United States Patent Application Publication US 2007/0054278 A1 - sequence listing, part 10

SEQ ID NO: 32752 - DNA, 149 bp, Homo sapiens
atgaaactctcatagatatcatgactcgcttcaggaaggagatgaagaatggcctctcccgggattttaatccaacagccacagtcaagatgttgccaacwttcgtaaggtccattcctgatggctctggtaagtctgtcacccagaga

SEQ ID NO: 32753 - DNA, 201 bp, Homo sapiens
cactactgaggtggggctgggcagccgcagaagccatgtgcagtcaggaagaggagtccggggctgctgggcgggcacagaccacgattgacaagtatctstatgccatgcggctctccgatgaaactctcatagatatcatgactcgcttcaggaaggagatgaagaatggcctctcccgggattttaatccaacagcca

SEQ ID NO: 32754 - DNA, 201 bp, Homo sapiens; identical to SEQ ID NO: 32644

SEQ ID NO: 32755 - DNA, 201 bp, Homo sapiens; identical to SEQ ID NO: 32643

SEQ ID NO: 32756 - DNA, 201 bp, Homo sapiens; identical to SEQ ID NO: 32645

SEQ ID NO: 32757 - DNA, 201 bp, Homo sapiens; identical to SEQ ID NO: 32646

SEQ ID NO: 32758 - DNA, 201 bp, Homo sapiens; identical to SEQ ID NO: 32648

SEQ ID NO: 32759 - DNA, 201 bp, Homo sapiens; identical to SEQ ID NO: 32647

SEQ ID NO: 32760 - DNA, 201 bp, Homo sapiens; identical to SEQ ID NO: 32649

SEQ ID NO: 32761 - DNA, 201 bp, Homo sapiens
aaagaggagtctgggtgtatatccagatggactgtgagcacagcctgagtttgccctgtcgaggtgctgaggcctgggagattgggattgacaagtatctstatgccatgcggctctccgatgaaactctcatagatatcatgactcgcttcaggaaggagatgaagaatggcctctcccgggattttaatccaacagcca

SEQ ID NO: 32762 - DNA, 201 bp, Homo sapiens; identical to SEQ ID NO: 32651

SEQ ID NO: 32763 - DNA, 201 bp, Homo sapiens; identical to SEQ ID NO: 32652

SEQ ID NO: 32764 - DNA, 201 bp, Homo sapiens; identical to SEQ ID NO: 32653

SEQ ID NO: 32765 - DNA, 201 bp, Homo sapiens; identical to SEQ ID NO: 32654

SEQ ID NO: 32766 - DNA, 201 bp, Homo sapiens; identical to SEQ ID NO: 32655

SEQ ID NO: 32767 - DNA, 201 bp, Homo sapiens; identical to SEQ ID NO: 32656

SEQ ID NO: 32768 - DNA, 201 bp, Homo sapiens; identical to SEQ ID NO: 32660

SEQ ID NO: 32769 - DNA, 201 bp, Homo sapiens; identical to SEQ ID NO: 32658

SEQ ID NO: 32770 - DNA, 201 bp, Homo sapiens; identical to SEQ ID NO: 32659

SEQ ID NO: 32771 - DNA, 201 bp, Homo sapiens; identical to SEQ ID NO: 32644

SEQ ID NO: 32772 - DNA, 201 bp, Homo sapiens; identical to SEQ ID NO: 32643

SEQ ID NO: 32773 - DNA, 201 bp, Homo sapiens; identical to SEQ ID NO: 32645

SEQ ID NO: 32774 - DNA, 201 bp, Homo sapiens; identical to SEQ ID NO: 32646

SEQ ID NO: 32775 - DNA, 201 bp, Homo sapiens; identical to SEQ ID NO: 32648

SEQ ID NO: 32776 - DNA, 201 bp, Homo sapiens; identical to SEQ ID NO: 32665

SEQ ID NO: 32777 - DNA, 201 bp, Homo sapiens; identical to SEQ ID NO: 32649

SEQ ID NO: 32778 - DNA, 201 bp, Homo sapiens; identical to SEQ ID NO: 32761

SEQ ID NO: 32779 - DNA, 201 bp, Homo sapiens; identical to SEQ ID NO: 32651

SEQ ID NO: 32780 - DNA, 201 bp, Homo sapiens; identical to SEQ ID NO: 32652

SEQ ID NO: 32781 - DNA, 201 bp, Homo sapiens; identical to SEQ ID NO: 32653

SEQ ID NO: 32782 - DNA, 201 bp, Homo sapiens; identical to SEQ ID NO: 32654

SEQ ID NO: 32783 - DNA, 201 bp, Homo sapiens; identical to SEQ ID NO: 32655

SEQ ID NO: 32784 - DNA, 201 bp, Homo sapiens; identical to SEQ ID NO: 32656

SEQ ID NO: 32785 - DNA, 201 bp, Homo sapiens; identical to SEQ ID NO: 32660

SEQ ID NO: 32786 - DNA, 201 bp, Homo sapiens; identical to SEQ ID NO: 32658

SEQ ID NO: 32787 - DNA, 201 bp, Homo sapiens; identical to SEQ ID NO: 32659

SEQ ID NO: 32788 - DNA, 201 bp, Homo sapiens; identical to SEQ ID NO: 32643

SEQ ID NO: 32789 - DNA, 201 bp, Homo sapiens; identical to SEQ ID NO: 32644

SEQ ID NO: 32790 - DNA, 201 bp, Homo sapiens; identical to SEQ ID NO: 32645

SEQ ID NO: 32791 - DNA, 201 bp, Homo sapiens; identical to SEQ ID NO: 32646

SEQ ID NO: 32792 - DNA, 201 bp, Homo sapiens; identical to SEQ ID NO: 32665

SEQ ID NO: 32793 - DNA, 201 bp, Homo sapiens; identical to SEQ ID NO: 32648

SEQ ID NO: 32794 - DNA, 201 bp, Homo sapiens; identical to SEQ ID NO: 32649

SEQ ID NO: 32795 - DNA, 201 bp, Homo sapiens; identical to SEQ ID NO: 32668

SEQ ID NO: 32796 - DNA, 201 bp, Homo sapiens; identical to SEQ ID NO: 32651

SEQ ID NO: 32797 - DNA, 201 bp, Homo sapiens; identical to SEQ ID NO: 32652

SEQ ID NO: 32798 - DNA, 201 bp, Homo sapiens; identical to SEQ ID NO: 32653

SEQ ID NO: 32799 - DNA, 201 bp, Homo sapiens; identical to SEQ ID NO: 32654

SEQ ID NO: 32800 - DNA, 201 bp, Homo sapiens; identical to SEQ ID NO: 32655

SEQ ID NO: 32801 - DNA, 201 bp, Homo sapiens; identical to SEQ ID NO: 32656

SEQ ID NO: 32802 - DNA, 201 bp, Homo sapiens; identical to SEQ ID NO: 32657

SEQ ID NO: 32803 - DNA, 201 bp, Homo sapiens; identical to SEQ ID NO: 32658

SEQ ID NO: 32804 - DNA, 201 bp, Homo sapiens; identical to SEQ ID NO: 32659

SEQ ID NO: 32805 - DNA, 201 bp, Homo sapiens; identical to SEQ ID NO: 32660

SEQ ID NO: 32806 - DNA, 201 bp, Homo sapiens
ggatgtgacctaaaggataaataagctattacttatgtgctgatctcttgacattcactcattagaagaccttactccttcaagcaaatgtttggggtcaratttaccatatcttctggctaaccatattcaagattcttctgaaacttggaggatgtaaagaatccatttgatttggtcagcctggcttttgtcgtggtg

SEQ ID NO: 32807 - DNA, 201 bp, Homo sapiens
gccacgtgtcttccctccgtattccgtatgcctgcaagctgctcttccaggaactacagtctatgaacatcatccccaggttaaaactgtccaagtacaaygaatgaggatggaaaaaatgattattaaagagaacaagtgatacatccaatgcaacggaaagcagaagggatttaggactacgtctcctcctgtgaagaa

SEQ ID NO: 32808 - DNA, 201 bp, Homo sapiens
ataaagtgatggggcccatgttggatgctgctacaaggaaacctatctggcgacatgaaatcttagatgcagatggtatttgttctccaggtgagaaagtrgaaaacaaacaagtgcttgtaaataagtccatgcccacagtgactcagattcctttggaaggaagtaatgtaccacagcaaccacagtacaaagatgtac

SEQ ID NO: 32809 - DNA, 201 bp, Homo sapiens
cagacaccacccacttggagattgaacccttcactcttctcggcgtgtgtgctggacttatcccataccctcaccataaccagtcaccgagaaacacttaycagtgtgccatggggaaacaagccatgggtactataggatacaaccagcgaaacagaattgatactctcatgtatctactagcatatccacaaaaaccca

SEQ ID NO: 32810 - DNA, 201 bp, Homo sapiens
gtttttaagaatctctttatatttgctcttgaaagaaatagacttgtttttatttttgaaactgttttaacctctttcattgtgaagataaatttaattckgaattttgaagatttcttacatgagagtctggttgaatatttagatgtgaatgaagaaaatgattgtaacattgcactgtacgaacacacaattaataag

SEQ ID NO: 32811 - DNA, 201 bp, Homo sapiens; identical to SEQ ID NO: 32806

SEQ ID NO: 32812 - DNA, 201 bp, Homo sapiens; identical to SEQ ID NO: 32807

SEQ ID NO: 32813 - DNA, 201 bp, Homo sapiens; identical to SEQ ID NO: 32808

SEQ ID NO: 32814 - DNA, 201 bp, Homo sapiens
tcttgtctttcttaatggtgggtatattatagagacatgtgtcattcgagaccacaaaaagctagtgaatacatttcgactcatgagaagagcaggatatrtcaatgaatttgtttccatctcaacaaatcttacagatcgatgtgtctatatttcttctgatgggggaaggctatgcaggtatatatgcaggttactaaa

SEQ ID NO: 32815 - DNA, 201 bp, Homo sapiens
gaaggcaaaggatgtggggaggtggaccaaagaaaaccaaaatagaagaagcaagagagctcctggcttccaccattctgacccatgtcccagttaaggarttcaatttccgagccaaatgtatctatactgcagtgatggtgcgaagagttattctggcccaaggagataataaagttgacgacagagattattatggta

SEQ ID NO: 32816 - DNA, 201 bp, Homo sapiens
aagacaccacccacttggagattgaacccttcactcttctcggcgtgtgtgctggacttatcccataccctcaccataaccagtcaccgagaaacacttaycagtgtgccatggggaaacaagccatgggtactataggatacaaccagcgaaacagaattgatactctcatgtatctactagcatatccacaaaaaccca

SEQ ID NO: 32817 - DNA, 201 bp, Homo sapiens; identical to SEQ ID NO: 32806

SEQ ID NO: 32818 - DNA, 201 bp, Homo sapiens; identical to SEQ ID NO: 32807

SEQ ID NO: 32819 - DNA, 201 bp, Homo sapiens; identical to SEQ ID NO: 32808

SEQ ID NO: 32820 - DNA, 201 bp, Homo sapiens
aaatgtgtttcttgtctttcttaatggtaacatcttaggtgtcattcgagaccacaaaaagctagtgaatacatttcgactcatgagaagagcaggatatrtcaatgaatttgtttccatctcaacaaatcttacagatcgatgtgtctatatttcttctgatgggggaaggctatgcagaccctacataattgtcaagaa

SEQ ID NO: 32821 - DNA, 201 bp, Homo sapiens; identical to SEQ ID NO: 32815

SEQ ID NO: 32822 - DNA, 201 bp, Homo sapiens
tcaaaggaagctaaagaatactttgcagatatgaaaagacatcgtatccagttcaaatattctggtcctgaagatgatgctgctatcagcctggcctttakcaaaaaacagatagatgatcgaaaggaatggttaactaatttcatggaggatagaagacaacgaaagttacttgggcttcctgaggattacttgtatgga

SEQ ID NO: 32823 - DNA, 201 bp, Homo sapiens
aaaatcacatgtggatttttgtaaatgccttaattgaaaacccaacctttgactctcagacaaaagaaaacatgactttacaacccaagagctttggatcracatgccaattgagtgaaaaatttatcaaagctgctcatttgtattctagatttctgatagatcccttcttccctaatatgatccctaatatgaatcttc

SEQ ID NO: 32824 - DNA, 201 bp, Homo sapiens
tggtcctgcaaaatccccaactttgatgtgcgtgaaattgtaaataacatcaggcgtttgatggatggagaagaacctttgccaatgcttccaagttacargaacttcaagggtactattgaagaactggctccaaatcaatatgtgattagtggtgaagtagctattcttaattctacaaccattgaaatctcagagctt

SEQ ID NO: 32825 - DNA, 201 bp, Homo sapiens
tcagatttgtggaaagaagacttggctacatttattgaagaattggaggctgttgaagccaaggaaaaacaagatgaacaagtcggacttcctgggaaagkggggaaggccaaggggaaaaaaacacaaatggctgaagttttgccttctccgcgtggtcaaagagtcattccacgaataaccatagaaatgaaagcagag

SEQ ID NO: 32826 - DNA, 201 bp, Homo sapiens
atcattgaaaataagcctaagaaagaattaattaaagttctgattcagaggggatatgattcggatcctgtgaaggcctggaaagaagcccagcaaaaggytccagatgaagaagaaaatgaagagagtgacaacgaaaaggaaactgaaaagagtgactccgtaacagattctggaccaaccttcaactatcttcttgat

SEQ ID NO: 32827 - DNA, 201 bp, Homo sapiens
atggagaagattatacatgtatcacctttcagcctgatttgtctaagtttaaaatgcaaagcctggacaaagatattgttgcactaatggtcagaagagcrtatgatattgctggatccaccaaagatgtcaaagtctttcttaatggaaataaactgccagtaaaaggatttcgtagttatgtggacatgtatttgaagg

SEQ ID NO: 32828 - DNA, 201 bp, Homo sapiens
aagacttggctacatttattgaagaattggaggctgttgaagccaaggaaaaacaagatgaacaagtcggacttcctgggaaaggggggaaggccaagggraaaaaaacacaaatggctgaagttttgccttctccgcgtggtcaaagagtcattccacgaataaccatagaaatgaaagcagaggcagaaaagaaaaata

SEQ ID NO: 32829 - DNA, 201 bp, Homo sapiens
tgttgaatggcaccgagaagacacctcctctcataacagactatagggaataccatacagataccactgtgaaatttgttgtgaagatgactgaagaaaarctggcagaggcagagagagttggactacacaaagtcttcaaactccaaactagtctcacatgcaactctatggtgctttttgaccacgtaggctgtttaa

SEQ ID NO: 32830 - DNA, 182 bp, Homo sapiens
tacattggcatttaagccaatcaaaaaaggaaagaagagaaatccctggtctgattcagaatcagataggagcagtgacgaaagtaattttgatgtccctbcacgagaaacagagccacggagagcagcaacaaaattcacaatggatttggattcagatgaagatttctcagattttgatg

SEQ ID NO: 32831 - DNA, 150 bp, Homo sapiens
agaagagaaatccctggtctgattcagaatcagataggagcagtgacgaaagtaattttgatgtccctccacgagaaacagagccacggagagcagcaacmaaattcacaatggatttggattcagatgaagatttctcagattttgatg

SEQ ID NO: 32832 - DNA, 201 bp, Homo sapiens; identical to SEQ ID NO: 32822

SEQ ID NO: 32833 - DNA, 201 bp, Homo sapiens
gctagtccacctaagaccaaaacttccccaaaacttagtaacaaagaactgaaaccacagaaaagtgtcgtgtcagaccttgaagctgatgatgttaaggrcagtgtaccactgtcttcaagccctcctgctacacatttcccagatgaaactgaaattacaaacccagttcctaaaaagaatgtgacagtgaagaagaca

SEQ ID NO: 32834 - DNA, 201 bp, Homo sapiens
aaaatcacatgtggatttttgtaaatgccttaattgaaaacccaacctttgactctcagacaaaagaaaacatgactttacaacccaagagctttggatcracatgccaattgagtgaaaaatttatcaaagctgccattggctgtggtattgtagaaagcatactaaactgggtgaagtttaaggcccaagtccagttaa

SEQ ID NO: 32835 - DNA, 201 bp, Homo sapiens
gagagaaaccaatttctaagaggactggattgcagaagactcggggacaacatttgatccaagatcttaaatgttatattgataaccatgctcagcaatgdgctattagattcattttgggaaatctccataatttcaatttgtaaactttgttaagacctgtctacattgttatatgtgtgtgacttgagtaatgttatc

SEQ ID NO: 32836 - DNA, 201 bp, Homo sapiens; identical to SEQ ID NO: 32824

SEQ ID NO: 32837 - DNA, 201 bp, Homo sapiens; identical to SEQ ID NO: 32826

SEQ ID NO: 32838 - DNA, 201 bp, Homo sapiens; identical to SEQ ID NO: 32825

SEQ ID NO: 32839 - DNA, 201 bp, Homo sapiens; identical to SEQ ID NO: 32828

SEQ ID NO: 32840 - DNA, 201 bp, Homo sapiens; identical to SEQ ID NO: 32829

SEQ ID NO: 32841 - DNA, 201 bp, Homo sapiens; identical to SEQ ID NO: 32827

SEQ ID NO: 32842 - DNA, 201 bp, Homo sapiens
ccaaaaggaactaaaagggatccagctttgaattctggtgtctctcaaaagcctgatcctgccaaaaccaagaatcgccgcaaaaggaagccatccacttbtgatgattctgactctaattttgagaaaattgtttcgaaagcagtcacaagcaagaaatccaagggggagagtgatgacttccatatggactttgactca

SEQ ID NO: 32843 - DNA, 201 bp, Homo sapiens
tacattggcatttaagccaatcaaaaaaggaaagaagagaaatccctggtctgattcagaatcagataggagcagtgacgaaagtaattttgatgtccctbcacgagaaacagagccacggagagcagcaacaaaaacaaaattcacaatggatttggattcagatgaagatttctcagattttgatgaaaaaactgatga

SEQ ID NO: 32844 - DNA, 201 bp, Homo sapiens
gaaatccctggtctgattcagaatcagataggagcagtgacgaaagtaattttgatgtccctccacgagaaacagagccacggagagcagcaacaaaaacmaaattcacaatggatttggattcagatgaagatttctcagattttgatgaaaaaactgatgatgaagattttgtcccatcagatgctagtccacctaaga

SEQ ID NO: 32845 - DNA, 201 bp, Homo sapiens
  misc_feature (1)...(201): n = A,T,C or G
gtacagatactctactacactcagcctcttatgtgccaagtttttctttaagcaatgagaaattgctcatgttcttcatcttctcaaatcatcagaggccnaagaaaaacactttggctgtgtctataacttgacacagtcaatagaatgaagaaaattagagtagttatgtgattatttcagctcttgacctgtcccctc

SEQ ID NO: 32846 - DNA, 201 bp, Homo sapiens
tccctccacgagaaacagagccacggagagcagcaacaaaaacaaaattcacaatggatttggattcagatgaagatttctcagattttgatgaaaaaackgatgatgaagattttgtcccatcagatgctagtccacctaagaccaaaacttccccaaaacttagtaacaaagaactgaaaccacagaaaagtgtcgtgt

SEQ ID NO: 32847 - DNA, 201 bp, Homo sapiens
tgtttcgaaagcagtcacaagcaagaaatccaagggggagagtgatgacttccatatggactttgactcagctgtggctcctcgggcaaaatctgtacggkcaaagaaacctataaagtacctggaagagtcagatgaagatgatctgttttaaaatgtgaggcgattattttaagtaattatcttaccaagcccaagact

SEQ ID NO: 32848 - DNA, 201 bp, Homo sapiens
cccacaactgcctccccagccagcagtaaagcaaaacttggtgtacttaataacacagctgagcctggaaaattcccactactgggtaatgctggattaastagcctgacggaaggggtcttggatctttttgcagtgaaggctgtatacatgggccaccctggcattgatatacacactgtgtgtgttcagaacaaactg

SEQ ID NO: 32849 - DNA, 201 bp, Homo sapiens
agatgaggaaattccctgaccaaagacagcagtggctgcggaaacagtacgtcagcctttatcaggaggatggacggtatgaaggcccaactttggctcaygctgtggagttgtttggtggcagacggtggagtgctcgaaaccccagccccggaacatcagcaaagaatgctgagaagcccaatatgcagagaaacaata

SEQ ID NO: 32850 - DNA, 201 bp, Homo sapiens
tctccactagaaagagatctggacagcatggatcctgcagtctattctttaactattgtctctggtcagaatgtgtgccccagtaatagcatgggaagccygtgcattgaagtcgacgtcctgggcatgcctctggacagctgccatttccgcacaaagcccatccatcgaaacaccctgaaccccatgtggaacgagcag

SEQ ID NO: 32851 - DNA, 201 bp, Homo sapiens
catcagacgccagtggatatcttaaagcaaaaggctcatcagttagcatctatgcaagtgcaggcttataatggtgggaatgccaacccccgacctgccartaatgaggaagaggaagatgaggaggacgaatatgattatgactatgaatccctttctgatgacaacattctggaagacagacctgaaaataaatcatgt

SEQ ID NO: 32852 - DNA, 201 bp, Homo sapiens
cccggaacatcagcaaagaatgctgagaagcccaatatgcagagaaacaataccctgggcataagcactaccaagaaaaagaagaaaatcctcatgagggktgagagtggagaggtaactgacgatgagatggcaacccgaaaggccaagatgcacaaagagtgtcgaagccggagtggttctgatcctcaagacattaat

SEQ ID NO: 32853 - DNA, 201 bp, Homo sapiens
aggagaacattaaagaactgcagctacccctctcatactattacatcgaatcttcgcacaatacctacctcacgggccatcagctcaaaggagaatcctcrgtagaactctacagccaggtccttttgcaaggctgtcgaagtgtagaattggactgctgggacggagacgatgggatgcccatcatttatcatggacata

SEQ ID NO: 32854 - DNA, 201 bp, Homo sapiens
tgatggaattggccaaaaattgtgataataagaatgagcagctgcagtgtgatcattgtgacaccttgaatgataaatacttttgctttgaaggctcttgygagaaggttgacatggtatattcaggtgatagcttttgtaggaaagactttactgacagtcaagctgccaagacctttttgagccattttgaggacttcc

SEQ ID NO: 32855 - DNA, 201 bp, Homo sapiens
tccctcagtgctatcattagaactcccaaatgttatcatatctcgtcgctgaatgaaaatgccgccaaacgtctgtgtcgcaggtattctcagaaactgayccagcacaccgcctgtcagctgctgagaacttaccctgctgccacccgcatcgactcttccaacccgaaccccctcatgttctggctccatgggatacag

SEQ ID NO: 32856 - DNA, 201 bp, Homo sapiens
ccttctcagctcttgacctcagaaagtatccaaaccaaggaggagaaacctgtgggtggcttgtcctccagtgacacaatggattaccgacagtgactaasggcagcatgtttaacccaggtgaagatctttaagcaagaagttaaagagtgaacatggtggaaaaaatataattattttcatcagacttaaactggaaat

SEQ ID NO: 32857 - DNA, 201 bp, Homo sapiens
tcagctgggatcagcaaggagctgatcgatctgcagcctctcatccagttcccagaggaagtcgccagcatcctgatggagcaagagcagactatttacckcagggtcttgccagtcgactacctttgcttcttaacacgggacttgggcactcctgaatgccagagctccttgccctgcctcaaagcatccatctcagcg

SEQ ID NO: 32858 - DNA, 201 bp, Homo sapiens
ttactgacagtcaagctgccaagacctttttgagccattttgaggacttccctgataattgtgatgatgtagaagaagacgcttttaaaagcaaaaaggarcgatccactttgttagtcaggagattctgtaaaaatgacagagaagttaagaaatctgtgtatactggaacaagagcaattgtgagaactctgccttctg

SEQ ID NO: 32859 - DNA, 201 bp, Homo sapiens
gataagcgttggtccatgcttaaagcaatgtgtccgagacactgtatgtgagtatcgcgccaccctccaaaggacttcaatatcgcagtacatcaccggtwctctcctagaagcaaccacgtctttgggagcaagaagtggccttctcagtacttttggaggatccactggacgaatgatgctgaaagaacgccagccagg

SEQ ID NO: 32860 - DNA, 201 bp, Homo sapiens
  misc_feature (1)...(201): n = A,T,C or G
gtcgacgtcctgggcatgcctctggacagctgccatttccgcacaaagcccatccatcgaaacaccctgaaccccatgtggaacgagcagtttctgttccncgttcacttcgaagatcttgtatttcttcgttttgcagttgtggaaaacaatagttcagcggtaactgctcagagaatcattccactgaaagctttaaaa

SEQ ID NO: 32861 - DNA, 201 bp, Homo sapiens
atctaccaccttaaaaccctgatctagaaaaaatatatattcatgataggaagttataactaagaaaatttatttgcctcttaatgctcctgaatgaaagraattatccctttgttctttgggaggacttgtgtatctgagattgttgtaataatcagtcattttattaaaaccttgacatgatcaccagggaggaaaaat

SEQ ID NO: 32862 - DNA, 201 bp, Homo sapiens
gtaggaaacaaccattccagagagccattggtccagaagaggagatcatgcaaattttaagcagctggtttccagaagagggatacatgggcaggattgtsttaaaaacccagcaggaaaacctagaagagaaaaacattgttcaagatgacaaagaggtgatcttgagctcagaggaggagagtttctttgtccaagtgc

SEQ ID NO: 32863 - DNA, 201 bp, Homo sapiens
ctaaaagcccatcagacgccagtggatatcttaaagcaaaaggctcatcagttagcatctatgcaagtgcaggcttataatggtgggaatgccaacccccsacctgccaataatgaggaagaggaagatgaggaggacgaatatgattatgactatgaatccctttctgatgacaacattctggaagacagacctgaaaat

SEQ ID NO: 32864 - DNA, 201 bp, Homo sapiens; identical to SEQ ID NO: 32848

SEQ ID NO: 32865 - DNA, 201 bp, Homo sapiens; identical to SEQ ID NO: 32849

SEQ ID NO: 32866 - DNA, 201 bp, Homo sapiens; identical to SEQ ID NO: 32850

SEQ ID NO: 32867 - DNA, 201 bp, Homo sapiens; identical to SEQ ID NO: 32851

SEQ ID NO: 32868 - DNA, 201 bp, Homo sapiens; identical to SEQ ID NO: 32852

SEQ ID NO: 32869 - DNA, 201 bp, Homo sapiens; identical to SEQ ID NO: 32862

SEQ ID NO: 32870 - DNA, 201 bp, Homo sapiens; identical to SEQ ID NO: 32853

SEQ ID NO: 32871 - DNA, 201 bp, Homo sapiens; identical to SEQ ID NO: 32855

SEQ ID NO: 32872 - DNA, 201 bp, Homo sapiens; identical to SEQ ID NO: 32857

SEQ ID NO: 32873 - DNA, 201 bp, Homo sapiens; identical to SEQ ID NO: 32856

SEQ ID NO: 32874 - DNA, 201 bp, Homo sapiens; identical to SEQ ID NO: 32863

SEQ ID NO: 32875 - DNA, 201 bp, Homo sapiens; identical to SEQ ID NO: 32859

SEQ ID NO: 32876 - DNA, 201 bp, Homo sapiens; identical to SEQ ID NO: 32860
  misc_feature (1)...(201): n = A,T,C or G

SEQ ID NO: 32877 - DNA, 201 bp, Homo sapiens
cattgataaacaagagacggaaattacttacctgataccatggtccaaattagaaaagcctccaaaagaaggagtctatgaactagctgtttttcagatgraacctggtgggccagctctgtggggtgatgcatttgaaagagcaattaatgcccatgtcaatttaggctacacaaaagtagttggtgttttccacacaga

SEQ ID NO: 32878 - DNA, 201 bp, Homo sapiens
acagagttcatgttctttggtggaatgagagtgcagatagtcgtgcagctgggagacataagtcccatgaggatcccagagttgtggcggctgttcgggaragtgtcaactacctagtttctcagcagaatatgcttctgattcctgcatcattttcaccattgaaatagttttctactgaaatacaaaacatttcattaa

SEQ ID NO: 32879 - DNA, 201 bp, Homo sapiens
tcatcttcggacctcttactctgaattggttggattctggagtgtagaatttggaggcagaacgaataaagtgtttcatatttggaagtatgataattttsctcatcgagctgaagttcggaaagccttagccaactgtaaggaatggcaagaacaatctatcattccaaatttggctcgcattgataaacaagagacgga

SEQ ID NO: 32880 - DNA, 201 bp, Homo sapiens
tggaaaataatgcaattgggtcacagtgttaaaaatctagaaaagacttgttggtttatatgctgaaattgttcatttataattaattttactaatttctmcttagtttggatcactaacagagatcttgggacatttatttgttttaaagaaatatttatggttatggaaacgcttgccctaataaaaatcctgcatatt

SEQ ID NO: 32881 - DNA, 201 bp, Homo sapiens
cggcctgaccaaggcgcttgcctcacggacgctcgcgcctcaggtgtgttcatcttttgctacgggccctagacaatacgatggaacgttctatgaatttygtacttattaccttaaaccttcaaatatgaatgcgttcatggaaaatcttaagaaaaacattcatcttcggacctcttactctgaattggttggattctg

SEQ ID NO: 32882 - DNA, 201 bp, Homo sapiens
ctgagattttaaaaaaatttgcttagtaaaggttattttgtgatataaaatgggatttataaaaatattagattgtttatttctttactgtggaaaagtasaatgtcatctgtattaattattgcttttacattcattgattattagtcattctaacttggaaaataatgcaattgggtcacagtgttaaaaatctagaaa

SEQ ID NO: 32883 - DNA, 201 bp, Homo sapiens
tgggccagctctgtggggtgatgcatttgaaagagcaattaatgcccatgtcaatttaggctacacaaaagtagttggtgttttccacacagaatatggaraactcaacagagttcatgttctttggtggaatgagagtgcagatagtcgtgcagctgggagacataagtcccatgaggatcccagagttgtggcggctgt

SEQ ID NO: 32884 - DNA, 201 bp, Homo sapiens
ctcagaagcggcctgaccaaggcgcttgcctcacggacgctcgcgcctcaggtgtgttcatcttttgctacgggccctagacaatacgatggaacgttctwtgaatttcgtacttattaccttaaaccttcaaatatgaatgcgttcatggaaaatcttaagaaaaacattcatcttcggacctcttactctgaattggtt

SEQ ID NO: 32885 - DNA, 201 bp, Homo sapiens
acggaaattacttacctgataccatggtccaaattagaaaagcctccaaaagaaggagtctatgaactagctgtttttcagatgaaacctggtgggccagstctgtggggtgatgcatttgaaagagcaattaatgcccatgtcaatttaggctacacaaaagtagttggtgttttccacacagaatatggagaactcaac

SEQ ID NO: 32886 - DNA, 201 bp, Homo sapiens
taaagaggaaatcttcatacttgattccctgtagtatgctggatatttcttggtaaatgcatgaataaagtctttagtagcaagtcatgtacctggacctygttggggatgttctcgccagagatctcaattagtcttcattggacgtttgttggcaaagttgcagcatcttactgagtagcgtttggtaaaggaactgct

SEQ ID NO: 32887 - DNA, 201 bp, Homo sapiens
caccgatagctggagactacatcttgtttaaatttgataaaccagtcaatgtagaaagttatttgttccatagcggcaaccaagaacatcctggagatatwctgctaaacacaactgtggaagttttgccttttaagagtgaaggtttggaaataagcaaagaaaccaaagacaaacgattagaagatggctatttcagaa

SEQ ID NO: 32888 - DNA, 201 bp, Homo sapiens
tatccagtccaatccctttatagaaaaggaacttttccaagttatgttgcagtatttatagtgtgtaaaattttgtttgactttggtagttgtgcattttraattatgaatcttatatgctacgataactagtatgcttactttctttaatgcatgtgatcatacaatgctaaaaaggtattttttaaagacccaaccaaa

SEQ ID NO: 32889 - DNA, 201 bp, Homo sapiens
gtagagggggctgcatgagaaggaatgcacatggctttgaggagctgagagaggccttggctaacagcaaaggagctgggaactgcagtcctacagccacrggaactgaattcagcccataagctcattcataggcttggaaaggcattcatctccagtctccagataagacccagcctggccaacactttgaatccagcc

SEQ ID NO: 32890 - DNA, 201 bp, Homo sapiens
ggatccaagtctcaatcccatttcagcctttcgactttcagttattcagaattctgctgtttgggccattcttaatgagattcatattaaaaaagccaccractgatcatctgagaaaccaacacattttttcctgtgaatttgttaattaaagatagttaagcatgtatcttttttttatttctacttgaacactacctc

SEQ ID NO: 32891 - DNA, 201 bp, Homo sapiens; identical to SEQ ID NO: 32887

SEQ ID NO: 32892 - DNA, 201 bp, Homo sapiens; identical to SEQ ID NO: 32890

SEQ ID NO: 32893 - DNA, 201 bp, Homo sapiens; identical to SEQ ID NO: 32887

SEQ ID NO: 32894 - DNA, 201 bp, Homo sapiens
tcttactggcttactgttcaagcaagtttgctgctgttggatttcataaaactttgacagatgaactggctgccttacaaataactggagtcaaaacaacmtgtctgtgtcctaatttcgtaaacactggcttcatcaaaaatccaagtacaagtttgggacccactctggaacctgaggaagtggtaaacaggctgatgc

SEQ ID NO: 32895 - DNA, 166 bp, Homo sapiens
acaaagcccagcccagcggaaggaacggtttcggagttgtttttctttgatacgggagttcctccwtgctctcgcccctactctttctggtgttagatcgagcaaccctctaaaagcagtttagagtggtaaaaaaaaaaaaaaacacaccaaacgctcgcagcca

SEQ ID NO: 32896 - DNA, 201 bp, Homo sapiens
attctgactgagcagaagatgatttttattccatcttctatagcttttttaacaacattggaaaggatccttcctgagcgtttcctggcagttttaaaacraaaaatcagtgttaagtttgatgcagttattggatataaaatgaaagcgcaataagcacctagttttctgaaaactgatttaccaggtttaggttgatgt

SEQ ID NO: 32897 - DNA, 201 bp, Homo sapiens
aagcccagcccagcggaaggaacggtttcggagttgtttttctttgatacgggagttcctccttgctctcgcccctactctttctggtgttagatcgagcwaccctctaaaagcagtttagagtggtaaaaaaaaaaaaaaacacaccaaacgctcgcagccacaaaagggatgaaatttcttctggacatcctcctgctt

SEQ ID NO: 32898 - DNA, 201 bp, Homo sapiens
tcgccaagtgtgtatctagcccccattttcaggtggcagaaagagcactctattattggaataatgaatacatcatgagtttgatagaagaaaactctaaygtcatccttcccatcatgttttccagcctttataggatttcaaaagaacattggaatccggctattgtggcgttggtgtacaatgtgttgaaggcattta

SEQ ID NO: 32899 - DNA, 201 bp, Homo sapiens
tctccctcctagtgacagcaatgaatttgatccagaagaagatgaacctacccttgaggcatcgtggccacacttacagcttgtatatgaatttttcatamgatttttggaaagccaagaattccaacccagcattgccaaaaaatatatagatcagaaatttgtattacagcttctggagctatttgacagcgaagaccc

SEQ ID NO: 32900 - DNA, 156 bp, Homo sapiens
tggccagaaggttcggttgcgcgtgtgccatggactcagccgcccggtgatattgwcaataggagagagaaaggggcattgactgggacccaccgcgggtagcgaaaggtggctctggcagcggcggctccagctcctgcggctcctcctccttat

SEQ ID NO: 32901 - DNA, 201 bp, Homo sapiens
ctccagctcctgcggctcctcctccttattctgtccccttctcttgctgccgctgcagatccagtcttcctccctcccttccccccctccccacgtcgtcrccgccgccgccgggtccggggcaacgagctgaggcgccgcccgccaggaatgtgagcgaggagccaccggcggagccgcaacggggtcggtgccgatttg

SEQ ID NO: 32902 - DNA, 201 bp, Homo sapiens
tgcattatatttagtttatatagtgtaaacttttgtttgccattaattcatctttttaggtagaagacattaaaatcacaggtttatgaagaatctctgcycattggaatgaaatgcagtcatttgaaatgagaaaggccaggatccttttttgtaccttaccctgtcttcaagagtaaaggtgaacacttacagctctcc

SEQ ID NO: 32903 - DNA, 201 bp, Homo sapiens
gcagctgcccggacctccccctgcacgtcccggtcccgccgcccgcccccgctgcggccacctcgcccgtctcccgcccctccaagccacagatcatcttyggattcttccccagaagcttcaagtagggatatgtcctcagcaccaactactcctccatcagtggataaagtagacggattttctcggaagtccgtcaga

SEQ ID NO: 32904 - DNA, 201 bp, Homo sapiens
ttattctgtccccttctcttgctgccgctgcagatccagtcttcctccctcccttccccccctccccacgtcgtcgccgccgccgccgggtccggggcaasgagctgaggcgccgcccgccaggaatgtgagcgaggagccaccggcggagccgcaacggggtcggtgccgatttgatgggacgggcccgcgggggaggat

SEQ ID NO: 32905 - DNA, 201 bp, Homo sapiens
tcgccaagtgtgtatctagcccccattttcaggttagtaaaagagcactctattattggaataatgaatacatcatgagtttgatagaagaaaactctaaygtcatccttcccatcatgttttccagcctttataggatttcaaaagaacattggaatccggctattgtggcgttggtgtacaatgtgttgaaggcattta

SEQ ID NO: 32906 - DNA, 201 bp, Homo sapiens; identical to SEQ ID NO: 32899

SEQ ID NO: 32907 - DNA, 156 bp, Homo sapiens; identical to SEQ ID NO: 32900

SEQ ID NO: 32908 - DNA, 201 bp, Homo sapiens
agcaaatattgtagttagtgagtgatgatcactccaaccttatccttaccatattggtttcagggataggattaagagtgtctttggaagagaaaaatacrcacaaccctgtggtttagaatgacgctgaggccttaggctgtgggcctagaacaactatgtgagtgaattcacccatctcatactttgaatcaagcatgc

SEQ ID NO: 32909 - DNA, 201 bp, Homo sapiens; identical to SEQ ID NO: 32901

SEQ ID NO: 32910 - DNA, 201 bp, Homo sapiens; identical to SEQ ID NO: 32902

SEQ ID NO: 32911 - DNA, 201 bp, Homo sapiens; identical to SEQ ID NO: 32903

SEQ ID NO: 32912 - DNA, 201 bp, Homo sapiens; identical to SEQ ID NO: 32904

SEQ ID NO: 32913 - DNA, 201 bp, Homo sapiens
agagccggaggagggggaaggagggaggggagagcggtggcggcggctgcgccgggctgtgagtctctcgccgccggaggaagatgaggctgaagattggrttcatcttacgcagtttgctggtggtgggaagcttcctggggctagtggtcctctggtcttccctgaccccgcggccggacgacccaagcccgctgagca

SEQ ID NO: 32914 - DNA, 201 bp, Homo sapiens
ggtcaaccctcatgagaacagtccacagtgtaattaaaaggactccaaggaaatatttagcagaaattgtgttaattgacgatttcagtaataaagaacasttaaaagaaaaactggatgaatatattaagctgtggaatggcctagtgaaggtatttcgaaatgaaagaagggaaggtttaattcaagcacgaagtattg

SEQ ID NO: 32915 - DNA, 201 bp, Homo sapiens
tttatgttgggtcttctccaactctgaagaattatgttagagttgtggaggtttggtgggatgaatataaagactacttctatgctagtcgtcctgaatckcaggcattaccatatggggatatatcggagctgaaaaaatttcgagaagatcacaactgcaaaagttttaagtggttcatggaagaaatagcttatgata

SEQ ID NO: 32916 - DNA, 201 bp, Homo sapiens
atcaactcatgcagtatgaccagtgtttgacaaagggagctgatggatcaaaagttatgattacacactgtaatctaaatgaatttaaggaatggcagtayttcaagaacctgcacagatttactcatattccttcaggaaagtgtttagatcgctcagaggtcctgcatcaagtattcatctccaattgtgactccagta

SEQ ID NO: 32917 - DNA, 201 bp, Homo sapiens
gctcacttcgagcgttgtcattgtcttccataatgaaggatggtcaaccctcatgagaacagtccacagtgtaattaaaaggactccaaggaaatatttascagaaattgtgttaattgacgatttcagtaataaagaacacttaaaagaaaaactggatgaatatattaagctgtggaatggcctagtgaaggtatttcg

SEQ ID NO: 32918 - DNA, 201 bp, Homo sapiens
aaactgaaccgtatcggtccccagccatggctgggggattatttgccattgaacgagagttcttctttgaattgggtctctatgatccaggtctccagatytggggtggtgaaaactttgagatctcatacaagatatggcagtgtggtggcaaattattatttgttccttgttctcgtgttggacatatctaccgtcttg

SEQ ID NO: 32919 - DNA, 201 bp, Homo sapiens
atctccaattgtgactccagtaaaacgactcaaaaatgggaaatgaataacatccatagtgtttagagagaaaaaaataaaccaataacctacctactgasaagtaaatttatacaggactgaaaaccgcctgaaacctgctgcaactattgttattaactctgtatagctccaaacctggaacctcctgatcagtttgaa

SEQ ID NO: 32920 - DNA, 201 bp, Homo sapiens
catttgctataaagttgaactttgtatggcttgaaaaagaaatgacaatatggaacatcccaaggctgtcccatagggttggaagttgtgtagcattcacycccttacctactggcattcccagtgccctctgtccatacctacttctaggattgcaaaggagtcttccaactagagaaaaattgtccactgacatttggg

SEQ ID NO: 32921 - DNA, 201 bp, Homo sapiens
tgcggttgaacctgggctccatttgtccccttggagctccaggcggccgggccgacttcgaccctgagctctcctgtctgatttcctttccaggtggcacrtctctgagcttcctggtgttggtgacaggctgcacatctgtgggcagaattccagatgctgaaatctacaaaatcactgccactgacttttaccctcttc

SEQ ID NO: 32922 - DNA, 201 bp, Homo sapiens
agctacagaaatcaagtggaaaaatttttaaggactttcacgaaggagccattaactttggacccacctacaagtatgacgttggctcagccgcctacgayacaagcgacaaatgccgcacccccgcctggacagacagggtgctgtggtggaggaagaaacatccctttgataaaacagctggagaactcaaccttctag

SEQ ID NO: 32923 - DNA, 201 bp, Homo sapiens
gggagagagcaagatgggttccttggagaagctgatttgccaagatgcacatcgctattaacagccagagtcataaatgaaatgaaattgaagaattcatycaaatgctcttttccctataacctcttttctcaccaaaaaggagataaatttgaaaacagataaatgtaacaaccagtcaaagaagcaggggaaaagtaa

SEQ ID NO: 32924 - DNA, 201 bp, Homo sapiens
taaaaaaaaaaaaaaggacaattggaattgccttatttatttttaaaatcaatgcttactagttggtaggattcccaggtcagcagcaggggcagttcacrcagactggtttaggtacttcacaactcaccattgtctctctgaccccaagcctagtcccttttacatcaccatcttctcagacttcttgcctattcttaa

SEQ ID NO: 32925 - DNA, 201 bp, Homo sapiens
caagccacaggaagccagcatcagacgaagcccctcctggggcaggagcctctgtgccaccacctctggaggcgccgcctcttgtgcccaaggtaccccckaggaggaagaagtcagcccccgcagccttccacctgcaggtcctgcagagcaacagccagcttctccagggcctcacttacaatagcagtgacagcccct

SEQ ID NO: 32926 - DNA, 201 bp, Homo sapiens
tttttgcctatacatttttcccacgtttccaacagcacttctcacctattcaataactgaaaaagacattaccatagtgctttacatttttaaagtaatgytacaaggtctggaatccatttggagcagataccgtgttttcgctatttaataagaagttcagtagtgaaatcttactgtaccgcctgttgtatctgggag

SEQ ID NO: 32927 - DNA, 201 bp, Homo sapiens
gaccctttggactcaggaaccaggagccccaaaagagatcccatagacccagtgtcagctggcgcttcagctgccaaggcagagctgccaccagatcatgracacaaaaccttaggtcactgggtgacaatcagtgaccaagaaaagaggacagcactgcaggtgtttgacccactggcaaaaacatgactgagcagcttt

SEQ ID NO: 32928 - DNA, 201 bp, Homo sapiens
aaagaggacagcactgcaggtgtttgacccactggcaaaaacatgactgagcagctttgaaggctgcagtcctatagaatgcataccttcctccctctagrcatccctccaccagaagagacatctatttaaaggcacactggccaaaacgtttgtgcatctgtcactctcgtgtagtttacaaaaatcgtgtctcttatt

SEQ ID NO: 32929 - DNA, 201 bp, Homo sapiens
aatcagcctggagtctcggacagtgaactcgggggagacgacctctctgatgtccccggccccacagcactggctcctcccagcaagtcacctgctctcamcaaaaagaagcagcatccaacgtacaaagatgacgcggacctggtggagctcaagcgggagctggaagccgtcggggagttccgccaccgttctccgagc

SEQ ID NO: 32930 - DNA, 201 bp, Homo sapiens
acaaagatgacgcggacctggtggagctcaagcgggagctggaagccgtcggggagttccgccaccgttctccgagcaggtctctgtcggtccccaaccgrcctcggccacctcaacccccgcagagacccccccctccaaccggtttaatggtgaaaaagtcggcttcagatgcgtccatctcctccggcacccatgggc

SEQ ID NO: 32931 - DNA, 201 bp, Homo sapiens
ggccccacagcactggctcctcccagcaagtcacctgctctcaccaaaaagaagcagcatccaacgtacaaagatgacgcggacctggtggagctcaagcrggagctggaagccgtcggggagttccgccaccgttctccgagcaggtctctgtcggtccccaaccggcctcggccacctcaacccccgcagagacccccc

SEQ ID NO: 32932 - DNA, 201 bp, Homo sapiens
aactcaaccttctagacagtgatctagatgttgacaccaaagtcagacacacctggtctcctggtgccctgcagtattatggtcgtgcggagctacaagcktctgatcacagacctgtgctggcgatcgtggaggtggaagttcaggaagtcgatgtgggtgctcgggagagggttttccaggaagtgtcctccttccagg

SEQ ID NO: 32933 - DNA, 201 bp, Homo sapiens
gccatgtgtccaacttcgtggagacagagcagatgatttacatggacgatggagtgtcatcttttgtccagatcagaggctccgttccgctgttctgggarcagccagggcttcaggttggctcccatcatctgagactccacagaggcctggaagccaatgcccctgctttcgacaggcacatggtgcttctgaaggagc

SEQ ID NO: 32934 - DNA, 201 bp, Homo sapiens
tatattgcagattacttaaatatggccatcaaaacaaaagttacaacacgtatctcttttcatctgaaaactaatacctggaaaaggataaaaaaaaaaaaggaatccgtgacccacagagctagacagataagatgcatagttgaccagtcataaaaggcggtgtttaggtgatcaggatgccgttggtggcatttacgt

SEQ ID NO: 32935 - DNA, 201 bp, Homo sapiens
cacaagtttggactatgagtcagaaggggatattcttgaagacgatgaagactacttggtggatgaattcaatcagcctggagtctcggacagtgaactcrggggagacgacctctctgatgtccccggccccacagcactggctcctcccagcaagtcacctgctctcaccaaaaagaagcagcatccaacgtacaaaga

SEQ ID NO: 32936 - DNA, 201 bp, Homo sapiens
ggcctcggccacctcaacccccgcagagacccccccctccaaccggtttaatggtgaaaaagtcggcttcagatgcgtccatctcctccggcacccatggrcagtattcaattttgcagacggcaagacttctaccaggagcacctcagcaacctcccaaggctcggactggaataagtaaaccttataatgtcaagcaga

SEQ ID NO: 32937 - DNA, 201 bp, Homo sapiens
ggacggcggagctgacagactggctgctcgactcgccccagctctcgggagctaccgactcccaggatgacagcagcccagctgacatatttgctgtgggrtttgaagagatggtggaattgagcgcagggaatattgtcaatgccagtactaccaacaagaagatgtggggtgaacagcttcagaaagccatctcacgct

SEQ ID NO: 32938 - DNA, 201 bp, Homo sapiens
gaagctgctctgggcttcttgccacgcgggcgacacgcctatgatcaattttgacttccatcagtttgccaaaggtgggaagctagagaaattggagaccytcttgaggccacagttaaagctgcactgggaagacttcgatgtgttcacaaagggggagaacgtcagtccacgttttcagaaaggcactttgcggatgaa

SEQ ID NO: 32939 - DNA, 201 bp, Homo sapiens
ctctgatgtccccggccccacagcactggctcctcccagcaagtcacctgctctcaccaaaaagaagcagcatccaacgtacaaagatgacgcggacctgrtggagctcaagcgggagctggaagccgtcggggagttccgccaccgttctccgagcaggtctctgtcggtccccaaccggcctcggccacctcaaccccc

SEQ ID NO: 32940 - DNA, 201 bp, Homo sapiens
gcgacgactgcctgctgttcgaggccggcacggtggccacgctggctccagaagaaaaggaagtcattaaaggacagtatggcaagctcacggacgcgtayggctgcctgggggagctgaggctgaaatctggtggcacgtctctgagcttcctggtgttggtgacaggctgcacatctgtgggcagaattccagatgctg

SEQ ID NO: 32941 - DNA, 201 bp, Homo sapiens
agaccttggggagttatgggacaattgttcttgtcaggatcaaccaagggcagatgctggtaacttttgcagacagtcactcggctctcagtgtcctggaygtggacggtatgaaggtgaaaggcagagcagtgaagattagaccgaagaccaaggactggctgaaaggtttgcgagaggagatcattcggaaacgagaca

SEQ ID NO: 32942 - DNA, 201 bp, Homo sapiens
ggaggtggcagacaaagggggcatgctgctggacagcacggcgctcctggtgactcccaggatcctgaaagctatgactgagcgtcagtccgaattcacaratttcaagcggatccggattgctatggggacctggaacgtgaacggaggaaagcagttccggagcaacgtgctcaggacggcggagctgacagactggct

SEQ ID NO: 32943 - DNA, 201 bp, Homo sapiens
atttgccaagatgcacatcgctattaacagccagagtcataaatgaaatgaaattgaagaattcattcaaatgctcttttccctataacctcttttctcascaaaaaggagataaatttgaaaacagataaatgtaacaaccagtcaaagaagcaggggaaaagtaagctcctccaaagttgcttgcagtgctggaaatag

SEQ ID NO: 32944 - DNA, 201 bp, Homo sapiens
cttccacctgcaggtcctgcagagcaacagccagcttctccagggcctcacttacaatagcagtgacagcccctctgggcacccacctgccgcgggcaccrtcttcccacaaggggactttctcagcacttcatctgctacaagccccgacagcgatggcaccaaagcgatgaagccagaggcagccccacttcttggtga

SEQ ID NO: 32945 - DNA, 201 bp, Homo sapiens
cgctggctccagaagaaaaggaagtcattaaaggacagtatggcaagctcacggacgcgtacggctgcctgggggagctgaggctgaaatctggtggcacrtctctgagcttcctggtgttggtgacaggctgcacatctgtgggcagaattccagatgctgaaatctacaaaatcactgccactgacttttaccctcttc

SEQ ID NO: 32946 - DNA, 201 bp, Homo sapiens
tggaatttgatcaactacagctacagaaatcaagtggaaaaatttttaaggactttcacgaaggagccattaactttggacccacctacaagtatgacgtyggctcagccgcctacgatacaagcgacaaatgccgcacccccgcctggacagacagggtgctgtggtggaggaagaaacatccctttgataaaacagctg

SEQ ID NO: 32947 - DNA, 201 bp, Homo sapiens
cttgaagacgatgaagactacttggtggatgaattcaatcagcctggagtctcggacagtgaactcgggggagacgacctctctgatgtccccggccccayagcactggctcctcccagcaagtcacctgctctcaccaaaaagaagcagcatccaacgtacaaagatgacgcggacctggtggagctcaagcgggagctg

SEQ ID NO: 32948 - DNA, 201 bp, Homo sapiens
tggaggaaaactttgacttcacaagtttggactatgagtcagaaggggatattcttgaagacgatgaagactacttggtggatgaattcaatcagcctggrgtctcggacagtgaactcgggggagacgacctctctgatgtccccggccccacagcactggctcctcccagcaagtcacctgctctcaccaaaaagaagc

SEQ ID NO: 32949 - DNA, 201 bp, Homo sapiens
tagacagataagatgcatagttgaccagtcataaaaggcggtgtttaggtgatcaggatgccgttggtggcatttacgtgctttatatgatttttacctcygtaacaaacacaagaaataaacagaatggtccttaacagagtttgggggagagagcaagatgggttccttggagaagctgatttgccaagatgcacatcg

SEQ ID NO: 32950 - DNA, 201 bp, Homo sapiens
ccacccacgcccgcccccagccgctgggcctttcccagtgcggccgccgccgccacagctgcagtcagcaccgtcaccccagcagcatccgccgcctgcaycgcgcgtgcggcccgccccggcctgaccccgccgccgaacccggcgccagccatggagcccgaagccccccgtcgccgccacacccatcagcgcggctac

SEQ ID NO: 32951 - DNA, 201 bp, Homo sapiens
atcccacctgaaatcaccttttttcccccttgatcaaacatcccatccttcagctaccatactgttgctacagggattttgtggactgtggcccctgtccygaggttggcaccttcagttcagcacagcctgagcagtgagaaggtctgaaaggagagtatatagttaagatccttgagaaagggctgcctgaggaactga

SEQ ID NO: 32952 - DNA, 201 bp, Homo sapiens
ttcaaggaacagcatctgttgcagttgcaggtctccttgcagctcttcgaataaccaagaacaaactgtctgatcaaacaatactattccaaggagctggrgaggctgccctagggattgcacacctgattgtgatggccttggaaaaagaaggtttaccaaaagagaaagccatcaaaaagatatggctggttgattcaa

SEQ ID NO: 32953 - DNA, 201 bp, Homo sapiens
taaccaagggacgtgcaatttttgccagtggcagtccttttgatccagtcactcttccaaatggacagaccctatatcctggccaaggcaacaattcctaygtgttccctggagttgctcttggtgttgtggcgtgtggattgaggcagatcacagataatattttcctcactactgctgaggttatagctcagcaagtgt

SEQ ID NO: 32954 - DNA, 201 bp, Homo sapiens
caggacactaatgggaagaccaaaattactaataaattgacataaccaacattaaaactcataattattttgttgaccattttgttaaaatctacttttcaaaaaaaaaaaagctagaaatgaatctaggcgtaggtgaacttttgctaagcagaaataacactactttgttgcctagagaaagataacttctcaagtatt

SEQ ID NO: 32955 - DNA, 201 bp, Homo sapiens
agaaagccatcaaaaagatatggctggttgattcaaaaggattaatagttaagggacgtgcttccttaacacaagagaaagagaagtttgcccatgaacaygaagaaatgaagaacctagaagccattgttcaagaaataaaaccaactgccctcataggagttgctgcaattggtggtgcattctcagaacaaattctca

SEQ ID NO: 32956 - DNA, 201 bp, Homo sapiens
aagatagagtttttaataccccattgtgtgaacaaggaattgttggatttggaatcggaattgcggtcactggagctactgccattgcggaaattcagttygcagattatattttccctgcatttgatcagattgttaatgaagctgccaagtatcgctatcgctctggggatctttttaactgtggaagcctcactatcc

SEQ ID NO: 32957 - DNA, 201 bp, Homo sapiens
tttttattaaatgaaccatcatgatattggctgaaaagttctacattctattattgtattgtaacacacatgtattgatgattttcattaagagtttcagwttaactttgaaaaatattccacatggtaatcttataaattctgtttaattacatctgtaaatattatgtgtgtgatagtattcaataaagtaaaatcaaa

SEQ ID NO: 32958 - DNA, 201 bp, Homo sapiens
cagggcagcagcggaagaagtccctatagaaccatacaacatcccactgtcccaggccgaagtcatacaggaagggagtgatgttactctagttgcctggrgcactcaggttcatgtgatccgagaggtagcttccatggcaaaagaaaagcttggagtgtcttgtgaagtcattgatctgaggactataataccttggga

SEQ ID NO: 32959 - DNA, 201 bp, Homo sapiens
tgccattgcggaaattcagtttgcagattatattttccctgcatttgatcagattgttaatgaagctgccaagtatcgctatcgctctggggatctttttwactgtggaagcctcactatccggtccccttggggctgtgttggtcatggggctctctatcattctcagagtcctgaagcattttttgcccattgcccagg

SEQ ID NO: 32960 - DNA, 201 bp, Homo sapiens
atcggaaatcagctctacagttcaggaggaatgtttcttgaacctagaggctcctatatcaagagtatgtggttatgacacaccatttcctcacatttttkaaccattctacatcccagacaaatggaagtgttatgatgcccttcgaaaaatgatcaactattgaccatatagaaaagctggaagattatgactagatat

SEQ ID NO: 32961 - DNA, 201 bp, Homo sapiens
gccggctggctactcaggctcagggcggcaggggctgaggggcactggcgtcggcttcctggcgcggggctggcgcggggctttttgcaccccgccgcgaytgtcgaggatgcggcccagaggcggcaggtggctcattttactttccagccagatccggagccccgggagtacgggcaaactcagaaaatgaatcttttc

SEQ ID NO: 32962 - DNA, 201 bp, Homo sapiens
gatctttttaactgtggaagcctcactatccggtccccttggggctgtgttggtcatggggctctctatcattctcagagtcctgaagcattttttgcccrttgcccaggaatcaaggtggttatacccagaagccctttccaggccaaaggacttcttttgtcatgcatagaggataaaaatccttgtatattttttgaa

SEQ ID NO: 32963 - DNA, 201 bp, Homo sapiens
aaaagctggaagattatgactagatatggaaatattttttctgaatttttttttatatttcctccgacttacctctttttgaaaagagagtttttattaartgaaccatcatgatattggctgaaaagttctacattctattattgtattgtaacacacatgtattgatgattttcattaagagtttcagattaactttga

SEQ ID NO: 32964 - DNA, 201 bp, Homo sapiens
gattatgactagatatggaaatattttttctgaatttttttttatatttcctccgacttacctctttttgaaaagagagtttttattaaatgaaccatcaygatattggctgaaaagttctacattctattattgtattgtaacacacatgtattgatgattttcattaagagtttcagattaactttgaaaaatattcca

SEQ ID NO: 32965 - DNA, 201 bp, Homo sapiens
gcagattatattttccctgcatttgatcagattgttaatgaagctgccaagtatcgctatcgctctggggatctttttaactgtggaagcctcactatccsgtccccttggggctgtgttggtcatggggctctctatcattctcagagtcctgaagcattttttgcccattgcccaggaatcaaggtggttatacccaga

SEQ ID NO: 32966 - DNA, 201 bp, Homo sapiens
tagcgaggctggggatgcccggcacggccggctcgtccgctcggaaagctctgggatgctcgggcgcagtgacagccgcgctctcgccaccaggccctgcygctcgcctcctctccggcttggctgggatgccccgcgcaccgccggcttttaaagagtccgggctggccgcagacgcgtacgtcagcctcggggcgggcc

SEQ ID NO: 32967 - DNA, 201 bp, Homo sapiens
aatcccttgggaagctgcttaaagtgcatcctaccaatgcagctcctttagggccatggagccccaatactctgcattcctaacacgcgctgtggggcagrcgcagtccaggtacacctactttctcctgcctctgccacccctgagacagcaagaccagccccctcttcctccttcccagtctactcaacatgaagacga

SEQ ID NO: 32968 - DNA, 201 bp, Homo sapiens
ctgcactcggctctgcgtcagttccaacggcatcttcgcggctgcgcccgacggcccgcctcccggggccgagatcccgacgctggcaggagagcggccgscgacccccggaacaaaggaggagaggggggcgtgcgccggcgcgcggccgggcgtttcctgcgctgccaggggaaacgtgctttgggctaagttccggac

SEQ ID NO: 32969 - DNA, 201 bp, Homo sapiens
tctgcactcggctctgcgtcagttccaacggcatcttcgcggctgcgcccgacggcccgcctcccggggccgagatcccgacgctggcaggagagcggccrccgacccccggaacaaaggaggagaggggggcgtgcgccggcgcgcggccgggcgtttcctgcgctgccaggggaaacgtgctttgggctaagttccgga

SEQ ID NO: 32970 - DNA, 201 bp, Homo sapiens
ctgcgcccgacggcccgcctcccggggccgagatcccgacgctggcaggagagcggccgccgacccccggaacaaaggaggagaggggggcgtgcgccggsgcgcggccgggcgtttcctgcgctgccaggggaaacgtgctttgggctaagttccggaccctcgcctgtgcggggctcgacgtgtgctgcgagggtagcg

SEQ ID NO: 32971 - DNA, 201 bp, Homo sapiens
ccgggacaagggccacagcgcccccgccgcccggccaaggacgcgcagcccgcgcctccgccccgccccgccggcgcgacccgcacgggcgcgccccccgyagaggggcgtcggcacaaagccgccccacacaatggcccggcccggcgcagcccgccctgcaacccggctccgcgcagctgcactcacatctgggcaacg

SEQ ID NO: 32972 - DNA, 201 bp, Homo sapiens
ggagcgcgcccagccctgctgaagggtcctggctgctgttatcccctcgtcccgttgtcccctcgggacgtctggcacagcttccccgactaattccggcscctcacctcaactgtgctggccgggaggagagcagagacgcagtcctgcccagtgtagaccgtggaccccgcagccgaatcccttgggaagctgcttaaa

SEQ ID NO: 32973 - DNA, 201 bp, Homo sapiens
cagctggaaagatgggatcagtaagattaaaaaacttttgttcggccaggcgtggtggctcacacctgtaatcccagcactttgggaggctgaggcggacrgatcatgaggtcaggagttcaagaccagcctggccaatatggtgaaaccccgtctctactaaaaatacaaaaattagccgggtgttgtggctcaccctct

SEQ ID NO: 32974 - DNA, 201 bp, Homo sapiens
ctgaaagccctgtggtgattttctactctgagattggctctgaggaattttccaattttcaccgccagcttatatcaaaaagcaatgcaggcaaaatcaaytatgtattcagacattatatatttaatcccaggaaggagcctgtttacctctctggctatggcgtggaattggccattaagagcactgagtacaaggcca

SEQ ID NO: 32975 - DNA, 201 bp, Homo sapiens
acaatttttgtatctgtgaaagtctttgctttttctttccaccttctagaaaagtctgctaccagtttccttactgaatacagccatactcagcccctctygcatccagcccgtcagggtcagggtcagggtcaggctccctcaagacgagcaccgcattgtctgccctcttttgcgtaggatttttctctcagacccagg

SEQ ID NO: 32976 - DNA, 201 bp, Homo sapiens
gataagccggctgggcaggagtgccacaccttttgattctgagcatttgattctgacttctgtactctggtggccactggatctttgggattaaagctctrttggatttgtacctcagaggaagaccaagtggctgatcctttggactctgtaaagagcattcttctagtcagagggtggaatggcagcagcaactggaag

SEQ ID NO: 32977 - DNA, 201 bp, Homo sapiens
atctgaaagagttaagagatttcaatttggatggtgctccttatggttacactcctttctgtgacagccgaagagaaatggacggctacaggttctggaartcagggtactgggccagtcatttagccgggcgaaagtatcatatcagtgcactatatgttgtggatctgaagaagtttaggaaaatagctgctggtgaca

SEQ ID NO: 32978 - DNA, 201 bp, Homo sapiens
cgggagcactgtacaaagagaagacaaaagaaccaagccgagaaggtcctcagaaacgtgaagaattatgatctctggagaaggacaggaaatcaccccawttgaaaaacagtttttataataaatgctagttttttctgatctgtctatacaactgctgataagccggctgggcaggagtgccacaccttttgattctga

SEQ ID NO: 32979 - DNA, 201 bp, Homo sapiens
tctttggaaaattaagagatctgcaccccgacctggagggacagttgaaagaactcagaaagcatcttgtagagagcaccaatgaaatggcacctttaaargtttggcagttgcaagatctcagtttccagactgctgctcgaatcttggcttctcctgttgagttggctttggttgtcatgaaggatcttagtcagaatt

SEQ ID NO: 32980 - DNA, 201 bp, Homo sapiens
tgggctactttcagctgaaagccaacccaggagcttggatcctcagacttaggaagggacgctctgaagatatttatagaatttacagccacgatggcacygattctccccctgatgctgatgaggtggttatcgtcctcaacaacttcaaaagcaaaattattaaagtgaaggttcagaagaaggcagatatggtgaacg

SEQ ID NO: 32981 - DNA, 201 bp, Homo sapiens
aacccagcttgcttccagaatggcctaggaccctcctcctcctgccagtttttttttttttttttggttcatgtggcataatcatctttcaaaattaaccraatgccccagaaaatgatgttaccactaaaatattttctccaagaaggcatactgtaacagaaaagataggtaagatatttttttcccaagaagtaagaa

SEQ ID NO: 32982 - DNA, 201 bp, Homo sapiens
ccttgagaagtccaatcaaacaaatagcatgggagcaaaagcaaaggggctttattttagatatgtcaaattttaaacctgaaagagtaaaaccgaggtcrttatcagaagcaatttcacaaaccaaagcactttctcagtgtaaaaatcgaaatgtgtcaacaccttcagcatttggtgaaggacagtctggactggcag

SEQ ID NO: 32983 - DNA, 201 bp, Homo sapiens
aggaacaaacgaaatcagacaaataaactagtagatgatggaaaaaagaaaccaagagcaaaacaaaaaacaaatgagaaaggtacatcgagaaagcatayaacacttaaggatgaaaaaataaaatctcagtctggtgctgaggttaagtttgtactgaaacaccagaatgtgtctgaatttgcaagtagttctggaggc

SEQ ID NO: 32984 - DNA, 201 bp, Homo sapiens
atcccctttctgcttccctacccactggaattaatgcacaacagaagttatctggctgcttttcttctttcttagaaagcaagaagtctgtagatttgcakacattccccagttcacgagatgatttgcatccatcagttgtttgtaattctataggacctggagtctcaaaaattaatgttcaaaggcctcataatcaaa

SEQ ID NO: 32985 - DNA, 201 bp, Homo sapiens
aataatggattctttctgtgttcagcaggcagaagactgtctaagtgaaaaatctagattgaataggagttcagtaagcaaagaagtgtttcttagcctcycacagccaaacaattcagactggattcaaggtcacaccagaaaagaaatgggacagtctcttgactcagccaatacctcttttactgcaatactctcctc

SEQ ID NO: 32986 - DNA, 201 bp, Homo sapiens
aggcactatttcacaatattttactaccttacactgtcctgtgtgtgatgacctaactcagcatggcatctgtagtaaatgtcggagccaacctcagcatrttgcagtcatcctcaaccaagaaatccgggagttggaacgtcaacaggagcaacttgtaaagatatgcaagaactgtacaggttgctttgatcgacacat

SEQ ID NO: 32987 - DNA, 201 bp, Homo sapiens
agataaaaaaattgtgattatgccttgcaaatgtgccccaagtcgacaactggttcaagtgtggcttcaagccaaagaagaatacgaacgttccaagaaaytgcctaaaaccaagccaactggagttgtaaaatctgctgagaactttagctcttcagttaacccagatgacaaacctgtagtgcctccaaaaatggatgt

SEQ ID NO: 32988 - DNA, 201 bp, Homo sapiens
ttgatgtcttcagctggtatcatgaattaccaaggatccataaagctaccagctcctcgcgaagtgaacctgaagggcggaaaggcactatttcacaataytttactaccttacactgtcctgtgtgtgatgacctaactcagcatggcatctgtagtaaatgtcggagccaacctcagcatgttgcagtcatcctcaacc

SEQ ID NO: 32989 - DNA, 201 bp, Homo sapiens
aattatggcaactttgttggatcatgacctgtctgagactatttaccaggaaccattttgcagtaatccttctgatgtaccagaaaagcccagggagattsgtggacggctcctcatggtagaaactcgacttgcaaatgatctggctgagtttgagggagacttttccttggaaggacttcgtctttggaaaacagcatt

SEQ ID NO: 32990 - DNA, 135 bp, Homo sapiens
ttccttaccaaaacttcttcagggttaaaacaaaaaaaaaaaaaaaaaaaaagggcagcaaaaatgggaaaatttaatttagcactcatccttttagagakttttaagagtgtacttgttagtagatcttcagtg

SEQ ID NO: 32991 - DNA, 201 bp, Homo sapiens
atcttttttataagcctgcattggttacatctttcttaccctacccttttctgagttttaatgaagtaaattatttaacatatttttatatcctgtttgawattgcaatttccttaccaaaacttcttcagggttaaaacaaaaaaaaaaaaaaaaaaaaagggcagcaaaaatgggaaaatttaatttagcactcatcct

SEQ ID NO: 32992 - DNA, 201 bp, Homo sapiens
ctaatgggctctgctgtagatcatcccctttctgcttccctacccactggaattaatgcacaacagaagttatctggctgcttttcttctttcttagaaascaagaagtctgtagatttgcagacattccccagttcacgagatgatttgcatccatcagttgtttgtaattctataggacctggagtctcaaaaattaat

SEQ ID NO: 32993 - DNA, 201 bp, Homo sapiens
catcttgaacacaaaatgtgtatttagaatatttgtataactgtgtaaaataaaaaaggaattatgtggtcagtgcattgttttttaaactggaaatcatkttgttttaaaagttaataatggaaaccatattaaaattgaataaaatataaaataatatagcagtgtgacttcatcttttttataagcctgcattggtta

SEQ ID NO: 32994 - DNA, 201 bp, Homo sapiens
tcttctccacctcgctgctggtctcccacagatccaagagctgaagaaatcatggctgctgcagaaaaagaggcaatgctttttaagggtcctaatgtatrtaagaagactgttaattctcgtataggaaaaactagtcgcgcaagagcacagattaagaaatcaaaagcaaagcttgctaatccctctatagttactaag

SEQ ID NO: 32995 - DNA, 201 bp, Homo sapiens
aactgtctgtatcaagacgtgttacttcgagatatccattcactttataattttgactgcaaaatattttgtaaatacacttttttacttttcaaacgagyaaaataatgtgcaatgatttttatacaaatgattttcaagttgtttggtatatttcctctaggttttgcttgactcaaagtagatcgttattttgatcaa

SEQ ID NO: 32996 - DNA, 201 bp, Homo sapiens
aaccatattaaaattgaataaaatataaaataatatagcagtgtgacttcatcttttttataagcctgcattggttacatctttcttaccctacccttttytgagttttaatgaagtaaattatttaacatatttttatatcctgtttgatattgcaatttccttaccaaaacttcttcagggttaaaacaaaaaaaaaaa

SEQ ID NO: 32997 - DNA, 201 bp, Homo sapiens
cctacccttttctgagttttaatgaagtaaattatttaacatatttttatatcctgtttgatattgcaatttccttaccaaaacttcttcagggttaaaamaaaaaaaaaaaaaaaaaaaaagggcagcaaaaatgggaaaatttaatttagcactcatccttttagagatttttaagagtgtacttgttagtagatcttc

SEQ ID NO: 32998 - DNA, 201 bp, Homo sapiens
tacatctttcttaccctacccttttctgagttttaatgaagtaaattatttaacatatttttatatcctgtttgatattgcaatttccttaccaaaacttyttcagggttaaaacaaaaaaaaaaaaaaaaaaaaagggcagcaaaaatgggaaaatttaatttagcactcatccttttagagatttttaagagtgtactt

SEQ ID NO: 32999 - DNA, 201 bp, Homo sapiens
gaaatcattttgttttaaaagttaataatggaaaccatattaaaattgaataaaatataaaataatatagcagtgtgacttcatcttttttataagcctgyattggttacatctttcttaccctacccttttctgagttttaatgaagtaaattatttaacatatttttatatcctgtttgatattgcaatttccttacca

SEQ ID NO: 33000 - DNA, 201 bp, Homo sapiens
tacccttttctgagttttaatgaagtaaattatttaacatatttttatatcctgtttgatattgcaatttccttaccaaaacttcttcagggttaaaacamaaaaaaaaaaaaaaaaaaagggcagcaaaaatgggaaaatttaatttagcactcatccttttagagatttttaagagtgtacttgttagtagatcttcag

SEQ ID NO: 33001 - DNA, 191 bp, Homo sapiens
agttttaatgaagtaaattatttaacatatttttatatcctgtttgatattgcaatttccttaccaaaacttcttcagggttaaaacaaaaaaaaaaaaawaaaaaaagggcagcaaaaatgggaaaatttaatttagcactcatccttttagagatttttaagagtgtacttgttagtagatcttcagtg

SEQ ID NO: 33002 - DNA, 201 bp, Homo sapiens
gaaaaatagactctaaagaaaaacaagtaatattaacagaagaaaaaatggaactatataaaaagcttgcacctttgaaggacttttggccaaaagttccygactcccctgcaaccaaatatcccatttatccactaacaccaaagaaaagtcacagaagaaagtcaaaacataaatctgctaagaaaaaaactggtaaac

SEQ ID NO: 33003 - DNA, 201 bp, Homo sapiens
tacactgtcctgtgtgtgatgacctaactcagcatggcatctgtagtaaatgtcggagccaacctcagcatgttgcagtcatcctcaaccaagaaatccgsgagttggaacgtcaacaggagcaacttgtaaagatatgcaagaactgtacaggttgctttgatcgacacatcccatgtgtttctctgaactgcccagtac

SEQ ID NO: 33004 - DNA, 201 bp, Homo sapiens
aggaaattctcttgctgatactttatttcggtgggaacaagatgaaataccaagctctttaatattggaaggtgttgaaccacagagtacatgtgaattasaagtggatgctgtagctgctgatatcttaaatcgtctggacattgaagctcaaattggtggaaaccctggtctacaggccatatgggaagatgaaaagca

SEQ ID NO: 33005 - DNA, 201 bp, Homo sapiens
tcggaaagttaagtgaatatcgcaattccctagaatcaaagctggaccaagcatatacccctaattttttgcattgcaaagacagtcagcagcagattgtrtgcatagcggaacagtcaaagcacagtgaaacttgttctccgggaaatacagcttcagaggaaagccaaatgcctaataattgctttgtaacttccttga

SEQ ID NO: 33006 - DNA, 201 bp, Homo sapiens
tttggtatatttcctctaggttttgcttgactcaaagtagatcgttattttgatcaaactgtgcaaacagtagtaccacgtgtagcattttgaaacattawtttttaaaaaatgctgtcttgctttagctattaatggggcattgtgaggaactgtgcaaagacatttttgttacaaacctgtgggcctgttgcaatactt

SEQ ID NO: 33007 - DNA, 201 bp, Homo sapiens
ttgataattctcagattgctttacaagcaccaaccacgggatgtagtcaaactgcaagtgaaagtcagatgctgccaccagttgcctctgcaagtgatccygaaaaagatgaagatgatgatgataactattacattagttatagctcccctgattctccagtaattcccccttggcaacaaccaatatccccagattcca

SEQ ID NO: 33008 - DNA, 201 bp, Homo sapiens
tgaaaatattaaaagaactttgtctttcaggaaaaaacggtcacatgctattctttctcctccctcaccatcttacaatgctgaaaccgaagattgtgacytgaattatagtgatgttatgtctaaactaggttttctttctgagagaagcacaagtcccataaattcttctccacctcgctgctggtctcccacagatcc

SEQ ID NO: 33009 - DNA, 201 bp, Homo sapiens
ctggctgagtttgagggagacttttccttggaaggacttcgtctttggaaaacagcattctcagcaatgactcagaatccaaggccagggtcaccccttcrcagtggccaaggagttgtcaataaagggtcaagtaatagccctaagatggttgaagataaaaaaattgtgattatgccttgcaaatgtgccccaagtcga

SEQ ID NO: 33010 - DNA, 201 bp, Homo sapiens
aggataatgcattggctagtgatttaactaaaaccactcgtggagcttttgaaaataaaacacccacagatggttttatagactgtcactttggagatggracgttagaaactgagcagtcctttggactatatggaaataaatacacacttagagccaaacgcaaggtaaattatgagactgaagacagtgagtcaagtt

SEQ ID NO: 33011 - DNA, 201 bp, Homo sapiens
ttctcagtgtaaaaatcgaaatgtgtcaacaccttcagcatttggtgaaggacagtctggactggcagttctaaaagaattgttacaaaaaagacagcagraagcacaaaatgcaaatactacacaagacccattatccaataaacatcaaccaaataaaaatatttctggttcccttgagcataacaaagcaaataaacg

SEQ ID NO: 33012 - DNA, 201 bp, Homo sapiens
aaaagttaataatggaaaccatattaaaattgaataaaatataaaataatatagcagtgtgacttcatcttttttataagcctgcattggttacatctttyttaccctacccttttctgagttttaatgaagtaaattatttaacatatttttatatcctgtttgatattgcaatttccttaccaaaacttcttcagggtt

SEQ ID NO: 33013 - DNA, 201 bp, Homo sapiens
cttcagcatttggtgaaggacagtctggactggcagttctaaaagaattgttacaaaaaagacagcagaaagcacaaaatgcaaatactacacaagacccrttatccaataaacatcaaccaaataaaaatatttctggttcccttgagcataacaaagcaaataaacggacacgatcggtaacgtccccaagaaaacctc

SEQ ID NO: 33014 - DNA, 201 bp, Homo sapiens; identical to SEQ ID NO: 32982

SEQ ID NO: 33015 - DNA, 201 bp, Homo sapiens; identical to SEQ ID NO: 32983

SEQ ID NO: 33016 - DNA, 201 bp, Homo sapiens; identical to SEQ ID NO: 32984

SEQ ID NO: 33017 - DNA, 201 bp, Homo sapiens; identical to SEQ ID NO: 32985

SEQ ID NO: 33018 - DNA, 201 bp, Homo sapiens; identical to SEQ ID NO: 32986

SEQ ID NO: 33019 - DNA, 201 bp, Homo sapiens; identical to SEQ ID NO: 32987

SEQ ID NO: 33020 - DNA, 201 bp, Homo sapiens; identical to SEQ ID NO: 32988

SEQ ID NO: 33021 - DNA, 201 bp, Homo sapiens; identical to SEQ ID NO: 32989

SEQ ID NO: 33022 - DNA, 135 bp, Homo sapiens; identical to SEQ ID NO: 32990

SEQ ID NO: 33023 - DNA, 201 bp, Homo sapiens; identical to SEQ ID NO: 32991

SEQ ID NO: 33024 - DNA, 201 bp, Homo sapiens; identical to SEQ ID NO: 32992

SEQ ID NO: 33025 - DNA, 201 bp, Homo sapiens; identical to SEQ ID NO: 32993

SEQ ID NO: 33026 - DNA, 201 bp, Homo sapiens; identical to SEQ ID NO: 32994

SEQ ID NO: 33027 - DNA, 201 bp, Homo sapiens; identical to SEQ ID NO: 32995

SEQ ID NO: 33028 - DNA, 201 bp, Homo sapiens; identical to SEQ ID NO: 32996

SEQ ID NO: 33029 - DNA, 201 bp, Homo sapiens; identical to SEQ ID NO: 32997

SEQ ID NO: 33030 - DNA, 201 bp, Homo sapiens; identical to SEQ ID NO: 32998

SEQ ID NO: 33031 - DNA, 201 bp, Homo sapiens; identical to SEQ ID NO: 32999

SEQ ID NO: 33032 - DNA, 201 bp, Homo sapiens; identical to SEQ ID NO: 33000

SEQ ID NO: 33033 - DNA, 191 bp, Homo sapiens; identical to SEQ ID NO: 33001

SEQ ID NO: 33034 - DNA, 201 bp, Homo sapiens; identical to SEQ ID NO: 33002

SEQ ID NO: 33035 - DNA, 201 bp, Homo sapiens; identical to SEQ ID NO: 33003

SEQ ID NO: 33036 - DNA, 201 bp, Homo sapiens; identical to SEQ ID NO: 33004

SEQ ID NO: 33037 - DNA, 201 bp, Homo sapiens; identical to SEQ ID NO: 33005

SEQ ID NO: 33038 - DNA, 201 bp, Homo sapiens; identical to SEQ ID NO: 33006

SEQ ID NO: 33039 - DNA, 201 bp, Homo sapiens; identical to SEQ ID NO: 33007

SEQ ID NO: 33040 - DNA, 201 bp, Homo sapiens; identical to SEQ ID NO: 33008

SEQ ID NO: 33041 - DNA, 201 bp, Homo sapiens; identical to SEQ ID NO: 33009

SEQ ID NO: 33042 - DNA, 201 bp, Homo sapiens; identical to SEQ ID NO: 33010

SEQ ID NO: 33043 - DNA, 201 bp, Homo sapiens; identical to SEQ ID NO: 33011

SEQ ID NO: 33044 - DNA, 201 bp, Homo sapiens; identical to SEQ ID NO: 33012

SEQ ID NO: 33045 - DNA, 201 bp, Homo sapiens; identical to SEQ ID NO: 33013

SEQ ID NO: 33046 - DNA, 201 bp, Homo sapiens; identical to SEQ ID NO: 32982

SEQ ID NO: 33047 - DNA, 201 bp, Homo sapiens; identical to SEQ ID NO: 32983

SEQ ID NO: 33048 - DNA, 201 bp, Homo sapiens; identical to SEQ ID NO: 32984

SEQ ID NO: 33049 - DNA, 201 bp, Homo sapiens; identical to SEQ ID NO: 32985

SEQ ID NO: 33050 - DNA, 201 bp, Homo sapiens; identical to SEQ ID NO: 32986

SEQ ID NO: 33051 - DNA, 201 bp, Homo sapiens; identical to SEQ ID NO: 32987

SEQ ID NO: 33052 - DNA, 201 bp, Homo sapiens; identical to SEQ ID NO: 32988

SEQ ID NO: 33053 - DNA, 201 bp, Homo sapiens; identical to SEQ ID NO: 32989

SEQ ID NO: 33054 - DNA, 135 bp, Homo sapiens; identical to SEQ ID NO: 32990

SEQ ID NO: 33055 - DNA, 201 bp, Homo sapiens; identical to SEQ ID NO: 32991

SEQ ID NO: 33056 - DNA, 201 bp, Homo sapiens; identical to SEQ ID NO: 32992

SEQ ID NO: 33057 - DNA, 201 bp, Homo sapiens; identical to SEQ ID NO: 32993

SEQ ID NO: 33058 - DNA, 201 bp, Homo sapiens; identical to SEQ ID NO: 32994

SEQ ID NO: 33059 - DNA, 201 bp, Homo sapiens; identical to SEQ ID NO: 32995

SEQ ID NO: 33060 - DNA, 201 bp, Homo sapiens; identical to SEQ ID NO: 32996

SEQ ID NO: 33061 - DNA, 201 bp, Homo sapiens; identical to SEQ ID NO: 32997

SEQ ID NO: 33062 - DNA, 201 bp, Homo sapiens; identical to SEQ ID NO: 32998

SEQ ID NO: 33063 - DNA, 201 bp, Homo sapiens; identical to SEQ ID NO: 32999

SEQ ID NO: 33064 - DNA, 201 bp, Homo sapiens; identical to SEQ ID NO: 33000

SEQ ID NO: 33065 - DNA, 191 bp, Homo sapiens; identical to SEQ ID NO: 33001

SEQ ID NO: 33066 - DNA, 201 bp, Homo sapiens; identical to SEQ ID NO: 33002

SEQ ID NO: 33067 - DNA, 201 bp, Homo sapiens; identical to SEQ ID NO: 33003

SEQ ID NO: 33068 - DNA, 201 bp, Homo sapiens; identical to SEQ ID NO: 33004

SEQ ID NO: 33069 - DNA, 201 bp, Homo sapiens; identical to SEQ ID NO: 33005

SEQ ID NO: 33070 - DNA, 201 bp, Homo sapiens; identical to SEQ ID NO: 33006

SEQ ID NO: 33071 - DNA, 201 bp, Homo sapiens; identical to SEQ ID NO: 33007

SEQ ID NO: 33072 - DNA, 201 bp, Homo sapiens; identical to SEQ ID NO: 33008

SEQ ID NO: 33073 - DNA, 201 bp, Homo sapiens; identical to SEQ ID NO: 33009

SEQ ID NO: 33074 - DNA, 201 bp, Homo sapiens; identical to SEQ ID NO: 33010

SEQ ID NO: 33075 - DNA, 201 bp, Homo sapiens; identical to SEQ ID NO: 33011

SEQ ID NO: 33076 - DNA, 201 bp, Homo sapiens; identical to SEQ ID NO: 33012

SEQ ID NO: 33077 - DNA, 201 bp, Homo sapiens; identical to SEQ ID NO: 33013

SEQ ID NO: 33078 - DNA, 201 bp, Homo sapiens
cttaattagtaaccatggataagatgctttagatcagactaggttttaatcattaacttccacaaagaagtcatactttgcgttaggtgtgctggttggaygtgcaggaacttcagcaagcagtaggttttactaagcagatggtcgggcactgcagggcaccaggcaggatcctagggcgcctcttattctgcgttagca

SEQ ID NO: 33079 - DNA, 201 bp, Homo sapiens
tcacggagctaattcatattgctctccttgtacatcgtgggatagtaaatttaaatgagttgcaatcatctgatggtccactgaaagacatgcaatttggmaataaaattgctatcctgagtggagactttcttctagcaaatgcctgcaatggactagctctgctacagaacaccaaggttgtggaacttttagcaagtg

SEQ ID NO: 33080 - DNA, 201 bp, Homo sapiens
tattgtattataaaatattttaagtgtactcaaaatatcataattgtacagtttatgccaccataatttgaggcctatagatttagcttaagagaacactsttctgtttgaaatgctttctgtcactgaaattggcttaattagtaaccatggataagatgctttagatcagactaggttttaatcattaacttccacaaa

SEQ ID NO: 33081 - DNA, 201 bp, Homo sapiens
cctgagtggagactttcttctagcaaatgcctgcaatggactagctctgctacagaacaccaaggttgtggaacttttagcaagtgctcttatggacttgrtacaaggagtatatcatgaaaattctacttcaaaggaaagttatatcacagatgatattggaatatcgacttggaaggagcagacttttctctcccatgg

SEQ ID NO: 33082 - DNA, 201 bp, Homo sapiens
cttttagttactgtaagttcctcctctgcccctggtttgtttcccgcggcacttctggatacccccaggtcccagacccttccagactcaaaccatgaacyttcggcagctgctgttgcacttgccacgttatcttggagcctcgggttccccgcgtcgcctgtggtggtccccgtccctcgacaccatctcctcggtggg

SEQ ID NO: 33083 - DNA, 201 bp, Homo sapiens; identical to SEQ ID NO: 33078

SEQ ID NO: 33084 - DNA, 201 bp, Homo sapiens
tagttactgtaagttcctcctctgcccctggtttgtttcccgcggcacttctggatacccccaggtcccagacccttccagactcaaaccatgaactttcsgcagctgctgttgcacttgccacgttatcttggagcctcgggttccccgcgtcgcctgtggtggtccccgtccctcgacaccatctcctcggtgggctct

SEQ ID NO: 33085 - DNA, 194 bp, Homo sapiens
ctccaatatggcgtcctccacataggcagtggctgtggtttctaccccgggtggccgggggcagtgctgagctgggactgttgtttgcccagcmtgggctgcagaaagcagcagttaaagttcgtttctggtcactgctccaggaagccaccttactctgagggtcaagaattgccgcttccttttagttactg

SEQ ID NO: 33086 - DNA, 201 bp, Homo sapiens; identical to SEQ ID NO: 33079

SEQ ID NO: 33087 - DNA, 201 bp, Homo sapiens; identical to SEQ ID NO: 33080

SEQ ID NO: 33088 - DNA, 201 bp, Homo sapiens; identical to SEQ ID NO: 33081

SEQ ID NO: 33089 - DNA, 151 bp, Homo sapiens
aggctgggaattttgtatactcatgagagtgttagattatgacattaaaacccaaggcttgtggcagttatatataatatttagagaagaagaagaacttmattatcgtggcctagcaaaagaatggtttccttgctttcatatgaagttt

SEQ ID NO: 33090 - DNA, 201 bp, Homo sapiens
cccggcagacattgtctgaagattccttccaacagattatgacattaaaacccaaggcttgtggcagttatatataatatttagagaagaagaagaacttmattatcgtggcctagcaaaagaatggtttccttgctttcatatgaagttttgaacccaatgtattgcttatttgagtatatgggcaagaacaactattgt

SEQ ID NO: 33091 - DNA, 117 bp, Homo sapiens
ttaaaacaaactgacasgttcaagtacctgtcttcagaaaagccagcagctttttttttttttttttttaacaaccagtgatacctctagttggcttcaatgttagctgcagaaaat

SEQ ID NO: 33092 - DNA, 201 bp, Homo sapiens
cggttgcccgagttcccggaggtctctcgcgggacctctctcaccgccaccgctcctactctcgggcttccaaatctggggcgatgtctccccaggttaarttaccctagctcctgctccagatcgcttccccgtgccccgccagagcccagtagttcaaaaattaaatttggggcaaggggtgcgcgccagagcgcagct

SEQ ID NO: 33093 - DNA, 201 bp, Homo sapiens
ttgggctgtgctgagtctcactgtccaccccttcgctgtccagaattccccagcttgttgggagtctacgtcacggcttgtcttgggaaccaatccgtctytctttcttttctttgaagttcccaataaaatgaaaacaggaaatgtattcttctgataatcatttgtctgactcctctagcctgtagctgctgctactgc

SEQ ID NO: 33094 - DNA, 201 bp, Homo sapiens
ccttctttggtggaacctgtatatccatgattgattacctcctctggccctggtttgagcggctggatgtgtatgggatactggactgtgtgagccacackccagccctgcggctctggatatcagccatgaagtgggaccccacagtctgtgctcttctcatggataagagcattttccagggcttcttgaatctctatt

SEQ ID NO: 33095 - DNA, 201 bp, Homo sapiens
tggctgatgctctgggcgccggggctagttggcgggtaggatcacgtgcgaggggcaggccccgtctaggccccgcctccttgctgctgctgccgccgccwatcctggtccggttgcccgagttcccggaggtctctcgcgggacctctctcaccgccaccgctcctactctcgggcttccaaatctggggcgatgtctcc

SEQ ID NO: 33096 - DNA, 201 bp, Homo sapiens
tcctctggccctggtttgagcggctggatgtgtatgggatactggactgtgtgagccacacgccagccctgcggctctggatatcagccatgaagtgggaycccacagtctgtgctcttctcatggataagagcattttccagggcttcttgaatctctattttcagaacaaccctaatgcctttgactttgggctgtgct

SEQ ID NO: 33097 - DNA, 201 bp, Homo sapiens
gaccctggggaaaggaagccagcccccagggccagtcccggaggggctgatccgcatctacagcatgaggttctgcccctattctcacaggacccgcctcrtcctcaaggccaaagacatcagacatgaagtggtcaacattaacctgagaaacaagcctgaatggtactatacaaagcacccttttggccacattcctgt

SEQ ID NO: 33098 - DNA, 201 bp, Homo sapiens; identical to SEQ ID NO: 33092

SEQ ID NO: 33099 - DNA, 201 bp, Homo sapiens; identical to SEQ ID NO: 33093

SEQ ID NO: 33100 - DNA, 201 bp, Homo sapiens
tgaacgagctcgccaaaagatgttattggagctattttgtaaggtcccacatttgaccaaggagtgcctggtagcgttgagatgtgggagagaatgcactratctgaaggcagccctgcgtcaggaattcagcaacctggaagagattcttgagtatcagaacaccaccttctttggtggaacctgtatatccatgattga

SEQ ID NO: 33101 - DNA, 201 bp, Homo sapiens; identical to SEQ ID NO: 33094

SEQ ID NO: 33102 - DNA, 201 bp, Homo sapiens; identical to SEQ ID NO: 33095

SEQ ID NO: 33103 - DNA, 201 bp, Homo sapiens; identical to SEQ ID NO: 33096

SEQ ID NO: 33104 - DNA, 201 bp, Homo sapiens; identical to SEQ ID NO: 33097

SEQ ID NO: 33105 - DNA, 163 bp, Homo sapiens
gggcaagtgagcgagctccttcctcaccgggctgactagcctctcctttccctgtccccctcyatcgctgctctgcaggaagccagcccccagggccagtcccggaggggctgatccgcatctacagcatgaggttctgcccctattctcacaggacccgcct

SEQ ID NO: 33106 - DNA, 149 bp, Homo sapiens
gggcaagtgagcgagctccttcctcaccgggctgactagcctctcctttccctgtccccctccatcgctgctctgcaggaagccagcccccagggccagtcccggaggggctgatccgcatctacagcatgaggttctgcccctattct

SEQ ID NO: 33107 - DNA, 201 bp, Homo sapiens; identical to SEQ ID NO: 33093

SEQ ID NO: 33108 - DNA, 201 bp, Homo sapiens; identical to SEQ ID NO: 33094

SEQ ID NO: 33109 - DNA, 201 bp, Homo sapiens; identical to SEQ ID NO: 33096

SEQ ID NO: 33110 - DNA, 201 bp, Homo sapiens
tcgctgctctgcaggaagccagcccccagggccagtcccggaggggctgatccgcatctacagcatgaggttctgcccctattctcacaggacccgcctcrtcctcaaggccaaagacatcagacatgaagtggtcaacattaacctgagaaacaagcctgaatggtactatacaaagcacccttttggccacattcctgt

SEQ ID NO: 33111 - DNA, 158 bp, Homo sapiens
acaactcctaaaagacccgcaagtgctatttgctggctacaaagtcccccaccccttrgagcacaagatcatcatccgagtgcagaccacgccggactacagcccccaggaagcctttaccaacgccatcaccgacctcatcagtgagctgtccctgc

SEQ ID NO: 33112 - DNA, 201 bp, Homo sapiens
gccatggcccgccttgtggccacccctcaccctgacaccgacgtgtcctgtacatagattaggttttatattcctaataaagtatagcggaagagacctgkatgtggacttgagcagcggtgacttcgcaagcaaatggattgtcaggcttgatgcaggcagatgacctgtttcaggggcgtccggctggcagggatgaat

SEQ ID NO: 33113 - DNA, 201 bp, Homo sapiens
atgcaggcagatgacctgtttcaggggcgtccggctggcagggatgaattcattctggaccaaagatccggggtccaggggctgctgcgggggctgtgctsagccggagagaagtgtgcaaacccatgagctcccaagagtctctgctctagaagcctcaactcctgggcctgcctgtcagtcaaagcaggaacacttctt

SEQ ID NO: 33114 - DNA, 201 bp, Homo sapiens
ttaggttttatattcctaataaagtatagcggaagagacctggatgtggacttgagcagcggtgacttcgcaagcaaatggattgtcaggcttgatgcagrcagatgacctgtttcaggggcgtccggctggcagggatgaattcattctggaccaaagatccggggtccaggggctgctgcgggggctgtgctgagccgg

SEQ ID NO: 33115 - DNA, 201 bp, Homo sapiens
gccggtcccagccatggcccgccttgtggccacccctcaccctgacaccgacgtgtcctgtacatagattaggttttatattcctaataaagtatagcggragagacctggatgtggacttgagcagcggtgacttcgcaagcaaatggattgtcaggcttgatgcaggcagatgacctgtttcaggggcgtccggctggc

SEQ ID NO: 33116 - DNA, 201 bp, Homo sapiens
gaattgagtaggggccagagggggctctgctcggcctgtgagccccgttcctacctgtgcctgaccctccgctccaggtaccacaccgaggagagcggccrgtcccagccatggcccgccttgtggccacccctcaccctgacaccgacgtgtcctgtacatagattaggttttatattcctaataaagtatagcggaaga

SEQ ID NO: 33117 - DNA, 201 bp, Homo sapiens
agctgtccctgctggaggagcgctttcgggtgagggcggggcctggaggggcagacggggtggccataaaagacaagcaggaaggaattgagtaggggccrgagggggctctgctcggcctgtgagccccgttcctacctgtgcctgaccctccgctccaggtaccacaccgaggagagcggccggtcccagccatggccc

SEQ ID NO: 33118 - DNA, 158 bp, Homo sapiens; identical to SEQ ID NO: 33111

SEQ ID NO: 33119 - DNA, 201 bp, Homo sapiens; identical to SEQ ID NO: 33112

SEQ ID NO: 33120 - DNA, 201 bp, Homo sapiens; identical to SEQ ID NO: 33113

SEQ ID NO: 33121 - DNA, 201 bp, Homo sapiens; identical to SEQ ID NO: 33114

SEQ ID NO: 33122 - DNA, 201 bp, Homo sapiens; identical to SEQ ID NO: 33115

SEQ ID NO: 33123 - DNA, 201 bp, Homo sapiens; identical to SEQ ID NO: 33116

SEQ ID NO: 33124 - DNA, 201 bp, Homo sapiens
ttaccaacgccatcaccgacctcatcagtgagctgtccctgctggaggagcgctttcgggtggccataaaagacaagcaggaaggaattgagtaggggccrgagggggctctgctcggcctgtgagccccgttcctacctgtgcctgaccctccgctccaggtaccacaccgaggagagcggccggtcccagccatggccc

SEQ ID NO: 33125 - DNA, 158 bp, Homo sapiens; identical to SEQ ID NO: 33111

SEQ ID NO: 33126 - DNA, 140 bp, Homo sapiens
cttctacgtcccttgttggtgattggcaaggcctggtccttccaggtctctgggaggcagctcaccccagggtggcccacacctgttcctggcagggcgcmtgggaatctagaacagtttagaggggaaagagccacagc

SEQ ID NO: 33127 - DNA, 169 bp, Homo sapiens
gcggggacctactgtcctttgggggtgctcttctacgtcccttgttggtgattggcaaggcctggtccttccaggtctctgggaggcagctcaccccagggtggcccacacctgttcctggcagggcgcctgggaatctagaacagtttagaggggaaagagccacagc

SEQ ID NO: 33128 - DNA, 173 bp, Homo sapiens
ccgggcggggacctactgtcctttgggggtgctcttctacgtcccttgttggtgattggcaaggcctggtccttccaggtctctgggaggcagctcaccccagggtggcccacacctgttcctggcagggcgcctgggaatctagaacagtttagaggggaaagagccacagc

SEQ ID NO: 33129 - DNA, 201 bp, Homo sapiens
atgtggactgaggggctgtggagtctgggcctgtggctcccgtctgccccatgggacttctgtagtgctgcagggtccctcgggtgctgtgggccagatcsgggcggggacctactgtcctttgggggtgctcttctacgtcccttgttggtgattggcaaggcctggtccttccaggtctctgggaggcagctcacccca

SEQ ID NO: 33130 - DNA, 171 bp, Homo sapiens
gggcggggacctactgtcctttgggggtgctcttctacgtcccttgttggtgattggcaaggcctggtccttccaggtctctgggaggcagctcaccccarggtggcccacacctgttcctggcagggcgcctgggaatctagaacagtttagaggggaaagagccacagc

SEQ ID NO: 33131 - DNA, 127 bp, Homo sapiens
ccttccccgtcccccttcctctcttcytccccttttcagcccctccgttctttgagaaccctcccgacccccgcgggcccccattggccggcccgctacccagccctctccgccacttccctcgctt

SEQ ID NO: 33132 - DNA, 201 bp, Homo sapiens
ggccccagggggcccgggaggggctgagggtcccatggccaagaagcatgctggcgagcgcgataagaagctggcggccaagaaaaagacggacaagaagsgggcgctgcggcggctgtagtgggctctcttcctccttccaccgtgaccccaacctctcctgtcccctccctccaactctgtctctaagttatttaaatt

SEQ ID NO: 33133 - DNA, 201 bp, Homo sapiens
gggccgaagccggtcgggccctggccagtggcactgaagcttcctccaccgaccctggggccccagggggcccgggaggggctgagggtcccatggccaaraagcatgctggcgagcgcgataagaagctggcggccaagaaaaagacggacaagaagcgggcgctgcggcggctgtagtgggctctcttcctccttccac

SEQ ID NO: 33134 - DNA, 201 bp, Homo sapiens
tactgctgaccatcaagtgcctgctgatccaccctaaccccgagtctgcactcaacgaggaggcgggccgcctgctcttggagaactacgaggagtatgcrgctcgggcccgtctgctcacagagatccacgggggcgccggcgggcccagcggcagggccgaagccggtcgggccctggccagtggcactgaagcttcct

SEQ ID NO: 33135 - DNA, 201 bp, Homo sapiens
gggtcccatggccaagaagcatgctggcgagcgcgataagaagctggcggccaagaaaaagacggacaagaagcgggcgctgcggcggctgtagtgggctytcttcctccttccaccgtgaccccaacctctcctgtcccctccctccaactctgtctctaagttatttaaattatggctggggtcggggagggtacaggg

SEQ ID NO: 33136 - DNA, 201 bp, Homo sapiens
gcgcgataagaagctggcggccaagaaaaagacggacaagaagcgggcgctgcggcggctgtagtgggctctcttcctccttccaccgtgaccccaacctytcctgtcccctccctccaactctgtctctaagttatttaaattatggctggggtcggggagggtacagggggcactgggacctggatttgtttttctaaa

SEQ ID NO: 33137 - DNA, 143 bp, Homo sapiens
tcctccttccaccgtgaccccaacctctcctgtcccctccctccaactctgtctctaagttatttaaattatggctggggtcggggagggtacagggggcmctgggacctggatttgtttttctaaataaagttggaaaagca

SEQ ID NO: 33138 - DNA, 201 bp, Homo sapiens
ctcttgacggacagaaccttccttctctcgtctgtgtgataacaggcaaagggcctctgagggagtattacagccgcctcatccaccagaagcatttccarcacatccaggtctgcatcccctggctggagggccgaggactacccccgcttctagggtcggtggacctggatgtctgtctggacacgtcctccagtggcc

SEQ ID NO: 33139 - DNA, 166 bp, Homo sapiens
ctgcagtactcctcatcctgcatttggtctccaggtgtcacctttctgccatgttcctaacactttgattcctgtcttgagaaaagcacctgctgcaccayaagcccagggatgtggcagctgcagcgggcttggctttgtgaggaaccgagtgtgtccacgttgg

SEQ ID NO: 33140 - DNA, 201 bp, Homo sapiens
agagctgggtgcagactgtgctccctttggttatggacacataactcctgggccagaggctaaaaccccagggcccctgctgtccttcccgcagcttcttyttggagtctcagggcaaaccctttcaagcagcgcctcccagtggccagaagctgaaatgacggcagtggtgccacctggtgaatgacccgggaagctgtg

SEQ ID NO: 33141 - DNA, 201 bp, Homo sapiens
ggacatgttcaggtgctgtttgcctgcgtgtgccgtgaacttcaagtgtttacatgagctggtgaaacatgaagaaaaccgcctggtctttgaggactcaraggaactggcagctcagctgcagatgcttttctcaaactttcctgatcctgaaggcaagctaaaccagttccggaagaacctgcgggagtcgcagcagct

SEQ ID NO: 33142 - DNA, 201 bp, Homo sapiens
gggatgagagctgggtgcagactgtgctccctttggttatggacacataactcctgggccagaggctaaaaccccagggcccctgctgtccttcccgcagyttcttcttggagtctcagggcaaaccctttcaagcagcgcctcccagtggccagaagctgaaatgacggcagtggtgccacctggtgaatgacccgggaa

SEQ ID NO: 33143 - DNA, 201 bp, Homo sapiens
tggcctggacctgcccatgaaggtggtggacatgttcaggtgctgtttgcctgcgtgtgccgtgaacttcaagtgtttacatgagctggtgaaacatgaaraaaaccgcctggtctttgaggactcagaggaactggcagctcagctgcagatgcttttctcaaactttcctgatcctgaaggcaagctaaaccagttccg

SEQ ID NO: 33144 - DNA, 201 bp, Homo sapiens; identical to SEQ ID NO: 33140

SEQ ID NO: 33145 - DNA, 201 bp, Homo sapiens; identical to SEQ ID NO: 33142

SEQ ID NO: 33146 - DNA, 201 bp, Homo sapiens
gatggaggcggagcgctgctggggtgtgaagggtctcaagtccaagtgagggagctagggacttgggaggggttgttgttgggtcggggagctggggtcakccaggtggtgacctgggatggggtggggacaggcaatgaggtaagctctgctcttcagtattttgcagatgcttttctcaaactttcctgatcctgaagg

SEQ ID NO: 33147 - DNA, 201 bp, Homo sapiens
caggctgtagtttgtgatccttgattcagacagtttagcaaggctgaaaagaacacccccttgttacccacagatgggtgggactgtgttggccagaggcygagaggagggtgctcacaggggaacgtacatcatgtagaggccggaaggtgctccagggcaccaagtgtgggaaagtgggacatacggggaagtttccag

SEQ ID NO: 33148 - DNA, 201 bp, Homo sapiens
aagctttatttacaaacacaggctgtgggctggatttggcctgcaggctgtagtttgtgatccttgattcagacagtttagcaaggctgaaaagaacaccwccttgttacccacagatgggtgggactgtgttggccagaggccgagaggagggtgctcacaggggaacgtacatcatgtagaggccggaaggtgctccag

SEQ ID NO: 33149 - DNA, 201 bp, Homo sapiens
agcatgtcaagatggaggcggagcgctgctggggtgtgaagggtctcaagtccaagtgagggagctagggacttgggaggggttgttgttgggtcggggasctggggtcatccaggtggtgacctgggatggggtggggacaggcaatgaggtaagctctgctcttcagtattttgcagatgcttttctcaaactttcctg

SEQ ID NO: 33150 - DNA, 201 bp, Homo sapiens
tacggggaagtttccagaaagcatgtcaagatggaggcggagcgctgctggggtgtgaagggtctcaagtccaagtgagggagctagggacttgggagggkttgttgttgggtcggggagctggggtcatccaggtggtgacctgggatggggtggggacaggcaatgaggtaagctctgctcttcagtattttgcagatg

SEQ ID NO: 33151 - DNA, 201 bp, Homo sapiens
taaagctttatttacaaacacaggctgtgggctggatttggcctgcaggctgtagtttgtgatccttgattcagacagtttagcaaggctgaaaagaacamccccttgttacccacagatgggtgggactgtgttggccagaggccgagaggagggtgctcacaggggaacgtacatcatgtagaggccggaaggtgctcc

SEQ ID NO: 33152 - DNA, 201 bp, Homo sapiens
aaaagaacacccccttgttacccacagatgggtgggactgtgttggccagaggccgagaggagggtgctcacaggggaacgtacatcatgtagaggccggraggtgctccagggcaccaagtgtgggaaagtgggacatacggggaagtttccagaaagcatgtcaagatggaggcggagcgctgctggggtgtgaagggt

SEQ ID NO: 33153 - DNA, 201 bp, Homo sapiens
ataaagctttatttacaaacacaggctgtgggctggatttggcctgcaggctgtagtttgtgatccttgattcagacagtttagcaaggctgaaaagaacscccccttgttacccacagatgggtgggactgtgttggccagaggccgagaggagggtgctcacaggggaacgtacatcatgtagaggccggaaggtgctc

SEQ ID NO: 33154 - DNA, 201 bp, Homo sapiens
gcgggcttggctttgtgaggaaccgaatgtgtccagggatgtggcagctgcagcgagcttggctttgtgaggaaccgagtgttgtccacgttgggggaacrtcatacttgatacacacgtttttatttgcacaaaccagaattttcatgtctgatttatggtgattttcttaagaaccagaactgctggcagaaagggggc

SEQ ID NO: 33155 - DNA, 201 bp, Homo sapiens
ttagcaaggctgaaaagaacacccccttgttacccacagatgggtgggactgtgttggccagaggccgagaggagggtgctcacaggggaacgtacatcaygtagaggccggaaggtgctccagggcaccaagtgtgggaaagtgggacatacggggaagtttccagaaagcatgtcaagatggaggcggagcgctgctgg

SEQ ID NO: 33156 - DNA, 201 bp, Homo sapiens
actctgttgtggtgtgaaagtagccacagatcatctgtagattaaggggtgtggctttgttccaataaagctttatttacaaacacaggctgtgggctggmtttggcctgcaggctgtagtttgtgatccttgattcagacagtttagcaaggctgaaaagaacacccccttgttacccacagatgggtgggactgtgttg

SEQ ID NO: 33157 - DNA, 201 bp, Homo sapiens
ctgcagtactcctcatcctgcatttggtctccaggtgtcacctttctgccatgttcctaacactttgattcctgtcttgagaaaagcacctgctgcaccayaagcccagggatgtggcagctgcagcgggcttggctttgtgaggaaccgagtgtgtccagggatgtggcagctgccgcgggcttggctttgtgaggaacc

SEQ ID NO: 33158 - DNA, 201 bp, Homo sapiens
agacagtttagcaaggctgaaaagaacacccccttgttacccacagatgggtgggactgtgttggccagaggccgagaggagggtgctcacaggggaacgkacatcatgtagaggccggaaggtgctccagggcaccaagtgtgggaaagtgggacatacggggaagtttccagaaagcatgtcaagatggaggcggagcg

SEQ ID NO: 33159 - DNA, 201 bp, Homo sapiens
agactgggtcccccagtctctgtcagaaccatggtactctgttgtggtgtgaaagtagccacagatcatctgtagattaaggggtgtggctttgttccaayaaagctttatttacaaacacaggctgtgggctggatttggcctgcaggctgtagtttgtgatccttgattcagacagtttagcaaggctgaaaagaacac

SEQ ID NO: 33160 - DNA, 201 bp, Homo sapiens
atccttgattcagacagtttagcaaggctgaaaagaacacccccttgttacccacagatgggtgggactgtgttggccagaggccgagaggagggtgctcrcaggggaacgtacatcatgtagaggccggaaggtgctccagggcaccaagtgtgggaaagtgggacatacggggaagtttccagaaagcatgtcaagatg

SEQ ID NO: 33161 - DNA, 201 bp, Homo sapiens
aggctgtagtttgtgatccttgattcagacagtttagcaaggctgaaaagaacacccccttgttacccacagatgggtgggactgtgttggccagaggccragaggagggtgctcacaggggaacgtacatcatgtagaggccggaaggtgctccagggcaccaagtgtgggaaagtgggacatacggggaagtttccaga

SEQ ID NO: 33162 - DNA, 201 bp, Homo sapiens
tgattcagacagtttagcaaggctgaaaagaacacccccttgttacccacagatgggtgggactgtgttggccagaggccgagaggagggtgctcacaggkgaacgtacatcatgtagaggccggaaggtgctccagggcaccaagtgtgggaaagtgggacatacggggaagtttccagaaagcatgtcaagatggaggc

SEQ ID NO: 33163 - DNA, 201 bp, Homo sapiens
gtgtggaggtcgttggagtcacttccccgtcaccagctcctgtgcctgccagtcggtgcccctcccgctccagccatgctctccgccctcgcccggcctgycagcgctgctctccgccgcagcttcagcacctcggcccagaacaatgctaaagtagctgtgctaggggcctctggaggcatcgggcagccactttcactt

SEQ ID NO: 33164 - DNA, 201 bp, Homo sapiens
ctggagtccccagaaagccaggcatgacccgggacgacctgttcaacaccaatgccacgattgtggccaccctgaccgctgcctgtgcccagcactgccckgaagccatgatctgcgtcattgccaatccggttaattccaccatccccatcacagcagaagttttcaagaagcatggagtgtacaaccccaacaaaatct

SEQ ID NO: 33165 - DNA, 201 bp, Homo sapiens
gggacgacctgttcaacaccaatgccacgattgtggccaccctgaccgctgcctgtgcccagcactgcccggaagccatgatctgcgtcattgccaatccrgttaattccaccatccccatcacagcagaagttttcaagaagcatggagtgtacaaccccaacaaaatcttcggcgtgacgaccctggacatcgtcagag

SEQ ID NO: 33166 - DNA, 201 bp, Homo sapiens
gcgcccgctttgtcttctcccttgtggatgcaatgaatggaaaggaaggtgttgtggaatgttccttcgttaagtcacaggaaacggaatgtacctacttytccacaccgctgctgcttgggaaaaagggcatcgagaagaacctgggcatcggcaaagtctcctcttttgaggagaagatgatctcggatgccatccccg

SEQ ID NO: 33167 - DNA, 201 bp, Homo sapiens
tattgacatcatcatgccttccaaattgtgggtggctctgtgggcgcatcatttcttccctgtgagagccaactttagagtgtctgctacctcttcattaycaatcagaattagatgatgtttaactgttagactgaagcgtgacgctttcatcagtagcttcaagaaagtctaaattgttaatttatggaattggacaca

SEQ ID NO: 33168 - DNA, 201 bp, Homo sapiens
cagtattcagtttacccgtacatgctcctcccgcccctcctgttggcacccttgcatcgcccaggcctgattcctcctgggggtagttcacccccacgggktcatagttcagcggcgaatgccaggcagctgttttctggctgagcaaacagcacctttctcattgagcttcctctactgacctctgtcccccttgggatt

SEQ ID NO: 33169 - DNA, 201 bp, Homo sapiens
catcatttcttccctgtgagagccaactttagagtgtctgctacctcttcattaccaatcagaattagatgatgtttaactgttagactgaagcgtgacgytttcatcagtagcttcaagaaagtctaaattgttaatttatggaattggacacagtattcagtttacccgtacatgctcctcccgcccctcctgttggca

SEQ ID NO: 33170 - DNA, 201 bp, Homo sapiens
ggaaaggaaggtgttgtggaatgttccttcgttaagtcacaggaaacggaatgtacctacttctccacaccgctgctgcttgggaaaaagggcatcgagargaacctgggcatcggcaaagtctcctcttttgaggagaagatgatctcggatgccatccccgagctgaaggcctccatcaagaagggggaagatttcgtg

SEQ ID NO: 33171 - DNA, 201 bp, Homo sapiens
gcagagacagcccatagccagaactgtgggtagaccagggttggggtgtgcggtttgggacagcccaaaccccagccgctgtgtcaaggcctaggacgccrtgctgccatcaaaagggggttccaggtttccatcagtggcctaaagaagggacttcttgttgtactgaggagtgcggaattaaagagatttgactccctt

SEQ ID NO: 33172 - DNA, 201 bp, Homo sapiens
attaaagagatttgactccctttagtattgggggcagtccgttccccagacactgtggcctctgaagtggaaactgaaagctgcatacctgggaaagaacyttctaggaataggcaatggccttcagtggaagagggagggctggaggtgtgcccagtacttggatgttcatctgtccacaacagctttttgtttttttaa

SEQ ID NO: 33173 - DNA, 201 bp, Homo sapiens
agatttgactccctttagtattgggggcagtccgttccccagacactgtggcctctgaagtggaaactgaaagctgcatacctgggaaagaactttctagsaataggcaatggccttcagtggaagagggagggctggaggtgtgcccagtacttggatgttcatctgtccacaacagctttttgtttttttaaaaaagct

SEQ ID NO: 33174 - DNA, 201 bp, Homo sapiens
tccccatcacagcagaagttttcaagaagcatggagtgtacaaccccaacaaaatcttcggcgtgacgaccctggacatcgtcagagccaacacctttgtkgcagagctgaagggtttggatccagctcgagtcaacgtccctgtcattggtggccatgctgggaagaccatcatccccctgatctctcagtgcaccccca

SEQ ID NO: 33175 - DNA, 108 bp, Homo sapiens
aaatggattttatcataaaggatgacatcgttttcttctacaattaatacatgttcattgtataaaacccaaaaagcagctaaaaaataaagcgggaaagraactact

SEQ ID NO: 33176 - DNA, 201 bp, Homo sapiens; identical to SEQ ID NO: 33163

SEQ ID NO: 33177 - DNA, 201 bp, Homo sapiens; identical to SEQ ID NO: 33164

SEQ ID NO: 33178 - DNA, 201 bp, Homo sapiens; identical to SEQ ID NO: 33165

SEQ ID NO: 33179 - DNA, 201 bp, Homo sapiens; identical to SEQ ID NO: 33166

SEQ ID NO: 33180 - DNA, 201 bp, Homo sapiens
aaaagccgtccttgattttatttttcaaggtcccttctgtaaatgctgtgctttcttccctgtgagagccaactttagagtgtctgctacctcttcattaycaatcagaattagatgatgtttaactgttagactgaagcgtgacgctttcatcagtagcttcaagaaagtctaaattgttaatttatggaattggacaca

SEQ ID NO: 33181 - DNA, 201 bp, Homo sapiens; identical to SEQ ID NO: 33168

SEQ ID NO: 33182 - DNA, 201 bp, Homo sapiens
ttttaatttgctttggtgatgattactgtattgacatcatcatgccttccaaattgtgggtggctctgtgggcgcatcaataaaagccgtccttgattttrtttttcaaggtcccttctgtaaatgctgtgctttcttccctgtgagagccaactttagagtgtctgctacctcttcattaccaatcagaattagatgatg

SEQ ID NO: 33183 - DNA, 201 bp, Homo sapiens
tgtgctttcttccctgtgagagccaactttagagtgtctgctacctcttcattaccaatcagaattagatgatgtttaactgttagactgaagcgtgacgytttcatcagtagcttcaagaaagtctaaattgttaatttatggaattggacacagtattcagtttacccgtacatgctcctcccgcccctcctgttggca

SEQ ID NO: 33184 - DNA, 201 bp, Homo sapiens; identical to SEQ ID NO: 33170

SEQ ID NO: 33185 - DNA, 201 bp, Homo sapiens; identical to SEQ ID NO: 33171

SEQ ID NO: 33186 - DNA, 201 bp, Homo sapiens; identical to SEQ ID NO: 33172

SEQ ID NO: 33187 - DNA, 201 bp, Homo sapiens; identical to SEQ ID NO: 33173

SEQ ID NO: 33188 - DNA, 201 bp, Homo sapiens; identical to SEQ ID NO: 33174

SEQ ID NO: 33189 - DNA, 108 bp, Homo sapiens; identical to SEQ ID NO: 33175

SEQ ID NO: 33190 - DNA, 201 bp, Homo sapiens
ccccagccaaggtcatccatgataactttggcatcatggagggattcatgaccacagtccatgccatcactgccacccagaagacgaagacaacctctctsggaaactgggatgacagctatggaactctacagaacatcacccctgcaattaactagtgttaccaaggcaaagtcatccccacactgaatgagaacctca

SEQ ID NO: 33191 - DNA, 201 bp, Homo sapiens
agcacccccagccaaggtcatccatgataactttggcatcatggagggattcatgaccacagtccatgccatcactgccacccagaagacgaagacaaccyctctgggaaactgggatgacagctatggaactctacagaacatcacccctgcaattaactagtgttaccaaggcaaagtcatccccacactgaatgagaa

SEQ ID NO: 33192 - DNA, 201 bp, Homo sapiens
agtaaacggatttggccttactgggtgcctgatcactagtacagttttaactctagcaaagtgattattgtcaccatcaatgacctcttcattgacctcarttacatggtccacatgttccagtatgattccacccatggcaagttccacgcaccatcaaggctgagaatgggaagcttgtcatcaatggcaatcccatta

SEQ ID NO: 33193 - DNA, 158 bp, Homo sapiens
cctccaactttaacagtgacatcgacccttccactttcgacgttggggctggcattgtcctcagtgatcactctgtcaagctcatattctgatatgacaakgaatttggctacagcaacagggtgatagactttatggtacacatggcctccaaggag

SEQ ID NO: 33194 - DNA, 190 bp, Homo sapiens
atcgtggggctacactgagcaccaagttgtctcctccaactttaacagtgacatcgacccttccactttcgacgttggggctggcattgtcctcagtgatmactctgtcaagctcatattctgatatgacaaggaatttggctacagcaacagggtgatagactttatggtacacatggcctccaaggag

SEQ ID NO: 33195 - DNA, 194 bp, Homo sapiens
gaacatcgtggggctacactgagcaccaagttgtctcctccaactttaacagtgacatcgacccttccactttcgacgttggggctggcattgtcctcagygatcactctgtcaagctcatattctgatatgacaaggaatttggctacagcaacagggtgatagactttatggtacacatggcctccaaggag

SEQ ID NO: 33196 - DNA, 201 bp, Homo sapiens
tggttgtgaatcatgagaaaaacaaaaacaacttcacaatcatcagcaatgcttcctgttctaccaactgcttagcacccccagccaaggtcatccatgayaactttggcatcatggagggattcatgaccacagtccatgccatcactgccacccagaagacgaagacaacctctctgggaaactgggatgacagctatg

SEQ ID NO: 33197 - DNA, 201 bp, Homo sapiens
gccaaatatggtaacaccaagaaggtaatgaaggaggcacggaagggcccctcaagaacatcgtggggctacactgagcaccaagttgtctcctccaactwtaacagtgacatcgacccttccactttcgacgttggggctggcattgtcctcagtgatcactctgtcaagctcatattctgatatgacaaggaatttggc

SEQ ID NO: 33198 - DNA, 125 bp, Homo sapiens
gttgaagtgaaggccagagtaaacrgatttggccttactgggtgcctgatcactagtacagttttaactctagcaaagtgattattgtcaccatcaatgacctcttcattgacctcaattacatg

SEQ ID NO: 33199 - DNA, 201 bp, Homo sapiens
ggttgtggacctgacctgccatataaagaaacctgccaaatatggtaacaccaagaaggtaatgaaggaggcacggaagggcccctcaagaacatcgtggkgctacactgagcaccaagttgtctcctccaactttaacagtgacatcgacccttccactttcgacgttggggctggcattgtcctcagtgatcactctgt

SEQ ID NO: 33200 - DNA, 201 bp, Homo sapiens
ggggtcatgatttctcccccttctgctgatgcccccatgtttgtgatggttgtgaatcatgagaaaaacaaaaacaacttcacaatcatcagcaatgcttyctgttctaccaactgcttagcacccccagccaaggtcatccatgataactttggcatcatggagggattcatgaccacagtccatgccatcactgccacc

SEQ ID NO: 33201 - DNA, 201 bp, Homo sapiens
caacatgttggttgtggacctgacctgccatataaagaaacctgccaaatatggtaacaccaagaaggtaatgaaggaggcacggaagggcccctcaagarcatcgtggggctacactgagcaccaagttgtctcctccaactttaacagtgacatcgacccttccactttcgacgttggggctggcattgtcctcagtga

SEQ ID NO: 33202 - DNA, 201 bp, Homo sapiens
ggcatcatggagggattcatgaccacagtccatgccatcactgccacccagaagacgaagacaacctctctgggaaactgggatgacagctatggaactcyacagaacatcacccctgcaattaactagtgttaccaaggcaaagtcatccccacactgaatgagaacctcactggcatggccttctgtgtccccactgcc

SEQ ID NO: 33203 - DNA, 201 bp, Homo sapiens
ctttggcatcatggagggattcatgaccacagtccatgccatcactgccacccagaagacgaagacaacctctctgggaaactgggatgacagctatggarctctacagaacatcacccctgcaattaactagtgttaccaaggcaaagtcatccccacactgaatgagaacctcactggcatggccttctgtgtccccac

SEQ ID NO: 33204 - DNA, 201 bp, Homo sapiens
ggagacttaaagtggctggttaattcaccaagcctgtttgctaacaagtttgagcttaatacctacccccttactgtggaatgcctagaactgaggcatcrcgaaagaaccctcaatcagagtgaaactgcgatacaacccagctggtatttttgagctattcatgagctactcatgactgaagggaaactgcagctggga

SEQ ID NO: 33205 - DNA, 201 bp, Homo sapiens
cactgcgctcattccctgaatggcagtaaccagggggcgggggtggcatgggaaatgaaagaaagagatatgggaaactaaatctgccgggggaaagagasttaccggagttttagcaaaacagctagcagatgcaaacggggaggcagagggaggagggaaggctgggcttcagcaacctgccacggggatttaaacaaa

SEQ ID NO: 33206 - DNA, 201 bp, Homo sapiens
aacccagctggtatttttgagctattcatgagctactcatgactgaagggaaactgcagctgggaagaggagcctgtttttgtgagagacttttgccttcrtaatgttaaccgtttcaggaccacgtttatagcttcaggacctggctacgtaattatacttaaaatatccactggacactgtgaaatacactaacaggat

SEQ ID NO: 33207 - DNA, 134 bp, Homo sapiens
agtaagctcttgttttgaaaaacagtggggtggkgccaaaaaagcattacaatggagctgggatggatgaggctttcttttatttgagatgtcacttgtgtcacgtttcctgaaacagcacgttggaaaacaga

SEQ ID NO: 33208 - DNA, 201 bp, Homo sapiens
cagaccctttgaggctgactcaagtttgcacatcttttatcaatggaaaaacacgtttcctgtggaaaaacaaactaatgatccatgagaagtcttcttgyaaggaatacttgacccagagccactacatcacagcccctttatctaaggaagaagctgactttcccttggcatatataatggtcatccatcatcactttg

SEQ ID NO: 33209 - DNA, 201 bp, Homo sapiens
cccagagccactacatcacagcccctttatctaaggaagaagctgactttcccttggcatatataatggtcatccatcatcactttgacacctttgcaagrctcttcagggctatttacatgccccaaaatatctactgtgttcatgtggatgaaaaagcaacaactgaatttaaagatgcggtagagcaactattaagct

SEQ ID NO: 33210 - DNA, 201 bp, Homo sapiens
aaaaggaaacataagagctttttcactctaaaaatcttggcaataatgtcaacaccagaaagcctcctctggagaatcttacagagtgattgtagtttaayacaggaacacacagggctgtgtagcatgataccaggcccaggagatcagtaattacaaattaagggttaaatcagagattattcaacagagagggagaaa

SEQ ID NO: 33211 - DNA, 201 bp, Homo sapiens
aatttctctgggtgagaattgggactctgttgctggtcttctcagttcatttcctgaggtggatttactgagagaaggtgaaataaagccatatttagtayaccagagaaggtagattttaagaatggtctcagtgttaatactgagaaaaagtcctgtcagttcagaaaaaatgtgaagtctactttagtattcctgtaa

SEQ ID NO: 33212 - DNA, 201 bp, Homo sapiens
aaaccaacaaggaaatagttcagtatctgaaaggatttaaaggtaaaaatatcaccccaggggtgctgcccccagctcatgcaattggacggactaaataygtccaccaagagcacctgggcaaagagctttcctatgtgataagaacaacagcgttgaaaccgcctcccccccataatctcacaatttactttggctctg

SEQ ID NO: 33213 - DNA, 201 bp, Homo sapiens; identical to SEQ ID NO: 33204

SEQ ID NO: 33214 - DNA, 201 bp, Homo sapiens; identical to SEQ ID NO: 33206

SEQ ID NO: 33215 - DNA, 201 bp, Homo sapiens
atagttcagcatctgaaaggatttaaagggaaaaatatcaccccaggggtgctgcctcctgaccatgcaattaagcgaactaaatatgtccaccaagagcrtacagataaaggtggcttttttgtgaaaaatactaatattttgaaaacttcacctccacatcagctgaccatctactttggcactgcctatgtggcgctt

SEQ ID NO: 33216 - DNA, 201 bp, Homo sapiens
agagaaaatgccagtctttttgtgggaaaatatattaccatcacctttgcgaagtgtcccttgcaaggattacctgacccagaatcactacatcacaagtsccctgtcggaagaagaggctgcattccctttggcctatgtcatggtcatccataaggactttgacacctttgaaaggctctttagggctatctatatgcc

SEQ ID NO: 33217 - DNA, 201 bp, Homo sapiens; identical to SEQ ID NO: 33210

SEQ ID NO: 33218 - DNA, 115 bp, Homo sapiens
tgcagaccaaagtgmgagagggacgcaccgcatctccaggcacatccaaaaaggatggacgagacaccgaagcagaggatacaggaggattaaaggattcaggaaagcaagcagc

SEQ ID NO: 33219 - DNA, 201 bp, Homo sapiens
aaggtggcttttttgtgaaaaatactaatattttgaaaacttcacctccacatcagctgaccatctactttggcactgcctatgtggcgcttaccagagastttgtcgactttgttctacgtgaccaaagggccattgatctactacaatggtcaaaagatacctatagtcctgatgagcatttctgggtgacacttaata

SEQ ID NO: 33220 - DNA, 201 bp, Homo sapiens; identical to SEQ ID NO: 33211

SEQ ID NO: 33221 - DNA, 201 bp, Homo sapiens; identical to SEQ ID NO: 33204

SEQ ID NO: 33222 - DNA, 201 bp, Homo sapiens
gcaggggaggggacatagttactagactctggccgggacaagaggctgaggttaaggtcttagagccgatgacttgcagaatggtcacctcacccacttgyaatttcatggtgggaacaggtggaccccctggaatcagaacctctctgaggacatctgtttttgtgtagacacaggttgcaggttagcaggagaacaggc

SEQ ID NO: 33223 - DNA, 201 bp, Homo sapiens; identical to SEQ ID NO: 33206

SEQ ID NO: 33224 - DNA, 201 bp, Homo sapiens
aggaccagaaccgtgaactgaagggacagggaacagccagacgagagcttcagccatcacgaggatgatttcggaacctggagaaaatgtaagttaaatayatctacactctgatcctatctcaagagagagatattttactcatttcctggttgtgaatgatgggctcttggaagcactgtctttttagcgcgtctctta

SEQ ID NO: 33225 - DNA, 201 bp, Homo sapiens
cacttcagaaatgtgtcacagaaaagtgaaaatgcaacctagtggtaagtgaagaggggaagaagaaagaaaaaggaccagaaccgtgaactgaagggacrgggaacagccagacgagagcttcagccatcacgaggatgatttcggaacctggagaaaatgtaagttaaatatatctacactctgatcctatctcaagag

SEQ ID NO: 33226 - DNA, 201 bp, Homo sapiens
acagccagacgagagcttcagccatcacgaggatgatttcggaacctggagaaaatgtaagttaaatatatctacactctgatcctatctcaagagagagmtattttactcatttcctggttgtgaatgatgggctcttggaagcactgtctttttagcgcgtctcttatctctgccctgatttttgtatttgtttacaat

SEQ ID NO: 33227 - DNA, 139 bp, Homo sapiens
gcactacatatttattgatagaatatctctccaggcagyattcacatgctttaaactgaagctcgtagcttggcagtgcagtttaagcaaataaactcaggctgttgaacacaatgattaacaggaagcaggggagggg

SEQ ID NO: 33228 - DNA, 201 bp, Homo sapiens; identical to SEQ ID NO: 33210

SEQ ID NO: 33229 - DNA, 201 bp, Homo sapiens; identical to SEQ ID NO: 33211

SEQ ID NO: 33230 - DNA, 123 bp, Homo sapiens
gcactacatatttattgatagamtatctctccaggcagtattcacatgctttaaactgaagctcgtagcttggcagtgcagtttaagcaaataaactcaggctgttgaacacaatgattaaca

SEQ ID NO: 33231 - DNA, 201 bp, Homo sapiens; identical to SEQ ID NO: 33204

SEQ ID NO: 33232 - DNA, 201 bp, Homo sapiens; identical to SEQ ID NO: 33206

SEQ ID NO: 33233 - DNA, 201 bp, Homo sapiens; identical to SEQ ID NO: 33210

SEQ ID NO: 33234 - DNA, 201 bp, Homo sapiens; identical to SEQ ID NO: 33211

SEQ ID NO: 33235 - DNA, 201 bp, Homo sapiens
gaatcttttacctggtatgtgacagagcttctcaccaccaccatgacaaaccaggaaaaatgggcccacctcagcccttcggaattttcccaacttcagawatatgctgagtattctacaaagaaattaaaggatgttcttgaagaattccatggtaatggtgtgcttgcaaagtataatcctgaagggaaacaagacatt

SEQ ID NO: 33236 - DNA, 201 bp, Homo sapiens
ttccatggtaatggtgtgcttgcaaagtataatcctgaagggaaacaagacattcttaaccaagtctgagaatgaataaaggtgccatcacccctccccgractacttctcctgcaaatacgtgttccccagaagtaatccatctgaaggacattgtctgttacctgtctctgcttgaaagaggaagacctgaggataagc

SEQ ID NO: 33237 - DNA, 201 bp, Homo sapiens; identical to SEQ ID NO: 33235

SEQ ID NO: 33238 - DNA, 201 bp, Homo sapiens
aaaaacacccagagaaattcaacagtagaatgaagaacaaattttggtattttgagtttggcacatctgaaactttctcagccacctgcaagaagctacaygaatctgtagaaatagaatgtgatggagtacagatagatttaataaacatctctctggaaggaattgctattttgaatataccaagcatgcatggaggat

SEQ ID NO: 33239 - DNA, 201 bp, Homo sapiens
aatgcaaattgatggggagccatggatgcagaccccatgcacaataaaaattacacacaagaaccaagccccaatgctgatgggcccgcctccaaaaaccrgtttattctgctccctcgtcaaaaggacaagaaaccgaagcaaggaataatcctgtgttgtttcactcttagaaattgaattagcataattgggccatgg

SEQ ID NO: 33240 - DNA, 201 bp, Homo sapiens
aataatactgagctcttggaagcgaatcatgcatgcaattagctccctcctcctcacctactccactcccatctttatgacatttcaaatgtttatttggraacaacagcctagatcactgttgaaggtgttcatggcatagttggagtctctgactgtttaaagaaatcacagaacagtacttttcttttagtgtttcat

SEQ ID NO: 33241 - DNA, 201 bp, Homo sapiens
tcagtgaccagctgctggaggtggtcggcttggaaggagccatggagatggggcaaatatacacaggcctgaaaagtgctggccggcggctggctcagtgytcctgcgtggtcatcaggacgagcaagtctctgccaatgcaaattgatggggagccatggatgcagaccccatgcacaataaaaattacacacaagaacc

SEQ ID NO: 33242 - DNA, 201 bp, Homo sapiens
atgcttgagagaaatgggttaatgcataattaattaagcattgtggagcaaatttagggttcctgtgattaattttgtgatgactaaaatgctggaaagcragtgagttgcccattaattatgattaaaattctcacctttcacagacagacaataagccagacaacacaatcaaagctcaatagatgatttcttgctttt

SEQ ID NO: 33243 - DNA, 201 bp, Homo sapiens
ttagcaacaagtttcctcattctagtccaatggtaaaaagtaagcctgctctcctatcaggcggtctgagaatgaataaaggtgccatcacccctccccgractacttctcctgcaaatacgtgttccccagaagtaatccatctgaaggacattgtctgttacctgtctctgcttgaaagaggaagacctgaggataagc

SEQ ID NO: 33244 - DNA, 201 bp, Homo sapiens
gctcggagctagaaaatatcatcagtcagatgatgcatgttgcagaataccttgagtgggatgtcactgaacttaatccaatcctccatgaaatgatggargaaattgactatgatcatgatggaaccgtgtctctggaggaatggattcaaggaggaatgacaacgattccacttcttgtgctcctgggcttagaaaata

SEQ ID NO: 33245 - DNA, 201 bp, Homo sapiens; identical to SEQ ID NO: 33235

SEQ ID NO: 33246 - DNA, 201 bp, Homo sapiens; identical to SEQ ID NO: 33238

SEQ ID NO: 33247 - DNA, 201 bp, Homo sapiens; identical to SEQ ID NO: 33239

SEQ ID NO: 33248 - DNA, 201 bp, Homo sapiens; identical to SEQ ID NO: 33240

SEQ ID NO: 33249 - DNA, 201 bp, Homo sapiens; identical to SEQ ID NO: 33241

SEQ ID NO: 33250 - DNA, 201 bp, Homo sapiens; identical to SEQ ID NO: 33242

SEQ ID NO: 33251 - DNA, 201 bp, Homo sapiens; identical to SEQ ID NO: 33243

SEQ ID NO: 33252 - DNA, 201 bp, Homo sapiens
gctcggagctagaaaatatcatcagtcagatgatgcatgttgcagaataccttgagtgggatgtcactgaacttaatccaatcctccatgaaatgatggargaaattgactatgatcatgatggaaccgtgtctctggaggaatggattcaaggaggaatgacaacgattccacttcttgtgctcctgggcttagaaaatg

SEQ ID NO: 33253 - DNA, 201 bp, Homo sapiens
ggcacggctgggctgtggggctcaggctggctccgctcttggtggtggctgtgacctgggtccgggaggggcgggcttgccgcagcctcggggtggccacrctgcagcttgggggccctggcatccccatccccactgagcttcatggttgtgggacccagagtacttggaggggctgggcacccctcattttcatttctc

SEQ ID NO: 33254 - DNA, 201 bp, Homo sapiens
  misc_feature (1)...(201): n = A,T,C or G
ggaccacctcacctgcagattagacccccaagccaagacctgaaggatgggacccaggaggaggccacaaaaaggcaagaagcccctgtggatccccgccyggaaggagatccgcagaggacagtcatcagctggaggggagcggtgatcgagcctgagcagggcaccgagctnnnnnnnnnnnnnnnnnnnncagaagtg

SEQ ID NO: 33255 - DNA, 169 bp, Homo sapiens
cagcctcggggtggccacactgcagcttgggggccctggcatccccatccccactgagcttcatggttgtgggacccagagtacttggaggggctgggcamccctcattttcatttctcagggcctgtctagggagggtctctgctgtgggcccagcatccccccagtt

SEQ ID NO: 33256 - DNA, 201 bp, Homo sapiens
accacggcctgcccgccagccacatggagctggcccaggagctcatggagacttgttaccagatgaaccggcagatggagacggggctgagtcccgagatygtgcacttcaacctttacccccagccgggccgtcgggacgtggaggtcaagccagcagacaggcacaacctgctgcggccagagaccgtggagagcctgt

SEQ ID NO: 33257 - DNA, 201 bp, Homo sapiens
tgggagattctgcagagcttcagccgattcacacgggtgagcacctgtcctcgccccgcgtggtcacggccaccgggccacaggcacggctgggctgtggrgctcaggctggctccgctcttggtggtggctgtgacctgggtccgggaggggcgggcttgccgcagcctcggggtggccacactgcagcttgggggccct

SEQ ID NO: 33258 - DNA, 201 bp, Homo sapiens
ggggccccttgggccgtcgccaccactgtagtcatgtacccaccgccgccgccgccgcctcatcgggacttcatctcggtgacgctgagctttggcgagarctatgacaacagcaagagttggcggcggcgctcgtgctggaggaaatggaagcaactgtcgagattgcagcggaatatgattctcttcctccttgccttt

SEQ ID NO: 33259 - DNA, 201 bp, Homo sapiens
tctgcagagcttcagccgattcacacgggtgagcacctgtcctcgccccgcgtggtcacggccaccgggccacaggcacggctgggctgtggggctcaggytggctccgctcttggtggtggctgtgacctgggtccgggaggggcgggcttgccgcagcctcggggtggccacactgcagcttgggggccctggcatccc

SEQ ID NO: 33260 - DNA, 201 bp, Homo sapiens; identical to SEQ ID NO: 33254
  misc_feature (1)...(201): n = A,T,C or G

SEQ ID NO: 33261 - DNA, 201 bp, Homo sapiens
caggggaccgcaaataccaggactggggctgggagattctgcagagcttcagccgattcacacgggtcccctcgggtggctattcttccatcaacaatgtycaggatcctcagaagcccgagcctagggacaagatggagagcttcttcctgggggagacgctcaagtatctgttcttgctcttctccgatgacccaaacc

SEQ ID NO: 33262 - DNA, 201 bp, Homo sapiens
agcccgagcctagggacaagatggagagcttcttcctgggggagacgctcaagtatctgttcttgctcttctccgatgacccaaacctgctcagcctggaygcctacgtgttcaacaccgaagcccaccctctgcctatctggacccctgcctagggtggatggctgctggtgtggggacttcgggtgggcagaggcacct

SEQ ID NO: 33263 - DNA, 201 bp, Homo sapiens; identical to SEQ ID NO: 33256

SEQ ID NO: 33264 - DNA, 201 bp, Homo sapiens
tgtgggccgaccagaggggggcttcgaggtggtccctggtactggggtgaccgagtggacagcccagggtgcagctctgcccgggctcgtgaagcctcagrtgtccccaatccaagggtctggaggggctgccgtgactccagaggcctgaggctccagggctggctctggtgtttacaagctggactcagggatcctcct

SEQ ID NO: 33265 - DNA, 201 bp, Homo sapiens; identical to SEQ ID NO: 33258

SEQ ID NO: 33266 - DNA, 201 bp, Homo sapiens
tgtggaaaaggcctgtcagctcatcaacaggcaggaccggactcacttctcccaccattatgagaacttctaggccccttcccgggggttctgcccactgyccagttgagcagaggtttgagcccacacctcacctctgttcttcctatttctggctgcctcagccttctctgatttcccacctcccaaccttgttccagg

SEQ ID NO: 33267 - DNA, 201 bp, Homo sapiens
tatgagaacttctaggccccttcccgggggttctgcccactgtccagttgagcagaggtttgagcccacacctcacctctgttcttcctatttctggctgmctcagccttctctgatttcccacctcccaaccttgttccaggtggccatagtcagtcaccatgtgtgggctcagggacccccaggaccaggatgtgtctc

SEQ ID NO: 33268 - DNA, 105 bp, Homo sapiens
gtcagccactagtgtgaggcctggtgagcctgctcaggaggggcagaaacagagggtgtggaagcttctggaggaggttggctggggaagagaacggggtsgggg

SEQ ID NO: 33269 - DNA, 201 bp, Homo sapiens
agtactatgtgtgtgcatgtctgtatgtgtgttggggcgttgagtgtaaggatgcagtgggagcatggatgctggcatcttagaaccctccctactcccakacctcctcctcttctgggctccccactgtcagacgggctggcaaatgccttgcaggaggtagaggctggacccatggcaagccatttacagaaacccact

SEQ ID NO: 33270 - DNA, 201 bp, Homo sapiens
aaagtgaaacctctgcttccagacttcagaaacaaatctcagaagacaagctgacctgacaagtactatgtgtgtgcatgtctgtatgtgtgttggggcgktgagtgtaaggatgcagtgggagcatggatgctggcatcttagaaccctccctactcccatacctcctcctcttctgggctccccactgtcagacgggct

SEQ ID NO: 33271 - DNA, 201 bp, Homo sapiens
tgtgggctcagggacccccaggaccaggatgtgtctcagcctggagaaatggtgggggggcagtgtctagggactagagtgagaagtaggggagctactgrtttggggcaaagtgaaacctctgcttccagacttcagaaacaaatctcagaagacaagctgacctgacaagtactatgtgtgtgcatgtctgtatgtgtg

SEQ ID NO: 33272 - DNA, 201 bp, Homo sapiens
tactggtggttcttccagaccgtaccaggcctcacgggggttgtgctgctcctgatcctggccatcatgtatgtctttgcctcccaccacttccgccgccrcagtttccggggcttctggctgacccaccacctctacatcctgctctatgtcctgctcatcatccatggtagctttgccctgatccagctgccccgtttc

SEQ ID NO: 33273 - DNA, 201 bp, Homo sapiens
gccacatcggctgcgtggccgtgttctacgccatcgctggggggcttttcctggagagggcctactactacgcctttgccgcacatcacacgggcatcacrgacaccacccgcgtgggaatcatcctgtcgcggggcacagcagccagcatctctttcatgttctcctacatcttgctcaccatgtgccgcaacctcatca

SEQ ID NO: 33274 - DNA, 201 bp, Homo sapiens
cagtgtgggccatgtggtgaatgtgtacctgttctccatcagccccctcagcgtcctctcttgcctctttcctggcctcttccatgatgatgggtctgagytcccccagaagtattactggtggttcttccagaccgtaccaggcctcacgggggttgtgctgctcctgatcctggccatcatgtatgtctttgcctccca

SEQ ID NO: 33275 - DNA, 201 bp, Homo sapiens
ttgcagtcccgggctctggtgacgccgtggccgcagctggaagaggaaaacaaggatcagattggagaagtgatttatctaagatcccacagtggactggsagcagcactgagacctcagcctagtctcctgatccccaagcagggccctgcctaaggaacacactctgcagagtgctgggccaaagcagggttttccaac

SEQ ID NO: 33276 - DNA, 201 bp, Homo sapiens; identical to SEQ ID NO: 33266

SEQ ID NO: 33277 - DNA, 201 bp, Homo sapiens; identical to SEQ ID NO: 33267

SEQ ID NO: 33278 - DNA, 105 bp, Homo sapiens; identical to SEQ ID NO: 33268

SEQ ID NO: 33279 - DNA, 201 bp, Homo sapiens; identical to SEQ ID NO: 33269

SEQ ID NO: 33280 - DNA, 201 bp, Homo sapiens; identical to SEQ ID NO: 33270

SEQ ID NO: 33281 - DNA, 201 bp, Homo sapiens; identical to SEQ ID NO: 33271

SEQ ID NO: 33282 - DNA, 201 bp, Homo sapiens; identical to SEQ ID NO: 33272

SEQ ID NO: 33283 - DNA, 201 bp, Homo sapiens; identical to SEQ ID NO: 33273

SEQ ID NO: 33284 - DNA, 201 bp, Homo sapiens; identical to SEQ ID NO: 33274

SEQ ID NO: 33285 - DNA, 201 bp, Homo sapiens; identical to SEQ ID NO: 33273

SEQ ID NO: 33286 - DNA, 201 bp, Homo sapiens
agcacttggagatggcaatgctgaatctcaccctgtaggactcacacacgactccaacgggattgtgagaatcaagtcactctcatgggaagaatttttayatgggaaagcggataaaactttcattggactggaatgtttggagaatgttaatttccaaatcaggaaccacaaactgccctctaataagacatcggctat

SEQ ID NO: 33287 - DNA, 201 bp, Homo sapiens
cgggtcacagaaccaattcttttaccaggcagtaccactgctgtcatttcagcttctggccactgggaggtgctgctcgaaagggtttgccctgagactcyaagaagaagctgcgggaaggacagcaggggtcctggggttttatagcctctggcccaggagttatgtgtccataaccaaagggagcacagtctgcaccca

SEQ ID NO: 33288 - DNA, 201 bp, Homo sapiens
atcaaggccaaccaaagcttcccgggtcacagaaccaattcttttaccaggcagtaccactgctgtcatttcagcttctggccactgggaggtgctgctcraaagggtttgccctgagactccaagaagaagctgcgggaaggacagcaggggtcctggggttttatagcctctggcccaggagttatgtgtccataacca

SEQ ID NO: 33289 - DNA, 201 bp, Homo sapiens
gggtcctggggttttatagcctctggcccaggagttatgtgtccataaccaaagggagcacagtctgcacccagctctcatcccatcggagctgctgcgaytcccgcaggttcttccggaactggtttagcttgcccgcaggatcaggaaagtttgagaaaagcatctgcaaaaaaataaagagcagagcttacctcattg

SEQ ID NO: 33290 - DNA, 201 bp, Homo sapiens
gaagctgcgggaaggacagcaggggtcctggggttttatagcctctggcccaggagttatgtgtccataaccaaagggagcacagtctgcacccagctctmatcccatcggagctgctgcgactcccgcaggttcttccggaactggtttagcttgcccgcaggatcaggaaagtttgagaaaagcatctgcaaaaaaata

SEQ ID NO: 33291 - DNA, 201 bp, Homo sapiens
gcagcactccgcctccaacttgacatcacagtttctggaaacttccccgcatgtcccactttcccacacttggtgccctggagcacctcccggcctctacrtgctgcccattcccctgtgagcaccctcctctcggcctctggccaacgcagtcccacccatctgtgggtaacaagggggtgtcggtgttctttgcagcct

SEQ ID NO: 33292 - DNA, 201 bp, Homo sapiens
gtcacagaacagtaatacgctagcaggggcatggggcgtgaagaacagaagaagagaggaagcgtttccaagcctccagagaagaaatcaaggccaaccamagcttcccgggtcacagaaccaattcttttaccaggcagtaccactgctgtcatttcagcttctggccactgggaggtgctgctcgaaagggtttgccct

SEQ ID NO: 33293 - DNA, 201 bp, Homo sapiens
attgcctgtccccaccccatcccaggtcaccacctggctgaccccaggtccccgacccaacaacaacccctcccaagtccctaactccctcacttggactygagacccttcacaccccagcagcactccgcctccaacttgacatcacagtttctggaaacttccccgcatgtcccactttcccacacttggtgccctgga

SEQ ID NO: 33294 - DNA, 201 bp, Homo sapiens
cacctcccggcctctacgtgctgcccattcccctgtgagcaccctcctctcggcctctggccaacgcagtcccacccatctgtgggtaacaagggggtgtbggtgttctttgcagccttgctaaactgtctgaatcaaggatcacaaactacagcctgcaggccaaatccagcccacagcctgtgtttgtaaataaagttt

SEQ ID NO: 33295 - DNA, 201 bp, Homo sapiens
ggcatggggcgtgaagaacagaagaagagaggaagcgtttccaagcctccagagaagaaatcaaggccaaccaaagcttcccgggtcacagaaccaattcwtttaccaggcagtaccactgctgtcatttcagcttctggccactgggaggtgctgctcgaaagggtttgccctgagactccaagaagaagctgcgggaag

SEQ ID NO: 33296 - DNA, 201 bp, Homo sapiens
tgaagaacagaagaagagaggaagcgtttccaagcctccagagaagaaatcaaggccaaccaaagcttcccgggtcacagaaccaattcttttaccaggcrgtaccactgctgtcatttcagcttctggccactgggaggtgctgctcgaaagggtttgccctgagactccaagaagaagctgcgggaaggacagcagggg

SEQ ID NO: 33297 - DNA, 201 bp, Homo sapiens
atggggcgtgaagaacagaagaagagaggaagcgtttccaagcctccagagaagaaatcaaggccaaccaaagcttcccgggtcacagaaccaattctttyaccaggcagtaccactgctgtcatttcagcttctggccactgggaggtgctgctcgaaagggtttgccctgagactccaagaagaagctgcgggaaggac

SEQ ID NO: 33298 - DNA, 201 bp, Homo sapiens
gtgaagaacagaagaagagaggaagcgtttccaagcctccagagaagaaatcaaggccaaccaaagcttcccgggtcacagaaccaattcttttaccaggyagtaccactgctgtcatttcagcttctggccactgggaggtgctgctcgaaagggtttgccctgagactccaagaagaagctgcgggaaggacagcaggg

SEQ ID NO: 33299 - DNA, 201 bp, Homo sapiens
aacagaagaagagaggaagcgtttccaagcctccagagaagaaatcaaggccaaccaaagcttcccgggtcacagaaccaattcttttaccaggcagtacyactgctgtcatttcagcttctggccactgggaggtgctgctcgaaagggtttgccctgagactccaagaagaagctgcgggaaggacagcaggggtcctg

SEQ ID NO: 33300 - DNA, 201 bp, Homo sapiens
aagaacagaagaagagaggaagcgtttccaagcctccagagaagaaatcaaggccaaccaaagcttcccgggtcacagaaccaattcttttaccaggcagyaccactgctgtcatttcagcttctggccactgggaggtgctgctcgaaagggtttgccctgagactccaagaagaagctgcgggaaggacagcaggggtc

SEQ ID NO: 33301 - DNA, 201 bp, Homo sapiens
cccgcaggatcaggaaagtttgagaaaagcatctgcaaaaaaataaagagcagagcttacctcattgcctgtccccaccccatcccaggtcaccacctggmtgaccccaggtccccgacccaacaacaacccctcccaagtccctaactccctcacttggactcgagacccttcacaccccagcagcactccgcctccaac

SEQ ID NO: 33302 - DNA, 201 bp, Homo sapiens
tgtccccaccccatcccaggtcaccacctggctgaccccaggtccccgacccaacaacaacccctcccaagtccctaactccctcacttggactcgagacycttcacaccccagcagcactccgcctccaacttgacatcacagtttctggaaacttccccgcatgtcccactttcccacacttggtgccctggagcacct

SEQ ID NO: 33303 - DNA, 201 bp, Homo sapiens
gccaaccaaagcttcccgggtcacagaaccaattcttttaccaggcagtaccactgctgtcatttcagcttctggccactgggaggtgctgctcgaaaggrtttgccctgagactccaagaagaagctgcgggaaggacagcaggggtcctggggttttatagcctctggcccaggagttatgtgtccataaccaaaggga

SEQ ID NO: 33304 - DNA, 201 bp, Homo sapiens
tgcagagtttcgagcgccgcttcctggcggcacgcacactgcgctccttcccctggcagagcttagaagcaaagttaagagactcatcagattctgagctrctgcgggatattttgcacaagactgtgaagcatcctgtgtgtgtgaagcacccgccgtccgtcaaatatgcccggtgctttctctcagaactcatcaaaa

SEQ ID NO: 33305 - DNA, 201 bp, Homo sapiens
cgggatcagatgggaagtggaacctcgtcatgagcagaaactgtttccctacgaagagcacttggagatggcaatgctgaatctcaccctgtaggactcayacacgactccaacgggattgtgagaatcaagtcactctcatgggaagaatttttatatgggaaagcggataaaactttcattggactggaatgtttggag

SEQ ID NO: 33306 - DNA, 201 bp, Homo sapiens
acatcggctatctaagcgtgtgggtgccccctttctgccagcagttctggttcttaagaaaatcaccataaatcagacatgaaaattctggctccaaaaayagcattttctttgtgcaaataaaaacgtgtgtatcaagtatgggacacactcagttcctcacaaagccaagcccactgcagctgccacatccctgggctt

SEQ ID NO: 33307 - DNA, 201 bp, Homo sapiens
cctcccaagtccctaactccctcacttggactcgagacccttcacaccccagcagcactccgcctccaacttgacatcacagtttctggaaacttccccgyatgtcccactttcccacacttggtgccctggagcacctcccggcctctacgtgctgcccattcccctgtgagcaccctcctctcggcctctggccaacgc

SEQ ID NO: 33308 - DNA, 201 bp, Homo sapiens
ctctacgtgctgcccattcccctgtgagcaccctcctctcggcctctggccaacgcagtcccacccatctgtgggtaacaagggggtgtcggtgttctttkcagccttgctaaactgtctgaatcaaggatcacaaactacagcctgcaggccaaatccagcccacagcctgtgtttgtaaataaagttttattggaacaa

SEQ ID NO: 33309 - DNA, 201 bp, Homo sapiens
ttcccctgtgagcaccctcctctcggcctctggccaacgcagtcccacccatctgtgggtaacaagggggtgtcggtgttctttgcagccttgctaaactstctgaatcaaggatcacaaactacagcctgcaggccaaatccagcccacagcctgtgtttgtaaataaagttttattggaacaaagccacaccccttaat

SEQ ID NO: 33310 - DNA, 201 bp, Homo sapiens
gaacaaagccacaccccttaatctacagatgatctgtggctactttcacaccccaacagagtaccatggttctgacagagactggggaacccagtctaaaygacttccgacctggacctttactgaaaatcctgccaatcattctgttggcaagaatgatgtattactttttgcaataagaaacaagtaacctttgcagaa

SEQ ID NO: 33311 - DNA, 201 bp, Homo sapiens; identical to SEQ ID NO: 33286

SEQ ID NO: 33312 - DNA, 201 bp, Homo sapiens
aagccaagcccactgcagctgccacatccctggaccactgctgtcatttcagcttctggccactgggaggtgctgctcgaaagggtttgccctgagactcyaagaagaagctgcgggaaggacagcaggggtcctggggttttatagcctctggcccaggagttatgtgtccataaccaaagggagcacagtctgcaccca

SEQ ID NO: 33313 - DNA, 201 bp, Homo sapiens
tggacacactcagttcctcacaaagccaagcccactgcagctgccacatccctggaccactgctgtcatttcagcttctggccactgggaggtgctgctcraaagggtttgccctgagactccaagaagaagctgcgggaaggacagcaggggtcctggggttttatagcctctggcccaggagttatgtgtccataacca

SEQ ID NO: 33314 - DNA, 201 bp, Homo sapiens; identical to SEQ ID NO: 33289

SEQ ID NO: 33315 - DNA, 201 bp, Homo sapiens; identical to SEQ ID NO: 33290

SEQ ID NO: 33316 - DNA, 201 bp, Homo sapiens
acttggactcgagacccttcacaccccagcatttctggaaacttccccgcatgtcccactttcccacacttggtgccctggagcacctcccggcctctacrtgctgcccattcccctgtgagcaccctcctctcggcctctggccaacgcagtcccacccatctgtgggtaacaagggggtgtcggtgttctttgcagcct

SEQ ID NO: 33317 - DNA, 201 bp, Homo sapiens
attgcctgtccccaccccatcccaggtcaccacctggctgaccccaggtccccgacccaacaacaacccctcccaagtccctaactccctcacttggactygagacccttcacaccccagcatttctggaaacttccccgcatgtcccactttcccacacttggtgccctggagcacctcccggcctctacgtgctgccca

SEQ ID NO: 33318 - DNA, 201 bp, Homo sapiens; identical to SEQ ID NO: 33294

SEQ ID NO: 33319 - DNA, 201 bp, Homo sapiens
atcctgtgtgtgtgaagcacccgccgtccgtcaaatatgcccggtgctttctctcagaactcatcaaaaagcacgaggctgtccacacagagcctttggaygagctgtatgaagcgctggcggagaccctgatggccaaggagtccacccagggccaccggagctatttgctgccctcgggaggctcggtcacactctccg

SEQ ID NO: 33320 - DNA, 201 bp, Homo sapiens
tgcaaataaaaacgtgtgtatcaagtatgatgttcccccaacgtggacacactcagttcctcacaaagccaagcccactgcagctgccacatccctggacyactgctgtcatttcagcttctggccactgggaggtgctgctcgaaagggtttgccctgagactccaagaagaagctgcgggaaggacagcaggggtcctg

SEQ ID NO: 33321 - DNA, 201 bp, Homo sapiens
cccgcaggatcaggaaagtttgagaaaagcatctgcaaaaaaataaagagcagagcttacctcattgcctgtccccaccccatcccaggtcaccacctggmtgaccccaggtccccgacccaacaacaacccctcccaagtccctaactccctcacttggactcgagacccttcacaccccagcatttctggaaacttccc

SEQ ID NO: 33322 - DNA, 201 bp, Homo sapiens; identical to SEQ ID NO: 33305

SEQ ID NO: 33323 - DNA, 201 bp, Homo sapiens
ctgtccacacagagcctttggacgagctgtatgaagcgctggcggagaccctgatggccaaggagtccacccagggccaccggagctatttgctgccctcrggaggctcggtcacactctccgagagcacggccatcatctcctacggtaccacaggcctggtcacatgggacgccgccctctaccttgcagaatgggcca

SEQ ID NO: 33324 - DNA, 201 bp, Homo sapiens; identical to SEQ ID NO: 33304

SEQ ID NO: 33325 - DNA, 201 bp, Homo sapiens
cactcagttcctcacaaagccaagcccactgcagctgccacatccctggaccactgctgtcatttcagcttctggccactgggaggtgctgctcgaaaggrtttgccctgagactccaagaagaagctgcgggaaggacagcaggggtcctggggttttatagcctctggcccaggagttatgtgtccataaccaaaggga

SEQ ID NO: 33326 - DNA, 201 bp, Homo sapiens
tgtccccaccccatcccaggtcaccacctggctgaccccaggtccccgacccaacaacaacccctcccaagtccctaactccctcacttggactcgagacycttcacaccccagcatttctggaaacttccccgcatgtcccactttcccacacttggtgccctggagcacctcccggcctctacgtgctgcccattcccc

SEQ ID NO: 33327 - DNA, 201 bp, Homo sapiens
acatcggctatctaagcgtgtgggtgccccctttctgccagcagttctggttcttaagaaaatcaccataaatcagacatgaaaattctggctccaaaaayagcattttctttgtgcaaataaaaacgtgtgtatcaagtatgatgttcccccaacgtggacacactcagttcctcacaaagccaagcccactgcagctgc

SEQ ID NO: 33328 - DNA, 201 bp, Homo sapiens
accccaggtccccgacccaacaacaacccctcccaagtccctaactccctcacttggactcgagacccttcacaccccagcatttctggaaacttccccgyatgtcccactttcccacacttggtgccctggagcacctcccggcctctacgtgctgcccattcccctgtgagcaccctcctctcggcctctggccaacgc

SEQ ID NO: 33329 - DNA, 201 bp, Homo sapiens; identical to SEQ ID NO: 33308

SEQ ID NO: 33330 - DNA, 201 bp, Homo sapiens; identical to SEQ ID NO: 33309

SEQ ID NO: 33331 - DNA, 201 bp, Homo sapiens; identical to SEQ ID NO: 33310

SEQ ID NO: 33332 - DNA, 201 bp, Homo sapiens; identical to SEQ ID NO: 33286

SEQ ID NO: 33333 - DNA, 201 bp, Homo sapiens; identical to SEQ ID NO: 33312

SEQ ID NO: 33334 - DNA, 201 bp, Homo sapiens; identical to SEQ ID NO: 33313

SEQ ID NO: 33335 - DNA, 201 bp, Homo sapiens; identical to SEQ ID NO: 33289

SEQ ID NO: 33336 - DNA, 201 bp, Homo sapiens; identical to SEQ ID NO: 33290

SEQ ID NO: 33337 - DNA, 201 bp, Homo sapiens; identical to SEQ ID NO: 33316

SEQ ID NO: 33338 - DNA, 201 bp, Homo sapiens; identical to SEQ ID NO: 33317

SEQ ID NO: 33339 - DNA, 201 bp, Homo sapiens; identical to SEQ ID NO: 33294

SEQ ID NO: 33340 - DNA, 201 bp, Homo sapiens; identical to SEQ ID NO: 33320

SEQ ID NO: 33341 - DNA, 201 bp, Homo sapiens; identical to SEQ ID NO: 33321

SEQ ID NO: 33342 - DNA, 201 bp, Homo sapiens; identical to SEQ ID NO: 33305

SEQ ID NO: 33343 - DNA, 201 bp, Homo sapiens
cggcacgcacactgcgctccttcccctggcagagcttagaagcaaagttaagagactcatcagattctgagctgctgcgggatattttgcacaagccctcrggaggctcggtcacactctccgagagcacggccatcatctcctacggtaccacaggcctggtcacatgggacgccgccctctaccttgcagaatgggcca

SEQ ID NO: 33344 - DNA, 201 bp, Homo sapiens
tgcagagtttcgagcgccgcttcctggcggcacgcacactgcgctccttcccctggcagagcttagaagcaaagttaagagactcatcagattctgagctrctgcgggatattttgcacaagccctcgggaggctcggtcacactctccgagagcacggccatcatctcctacggtaccacaggcctggtcacatgggacg

SEQ ID NO: 33345 - DNA, 201 bp, Homo sapiens; identical to SEQ ID NO: 33325

SEQ ID NO: 33346 - DNA, 201 bp, Homo sapiens; identical to SEQ ID NO: 33326

SEQ ID NO: 33347 - DNA, 201 bp, Homo sapiens; identical to SEQ ID NO: 33327

SEQ ID NO: 33348 - DNA, 201 bp, Homo sapiens; identical to SEQ ID NO: 33328

SEQ ID NO: 33349 - DNA, 201 bp, Homo sapiens; identical to SEQ ID NO: 33308

SEQ ID NO: 33350 - DNA, 201 bp, Homo sapiens; identical to SEQ ID NO: 33309

SEQ ID NO: 33351 - DNA, 201 bp, Homo sapiens; identical to SEQ ID NO: 33310

SEQ ID NO: 33352 - DNA, 201 bp, Homo sapiens; identical to SEQ ID NO: 33286

SEQ ID NO: 33353 - DNA, 201 bp, Homo sapiens
aatcaccataaatcagacatgaaaattctggctaccactgctgtcatttcagcttctggccactgggaggtgctgctcgaaagggtttgccctgagactcyaagaagaagctgcgggaaggacagcaggggtcctggggttttatagcctctggcccaggagttatgtgtccataaccaaagggagcacagtctgcaccca

SEQ ID NO: 33354 - DNA, 201 bp, Homo sapiens
cagcagttctggttcttaagaaaatcaccataaatcagacatgaaaattctggctaccactgctgtcatttcagcttctggccactgggaggtgctgctcraaagggtttgccctgagactccaagaagaagctgcgggaaggacagcaggggtcctggggttttatagcctctggcccaggagttatgtgtccataacca

SEQ ID NO: 33355 - DNA, 201 bp, Homo sapiens; identical to SEQ ID NO: 33289

SEQ ID NO: 33356 - DNA, 201 bp, Homo sapiens; identical to SEQ ID NO: 33290

SEQ ID NO: 33357 - DNA, 201 bp, Homo sapiens; identical to SEQ ID NO: 33291

SEQ ID NO: 33358 - DNA, 201 bp, Homo sapiens; identical to SEQ ID NO: 33293

SEQ ID NO: 33359 - DNA, 201 bp, Homo sapiens; identical to SEQ ID NO: 33294

SEQ ID NO: 33360 - DNA, 201 bp, Homo sapiens
ataagacatcggctatctaagcgtgtgggtgccccctttctgccagcagttctggttcttaagaaaatcaccataaatcagacatgaaaattctggctacyactgctgtcatttcagcttctggccactgggaggtgctgctcgaaagggtttgccctgagactccaagaagaagctgcgggaaggacagcaggggtcctg

SEQ ID NO: 33361 - DNA, 201 bp, Homo sapiens; identical to SEQ ID NO: 33301

SEQ ID NO: 33362 - DNA, 201 bp, Homo sapiens; identical to SEQ ID NO: 33305

SEQ ID NO: 33363 - DNA, 201 bp, Homo sapiens
atattttgcacaagactgtgaagcatcctgtgtgtgtgaagcacccgccgtccgtcaaatatgcccggtgctttctctcagaactcatcaaaaagccctcrggaggctcggtcacactctccgagagcacggccatcatctcctacggtaccacaggcctggtcacatgggacgccgccctctaccttgcagaatgggcca

SEQ ID NO: 33364 - DNA, 201 bp, Homo sapiens
gggagtccaggggcagacgggacgggtctccgtgctgaagcccctggcgctcccgccacagcttagaagcaaagttaagagactcatcagattctgagctrctgcgggatattttgcacaagactgtgaagcatcctgtgtgtgtgaagcacccgccgtccgtcaaatatgcccggtgctttctctcagaactcatcaaaa

SEQ ID NO: 33365 - DNA, 201 bp, Homo sapiens
ttctggttcttaagaaaatcaccataaatcagacatgaaaattctggctaccactgctgtcatttcagcttctggccactgggaggtgctgctcgaaaggrtttgccctgagactccaagaagaagctgcgggaaggacagcaggggtcctggggttttatagcctctggcccaggagttatgtgtccataaccaaaggga

SEQ ID NO: 33366 - DNA, 201 bp, Homo sapiens; identical to SEQ ID NO: 33302

SEQ ID NO: 33367 - DNA, 201 bp, Homo sapiens; identical to SEQ ID NO: 33307

SEQ ID NO: 33368 - DNA, 201 bp, Homo sapiens; identical to SEQ ID NO: 33308

SEQ ID NO: 33369 - DNA, 201 bp, Homo sapiens; identical to SEQ ID NO: 33309

SEQ ID NO: 33370 - DNA, 201 bp, Homo sapiens; identical to SEQ ID NO: 33310

SEQ ID NO: 33371 - DNA, 201 bp, Homo sapiens
ccgctttctaagctttgtgaagagtgggttgactattcagatctctgcttctgtcccgctgtgccaagtgctggggcggacacaggcagagagtggacagmggcacggtccctgctgctagccatttctatgcaaaaccagctttctggtcccatcctggaggccaattctaggcacctgggtgggcctgggaacctgtga

SEQ ID NO: 33372 - DNA, 201 bp, Homo sapiens
aagctttgtgaagagtgggttgactattcagatctctgcttctgtcccgctgtgccaagtgctggggcggacacaggcagagagtggacagcggcacggtscctgctgctagccatttctatgcaaaaccagctttctggtcccatcctggaggccaattctaggcacctgggtgggcctgggaacctgtgaaccaagtaa

SEQ ID NO: 33373 - DNA, 201 bp, Homo sapiens; identical to SEQ ID NO: 33286

SEQ ID NO: 33374 - DNA, 201 bp, Homo sapiens; identical to SEQ ID NO: 33305

SEQ ID NO: 33375 - DNA, 201 bp, Homo sapiens; identical to SEQ ID NO: 33327

SEQ ID NO: 33376 - DNA, 201 bp, Homo sapiens
ttctgtatttttgtagagatgggatttcaccatgttggccaggctggtctcgaactcctgacctcaagtgatccgcccgccttggcctcccaaagtgttgkgattacaggcatgagccactgtgcccggccgctttctaagctttgtgaagagtgggttgactattcagatctctgcttctgtcccgctgtgccaagtgct

SEQ ID NO: 33377 - DNA, 201 bp, Homo sapiens
caggcatgagccactgtgcccggccgctttctaagctttgtgaagagtgggttgactattcagatctctgcttctgtcccgctgtgccaagtgctggggcrgacacaggcagagagtggacagcggcacggtccctgctgctagccatttctatgcaaaaccagctttctggtcccatcctggaggccaattctaggcacc

SEQ ID NO: 33378 - DNA, 201 bp, Homo sapiens; identical to SEQ ID NO: 33286

SEQ ID NO: 33379 - DNA, 201 bp, Homo sapiens
gttcctcacaaagccaagcccactgcagctgccacatccctggtcatttcagcttctggccactgggaggtgctgctcgaaagggtttgccctgagactcyaagaagaagctgcgggaaggacagcaggggtcctggggttttatagcctctggcccaggagttatgtgtccataaccaaagggagcacagtctgcaccca

SEQ ID NO: 33380 - DNA, 201 bp, Homo sapiens
tcccccaacgtggacacactcagttcctcacaaagccaagcccactgcagctgccacatccctggtcatttcagcttctggccactgggaggtgctgctcraaagggtttgccctgagactccaagaagaagctgcgggaaggacagcaggggtcctggggttttatagcctctggcccaggagttatgtgtccataacca

SEQ ID NO: 33381 - DNA, 201 bp, Homo sapiens; identical to SEQ ID NO: 33289

SEQ ID NO: 33382 - DNA, 201 bp, Homo sapiens; identical to SEQ ID NO: 33290

SEQ ID NO: 33383 - DNA, 201 bp, Homo sapiens; identical to SEQ ID NO: 33291

SEQ ID NO: 33384 - DNA, 201 bp, Homo sapiens; identical to SEQ ID NO: 33293

SEQ ID NO: 33385 - DNA, 201 bp, Homo sapiens; identical to SEQ ID NO: 33294

SEQ ID NO: 33386 - DNA, 201 bp, Homo sapiens
cctggcagagcttagaagcaaagttaagagactcatcagattctgagctgctgcgggatattttgcacaagcacgaggctgtccacacagagcctttggaygagctgtatgaagcgctggcggagaccctgatggccaaggagtccacccagggccaccggagctatttgctgatgtgctgtattgcccagaagccatcat

SEQ ID NO: 33387 - DNA, 201 bp, Homo sapiens; identical to SEQ ID NO: 33301

SEQ ID NO: 33388 - DNA, 201 bp, Homo sapiens; identical to SEQ ID NO: 33305

SEQ ID NO: 33389 - DNA, 201 bp, Homo sapiens
tgcagagtttcgagcgccgcttcctggcggcacgcacactgcgctccttcccctggcagagcttagaagcaaagttaagagactcatcagattctgagctrctgcgggatattttgcacaagcacgaggctgtccacacagagcctttggacgagctgtatgaagcgctggcggagaccctgatggccaaggagtccaccc

SEQ ID NO: 33390 - DNA, 201 bp, Homo sapiens
aacgtggacacactcagttcctcacaaagccaagcccactgcagctgccacatccctggtcatttcagcttctggccactgggaggtgctgctcgaaaggrtttgccctgagactccaagaagaagctgcgggaaggacagcaggggtcctggggttttatagcctctggcccaggagttatgtgtccataaccaaaggga

SEQ ID NO: 33391 - DNA, 201 bp, Homo sapiens; identical to SEQ ID NO: 33302

SEQ ID NO: 33392 - DNA, 201 bp, Homo sapiens; identical to SEQ ID NO: 33327

SEQ ID NO: 33393 - DNA, 201 bp, Homo sapiens; identical to SEQ ID NO: 33307

SEQ ID NO: 33394 - DNA, 201 bp, Homo sapiens; identical to SEQ ID NO: 33308

SEQ ID NO: 33395 - DNA, 201 bp, Homo sapiens; identical to SEQ ID NO: 33309

SEQ ID NO: 33396 - DNA, 201 bp, Homo sapiens; identical to SEQ ID NO: 33310

SEQ ID NO: 33397 - DNA, 201 bp, Homo sapiens; identical to SEQ ID NO: 33286

SEQ ID NO: 33398 - DNA, 201 bp, Homo sapiens; identical to SEQ ID NO: 33312

SEQ ID NO: 33399 - DNA, 201 bp, Homo sapiens; identical to SEQ ID NO: 33313

SEQ ID NO: 33400 - DNA, 201 bp, Homo sapiens; identical to SEQ ID NO: 33289

SEQ ID NO: 33401 - DNA, 201 bp, Homo sapiens; identical to SEQ ID NO: 33290

SEQ ID NO: 33402 - DNA, 201 bp, Homo sapiens; identical to SEQ ID NO: 33316

SEQ ID NO: 33403 - DNA, 201 bp, Homo sapiens; identical to SEQ ID NO: 33317

SEQ ID NO: 33404 - DNA, 201 bp, Homo sapiens; identical to SEQ ID NO: 33294

SEQ ID NO: 33405 - DNA, 201 bp, Homo sapiens; identical to SEQ ID NO: 33320

SEQ ID NO: 33406 - DNA, 201 bp, Homo sapiens; identical to SEQ ID NO: 33321

SEQ ID NO: 33407 - DNA, 201 bp, Homo sapiens; identical to SEQ ID NO: 33305

SEQ ID NO: 33408 - DNA, 201 bp, Homo sapiens; identical to SEQ ID NO: 33363

SEQ ID NO: 33409 - DNA, 201 bp, Homo sapiens; identical to SEQ ID NO: 33304

SEQ ID NO: 33410 - DNA, 201 bp, Homo sapiens; identical to SEQ ID NO: 33325

SEQ ID NO: 33411 - DNA, 201 bp, Homo sapiens; identical to SEQ ID NO: 33326

SEQ ID NO: 33412 - DNA, 201 bp, Homo sapiens; identical to SEQ ID NO: 33327

SEQ ID NO: 33413 - DNA, 201 bp, Homo sapiens; identical to SEQ ID NO: 33328

SEQ ID NO: 33414 - DNA, 201 bp, Homo sapiens; identical to SEQ ID NO: 33308

SEQ ID NO: 33415 - DNA, 201 bp, Homo sapiens; identical to SEQ ID NO: 33309

SEQ ID NO: 33416 - DNA, 201 bp, Homo sapiens; identical to SEQ ID NO: 33310

SEQ ID NO: 33417 - DNA, 201 bp, Homo sapiens; identical to SEQ ID NO: 33286

SEQ ID NO: 33418 - DNA, 201 bp, Homo sapiens; identical to SEQ ID NO: 33312

SEQ ID NO: 33419 - DNA, 201 bp, Homo sapiens; identical to SEQ ID NO: 33313

SEQ ID NO: 33420 - DNA, 201 bp, Homo sapiens; identical to SEQ ID NO: 33289

SEQ ID NO: 33421 - DNA, 201 bp, Homo sapiens; identical to SEQ ID NO: 33290

SEQ ID NO: 33422 - DNA, 201 bp, Homo sapiens; identical to SEQ ID NO: 33316

SEQ ID NO: 33423 - DNA, 201 bp, Homo sapiens; identical to SEQ ID NO: 33317

SEQ ID NO: 33424 - DNA, 201 bp, Homo sapiens; identical to SEQ ID NO: 33294

SEQ ID NO: 33425 - DNA, 201 bp, Homo sapiens; identical to SEQ ID NO: 33320

SEQ ID NO: 33426 - DNA, 201 bp, Homo sapiens; identical to SEQ ID NO: 33321

SEQ ID NO: 33427 - DNA, 201 bp, Homo sapiens; identical to SEQ ID NO: 33305

SEQ ID NO: 33428 - DNA, 201 bp, Homo sapiens; identical to SEQ ID NO: 33363

SEQ ID NO: 33429 - DNA, 201 bp, Homo sapiens
taaaaagtcagcgccgtcaggaccgcaggtaaccacgtcctcctgagcgcggtgaccggagcttagaagcaaagttaagagactcatcagattctgagctrctgcgggatattttgcacaagactgtgaagcatcctgtgtgtgtgaagcacccgccgtccgtcaaatatgcccggtgctttctctcagaactcatcaaaa

SEQ ID NO: 33430 - DNA, 201 bp, Homo sapiens; identical to SEQ ID NO: 33325

SEQ ID NO: 33431 - DNA, 201 bp, Homo sapiens; identical to SEQ ID NO: 33326

SEQ ID NO: 33432 - DNA, 201 bp, Homo sapiens; identical to SEQ ID NO: 33327

SEQ ID NO: 33433 - DNA, 201 bp, Homo sapiens; identical to SEQ ID NO: 33328

SEQ ID NO: 33434 - DNA, 201 bp, Homo sapiens; identical to SEQ ID NO: 33308

SEQ ID NO: 33435 - DNA, 201 bp, Homo sapiens; identical to SEQ ID NO: 33309

SEQ ID NO: 33436 - DNA, 201 bp, Homo sapiens; identical to SEQ ID NO: 33310

SEQ ID NO: 33437 - DNA, 201 bp, Homo sapiens
tggcttatgcgaaactcctggagttttcaatttcctcatccattcttaccaaacgttgattttgttggaggattccactgcaaacctgccaaacccctacytaaggaaatggaggagtttgtacagagctctggagaaaatggtgttgtggtgttttctctggggtcagtgataagtaacatgacagcagaaagggccaat

SEQ ID NO: 33438 - DNA, 201 bp, Homo sapiens
aaccagatagataggacaacttcagtttattccagcaagaaagaaaagattgttatgcaagatttctttcttcctgtgacaaaaaaaaaaaaaaaaaaaaattttcaaatctaccttgtcaagtaaaaatttgtttttcagagatttaccacccaggtaatggttagaaatattttgtggcaatgaagaaaatactaggaa

SEQ ID NO: 33439 - DNA, 201 bp, Homo sapiens; identical to SEQ ID NO: 33437

SEQ ID NO: 33440 - DNA, 201 bp, Homo sapiens; identical to SEQ ID NO: 33437

SEQ ID NO: 33441 - DNA, 201 bp, Homo sapiens; identical to SEQ ID NO: 33438

SEQ ID NO: 33442 - DNA, 201 bp, Homo sapiens
tagcaggacaactcgaggtgaggcccctgttttccccgccccgctcgccgactcgagaagatggctgatccttggcaggaatgcatggattatgcagtaamcctagcaagacaagctggagaggtggttcatgatgctcttaaaaatgaagtgaatgttatcctgaaaggttctccagttgatttggtaactgctactgac

SEQ ID NO: 33443 - DNA, 201 bp, Homo sapiens
cacatgtgttggaacagcagctactaatatgtgcattgcggcaagtggaggagcagaggcattttatgaaatgggaattcactgctgggatattgcagtarctgccattattgttactgaagctggtggcgtgctaatggatgttactggtggaccattccatttaatgtcacggagaataattgctgcaaattgtacagc

SEQ ID NO: 33444 - DNA, 201 bp, Homo sapiens
cctatagcagggaataggcaaccggaccttcctagggacgagcgattcctcgaggataaggatttagactttaatgtctccctagcaaaagggttgaaggrcttggccattaaggggacactggatttcataaattgtgtgaaaaggctggaagatttcaaaaaaatattcccacatggaaagactgtcctggctgagcgg

SEQ ID NO: 33445 - DNA, 201 bp, Homo sapiens
cttagagtcccgggctcagctctgccactttgtcaccatgtgcatcttcacatgcacaggtcagcatgcttctaaccacctgggccagctggactggtacycctggatccctaatggcccatgcaccatgcagaagcccccgcccatctctaaggatgtgacagagaaggatatagtggacttactgcccaatctccacca

SEQ ID NO: 33446 - DNA, 201 bp, Homo sapiens
gggcgcctcctgatggtgaagctgcgcaaacacaacgtgctgttgagtctcgactggttctgcaagtggatctcagtgcagggcccggggacccaaggcgmggcctttttcccctgctaccgctgggtgcagggccacggaattatctgcctgcctgagggtactgcccggaccgtgagtgatgacccccagaacctgttt

SEQ ID NO: 33447 - DNA, 201 bp, Homo sapiens
cttcacatgcacaggtcagcatgcttctaaccacctgggccagctggactggtactcctggatccctaatggcccatgcaccatgcagaagcccccgcccrtctctaaggatgtgacagagaaggatatagtggacttactgcccaatctccaccaggcacgtatgcaaaagaccttcacaaagttccttggcagacgcca

SEQ ID NO: 33448 - DNA, 201 bp, Homo sapiens
ttgagtctcgactggttctgcaagtggatctcagtgcagggcccggggacccaaggcgaggcctttttcccctgctaccgctgggtgcagggccacggaaytatctgcctgcctgagggtactgcccggaccgtgagtgatgacccccagaacctgtttaagaaatatcgggaacaggagctcgaggaaagaaggaaggtg

SEQ ID NO: 33449 - DNA, 201 bp, Homo sapiens
tcctggacctgccctgtgagtacctttgacccagcatggtagagaacagcgtgaccatctgagaggccttgcccgcctcagctccaaagctccaccatccstgagtgcctttgagtattccgtcctcctcacatcctctggtgaacaaattgtccccaaagctttgtggtcagggtatccagagctgctcaccacacaact

SEQ ID NO: 33450 - DNA, 201 bp, Homo sapiens
gcatcttcacatgcacaggtcagcatgcttctaaccacctgggccagctggactggtactcctggatccctaatggcccatgcaccatgcagaagcccccrcccatctctaaggatgtgacagagaaggatatagtggacttactgcccaatctccaccaggcacgtatgcaaaagaccttcacaaagttccttggcagac

SEQ ID NO: 33451 - DNA, 201 bp, Homo sapiens
aggggatggttgggcttttctacaatagtgaccaagccatgaaggatgatctagagctgcaggcctggtgcagagagatgactgagactggactgcagagrgcccaagaccaggggttcctcatctccttagagtcccgggctcagctctgccactttgtcaccatgtgcatcttcacatgcacaggtcagcatgcttcta

SEQ ID NO: 33452 - DNA, 201 bp, Homo sapiens
taaccacctgggccagctggactggtactcctggatccctaatggcccatgcaccatgcagaagcccccgcccatctctaaggatgtgacagagaaggatmtagtggacttactgcccaatctccaccaggcacgtatgcaaaagaccttcacaaagttccttggcagacgccagcctgtcatgcatgaggagaaatattt

SEQ ID NO: 33453 - DNA, 201 bp, Homo sapiens
ctgtcctcctgatgacctggctgaccgtgggctcctggatgtgaaatcttctttttatggctaagatgccatcaggctgtggggaatcatcagccggtacrtggaggggatggttgggcttttctacaatagtgaccaagccatgaaggatgatctagagctgcaggcctggtgcagagagatgactgagactggactgca

SEQ ID NO: 33454 - DNA, 164 bp, Homo sapiens
atgggcaagtacacggtccgcgtagccaccggggatttgctcctggcgggctctcccaacctgstgcagctatggctggtgggcgagcacggggaggcagacctagggaagcagctgccaccggtgtggggaaaggaggcagagtttgagatcgacgtccccct

SEQ ID NO: 33455 - DNA, 201 bp, Homo sapiens
aagactgtcctggctgagcgggtttatgattcttggaagaatgatgccttctttgggtaccagtttctcaatggtgcaaaccccatgctcctgaggtgttyttcaaggctcccagcctgcctggtgctgcctccagggatggaagacttgaagacccagctggagaaagaactccaggctggatctctgtttgaagtggat

SEQ ID NO: 33456 - DNA, 201 bp, Homo sapiens
tgccatcaggctgtggggaatcatcagccggtacgtggaggggatggttgggcttttctacaatagtgaccaagccatgaaggatgatctagagctgcagrcctggtgcagagagatgactgagactggactgcagagggcccaagaccaggggttcctcatctccttagagtcccgggctcagctctgccactttgtcac

SEQ ID NO: 33457 - DNA, 201 bp, Homo sapiens
ccagatgttgctctttgacctatttaataccgagcttgacacacacacacaatctctctctctctctctcacacacacacacacacacacacacacacacwcactcctatgcccatccctagagtgtagggtgggcctaagactgcgcttctaacaagtctcccagttgctgctgctgttggtgctggttccgggaccaca

SEQ ID NO: 33458 - DNA, 201 bp, Homo sapiens
ggtggagaggcctgagggtgggtttagaagccagatgttgctctttgacctatttaataccgagcttgacacacacacacaatctctctctctctctctcwcacacacacacacacacacacacacacactcactcctatgcccatccctagagtgtagggtgggcctaagactgcgcttctaacaagtctcccagttgct

SEQ ID NO: 33459 - DNA, 201 bp, Homo sapiens
cactcctatgcccatccctagagtgtagggtgggcctaagactgcgcttctaacaagtctcccagttgctgctgctgttggtgctggttccgggaccacawgagaaccactgaactgaatgaagcatgtgaaaattcacatatattaaagtgaaaattggagaaatggaaacaattacagtacccttcaggggactcgggg

SEQ ID NO: 33460 - DNA, 201 bp, Homo sapiens
gccagatgttgctctttgacctatttaataccgagcttgacacacacacacaatctctctctctctctctcacacacacacacacacacacacacacacamtcactcctatgcccatccctagagtgtagggtgggcctaagactgcgcttctaacaagtctcccagttgctgctgctgttggtgctggttccgggaccac

SEQ ID NO: 33461 - DNA, 201 bp, Homo sapiens
ggcctgagggtgggtttagaagccagatgttgctctttgacctatttaataccgagcttgacacacacacacaatctctctctctctctctcacacacacwcacacacacacacacacacactcactcctatgcccatccctagagtgtagggtgggcctaagactgcgcttctaacaagtctcccagttgctgctgctgt

SEQ ID NO: 33462 - DNA, 201 bp, Homo sapiens
cctcctccgccaccgctacgaccaccgccaccgccgccacctcttcctccaccgcctcctccctcggcgattcagacctgagcacacgaacactgccactmccaccccggccgccgcgctcgcctcagtgtggaatcacctccgcgcccggccaccaaaatggcgccgggtcggcgcatgcgcacgacgttgacccggccg

SEQ ID NO: 33463 - DNA, 201 bp, Homo sapiens
ggagaggcctgagggtgggtttagaagccagatgttgctctttgacctatttaataccgagcttgacacacacacacaatctctctctctctctctcacawacacacacacacacacacacacacactcactcctatgcccatccctagagtgtagggtgggcctaagactgcgcttctaacaagtctcccagttgctgct

SEQ ID NO: 33464 - DNA, 201 bp, Homo sapiens
tggagaggcctgagggtgggtttagaagccagatgttgctctttgacctatttaataccgagcttgacacacacacacaatctctctctctctctctcacwcacacacacacacacacacacacacactcactcctatgcccatccctagagtgtagggtgggcctaagactgcgcttctaacaagtctcccagttgctgc

SEQ ID NO: 33465 - DNA, 158 bp, Homo sapiens
  misc_feature (1)...(158): n = A,T,C or G
acatatattaaagtgaaaattggagaaatggaaacaattacagtacccttcaggggactcggggtgggggagggggagccttatttctgtaaacctaggcntcaaaggtgcctggtgatagtaggcactcaataaatattgaatgagtaaatgagtac

SEQ ID NO: 33466 - DNA, 201 bp, Homo sapiens
ccgcctcctccgccaccgctacgaccaccgccaccgccgccacctcttcctccaccgcctcctccctcggcgattcagacctgagcacacgaacactgccrctaccaccccggccgccgcgctcgcctcagtgtggaatcacctccgcgcccggccaccaaaatggcgccgggtcggcgcatgcgcacgacgttgacccgg

SEQ ID NO: 33467 - DNA, 201 bp, Homo sapiens
gtgacaagtggtgcccaggacagggacatgagcaaagaaggtctgctggagcagagaaagtgaaactgaccagatgagcaagaaaccttgggacaagtctrctggcagctaatataagcacataccaaggttaccagcactcggggaagcaaggacggaagaagaaaagaggatgctctttctccctcatgtaccccaggt

SEQ ID NO: 33468 - DNA, 181 bp, Homo sapiens
gatcccttgttcactagaaacaaggagccccctgtcaccttcttttaaaacagatctttctgtctctgtcttcatttctcyattcatcccccttcattcaatcctgtagcaactggcagtgacaagtggtgcccaggacagggacatgagcaaagaaggtctgctggagcagagaaagtga

SEQ ID NO: 33469 - DNA, 109 bp, Homo sapiens
cgacctcacctggttccaataccacaacttgcatgtgattaggttcctgctggcctatgtgtcaactgtgatcttcatcatcacaagatgttgcctgtttyctttctga

SEQ ID NO: 33470 - DNA, 201 bp, Homo sapiens
gtctacaaagagaatgctatgaagttatcaataattcgccatgatttgccaattaagcccctggatcaagcagccttctggattgagtttgtcatgcagcrcaaaggagccaagcaccttcgggttgcagcccacgacctcacctggttccaataccacaacttgcatgtgattaggttcctgctggcctatgtgtcaact

SEQ ID NO: 33471 - DNA, 201 bp, Homo sapiens
aggacggaagaagaaaagaggatgctctttctccctcatgtaccccaggtatctgctagaaagagaagagaactagggacacctgccaccctcttcctagytgattgacaatttctttagagttctaacatcttatagctttggcattctactcatggaacaagatattttctttaccccaacaggttctgtggatggaaa

SEQ ID NO: 33472 - DNA, 201 bp, Homo sapiens
ggaaatcccatcaccatcttccaggagcaagatccctccaaaatcaaatggggcgatgctggcgctgaatatgttgtgaagtccaccagcggaggagctamaagggtcatcatctctgccccctctgctgatgcccccatgttcgtgatgggcatgaaccacaagaagtatgacaacagactcaatatcgtcagctatgcc

SEQ ID NO: 33473 - DNA, 201 bp, Homo sapiens
ccaaaatcaaatggggcgatgctggcgctgaatatgttgtgaagtccaccagcgtctttcaccatggagaaggctggggctgacttgcagggaggagctamaagggtcatcatctctgccccctctgctgatgcccccatgttcgtgatgggcatgaaccacaagaagtatgacaacagactcaatatcgtcagctatgcc

SEQ ID NO: 33474 - DNA, 201 bp, Homo sapiens
tgacatgggcttctgtgtccacatcaccaacgtgtcagtcatggacctcacctgccgtctcgaaaaacctgccaaatatgatgacattaagaaggtggtgragtgagcattggagtgtccccccaagggcatctggggcgacactgagcaccaggttgtctcctctgacttcaacagagacacccactcctccacctttga

SEQ ID NO: 33475 - DNA, 201 bp, Homo sapiens
actgacatgggcttctgtgtccacatcaccaacgtgtcagtcatggacctcacctgccgtctcgaaaaacctgccaaatatgatgacattaagaaggtggkgaagtgagcattggagtgtccccccaagggcatctggggcgacactgagcaccaggttgtctcctctgacttcaacagagacacccactcctccaccttt

SEQ ID NO: 33476 - DNA, 189 bp, Homo sapiens
accgtggcggcatctttaactggcctccactcaatgggaaactgactcgcctgtgaaagacacagtgggagagctgaaaatgaatcagaagctttatgtawatgatttttaaattaaactttactttttcagactgcccctcccctttttgtaaaaagtccatttactgtaaaatcgttttttccagtt

SEQ ID NO: 33477 - DNA, 189 bp, Homo sapiens; identical to SEQ ID NO: 33476

SEQ ID NO: 33478 - DNA, 189 bp, Homo sapiens; identical to SEQ ID NO: 33476

SEQ ID NO: 33479 - DNA, 201 bp, Homo sapiens
ggtgctgggcccagaccgtgccaactacgagcgctttgtgccccgcggcgccttcatccacgtggacgacttcccaagtgcctcctccctggcctcgtacytgcttttcctcgaccgcaaccccgcggtctatcgccgctacttccactggcgccggagctacgctgtccacatcacctccttctgggacgagccttggtg

SEQ ID NO: 33480 - DNA, 201 bp, Homo sapiens
cctgctcaccgaccgcgcgtcctacggagaggctcaggccgtgcttttccaccaccgcgacctcgtgaaggggccccccgactggcccccgccctggggcrtccaggcgcacactgccgaggaggtggatctgcgcgtgttggactacgaggaggcagcggcggcggcagaagccctggcgacctccagccccaggccccc

SEQ ID NO: 33481 - DNA, 201 bp, Homo sapiens
tctagggcctgctcctgcgcggcagctgctttagaaggtctcgagcctcctgtaccttcccagggatgaaccgggccttccctctggaaggcgagggttcsggccacagtgagcgagggccagggcggtgggcgcgcgcagagggaaaccggatcagttgagagagaatcaagagtagcggatgaggcgcttgtggggcgc

SEQ ID NO: 33482 - DNA, 201 bp, Homo sapiens
tgccaaaaaccatcactggcaagattgaacggaaggaacttcggaaaaaggagactggtcagatgtaatcggcagtgaactcagaacgcactgcacacctraggcaaatccctggccactttagtctccccactatggtgaggacgagggtggggcattgagagtgttgatttgggaaagtatcaggagtgccatgattcc

SEQ ID NO: 33483 - DNA, 201 bp, Homo sapiens
tcctgaccccacagttcctgtcccatgacaaggatcagctgaccaaggaactgcagcagcatgtcaagtcagtgacagccccatacaagtacccaaggaargtggagtttgtctcagagctgccaaaaaccatcactggcaagattgaacggaaggaacttcggaaaaaggagactggtcagatgtaatcggcagtgaact

SEQ ID NO: 33484 - DNA, 201 bp, Homo sapiens
cctacgacgtccaggtcattgatgacaagggcagcatcctgccacctaacacagaaggaaacattggcatcagaatcaaacctgtcaggcctgtgagcctmttcatgtgctatgagggtgacccagagaagacagctaaagtggaatgtggggacttctacaacactggggacagaggaaagatggatgaagagggctaca

SEQ ID NO: 33485 - DNA, 201 bp, Homo sapiens
acaaccctccttcccaggaagtaggaaattacggagcctgaagacatctgatgtctcctggtgcctgtcggactcaggatggattgtggctaccatttggwccctggtagaaccatggacagcgggttgtacagtctttatccaccatctgccacagtttgacaccaaggtcatcatacagacattgttgaaataccccat

SEQ ID NO: 33486 - DNA, 201 bp, Homo sapiens
ggggacttctacaacactggggacagaggaaagatggatgaagagggctacatttgtttcctggggaggagtgatgacatcattaatgcctctgggtatcrcatcgggcctgcagaggttgaaagcgctttggtggagcacccagcggtggcggagtcagccgtggtgggcagcccagacccgattcgaggggaggtggtg

SEQ ID NO: 33487 - DNA, 201 bp, Homo sapiens
gaggaaagatggatgaagagggctacatttgtttcctggggaggagtgatgacatcattaatgcctctgggtatcgcatcgggcctgcagaggttgaaagygctttggtggagcacccagcggtggcggagtcagccgtggtgggcagcccagacccgattcgaggggaggtggtgaaggcctttattgtcctgaccccac

SEQ ID NO: 33488 - DNA, 201 bp, Homo sapiens
catcctgttgaaggccaaagacattctctatcgactacagttgtctaaagccaagggcattgtgaccatagatgcccttgcctcagaggtggactccatascttctcagtgcccctctctgaaaaccaagctcctggtgtctgatcacagccgtgaagggtggctggacttccgatcgctggttaaatcagcatccccaga

SEQ ID NO: 33489 - DNA, 201 bp, Homo sapiens
ttcaccagtgggaccacaggcttccccaagatggcaaaacactcccatgggttggccttacaaccctccttcccaggaagtaggaaattacggagcctgargacatctgatgtctcctggtgcctgtcggactcaggatggattgtggctaccatttggaccctggtagaaccatggacagcgggttgtacagtctttatc

SEQ ID NO: 33490 - DNA, 201 bp, Homo sapiens
tctacgagaactatgggcagtcggaaacgggactaatttgtgccacctactggggaatgaagatcaagccgggtttcatggggaaggccactccaccctaygacgtccaggtcattgatgacaagggcagcatcctgccacctaacacagaaggaaacattggcatcagaatcaaacctgtcaggcctgtgagcctcttca

SEQ ID NO: 33491 - DNA, 201 bp, Homo sapiens
aacctgtcaggcctgtgagcctcttcatgtgctatgagggtgacccagagaagacagctaaagtggaatgtggggacttctacaacactggggacagaggwaagatggatgaagagggctacatttgtttcctggggaggagtgatgacatcattaatgcctctgggtatcgcatcgggcctgcagaggttgaaagcgctt

SEQ ID NO: 33492 - DNA, 201 bp, Homo sapiens
cttacaaccctccttcccaggaaggaaattacggagcctgaagacatctgatgtctcctggtgcctgtcggactcaggatggattgtggctaccatttggwccctggtagaaccatggacagcgggttgtacagtctttatccaccatctgccacagtttgacaccaaggtcatcatacagacattgttgaaataccccat

SEQ ID NO: 33493 - DNA, 201 bp, Homo sapiens; identical to SEQ ID NO: 33488

SEQ ID NO: 33494 - DNA, 201 bp, Homo sapiens
ttcttcaccagtgggaccacaggcttccccaagatggcaaaacactcccatgggttggccttacaaccctccttcccaggaaggaaattacggagcctgargacatctgatgtctcctggtgcctgtcggactcaggatggattgtggctaccatttggaccctggtagaaccatggacagcgggttgtacagtctttatc

SEQ ID NO: 33495 - DNA, 201 bp, Homo sapiens; identical to SEQ ID NO: 33487

SEQ ID NO: 33496 - DNA, 201 bp, Homo sapiens; identical to SEQ ID NO: 33482

SEQ ID NO: 33497 - DNA, 201 bp, Homo sapiens; identical to SEQ ID NO: 33483

SEQ ID NO: 33498 - DNA, 201 bp, Homo sapiens
gcctcttgctacaggtcattgatgacaagggcagcatcctgccacctaacacagaaggaaacattggcatcagaatcaaacctgtcaggcctgtgagcctmttcatgtgctatgagggtgacccagagaagacagctaaagtggaatgtggggacttctacaacactggggacagaggaaagatggatgaagagggctaca

SEQ ID NO: 33499 - DNA, 145 bp, Homo sapiens
atgaagatcaagccgggtttcatggggaaggccactccaccctaygacgtccagtttcatatggaggcctcagttgaaaactgcattattgtgagcatgaacaccgctgaccctggcagccagggcatcacacacagcctcttgc

SEQ ID NO: 33500 - DNA, 201 bp, Homo sapiens; identical to SEQ ID NO: 33486

SEQ ID NO: 33501 - DNA, 201 bp, Homo sapiens; identical to SEQ ID NO: 33491

SEQ ID NO: 33502 - DNA, 201 bp, Homo sapiens
gaaatgggcagacgtcatcctttggctcaaagccagatgtccgtgtggaggggacatagacactgcatggccctatgtggctctgcattctagtcagacayctaacacctccccaagcttctgctataatgtagggaatagatgaatagctacagaatcacacaactagaaagtgtcacctatgacaagagcagtgaaggt

SEQ ID NO: 33503 - DNA, 201 bp, Homo sapiens
atcacacaactagaaagtgtcacctatgacaagagcagtgaaggtgaggtacttgctgccacagcagaatctaaagaaagcattgagtcctggggctggamgaggttaccagggaaggcttgctggaaaagtgactaatgagtcaggagcaaggaacgtccagggagtgggagcagcacatgcgcgtgctgtggcaggagg

SEQ ID NO: 33504 - DNA, 201 bp, Homo sapiens
gaggtttactccaccgcagcctgcagagccgtggagctttgtgaagaatgccaccttgtaccctcctatgttcacccaagatcccaaggcggggcagttamtctcagagctatttacaaactgaaaagagaacattcctctcaagctttctgaagactgtctttacctcaatatttacactcctgctgacttgaccaagaa

SEQ ID NO: 33505 - DNA, 201 bp, Homo sapiens
tttttgtgattgtatttgaaaatccaattataataaaaaaaattaaagtaaatactggaacagaagatcggcaaaatgatattttgcatcatggagccctrgatgttggggaaaacgttatgcctagcaaacaaaggagacaatgttctacttacttaagactaggagaattcaaaaatggaaactttgaaatgtcaggtg

SEQ ID NO: 33506 - DNA, 201 bp, Homo sapiens
aatactggaacagaagatcggcaaaatgatattttgcatcatggagccctagatgttggggaaaacgttatgcctagcaaacaaaggagacaatgttctasttacttaagactaggagaattcaaaaatggaaactttgaaatgtcaggtgtaaatcaaaaaattccatttgatatacattgtatgaggatatatgtcacc

SEQ ID NO: 33507 - DNA, 201 bp, Homo sapiens
ccctgcaagtctgtacaccaacatgaatgtgtttgaaaattatgaagcaagcaaggcttacagtagtgttgatgagtacttttgggggaaaccaccttcarcaggagatgtttttgtgattgtatttgaaaatccaattataataaaaaaaattaaagtaaatactggaacagaagatcggcaaaatgatattttgcatca

SEQ ID NO: 33508 - DNA, 201 bp, Homo sapiens
ttgaaaatccaattataataaaaaaaattaaagtaaatactggaacagaagatcggcaaaatgatattttgcatcatggagccctagatgttggggaaaaygttatgcctagcaaacaaaggagacaatgttctacttacttaagactaggagaattcaaaaatggaaactttgaaatgtcaggtgtaaatcaaaaaattc

SEQ ID NO: 33509 - DNA, 201 bp, Homo sapiens
tgggccatggggtggagcagacagacttggagtttggaagccagatggaccaagcaaggagcctgactctgagctcaccagctgtgcaattcgggccaagrtcacatgtgcaccatggagggcaaaagacttggcggtttcgaaccctatggtttaaaggaaagtcaatgttagaaaacataacatcaacacaagaattcc

SEQ ID NO: 33510 - DNA, 201 bp, Homo sapiens
tccagtggtcacaatggactcgctcaagatactgtggccttgtgaccagccagaaatggacgaggtgccctcttatcccgagcagctcaaggaggaaaaargcatcttctccatttcagatgtgtctttctgggtgaagggatctccatttgcgttaacatccctgaccccctctgccactcacttattcctgctcaaggg

SEQ ID NO: 33511 - DNA, 131 bp, Homo sapiens
atgggccatggggtggagcagacagacttgsagtttggaagccagatggaccaagcaaggagcctgactctgagctcaccagctgtgcaattcgggccaagatcacatgtgcaccatggagggcaaaagac

SEQ ID NO: 33512 - DNA, 163 bp, Homo sapiens
atgggccatggggtggagcagacagacttggagtttggaagccagatggaccaagcaaggagmctgactctgagctcaccagctgtgcaattcgggccaagatcacatgtgcaccatggagggcaaaagacttggcggtttcgaaccctatggtttaaaggaa

SEQ ID NO: 33513 - DNA, 201 bp, Homo sapiens
gcggccagcaggaggctgattaagagaactctccatatgattaggtgaccttcagaatcgaaatcaactttccagcagagtatccattcaaactaccaaakatcacatttaaaacaaagatctatcacccaaatatcgacgaaaaggggcaggtctgtctgtcagtaattagtgctgaaaactggaagccagcaaccaaaa

SEQ ID NO: 33514 - DNA, 201 bp, Homo sapiens
cttagcaagggcttattgttcctgacaactctccatatgattaggtgaccttcagaatcgaaatcaactttccagcagagtatccattcaaactaccaaakatcacatttaaaacaaagatctatcacccaaatatcgacgaaaaggggcaggtctgtctgtcagtaattagtgctgaaaactggaagccagcaaccaaaa

SEQ ID NO: 33515 - DNA, 201 bp, Homo sapiens
attgcgcttccgacgagtgcttcctgcctgaggccaaggtcacccagcagccgggcccatcgggggattcgtttcctgtatctctcgagagcgggcatccrgtctcctggaccaaggaagaaaactacattttcaggctttcccagttccggaagccactccagcggtggctgcggggcaaccctcaggcgatcacccccg

SEQ ID NO: 33516 - DNA, 201 bp, Homo sapiens
ggaaagttatactagtattttcttaagtgtggaatcaaatgagcacataagctgtgtccctgtgaaaagaggtttgtagcctttcaggtgcctgctcctattcttcatttctctgtgaccattgatcactgtcctttgtgcattgtgtgtctaagatgtcttcaggggaaagatgggtaagagacagtgttgctaatgctg

SEQ ID NO: 33517 - DNA, 201 bp, Homo sapiens
gaaagttatactagtattttcttaagtgtggaatcaaatgagcacataagctgtgtccctgtgaaaagaggtttgtagcctttcaggtgcctgctcctattcttcatttctctgtgaccattgatcactgtcctttgtgcattgtgtgtctaagatgtcttcaggggaaagatgggtaagagacagtgttgctaatgctgt

SEQ ID NO: 33518 - DNA, 201 bp, Homo sapiens
ttttccaggaggccggtatctcctgcacagatttcatccgcaccacggaggcccggcaccgggtggctgtgcagcacttctggggggtgcttaagtcccgyggtctgctctacaagggcgtctatgaaggttggtattgcgcttccgacgagtgcttcctgcctgaggccaaggtcacccagcagccgggcccatcggggg

SEQ ID NO: 33519 - DNA, 201 bp, Homo sapiens
aaagttatactagtattttcttaagtgtggaatcaaatgagcacataagctgtgtccctgtgaaaagaggtttgtagcctttcaggtgcctgctcctattcttcatttctctgtgaccattgatcactgtcctttgtgcattgtgtgtctaagatgtcttcaggggaaagatgggtaagagacagtgttgctaatgctgtt

SEQ ID NO: 33520 - DNA, 201 bp, Homo sapiens
ccagttccggaagccactccagcggtggctgcggggcaaccctcaggcgatcacccccgaaccatttcatcacgtagttcttcagtggctggacgaggagytgcccgacctgtccgtgtctcgcagaagtagccacttgcactggggcattccggtgcccggggatgattcgcagaccatctatgtatggctggatgccct

SEQ ID NO: 33521 - DNA, 201 bp, Homo sapiens
tggatagtaatttccatatgttctttataaccactctgtatattataagcaaagttttttcatattgtatctttttctgttgagcactttatgcattttaktctattgcatttgagaatgtagtttagaaattcactgtttaaagccatgtgaaaactgatagaggataatgaaaatgagtgtacattattttgaatttaa

SEQ ID NO: 33522 - DNA, 201 bp, Homo sapiens
gtgtcttaggcaactttatcagtatcaatggaaaaatgataggcactacaatgaaatggcaggatgccaatatgagatatttcaggaataataagaaatamagtttgtttgtataaaataaactatctcaagaaagttttcaacgacagtgatagtgttcatttgtaagagagagttctagaacttcgatgtccagtgcag

SEQ ID NO: 33523 - DNA, 201 bp, Homo sapiens
ttttgctaatgcctcagaacctgagcgatgccaaaagatgccttttaacctggatgatccctatccactgcttgtagtgaacattggctcaggagtcagtrttttagcagtccattccaaagacaactataaacgagtgactgggacaagccttggagggggtacctttctgggtttatgcagtttattgactggctgtga

SEQ ID NO: 33524 - DNA, 201 bp, Homo sapiens
tggaaatattgggttaaagaaaaatacacaattaaaatgaatcttggccaggcgcagtggctcacgcctctaatcccagcactttgagaggccagggtggkcaggtcacctgaggtcaggagttcgagaccagcctggccagtgtggcaaaaccctgcctactaaaaatacaaaaattagccaggcatggtggtgcgcacc

SEQ ID NO: 33525 - DNA, 201 bp, Homo sapiens
gagtggggttgagccctctgccttcaaccttaagatttaggaagttctttccccaactgtctaacttggaaaggtagatgagtctgaattttgaagtaacraatgcaaattccactcagcagaggcaatgttatttatgtacatagggatagtggaatgagttttaatagattctgtccaaaaggggtttgttcctcttat

SEQ ID NO: 33526 - DNA, 201 bp, Homo sapiens
agtgctcctgagacagtcatacaggactttctcagttacactttgaaagagaggtcagaagactctccctctgaggttttgctcatgtccccctggccctygtctgtggccatcttccccaatggtgatatgattggctcctttctgttgcactctttgtcaaccactttggcaggtgcagttcaatgcttatcataattt

SEQ ID NO: 33527 - DNA, 201 bp, Homo sapiens
gagtcgccgcctctgctctcagtgccccggatcggaggccgtccatcgcccctcgggccgacgccatgaagatcaaagatgccaagaaaccctctttcccrtggtttggcatggacattgggggaactctagtaaagctctcgtactttgaacctattgatatcacagcagaggaagagcaagaagaagttgagagtttaa

SEQ ID NO: 33528 - DNA, 201 bp, Homo sapiens
aagattgagcaacataggaaaaggggaagagaggctgagtgtcaccaaggtccaaactccatttataaaaatactgcaaaaccaggagttgatggtagaartgcatatgatccatggcaggagtaaatctctccacctcctctaactctctgaaaactctagagttggagcaagtcttccatttgcttcttatccccttaa

SEQ ID NO: 33529 - DNA, 201 bp, Homo sapiens
atttgccaaatattagactctataaaaatttctgaggttttttttcttttacctttgagtgtacatgtgattgctataatgtaaataccagtcccttaaasactgtttctataagcagaatgatgcagcacaaagtggaaaggttttcctcttattccagcagtattcttgccttcaaagagtagtccatcttgccttgat

SEQ ID NO: 33530 - DNA, 201 bp, Homo sapiens; identical to SEQ ID NO: 33527

SEQ ID NO: 33531 - DNA, 150 bp, Homo sapiens
ttttgctaatgcctcagaacctgagcgatgccaaaagatgccttttaacctggatgatccctatccactgcttgtagtgaacattggctcaggagtcagtrttttagcagtccattccaaagacaactataaacgagtgactgggacaag

SEQ ID NO: 33532 - DNA, 201 bp, Homo sapiens; identical to SEQ ID NO: 33521

SEQ ID NO: 33533 - DNA, 201 bp, Homo sapiens; identical to SEQ ID NO: 33522

SEQ ID NO: 33534 - DNA, 201 bp, Homo sapiens; identical to SEQ ID NO: 33523

SEQ ID NO: 33535 - DNA, 201 bp, Homo sapiens; identical to SEQ ID NO: 33524

SEQ ID NO: 33536 - DNA, 201 bp, Homo sapiens; identical to SEQ ID NO: 33525

SEQ ID NO: 33537 - DNA, 201 bp, Homo sapiens; identical to SEQ ID NO: 33526

SEQ ID NO: 33538 - DNA, 201 bp, Homo sapiens; identical to SEQ ID NO: 33527

SEQ ID NO: 33539 - DNA, 201 bp, Homo sapiens; identical to SEQ ID NO: 33528

SEQ ID NO: 33540 - DNA, 201 bp, Homo sapiens; identical to SEQ ID NO: 33529

SEQ ID NO: 33541 - DNA, 201 bp, Homo sapiens; identical to SEQ ID NO: 33521

SEQ ID NO: 33542 - DNA, 201 bp, Homo sapiens; identical to SEQ ID NO: 33522

SEQ ID NO: 33543 - DNA, 201 bp, Homo sapiens
ttttgctaatgcctcagaacctgagcgatgccaaaagatgccttttaacctggatgatccctatccactgcttgtagtgaacattggctcaggagtcagtrttttagcagtccattccaaagacaactataaacgagtgactgggacaagttttgggaatatgatttataaggagaagcgagaatctgttagtaaagaaga

SEQ ID NO: 33544 - DNA, 201 bp, Homo sapiens; identical to SEQ ID NO: 33524

SEQ ID NO: 33545 - DNA, 201 bp, Homo sapiens; identical to SEQ ID NO: 33525

SEQ ID NO: 33546 - DNA, 201 bp, Homo sapiens; identical to SEQ ID NO: 33526

SEQ ID NO: 33547 - DNA, 201 bp, Homo sapiens; identical to SEQ ID NO: 33527

SEQ ID NO: 33548 - DNA, 201 bp, Homo sapiens; identical to SEQ ID NO: 33528

SEQ ID NO: 33549 - DNA, 201 bp, Homo sapiens; identical to SEQ ID NO: 33529

SEQ ID NO: 33550 - DNA, 201 bp, Homo sapiens
tggaagtgggagcctgtcaaagcaaaagcagactggtcaagagcaaagaccatagcaacggtttcttgggatgctcaaggcatttcacttgttggctttcyggatggccaaagaatgataatatttgtttactatgagagtgttttgaaaaaattacccaaagctttagcatgaaaatgcccaagaagcttcaccagacag

SEQ ID NO: 33551 - DNA, 201 bp, Homo sapiens
gacgtggaaagcactattcacagtagtcgagatatgaactcaaccttcaagatatgaactcaaccttcgtgcccatcagtgaataaatggatgaagaggayaaagggtcttcaaaaagttcataggaaatgtgtagtacttaaaaggaaactatgcatggatttcaacttttttacaccaaaataaactcatactaacttg

SEQ ID NO: 33552 - DNA, 201 bp, Homo sapiens
tatgaactcaaccttcaagatatgaactcaaccttcgtgcccatcagtgaataaatggatgaagaggacaaagggtcttcaaaaagttcataggaaatgtrtagtacttaaaaggaaactatgcatggatttcaacttttttacaccaaaataaactcatactaacttgtcataacatacctgaacaggaagtagtttgag

SEQ ID NO: 33553 - DNA, 201 bp, Homo sapiens
ccctaaaggaattggcagtttataaatagctaactcattttaagaaggagtgaaataattttgaagatgaagcccgcagcagcagaccatccacatcaatrtgtgaaaaaaattaatctcgttcatgcctatgattaacagcagaaataatagccaacaccatagacatctcagtttgatcagcttacacaattctgactg

SEQ ID NO: 33554 - DNA, 108 bp, Homo sapiens
aaaattacccaaagctttagcatgaaaatgcccaagaagcttcaccagacagtccttctcccctaaaactatgctcctgctcatttctctcagctaaatasggttatt

SEQ ID NO: 33555 - DNA, 201 bp, Homo sapiens
gtagggacatggatgaaattgtaaatcatcattctcagtaaactatcacaagaacaaaaaaccaaacactgcatattctcactcataggtgggaattgaayaatgagatcacatgatcattgtttttttaaaaaaatgctcttacataatattgtcagagaaatgtagcagtgaatttaaaacaaacttagaatctgtgaa

SEQ ID NO: 33556 - DNA, 201 bp, Homo sapiens
atgcagccataaaaaatgatgagttcatgtcctttgtagggacatggatgaaattgtaaatcatcattctcagtaaactatcacaagaacaaaaaaccaarcactgcatattctcactcataggtgggaattgaataatgagatcacatgatcattgtttttttaaaaaaatgctcttacataatattgtcagagaaatgt

SEQ ID NO: 33557 - DNA, 201 bp, Homo sapiens
tatacaccatggaatactatgcagccataaaaaatgatgagttcatgtcctttgtagggacatggatgaaattgtaaatcatcattctcagtaaactatcrcaagaacaaaaaaccaaacactgcatattctcactcataggtgggaattgaataatgagatcacatgatcattgtttttttaaaaaaatgctcttacata

SEQ ID NO: 33558 - DNA, 201 bp, Homo sapiens
agactggattaagaaaatgtggcacatatacaccatggaatactatgcagccataaaaaatgatgagttcatgtcctttgtagggacatggatgaaattgkaaatcatcattctcagtaaactatcacaagaacaaaaaaccaaacactgcatattctcactcataggtgggaattgaataatgagatcacatgatcattg

SEQ ID NO: 33559 - DNA, 201 bp, Homo sapiens
catgcacacgtatgtttattgcggcactattcacaatagcaaagacttggaaccaacccaaatgtccaacaatgatagactggattaagaaaatgtggcayatatacaccatggaatactatgcagccataaaaaatgatgagttcatgtcctttgtagggacatggatgaaattgtaaatcatcattctcagtaaactat

SEQ ID NO: 33560 - DNA, 201 bp, Homo sapiens
aaaggactataaatcttgctgctataaagacacatgcacacgtatgtttattgcggcactattcacaatagcaaagacttggaaccaacccaaatgtccarcaatgatagactggattaagaaaatgtggcacatatacaccatggaatactatgcagccataaaaaatgatgagttcatgtcctttgtagggacatggat

SEQ ID NO: 33561 - DNA, 201 bp, Homo sapiens
taccatttgacccagccatcccattactgggtatatacccaaaggactataaatcttgctgctataaagacacatgcacacgtatgtttattgcggcactmttcacaatagcaaagacttggaaccaacccaaatgtccaacaatgatagactggattaagaaaatgtggcacatatacaccatggaatactatgcagcca

SEQ ID NO: 33562 - DNA, 201 bp, Homo sapiens
atggatgaaattgtaaatcatcattctcagtaaactatcacaagaacaaaaaaccaaacactgcatattctcactcataggtgggaattgaataatgagawcacatgatcattgtttttttaaaaaaatgctcttacataatattgtcagagaaatgtagcagtgaatttaaaacaaacttagaatctgtgaagactcacc

SEQ ID NO: 33563 - DNA, 201 bp, Homo sapiens
actaaagaaaaaaaacgaagcttttaaagaattaaagttagttttatttagaagtcttcttgaggattatagaccaaggcctgtagcctgggaggaggctkttagaaaggttctctcagactcctccaacgtagtattttagtttatacataggtggtgaagatttagtatgtgaaaaattacatcaaggtttgggtgtta

SEQ ID NO: 33564 - DNA, 201 bp, Homo sapiens
cactgactactctttgctgataagcttggaagcagcctcagaatgcatatcaacacccacctggggcagcccctaccaatggatcagagttggcctggcarggagtagaaacctatttgctgtgtctctctctctgtctctctctctccctttccccctccctctctccctccccactccttctctctctctctttctttc

SEQ ID NO: 33565 - DNA, 201 bp, Homo sapiens
aaattctcccagcaaagggaaatgggcaaacacggcctcttacatttgccactttgtttcacgaagtttttggtcataaattgtttggttgtgttggtaakaattaatgttgattgccatctgtagttagaagggctcttgtttaggaaggttggtaatttttagttgtagttgtatcagacctagtgtgttttttagcct

SEQ ID NO: 33566 - DNA, 201 bp, Homo sapiens
ccagcaaagggaaatgggcaaacacggcctcttacatttgccactttgtttcacgaagtttttggtcataaattgtttggttgtgttggtaagaattaatrttgattgccatctgtagttagaagggctcttgtttaggaaggttggtaatttttagttgtagttgtatcagacctagtgtgttttttagccttttcttgg

SEQ ID NO: 33567 - DNA, 201 bp, Homo sapiens
gtaataaagtctgttgtagactggaaaaaatatgatatttaataaaattggaatatatatttgtatacttttaattgtattattttttatacttatatttrttggagtcttttttatgaaaagcaatgttggactagaatttattgtaaatgcctttatagaagaatttagaataataattctaaataagtgagaaaaata

SEQ ID NO: 33568 - DNA, 201 bp, Homo sapiens
gacagtgttatatcagaactactagacttttatacattttacatatttttagaatatttataagatatttatataaatataattttagaaaagatttaatmcaataataaaaattatgactcataaaaattggtctcatagtgtcttttctgtgttggaccaggctttaggtacttgggatatggcggtgagtgaaacaca

SEQ ID NO: 33569 - DNA, 201 bp, Homo sapiens
ctcataaaaattggtctcatagtgtcttttctgtgttggaccaggctttaggtacttgggatatggcggtgagtgaaacacaaaaagatccctcccccackgactactctttgctgataagcttggaagcagcctcagaatgcatatcaacacccacctggggcagcccctaccaatggatcagagttggcctggcaggga

SEQ ID NO: 33570 - DNA, 201 bp, Homo sapiens
acgtggctctgttacaatggtgaaatctacaaccataagaaggtgcaacactattttgaatttgaataccagaccaaagtggatggtgagataatccttcrtctttatgacaaaggaggaattgagcaaacaatttgtgtgttggatggtgtgtttgcatttgttttactggattctgccaataagaaagtgttcctgggc

SEQ ID NO: 33571 - DNA, 119 bp, Homo sapiens
ttttactggattctgccaataagaaagtgttcctgggcagagatacatgaggagtcagaccttcgtttaaagcagtgacagaagatggatttttggctgtrtgttcagaagctaaaggt

SEQ ID NO: 33572 - DNA, 171 bp, Homo sapiens
aaaggaggaattgagcaaacaatttgtgtgttggatggtgtgtttgcatttgttttactggattctgccaataagaaagtgttcctgggcagagatacatraggagtcagaccttcgtttaaagcagtgacagaagatggatttttggctgtatgttcagaagctaaaggt

SEQ ID NO: 33573 - DNA, 201 bp, Homo sapiens
gacatgcagactaataaagcgccaccatcattttatctctcagtgcaacactattttgaatttgaataccagaccaaagtggatggtgagataatccttcrtctttatgacaaaggaggaattgagcaaacaatttgtgtgttggatggtgtgtttgcatttgttttactggattctgccaataagaaagtgttcctgggc

SEQ ID NO: 33574 - DNA, 201 bp, Homo sapiens
caaggagtctataacgttttggttttgctattgcttcctaaggtgcaacactattttgaatttgaataccagaccaaagtggatggtgagataatccttcrtctttatgacaaaggaggaattgagcaaacaatttgtgtgttggatggtgtgtttgcatttgttttactggattctgccaataagaaagtgttcctgggc

SEQ ID NO: 33575 - DNA, 119 bp, Homo sapiens; identical to SEQ ID NO: 33571

SEQ ID NO: 33576 - DNA, 171 bp, Homo sapiens; identical to SEQ ID NO: 33572

SEQ ID NO: 33577 - DNA, 201 bp, Homo sapiens
agtgggtgcagagccgggtggctggggtgagacccttggctggcagaagctgcctgccaaatgtcagcagaggcacagcagctaggaggcccttgaagccyccaccgtactgagggaacagcactcactgccgtcctcagaggccaaggccacaggcataagaggatcacccagctgggggcttgtgtatgcctgatatta

SEQ ID NO: 33578 - DNA, 201 bp, Homo sapiens
ggagccttccaaccccgcatttgtgactcttcctcatcctactgaagtaacaaccccgtcaccgcagatccctcctgaggcacacgctgctgacagccagrcgctggcccttctgctgggagtggtgcccatgcagcggaacggtcacaagcaggccaggacgatctgccagaagcccgcctcaccgcaggcctgtgacgg

SEQ ID NO: 33579 - DNA, 201 bp, Homo sapiens
cagcagtcccctagggcagctcaggagctccggccacctgaactggcccttccatgggcaggaccactcctgtgggcagcacagtgggtgcagagccgggkggctggggtgagacccttggctggcagaagctgcctgccaaatgtcagcagaggcacagcagctaggaggcccttgaagcctccaccgtactgagggaac

SEQ ID NO: 33580 - DNA, 201 bp, Homo sapiens
gactcttcctcatcctactgaagtaacaaccccgtcaccgcagatccctcctgaggcacacgctgctgacagccaggcgctggcccttctgctgggagtgrtgcccatgcagcggaacggtcacaagcaggccaggacgatctgccagaagcccgcctcaccgcaggcctgtgacggcgtcaggctgagtctgcaccgagc

SEQ ID NO: 33581 - DNA, 201 bp, Homo sapiens
acagtgggtgcagagccgggtggctggggtgagacccttggctggcagaagctgcctgccaaatgtcagcagaggcacagcagctaggaggcccttgaagyctccaccgtactgagggaacagcactcactgccgtcctcagaggccaaggccacaggcataagaggatcacccagctgggggcttgtgtatgcctgatat

SEQ ID NO: 33582 - DNA, 201 bp, Homo sapiens
agcacagtgggtgcagagccgggtggctggggtgagacccttggctggcagaagctgcctgccaaatgtcagcagaggcacagcagctaggaggcccttgragcctccaccgtactgagggaacagcactcactgccgtcctcagaggccaaggccacaggcataagaggatcacccagctgggggcttgtgtatgcctga

SEQ ID NO: 33583 - DNA, 116 bp, Homo sapiens
gatctgatcttacagtcaaggaaaaagaagaactgattgaagagtggcaaccacaacctcttgttcctcctgtcccaaaagaccatcctgctgtcaactayaacatcgtttcagga

SEQ ID NO: 33584 - DNA, 201 bp, Homo sapiens
tttaggaggctcctgcttaccatcttattttggaagggattctgttactctggataatcagacttcttttctctaagacttacaaattacaggaacgatcygatcttacagtcaaggaaaaagaagaactgattgaagagtggcaaccacaacctcttgttcctcctgtcccaaaagaccatcctgctgtcaactacaaca

SEQ ID NO: 33585 - DNA, 187 bp, Homo sapiens
aggtgcttgtgacccaccttccggaaggaagcggttaactatggcgacctccacggagcagtgggttctggtggggatggtacaggygctttaggaggctcctgcttaccatcttattttggaagggattctgttactctggataatcagacttcttttctctaagacttacaaattacaggaacga

SEQ ID NO: 33586 - DNA, 201 bp, Homo sapiens
ctatggcgaccgccatggagcagtgggttctggtggagatggtacagttgctttacgaggctcctgcttaccatcttattttggaagggattctgatactmtggataatcagacttcttttctctaagactcacaaattacaagaacgatctgatcttacagtcaaagaaaaagaagaactgattgaagagtggcaaccag

SEQ ID NO: 33587 - DNA, 127 bp, Homo sapiens
ttaacccctagccttccggaaggaagyggctaactatggcgaccgccatggagcagtgggttctggtggagatggtacagttgctttacgaggctcctgcttaccatcttattttggaagggattct

SEQ ID NO: 33588 - DNA, 172 bp, Homo sapiens
tctgatactctggataatcagacttcttttctctaagactcacaaattacaagaacgatctgatcttacagtcaaagaaaaagaagaactgattgaagagwggcaaccagaacctcttgttcctcctgtcccaaaagaccatcctgctctcaaccacaacatcgtttcagga

SEQ ID NO: 33589 - DNA, 197 bp, Homo sapiens
cttaccatcttattttggaagggattctgatactctggataatcagacttcttttctctaagactcacaaattacaagaacgatctgatcttacagtcaargaaaaagaagaactgattgaagagtggcaaccagaacctcttgttcctcctgtcccaaaagaccatcctgctctcaaccacaacatcgtttcagga

SEQ ID NO: 33590 - DNA, 201 bp, Homo sapiens
ccctagccttccggaaggaagcggctaactatggcgaccgccatggagcagtgggttctggtggagatggtacagttgctttacgaggctcctgcttaccrtcttattttggaagggattctgatactctggataatcagacttcttttctctaagactcacaaattacaagaacgatctgatcttacagtcaaagaaaaa

SEQ ID NO: 33591 - DNA, 118 bp, Homo sapiens
ttaacccctagccttccsgaaggaagcggctaactatggcgaccgccatggagcagtgggttctggtggagatggtacagttgctttacgaggctcctgcttaccatcttattttgga

SEQ ID NO: 33592 - DNA, 201 bp, Homo sapiens
ggtggagatggtacagttgctttacgaggctcctgcttaccatcttattttggaagggattctgatactctggataatcagacttcttttctctaagactyacaaattacaagaacgatctgatcttacagtcaaagaaaaagaagaactgattgaagagtggcaaccagaacctcttgttcctcctgtcccaaaagacca

SEQ ID NO: 33593 - DNA, 102 bp, Homo sapiens
cacctgggaagccatcagcctgggaaggcagccggtgcctgaatacttcaactttgcccatgatgtgctggatgtgtggagtcggctggaagagatgaagmc

SEQ ID NO: 33594 - DNA, 201 bp, Homo sapiens
aaaaaaaaaattaacaattaacatccaaacaacaaggaaatgattaacaaaattgtagtagattaactcaataacatatgatgtggccactaaaatatttragagcagtttagtatgtcttgggaaaagtgtaagctatattaattttaaaaatcagaataaaaatatttgcatactggagaatcccaactctgaaaaata

SEQ ID NO: 33595 - DNA, 201 bp, Homo sapiens
attctacctttgggagtcaccacaaaagaaaaaatcaaaatgcagaaaatgtgtggtgcactaagatgatcacacagcattaaaactaaaaaaaaaaaaaattaacaattaacatccaaacaacaaggaaatgattaacaaaattgtagtagattaactcaataacatatgatgtggccactaaaatatttgagagcagtt

SEQ ID NO: 33596 - DNA, 145 bp, Homo sapiens
ggacatatatagacataggagaggggatttatgatgggaattggctcactcgattttggaggctgagaagttccacaatctaccatctgcatgctggagayccaggaaaccccgtggtataattccatctgagtccaaaggcctg

SEQ ID NO: 33597 - DNA, 201 bp, Homo sapiens
gcctgaatacttcaactttgcccatgatgtgctggatgtgtggagtcggctggaagagcagggactgtgatgattccaggtgtcactcagctgacgcagarggacctcaagtaccggctgcaggcgtccagggccaagtccattatcaccagtgactccctagctccaagggtggacgccatcagcgccgaatgcccctcc

SEQ ID NO: 33598 - DNA, 201 bp, Homo sapiens
tcaaaggtgtgcagcttccaaatggcatccccaggatcactgggcaatgccggaaagagcaaaagaatatcactggccctgaccacatagatgctgcgcckcctagcaaatgcttggtggttcgacttctccctctgtctgggggcaggctcagcatctgcccactggtctcactaagagctttcagatttccctccacag

SEQ ID NO: 33599 - DNA, 201 bp, Homo sapiens
tcctccacatactcatacatcaaccccaaagactgctgtattatgtctgtattagtcagcattctccagagaaggagaagcaataggacatatatagacayaggagaggggatttatgatgggaattggctcactcgattttggaggctgagaagttccacaatctaccatctgcatgctggagatccaggaaaccccgtg

SEQ ID NO: 33600 - DNA, 201 bp, Homo sapiens
tttgtggccagcggaagatggtggttggccttgaccgaatcggacgtcttctggaacacgacagacactggctgggtgaaggcagcctggactctcttctytgcctggcctaatggatcttgcatttttgtgcatgagctgtcccgagttgatgccaaatttatcctgaatggttgtcatctgtgccaatccaaaaggcat

SEQ ID NO: 33601 - DNA, 201 bp, Homo sapiens
tatttgcatactggagaatcccaactctgaaaaataaagggaaaactgtagttaattgtaattttcctggagattgaggagggagggagagaaaataatgsatggtagtttttcttcttcctttttcactacatttctgtattttccaagtttttgtactaagcacatataactattttaatgaaaaagttatgttaaaga

SEQ ID NO: 33602 - DNA, 201 bp, Homo sapiens
tgcatgagctgtcccgagttgatgccaaatttatcctgaatggttgtcatctgtgccaatccaaaaggcatgaaaatcaagtctggatccatggggaaggygtccccaccctacaatgtgcagattgtggatgatgagggcaatgtcctgcctcctggagaagaggggaatgttgccgtcgtatcagaaccacccggccct

SEQ ID NO: 33603 - DNA, 201 bp, Homo sapiens
actgggttttgtggccagcggaagatggtggttggccttgaccgaatcggacgtcttctggaacacgacagacactggctgggtgaaggcagcctggactstcttctctgcctggcctaatggatcttgcatttttgtgcatgagctgtcccgagttgatgccaaatttatcctgaatggttgtcatctgtgccaatccaa

SEQ ID NO: 33604 - DNA, 201 bp, Homo sapiens
gtcggccaggctggttgaacttcagggaactcctccgggaggcatctacagagcacaactgcgtgaggacaaagtgtcaagacccactggctatctacttyaccagcggaaccaccggggaccccgagatggtcgagcactcccagagcagctacggactgggttttgtggccagcggaagatggtggttggccttgaccg

SEQ ID NO: 33605 - DNA, 201 bp, Homo sapiens
cagacagcagtcggccaggctggttgaacttcagggaactcctccgggaggcatctacagagcacaactgcgtgaggacaaagtgtcaagacccactggcyatctacttcaccagcggaaccaccggggaccccgagatggtcgagcactcccagagcagctacggactgggttttgtggccagcggaagatggtggttgg

SEQ ID NO: 33606 - DNA, 201 bp, Homo sapiens
aggtgtcactcagctgacgcagagggacctcaagtaccggctgcaggcgtccagggccaagtccattatcaccagtgactccctagctccaagggtggacrccatcagcgccgaatgcccctccctcaagaccaagctgctggtgtcagacagcagtcggccaggctggttgaacttcagggaactcctccgggaggcatc

SEQ ID NO: 33607 - DNA, 201 bp, Homo sapiens
tgcttctggaagaacaagtttgacaaacatattgtggtctggttccggtcaagcaaaattctggtaccagttcctcataccatgcacctgatgtcacccascatgcgccctattttaagggtacagccgtggtcaatggagagttcaaagacctaagccttgatgactttgaggggaaatatttggtgcttttcttctgtg

SEQ ID NO: 33608 - DNA, 201 bp, Homo sapiens
cctatcctttggatttcacctttgtgtgtcctacagaaattgttgcttctagtgacaaagctaaggaatttcacgatgtgaactttgaagttgttgcagtmtcagtggattcccactttagccgtcttgcctggataaatacaccaagaaagaatggtgctttgggccacataaacatcgcacccttgtcagatttaacta

SEQ ID NO: 33609 - DNA, 201 bp, Homo sapiens
gcttctggaagaacaagtttgacaaacatattgtggtctggttccggtcaagcaaaattctggtaccagttcctcataccatgcacctgatgtcacccagsatgcgccctattttaagggtacagccgtggtcaatggagagttcaaagacctaagccttgatgactttgaggggaaatatttggtgcttttcttctgtgt

SEQ ID NO: 33610 - DNA, 201 bp, Homo sapiens
agttcctcataccatgcacctgatgtcacccagcatgcgccctattttaagggtacagccgtggtcaatggagagttcaaagacctaagccttgatgactytgaggggaaatatttggtgcttttcttctgtgtgagccaccgcgcccagccctatcctttggatttcacctttgtgtgtcctacagaaattgttgcttct

SEQ ID NO: 33611 - DNA, 201 bp, Homo sapiens
gccggcggacagtgagggcgcgacaacaagggaggtgtcacagttttccatttagatcaacaacttcaagttcttaccatggaaaattccgagaagactgmagtggttctccttgcttgtggttcattcaatcccatcaccaacatgcacctcaggttgtttgagctggccaaggactacatgaatggaacaggaaggtac

SEQ ID NO: 33612 - DNA, 201 bp, Homo sapiens
acaggaagaagtccagatgaagtgactcatggaaccatttgtttatctgaacctgagctaaatcttaggagagaaggactatggaaatgatgttagacaaraagcaaattcaagtgattttcttattcaagttcaaaatgggtcataaagcagcagagacaactcgcagcatcaacaatgcatttggcccagaaattgcta

SEQ ID NO: 33613 - DNA, 201 bp, Homo sapiens
taaattggcataaagctgcatactttttgtctagctgtttgatttcattttttaatatagtatgccaattttgtgactgttaccatgtgaaagtcctgttraaatgaacaattgtctgccccacaatcaagaatgtatgtgtaaagtgtgaataaatctcatatcaaatgtcaaacttttacatgtgaatgattttctcaa

SEQ ID NO: 33614 - DNA, 201 bp, Homo sapiens
taatcacaagaaaggaaagaattacagttggactgattgtgacagtgccttgtcgtcctctttgaaacaccccgtgttgtccagtataccttataacactkagccacttctccccaccctccagaaggggtccacgttgaattctgaatcatcttgaaaataagattccaaccacaaaaaaaatttagccatttctttact

SEQ ID NO: 33615 - DNA, 201 bp, Homo sapiens
tgtgacctcagacactctctggctaatattttaataagctcacagcagataattctgagatcatgggtgaggggtggtgcatgttgagatttaaattggcrtaaagctgcatactttttgtctagctgtttgatttcattttttaatatagtatgccaattttgtgactgttaccatgtgaaagtcctgttgaaatgaaca

SEQ ID NO: 33616 - DNA, 201 bp, Homo sapiens
tctccccaccctccagaaggggtccacgttgaattctgaatcatcttgaaaataagattccaaccacaaaaaaaatttagccatttctttactaaaaaaamccaaaaaacaaatctgttttataatcacagatttttagacaaatttcttgtatcaggaagaaatacaaattttgtcatgtttctcaagcagtttttctga

SEQ ID NO: 33617 - DNA, 201 bp, Homo sapiens
gatcatcgattttcttcctattacttgtctctgccaccagaaatgagaattccaaagaatgggatagaaaaacatctcctgagagagacgtttgaggattycaatctgatacccaaagagattctctggcgaccaaaagaagccttcagtgatggaataacttcagttaagaattcctggtttaagattttacaggaatac

SEQ ID NO: 33618 - DNA, 201 bp, Homo sapiens
gtggagccttttcttcctggacactatgaagttttggatttaaagccaaatggcaaagttgcatccgtggaaatggttaaatatcatcactgtcgggatgwacccctgcacgccctctatgacaatgtggagaaactctttccaggttttgagatagaaactgtgaagaacaacctcaggatcctttttaataatgctgta

SEQ ID NO: 33619 - DNA, 201 bp, Homo sapiens
ttacatatattttcacaaggctccttctcctgaaaaagccgaggaggagagtgagaggcttctgagggaactctatttgtttgatgttctccgcgcagatygaactactgctgcccatggtcttgaactgagagtcccatttctagatcatcgattttcttcctattacttgtctctgccaccagaaatgagaattccaaa

SEQ ID NO: 33620 - DNA, 168 bp, Homo sapiens
aagtcagctgtcaaagcttaggtggtctttatgctgtaatgtgaaagcaaatatttcttcgtgttggatggggactgtgggtagataggggaacaatgagmgtcaactcaggctaacttgggtgtgaaaaaaataaaagtcctaaatctaaaccattgctgtagtcat

SEQ ID NO: 33621 - DNA, 201 bp, Homo sapiens
ttacgcagggttacatatattttcacaaggctccttctcctgaaaaagccgaggaggagagtgagaggcttctgagggaactctatttgtttgatgttctscgcgcagatcgaactactgctgcccatggtcttgaactgagagtcccatttctagatcatcgattttcttcctattacttgtctctgccaccagaaatga

SEQ ID NO: 33622 - DNA, 201 bp, Homo sapiens
aaagaaacgtttgatgacagacagaaggattggctgccttttatcagggggcttggactccagcttggttgctgccactctgttgaagcagctgaaagaarcccaagtacagtatcctctccagacatttgcaattggcatggaagacagccccgatttactggctgctagaaaggtggcagatcatattggaagtgaaca

SEQ ID NO: 33623 - DNA, 201 bp, Homo sapiens
gaaggatattactaccgtcaagtctttgaacgccattacccaggccgggctgactggctgagccattactggatgcccaagtggatcaatgccactgaccmttctgcccgcacgctgacccactacaagtcagctgtcaaagcttaggtggtctttatgctgtaatgtgaaagcaaatatttcttcgtgttggatggggac

SEQ ID NO: 33624 - DNA, 201 bp, Homo sapiens
tgcccatggtcttgaactgagagtcccatttctagatcatcgattttcttcctattacttgtctctgccaccagaaatgagaattccaaagaatgggatasaaaaacatctcctgagagagacgtttgaggattccaatctgatacccaaagagattctctggcgaccaaaagaagccttcagtgatggaataacttcagt

SEQ ID NO: 33625 - DNA, 201 bp, Homo sapiens; identical to SEQ ID NO: 33617

SEQ ID NO: 33626 - DNA, 201 bp, Homo sapiens; identical to SEQ ID NO: 33618

SEQ ID NO: 33627 - DNA, 201 bp, Homo sapiens; identical to SEQ ID NO: 33619

SEQ ID NO: 33628 - DNA, 168 bp, Homo sapiens; identical to SEQ ID NO: 33620

SEQ ID NO: 33629 - DNA, 201 bp, Homo sapiens; identical to SEQ ID NO: 33621

SEQ ID NO: 33630 - DNA, 201 bp, Homo sapiens; identical to SEQ ID NO: 33622

SEQ ID NO: 33631 - DNA, 201 bp, Homo sapiens; identical to SEQ ID NO: 33623

SEQ ID NO: 33632 - DNA, 201 bp, Homo sapiens; identical to SEQ ID NO: 33624

SEQ ID NO: 33633 - DNA, 201 bp, Homo sapiens; identical to SEQ ID NO: 33617

SEQ ID NO: 33634 - DNA, 201 bp, Homo sapiens; identical to SEQ ID NO: 33618

SEQ ID NO: 33635 - DNA, 201 bp, Homo sapiens; identical to SEQ ID NO: 33619

SEQ ID NO: 33636 - DNA, 168 bp, Homo sapiens; identical to SEQ ID NO: 33620

SEQ ID NO: 33637 - DNA, 201 bp, Homo sapiens; identical to SEQ ID NO: 33621

SEQ ID NO: 33638 - DNA, 201 bp, Homo sapiens; identical to SEQ ID NO: 33622

SEQ ID NO: 33639 - DNA, 201 bp, Homo sapiens; identical to SEQ ID NO: 33623

SEQ ID NO: 33640 - DNA, 201 bp, Homo sapiens; identical to SEQ ID NO: 33624

SEQ ID NO: 33641 - DNA, 201 bp, Homo sapiens; identical to SEQ ID NO: 33617

SEQ ID NO: 33642 - DNA, 201 bp, Homo sapiens; identical to SEQ ID NO: 33618

SEQ ID NO: 33643 - DNA, 201 bp, Homo sapiens; identical to SEQ ID NO: 33619

SEQ ID NO: 33644 - DNA, 168 bp, Homo sapiens; identical to SEQ ID NO: 33620

SEQ ID NO: 33645 - DNA, 201 bp, Homo sapiens; identical to SEQ ID NO: 33621

SEQ ID NO: 33646 - DNA, 201 bp, Homo sapiens; identical to SEQ ID NO: 33622

SEQ ID NO: 33647 - DNA, 201 bp, Homo sapiens
cgtgctcgtggccagggcgcagtcaggtgtcgcgtggtcctgatctaggaagagactgcggccttatcaccgtctcggtgtctgctttcaccttcaactgmccccctcctcacctggaccgctcaccctcctcctcccctctcaccccgccatccccaccagtccccacctgtctctgtagactgcaagactcatcaagtg

SEQ ID NO: 33648 - DNA, 201 bp, Homo sapiens; identical to SEQ ID NO: 33623

SEQ ID NO: 33649 - DNA, 201 bp, Homo sapiens; identical to SEQ ID NO: 33624

SEQ ID NO: 33650 - DNA, 201 bp, Homo sapiens
acattttcacaaaacagaccagcagcagctaggacatttcaacagattcggtgctattctgcacctgttgctgctgagccctttctcagtgggactagttygaactatgtggaggagatgtactgtgcttggctggaaaaccccaaaagtgtacataagtcatgggacattttttttcgcaacacgaatgccggagcccca

SEQ ID NO: 33651 - DNA, 201 bp, Homo sapiens
aggagcacaagaaccaaggctactatgactacgtgaagccaagacttcggaccaccatcagccgcgccaagcccgtctggtatgccggccgggacccagcrgctgctccagccaccggcaacaagaagacccacctgacggagctgcagcgcctcctggacacggccttcgacctggacgtcttcaagaacttctcgtaga

SEQ ID NO: 33652 - DNA, 201 bp, Homo sapiens
taccggcgcaacggccacaacgagatggatgagcccatgttcacgcagccgctcatgtacaagcagatccgcaagcagaagcctgtgttacagaagtacgmtgagctgctggtgtcgcagggtgtggtcaaccagcctgagtatgaggaggaaatttccaagtatgataagatctgtgaggaagcttttgccagatctaaa

SEQ ID NO: 33653 - DNA, 201 bp, Homo sapiens
catcgttttctttgctgtgccaaagcaggtcagaagagggagaggaggggctgggggtgaggggccaggccatggccaaggggccagctgcccctcatttrtcactctgaccttcacagggacagatctgatttatttattttggttaaaaaaaaaaaaaaggaacagaaacaactttgcattgcattggcttgacccata

SEQ ID NO: 33654 - DNA, 201 bp, Homo sapiens
acacgaatgccggagccccaccgggcactgcctaccagagtccccttcccctgagccgaggctccctggctgctgtggcccatgcacagtccctggtagargcacagcccaacgtggacaagctcgtggaggaccacctggcagtgcagtcgctcatcagggcatatcagatacgagggcaccatgtagcacagctggacc

SEQ ID NO: 33655 - DNA, 201 bp, Homo sapiens
tcttggtcctgttaaccctccacctcctctcttggactccctccccaccccaaccactctttctttctcctttaacccaatggagactttctgatgcatcrttttctttgctgtgccaaagcaggtcagaagagggagaggaggggctgggggtgaggggccaggccatggccaaggggccagctgcccctcatttatcac

SEQ ID NO: 33656 - DNA, 201 bp, Homo sapiens
tgagccgaggctccctggctgctgtggcccatgcacagtccctggtagaagcacagcccaacgtggacaagctcgtggaggaccacctggcagtgcagtcrctcatcagggcatatcagatacgagggcaccatgtagcacagctggaccccctggggattttggatgctgatctggactcctccgtgcccgctgacatta

SEQ ID NO: 33657 - DNA, 201 bp, Homo sapiens
cagagtctgtgtgtagccaggaagccccgctcaggtagccaccgccggggcactggctgctctgtcttggtcctgttaaccctccacctcctctcttggamtccctccccaccccaaccactctttctttctcctttaacccaatggagactttctgatgcatcgttttctttgctgtgccaaagcaggtcagaagaggga

SEQ ID NO: 33658 - DNA, 201 bp, Homo sapiens
gactgggctctagcggagtacatggcgtttggctcgctcctgaaggagggcatccacattcggctgagcggccaggacgtggagcggggcacattcagccmccgccaccatgtgctccatgaccagaatgtggacaagagaacctgcatccccatgaaccatctctggcccaatcaggccccctatactgtgtgcaacagc

SEQ ID NO: 33659 - DNA, 201 bp, Homo sapiens
tggggcccaagcatgccccacccacccctcctgggcccaggcagcacctggagcccacagagtctgtgtgtagccaggaagccccgctcaggtagccaccrccggggcactggctgctctgtcttggtcctgttaaccctccacctcctctcttggactccctccccaccccaaccactctttctttctcctttaacccaa

SEQ ID NO: 33660 - DNA, 201 bp, Homo sapiens
tgctgacttctgagcagttttccaggaggccggggggagcaggaggaggaaaggtagcccccgagggatgtccttggggaggggtcagctctggccacaaycctccccaccagtctcacccactaggataggaactgggccttgtgtgctggcttccgctgtcacccagcaaggcacaggctcctgtatttgagactagga

SEQ ID NO: 33661 - DNA, 201 bp, Homo sapiens
tcgcggcgcttggcggcccggggttggagatcgcggcagttgtgaaaaacttcaggacaaaaatgtttcatttaaggacttgtgctgctaagttgaggccmttgacggcttcccagactgttaagacattttcacaaaacagaccagcagcagctaggacatttcaacagattcggtgctattctgcacctgttgctgctg

SEQ ID NO: 33662 - DNA, 201 bp, Homo sapiens
gtatgccggccgggacccagcggctgctccagccaccggcaacaagaagacccacctgacggagctgcagcgcctcctggacacggccttcgacctggacrtcttcaagaacttctcgtagatgctgcctagggttgcttgggccactgccctctccacacccatgactgccccttgcttctcaactaaagaatagtgcct

SEQ ID NO: 33663 - DNA, 201 bp, Homo sapiens
atgctgcctagggttgcttgggccactgccctctccacacccatgactgccccttgcttctcaactaaagaatagtgcctcagcgctgcccacaccaccgycctcctcgctgtgccaccacccctccctctgctctcataggagttaggctgtcgtccccctccagtgcttggctgccccacaggccacacgctgcccagg

SEQ ID NO: 33664 - DNA, 201 bp, Homo sapiens; identical to SEQ ID NO: 33661

SEQ ID NO: 33665 - DNA, 201 bp, Homo sapiens; identical to SEQ ID NO: 33650

SEQ ID NO: 33666 - DNA, 201 bp, Homo sapiens; identical to SEQ ID NO: 33654

SEQ ID NO: 33667 - DNA, 201 bp, Homo sapiens; identical to SEQ ID NO: 33656

SEQ ID NO: 33668 - DNA, 201 bp, Homo sapiens
agatgcgtagagttgctcaccatggagggcccagggcagttgtgaaaaacttcaggacaaaaatgtttcatttaaggacttgtgctgctaagttgaggccmttgacggcttcccagactgttaagacattttcacaaaacagaccagcagcagctaggacatttcaacagattcggtgctattctgcacctgttgctgctg

SEQ ID NO: 33669 - DNA, 201 bp, Homo sapiens
acattttcacaaaacagaccagcagcagctaggacatttcaacagattcggtgctattctgcacctgttgctgctgagccctttctcagtgggactagttygaactatgtggaggagatgtactgtgcttggctggaaaaccccaaaagtgtacataaggtaaggctcgcagggctgtgggtctgcctcatgttggtgtgt

SEQ ID NO: 33670 - DNA, 201 bp, Homo sapiens
ggccttttagctcattatgttcgtatttttttcctgtttgtttctaacttctctgtattacatataagggcattttctaaacttttcaccacatgattacygatgtaagtcatgtcttgttttttttggtttgtttttgtttttgtttgttttgttttgtttcagacagagtcccatccatcctgggcaacagagggagac

SEQ ID NO: 33671 - DNA, 109 bp, Homo sapiens
tttttgtttttgtttgttttgttttgtttcagacagagtcccatccatcctgggcaacagagggagaccctgtctctaaaatttaaaagaaggtggggggygggtatat

SEQ ID NO: 33672 - DNA, 201 bp, Homo sapiens; identical to SEQ ID NO: 33650

SEQ ID NO: 33673 - DNA, 201 bp, Homo sapiens; identical to SEQ ID NO: 33651

SEQ ID NO: 33674 - DNA, 201 bp, Homo sapiens; identical to SEQ ID NO: 33652

SEQ ID NO: 33675 - DNA, 201 bp, Homo sapiens; identical to SEQ ID NO: 33653

SEQ ID NO: 33676 - DNA, 201 bp, Homo sapiens; identical to SEQ ID NO: 33654

SEQ ID NO: 33677 - DNA, 201 bp, Homo sapiens; identical to SEQ ID NO: 33655

SEQ ID NO: 33678 - DNA, 201 bp, Homo sapiens; identical to SEQ ID NO: 33656

SEQ ID NO: 33679 - DNA, 201 bp, Homo sapiens; identical to SEQ ID NO: 33657

SEQ ID NO: 33680 - DNA, 201 bp, Homo sapiens; identical to SEQ ID NO: 33658

SEQ ID NO: 33681 - DNA, 201 bp, Homo sapiens; identical to SEQ ID NO: 33659

SEQ ID NO: 33682 - DNA, 201 bp, Homo sapiens; identical to SEQ ID NO: 33660

SEQ ID NO: 33683 - DNA, 201 bp, Homo sapiens
ggcgcctcattcgggtggagctgagccggagacaggcagttgtgaaaaacttcaggacaaaaatgtttcatttaaggacttgtgctgctaagttgaggccmttgacggcttcccagactgttaagacattttcacaaaacagaccagcagcagctaggacatttcaacagattcggtgctattctgcacctgttgctgctg

SEQ ID NO: 33684 - DNA, 201 bp, Homo sapiens; identical to SEQ ID NO: 33662

SEQ ID NO: 33685 - DNA, 201 bp, Homo sapiens; identical to SEQ ID NO: 33663

SEQ ID NO: 33686 - DNA, 201 bp, Homo sapiens; identical to SEQ ID NO: 33650

SEQ ID NO: 33687 - DNA, 201 bp, Homo sapiens; identical to SEQ ID NO: 33651

SEQ ID NO: 33688 - DNA, 201 bp, Homo sapiens; identical to SEQ ID NO: 33652

SEQ ID NO: 33689 - DNA, 201 bp, Homo sapiens
ggacacggccttcgacctggacgtcttcaagaacttctcgtagatgctgcctagggttgcttgggccactgccctctccacacccatctgcccctcatttrtcactctgaccttcacagggacagatctgatttatttattttggttaaaaaaaaaaaaaaggaacagaaacaactttgcattgcattggcttgacccata

SEQ ID NO: 33690 - DNA, 201 bp, Homo sapiens; identical to SEQ ID NO: 33654

SEQ ID NO: 33691 - DNA, 201 bp, Homo sapiens; identical to SEQ ID NO: 33656

SEQ ID NO: 33692 - DNA, 201 bp, Homo sapiens; identical to SEQ ID NO: 33658

SEQ ID NO: 33693 - DNA, 201 bp, Homo sapiens; identical to SEQ ID NO: 33661

SEQ ID NO: 33694 - DNA, 201 bp, Homo sapiens
gtatgccggccgggacccagcggctgctccagccaccggcaacaagaagacccacctgacggagctgcagcgcctcctggacacggccttcgacctggacrtcttcaagaacttctcgtagatgctgcctagggttgcttgggccactgccctctccacacccatctgcccctcatttatcactctgaccttcacagggac

SEQ ID NO: 33695 - DNA, 201 bp, Homo sapiens; identical to SEQ ID NO: 33650

SEQ ID NO: 33696 - DNA, 201 bp, Homo sapiens; identical to SEQ ID NO: 33651

SEQ ID NO: 33697 - DNA, 201 bp, Homo sapiens; identical to SEQ ID NO: 33652

SEQ ID NO: 33698 - DNA, 201 bp, Homo sapiens; identical to SEQ ID NO: 33653

SEQ ID NO: 33699 - DNA, 201 bp, Homo sapiens; identical to SEQ ID NO: 33654

SEQ ID NO: 33700 - DNA, 201 bp, Homo sapiens; identical to SEQ ID NO: 33655

SEQ ID NO: 33701 - DNA, 201 bp, Homo sapiens; identical to SEQ ID NO: 33656

SEQ ID NO: 33702 - DNA, 201 bp, Homo sapiens; identical to SEQ ID NO: 33657

SEQ ID NO: 33703 - DNA, 201 bp, Homo sapiens; identical to SEQ ID NO: 33658

SEQ ID NO: 33704 - DNA, 201 bp, Homo sapiens; identical to SEQ ID NO: 33659

SEQ ID NO: 33705 - DNA, 201 bp, Homo sapiens; identical to SEQ ID NO: 33660

SEQ ID NO: 33706 - DNA, 166 bp, Homo sapiens
gcagttgtgaaaaacttcaggacaaaaatgtttcatttaaggacttgtgctgctaagttgaggccmttgacggcttcccagactgttaagacattttcacaaaacagaccagcagcagctaggacatttcaacagattcggtgctattctgcacctgttgctgctg

SEQ ID NO: 33707 - DNA, 201 bp, Homo sapiens; identical to SEQ ID NO: 33662

SEQ ID NO: 33708 - DNA, 201 bp, Homo sapiens; identical to SEQ ID NO: 33663

SEQ ID NO: 33709 - DNA, 201 bp, Homo sapiens
cagatgtggtagtagggaccccatctcgcatattaagccacttgcagcaagacagcctgaaacttcgtgactccctggagcttttggtggtggacgaagcygaccttcttttttcctttggctttgaagaagagctcaagagtctcctctgtcacttgccccggatttaccaggcttttctcatgtcagctacttttaacg

SEQ ID NO: 33710 - DNA, 201 bp, Homo sapiens
agaagccagatgtggtagtagggaccccatctcgcatattaagccacttgcagcaagacagcctgaaacttcgtgactccctggagcttttggtggtggaygaagctgaccttcttttttcctttggctttgaagaagagctcaagagtctcctctgtcacttgccccggatttaccaggcttttctcatgtcagctactt

SEQ ID NO: 33711 - DNA, 201 bp, Homo sapiens
gccagcagaggtcagctgtgccgagctgccccagccatgagaagagaagcctgcccttgctggcaggtggctatggccggcccagagccttcctgcccagytcctgcagccctgctgcctgggatcaggctgggagatgggccttcctgaccgccagccttcctctccccgagcacacgcacatgtagattcggggggaag

SEQ ID NO: 33712 - DNA, 201 bp, Homo sapiens
agctgctgcggcatgacctacctttgcaccccgcagtggtgaagccccacctgggccatgttcctgactacctggttcctcctgctctccgtggcctggtrcgccctcacaagaagcggaagaagctgtcttcctcttgtaggaaggccaagagagcaaagtcccagaacccactgcgcagcttcaagcacaaaggaaaga

SEQ ID NO: 33713 - DNA, 201 bp, Homo sapiens
attcagacccacagccaagccctcctgaggttgttgggcctctctggagctgagcacattgtggagcacaggcttacacccttcgtggacaggcgaggctytggtgcttactgcacagcctgaacagacagttctggggccggcagtgctgggccctttagctccttggcacttccaagctggcatcttgccccttgacaa

SEQ ID NO: 33714 - DNA, 201 bp, Homo sapiens; identical to SEQ ID NO: 33709

SEQ ID NO: 33715 - DNA, 201 bp, Homo sapiens; identical to SEQ ID NO: 33710

SEQ ID NO: 33716 - DNA, 201 bp, Homo sapiens; identical to SEQ ID NO: 33711

SEQ ID NO: 33717 - DNA, 201 bp, Homo sapiens; identical to SEQ ID NO: 33712

SEQ ID NO: 33718 - DNA, 201 bp, Homo sapiens; identical to SEQ ID NO: 33713

SEQ ID NO: 33719 - DNA, 201 bp, Homo sapiens
agggtgacatctgtcctgtgagctactcttcctgccccgggatcaagacgtccgaccaccgccctgtgtatggcctcttccgggtgaaagtgaggccgggkcgagacaacattccgttggcagctggcaaatttgatagagaactgtacttactaggaattaaaagacggatttcgaaggagattcagaggcagcaagcac

SEQ ID NO: 33720 - DNA, 201 bp, Homo sapiens
ggttctgctcagaggtggagtgctccacggtgaccacacgcatcgtgtctcagatcaagaccaagggggccttgggcatcagcttcaccttttttggcacytccttcctcttcatcacgtcccacttcacctcaggcgacgggaaggtggcggagcggctgctggactacaccaggactgtacaagccctggtcctgccca

SEQ ID NO: 33721 - DNA, 201 bp, Homo sapiens
cacgcatcgtgtctcagatcaagaccaagggggccttgggcatcagcttcaccttttttggcacctccttcctcttcatcacgtcccacttcacctcaggygacgggaaggtggcggagcggctgctggactacaccaggactgtacaagccctggtcctgcccagaaatgtgcccgacaccaacccctatcgctccagcg

SEQ ID NO: 33722 - DNA, 201 bp, Homo sapiens
ggtaaccctctctctggggtggccagcagctccccgaacctcccgcacagagacgccgccgtggcggggagctcgcccaggctgcccagcctgctgccccsgcgcccaccgcctgccctgagcctggacatcgcctccgactccctgaggacagcaaacaaggtcgactcggatcttgcagactacaagctccgcgcgcag

SEQ ID NO: 33723 - DNA, 201 bp, Homo sapiens
ccccgaacctcccgcacagagacgccgccgtggcggggagctcgcccaggctgcccagcctgctgcccccgcgcccaccgcctgccctgagcctggacatsgcctccgactccctgaggacagcaaacaaggtcgactcggatcttgcagactacaagctccgcgcgcagccgctcctggtgcgggcccacagcagcctgg

SEQ ID NO: 33724 - DNA, 201 bp, Homo sapiens
cggggagctcgcccaggctgcccagcctgctgcccccgcgcccaccgcctgccctgagcctggacatcgcctccgactccctgaggacagcaaacaaggtmgactcggatcttgcagactacaagctccgcgcgcagccgctcctggtgcgggcccacagcagcctgggccccggccggccgcggagccccctggcctgcg

SEQ ID NO: 33725 - DNA, 201 bp, Homo sapiens
tgaagtttgctgaacgaggactcacagctgcaacgtggggtgattgtattgatcaaaacccactgggaaggacaaagagtttgccgcctttcggggatccragggactgtggcgaccgtgcctctgtgccagcgtcccaggaaggaagccaaccctgagcgagcctgtcctctgtggcaggtccacacggtgtgggtgggc

SEQ ID NO: 33726 - DNA, 201 bp, Homo sapiens
tcatcacgtcccacttcacctcaggcgacgggaaggtggcggagcggctgctggactacaccaggactgtacaagccctggtcctgcccagaaatgtgccygacaccaacccctatcgctccagcgcagcggacgtcaccacccgcttcgatgaggtgttctggtttggagacttcaacttccgcctgagtggcgggcgca

SEQ ID NO: 33727 - DNA, 201 bp, Homo sapiens
tggaagttcaggatgccaccaccttgaacacctaggccagggatccccaccatgtcccgggtttctttcttcgagagtatagaaccgttcattcttgcttygtgtcccattccatctcttgaaaaaatgtagtctttgaatgtgtgaaaatctagggacattcaatctagtcttttaaattatttttccatatttatattt

SEQ ID NO: 33728 - DNA, 201 bp, Homo sapiens
tccatacagcatgggtggcagggtttggacccgcccagcagcaccacggaccccagccactctcgggggcagacgtcagaatccgttcctgagcagctccygtgccctgggggcagtcacagagccccccaacacccccgtgctctgcaccagcctctccctccacacccgaagcaggcgtccatctgtgtcctcctggca

SEQ ID NO: 33729 - DNA, 201 bp, Homo sapiens
cccgctacttcccagaccggaacgtggcactcttcgtggccacctggaacatgcagggccagaaggagctcccgcccagcctggacgagttcctgctcccrgccgaggccgactatgcccaggacctgtatgtcatcggggtccaggagggctgttctgacaggcgggagtgggagactcgtctgcaggagacgctgggcc

SEQ ID NO: 33730 - DNA, 201 bp, Homo sapiens
tcccagaccggaacgtggcactcttcgtggccacctggaacatgcagggccagaaggagctcccgcccagcctggacgagttcctgctcccagccgaggcygactatgcccaggacctgtatgtcatcggggtccaggagggctgttctgacaggcgggagtgggagactcgtctgcaggagacgctgggcccgcactatg

SEQ ID NO: 33731 - DNA, 201 bp, Homo sapiens
ccatggggcgaggaggcctgcaccccagtataagggcctccccagctgagtaagaagctgcttcccctcctctcataggccaagcctattgtgtgaaaccrtctcatggtcttggtgacgtagaccatttttgaaaccgtctcatggtcttggtgacgtagaccgtttgcttctttaactccagccgcggaatgacattag

SEQ ID NO: 33732 - DNA, 201 bp, Homo sapiens
acaagggtgacatctgtcctgtgagctactcttcctgccccgggatcaagacgtccgaccaccgccctgtgtatggcctcttccgggtgaaagtgaggccrgggcgagacaacattccgttggcagctggcaaatttgatagagaactgtacttactaggaattaaaagacggatttcgaaggagattcagaggcagcaag

SEQ ID NO: 33733 - DNA, 201 bp, Homo sapiens
ggtgacgtagaccatttttgaaaccgtctcatggtcttggtgacgtagaccgtttgcttctttaactccagccgcggaatgacattagtggaaccgggctrgggaactgctggaagttcaggatgccaccaccttgaacacctaggccagggatccccaccatgtcccgggtttctttcttcgagagtatagaaccgttca

SEQ ID NO: 33734 - DNA, 201 bp, Homo sapiens; identical to SEQ ID NO: 33719

SEQ ID NO: 33735 - DNA, 201 bp, Homo sapiens
cccctcccacagaggtggagtgctccacggtgaccacacgcatcgtgtctcagatcaagaccaagggggccttgggcatcagcttcaccttttttggcacytccttcctcttcatcacgtcccacttcacctcaggcgacgggaaggtggcggagcggctgctggactacaccaggactgtacaagccctggtcctgccca

SEQ ID NO: 33736 - DNA, 201 bp, Homo sapiens; identical to SEQ ID NO: 33721

SEQ ID NO: 33737 - DNA, 201 bp, Homo sapiens; identical to SEQ ID NO: 33722

SEQ ID NO: 33738 - DNA, 201 bp, Homo sapiens; identical to SEQ ID NO: 33723

SEQ ID NO: 33739 - DNA, 201 bp, Homo sapiens; identical to SEQ ID NO: 33724

SEQ ID NO: 33740 - DNA, 201 bp, Homo sapiens; identical to SEQ ID NO: 33726

SEQ ID NO: 33741 - DNA, 201 bp, Homo sapiens; identical to SEQ ID NO: 33725

SEQ ID NO: 33742 - DNA, 201 bp, Homo sapiens; identical to SEQ ID NO: 33727

SEQ ID NO: 33743 - DNA, 201 bp, Homo sapiens
tgcccaggacctgtatgtcatcggggtccaggagggctgttctgacagggacctcatctggttctgctcaggtgggcgcggctggaggggtgggcgcggcwggaaggtggcagcgtcccacaggtgagctgagggctgcccctcccacagaggtggagtgctccacggtgaccacacgcatcgtgtctcagatcaagacca

SEQ ID NO: 33744 - DNA, 201 bp, Homo sapiens; identical to SEQ ID NO: 33728

SEQ ID NO: 33745 - DNA, 201 bp, Homo sapiens
cccgctacttcccagaccggaacgtggcactcttcgtggccacctggaacatgcagggccagaaggagctcccgcccagcctggacgagttcctgctcccrgccgaggccgactatgcccaggacctgtatgtcatcggggtccaggagggctgttctgacagggacctcatctggttctgctcaggtgggcgcggctgga

SEQ ID NO: 33746 - DNA, 201 bp, Homo sapiens
tcccagaccggaacgtggcactcttcgtggccacctggaacatgcagggccagaaggagctcccgcccagcctggacgagttcctgctcccagccgaggcygactatgcccaggacctgtatgtcatcggggtccaggagggctgttctgacagggacctcatctggttctgctcaggtgggcgcggctggaggggtgggc

SEQ ID NO: 33747 - DNA, 201 bp, Homo sapiens; identical to SEQ ID NO: 33731

SEQ ID NO: 33748 - DNA, 201 bp, Homo sapiens; identical to SEQ ID NO: 33732

SEQ ID NO: 33749 - DNA, 201 bp, Homo sapiens; identical to SEQ ID NO: 33733

SEQ ID NO: 33750 - DNA, 201 bp, Homo sapiens
tataaacaatcagatttggacaccctggctaaagaagcatccatcccaattatcaatgggctgtcagatttgtaccatcctatccagatcctggctgattrcctcacgctccaggaacactatagctctctgaaaggtcttaccctcagctggatcggggatgggaacaatatcctgcactccatcatgatgagcgcagcg

SEQ ID NO: 33751 - DNA, 201 bp, Homo sapiens
gtataaacaatcagatttggacaccctggctaaagaagcatccatcccaattatcaatgggctgtcagatttgtaccatcctatccagatcctggctgatyacctcacgctccaggaacactatagctctctgaaaggtcttaccctcagctggatcggggatgggaacaatatcctgcactccatcatgatgagcgcagc

SEQ ID NO: 33752 - DNA, 201 bp, Homo sapiens
taaatggaaatagtactactcagggctgtcacatctacatctgtgtttttgcagtgccaatttgcattttctgagtgagttacttctactcaccttcacarcagccagtaccgcagtgccttgcatatattatatcctcaatgagtacttgtcaattgattttgtacatgcgtgtgacagtataaatatattatgaaaaat

SEQ ID NO: 33753 - DNA, 201 bp, Homo sapiens
caatcagatttggacaccctggctaaagaagcatccatcccaattatcaatgggctgtcagatttgtaccatcctatccagatcctggctgattacctcaygctccaggaacactatagctctctgaaaggtcttaccctcagctggatcggggatgggaacaatatcctgcactccatcatgatgagcgcagcgaaattc

SEQ ID NO: 33754 - DNA, 201 bp, Homo sapiens
tgaaagtctcacggacacggcccgtgtattgtctagcatggcagatgcagtattggctcgagtgtataaacaatcagatttggacaccctggctaaagaakcatccatcccaattatcaatgggctgtcagatttgtaccatcctatccagatcctggctgattacctcacgctccaggaacactatagctctctgaaagg

SEQ ID NO: 33755 - DNA, 201 bp, Homo sapiens
acggcccgtgtattgtctagcatggcagatgcagtattggctcgagtgtataaacaatcagatttggacaccctggctaaagaagcatccatcccaattakcaatgggctgtcagatttgtaccatcctatccagatcctggctgattacctcacgctccaggaacactatagctctctgaaaggtcttaccctcagctgg

SEQ ID NO: 33756 - DNA, 201 bp, Homo sapiens
ttgtaccatcctatccagatcctggctgattacctcacgctccaggaacactatagctctctgaaaggtcttaccctcagctggatcggggatgggaacartatcctgcactccatcatgatgagcgcagcgaaattcggaatgcaccttcaggcagctactccaaagggttatgagccggatgctagtgtaaccaagttg

SEQ ID NO: 33757 - DNA, 201 bp, Homo sapiens
gaggagaagaaaaagcggctccaggctttccaaggttaccaggttacaatgaagactgctaaagttgctgcctctgactggacatttttacactgcttgcmcagaaagccagaagaagtggatgatgaagtcttttattctcctcgatcactagtgttcccagaggcagaaaacagaaagtggacaatcatggctgtcatg

SEQ ID NO: 33758 - DNA, 201 bp, Homo sapiens
aaacaatgcagcttttagaaatggtcacaacttcatggttcgaaattttcggtgtggacaaccactacaaaataaagtgcagctgaagggccgtgaccttytcactctaaaaaactttaccggagaagaaattaaatatatgctatggctatcagcagatctgaaatttaggataaaacagaaaggagagtatttgccttt

SEQ ID NO: 33759 - DNA, 201 bp, Homo sapiens
atttgtaccatcctatccagatcctggctgattacctcacgctccaggaacactatagctctctgaaaggtcttaccctcagctggatcggggatgggaamaatatcctgcactccatcatgatgagcgcagcgaaattcggaatgcaccttcaggcagctactccaaagggttatgagccggatgctagtgtaaccaagt

SEQ ID NO: 33760 - DNA, 201 bp, Homo sapiens
tggctgattacctcacgctccaggaacactatagctctctgaaaggtcttaccctcagctggatcggggatgggaacaatatcctgcactccatcatgatsagcgcagcgaaattcggaatgcaccttcaggcagctactccaaagggttatgagccggatgctagtgtaaccaagttggcagagcagtatgccaaagaga

SEQ ID NO: 33761 - DNA, 201 bp, Homo sapiens
acaagaagaggagaagaaaaagcggctccaggctttccaaggttaccaggttacaatgaagactgctaaagttgctgcctctgactggacatttttacacbgcttgcccagaaagccagaagaagtggatgatgaagtcttttattctcctcgatcactagtgttcccagaggcagaaaacagaaagtggacaatcatggc

SEQ ID NO: 33762 - DNA, 201 bp, Homo sapiens
tacaatgaagactgctaaagttgctgcctctgactggacatttttacactgcttgcccagaaagccagaagaagtggatgatgaagtcttttattctcctygatcactagtgttcccagaggcagaaaacagaaagtggacaatcatggctgtcatggtgtccctgctgacagattactcacctcagctccagaagcctaa

SEQ ID NO: 33763 - DNA, 201 bp, Homo sapiens
atttggacaccctggctaaagaagcatccatcccaattatcaatgggctgtcagatttgtaccatcctatccagatcctggctgattacctcacgctccasgaacactatagctctctgaaaggtcttaccctcagctggatcggggatgggaacaatatcctgcactccatcatgatgagcgcagcgaaattcggaatgc

SEQ ID NO: 33764 - DNA, 201 bp, Homo sapiens
ctggctgattacctcacgctccaggaacactatagctctctgaaaggtcttaccctcagctggatcggggatgggaacaatatcctgcactccatcatgakgagcgcagcgaaattcggaatgcaccttcaggcagctactccaaagggttatgagccggatgctagtgtaaccaagttggcagagcagtatgccaaagag

SEQ ID NO: 33765 - DNA, 201 bp, Homo sapiens
ttggacaccctggctaaagaagcatccatcccaattatcaatgggctgtcagatttgtaccatcctatccagatcctggctgattacctcacgctccaggracactatagctctctgaaaggtcttaccctcagctggatcggggatgggaacaatatcctgcactccatcatgatgagcgcagcgaaattcggaatgcac

SEQ ID NO: 33766 - DNA, 201 bp, Homo sapiens
tatgccaaagagaatggtaccaagctgttgctgacaaatgatccattggaagcagcgcatggaggcaatgtattaattacagacacttggataagcatggracaagaagaggagaagaaaaagcggctccaggctttccaaggttaccaggttacaatgaagactgctaaagttgctgcctctgactggacatttttacac

SEQ ID NO: 33767 - DNA, 201 bp, Homo sapiens
ccgtgtattgtctagcatggcagatgcagtattggctcgagtgtataaacaatcagatttggacaccctggctaaagaagcatccatcccaattatcaatrggctgtcagatttgtaccatcctatccagatcctggctgattacctcacgctccaggaacactatagctctctgaaaggtcttaccctcagctggatcgg

SEQ ID NO: 33768 - DNA, 201 bp, Homo sapiens
gacaccctggctaaagaagcatccatcccaattatcaatgggctgtcagatttgtaccatcctatccagatcctggctgattacctcacgctccaggaacwctatagctctctgaaaggtcttaccctcagctggatcggggatgggaacaatatcctgcactccatcatgatgagcgcagcgaaattcggaatgcacctt

SEQ ID NO: 33769 - DNA, 201 bp, Homo sapiens
caccctggctaaagaagcatccatcccaattatcaatgggctgtcagatttgtaccatcctatccagatcctggctgattacctcacgctccaggaacackatagctctctgaaaggtcttaccctcagctggatcggggatgggaacaatatcctgcactccatcatgatgagcgcagcgaaattcggaatgcaccttca

SEQ ID NO: 33770 - DNA, 201 bp, Homo sapiens
accctggctaaagaagcatccatcccaattatcaatgggctgtcagatttgtaccatcctatccagatcctggctgattacctcacgctccaggaacactrtagctctctgaaaggtcttaccctcagctggatcggggatgggaacaatatcctgcactccatcatgatgagcgcagcgaaattcggaatgcaccttcag

SEQ ID NO: 33771 - DNA, 201 bp, Homo sapiens
tcttaccacacaagatattcatttgggtgtgaatgaaagtctcacggacacggcccgtgtattgtctagcatggcagatgcagtattggctcgagtgtatwaacaatcagatttggacaccctggctaaagaagcatccatcccaattatcaatgggctgtcagatttgtaccatcctatccagatcctggctgattacct

SEQ ID NO: 33772 - DNA, 201 bp, Homo sapiens
tggcagatgcagtattggctcgagtgtataaacaatcagatttggacaccctggctaaagaagcatccatcccaattatcaatgggctgtcagatttgtascatcctatccagatcctggctgattacctcacgctccaggaacactatagctctctgaaaggtcttaccctcagctggatcggggatgggaacaatatcc

SEQ ID NO: 33773 - DNA, 201 bp, Homo sapiens
ttgtctagcatggcagatgcagtattggctcgagtgtataaacaatcagatttggacaccctggctaaagaagcatccatcccaattatcaatgggctgtsagatttgtaccatcctatccagatcctggctgattacctcacgctccaggaacactatagctctctgaaaggtcttaccctcagctggatcggggatggg

SEQ ID NO: 33774 - DNA, 201 bp, Homo sapiens
agcatccatcccaattatcaatgggctgtcagatttgtaccatcctatccagatcctggctgattacctcacgctccaggaacactatagctctctgaaasgtcttaccctcagctggatcggggatgggaacaatatcctgcactccatcatgatgagcgcagcgaaattcggaatgcaccttcaggcagctactccaaa

SEQ ID NO: 33775 - DNA, 201 bp, Homo sapiens
ctgattacctcacgctccaggaacactatagctctctgaaaggtcttaccctcagctggatcggggatgggaacaatatcctgcactccatcatgatgagmgcagcgaaattcggaatgcaccttcaggcagctactccaaagggttatgagccggatgctagtgtaaccaagttggcagagcagtatgccaaagagaatg

SEQ ID NO: 33776 - DNA, 201 bp, Homo sapiens
ctatagctctctgaaaggtcttaccctcagctggatcggggatgggaacaatatcctgcactccatcatgatgagcgcagcgaaattcggaatgcaccttsaggcagctactccaaagggttatgagccggatgctagtgtaaccaagttggcagagcagtatgccaaagagaatggtaccaagctgttgctgacaaatga

SEQ ID NO: 33777 - DNA, 201 bp, Homo sapiens
gaaaggtcttaccctcagctggatcggggatgggaacaatatcctgcactccatcatgatgagcgcagcgaaattcggaatgcaccttcaggcagctactscaaagggttatgagccggatgctagtgtaaccaagttggcagagcagtatgccaaagagaatggtaccaagctgttgctgacaaatgatccattggaagc

SEQ ID NO: 33778 - DNA, 201 bp, Homo sapiens
gcgaaattcggaatgcaccttcaggcagctactccaaagggttatgagccggatgctagtgtaaccaagttggcagagcagtatgccaaagagaatggtaycaagctgttgctgacaaatgatccattggaagcagcgcatggaggcaatgtattaattacagacacttggataagcatgggacaagaagaggagaagaaa

SEQ ID NO: 33779 - DNA, 201 bp, Homo sapiens
aaccaagttggcagagcagtatgccaaagagaatggtaccaagctgttgctgacaaatgatccattggaagcagcgcatggaggcaatgtattaattacaracacttggataagcatgggacaagaagaggagaagaaaaagcggctccaggctttccaaggttaccaggttacaatgaagactgctaaagttgctgcctc

SEQ ID NO: 33780 - DNA, 201 bp, Homo sapiens
gatcctgttaaacaatgcagcttttagaaatggtcacaacttcatggttcgaaattttcggtgtggacaaccactacaaaataaagtgcagctgaagggcygtgaccttctcactctaaaaaactttaccggagaagaaattaaatatatgctatggctatcagcagatctgaaatttaggataaaacagaaaggagagta

SEQ ID NO: 33781 - DNA, 201 bp, Homo sapiens
ttcggaatgcaccttcaggcagctactccaaagggttatgagccggatgctagtgtaaccaagttggcagagcagtatgccaaagagaatggtaccaagcwgttgctgacaaatgatccattggaagcagcgcatggaggcaatgtattaattacagacacttggataagcatgggacaagaagaggagaagaaaaagcgg

SEQ ID NO: 33782 - DNA, 201 bp, Homo sapiens
ggtgtgaatgaaagtctcacggacacggcccgtgtattgtctagcatggcagatgcagtattggctcgagtgtataaacaatcagatttggacaccctggytaaagaagcatccatcccaattatcaatgggctgtcagatttgtaccatcctatccagatcctggctgattacctcacgctccaggaacactatagctct

SEQ ID NO: 33783 - DNA, 201 bp, Homo sapiens
atgaagactgctaaagttgctgcctctgactggacatttttacactgcttgcccagaaagccagaagaagtggatgatgaagtcttttattctcctcgatmactagtgttcccagaggcagaaaacagaaagtggacaatcatggctgtcatggtgtccctgctgacagattactcacctcagctccagaagcctaaattt

SEQ ID NO: 33784 - DNA, 201 bp, Homo sapiens
tttagaaatggtcacaacttcatggttcgaaattttcggtgtggacaaccactacaaaataaagtgcagctgaagggccgtgaccttctcactctaaaaawctttaccggagaagaaattaaatatatgctatggctatcagcagatctgaaatttaggataaaacagaaaggagagtatttgcctttattgcaagggaag

SEQ ID NO: 33785 - DNA, 201 bp, Homo sapiens
cgaaattttcggtgtggacaaccactacaaaataaagtgcagctgaagggccgtgaccttctcactctaaaaaactttaccggagaagaaattaaatataygctatggctatcagcagatctgaaatttaggataaaacagaaaggagagtatttgcctttattgcaagggaagtccttaggcatgatttttgagaaaaga

SEQ ID NO: 33786 - DNA, 201 bp, Homo sapiens
atattcatttgggtgtgaatgaaagtctcacggacacggcccgtgtattgtctagcatggcagatgcagtattggctcgagtgtataaacaatcagatttsgacaccctggctaaagaagcatccatcccaattatcaatgggctgtcagatttgtaccatcctatccagatcctggctgattacctcacgctccaggaac

SEQ ID NO: 33787 - DNA, 201 bp, Homo sapiens
tcctatccagatcctggctgattacctcacgctccaggaacactatagctctctgaaaggtcttaccctcagctggatcggggatgggaacaatatcctgyactccatcatgatgagcgcagcgaaattcggaatgcaccttcaggcagctactccaaagggttatgagccggatgctagtgtaaccaagttggcagagca

SEQ ID NO: 33788 - DNA, 201 bp, Homo sapiens
gcagcttttagaaatggtcacaacttcatggttcgaaattttcggtgtggacaaccactacaaaataaagtgcagctgaagggccgtgaccttctcactcyaaaaaactttaccggagaagaaattaaatatatgctatggctatcagcagatctgaaatttaggataaaacagaaaggagagtatttgcctttattgcaa

SEQ ID NO: 33789 - DNA, 201 bp, Homo sapiens
gacacggcccgtgtattgtctagcatggcagatgcagtattggctcgagtgtataaacaatcagatttggacaccctggctaaagaagcatccatcccaaytatcaatgggctgtcagatttgtaccatcctatccagatcctggctgattacctcacgctccaggaacactatagctctctgaaaggtcttaccctcagc

SEQ ID NO: 33790 - DNA, 201 bp, Homo sapiens
gccaaagagaatggtaccaagctgttgctgacaaatgatccattggaagcagcgcatggaggcaatgtattaattacagacacttggataagcatgggacragaagaggagaagaaaaagcggctccaggctttccaaggttaccaggttacaatgaagactgctaaagttgctgcctctgactggacatttttacactgc

SEQ ID NO: 33791 - DNA, 201 bp, Homo sapiens
agaaatggtcacaacttcatggttcgaaattttcggtgtggacaaccactacaaaataaagtgcagctgaagggccgtgaccttctcactctaaaaaactytaccggagaagaaattaaatatatgctatggctatcagcagatctgaaatttaggataaaacagaaaggagagtatttgcctttattgcaagggaagtcc

SEQ ID NO: 33792 - DNA, 201 bp, Homo sapiens
gaggcaatgtattaattacagacacttggataagcatgggacaagaagaggagaagaaaaagcggctccaggctttccaaggttaccaggttacaatgaakactgctaaagttgctgcctctgactggacatttttacactgcttgcccagaaagccagaagaagtggatgatgaagtcttttattctcctcgatcactag

SEQ ID NO: 33793 - DNA, 201 bp, Homo sapiens
tcactagtgttcccagaggcagaaaacagaaagtggacaatcatggctgtcatggtgtccctgctgacagattactcacctcagctccagaagcctaaatkttgatgttgtgttacttgtcaagaaagaagcaatgttcttcagtaacagaatgagttggtttatggggaaaagagaagagaatctaaaaaataaacaaat

SEQ ID NO: 33794 - DNA, 201 bp, Homo sapiens
aacagaaaggagagtatttgcctttattgcaagggaagtccttaggcatgatttttgagaaaagaagtactcgaacaagattgtctacagaaacaggcttwgcacttctgggaggacatccttgttttcttaccacacaagatattcatttgggtgtgaatgaaagtctcacggacacggcccgtgtattgtctagcatgg

SEQ ID NO: 33795 - DNA, 201 bp, Homo sapiens
gacaagaagaggagaagaaaaagcggctccaggctttccaaggttaccaggttacaatgaagactgctaaagttgctgcctctgactggacatttttacastgcttgcccagaaagccagaagaagtggatgatgaagtcttttattctcctcgatcactagtgttcccagaggcagaaaacagaaagtggacaatcatgg

SEQ ID NO: 33796 - DNA, 201 bp, Homo sapiens
caacttcatggttcgaaattttcggtgtggacaaccactacaaaataaagtgcagctgaagggccgtgaccttctcactctaaaaaactttaccggagaadaaattaaatatatgctatggctatcagcagatctgaaatttaggataaaacagaaaggagagtatttgcctttattgcaagggaagtccttaggcatgat

SEQ ID NO: 33797 - DNA, 201 bp, Homo sapiens
caagaagaggagaagaaaaagcggctccaggctttccaaggttaccaggttacaatgaagactgctaaagttgctgcctctgactggacatttttacactrcttgcccagaaagccagaagaagtggatgatgaagtcttttattctcctcgatcactagtgttcccagaggcagaaaacagaaagtggacaatcatggct

SEQ ID NO: 33798 - DNA, 201 bp, Homo sapiens
tcagatttgtaccatcctatccagatcctggctgattacctcacgctccaggaacactatagctctctgaaaggtcttaccctcagctggatcggggatgrgaacaatatcctgcactccatcatgatgagcgcagcgaaattcggaatgcaccttcaggcagctactccaaagggttatgagccggatgctagtgtaacc

SEQ ID NO: 33799 - DNA, 201 bp, Homo sapiens
gaatgaaagtctcacggacacggcccgtgtattgtctagcatggcagatgcagtattggctcgagtgtataaacaatcagatttggacaccctggctaaakaagcatccatcccaattatcaatgggctgtcagatttgtaccatcctatccagatcctggctgattacctcacgctccaggaacactatagctctctgaa

SEQ ID NO: 33800 - DNA, 201 bp, Homo sapiens
acttcatggttcgaaattttcggtgtggacaaccactacaaaataaagtgcagctgaagggccgtgaccttctcactctaaaaaactttaccggagaagawattaaatatatgctatggctatcagcagatctgaaatttaggataaaacagaaaggagagtatttgcctttattgcaagggaagtccttaggcatgattt

SEQ ID NO: 33801 - DNA, 201 bp, Homo sapiens
tgattacctcacgctccaggaacactatagctctctgaaaggtcttaccctcagctggatcggggatgggaacaatatcctgcactccatcatgatgagcrcagcgaaattcggaatgcaccttcaggcagctactccaaagggttatgagccggatgctagtgtaaccaagttggcagagcagtatgccaaagagaatgg

SEQ ID NO: 33802 - DNA, 197 bp, Homo sapiens
acgtggtatgggtgaaccgtatgatatgctttgccattgtgaaactttccttaagcctttaatttaagtgctgatgcactgtaatacgtgcttaactttgyttaaactctctaattcccaatttctgagttacatttagatatcatattaattatcatatacatttacttcaacataaaatactgtgttcataatgt

SEQ ID NO: 33803 - DNA, 201 bp, Homo sapiens
tgggctgtcagatttgtaccatcctatccagatcctggctgattacctcacgctccaggaacactatagctctctgaaaggtcttaccctcagctggatcrgggatgggaacaatatcctgcactccatcatgatgagcgcagcgaaattcggaatgcaccttcaggcagctactccaaagggttatgagccggatgctag

SEQ ID NO: 33804 - DNA, 201 bp, Homo sapiens
caagggaagtccttaggcatgatttttgagaaaagaagtactcgaacaagattgtctacagaaacaggctttgcacttctgggaggacatccttgttttcytaccacacaagatattcatttgggtgtgaatgaaagtctcacggacacggcccgtgtattgtctagcatggcagatgcagtattggctcgagtgtataaa

SEQ ID NO: 33805 - DNA, 201 bp, Homo sapiens
atcctggctgattacctcacgctccaggaacactatagctctctgaaaggtcttaccctcagctggatcggggatgggaacaatatcctgcactccatcaygatgagcgcagcgaaattcggaatgcaccttcaggcagctactccaaagggttatgagccggatgctagtgtaaccaagttggcagagcagtatgccaaa

SEQ ID NO: 33806 - DNA, 201 bp, Homo sapiens
aatgcagcttttagaaatggtcacaacttcatggttcgaaattttcggtgtggacaaccactacaaaataaagtgcagctgaagggccgtgaccttctcaytctaaaaaactttaccggagaagaaattaaatatatgctatggctatcagcagatctgaaatttaggataaaacagaaaggagagtatttgcctttattg

SEQ ID NO: 33807 - DNA, 201 bp, Homo sapiens
ttcatggttcgaaattttcggtgtggacaaccactacaaaataaagtgcagctgaagggccgtgaccttctcactctaaaaaactttaccggagaagaaaktaaatatatgctatggctatcagcagatctgaaatttaggataaaacagaaaggagagtatttgcctttattgcaagggaagtccttaggcatgattttt

SEQ ID NO: 33808 - DNA, 201 bp, Homo sapiens
ggttaccaggttacaatgaagactgctaaagttgctgcctctgactggacatttttacactgcttgcccagaaagccagaagaagtggatgatgaagtctyttattctcctcgatcactagtgttcccagaggcagaaaacagaaagtggacaatcatggctgtcatggtgtccctgctgacagattactcacctcagctc

SEQ ID NO: 33809 - DNA, 201 bp, Homo sapiens
caagttggcagagcagtatgccaaagagaatggtaccaagctgttgctgacaaatgatccattggaagcagcgcatggaggcaatgtattaattacagacrcttggataagcatgggacaagaagaggagaagaaaaagcggctccaggctttccaaggttaccaggttacaatgaagactgctaaagttgctgcctctga

SEQ ID NO: 33810 - DNA, 201 bp, Homo sapiens
ttggcagagcagtatgccaaagagaatggtaccaagctgttgctgacaaatgatccattggaagcagcgcatggaggcaatgtattaattacagacacttkgataagcatgggacaagaagaggagaagaaaaagcggctccaggctttccaaggttaccaggttacaatgaagactgctaaagttgctgcctctgactgg

SEQ ID NO: 33811 - DNA, 201 bp, Homo sapiens
cagtatgccaaagagaatggtaccaagctgttgctgacaaatgatccattggaagcagcgcatggaggcaatgtattaattacagacacttggataagcaygggacaagaagaggagaagaaaaagcggctccaggctttccaaggttaccaggttacaatgaagactgctaaagttgctgcctctgactggacattttta

SEQ ID NO: 33812 - DNA, 201 bp, Homo sapiens
gtaaccaagttggcagagcagtatgccaaagagaatggtaccaagctgttgctgacaaatgatccattggaagcagcgcatggaggcaatgtattaattamagacacttggataagcatgggacaagaagaggagaagaaaaagcggctccaggctttccaaggttaccaggttacaatgaagactgctaaagttgctgcc

SEQ ID NO: 33813 - DNA, 201 bp, Homo sapiens
tggtcacaacttcatggttcgaaattttcggtgtggacaaccactacaaaataaagtgcagctgaagggccgtgaccttctcactctaaaaaactttaccdgagaagaaattaaatatatgctatggctatcagcagatctgaaatttaggataaaacagaaaggagagtatttgcctttattgcaagggaagtccttagg

SEQ ID NO: 33814 - DNA, 201 bp, Homo sapiens
aagaggagaagaaaaagcggctccaggctttccaaggttaccaggttacaatgaagactgctaaagttgctgcctctgactggacatttttacactgcttkcccagaaagccagaagaagtggatgatgaagtcttttattctcctcgatcactagtgttcccagaggcagaaaacagaaagtggacaatcatggctgtca

SEQ ID NO: 33815 - DNA, 201 bp, Homo sapiens
ggttatgagccggatgctagtgtaaccaagttggcagagcagtatgccaaagagaatggtaccaagctgttgctgacaaatgatccattggaagcagcgcmtggaggcaatgtattaattacagacacttggataagcatgggacaagaagaggagaagaaaaagcggctccaggctttccaaggttaccaggttacaatg

SEQ ID NO: 33816 - DNA, 201 bp, Homo sapiens
ctgtcagatttgtaccatcctatccagatcctggctgattacctcacgctccaggaacactatagctctctgaaaggtcttaccctcagctggatcggggwtgggaacaatatcctgcactccatcatgatgagcgcagcgaaattcggaatgcaccttcaggcagctactccaaagggttatgagccggatgctagtgta

SEQ ID NO: 33817 - DNA, 201 bp, Homo sapiens
caaggttaccaggttacaatgaagactgctaaagttgctgcctctgactggacatttttacactgcttgcccagaaagccagaagaagtggatgatgaagdcttttattctcctcgatcactagtgttcccagaggcagaaaacagaaagtggacaatcatggctgtcatggtgtccctgctgacagattactcacctcag

SEQ ID NO: 33818 - DNA, 201 bp, Homo sapiens
gcttttagaaatggtcacaacttcatggttcgaaattttcggtgtggacaaccactacaaaataaagtgcagctgaagggccgtgaccttctcactctaaraaactttaccggagaagaaattaaatatatgctatggctatcagcagatctgaaatttaggataaaacagaaaggagagtatttgcctttattgcaaggg

SEQ ID NO: 33819 - DNA, 201 bp, Homo sapiens
atcctgttaaacaatgcagcttttagaaatggtcacaacttcatggttcgaaattttcggtgtggacaaccactacaaaataaagtgcagctgaagggccrtgaccttctcactctaaaaaactttaccggagaagaaattaaatatatgctatggctatcagcagatctgaaatttaggataaaacagaaaggagagtat

SEQ ID NO: 33820 - DNA, 201 bp, Homo sapiens
gatattcatttgggtgtgaatgaaagtctcacggacacggcccgtgtattgtctagcatggcagatgcagtattggctcgagtgtataaacaatcagattkggacaccctggctaaagaagcatccatcccaattatcaatgggctgtcagatttgtaccatcctatccagatcctggctgattacctcacgctccaggaa

SEQ ID NO: 33821 - DNA, 201 bp, Homo sapiens
accaagttggcagagcagtatgccaaagagaatggtaccaagctgttgctgacaaatgatccattggaagcagcgcatggaggcaatgtattaattacagrcacttggataagcatgggacaagaagaggagaagaaaaagcggctccaggctttccaaggttaccaggttacaatgaagactgctaaagttgctgcctct

SEQ ID NO: 33822 - DNA, 201 bp, Homo sapiens
tgcagcttttagaaatggtcacaacttcatggttcgaaattttcggtgtggacaaccactacaaaataaagtgcagctgaagggccgtgaccttctcactstaaaaaactttaccggagaagaaattaaatatatgctatggctatcagcagatctgaaatttaggataaaacagaaaggagagtatttgcctttattgca

SEQ ID NO: 33823 - DNA, 201 bp, Homo sapiens
tgccaaagagaatggtaccaagctgttgctgacaaatgatccattggaagcagcgcatggaggcaatgtattaattacagacacttggataagcatgggayaagaagaggagaagaaaaagcggctccaggctttccaaggttaccaggttacaatgaagactgctaaagttgctgcctctgactggacatttttacactg

SEQ ID NO: 33824 - DNA, 201 bp, Homo sapiens
gctgtcagatttgtaccatcctatccagatcctggctgattacctcacgctccaggaacactatagctctctgaaaggtcttaccctcagctggatcgggkatgggaacaatatcctgcactccatcatgatgagcgcagcgaaattcggaatgcaccttcaggcagctactccaaagggttatgagccggatgctagtgt

SEQ ID NO: 33825 - DNA, 201 bp, Homo sapiens
ggcccgtgtattgtctagcatggcagatgcagtattggctcgagtgtataaacaatcagatttggacaccctggctaaagaagcatccatcccaattatcratgggctgtcagatttgtaccatcctatccagatcctggctgattacctcacgctccaggaacactatagctctctgaaaggtcttaccctcagctggat

SEQ ID NO: 33826 - DNA, 201 bp, Homo sapiens
agagcagtatgccaaagagaatggtaccaagctgttgctgacaaatgatccattggaagcagcgcatggaggcaatgtattaattacagacacttggatamgcatgggacaagaagaggagaagaaaaagcggctccaggctttccaaggttaccaggttacaatgaagactgctaaagttgctgcctctgactggacatt

SEQ ID NO: 33827 - DNA, 201 bp, Homo sapiens
gcccgtgtattgtctagcatggcagatgcagtattggctcgagtgtataaacaatcagatttggacaccctggctaaagaagcatccatcccaattatcartgggctgtcagatttgtaccatcctatccagatcctggctgattacctcacgctccaggaacactatagctctctgaaaggtcttaccctcagctggatc

SEQ ID NO: 33828 - DNA, 201 bp, Homo sapiens
actccatcatgatgagcgcagcgaaattcggaatgcaccttcaggcagctactccaaagggttatgagccggatgctagtgtaaccaagttggcagagcartatgccaaagagaatggtaccaagctgttgctgacaaatgatccattggaagcagcgcatggaggcaatgtattaattacagacacttggataagcatgg

SEQ ID NO: 33829 - DNA, 201 bp, Homo sapiens
gtctagcatggcagatgcagtattggctcgagtgtataaacaatcagatttggacaccctggctaaagaagcatccatcccaattatcaatgggctgtcakatttgtaccatcctatccagatcctggctgattacctcacgctccaggaacactatagctctctgaaaggtcttaccctcagctggatcggggatgggaa

SEQ ID NO: 33830 - DNA, 201 bp, Homo sapiens
gatcctggctgattacctcacgctccaggaacactatagctctctgaaaggtcttaccctcagctggatcggggatgggaacaatatcctgcactccatcrtgatgagcgcagcgaaattcggaatgcaccttcaggcagctactccaaagggttatgagccggatgctagtgtaaccaagttggcagagcagtatgccaa

SEQ ID NO: 33831 - DNA, 201 bp, Homo sapiens
acaatgaagactgctaaagttgctgcctctgactggacatttttacactgcttgcccagaaagccagaagaagtggatgatgaagtcttttattctcctckatcactagtgttcccagaggcagaaaacagaaagtggacaatcatggctgtcatggtgtccctgctgacagattactcacctcagctccagaagcctaaa

SEQ ID NO: 33832 - DNA, 201 bp, Homo sapiens
caggttacaatgaagactgctaaagttgctgcctctgactggacatttttacactgcttgcccagaaagccagaagaagtggatgatgaagtcttttattytcctcgatcactagtgttcccagaggcagaaaacagaaagtggacaatcatggctgtcatggtgtccctgctgacagattactcacctcagctccagaag

SEQ ID NO: 33833 - DNA, 201 bp, Homo sapiens
atccagatcctggctgattacctcacgctccaggaacactatagctctctgaaaggtcttaccctcagctggatcggggatgggaacaatatcctgcactscatcatgatgagcgcagcgaaattcggaatgcaccttcaggcagctactccaaagggttatgagccggatgctagtgtaaccaagttggcagagcagtat

SEQ ID NO: 33834 - DNA, 201 bp, Homo sapiens
ggttcgaaattttcggtgtggacaaccactacaaaataaagtgcagctgaagggccgtgaccttctcactctaaaaaactttaccggagaagaaattaaakatatgctatggctatcagcagatctgaaatttaggataaaacagaaaggagagtatttgcctttattgcaagggaagtccttaggcatgatttttgagaa

SEQ ID NO: 33835 - DNA, 201 bp, Homo sapiens
ggctgtcagatttgtaccatcctatccagatcctggctgattacctcacgctccaggaacactatagctctctgaaaggtcttaccctcagctggatcggrgatgggaacaatatcctgcactccatcatgatgagcgcagcgaaattcggaatgcaccttcaggcagctactccaaagggttatgagccggatgctagtg

SEQ ID NO: 33836 - DNA, 201 bp, Homo sapiens
aagttggcagagcagtatgccaaagagaatggtaccaagctgttgctgacaaatgatccattggaagcagcgcatggaggcaatgtattaattacagacayttggataagcatgggacaagaagaggagaagaaaaagcggctccaggctttccaaggttaccaggttacaatgaagactgctaaagttgctgcctctgac

SEQ ID NO: 33837 - DNA, 201 bp, Homo sapiens
aactgaacacatttcttagtttttaggtggcccccgctggctaacttgctgtggagttttcaagggcatagaatcgtcctttacacaattaaaagaagatrctgtttaatctgaggatcctgttaaacaatgcagcttttagaaatggtcacaacttcatggttcgaaattttcggtgtggacaaccactacaaaataaag

SEQ ID NO: 33838 - DNA, 201 bp, Homo sapiens
gtcagatttgtaccatcctatccagatcctggctgattacctcacgctccaggaacactatagctctctgaaaggtcttaccctcagctggatcggggatrggaacaatatcctgcactccatcatgatgagcgcagcgaaattcggaatgcaccttcaggcagctactccaaagggttatgagccggatgctagtgtaac

SEQ ID NO: 33839 - DNA, 201 bp, Homo sapiens
gcagctgaagggccgtgaccttctcactctaaaaaactttaccggagaagaaattaaatatatgctatggctatcagcagatctgaaatttaggataaaayagaaaggagagtatttgcctttattgcaagggaagtccttaggcatgatttttgagaaaagaagtactcgaacaagattgtctacagaaacaggctttgc

SEQ ID NO: 33840 - DNA, 201 bp, Homo sapiens
ctcactctaaaaaactttaccggagaagaaattaaatatatgctatggctatcagcagatctgaaatttaggataaaacagaaaggagagtatttgccttyattgcaagggaagtccttaggcatgatttttgagaaaagaagtactcgaacaagattgtctacagaaacaggctttgcacttctgggaggacatccttgt

SEQ ID NO: 33841 - DNA, 201 bp, Homo sapiens
ctctaaaaaactttaccggagaagaaattaaatatatgctatggctatcagcagatctgaaatttaggataaaacagaaaggagagtatttgcctttattkcaagggaagtccttaggcatgatttttgagaaaagaagtactcgaacaagattgtctacagaaacaggctttgcacttctgggaggacatccttgttttc

SEQ ID NO: 33842 - DNA, 201 bp, Homo sapiens
gcggctccaggctttccaaggttaccaggttacaatgaagactgctaaagttgctgcctctgactggacatttttacactgcttgcccagaaagccagaakaagtggatgatgaagtcttttattctcctcgatcactagtgttcccagaggcagaaaacagaaagtggacaatcatggctgtcatggtgtccctgctgac

SEQ ID NO: 33843 - DNA, 201 bp, Homo sapiens
aaaaactttaccggagaagaaattaaatatatgctatggctatcagcagatctgaaatttaggataaaacagaaaggagagtatttgcctttattgcaagrgaagtccttaggcatgatttttgagaaaagaagtactcgaacaagattgtctacagaaacaggctttgcacttctgggaggacatccttgttttcttacc

SEQ ID NO: 33844 - DNA, 201 bp, Homo sapiens
acacaagatattcatttgggtgtgaatgaaagtctcacggacacggcccgtgtattgtctagcatggcagatgcagtattggctcgagtgtataaacaatsagatttggacaccctggctaaagaagcatccatcccaattatcaatgggctgtcagatttgtaccatcctatccagatcctggctgattacctcacgctc

SEQ ID NO: 33845 - DNA, 201 bp, Homo sapiens
cctatccagatcctggctgattacctcacgctccaggaacactatagctctctgaaaggtcttaccctcagctggatcggggatgggaacaatatcctgcmctccatcatgatgagcgcagcgaaattcggaatgcaccttcaggcagctactccaaagggttatgagccggatgctagtgtaaccaagttggcagagcag

SEQ ID NO: 33846 - DNA, 201 bp, Homo sapiens
agctactccaaagggttatgagccggatgctagtgtaaccaagttggcagagcagtatgccaaagagaatggtaccaagctgttgctgacaaatgatccaytggaagcagcgcatggaggcaatgtattaattacagacacttggataagcatgggacaagaagaggagaagaaaaagcggctccaggctttccaaggtta

SEQ ID NO: 33847 - DNA, 201 bp, Homo sapiens
tcgagtgtataaacaatcagatttggacaccctggctaaagaagcatccatcccaattatcaatgggctgtcagatttgtaccatcctatccagatcctgsctgattacctcacgctccaggaacactatagctctctgaaaggtcttaccctcagctggatcggggatgggaacaatatcctgcactccatcatgatgag

SEQ ID NO: 33848 - DNA, 201 bp, Homo sapiens
gtgtataaacaatcagatttggacaccctggctaaagaagcatccatcccaattatcaatgggctgtcagatttgtaccatcctatccagatcctggctgdttacctcacgctccaggaacactatagctctctgaaaggtcttaccctcagctggatcggggatgggaacaatatcctgcactccatcatgatgagcgca

SEQ ID NO: 33849 - DNA, 201 bp, Homo sapiens; identical to SEQ ID NO: 33750

SEQ ID NO: 33850 - DNA, 201 bp, Homo sapiens; identical to SEQ ID NO: 33751

SEQ ID NO: 33851 - DNA, 201 bp, Homo sapiens; identical to SEQ ID NO: 33753

SEQ ID NO: 33852 - DNA, 201 bp, Homo sapiens; identical to SEQ ID NO: 33754

SEQ ID NO: 33853 - DNA, 201 bp, Homo sapiens; identical to SEQ ID NO: 33755

SEQ ID NO: 33854 - DNA, 201 bp, Homo sapiens; identical to SEQ ID NO: 33756

SEQ ID NO: 33855 - DNA, 201 bp, Homo sapiens; identical to SEQ ID NO: 33757

SEQ ID NO: 33856 - DNA, 201 bp, Homo sapiens; identical to SEQ ID NO: 33758

SEQ ID NO: 33857 - DNA, 201 bp, Homo sapiens; identical to SEQ ID NO: 33759

SEQ ID NO: 33858 - DNA, 201 bp, Homo sapiens; identical to SEQ ID NO: 33760

SEQ ID NO: 33859 - DNA, 201 bp, Homo sapiens; identical to SEQ ID NO: 33761

SEQ ID NO: 33860 - DNA, 201 bp, Homo sapiens; identical to SEQ ID NO: 33762

SEQ ID NO: 33861 - DNA, 201 bp, Homo sapiens; identical to SEQ ID NO: 33763

SEQ ID NO: 33862 - DNA, 201 bp, Homo sapiens; identical to SEQ ID NO: 33764

SEQ ID NO: 33863 - DNA, 201 bp, Homo sapiens; identical to SEQ ID NO: 33765

SEQ ID NO: 33864 - DNA, 201 bp, Homo sapiens; identical to SEQ ID NO: 33766

SEQ ID NO: 33865 - DNA, 201 bp, Homo sapiens; identical to SEQ ID NO: 33767

SEQ ID NO: 33866 - DNA, 201 bp, Homo sapiens; identical to SEQ ID NO: 33768

SEQ ID NO: 33867 - DNA, 201 bp, Homo sapiens; identical to SEQ ID NO: 33769

SEQ ID NO: 33868 - DNA, 201 bp, Homo sapiens; identical to SEQ ID NO: 33770

SEQ ID NO: 33869 - DNA, 201 bp, Homo sapiens; identical to SEQ ID NO: 33771

SEQ ID NO: 33870 - DNA, 201 bp, Homo sapiens; identical to SEQ ID NO: 33772

SEQ ID NO: 33871 - DNA, 201 bp, Homo sapiens; identical to SEQ ID NO: 33773

SEQ ID NO: 33872 - DNA, 201 bp, Homo sapiens; identical to SEQ ID NO: 33774

SEQ ID NO: 33873 - DNA, 201 bp, Homo sapiens; identical to SEQ ID NO: 33775

SEQ ID NO: 33874 - DNA, 201 bp, Homo sapiens; identical to SEQ ID NO: 33776

SEQ ID NO: 33875 - DNA, 201 bp, Homo sapiens; identical to SEQ ID NO: 33777

SEQ ID NO: 33876 - DNA, 201 bp, Homo sapiens; identical to SEQ ID NO: 33778

SEQ ID NO: 33877 - DNA, 201 bp, Homo sapiens; identical to SEQ ID NO: 33779

SEQ ID NO: 33878 - DNA, 201 bp, Homo sapiens; identical to SEQ ID NO: 33780

SEQ ID NO: 33879 - DNA, 201 bp, Homo sapiens; identical to SEQ ID NO: 33781

SEQ ID NO: 33880 - DNA, 201 bp, Homo sapiens; identical to SEQ ID NO: 33782

SEQ ID NO: 33881 - DNA, 201 bp, Homo sapiens; identical to SEQ ID NO: 33783

SEQ ID NO: 33882 - DNA, 201 bp, Homo sapiens; identical to SEQ ID NO: 33784

SEQ ID NO: 33883 - DNA, 201 bp, Homo sapiens; identical to SEQ ID NO: 33785

SEQ ID NO: 33884 - DNA, 201 bp, Homo sapiens; identical to SEQ ID NO: 33786

SEQ ID NO: 33885 - DNA, 201 bp, Homo sapiens; identical to SEQ ID NO: 33787

SEQ ID NO: 33886 - DNA, 201 bp, Homo sapiens; identical to SEQ ID NO: 33788

SEQ ID NO: 33887 - DNA, 201 bp, Homo sapiens; identical to SEQ ID NO: 33789

SEQ ID NO: 33888 - DNA, 201 bp, Homo sapiens; identical to SEQ ID NO: 33790

SEQ ID NO: 33889 - DNA, 201 bp, Homo sapiens; identical to SEQ ID NO: 33791

SEQ ID NO: 33890 - DNA, 201 bp, Homo sapiens; identical to SEQ ID NO: 33792

SEQ ID NO: 33891 - DNA, 201 bp, Homo sapiens; identical to SEQ ID NO: 33793

SEQ ID NO: 33892 - DNA, 201 bp, Homo sapiens; identical to SEQ ID NO: 33794

SEQ ID NO: 33893 - DNA, 201 bp, Homo sapiens; identical to SEQ ID NO: 33795

SEQ ID NO: 33894 - DNA, 201 bp, Homo sapiens; identical to SEQ ID NO: 33796

SEQ ID NO: 33895 - DNA, 201 bp, Homo sapiens; identical to SEQ ID NO: 33797

SEQ ID NO: 33896 - DNA, 201 bp, Homo sapiens; identical to SEQ ID NO: 33798

SEQ ID NO: 33897 - DNA, 201 bp, Homo sapiens; identical to SEQ ID NO: 33799

SEQ ID NO: 33898 - DNA, 201 bp, Homo sapiens; identical to SEQ ID NO: 33800

SEQ ID NO: 33899 - DNA, 201 bp, Homo sapiens; identical to SEQ ID NO: 33801

SEQ ID NO: 33900 - DNA, 197 bp, Homo sapiens; identical to SEQ ID NO: 33802

SEQ ID NO: 33901 - DNA, 201 bp, Homo sapiens; identical to SEQ ID NO: 33803

SEQ ID NO: 33902 - DNA, 201 bp, Homo sapiens; identical to SEQ ID NO: 33804

SEQ ID NO: 33903 - DNA, 201 bp, Homo sapiens; identical to SEQ ID NO: 33805

SEQ ID NO: 33904 - DNA, 201 bp, Homo sapiens; identical to SEQ ID NO: 33806

SEQ ID NO: 33905 - DNA, 201 bp, Homo sapiens; identical to SEQ ID NO: 33807

SEQ ID NO: 33906 - DNA, 144 bp, Homo sapiens
atatgagaagtttatcctcaagaagacagcagtgggtatttgcrttaagaagtggcagtttttaggtggcccccgctggctaacttgctgtggagttttcaagggcatagaatcgtcctttacacaattaaaagaagatgctgt

SEQ ID NO: 33907 - DNA, 201 bp, Homo sapiens; identical to SEQ ID NO: 33808

SEQ ID NO: 33908 - DNA, 142 bp, Homo sapiens
atatgagaagtttatcctcaagaagacagcagtgggtatttkcgttaagaagtggcagtttttaggtggcccccgctggctaacttgctgtggagttttcaagggcatagaatcgtcctttacacaattaaaagaagatgct

SEQ ID NO: 33909 - DNA, 201 bp, Homo sapiens; identical to SEQ ID NO: 33809

SEQ ID NO: 33910 - DNA, 201 bp, Homo sapiens; identical to SEQ ID NO: 33810

SEQ ID NO: 33911 - DNA, 201 bp, Homo sapiens; identical to SEQ ID NO: 33811

SEQ ID NO: 33912 - DNA, 201 bp, Homo sapiens; identical to SEQ ID NO: 33812

SEQ ID NO: 33913 - DNA, 201 bp, Homo sapiens; identical to SEQ ID NO: 33813

SEQ ID NO: 33914 - DNA, 201 bp, Homo sapiens; identical to SEQ ID NO: 33814

SEQ ID NO: 33915 - DNA, 201 bp, Homo sapiens; identical to SEQ ID NO: 33815

SEQ ID NO: 33916 - DNA, 201 bp, Homo sapiens; identical to SEQ ID NO: 33816

SEQ ID NO: 33917 - DNA, 201 bp, Homo sapiens; identical to SEQ ID NO: 33817

SEQ ID NO: 33918 - DNA, 201 bp, Homo sapiens; identical to SEQ ID NO: 33818

SEQ ID NO: 33919 - DNA, 201 bp, Homo sapiens; identical to SEQ ID NO: 33819

SEQ ID NO: 33920 - DNA, 201 bp, Homo sapiens; identical to SEQ ID NO: 33820

SEQ ID NO: 33921 - DNA, 201 bp, Homo sapiens; identical to SEQ ID NO: 33821

SEQ ID NO: 33922 - DNA, 201 bp, Homo sapiens; identical to SEQ ID NO: 33822

SEQ ID NO: 33923 - DNA, 201 bp, Homo sapiens; identical to SEQ ID NO: 33823

SEQ ID NO: 33924 - DNA, 201 bp, Homo sapiens; identical to SEQ ID NO: 33824

SEQ ID NO: 33925 - DNA, 201 bp, Homo sapiens; identical to SEQ ID NO: 33825

SEQ ID NO: 33926 - DNA, 201 bp, Homo sapiens; identical to SEQ ID NO: 33826

SEQ ID NO: 33927 - DNA, 201 bp, Homo sapiens; identical to SEQ ID NO: 33827

SEQ ID NO: 33928 - DNA, 201 bp, Homo sapiens; identical to SEQ ID NO: 33828

SEQ ID NO: 33929 - DNA, 201 bp, Homo sapiens; identical to SEQ ID NO: 33829

SEQ ID NO: 33930 - DNA, 201 bp, Homo sapiens; identical to SEQ ID NO: 33830

SEQ ID NO: 33931 - DNA, 201 bp, Homo sapiens; identical to SEQ ID NO: 33831

SEQ ID NO: 33932 - DNA, 201 bp, Homo sapiens; identical to SEQ ID NO: 33832

SEQ ID NO: 33933 - DNA, 201 bp, Homo sapiens; identical to SEQ ID NO: 33833

SEQ ID NO: 33934 - DNA, 201 bp, Homo sapiens; identical to SEQ ID NO: 33834

SEQ ID NO: 33935 - DNA, 201 bp, Homo sapiens; identical to SEQ ID NO: 33835

SEQ ID NO: 33936 - DNA, 201 bp, Homo sapiens; identical to SEQ ID NO: 33836

SEQ ID NO: 33937 - DNA, 201 bp, Homo sapiens
ttgcgttaagaagtggcagtttttaggtggcccccgctggctaacttgctgtggagttttcaagggcatagaatcgtcctttacacaattaaaagaagatrctgtttaatctgaggatcctgttaaacaatgcagcttttagaaatggtcacaacttcatggttcgaaattttcggtgtggacaaccactacaaaataaag

SEQ ID NO: 33938 - DNA, 201 bp, Homo sapiens; identical to SEQ ID NO: 33838

SEQ ID NO: 33939 - DNA, 201 bp, Homo sapiens; identical to SEQ ID NO: 33839

SEQ ID NO: 33940 - DNA, 201 bp, Homo sapiens; identical to SEQ ID NO: 33840

SEQ ID NO: 33941 - DNA, 201 bp, Homo sapiens; identical to SEQ ID NO: 33841

SEQ ID NO: 33942 - DNA, 201 bp, Homo sapiens; identical to SEQ ID NO: 33842

SEQ ID NO: 33943 - DNA, 201 bp, Homo sapiens; identical to SEQ ID NO: 33843

SEQ ID NO: 33944 - DNA, 201 bp, Homo sapiens; identical to SEQ ID NO: 33844

SEQ ID NO: 33945 - DNA, 201 bp, Homo sapiens; identical to SEQ ID NO: 33845

SEQ ID NO: 33946 - DNA, 201 bp, Homo sapiens; identical to SEQ ID NO: 33846

SEQ ID NO: 33947 - DNA, 201 bp, Homo sapiens; identical to SEQ ID NO: 33847

SEQ ID NO: 33948 - DNA, 201 bp, Homo sapiens; identical to SEQ ID NO: 33848

SEQ ID NO: 33949 - DNA, 201 bp, Homo sapiens
ggctggtgccttgggtgcagatggcaagcagaaaggggtggataaagaattctttcttctcttcactgtgttggatgagaacaagagctggtacagcaatrccaatcaagcagctgctatgttggatttccgactgctttcagaggatattgagggcttccaagactccaatcggatgcatgccattaatgggtttctgtt

SEQ ID NO: 33950 - DNA, 201 bp, Homo sapiens
tgcttgtctcacttggatgtacttctctgctgcagatcccataagagacacaaattctggcctggtgggcccgctgctggtgtgcagggctggtgccttgrgtgcagatggcaagcagaaaggggtggataaagaattctttcttctcttcactgtgttggatgagaacaagagctggtacagcaatgccaatcaagcagc

SEQ ID NO: 33951 - DNA, 201 bp, Homo sapiens
aagaatctactatatcatggcagaagaagtagagtgggactattgccctgaccggagctgggaacgggaatggcacaaccagtctgagaaggacagttatrgttacattttcctgagcaacaaggatgggctcctgggttccagatacaagaaagctgtattcagggaatacactgatggtacattcaggatccctcggcc

SEQ ID NO: 33952 - DNA, 201 bp, Homo sapiens
ctactctgtgcatgctcatggagtgctagaatctactactgtctggccactggctgctgagcctggtgaggtggtcacttatcagtggaacatcccagagwggtctggccctgggcccaatgactctgcttgtgtttcctggatctattattctgcagtggatcccatcaaggacatgtatagtggcctggtggggccctt

SEQ ID NO: 33953 - DNA, 201 bp, Homo sapiens
tgaccatgtccatgctggcatggagaccctcttcactgttttttctcgaacagaacacttaagccctctcaccgtcatcaccaaagagactgaaaaagcaktgccccccagagacattgaagaaggcaatgtgaagatgctgggcatgcagatccccataaagaatgttgagatgctggcctctgttttggttgccattag

SEQ ID NO: 33954 - DNA, 190 bp, Homo sapiens
agtgaactactttgaagaagtggtcaatgggttgttgctgccatgagcatgtacaacctctggagctagaagctcctcaggaaagccagttctccaagttyttaacctgtggcactgaaaggaatgttgagttacctcttcatgttttagacagcaaaccctatccattaaagtacttgttagaacactg

SEQ ID NO: 33955 - DNA, 199 bp, Homo sapiens
ctccttggcagtgaactactttgaagaagtggtcaatgggttgttgctgccatgagcatgtacaacctctggagctagaagctcctcaggaaagccagttytccaagttcttaacctgtggcactgaaaggaatgttgagttacctcttcatgttttagacagcaaaccctatccattaaagtacttgttagaacactg

SEQ ID NO: 33956 - DNA, 201 bp, Homo sapiens
ggagtgctagaatctactactgtctggccactggctgctgagcctggtgaggtggtcacttatcagtggaacatcccagagaggtctggccctgggcccartgactctgcttgtgtttcctggatctattattctgcagtggatcccatcaaggacatgtatagtggcctggtggggcccttggctatctgccaaaagggc

SEQ ID NO: 33957 - DNA, 201 bp, Homo sapiens
tctcacttggatgtacttctctgctgcagatcccataagagacacaaattctggcctggtgggcccgctgctggtgtgcagggctggtgccttgggtgcasatggcaagcagaaaggggtggataaagaattctttcttctcttcactgtgttggatgagaacaagagctggtacagcaatgccaatcaagcagctgctat

SEQ ID NO: 33958 - DNA, 152 bp, Homo sapiens
aaagagggcacccagcccttccccctccctcatcctcccatcccagtaaacyctgccaaattggaatcctggacttaatttaggagaaaggccctgtaaccaagatactgactgaacatggctggcggactcaggctggggtctgcagtgca

SEQ ID NO: 33959 - DNA, 201 bp, Homo sapiens
caagaatctactatatcatggcagaagaagtagagtgggactattgccctgaccggagctgggaacgggaatggcacaaccagtctgagaaggacagttayggttacattttcctgagcaacaaggatgggctcctgggttccagatacaagaaagctgtattcagggaatacactgatggtacattcaggatccctcggc

SEQ ID NO: 33960 - DNA, 201 bp, Homo sapiens
ctgagaaggacagttatggttacattttcctgagcaacaaggatgggctcctgggttccagatacaagaaagctgtattcagggaatacactgatggtacrttcaggatccctcggccaaggactggaccagaagaacacttgggaatcttgggtccacttatcaaaggtgaagttggtgatatcctgactgtggtattca

SEQ ID NO: 33961 - DNA, 201 bp, Homo sapiens
cactgtgcagcttcagggcatgaggaagggtgcagctatgctctttcctcatacctttgtcatggccatcatgcagcctgacaaccttgggacatttgagmtttattgccaggcaggcagccatcgagaagcagggatgagggcaatctataatgtctcccagtgtcctggccaccaagccacccctcgccaacgctacca

SEQ ID NO: 33962 - DNA, 201 bp, Homo sapiens; identical to SEQ ID NO: 33949

SEQ ID NO: 33963 - DNA, 201 bp, Homo sapiens; identical to SEQ ID NO: 33950

SEQ ID NO: 33964 - DNA, 201 bp, Homo sapiens; identical to SEQ ID NO: 33951

SEQ ID NO: 33965 - DNA, 201 bp, Homo sapiens; identical to SEQ ID NO: 33952

SEQ ID NO: 33966 - DNA, 201 bp, Homo sapiens; identical to SEQ ID NO: 33953

SEQ ID NO: 33967 - DNA, 190 bp, Homo sapiens; identical to SEQ ID NO: 33954

SEQ ID NO: 33968 - DNA, 199 bp, Homo sapiens; identical to SEQ ID NO: 33955

SEQ ID NO: 33969 - DNA, 201 bp, Homo sapiens; identical to SEQ ID NO: 33956

SEQ ID NO: 33970 - DNA, 201 bp, Homo sapiens; identical to SEQ ID NO: 33957

SEQ ID NO: 33971 - DNA, 155 bp, Homo sapiens
ggaaaagagggcacccagcccttccccctccctcatcctcccatcccagtaaacyctgccaaattggaatcctggacttaatttaggagaaaggccctgtaaccaagatactgactgaacatggctggcggactcaggctggggtctgcagtgca

SEQ ID NO: 33972 - DNA, 201 bp, Homo sapiens; identical to SEQ ID NO: 33959

SEQ ID NO: 33973 - DNA, 201 bp, Homo sapiens; identical to SEQ ID NO: 33960

SEQ ID NO: 33974 - DNA, 201 bp, Homo sapiens; identical to SEQ ID NO: 33961

SEQ ID NO: 33975 - DNA, 201 bp, Homo sapiens; identical to SEQ ID NO: 33949

SEQ ID NO: 33976 - DNA, 201 bp, Homo sapiens; identical to SEQ ID NO: 33950

SEQ ID NO: 33977 - DNA, 201 bp, Homo sapiens; identical to SEQ ID NO: 33951

SEQ ID NO: 33978 - DNA, 201 bp, Homo sapiens; identical to SEQ ID NO: 33952

SEQ ID NO: 33979 - DNA, 201 bp, Homo sapiens; identical to SEQ ID NO: 33953

SEQ ID NO: 33980 - DNA, 190 bp, Homo sapiens; identical to SEQ ID NO: 33954

SEQ ID NO: 33981 - DNA, 199 bp, Homo sapiens; identical to SEQ ID NO: 33955

SEQ ID NO: 33982 - DNA, 201 bp, Homo sapiens; identical to SEQ ID NO: 33956

SEQ ID NO: 33983 - DNA, 201 bp, Homo sapiens; identical to SEQ ID NO: 33957

SEQ ID NO: 33984 - DNA, 155 bp, Homo sapiens; identical to SEQ ID NO: 33971

SEQ ID NO: 33985 - DNA, 201 bp, Homo sapiens; identical to SEQ ID NO: 33959

SEQ ID NO: 33986 - DNA, 201 bp, Homo sapiens; identical to SEQ ID NO: 33960

SEQ ID NO: 33987 - DNA, 201 bp, Homo sapiens; identical to SEQ ID NO: 33961

SEQ ID NO: 33988 - DNA, 201 bp, Homo sapiens
ccgtggtggccgacacgggcgacttccacgccatcgacgagtacaagccccaggatgctaccaccaacccgtccctgatcctggccgcagcacagatgccygcttaccaggagctggtggaggaggcgattgcctatggccggaagctgggcgggtcacaagaggaccagattaaaaatgctattgataaactttttgtgt

SEQ ID NO: 33989 - DNA, 201 bp, Homo sapiens
aatatttaatatatagacctatgatgtacaggtacgacatgtataggttacctagatgttatgagaaattttagtttattgtgagtactcaagttgcttaragagccaccagggtgatttgctgctggctttctatcatttttatgttttaatgcaaaggaaattttaaaatgttctggaagtgtttttgattaagcaatg

SEQ ID NO: 33990 - DNA, 201 bp, Homo sapiens
agtctctctgaagaaaccattgtgcttctgagaccctagcccccttcctggatggaggcttgagggccctgggacatgtgctatctgataagattgggtcrtcgctgccaaggtggagagcagtgagcaaggggcttggggcaatttccagtggagggcatccacacctccattttatgcttgtggttcacacatttaagt

SEQ ID NO: 33991 - DNA, 201 bp, Homo sapiens; identical to SEQ ID NO: 33989

SEQ ID NO: 33992 - DNA, 201 bp, Homo sapiens; identical to SEQ ID NO: 33990

SEQ ID NO: 33993 - DNA, 201 bp, Homo sapiens
ccaacctgaccgtcactatggaccagctgcagggtctgggcagtgattatgagcaaccactggaggtgaagaacaacagtaatctgcagagaatgggctcytccgagtcaacagattcaggtttctgtctagattctcctgggccattggacagtaaagaaaaccttgaaaatcctatgagaagaatacattccctacctc

SEQ ID NO: 33994 - DNA, 201 bp, Homo sapiens
agagcaagagggagatgtacagtcgtctgaagaagctctgagggcggcaggaccagccagcagcagcccaagcttccctccatccccctttaccctctttsctgcagagaaacttaagcaaaggggacagctgtgtgacatttggagagggggcctgggacttccatgccttaaacctactccagccatctcatgagggga

SEQ ID NO: 33995 - DNA, 201 bp, Homo sapiens; identical to SEQ ID NO: 33993

SEQ ID NO: 33996 - DNA, 201 bp, Homo sapiens; identical to SEQ ID NO: 33994

SEQ ID NO: 33997 - DNA, 201 bp, Homo sapiens; identical to SEQ ID NO: 33993

SEQ ID NO: 33998 - DNA, 201 bp, Homo sapiens
agggcatcttgctggctacgcctcttctgtccctgttagacgtcctccgtccatatcagaactgtgccacaatgcagttctgagcaccgtgtcaagctgcyctgagccacagtgggatgaaccagccggggccttatcgggctccagccatctcatgaggggagaggagacggaggggagtagagaagttacacagaaatg

SEQ ID NO: 33999 - DNA, 201 bp, Homo sapiens
agagcaagagggagatgtacagtcgtctgaagaagctctgagggcggcaggaccagccagcagcagcccaagcttccctccatccccctttaccctctttsctgcagagaaacttaagcaaaggggacagctgtgtgacatttggagagggggcctgggacttccatgccttaaacctacctcccacactcccaaggttgg

SEQ ID NO: 34000 - DNA, 201 bp, Homo sapiens
gtcttttaattggggtgtgcattcaagataagtttataccatggatagcacaaaggagaagtgtgacagttacaaagatgatcttctgcttaggatgggayttaatgataataaagcaggaatggaaggattagataaagagaaaattaacaaaattataatggaagccacgaaggggtccagattttatggaaatgagct

SEQ ID NO: 34001 - DNA, 201 bp, Homo sapiens
atcctcaaatactccaaaactcagttgtttttggaacatcagcccaggaagtggtaaaggaaattcgtttcagaattgagcagaaaacaacactgacagcyagtgcaggcattgccccaaatacaatgttagcaaaagtatgcagtgataagaataaaccaaatggacaataccaaattcttcccaatagacaagctgtga

SEQ ID NO: 34002 - DNA, 201 bp, Homo sapiens
caggaaaggaagttaataaactgagtgagcatgaacgatccatctctccactactttttgaagagagtccttctgatgtgcagcccccaggagatcctttycaagtgaactttgaagaacaaaacaatcctcaaatactccaaaactcagttgtttttggaacatcagcccaggaagtggtaaaggaaattcgtttcagaa

SEQ ID NO: 34003 - DNA, 201 bp, Homo sapiens
aatacaaagttgtagtattatggttcttgatggtgtgatttacttatgtaaattatgtacaaatttaagttcaatgaaacactgatttaatgtactgaaasgtaaatagtaccatagtgaattattttctgtcttgccttaggtttatttttattatcttcaatattagaataaatgctaaattattttcatttaaggatt

SEQ ID NO: 34004 - DNA, 201 bp, Homo sapiens
tcaccaagatacatttaaatgtgaagccgtgaataaacaaagtttccagacatcacaaccattccaagttttaaagaagaagatgaatgagaatttggaartatcagagaattcagatgactgtcagatacttacctgtcctgtttgctttagggctcaagggtgcatcagtctggaagccttgaataaacatgtagatga

SEQ ID NO: 34005 - DNA, 201 bp, Homo sapiens
gccgaaatttgagcaataccatagtgcacattgacatggatgctttctatgcagctgtagaaatgagggacaatccagaattgaaggataaacccattgcygtaggatcaatgagtatgctgtctacttcaaattaccatgcaaggagatttggtgttcgtgcagccatgccaggatttattgctaagaggctgtgcccac

SEQ ID NO: 34006 - DNA, 201 bp, Homo sapiens
ttaaagaagaagatgaatgagaatttggaaatatcagagaattcagatgactgtcagatacttacctgtcctgtttgctttagggctcaagggtgcatcartctggaagccttgaataaacatgtagatgaatgtcttgatggaccttcaatcagtgaaaactttaaaatgttctcgtgttcacatgtttctgctaccaaa

SEQ ID NO: 34007 - DNA, 201 bp, Homo sapiens
aacatcttggcattatttccttcatatctccttgggtctaggttcaacacacctgacgagggatggagagaggaaaagtatgagcgttgagaggacattcmgtgagataaataaagcggaagagcaatacagcctatgtcaagaactttgcagtgagcttgctcaggatctacagaaagaaagacttaagggtagaactgt

SEQ ID NO: 34008 - DNA, 201 bp, Homo sapiens
tcaggaaaataaatatcacagtattatctgtgttaaaatggtttttgcctaaaatataatttttaatttggcttttcttatttaaaattccattatcttaygaataagcacttgaatcagtttttaaaatatttagtctaagatgattcaaagtagttttattttaatacaggacttttaaatggcagtatttcatttctt

SEQ ID NO: 34009 - DNA, 201 bp, Homo sapiens
gttgtagtcgcgatcctgaggtaacggataagtttataccatggatagcacaaaggagaagtgtgacagttacaaagatgatcttctgcttaggatgggayttaatgataataaagcaggaatggaaggattagataaagagaaaattaacaaaattataatggaagccacgaaggggtccagattttatggaaatgagct

SEQ ID NO: 34010 - DNA, 201 bp, Homo sapiens; identical to SEQ ID NO: 34001

SEQ ID NO: 34011 - DNA, 201 bp, Homo sapiens; identical to SEQ ID NO: 34002

SEQ ID NO: 34012 - DNA, 201 bp, Homo sapiens; identical to SEQ ID NO: 34004

SEQ ID NO: 34013 - DNA, 201 bp, Homo sapiens; identical to SEQ ID NO: 34005

SEQ ID NO: 34014 - DNA, 201 bp, Homo sapiens; identical to SEQ ID NO: 34006

SEQ ID NO: 34015 - DNA, 201 bp, Homo sapiens; identical to SEQ ID NO: 34007

SEQ ID NO: 34016 - DNA, 201 bp, Homo sapiens; identical to SEQ ID NO: 34008

SEQ ID NO: 34017 - DNA, 201 bp, Homo sapiens; identical to SEQ ID NO: 34009

SEQ ID NO: 34018 - DNA, 201 bp, Homo sapiens; identical to SEQ ID NO: 34001

SEQ ID NO: 34019 - DNA, 201 bp, Homo sapiens; identical to SEQ ID NO: 34002

SEQ ID NO: 34020 - DNA, 201 bp, Homo sapiens; identical to SEQ ID NO: 34003

SEQ ID NO: 34021 - DNA, 201 bp, Homo sapiens; identical to SEQ ID NO: 34004

SEQ ID NO: 34022 - DNA, 201 bp, Homo sapiens; identical to SEQ ID NO: 34005

SEQ ID NO: 34023 - DNA, 201 bp, Homo sapiens; identical to SEQ ID NO: 34006

SEQ ID NO: 34024 - DNA, 201 bp, Homo sapiens; identical to SEQ ID NO: 34007

SEQ ID NO: 34025 - DNA, 201 bp, Homo sapiens; identical to SEQ ID NO: 34008

SEQ ID NO: 34026 - DNA, 201 bp, Homo sapiens
aggaccccctgctgccagggaatgacgttggccggagctcctatggcgccatgcaggtgaagcaggtcttcgattatgcctacatagtgctcagccatgcygtgtcaccgctggccaggtcctatccaaacagagacgccgaaagtactttaggaagaatcatcaaagtaactcaggaggtgattgactaccggaggtgga

SEQ ID NO: 34027 - DNA, 201 bp, Homo sapiens
gtttactatacctccaccgaccctaggggttgctcctgttccttgcagacaagctggtgtagaaggaactgcgtctttgaaagccgtccaccacatgtctyccccggccattccctcagcgtcccccaacccgctctcgagccctcatctgtatcataagcagcacaacggcatgaaactgtccatgaagggctctcacgg

SEQ ID NO: 34028 - DNA, 201 bp, Homo sapiens
atcttcaagaacagctcgttgtgctcatctgtgaagccttattaaacgtggacgttgttttctgccttcccaggattcttccttcagtgctgaggcaggtygggctcaggaactgcagggacgtgaacatgcgcttgcggtttgaggtagccgtgtctgttccttcgcggtttgctattttcatttcctgttcgtcaaagc

SEQ ID NO: 34029 - DNA, 201 bp, Homo sapiens
ttgaggtagccgtgtctgttccttcgcggtttgctattttcatttcctgttcgtcaaagcagcagaggagatcaaaccccgttcgtgtgtctttcctccayggataagcttgggaggtcattgttttactgccctcacattttgtttgaaatttcagaactgtttttctatgtaaatattgaaaacttatgatttgtgcaa

SEQ ID NO: 34030 - DNA, 201 bp, Homo sapiens
cagtataaccgcaccggctggaggaggaaaaaacacacacacacacgggacagtctgcccgtgagcctcagcagataatggctcctggctgcgtcagcctsccccacccctctgcagactgccccgcggcctcggccaccggcaggggaaccgagaccagcaccccgcacgtcagccgggctcgcggcacgcccgccgctg

SEQ ID NO: 34031 - DNA, 201 bp, Homo sapiens; identical to SEQ ID NO: 34026

SEQ ID NO: 34032 - DNA, 201 bp, Homo sapiens; identical to SEQ ID NO: 34027

SEQ ID NO: 34033 - DNA, 201 bp, Homo sapiens; identical to SEQ ID NO: 34028

SEQ ID NO: 34034 - DNA, 201 bp, Homo sapiens; identical to SEQ ID NO: 34029

SEQ ID NO: 34035 - DNA, 201 bp, Homo sapiens; identical to SEQ ID NO: 34030

SEQ ID NO: 34036 - DNA, 201 bp, Homo sapiens
tatgtttcgattataaatgaatgatcacctcgaagtcactttagaacacatgttgagatggtgacatttcccagcctgcctgcccctctgcccaccccggycacattgccctgagcttctttccatgacagcagctccgacgagccggcaggaaactcaatgcccctgctggctccatttccatgtaaatggcgccgttca

SEQ ID NO: 34037 - DNA, 201 bp, Homo sapiens
tggtgaaaacgtgctctcgatgctgatttgtggtgtgctgctgtccacagataaaccagtgccattagatggaaggcagaggatactgcgaccacccctgrcagacggtggcgtagacaccaggtgcgccctctggggctcagagcaacggatggtcagctgcgaacagtctcgtccgatgttaggaaatggtcctacggc

SEQ ID NO: 34038 - DNA, 201 bp, Homo sapiens
cctggcagacggtggcgtagacaccaggtgcgccctctggggctcagagcaacggatggtcagctgcgaacagtctcgtccgatgttaggaaatggtcctrcggccgcgcctttgtgttcctgtcttctctccaccaccaaaagcaaaagatgatttcccattcactgcagtcatctgactcattttaatatctgtgctag

SEQ ID NO: 34039 - DNA, 201 bp, Homo sapiens
ttgggtcaccccgcccgtgtccgacggctgatgtctgccacgtgcagtagacgctcgagcgcctgtccacacacacaccagtaccctgacatctcctcaaygctgtgcatcctccacccgtttttactccagccagaactgcatcctgaatgcccaggagacgtttaagttatttatgaaaagatgtgtgtacagagagga

SEQ ID NO: 34040 - DNA, 201 bp, Homo sapiens
tttaagagtttggtgaagacgcatgaaaaatatggttgggtcaccccgcccgtgtccgacggctgatgtctgccacgtgcagtagacgctcgagcgcctgyccacacacacaccagtaccctgacatctcctcaatgctgtgcatcctccacccgtttttactccagccagaactgcatcctgaatgcccaggagacgttt

SEQ ID NO: 34041 - DNA, 201 bp, Homo sapiens; identical to SEQ ID NO: 34036

SEQ ID NO: 34042 - DNA, 201 bp, Homo sapiens; identical to SEQ ID NO: 34037

SEQ ID NO: 34043 - DNA, 201 bp, Homo sapiens; identical to SEQ ID NO: 34038

SEQ ID NO: 34044 - DNA, 201 bp, Homo sapiens; identical to SEQ ID NO: 34039

SEQ ID NO: 34045 - DNA, 201 bp, Homo sapiens; identical to SEQ ID NO: 34040

SEQ ID NO: 34046 - DNA, 201 bp, Homo sapiens
ttctcgactggaacaggatgaatatgcactgcgctgtcccagtctggccaagaaggcacaggatgaaggactcctttctgatgtcgtacccttcaaagtamcaggaaaagatacagttaccaaacataatggcatccgtccttcctcactggagcagatggctaaactaaaacctgcattcatcaagccctacggcacagc

SEQ ID NO: 34047 - DNA, 201 bp, Homo sapiens
cgtcttgacttacacttttaaaaagtgcacttctgatgcacttctcactgcatcagaatggtccctcagattttccataagacctctgagctattcctccyaagcaacacttacgggtttgttgcatcagcccagtgtccccaaggaagtagttgattatatcatctttggcacagtcattcaggaagtgaaaacaagcca

SEQ ID NO: 34048 - DNA, 201 bp, Homo sapiens
tctgcagaccaattggctgtttctcgactggaacaggatgaatatgcactgcgctgtcccagtctggccaagaaggcacaggatgaaggactcctttctgrtgtcgtacccttcaaagtaccaggaaaagatacagttaccaaacataatggcatccgtccttcctcactggagcagatggctaaactaaaacctgcattc

SEQ ID NO: 34049 - DNA, 108 bp, Homo sapiens
ggagctactggctgcaggttggtcgtggcagctgccaacagattacggaaggaaggaggccagtatgccttagcggctgcctgtgcagctggagggcaggrccatggt

SEQ ID NO: 34050 - DNA, 201 bp, Homo sapiens
atgaatatgcactgcgctgtcccagtctggccaagaaggcacaggatgaaggactcctttctgatgtcgtacccttcaaagtaccaggaaaagatacagtyaccaaacataatggcatccgtccttcctcactggagcagatggctaaactaaaacctgcattcatcaagccctacggcacagcgacagctgcaaattctt

SEQ ID NO: 34051 - DNA, 201 bp, Homo sapiens
tagagtttattaggtgaatcttctaaaactttccttctgttggatcccagtgacgtggaagtcatcagaaccccacggtacttggagtacctctctgcacmaagatagctggctgattttctgctcagtcacaattttacttgaaagcaagaattgtcctagctccttttccattattccaaaacgtttaacgttcaaagc

SEQ ID NO: 34052 - DNA, 201 bp, Homo sapiens
ggtgtgcttgttttgtttctttggtagagtttattaggtgaatcttctaaaactttccttctgttggatcccagtgacgtggaagtcatcagaaccccacrgtacttggagtacctctctgcaccaagatagctggctgattttctgctcagtcacaattttacttgaaagcaagaattgtcctagctccttttccattat

SEQ ID NO: 34053 - DNA, 201 bp, Homo sapiens
ttcgtcaggtggcacaggagcagttctttttaatgtgcaccagatgttgcatgggacaccggcctctacttttcttcattactctactctttactgttttrgggagcacagcaagagagagagctaaacactcaggcgactactttactcttttaagacaccttcttaattacgcttacaatagtaatattaatgtaccca

SEQ ID NO: 34054 - DNA, 201 bp, Homo sapiens
aaggccagttggacaaatgcgagtaaaaagcaacgtgaaaagctacttgagctgatacgtcgtcttgcagaagatgataaagatggtgtgatggcacacaragtgttgaaccttctgtggaatctggctcacagtgatgatgtgcctgtagatatcatggacctggctctcagtgcccacataaaaatactagattacagt

SEQ ID NO: 34055 - DNA, 201 bp, Homo sapiens
ctgttttggggagcacagcaagagagagagctaaacactcaggcgactactttactcttttaagacaccttcttaattacgcttacaatagtaatattaaygtacccaatgctgaagttcttctcaataatgaaattgattggcttaaaagaattagggatgatgttaaaagaacaggagaaacgggtattgaagagacga

SEQ ID NO: 34056 - DNA, 201 bp, Homo sapiens
cccgcctgcagtggaaagtgtatagtgttttgtaataaatggcctgatgctaatgtgtaaatggcaaaggtgtatatagtatattaatgttgactgttaawtcttaagcaagaaacttttttcttgatgagactcacagatctacacaaactacaaaagttaattttcttgttacacccactgcactctgcaaccagtgtt

SEQ ID NO: 34057 - DNA, 201 bp, Homo sapiens
tgattcagcaactctacatgattccttccattaggaacggtattcttgccattgaaggcacaggtagtgatgtagatgatgatatgtctggggatgagaarcaggacaatgagagcaatgttgatcccagggatgatgtatttggatatcctcaacaatttgaagataaaccagcattaagtaaaactgaagatagaaaag

SEQ ID NO: 34058 - DNA, 201 bp, Homo sapiens
cccatacaaaaattgagctctttgtgggcggtgagctgatagatcctgcagatgatagaaagttgattggacaattaaacttaaaagataaatcgcttatyacagccaaacttacacagataagttccaatatgccttcaagccctgatagctcttctgattcctccactggatctcctggaaaccatggtaatcattaca

SEQ ID NO: 34059 - DNA, 201 bp, Homo sapiens
ctgtgtctggctaatatttaaaactagaaaaactattcctaatcaacatggagtggagagtttattcactgtcttatctgcagaaatttgctgtcaatatrtaacccgcctgcagtggaaagtgtatagtgttttgtaataaatggcctgatgctaatgtgtaaatggcaaaggtgtatatagtatattaatgttgactgt

SEQ ID NO: 34060 - DNA, 201 bp, Homo sapiens; identical to SEQ ID NO: 34051

SEQ ID NO: 34061 - DNA, 201 bp, Homo sapiens; identical to SEQ ID NO: 34052

SEQ ID NO: 34062 - DNA, 201 bp, Homo sapiens; identical to SEQ ID NO: 34053

SEQ ID NO: 34063 - DNA, 201 bp, Homo sapiens; identical to SEQ ID NO: 34054

SEQ ID NO: 34064 - DNA, 201 bp, Homo sapiens; identical to SEQ ID NO: 34055

SEQ ID NO: 34065 - DNA, 201 bp, Homo sapiens; identical to SEQ ID NO: 34056

SEQ ID NO: 34066 - DNA, 201 bp, Homo sapiens; identical to SEQ ID NO: 34057

SEQ ID NO: 34067 - DNA, 201 bp, Homo sapiens; identical to SEQ ID NO: 34058

SEQ ID NO: 34068 - DNA, 201 bp, Homo sapiens; identical to SEQ ID NO: 34059

SEQ ID NO: 34069 - DNA, 201 bp, Homo sapiens; identical to SEQ ID NO: 34051

SEQ ID NO: 34070 - DNA, 201 bp, Homo sapiens; identical to SEQ ID NO: 34052

SEQ ID NO: 34071 - DNA, 201 bp, Homo sapiens; identical to SEQ ID NO: 34053

SEQ ID NO: 34072 - DNA, 201 bp, Homo sapiens; identical to SEQ ID NO: 34054

SEQ ID NO: 34073 - DNA, 201 bp, Homo sapiens; identical to SEQ ID NO: 34055

SEQ ID NO: 34074 - DNA, 201 bp, Homo sapiens; identical to SEQ ID NO: 34056

SEQ ID NO: 34075 - DNA, 201 bp, Homo sapiens; identical to SEQ ID NO: 34057

SEQ ID NO: 34076 - DNA, 201 bp, Homo sapiens; identical to SEQ ID NO: 34058

SEQ ID NO: 34077 - DNA, 201 bp, Homo sapiens; identical to SEQ ID NO: 34059

SEQ ID NO: 34078 - DNA, 201 bp, Homo sapiens; identical to SEQ ID NO: 34051

SEQ ID NO: 34079 - DNA, 201 bp, Homo sapiens; identical to SEQ ID NO: 34052

SEQ ID NO: 34080 - DNA, 201 bp, Homo sapiens; identical to SEQ ID NO: 34053

SEQ ID NO: 34081 - DNA, 201 bp, Homo sapiens; identical to SEQ ID NO: 34054

SEQ ID NO: 34082 - DNA, 201 bp, Homo sapiens; identical to SEQ ID NO: 34055

SEQ ID NO: 34083 - DNA, 201 bp, Homo sapiens; identical to SEQ ID NO: 34056

SEQ ID NO: 34084 - DNA, 201 bp, Homo sapiens; identical to SEQ ID NO: 34057

SEQ ID NO: 34085 - DNA, 201 bp, Homo sapiens; identical to SEQ ID NO: 34058

SEQ ID NO: 34086 - DNA, 201 bp, Homo sapiens; identical to SEQ ID NO: 34059

SEQ ID NO: 34087 - DNA, 201 bp, Homo sapiens; identical to SEQ ID NO: 34051

SEQ ID NO: 34088 - DNA, 201 bp, Homo sapiens; identical to SEQ ID NO: 34052

SEQ ID NO: 34089 - DNA, 201 bp, Homo sapiens; identical to SEQ ID NO: 34053

SEQ ID NO: 34090 - DNA, 201 bp, Homo sapiens; identical to SEQ ID NO: 34054

SEQ ID NO: 34091 - DNA, 201 bp, Homo sapiens; identical to SEQ ID NO: 34055

SEQ ID NO: 34092 - DNA, 201 bp, Homo sapiens; identical to SEQ ID NO: 34056

SEQ ID NO: 34093 - DNA, 201 bp, Homo sapiens; identical to SEQ ID NO: 34057

SEQ ID NO: 34094 - DNA, 201 bp, Homo sapiens; identical to SEQ ID NO: 34058

SEQ ID NO: 34095 - DNA, 201 bp, Homo sapiens; identical to SEQ ID NO: 34059

SEQ ID NO: 34096 - DNA, 201 bp, Homo sapiens; identical to SEQ ID NO: 34051

SEQ ID NO: 34097 - DNA, 201 bp, Homo sapiens; identical to SEQ ID NO: 34052

SEQ ID NO: 34098 - DNA, 201 bp, Homo sapiens; identical to SEQ ID NO: 34053

SEQ ID NO: 34099 - DNA, 201 bp, Homo sapiens; identical to SEQ ID NO: 34054

SEQ ID NO: 34100 - DNA, 201 bp, Homo sapiens; identical to SEQ ID NO: 34055

SEQ ID NO: 34101 - DNA, 201 bp, Homo sapiens; identical to SEQ ID NO: 34056

SEQ ID NO: 34102 - DNA, 147 bp, Homo sapiens
cttttctcaagacaactacataagcagacaaaattgcaaagatctgmcctgtgtcgagtatgacagccacgactcgtggctctccggtcggagggaatgacaaccagggccaggctcctgatggacagtctcagccccccctccaac

SEQ ID NO: 34103 - DNA, 201 bp, Homo sapiens; identical to SEQ ID NO: 34057

SEQ ID NO: 34104 - DNA, 201 bp, Homo sapiens; identical to SEQ ID NO: 34058

SEQ ID NO: 34105 - DNA, 201 bp, Homo sapiens; identical to SEQ ID NO: 34059

SEQ ID NO: 34106 - DNA, 201 bp, Homo sapiens; identical to SEQ ID NO: 34051

SEQ ID NO: 34107 - DNA, 201 bp, Homo sapiens; identical to SEQ ID NO: 34052

SEQ ID NO: 34108 - DNA, 201 bp, Homo sapiens; identical to SEQ ID NO: 34053

SEQ ID NO: 34109 - DNA, 201 bp, Homo sapiens; identical to SEQ ID NO: 34054

SEQ ID NO: 34110 - DNA, 201 bp, Homo sapiens; identical to SEQ ID NO: 34055

SEQ ID NO: 34111 - DNA, 201 bp, Homo sapiens; identical to SEQ ID NO: 34056

SEQ ID NO: 34112 - DNA, 201 bp, Homo sapiens; identical to SEQ ID NO: 34057

SEQ ID NO: 34113 - DNA, 201 bp, Homo sapiens; identical to SEQ ID NO: 34058

SEQ ID NO: 34114 - DNA, 201 bp, Homo sapiens; identical to SEQ ID NO: 34059

SEQ ID NO: 34115 - DNA, 201 bp, Homo sapiens
ccaccgaagggaacccatggctaggatcagtttttcctacctctgcccagcctcctggtacttcactgtgcccacagtgagtccatttctccgtcagcggrtggcattcctgggactcttcttcatatcctgtctccttttacttatgttaatcatagactttcgacattggagtgcttcattaccacgagataggcaata

SEQ ID NO: 34116 - DNA, 161 bp, Homo sapiens
ccgccgccggccgggccctccttccggctgggcaaggggccgcggggagcagctcgggacygaaccgagaggtgccgaaggaaccggcgggccgcttgatcccgctgcagacgtaggagatgcctgggacaaggaggccaccttctcagggcaaaagaaaa

SEQ ID NO: 34117 - DNA, 201 bp, Homo sapiens
ggacttgctgtggcttgaagaggtggtgcccatgatgggagtacaggtggggccgtgaggctggaccaggactagagaagcttgagcacccccgagttgcygctcattgaattcctccactttcttatatagcctcagatgctgtgattaattccttctccgtacccaggtcttctctgagagaagctataatttaatctg

SEQ ID NO: 34118 - DNA, 201 bp, Homo sapiens
ccttgttctgaatgaaactcttaacaaaaacagattgcttggtcagaagacaggtctgagtcccgacaatccatttctggatccctgcctgccagtgggaytcacagatgtggtggagaggaacagccaagtcttacatgtccgaggaagaggagactgggtgtcttgtggggcaatgctgagccccctgctggctcgctc

SEQ ID NO: 34119 - DNA, 201 bp, Homo sapiens
acccaggaattggcagcaggacggagaaggacagtagggatactggatatgggaggagcctctctccaaattgcttatgaagttcctacctcaacctctgyccttcctgcaaagcaggaagaagctgccaagatcctgctggctgagttcaacctgggctgtgatgtgcaacacactgaacacgtgtacagggtttatgtc

SEQ ID NO: 34120 - DNA, 201 bp, Homo sapiens
ggaacagccaagtcttacatgtccgaggaagaggagactgggtgtcttgtggggcaatgctgagccccctgctggctcgctccaacaccagccaggcctcrctcaatggcatatatcaatcgcctattgacttcaacaacagcgagttctacggcttctctgagtttttttattgtacagaggatgtgttgcgcattggtg

SEQ ID NO: 34121 - DNA, 201 bp, Homo sapiens
aagaagctgccaagatcctgctggctgagttcaacctgggctgtgatgtgcaacacactgaacacgtgtacagggtttatgtcacaacttttctgggtttyggaggcaactttgcccggcagcgctacgaagaccttgttctgaatgaaactcttaacaaaaacagattgcttggtcagaagacaggtctgagtcccgaca

SEQ ID NO: 34122 - DNA, 201 bp, Homo sapiens
acaaggagacccctctttacatcctctgcacagcaggcatgaggcttctccctgagaggaagcagttggctatcttggctgacctagtgaaagatttaccmctggagtttgacttcctcttttcacagtctcaagcagaagtgatctctgggaagcaggaaggggtttatgcatggattggaatcaactttgttttgggaa

SEQ ID NO: 34123 - DNA, 201 bp, Homo sapiens
ggtagctggttccgtctctcctttgtatacaaccactatctcttctttgcctgtatcctggtggtgctactggccatcttcctataccttctgcggctackccgaattcaccaccgacaaacacgagcctcagctccattggacttgctgtggcttgaagaggtggtgcccatgatgggagtacaggtggggccgtgaggc

SEQ ID NO: 34124 - DNA, 201 bp, Homo sapiens
tgctggacatcaaacagatgagagaccgcaacagccaaccagtggttaaaaaaatcaagccaggaatctctgcaatggcagacactccagaacatgccagkgattaccttcgtcctctgctgagctttgctgctgctcatgtgcctgtgaagaagcacaaggagacccctctttacatcctctgcacagcaggcatgaggc

SEQ ID NO: 34125 - DNA, 201 bp, Homo sapiens
ctccgtcagcgggtggcattcctgggactcttcttcatatcctgtctccttttacttatgttaatcatagactttcgacattggagtgcttcattaccacragataggcaatacgaaaggtatttggctcgagtaggggagcttgaagctactgacactgaagacccaaatctgaattatggacttgttgttgactgtggc

SEQ ID NO: 34126 - DNA, 184 bp, Homo sapiens
ccgccgccggccgggccctccttccggctgggcaaggggccgcggggagcagctcgggactgaaccgagaggtgccgaaggaamcggcgggccgcttgatcccgctgcagacgtaggagatgcctgggacaaggaggccaccttctcagggcaaaagaaaaagaaggtgacaggcgttgagacc

SEQ ID NO: 34127 - DNA, 201 bp, Homo sapiens
gggcaatgctgagccccctgctggctcgctccaacaccagccaggcctcactcaatggcatatatcaatcgcctattgacttcaacaacagcgagttctayggcttctctgagtttttttattgtacagaggatgtgttgcgcattggtggccgctaccatgggccaacatttgccaaggctgctcaggattactgtggca

SEQ ID NO: 34128 - DNA, 201 bp, Homo sapiens; identical to SEQ ID NO: 34115

SEQ ID NO: 34129 - DNA, 161 bp, Homo sapiens; identical to SEQ ID NO: 34116

SEQ ID NO: 34130 - DNA, 201 bp, Homo sapiens; identical to SEQ ID NO: 34117

SEQ ID NO: 34131 - DNA, 201 bp, Homo sapiens; identical to SEQ ID NO: 34118

SEQ ID NO: 34132 - DNA, 201 bp, Homo sapiens
agattcgaccacgaggatggacggagaaggacagtagggatactggatatgggaggagcctctctccaaattgcttatgaagttcctacctcaacctctgyccttcctgcaaagcaggaagaagctgccaagatcctgctggctgagttcaacctgggctgtgatgtgcaacacactgaacacgtgtacagggtttatgtc

SEQ ID NO: 34133 - DNA, 201 bp, Homo sapiens; identical to SEQ ID NO: 34120

SEQ ID NO: 34134 - DNA, 201 bp, Homo sapiens; identical to SEQ ID NO: 34121

SEQ ID NO: 34135 - DNA, 201 bp, Homo sapiens; identical to SEQ ID NO: 34122

SEQ ID NO: 34136 - DNA, 201 bp, Homo sapiens; identical to SEQ ID NO: 34123

SEQ ID NO: 34137 - DNA, 201 bp, Homo sapiens; identical to SEQ ID NO: 34124

SEQ ID NO: 34138 - DNA, 201 bp, Homo sapiens; identical to SEQ ID NO: 34125

SEQ ID NO: 34139 - DNA, 184 bp, Homo sapiens; identical to SEQ ID NO: 34126

SEQ ID NO: 34140 - DNA, 201 bp, Homo sapiens; identical to SEQ ID NO: 34127

SEQ ID NO: 34141 - DNA, 201 bp, Homo sapiens
tgatcagcactgcagcaaacctgtccttgctcctgtccagagcagagaggaaccggcgcctgcatggggactatgcataccacccgctgcaggagatgaayggggagcctctggccgcagagaaggagcagccagggggcgcccacaaccccttcaaggactgaagcctcaagctgcccggggtggcacgtcgcgaaagct

SEQ ID NO: 34142 - DNA, 201 bp, Homo sapiens
tgcgcaccttcgtgtcgcacttcagggaccgcgcggtggccggccacctgacgcgggccgttgagcccctgcgcaccttctcggtgctggagcccggtggrcccggcggctgcgcggcgagacgacgcgccaccgtggaggagacggcgcgggcggccgactgccgtgtcgcccagaacggcggcttcttccgcatgaact

SEQ ID NO: 34143 - DNA, 201 bp, Homo sapiens
gtttccccacggtctggcttctgcaggggaaatttcaaggccactggcgtggaccatctgggtgtcctcagcccctgtggggcagccaagttcctgatagsacttgtgcctcagcccctcacctggccacctgccagggcacctgcaaccctagcaataccatgctcgctggagaggctcagctgcctgcttttcgcctgc

SEQ ID NO: 34144 - DNA, 201 bp, Homo sapiens
cccctcacctggccacctgccagggcacctgcaaccctagcaataccatgctcgctggagaggctcagctgcctgcttttcgcctgcctgtgtctgctgcygagaagcccgtgcccccgggagggctgccgcactgccaaagagtctccctcctcctggggaaggggctgccaacgaaccagactcagtgaccacgtcatg

SEQ ID NO: 34145 - DNA, 201 bp, Homo sapiens
tgcttttcgcctgcctgtgtctgctgctgagaagcccgtgcccccgggagggctgccgcactgccaaagagtctccctcctcctggggaaggggctgccarcgaaccagactcagtgaccacgtcatgacagaacagcacatcctggccagcacccctggctggagtgggttaaagggacgagtctgccttcctggctgtg

SEQ ID NO: 34146 - DNA, 201 bp, Homo sapiens
cctgatagcacttgtgcctcagcccctcacctggccacctgccagggcacctgcaaccctagcaataccatgctcgctggagaggctcagctgcctgcttytcgcctgcctgtgtctgctgctgagaagcccgtgcccccgggagggctgccgcactgccaaagagtctccctcctcctggggaaggggctgccaacgaac

SEQ ID NO: 34147 - DNA, 201 bp, Homo sapiens
tgatagcacttgtgcctcagcccctcacctggccacctgccagggcacctgcaaccctagcaataccatgctcgctggagaggctcagctgcctgcttttsgcctgcctgtgtctgctgctgagaagcccgtgcccccgggagggctgccgcactgccaaagagtctccctcctcctggggaaggggctgccaacgaacca

SEQ ID NO: 34148 - DNA, 201 bp, Homo sapiens
acacgggaccccttttctacagacctcatcactggatttgccaactagaattcgatttcctgtcataggaagctccttggaagaagggatggggggatgaratcatgtttacagacctgttttgtcatcctgctgccaagaagttttttaatcacttgaataaattgatataataaaaggagccaccaggtggtgtgtgga

SEQ ID NO: 34149 - DNA, 201 bp, Homo sapiens
agttccaggaaaacgaggtgaagctgggcagggcggggcacagccccaggtcaccccaggttaagcggttcctcagcctcagggctttgtgactcgggccycaaggctcacttggagcaaaggaatcctgacttccaaggctggaagggcccagaaggctgcagccgccaccaggtcccccggcctcagcctggacagagc

SEQ ID NO: 34150 - DNA, 201 bp, Homo sapiens
tgagcgggtcatgaatcactggcaggaagacctgatgtttggctaccagttcctgaatggctgcaaccctgtgttgatccggcgctgcacagagctgcccragaagctcccggtgaccacggagatggtagagtgcagcctggagcggcagctcagcttggagcaggaggtccagcaagggaacattttcatcgtggactt

SEQ ID NO: 34151 - DNA, 201 bp, Homo sapiens; identical to SEQ ID NO: 34150

SEQ ID NO: 34152 - DNA, 201 bp, Homo sapiens
aaaacgagctgttcctgggcatgtacccagaagagcattttatcgagaagcctgtgaaggaagccatggcccgattccgcaagaacctcgaggccattgtmagcgtgattgctgagcgcaacaagaagaagcagctgccatattactacttgtccccagaccggattccgaacagtgtggccatctgagcacactgccagt

SEQ ID NO: 34153 - DNA, 201 bp, Homo sapiens
tgcagtgtgggcgctgagccagttccaggaaaacgagctgttcctgggcatgtacccagaagagcattttatcgagaagcctgtgaaggaagccatggccmgattccgcaagaacctcgaggccattgtcagcgtgattgctgagcgcaacaagaagaagcagctgccatattactacttgtccccagaccggattccgaa

SEQ ID NO: 34154 - DNA, 201 bp, Homo sapiens
tgtaaacaccatagggacccattctacacagagcaggactgcacagcgtcctgtccacacccagctcagcatttccacaccaagcagcaacagcaaatcaygaccactgatagatgtctattcttgttggagacatgggatgattattttctgttctatttgtgcttagtccaattccttgcacatagtaggtacccaatt

SEQ ID NO: 34155 - DNA, 193 bp, Homo sapiens
aagggtccttcaggtaggaggtcctgggtgactttggaagtccgtagtgtctcattgcagataatttttagcttagggcctggtggctaggtyggttctctcctttccagtcggagacctctgccgcaaacatgctccgccagatcatcggtcaggccaagaagcatccgagcttgatccccctctttgtatt

SEQ ID NO: 34156 - DNA, 145 bp, Homo sapiens
aagggtccttcaggtaggaggtcctgggtgactttggaagtccgyagtgtctcattgcagataatttttagcttagggcctggtggctaggtcggttctctcctttccagtcggagacctctgccgcaaacatgctccgccagat

SEQ ID NO: 34157 - DNA, 115 bp, Homo sapiens
aagggtccttcaggkaggaggtcctgggtgactttggaagtccgtagtgtctcattgcagataatttttagcttagggcctggtggctaggtcggttctctcctttccagtcgga

SEQ ID NO: 34158 - DNA, 201 bp, Homo sapiens
aggtcctgggtgactttggaagtccgtagtgtctcattgcagataatttttagcttagggcctggtggctaggtcggttctctcctttccagtcggagacytctgccgcaaacatgctccgccagatcatcggtcaggccaagaagcatccgagcttgatccccctctttgtatttattggaactggagctactggagcaa

SEQ ID NO: 34159 - DNA, 199 bp, Homo sapiens
agaatgaaggtcttccagaagccacatccgcacaattttccacttaaccaggaaatatttctcctctaaatgcatgaaatcatgttggagatctctattgyaatctctattggagattacaatgattaaatcaataaataactgaaacctaaaaaaaaaaaaaaaaccaaaaaaaaaaaaaaaagaaggggccttattt

SEQ ID NO: 34160 - DNA, 165 bp, Homo sapiens
acttggcatctctttgttgtgattttcaaggttataagttgctttggtcctaggattgaagttgaaatctgagtttatcagtgctaaccatggtgctagtrgtcaagagatcttgagaattttggctgctgagtcttggtgcagggtgcaggttttcttttcttt

SEQ ID NO: 34161 - DNA, 131 bp, Homo sapiens
taagttgctttggtcctaggattgaagttgaaatctgagtttatcagtgctaaccatggtgctagtagtcaagagatcttgagaattttggctgctgagtsttggtgcagggtgcaggttttcttttcttt

SEQ ID NO: 34162 - DNA, 193 bp, Homo sapiens
aagggtccttcaggtaggaggtcctgggtgactttggaagtccgtagtgtctcattgcagataatttttagcttagggcctggtggctaggtyggttctctcctttccagtcggagacctctgccgcaaacatgctccgccagatcatcggtcaggccaagaagcatccgagcttgggacagaaataacccag

SEQ ID NO: 34163 - DNA, 145 bp, Homo sapiens; identical to SEQ ID NO: 34156

SEQ ID NO: 34164 - DNA, 115 bp, Homo sapiens; identical to SEQ ID NO: 34157

SEQ ID NO: 34165 - DNA, 201 bp, Homo sapiens
aggtcctgggtgactttggaagtccgtagtgtctcattgcagataatttttagcttagggcctggtggctaggtcggttctctcctttccagtcggagacytctgccgcaaacatgctccgccagatcatcggtcaggccaagaagcatccgagcttgggacagaaataacccagagccctggaacaaactgggtcccaat

SEQ ID NO: 34166 - DNA, 201 bp, Homo sapiens
agaatgaaggtcttccagaagccacatccgcacaattttccacttaaccaggaaatatttctcctctaaatgcatgaaatcatgttggagatctctattgyaatctctattggagattacaatgattaaatcaataaataactgaaacttgatatgtgtcacttttttatgctgaaagtatgctctgaactttagagtata

SEQ ID NO: 34167 - DNA, 165 bp, Homo sapiens; identical to SEQ ID NO: 34160

SEQ ID NO: 34168 - DNA, 131 bp, Homo sapiens; identical to SEQ ID NO: 34161

SEQ ID NO: 34169 - DNA, 193 bp, Homo sapiens; identical to SEQ ID NO: 34155

SEQ ID NO: 34170 - DNA, 145 bp, Homo sapiens; identical to SEQ ID NO: 34156

SEQ ID NO: 34171 - DNA, 115 bp, Homo sapiens; identical to SEQ ID NO: 34157

SEQ ID NO: 34172 - DNA, 201 bp, Homo sapiens; identical to SEQ ID NO: 34158

SEQ ID NO: 34173 - DNA, 201 bp, Homo sapiens; identical to SEQ ID NO: 34166

SEQ ID NO: 34174 - DNA, 201 bp, Homo sapiens
taggagggagctgcaggaggagagcggtctgacagtggacgccctgcacaaggtgggccagatcgtgtttgagttcgtgggcgagcctgagctcatggacrtgcatgtcttctgcacagacagcatccaggggacccccgtggagagcgacgaaatgcgcccatgctggttccagctggatcagatccccttcaaggacat

SEQ ID NO: 34175 - DNA, 201 bp, Homo sapiens
gggtacttcaagttccagggtcaggacaccatcctggactacacactccgcgaggtggacacggtctagcgggagcccagggcagcccctgggcaggagaygtggctgctgaacagccgcaaaccatcttcacctgggggcattgagtggcgcagagccgggtttcatctggaattaactggatggaagggaaaataaagc

SEQ ID NO: 34176 - DNA, 201 bp, Homo sapiens
aggtgggccagatcgtgtttgagttcgtgggcgagcctgagctcatggacgtgcatgtcttctgcacagacagcatccaggggacccccgtggagagcgaygaaatgcgcccatgctggttccagctggatcagatccccttcaaggacatgtggcccgacgacagctactggtttccactcctgcttcagaagaagaaat

SEQ ID NO: 34177 - DNA, 201 bp, Homo sapiens
gggtcaggacaccatcctggactacacactccgcgaggtggacacggtctagcgggagcccagggcagcccctgggcaggagacgtggctgctgaacagcygcaaaccatcttcacctgggggcattgagtggcgcagagccgggtttcatctggaattaactggatggaagggaaaataaagctatctagcggtggtttt

SEQ ID NO: 34178 - DNA, 185 bp, Homo sapiens
gaaaagcgcgcgcggggattccaggagtcgtggtttcttgccttgatgtactggagcaatcagatcacacggcggcttggagagygagtgcaaggttttatgagtggaattagccctcagcagatgggggagccagaaggcagttggagtgggaagaacccagggaccatgggcgcctccaggct

SEQ ID NO: 34179 - DNA, 201 bp, Homo sapiens
tctgcacagacagcatccaggggacccccgtggagagcgacgaaatgcgcccatgctggttccagctggatcagatccccttcaaggacatgtggcccgaygacagctactggtttccactcctgcttcagaagaagaaattccacgggtacttcaagttccagggtcaggacaccatcctggactacacactccgcgagg

SEQ ID NO: 34180 - DNA, 201 bp, Homo sapiens
cacggtctagcgggagcccagggcagcccctgggcaggagacgtggctgctgaacagccgcaaaccatcttcacctgggggcattgagtggcgcagagccrggtttcatctggaattaactggatggaagggaaaataaagctatctagcggtggttttttttttttttttttggagatggagtctctctctgttgcccag

SEQ ID NO: 34181 - DNA, 201 bp, Homo sapiens; identical to SEQ ID NO: 34174

SEQ ID NO: 34182 - DNA, 201 bp, Homo sapiens
ctgcttcagaagaagaaattccacgggtacttcaagttccagggtcaggacaccatcctggactacacactccgcgaggtggacacggtctagcgggagaygtggctgctgaacagccgcaaaccatcttcacctgggggcattgagtggcgcagagccgggtttcatctggaattaactggatggaagggaaaataaagc

SEQ ID NO: 34183 - DNA, 201 bp, Homo sapiens; identical to SEQ ID NO: 34176

SEQ ID NO: 34184 - DNA, 196 bp, Homo sapiens
attccacgggtacttcaagttccagggtcaggacaccatcctggactacacactccgcgaggtggacacggtctagcgggagacgtggctgctgaacagcygcaaaccatcttcacctgggggcattgagtggcgcagagccgggtttcatctggaattaactggatggaagggaaaataaagctatctagcggtg

SEQ ID NO: 34185 - DNA, 185 bp, Homo sapiens; identical to SEQ ID NO: 34178

SEQ ID NO: 34186 - DNA, 201 bp, Homo sapiens; identical to SEQ ID NO: 34179

SEQ ID NO: 34187 - DNA, 154 bp, Homo sapiens
ggactacacactccgcgaggtggacacggtctagcgggagacgtggctgctgaacagccgcaaaccatcttcacctgggggcattgagtggcgcagagccrggtttcatctggaattaactggatggaagggaaaataaagctatctagcggtg

SEQ ID NO: 34188 - DNA, 201 bp, Homo sapiens
ggttgttgctaaggttgctgccatggtaacatgcacatcctgtttacaccttcatctgggcaagttggtctaagctaggaacctacctaccctggacaacyactatcatcaccacctggggacaccaatcatcgtgacacggagtccaccttccactcagttcccccatcctcttcctcctctcgctgccagacttcatac

SEQ ID NO: 34189 - DNA, 201 bp, Homo sapiens
tactatcatcaccacctggggacaccaatcatcgtgacacggagtccaccttccactcagttcccccatcctcttcctcctctcgctgccagacttcatasggaagaaaggatctagacttcggacggctactcgggagcttattgcacaagatatattcaatctattccctcactgggcccccagagaagcaagaagtag

SEQ ID NO: 34190 - DNA, 201 bp, Homo sapiens
attcaccacccagccagcactataccattgtttttaacaccttcgtgctgatgcagctcttcaatgaaatcaactcccgaaagatccatggagagaagaaygtcttttcaggcatctaccgcaacattatcttctgctctgtagtcttgggcacattcatctgccagattttcatcgtggaatttgggggtaaacccttca

SEQ ID NO: 34191 - DNA, 201 bp, Homo sapiens
ctcgatggccgagagccgtgaaggggactttggctgcacagtaatggaactgaggaagctcatggagctgcgttcgagggatgcactgacccagattaatrtccactatggaggtgtacagaatctctgcagtagactgaaaacctcccctgtggaaggtctgtctgggaaccctgcagatctggagaaacgtaggcaggt

SEQ ID NO: 34192 - DNA, 201 bp, Homo sapiens
tcaacacagcccgggccattgccaccaaatgtggcattctgacacctggggatgacttcctgtgcttagaaggcaaagaattcaaccggctcatccgcaaygagaaaggcgaggtagagcaagaaaagctggacaagatctggcctaagcttcgggtcctggcgcgatcttctcccactgacaagcacaccctggtgaaag

SEQ ID NO: 34193 - DNA, 201 bp, Homo sapiens
actatcatcaccacctggggacaccaatcatcgtgacacggagtccaccttccactcagttcccccatcctcttcctcctctcgctgccagacttcatacrgaagaaaggatctagacttcggacggctactcgggagcttattgcacaagatatattcaatctattccctcactgggcccccagagaagcaagaagtagg

SEQ ID NO: 34194 - DNA, 201 bp, Homo sapiens
catcagaccgtgtcttgcctgccaactcgatggccgagagccgtgaaggggactttggctgcacagtaatggaactgaggaagctcatggagctgcgttcragggatgcactgacccagattaatgtccactatggaggtgtacagaatctctgcagtagactgaaaacctcccctgtggaaggtctgtctgggaaccctg

SEQ ID NO: 34195 - DNA, 201 bp, Homo sapiens
gctcccccagtcggacagctctctacagagcctagagacatcagtttgaattttctttctctgactctcatccctattttacctatttccattttcgtctrtcccatctatgaggtgatgatgggacttttcattgtcacgtcagctgctgtgttaacagcagtgtgtgtgaagtgaacctctacctgaccatgaagaggc

SEQ ID NO: 34196 - DNA, 201 bp, Homo sapiens
cctgagtgtactcccatctacatccagtactttgtcaagttcttcatcatcggcatcactgtactggtggtggctgtgccagaggggctgcctctggctgwcaccatctcactggcctactctgtgaagaaaatgatgaaagacaataacctagtacggcacttggatgcttgtgagaccatgggcaacgccaccgccatc

SEQ ID NO: 34197 - DNA, 201 bp, Homo sapiens
ggaatcccaacggtggcttccgtatgtacagcaagggcgcctctgagatcatcttgcgcaagtgtaatcgaatcctggaccggaaaggggaagcagtgccwttcaagaataaagacagagatgatatggtacgcactgtcatcgagcccatggcctgtgatggactccggactatctgcatagcttaccgggacttcgatg

SEQ ID NO: 34198 - DNA, 201 bp, Homo sapiens
gagacatcagtttgaattttctttctctgactctcatccctattttacctatttccattttcgtctatcccatctatgaggtgatgatgggacttttcatygtcacgtcagctgctgtgttaacagcagtgtgtgtgaagtgaacctctacctgaccatgaagaggcaagagcacagacttacaaggatttcaacttaagc

SEQ ID NO: 34199 - DNA, 201 bp, Homo sapiens
cctatggccgaaataagcctctgatctcacgcactatgatgaagaacatcttgggccatgcattctatcagctcattgtcatctttatccttgtctttgcrggtgagaaattctttgatattgatagtgggaggaaggcacctctacattcaccacccagccagcactataccattgtttttaacaccttcgtgctgatgc

SEQ ID NO: 34200 - DNA, 201 bp, Homo sapiens
tggagaaacgtaggcaggtgtttggacacaacgtgatcccccccaaaaagcccaagactttcttagaattagtgtgggaagctcttcaagatgtcacgctyatcatcctggagattgcagccatcatctccctggtcctgtccttttatcgccctgctggtgaagaaaatgaactgtgtggtcaagtcgcaactaccccag

SEQ ID NO: 34201 - DNA, 201 bp, Homo sapiens
attccctcactgggcccccagagaagcaagaagtaggaagaagttgagacagggaggcaggagacactggtcagttgaagggaaacgctacatcttctctrgttgaggggcttggtaacagcaggcaaaatgacgaacccatcagaccgtgtcttgcctgccaactcgatggccgagagccgtgaaggggactttggctgc

SEQ ID NO: 34202 - DNA, 201 bp, Homo sapiens
agatcaaagtggtcaaagcgttccatagttccctccacgaaagcattcagaaaccctacaaccaaaagtccatccacagcttcatgacccaccctgaattygccatagaggaggagttgccacgaacaccactcctggatgaggaagaggaggaaaatcctgacaaggcttctaagtttgggactagggtgctcctgttgg

SEQ ID NO: 34203 - DNA, 148 bp, Homo sapiens
gcttagactgggtacctcttgcccttgcagatgctggatacttatggytgctctaatggtttctttttgtctatctttgaacctttattccagagatccagttgtcatcggtatccaggaagctctcctcttcctcctcctgacgtct

SEQ ID NO: 34204 - DNA, 201 bp, Homo sapiens
ctctaatggtttctttttgtctatctttgaacctttattccagagatccagttgtcatcggtatccaggaagctctcctcttcctcctcctgacgtctacyactacagttgctggttgttgctaaggttgctgccatggtaacatgcacatcctgtttacaccttcatctgggcaagttggtctaagctaggaacctacct

SEQ ID NO: 34205 - DNA, 201 bp, Homo sapiens
cagtcaaggtgcctaaaaaggagaagtcagtgctgcagggcaagctgactcgcctggctgttcagattgggaaagccggtctgctcatgtctgctctcacrgttttcatcctgattctatactttgtgattgacaactttgtgataaatcgcagaccatggctccctgagtgtactcccatctacatccagtactttgtca

SEQ ID NO: 34206 - DNA, 201 bp, Homo sapiens
caatcaaagtggtcaaagcgttccatagttccctccacgaaagcattcagaaaccctacaaccaaaagtccatccacagcttcatgacccaccctgaattygccatagaggaggagttgccacgaacaccactcctggatgaggaagaggaggaaaatcctgacaaggcttctaagtttgggactagggtgctcctgttgg

SEQ ID NO: 34207 - DNA, 201 bp, Homo sapiens; identical to SEQ ID NO: 34188

SEQ ID NO: 34208 - DNA, 201 bp, Homo sapiens; identical to SEQ ID NO: 34189

SEQ ID NO: 34209 - DNA, 201 bp, Homo sapiens; identical to SEQ ID NO: 34190

SEQ ID NO: 34210 - DNA, 201 bp, Homo sapiens; identical to SEQ ID NO: 34191

SEQ ID NO: 34211 - DNA, 201 bp, Homo sapiens; identical to SEQ ID NO: 34192

SEQ ID NO: 34212 - DNA, 201 bp, Homo sapiens; identical to SEQ ID NO: 34193

SEQ ID NO: 34213 - DNA, 201 bp, Homo sapiens; identical to SEQ ID NO: 34194

SEQ ID NO: 34214 - DNA, 201 bp, Homo sapiens; identical to SEQ ID NO: 34196

SEQ ID NO: 34215 - DNA, 201 bp, Homo sapiens; identical to SEQ ID NO: 34197

SEQ ID NO: 34216 - DNA, 201 bp, Homo sapiens; identical to SEQ ID NO: 34199

SEQ ID NO: 34217 - DNA, 201 bp, Homo sapiens; identical to SEQ ID NO: 34200

SEQ ID NO: 34218 - DNA, 201 bp, Homo sapiens; identical to SEQ ID NO: 34201

SEQ ID NO: 34219 - DNA, 201 bp, Homo sapiens
atatcaaagtggtcaaagcgttccatagttccctccacgaaagcattcagaaaccctacaaccaaaagtccatccacagcttcatgacccaccctgaattygccatagaggaggagttgccacgaacaccactcctggatgaggaagaggaggaaaatcctgacaaggcttctaagtttgggactagggtgctcctgttgg

SEQ ID NO: 34220 - DNA, 148 bp, Homo sapiens; identical to SEQ ID NO: 34203

SEQ ID NO: 34221 - DNA, 201 bp, Homo sapiens; identical to SEQ ID NO: 34204

SEQ ID NO: 34222 - DNA, 201 bp, Homo sapiens; identical to SEQ ID NO: 34205

SEQ ID NO: 34223 - DNA, 201 bp, Homo sapiens; identical to SEQ ID NO: 34188

SEQ ID NO: 34224 - DNA, 201 bp, Homo sapiens; identical to SEQ ID NO: 34189

SEQ ID NO: 34225 - DNA, 201 bp, Homo sapiens; identical to SEQ ID NO: 34190

SEQ ID NO: 34226 - DNA, 201 bp, Homo sapiens; identical to SEQ ID NO: 34191

SEQ ID NO: 34227 - DNA, 201 bp, Homo sapiens; identical to SEQ ID NO: 34192

SEQ ID NO: 34228 - DNA, 201 bp, Homo sapiens; identical to SEQ ID NO: 34193

SEQ ID NO: 34229 - DNA, 201 bp, Homo sapiens; identical to SEQ ID NO: 34194

SEQ ID NO: 34230 - DNA, 201 bp, Homo sapiens; identical to SEQ ID NO: 34195

SEQ ID NO: 34231 - DNA, 201 bp, Homo sapiens; identical to SEQ ID NO: 34196

SEQ ID NO: 34232 - DNA, 201 bp, Homo sapiens; identical to SEQ ID NO: 34197

SEQ ID NO: 34233 - DNA, 201 bp, Homo sapiens; identical to SEQ ID NO: 34198

SEQ ID NO: 34234 - DNA, 201 bp, Homo sapiens; identical to SEQ ID NO: 34199

SEQ ID NO: 34235 - DNA, 201 bp, Homo sapiens; identical to SEQ ID NO: 34200

SEQ ID NO: 34236 - DNA, 201 bp, Homo sapiens; identical to SEQ ID NO: 34201

SEQ ID NO: 34237 - DNA, 201 bp, Homo sapiens; identical to SEQ ID NO: 34202

SEQ ID NO: 34238 - DNA, 148 bp, Homo sapiens; identical to SEQ ID NO: 34203

SEQ ID NO: 34239 - DNA, 201 bp, Homo sapiens; identical to SEQ ID NO: 34204

SEQ ID NO: 34240 - DNA, 201 bp, Homo sapiens; identical to SEQ ID NO: 34205

SEQ ID NO: 34241 - DNA, 201 bp, Homo sapiens; identical to SEQ ID NO: 34188

SEQ ID NO: 34242 - DNA, 201 bp, Homo sapiens; identical to SEQ ID NO: 34190

SEQ ID NO: 34243 - DNA, 201 bp, Homo sapiens; identical to SEQ ID NO: 34191

SEQ ID NO: 34244 - DNA, 201 bp, Homo sapiens; identical to SEQ ID NO: 34189

SEQ ID NO: 34245 - DNA, 201 bp, Homo sapiens; identical to SEQ ID NO: 34192

SEQ ID NO: 34246 - DNA, 201 bp, Homo sapiens; identical to SEQ ID NO: 34193

SEQ ID NO: 34247 - DNA, 201 bp, Homo sapiens; identical to SEQ ID NO: 34194

SEQ ID NO: 34248 - DNA, 201 bp, Homo sapiens; identical to SEQ ID NO: 34197

SEQ ID NO: 34249 - DNA, 201 bp, Homo sapiens; identical to SEQ ID NO: 34196

SEQ ID NO: 34250 - DNA, 201 bp, Homo sapiens; identical to SEQ ID NO: 34199

SEQ ID NO: 34251 - DNA, 201 bp, Homo sapiens; identical to SEQ ID NO: 34200

SEQ ID NO: 34252 - DNA, 201 bp, Homo sapiens; identical to SEQ ID NO: 34201

SEQ ID NO: 34253 - DNA, 148 bp, Homo sapiens; identical to SEQ ID NO: 34203

SEQ ID NO: 34254 - DNA, 201 bp, Homo sapiens; identical to SEQ ID NO: 34206

SEQ ID NO: 34255 - DNA, 201 bp, Homo sapiens; identical to SEQ ID NO: 34204

SEQ ID NO: 34256 - DNA, 201 bp, Homo sapiens; identical to SEQ ID NO: 34205

SEQ ID NO: 34257 - DNA, 201 bp, Homo sapiens
ctctggtggccgtacctgatgcacgaacgccctgcctatctgtattcattggaggtgcagctgactgcacagacgtcactggggcctgtgtctgacttctvcacactccctgtggggatccgcactgtggctgtcaccaagagccagttcctcatcaatgggaaacctttctatttccacggtgtcaacaagcatgaggat

SEQ ID NO: 34258 - DNA, 201 bp, Homo sapiens
cacaagagtggtgctgaggattggcagtgcccattcctatgccatcgtgtgggtgaatggggtcgacacgctagagcatgaggggggctacctccccttcraggccgacatcagcaacctggtccaggtggggcccctgccctcccggctccgaatcactatcgccatcaacaacacactcacccccaccaccctgccacc

SEQ ID NO: 34259 - DNA, 201 bp, Homo sapiens
ccctcccggcctgtgacctttgtgagcaactctaactatgcagcagacaagggggctccgtatgtggatgtgatctgtttgaacagctactactcttggtrtcacgactacgggcacctggagttgattcagctgcagctggccacccagtttgagaactggtataagaagtatcagaagcccattattcagagcgagtat

SEQ ID NO: 34260 - DNA, 201 bp, Homo sapiens
catgccagttccctccagcttcaatgacatcagccaggactggcgtctgcggcattttgtcggctgggtgtggtacgaacgggaggtgatcctgccggagygatggacccaggacctgcgcacaagagtggtgctgaggattggcagtgcccattcctatgccatcgtgtgggtgaatggggtcgacacgctagagcatga

SEQ ID NO: 34261 - DNA, 201 bp, Homo sapiens
accgggcagcgcccggccccgcccctccaggcctggcactcgtcctcaaccaagatggcgcggatggcttcaggcgcatcacgacaccggcgcgtcacgckacccgccctacgggcacctcccgcgcttttcttagcgccgcagacggtggccgagcgggggaccgggaagcatggcccgggggtcggcggttgcctgggc

SEQ ID NO: 34262 - DNA, 201 bp, Homo sapiens
cggatggcttcaggcgcatcacgacaccggcgcgtcacgcgacccgccctacgggcacctcccgcgcttttcttagcgccgcagacggtggccgagcgggrgaccgggaagcatggcccgggggtcggcggttgcctgggcggcgctcgggccgttgttgtggggctgcgcgctggggctgcagggcgggatgctgtaccc

SEQ ID NO: 34263 - DNA, 201 bp, Homo sapiens
acgggaggtgatcctgccggagcgatggacccaggacctgcgcacaagagtggtgctgaggattggcagtgcccattcctatgccatcgtgtgggtgaatrgggtcgacacgctagagcatgaggggggctacctccccttcgaggccgacatcagcaacctggtccaggtggggcccctgccctcccggctccgaatcac

SEQ ID NO: 34264 - DNA, 201 bp, Homo sapiens
caacttaaggtgccaggtgtcagcctctggtggccgtacctgatgcacgaacgccctgcctatctgtattcattggaggtgcagctgactgcacagacgtmactggggcctgtgtctgacttctacacactccctgtggggatccgcactgtggctgtcaccaagagccagttcctcatcaatgggaaacctttctatttc

SEQ ID NO: 34265 - DNA, 201 bp, Homo sapiens
tgacttctacacactccctgtggggatccgcactgtggctgtcaccaagagccagttcctcatcaatgggaaacctttctatttccacggtgtcaacaagyatgaggatgcggacatccgagggaagggcttcgactggccgctgctggtgaaggacttcaacctgcttcgctggcttggtgccaacgctttccgtaccag

SEQ ID NO: 34266 - DNA, 201 bp, Homo sapiens
tgcgcgctggggctgcagggcgggatgctgtacccccaggagagcccgtcgcgggagtgcaaggagctggacggcctctggagcttccgcgccgacttctytgacaaccgacgccggggcttcgaggagcagtggtaccggcggccgctgtgggagtcaggccccaccgtggacatgccagttccctccagcttcaatgac

SEQ ID NO: 34267 - DNA, 201 bp, Homo sapiens
agcgagtatggagcagaaacgattgcagggtttcaccaggatccacctctgatgttcactgaagagtaccagaaaagtctgctagagcagtaccatctggrtctggatcaaaaacgcagaaaatacgtggttggagagctcatttggaattttgccgatttcatgactgaacagtcaccgacgagagtgctggggaataaa

SEQ ID NO: 34268 - DNA, 201 bp, Homo sapiens
acactccctgtggggatccgcactgtggctgtcaccaagagccagttcctcatcaatgggaaacctttctatttccacggtgtcaacaagcatgaggatgyggacatccgagggaagggcttcgactggccgctgctggtgaaggacttcaacctgcttcgctggcttggtgccaacgctttccgtaccagccactacccc

SEQ ID NO: 34269 - DNA, 201 bp, Homo sapiens
cagggtttcaccaggatccacctctgatgttcactgaagagtaccagaaaagtctgctagagcagtaccatctgggtctggatcaaaaacgcagaaaataygtggttggagagctcatttggaattttgccgatttcatgactgaacagtcaccgacgagagtgctggggaataaaaaggggatcttcactcggcagagac

SEQ ID NO: 34270 - DNA, 201 bp, Homo sapiens
tgtggggatccgcactgtggctgtcaccaagagccagttcctcatcaatgggaaacctttctatttccacggtgtcaacaagcatgaggatgcggacatcygagggaagggcttcgactggccgctgctggtgaaggacttcaacctgcttcgctggcttggtgccaacgctttccgtaccagccactacccctatgcaga

SEQ ID NO: 34271 - DNA, 201 bp, Homo sapiens
cgtaccagccactacccctatgcagaggaagtgatgcagatgtgtgaccgctatgggattgtggtcatcgatgagtgtcccggcgtgggcctggcgctgcygcagttcttcaacaacgtttctctgcatcaccacatgcaggtgatggaagaagtggtgcgtagggacaagaaccaccccgcggtcgtgatgtggtctgtg

SEQ ID NO: 34272 - DNA, 201 bp, Homo sapiens
tacttgaagatggtgatcgctcacaccaaatccttggacccctcccggcctgtgacctttgtgagcaactctaactatgcagcagacaagggggctccgtrtgtggatgtgatctgtttgaacagctactactcttggtatcacgactacgggcacctggagttgattcagctgcagctggccacccagtttgagaactgg

SEQ ID NO: 34273 - DNA, 201 bp, Homo sapiens
ctgaacagtcaccgacgagagtgctggggaataaaaaggggatcttcactcggcagagacaaccaaaaagtgcagcgttccttttgcgagagagatactgkaagattgccaatgaaaccaggtatccccactcagtagccaagtcacaatgtttggaaaacagcctgtttacttgagcaagactgataccacctgcgtgtc

SEQ ID NO: 34274 - DNA, 201 bp, Homo sapiens
gtcggcggttgcctgggcggcgctcgggccgttgttgtggggctgcgcgctggggctgcagggcgggatgctgtacccccaggagagcccgtcgcgggagkgcaaggagctggacggcctctggagcttccgcgccgacttctctgacaaccgacgccggggcttcgaggagcagtggtaccggcggccgctgtgggagtc

SEQ ID NO: 34275 - DNA, 201 bp, Homo sapiens
gaaacctttctatttccacggtgtcaacaagcatgaggatgcggacatccgagggaagggcttcgactggccgctgctggtgaaggacttcaacctgcttygctggcttggtgccaacgctttccgtaccagccactacccctatgcagaggaagtgatgcagatgtgtgaccgctatgggattgtggtcatcgatgagtg

SEQ ID NO: 34276 - DNA, 201 bp, Homo sapiens
aacaagcatgaggatgcggacatccgagggaagggcttcgactggccgctgctggtgaaggacttcaacctgcttcgctggcttggtgccaacgctttccrtaccagccactacccctatgcagaggaagtgatgcagatgtgtgaccgctatgggattgtggtcatcgatgagtgtcccggcgtgggcctggcgctgccg

SEQ ID NO: 34277 - DNA, 201 bp, Homo sapiens
accagggaccatccaatacctgactgacacctccaagtatcccaagggttactttgtccagaacacatattttgactttttcaactacgctggactgcagyggtctgtacttctgtacacgacacccaccacctacatcgatgacatcaccgtcaccaccagcgtggagcaagacagtgggctggtgaattaccagatctc

SEQ ID NO: 34278 - DNA, 201 bp, Homo sapiens
acccctcccggcctgtgacctttgtgagcaactctaactatgcagcagacaagggggctccgtatgtggatgtgatctgtttgaacagctactactcttgrtatcacgactacgggcacctggagttgattcagctgcagctggccacccagtttgagaactggtataagaagtatcagaagcccattattcagagcgagt

SEQ ID NO: 34279 - DNA, 201 bp, Homo sapiens
gatggcttcaggcgcatcacgacaccggcgcgtcacgcgacccgccctacgggcacctcccgcgcttttcttagcgccgcagacggtggccgagcgggggwccgggaagcatggcccgggggtcggcggttgcctgggcggcgctcgggccgttgttgtggggctgcgcgctggggctgcagggcgggatgctgtaccccc

SEQ ID NO: 34280 - DNA, 201 bp, Homo sapiens
gcgctgccgcagttcttcaacaacgtttctctgcatcaccacatgcaggtgatggaagaagtggtgcgtagggacaagaaccaccccgcggtcgtgatgtrgtctgtggccaacgagcctgcgtcccacctagaatctgctggctactacttgaagatggtgatcgctcacaccaaatccttggacccctcccggcctgtg

SEQ ID NO: 34281 - DNA, 201 bp, Homo sapiens
gtggtcatcgatgagtgtcccggcgtgggcctggcgctgccgcagttcttcaacaacgtttctctgcatcaccacatgcaggtgatggaagaagtggtgcstagggacaagaaccaccccgcggtcgtgatgtggtctgtggccaacgagcctgcgtcccacctagaatctgctggctactacttgaagatggtgatcgct

SEQ ID NO: 34282 - DNA, 201 bp, Homo sapiens
atttggaattttgccgatttcatgactgaacagtcaccgacgagagtgctggggaataaaaaggggatcttcactcggcagagacaaccaaaaagtgcagygttccttttgcgagagagatactggaagattgccaatgaaaccaggtatccccactcagtagccaagtcacaatgtttggaaaacagcctgtttacttga

SEQ ID NO: 34283 - DNA, 201 bp, Homo sapiens
cagaaaatacgtggttggagagctcatttggaattttgccgatttcatgactgaacagtcaccgacgagagtgctggggaataaaaaggggatcttcactyggcagagacaaccaaaaagtgcagcgttccttttgcgagagagatactggaagattgccaatgaaaccaggtatccccactcagtagccaagtcacaatg

SEQ ID NO: 34284 - DNA, 201 bp, Homo sapiens
caacaagcatgaggatgcggacatccgagggaagggcttcgactggccgctgctggtgaaggacttcaacctgcttcgctggcttggtgccaacgctttcygtaccagccactacccctatgcagaggaagtgatgcagatgtgtgaccgctatgggattgtggtcatcgatgagtgtcccggcgtgggcctggcgctgcc

SEQ ID NO: 34285 - DNA, 201 bp, Homo sapiens
tcccggcctgtgacctttgtgagcaactctaactatgcagcagacaagggggctccgtatgtggatgtgatctgtttgaacagctactactcttggtatcrcgactacgggcacctggagttgattcagctgcagctggccacccagtttgagaactggtataagaagtatcagaagcccattattcagagcgagtatgga

SEQ ID NO: 34286 - DNA, 201 bp, Homo sapiens
gacccctcccggcctgtgacctttgtgagcaactctaactatgcagcagacaagggggctccgtatgtggatgtgatctgtttgaacagctactactcttrgtatcacgactacgggcacctggagttgattcagctgcagctggccacccagtttgagaactggtataagaagtatcagaagcccattattcagagcgag

SEQ ID NO: 34287 - DNA, 201 bp, Homo sapiens
cctgcgcacaagagtggtgctgaggattggcagtgcccattcctatgccatcgtgtgggtgaatggggtcgacacgctagagcatgaggggggctacctcyccttcgaggccgacatcagcaacctggtccaggtggggcccctgccctcccggctccgaatcactatcgccatcaacaacacactcacccccaccaccct

SEQ ID NO: 34288 - DNA, 201 bp, Homo sapiens
ctgtgacctttgtgagcaactctaactatgcagcagacaagggggctccgtatgtggatgtgatctgtttgaacagctactactcttggtatcacgactaygggcacctggagttgattcagctgcagctggccacccagtttgagaactggtataagaagtatcagaagcccattattcagagcgagtatggagcagaaa

SEQ ID NO: 34289 - DNA, 201 bp, Homo sapiens
agtggtgctgaggattggcagtgcccattcctatgccatcgtgtgggtgaatggggtcgacacgctagagcatgaggggggctacctccccttcgaggccracatcagcaacctggtccaggtggggcccctgccctcccggctccgaatcactatcgccatcaacaacacactcacccccaccaccctgccaccagggac

SEQ ID NO: 34290 - DNA, 201 bp, Homo sapiens
aaaagtgcagcgttccttttgcgagagagatactggaagattgccaatgaaaccaggtatccccactcagtagccaagtcacaatgtttggaaaacagccygtttacttgagcaagactgataccacctgcgtgtcccttcctccccgagtcagggcgacttccacagcagcagaacaagtgcctcctggactgttcacgg

SEQ ID NO: 34291 - DNA, 201 bp, Homo sapiens
catgactgaacagtcaccgacgagagtgctggggaataaaaaggggatcttcactcggcagagacaaccaaaaagtgcagcgttccttttgcgagagagayactggaagattgccaatgaaaccaggtatccccactcagtagccaagtcacaatgtttggaaaacagcctgtttacttgagcaagactgataccacctgc

SEQ ID NO: 34292 - DNA, 201 bp, Homo sapiens
tgaggggggctacctccccttcgaggccgacatcagcaacctggtccaggtggggcccctgccctcccggctccgaatcactatcgccatcaacaacacaytcacccccaccaccctgccaccagggaccatccaatacctgactgacacctccaagtatcccaagggttactttgtccagaacacatattttgacttttt

SEQ ID NO: 34293 - DNA, 201 bp, Homo sapiens; identical to SEQ ID NO: 34257

SEQ ID NO: 34294 - DNA, 201 bp, Homo sapiens; identical to SEQ ID NO: 34258

SEQ ID NO: 34295 - DNA, 201 bp, Homo sapiens; identical to SEQ ID NO: 34259

SEQ ID NO: 34296 - DNA, 201 bp, Homo sapiens; identical to SEQ ID NO: 34260

SEQ ID NO: 34297 - DNA, 201 bp, Homo sapiens; identical to SEQ ID NO: 34261

SEQ ID NO: 34298 - DNA, 201 bp, Homo sapiens; identical to SEQ ID NO: 34262

SEQ ID NO: 34299 - DNA, 201 bp, Homo sapiens; identical to SEQ ID NO: 34263

SEQ ID NO: 34300 - DNA, 201 bp, Homo sapiens; identical to SEQ ID NO: 34264

SEQ ID NO: 34301 - DNA, 201 bp, Homo sapiens; identical to SEQ ID NO: 34265

SEQ ID NO: 34302 - DNA, 201 bp, Homo sapiens; identical to SEQ ID NO: 34266

SEQ ID NO: 34303 - DNA, 201 bp, Homo sapiens; identical to SEQ ID NO: 34267

SEQ ID NO: 34304 - DNA, 201 bp, Homo sapiens; identical to SEQ ID NO: 34268

SEQ ID NO: 34305 - DNA, 201 bp, Homo sapiens; identical to SEQ ID NO: 34269

SEQ ID NO: 34306 - DNA, 201 bp, Homo sapiens; identical to SEQ ID NO: 34270

SEQ ID NO: 34307 - DNA, 201 bp, Homo sapiens; identical to SEQ ID NO: 34271

SEQ ID NO: 34308 - DNA, 201 bp, Homo sapiens; identical to SEQ ID NO: 34272

SEQ ID NO: 34309 - DNA, 201 bp, Homo sapiens; identical to SEQ ID NO: 34273

SEQ ID NO: 34310 - DNA, 201 bp, Homo sapiens; identical to SEQ ID NO: 34274

SEQ ID NO: 34311 - DNA, 201 bp, Homo sapiens; identical to SEQ ID NO: 34275

SEQ ID NO: 34312 - DNA, 201 bp, Homo sapiens; identical to SEQ ID NO: 34276

SEQ ID NO: 34313 - DNA, 201 bp, Homo sapiens; identical to SEQ ID NO: 34277

SEQ ID NO: 34314 - DNA, 201 bp, Homo sapiens; identical to SEQ ID NO: 34278

SEQ ID NO: 34315 - DNA, 201 bp, Homo sapiens; identical to SEQ ID NO: 34279

SEQ ID NO: 34316 - DNA, 201 bp, Homo sapiens; identical to SEQ ID NO: 34280

SEQ ID NO: 34317 - DNA, 201 bp, Homo sapiens; identical to SEQ ID NO: 34281

SEQ ID NO: 34318 - DNA, 201 bp, Homo sapiens; identical to SEQ ID NO: 34282

SEQ ID NO: 34319 - DNA, 201 bp, Homo sapiens; identical to SEQ ID NO: 34283

SEQ ID NO: 34320 - DNA, 201 bp, Homo sapiens; identical to SEQ ID NO: 34284

SEQ ID NO: 34321 - DNA, 201 bp, Homo sapiens; identical to SEQ ID NO: 34285

SEQ ID NO: 34322 - DNA, 201 bp, Homo sapiens; identical to SEQ ID NO: 34286

SEQ ID NO: 34323 - DNA, 201 bp, Homo sapiens; identical to SEQ ID NO: 34287

SEQ ID NO: 34324 - DNA, 201 bp, Homo sapiens; identical to SEQ ID NO: 34288

SEQ ID NO: 34325 - DNA, 201 bp, Homo sapiens; identical to SEQ ID NO: 34289

SEQ ID NO: 34326 - DNA, 201 bp, Homo sapiens; identical to SEQ ID NO: 34290

SEQ ID NO: 34327 - DNA, 201 bp, Homo sapiens; identical to SEQ ID NO: 34291

SEQ ID NO: 34328 - DNA, 201 bp, Homo sapiens; identical to SEQ ID NO: 34292

SEQ ID NO: 34329 - DNA, 201 bp, Homo sapiens; identical to SEQ ID NO: 34257

SEQ ID NO: 34330 - DNA, 201 bp, Homo sapiens; identical to SEQ ID NO: 34258

SEQ ID NO: 34331 - DNA, 201 bp, Homo sapiens; identical to SEQ ID NO: 34259

SEQ ID NO: 34332 - DNA, 201 bp, Homo sapiens; identical to SEQ ID NO: 34260

SEQ ID NO: 34333 - DNA, 201 bp, Homo sapiens; identical to SEQ ID NO: 34261

SEQ ID NO: 34334 - DNA, 201 bp, Homo sapiens; identical to SEQ ID NO: 34262

SEQ ID NO: 34335 - DNA, 201 bp, Homo sapiens; identical to SEQ ID NO: 34263

SEQ ID NO: 34336 - DNA, 201 bp, Homo sapiens; identical to SEQ ID NO: 34264

SEQ ID NO: 34337 - DNA, 201 bp, Homo sapiens
atggagcagaaacgattgcagggtttcaccaggtaagcagatccacctctgatgttcactgaagagtaccagaaaagtctgctagagcagtaccatctggrtctggatcaaaaacgcagaaaatacgtggttggagagctcatttggaattttgccgatttcatgactgaacagtcaccgacgagagtgctggggaataaa

SEQ ID NO: 34338 - DNA, 201 bp, Homo sapiens; identical to SEQ ID NO: 34265

SEQ ID NO: 34339 - DNA, 201 bp, Homo sapiens; identical to SEQ ID NO: 34266

SEQ ID NO: 34340 - DNA, 201 bp, Homo sapiens
tcaccaggtaagcagatccacctctgatgttcactgaagagtaccagaaaagtctgctagagcagtaccatctgggtctggatcaaaaacgcagaaaataygtggttggagagctcatttggaattttgccgatttcatgactgaacagtcaccgacgagagtgctggggaataaaaaggggatcttcactcggcagagac

SEQ ID NO: 34341 - DNA, 201 bp, Homo sapiens; identical to SEQ ID NO: 34268

SEQ ID NO: 34342 - DNA, 201 bp, Homo sapiens; identical to SEQ ID NO: 34270

SEQ ID NO: 34343 - DNA, 201 bp, Homo sapiens; identical to SEQ ID NO: 34271

SEQ ID NO: 34344 - DNA, 201 bp, Homo sapiens; identical to SEQ ID NO: 34272

SEQ ID NO: 34345 - DNA, 201 bp, Homo sapiens; identical to SEQ ID NO: 34273

SEQ ID NO: 34346 - DNA, 201 bp, Homo sapiens; identical to SEQ ID NO: 34274

SEQ ID NO: 34347 - DNA, 201 bp, Homo sapiens; identical to SEQ ID NO: 34275

SEQ ID NO: 34348 - DNA, 201 bp, Homo sapiens; identical to SEQ ID NO: 34276

SEQ ID NO: 34349 - DNA, 201 bp, Homo sapiens; identical to SEQ ID NO: 34277

SEQ ID NO: 34350 - DNA, 201 bp, Homo sapiens; identical to SEQ ID NO: 34278

SEQ ID NO: 34351 - DNA, 201 bp, Homo sapiens; identical to SEQ ID NO: 34280

SEQ ID NO: 34352 - DNA, 201 bp, Homo sapiens; identical to SEQ ID NO: 34279

SEQ ID NO: 34353 - DNA, 201 bp, Homo sapiens; identical to SEQ ID NO: 34283

SEQ ID NO: 34354 - DNA, 201 bp, Homo sapiens; identical to SEQ ID NO: 34282

SEQ ID NO: 34355 - DNA, 201 bp, Homo sapiens; identical to SEQ ID NO: 34281

SEQ ID NO: 34356 - DNA, 201 bp, Homo sapiens; identical to SEQ ID NO: 34284

SEQ ID NO: 34357 - DNA, 201 bp, Homo sapiens; identical to SEQ ID NO: 34285

SEQ ID NO: 34358 - DNA, 201 bp, Homo sapiens; identical to SEQ ID NO: 34286

SEQ ID NO: 34359 - DNA, 201 bp, Homo sapiens; identical to SEQ ID NO: 34287

SEQ ID NO: 34360 - DNA, 201 bp, Homo sapiens; identical to SEQ ID NO: 34288

SEQ ID NO: 34361 - DNA, 201 bp, Homo sapiens; identical to SEQ ID NO: 34289

SEQ ID NO: 34362 - DNA, 201 bp, Homo sapiens; identical to SEQ ID NO: 34290

SEQ ID NO: 34363 - DNA, 201 bp, Homo sapiens; identical to SEQ ID NO: 34291

SEQ ID NO: 34364 - DNA, 201 bp, Homo sapiens; identical to SEQ ID NO: 34292

SEQ ID NO: 34365 - DNA, 201 bp, Homo sapiens
gaatcgcttgaacctgggaggtggaggttgcagtgggccaagatcgcaccactgcactccagcctgggtgacagagcgagactctgtctcaaataaataaattatttcacagaggatagcaagctccagaaggttctattacctttaaaaaagagtagttttgcccctcccagcaacctggtatgggtgccctaagaccag

SEQ ID NO: 34366 - DNA, 201 bp, Homo sapiens
agaatcgcttgaacctgggaggtggaggttgcagtgggccaagatcgcaccactgcactccagcctgggtgacagagcgagactctgtctcaaataaataaattatttcacagaggatagcaagctccagaaggttctattacctttaaaaaagagtagttttgcccctcccagcaacctggtatgggtgccctaagacca

SEQ ID NO: 34367 - DNA, 201 bp, Homo sapiens
aagaatcgcttgaacctgggaggtggaggttgcagtgggccaagatcgcaccactgcactccagcctgggtgacagagcgagactctgtctcaaataaataaattatttcacagaggatagcaagctccagaaggttctattacctttaaaaaagagtagttttgcccctcccagcaacctggtatgggtgccctaagacc

SEQ ID NO: 34368 - DNA, 201 bp, Homo sapiens
gaagaatcgcttgaacctgggaggtggaggttgcagtgggccaagatcgcaccactgcactccagcctgggtgacagagcgagactctgtctcaaataaataaattatttcacagaggatagcaagctccagaaggttctattacctttaaaaaagagtagttttgcccctcccagcaacctggtatgggtgccctaagac

SEQ ID NO: 34369 - DNA, 201 bp, Homo sapiens
tgccccagtggcagcggcgggagctgctggccacagtgaagatgctgcagcggcgtgccaacactgccatccgtaagctgcaaatgggacaggctgcaaaraaaactcaggagctgctggagcggcactcgaaggggcctctgattgtggacacagtctctgctgagtctctctcagtgctggtgaaggtggtacggcagc

SEQ ID NO: 34370 - DNA, 201 bp, Homo sapiens
agaagaatcgcttgaacctgggaggtggaggttgcagtgggccaagatcgcaccactgcactccagcctgggtgacagagcgagactctgtctcaaataaataaattatttcacagaggatagcaagctccagaaggttctattacctttaaaaaagagtagttttgcccctcccagcaacctggtatgggtgccctaaga

SEQ ID NO: 34371 - DNA, 201 bp, Homo sapiens
ggtagatcatgaggtcaggagatcaaaaccatcctggctaacatggtgaaaccccatctctactaaaaatacaaaaaattagccgggtgtggtggcacacrcctgtagtcccagctactcgggaggctgaggcagaagaatcgcttgaacctgggaggtggaggttgcagtgggccaagatcgcaccactgcactccagcc

SEQ ID NO: 34372 - DNA, 201 bp, Homo sapiens
actggccgggtgtggtggttcacacctgtaatccaagcactttgggaggccgaggcaggtagatcatgaggtcaggagatcaaaaccatcctggctaacayggtgaaaccccatctctactaaaaatacaaaaaattagccgggtgtggtggcacacacctgtagtcccagctactcgggaggctgaggcagaagaatcgc

SEQ ID NO: 34373 - DNA, 201 bp, Homo sapiens
cctgaaggagccagcagaaccttcccacatgctgaagcgaggactagaggctggaggccaagcagctgagccaaagaagatcacctgggccagggcctacrtgacacaaggagacatgggctagggaaggcagaactgggcccaaagacacacacccccttggtgaaagagaagacatggacaattatggctgtgactgca

SEQ ID NO: 34374 - DNA, 201 bp, Homo sapiens
tgtgtgcctgtcaggtggcccagggtgccatgcccaccttcacagcagaggcctgggcactggcagtgtgcagccacatggggggcaaggcgtggggctcrcgagtggtggcccaaggcaccggaagcactactgacctggaagctgccctcagtatagcccaaacctatgccctcagccagctctgacccaggtccgccc

SEQ ID NO: 34375 - DNA, 201 bp, Homo sapiens
ggcactgaggctgtccaaggacataggacgactcattgaagctgtggaaactgctgtgatgccccagtggcagcggcgggagctgctggccacagtgaagrtgctgcagcggcgtgccaacactgccatccgtaagctgcaaatgggacaggctgcaaagaaaactcaggagctgctggagcggcactcgaaggggcctct

SEQ ID NO: 34376 - DNA, 201 bp, Homo sapiens
tggtccttgtcactgtgtggagacctgggactccccttggacatggtagagctgatgctggaggagaaaggggtccagctagactccgctggactggagcrgttggcccaagaggaggcccagcaccgggcacggcaggctgagccagttcagaagcagggattgtggcttgatgtccatgcgcttggggagctgcagcgc

SEQ ID NO: 34377 - DNA, 201 bp, Homo sapiens
gacatggtagagctgatgctggaggagaaaggggtccagctagactccgctggactggagcggttggcccaagaggaggcccagcaccgggcacggcaggmtgagccagttcagaagcagggattgtggcttgatgtccatgcgcttggggagctgcagcgccaaggagtgcccccaactgacgacagccccaagtacaac

SEQ ID NO: 34378 - DNA, 201 bp, Homo sapiens
cttgggccgagtaggggtggcagacgaggggcgcacagacacagcgtaccgcgtggtggctgaccacatccgcacactcagtgtctgcatctctgatggcrtcttccctgggatgtcaggtcccccgctggttcttcgtcggatcctgcgtcgagctgtgcgtttctccatggagatcttaaaggcaccacctggcttcct

SEQ ID NO: 34379 - DNA, 201 bp, Homo sapiens
gtgactgcacattagaaattatttcactggccgggtgtggtggttcacacctgtaatccaagcactttgggaggccgaggcaggtagatcatgaggtcagragatcaaaaccatcctggctaacatggtgaaaccccatctctactaaaaatacaaaaaattagccgggtgtggtggcacacacctgtagtcccagctact

SEQ ID NO: 34380 - DNA, 201 bp, Homo sapiens
acccgcctgctggccgtcactggggagcaggcccagcaggcccgagagctaggccagagcctggcccaggaagtgaaagcggccactgagcggctgagtcwggggagccgggatgtggcggaggcactgaggctgtccaaggacataggacgactcattgaagctgtggaaactgctgtgatgccccagtggcagcggcgg

SEQ ID NO: 34381 - DNA, 201 bp, Homo sapiens
aaactcaggagctgctggagcggcactcgaaggggcctctgattgtggacacagtctctgctgagtctctctcagtgctggtgaaggtggtacggcagctrtgtgagcaggcccccagcacgtctgtgctcctactcagcccccagcccatggggaaggtgctgtgtgcctgtcaggtggcccagggtgccatgcccacct

SEQ ID NO: 34382 - DNA, 201 bp, Homo sapiens
ggaggaggtgcccctggcgctcactgcccaggtccctggcctgcgctctctggatgaggtttacccagaccctgtgcgggtggtatcagtgggggtgcccrtggcccatgcattggacccagcctcccaagccgcactgcagacctctgtggagctatgctgtgggacgcacctgttacgtactggggctgtaggggacct

SEQ ID NO: 34383 - DNA, 201 bp, Homo sapiens
cctctacgtgggctacacccgcgtgtctgattacaaacaccactggagcgatgtccttgttggcctcctgcagggggcactggtggctgccctcactgtcygctacatctcagacttcttcaaagcccgacccccacagcactgtctgaaggaggaggagctggaacggaagcccagcctgtcactgacgttgaccctggg

SEQ ID NO: 34384 - DNA, 201 bp, Homo sapiens
cctgcagggggcactggtggctgccctcactgtctgctacatctcagacttcttcaaagcccgacccccacagcactgtctgaaggaggaggagctggaayggaagcccagcctgtcactgacgttgaccctgggcgaggctgaccacaaccactatggatacccgcactcctcctcctgaggccggaccccgcccaggca

SEQ ID NO: 34385 - DNA, 201 bp, Homo sapiens
gagaaggtgtgcaggggaaaccctgctgatgtcaccgaggccaggttgtctttctactcgggacactcttcctttgggatgtactgcatggtgttcttggygctgtatgtgcaggcacgactctgttggaagtgggcacggctgctgcgacccacagtccagttcttcctggtggcctttgccctctacgtgggctacacc

SEQ ID NO: 34386 - DNA, 201 bp, Homo sapiens
cagcctgtcactgacgttgaccctgggcgaggctgaccacaaccactatggatacccgcactcctcctcctgaggccggaccccgcccaggcagggagctrctgtgagtccagctgaggcccacccaggtggtccctccagccctggttaggcactgagggctctggacgggctccaggaaccctgggctgatgggagcag

SEQ ID NO: 34387 - DNA, 201 bp, Homo sapiens
catcacccacgggctcatggctggggtcaccatcacggccaccgtcatccttgtctcggccggggaagcctacctggtgtacacagaccggctctattctygctcggacttcaacaactacgtggctgctgtatacaaggtgctggggaccttcctgtttggggctgccgtgagccagtctctgacagacctggccaagta

SEQ ID NO: 34388 - DNA, 201 bp, Homo sapiens
gaggaggagctggaacggaagcccagcctgtcactgacgttgaccctgggcgaggctgaccacaaccactatggatacccgcactcctcctcctgaggccrgaccccgcccaggcagggagctgctgtgagtccagctgaggcccacccaggtggtccctccagccctggttaggcactgagggctctggacgggctccag

SEQ ID NO: 34389 - DNA, 201 bp, Homo sapiens
caaccactatggatacccgcactcctcctcctgaggccggaccccgcccaggcagggagctgctgtgagtccagctgaggcccacccaggtggtccctccrgccctggttaggcactgagggctctggacgggctccaggaaccctgggctgatgggagcagtgagcgggctccgctgccccctgccctgcactggaccag

SEQ ID NO: 34390 - DNA, 201 bp, Homo sapiens
tgaccctgggcgaggctgaccacaaccactatggatacccgcactcctcctcctgaggccggaccccgcccaggcagggagctgctgtgagtccagctgakgcccacccaggtggtccctccagccctggttaggcactgagggctctggacgggctccaggaaccctgggctgatgggagcagtgagcgggctccgctgc

SEQ ID NO: 34391 - DNA, 201 bp, Homo sapiens
tcctcctcctgaggccggaccccgcccaggcagggagctgctgtgagtccagctgaggcccacccaggtggtccctccagccctggttaggcactgagggytctggacgggctccaggaaccctgggctgatgggagcagtgagcgggctccgctgccccctgccctgcactggaccaggagtctggagatgcctgggtag

SEQ ID NO: 34392 - DNA, 201 bp, Homo sapiens
acccccacagcactgtctgaaggaggaggagctggaacggaagcccagcctgtcactgacgttgaccctgggcgaggctgaccacaaccactatggatacycgcactcctcctcctgaggccggaccccgcccaggcagggagctgctgtgagtccagctgaggcccacccaggtggtccctccagccctggttaggcact

SEQ ID NO: 34393 - DNA, 201 bp, Homo sapiens
tgtgagatgagaagaagaccagactgaagcctgttcaccatatgccaggcagtgctttctgcagacccccttgcagagaccttgtgatggagaattatacmcatttgacagacgagggaactgtggctggtttcaagaagccatggaggccgggcacggtggctcacgcctgtaatcccagcactttgggaggctgaggcg

SEQ ID NO: 34394 - DNA, 201 bp, Homo sapiens
ccgtgcgcatgctcaataccctgcagaccaatgccggctacctggagcaggtgaagcgccagcggggtgaccctcagacacagttggaagccatggaactrtacctggcacggagtgggctgcaggtggaggacttggaccggctgaacatcatccacgtcactgggacgaaggggaagggctccacctgtgccttcacgg

SEQ ID NO: 34395 - DNA, 201 bp, Homo sapiens
gtttgactatgccgtcttctgccctaacctgacagaggtgtcatccacaggcaacgcagaccaacagaacttcacagtgacactggaccaggtcctgctcygctgcctggaacaccagcagcactggaaccacctggacgaagagcaggccagcccggacctctggagtgcccccagcccagagcccggtggcctgtctgt

SEQ ID NO: 34396 - DNA, 201 bp, Homo sapiens; identical to SEQ ID NO: 34393

SEQ ID NO: 34397 - DNA, 201 bp, Homo sapiens
tagactggcctaggggccagggctttgggatgggaggccgggagaggatgtcttttttaaggctctgtgccttggtctctccttcctcttggctgagatarcagaggggctccccgggtctctcactgttgcagtggcctggccgttcagcctgtctcccccaacaccccgcctgcctcctggctcaggcccagcttattg

SEQ ID NO: 34398 - DNA, 201 bp, Homo sapiens; identical to SEQ ID NO: 34394

SEQ ID NO: 34399 - DNA, 201 bp, Homo sapiens
gtttgactatgccgtcttctgccctaacctgacagaggtgtcatccacaggcaacgcagaccaacagaacttcacagtgacactggaccaggtcctgctcygctgcctggaacaccagcagcactggaaccacctggacgaagagcaggccagcccggacctctggagtgcccccagcccagagcccggtgggtccgcatc

SEQ ID NO: 34400 - DNA, 201 bp, Homo sapiens
cctggttctgtctagactggcctaggggccagggctttgggatgggaggccgggagaggatgtcttttttaaggctctgtgccttggtctctccttcctcytggctgagatagcagaggggctccccgggtctctcactgttgcagtggcctggccgttcagcctgtctcccccaacaccccgcctgcctcctggctcagg

SEQ ID NO: 34401 - DNA, 108 bp, Homo sapiens
agcactttgggaggctgaggcgggcggatcatgaggtcaagaggtcgagaccatctggccaacatggtgaaaccccgtctctgctaaaaatacaaaaattrttagctg

SEQ ID NO: 34402 - DNA, 201 bp, Homo sapiens
cctgcctcctggctcaggcccagcttattgtgtgcgctgcctggccaggccctgggtcttgccatgtgctgggtggtagatttcctcctcccagtgccttytgggaagggagagggcctctgcctgggacactgcgggacagagggtggctggagtgaattaaagcctttgttttttaaagaaatggcaaagccttcgact

SEQ ID NO: 34403 - DNA, 201 bp, Homo sapiens
ggtgggtccgcatccctgcttctggcgccccacccaccccacacctgcagtgccagctccctcgtcttcagctgcatttcacatgccttgcaatggatcasccaaggccgagaccccatcttccagccacctagtcccccaaagggcctcctcacccaccctgtggctcacagtggggccagcatactccgtgaggctgct

SEQ ID NO: 34404 - DNA, 201 bp, Homo sapiens; identical to SEQ ID NO: 34393

SEQ ID NO: 34405 - DNA, 201 bp, Homo sapiens; identical to SEQ ID NO: 34394

SEQ ID NO: 34406 - DNA, 201 bp, Homo sapiens; identical to SEQ ID NO: 34395

SEQ ID NO: 34407 - DNA, 201 bp, Homo sapiens; identical to SEQ ID NO: 34394

SEQ ID NO: 34408 - DNA, 201 bp, Homo sapiens
aacttttggaggccgagttgggaggatcgcttgagcccaggagttcgacaccagcctggataacatagaactccgtctcaaaaacaaacaaacaaacaaaraaaacgttcccgactggcttccctgaggaacgtggcgtcccagtgagaccggatgggtgaggagcagccggcctgtgagtggtgggggaccgcgttccta

SEQ ID NO: 34409 - DNA, 201 bp, Homo sapiens
cctgggtgattctcttgccattcatcgacagtcagcatgtcatccacaagtatttcctgccccgagcctatgctgtcgccatcccactggctgcaggcctyctgctgctcctgtttgtgggactgttcatctcctacgtgatgctgaagagcaagagagtgaccaagaaggctcagtgaaggtcccgcagggatgaggctg

SEQ ID NO: 34410 - DNA, 201 bp, Homo sapiens
atgtcatccacaagtatttcctgccccgagcctatgctgtcgccatcccactggctgcaggcctcctgctgctcctgtttgtgggactgttcatctcctaygtgatgctgaagagcaagagagtgaccaagaaggctcagtgaaggtcccgcagggatgaggctgccagccccttctctgcttcccctccagcacagggac

SEQ ID NO: 34411 - DNA, 201 bp, Homo sapiens
tatttcctgccccgagcctatgctgtcgccatcccactggctgcaggcctcctgctgctcctgtttgtgggactgttcatctcctacgtgatgctgaagascaagagagtgaccaagaaggctcagtgaaggtcccgcagggatgaggctgccagccccttctctgcttcccctccagcacagggaccaagtgggggagcc

SEQ ID NO: 34412 - DNA, 201 bp, Homo sapiens
ggcccaacatctctttgttctcagaggaagggccttccaagaccggggaggggcctgtgcgtgggtcccggtccgaaacgtgtctgggctgctgcgagagrcagtcggtgaaggaagggaggggacatccgaagggtggcccgggaggccgggcgatggtgaggagggcgcctcctctccaccaaatcctccccatccatg

SEQ ID NO: 34413 - DNA, 201 bp, Homo sapiens; identical to SEQ ID NO: 34409

SEQ ID NO: 34414 - DNA, 201 bp, Homo sapiens; identical to SEQ ID NO: 34410

SEQ ID NO: 34415 - DNA, 201 bp, Homo sapiens; identical to SEQ ID NO: 34411

SEQ ID NO: 34416 - DNA, 116 bp, Homo sapiens
gggctgctgcgagagrcagtcggtgaaggaagggaggggacatccgaagggtggcccgggaggccgggcgatggtgaggagggcgcctcctctccaccaaatcctccccatccatg

SEQ ID NO: 34417 - DNA, 201 bp, Homo sapiens
cggcgtgctccgcagtccaaagccggaagagcgtggacccggaaccggatgtggcttgcggctcgggtggctgagcgcgcggggaaatggtgagattggcrccgtgtgccggagataggggcgtctgggggtggggtcccgggtctgctcaggagctggggcatgggcacttggaacggggattgctctcccgcccccact

SEQ ID NO: 34418 - DNA, 201 bp, Homo sapiens
acttggaacggggattgctctcccgcccccactattgtacggacgacaacgcggaggcctagcattctctcccagcctagaaactgatccctagtcagccytctaccatctgttgaatgggaagcttagaccgtgatcgggccgcgacgccccgcttccattagtgcgccgaaatagagggtcacttcgtcagctgagacc

SEQ ID NO: 34419 - DNA, 201 bp, Homo sapiens
cctcaactttcagggcaagaccatcaacctggggccccagcggagctggttcctccgccagatggaactggataccaccttcctccgggagctcaacgtgytggattacagcctcctgatagccttccaacgtctccacgaggatgagaggggcccgggcagcagcctcatcttccgcacggccaggtctgtgcaaggggc

SEQ ID NO: 34420 - DNA, 201 bp, Homo sapiens
aatcatgacgacttacagtgacaaaggggcaaagcctgagagaggccgattcctccacttccactctgtgaccttctgggttggcaacgccaagcaggccrcgtcattctactgcagcaagatgggctttgaacctctagcctacaggggcctggagaccggttcccgggaggtggtcagccatgtaatcaaacaagggaa

SEQ ID NO: 34421 - DNA, 201 bp, Homo sapiens
tgcgggagccctgggtagagcaagacaagtttgggaaggtgaagtttgctgtgctgcagacgtatggggacaccacacacaccctggtggagaagatgaamtacatcggccaattcttgcctggatatgaggccccagcgttcatggaccccctacttcctaaactgcccaaatgcagtctggagatgatcgaccacattg

SEQ ID NO: 34422 - DNA, 201 bp, Homo sapiens
aaagagatgggcgatcacctggtgaaacacggtgacggagtgaaggacattgcgttcgaggtggaagattgtgactacatcgtgcagaaagcacgggaacrgggcgccaaaatcatgcgggagccctgggtagagcaagacaagtttgggaaggtgaagtttgctgtgctgcagacgtatggggacaccacacacaccctg

SEQ ID NO: 34423 - DNA, 201 bp, Homo sapiens
tgggaaggtgaagtttgctgtgctgcagacgtatggggacaccacacacaccctggtggagaagatgaactacatcggccaattcttgcctggatatgagsccccagcgttcatggaccccctacttcctaaactgcccaaatgcagtctggagatgatcgaccacattgtgggaaaccagcctgatcaggagatggtgtc

SEQ ID NO: 34424 - DNA, 201 bp, Homo sapiens
caagatcaaggtgaaggagaacattgatgccctggaggagctgaaaatcctggtggactacgacgagaaaggctacctcctgcagatcttcaccaaaccgktgcaggaccggcccacgctcttcctggaagtcatccagcgccacaaccaccagggttttggagccggcaacttcaactcactgttcaaggctttcgagga

SEQ ID NO: 34425 - DNA, 201 bp, Homo sapiens
gcccacgctcttcctggaagtcatccagcgccacaaccaccagggttttggagccggcaacttcaactcactgttcaaggctttcgaggaggagcagaacytgcggggtaacctcaccaacatggagaccaatggggtggtgcccggcatgtaagccccgcccaccccacggaggccacagccacacagccacgccccctg

SEQ ID NO: 34426 - DNA, 155 bp, Homo sapiens
aggcctctagtcccagtaggaggtttgactaagatcaatcatgacgacttacagkgacaaaggggcaaagcctgagagaggccgattcctccacttccactctgtgaccttctgggttggcaacgccaagcaggccgcgtcattctactgcagca

SEQ ID NO: 34427 - DNA, 201 bp, Homo sapiens
agatgggcgatcacctggtgaaacacggtgacggagtgaaggacattgcgttcgaggtggaagattgtgactacatcgtgcagaaagcacgggaacggggygccaaaatcatgcgggagccctgggtagagcaagacaagtttgggaaggtgaagtttgctgtgctgcagacgtatggggacaccacacacaccctggtgg

SEQ ID NO: 34428 - DNA, 201 bp, Homo sapiens
accccctacttcctaaactgcccaaatgcagtctggagatgatcgaccacattgtgggaaaccagcctgatcaggagatggtgtccgcctccgaatggtasctgaaaaacctgcagttccaccgcttctggtccgtggatgacacgcaggtgcacacggaatatagctctctgcgatccattgtggtggccaactatgaag

SEQ ID NO: 34429 - DNA, 201 bp, Homo sapiens
tgggcgatcacctggtgaaacacggtgacggagtgaaggacattgcgttcgaggtggaagattgtgactacatcgtgcagaaagcacgggaacggggcgcyaaaatcatgcgggagccctgggtagagcaagacaagtttgggaaggtgaagtttgctgtgctgcagacgtatggggacaccacacacaccctggtggaga

SEQ ID NO: 34430 - DNA, 201 bp, Homo sapiens
gatccattgtggtggccaactatgaagagtccatcaagatgcccatcaatgagccagcgcctggcaagaagaagtcccagatccaggaatatgtggactakaacgggggcgctggggtccagcacatcgctctcaagaccgaagacatcatcacagcgattcgccacttgagagagagaggcctggagttcttatctgttc

SEQ ID NO: 34431 - DNA, 153 bp, Homo sapiens
ctggaactcgcccaacttccctactggctgctccccttgggtcccgcccaccagcggactcggcccccaaggctccgcccacactgaccacgcccctcggsggggccgccctctgctccagccctcccgattaaagcgtgccccggtccaata

SEQ ID NO: 34432 - DNA, 183 bp, Homo sapiens
gccacagccacacagccacgccccctgattctggaactcgcccaacttccctactggctgctccccttgggtcccgcccaccagcggactcggcccccaasgctccgcccacactgaccacgcccctcggcggggccgccctctgctccagccctcccgattaaagcgtgccccggtccaata

SEQ ID NO: 34433 - DNA, 201 bp, Homo sapiens
tgcccggcatgtaagccccgcccaccccacggaggccacagccacacagccacgccccctgattctggaactcgcccaacttccctactggctgctccccwtgggtcccgcccaccagcggactcggcccccaaggctccgcccacactgaccacgcccctcggcggggccgccctctgctccagccctcccgattaaagc

SEQ ID NO: 34434 - DNA, 201 bp, Homo sapiens
aagtttgggaaggtgaagtttgctgtgctgcagacgtatggggacaccacacacaccctggtggagaagatgaactacatcggccaattcttgcctggatrtgaggccccagcgttcatggaccccctacttcctaaactgcccaaatgcagtctggagatgatcgaccacattgtgggaaaccagcctgatcaggagatg

SEQ ID NO: 34435 - DNA, 201 bp, Homo sapiens
gcccggcatgtaagccccgcccaccccacggaggccacagccacacagccacgccccctgattctggaactcgcccaacttccctactggctgctcccctwgggtcccgcccaccagcggactcggcccccaaggctccgcccacactgaccacgcccctcggcggggccgccctctgctccagccctcccgattaaagcg

SEQ ID NO: 34436 - DNA, 201 bp, Homo sapiens; identical to SEQ ID NO: 34420

SEQ ID NO: 34437 - DNA, 201 bp, Homo sapiens; identical to SEQ ID NO: 34421

SEQ ID NO: 34438 - DNA, 201 bp, Homo sapiens; identical to SEQ ID NO: 34422

SEQ ID NO: 34439 - DNA, 201 bp, Homo sapiens; identical to SEQ ID NO: 34423

SEQ ID NO: 34440 - DNA, 201 bp, Homo sapiens
cttatctgttccctccacgtactacaaacaactgcgggagaagctgaagacggccaagatcaaggtgaaggagaacattgatgccctggaggtgagaccgktgcaggaccggcccacgctcttcctggaagtcatccagcgccacaaccaccagggttttggagccggcaacttcaactcactgttcaaggctttcgagga

SEQ ID NO: 34441 - DNA, 201 bp, Homo sapiens; identical to SEQ ID NO: 34425

SEQ ID NO: 34442 - DNA, 155 bp, Homo sapiens; identical to SEQ ID NO: 34426

SEQ ID NO: 34443 - DNA, 201 bp, Homo sapiens; identical to SEQ ID NO: 34427

SEQ ID NO: 34444 - DNA, 201 bp, Homo sapiens; identical to SEQ ID NO: 34428

SEQ ID NO: 34445 - DNA, 201 bp, Homo sapiens; identical to SEQ ID NO: 34429

SEQ ID NO: 34446 - DNA, 201 bp, Homo sapiens; identical to SEQ ID NO: 34430

SEQ ID NO: 34447 - DNA, 153 bp, Homo sapiens; identical to SEQ ID NO: 34431

SEQ ID NO: 34448 - DNA, 183 bp, Homo sapiens; identical to SEQ ID NO: 34432

SEQ ID NO: 34449 - DNA, 201 bp, Homo sapiens; identical to SEQ ID NO: 34433

SEQ ID NO: 34450 - DNA, 201 bp, Homo sapiens; identical to SEQ ID NO: 34434

SEQ ID NO: 34451 - DNA, 201 bp, Homo sapiens; identical to SEQ ID NO: 34435

SEQ ID NO: 34452 - DNA, 143 bp, Homo sapiens
acgtggatgatggggtcagagatcactgagctgcccctcaagggggcctggaacccgggtgctggggtcatgctgcctccgtggctccaaggtgagggtcmtcttcacgagcaaagagaaccaataaagtgacaacgaacgtc

SEQ ID NO: 34453 - DNA, 201 bp, Homo sapiens
gccacggagctgctcatcgtggtgaagtacgacccccacacgctcaccctgtccctgcccttctacatctcccagtgctggaccctcggctccgtcctggygctcacctggaccgtctggcgcttcttcctgcgggacatcacattgaggtacaaggagacccggtggcagaagtggcagaacaaggatgaccagggcagc

SEQ ID NO: 34454 - DNA, 201 bp, Homo sapiens
acacgctcaccctgtccctgcccttctacatctcccagtgctggaccctcggctccgtcctggcgctcacctggaccgtctggcgcttcttcctgcgggayatcacattgaggtacaaggagacccggtggcagaagtggcagaacaaggatgaccagggcagcaccgtcggcaacggggaccagcacccactggggctgg

SEQ ID NO: 34455 - DNA, 201 bp, Homo sapiens
gtgcatgatcatcagcgtgatgttcgagttcctggagtacagcctggagcaccagctgcccaacttcagcgagtgctggtgggatcactggatcatggacrtgctcgtctgcaacgggctgggcatctactgcggcatgaagacccttgagtggctgtccctgaagacgtacaagtggcagggcctctggaacattccgac

SEQ ID NO: 34456 - DNA, 165 bp, Homo sapiens
acgtggatgatggggtcagagatcactgagctgcccctcaagggggcctggaacccgggtgctggggtcatgctgcctccgtggctccaaggtgagggtcmtcttcacgagcaaagagaaccaataaagtgacaacgaacgtctgaggcttccagccctcccccc

SEQ ID NO: 34457 - DNA, 201 bp, Homo sapiens; identical to SEQ ID NO: 34453

SEQ ID NO: 34458 - DNA, 201 bp, Homo sapiens; identical to SEQ ID NO: 34454

SEQ ID NO: 34459 - DNA, 201 bp, Homo sapiens; identical to SEQ ID NO: 34455

SEQ ID NO: 34460 - DNA, 166 bp, Homo sapiens
acgtggatgatggggtcagagatcactgagctgcccctcaagggggcctggaacccgggtgctggggtcatgctgcctccgtggctccaaggtgagggtcmtcttcacgagcaaagagaaccaataaagtgacaacgaacgtctgaggcttccagccctcccccca

SEQ ID NO: 34461 - DNA, 201 bp, Homo sapiens; identical to SEQ ID NO: 34453

SEQ ID NO: 34462 - DNA, 201 bp, Homo sapiens; identical to SEQ ID NO: 34454

SEQ ID NO: 34463 - DNA, 201 bp, Homo sapiens; identical to SEQ ID NO: 34455

SEQ ID NO: 34464 - DNA, 201 bp, Homo sapiens
gcaggaatctcctgaagcctccaacgtccaggaacgcggaaacccagggcctccagtgcaggtgtcatcccggagggcgcatgcggagtcccaagagaggmgcgtcccattggacaatgctgagcggaagagcccaagatagcggggggagttgtgacaggctgctgcagacgtacttagaaaaggggtgcatactggata

SEQ ID NO: 34465 - DNA, 201 bp, Homo sapiens
ccccaaagttaaagccacagctgcgcctgcaggagcaccgccacaacctcaggaccttgagtttaccaagttaccaaatggcttggtgattgcttctttgkaaaactattctcctgtatcaagaattggtttgttcattaaagcaggcagtagatatgaggacttcagcaatttaggaaccacccatttgctgcgtcttac

SEQ ID NO: 34466 - DNA, 201 bp, Homo sapiens
ccctcaaagttgcccccaaagttaaagccacagctgcgcctgcaggagcaccgccacaacctcaggaccttgagtttaccaagttaccaaatggcttggtkattgcttctttggaaaactattctcctgtatcaagaattggtttgttcattaaagcaggcagtagatatgaggacttcagcaatttaggaaccacccatt

SEQ ID NO: 34467 - DNA, 201 bp, Homo sapiens
aacaagggaaaacatggcttatactgtggaatgcctgcggggtgatgttgatattctaatggagttcctgctcaatgtcaccacagcaccagaatttcgtmgttgggaagtagctgaccttcagcctcagctaaagattgacaaagctgtggcctttcagaatccgcagactcatgtcattgaaaatttgcatgcagcagc

SEQ ID NO: 34468 - DNA, 201 bp, Homo sapiens
attggacttggtgtgagtcatcctgttctaaagcaagttgctgaacagtttctcaacatgaggggtgggcttggtttatctggtgcaaaggccaactaccrtggaggtgaaatccgagaacagaatggagacagtcttgtccatgctgcttttgtagcagaaagtgctgtcgcgggaagtgcagaggcaaatgcatttagt

SEQ ID NO: 34469 - DNA, 201 bp, Homo sapiens
aatgccagttactcagattctggactctttgggatttatactatctcccaggccacagctgctggagatgttatcaaggctgcctataatcaagtaaaaasaatagctcaaggaaacctttccaacacagatgtccaagctgccaagaacaagctgaaagctggatacctaatgtcagtggagtcttctgagtgtttcctg

SEQ ID NO: 34470 - DNA, 201 bp, Homo sapiens; identical to SEQ ID NO: 34464

SEQ ID NO: 34471 - DNA, 201 bp, Homo sapiens; identical to SEQ ID NO: 34465

SEQ ID NO: 34472 - DNA, 201 bp, Homo sapiens
tgtcagtggagtcttctgagtgtttcctggaagaagtcgggtcccaggctctagttgctggttcttacatgccaccatccacagtccttcagcagattgaytcagtggctaatgctgatatcataaatgcggcaaagaagtttgtttctggccagaagtcaatggcagcaagtggaaatttgggacatacaccttttgttg

SEQ ID NO: 34473 - DNA, 201 bp, Homo sapiens; identical to SEQ ID NO: 34466

SEQ ID NO: 34474 - DNA, 201 bp, Homo sapiens
gaagtagctgaccttcagcctcagctaaagattgacaaagctgtggcctttcagaatccgcagactcatgtcattgaaaatttgcatgcagcagcttaccrgaatgccttggctaatcccttgtattgtcctgactataggattggaaaagtgacatcagaggagttacattacttcgttcagaaccatttcacaagtgca

SEQ ID NO: 34475 - DNA, 201 bp, Homo sapiens
agcagattgattcagtggctaatgctgatatcataaatgcggcaaagaagtttgtttctggccagaagtcaatggcagcaagtggaaatttgggacatacrccttttgttgatgagttgtaatactgatgcacacattacaggagagagctgaacgttctctcagcccagagcagcaaacacatgaaagtcagaagtctct

SEQ ID NO: 34476 - DNA, 201 bp, Homo sapiens
aagaagtcgggtcccaggctctagttgctggttcttacatgccaccatccacagtccttcagcagattgattcagtggctaatgctgatatcataaatgcrgcaaagaagtttgtttctggccagaagtcaatggcagcaagtggaaatttgggacatacaccttttgttgatgagttgtaatactgatgcacacattaca

SEQ ID NO: 34477 - DNA, 201 bp, Homo sapiens; identical to SEQ ID NO: 34467

SEQ ID NO: 34478 - DNA, 201 bp, Homo sapiens; identical to SEQ ID NO: 34468

SEQ ID NO: 34479 - DNA, 201 bp, Homo sapiens
aatgccagttactcagattctggactctttgggatttatactatctcccaggccacagctgctggagatgttatcaaggctgcctataatcaagtaaaaasaatagctcaaggaaacctttccaacacagatgtccaagctgccaagtaagtctcagtattaactgtgttttatgtttttgttatttgaaagttgtattct

SEQ ID NO: 34480 - DNA, 201 bp, Homo sapiens; identical to SEQ ID NO: 34474

SEQ ID NO: 34481 - DNA, 201 bp, Homo sapiens
agcaggaactggaaccctggccgagtccgaaaaaagccagatctggaaggtggctgcggaacggttttaagcggaagatggaggagccggaggaaccggcrgacagtgggcagtcgctggtcccggtttatatctatagtcccgagtatgtcagtatgtgtgactccctggccaagatccccaaacgggccagtatggtgc

SEQ ID NO: 34482 - DNA, 201 bp, Homo sapiens
atagtcccgagtatgtcagtatgtgtgactccctggccaagatccccaaacgggccagtatggtgcattctttgattgaagcatatgcactgcataagcaratgaggatagttaagcctaaagtggcctccatggaggagatggccaccttccacactgatgcttatctgcagcatctccagaaggtcagccaagagggcg

SEQ ID NO: 34483 - DNA, 201 bp, Homo sapiens
ttaagcgaattggggaggggagtattttaatcatcttaaatgaaacagatcagaagctggatgagagcagtcaccagtttgtagggcaggaggcagctgasaggcagggtttgggcctcaggaccatccaggtggagccctgggagagagggtactgatcagcagactgggaggtggggagaagtccgctggtgttgtttt

SEQ ID NO: 34484 - DNA, 201 bp, Homo sapiens; identical to SEQ ID NO: 34481

SEQ ID NO: 34485 - DNA, 201 bp, Homo sapiens; identical to SEQ ID NO: 34482

SEQ ID NO: 34486 - DNA, 201 bp, Homo sapiens; identical to SEQ ID NO: 34481

SEQ ID NO: 34487 - DNA, 201 bp, Homo sapiens; identical to SEQ ID NO: 34482

SEQ ID NO: 34488 - DNA, 201 bp, Homo sapiens; identical to SEQ ID NO: 34483

SEQ ID NO: 34489 - DNA, 201 bp, Homo sapiens; identical to SEQ ID NO: 34481

SEQ ID NO: 34490 - DNA, 201 bp, Homo sapiens; identical to SEQ ID NO: 34482

SEQ ID NO: 34491 - DNA, 201 bp, Homo sapiens; identical to SEQ ID NO: 34483

SEQ ID NO: 34492 - DNA, 201 bp, Homo sapiens
tcaccaccaaccagatgtctgtctgcaagatgtttatcattgacaaggtggatggggacatctgcctcctgaatgagttctccatcaccggctccacttamgctccagagggagaggtcttgaagaatgataagccagtccggccagggcagtatgacgggctggtggagctggccaccatctgtgccctctgcaatgact

SEQ ID NO: 34493 - DNA, 201 bp, Homo sapiens
ccgttcctgacccccgagctgtcaaccaggacaagaagaacatgcttttctcgggcaccaacattgcagccggcaaggccttgggcatcgtggccaccacyggtgtgggcaccgagattgggaagatccgagaccaaatggctgccacagaacaggacaagacccccttgcagcagaagctggatgagtttggggagcagc

SEQ ID NO: 34494 - DNA, 201 bp, Homo sapiens
gggctgctgtgggcaacaagatgtttgtcaagggtgcccctgagggcgtcatcgaccgctgtaactatgtgcgagttggcaccacccgggtgccactgacrgggccggtgaaggaaaagatcatggcggtgatcaaggagtggggcactggccgggacaccctgcgctgcttggccctggccacccgggacacccccccga

SEQ ID NO: 34495 - DNA, 201 bp, Homo sapiens; identical to SEQ ID NO: 34492

SEQ ID NO: 34496 - DNA, 201 bp, Homo sapiens; identical to SEQ ID NO: 34493

SEQ ID NO: 34497 - DNA, 201 bp, Homo sapiens; identical to SEQ ID NO: 34494

SEQ ID NO: 34498 - DNA, 201 bp, Homo sapiens
ttctcaatgcacttgtatatttgtcacctaacgtggaatgtgacttgacgtatcacaatgtatactctcgagatcctaattatctgaatttgttcattatmgtaatggagaatagaaatctccacagtcctgaatatctggaaatggctttgccattattttgcaaagcgatgagcaagctaccccttgcagcccaaggaa

SEQ ID NO: 34499 - DNA, 201 bp, Homo sapiens
tgagactcaaagttagacgtgaccatatcatagatgatgcacttgtccggctagagatgatcgctatggaaaatcctgcagacttgaagaagcagttgtakgtggaatttgaaggagaacaaggagttgatgagggaggtgtttccaaagaattttttcagctggttgtggaggaaatcttcaatccagatattggtatgt

SEQ ID NO: 34500 - DNA, 201 bp, Homo sapiens
aatctccacagtcctgaatatctggaaatggctttgccattattttgcaaagcgatgagcaagctaccccttgcagcccaaggaaaactgatcagactgtrgtctaaatacaatgcagaccagattcggagaatgatggagacatttcagcaacttattacttataaagtcataagcaatgaatttaacagtcgaaatcta

SEQ ID NO: 34501 - DNA, 201 bp, Homo sapiens
gctgacacttcaggaacttttgggagaagaaagaagaaacaagaaaggtcctcgagtggaccccctggaaactgaacttggtgttaaaaccctggattgtygaaaaccacttatcccttttgaagagtttattaatgaaccactgaatgaggttctagaaatggataaagattatacttttttcaaagtagaaacagagaa

SEQ ID NO: 34502 - DNA, 201 bp, Homo sapiens
ctcaatgcacttgtatatttgtcacctaacgtggaatgtgacttgacgtatcacaatgtatactctcgagatcctaattatctgaatttgttcattatcgkaatggagaatagaaatctccacagtcctgaatatctggaaatggctttgccattattttgcaaagcgatgagcaagctaccccttgcagcccaaggaaaa

SEQ ID NO: 34503 - DNA, 201 bp, Homo sapiens
agcttaccttgagaactcgaaaggtgcccccaacaactcctgctctgagataaaaatgaacaagaaaggcgctagaattgattttaaagatgtgacttacytaacagaagagaaggtatatgaaattcttgaattatgtagagaaagagaggattattcccctttaatccgtgttattggaagagttttttctagtgctga

SEQ ID NO: 34504 - DNA, 201 bp, Homo sapiens
tttttctagtgctgaggcattggtacagagcttccggaaagttaaacaacacaccaaggaagaactgaaatctcttcaagcaaaagatgaagacaaagatkaagatgaaaaggaaaaagctgcatgttctgctgctgctatggaagaagactcagaagcatcttcctcaaggataggtgatagctcacagggagacaacaa

SEQ ID NO: 34505 - DNA, 201 bp, Homo sapiens
cagaagagaaggtatatgaaattcttgaattatgtagagaaagagaggattattcccctttaatccgtgttattggaagagttttttctagtgctgaggcwttggtacagagcttccggaaagttaaacaacacaccaaggaagaactgaaatctcttcaagcaaaagatgaagacaaagatgaagatgaaaaggaaaaag

SEQ ID NO: 34506 - DNA, 201 bp, Homo sapiens
tcaggagaacctcagtctgacgacattgaagctagccgaatgaagcgagcagctgcaaagcatctaatagaacgctactaccaccagttaactgagggctrtggaaatgaagcctgcacgaatgagttttgtgcttcctgtccaacttttcttcgtatggataataatgcagcagctattaaagccctcgagctttataag

SEQ ID NO: 34507 - DNA, 201 bp, Homo sapiens
gttctgggaaatcgttcattcatttacagatgaacagaaaagactcttcttgcagtttacaacgggcacagacagagcacctgtgggaggactaggaaaaytaaagatgattatagccaaaaatggcccagacacagaaaggttacctacatctcatacttgctttaatgtgcttttacttccggaatactcaagcaaaga

SEQ ID NO: 34508 - DNA, 201 bp, Homo sapiens
ctcctaagaattacattgtatagccccacagattaaatttaattaattaattcaaaacatgttaaacgttactttcatgtactatggaaaagtacaagtargtttacattactgatttccagaagtaagtagtttcccctttcctagtcttctgtgtatgtgatgttgttaatttcttttattgcattataaaataaaagg

SEQ ID NO: 34509 - DNA, 201 bp, Homo sapiens
gacaacaatttgcaaaaattaggccctgatgatgtgtctgtggatattgatgccattagaagggtctacaccagattgctctctaatgaaaaaattgaaaytgcctttctcaatgcacttgtatatttgtcacctaacgtggaatgtgacttgacgtatcacaatgtatactctcgagatcctaattatctgaatttgttc

SEQ ID NO: 34510 - DNA, 201 bp, Homo sapiens
ttgtatatttgtcacctaacgtggaatgtgacttgacgtatcacaatgtatactctcgagatcctaattatctgaatttgttcattatcgtaatggagaayagaaatctccacagtcctgaatatctggaaatggctttgccattattttgcaaagcgatgagcaagctaccccttgcagcccaaggaaaactgatcagac

SEQ ID NO: 34511 - DNA, 201 bp, Homo sapiens
gagaacaaggagttgatgagggaggtgtttccaaagaattttttcagctggttgtggaggaaatcttcaatccagatattggtatgttcacatacgatgartctacaaaattgttttggtttaatccatcttcttttgaaactgagggtcagtttactctgattggcatagtactgggtctggctatttacaataactgta

SEQ ID NO: 34512 - DNA, 201 bp, Homo sapiens; identical to SEQ ID NO: 34498

SEQ ID NO: 34513 - DNA, 201 bp, Homo sapiens; identical to SEQ ID NO: 34499

SEQ ID NO: 34514 - DNA, 201 bp, Homo sapiens; identical to SEQ ID NO: 34500

SEQ ID NO: 34515 - DNA, 201 bp, Homo sapiens; identical to SEQ ID NO: 34501

SEQ ID NO: 34516 - DNA, 201 bp, Homo sapiens; identical to SEQ ID NO: 34502

SEQ ID NO: 34517 - DNA, 201 bp, Homo sapiens; identical to SEQ ID NO: 34504

SEQ ID NO: 34518 - DNA, 125 bp, Homo sapiens
tctgattttctagatgtgacttacytaacagaagagaaggtatatgaaattcttgaattatgtagagaaagagaggattattcccctttaatccgtgttattggaagagttttttctagtgctga

SEQ ID NO: 34519 - DNA, 201 bp, Homo sapiens; identical to SEQ ID NO: 34505

SEQ ID NO: 34520 - DNA, 201 bp, Homo sapiens; identical to SEQ ID NO: 34507

SEQ ID NO: 34521 - DNA, 201 bp, Homo sapiens; identical to SEQ ID NO: 34508

SEQ ID NO: 34522 - DNA, 201 bp, Homo sapiens; identical to SEQ ID NO: 34509

SEQ ID NO: 34523 - DNA, 201 bp, Homo sapiens; identical to SEQ ID NO: 34510

SEQ ID NO: 34524 - DNA, 201 bp, Homo sapiens; identical to SEQ ID NO: 34511

SEQ ID NO: 34525 - DNA, 201 bp, Homo sapiens; identical to SEQ ID NO: 34498

SEQ ID NO: 34526 - DNA, 201 bp, Homo sapiens; identical to SEQ ID NO: 34499

SEQ ID NO: 34527 - DNA, 201 bp, Homo sapiens; identical to SEQ ID NO: 34500

SEQ ID NO: 34528 - DNA, 201 bp, Homo sapiens; identical to SEQ ID NO: 34501

SEQ ID NO: 34529 - DNA, 201 bp, Homo sapiens; identical to SEQ ID NO: 34502

SEQ ID NO: 34530 - DNA, 201 bp, Homo sapiens; identical to SEQ ID NO: 34503

SEQ ID NO: 34531 - DNA, 201 bp, Homo sapiens; identical to SEQ ID NO: 34504

SEQ ID NO: 34532 - DNA, 201 bp, Homo sapiens; identical to SEQ ID NO: 34505

SEQ ID NO: 34533 - DNA, 201 bp, Homo sapiens; identical to SEQ ID NO: 34506

SEQ ID NO: 34534 - DNA, 201 bp, Homo sapiens; identical to SEQ ID NO: 34507

SEQ ID NO: 34535 - DNA, 201 bp, Homo sapiens; identical to SEQ ID NO: 34508

SEQ ID NO: 34536 - DNA, 201 bp, Homo sapiens; identical to SEQ ID NO: 34509

SEQ ID NO: 34537 - DNA, 201 bp, Homo sapiens; identical to SEQ ID NO: 34510

SEQ ID NO: 34538 - DNA, 201 bp, Homo sapiens; identical to SEQ ID NO: 34511

SEQ ID NO: 34539 - DNA, 201 bp, Homo sapiens; identical to SEQ ID NO: 34498

SEQ ID NO: 34540 - DNA, 201 bp, Homo sapiens; identical to SEQ ID NO: 34499

SEQ ID NO: 34541 - DNA, 201 bp, Homo sapiens; identical to SEQ ID NO: 34500

SEQ ID NO: 34542 - DNA, 201 bp, Homo sapiens; identical to SEQ ID NO: 34501

SEQ ID NO: 34543 - DNA, 201 bp, Homo sapiens; identical to SEQ ID NO: 34502

SEQ ID NO: 34544 - DNA, 201 bp, Homo sapiens; identical to SEQ ID NO: 34503

SEQ ID NO: 34545 - DNA, 201 bp, Homo sapiens; identical to SEQ ID NO: 34504

SEQ ID NO: 34546 - DNA, 201 bp, Homo sapiens; identical to SEQ ID NO: 34505

SEQ ID NO: 34547 - DNA, 201 bp, Homo sapiens; identical to SEQ ID NO: 34506

SEQ ID NO: 34548 - DNA, 201 bp, Homo sapiens; identical to SEQ ID NO: 34507

SEQ ID NO: 34549 - DNA, 201 bp, Homo sapiens; identical to SEQ ID NO: 34508

SEQ ID NO: 34550 - DNA, 201 bp, Homo sapiens; identical to SEQ ID NO: 34509

SEQ ID NO: 34551 - DNA, 201 bp, Homo sapiens; identical to SEQ ID NO: 34510

SEQ ID NO: 34552 - DNA, 201 bp, Homo sapiens; identical to SEQ ID NO: 34511

SEQ ID NO: 34553 - DNA, 201 bp, Homo sapiens
tctatcagcccctgccctggtccatctgtcagcttcagagccgtggagcgagagatgccggccctgggctgggccgtggctgccatcctgatgctgcagayggccatggcggagccctccccggggactctgcccaggaaggcaggggtgttttcagacctaagcaaccaagagctgaaggcagtgcacagcttcctctgg

SEQ ID NO: 34554 - DNA, 201 bp, Homo sapiens
caagtaccgggagtcggagctgtgcagcagcagcatctaccaccagaacgacccctggcacccgcccgtggtctttgagcagtttcttcacaacaacgagmacattgaaaatgaggacctggtggcctgggtgacggtgggcttcctgcacatcccccactcagaggacccctccctggcatccagagacactgtgatcgt

SEQ ID NO: 34555 - DNA, 201 bp, Homo sapiens
acccctggagcccaagacaccgcgtggtccagccaactctggagcagacgcagtactcctgggagcgccaggcggccttccgcttcaaaaggaagctgccyaagtacctgctctttaccagcccccaggagaacccctggggccacaagcgcagctaccgcctgcagatccactccatggccgaccaggtgctgcccccag

SEQ ID NO: 34556 - DNA, 201 bp, Homo sapiens
acttggtgcactaccgcgtagacctggatgtggcaggcaccaagaacagcttccagacactgcagatgaagctagaaaacatcaccaacccctggagcccragacaccgcgtggtccagccaactctggagcagacgcagtactcctgggagcgccaggcggccttccgcttcaaaaggaagctgcctaagtacctgctct

SEQ ID NO: 34557 - DNA, 201 bp, Homo sapiens
tccactccatggccgaccaggtgctgcccccaggctggcaggaggagcaggccatcacctgggcaaggtaccccctggcagtgaccaagtaccgggagtcrgagctgtgcagcagcagcatctaccaccagaacgacccctggcacccgcccgtggtctttgagcagtttcttcacaacaacgagaacattgaaaatgagg

SEQ ID NO: 34558 - DNA, 201 bp, Homo sapiens
acccgctgcctgggggcaaggggcatgacagcacagaggagccgcccctcttctcctcccacaagccccgcggggacttccccagccccatccatgtgagyggcccccgcttggtccagccccacggccctcgcttcaggctggagggcaacgctgtgctctacggcggctggagctttgccttccggctgcgctcctcct

SEQ ID NO: 34559 - DNA, 201 bp, Homo sapiens
ggagcaggccatcacctgggcaaggtaccccctggcagtgaccaagtaccgggagtcggagctgtgcagcagcagcatctaccaccagaacgacccctggsacccgcccgtggtctttgagcagtttcttcacaacaacgagaacattgaaaatgaggacctggtggcctgggtgacggtgggcttcctgcacatccccca

SEQ ID NO: 34560 - DNA, 201 bp, Homo sapiens
ggcccccgcttggtccagccccacggccctcgcttcaggctggagggcaacgctgtgctctacggcggctggagctttgccttccggctgcgctcctcctycgggctgcaggtcctgaacgtgcacttcggcggagagcgcattgcctatgaggtcagcgtgcaagaggcagtggcgctgtatggaggacacacacctgca

SEQ ID NO: 34561 - DNA, 201 bp, Homo sapiens
cctggggccacaagcgcagctaccgcctgcagatccactccatggccgaccaggtgctgcccccaggctggcaggaggagcaggccatcacctgggcaagktaccccctggcagtgaccaagtaccgggagtcggagctgtgcagcagcagcatctaccaccagaacgacccctggcacccgcccgtggtctttgagcagt

SEQ ID NO: 34562 - DNA, 111 bp, Homo sapiens
ttagctacaatgggacctatagacctgtgtgaccagcccccagttcctcccccagttcctcccaggaagcccaggagcctcactggggcagacaataaacyctcagagcct

SEQ ID NO: 34563 - DNA, 201 bp, Homo sapiens
gcttcaggctggagggcaacgctgtgctctacggcggctggagctttgccttccggctgcgctcctcctccgggctgcaggtcctgaacgtgcacttcggyggagagcgcattgcctatgaggtcagcgtgcaagaggcagtggcgctgtatggaggacacacacctgcaggcatgcagaccaagtacctcgatgtcggct

SEQ ID NO: 34564 - DNA, 201 bp, Homo sapiens
cgcggggacttccccagccccatccatgtgagcggcccccgcttggtccagccccacggccctcgcttcaggctggagggcaacgctgtgctctacggcgrctggagctttgccttccggctgcgctcctcctccgggctgcaggtcctgaacgtgcacttcggcggagagcgcattgcctatgaggtcagcgtgcaagag

SEQ ID NO: 34565 - DNA, 201 bp, Homo sapiens
aacttgaccttgggaagacagggccagccagcaaggtggctggggagaaggccgaggtccccgggccgcagacgggaattgagggtcaggagccgaagtgraactggagccggcgccaggagatgcagccctgaagggcacctccacccagtggccctcccccaccccactcccggggccctcctggcccagcgtcaccct

SEQ ID NO: 34566 - DNA, 201 bp, Homo sapiens
cagggccagccagcaaggtggctggggagaaggccgaggtccccgggccgcagacgggaattgagggtcaggagccgaagtggaactggagccggcgccasgagatgcagccctgaagggcacctccacccagtggccctcccccaccccactcccggggccctcctggcccagcgtcaccctgctgcgctaggacctaca

SEQ ID NO: 34567 - DNA, 201 bp, Homo sapiens
tccattatccccgagccctctgcctctttgaaatgcccacaggggtgccccttcggcggcactttaattccaactttaaaggtggcttcaacttctatgcrgggctgaagggccaggtgctggtgctgcggacaacttcaactgtctacaattatgattacatttgggactttatcttctaccccaacggggtgatggagg

SEQ ID NO: 34568 - DNA, 201 bp, Homo sapiens
aggctggaagcagagcgaactgggagcagagcacacagagccgtggagcgagagatgccggccctgggctgggccgtggctgccatcctgatgctgcagayggccatggcggagccctccccggggactctgcccaggaaggcaggggtgttttcagacctaagcaaccaagagctgaaggcagtgcacagcttcctctgg

SEQ ID NO: 34569 - DNA, 201 bp, Homo sapiens
caagtaccgggagtcggagctgtgcagcagcagcatctaccaccagaacgacccctggcacccgcccgtggtctttgagcagtttcttcacaacaacgagmacattgaaaatgaggacctggtggcctgggtgacggtgggcttcctgcacatcccccactcagaggacattcccaacacagccacacctgggaactccgt

SEQ ID NO: 34570 - DNA, 201 bp, Homo sapiens; identical to SEQ ID NO: 34555

SEQ ID NO: 34571 - DNA, 201 bp, Homo sapiens; identical to SEQ ID NO: 34556

SEQ ID NO: 34572 - DNA, 201 bp, Homo sapiens; identical to SEQ ID NO: 34557

SEQ ID NO: 34573 - DNA, 201 bp, Homo sapiens; identical to SEQ ID NO: 34558

SEQ ID NO: 34574 - DNA, 201 bp, Homo sapiens; identical to SEQ ID NO: 34559

SEQ ID NO: 34575 - DNA, 201 bp, Homo sapiens; identical to SEQ ID NO: 34560

SEQ ID NO: 34576 - DNA, 201 bp, Homo sapiens; identical to SEQ ID NO: 34561

SEQ ID NO: 34577 - DNA, 112 bp, Homo sapiens
ttagctacaatgggacctatagacctgtgtgaccagcccccagttcctcccccagttcctcccaggaagcccaggagcctcactggggcagacaataaacyctcagagcctc

SEQ ID NO: 34578 - DNA, 201 bp, Homo sapiens; identical to SEQ ID NO: 34563

SEQ ID NO: 34579 - DNA, 201 bp, Homo sapiens; identical to SEQ ID NO: 34564

SEQ ID NO: 34580 - DNA, 201 bp, Homo sapiens; identical to SEQ ID NO: 34567

SEQ ID NO: 34581 - DNA, 201 bp, Homo sapiens; identical to SEQ ID NO: 34568

SEQ ID NO: 34582 - DNA, 201 bp, Homo sapiens; identical to SEQ ID NO: 34554

SEQ ID NO: 34583 - DNA, 201 bp, Homo sapiens; identical to SEQ ID NO: 34555

SEQ ID NO: 34584 - DNA, 201 bp, Homo sapiens; identical to SEQ ID NO: 34556

SEQ ID NO: 34585 - DNA, 201 bp, Homo sapiens; identical to SEQ ID NO: 34557

SEQ ID NO: 34586 - DNA, 201 bp, Homo sapiens; identical to SEQ ID NO: 34558

SEQ ID NO: 34587 - DNA, 201 bp, Homo sapiens; identical to SEQ ID NO: 34559

SEQ ID NO: 34588 - DNA, 201 bp, Homo sapiens; identical to SEQ ID NO: 34560

SEQ ID NO: 34589 - DNA, 201 bp, Homo sapiens; identical to SEQ ID NO: 34561

SEQ ID NO: 34590 - DNA, 111 bp, Homo sapiens; identical to SEQ ID NO: 34562

SEQ ID NO: 34591 - DNA, 201 bp, Homo sapiens; identical to SEQ ID NO: 34563

SEQ ID NO: 34592 - DNA, 201 bp, Homo sapiens; identical to SEQ ID NO: 34564

SEQ ID NO: 34593 - DNA, 201 bp, Homo sapiens; identical to SEQ ID NO: 34567

SEQ ID NO: 34594 - DNA, 201 bp, Homo sapiens; identical to SEQ ID NO: 34553

SEQ ID NO: 34595 - DNA, 201 bp, Homo sapiens; identical to SEQ ID NO: 34569

SEQ ID NO: 34596 - DNA, 201 bp, Homo sapiens
cctgggcaaggactgaggggggccagcccagggccctgagccaagctgcttcgcctgtgcctggcaggtaccccctggcagtgaccaagtaccgggagtcrgagctgtgcagcagcagcatctaccaccagaacgacccctggcacccgcccgtggtctttgagcagtttcttcacaacaacgagaacattgaaaatgagg

SEQ ID NO: 34597 - DNA, 201 bp, Homo sapiens; identical to SEQ ID NO: 34558

SEQ ID NO: 34598 - DNA, 201 bp, Homo sapiens
tgcccccaggctggcaggaggagcaggccatcacctgggcaaggactgaggggggccagcccagggccctgagccaagctgcttcgcctgtgcctggcagktaccccctggcagtgaccaagtaccgggagtcggagctgtgcagcagcagcatctaccaccagaacgacccctggcacccgcccgtggtctttgagcagt

SEQ ID NO: 34599 - DNA, 112 bp, Homo sapiens; identical to SEQ ID NO: 34577

SEQ ID NO: 34600 - DNA, 201 bp, Homo sapiens; identical to SEQ ID NO: 34563

SEQ ID NO: 34601 - DNA, 201 bp, Homo sapiens; identical to SEQ ID NO: 34564

SEQ ID NO: 34602 - DNA, 201 bp, Homo sapiens; identical to SEQ ID NO: 34565

SEQ ID NO: 34603 - DNA, 201 bp, Homo sapiens; identical to SEQ ID NO: 34555

SEQ ID NO: 34604 - DNA, 201 bp, Homo sapiens; identical to SEQ ID NO: 34556

SEQ ID NO: 34605 - DNA, 201 bp, Homo sapiens; identical to SEQ ID NO: 34560

SEQ ID NO: 34606 - DNA, 201 bp, Homo sapiens
agctgcttcgcctgtgcctggcaggtaccccctggcagtgaccaagtaccgggagtcggagctgtgcagcagcagcatctaccaccagaacgacccctggsacccgcccgtggtctttgagcagtttcttcacaacaacgagaacattgaaaatgaggacctggtggcctgggtgacggtgggcttcctgcacatccccca

SEQ ID NO: 34607 - DNA, 201 bp, Homo sapiens
cgaccaggtgctgcccccaggctggcaggaggagcaggccatcacctgggcaaggactgaggggggccagcccagggccctgagccaagctgcttcgcctrtgcctggcaggtaccccctggcagtgaccaagtaccgggagtcggagctgtgcagcagcagcatctaccaccagaacgacccctggcacccgcccgtggt

SEQ ID NO: 34608 - DNA, 201 bp, Homo sapiens; identical to SEQ ID NO: 34566

SEQ ID NO: 34609 - DNA, 201 bp, Homo sapiens; identical to SEQ ID NO: 34567

SEQ ID NO: 34610 - DNA, 201 bp, Homo sapiens
aggctggaagcagagcgaactgggagcagagcacacagagccgtggagcgagagatgccggccctgggctgggccgtggctgccatcctgatgctgcagayggccatggcggagccctccccggggactctgcccaggaaggcaggggtgttttcagacctggcatccagagacactgtgatcgtgtggcctcgggacaac

SEQ ID NO: 34611 - DNA, 116 bp, Homo sapiens
ttagctacaatgggacctatagacctgtgtgaccagcccccagttcctcccccagttcctcccaggaagcccaggagcctcactggggcagacaataaacyctcagagcctcgctc

SEQ ID NO: 34612 - DNA, 201 bp, Homo sapiens; identical to SEQ ID NO: 34553

SEQ ID NO: 34613 - DNA, 201 bp, Homo sapiens; identical to SEQ ID NO: 34569

SEQ ID NO: 34614 - DNA, 201 bp, Homo sapiens; identical to SEQ ID NO: 34555

SEQ ID NO: 34615 - DNA, 201 bp, Homo sapiens; identical to SEQ ID NO: 34556

SEQ ID NO: 34616 - DNA, 201 bp, Homo sapiens; identical to SEQ ID NO: 34557

SEQ ID NO: 34617 - DNA, 201 bp, Homo sapiens; identical to SEQ ID NO: 34558

SEQ ID NO: 34618 - DNA, 201 bp, Homo sapiens; identical to SEQ ID NO: 34559

SEQ ID NO: 34619 - DNA, 201 bp, Homo sapiens; identical to SEQ ID NO: 34560

SEQ ID NO: 34620 - DNA, 201 bp, Homo sapiens; identical to SEQ ID NO: 34561

SEQ ID NO: 34621 - DNA, 112 bp, Homo sapiens; identical to SEQ ID NO: 34577

SEQ ID NO: 34622 - DNA, 201 bp, Homo sapiens; identical to SEQ ID NO: 34563

SEQ ID NO: 34623 - DNA, 201 bp, Homo sapiens; identical to SEQ ID NO: 34564

SEQ ID NO: 34624 - DNA, 201 bp, Homo sapiens; identical to SEQ ID NO: 34565

SEQ ID NO: 34625 - DNA, 201 bp, Homo sapiens; identical to SEQ ID NO: 34566

SEQ ID NO: 34626 - DNA, 201 bp, Homo sapiens; identical to SEQ ID NO: 34567

SEQ ID NO: 34627 - DNA, 201 bp, Homo sapiens
cagccaacgtggagatcaccgagctctgcattcagcacggctggaccccaggaaacggtcgcttcgacgtgctgcccctgctgctgcaggccccagatgakcccccagaactcttccttctgccccccgagctggtccttgaggtgcccctggagcaccccacgctggagtggtttgcagccctgggcctgcgctggtacg

SEQ ID NO: 34628 - DNA, 201 bp, Homo sapiens
ccaagacctacgtgcaggacatcctgaggacggagctggctgcggaggtgcaccgcgtgctgtgcctcgagcggggccacatgtttgtctgcggcgatgtyaccatggcaaccaacgtcctgcagaccgtgcagcgcatcctggcgacggagggcgacatggagctggacgaggccggcgacgtcatcggcgtgctgcggg

SEQ ID NO: 34629 - DNA, 201 bp, Homo sapiens
ctgctggaggtgctggagcagttcccgtcggtggcgctgcctgccccactgctcctcacccagctgcctctgctccagccccggtactactcagtcagctyggcacccagcacccacccaggagagatccacctcactgtagctgtgctggcatacaggactcaggatgggctgggccccctgcactatggagtctgctcc

SEQ ID NO: 34630 - DNA, 201 bp, Homo sapiens
gctcggccatcacagtgttcccgcagcgctgccctggccgaggagacttccgaatctggaacagccagctggtgcgctacgcgggctaccggcagcaggayggctctgtgcggggggacccagccaacgtggagatcaccgagctctgcattcagcacggctggaccccaggaaacggtcgcttcgacgtgctgcccctgc

SEQ ID NO: 34631 - DNA, 201 bp, Homo sapiens
ccagtaacacagacagtgcaggggccctgggcaccctcaggttctgtgtgttcgggctcggctcccgggcatacccccacttctgcgcctttgctcgtgcsgtggacacacggctggaggaactgggcggggagcggctgctgcagctgggccagggcgacgagctgtgcggccaggaggaggccttccgaggctgggccc

SEQ ID NO: 34632 - DNA, 201 bp, Homo sapiens
gctacgcgggctaccggcagcaggacggctctgtgcggggggacccagccaacgtggagatcaccgagctctgcattcagcacggctggaccccaggaaayggtcgcttcgacgtgctgcccctgctgctgcaggccccagatgagcccccagaactcttccttctgccccccgagctggtccttgaggtgcccctggagc

SEQ ID NO: 34633 - DNA, 201 bp, Homo sapiens
ccgtgcacgctgcgccaggctctcaccttcttcctggacatcacctccccacccagccctcagctcttgcggctgctcagcaccttggcagaagagcccakggaacagcaggagctggaggccctcagccaggatccccgacgctacgaggagtggaagtggttccgctgccccacgctgctggaggtgctggagcagttc

SEQ ID NO: 34634 - DNA, 201 bp, Homo sapiens
agcggctgcatgacattgagagcaaagggctgcagcccactcccatgactttggtgttcggctgccgatgctcccaacttgaccatctctaccgcgacgargtgcagaacgcccagcagcgcggggtgtttggccgagtcctcaccgccttctcccgggaacctgacaaccccaagacctacgtgcaggacatcctgagga

SEQ ID NO: 34635 - DNA, 201 bp, Homo sapiens
accagccagacccctggaaggggagtgccgccaagggcaccggcatcaccaggaagaagacctttaaagaagtggccaacgccgtgaagatctccgcctckctcatgggcacggtgatggcgaagcgagtgaaggcgacaatcctgtatggctccgagaccggccgggcccagagctacgcacagcagctggggagactct

SEQ ID NO: 34636 - DNA, 201 bp, Homo sapiens
ccacgtggctaagccagctcaagcccggagaccctgtgccctgcttcatccggggggctccctccttccggctgccacccgatcccagcttgccctgcatyctggtgggtccaggcactggcattgcccccttccggggattctggcaggagcggctgcatgacattgagagcaaagggctgcagcccactcccatgactt

SEQ ID NO: 34637 - DNA, 201 bp, Homo sapiens
tacgcacccagagcttttccttgcaggagcgtcagttgcggggcgcagtgccctgggcgttcgaccctcccggctcagacaccaacagcccctgagagccrcctggctttcccttccagttccgggagagcggctgcccgactcaggtccgcccgaccaggatcagccccgctcctcccctcttgaggtggtgccttctca

SEQ ID NO: 34638 - DNA, 201 bp, Homo sapiens
ctagacaaggtggctgaggagtgggcccagggcaccttcaaactgaactccaatgatgaggacatccacacagccaatgagcgccgcctgaaggagctcaytggtgcaacggcagggaagctgcacacgggacggagccggaatgaccaggtggtcacagacctcaggctgtggatgcggcagacctgctccacgctctcg

SEQ ID NO: 34639 - DNA, 201 bp, Homo sapiens
ctccaatgatgaggacatccacacagccaatgagcgccgcctgaaggagctcattggtgcaacggcagggaagctgcacacgggacggagccggaatgacyaggtggtcacagacctcaggctgtggatgcggcagacctgctccacgctctcgggcctcctctgggagctcattaggaccatggtggatcgggcagaggc

SEQ ID NO: 34640 - DNA, 201 bp, Homo sapiens
cgagagctgctccgagcagaactcaactttggggccatcactctcaacagcatggatgccactagtgagcgggactttgtggccgagttcctgttctgggsttcgctgtgcatgacccatctcagcaggatggccgaggacctcatcctctactgcaccaaggaattcagcttcgtgcagctctcagatgcctacagcacg

SEQ ID NO: 34641 - DNA, 201 bp, Homo sapiens
gagctcattggtgcaacggcagggaagctgcacacgggacggagccggaatgaccaggtggtcacagacctcaggctgtggatgcggcagacctgctccaygctctcgggcctcctctgggagctcattaggaccatggtggatcgggcagaggcggaacgtgatgttctcttcccggggtacacccatttgcagagggcc

SEQ ID NO: 34642 - DNA, 201 bp, Homo sapiens
ctcaggctgtggatgcggcagacctgctccacgctctcgggcctcctctgggagctcattaggaccatggtggatcgggcagaggcggaacgtgatgttcycttcccggggtacacccatttgcagagggcccagcccatccgctggagccactggattctgagccacgccgtggcactgacccgagactctgagcggctg

SEQ ID NO: 34643 - DNA, 201 bp, Homo sapiens
ggatcgggcagaggcggaacgtgatgttctcttcccggggtacacccatttgcagagggcccagcccatccgctggagccactggattctgagccacgccrtggcactgacccgagactctgagcggctgctggaggtgcggaagcggatcaatgtcctgcccctggggagtggggccattgcaggcaatcccctgggtgt

SEQ ID NO: 34644 - DNA, 201 bp, Homo sapiens
gcggaacgtgatgttctcttcccggggtacacccatttgcagagggcccagcccatccgctggagccactggattctgagccacgccgtggcactgacccragactctgagcggctgctggaggtgcggaagcggatcaatgtcctgcccctggggagtggggccattgcaggcaatcccctgggtgtggaccgagagctg

SEQ ID NO: 34645 - DNA, 201 bp, Homo sapiens
tgcctacagcacgggaagcagcctgatgccccagaagaaaaaccccgacagtttggagctgatccggagcaaggctgggcgtgtgtttgggcggtgtgccrggctcctgatgaccctcaagggacttcccagcacctacaacaaagacttacaggaggacaaggaagctgtgtttgaagtgtcagacactatgagtgccgt

SEQ ID NO: 34646 - DNA, 201 bp, Homo sapiens
ggccactggcgtcatctctacgctgcagattcaccaagagaacatgggacaggctctcagccccgacatgctggccactgaccttgcctattacctggtcygcaaagggatgccattccgccaggcccacgaggcctccgggaaagctgtgttcatggccgagaccaagggggtcgccctcaaccagctgtcactgcagga

SEQ ID NO: 34647 - DNA, 201 bp, Homo sapiens
caaactgaactccaatgatgaggacatccacacagccaatgagcgccgcctgaaggagctcattggtgcaacggcagggaagctgcacacgggacggagcyggaatgaccaggtggtcacagacctcaggctgtggatgcggcagacctgctccacgctctcgggcctcctctgggagctcattaggaccatggtggatcg

SEQ ID NO: 34648 - DNA, 201 bp, Homo sapiens
tacgctgcagattcaccaagagaacatgggacaggctctcagccccgacatgctggccactgaccttgcctattacctggtccgcaaagggatgccattcygccaggcccacgaggcctccgggaaagctgtgttcatggccgagaccaagggggtcgccctcaaccagctgtcactgcaggagctgcagaccatcagccc

SEQ ID NO: 34649 - DNA, 200 bp, Homo sapiens
ggagacccccatctctactcaataataaaacaaatagcctggcgtggtggcccatgcatatagtcccagctacttgtaaggctgaggtgagaggacacttrtgcccaggagtggaggctgcagtgagctatgatcacgccactgcattccagcctggataacagagtgagaacctatctctaaaaataaataaataaacg

SEQ ID NO: 34650 - DNA, 201 bp, Homo sapiens
tgaggccaggagtttgacacagcctgggcaacacagggagacccccatctctactcaataataaaacaaatagcctggcgtggtggcccatgcatatagtyccagctacttgtaaggctgaggtgagaggacacttgtgcccaggagtggaggctgcagtgagctatgatcacgccactgcattccagcctggataacaga

SEQ ID NO: 34651 - DNA, 201 bp, Homo sapiens
caggagctgcagaccatcagccccctgttctcgggcgacgtgatctgcgtgtgggactacgggcacagtgtggagcagtatggtgccctgggcggcactgygcgctccagcgtcgactggcagatccgccaggtgcgggcgctactgcaggcacagcaggcctaggtcctcccacacctgccccctaataaagtgggcgcg

SEQ ID NO: 34652 - DNA, 201 bp, Homo sapiens
agccccgacatgctggccactgaccttgcctattacctggtccgcaaagggatgccattccgccaggcccacgaggcctccgggaaagctgtgttcatggmcgagaccaagggggtcgccctcaaccagctgtcactgcaggagctgcagaccatcagccccctgttctcgggcgacgtgatctgcgtgtgggactacggg

SEQ ID NO: 34653 - DNA, 201 bp, Homo sapiens
ctcgggcgacgtgatctgcgtgtgggactacgggcacagtgtggagcagtatggtgccctgggcggcactgcgcgctccagcgtcgactggcagatccgcyaggtgcgggcgctactgcaggcacagcaggcctaggtcctcccacacctgccccctaataaagtgggcgcgagaggaggctgctgtgtgtttcctgcccc

SEQ ID NO: 34654 - DNA, 201 bp, Homo sapiens
ccagatactccatggcctagacaaggtggctgaggagtgggcccagggcaccttcaaactgaactccaatgatgaggacatccacacagccaatgagcgcygcctgaaggagctcattggtgcaacggcagggaagctgcacacgggacggagccggaatgaccaggtggtcacagacctcaggctgtggatgcggcagac

SEQ ID NO: 34655 - DNA, 201 bp, Homo sapiens
ggcaaggtgcgaggatgcttgaggccaggagtttgacacagcctgggcaacacagggagacccccatctctactcaataataaaacaaatagcctggcgtsgtggcccatgcatatagtcccagctacttgtaaggctgaggtgagaggacacttgtgcccaggagtggaggctgcagtgagctatgatcacgccactgca

SEQ ID NO: 34656 - DNA, 201 bp, Homo sapiens
ccgagagctgctccgagcagaactcaactttggggccatcactctcaacagcatggatgccactagtgagcgggactttgtggccgagttcctgttctggscttcgctgtgcatgacccatctcagcaggatggccgaggacctcatcctctactgcaccaaggaattcagcttcgtgcagctctcagatgcctacagcac

SEQ ID NO: 34657 - DNA, 201 bp, Homo sapiens
caccttcaaactgaactccaatgatgaggacatccacacagccaatgagcgccgcctgaaggagctcattggtgcaacggcagggaagctgcacacgggayggagccggaatgaccaggtggtcacagacctcaggctgtggatgcggcagacctgctccacgctctcgggcctcctctgggagctcattaggaccatggt

SEQ ID NO: 34658 - DNA, 201 bp, Homo sapiens
aagggcaaggtgcgaggatgcttgaggccaggagtttgacacagcctgggcaacacagggagacccccatctctactcaataataaaacaaatagcctggygtggtggcccatgcatatagtcccagctacttgtaaggctgaggtgagaggacacttgtgcccaggagtggaggctgcagtgagctatgatcacgccact

SEQ ID NO: 34659 - DNA, 201 bp, Homo sapiens; identical to SEQ ID NO: 34638

SEQ ID NO: 34660 - DNA, 201 bp, Homo sapiens; identical to SEQ ID NO: 34639

SEQ ID NO: 34661 - DNA, 201 bp, Homo sapiens; identical to SEQ ID NO: 34640

SEQ ID NO: 34662 - DNA, 201 bp, Homo sapiens; identical to SEQ ID NO: 34641

SEQ ID NO: 34663 - DNA, 201 bp, Homo sapiens; identical to SEQ ID NO: 34642

SEQ ID NO: 34664 - DNA, 201 bp, Homo sapiens; identical to SEQ ID NO: 34643

SEQ ID NO: 34665 - DNA, 201 bp, Homo sapiens; identical to SEQ ID NO: 34644

SEQ ID NO: 34666 - DNA, 201 bp, Homo sapiens
tgcctacagcacgggaagcagcctgatgccccagaagaaaaaccccgacagtttggagctgatccggagcaaggctgggcgtgtgtttgggcggtgtgccrggctcctgatgaccctcaagggacttcccagcacctacaacaaagacttacagagaacatgggacaggctctcagccccgacatgctggccactgacctt

SEQ ID NO: 34667 - DNA, 201 bp, Homo sapiens
tcaagggacttcccagcacctacaacaaagacttacagagaacatgggacaggctctcagccccgacatgctggccactgaccttgcctattacctggtcygcaaagggatgccattccgccaggcccacgaggcctccgggaaagctgtgttcatggccgagaccaagggggtcgccctcaaccagctgtcactgcagga

SEQ ID NO: 34668 - DNA, 201 bp, Homo sapiens; identical to SEQ ID NO: 34647

SEQ ID NO: 34669 - DNA, 201 bp, Homo sapiens
cctacaacaaagacttacagagaacatgggacaggctctcagccccgacatgctggccactgaccttgcctattacctggtccgcaaagggatgccattcygccaggcccacgaggcctccgggaaagctgtgttcatggccgagaccaagggggtcgccctcaaccagctgtcactgcaggagctgcagaccatcagccc

SEQ ID NO: 34670 - DNA, 200 bp, Homo sapiens; identical to SEQ ID NO: 34649

SEQ ID NO: 34671 - DNA, 201 bp, Homo sapiens; identical to SEQ ID NO: 34651

SEQ ID NO: 34672 - DNA, 201 bp, Homo sapiens; identical to SEQ ID NO: 34650

SEQ ID NO: 34673 - DNA, 201 bp, Homo sapiens; identical to SEQ ID NO: 34653

SEQ ID NO: 34674 - DNA, 201 bp, Homo sapiens; identical to SEQ ID NO: 34652

SEQ ID NO: 34675 - DNA, 201 bp, Homo sapiens; identical to SEQ ID NO: 34654

SEQ ID NO: 34676 - DNA, 201 bp, Homo sapiens; identical to SEQ ID NO: 34656

SEQ ID NO: 34677 - DNA, 201 bp, Homo sapiens; identical to SEQ ID NO: 34657

SEQ ID NO: 34678 - DNA, 201 bp, Homo sapiens; identical to SEQ ID NO: 34655

SEQ ID NO: 34679 - DNA, 201 bp, Homo sapiens; identical to SEQ ID NO: 34658

SEQ ID NO: 34680 - DNA, 201 bp, Homo sapiens; identical to SEQ ID NO: 34638

SEQ ID NO: 34681 - DNA, 201 bp, Homo sapiens; identical to SEQ ID NO: 34639

SEQ ID NO: 34682 - DNA, 201 bp, Homo sapiens; identical to SEQ ID NO: 34640

SEQ ID NO: 34683 - DNA, 201 bp, Homo sapiens; identical to SEQ ID NO: 34641

SEQ ID NO: 34684 - DNA, 201 bp, Homo sapiens; identical to SEQ ID NO: 34642

SEQ ID NO: 34685 - DNA, 201 bp, Homo sapiens; identical to SEQ ID NO: 34643

SEQ ID NO: 34686 - DNA, 201 bp, Homo sapiens; identical to SEQ ID NO: 34644

SEQ ID NO: 34687 - DNA, 201 bp, Homo sapiens; identical to SEQ ID NO: 34645

SEQ ID NO: 34688 - DNA, 201 bp, Homo sapiens; identical to SEQ ID NO: 34646

SEQ ID NO: 34689 - DNA, 201 bp, Homo sapiens; identical to SEQ ID NO: 34647

SEQ ID NO: 34690 - DNA, 201 bp, Homo sapiens; identical to SEQ ID NO: 34648

SEQ ID NO: 34691 - DNA, 200 bp, Homo sapiens; identical to SEQ ID NO: 34649

SEQ ID NO: 34692 - DNA, 201 bp, Homo sapiens; identical to SEQ ID NO: 34650

SEQ ID NO: 34693 - DNA, 201 bp, Homo sapiens; identical to SEQ ID NO: 34651

SEQ ID NO: 34694 - DNA, 201 bp, Homo sapiens; identical to SEQ ID NO: 34652

SEQ ID NO: 34695 - DNA, 201 bp, Homo sapiens; identical to SEQ ID NO: 34653

SEQ ID NO: 34696 - DNA, 201 bp, Homo sapiens; identical to SEQ ID NO: 34654

SEQ ID NO: 34697 - DNA, 201 bp, Homo sapiens; identical to SEQ ID NO: 34655

SEQ ID NO: 34698 - DNA, 201 bp, Homo sapiens; identical to SEQ ID NO: 34656

SEQ ID NO: 34699 - DNA, 201 bp, Homo sapiens; identical to SEQ ID NO: 34657

SEQ ID NO: 34700 - DNA, 201 bp, Homo sapiens; identical to SEQ ID NO: 34658

SEQ ID NO: 34701 - DNA, 201 bp, Homo sapiens
gtcaaaatggctggcaagcaggccatttcagcatcaggcaagtggctggatggtattcgaaaatggtattacaatactgcaggattcaataaactggggtwaatgagagatgatacaatatatgaggatgaagacataaaagaagccataagaaggcttcctgagaacctttataatgacaggatgtgtcacattaagagt

SEQ ID NO: 34702 - DNA, 201 bp, Homo sapiens
caatactgcaggattcaataaactggggttaatgagagatgatacaatatatgaggatgaagacataaaagaagccataagaaggcttcctgagaaccttyataatgacaggatgtgtcacattaagagtgcattggacctgaccatgaagcatcagatcttgcctaaagagcagtggaccaaatatgaagaggaaaattt

SEQ ID NO: 34703 - DNA, 181 bp, Homo sapiens
ggtcaaaatggctggcaagcaggccatttcagcatcaggcaagtggctggatggtattcgaaaatggtattacaatactgyaggattcaataaactggggttaatgagagatgatacaatatatgaggatgaagacataaaagaagccataagaaggcttcctgagaacctttataatgac

SEQ ID NO: 34704 - DNA, 201 bp, Homo sapiens
tctcagtaatatagagaccggaatacatggtttataggaaatgatcaaatgatccaaaaaaactccacattttttaagaagttggaatttgatttcatgcrtaactgtattaaaacattaaatagaaataatgtcatttgaatgaaaatcttatcacattaaattcactgtgaaggcagcatacttaaatttttattttga

SEQ ID NO: 34705 - DNA, 201 bp, Homo sapiens
ccacaaggccattatggaaggcatatcttctgtgtttggcaaagcaggcaaagataagattaaagtgtctgaggatgacctggagaaactccttctaattmaatggtgtgttttggaaaccattcgtttaaaagctcctggtgtcattactagaaaagtggtgaagcctgtggaaattttgaattacatcattccttctgg

SEQ ID NO: 34706 - DNA, 201 bp, Homo sapiens
gcctgaattgttcaaacctgaacgttggaaaaaggcaaatttagagaagcactctttcttggactgcttcatggcatttggaagcgggaagttccagtgtyctgcaaggtggtttgctctgttagaggttcagatgtgtattattttaatactttataaatatgactgtagtcttctggacccattacccaaacagagtta

SEQ ID NO: 34707 - DNA, 201 bp, Homo sapiens
tccagtcacagtgaatatgctctttaataaaagtttgttttccacaaacaagaaaaaaatcaaggagttccatcagtattttcaagtttatgatgaagatkttgagtatgggtcccagttgccagagtgtcttctaagaaactggtcaaaatccaaaaagtggttcctggaactgtttgagaaaaacattccagatataaa

SEQ ID NO: 34708 - DNA, 201 bp, Homo sapiens
cccaaacagagttatctccatttggtgggtgtcccccagccggaagggcaatgccgaattgaatataaacaaagaatatgacatctgttgggcctcacaakgaccagggccttctggaggagtggcactaccccacctggcagcacctagacctgagctctacaaaaacacactgcttcactttgttttaggacttagttc

SEQ ID NO: 34709 - DNA, 201 bp, Homo sapiens
cttttctgcttctggaaggtgctggacaaaaacatggaactaatttccccaacagtgattataatcctgggttgccttgctctgttcttactccttcagcsgaagaatttgcgtagacccccgtgcatcaagggctggattccttggattggagttggatttgagtttgggaaagcccctctagaatttatagagaaagca

SEQ ID NO: 34710 - DNA, 181 bp, Homo sapiens
gaggtgggagggagcgacaatggaaaaatcacctgaaaactgggacagaggaaggaagctacagttacgaaggagagctgsaaaagttgcagcagaaaggttgggagtcccgacaggttccgtagcccacagaaaagaagcaagggacggcaggactgtttcacacttttctgcttctgga

SEQ ID NO: 34711 - DNA, 201 bp, Homo sapiens
ggaaaccgaatgacctttgttactgaagaagaaggaattaatgtgtttctaaaatccaaaaaagtagattttgaactagcagtgcaaaatatcgtttatcrtacagcatcaattccaaagaatgtctttttagcactgcatgaaaaactctatattatgttgaaagggaaaatggggactgtcaatctccatcagtttact

SEQ ID NO: 34712 - DNA, 201 bp, Homo sapiens
ctcatcctgatatccacaaggccattatggaaggcatatcttctgtgtttggcaaagcaggcaaagataagattaaagtgtctgaggatgacctggagaawctccttctaattaaatggtgtgttttggaaaccattcgtttaaaagctcctggtgtcattactagaaaagtggtgaagcctgtggaaattttgaattaca

SEQ ID NO: 34713 - DNA, 201 bp, Homo sapiens
tttccacaaacaagaaaaaaatcaaggagttccatcagtattttcaagtttatgatgaagattttgagtatgggtcccagttgccagagtgtcttctaagsaactggtcaaaatccaaaaagtggttcctggaactgtttgagaaaaacattccagatataaaagcatgtaaatctgcaaaagataattccatgacattat

SEQ ID NO: 34714 - DNA, 201 bp, Homo sapiens
acggcaggactgtttcacacttttctgcttctggaaggtgctggacaaaaacatggaactaatttccccaacagtgattataatcctgggttgccttgctstgttcttactccttcagcggaagaatttgcgtagacccccgtgcatcaagggctggattccttggattggagttggatttgagtttgggaaagcccctct

SEQ ID NO: 34715 - DNA, 201 bp, Homo sapiens
atcgggaaatcaaggatattttctataaggcaatccagaaacgcagacagtctcaagaaaaaattgatgacattctccaaactttactagatgctacatayaaggatgggcgtcctttgactgatgatgaagtagcagggatgcttattggattactcttggcagggcagcatacatcctcaactactagtgcttggatgg

SEQ ID NO: 34716 - DNA, 201 bp, Homo sapiens
tcagaaatggagatattataggaaaaagaaatcctttggaattttaactaaaatcactgcatatgggaaattaagagatccaggaccatatttgataagakttcctaaaaataatgtaattattaatgctaaagactgctcatgtatcttgatctaattactaaataattacatatttatttacctgataaatatgtatct

SEQ ID NO: 34717 - DNA, 201 bp, Homo sapiens
aggacatcaggtgtgtgtttctcccactgtcaatcaaagacttaaagactcatgggtagaacgcctggactttaatcctgatcgctacttacaggataacycagcatcaggggaaaagtttgcctatgtgccatttggagctgggcgtcatcgttgtattggggaaaattttgcctatgttcaaattaagacaatttggtc

SEQ ID NO: 34718 - DNA, 201 bp, Homo sapiens
gaggagcggtggcgacctcggccttcagtgtttccgacggagtgaatggcggcggcggctgggatgctgctgctgggcttgctgcaggcgggtgggtcggygctgggccaggcgatggagaaggtgacaggcggcaacctcttgtccatgctgctgatcgcctgcgccttcaccctcagcctggtctacctgatccgtctg

SEQ ID NO: 34719 - DNA, 201 bp, Homo sapiens
ttctaaataatataatttccagatagtaattttaagagtactcatcgctcttgccaaataagttcagggtattcaaatcttggactagtcctgcaaggtayaaagaataaaaatcccagtgagatacttggaaaccacagtttattattatttatctgggcaattattgtgtgtgtgaggatggaagggtagggaataatc

SEQ ID NO: 34720 - DNA, 201 bp, Homo sapiens
taaataattacatatttatttacctgataaatatgtatctagttctacaaggtcacatttatgtggaagtccaaagtcaagtccttaggggataattttgytttggctcagttgttccctgcttcctttttttttttttttttttgagatggagtctcgctctgttgcccaggctggagtgcagtggtgcgatctcagctc

SEQ ID NO: 34721 - DNA, 201 bp, Homo sapiens
tcccgggttcaagcaattctctgcctcagcctcccaagtagttgggattacaggcacctgccaccatgcctggctaattttttgtatttttagtagagacrggggtttcactatgttggctaggctggtcttgaactcctgacctcgtgatccacccgccttggcctcccaaagtgctgggattacaggcatgagccaccg

SEQ ID NO: 34722 - DNA, 201 bp, Homo sapiens
ctgaatggttctatcaaatataatagcatttgaaacattttctaatagttatgatacttatacatgtgctttcaggaagttccttggtgaaacaattgttsaggggggatctaggtaattggcagattctaaataatataatttccagatagtaattttaagagtactcatcgctcttgccaaataagttcagggtattca

SEQ ID NO: 34723 - DNA, 201 bp, Homo sapiens; identical to SEQ ID NO: 34715

SEQ ID NO: 34724 - DNA, 201 bp, Homo sapiens; identical to SEQ ID NO: 34716

SEQ ID NO: 34725 - DNA, 201 bp, Homo sapiens; identical to SEQ ID NO: 34717

SEQ ID NO: 34726 - DNA, 201 bp, Homo sapiens; identical to SEQ ID NO: 34718

SEQ ID NO: 34727 - DNA, 201 bp, Homo sapiens
aaacaattgttgaggggggcagatagtaattttaagagtactcatcgctcttgccaaataagttcagggtattcaaatcttggactagtcctgcaaggtayaaagaataaaaatcccagtgagatacttggaaaccacagtttattattatttatctgggcaattattgtgtgtgtgaggatggaagggtagggaataatc

SEQ ID NO: 34728 - DNA, 201 bp, Homo sapiens
taaataattacatatttatttacctgataaatatgtatctagttctacaaggtcacatttatgtggaagtccaaagtcaagtccttaggggataattttgytttggctcagttgttccctgcttcctttttttttttttttttttgtagtagagacgggggtttcactatgttggctaggctggtcttgaactcctgacct

SEQ ID NO: 34729 - DNA, 201 bp, Homo sapiens
atttatgtggaagtccaaagtcaagtccttaggggataattttgttttggctcagttgttccctgcttcctttttttttttttttttttgtagtagagacrggggtttcactatgttggctaggctggtcttgaactcctgacctcgtgatccacccgccttggcctcccaaagtgctgggattacaggcatgagccaccg

SEQ ID NO: 34730 - DNA, 201 bp, Homo sapiens
ctgaatggttctatcaaatataatagcatttgaaacattttctaatagttatgatacttatacatgtgctttcaggaagttccttggtgaaacaattgttsaggggggcagatagtaattttaagagtactcatcgctcttgccaaataagttcagggtattcaaatcttggactagtcctgcaaggtataaagaataaaa

SEQ ID NO: 34731 - DNA, 201 bp, Homo sapiens
aggaagaccaaggtctttgtgttttcttcctcatggaattgaacctgacattttctggatctcctgcatgtcaggagcatcagtgaggcttcagcctcctygtctccactccagagaggaggtggctatgtcttcttaagcctctggccctcagaggctcctccctatctcctggctagttaccactaggctaccaggtct

SEQ ID NO: 34732 - DNA, 201 bp, Homo sapiens
agacatctccaactgtgggaactctttccagcttgtgtctgaaggtgcttcctggaggggcctgccccactgttcctgtgctgagttccaggacagcctcmacttcagctaccatccctcaggcctgagcctgcacctcagaccacccagtcggggaaactcccccaaggagcagcccttctcccaagtcctaagacctga

SEQ ID NO: 34733 - DNA, 201 bp, Homo sapiens
ggccacacagactgactctctcatggctactaacaagtgtcgagtccccaaggctgggggccgagcctgggaatgggggtgagtggagggctccgactcarggcagctggaaatcttctcgctccagcaagctcgaccatgccaagagactggccgggacaagataaacggagctggtggcgggagggacagccccagagc

SEQ ID NO: 34734 - DNA, 201 bp, Homo sapiens
ttcctcctggggcatcctcatcccagggctctctgctgtagattggctgtgccagcttccaacaggttactggcaatgccagtgagtttctgtaggccctragctgaagaagtgaggcagtgattctgcctccatcctggtttccccaaagccccagggcaccatccttaggggagaaggtctacagttatcattatttta

SEQ ID NO: 34735 - DNA, 201 bp, Homo sapiens
tcaagaggagggcaccaagttttccttttttctaaatagctctggaaccaggcttgtaatccatagcatcaccgactctgcaaaggatttcattttggggyacagcagggtgttttaagtgctgtgacttcagctaatgatcttttcttcagccccaccccctccccactagctcgatctagtatattggggaatgcaggt

SEQ ID NO: 34736 - DNA, 201 bp, Homo sapiens
ggcccaggcttctgctaaggccttggttatttttggcagtctggtttggtctctctttccctggcagttatacttgtctcctcctgcctgctgtcactctmacttccagcaagttgaagtcaagtatgaatgcattccagctccctgagaaatggtttatggtacagtcaggaacttgtctagattggtttgtaggctttg

SEQ ID NO: 34737 - DNA, 142 bp, Homo sapiens
cactttgagagagacacgacacggagctgcgccctccatggrtggcttggggggattctgcgagccggagctgtccccctactctcctcagggactcgttggttcgcgccagcgccttttaagggcaccgtggggcgaaccg

SEQ ID NO: 34738 - DNA, 201 bp, Homo sapiens
gggacctggacttgaatttgattgaggaaaactaaaactgagaggctacttcctggggccacacagactgactctctcatggctactaacaagtgtcgagkccccaaggctgggggccgagcctgggaatgggggtgagtggagggctccgactcagggcagctggaaatcttctcgctccagcaagctcgaccatgccaa

SEQ ID NO: 34739 - DNA, 201 bp, Homo sapiens
tcctggaggggcctgccccactgttcctgtgctgagttccaggacagcctcaacttcagctaccatccctcaggcctgagcctgcacctcagaccacccaktcggggaaactcccccaaggagcagcccttctcccaagtcctaagacctgagcccccagatccagagaagcttcctgtgccccctgcccctccatccaag

SEQ ID NO: 34740 - DNA, 201 bp, Homo sapiens
ggggggattctgcgagccggagctgtccccctactctcctcagggactcgttggttcgcgccagcgccttttaagggcaccgtggggcgaaccgagcgctsagagctgctccggccgcggccctgggagctggaggaaccgcgactcagcaggcatgactggagagggaagtcccaatggtgctagaatggtgctgcagtg

SEQ ID NO: 34741 - DNA, 201 bp, Homo sapiens
gtggccacagtgatgggtttaagtaccttggtagggctggcaccagtggaaacacatactgaagctgccaccacaatagcttgtgaggttttatccagctktggttagaccctgcatgaccaaatttgacctgcccttgtttatggcaagaagggcatttttctcttcaatttccagggtttcctaggacccagttcctca

SEQ ID NO: 34742 - DNA, 201 bp, Homo sapiens
cctactctcctcagggactcgttggttcgcgccagcgccttttaagggcaccgtggggcgaaccgagcgctcagagctgctccggccgcggccctgggagytggaggaaccgcgactcagcaggcatgactggagagggaagtcccaatggtgctagaatggtgctgcagtggcagaagacggctcacaagtgaggtctgg

SEQ ID NO: 34743 - DNA, 201 bp, Homo sapiens
cctcaaagtggctcctgggagagtgatgctgagtccttgtcaccttgcccacctcagcgccgcttctccctgtcacccagtctgggcccgcaggcaagcckcttcttgccctctgcccggagctctcccgcatcctccccagagctgccctggcgacctcgaggtctccgcaaccttccccgaagccgctcacagccttgt

SEQ ID NO: 34744 - DNA, 201 bp, Homo sapiens
tcatcagattgtccaggctatattccacctgcctcttttgccctcttgagtagagttgcacacagcacatgggcaactgaagcagggttgaggggctctatctctctctctcctctgctgatgggacccttttcccctcaccctctgcccttctaagtcatagactaggtaggaaggccctatattggtccccagcatcta

SEQ ID NO: 34745 - DNA, 201 bp, Homo sapiens
tggcaatgccagtgagtttctgtaggccctaagctgaagaagtgaggcagtgattctgcctccatcctggtttccccaaagccccagggcaccatccttargggagaaggtctacagttatcattattttaattccattactttcagtctggaaaactaagctagtcagaactgtcatcttgcttcccaatctaagaacct

SEQ ID NO: 34746 - DNA, 201 bp, Homo sapiens
ctcatcagattgtccaggctatattccacctgcctcttttgccctcttgagtagagttgcacacagcacatgggcaactgaagcagggttgaggggctctatctctctctctcctctgctgatgggacccttttcccctcaccctctgcccttctaagtcatagactaggtaggaaggccctatattggtccccagcatct

SEQ ID NO: 34747 - DNA, 201 bp, Homo sapiens
gaaaatctgcgactatctcttcaatgtgtctgactcctctgccctgaatttggctaaaaatattggccttaccaaggcccgagatataaatgctgtgctawttgacatggaaaggcagggggatgtctatagacaagggacaacccctcccatatggcatttgacagacaagaagcgagagaggatgcaaatcaagagaaa

SEQ ID NO: 34748 - DNA, 201 bp, Homo sapiens
ggccaggatcttcccccagtagtttcctgcttaagcaaatagaatttctcaaggggcagctcccagaagcaccggtgattggaaagcagacaccgtcactrccaccttccctcccaggactccggccaaggtttccagtactacttgcctccagtaccagaggcaggcaagtggacatcaggggtgtccccaggggcgtgc

SEQ ID NO: 34749 - DNA, 201 bp, Homo sapiens
tggcaaagcagatggccgcagaggaagccatgaaggccctgcatggggaggcgaccaactccatggcttctgataaccaggtcaggaagattggcgagctygtgagatacctgaacaccaaccctgtgggtggccttttggagtacgcccgctcccatggctttgctgctgaattcaagttggtcgaccagtccggacctc

SEQ ID NO: 34750 - DNA, 201 bp, Homo sapiens
aagaaagtggccaagcaggatgcagctatgaaagccatgacaattctgctagaggaagccaaagccaaggacagtggaaaatcagaagaatcatcccactrttccacagagaaagaatcagagaagactgcagagtcccagacccccaccccttcagccacatccttcttttctgggaagagccccgtcaccacactgctt

SEQ ID NO: 34751 - DNA, 201 bp, Homo sapiens
aggtgaacataaaggatttggtgaaacatttgtaagggtaggagttgaaaactgcagttcccagtgccacggaagtgtgattggagcctgcagataatgcycagccatcctcccatcctgcactttagccagctgcagggcgggcaaggcaaggaaagctgcttccctggaagtgtatcactttctccggcagctgggaag

SEQ ID NO: 34752 - DNA, 201 bp, Homo sapiens
  misc_feature (1)...(201): n = A,T,C or G
cccatatggcatttgacagacaagaagcgagagaggatgcaaatcaagagaaatacgaacagtgttcctgaaaccgctccagctgcaatccctgagaccanaagaaacgcagagttcctcacctgtaatatacccacatcaaatgcctcaaataacatggtaaccacagaaaaagtggagaatgggcaggaacctgtcata

SEQ ID NO: 34753 - DNA, 201 bp, Homo sapiens
agcaatagcagaggtttcacccggcaggatgacacagaccacttcccagggagcacgggcatgccttggaatattgccaagcttccagctgcctcttctcytaaagcattcctaggaatattttccccgccaatgctgggcgtacaccctagccaacgggacaaatcctagagggtataaaatcatctctgctcagataat

SEQ ID NO: 34754 - DNA, 201 bp, Homo sapiens
gacaaatcctagagggtataaaatcatctctgctcagataatcatgacttagcaagaataagggcaaaaaatcctgttggcttaacgtcactgttccaccyggtgtaatatctctcatgacagtgacaccaagggaagttgactaagtcacatgtaaattaggagtgttttaaagaatgccatagatgttgattcttaact

SEQ ID NO: 34755 - DNA, 201 bp, Homo sapiens
agtggaaaatcagaagaatcatcccactattccacagagaaagaatcagagaagactgcagagtcccagacccccaccccttcagccacatccttcttttstgggaagagccccgtcaccacactgcttgagtgtatgcacaaattggggaactcctgcgaattccgtctcctgtccaaagaaggccctgcccatgaaccc

SEQ ID NO: 34756 - DNA, 201 bp, Homo sapiens
ttccctcccaggactccggccaaggtttccagtactacttgcctccagtaccagaggcaggcaagtggacatcaggggtgtccccaggggcgtgcatctcrgaagtcaggggctccagagagggttccagcatccttcaccacgtggcaggagtctgccacagagaggtgttgattgcctttcctcacatttccaggaact

SEQ ID NO: 34757 - DNA, 201 bp, Homo sapiens
gactcgtgtgttcagagcctttggcctctctgtggagtctggctctctggctcctgtgcattctttgaatagtcactcgtaaaaactgtcagtgcttgaarctgtttcctttactcatgttgaagggactttgttggcttttagagtgttggtcatgactccaagagcagagcagggaagagcccaagcatagacttggtg

SEQ ID NO: 34758 - DNA, 201 bp, Homo sapiens
ccgggcaatgcctcgcgggcgcaatgaatccgcggcaggggtattccctcagcggatactacacccatccatttcaaggctatgagcacagacagctcagrtaccagcagcctgggccaggatcttcccccagtagtttcctgcttaagcaaatagaatttctcaaggggcagctcccagaagcaccggtgattggaaagc

SEQ ID NO: 34759 - DNA, 201 bp, Homo sapiens
ggctactgtgcattccttgaataatcacttgtaaaaattgtcagtgcttgaagctgtttcctttactcacattgaagggacttcgttggttttttggagtyttggttgtgactccaagagcagagtgaggaagacccccaagcatagactcgggtactgtgatgatggctgcagtccagttttatgattctgcttttatgt

SEQ ID NO: 34760 - DNA, 201 bp, Homo sapiens
cctccttgctcggccgcaagattctggccgccatcattatgaaaaaagactctgaggacatgggtgtcgtcgtcagcttgggaacagggaatcgctgtgtraaaggagattctctcagcctaaaaggagaaactgtcaatgactgccatgcagaaataatctcccggagaggcttcatcaggtttctctacagtgagttaa

SEQ ID NO: 34761 - DNA, 201 bp, Homo sapiens
gatttaaaattcaggcatacttttccatttatccaagtgctttcatttttccagatggcttcagaagtaggctcgtgggcagggcgcagacctgatctttmtagggttgacatagaaagcagtagttgtgggtgaaagggcaggttgtcttcaaactctgtgaggtagaatcctttgtctatacctccatgaacattgact

SEQ ID NO: 34762 - DNA, 201 bp, Homo sapiens
ttactcatgttgaagggactttgttggcttttagagtgttggtcatgactccaagagcagagcagggaagagcccaagcatagacttggtgccgtggtgawggctgcagtccagttttgtgatgctgcttttacgtgtccctcgataacagtcagctagacacactcaggaggactactgaggctctgcgaccttcaggag

SEQ ID NO: 34763 - DNA, 201 bp, Homo sapiens
gggaacgtgctgagccagcaccctcagatgatttccctccaaactgctgactaggtcatcctctgtctggtagagacattcacatctttgcttttattctrtgctctctgtacttttgaccaaaaattgaccaaagtaagaaaatgcaagttctaaaaatagactaaggatgcctttgcagaacaccaaagcatcccaagg

SEQ ID NO: 34764 - DNA, 201 bp, Homo sapiens
gttgtaggaagagagcgaggcatccctgaattccacgcatctgctggaaacgagccgtgtcagatcgcacatccctgcgcccccatgcccccatgcccctytgagtcacacaggacagaggaggcagagcttctgcccactgttatcttcactttctttgtccagtcttttgtttttaataagcagtgaccctccctactc

SEQ ID NO: 34765 - DNA, 201 bp, Homo sapiens
tccctgcgcccccatgcccccatgcccctctgagtcacacaggacagaggaggcagagcttctgcccactgttatcttcactttctttgtccagtcttttktttttaataagcagtgaccctccctactcttctttttaatgatttttgtagttgatttgtctgaactgtggctactgtgcattccttgaataatcacttg

SEQ ID NO: 34766 - DNA, 201 bp, Homo sapiens
gtgcttgaagctgtttcctttactcacattgaagggacttcgttggttttttggagtcttggttgtgactccaagagcagagtgaggaagacccccaagcrtagactcgggtactgtgatgatggctgcagtccagttttatgattctgcttttatgtgtcccttgataacagtgacttaacaatatacattcctcataaa

SEQ ID NO: 34767 - DNA, 201 bp, Homo sapiens
tgacagatggattagggtgtgtcatactagggtgtgagagaggtaggtcgtagcattcctcatcacatggtcaggggatttttttttctcctttttttttytttttaagccataattggtgatactgaaaactttgggttcccatttatcctgctttctttgggattgctaggcaaggtctggccaggccccccttttttc

SEQ ID NO: 34768 - DNA, 201 bp, Homo sapiens; identical to SEQ ID NO: 34747

SEQ ID NO: 34769 - DNA, 201 bp, Homo sapiens; identical to SEQ ID NO: 34748

SEQ ID NO: 34770 - DNA, 201 bp, Homo sapiens; identical to SEQ ID NO: 34749

SEQ ID NO: 34771 - DNA, 201 bp, Homo sapiens; identical to SEQ ID NO: 34750

SEQ ID NO: 34772 - DNA, 201 bp, Homo sapiens; identical to SEQ ID NO: 34751

SEQ ID NO: 34773 - DNA, 201 bp, Homo sapiens; identical to SEQ ID NO: 34752
  misc_feature (1)...(201): n = A,T,C or G

SEQ ID NO: 34774 - DNA, 201 bp, Homo sapiens; identical to SEQ ID NO: 34753

SEQ ID NO: 34775 - DNA, 201 bp, Homo sapiens
gacaaatcctagagggtataaaatcatctctgctcagataatcatgacttagcaagaataagggcaaaaaatcctgttggcttaacgtcactgttccaccyggtgtaatatctctcatgacagtgacaccaagggaagttgactaagtcacatgtaaattaggagtgttttaaagaatgccatagatgttgtcttcaaact

SEQ ID NO: 34776 - DNA, 201 bp, Homo sapiens; identical to SEQ ID NO: 34755

SEQ ID NO: 34777 - DNA, 201 bp, Homo sapiens; identical to SEQ ID NO: 34756

SEQ ID NO: 34778 - DNA, 201 bp, Homo sapiens; identical to SEQ ID NO: 34757

SEQ ID NO: 34779 - DNA, 201 bp, Homo sapiens
cgggtgtccggccgtgtcccgaggaagtgcaagacccggggtattccctcagcggatactacacccatccatttcaaggctatgagcacagacagctcagrtaccagcagcctgggccaggatcttcccccagtagtttcctgcttaagcaaatagaatttctcaaggggcagctcccagaagcaccggtgattggaaagc

SEQ ID NO: 34780 - DNA, 201 bp, Homo sapiens; identical to SEQ ID NO: 34759

SEQ ID NO: 34781 - DNA, 201 bp, Homo sapiens; identical to SEQ ID NO: 34760

SEQ ID NO: 34782 - DNA, 201 bp, Homo sapiens; identical to SEQ ID NO: 34762

SEQ ID NO: 34783 - DNA, 201 bp, Homo sapiens; identical to SEQ ID NO: 34763

SEQ ID NO: 34784 - DNA, 201 bp, Homo sapiens; identical to SEQ ID NO: 34764

SEQ ID NO: 34785 - DNA, 201 bp, Homo sapiens; identical to SEQ ID NO: 34765

SEQ ID NO: 34786 - DNA, 201 bp, Homo sapiens; identical to SEQ ID NO: 34766

SEQ ID NO: 34787 - DNA, 201 bp, Homo sapiens; identical to SEQ ID NO: 34767

SEQ ID NO: 34788 - DNA, 201 bp, Homo sapiens; identical to SEQ ID NO: 34747

SEQ ID NO: 34789 - DNA, 201 bp, Homo sapiens; identical to SEQ ID NO: 34748

SEQ ID NO: 34790 - DNA, 201 bp, Homo sapiens; identical to SEQ ID NO: 34749

SEQ ID NO: 34791 - DNA, 201 bp, Homo sapiens; identical to SEQ ID NO: 34750

SEQ ID NO: 34792 - DNA, 201 bp, Homo sapiens; identical to SEQ ID NO: 34751

SEQ ID NO: 34793 - DNA, 201 bp, Homo sapiens; identical to SEQ ID NO: 34752
  misc_feature (1)...(201): n = A,T,C or G

SEQ ID NO: 34794 - DNA, 201 bp, Homo sapiens; identical to SEQ ID NO: 34753

SEQ ID NO: 34795 - DNA, 201 bp, Homo sapiens; identical to SEQ ID NO: 34754

SEQ ID NO: 34796 - DNA, 201 bp, Homo sapiens; identical to SEQ ID NO: 34755

SEQ ID NO: 34797 - DNA, 201 bp, Homo sapiens; identical to SEQ ID NO: 34756

SEQ ID NO: 34798 - DNA, 201 bp, Homo sapiens; identical to SEQ ID NO: 34757

SEQ ID NO: 34799 - DNA, 201 bp, Homo sapiens; identical to SEQ ID NO: 34779

SEQ ID NO: 34800 - DNA, 201 bp, Homo sapiens; identical to SEQ ID NO: 34759

SEQ ID NO: 34801 - DNA, 201 bp, Homo sapiens; identical to SEQ ID NO: 34760

SEQ ID NO: 34802 - DNA, 201 bp, Homo sapiens; identical to SEQ ID NO: 34761

SEQ ID NO: 34803 - DNA, 201 bp, Homo sapiens; identical to SEQ ID NO: 34762

SEQ ID NO: 34804 - DNA, 201 bp, Homo sapiens; identical to SEQ ID NO: 34763

SEQ ID NO: 34805 - DNA, 201 bp, Homo sapiens; identical to SEQ ID NO: 34764

SEQ ID NO: 34806 - DNA, 201 bp, Homo sapiens; identical to SEQ ID NO: 34765

SEQ ID NO: 34807 - DNA, 201 bp, Homo sapiens; identical to SEQ ID NO: 34766

SEQ ID NO: 34808 - DNA, 201 bp, Homo sapiens; identical to SEQ ID NO: 34767

SEQ ID NO: 34809 - DNA, 201 bp, Homo sapiens; identical to SEQ ID NO: 34747

SEQ ID NO: 34810 - DNA, 201 bp, Homo sapiens; identical to SEQ ID NO: 34748

SEQ ID NO: 34811 - DNA, 201 bp, Homo sapiens
actccatggcttctgataaccagcctgaaggtatgatctcagagtcacttgataacttggaatccatgatgcccaacaaggtcaggaagattggcgagctygtgagatacctgaacaccaaccctgtgggtggccttttggagtacgcccgctcccatggctttgctgctgaattcaagttggtcgaccagtccggacctc

SEQ ID NO: 34812 - DNA, 201 bp, Homo sapiens; identical to SEQ ID NO: 34750

SEQ ID NO: 34813 - DNA, 201 bp, Homo sapiens; identical to SEQ ID NO: 34751

SEQ ID NO: 34814 - DNA, 201 bp, Homo sapiens; identical to SEQ ID NO: 34752
  misc_feature (1)...(201): n = A,T,C or G

SEQ ID NO: 34815 - DNA, 201 bp, Homo sapiens; identical to SEQ ID NO: 34753

SEQ ID NO: 34816 - DNA, 201 bp, Homo sapiens; identical to SEQ ID NO: 34754

SEQ ID NO: 34817 - DNA, 201 bp, Homo sapiens; identical to SEQ ID NO: 34755

SEQ ID NO: 34818 - DNA, 201 bp, Homo sapiens; identical to SEQ ID NO: 34756

SEQ ID NO: 34819 - DNA, 201 bp, Homo sapiens; identical to SEQ ID NO: 34757

SEQ ID NO: 34820 - DNA, 201 bp, Homo sapiens; identical to SEQ ID NO: 34758

SEQ ID NO: 34821 - DNA, 201 bp, Homo sapiens; identical to SEQ ID NO: 34759

SEQ ID NO: 34822 - DNA, 201 bp, Homo sapiens; identical to SEQ ID NO: 34760

SEQ ID NO: 34823 - DNA, 201 bp, Homo sapiens
gagtgctcccagcaagaaagtggcaaagcagatggccgcagaggaagccatgaaggccctgcatggggaggcgaccaactccatggcttctgataaccagyctgaaggtatgatctcagagtcacttgataacttggaatccatgatgcccaacaaggtcaggaagattggcgagctcgtgagatacctgaacaccaaccc

SEQ ID NO: 34824 - DNA, 201 bp, Homo sapiens; identical to SEQ ID NO: 34761

SEQ ID NO: 34825 - DNA, 201 bp, Homo sapiens; identical to SEQ ID NO: 34762

SEQ ID NO: 34826 - DNA, 201 bp, Homo sapiens; identical to SEQ ID NO: 34763

SEQ ID NO: 34827 - DNA, 201 bp, Homo sapiens; identical to SEQ ID NO: 34764

SEQ ID NO: 34828 - DNA, 201 bp, Homo sapiens; identical to SEQ ID NO: 34765

SEQ ID NO: 34829 - DNA, 201 bp, Homo sapiens; identical to SEQ ID NO: 34766

SEQ ID NO: 34830 - DNA, 201 bp, Homo sapiens; identical to SEQ ID NO: 34767

SEQ ID NO: 34831 - DNA, 201 bp, Homo sapiens; identical to SEQ ID NO: 34747

SEQ ID NO: 34832 - DNA, 201 bp, Homo sapiens; identical to SEQ ID NO: 34748

SEQ ID NO: 34833 - DNA, 201 bp, Homo sapiens; identical to SEQ ID NO: 34811

SEQ ID NO: 34834 - DNA, 201 bp, Homo sapiens; identical to SEQ ID NO: 34750

SEQ ID NO: 34835 - DNA, 201 bp, Homo sapiens; identical to SEQ ID NO: 34751

SEQ ID NO: 34836 - DNA, 201 bp, Homo sapiens; identical to SEQ ID NO: 34752
  misc_feature (1)...(201): n = A,T,C or G

SEQ ID NO: 34837 - DNA, 201 bp, Homo sapiens; identical to SEQ ID NO: 34753

SEQ ID NO: 34838 - DNA, 201 bp, Homo sapiens; identical to SEQ ID NO: 34775

SEQ ID NO: 34839 - DNA, 201 bp, Homo sapiens; identical to SEQ ID NO: 34755

SEQ ID NO: 34840 - DNA, 201 bp, Homo sapiens; identical to SEQ ID NO: 34756

SEQ ID NO: 34841 - DNA, 201 bp, Homo sapiens; identical to SEQ ID NO: 34757

SEQ ID NO: 34842 - DNA, 201 bp, Homo sapiens; identical to SEQ ID NO: 34779

SEQ ID NO: 34843 - DNA, 201 bp, Homo sapiens; identical to SEQ ID NO: 34759

SEQ ID NO: 34844 - DNA, 201 bp, Homo sapiens; identical to SEQ ID NO: 34760

SEQ ID NO: 34845 - DNA, 201 bp, Homo sapiens; identical to SEQ ID NO: 34823

SEQ ID NO: 34846 - DNA, 201 bp, Homo sapiens; identical to SEQ ID NO: 34762

SEQ ID NO: 34847 - DNA, 201 bp, Homo sapiens; identical to SEQ ID NO: 34763

SEQ ID NO: 34848 - DNA, 201 bp, Homo sapiens; identical to SEQ ID NO: 34764

SEQ ID NO: 34849 - DNA, 201 bp, Homo sapiens; identical to SEQ ID NO: 34765

SEQ ID NO: 34850 - DNA, 201 bp, Homo sapiens; identical to SEQ ID NO: 34766

SEQ ID NO: 34851 - DNA, 201 bp, Homo sapiens; identical to SEQ ID NO: 34767

SEQ ID NO: 34852 - DNA, 201 bp, Homo sapiens; identical to SEQ ID NO: 34747

SEQ ID NO: 34853 - DNA, 201 bp, Homo sapiens; identical to SEQ ID NO: 34748

SEQ ID NO: 34854 - DNA, 201 bp, Homo sapiens; identical to SEQ ID NO: 34811

SEQ ID NO: 34855 - DNA, 201 bp, Homo sapiens; identical to SEQ ID NO: 34750

SEQ ID NO: 34856 - DNA, 201 bp, Homo sapiens; identical to SEQ ID NO: 34751

SEQ ID NO: 34857 - DNA, 201 bp, Homo sapiens; identical to SEQ ID NO: 34752
  misc_feature (1)...(201): n = A,T,C or G

SEQ ID NO: 34858 - DNA, 201 bp, Homo sapiens; identical to SEQ ID NO: 34753

SEQ ID NO: 34859 - DNA, 201 bp, Homo sapiens; identical to SEQ ID NO: 34775

SEQ ID NO: 34860 - DNA, 201 bp, Homo sapiens; identical to SEQ ID NO: 34755

SEQ ID NO: 34861 - DNA, 201 bp, Homo sapiens; identical to SEQ ID NO: 34756

SEQ ID NO: 34862 - DNA, 201 bp, Homo sapiens; identical to SEQ ID NO: 34757

SEQ ID NO: 34863 - DNA, 201 bp, Homo sapiens; identical to SEQ ID NO: 34779

SEQ ID NO: 34864 - DNA, 201 bp, Homo sapiens; identical to SEQ ID NO: 34759

SEQ ID NO: 34865 - DNA, 201 bp, Homo sapiens; identical to SEQ ID NO: 34760

SEQ ID NO: 34866 - DNA, 201 bp, Homo sapiens; identical to SEQ ID NO: 34823

SEQ ID NO: 34867 - DNA, 201 bp, Homo sapiens; identical to SEQ ID NO: 34762

SEQ ID NO: 34868 - DNA, 201 bp, Homo sapiens; identical to SEQ ID NO: 34763

SEQ ID NO: 34869 - DNA, 201 bp, Homo sapiens; identical to SEQ ID NO: 34764

SEQ ID NO: 34870 - DNA, 201 bp, Homo sapiens; identical to SEQ ID NO: 34765

SEQ ID NO: 34871 - DNA, 201 bp, Homo sapiens; identical to SEQ ID NO: 34766

SEQ ID NO: 34872 - DNA, 201 bp, Homo sapiens; identical to SEQ ID NO: 34767

SEQ ID NO: 34873 - DNA, 201 bp, Homo sapiens; identical to SEQ ID NO: 34747

SEQ ID NO: 34874 - DNA, 201 bp, Homo sapiens; identical to SEQ ID NO: 34748

SEQ ID NO: 34875 - DNA, 201 bp, Homo sapiens; identical to SEQ ID NO: 34811

SEQ ID NO: 34876 - DNA, 201 bp, Homo sapiens; identical to SEQ ID NO: 34750

SEQ ID NO: 34877 - DNA, 201 bp, Homo sapiens; identical to SEQ ID NO: 34751

SEQ ID NO: 34878 - DNA, 201 bp, Homo sapiens; identical to SEQ ID NO: 34752
  misc_feature (1)...(201): n = A,T,C or G

SEQ ID NO: 34879 - DNA, 201 bp, Homo sapiens; identical to SEQ ID NO: 34753

SEQ ID NO: 34880 - DNA, 201 bp, Homo sapiens; identical to SEQ ID NO: 34754

SEQ ID NO: 34881 - DNA, 201 bp, Homo sapiens; identical to SEQ ID NO: 34755

SEQ ID NO: 34882 - DNA, 201 bp, Homo sapiens; identical to SEQ ID NO: 34756

SEQ ID NO: 34883 - DNA, 201 bp, Homo sapiens; identical to SEQ ID NO: 34757

SEQ ID NO: 34884 - DNA, 201 bp, Homo sapiens; identical to SEQ ID NO: 34758

SEQ ID NO: 34885 - DNA, 201 bp, Homo sapiens; identical to SEQ ID NO: 34759

SEQ ID NO: 34886 - DNA, 201 bp, Homo sapiens; identical to SEQ ID NO: 34760

SEQ ID NO: 34887 - DNA, 201 bp, Homo sapiens; identical to SEQ ID NO: 34823

SEQ ID NO: 34888 - DNA, 201 bp, Homo sapiens; identical to SEQ ID NO: 34761

SEQ ID NO: 34889 - DNA, 201 bp, Homo sapiens; identical to SEQ ID NO: 34762

SEQ ID NO: 34890 - DNA, 201 bp, Homo sapiens; identical to SEQ ID NO: 34763

SEQ ID NO: 34891 - DNA, 201 bp, Homo sapiens; identical to SEQ ID NO: 34764

SEQ ID NO: 34892 - DNA, 201 bp, Homo sapiens; identical to SEQ ID NO: 34765

SEQ ID NO: 34893 - DNA, 201 bp, Homo sapiens; identical to SEQ ID NO: 34766

SEQ ID NO: 34894 - DNA, 201 bp, Homo sapiens; identical to SEQ ID NO: 34767

SEQ ID NO: 34895 - DNA, 201 bp, Homo sapiens
tccttttgaccacttgccaagtccctgtctctttcagacacagacaagcttcatttaaattatttcatctgatcattatcatttataactttattgttacttcttcatcagtttttccttttgaaaggtgtatgaattcattacatttttattctaatgtattatctgtagattagaagataaaatcaagcatgtatctgc

SEQ ID NO: 34896 - DNA, 201 bp, Homo sapiens
ccttttgaccacttgccaagtccctgtctctttcagacacagacaagcttcatttaaattatttcatctgatcattatcatttataactttattgttacttcttcatcagtttttccttttgaaaggtgtatgaattcattacatttttattctaatgtattatctgtagattagaagataaaatcaagcatgtatctgcc

SEQ ID NO: 34897 - DNA, 201 bp, Homo sapiens
tgtagattagaagataaaatcaagcatgtatctgcctatactttgtgagttcacctgtctttatactcaaaagtgtcccttaatagtgtccttccctgaartaaatacctaagggagtgtaacagtctctggaggaccactttgagcctttggaagttaaggtttcctcagccacctgccgaacagtttctcatgtggtcc

SEQ ID NO: 34898 - DNA, 201 bp, Homo sapiens
tttgtaagtaggctggataaatggtgcttaaatggtaatgtactccacttcttcctattggaagattaacattatttaccaagaaggacttaagggagtarggggcgcagattagcattgctcaagagtatgtaaaaaaaaaaaaaaaaaaaaagaaccaaaccactggaaataatcaaatgcaaaaaggtaacaaattca

SEQ ID NO: 34899 - DNA, 201 bp, Homo sapiens
tcatgctttagtgaattcttcatagatagtatatataaaagtacattttaatagaaagccagggttttaaggaatttcacatgtataaggtggctccatakctttatttgtaagtaggctggataaatggtgcttaaatggtaatgtactccacttcttcctattggaagattaacattatttaccaagaaggacttaagg

SEQ ID NO: 34900 - DNA, 201 bp, Homo sapiens
ccagaattcaacctgtatttataaatgtataatgtatttagctactttttggtttaaatgaacttgttgggttagcttggtaaatgttataatttttactrttttctacaaagaaaatattttctaatttaagttggagctatctgtgcagcagtttctctacagttgtgcataaatgtttttactataaaatgagctaat

SEQ ID NO: 34901 - DNA, 201 bp, Homo sapiens
aatgtataatgtatttagctactttttggtttaaatgaacttgttgggttagcttggtaaatgttataatttttactattttctacaaagaaaatattttytaatttaagttggagctatctgtgcagcagtttctctacagttgtgcataaatgtttttactataaaatgagctaatgtataaaatactgctgtatacca

SEQ ID NO: 34902 - DNA, 201 bp, Homo sapiens
gggggtgtgcatctgcttttatcagcacaaggaagaatatcagttagtacaagtggagcaaaaagcgggaattaagttcaaacgaataggtgttccttctkcaacagaaataataaaagcttccagcaaagatgccatcaggcttttggattccgtgcctcccactgccattagtcacttcaaacaatcagctgagaagct

SEQ ID NO: 34903 - DNA, 201 bp, Homo sapiens
ctccttttgaccacttgccaagtccctgtctctttcagacacagacaagcttcatttaaattatttcatctgatcattatcatttataactttattgttacttcttcatcagtttttccttttgaaaggtgtatgaattcattacatttttattctaatgtattatctgtagattagaagataaaatcaagcatgtatctg

SEQ ID NO: 34904 - DNA, 201 bp, Homo sapiens
gagctcacctgctcactggccctcagattaaggtcattgcttcctggaggatgcccgagttttacagctggttcaagggccttaatgatctcatggaataygcaaagcaacatcggattcccatcccagtcactctcaagaacccgtggagcatagacgagaacctcatgcatatcagctacgaggctggaattctggaga

SEQ ID NO: 34905 - DNA, 201 bp, Homo sapiens
agaatctttgtaccaaactgcccacatgagggtgaagagatttcctcaaaagacttaaatgacctggattgatcagagagaattgaactgtgacctttaaracttctagactaattcttttagttgatagagattcatttagtcaaagacaaaagctttaactgtgagggcacagccttgaagtgggagtgatgagattct

SEQ ID NO: 34906 - DNA, 201 bp, Homo sapiens
caaatacaagtctcactcttcacactgagcctgtaccactgttgtaacatgggaagacgtgaagaagaaataatctgagctttaattatttatatttggayataaggtctgcttaaataaagaatctttgtaccaaactgcccacatgagggtgaagagatttcctcaaaagacttaaatgacctggattgatcagagaga

SEQ ID NO: 34907 - DNA, 201 bp, Homo sapiens
gtgaccaatgagctgctggccggagtcctgcttatgatgcacaactttgaacactactttgggtttttccattacatccgggaagcactaaaaagtgacaractggcacagttgaaagagctcatccacaggcaagcatcttgagatcttgcaaatacaagtctcactcttcacactgagcctgtaccactgttgtaacat

SEQ ID NO: 34908 - DNA, 201 bp, Homo sapiens
aataacatcatttgaaattaatctgaaggaaaaaaagtaccaggaggactttaacccgctggtgagaggatgttcctgttactgctgtaagaatcacactygggcatacatccaccatctgctggtgaccaatgagctgctggccggagtcctgcttatgatgcacaactttgaacactactttgggtttttccattacat

SEQ ID NO: 34909 - DNA, 201 bp, Homo sapiens
aaagaggtttaattggctcatggctctgcaggctttacaggaagcatggtactggcatctgcttggtttctggggaggcctccggaagcttatagtcatgrcagaaggtgaagggggagcaggcacatcacatgacaaaagcaggaacaagactcagagcaagaagtcacttatcaccaaggggatggcccaggccattca

SEQ ID NO: 34910 - DNA, 201 bp, Homo sapiens; identical to SEQ ID NO: 34905

SEQ ID NO: 34911 - DNA, 201 bp, Homo sapiens; identical to SEQ ID NO: 34906

SEQ ID NO: 34912 - DNA, 201 bp, Homo sapiens; identical to SEQ ID NO: 34907

SEQ ID NO: 34913 - DNA, 201 bp, Homo sapiens; identical to SEQ ID NO: 34908

SEQ ID NO: 34914 - DNA, 201 bp, Homo sapiens; identical to SEQ ID NO: 34909

SEQ ID NO: 34915 - DNA, 201 bp, Homo sapiens; identical to SEQ ID NO: 34905

SEQ ID NO: 34916 - DNA, 201 bp, Homo sapiens; identical to SEQ ID NO: 34906

SEQ ID NO: 34917 - DNA, 201 bp, Homo sapiens; identical to SEQ ID NO: 34907

SEQ ID NO: 34918 - DNA, 201 bp, Homo sapiens; identical to SEQ ID NO: 34908

SEQ ID NO: 34919 - DNA, 201 bp, Homo sapiens; identical to SEQ ID NO: 34909

SEQ ID NO: 34920 - DNA, 201 bp, Homo sapiens
acttataaagcagaataaaggggagaacagtagtagttgatctaacccagattagacatgaataccagcatatgtttgcagagtcccacagttttgattcytcttataactttttgaggtgcaaaaggaaggtaccagaactggaatcacatgtaatcaatcagtgtgattttcccctcataccacacagccataggctgc

SEQ ID NO: 34921 - DNA, 201 bp, Homo sapiens
aaagttcttattagataagtaaataactaaagaaagaatacaattactaaactctgatggctttgtattattttaaagaaatgaagtttaactttatacartgaagctaagctaggcaagctcaagaaggaaaaaaaaatcttgaacattatttttttttgcctgacttacttattcattaaattttgaaggttttccact

SEQ ID NO: 34922 - DNA, 201 bp, Homo sapiens
gctaaacataaagttcttattagataagtaaataactaaagaaagaatacaattactaaactctgatggctttgtattattttaaagaaatgaagtttaahtttatacaatgaagctaagctaggcaagctcaagaaggaaaaaaaaatcttgaacattatttttttttgcctgacttacttattcattaaattttgaagg

SEQ ID NO: 34923 - DNA, 201 bp, Homo sapiens
tttttaaaataagctagttttctgaggtgttttcacacgtctttttatagttacttcatcttagatttttgaagggatatgacttcctactaaggatttartttaccacaacaattctgactacaataagacattttgaggaggatatttggctactgtaaacatggctggtggaaaatcacgattgtggcttgatgtggc

SEQ ID NO: 34924 - DNA, 201 bp, Homo sapiens
tggttttaaatacaacttttctgacctcaagagtcctttgcactactatgggaatgccaccatgtctttgatgaataagaacgcgtatcacaatgtgactrcagagcagctctttttgaaggacattatagaaaaaaacctcgtaatcaacttgactcaagattgactctacagactcagaagatgatgctaacagtgtta

SEQ ID NO: 34925 - DNA, 201 bp, Homo sapiens
gatatgacttcctactaaggatttagtttaccacaacaattctgactacaataagacattttgaggaggatatttggctactgtaaacatggctggtggaraatcacgattgtggcttgatgtggcaagccgaaaccacttggctctggaaatctaagttcatactggtttaattaagctctctcctgacaacccccagaa

SEQ ID NO: 34926 - DNA, 150 bp, Homo sapiens
catataaatgtagtaaaaaaaaaaaaaaaaaatagaaaacctctactataaaaaccaatgaactaaaaagaagtataaagcagaaaaaccatttgaatcasgctcagctcttcatctggaaagtaaagtttatataaaagtagtaaaaac

SEQ ID NO: 34927 - DNA, 201 bp, Homo sapiens
tgtcagatatggttactttcacattttcagttgttacttgattgtctccaaagccgtatatgtatcagacatataaatgtagtaaaaaaaaaaaaaaaaaatagaaaacctctactataaaaaccaatgaactaaaaagaagtataaagcagaaaaaccatttgaatcaggctcagctcttcatctggaaagtaaagttta

SEQ ID NO: 34928 - DNA, 201 bp, Homo sapiens
attctgggagaatatcactgacgctcaaaccatttttatttccaatatgtatttcaatacatgtttgtttccacttttcccagtgccacacacacacacamaaaaacaaaacaaaacaaaaaaaaacagtcacaagttggattacattagaattggtgccacagttgactttaaaagcattttaataaccacccaactctt

SEQ ID NO: 34929 - DNA, 201 bp, Homo sapiens
cacttttcccagtgccacacacacacacacaaaaacaaaacaaaacaaaaaaaaacagtcacaagttggattacattagaattggtgccacagttgactttaaaagcattttaataaccacccaactcttagattttgcagtttagggacttcaagttcagaaccaaaaagcagagaatcgtttcatgtgacatgatgttt

SEQ ID NO: 34930 - DNA, 201 bp, Homo sapiens
ggtgattcataaccaccagcttaatttctgtgaatactgtatatttaacttatgaaaaccaagaaatgtaaagataacaggaaaataagttttgattgcawtgtttttaaaataagctagttttctgaggtgttttcacacgtctttttatagttacttcatcttagatttttgaagggatatgacttcctactaaggatt

SEQ ID NO: 34931 - DNA, 201 bp, Homo sapiens
atgaataagaacgcgtatcacaatgtgactgcagagcagctctttttgaaggacattatagaaaaaaacctcgtaatcaacttgactcaagattgactctrcagactcagaagatgatgctaacagtgttagttttatttttgtactgcaatttttagtttaaaatatgttggatgcactcgtcaaataattatgtatact

SEQ ID NO: 34932 - DNA, 201 bp, Homo sapiens
gtttccacttttcccagtgccacacacacacacacaaaaacaaaacaaaacaaaaaaaaacagtcacaagttggattacattagaattggtgccacagttractttaaaagcattttaataaccacccaactcttagattttgcagtttagggacttcaagttcagaaccaaaaagcagagaatcgtttcatgtgacatga

SEQ ID NO: 34933 - DNA, 201 bp, Homo sapiens
tgcgggtttgcactgcccggcatttgcaagtgaggaagcagcacaaccctgggttttagataatttctaacagagaggccccagcaattcagcaggcagcrtcctgagtctttggcagcctggtccctctttcgcaaattctccacctttgcgaacagagggtctttaggacacagattcttaaaagtgcaggtgagccag

SEQ ID NO: 34934 - DNA, 201 bp, Homo sapiens
ctgtggaaatgaaacggagaaataagatccagccttgtttatcaaagccagcttttgcctctctgctgaggtttcatcagtttcacccttttctgtgtgcrgctgattttagaaagattgcttccttgtatggtagcgataagtttgatttgccctatgggatgagaacatcagcggaatattttcgacttgctctttcaa

SEQ ID NO: 34935 - DNA, 201 bp, Homo sapiens
atgtaaccaaaggccatctggaggtaggggaatgagaggtgaagaaacagaaaaatagaggttataaggatggaactaaaagttgtcagaagaggtatgasctgaagaaagaattactctcttttgaccaataaatacaattgggaaacactggaaaaccatggcttgattactgacaaccaacctgcctctctaaagagg

SEQ ID NO: 34936 - DNA, 201 bp, Homo sapiens
cgaataaacccattgttcaatgcaaagtgcaaacagtgaaacatgaacttaaataaactggactagacccatcacatccaacaggatctatttagatttayagcatttaataaagtataagtcagaattcacaatatcttaaactgtgctgtttcctaagatcaagtaacagccaagtcagtgtaattttatgaaacctgt

SEQ ID NO: 34937 - DNA, 201 bp, Homo sapiens; identical to SEQ ID NO: 34920

SEQ ID NO: 34938 - DNA, 201 bp, Homo sapiens; identical to SEQ ID NO: 34921

SEQ ID NO: 34939 - DNA, 201 bp, Homo sapiens; identical to SEQ ID NO: 34922

SEQ ID NO: 34940 - DNA, 201 bp, Homo sapiens; identical to SEQ ID NO: 34923

SEQ ID NO: 34941 - DNA, 201 bp, Homo sapiens
cctgcactgaccaccgttctccagccagcctctgctgcagctagttctctaaatgttctggccttgtctcttgaaagttctgtacttattcccccaccccmcaacccgcttaccttggttttatccctgctcattgaaccttgagtcccttgtcttggttaactgactcacactgactgtgtggtgcccgcccacttttac

SEQ ID NO: 34942 - DNA, 201 bp, Homo sapiens; identical to SEQ ID NO: 34924

SEQ ID NO: 34943 - DNA, 201 bp, Homo sapiens
actcacccgaaagagaagggcttttttttttttttttccatcaaatctactgtgaagagcatgcccaggagcaagtcacaccacttgagggtacgatgtgrtcatcatgttccccaagtgatccagcagacctgcactgaccaccgttctccagccagcctctgctgcagctagttctctaaatgttctggccttgtctct

SEQ ID NO: 34944 - DNA, 201 bp, Homo sapiens; identical to SEQ ID NO: 34925

SEQ ID NO: 34945 - DNA, 201 bp, Homo sapiens
gaggaggccaatggcgtgtccatagatcatgttcagcctccaagtggtctcataatcaacaaagaatctgaagtttacaagatgcttcaggagaaacaggrgttgaatgaacccctgaaacagtctacctctttcctgattttgcaggaaatcctggagtctgagataaaaggggatctcaacaaccctcaggattcagaa

SEQ ID NO: 34946 - DNA, 150 bp, Homo sapiens; identical to SEQ ID NO: 34926

SEQ ID NO: 34947 - DNA, 201 bp, Homo sapiens
caatactttgagataccatattgctggtatttcaaaaactgctgccagcagggaggaggccaatggcgtgtccatagatcatgttcagcctccaagtggtstcataatcaacaaagaatctgaagtttacaagatgcttcaggagaaacaggagttgaatgaacccctgaaacagtctacctctttcctgattttgcagga

SEQ ID NO: 34948 - DNA, 201 bp, Homo sapiens; identical to SEQ ID NO: 34927

SEQ ID NO: 34949 - DNA, 201 bp, Homo sapiens
catgtttgtaaagctgcggggaccatcatcccctccctgaatgttacgtgtgcactgattgtgacactcacccgaaagagaagggcttttttttttttttttccatcaaatctactgtgaagagcatgcccaggagcaagtcacaccacttgagggtacgatgtggtcatcatgttccccaagtgatccagcagacctgca

SEQ ID NO: 34950 - DNA, 201 bp, Homo sapiens; identical to SEQ ID NO: 34928

SEQ ID NO: 34951 - DNA, 201 bp, Homo sapiens; identical to SEQ ID NO: 34929

SEQ ID NO: 34952 - DNA, 201 bp, Homo sapiens; identical to SEQ ID NO: 34930

SEQ ID NO: 34953 - DNA, 201 bp, Homo sapiens; identical to SEQ ID NO: 34931

SEQ ID NO: 34954 - DNA, 201 bp, Homo sapiens; identical to SEQ ID NO: 34932

SEQ ID NO: 34955 - DNA, 201 bp, Homo sapiens; identical to SEQ ID NO: 34935

SEQ ID NO: 34956 - DNA, 201 bp, Homo sapiens
aacaaacagacccttctggaacctactgtgacatgagatgtgtccacaaggcgaggtttcaggcacacactgaaggagcatctgctggacagccctccccrcccccaagtccttaccaacctgtgccactgcataccctgtaaaaagtgtgtggtggttggtaatggaggagttttgaagaataagacattaggagaaaaa

SEQ ID NO: 34957 - DNA, 201 bp, Homo sapiens; identical to SEQ ID NO: 34936

SEQ ID NO: 34958 - DNA, 201 bp, Homo sapiens; identical to SEQ ID NO: 34920

SEQ ID NO: 34959 - DNA, 201 bp, Homo sapiens; identical to SEQ ID NO: 34921

SEQ ID NO: 34960 - DNA, 201 bp, Homo sapiens; identical to SEQ ID NO: 34922

SEQ ID NO: 34961 - DNA, 201 bp, Homo sapiens; identical to SEQ ID NO: 34923

SEQ ID NO: 34962 - DNA, 201 bp, Homo sapiens; identical to SEQ ID NO: 34924

SEQ ID NO: 34963 - DNA, 201 bp, Homo sapiens; identical to SEQ ID NO: 34925

SEQ ID NO: 34964 - DNA, 150 bp, Homo sapiens; identical to SEQ ID NO: 34926

SEQ ID NO: 34965 - DNA, 201 bp, Homo sapiens; identical to SEQ ID NO: 34927

SEQ ID NO: 34966 - DNA, 201 bp, Homo sapiens; identical to SEQ ID NO: 34928

SEQ ID NO: 34967 - DNA, 201 bp, Homo sapiens; identical to SEQ ID NO: 34929

SEQ ID NO: 34968 - DNA, 201 bp, Homo sapiens; identical to SEQ ID NO: 34930

SEQ ID NO: 34969 - DNA, 201 bp, Homo sapiens; identical to SEQ ID NO: 34931

SEQ ID NO: 34970 - DNA, 201 bp, Homo sapiens; identical to SEQ ID NO: 34932

SEQ ID NO: 34971 - DNA, 201 bp, Homo sapiens; identical to SEQ ID NO: 34934

SEQ ID NO: 34972 - DNA, 201 bp, Homo sapiens; identical to SEQ ID NO: 34935

SEQ ID NO: 34973 - DNA, 201 bp, Homo sapiens; identical to SEQ ID NO: 34936

SEQ ID NO: 34974 - DNA, 201 bp, Homo sapiens; identical to SEQ ID NO: 34920

SEQ ID NO: 34975 - DNA, 201 bp, Homo sapiens; identical to SEQ ID NO: 34921

SEQ ID NO: 34976 - DNA, 201 bp, Homo sapiens; identical to SEQ ID NO: 34922

SEQ ID NO: 34977 - DNA, 201 bp, Homo sapiens; identical to SEQ ID NO: 34923

SEQ ID NO: 34978 - DNA, 201 bp, Homo sapiens; identical to SEQ ID NO: 34924

SEQ ID NO: 34979 - DNA, 201 bp, Homo sapiens; identical to SEQ ID NO: 34925

SEQ ID NO: 34980 - DNA, 150 bp, Homo sapiens; identical to SEQ ID NO: 34926

SEQ ID NO: 34981 - DNA, 201 bp, Homo sapiens; identical to SEQ ID NO: 34927

SEQ ID NO: 34982 - DNA, 201 bp, Homo sapiens; identical to SEQ ID NO: 34928

SEQ ID NO: 34983 - DNA, 201 bp, Homo sapiens; identical to SEQ ID NO: 34929

SEQ ID NO: 34984 - DNA, 201 bp, Homo sapiens; identical to SEQ ID NO: 34930

SEQ ID NO: 34985 - DNA, 201 bp, Homo sapiens; identical to SEQ ID NO: 34931

SEQ ID NO: 34986 - DNA, 201 bp, Homo sapiens; identical to SEQ ID NO: 34932

SEQ ID NO: 34987 - DNA, 201 bp, Homo sapiens; identical to SEQ ID NO: 34934

SEQ ID NO: 34988 - DNA, 201 bp, Homo sapiens; identical to SEQ ID NO: 34935

SEQ ID NO: 34989 - DNA, 201 bp, Homo sapiens; identical to SEQ ID NO: 34936

SEQ ID NO: 34990 - DNA, 201 bp, Homo sapiens; identical to SEQ ID NO: 34920

SEQ ID NO: 34991 - DNA, 201 bp, Homo sapiens; identical to SEQ ID NO: 34921

SEQ ID NO: 34992 - DNA, 201 bp, Homo sapiens; identical to SEQ ID NO: 34922

SEQ ID NO: 34993 - DNA, 201 bp, Homo sapiens; identical to SEQ ID NO: 34923

SEQ ID NO: 34994 - DNA, 201 bp, Homo sapiens; identical to SEQ ID NO: 34924

SEQ ID NO: 34995 - DNA, 201 bp, Homo sapiens; identical to SEQ ID NO: 34925

SEQ ID NO: 34996 - DNA, 150 bp, Homo sapiens; identical to SEQ ID NO: 34926

SEQ ID NO: 34997 - DNA, 201 bp, Homo sapiens; identical to SEQ ID NO: 34927

SEQ ID NO: 34998 - DNA, 201 bp, Homo sapiens; identical to SEQ ID NO: 34928

SEQ ID NO: 34999 - DNA, 201 bp, Homo sapiens; identical to SEQ ID NO: 34929

SEQ ID NO: 35000 - DNA, 201 bp, Homo sapiens; identical to SEQ ID NO: 34930

SEQ ID NO: 35001 - DNA, 201 bp, Homo sapiens; identical to SEQ ID NO: 34931

SEQ ID NO: 35002 - DNA, 201 bp, Homo sapiens; identical to SEQ ID NO: 34932

SEQ ID NO: 35003 - DNA, 201 bp, Homo sapiens
gtgtccgccccgcccgaaagcatttgcaagtgaggaagcagcacaaccctgggttttagataatttctaacagagaggccccagcaattcagcaggcagcrtcctgagtctttggcagcctggtccctctttcgcaaattctccacctttgcgaacagagggtctttaggacacagattcttaaaagtgcaggtgagccag

SEQ ID NO: 35004 - DNA, 201 bp, Homo sapiens; identical to SEQ ID NO: 34934

SEQ ID NO: 35005 - DNA, 201 bp, Homo sapiens; identical to SEQ ID NO: 34935

SEQ ID NO: 35006 - DNA, 201 bp, Homo sapiens; identical to SEQ ID NO: 34936

SEQ ID NO: 35007 - DNA, 201 bp, Homo sapiens; identical to SEQ ID NO: 34920

SEQ ID NO: 35008 - DNA, 201 bp, Homo sapiens; identical to SEQ ID NO: 34921

SEQ ID NO: 35009 - DNA, 201 bp, Homo sapiens; identical to SEQ ID NO: 34922

SEQ ID NO: 35010 - DNA, 201 bp, Homo sapiens; identical to SEQ ID NO: 34923

SEQ ID NO: 35011 - DNA, 201 bp, Homo sapiens; identical to SEQ ID NO: 34924

SEQ ID NO: 35012 - DNA, 201 bp, Homo sapiens; identical to SEQ ID NO: 34925

SEQ ID NO: 35013 - DNA, 150 bp, Homo sapiens; identical to SEQ ID NO: 34926

SEQ ID NO: 35014 - DNA, 201 bp, Homo sapiens; identical to SEQ ID NO: 34927

SEQ ID NO: 35015 - DNA, 201 bp, Homo sapiens; identical to SEQ ID NO: 34928

SEQ ID NO: 35016 - DNA, 201 bp, Homo sapiens; identical to SEQ ID NO: 34929

SEQ ID NO: 35017 - DNA, 201 bp, Homo sapiens; identical to SEQ ID NO: 34930

SEQ ID NO: 35018 - DNA, 201 bp, Homo sapiens; identical to SEQ ID NO: 34931

SEQ ID NO: 35019 - DNA, 201 bp, Homo sapiens; identical to SEQ ID NO: 34932

SEQ ID NO: 35020 - DNA, 201 bp, Homo sapiens; identical to SEQ ID NO: 34934

SEQ ID NO: 35021 - DNA, 201 bp, Homo sapiens; identical to SEQ ID NO: 34935

SEQ ID NO: 35022 - DNA, 201 bp, Homo sapiens; identical to SEQ ID NO: 34936

SEQ ID NO: 35023 - DNA, 201 bp, Homo sapiens
tatcgacctcagccctatacatattgggtttggctgtatcccaccacgttacaaactctgtgtcattccccgctcatgagtgtgtggaggacaccctgaaycccccgctttcaaacaagatttcgaattgtttgaggtcaggatttctcaaactgattcctttctttgcatatgagtatttgaaaataaatattttcccag

SEQ ID NO: 35024 - DNA, 201 bp, Homo sapiens
gtatcaccgtgactgtggccgacctgttctttgcggggacagagaccaccagcacaactctgagatatgggctcctgattctcatgaaataccctgagatygaagagaagctccatgaagaaattgacagggtgattgggccaagccgaatccctgccatcaaggataggcaagagatgccctacatggatgctgtggtgc

SEQ ID NO: 35025 - DNA, 201 bp, Homo sapiens
tggctgtatcccaccacgttacaaactctgtgtcattccccgctcatgagtgtgtggaggacaccctgaaccccccgctttcaaacaagatttcgaattgyttgaggtcaggatttctcaaactgattcctttctttgcatatgagtatttgaaaataaatattttcccagaatataaataaatcatcacatgattatttt

SEQ ID NO: 35026 - DNA, 201 bp, Homo sapiens
tgggtttggctgtatcccaccacgttacaaactctgtgtcattccccgctcatgagtgtgtggaggacaccctgaaccccccgctttcaaacaagatttcraattgtttgaggtcaggatttctcaaactgattcctttctttgcatatgagtatttgaaaataaatattttcccagaatataaataaatcatcacatgat

SEQ ID NO: 35027 - DNA, 201 bp, Homo sapiens
tcgtagtgccaactctggactctgttttgtatgacaaccaagaatttcctgatccagaaaagtttaagccagaacacttcctgaatgaaaatggaaagttyaagtacagtgactatttcaagccattttccacaggaaaacgagtgtgtgctggagaaggcctggctcgcatggagttgtttcttttgttgtgtgccattt

SEQ ID NO: 35028 - DNA, 201 bp, Homo sapiens
ccctctgggttctctagagcaacagcaatacccgcccggcaggggtgtggcttagagccccgcacctcctcgccgcgcggcgggcctgacttctagccacsggtctccgcagttggcccagcgcttcgggccggtgttcacgctgtacgtgggctcgcagcgcatggtggtgatgcacggctacaaggcggtgaaggaagc

SEQ ID NO: 35029 - DNA, 201 bp, Homo sapiens
catattgggtttggctgtatcccaccacgttacaaactctgtgtcattccccgctcatgagtgtgtggaggacaccctgaaccccccgctttcaaacaagwtttcgaattgtttgaggtcaggatttctcaaactgattcctttctttgcatatgagtatttgaaaataaatattttcccagaatataaataaatcatcac

SEQ ID NO: 35030 - DNA, 201 bp, Homo sapiens; identical to SEQ ID NO: 35023

SEQ ID NO: 35031 - DNA, 201 bp, Homo sapiens; identical to SEQ ID NO: 35024

SEQ ID NO: 35032 - DNA, 201 bp, Homo sapiens; identical to SEQ ID NO: 35025

SEQ ID NO: 35033 - DNA, 201 bp, Homo sapiens; identical to SEQ ID NO: 35026

SEQ ID NO: 35034 - DNA, 201 bp, Homo sapiens; identical to SEQ ID NO: 35027

SEQ ID NO: 35035 - DNA, 201 bp, Homo sapiens; identical to SEQ ID NO: 35029

SEQ ID NO: 35036 - DNA, 201 bp, Homo sapiens
ggcggctagatggtcactacactcagggaggctgggcctaggcaagctggcgctggaggtgcagctgcagaaagaggcagcagagctggcagaagccttcygccaggagcagggtagacccttcgaccctcaggtatccattgtcaggtccacagtcagagtcatcggggcccttgtgtttggccaccacttcctcttaga

SEQ ID NO: 35037 - DNA, 201 bp, Homo sapiens
tatgacgtgtttccctgggccctctgccacctcccaggaccccaccaggagatatttaggtaccaagaggtcgtgctgagcttaatccaccaggagatcascaggcacaaactcagggcaccggaggcccccagggacttcatcagctgctacctggcccagatctccaaggtgagcctggaacagctgctcaggaaagga

SEQ ID NO: 35038 - DNA, 201 bp, Homo sapiens
ctctgccacctcccaggaccccaccaggagatatttaggtaccaagaggtcgtgctgagcttaatccaccaggagatcaccaggcacaaactcagggcacsggaggcccccagggacttcatcagctgctacctggcccagatctccaaggtgagcctggaacagctgctcaggaaaggaggggccatctttttgggctgc

SEQ ID NO: 35039 - DNA, 201 bp, Homo sapiens
agggcaccggaggcccccagggacttcatcagctgctacctggcccagatctccaaggtgagcctggaacagctgctcaggaaaggaggggccatcttttygggctgcacctcgtttctgagcacctcctttctaagccatggtctcagtttctcatctttgactctatctacgagcttccaaagcacgctgaaaatgaac

SEQ ID NO: 35040 - DNA, 201 bp, Homo sapiens
ccacagtcagagtcatcggggcccttgtgtttggccaccacttcctcttagaggatcccatcttccaggaactgactcaagccatcgactttggcctggcmtttgtcagcactgtgtggcgccggctgtatgacgtgtttccctgggccctctgccacctcccaggaccccaccaggagatatttaggtaccaagaggtcg

SEQ ID NO: 35041 - DNA, 201 bp, Homo sapiens
tccttcctgctcctgaaacttggcaccttctgctgggacaggagctgtcttcctcctggcccactccccttccccatccttggaaacctgtggcagctatrctttcagctgcacccagagacactgctccagctggcgcagagtgtgttcaccgtgtgggtgggcccgatccccgttgcggtgctgagtggcttccaggtg

SEQ ID NO: 35042 - DNA, 201 bp, Homo sapiens
ggtgggcccgatccccgttgcggtgctgagtggcttccaggtggtgaaggaagcactggtctccaactcggagcagttctccggcaggtccctcaccccgytcttccaggacctgtttggagaacgaggcagggctgcccctcctgctggggagggggaggcggctagatggtcactacactcagggaggctgggcctagg

SEQ ID NO: 35043 - DNA, 201 bp, Homo sapiens
aattgctgcgtggtcgtggcccgacctctcacggcatgacagccttcgtcacccagcctgtgagggtcctgactggagcaccttctaaatctaagattctkctgaggagcccccgctggtccctctgggcatgctgtgctcggacggaaagcggggcctgtgggtccttgtgtccctgccgctgaagaatggggctgctct

SEQ ID NO: 35044 - DNA, 201 bp, Homo sapiens
tgagggtcctgactggagcaccttctaaatctaagattctgctgaggagcccccgctggtccctctgggcatgctgtgctcggacggaaagcggggcctgygggtccttgtgtccctgccgctgaagaatggggctgctctgagggaaacgctgtctgctgccttcatacagatgctgattaaagtgatagcgattcagat

SEQ ID NO: 35045 - DNA, 201 bp, Homo sapiens
cacagccggagatcttaataggaaccatcccaggtgcgggcggcacccagagactcacccgtgctgttgggaagtcgctggcgatggagatggtcctcacyggtgaccggatctcagcccaggacgccaagcaagcaggtcttgtcagcaagatttgtcctgttgagacactggtggaagaagccatccagtgtgcagaaa

SEQ ID NO: 35046 - DNA, 168 bp, Homo sapiens
tgctgaggagcccccgctggtccctctgggcatgctgtgctcggacggaaagcggggcctgtgggtccttgtgtccctgccgctgaagaatggggctgctytgagggaaacgctgtctgctgccttcatacagatgctgattaaagtgatagcgattcagattacacc

SEQ ID NO: 35047 - DNA, 201 bp, Homo sapiens
agaataacaccgtggggttgatccaactgaaccgccccaaggccctcaatgcactttgcgatggcctgattgacgagctcaaccaggccctgaagatcttygaggaggacccggccgtgggggccattgtcctcaccggcggggataaggcctttgcagctggagctgatatcaaggaaatgcagaacctgagtttccagg

SEQ ID NO: 35048 - DNA, 201 bp, Homo sapiens
gggaagaataacaccgtggggttgatccaactgaaccgccccaaggccctcaatgcactttgcgatggcctgattgacgagctcaaccaggccctgaagaycttcgaggaggacccggccgtgggggccattgtcctcaccggcggggataaggcctttgcagctggagctgatatcaaggaaatgcagaacctgagtttc

SEQ ID NO: 35049 - DNA, 201 bp, Homo sapiens
ccctgcttcacacctctgcttggagaggacaagtgcagcctgtcagttttagaagcaagtaaatcatcctcttttcaagagcagtgtccgtggtgtgcagytcctctccaattgctgcgtggtcgtggcccgacctctcacggcatgacagccttcgtcacccagcctgtgagggtcctgactggagcaccttctaaatct

SEQ ID NO: 35050 - DNA, 201 bp, Homo sapiens
tgcccctgcttcacacctctgcttggagaggacaagtgcagcctgtcagttttagaagcaagtaaatcatcctcttttcaagagcagtgtccgtggtgtgyagttcctctccaattgctgcgtggtcgtggcccgacctctcacggcatgacagccttcgtcacccagcctgtgagggtcctgactggagcaccttctaaa

SEQ ID NO: 35051 - DNA, 201 bp, Homo sapiens
tggggttgatccaactgaaccgccccaaggccctcaatgcactttgcgatggcctgattgacgagctcaaccaggccctgaagatcttcgaggaggacccrgccgtgggggccattgtcctcaccggcggggataaggcctttgcagctggagctgatatcaaggaaatgcagaacctgagtttccaggactgttactcca

SEQ ID NO: 35052 - DNA, 201 bp, Homo sapiens
gagcgagccctgaaaggctataggcgagggggcggctccgcggggccgggcgaggagtccagagagccatggccgccctgcgtgtcctgctgtcctgcgtycgcggcccgctgaggcccccggttcgctgtcccgcctggcgtcccttcgcctcgggtgctaactttgagtacatcatcgcagaaaaaagagggaagaata

SEQ ID NO: 35053 - DNA, 201 bp, Homo sapiens
cttggagaggacaagtgcagcctgtcagttttagaagcaagtaaatcatcctcttttcaagagcagtgtccgtggtgtgcagttcctctccaattgctgcrtggtcgtggcccgacctctcacggcatgacagccttcgtcacccagcctgtgagggtcctgactggagcaccttctaaatctaagattctgctgaggagc

SEQ ID NO: 35054 - DNA, 201 bp, Homo sapiens
ggagcgagccctgaaaggctataggcgagggggcggctccgcggggccgggcgaggagtccagagagccatggccgccctgcgtgtcctgctgtcctgcgyccgcggcccgctgaggcccccggttcgctgtcccgcctggcgtcccttcgcctcgggtgctaactttgagtacatcatcgcagaaaaaagagggaagaat

SEQ ID NO: 35055 - DNA, 201 bp, Homo sapiens
ctgcttcacacctctgcttggagaggacaagtgcagcctgtcagttttagaagcaagtaaatcatcctcttttcaagagcagtgtccgtggtgtgcagttyctctccaattgctgcgtggtcgtggcccgacctctcacggcatgacagccttcgtcacccagcctgtgagggtcctgactggagcaccttctaaatctaa

SEQ ID NO: 35056 - DNA, 201 bp, Homo sapiens
agctaatagaaagctataaaaatggaggcagtctgctaattcagggaccagaccactgttcactccttcactacgcagctaaaaccggcaacggggagatygtgaaatatatccttgaccacggaccttccgagttattggatatggcagacagtgaaacgggtgagactgcactgcacaaggctgcctgccagcggaacc

SEQ ID NO: 35057 - DNA, 201 bp, Homo sapiens
caacgtctcgggagacctctgctaccttggagaggagaactgccaagtcagatttgcaaaatcagctctcaggaggaagtgtgcagtctgtaaaatcgtcrtccacaccgcctgcattgagcagctagaaaagattaatttcagatgtaaaccaacatttcgagaaggaggctcaaggtcaccaagagaaaattttgtacg

SEQ ID NO: 35058 - DNA, 201 bp, Homo sapiens
tgagtgacagtgggctggggatgatagctccctattatgaggactcagatctgaaagatctcagccactcccgcgtgctacagtcaccagtctcttcagargatcatgcaattttgcaggcagtaatagctggtgatcttatgaagctaatagaaagctataaaaatggaggcagtctgctaattcagggaccagaccact

SEQ ID NO: 35059 - DNA, 201 bp, Homo sapiens
tgatggagatttcccaagatgagatttttattctggacccagatatggtggtgtcacagccggcggggacacctccgggcatgcctgacctggtggtggarcaagcctcggggatctcagactggtggaatcctgccctgcggaaacgcatgctgagtgacagtgggctggggatgatagctccctattatgaggactcag

SEQ ID NO: 35060 - DNA, 201 bp, Homo sapiens
aaaggcttgttgtatgagttccactgccagatttatgggatgcctggatcattcagaaggatgcttcaactattatttgtcaggtccaaaggtcgtacttrataaccccattttctatgtatggggtagtctaatatattattttatctactttatttttcccttttcagaaagtccttagtgcaaaccaccattggaatc

SEQ ID NO: 35061 - DNA, 201 bp, Homo sapiens
cagatctcaccccaaagattcaggaactgaagttccagtgtatagtatttttaaatatacccagatattgtgctggcacaatgccctggggaaacccaggwgatcaccatgatttcgaacctcagcgtcatgatgatggttatattgaagtcattggatttaccatggcctctttggcagccctgcaagttgggggccatg

SEQ ID NO: 35062 - DNA, 201 bp, Homo sapiens
acttggaaaaaaaaaacagcaaaagcaaaagtagcaacatatgtcaacatatgtcactgaaataggaaacagtcattggaatgttgcacagaggctaatarctatagactgttggatacagtggtgagaggagccccattttaggtctttcttttaggtttttggttttcattactccaagtaatccttgacccaagaaca

SEQ ID NO: 35063 - DNA, 201 bp, Homo sapiens
gaaaaaaaaaacagcaaaagcaaaagtagcaacatatgtcaacatatgtcactgaaataggaaacagtcattggaatgttgcacagaggctaataactatrgactgttggatacagtggtgagaggagccccattttaggtctttcttttaggtttttggttttcattactccaagtaatccttgacccaagaacaaaggc

SEQ ID NO: 35064 - DNA, 201 bp, Homo sapiens
caaaatcagctctcaggaggaagtgtgcagtctgtaaaatcgtcgtccacaccgcctgcattgagcagctagaaaagattaatttcagatgtaaaccaacwtttcgagaaggaggctcaaggtcaccaagagaaaattttgtacgtcatcactgggtgcacaggcgtcggcaggaggggaaatgtaagcagtgtggtaagg

SEQ ID NO: 35065 - DNA, 201 bp, Homo sapiens
gagagttcattaccaggaccatgaaacctccttccccagggctctctcagcacagaggctctctcctcggtggtgcttcctagatgacttcttgttcttcyttaggaacatttgcactttgtgatggagatttcccaagatgagatttttattctggacccagatatggtggtgtcacagccggcggggacacctccgggc

SEQ ID NO: 35066 - DNA, 201 bp, Homo sapiens
ttgcacagaggctaataactatagactgttggatacagtggtgagaggagccccattttaggtctttcttttaggtttttggttttcattactccaagtartccttgacccaagaacaaaggcttgttgtatgagttccactgccagatttatgggatgcctggatcattcagaaggatgcttcaactattatttgtcagg

SEQ ID NO: 35067 - DNA, 201 bp, Homo sapiens
ttgttcttctttaggaacatttgcactttgtgatggagatttcccaagatgagatttttattctggacccagatatggtggtgtcacagccggcggggacrcctccgggcatgcctgacctggtggtggaacaagcctcggggatctcagactggtggaatcctgccctgcggaaacgcatgctgagtgacagtgggctgg

SEQ ID NO: 35068 - DNA, 201 bp, Homo sapiens
gaggacatgagcaagcgtatcacatctgccctccctgcaattgggcagctcccctggaagaagctgatggaattcatatatctgtctctctcctgcaagawtctacctgagaccatgccactagcttttaagggctaccaagatgtacaacagaacatgatagcccattgagaaggaggcaggatacctggagatttgtgg

SEQ ID NO: 35069 - DNA, 201 bp, Homo sapiens
tgcacagaggctaataactatagactgttggatacagtggtgagaggagccccattttaggtctttcttttaggtttttggttttcattactccaagtaayccttgacccaagaacaaaggcttgttgtatgagttccactgccagatttatgggatgcctggatcattcagaaggatgcttcaactattatttgtcaggt

SEQ ID NO: 35070 - DNA, 201 bp, Homo sapiens; identical to SEQ ID NO: 35056

SEQ ID NO: 35071 - DNA, 201 bp, Homo sapiens; identical to SEQ ID NO: 35057

SEQ ID NO: 35072 - DNA, 201 bp, Homo sapiens; identical to SEQ ID NO: 35058

SEQ ID NO: 35073 - DNA, 201 bp, Homo sapiens; identical to SEQ ID NO: 35059

SEQ ID NO: 35074 - DNA, 201 bp, Homo sapiens; identical to SEQ ID NO: 35060

SEQ ID NO: 35075 - DNA, 201 bp, Homo sapiens; identical to SEQ ID NO: 35061

SEQ ID NO: 35076 - DNA, 201 bp, Homo sapiens; identical to SEQ ID NO: 35062

SEQ ID NO: 35077 - DNA, 201 bp, Homo sapiens; identical to SEQ ID NO: 35063

SEQ ID NO: 35078 - DNA, 201 bp, Homo sapiens; identical to SEQ ID NO: 35064

SEQ ID NO: 35079 - DNA, 201 bp, Homo sapiens
ggctcccagagagttcattaccaggaccatgaaacctccttccccagggctctctcagcacagaggctctctcctcggtggtgcttcctagatgttcttcyttaggaacatttgcactttgtgatggagatttcccaagatgagatttttattctggacccagatatggtggtgtcacagccggcggggacacctccgggc

SEQ ID NO: 35080 - DNA, 201 bp, Homo sapiens; identical to SEQ ID NO: 35066

SEQ ID NO: 35081 - DNA, 201 bp, Homo sapiens
atgttcttctttaggaacatttgcactttgtgatggagatttcccaagatgagatttttattctggacccagatatggtggtgtcacagccggcggggacrcctccgggcatgcctgacctggtggtggaacaagcctcggggatctcagactggtggaatcctgccctgcggaaacgcatgctgagtgacagtgggctgg

SEQ ID NO: 35082 - DNA, 201 bp, Homo sapiens; identical to SEQ ID NO: 35068

SEQ ID NO: 35083 - DNA, 201 bp, Homo sapiens; identical to SEQ ID NO: 35069

SEQ ID NO: 35084 - DNA, 201 bp, Homo sapiens
cagatctcaccccaaagattcaggaactgaagttccagtgtatagtatttttaaatatacccagatattgtgctggcacaatgccctggggaaacccaggwgatcaccatgatttcgaacctcagcgtcatgatgatggttatattgaagtcattggatttaccatggcctctttgctcaagcagctgacaagtgaagcac

SEQ ID NO: 35085 - DNA, 201 bp, Homo sapiens; identical to SEQ ID NO: 35057

SEQ ID NO: 35086 - DNA, 201 bp, Homo sapiens
aagggccaaaagatgcgcttgaattgtataggaaagtaccaaatctgcgaattctggcctgtggtggggatggaacgaatgaaaatattgctcaaaatgcmcttggtaaacattcagtgacaactaatgctaaaaacggacagatggtggcagcattgaccagctgctgctgtgcatggctgctcagggacaaagcggagg

SEQ ID NO: 35087 - DNA, 201 bp, Homo sapiens; identical to SEQ ID NO: 35064

SEQ ID NO: 35088 - DNA, 201 bp, Homo sapiens; identical to SEQ ID NO: 35056

SEQ ID NO: 35089 - DNA, 201 bp, Homo sapiens; identical to SEQ ID NO: 35057

SEQ ID NO: 35090 - DNA, 201 bp, Homo sapiens; identical to SEQ ID NO: 35058

SEQ ID NO: 35091 - DNA, 201 bp, Homo sapiens; identical to SEQ ID NO: 35059

SEQ ID NO: 35092 - DNA, 201 bp, Homo sapiens; identical to SEQ ID NO: 35060

SEQ ID NO: 35093 - DNA, 201 bp, Homo sapiens; identical to SEQ ID NO: 35062

SEQ ID NO: 35094 - DNA, 201 bp, Homo sapiens; identical to SEQ ID NO: 35061

SEQ ID NO: 35095 - DNA, 201 bp, Homo sapiens; identical to SEQ ID NO: 35063

SEQ ID NO: 35096 - DNA, 201 bp, Homo sapiens; identical to SEQ ID NO: 35066

SEQ ID NO: 35097 - DNA, 201 bp, Homo sapiens; identical to SEQ ID NO: 35064

SEQ ID NO: 35098 - DNA, 201 bp, Homo sapiens
tagatggtgagttggaacatttgcactttgtgatggagatttcccaagatgagatttttattctggacccagatatggtggtgtcacagccggcggggacrcctccgggcatgcctgacctggtggtggaacaagcctcggggatctcagactggtggaatcctgccctgcggaaacgcatgctgagtgacagtgggctgg

SEQ ID NO: 35099 - DNA, 201 bp, Homo sapiens; identical to SEQ ID NO: 35069

SEQ ID NO: 35100 - DNA, 201 bp, Homo sapiens; identical to SEQ ID NO: 35068

SEQ ID NO: 35101 - DNA, 201 bp, Homo sapiens
agacatgccaaaacaaagcccaagtgcgctcaaccaggcctcagcccagtcaggttggctctagcagaggccagaaaaacctgaagagctactttcagccytcccctagctgtccccaagcctctcctgacatagagctgcctagcctaccactgatgagcgccctcatgaccccgaagactccagaagagaaggcagtgg

SEQ ID NO: 35102 - DNA, 201 bp, Homo sapiens
ttgactatgtgctgggggacaggaccctggtcatagacacctttcaggcctctttcctgctgcctgaggtgatgggctctgaccactgccctgtgggtgcrgtcttgagtgtgtcctctgtgcctgcaaaacagtgcccacctctgtgcacccgcttcctccctgagtttgcaggcacccagctcaagatccttcgcttcc

SEQ ID NO: 35103 - DNA, 201 bp, Homo sapiens
ccctttaagatgttgcgcgtggtgagctggaacatcaatgggattcggagacccctgcaaggggtggcaaatcaggaacccagcaactgtgccgccgtggmcgtggggcgcattttggacgagctggatgcggatatcgtctgtctccaggaaaccaaagtgaccagggatgcactgacagagcccctggctatcgttgag

SEQ ID NO: 35104 - DNA, 201 bp, Homo sapiens
tgatgggctctgaccactgccctgtgggtgcagtcttgagtgtgtcctctgtgcctgcaaaacagtgcccacctctgtgcacccgcttcctccctgagttygcaggcacccagctcaagatccttcgcttcctagttcctctcgaacaaagtcctgtgttggagcagtcgacgctgcagcacaacaatcaaacccgggtac

SEQ ID NO: 35105 - DNA, 201 bp, Homo sapiens
tgaagagctactttcagccctcccctagctgtccccaagcctctcctgacatagagctgcctagcctaccactgatgagcgccctcatgaccccgaagacyccagaagagaaggcagtggccaaagtggtgaaggggcaggccaagacttcagaagccaaagatgagaaggagttacggacctcattctggaagtctgtgc

SEQ ID NO: 35106 - DNA, 201 bp, Homo sapiens
gaacgcctgcgcaaacgcgcgcgggaggcgggcctggccaacttctgaacaggaagcagttcgctcgcgcctaggttggcgcgggctgggaggtgttccarccctttaagatgttgcgcgtggtgagctggaacatcaatgggattcggagacccctgcaaggggtggcaaatcaggaacccagcaactgtgccgccgtgg

SEQ ID NO: 35107 - DNA, 201 bp, Homo sapiens
gtggcaaatcaggaacccagcaactgtgccgccgtggccgtggggcgcattttggacgagctggatgcggatatcgtctgtctccaggaaaccaaagtgamcagggatgcactgacagagcccctggctatcgttgagggttataactcctatttcagcttcagccgcaaccgtagcggctattctgcacatgggaaggta

SEQ ID NO: 35108 - DNA, 201 bp, Homo sapiens
cccctcctcccggtgcaacttcttcctctggagcaggcccagctgaaccaatggaggcctggggacatctggcatggtcacccctgcacatgatctgaggmcagctccccttccctgagctgcctcctgcttctccctcaaagtctcctacccttctcttcctcttttaagccctctcttcctcgctttccttcctaccta

SEQ ID NO: 35109 - DNA, 201 bp, Homo sapiens; identical to SEQ ID NO: 35101

SEQ ID NO: 35110 - DNA, 201 bp, Homo sapiens; identical to SEQ ID NO: 35102

SEQ ID NO: 35111 - DNA, 201 bp, Homo sapiens; identical to SEQ ID NO: 35103

SEQ ID NO: 35112 - DNA, 201 bp, Homo sapiens; identical to SEQ ID NO: 35104

SEQ ID NO: 35113 - DNA, 201 bp, Homo sapiens; identical to SEQ ID NO: 35105

SEQ ID NO: 35114 - DNA, 201 bp, Homo sapiens; identical to SEQ ID NO: 35106

SEQ ID NO: 35115 - DNA, 201 bp, Homo sapiens
gtggcaaatcaggaacccagcaactgtgccgccgtggccgtggggcgcattttggacgagctggatgcggatatcgtctgtctccaggaaaccaaagtgamcagggatgcactgacagagcccctggctatcgttgagggttataactcctatttcagcttcagccgcaaccgtagcggctattctggaatgctttgaaga

SEQ ID NO: 35116 - DNA, 201 bp, Homo sapiens; identical to SEQ ID NO: 35108

SEQ ID NO: 35117 - DNA, 201 bp, Homo sapiens; identical to SEQ ID NO: 35102

SEQ ID NO: 35118 - DNA, 201 bp, Homo sapiens; identical to SEQ ID NO: 35101

SEQ ID NO: 35119 - DNA, 201 bp, Homo sapiens; identical to SEQ ID NO: 35103

SEQ ID NO: 35120 - DNA, 201 bp, Homo sapiens
tggggatgttggttgctatggaaacatggatgagtttacccaagaggaactccgggctctggatagtgagggcagggccctcctcacacagcataagatcygcacatgggaaggtaaggagaagaccttgaccctaatcaacgtgtactgcccccatgcggaccctgggaggcctgagcggctagtctttaagatgcgctt

SEQ ID NO: 35121 - DNA, 201 bp, Homo sapiens; identical to SEQ ID NO: 35104

SEQ ID NO: 35122 - DNA, 201 bp, Homo sapiens
ttgccacccagaatggggatgttggttgctatggaaacatggatgagtttacccaagaggaactccgggctctggatagtgagggcagggccctcctcacrcagcataagatccgcacatgggaaggtaaggagaagaccttgaccctaatcaacgtgtactgcccccatgcggaccctgggaggcctgagcggctagtct

SEQ ID NO: 35123 - DNA, 201 bp, Homo sapiens; identical to SEQ ID NO: 35106

SEQ ID NO: 35124 - DNA, 201 bp, Homo sapiens; identical to SEQ ID NO: 35105

SEQ ID NO: 35125 - DNA, 201 bp, Homo sapiens
gtggcaaatcaggaacccagcaactgtgccgccgtggccgtggggcgcattttggacgagctggatgcggatatcgtctgtctccaggaaaccaaagtgamcagggatgcactgacagagcccctggctatcgttgagggttataactcctatttcagcttcagccgcaaccgtagcggctattctggtgtagccaccttc

SEQ ID NO: 35126 - DNA, 201 bp, Homo sapiens; identical to SEQ ID NO: 35108

SEQ ID NO: 35127 - DNA, 112 bp, Homo sapiens
gactgaagacaractttgagagggctcagaaacccagtacaccccctgtcccagccctgtccacctgctgctgtggccacagcgagagaaaagacagctagtaagataggaa

SEQ ID NO: 35128 - DNA, 201 bp, Homo sapiens
ggtgactctggcctctcagttcgcggcaagcagtatgcctatgccctggccaacttcattcagtcccagggcatcagctccctgaaggtgtggaccagtcrcatgaagaggaccatccagacagctgaggccctgggtgtcccctatgagcagtggaaggccctgaatgagattgatgcgggtgtctgtgaggagatgacc

SEQ ID NO: 35129 - DNA, 201 bp, Homo sapiens
gcaggcttcatctttaccacttctctgccccccatggtgctctctggagctctagaatctgtgcggctgctcaagggagaggagggccaagccctgaggcragcccaccagcgcaatgtcaagcacatgcgccagctactcatggacaggggccttcctgtcatcccctgccccagccacatcatccccatccgggtgggc

SEQ ID NO: 35130 - DNA, 201 bp, Homo sapiens
ctttaccacttctctgccccccatggtgctctctggagctctagaatctgtgcggctgctcaagggagaggagggccaagccctgaggcgagcccaccagygcaatgtcaagcacatgcgccagctactcatggacaggggccttcctgtcatcccctgccccagccacatcatccccatccgggtgggcaatgcagcact

SEQ ID NO: 35131 - DNA, 201 bp, Homo sapiens
gaagctgctgctggcttggactgcggtggggctgcccctccaggatgtgtctgtggctgcctgcaatttctgtcgccgtcctgtacactttgagctcatgrgtgagtgggaacgttcctacttcgggaacatggggccccagtatgtcaccacctatgcctgagaagccagctgcctaggattcacaccccacctgcgctt

SEQ ID NO: 35132 - DNA, 201 bp, Homo sapiens
tgcgcttggcaccctccccccaccacagccctcagatgatggaagattttgtggagaagctgctgctggcttggactgcggtggggctgcccctccaggaygtgtctgtggctgcctgcaatttctgtcgccgtcctgtacactttgagctcatgagtgagtgggaacgttcctacttcgggaacatggggccccagtatg

SEQ ID NO: 35133 - DNA, 201 bp, Homo sapiens
tctcttcaccttggccaagatcctgccagggtgcgagatttactcagacgcaggcaaccatgcttccatgatccaaggtatccgtaacagtggagcagccmagtttgtcttcaggcacaatgaccctgaccacctaaagaaacttctagagaagtctaaccctaagatacccaaaattgtggcctttgagactgtccactc

SEQ ID NO: 35134 - DNA, 201 bp, Homo sapiens
tcacaccccacctgcgcttcacttgggtccaggcctactcctgtcttctgctttgttgtgtgcctctagctgaattgagcctaaaaataaagcacaaaccmcagcatgtgaagccttttattggacagggaacagacaagtgcattctgactccctcagacaagtggcagatctatgaggtaaccataggtcacttgttgg

SEQ ID NO: 35135 - DNA, 201 bp, Homo sapiens
caagactgtgaaccgctgggctgatgcatatccctttgcccaacatttctctgaggcatctgtggcctcaaaggatgtgtccgtctggtgtagtaatgatyacctgggcatgagccgacaccctcaggtcttgcaagccacacaggagaccctgcagcgtcatggtgctggagctggtggcacccgcaacatctcaggcac

SEQ ID NO: 35136 - DNA, 201 bp, Homo sapiens
tgattcagaacaatatgcctggaaactatgtcttcagttatgaccagtttttcagggacaagatcatggagaagaaacaggatcacacctaccgtgtgttmaagactgtgaaccgctgggctgatgcatatccctttgcccaacatttctctgaggcatctgtggcctcaaaggatgtgtccgtctggtgtagtaatgatt

SEQ ID NO: 35137 - DNA, 201 bp, Homo sapiens
cattttaccaacagggaaacagaatgagaaagaggaaggaaatgcccaaaaactacacagtgagttgcaaagagctaggatacttggcagatttatttgaratggctcttctccaatggtttcaataaaaatccagggattgacgcttcactggtaatccgggccctggaaatctgggcccagggtagcccctgaagccag

SEQ ID NO: 35138 - DNA, 201 bp, Homo sapiens
ttcgtggatgaggtccatgctgtaggactgtatgggtcccggggcgctgggattggggagcgtgatggaattatgcataagattgacatcatctctggaastcttggcaaggcctttggctgtgtgggcggctacattgccagcacccgtgacttggtggacatggtgcgctcctatgctgcaggcttcatctttaccact

SEQ ID NO: 35139 - DNA, 201 bp, Homo sapiens
ggccaagccctgaggcgagcccaccagcgcaatgtcaagcacatgcgccagctactcatggacaggggccttcctgtcatcccctgccccagccacatcawccccatccgggtgggcaatgcagcactcaacagcaagctctgtgatctcctgctctccaagcatggcatctatgtgcaggccatcaactacccaactgtc

SEQ ID NO: 35140 - DNA, 201 bp, Homo sapiens
tacttcgggaacatggggccccagtatgtcaccacctatgcctgagaagccagctgcctaggattcacaccccacctgcgcttcacttgggtccaggcctmctcctgtcttctgctttgttgtgtgcctctagctgaattgagcctaaaaataaagcacaaaccacagcatgtgaagccttttattggacagggaacagac

SEQ ID NO: 35141 - DNA, 201 bp, Homo sapiens
ctctgggaaggtcacacacctgattcagaacaatatgcctggaaactatgtcttcagttatgaccagtttttcagggacaagatcatggagaagaaacagkatcacacctaccgtgtgttcaagactgtgaaccgctgggctgatgcatatccctttgcccaacatttctctgaggcatctgtggcctcaaaggatgtgtc

SEQ ID NO: 35142 - DNA, 201 bp, Homo sapiens
aattatgcataagattgacatcatctctggaactcttggcaaggcctttggctgtgtgggcggctacattgccagcacccgtgacttggtggacatggtgygctcctatgctgcaggcttcatctttaccacttctctgccccccatggtgctctctggagctctagaatctgtgcggctgctcaagggagaggagggcca

SEQ ID NO: 35143 - DNA, 201 bp, Homo sapiens
cagatgatggaagattttgtggagaagctgctgctggcttggactgcggtggggctgcccctccaggatgtgtctgtggctgcctgcaatttctgtcgccrtcctgtacactttgagctcatgagtgagtgggaacgttcctacttcgggaacatggggccccagtatgtcaccacctatgcctgagaagccagctgccta

SEQ ID NO: 35144 - DNA, 201 bp, Homo sapiens
tttaccacttctctgccccccatggtgctctctggagctctagaatctgtgcggctgctcaagggagaggagggccaagccctgaggcgagcccaccagcrcaatgtcaagcacatgcgccagctactcatggacaggggccttcctgtcatcccctgccccagccacatcatccccatccgggtgggcaatgcagcactc

SEQ ID NO: 35145 - DNA, 201 bp, Homo sapiens
atgcctggaaactatgtcttcagttatgaccagtttttcagggacaagatcatggagaagaaacaggatcacacctaccgtgtgttcaagactgtgaaccdctgggctgatgcatatccctttgcccaacatttctctgaggcatctgtggcctcaaaggatgtgtccgtctggtgtagtaatgattacctgggcatgagc

SEQ ID NO: 35146 - DNA, 201 bp, Homo sapiens
ctgctttgttgccaatgactctactctcttcaccttggccaagatcctgccagggtgcgagatttactcagacgcaggcaaccatgcttccatgatccaargtatccgtaacagtggagcagccaagtttgtcttcaggcacaatgaccctgaccacctaaagaaacttctagagaagtctaaccctaagatacccaaaat

SEQ ID NO: 35147 - DNA, 201 bp, Homo sapiens
ctaggattcacaccccacctgcgcttcacttgggtccaggcctactcctgtcttctgctttgttgtgtgcctctagctgaattgagcctaaaaataaagcmcaaaccacagcatgtgaagccttttattggacagggaacagacaagtgcattctgactccctcagacaagtggcagatctatgaggtaaccataggtcac

SEQ ID NO: 35148 - DNA, 201 bp, Homo sapiens
gacatcatctctggaactcttggcaaggcctttggctgtgtgggcggctacattgccagcacccgtgacttggtggacatggtgcgctcctatgctgcagrcttcatctttaccacttctctgccccccatggtgctctctggagctctagaatctgtgcggctgctcaagggagaggagggccaagccctgaggcgagcc

SEQ ID NO: 35149 - DNA, 201 bp, Homo sapiens
tggaaactatgtcttcagttatgaccagtttttcagggacaagatcatggagaagaaacaggatcacacctaccgtgtgttcaagactgtgaaccgctggrctgatgcatatccctttgcccaacatttctctgaggcatctgtggcctcaaaggatgtgtccgtctggtgtagtaatgattacctgggcatgagccgaca

SEQ ID NO: 35150 - DNA, 201 bp, Homo sapiens
ctttggctgtgtgggcggctacattgccagcacccgtgacttggtggacatggtgcgctcctatgctgcaggcttcatctttaccacttctctgccccccrtggtgctctctggagctctagaatctgtgcggctgctcaagggagaggagggccaagccctgaggcgagcccaccagcgcaatgtcaagcacatgcgcca

SEQ ID NO: 35151 - DNA, 201 bp, Homo sapiens
tcccccggggtgaagagctcctgcgcttggcaccctccccccaccacagccctcagatgatggaagattttgtggagaagctgctgctggcttggactgcrgtggggctgcccctccaggatgtgtctgtggctgcctgcaatttctgtcgccgtcctgtacactttgagctcatgagtgagtgggaacgttcctacttcg

SEQ ID NO: 35152 - DNA, 201 bp, Homo sapiens
aaacaggatcacacctaccgtgtgttcaagactgtgaaccgctgggctgatgcatatccctttgcccaacatttctctgaggcatctgtggcctcaaaggwtgtgtccgtctggtgtagtaatgattacctgggcatgagccgacaccctcaggtcttgcaagccacacaggagaccctgcagcgtcatggtgctggagct

SEQ ID NO: 35153 - DNA, 201 bp, Homo sapiens; identical to SEQ ID NO: 35129

SEQ ID NO: 35154 - DNA, 201 bp, Homo sapiens; identical to SEQ ID NO: 35130

SEQ ID NO: 35155 - DNA, 201 bp, Homo sapiens; identical to SEQ ID NO: 35131

SEQ ID NO: 35156 - DNA, 201 bp, Homo sapiens; identical to SEQ ID NO: 35132

SEQ ID NO: 35157 - DNA, 201 bp, Homo sapiens; identical to SEQ ID NO: 35133

SEQ ID NO: 35158 - DNA, 201 bp, Homo sapiens; identical to SEQ ID NO: 35134

SEQ ID NO: 35159 - DNA, 201 bp, Homo sapiens; identical to SEQ ID NO: 35135

SEQ ID NO: 35160 - DNA, 201 bp, Homo sapiens; identical to SEQ ID NO: 35136

SEQ ID NO: 35161 - DNA, 201 bp, Homo sapiens; identical to SEQ ID NO: 35137

SEQ ID NO: 35162 - DNA, 201 bp, Homo sapiens; identical to SEQ ID NO: 35138

SEQ ID NO: 35163 - DNA, 201 bp, Homo sapiens; identical to SEQ ID NO: 35139

SEQ ID NO: 35164 - DNA, 201 bp, Homo sapiens; identical to SEQ ID NO: 35140

SEQ ID NO: 35165 - DNA, 201 bp, Homo sapiens; identical to SEQ ID NO: 35141

SEQ ID NO: 35166 - DNA, 201 bp, Homo sapiens; identical to SEQ ID NO: 35142

SEQ ID NO: 35167 - DNA, 201 bp, Homo sapiens; identical to SEQ ID NO: 35143

SEQ ID NO: 35168 - DNA, 201 bp, Homo sapiens; identical to SEQ ID NO: 35144

SEQ ID NO: 35169 - DNA, 201 bp, Homo sapiens; identical to SEQ ID NO: 35145

SEQ ID NO: 35170 - DNA, 201 bp, Homo sapiens; identical to SEQ ID NO: 35146

SEQ ID NO: 35171 - DNA, 201 bp, Homo sapiens; identical to SEQ ID NO: 35147

SEQ ID NO: 35172 - DNA, 201 bp, Homo sapiens; identical to SEQ ID NO: 35148

SEQ ID NO: 35173 - DNA, 201 bp, Homo sapiens; identical to SEQ ID NO: 35149

SEQ ID NO: 35174 - DNA, 201 bp, Homo sapiens; identical to SEQ ID NO: 35150

SEQ ID NO: 35175 - DNA, 201 bp, Homo sapiens; identical to SEQ ID NO: 35151

SEQ ID NO: 35176 - DNA, 201 bp, Homo sapiens; identical to SEQ ID NO: 35152

SEQ ID NO: 35177 - DNA, 201 bp, Homo sapiens
caaaagctactcaaagatggaggtgtgctgtcacccatcctcacacgactgatgaacttctttgtattctctcgaggtctcaccccagtctttgggccgtrtactcggccctctgagagtgagctgtgggacatgtgggcagggatccgcaacaatgacgggaacttagtcattgacagtctcttacagtacatcaatcag

SEQ ID NO: 35178 - DNA, 201 bp, Homo sapiens
tgcccttgatttcttaggctttggcttcagtgacaaaccgagaccacatcactattccatatttgagcaggccagcatcgtggaagcgcttttgcggcatytggggctccagaaccgcaggatcaaccttctttctcatgactatggagatattgttgctcaggagcttctctacaggtacaagcagaatcgatctggtcg

SEQ ID NO: 35179 - DNA, 201 bp, Homo sapiens
atcaaatgtatagacttggctttgttttttgtgctattaggaaattctgatgagcattactattcactgatgcagaaagacgttcttttgcataaaagactttttttaacactttggacttctctgaaatatttagaagtgctaatttctggcccacccccaacaggaattctatagtaaggaggaggagaaggggggctc

SEQ ID NO: 35180 - DNA, 201 bp, Homo sapiens
tttagtgtttcatcagctgtttttagttataaacattttgttaaaatagatattggtttctgaataaattgaactaaatccaaactatttcctaaaatcasaggacattaaggaccaatagcatctgtgccagagatgtactgttattagctgggaagaccaattctaacagcaaataacagtctgagactcctcatacct

SEQ ID NO: 35181 - DNA, 201 bp, Homo sapiens
attcctgttactttacagacaggaaagttccagaaactttaagaacaaactctgaaagacctatgagcaaatggtgctgaatactttttttttaaagccayatttcattgtcttagtcaaagcaggattattaagtgattatttaaaattcgtttttttaaattagcaacttcaagtataacaactttgaaactggaataa

SEQ ID NO: 35182 - DNA, 201 bp, Homo sapiens
ttggcttcagtgacaaaccgagaccacatcactattccatatttgagcaggccagcatcgtggaagcgcttttgcggcatctggggctccagaaccgcagratcaaccttctttctcatgactatggagatattgttgctcaggagcttctctacaggtacaagcagaatcgatctggtcggcttaccataaagagtctct

SEQ ID NO: 35183 - DNA, 201 bp, Homo sapiens
agaggatcccatgggcttcttgaatgcatatatgggcttcatcaactccttctgagctggaaagagtagcttccctgtattacctcccctactcccttatstgttgtgtattccacttaggaagaaatgcccaaaagaggtcctggccatcaaacataattctctcacaaagtccactttactcaaattggtgaacagtgt

SEQ ID NO: 35184 - DNA, 201 bp, Homo sapiens
aattcctgttactttacagacaggaaagttccagaaactttaagaacaaactctgaaagacctatgagcaaatggtgctgaatactttttttttaaagccmcatttcattgtcttagtcaaagcaggattattaagtgattatttaaaattcgtttttttaaattagcaacttcaagtataacaactttgaaactggaata

SEQ ID NO: 35185 - DNA, 201 bp, Homo sapiens
agcagctggagtataggatagtatttgattttcaagatcacccaaagctgcactatcgtcccaaagctgaccaagtagaataaaaagaaaaaaaaaaaaamcaacccatgcgcaaagatagacatttgcttgatctgctggctcagggccaaatgtttaatttgcttctccaaagtcattcatcttcaaaagtctgattct

SEQ ID NO: 35186 - DNA, 201 bp, Homo sapiens
ataaaatgaagttaagcagctggagtataggatagtatttgattttcaagatcacccaaagctgcactatcgtcccaaagctgaccaagtagaataaaaaraaaaaaaaaaaaaacaacccatgcgcaaagatagacatttgcttgatctgctggctcagggccaaatgtttaatttgcttctccaaagtcattcatcttc

SEQ ID NO: 35187 - DNA, 201 bp, Homo sapiens; identical to SEQ ID NO: 35177

SEQ ID NO: 35188 - DNA, 201 bp, Homo sapiens; identical to SEQ ID NO: 35178

SEQ ID NO: 35189 - DNA, 166 bp, Homo sapiens
tcacttctttggccttcacttttattatgtaaaagtactcagatcaggccgaatacaattttattytctttatccaatgccggaggctattgtcgaagccacggcctgccatttcataccctttgcaataggtggcgctgacgcctggcagggagaaggcggcagc

SEQ ID NO: 35190 - DNA, 201 bp, Homo sapiens; identical to SEQ ID NO: 35179

SEQ ID NO: 35191 - DNA, 201 bp, Homo sapiens
tgatttaagactatgatttacctatacattatatatattttataaagatactaaaccagcatacccttactctgccagagtagtgaagctaattaaacacrtttggtttctgaataaattgaactaaatccaaactatttcctaaaatcacaggacattaaggaccaatagcatctgtgccagagatgtactgttattagc

SEQ ID NO: 35192 - DNA, 201 bp, Homo sapiens
ctaaaccagcatacccttactctgccagagtagtgaagctaattaaacacgtttggtttctgaataaattgaactaaatccaaactatttcctaaaatcasaggacattaaggaccaatagcatctgtgccagagatgtactgttattagctgggaagaccaattctaacagcaaataacagtctgagactcctcatacct

SEQ ID NO: 35193 - DNA, 201 bp, Homo sapiens; identical to SEQ ID NO: 35181

SEQ ID NO: 35194 - DNA, 201 bp, Homo sapiens; identical to SEQ ID NO: 35182

SEQ ID NO: 35195 - DNA, 201 bp, Homo sapiens; identical to SEQ ID NO: 35183

SEQ ID NO: 35196 - DNA, 201 bp, Homo sapiens; identical to SEQ ID NO: 35184

SEQ ID NO: 35197 - DNA, 201 bp, Homo sapiens; identical to SEQ ID NO: 35185

SEQ ID NO: 35198 - DNA, 201 bp, Homo sapiens; identical to SEQ ID NO: 35186

SEQ ID NO: 35199 - DNA, 201 bp, Homo sapiens; identical to SEQ ID NO: 35177

SEQ ID NO: 35200 - DNA, 201 bp, Homo sapiens; identical to SEQ ID NO: 35178

SEQ ID NO: 35201 - DNA, 201 bp, Homo sapiens; identical to SEQ ID NO: 35179

SEQ ID NO: 35202 - DNA, 201 bp, Homo sapiens; identical to SEQ ID NO: 35191

SEQ ID NO: 35203 - DNA, 201 bp, Homo sapiens; identical to SEQ ID NO: 35192

SEQ ID NO: 35204 - DNA, 201 bp, Homo sapiens; identical to SEQ ID NO: 35181

SEQ ID NO: 35205 - DNA, 201 bp, Homo sapiens; identical to SEQ ID NO: 35182

SEQ ID NO: 35206 - DNA, 201 bp, Homo sapiens; identical to SEQ ID NO: 35183

SEQ ID NO: 35207 - DNA, 201 bp, Homo sapiens; identical to SEQ ID NO: 35184

SEQ ID NO: 35208 - DNA, 201 bp, Homo sapiens; identical to SEQ ID NO: 35185

SEQ ID NO: 35209 - DNA, 201 bp, Homo sapiens; identical to SEQ ID NO: 35186

SEQ ID NO: 35210 - DNA, 201 bp, Homo sapiens
attacactgtggggcatggagctgggccttctgagcatgcggagaggagagctggccaggtttctgttcaaaccgaactacgcctatggaacgctgggctsccctcccttgatccccccaaacaccactgtcctgtttgagattgagctgcttgacttcctggactgtgctgagtcagacaagttttgtgctctctcagct

SEQ ID NO: 35211 - DNA, 201 bp, Homo sapiens
tgaaggacgtcatccgagaaggagctggagacctagtggcgcctgatgcttcggtgctagtgaaatactcgggatacctggaacacatggacagacccttmgattctaattactttaggaaaactcctcggctaatgaaacttggagaggatattacactgtggggcatggagctgggccttctgagcatgcggagaggag

SEQ ID NO: 35212 - DNA, 201 bp, Homo sapiens
ctgactgagtatcaaaaggcccgggattttctagttcgagcccagaaggagcaacccttcaatcatgacatcaataatgagctgaagaaactggctagctrttacagggactatgtggataaagagaaagaaatgtggcaccgcatgttcgcgccctgtggcgatggttctacagcaggagaaagttgaaggttcttcacc

SEQ ID NO: 35213 - DNA, 183 bp, Homo sapiens
gccccagaatggaatgccgccgtcggtaggggtctgccgggcataaaggggccttcggaaccccaccagagtcacagccaggragggcagcggggcgcaccaggccgaaggctcacgccacagggagggcagctaggacatggggggaagcgcgttaaaccagggagtcctggaaggggacga

SEQ ID NO: 35214 - DNA, 201 bp, Homo sapiens
gagaggatattacactgtggggcatggagctgggccttctgagcatgcggagaggagagctggccaggtttctgttcaaaccgaactacgcctatggaacrctgggctgccctcccttgatccccccaaacaccactgtcctgtttgagattgagctgcttgacttcctggactgtgctgagtcagacaagttttgtgctc

SEQ ID NO: 35215 - DNA, 201 bp, Homo sapiens
gcggagaggagagctggccaggtttctgttcaaaccgaactacgcctatggaacgctgggctgccctcccttgatccccccaaacaccactgtcctgtttragattgagctgcttgacttcctggactgtgctgagtcagacaagttttgtgctctctcagctgagcagcaagaccaatttccacttcagaaggtcctgaa

SEQ ID NO: 35216 - DNA, 201 bp, Homo sapiens
agaaggtcctgaaagtggcagctacggaacgggagtttggcaactaccttttccgccagaatcgtttctatgatgccaaagtgagatataaaagggccctrttgcttctgcgccggcgatcagcaccccctgaagagcagcacctggtggaggccgccaagcttcctgttctcctgaacctgtcctttacatacctgaagc

SEQ ID NO: 35217 - DNA, 201 bp, Homo sapiens
tgttcgcgccctgtggcgatggttctacagcaggagaaagttgaaggttcttcacctaccaacgaggggagagagctgtggttctccatcattgggggagyggaagggagctcccagcgcagccgtggcagccaccttccaggagcaggggctggaatgtcctgtggccgcatctctcatggacgcggctgaaacgtgttt

SEQ ID NO: 35218 - DNA, 201 bp, Homo sapiens
agacccttcgattctaattactttaggaaaactcctcggctaatgaaacttggagaggatattacactgtggggcatggagctgggccttctgagcatgcrgagaggagagctggccaggtttctgttcaaaccgaactacgcctatggaacgctgggctgccctcccttgatccccccaaacaccactgtcctgtttgag

SEQ ID NO: 35219 - DNA, 201 bp, Homo sapiens
ggatgctggacatctcgggggaccggggcgtgctgaaggacgtcatccgagaaggagctggagacctagtggcgcctgatgcttcggtgctagtgaaatastcgggatacctggaacacatggacagacccttcgattctaattactttaggaaaactcctcggctaatgaaacttggagaggatattacactgtggggca

SEQ ID NO: 35220 - DNA, 112 bp, Homo sapiens
gccccagaatgkaatgccgccgtcggtaggggtctgccgggcataaaggggccttcggaaccccaccagagtcacagccagggagggcagcggggcgcaccaggccgaaggc

SEQ ID NO: 35221 - DNA, 201 bp, Homo sapiens
tgcggagaggagagctggccaggtttctgttcaaaccgaactacgcctatggaacgctgggctgccctcccttgatccccccaaacaccactgtcctgttygagattgagctgcttgacttcctggactgtgctgagtcagacaagttttgtgctctctcagctgagcagcaagaccaatttccacttcagaaggtcctga

SEQ ID NO: 35222 - DNA, 186 bp, Homo sapiens
aaggacgtcatccgagaaggagctggagacctagtggcgcctgatgcttcggtgctagatattacactgtggggcatggagctgggccttctgagcatgcrgagaggagagctggccagatgcttcgtcttgggtaaactcctcgactcccaaggccccagcctccatctttacctcagagcctcc

SEQ ID NO: 35223 - DNA, 183 bp, Homo sapiens; identical to SEQ ID NO: 35213

SEQ ID NO: 35224 - DNA, 112 bp, Homo sapiens; identical to SEQ ID NO: 35220

SEQ ID NO: 35225 - DNA, 201 bp, Homo sapiens
ggtgtgctgctgaggcgtgagaatggcgtcccgcggccggcgtccggagcatggcggacccccagagctgttttatgacgagacagaagcccggaaatacrttcgcaactcacggatgattgatatccagaccaggatggctgggcgagcattggagcttctttatctgccagagaataagccctgttacctgctggatat

SEQ ID NO: 35226 - DNA, 104 bp, Homo sapiens
cggmaggcgccagtcgcaggtgtgctgctgaggcgtgagaatggcgtcccgcggccggcgtccggagcatggcggacccccagagctgttttatgacgagacag

SEQ ID NO: 35227 - DNA, 133 bp, Homo sapiens
cggcaggcgccagtcgcaggtgtgctgctgagscgtgagaatggcgtcccgcggccggcgtccggagcatggcggacccccagagctgttttatgacgagacagaagcccggaaatacgttcgcaactcacgg

SEQ ID NO: 35228 - DNA, 187 bp, Homo sapiens
tgtaatcccagcaccttgggaggctgaggtgggaggatcatttgaggccaggagtttgagacctgcctgggcaacataatgaaacttcctttccagggagraaaaaaaaaaaaaaaaaaaaagctctgagagcatcttattttgtttaaaggcaagaaataaaatttccttttgtggagctctggca

SEQ ID NO: 35229 - DNA, 201 bp, Homo sapiens; identical to SEQ ID NO: 35225

SEQ ID NO: 35230 - DNA, 104 bp, Homo sapiens; identical to SEQ ID NO: 35226

SEQ ID NO: 35231 - DNA, 201 bp, Homo sapiens
tgatttccataaccaaataagtaaatgccatttaggaagggtgagagggcaccgacagttctccgttgtgtgatgtataaattaaggaatggcggagtagkatgtagatgttgaaagataagtgaagagctgttcctgactaataacatgaatgactctggattccaattggtggccatctccctaaacttgagtggggag

SEQ ID NO: 35232 - DNA, 133 bp, Homo sapiens; identical to SEQ ID NO: 35227

SEQ ID NO: 35233 - DNA, 187 bp, Homo sapiens; identical to SEQ ID NO: 35228

SEQ ID NO: 35234 - DNA, 201 bp, Homo sapiens
ggcagatgacatggtattacagataaggtgatgcgactgatttccataaccaaataagtaaatgccatttaggaagggtgagagggcaccgacagttctcygttgtgtgatgtataaattaaggaatggcggagtaggatgtagatgttgaaagataagtgaagagctgttcctgactaataacatgaatgactctggatt

SEQ ID NO: 35235 - DNA, 201 bp, Homo sapiens
ttgcttctcttttttctgttctcgtccggggatcccgagctgtcctgcagctgtaccctgagaactcagagcaggtgagtccctcggctactgggtgtgcmggggagttgggggactcaacaggtaagctgtcctggggaagcgacaaagaatcttatgcagattggcgggaaaaggaggaaacatgcaccctagtgtggc

SEQ ID NO: 35236 - DNA, 201 bp, Homo sapiens
atgcgactgatttccataaccaaataagtaaatgccatttaggaagggtgagagggcaccgacagttctccgttgtgtgatgtataaattaaggaatggcrgagtaggatgtagatgttgaaagataagtgaagagctgttcctgactaataacatgaatgactctggattccaattggtggccatctccctaaacttgag

SEQ ID NO: 35237 - DNA, 119 bp, Homo sapiens
tagtctcgtggagagattraagatggcggcttctcaggcggtggaggaaatgcggagccgcgtggttctgggggagtttggggttcgcaatgtccatactactgactttcccggtaact

SEQ ID NO: 35238 - DNA, 201 bp, Homo sapiens
ttggatgcttctgaggcaagctgaagctttgggttctgactgacccaccctacaggactgctgaacagagagcccagtgtgactagggatcctgagttttytgggacaattccagctttaatcaatacattttgttaaatgtgccataaaatgagactttttacgcctttataaggccttagatgtaaataaactcaccca

SEQ ID NO: 35239 - DNA, 201 bp, Homo sapiens
aagccatcaaagtactgatggggaagtgccggcgcttcttggatgaactagatgcggttcagatggactgagcttggatgcttctgaggcaagctgaagcyttgggttctgactgacccaccctacaggactgctgaacagagagcccagtgtgactagggatcctgagttttctgggacaattccagctttaatcaatac

SEQ ID NO: 35240 - DNA, 201 bp, Homo sapiens
caccattctccttataatttcaggtaagaaagatttgctggctgcggtggctcacacctgtaatcccagcactttgggaggccaaggcgagtggatcacgrggtcaagagagcgagaccatcctggctaacatggtgaaaccccgtctctactaaaaaaaaaaaaaaaaaaaaaaaaaattagtcgggcatgggggcgagc

SEQ ID NO: 35241 - DNA, 108 bp, Homo sapiens
tagtctcrtggagagattgaagatggcggcttctcaggcggtggaggaaatgcggagccgcgtggttctgggggagtttggggttcgcaatgtccatactactgactt

SEQ ID NO: 35242 - DNA, 201 bp, Homo sapiens
acaaaaaaaatatcctgtgttaacagtgaaaaaatcttaaagttcttttcctaaaatcctaaatggcactgatattgaattccattatactcttagtttarctgcatttccgtcaggctgcacattatggtcactggcccaaaaagtaggaataaaaaaataggaaggaggacatccttgtaacaaactctccttcaccat

SEQ ID NO: 35243 - DNA, 165 bp, Homo sapiens
acacctgtaatcccagcactttgggaggccaaggcgagtggatcacggggtcaagagagcgagaccatcctggctaacatggtgaaaccccgtctctactaaaaaaaaaaaaaaaaaaaaaaaaaattagtcgggcatgggggcgagcgcctgtagtcccagcta

SEQ ID NO: 35244 - DNA, 119 bp, Homo sapiens; identical to SEQ ID NO: 35237

SEQ ID NO: 35245 - DNA, 169 bp, Homo sapiens
ccgggttcgagatcattatatctgtaagaaagatttgctggctgcggtggctcacacctgtaatcccagcactttgggaggccaaggcgagtggatcacgrggtcaagagagcgagaccatcctggctaacatggtgaaaccccgtctctactaaaaaaaaaaaaaaaa

SEQ ID NO: 35246 - DNA, 108 bp, Homo sapiens; identical to SEQ ID NO: 35241

SEQ ID NO: 35247 - DNA, 116 bp, Homo sapiens
acacctgtaatcccagcactttgggaggccaaggcgagtggatcacggggtcaagagagcgagaccatcctggctaacatggtgaaaccccgtctctactaaaaaaaaaaaaaaaa

SEQ ID NO: 35248 - DNA, 119 bp, Homo sapiens; identical to SEQ ID NO: 35237

SEQ ID NO: 35249 - DNA, 201 bp, Homo sapiens; identical to SEQ ID NO: 35238

SEQ ID NO: 35250 - DNA, 201 bp, Homo sapiens; identical to SEQ ID NO: 35239

SEQ ID NO: 35251 - DNA, 108 bp, Homo sapiens; identical to SEQ ID NO: 35241

SEQ ID NO: 35252 - DNA, 201 bp, Homo sapiens
cagtcacggtggctgatgcttgtaatcctaacactttgggaggctgaggtgggtggactactggagccctggagttcaaaaccggcctaagccacatggcraaacagtctttacaaaaaatacaaagatggtggcttatgcctgtagtcgtacctactcaggaggctgaggttgggaggatcacctgaatctgggagtttg

SEQ ID NO: 35253 - DNA, 201 bp, Homo sapiens
gcagtgacccaagttctctgccaaaggtgccagttaccagctcagaagctaagacccagggaagtggcccagcggtgacagccactaagaaagcaaccacrtctctggaatcattcttccaaaaagctgcagaaaggcagaaagttaaagaagcttcgctttcatctcttactgctcccactcaggctcccatgagcaatt

SEQ ID NO: 35254 - DNA, 201 bp, Homo sapiens
gtggctgttgcaattagcccaggaactagaggagagactgactaaagaccgaaatgataatgacagggtagccacccagctggttgtgagcattcgtgtayaaggagacaaacgcctcagcagcctgcgccgctgctgtgcccttacccgctatgatgctcacaagatgagccatgatgcatttactgtcatcaagaactg

SEQ ID NO: 35255 - DNA, 201 bp, Homo sapiens
tccaggcgtggtggtgcacgcctgtaatcccagctactcaggaggctaaggcaggagaatcacttgaacccaggaggcagaggttggagtgagctgagatygcgccaccgcactccagcctgggcaacagagcgagactccatctcaaacaaaaacaagaacaaaaacaaacataaagttggcacagaaaagggaccaagt

SEQ ID NO: 35256 - DNA, 201 bp, Homo sapiens
gctggaggtgactcagaaagcaaccccaaatccaagtcttctagctgctgaggaccaagtgccctgtgagaagtgtggctccctggtaccggtatgggatwtgccagaacacatggactatcattttgcattggagttgcagaaatcctttttgcagccccactcttcaaacccccaggttgtttctgccgtatctcatca

SEQ ID NO: 35257 - DNA, 201 bp, Homo sapiens
tcttggctatatgccatgtgccgagggattgaacatgatccagttaaacccaggcaactacccaaaaccattggctgtagtaagaacttcccaggaaaaayagctcttgctactcgggaacaggtacaatggtggctgttgcaattagcccaggaactagaggagagactgactaaagaccgaaatgataatgacagggta

SEQ ID NO: 35258 - DNA, 201 bp, Homo sapiens
tgcagaaaggcagaaagttaaagaagcttcgctttcatctcttactgctcccactcaggctcccatgagcaattcaccatccaagccctcattaccttttyaaaccagtcaaagtacaggaactgagcccttctttaagcagaaaagtctgcttctaaagcagaaacagcttaataattcttcagtttcttccccccaaca

SEQ ID NO: 35259 - DNA, 201 bp, Homo sapiens
ccgggaagccagtgttgaagtgatggagataatgtctcgttttgctgtgattgaacgtgccagcattgatgaggcttacgtagatctgaccagtgctgtayaagagagactacaaaagctacaaggtcagcctatctcggcagacttgttgccaagcacttacattgaagggttgccccaaggccctacaacggcagaaga

SEQ ID NO: 35260 - DNA, 201 bp, Homo sapiens
gcacaagttcgtgagtcccgtgggaaagctaacctcaccaagtaccgggaagccagtgttgaagtgatggagataatgtctcgttttgctgtgattgaacrtgccagcattgatgaggcttacgtagatctgaccagtgctgtacaagagagactacaaaagctacaaggtcagcctatctcggcagacttgttgccaagc

SEQ ID NO: 35261 - DNA, 201 bp, Homo sapiens
ccatggtccaactgtaaagcattaccaaactctttaccaacagagtatccagggtgtgtccctgtttgtgaaggggtgtcgaagctagaagaatcctctamagcaactcctgcagagatggatttggcccacaacagccaaagcatgcacgcctcttcagcttccaaatctgtgctggaggtgactcagaaagcaacccca

SEQ ID NO: 35262 - DNA, 201 bp, Homo sapiens
tactgctcccactcaggctcccatgagcaattcaccatccaagccctcattaccttttcaaaccagtcaaagtacaggaactgagcccttctttaagcagraaagtctgcttctaaagcagaaacagcttaataattcttcagtttcttccccccaacaaaacccatggtccaactgtaaagcattaccaaactctttacc

SEQ ID NO: 35263 - DNA, 201 bp, Homo sapiens
cctcaccaagtaccgggaagccagtgttgaagtgatggagataatgtctcgttttgctgtgattgaacgtgccagcattgatgaggcttacgtagatctgmccagtgctgtacaagagagactacaaaagctacaaggtcagcctatctcggcagacttgttgccaagcacttacattgaagggttgccccaaggccctac

SEQ ID NO: 35264 - DNA, 201 bp, Homo sapiens
aggcttacgtagatctgaccagtgctgtacaagagagactacaaaagctacaaggtcagcctatctcggcagacttgttgccaagcacttacattgaaggkttgccccaaggccctacaacggcagaagagactgttcagaaagaggggatgcgaaaacaaggcttatttcaatggctcgattctcttcagattgataacc

SEQ ID NO: 35265 - DNA, 201 bp, Homo sapiens
aagccctcattaccttttcaaaccagtcaaagtacaggaactgagcccttctttaagcagaaaagtctgcttctaaagcagaaacagcttaataattcttmagtttcttccccccaacaaaacccatggtccaactgtaaagcattaccaaactctttaccaacagagtatccagggtgtgtccctgtttgtgaaggggtg

SEQ ID NO: 35266 - DNA, 201 bp, Homo sapiens
gagcagtgattgtggaggaaatgagagcagccatagagagggagactggttttcagtgttcagctggaatttcacacaataaggtcctggcaaaactggcytgtggactaaacaagcccaaccgccaaaccctggtttcacatgggtcagtcccacagctcttcagccaaatgcccattcgcaaaatccgtagtcttggag

SEQ ID NO: 35267 - DNA, 201 bp, Homo sapiens
gcctctgtcattgagatcctagggatagaatacatgggtgaactgacccagttcactgaatcccagctccagagtcattttggggagaagaatgggtcttrgctatatgccatgtgccgagggattgaacatgatccagttaaacccaggcaactacccaaaaccattggctgtagtaagaacttcccaggaaaaacagct

SEQ ID NO: 35268 - DNA, 201 bp, Homo sapiens
gattctcttcagattgataacctcacctctccagacctgcagctcaccgtgggagcagtgattgtggaggaaatgagagcagccatagagagggagactgkttttcagtgttcagctggaatttcacacaataaggtcctggcaaaactggcctgtggactaaacaagcccaaccgccaaaccctggtttcacatgggtca

SEQ ID NO: 35269 - DNA, 201 bp, Homo sapiens
tggcagttttgccaggtgtttgttaccttgaaaaatggctactggacaggatcgagtggttgctctcgtggacatggactgtttttttgttcaagtggagyagcggcaaaatcctcatttgaggaataaaccttgtgcagttgtacagtacaaatcatggaagggtggtggaataattgcagtgagttatgaagctcgtgc

SEQ ID NO: 35270 - DNA, 201 bp, Homo sapiens
gtcaggagtttcagaccaatatggtgaaaccccatctctactaaaattacaaaaaaaattatccaggcgtggtggtgcacgcctgtaatcccagctactcrggaggctaaggcaggagaatcacttgaacccaggaggcagaggttggagtgagctgagatcgcgccaccgcactccagcctgggcaacagagcgagactc

SEQ ID NO: 35271 - DNA, 201 bp, Homo sapiens
cctgagggcatgcaaacattggaatcattttttaagccattaacacattagtgctgccctcaggcttgcctgtaggatttaatattttttatctttacagrtctttatctttaatattttatctttacagatttccctgagaaagggaattatgaaatttttaatacaaaaaataatccatttaggtgctgagttacggtc

SEQ ID NO: 35272 - DNA, 201 bp, Homo sapiens
tccccccaacaaaacccatggtccaactgtaaagcattaccaaactctttaccaacagagtatccagggtgtgtccctgtttgtgaaggggtgtcgaagcyagaagaatcctctaaagcaactcctgcagagatggatttggcccacaacagccaaagcatgcacgcctcttcagcttccaaatctgtgctggaggtgact

SEQ ID NO: 35273 - DNA, 201 bp, Homo sapiens
agcattaccaaactctttaccaacagagtatccagggtgtgtccctgtttgtgaaggggtgtcgaagctagaagaatcctctaaagcaactcctgcagagrtggatttggcccacaacagccaaagcatgcacgcctcttcagcttccaaatctgtgctggaggtgactcagaaagcaaccccaaatccaagtcttctagc

SEQ ID NO: 35274 - DNA, 201 bp, Homo sapiens; identical to SEQ ID NO: 35253

SEQ ID NO: 35275 - DNA, 201 bp, Homo sapiens; identical to SEQ ID NO: 35254

SEQ ID NO: 35276 - DNA, 201 bp, Homo sapiens; identical to SEQ ID NO: 35256

SEQ ID NO: 35277 - DNA, 201 bp, Homo sapiens; identical to SEQ ID NO: 35257

SEQ ID NO: 35278 - DNA, 201 bp, Homo sapiens; identical to SEQ ID NO: 35258

SEQ ID NO: 35279 - DNA, 201 bp, Homo sapiens; identical to SEQ ID NO: 35259

SEQ ID NO: 35280 - DNA, 201 bp, Homo sapiens; identical to SEQ ID NO: 35260

SEQ ID NO: 35281 - DNA, 201 bp, Homo sapiens; identical to SEQ ID NO: 35261

SEQ ID NO: 35282 - DNA, 201 bp, Homo sapiens; identical to SEQ ID NO: 35262

SEQ ID NO: 35283 - DNA, 201 bp, Homo sapiens; identical to SEQ ID NO: 35263

SEQ ID NO: 35284 - DNA, 201 bp, Homo sapiens; identical to SEQ ID NO: 35264

SEQ ID NO: 35285 - DNA, 201 bp, Homo sapiens; identical to SEQ ID NO: 35265

SEQ ID NO: 35286 - DNA, 201 bp, Homo sapiens; identical to SEQ ID NO: 35252

SEQ ID NO: 35287 - DNA, 201 bp, Homo sapiens; identical to SEQ ID NO: 35266

SEQ ID NO: 35288 - DNA, 201 bp, Homo sapiens; identical to SEQ ID NO: 35267

SEQ ID NO: 35289 - DNA, 201 bp, Homo sapiens; identical to SEQ ID NO: 35268

SEQ ID NO: 35290 - DNA, 201 bp, Homo sapiens; identical to SEQ ID NO: 35269

SEQ ID NO: 35291 - DNA, 201 bp, Homo sapiens; identical to SEQ ID NO: 35271

SEQ ID NO: 35292 - DNA, 201 bp, Homo sapiens; identical to SEQ ID NO: 35272

SEQ ID NO: 35293 - DNA, 201 bp, Homo sapiens; identical to SEQ ID NO: 35273

SEQ ID NO: 35294 - DNA, 201 bp, Homo sapiens; identical to SEQ ID NO: 35253

SEQ ID NO: 35295 - DNA, 201 bp, Homo sapiens; identical to SEQ ID NO: 35254

SEQ ID NO: 35296 - DNA, 201 bp, Homo sapiens; identical to SEQ ID NO: 35255

SEQ ID NO: 35297 - DNA, 201 bp, Homo sapiens; identical to SEQ ID NO: 35256

SEQ ID NO: 35298 - DNA, 201 bp, Homo sapiens; identical to SEQ ID NO: 35257

SEQ ID NO: 35299 - DNA, 201 bp, Homo sapiens; identical to SEQ ID NO: 35261

SEQ ID NO: 35300 - DNA, 201 bp, Homo sapiens; identical to SEQ ID NO: 35258

SEQ ID NO: 35301 - DNA, 201 bp, Homo sapiens; identical to SEQ ID NO: 35260

SEQ ID NO: 35302 - DNA, 201 bp, Homo sapiens; identical to SEQ ID NO: 35259

SEQ ID NO: 35303 - DNA, 201 bp, Homo sapiens; identical to SEQ ID NO: 35263

SEQ ID NO: 35304 - DNA, 201 bp, Homo sapiens; identical to SEQ ID NO: 35264

SEQ ID NO: 35305 - DNA, 201 bp, Homo sapiens; identical to SEQ ID NO: 35262

SEQ ID NO: 35306 - DNA, 201 bp, Homo sapiens; identical to SEQ ID NO: 35265

SEQ ID NO: 35307 - DNA, 201 bp, Homo sapiens; identical to SEQ ID NO: 35266

SEQ ID NO: 35308 - DNA, 201 bp, Homo sapiens; identical to SEQ ID NO: 35267

SEQ ID NO: 35309 - DNA, 201 bp, Homo sapiens; identical to SEQ ID NO: 35268

SEQ ID NO: 35310 - DNA, 201 bp, Homo sapiens; identical to SEQ ID NO: 35269

SEQ ID NO: 35311 - DNA, 201 bp, Homo sapiens; identical to SEQ ID NO: 35270

SEQ ID NO: 35312 - DNA, 201 bp, Homo sapiens; identical to SEQ ID NO: 35271

SEQ ID NO: 35313 - DNA, 201 bp, Homo sapiens; identical to SEQ ID NO: 35272

SEQ ID NO: 35314 - DNA, 201 bp, Homo sapiens; identical to SEQ ID NO: 35273

SEQ ID NO: 35315 - DNA, 201 bp, Homo sapiens
tggtgttaatcccttttattgatgagcgattattggaagccatggagacatgtaaccactccctcaaaaaggaagagaggaaaagaaaccaacatagtgartgcctaatgtgctggtatgatagagacacagagtttatctatccttctccatggccagaaaagttccctgccatagaacgatgttgtacaaggtataaaa

SEQ ID NO: 35316 - DNA, 201 bp, Homo sapiens
ttggctcttagaattaagttaatttcttctctttccatctacctttttataaatacatatctatgtctcataaaaattagaatgtactattttaaaataayatgtgtaaattgaaatttttttcatttttaagttatcaggcacttttcatgctgtttaaaagactgtgtatcaaattgtgcactttaagtatgtgcagtt

SEQ ID NO: 35317 - DNA, 201 bp, Homo sapiens
aatgggagatgtgccctccctatggaggatgtaagaagcagaggccatttctgccccatgttgaggaaacaatctgttgatagacctggaatttagagtayatctgaaaagcagttggacttcaagaaatttaaaattctctctttgagatggggtggactaagaccacccccaaagtttaaaaatatgctcattcaactt

SEQ ID NO: 35318 - DNA, 142 bp, Homo sapiens
aggctgcggcggagccccggcggggcgtttggtttcggtttsgccctgactgggattagtgttgacgatcgaaatgggagtccccaagttttacagatggatctcagagcggtatccctgtctcagcgaagtggtgaaagag

SEQ ID NO: 35319 - DNA, 201 bp, Homo sapiens
cctactaaagatgatgatgaattctgcaacatttggcagtccttacagggatctggaaagatgcaatactttcagccaactatacaagagaagggtgcagytctacctcaagaaataagccaagtaaatcaacatcataaatctggctttaatgacaacagtgttaaatatcagcaaagaaaacatgaccctcacagaaaa

SEQ ID NO: 35320 - DNA, 201 bp, Homo sapiens
cataaacaaaaacaaaataaccagaattgaccagaaagcattatatttctgtggatttcctactctgaaacacatcagacacaaattttttttgaagaaargtggtgttcaagtattccagcaaagcagtcgtggagaaaacatgatgttggaaatcttagtggatgcagaatcagatgaacttaccgtagaaaatgtagc

SEQ ID NO: 35321 - DNA, 201 bp, Homo sapiens
tttatttatgtgttctatttgtgttagtcataactgtttatagtggttgtctaatttttacttttattatatgagatagagctgtgcagatcttcactcaagttagttctgtcacgcttcttcccattatttagagcacagttttttaaagcaactgtacaatttctcagccttatgagcttgctgtatttcttggtatca

SEQ ID NO: 35322 - DNA, 201 bp, Homo sapiens
ttatttatgtgttctatttgtgttagtcataactgtttatagtggttgtctaatttttacttttattatatgagatagagctgtgcagatcttcactcaagttagttctgtcacgcttcttcccattatttagagcacagttttttaaagcaactgtacaatttctcagccttatgagcttgctgtatttcttggtatcat

SEQ ID NO: 35323 - DNA, 201 bp, Homo sapiens
tatttatgtgttctatttgtgttagtcataactgtttatagtggttgtctaatttttacttttattatatgagatagagctgtgcagatcttcactcaagttagttctgtcacgcttcttcccattatttagagcacagttttttaaagcaactgtacaatttctcagccttatgagcttgctgtatttcttggtatcatg

SEQ ID NO: 35324 - DNA, 201 bp, Homo sapiens
aaaagaaaagatcacatttaaatatgatattgaaaggataatagatgattggattttgatggggtttcttgttggtaatgattttatccctcatctacctyatttacatattaatcatgatgcactgcctcttctttatggaacatatgttaccatcctgccagaacttgggggttatattaatgaaagtgggcacctcaa

SEQ ID NO: 35325 - DNA, 201 bp, Homo sapiens
ggggtttcttgttggtaatgattttatccctcatctacctcatttacatattaatcatgatgcactgcctcttctttatggaacatatgttaccatcctgycagaacttgggggttatattaatgaaagtgggcacctcaacttacctcgatttgagaaataccttgtgaaactatcagattttgatcgggagcacttcag

SEQ ID NO: 35326 - DNA, 201 bp, Homo sapiens
atttatgtgttctatttgtgttagtcataactgtttatagtggttgtctaatttttacttttattatatgagatagagctgtgcagatcttcactcaagttagttctgtcacgcttcttcccattatttagagcacagttttttaaagcaactgtacaatttctcagccttatgagcttgctgtatttcttggtatcatgt

SEQ ID NO: 35327 - DNA, 179 bp, Homo sapiens
tggactccgaatgtatttttgtggtgttacgttatccgtagatttctagcatgaagttagcctcacgatgctgtgcaaaggattttaaaatatgagagtcmctgaaagagtttaaacatctgttcatgttaaatgctctatggattttaattaaagacttgagaatgattttataagct

SEQ ID NO: 35328 - DNA, 201 bp, Homo sapiens
tgttaatcccttttattgatgagaagcgattattggaagccatggagacatgtaaccactccctcaaaaaggaagagaggaaaagaaaccaacatagtgartgcctaatgtgctggtatgatagagacacagagtttatctatccttctccatggccagaaaagttccctgccatagaacgatgttgtacaaggtataaaa

SEQ ID NO: 35329 - DNA, 201 bp, Homo sapiens; identical to SEQ ID NO: 35316

SEQ ID NO: 35330 - DNA, 201 bp, Homo sapiens; identical to SEQ ID NO: 35317

SEQ ID NO: 35331 - DNA, 142 bp, Homo sapiens; identical to SEQ ID NO: 35318

SEQ ID NO: 35332 - DNA, 201 bp, Homo sapiens; identical to SEQ ID NO: 35319

SEQ ID NO: 35333 - DNA, 201 bp, Homo sapiens; identical to SEQ ID NO: 35320

SEQ ID NO: 35334 - DNA, 201 bp, Homo sapiens; identical to SEQ ID NO: 35321

SEQ ID NO: 35335 - DNA, 201 bp, Homo sapiens; identical to SEQ ID NO: 35322

SEQ ID NO: 35336 - DNA, 201 bp, Homo sapiens; identical to SEQ ID NO: 35323

SEQ ID NO: 35337 - DNA, 201 bp, Homo sapiens; identical to SEQ ID NO: 35324

SEQ ID NO: 35338 - DNA, 201 bp, Homo sapiens; identical to SEQ ID NO: 35325

SEQ ID NO: 35339 - DNA, 201 bp, Homo sapiens; identical to SEQ ID NO: 35326

SEQ ID NO: 35340 - DNA, 179 bp, Homo sapiens; identical to SEQ ID NO: 35327

SEQ ID NO: 35341 - DNA, 201 bp, Homo sapiens
tgaggcaggagaatggtgtgaacccaggaggcggagcttgcagtgagccgagatagtgcctctgcactccagcctgggtgacagagcaagactccgtctcaaaaaaaaagggctgataatgataaacagtgagcactccggtcctttttcttacgttttccttttttccttcctctccaccccacaagttttgctttttaa

SEQ ID NO: 35342 - DNA, 201 bp, Homo sapiens
tggcccacagcatctatggaatcccatctgtcatcaattctgccaattacgtgtatttccttggcttggagaaagtcttaacccttgatcacccagatgcrgtgaagctttttacccgccagcttttggaactccatcagggacaaggcctagatatttactggagggataattacacttgtcccactgaagaagaatata

SEQ ID NO: 35343 - DNA, 201 bp, Homo sapiens
tagtgcctctgcactccagcctgggtgacagagcaagactccgtctcaaaaaaaaagggctgataatgataaacagtgagcactccggtcctttttcttasgttttccttttttccttcctctccaccccacaagttttgctttttaaccaaggtgtctctgcttgatgaaattcacatgctagtctaaatctttttttct

SEQ ID NO: 35344 - DNA, 201 bp, Homo sapiens
cacaggcatttaatcattggctgaaagttccagaggacaagctacagattattattgaagtgacagaaatgttgcataatgccagtttactcatcgatgayattgaagacaactcaaaactccgacgtggctttccagtggcccacagcatctatggaatcccatctgtcatcaattctgccaattacgtgtatttccttg

SEQ ID NO: 35345 - DNA, 201 bp, Homo sapiens
gaatttttatccatacactttctaactgtactatctgggcagttccaagccagtttctattagctagctggaccaaagaccacaaatctctttttttcctraacgctgctgtaaggaatatctcacttttccccccggaaacaccctcactgaagtcttctatgaaaaggctgataatgggctgggcgcggtggctcacgc

SEQ ID NO: 35346 - DNA, 201 bp, Homo sapiens
tctgtacagataatcaaaattcaaagttgaaagaatcaaaagcagccacagttatgtaggtctgatttgaatgtcataattgcagtgacaggacattgccmccaactctatcctactaccatcaatgttgtgtttattccgtcaataaaaaagacttgcttccaggaatttttatccatacactttctaactgtactatct

SEQ ID NO: 35347 - DNA, 201 bp, Homo sapiens
ctactcgggaggctgaggcaggagaatggtgtgaacccaggaggcggagcttgcagtgagccgagatagtgcctctgcactccagcctgggtgacagagcragactccgtctcaaaaaaaaagggctgataatgataaacagtgagcactccggtcctttttcttacgttttccttttttccttcctctccaccccacaag

SEQ ID NO: 35348 - DNA, 201 bp, Homo sapiens; identical to SEQ ID NO: 35341

SEQ ID NO: 35349 - DNA, 201 bp, Homo sapiens; identical to SEQ ID NO: 35342

SEQ ID NO: 35350 - DNA, 201 bp, Homo sapiens; identical to SEQ ID NO: 35343

SEQ ID NO: 35351 - DNA, 201 bp, Homo sapiens; identical to SEQ ID NO: 35344

SEQ ID NO: 35352 - DNA, 201 bp, Homo sapiens; identical to SEQ ID NO: 35345

SEQ ID NO: 35353 - DNA, 201 bp, Homo sapiens; identical to SEQ ID NO: 35346

SEQ ID NO: 35354 - DNA, 201 bp, Homo sapiens; identical to SEQ ID NO: 35347

SEQ ID NO: 35355 - DNA, 201 bp, Homo sapiens; identical to SEQ ID NO: 35341

SEQ ID NO: 35356 - DNA, 201 bp, Homo sapiens; identical to SEQ ID NO: 35342

SEQ ID NO: 35357 - DNA, 201 bp, Homo sapiens; identical to SEQ ID NO: 35343

SEQ ID NO: 35358 - DNA, 201 bp, Homo sapiens; identical to SEQ ID NO: 35344

SEQ ID NO: 35359 - DNA, 201 bp, Homo sapiens; identical to SEQ ID NO: 35345

SEQ ID NO: 35360 - DNA, 201 bp, Homo sapiens; identical to SEQ ID NO: 35346

SEQ ID NO: 35361 - DNA, 201 bp, Homo sapiens; identical to SEQ ID NO: 35347

SEQ ID NO: 35362 - DNA, 201 bp, Homo sapiens; identical to SEQ ID NO: 35341

SEQ ID NO: 35363 - DNA, 201 bp, Homo sapiens; identical to SEQ ID NO: 35342

SEQ ID NO: 35364 - DNA, 201 bp, Homo sapiens; identical to SEQ ID NO: 35343

SEQ ID NO: 35365 - DNA, 201 bp, Homo sapiens; identical to SEQ ID NO: 35344

SEQ ID NO: 35366 - DNA, 201 bp, Homo sapiens; identical to SEQ ID NO: 35345

SEQ ID NO: 35367 - DNA, 201 bp, Homo sapiens; identical to SEQ ID NO: 35346

SEQ ID NO: 35368 - DNA, 201 bp, Homo sapiens; identical to SEQ ID NO: 35347

SEQ ID NO: 35369 - DNA, 157 bp, Homo sapiens
gcaccggctgcccacagggaacacattcctttgctggggttcagcgcctctcctggggctggaagtgccaaagcctggggcaaagctgtgtttcagccacrctgaacccaattacacacagcgggagaacgcagtaaacagctttcccacaagagcc

SEQ ID NO: 35370 - DNA, 201 bp, Homo sapiens
aggacagagggtggtcgtcgtggatgatctgctggccactggtggaaccatgaacgctgcctgtgagctgctgggccgcctgcaggctgaggtcctggagygcgtgagcctggtggagctgacctcgcttaagggcagggagaagctggcacctgtacccttcttctctctcctgcagtatgagtgaccacagggcctccc

SEQ ID NO: 35371 - DNA, 153 bp, Homo sapiens
acccctcgtggcggtcccgcccgtccccgcgcaggcgcgctcgggctgccgcwggctcttcgcacgcggccatggccgactccgagctgcagctggttgagcagcggatccgcagcttccccgacttccccaccccaggcgtggtattcaggg

SEQ ID NO: 35372 - DNA, 201 bp, Homo sapiens
gcgggggaagctgccaggccccactctgtgggcctcctattccctggagtacgggaaggctgagctggagattcagaaagacgccctggagccaggacagmgggtggtcgtcgtggatgatctgctggccactggtggaaccatgaacgctgcctgtgagctgctgggccgcctgcaggctgaggtcctggagtgcgtgag

SEQ ID NO: 35373 - DNA, 201 bp, Homo sapiens
ccacgggggccgcatcgactacatcgcaggcctagactcccgaggcttcctctttggcccctccctggcccaggagcttggactgggctgcgtgctcatchgaaagcgggggaagctgccaggccccactctgtgggcctcctattccctggagtacgggaaggctgagctggagattcagaaagacgccctggagccagg

SEQ ID NO: 35374 - DNA, 201 bp, Homo sapiens
cctggagccaggacagagggtggtcgtcgtggatgatctgctggccactggtggaaccatgaacgctgcctgtgagctgctgggccgcctgcaggctgagktcctggagtgcgtgagcctggtggagctgacctcgcttaagggcagggagaagctggcacctgtacccttcttctctctcctgcagtatgagtgaccaca

SEQ ID NO: 35375 - DNA, 201 bp, Homo sapiens
gtcctgaaggaccccgcctccttccgcgccgccatcggcctcctggcgcgacacctgaaggcgacccacgggggccgcatcgactacatcgcaggcctagwctcccgaggcttcctctttggcccctccctggcccaggagcttggactgggctgcgtgctcatccgaaagcgggggaagctgccaggccccactctgtgg

SEQ ID NO: 35376 - DNA, 201 bp, Homo sapiens
caggagcttggactgggctgcgtgctcatccgaaagcgggggaagctgccaggccccactctgtgggcctcctattccctggagtacgggaaggctgagcyggagattcagaaagacgccctggagccaggacagagggtggtcgtcgtggatgatctgctggccactggtggaaccatgaacgctgcctgtgagctgctg

SEQ ID NO: 35377 - DNA, 201 bp, Homo sapiens
aggtcctggagtgcgtgagcctggtggagctgacctcgcttaagggcagggagaagctggcacctgtacccttcttctctctcctgcagtatgagtgaccrcagggcctcccagcccaacatctccagctggatcccagggaaatatcagccttgggcaactgcagtgaccaggggcaccggctgcccacagggaacacat

SEQ ID NO: 35378 - DNA, 201 bp, Homo sapiens
ctggagtacgggaaggctgagctggagattcagaaagacgccctggagccaggacagagggtggtcgtcgtggatgatctgctggccactggtggaaccaygaacgctgcctgtgagctgctgggccgcctgcaggctgaggtcctggagtgcgtgagcctggtggagctgacctcgcttaagggcagggagaagctggca

SEQ ID NO: 35379 - DNA, 201 bp, Homo sapiens
gctgaggtcctggagtgcgtgagcctggtggagctgacctcgcttaagggcagggagaagctggcacctgtacccttcttctctctcctgcagtatgagtsaccacagggcctcccagcccaacatctccagctggatcccagggaaatatcagccttgggcaactgcagtgaccaggggcaccggctgcccacagggaac

SEQ ID NO: 35380 - DNA, 109 bp, Homo sapiens
tctcctggggctggaagtgccaaagcctggggcaaagctgtgtttcagccacactgaacccaattacacacagcgggagaacgcagtaaacagctttcccmcaagagcc

SEQ ID NO: 35381 - DNA, 154 bp, Homo sapiens
agccccagagggatgacttccagttccgtctgtcctttgtccacaaggaatttccctggacgctaattatgagggaggcgtgtagcttcttatcattgtarctatgttatttagaaataaaacgggaggcaggtttgcctaattcccagcttga

SEQ ID NO: 35382 - DNA, 201 bp, Homo sapiens
atgagggagcctgccctcgcatggtggccagggcacgtcactgcaggccaggtgagccaccagctgggcagcatcatggacctcttcaccaccagcctggyccttgcgggcctgacgccgcccagcgacagggccattgatggcctcaacctcctccccaccctcctgcagggccggctgatggacaggcctatcttctat

SEQ ID NO: 35383 - DNA, 201 bp, Homo sapiens
cccatccgcaatggcttctacaccaccaacgcccatgccagaaacgcctacacaccgcaggagattgtgggcggcatcccagactcggagcagctcctgcyggagcttctgaagaaggccggctacgtcagcaagattgtcggcaagtggcatctgggtcacaggccccagttccaccccctgaagcacggatttgatgag

SEQ ID NO: 35384 - DNA, 201 bp, Homo sapiens
acgcagggggactgcacaattccacctgcccaggacctgaccctggcgtgtgcttggccctcctcctcgcccacggcgcctcagatttcaggaccctcctsctcgcccacggcgcctcagacctcaggaccctgccgtctcacgcctttgtgaaccccaaatatctgagaccagtctcagtttattttgccaaggttaagg

SEQ ID NO: 35385 - DNA, 201 bp, Homo sapiens
tgggacgggacccaggggagaggttccccctcagctttgccagcgccgagtaccaggaggccctcagcaggatcacctcggtcgtccagcagcaccaggargccttggtccccgcgcagccccagctcaacgtgtgcaactgggcggtcatgaactgggcacctccgggctgtgaaaagttagggaagtgtctgacacctc

SEQ ID NO: 35386 - DNA, 201 bp, Homo sapiens
gaagcagaccacgtttgaaggagggatgagggagcctgccctcgcatggtggccagggcacgtcactgcaggccaggtgagccaccagctgggcagcatcwtggacctcttcaccaccagcctggcccttgcgggcctgacgccgcccagcgacagggccattgatggcctcaacctcctccccaccctcctgcagggccg

SEQ ID NO: 35387 - DNA, 201 bp, Homo sapiens
cgacagggccattgatggcctcaacctcctccccaccctcctgcagggccggctgatggacaggcctatcttctattaccgtggcgacacgctgatggcgkccaccctcgggcagcacaaggctcacttctggacctggaccaactcctgggagaacttcagacagggcattgatttctgccctgggcagaacgtttcagg

SEQ ID NO: 35388 - DNA, 201 bp, Homo sapiens
atggacctcttcaccaccagcctggcccttgcgggcctgacgccgcccagcgacagggccattgatggcctcaacctcctccccaccctcctgcagggccrgctgatggacaggcctatcttctattaccgtggcgacacgctgatggcggccaccctcgggcagcacaaggctcacttctggacctggaccaactcctgg

SEQ ID NO: 35389 - DNA, 201 bp, Homo sapiens
caacctcctccccaccctcctgcagggccggctgatggacaggcctatcttctattaccgtggcgacacgctgatggcggccaccctcgggcagcacaagrctcacttctggacctggaccaactcctgggagaacttcagacagggcattgatttctgccctgggcagaacgtttcaggggtcacaactcacaatctgga

SEQ ID NO: 35390 - DNA, 201 bp, Homo sapiens
atccgcatttttatgtaaacagtaagggaacggggcaatcatataagcgtttgtctcaggggagccccagagggatgacttccagttccgtctgtcctttrtccacaaggaatttccctggacgctaattatgagggaggcgtgtagcttcttatcattgtaactatgttatttagaaataaaacgggaggcaggtttgcc

SEQ ID NO: 35391 - DNA, 201 bp, Homo sapiens
ggccattgatggcctcaacctcctccccaccctcctgcagggccggctgatggacaggcctatcttctattaccgtggcgacacgctgatggcggccaccstcgggcagcacaaggctcacttctggacctggaccaactcctgggagaacttcagacagggcattgatttctgccctgggcagaacgtttcaggggtcac

SEQ ID NO: 35392 - DNA, 201 bp, Homo sapiens
tgcgggcctgacgccgcccagcgacagggccattgatggcctcaacctcctccccaccctcctgcagggccggctgatggacaggcctatcttctattacygtggcgacacgctgatggcggccaccctcgggcagcacaaggctcacttctggacctggaccaactcctgggagaacttcagacagggcattgatttctg

SEQ ID NO: 35393 - DNA, 201 bp, Homo sapiens
gcagggccggctgatggacaggcctatcttctattaccgtggcgacacgctgatggcggccaccctcgggcagcacaaggctcacttctggacctggaccmactcctgggagaacttcagacagggcattgatttctgccctgggcagaacgtttcaggggtcacaactcacaatctggaagaccacacgaagctgcccct

SEQ ID NO: 35394 - DNA, 201 bp, Homo sapiens
cggctgatggacaggcctatcttctattaccgtggcgacacgctgatggcggccaccctcgggcagcacaaggctcacttctggacctggaccaactcctsggagaacttcagacagggcattgatttctgccctgggcagaacgtttcaggggtcacaactcacaatctggaagaccacacgaagctgcccctgatcttc

SEQ ID NO: 35395 - DNA, 201 bp, Homo sapiens
agggcacgtcactgcaggccaggtgagccaccagctgggcagcatcatggacctcttcaccaccagcctggcccttgcgggcctgacgccgcccagcgacrgggccattgatggcctcaacctcctccccaccctcctgcagggccggctgatggacaggcctatcttctattaccgtggcgacacgctgatggcggccac

SEQ ID NO: 35396 - DNA, 201 bp, Homo sapiens
gacacgctgatggcggccaccctcgggcagcacaaggctcacttctggacctggaccaactcctgggagaacttcagacagggcattgatttctgccctgrgcagaacgtttcaggggtcacaactcacaatctggaagaccacacgaagctgcccctgatcttccacctgggacgggacccaggggagaggttccccctc

SEQ ID NO: 35397 - DNA, 201 bp, Homo sapiens
gatttctgccctgggcagaacgtttcaggggtcacaactcacaatctggaagaccacacgaagctgcccctgatcttccacctgggacgggacccaggggwgaggttccccctcagctttgccagcgccgagtaccaggaggccctcagcaggatcacctcggtcgtccagcagcaccaggaggccttggtccccgcgcag

SEQ ID NO: 35398 - DNA, 201 bp, Homo sapiens
cagctttgccagcgccgagtaccaggaggccctcagcaggatcacctcggtcgtccagcagcaccaggaggccttggtccccgcgcagccccagctcaacrtgtgcaactgggcggtcatgaactgggcacctccgggctgtgaaaagttagggaagtgtctgacacctccagaatccattcccaagaagtgcctctggtc

SEQ ID NO: 35399 - DNA, 201 bp, Homo sapiens
gtaccaggaggccctcagcaggatcacctcggtcgtccagcagcaccaggaggccttggtccccgcgcagccccagctcaacgtgtgcaactgggcggtcrtgaactgggcacctccgggctgtgaaaagttagggaagtgtctgacacctccagaatccattcccaagaagtgcctctggtcccactagcacctgcgcag

SEQ ID NO: 35400 - DNA, 201 bp, Homo sapiens
ctttttcctctactgggctgtcgacgccacgcacgcacccgtctatgcctccaaacccttcttgggcaccagtcagcgagggcggtatggagacgccgtcmgggagattgatgacagcattgggaagatactggagctcctccaagacctgcacgtcgcggacaacaccttcgtcttcttcacgtcggacaacggcgctgc

SEQ ID NO: 35401 - DNA, 201 bp, Homo sapiens
taatctgaagacgggggaagccaacctcacccagatctacctgcaggaagccctggacttcattaagagacaggcacggcaccacccctttttcctctackgggctgtcgacgccacgcacgcacccgtctatgcctccaaacccttcttgggcaccagtcagcgagggcggtatggagacgccgtccgggagattgatga

SEQ ID NO: 35402 - DNA, 201 bp, Homo sapiens
ctgaagacgggggaagccaacctcacccagatctacctgcaggaagccctggacttcattaagagacaggcacggcaccacccctttttcctctactgggstgtcgacgccacgcacgcacccgtctatgcctccaaacccttcttgggcaccagtcagcgagggcggtatggagacgccgtccgggagattgatgacagc

SEQ ID NO: 35403 - DNA, 201 bp, Homo sapiens
gggactgcacaattccacctgcccaggacctgaccctggcgtgtgcttggccctcctcctcgcccacggcgcctcagatttcaggaccctcctcctcgccsacggcgcctcagacctcaggaccctgccgtctcacgcctttgtgaaccccaaatatctgagaccagtctcagtttattttgccaaggttaaggatgcacc

SEQ ID NO: 35404 - DNA, 201 bp, Homo sapiens
aagaaggccggctacgtcagcaagattgtcggcaagtggcatctgggtcacaggccccagttccaccccctgaagcacggatttgatgagtggtttggatyccccaactgccactttggaccttatgacaacaaggccaggcccaacatccctgtgtacagggactgggagatggttggcagatattatgaagaatttcct

SEQ ID NO: 35405 - DNA, 201 bp, Homo sapiens
acgtcagcaagattgtcggcaagtggcatctgggtcacaggccccagttccaccccctgaagcacggatttgatgagtggtttggatcccccaactgccastttggaccttatgacaacaaggccaggcccaacatccctgtgtacagggactgggagatggttggcagatattatgaagaatttcctattaatctgaaga

SEQ ID NO: 35406 - DNA, 201 bp, Homo sapiens
cagcaagattgtcggcaagtggcatctgggtcacaggccccagttccaccccctgaagcacggatttgatgagtggtttggatcccccaactgccactttrgaccttatgacaacaaggccaggcccaacatccctgtgtacagggactgggagatggttggcagatattatgaagaatttcctattaatctgaagacggg

SEQ ID NO: 35407 - DNA, 201 bp, Homo sapiens
gccattgatggcctcaacctcctccccaccctcctgcagggccggctgatggacaggcctatcttctattaccgtggcgacacgctgatggcggccacccycgggcagcacaaggctcacttctggacctggaccaactcctgggagaacttcagacagggcattgatttctgccctgggcagaacgtttcaggggtcaca

SEQ ID NO: 35408 - DNA, 201 bp, Homo sapiens
cctgctcctgctcatggacgacatgggatggggtgacctcggggtgtatggagagccctccagagagaccccgaatttggaccggatggctgcagaaggghtgcttttcccaaacttctattctgccaaccctctgtgctcgccatcgagggcggcactgctcacaggacggctacccatccgcaatggcttctacaccac

SEQ ID NO: 35409 - DNA, 201 bp, Homo sapiens
ggtgacctcggggtgtatggagagccctccagagagaccccgaatttggaccggatggctgcagaagggctgcttttcccaaacttctattctgccaaccstctgtgctcgccatcgagggcggcactgctcacaggacggctacccatccgcaatggcttctacaccaccaacgcccatgccagaaacgcctacacaccg

SEQ ID NO: 35410 - DNA, 201 bp, Homo sapiens
gggtgtatggagagccctccagagagaccccgaatttggaccggatggctgcagaagggctgcttttcccaaacttctattctgccaaccctctgtgctcrccatcgagggcggcactgctcacaggacggctacccatccgcaatggcttctacaccaccaacgcccatgccagaaacgcctacacaccgcaggagattg

SEQ ID NO: 35411 - DNA, 201 bp, Homo sapiens
ttgtcggcaagtggcatctgggtcacaggccccagttccaccccctgaagcacggatttgatgagtggtttggatcccccaactgccactttggaccttaygacaacaaggccaggcccaacatccctgtgtacagggactgggagatggttggcagatattatgaagaatttcctattaatctgaagacgggggaagcca

SEQ ID NO: 35412 - DNA, 201 bp, Homo sapiens
ggggtgtatggagagccctccagagagaccccgaatttggaccggatggctgcagaagggctgcttttcccaaacttctattctgccaaccctctgtgctygccatcgagggcggcactgctcacaggacggctacccatccgcaatggcttctacaccaccaacgcccatgccagaaacgcctacacaccgcaggagatt

SEQ ID NO: 35413 - DNA, 201 bp, Homo sapiens
gcagctcctgccggagcttctgaagaaggccggctacgtcagcaagattgtcggcaagtggcatctgggtcacaggccccagttccaccccctgaagcacrgatttgatgagtggtttggatcccccaactgccactttggaccttatgacaacaaggccaggcccaacatccctgtgtacagggactgggagatggttgg

SEQ ID NO: 35414 - DNA, 201 bp, Homo sapiens
ctgtgctcgccatcgagggcggcactgctcacaggacggctacccatccgcaatggcttctacaccaccaacgcccatgccagaaacgcctacacaccgcrggagattgtgggcggcatcccagactcggagcagctcctgccggagcttctgaagaaggccggctacgtcagcaagattgtcggcaagtggcatctgggt

SEQ ID NO: 35415 - DNA, 195 bp, Homo sapiens
gtaagggaacggggcaatcatataagcgtttgtctcaggggagccccagagggatgacttccagttccgtctgtcctttgtccacaaggaatttccctggrcgctaattatgagggaggcgtgtagcttcttatcattgtaactatgttatttagaaataaaacgggaggcaggtttgcctaattcccagcttga

SEQ ID NO: 35416 - DNA, 201 bp, Homo sapiens
ctcctgccggagcttctgaagaaggccggctacgtcagcaagattgtcggcaagtggcatctgggtcacaggccccagttccaccccctgaagcacggatbtgatgagtggtttggatcccccaactgccactttggaccttatgacaacaaggccaggcccaacatccctgtgtacagggactgggagatggttggcaga

SEQ ID NO: 35417 - DNA, 201 bp, Homo sapiens
tctgtgctcgccatcgagggcggcactgctcacaggacggctacccatccgcaatggcttctacaccaccaacgcccatgccagaaacgcctacacaccgyaggagattgtgggcggcatcccagactcggagcagctcctgccggagcttctgaagaaggccggctacgtcagcaagattgtcggcaagtggcatctggg

SEQ ID NO: 35418 - DNA, 201 bp, Homo sapiens
ctcgccatcgagggcggcactgctcacaggacggctacccatccgcaatggcttctacaccaccaacgcccatgccagaaacgcctacacaccgcaggagwttgtgggcggcatcccagactcggagcagctcctgccggagcttctgaagaaggccggctacgtcagcaagattgtcggcaagtggcatctgggtcacag

SEQ ID NO: 35419 - DNA, 201 bp, Homo sapiens
attctgccaaccctctgtgctcgccatcgagggcggcactgctcacaggacggctacccatccgcaatggcttctacaccaccaacgcccatgccagaaaygcctacacaccgcaggagattgtgggcggcatcccagactcggagcagctcctgccggagcttctgaagaaggccggctacgtcagcaagattgtcggca

SEQ ID NO: 35420 - DNA, 201 bp, Homo sapiens
cccatgccagaaacgcctacacaccgcaggagattgtgggcggcatcccagactcggagcagctcctgccggagcttctgaagaaggccggctacgtcagsaagattgtcggcaagtggcatctgggtcacaggccccagttccaccccctgaagcacggatttgatgagtggtttggatcccccaactgccactttggac

SEQ ID NO: 35421 - DNA, 201 bp, Homo sapiens
agaaacgcctacacaccgcaggagattgtgggcggcatcccagactcggagcagctcctgccggagcttctgaagaaggccggctacgtcagcaagattgycggcaagtggcatctgggtcacaggccccagttccaccccctgaagcacggatttgatgagtggtttggatcccccaactgccactttggaccttatgac

SEQ ID NO: 35422 - DNA, 201 bp, Homo sapiens
aaacgcctacacaccgcaggagattgtgggcggcatcccagactcggagcagctcctgccggagcttctgaagaaggccggctacgtcagcaagattgtcrgcaagtggcatctgggtcacaggccccagttccaccccctgaagcacggatttgatgagtggtttggatcccccaactgccactttggaccttatgacaa

SEQ ID NO: 35423 - DNA, 201 bp, Homo sapiens
ctacacaccgcaggagattgtgggcggcatcccagactcggagcagctcctgccggagcttctgaagaaggccggctacgtcagcaagattgtcggcaagwggcatctgggtcacaggccccagttccaccccctgaagcacggatttgatgagtggtttggatcccccaactgccactttggaccttatgacaacaaggc

SEQ ID NO: 35424 - DNA, 105 bp, Homo sapiens
atttccctggacgctaattatgagggaggcgtgtagcttcttatcattgtaactatgttatttagaaataaaacgggaggcaggtttgcctaattcccagsttga

SEQ ID NO: 35425 - DNA, 201 bp, Homo sapiens
tatggagacgccgtccgggagattgatgacagcattgggaagatactggagctcctccaagacctgcacgtcgcggacaacaccttcgtcttcttcacgtyggacaacggcgctgccctcatttccgcccccgaacaaggtggcagcaacggcccctttctgtgtgggaagcagaccacgtttgaaggagggatgagggag

SEQ ID NO: 35426 - DNA, 201 bp, Homo sapiens
gtcggcaagtggcatctgggtcacaggccccagttccaccccctgaagcacggatttgatgagtggtttggatcccccaactgccactttggaccttatgmcaacaaggccaggcccaacatccctgtgtacagggactgggagatggttggcagatattatgaagaatttcctattaatctgaagacgggggaagccaac

SEQ ID NO: 35427 - DNA, 201 bp, Homo sapiens
gtcagcgagggcggtatggagacgccgtccgggagattgatgacagcattgggaagatactggagctcctccaagacctgcacgtcgcggacaacaccttygtcttcttcacgtcggacaacggcgctgccctcatttccgcccccgaacaaggtggcagcaacggcccctttctgtgtgggaagcagaccacgtttgaag

SEQ ID NO: 35428 - DNA, 201 bp, Homo sapiens
ccagccggaagggccggcggacgctcgctaggtcggctcgctggccggggctccgcggctcccgtggttgccatggcggcggttgtcgcggcgacgaggtrgtggcagctgttgctggtgctcagcgccgcggggatgggggcctcgggcgccccgcagccccccaacatcctgctcctgctcatggacgacatgggatgg

SEQ ID NO: 35429 - DNA, 201 bp, Homo sapiens
cgccccgcagccccccaacatcctgctcctgctcatggacgacatgggatggggtgacctcggggtgtatggagagccctccagagagaccccgaatttgraccggatggctgcagaagggctgcttttcccaaacttctattctgccaaccctctgtgctcgccatcgagggcggcactgctcacaggacggctacccat

SEQ ID NO: 35430 - DNA, 201 bp, Homo sapiens
ccaacctcacccagatctacctgcaggaagccctggacttcattaagagacaggcacggcaccacccctttttcctctactgggctgtcgacgccacgcaygcacccgtctatgcctccaaacccttcttgggcaccagtcagcgagggcggtatggagacgccgtccgggagattgatgacagcattgggaagatactgg

SEQ ID NO: 35431 - DNA, 201 bp, Homo sapiens
ttcacgtcggacaacggcgctgccctcatttccgcccccgaacaaggtggcagcaacggcccctttctgtgtgggaagcagaccacgtttgaaggagggakgagggagcctgccctcgcatggtggccagggcacgtcactgcaggccaggtgagccaccagctgggcagcatcatggacctcttcaccaccagcctggcc

SEQ ID NO: 35432 - DNA, 201 bp, Homo sapiens
atgtgtatggcgtacattggttcagtcagccttccactgaatacacgattgagtctggcccagtgaatccgcatttttatgtaaacagtaagggaacgggscaatcatataagcgtttgtctcaggggagccccagagggatgacttccagttccgtctgtcctttgtccacaaggaatttccctggacgctaattatgag

SEQ ID NO: 35433 - DNA, 201 bp, Homo sapiens
aaaagttagggaagtgtctgacacctccagaatccattcccaagaagtgcctctggtcccactagcacctgcgcagactcaggccaggcctagaatctccrgttggccctgcaagtgcctggaggaaggatggctctggcctcggtcctcccccaaccctgcccaagccagacagacagcacctgcagacgcagggggact

SEQ ID NO: 35434 - DNA, 201 bp, Homo sapiens
cagtcagccttccactgaatacacgattgagtctggcccagtgaatccgcatttttatgtaaacagtaagggaacggggcaatcatataagcgtttgtctyaggggagccccagagggatgacttccagttccgtctgtcctttgtccacaaggaatttccctggacgctaattatgagggaggcgtgtagcttcttatca

SEQ ID NO: 35435 - DNA, 201 bp, Homo sapiens
acggcgcctcagatttcaggaccctcctcctcgcccacggcgcctcagacctcaggaccctgccgtctcacgcctttgtgaaccccaaatatctgagaccrgtctcagtttattttgccaaggttaaggatgcacctgtgacagcctcaggaggtcctgacaacaggtgcctgaggtggctggggatacagtttgccttta

SEQ ID NO: 35436 - DNA, 201 bp, Homo sapiens
gcgagggcggtatggagacgccgtccgggagattgatgacagcattgggaagatactggagctcctccaagacctgcacgtcgcggacaacaccttcgtcktcttcacgtcggacaacggcgctgccctcatttccgcccccgaacaaggtggcagcaacggcccctttctgtgtgggaagcagaccacgtttgaaggagg

SEQ ID NO: 35437 - DNA, 201 bp, Homo sapiens
gggcggcatcccagactcggagcagctcctgccggagcttctgaagaaggccggctacgtcagcaagattgtcggcaagtggcatctgggtcacaggcccyagttccaccccctgaagcacggatttgatgagtggtttggatcccccaactgccactttggaccttatgacaacaaggccaggcccaacatccctgtgta

SEQ ID NO: 35438 - DNA, 201 bp, Homo sapiens
ctgaagcacggatttgatgagtggtttggatcccccaactgccactttggaccttatgacaacaaggccaggcccaacatccctgtgtacagggactgggrgatggttggcagatattatgaagaatttcctattaatctgaagacgggggaagccaacctcacccagatctacctgcaggaagccctggacttcattaag

SEQ ID NO: 35439 - DNA, 201 bp, Homo sapiens
gcctttgtgaaccccaaatatctgagaccagtctcagtttattttgccaaggttaaggatgcacctgtgacagcctcaggaggtcctgacaacaggtgccygaggtggctggggatacagtttgcctttatacatcttagggagacacaagatcagtatgtgtatggcgtacattggttcagtcagccttccactgaatac

SEQ ID NO: 35440 - DNA, 201 bp, Homo sapiens
acaacaaggccaggcccaacatccctgtgtacagggactgggagatggttggcagatattatgaagaatttcctattaatctgaagacgggggaagccaasctcacccagatctacctgcaggaagccctggacttcattaagagacaggcacggcaccacccctttttcctctactgggctgtcgacgccacgcacgcac

SEQ ID NO: 35441 - DNA, 201 bp, Homo sapiens
ctggacttcattaagagacaggcacggcaccacccctttttcctctactgggctgtcgacgccacgcacgcacccgtctatgcctccaaacccttcttggrcaccagtcagcgagggcggtatggagacgccgtccgggagattgatgacagcattgggaagatactggagctcctccaagacctgcacgtcgcggacaac

SEQ ID NO: 35442 - DNA, 201 bp, Homo sapiens
acaggcacggcaccacccctttttcctctactgggctgtcgacgccacgcacgcacccgtctatgcctccaaacccttcttgggcaccagtcagcgagggyggtatggagacgccgtccgggagattgatgacagcattgggaagatactggagctcctccaagacctgcacgtcgcggacaacaccttcgtcttcttcac

SEQ ID NO: 35443 - DNA, 201 bp, Homo sapiens
ccacccctttttcctctactgggctgtcgacgccacgcacgcacccgtctatgcctccaaacccttcttgggcaccagtcagcgagggcggtatggagacrccgtccgggagattgatgacagcattgggaagatactggagctcctccaagacctgcacgtcgcggacaacaccttcgtcttcttcacgtcggacaacgg

SEQ ID NO: 35444 - DNA, 201 bp, Homo sapiens
tttttcctctactgggctgtcgacgccacgcacgcacccgtctatgcctccaaacccttcttgggcaccagtcagcgagggcggtatggagacgccgtccrggagattgatgacagcattgggaagatactggagctcctccaagacctgcacgtcgcggacaacaccttcgtcttcttcacgtcggacaacggcgctgcc

SEQ ID NO: 35445 - DNA, 201 bp, Homo sapiens
gatgacagcattgggaagatactggagctcctccaagacctgcacgtcgcggacaacaccttcgtcttcttcacgtcggacaacggcgctgccctcatttycgcccccgaacaaggtggcagcaacggcccctttctgtgtgggaagcagaccacgtttgaaggagggatgagggagcctgccctcgcatggtggccaggg

SEQ ID NO: 35446 - DNA, 201 bp, Homo sapiens
gatactggagctcctccaagacctgcacgtcgcggacaacaccttcgtcttcttcacgtcggacaacggcgctgccctcatttccgcccccgaacaaggtkgcagcaacggcccctttctgtgtgggaagcagaccacgtttgaaggagggatgagggagcctgccctcgcatggtggccagggcacgtcactgcaggcca

SEQ ID NO: 35447 - DNA, 201 bp, Homo sapiens
cccctttctgtgtgggaagcagaccacgtttgaaggagggatgagggagcctgccctcgcatggtggccagggcacgtcactgcaggccaggtgagccacyagctgggcagcatcatggacctcttcaccaccagcctggcccttgcgggcctgacgccgcccagcgacagggccattgatggcctcaacctcctccccac

SEQ ID NO: 35448 - DNA, 201 bp, Homo sapiens
tttggaccttatgacaacaaggccaggcccaacatccctgtgtacagggactgggagatggttggcagatattatgaagaatttcctattaatctgaagaygggggaagccaacctcacccagatctacctgcaggaagccctggacttcattaagagacaggcacggcaccacccctttttcctctactgggctgtcgac

SEQ ID NO: 35449 - DNA, 201 bp, Homo sapiens
ggggtcacaactcacaatctggaagaccacacgaagctgcccctgatcttccacctgggacgggacccaggggagaggttccccctcagctttgccagcgycgagtaccaggaggccctcagcaggatcacctcggtcgtccagcagcaccaggaggccttggtccccgcgcagccccagctcaacgtgtgcaactgggcg

SEQ ID NO: 35450 - DNA, 201 bp, Homo sapiens
ggacccaggggagaggttccccctcagctttgccagcgccgagtaccaggaggccctcagcaggatcacctcggtcgtccagcagcaccaggaggccttgktccccgcgcagccccagctcaacgtgtgcaactgggcggtcatgaactgggcacctccgggctgtgaaaagttagggaagtgtctgacacctccagaatc

SEQ ID NO: 35451 - DNA, 201 bp, Homo sapiens
cctgatcttccacctgggacgggacccaggggagaggttccccctcagctttgccagcgccgagtaccaggaggccctcagcaggatcacctcggtcgtcyagcagcaccaggaggccttggtccccgcgcagccccagctcaacgtgtgcaactgggcggtcatgaactgggcacctccgggctgtgaaaagttagggaa

SEQ ID NO: 35452 - DNA, 201 bp, Homo sapiens
gtaaatgactataaactattatgtgattgcttttttttttagaatgtcttgtttaaatagtggccaatgtttaaggctgttaaaataagccaacttttacwaattggggagttttataaatgactgattaaatttaaagaattaacttacatgcaattgtgtgattattagttatcagcagtgttgtaaggaaaattattg

SEQ ID NO: 35453 - DNA, 201 bp, Homo sapiens
cctctgtatctaaatgtataccatccacttgtaaatgactataaactattatgtgattgcttttttttttagaatgtcttgtttaaatagtggccaatgtytaaggctgttaaaataagccaacttttactaattggggagttttataaatgactgattaaatttaaagaattaacttacatgcaattgtgtgattattag

SEQ ID NO: 35454 - DNA, 201 bp, Homo sapiens
atgactataaactattatgtgattgcttttttttttagaatgtcttgtttaaatagtggccaatgtttaaggctgttaaaataagccaacttttactaatyggggagttttataaatgactgattaaatttaaagaattaacttacatgcaattgtgtgattattagttatcagcagtgttgtaaggaaaattattgtgtt

SEQ ID NO: 35455 - DNA, 201 bp, Homo sapiens
agtttttaaaaatgggaacttctacattgaaaagtccccatttttgtgccaactatgattagtgagaggaagaaatcttattctatggcatatgtatggargggtgtaaagattcttttgaaaggtttattcacattgtagaacagcaaatgacatttttacagtatttttttgtaaagcaaactattttgtgccttgaat

SEQ ID NO: 35456 - DNA, 201 bp, Homo sapiens
ctattatgtgattgcttttttttttagaatgtcttgtttaaatagtggccaatgtttaaggctgttaaaataagccaacttttactaattggggagttttmtaaatgactgattaaatttaaagaattaacttacatgcaattgtgtgattattagttatcagcagtgttgtaaggaaaattattgtgtttttttttatga

SEQ ID NO: 35457 - DNA, 201 bp, Homo sapiens
ttttagaatgtcttgtttaaatagtggccaatgtttaaggctgttaaaataagccaacttttactaattggggagttttataaatgactgattaaatttamagaattaacttacatgcaattgtgtgattattagttatcagcagtgttgtaaggaaaattattgtgtttttttttatgatcattatcccactttaggtaa

SEQ ID NO: 35458 - DNA, 201 bp, Homo sapiens
tttgaaatctccatcaactgaagtaaatgatgtctgagtgttacagtaaaggtgaccaagtctctttcttaaagtcacaatgactaaagtattagttgaattttttttttttttttttttgatggagtctcgctctgtcaccaggctggagtgcagtagcacaatcacggctcactgcaatctctgcctcccggtttcaag

SEQ ID NO: 35459 - DNA, 201 bp, Homo sapiens; identical to SEQ ID NO: 35452

SEQ ID NO: 35460 - DNA, 201 bp, Homo sapiens; identical to SEQ ID NO: 35453

SEQ ID NO: 35461 - DNA, 201 bp, Homo sapiens; identical to SEQ ID NO: 35454

SEQ ID NO: 35462 - DNA, 201 bp, Homo sapiens; identical to SEQ ID NO: 35455

SEQ ID NO: 35463 - DNA, 201 bp, Homo sapiens; identical to SEQ ID NO: 35456

SEQ ID NO: 35464 - DNA, 201 bp, Homo sapiens; identical to SEQ ID NO: 35457

SEQ ID NO: 35465 - DNA, 201 bp, Homo sapiens; identical to SEQ ID NO: 35458

SEQ ID NO: 35466 - DNA, 201 bp, Homo sapiens
gagccgcctcggtgggcatgcacctgctgtccccgcccagccggggcctgttccacagggccgtgctgcagagcggtgcccccaatggaccctgggccacrgtgggcatgggagaggcccgtcgcagggccacgcagctggcccaccttgtgggctgtcctccaggcggcactggtgggaatgacacagagctggtagcct

SEQ ID NO: 35467 - DNA, 201 bp, Homo sapiens
gctgcctcaagaaagcgtcttccggttctccttcgtgcctgtggtagatggagacttcctcagtgacaccccagaggccctcatcaacgcgggagacttcmacggcctgcaggtgctggtgggtgtggtgaaggatgagggctcgtattttctggtttacggggccccaggcttcagcaaagacaacgagtctctcatcag

SEQ ID NO: 35468 - DNA, 201 bp, Homo sapiens
tgcggagccacccatgggaccccgtcgctttctgccaccggagcccaagcagccttggtcaggggtggtagacgctacaaccttccagagtgtctgctacyaatatgtggacaccctatacccaggttttgagggcaccgagatgtggaaccccaaccgtgagctgagcgaggactgcctgtacctcaacgtgtggacacc

SEQ ID NO: 35469 - DNA, 201 bp, Homo sapiens
agctggctgggcgactggctgcccagggtgcccgggtctacgcctacgtctttgaacaccgtgcttccacgctctcctggcccctgtggatgggggtgccycacggctacgagatcgagttcatctttgggatccccctggacccctctcgaaactacacggcagaggagaaaatcttcgcccagcgactgatgcgatact

SEQ ID NO: 35470 - DNA, 201 bp, Homo sapiens
ctggtagcctgccttcggacacgaccagcgcaggtcctggtgaaccacgaatggcacgtgctgcctcaagaaagcgtcttccggttctccttcgtgcctgwggtagatggagacttcctcagtgacaccccagaggccctcatcaacgcgggagacttccacggcctgcaggtgctggtgggtgtggtgaaggatgagggc

SEQ ID NO: 35471 - DNA, 201 bp, Homo sapiens
tacacagactggctgcatcccgaggacccggcacgcctgagggaggccctgagcgatgtggtgggcgaccacaatgtcgtgtgccccgtggcccagctggstgggcgactggctgcccagggtgcccgggtctacgcctacgtctttgaacaccgtgcttccacgctctcctggcccctgtggatgggggtgccccacggc

SEQ ID NO: 35472 - DNA, 201 bp, Homo sapiens
tctgccaccggagcccaagcagccttggtcaggggtggtagacgctacaaccttccagagtgtctgctaccaatatgtggacaccctatacccaggttttsagggcaccgagatgtggaaccccaaccgtgagctgagcgaggactgcctgtacctcaacgtgtggacaccatacccccggcctacatcccccacccctgt

SEQ ID NO: 35473 - DNA, 201 bp, Homo sapiens
gcctgcgccttctggaaccgcttcctccccaaattgctcagcgccaccgcctcggaggctcccagcacctgcccaggcttcacccatggggaggctgctcsgaggcccggcctccccctgcccctcctcctcctccaccagcttctcctcctcttcctctcccacctccggcggctgtgaacacggcctcttcccctacgg

SEQ ID NO: 35474 - DNA, 201 bp, Homo sapiens; identical to SEQ ID NO: 35469

SEQ ID NO: 35475 - DNA, 201 bp, Homo sapiens; identical to SEQ ID NO: 35466

SEQ ID NO: 35476 - DNA, 201 bp, Homo sapiens; identical to SEQ ID NO: 35468

SEQ ID NO: 35477 - DNA, 201 bp, Homo sapiens; identical to SEQ ID NO: 35470

SEQ ID NO: 35478 - DNA, 201 bp, Homo sapiens; identical to SEQ ID NO: 35471

SEQ ID NO: 35479 - DNA, 201 bp, Homo sapiens; identical to SEQ ID NO: 35472

SEQ ID NO: 35480 - DNA, 201 bp, Homo sapiens; identical to SEQ ID NO: 35467

SEQ ID NO: 35481 - DNA, 201 bp, Homo sapiens; identical to SEQ ID NO: 35469

SEQ ID NO: 35482 - DNA, 201 bp, Homo sapiens; identical to SEQ ID NO: 35466

SEQ ID NO: 35483 - DNA, 201 bp, Homo sapiens; identical to SEQ ID NO: 35468

SEQ ID NO: 35484 - DNA, 201 bp, Homo sapiens; identical to SEQ ID NO: 35470

SEQ ID NO: 35485 - DNA, 201 bp, Homo sapiens; identical to SEQ ID NO: 35471

SEQ ID NO: 35486 - DNA, 201 bp, Homo sapiens; identical to SEQ ID NO: 35472

SEQ ID NO: 35487 - DNA, 201 bp, Homo sapiens; identical to SEQ ID NO: 35467

SEQ ID NO: 35488 - DNA, 201 bp, Homo sapiens; identical to SEQ ID NO: 35466

SEQ ID NO: 35489 - DNA, 201 bp, Homo sapiens; identical to SEQ ID NO: 35467

SEQ ID NO: 35490 - DNA, 201 bp, Homo sapiens; identical to SEQ ID NO: 35468

SEQ ID NO: 35491 - DNA, 201 bp, Homo sapiens; identical to SEQ ID NO: 35469

SEQ ID NO: 35492 - DNA, 201 bp, Homo sapiens; identical to SEQ ID NO: 35470

SEQ ID NO: 35493 - DNA, 201 bp, Homo sapiens; identical to SEQ ID NO: 35471

SEQ ID NO: 35494 - DNA, 201 bp, Homo sapiens; identical to SEQ ID NO: 35472

SEQ ID NO: 35495 - DNA, 201 bp, Homo sapiens; identical to SEQ ID NO: 35473

SEQ ID NO: 35496 - DNA, 125 bp, Homo sapiens
actcccgcgggccacagcctgacaygggcatgcccctaccccctggctcccacagccacctaccggaggcatggcacagggagggcctcgcctcactgtcacagcagcatggcacagcaagatca

SEQ ID NO: 35497 - DNA, 201 bp, Homo sapiens
aacatgtggtgatgttgtagacaatcttaaaggaggctgctatcaggctctgatagaagactgcattccaatactgaagaggcacaccaaagaagggagasaattggattgtgtgactaacgatttgacagctgttccaatctccacatctctggaacaagattccatgtgggagtttctcagactgatttttgacccatg

SEQ ID NO: 35498 - DNA, 201 bp, Homo sapiens
ttccaggcctgattctctcagatataaaaccggccaaaaggatgaagttcaagactgtctgctacctgctggtgcagctcatgcactgccggaaaatgttyaaggccgagatccccttctccaatgtcatgacctgcgaggacgatgacaagcggagggcattaagaacagcctcggaaaaactcagaaaccgctcatctt

SEQ ID NO: 35499 - DNA, 201 bp, Homo sapiens
cccaggtgggcgtcatgtttgcctccatccccaacttcaatgacttctacatcgagctggacggcaacaacatgggggtggagtgtctgcggcttctcaaygagatcatcgccgactttgacgagctcatggaaaaagacttttacaaggacatagagaagatcaagaccatcgggagcacctacatggccgctgtggggc

SEQ ID NO: 35500 - DNA, 201 bp, Homo sapiens
acatctggggaaacacagtcaacgtggccagtcggatggatagcacaggggtccagggcagaatccaggtgactgaggaagtccaccggctgctgagaagrtgcccctaccactttgtgtgccgaggcaaagtcagtgtcaagggcaaaggcgagatgttgacatactttctagaaggcaggactgatggaaacggctccc

SEQ ID NO: 35501 - DNA, 201 bp, Homo sapiens
ggccatcctgctcttctcctgtgcgctggccctgcatgccaggcaggtggacatcaggctgaggctggactacctctgggccgcacaggcaaaggaggagygagaggacatggagaaggtgaagctggacaacaggcgcatcctcttcaacctcctgccggcccacgtcgcccagcacttcctcatgtccaaccctcggaa

SEQ ID NO: 35502 - DNA, 158 bp, Homo sapiens
gcctggcgtctcagtcagggctgggctccctccacactccccaggccagtacctgccctctgcagcagctgggaaggaggcttagtggagcccacgtgggsctctggggtgcacatggggtgggaatgctccgggggtgacacaggccacggtggctc

SEQ ID NO: 35503 - DNA, 201 bp, Homo sapiens
gctcatggaaaaagacttttacaaggacatagagaagatcaagaccatcgggagcacctacatggccgctgtggggctagcgcccacctcggggaccaagrctaagaagtccatctcctcccacctgagcacgctggcggactttgccattgagatgtttgacgttctggatgaaatcaactaccagtcttacaacgactt

SEQ ID NO: 35504 - DNA, 159 bp, Homo sapiens
tgcctggcgtctcagtcagggctgggctccctccacactccccaggccagtacctgccctctgcagcagctgggaaggaggcttagtggagcccacgtggscctctggggtgcacatggggtgggaatgctccgggggtgacacaggccacggtggctc

SEQ ID NO: 35505 - DNA, 201 bp, Homo sapiens
agagggcggggcttcctgcccaccccacccatgtcactgcccaccagcgccatctcccacacagggcctggagaacagctggcgccagcaccgcgaggccrcggcgtatctgcatgggcgcctgcaggcactggggctgcagctcttcgtgaaggacccggcgctccggcttcccacagtcaccactgtggctgtacccgc

SEQ ID NO: 35506 - DNA, 201 bp, Homo sapiens
gaatgtggaccgcgtgacggaggccctgagggcggccctgcagcactgccccaagaagaagctgtgacctgcccactggcacacagctggcactggcacamacctgtcccatgcccaccctgagggatcaggagcaaacagaccctgcaaggtcctccaggcctggggacaggaaagccactgacccagcccgggaggcag

SEQ ID NO: 35507 - DNA, 201 bp, Homo sapiens
caatgccacccgcgagaatgtggaccgcgtgacggaggccctgagggcggccctgcagcactgccccaagaagaagctgtgacctgcccactggcacacarctggcactggcacacacctgtcccatgcccaccctgagggatcaggagcaaacagaccctgcaaggtcctccaggcctggggacaggaaagccactgacc

SEQ ID NO: 35508 - DNA, 201 bp, Homo sapiens
ctgacttctgtgaccatagatcagcctggcatatttgaatttatttatttattttgaaacggagtttcactcttgttgcccaggctggagtgcagtggcaygatctcagctcactacaacctccacctcccgggttcaagcgattctcctgcctcaggctccggattagctgggactacaggtgtgcaccaccatgcccgg

SEQ ID NO: 35509 - DNA, 201 bp, Homo sapiens
ccagcttctttcacttactgtttttgacactcacatgtaccgtcgtgggcgccggtgtgtctttgttgctgagtgccgtcccgtcatatggacgtgcgtcrtgggcgccggtgtgtcttgttgctgagtgccgtcccgtcatatggacacctcatgatttgttggttcatcaccatagttgagcatctgggttatttctat

SEQ ID NO: 35510 - DNA, 201 bp, Homo sapiens
atgtaccgtcgtgggcgccggtgtgtctttgttgctgagtgccgtcccgtcatatggacgtgcgtcgtgggcgccggtgtgtcttgttgctgagtgccgtyccgtcatatggacacctcatgatttgttggttcatcaccatagttgagcatctgggttatttctattttggggctgttatgaatacggaggtagtgaaat

SEQ ID NO: 35511 - DNA, 201 bp, Homo sapiens
gcttcctgcccaccccacccatgtcactgcccaccagcgccatctcccacacagggcctggagaacagctggcgccagcaccgcgaggccgcggcgtatcygcatgggcgcctgcaggcactggggctgcagctcttcgtgaaggacccggcgctccggcttcccacagtcaccactgtggctgtacccgctggctatgac

SEQ ID NO: 35512 - DNA, 162 bp, Homo sapiens
atttccctgatgcctattgatgttgagcaacttctcataagctatcggccgtttgtagatcttctgaaaagtgtcagttcaaatattttgttcatatttgratttttatcttcttattgtcaatgtgtgatcattttaaaatatattctagatactatcaga

SEQ ID NO: 35513 - DNA, 201 bp, Homo sapiens
ttcttcctcccgcaccacagagggcggggcttcctgcccaccccacccatgtcactgcccaccagcgccatctcccacacagggcctggagaacagctggygccagcaccgcgaggccgcggcgtatctgcatgggcgcctgcaggcactggggctgcagctcttcgtgaaggacccggcgctccggcttcccacagtcac

SEQ ID NO: 35514 - DNA, 201 bp, Homo sapiens
cggcttcccacagtcaccactgtggctgtacccgctggctatgactggagagacatcgtcagctacgtcatagaccacttcgacattgagatcatgggtgrccttgggccctccacggggaaggtgctgcggatcggcctgctgggctgcaatgccacccgcgagaatgtggaccgcgtgacggaggccctgagggcggcc

SEQ ID NO: 35515 - DNA, 201 bp, Homo sapiens
tggaaacagtccacttgggcgcaaaacccagtgccttccaaatgagctgcagtccccaggccatgagcctcccgggaatgtttaataaagggcctggccamctctcctcactgtgtggggtggtctgtgaaagagtgagaggagagcatctctgctccctgagctgcctgattgtggactttagggggacactcctcatcc

SEQ ID NO: 35516 - DNA, 201 bp, Homo sapiens
agggtagatcctcccctggaggaggtgctgtcaccacactctagccccagatgtcacacccccaaacgtcctcacgcaccacatccaggtgaacccacatrgcgcacagggctggttggagacccctgtcatggacaagggtacctgcgtgctggagagcgcacagccaggacctgagcccatgacacgtggaagcctcca

SEQ ID NO: 35517 - DNA, 201 bp, Homo sapiens
cagggtagatcctcccctggaggaggtgctgtcaccacactctagccccagatgtcacacccccaaacgtcctcacgcaccacatccaggtgaacccacayggcgcacagggctggttggagacccctgtcatggacaagggtacctgcgtgctggagagcgcacagccaggacctgagcccatgacacgtggaagcctcc

SEQ ID NO: 35518 - DNA, 201 bp, Homo sapiens
tgcagctcttcgtgaaggacccggcgctccggcttcccacagtcaccactgtggctgtacccgctggctatgactggagagacatcgtcagctacgtcatrgaccacttcgacattgagatcatgggtggccttgggccctccacggggaaggtgctgcggatcggcctgctgggctgcaatgccacccgcgagaatgtgg

SEQ ID NO: 35519 - DNA, 201 bp, Homo sapiens
actgggggctccaggggctcccctgcaccaaggcctgcagagtcagtttcttcctcccgcaccacagagggcggggcttcctgcccaccccacccatgtcrctgcccaccagcgccatctcccacacagggcctggagaacagctggcgccagcaccgcgaggccgcggcgtatctgcatgggcgcctgcaggcactgggg

SEQ ID NO: 35520 - DNA, 201 bp, Homo sapiens
gctgcctgattgtggactttagggggacactcctcatcctggagcccacagggtagatcctcccctggaggaggtgctgtcaccacactctagccccagawgtcacacccccaaacgtcctcacgcaccacatccaggtgaacccacatggcgcacagggctggttggagacccctgtcatggacaagggtacctgcgtgc

SEQ ID NO: 35521 - DNA, 201 bp, Homo sapiens
tgcccacccctcaactgcctgacttctgtgaccatagatcagcctggcatatttgaatttatttatttattttgaaacggagtttcactcttgttgcccasgctggagtgcagtggcacgatctcagctcactacaacctccacctcccgggttcaagcgattctcctgcctcaggctccggattagctgggactacaggt

SEQ ID NO: 35522 - DNA, 201 bp, Homo sapiens
tcttcctcccgcaccacagagggcggggcttcctgcccaccccacccatgtcactgcccaccagcgccatctcccacacagggcctggagaacagctggcrccagcaccgcgaggccgcggcgtatctgcatgggcgcctgcaggcactggggctgcagctcttcgtgaaggacccggcgctccggcttcccacagtcacc

SEQ ID NO: 35523 - DNA, 201 bp, Homo sapiens
tgggcgcctgcaggcactggggctgcagctcttcgtgaaggacccggcgctccggcttcccacagtcaccactgtggctgtacccgctggctatgactggwgagacatcgtcagctacgtcatagaccacttcgacattgagatcatgggtggccttgggccctccacggggaaggtgctgcggatcggcctgctgggctg

SEQ ID NO: 35524 - DNA, 201 bp, Homo sapiens
gaccgcgtgacggaggccctgagggcggccctgcagcactgccccaagaagaagctgtgacctgcccactggcacacagctggcactggcacacacctgtmccatgcccaccctgagggatcaggagcaaacagaccctgcaaggtcctccaggcctggggacaggaaagccactgacccagcccgggaggcagaaccagg

SEQ ID NO: 35525 - DNA, 201 bp, Homo sapiens
tcacacaatccccgtcatcagcctgtacagcctgagagagagcctggccctcattgcggaacagggcctggagaacagctggcgccagcaccgcgaggccrcggcgtatctgcatgggcgcctgcaggcactggggctgcagctcttcgtgaaggacccggcgctccggcttcccacagtcaccactgtggctgtacccgc

SEQ ID NO: 35526 - DNA, 201 bp, Homo sapiens; identical to SEQ ID NO: 35506

SEQ ID NO: 35527 - DNA, 201 bp, Homo sapiens; identical to SEQ ID NO: 35507

SEQ ID NO: 35528 - DNA, 201 bp, Homo sapiens; identical to SEQ ID NO: 35508

SEQ ID NO: 35529 - DNA, 201 bp, Homo sapiens
gtgaccccccccaaggccctgctcaagcccctctccatccccaaccagctcctgctggggcctggtccttccaacctgcctcctcgcatcatggcagccgkggggctgcagatgatcgggtccatgagcaaggatatgtaccagatcatggacgagatcaaggaaggcatccagtacgtgttccagaccaggaacccactc

SEQ ID NO: 35530 - DNA, 201 bp, Homo sapiens; identical to SEQ ID NO: 35509

SEQ ID NO: 35531 - DNA, 201 bp, Homo sapiens; identical to SEQ ID NO: 35510

SEQ ID NO: 35532 - DNA, 201 bp, Homo sapiens
acactgtgccctggaggccgccctggtcaatgtgctggagcctggggactccttcctggttggggccaatggcatttgggggcagcgagccgtggacatcrgggagcgcataggagcccgagtgcacccgatgaccaaggaccctggaggccactacacactgcaggaggtggaggagggcctggcccagcacaagccagt

SEQ ID NO: 35533 - DNA, 201 bp, Homo sapiens
gcaggaggtggaggagggcctggcccagcacaagccagtgctgctgttcttaacccacggggagtcgtccaccggcgtgctgcagccccttgatggcttcrgggaactctgccacaggtacaagtgcctgctcctggtggattcggtggcatccctgggcgggacccccctttacatggaccggcaaggcatcgacatcct

SEQ ID NO: 35534 - DNA, 201 bp, Homo sapiens
cccgtcatcagcctgtacagcctgagagagagcctggccctcattgcggaacagggcctggagaacagctggcgccagcaccgcgaggccgcggcgtatcygcatgggcgcctgcaggcactggggctgcagctcttcgtgaaggacccggcgctccggcttcccacagtcaccactgtggctgtacccgctggctatgac

SEQ ID NO: 35535 - DNA, 201 bp, Homo sapiens
gaggagggcctggcccagcacaagccagtgctgctgttcttaacccacggggagtcgtccaccggcgtgctgcagccccttgatggcttcggggaactctrccacaggtacaagtgcctgctcctggtggattcggtggcatccctgggcgggacccccctttacatggaccggcaaggcatcgacatcctgtactcgggc

SEQ ID NO: 35536 - DNA, 201 bp, Homo sapiens
cagggaacaaaaggcagggctgccacggaagcccatccaccaatcctcacctctcacctctgtgtccgccctgctgggaaatattccaggctttggccaargccagtgcagccccaggttcccgagcggcaggttgggtgcggaccatggcctctcacaagctgctggtgaccccccccaaggccctgctcaagcccctct

SEQ ID NO: 35537 - DNA, 201 bp, Homo sapiens
gctgctgttcttaacccacggggagtcgtccaccggcgtgctgcagccccttgatggcttcggggaactctgccacaggtacaagtgcctgctcctggtgrattcggtggcatccctgggcgggacccccctttacatggaccggcaaggcatcgacatcctgtactcgggctcccagaaggccctgaacgcccctccagg

SEQ ID NO: 35538 - DNA, 201 bp, Homo sapiens
cacggaagcccatccaccaatcctcacctctcacctctgtgtccgccctgctgggaaatattccaggctttggccaaggccagtgcagccccaggttcccragcggcaggttgggtgcggaccatggcctctcacaagctgctggtgaccccccccaaggccctgctcaagcccctctccatccccaaccagctcctgctg

SEQ ID NO: 35539 - DNA, 201 bp, Homo sapiens
actctgccacaggtacaagtgcctgctcctggtggattcggtggcatccctgggcgggacccccctttacatggaccggcaaggcatcgacatcctgtacycgggctcccagaaggccctgaacgcccctccagggacctcgctcatctccttcagtgacaaggccaaaaagaagatgtactcccgcaagacgaagccctt

SEQ ID NO: 35540 - DNA, 201 bp, Homo sapiens
catcgacatcctgtactcgggctcccagaaggccctgaacgcccctccagggacctcgctcatctccttcagtgacaaggccaaaaagaagatgtactccygcaagacgaagcccttctccttctacctggacatcaagtggctggccaacttctggggctgtgacgaccagcccaggatgtaccatcacacaatccccgt

SEQ ID NO: 35541 - DNA, 201 bp, Homo sapiens
atcgacatcctgtactcgggctcccagaaggccctgaacgcccctccagggacctcgctcatctccttcagtgacaaggccaaaaagaagatgtactcccrcaagacgaagcccttctccttctacctggacatcaagtggctggccaacttctggggctgtgacgaccagcccaggatgtaccatcacacaatccccgtc

SEQ ID NO: 35542 - DNA, 201 bp, Homo sapiens
ccagcccaggatgtaccatcacacaatccccgtcatcagcctgtacagcctgagagagagcctggccctcattgcggaacagggcctggagaacagctggygccagcaccgcgaggccgcggcgtatctgcatgggcgcctgcaggcactggggctgcagctcttcgtgaaggacccggcgctccggcttcccacagtcac

SEQ ID NO: 35543 - DNA, 201 bp, Homo sapiens
ctgaacgcccctccagggacctcgctcatctccttcagtgacaaggccaaaaagaagatgtactcccgcaagacgaagcccttctccttctacctggacaycaagtggctggccaacttctggggctgtgacgaccagcccaggatgtaccatcacacaatccccgtcatcagcctgtacagcctgagagagagcctggcc

SEQ ID NO: 35544 - DNA, 201 bp, Homo sapiens; identical to SEQ ID NO: 35514

SEQ ID NO: 35545 - DNA, 201 bp, Homo sapiens; identical to SEQ ID NO: 35515

SEQ ID NO: 35546 - DNA, 201 bp, Homo sapiens
atgagcaaggatatgtaccagatcatggacgagatcaaggaaggcatccagtacgtgttccagaccaggaacccactcacactggtcatctctggctcggracactgtgccctggaggccgccctggtcaatgtgctggagcctggggactccttcctggttggggccaatggcatttgggggcagcgagccgtggacatc

SEQ ID NO: 35547 - DNA, 201 bp, Homo sapiens; identical to SEQ ID NO: 35520

SEQ ID NO: 35548 - DNA, 201 bp, Homo sapiens
tggcatccctgggcgggacccccctttacatggaccggcaaggcatcgacatcctgtactcgggctcccagaaggccctgaacgcccctccagggacctcrctcatctccttcagtgacaaggccaaaaagaagatgtactcccgcaagacgaagcccttctccttctacctggacatcaagtggctggccaacttctggg

SEQ ID NO: 35549 - DNA, 201 bp, Homo sapiens; identical to SEQ ID NO: 35521

SEQ ID NO: 35550 - DNA, 201 bp, Homo sapiens
agtgcacccgatgaccaaggaccctggaggccactacacactgcaggaggtggaggagggcctggcccagcacaagccagtgctgctgttcttaacccacrgggagtcgtccaccggcgtgctgcagccccttgatggcttcggggaactctgccacaggtacaagtgcctgctcctggtggattcggtggcatccctggg

SEQ ID NO: 35551 - DNA, 201 bp, Homo sapiens
gccccaggttcccgagcggcaggttgggtgcggaccatggcctctcacaagctgctggtgaccccccccaaggccctgctcaagcccctctccatccccarccagctcctgctggggcctggtccttccaacctgcctcctcgcatcatggcagccggggggctgcagatgatcgggtccatgagcaaggatatgtaccag

SEQ ID NO: 35552 - DNA, 162 bp, Homo sapiens; identical to SEQ ID NO: 35512

SEQ ID NO: 35553 - DNA, 201 bp, Homo sapiens; identical to SEQ ID NO: 35516

SEQ ID NO: 35554 - DNA, 201 bp, Homo sapiens; identical to SEQ ID NO: 35517

SEQ ID NO: 35555 - DNA, 201 bp, Homo sapiens; identical to SEQ ID NO: 35518

SEQ ID NO: 35556 - DNA, 201 bp, Homo sapiens
ggtgaccccccccaaggccctgctcaagcccctctccatccccaaccagctcctgctggggcctggtccttccaacctgcctcctcgcatcatggcagccrgggggctgcagatgatcgggtccatgagcaaggatatgtaccagatcatggacgagatcaaggaaggcatccagtacgtgttccagaccaggaacccact

SEQ ID NO: 35557 - DNA, 201 bp, Homo sapiens
cagccccttgatggcttcggggaactctgccacaggtacaagtgcctgctcctggtggattcggtggcatccctgggcgggacccccctttacatggaccrgcaaggcatcgacatcctgtactcgggctcccagaaggccctgaacgcccctccagggacctcgctcatctccttcagtgacaaggccaaaaagaagatg

SEQ ID NO: 35558 - DNA, 201 bp, Homo sapiens
tcctgtactcgggctcccagaaggccctgaacgcccctccagggacctcgctcatctccttcagtgacaaggccaaaaagaagatgtactcccgcaagacraagcccttctccttctacctggacatcaagtggctggccaacttctggggctgtgacgaccagcccaggatgtaccatcacacaatccccgtcatcagcc

SEQ ID NO: 35559 - DNA, 201 bp, Homo sapiens; identical to SEQ ID NO: 35523

SEQ ID NO: 35560 - DNA, 201 bp, Homo sapiens
cagcccaggatgtaccatcacacaatccccgtcatcagcctgtacagcctgagagagagcctggccctcattgcggaacagggcctggagaacagctggcrccagcaccgcgaggccgcggcgtatctgcatgggcgcctgcaggcactggggctgcagctcttcgtgaaggacccggcgctccggcttcccacagtcacc

SEQ ID NO: 35561 - DNA, 201 bp, Homo sapiens
gaaatattccaggctttggccaaggccagtgcagccccaggttcccgagcggcaggttgggtgcggaccatggcctctcacaagctgctggtgaccccccycaaggccctgctcaagcccctctccatccccaaccagctcctgctggggcctggtccttccaacctgcctcctcgcatcatggcagccggggggctgcag

SEQ ID NO: 35562 - DNA, 201 bp, Homo sapiens; identical to SEQ ID NO: 35524

SEQ ID NO: 35563 - DNA, 201 bp, Homo sapiens
ttttatgtaattaatgtagggcaaatgtgtttggaccagtattccacgttaccagctgccccatggggtgtgtgggaaataattaagcaaactggcattcycaccctagggaagagtgtggttgtggctggaaggtcaaaaaatgttgaaatgccagttgcaatgttactgcacacagatggggcgcatgaaggtcccaga

SEQ ID NO: 35564 - DNA, 201 bp, Homo sapiens
ttgcaatgttactgcacacagatggggcgcatgaaggtcccagaggtgatgctactgttacaatatctcatggatacactcccaaagagcagctgaagaarcataccattcttgcagatattgtaatatctgctgcagacattccaaatctcatcacagcacatatgatcaaggaaggagcagccatcattaatgtgggaa

SEQ ID NO: 35565 - DNA, 201 bp, Homo sapiens
gacccgatgcctgcttgcccgccaaagctcctttcccaagggaatgtattctgccttggcaggtttttgtgatataggtgaaagtgtggaagagaccatcygccgagaagttgcagaagaggtgggattggaggtggaaagcctgcagtactatgcatcccagcattggcccttccctagtggctcactcatgattgcttg

SEQ ID NO: 35566 - DNA, 201 bp, Homo sapiens
gcgttttacctctttcatagtctggctcctctgcttcagacttcagcacatcaatacctggccccccggcacagcctgttagagttggaaaggctcctggrtaaatttggacaggatgcacaaagaatagaagattctgtgctgattggatgctctgagcagcaggaagcatggtttgctctggatctaggtctggatagc

SEQ ID NO: 35567 - DNA, 201 bp, Homo sapiens
tttttgtgatataggtgaaagtgtggaagagaccatccgccgagaagttgcagaagaggtgggattggaggtggaaagcctgcagtactatgcatcccagyattggcccttccctagtggctcactcatgattgcttgccatgcaactgtgaaaccagggcagacagaaatccaggtgaacttgagagaattagagacagc

SEQ ID NO: 35568 - DNA, 201 bp, Homo sapiens
tcattactgagttacttgttacccttacagaattaagaaaaatagcacagtatgacattttaaaattcatgtacaggtgcattctagttacatgaacatgstagttaaataaaagtcacaattaagtcattatgactcagagtactttataataaatcagatgccctgaggctctgttgaggaagtagaatcccaatggga

SEQ ID NO: 35569 - DNA, 201 bp, Homo sapiens
agggaatgtattctgccttggcaggtttttgtgatatagcctacagggctgtcctgaattaatctgagtgcttgtaggtgaaagtgtggaagagaccatcygccgagaagttgcagaagaggtgggattggaggtggaaagcctgcagtactatgcatcccagcattggcccttccctagtggctcactcatgattgcttg

SEQ ID NO: 35570 - DNA, 201 bp, Homo sapiens; identical to SEQ ID NO: 35566

SEQ ID NO: 35571 - DNA, 201 bp, Homo sapiens
ctgagtgcttgtaggtgaaagtgtggaagagaccatccgccgagaagttgcagaagaggtgggattggaggtggaaagcctgcagtactatgcatcccagyattggcccttccctagtggctcactcatgattgcttgccatgcaactgtgaaaccagggcagacagaaatccaggtgaacttgagagaattagagacagc

SEQ ID NO: 35572 - DNA, 201 bp, Homo sapiens; identical to SEQ ID NO: 35568

SEQ ID NO: 35573 - DNA, 201 bp, Homo sapiens
ggaagagttatgaggaagaagtgattccttcctggttttgagtgacaccacagctgtcagccttcaagatgtcaagtcttcgagtcagcgtgactcattcrttcttccaacagtttggacaccacaaagcaggagaaagggaacatttttctacagctggaaagtgagtcctatcctttgaggaaatttgaaaaaagacat

SEQ ID NO: 35574 - DNA, 201 bp, Homo sapiens
atacagaagcagattattaccatacggaactgtggatggaacaagccctaaggcaactggatgaaggcgagatttctaccatagataaagtctctgttctrgattatttgagctatgcggtatatcagcagggagacctggataaggcacttttgctcacaaagaagcttcttgaactagatcctgaacatcagagagcta

SEQ ID NO: 35575 - DNA, 201 bp, Homo sapiens
ggcttccctttttctcctattgttgtactcttatgtgtctgatatacacatttcctagtcttaactttcaggagtttacaattgactaacactccatgatkgattcagtcatgaacctcatcccatgtttcatctgtggacaattgcttactttgtgggttcttttaaaagtaacacgaaatcatcatattgcataaaacc

SEQ ID NO: 35576 - DNA, 201 bp, Homo sapiens
gtcagatggctttatctctaacctaaccattcagagacagtactttcctaatgatgaagatcaggttggggcagccaaagctctgttacgtctccaggatwcctacaatttggatacagataccatctcaaagggtaatcttccaggagtgaaacacaaatcttttctaacggctgaggactgctttgagttgggcaaagt

SEQ ID NO: 35577 - DNA, 201 bp, Homo sapiens
atagtacacggcatgcagcctgtccagtgctagttggcaacaaatgggtatccaataaatggctccatgaacgtggacaagaatttcgaagaccttgtacsttgtcagaattggaatgacaaacaggcttccctttttctcctattgttgtactcttatgtgtctgatatacacatttcctagtcttaactttcaggagtt

SEQ ID NO: 35578 - DNA, 201 bp, Homo sapiens
cgagctacagtacatgaccctgagactggaaaattgaccacagcacagtacagagtatctaagagtgcctggctctctggctatgaaaatcctgtggtgtstcgaattaatatgagaatacaagatctaacaggactagatgtttccacagcagaggaattacaggtagcaaattatggagttggaggacagtatgaaccc

SEQ ID NO: 35579 - DNA, 201 bp, Homo sapiens
atgtgattgccctttcatatgatcttctaagttgatttttttcctcccaagtcttttttaaagaaagtatactgtattttaccaaccccctctcttttctyttagctcctctgtggtgaattaaacgtacttgagttaaaatattttgggccttcttaactaaaatgctcaccacttagcctgtttttttatccctttttt

SEQ ID NO: 35580 - DNA, 201 bp, Homo sapiens
gagctagtgtttggcccaaaaaaggaactgctgttttctggtataatctgtttgccagtggagaaggagattatagtacacggcatgcagcctgtccagtrctagttggcaacaaatgggtatccaataaatggctccatgaacgtggacaagaatttcgaagaccttgtacgttgtcagaattggaatgacaaacaggct

SEQ ID NO: 35581 - DNA, 201 bp, Homo sapiens
gccctttcatatgatcttctaagttgatttttttcctcccaagtcttttttaaagaaagtatactgtattttaccaaccccctctcttttcttttagctcytctgtggtgaattaaacgtacttgagttaaaatattttgggccttcttaactaaaatgctcaccacttagcctgtttttttatcccttttttaaaatgac

SEQ ID NO: 35582 - DNA, 201 bp, Homo sapiens; identical to SEQ ID NO: 35575

SEQ ID NO: 35583 - DNA, 201 bp, Homo sapiens; identical to SEQ ID NO: 35574

SEQ ID NO: 35584 - DNA, 201 bp, Homo sapiens; identical to SEQ ID NO: 35576

SEQ ID NO: 35585 - DNA, 201 bp, Homo sapiens; identical to SEQ ID NO: 35577

SEQ ID NO: 35586 - DNA, 201 bp, Homo sapiens
tatactgtattttaccaaccccctctcttttcttttagctcctctgtggtgaattaaacgtacttgagttaaaatatttcgattttttttttttttttaayggaaagtcctgcataacaacactgggccttcttaactaaaatgctcaccacttagcctgtttttttatcccttttttaaaatgacagatgattttgttca

SEQ ID NO: 35587 - DNA, 201 bp, Homo sapiens
atgtgattgccctttcatatgatcttctaagttgatttttttcctcccaagtcttttttaaagaaagtatactgtattttaccaaccccctctcttttctyttagctcctctgtggtgaattaaacgtacttgagttaaaatatttcgattttttttttttttttaatggaaagtcctgcataacaacactgggccttctt

SEQ ID NO: 35588 - DNA, 201 bp, Homo sapiens; identical to SEQ ID NO: 35578

SEQ ID NO: 35589 - DNA, 201 bp, Homo sapiens
gccctttcatatgatcttctaagttgatttttttcctcccaagtcttttttaaagaaagtatactgtattttaccaaccccctctcttttcttttagctcytctgtggtgaattaaacgtacttgagttaaaatatttcgattttttttttttttttaatggaaagtcctgcataacaacactgggccttcttaactaaaa

SEQ ID NO: 35590 - DNA, 201 bp, Homo sapiens; identical to SEQ ID NO: 35580

SEQ ID NO: 35591 - DNA, 201 bp, Homo sapiens; identical to SEQ ID NO: 35574

SEQ ID NO: 35592 - DNA, 201 bp, Homo sapiens; identical to SEQ ID NO: 35575

SEQ ID NO: 35593 - DNA, 201 bp, Homo sapiens; identical to SEQ ID NO: 35576

SEQ ID NO: 35594 - DNA, 201 bp, Homo sapiens; identical to SEQ ID NO: 35577

SEQ ID NO: 35595 - DNA, 201 bp, Homo sapiens
cgagccaccatttcaaacccaataacaggagacttggagacggtacattacagaattagcaaaagtgcctggctctctggctatgaaaatcctgtggtgtstcgaattaatatgagaatacaagatctaacaggactagatgtttccacagcagaggaattacaggtagcaaattatggagttggaggacagtatgaaccc

SEQ ID NO: 35596 - DNA, 201 bp, Homo sapiens; identical to SEQ ID NO: 35579

SEQ ID NO: 35597 - DNA, 201 bp, Homo sapiens; identical to SEQ ID NO: 35580

SEQ ID NO: 35598 - DNA, 201 bp, Homo sapiens; identical to SEQ ID NO: 35581

SEQ ID NO: 35599 - DNA, 201 bp, Homo sapiens
gtggccaccatcaactacacaggacagcggggcgctgtggggcgtgcttcctggctttacaaggtgagccagggctgctggtggccccggtaagccagcartccccattcctgggctatgctggcgggccagagctggcccaggggaagttgctaaaggatgtcttccggcctggggatgttttcttcaacactggggacc

SEQ ID NO: 35600 - DNA, 201 bp, Homo sapiens
gcaaggcagaacgtggccataaggtccggctggcagtgggcagcgggctgcgcccagatacctgggagcgttttgtgcggcgcttcgggcccctgcaggtsctggagacatatggactgacagagggcaacgtggccaccatcaactacacaggacagcggggcgctgtggggcgtgcttcctggctttacaaggtgagcc

SEQ ID NO: 35601 - DNA, 201 bp, Homo sapiens
acagttgacaggagacagggagttggagggagaagcagcaagaagaaaatggcagtgtaagataaggagccagagatggcctaggccatctgatgcttacrgcctctgaaggaggtcacagtaggagggggttctggggaatggggaacaggaattcacttccgggagcgggcatcttgatgctgaagctccggcccctct

SEQ ID NO: 35602 - DNA, 201 bp, Homo sapiens
ccaggagtctttggccaccacagagaccttcaaacagcagaaagttcggatggcaaatgagggcttcgaccccagcaccctgtctgacccactgtacgttytggaccaggctgtaggtgcctacctgcccctcacaactgcccggtacagcgccctcctggcaggaaaccttcgaatctgagaacttccacacctgaggca

SEQ ID NO: 35603 - DNA, 201 bp, Homo sapiens
caggctgtaggtgcctacctgcccctcacaactgcccggtacagcgccctcctggcaggaaaccttcgaatctgagaacttccacacctgaggcacctgaragaggaactctgtggggtgggggccgttgcaggtgtactgggctgtcagggatcttttctataccagaactgcggtcactattttgtaataaatgtggct

SEQ ID NO: 35604 - DNA, 201 bp, Homo sapiens
ccccgattcctcaggctccaggagtctttggccaccacagagaccttcaaacagcagaaagttcggatggcaaatgagggcttcgaccccagcaccctgtytgacccactgtacgttctggaccaggctgtaggtgcctacctgcccctcacaactgcccggtacagcgccctcctggcaggaaaccttcgaatctgagaa

SEQ ID NO: 35605 - DNA, 201 bp, Homo sapiens
gggttctggggaatggggaacaggaattcacttccgggagcgggcatcttgatgctgaagctccggcccctctcccactcatctcagagcaaggcagaacrtggccataaggtccggctggcagtgggcagcgggctgcgcccagatacctgggagcgttttgtgcggcgcttcgggcccctgcaggtgctggagacatat

SEQ ID NO: 35606 - DNA, 201 bp, Homo sapiens
ggcaaatgagggcttcgaccccagcaccctgtctgacccactgtacgttctggaccaggctgtaggtgcctacctgcccctcacaactgcccggtacagcrccctcctggcaggaaaccttcgaatctgagaacttccacacctgaggcacctgagagaggaactctgtggggtgggggccgttgcaggtgtactgggctg

SEQ ID NO: 35607 - DNA, 201 bp, Homo sapiens
atgatgtcaccacaggagagccaattcgggacccccaggggcactgtatggccacatctccaggtgagccagggctgctggtggccccggtaagccagcartccccattcctgggctatgctggcgggccagagctggcccaggggaagttgctaaaggatgtcttccggcctggggatgttttcttcaacactggggacc

SEQ ID NO: 35608 - DNA, 201 bp, Homo sapiens
gcaaggcagaacgtggccataaggtccggctggcagtgggcagcgggctgcgcccagatacctgggagcgttttgtgcggcgcttcgggcccctgcaggtsctggagacatatggactgacagagggcaacgtggccaccatcaactacacaggacagcggggcgctgtggggcgtgcttcctggctttacaagcatatct

SEQ ID NO: 35609 - DNA, 201 bp, Homo sapiens
gcgccctggccgcggctgccgccgacccggaaggtcccgaggggggctgcagcctggcctggcgcctcgcggaactggcccagcagcgcgccgcgcacacytttctcattcacggctcgcggcgctttagctactcagaggcggagcgcgagagtaacagggctgcacgcgccttcctacgtgcgctaggctgggactggg

SEQ ID NO: 35610 - DNA, 201 bp, Homo sapiens
ctgcggcgcgcgcgcgctggtgctggcgccagagtttctggagtccctggagccggacctgcccgccctgagagccatggggctccacctgtgggctgcasgcccaggaacccaccctgctggaattagcgatttgctggctgaagtgtccgctgaagtggatgggccagtgccaggatacctctcttccccccagagcat

SEQ ID NO: 35611 - DNA, 201 bp, Homo sapiens
ccggcggacttggcctttgcggtgcgagctctgtgctgcaaaagggctcttcgagctcgcgccctggccgcggctgccgccgacccggaaggtcccgaggsgggctgcagcctggcctggcgcctcgcggaactggcccagcagcgcgccgcgcacacctttctcattcacggctcgcggcgctttagctactcagaggcg

SEQ ID NO: 35612 - DNA, 114 bp, Homo sapiens
tttgggagagagcmatggtaccttcccttaacgggaaaacgagaaatattgaggggaagatggactgcgatccaaacgccctggctctcaggcctggactctagggcttagcca

SEQ ID NO: 35613 - DNA, 201 bp, Homo sapiens
cagttctgggaagattgccagcagcacagggtgacggtgttccagtacattggggagctgtgccgataccttgtcaaccagcccccgagcaaggcagaacrtggccataaggtccggctggcagtgggcagcgggctgcgcccagatacctgggagcgttttgtgcggcgcttcgggcccctgcaggtgctggagacatat

SEQ ID NO: 35614 - DNA, 127 bp, Homo sapiens
cacccacgtgtctgagaacttgccaccttatgcccggccccgattcctcaggctccaggctgtaggtgcctacctgcccctcacaactgcccggtacagcrccctcctggcaggaaaccttcgaatc

SEQ ID NO: 35615 - DNA, 201 bp, Homo sapiens
gtggatgggggcagaaggctctgggaaaggtgacaccactcctgaccctggtgactctgccaggtgagccagggctgctggtggccccggtaagccagcartccccattcctgggctatgctggcgggccagagctggcccaggggaagttgctaaaggatgtcttccggcctggggatgttttcttcaacactggggacc

SEQ ID NO: 35616 - DNA, 201 bp, Homo sapiens
gcacggcttcctgacggtgtgactcccacagtgggcccttcccagggaaagactacagtgatggctggggtctggaaagaggggcttgggctccccactcygctcctaatcttacctcccttcttcccccctgcccacttctggcaggggccacagtggtgctgaaatccaagttctcggctggtcagttctgggaagatt

SEQ ID NO: 35617 - DNA, 201 bp, Homo sapiens
gcaaggcagaacgtggccataaggtccggctggcagtgggcagcgggctgcgcccagatacctgggagcgttttgtgcggcgcttcgggcccctgcaggtsctggagacatatggactgacagagggcaacgtggccaccatcaactacacaggacagcggggcgctgtggggcgtgcttcctggctttacaaggtgaggg

SEQ ID NO: 35618 - DNA, 201 bp, Homo sapiens; identical to SEQ ID NO: 35601

SEQ ID NO: 35619 - DNA, 201 bp, Homo sapiens; identical to SEQ ID NO: 35602

SEQ ID NO: 35620 - DNA, 201 bp, Homo sapiens; identical to SEQ ID NO: 35603

SEQ ID NO: 35621 - DNA, 201 bp, Homo sapiens
ccctgaccctcctgtccccaggagtctttggccaccacagagaccttcaaacagcagaaagttcggatggcaaatgagggcttcgaccccagcaccctgtytgacccactgtacgttctggaccaggctgtaggtgcctacctgcccctcacaactgcccggtacagcgccctcctggcaggaaaccttcgaatctgagaa

SEQ ID NO: 35622 - DNA, 201 bp, Homo sapiens
gtgactcccacagtgggcccttcccagggaaagactacagtgatggctggggtctggaaagaggggcttgggctccccactctgctcctaatcttacctcycttcttcccccctgcccacttctggcaggggccacagtggtgctgaaatccaagttctcggctggtcagttctgggaagattgccagcagcacagggtga

SEQ ID NO: 35623 - DNA, 201 bp, Homo sapiens
tcagatctcaccatttcatccctgtgacactgacctctgacctcatctccccaccaagcccataaggccctgacccctgactcccagtttcagatctctgytctctgacaggtggaagggggagaatgtggccacaaccgaggtggcagaggtcttcgaggccctagattttcttcaggaggtgaacgtctatggagtcac

SEQ ID NO: 35624 - DNA, 201 bp, Homo sapiens; identical to SEQ ID NO: 35605

SEQ ID NO: 35625 - DNA, 201 bp, Homo sapiens; identical to SEQ ID NO: 35606

SEQ ID NO: 35626 - DNA, 201 bp, Homo sapiens; identical to SEQ ID NO: 35607

SEQ ID NO: 35627 - DNA, 201 bp, Homo sapiens; identical to SEQ ID NO: 35608

SEQ ID NO: 35628 - DNA, 201 bp, Homo sapiens; identical to SEQ ID NO: 35602

SEQ ID NO: 35629 - DNA, 201 bp, Homo sapiens; identical to SEQ ID NO: 35609

SEQ ID NO: 35630 - DNA, 201 bp, Homo sapiens; identical to SEQ ID NO: 35604

SEQ ID NO: 35631 - DNA, 201 bp, Homo sapiens; identical to SEQ ID NO: 35610

SEQ ID NO: 35632 - DNA, 201 bp, Homo sapiens; identical to SEQ ID NO: 35603

SEQ ID NO: 35633 - DNA, 201 bp, Homo sapiens; identical to SEQ ID NO: 35611

SEQ ID NO: 35634 - DNA, 114 bp, Homo sapiens; identical to SEQ ID NO: 35612

SEQ ID NO: 35635 - DNA, 201 bp, Homo sapiens; identical to SEQ ID NO: 35613

SEQ ID NO: 35636 - DNA, 201 bp, Homo sapiens; identical to SEQ ID NO: 35606

SEQ ID NO: 35637 - DNA, 201 bp, Homo sapiens; identical to SEQ ID NO: 35615

SEQ ID NO: 35638 - DNA, 201 bp, Homo sapiens; identical to SEQ ID NO: 35616

SEQ ID NO: 35639 - DNA, 201 bp, Homo sapiens; identical to SEQ ID NO: 35617

SEQ ID NO: 35640 - DNA, 201 bp, Homo sapiens; identical to SEQ ID NO: 35601

SEQ ID NO: 35641 - DNA, 201 bp, Homo sapiens; identical to SEQ ID NO: 35602

SEQ ID NO: 35642 - DNA, 201 bp, Homo sapiens; identical to SEQ ID NO: 35609

SEQ ID NO: 35643 - DNA, 201 bp, Homo sapiens; identical to SEQ ID NO: 35610

SEQ ID NO: 35644 - DNA, 201 bp, Homo sapiens; identical to SEQ ID NO: 35603

SEQ ID NO: 35645 - DNA, 201 bp, Homo sapiens; identical to SEQ ID NO: 35604

SEQ ID NO: 35646 - DNA, 201 bp, Homo sapiens; identical to SEQ ID NO: 35611

SEQ ID NO: 35647 - DNA, 114 bp, Homo sapiens; identical to SEQ ID NO: 35612

SEQ ID NO: 35648 - DNA, 201 bp, Homo sapiens; identical to SEQ ID NO: 35622

SEQ ID NO: 35649 - DNA, 201 bp, Homo sapiens; identical to SEQ ID NO: 35605

SEQ ID NO: 35650 - DNA, 201 bp, Homo sapiens; identical to SEQ ID NO: 35606

SEQ ID NO: 35651 - DNA, 201 bp, Homo sapiens
gcgagtttcgcggaccgtgcggcggcggcgagccggagccggaacccgaacccgaacccgaacccgaacccgaacccgagtccgagcccgagcccgaaccygaactggtagaagctgaggcggccgaggcttcggtagaggaacccggggaggaggcggccacggtagccgcgacggaggagggggaccaggagcaagacc

SEQ ID NO: 35652 - DNA, 201 bp, Homo sapiens
tgcaaaacaaagtaagataccaccagtattacaacacaatgattttccagacaaatggtatggtgttgaaaaataactgttacttcttaaagcagcatttkatcttctattttgaagactatttattgtaataattagaaaacatgaaatagggaactccagactgacacagcagttgtttttgaaaaggaaataaacttt

SEQ ID NO: 35653 - DNA, 201 bp, Homo sapiens
ctacctagatctcacacaaatagaagcaagcaaacctcacagtgcccagtttttgctaccagttgagatgtttggtcctggtgcaccaaagaaagcaaatyttattaatgagttaatgatggagaaaaaatcagttcagtcatcattgcctgaatggagtggtgctggagagtttcccactgctttcaatttgggttcaac

SEQ ID NO: 35654 - DNA, 201 bp, Homo sapiens
tggtctgcatcaatctgtttgcctgctaaacaagttagaataggaaatagtaaaataaatccaaacaagagtgtaatattggttagggaaacaaacttcargtcaccaactgaagtcattacaaactccttgtacattcactgtgagtttcaaagggagtcagtccctaatttacaggtttcctttgttcactttctagat

SEQ ID NO: 35655 - DNA, 201 bp, Homo sapiens
ccactgctttcaatttgggttcaacaggggagcagatatacagaatgcagagcttgtctcctgtctgttcagggttggaaaatgaacagttcaaatccccrggaaacagagtttctagattgtctcatttacgccaccactactcaaagaagtggcacagattcaggtttaatccaaagttttattcatttctctctgctc

SEQ ID NO: 35656 - DNA, 201 bp, Homo sapiens
gaatactacagttttgtccacactttaatttgagaccatttttctttgaatcgtaagttagcaaaagaaatttttttcacctttgaaaatcacgtgatgtkaaaggacaaatgcccactcttctattctgatctgcaaatagcttaaatgtctcttgcaaaacaaagtaagataccaccagtattacaacacaatgatttt

SEQ ID NO: 35657 - DNA, 201 bp, Homo sapiens
cttcctggagctattcctgggcgagtttcgcggaccgtgcggcggcggcgagccggagccggaacccgaacccgaacccgaacccgaacccgaacccgagyccgagcccgagcccgaacctgaactggtagaagctgaggcggccgaggcttcggtagaggaacccggggaggaggcggccacggtagccgcgacggagga

SEQ ID NO: 35658 - DNA, 201 bp, Homo sapiens
ttgggttcaacaggggagcagatatacagaatgcagagcttgtctcctgtctgttcagggttggaaaatgaacagttcaaatccccgggaaacagagtttytagattgtctcatttacgccaccactactcaaagaagtggcacagattcaggtttaatccaaagttttattcatttctctctgctcaagagccttcccac

SEQ ID NO: 35659 - DNA, 201 bp, Homo sapiens
ggagctattcctgggcgagtttcgcggaccgtgcggcggcggcgagccggagccggaacccgaacccgaacccgaacccgaacccgaacccgagtccgagyccgagcccgaacctgaactggtagaagctgaggcggccgaggcttcggtagaggaacccggggaggaggcggccacggtagccgcgacggaggaggggga

SEQ ID NO: 35660 - DNA, 157 bp, Homo sapiens
agcaaagagcggagctgagggtacccggtttgaagtcgtgcgggtcggaggactgcygcctccgctaccgtcttggacccctgcttaccggccgccgcggggacgagctcgggtaggcggcagggcagatgcccgagggcctgcgctggaacgcccc

SEQ ID NO: 35661 - DNA, 201 bp, Homo sapiens
tcaaacctcacttgccctctgtcacttatttgagattagatggcagcatacctcctggtcagaggcattccattgtttcccggtttaataatgatccatcyatagacgttctgttacttaccactcacgttggtggcctgggacttaatttgacaggcgctgacacagtagtatttgtggagcatgactggaatcctatgc

SEQ ID NO: 35662 - DNA, 201 bp, Homo sapiens
tcgtgcgggtcggaggactgccgcctccgctaccgtcttggacccctgcttaccggccgccgcggggacgagctcgggtaggcggcagggcagatgcccgrgggcctgcgctggaacgccccacgccgcaccggccgctcccctgtgctccgcggcctgggcctgcgccgctcagctctctggaaactagcgcctcagctg

SEQ ID NO: 35663 - DNA, 201 bp, Homo sapiens
ccagaagccttacctggtacaacggagaggagctgaatttgctttgacaactatagtaaagcattttggtggtgaaatggcagtgaagttgccacatctcygggatgctatggttggcccattgaggaatacaatcgacataaataattttgatggaaaatccctcctggataagggagatagccctgctcaagaattggt

SEQ ID NO: 35664 - DNA, 104 bp, Homo sapiens
aaaagccttaatgagccataattttaagaatataagaataatgactatgatattggtcagtcttagaacatgaaaatatgcatagtgtttttcaaatcttyaac

SEQ ID NO: 35665 - DNA, 201 bp, Homo sapiens
aaacttgctgaatgtaaagattgaacctcaagtcactgtagctttagtaattgcttattgtattagtttagatgctagcactgcatgtgctgtgcatattytgattttattaaaataaaaagttgaactgcacagtctcctttgttgttgtcaattgtggtttattttcagaggtgtaaataaagtgctcttgcctgaaaa

SEQ ID NO: 35666 - DNA, 201 bp, Homo sapiens
gagggagggcacacgttgtacgtgctgacgtagccggctttccagcgggtatattagatccgtggccgcgcggtgcgctccagagccgcagttctcccgtragagggccttcgcggtggaacaaacactcgcttagcagcggaagactccgagttctcggtactcttcagggatgagtcatgtggcagtggaaaatgcgct

SEQ ID NO: 35667 - DNA, 201 bp, Homo sapiens
gaagtgtagctcgagagaactgggacagcatttcgcaccctaagctccaaggcaggactgctaggggcgacaggactaagtaggaaatcccttgagcttasacctgagggagcgcgcagtagccgggcagaagtcgccgcgacagggaattgcggtgtgagagggagggcacacgttgtacgtgctgacgtagccggcttt

SEQ ID NO: 35668 - DNA, 201 bp, Homo sapiens
atttgctcactctatcctggataggtatttagaacctgatagtctttaagccattccagtcatgatgaggtgatgtatgaatacatgcatacattcaaagyactgttttcaaagttaatgcaagtaaatacagcaattcctctttcaacgtttaggcagatcattaattatgagctagccaaatgtgggcatactattaca

SEQ ID NO: 35669 - DNA, 201 bp, Homo sapiens
caagatatcaattgttttgacaaaataaatttactgaacttgggctaaaatcaaaccttggcacacaggtgtgatacaacttaacaggaatcatcgattcrtccataaataatataaggaaaaacttatgcggtagcctgcattagggctttttgatacttgcagattgggggaaaacaacaaatgtcttgaagcatatta

SEQ ID NO: 35670 - DNA, 201 bp, Homo sapiens
acattgcaatcctcaaacatgtggttatctttgttgtattggcataatcagtgacttgtacattcagcaatagcatttgagcaagttttatcagcaagcawtattttcagttaataaggtttcaaaaatcatgtaaggatttaaacttgctgaatgtaaagattgaacctcaagtcactgtagctttagtaattgcttatt

SEQ ID NO: 35671 - DNA, 201 bp, Homo sapiens
tcaaaaatcatgtaaggatttaaacttgctgaatgtaaagattgaacctcaagtcactgtagctttagtaattgcttattgtattagtttagatgctagcmctgcatgtgctgtgcatattctgattttattaaaataaaaagttgaactgcacagtctcctttgttgttgtcaattgtggtttattttcagaggtgtaaa

SEQ ID NO: 35672 - DNA, 201 bp, Homo sapiens
ttgagcaagttttatcagcaagcaatattttcagttaataaggtttcaaaaatcatgtaaggatttaaacttgctgaatgtaaagattgaacctcaagtcmctgtagctttagtaattgcttattgtattagtttagatgctagcactgcatgtgctgtgcatattctgattttattaaaataaaaagttgaactgcacag

SEQ ID NO: 35673 - DNA, 201 bp, Homo sapiens; identical to SEQ ID NO: 35666

SEQ ID NO: 35674 - DNA, 201 bp, Homo sapiens; identical to SEQ ID NO: 35667

SEQ ID NO: 35675 - DNA, 201 bp, Homo sapiens; identical to SEQ ID NO: 35666

SEQ ID NO: 35676 - DNA, 201 bp, Homo sapiens; identical to SEQ ID NO: 35667

SEQ ID NO: 35677 - DNA, 201 bp, Homo sapiens; identical to SEQ ID NO: 35666

SEQ ID NO: 35678 - DNA, 201 bp, Homo sapiens; identical to SEQ ID NO: 35667

SEQ ID NO: 35679 - DNA, 201 bp, Homo sapiens
aaagccatagatggcctagacagaaatctccactattttaacagtgatagttttgctagccaccctaattatccatattcagatgaatattaacatggagrgctttgcctgatgtctaccagaagccctgtgtgtggatggtgacgcagaggacgtctctatgccggtgactggacatatcacctctacttaaatccgtcc

SEQ ID NO: 35680 - DNA, 201 bp, Homo sapiens
atttttacagttttaactttaattttttattgaggaccaactgtttgaaaaattctcattagtcattcctttaaattatgtgtatgtgagagaaagacgtmagatggttaattatttcaaatgatgcagtataaagaaggggcattatcacggcagaaacgaaaaaagatatttgtagctggaggtttttatagtctaaca

SEQ ID NO: 35681 - DNA, 201 bp, Homo sapiens
agaaacgaaaaaagatatttgtagctggaggtttttatagtctaacatatggttgctatttgttctacaaatccttttgaataatttaatatagagatttmgaatagaaaataatactttagatagaaattaatgagtttattataaccatatattataataatttacttaggaattctctttgataagaaacaaatgaac

SEQ ID NO: 35682 - DNA, 201 bp, Homo sapiens
caaacgatgggtggacccgaactccccggtgctcttggaggacccagtcctttgtgccttggcaaaaaagcacaagcgaaccccagccctgattgccctgygctaccagctgcagcgtggggttgtggtcctggccaagagctacaatgagcagcgcatcagacagaacgtgcaggtttttgagttccagttgactgcaga

SEQ ID NO: 35683 - DNA, 201 bp, Homo sapiens
aaagctttggaggtcacaaaattagcaatagaagctgggttccgccatatagattctgctcatttatacaataatgaggagcaggttggactggccatccraagcaagattgcagatggcagtgtgaagagagaagacatattctacacttcaaagctttggtccacttttcatcgaccagagttggtccgaccagccttg

SEQ ID NO: 35684 - DNA, 201 bp, Homo sapiens
ttccaaacagcagtgtgtaaagctaaatgatggccacttcatgcctgtattgggatttggcacctatgcacctccagaggttccgagaagtaaagctttgkaggtcacaaaattagcaatagaagctgggttccgccatatagattctgctcatttatacaataatgaggagcaggttggactggccatccgaagcaagat

SEQ ID NO: 35685 - DNA, 201 bp, Homo sapiens
ttccgagaagtaaagctttggaggtcacaaaattagcaatagaagctgggttccgccatatagattctgctcatttatacaataatgaggagcaggttggrctggccatccgaagcaagattgcagatggcagtgtgaagagagaagacatattctacacttcaaagctttggtccacttttcatcgaccagagttggtcc

SEQ ID NO: 35686 - DNA, 157 bp, Homo sapiens
ccctcatcaggattacagctttatcaggactgcatcttcttcagaaatgaatatttmtcttacaacgcaaagaaagaaaaatcaaaataaattttctgattgaaaatgtaaaaaggcaaatatttttacagttttaactttaattttttattgagga

SEQ ID NO: 35687 - DNA, 201 bp, Homo sapiens
cagtgtgaagagagaagacatattctacacttcaaagctttggtccacttttcatcgaccagagttggtccgaccagccttggaaaactcactgaaaaaarctcaattggactatgttgacctctatcttattcattctccaatgtctctaaagccaggtgaggaactttcaccaacagatgaaaatggaaaagtaatatt

SEQ ID NO: 35688 - DNA, 201 bp, Homo sapiens
gccatggagaagtgtaaggatgcaggattggccaagtccattggggtgtcaaacttcaaccgcaggcagctggagatgatcctcaacaagccaggactcawgtacaagcctgtctgcaaccaggtagaatgtcatccgtatttcaaccggagtaaattgctagatttctgcaagtcgaaagatattgttctggttgcctat

SEQ ID NO: 35689 - DNA, 201 bp, Homo sapiens
agtgacagggaatggattccaaacagcagtgtgtaaagctaaatgatggccacttcatgcctgtattgggatttggcacctatgcacctccagaggttccragaagtaaagctttggaggtcacaaaattagcaatagaagctgggttccgccatatagattctgctcatttatacaataatgaggagcaggttggactgg

SEQ ID NO: 35690 - DNA, 201 bp, Homo sapiens
cacctgggaggccatggagaagtgtaaggatgcaggattggccaagtccattggggtgtcaaacttcaaccgcaggcagctggagatgatcctcaacaagycaggactcaagtacaagcctgtctgcaaccaggtagaatgtcatccgtatttcaaccggagtaaattgctagatttctgcaagtcgaaagatattgttct

SEQ ID NO: 35691 - DNA, 201 bp, Homo sapiens
aacgcaaagaaagaaaaatcaaaataaattttctgattgaaaatgtaaaaaggcaaatatttttacagttttaactttaattttttattgaggaccaactrtttgaaaaattctcattagtcattcctttaaattatgtgtatgtgagagaaagacgtaagatggttaattatttcaaatgatgcagtataaagaaggggc

SEQ ID NO: 35692 - DNA, 201 bp, Homo sapiens
aatatttttacagttttaactttaattttttattgaggaccaactgtttgaaaaattctcattagtcattcctttaaattatgtgtatgtgagagaaagaygtaagatggttaattatttcaaatgatgcagtataaagaaggggcattatcacggcagaaacgaaaaaagatatttgtagctggaggtttttatagtcta

SEQ ID NO: 35693 - DNA, 201 bp, Homo sapiens
cagaccatataagactgcctatgtacctcctcctacatgccattggttaaccatcagtcagtttgcaggggtggggggaggggtttcctgcccattgtttytgtaatctctgaggagaagcagcagcaaacatttgctagtcagacaagtgacagggaatggattccaaacagcagtgtgtaaagctaaatgatggccact

SEQ ID NO: 35694 - DNA, 201 bp, Homo sapiens
tattataaccatatattataataatttacttaggaattctctttgataagaaacaaatgaactgaatgcaattttctccacagaccatataagactgcctrtgtacctcctcctacatgccattggttaaccatcagtcagtttgcaggggtggggggaggggtttcctgcccattgtttttgtaatctctgaggagaagc

SEQ ID NO: 35695 - DNA, 201 bp, Homo sapiens
ggggggaggggtttcctgcccattgtttttgtaatctctgaggagaagcagcagcaaacatttgctagtcagacaagtgacagggaatggattccaaacascagtgtgtaaagctaaatgatggccacttcatgcctgtattgggatttggcacctatgcacctccagaggttccgagaagtaaagctttggaggtcacaa

SEQ ID NO: 35696 - DNA, 201 bp, Homo sapiens
agtgtgtaaagctaaatgatggccacttcatgcctgtattgggatttggcacctatgcacctccagaggttccgagaagtaaagctttggaggtcacaaarttagcaatagaagctgggttccgccatatagattctgctcatttatacaataatgaggagcaggttggactggccatccgaagcaagattgcagatggca

SEQ ID NO: 35697 - DNA, 201 bp, Homo sapiens
tgtctctaaagccaggtgaggaactttcaccaacagatgaaaatggaaaagtaatatttgacatagtggatctctgtaccacctgggaggccatggagaartgtaaggatgcaggattggccaagtccattggggtgtcaaacttcaaccgcaggcagctggagatgatcctcaacaagccaggactcaagtacaagcctg

SEQ ID NO: 35698 - DNA, 201 bp, Homo sapiens
atggcagtgtgaagagagaagacatattctacacttcaaagctttggtccacttttcatcgaccagagttggtccgaccagccttggaaaactcactgaaraaagctcaattggactatgttgacctctatcttattcattctccaatgtctctaaagccaggtgaggaactttcaccaacagatgaaaatggaaaagtaa

SEQ ID NO: 35699 - DNA, 201 bp, Homo sapiens
agctgcagcgtggggttgtggtcctggccaagagctacaatgagcagcgcatcagacagaacgtgcaggtttttgagttccagttgactgcagaggacatkaaagccatagatggcctagacagaaatctccactattttaacagtgatagttttgctagccaccctaattatccatattcagatgaatattaacatggag

SEQ ID NO: 35700 - DNA, 201 bp, Homo sapiens
aataatactttagatagaaattaatgagtttattataaccatatattataataatttacttaggaattctctttgataagaaacaaatgaactgaatgcarttttctccacagaccatataagactgcctatgtacctcctcctacatgccattggttaaccatcagtcagtttgcaggggtggggggaggggtttcctgc

SEQ ID NO: 35701 - DNA, 201 bp, Homo sapiens
tggatctctgtaccacctgggaggccatggagaagtgtaaggatgcaggattggccaagtccattggggtgtcaaacttcaaccgcaggcagctggagatsatcctcaacaagccaggactcaagtacaagcctgtctgcaaccaggtagaatgtcatccgtatttcaaccggagtaaattgctagatttctgcaagtcga

SEQ ID NO: 35702 - DNA, 201 bp, Homo sapiens
atgaaaatggaaaagtaatatttgacatagtggatctctgtaccacctgggaggccatggagaagtgtaaggatgcaggattggccaagtccattggggtrtcaaacttcaaccgcaggcagctggagatgatcctcaacaagccaggactcaagtacaagcctgtctgcaaccaggtagaatgtcatccgtatttcaacc

SEQ ID NO: 35703 - DNA, 201 bp, Homo sapiens
gatagttttgctagccaccctaattatccatattcagatgaatattaacatggagagctttgcctgatgtctaccagaagccctgtgtgtggatggtgackcagaggacgtctctatgccggtgactggacatatcacctctacttaaatccgtcctgtttagcgacttcagtcaactacagctgagtccataggccagaa

SEQ ID NO: 35704 - DNA, 201 bp, Homo sapiens
gtttgaaaaattctcattagtcattcctttaaattatgtgtatgtgagagaaagacgtaagatggttaattatttcaaatgatgcagtataaagaaggggsattatcacggcagaaacgaaaaaagatatttgtagctggaggtttttatagtctaacatatggttgctatttgttctacaaatccttttgaataatttaa

SEQ ID NO: 35705 - DNA, 201 bp, Homo sapiens
ctcatgcaccaggccatccacaccatcgagttctgcctgggctgcgtctccaacaccgcctcctacctgcgcctgtgggccctgagcctggcccacgcccrgtggaattccagaacaagttctactcaggcacgggctacaagctgagtcccttcaccttcgctgccacagatgactagggcccactgcaggtcctgccag

SEQ ID NO: 35706 - DNA, 201 bp, Homo sapiens
ggtggtcctggccttggccatggtgcccatcctgctgcttggcacacccctgcacctgctgcaccgccaccgccgccgcctgcggaggaggcccgctgacygacaggaggaaaacaaggccgggttgctggacctgcctgacgcatctgtgaatggctggagctccgatgaggaaaaggcagggggcctggatgatgaaga

SEQ ID NO: 35707 - DNA, 201 bp, Homo sapiens
gcaagatcctcgtccgagaaacggggatgcaggccccgggccgtgcagacagggccgtcagaggtgatggtgtgcatctttagcaggtggcacaactggcrctgggaaccgggggtcccttccctcaggagtccttatggaggcagaccctcacccagtgagggcacggagcccccgggggccctggagggaggagcgacc

SEQ ID NO: 35708 - DNA, 201 bp, Homo sapiens
gctaccaggaggtcaaccccgctccctacaccatcatcaccttccccttcctgtttgctgtgatgttcggggatgtgggccacgggctgctcatgttcctsttcgccctggccatggtccttgcggagaaccgaccggctgtgaaggccgcgcagaacgagatctggcagactttcttcaggggccgctacctgctcctgc

SEQ ID NO: 35709 - DNA, 201 bp, Homo sapiens
ctacacctgcgtgagtcggctgggcgagctgggcctcgtggagttcagagacctcaacgcctcggtgagcgccttccagagacgctttgtggttgatgttyggcgctgtgaggagctggagaagaccttcaccttcctgcaggaggaggtgcggcgggctgggctggtcctgcccccgccaaaggggaggctgccggcacc

SEQ ID NO: 35710 - DNA, 201 bp, Homo sapiens
ccagggcatcgtggatgcctacggcgtgggccgctaccaggaggtcaaccccgctccctacaccatcatcaccttccccttcctgtttgctgtgatgttcrgggatgtgggccacgggctgctcatgttcctcttcgccctggccatggtccttgcggagaaccgaccggctgtgaaggccgcgcagaacgagatctggca

SEQ ID NO: 35711 - DNA, 201 bp, Homo sapiens
ggcccaggagctgcgggatgtgcggggcaaccagcaggccctgcgggcccagctgcaccagctgcagctccacgccgccgtgctacgccagggccatgaayctcagctggcagccgcccacacagatggggcctcagagaggacgcccctgctccaggcccccggggggccgcaccaggacctgagggtcaactttgtggc

SEQ ID NO: 35712 - DNA, 201 bp, Homo sapiens
cagctcgatggaggagggagtgagtgccgtggctcaccgcatcccctgccgggacatgccccccacactcatccgcaccaaccgcttcacggccagcttcyagggcatcgtggatgcctacggcgtgggccgctaccaggaggtcaaccccgctccctacaccatcatcaccttccccttcctgtttgctgtgatgttcgg

SEQ ID NO: 35713 - DNA, 201 bp, Homo sapiens
tcccctcgggctggagtgtggccgccatggccaaccagtctggctggagtgatgcattcctggcccagcacacgatgcttaccctggatcccaacgtcacyggtgtcttcctgggaccctacccctttggcatcgatcctatttggagcctggctgccaaccacttgagcttcctcaactccttcaagatgaagatgtccg

SEQ ID NO: 35714 - DNA, 201 bp, Homo sapiens
cacgccgccgtgctacgccagggccatgaacctcagctggcagccgcccacacagatggggcctcagagaggacgcccctgctccaggcccccggggggcygcaccaggacctgagggtcaactttgtggcaggtgccgtggagccccacaaggcccctgccctagagcgcctgctctggagggcctgccgcggcttcctc

SEQ ID NO: 35715 - DNA, 201 bp, Homo sapiens
acaacgagtgcttcagtcgcgccaccagcatcttcccctcgggctggagtgtggccgccatggccaaccagtctggctggagtgatgcattcctggcccarcacacgatgcttaccctggatcccaacgtcaccggtgtcttcctgggaccctacccctttggcatcgatcctatttggagcctggctgccaaccacttga

SEQ ID NO: 35716 - DNA, 201 bp, Homo sapiens
caaccacttgagcttcctcaactccttcaagatgaagatgtccgtcatcctgggcgtcgtgcacatggcctttggggtggtcctcggagtcttcaaccacstgcactttggccagaggcaccggctgctgctggagacgctgccggagctcaccttcctgctgggactcttcggttacctcgtgttcctagtcatctacaa

SEQ ID NO: 35717 - DNA, 201 bp, Homo sapiens
ctggcccacgcccagctgtccgaggttctgtgggccatggtgatgcgcataggcctgggcctgggccgggaggtgggcgtggcggctgtggtgctggtccscatctttgccgcctttgccgtgatgaccgtggctatcctgctggtgatggagggactctcagccttcctgcacgccctgcggctgcactgggtggaattc

SEQ ID NO: 35718 - DNA, 201 bp, Homo sapiens
ccgcgcagaacgagatctggcagactttcttcaggggccgctacctgctcctgcttatgggcctgttctccatctacaccggcttcatctacaacgagtgmttcagtcgcgccaccagcatcttcccctcgggctggagtgtggccgccatggccaaccagtctggctggagtgatgcattcctggcccagcacacgatgc

SEQ ID NO: 35719 - DNA, 201 bp, Homo sapiens
ccgccatggccaaccagtctggctggagtgatgcattcctggcccagcacacgatgcttaccctggatcccaacgtcaccggtgtcttcctgggaccctamccctttggcatcgatcctatttggagcctggctgccaaccacttgagcttcctcaactccttcaagatgaagatgtccgtcatcctgggcgtcgtgcaca

SEQ ID NO: 35720 - DNA, 201 bp, Homo sapiens
atgtccgtcatcctgggcgtcgtgcacatggcctttggggtggtcctcggagtcttcaaccacgtgcactttggccagaggcaccggctgctgctggagaygctgccggagctcaccttcctgctgggactcttcggttacctcgtgttcctagtcatctacaagtggctgtgtgtctgggctgccagggccgcctcggcc

SEQ ID NO: 35721 - DNA, 201 bp, Homo sapiens
tgcgcatccaggaggagacggagcgcctggcccaggagctgcgggatgtgcggggcaaccagcaggccctgcgggcccagctgcaccagctgcagctccaygccgccgtgctacgccagggccatgaacctcagctggcagccgcccacacagatggggcctcagagaggacgcccctgctccaggcccccggggggccgc

SEQ ID NO: 35722 - DNA, 201 bp, Homo sapiens
aggcaccggctgctgctggagacgctgccggagctcaccttcctgctgggactcttcggttacctcgtgttcctagtcatctacaagtggctgtgtgtctrggctgccagggccgcctcggcccccagcatcctcatccacttcatcaacatgttcctcttctcccacagccccagcaacaggctgctctacccccggcag

SEQ ID NO: 35723 - DNA, 201 bp, Homo sapiens; identical to SEQ ID NO: 35706

SEQ ID NO: 35724 - DNA, 201 bp, Homo sapiens
tgctggtccccatctttgccgcctttgccgtgatgaccgtggctatcctgctggtgatggagggactctcagccttcctgcacgccctgcggctgcactgrgtggaattccagaacaagttctactcaggcacgggctacaagctgagtcccttcaccttcgctgccacagatgactagggcccactgcaggtcctgccag

SEQ ID NO: 35725 - DNA, 201 bp, Homo sapiens
gtgcagcgtgagcaccacgcacaagtgcctcattgccgaggcctggtgctctgtgcgagacctgcccgccctgcaggaggccctgcgggacagctcgatgkaggagggagtgagtgccgtggctcaccgcatcccctgccgggacatgccccccacactcatccgcaccaaccgcttcacggccagcttccagggcatcgt

SEQ ID NO: 35726 - DNA, 201 bp, Homo sapiens
gtttgctgtgatgttcggggatgtgggccacgggctgctcatgttcctcttcgccctggccatggtccttgcggagaaccgaccggctgtgaaggccgcgyagaacgagatctggcagactttcttcaggggccgctacctgctcctgcttatgggcctgttctccatctacaccggcttcatctacaacgagtgcttcag

SEQ ID NO: 35727 - DNA, 201 bp, Homo sapiens; identical to SEQ ID NO: 35708

SEQ ID NO: 35728 - DNA, 201 bp, Homo sapiens; identical to SEQ ID NO: 35710

SEQ ID NO: 35729 - DNA, 165 bp, Homo sapiens
ctggcagccgcccacacagatggggcctcagagaggacgcccctgctccaggcccccggggggcygcaccaggacctgagggtcaagtgagtgagggatgacctcatgccctttctggccagcccagaacccctggccagtcgctgggctgggccaggctgagct

SEQ ID NO: 35730 - DNA, 201 bp, Homo sapiens; identical to SEQ ID NO: 35713

SEQ ID NO: 35731 - DNA, 201 bp, Homo sapiens; identical to SEQ ID NO: 35712

SEQ ID NO: 35732 - DNA, 201 bp, Homo sapiens; identical to SEQ ID NO: 35715

SEQ ID NO: 35733 - DNA, 201 bp, Homo sapiens; identical to SEQ ID NO: 35718

SEQ ID NO: 35734 - DNA, 201 bp, Homo sapiens; identical to SEQ ID NO: 35716

SEQ ID NO: 35735 - DNA, 201 bp, Homo sapiens; identical to SEQ ID NO: 35717

SEQ ID NO: 35736 - DNA, 201 bp, Homo sapiens; identical to SEQ ID NO: 35719

SEQ ID NO: 35737 - DNA, 201 bp, Homo sapiens; identical to SEQ ID NO: 35720

SEQ ID NO: 35738 - DNA, 201 bp, Homo sapiens; identical to SEQ ID NO: 35722

SEQ ID NO: 35739 - DNA, 201 bp, Homo sapiens; identical to SEQ ID NO: 35706

SEQ ID NO: 35740 - DNA, 201 bp, Homo sapiens; identical to SEQ ID NO: 35724

SEQ ID NO: 35741 - DNA, 201 bp, Homo sapiens; identical to SEQ ID NO: 35725

SEQ ID NO: 35742 - DNA, 201 bp, Homo sapiens; identical to SEQ ID NO: 35726

SEQ ID NO: 35743 - DNA, 201 bp, Homo sapiens; identical to SEQ ID NO: 35708

SEQ ID NO: 35744 - DNA, 201 bp, Homo sapiens; identical to SEQ ID NO: 35709

SEQ ID NO: 35745 - DNA, 201 bp, Homo sapiens
ggcccaggagctgcgggatgtgcggggcaaccagcaggccctgcgggcccagctgcaccagctgcagctccacgccgccgtgctacgccagggccatgaayctcagctggcagccgcccacacagatggggcctcagagaggacgcccctgctccaggcccccggggggccgcaccaggacctgagggtcaagtgagtgag

SEQ ID NO: 35746 - DNA, 201 bp, Homo sapiens; identical to SEQ ID NO: 35710

SEQ ID NO: 35747 - DNA, 201 bp, Homo sapiens
cacgccgccgtgctacgccagggccatgaacctcagctggcagccgcccacacagatggggcctcagagaggacgcccctgctccaggcccccggggggcygcaccaggacctgagggtcaagtgagtgagggatgacctcatgccctttctggccagcccagaacccctggccagtcgctgggctgggccaggctgagct

SEQ ID NO: 35748 - DNA, 201 bp, Homo sapiens; identical to SEQ ID NO: 35713

SEQ ID NO: 35749 - DNA, 201 bp, Homo sapiens; identical to SEQ ID NO: 35712

SEQ ID NO: 35750 - DNA, 201 bp, Homo sapiens; identical to SEQ ID NO: 35715

SEQ ID NO: 35751 - DNA, 201 bp, Homo sapiens; identical to SEQ ID NO: 35718

SEQ ID NO: 35752 - DNA, 201 bp, Homo sapiens; identical to SEQ ID NO: 35716

SEQ ID NO: 35753 - DNA, 201 bp, Homo sapiens; identical to SEQ ID NO: 35717

SEQ ID NO: 35754 - DNA, 201 bp, Homo sapiens; identical to SEQ ID NO: 35719

SEQ ID NO: 35755 - DNA, 201 bp, Homo sapiens; identical to SEQ ID NO: 35720

SEQ ID NO: 35756 - DNA, 201 bp, Homo sapiens; identical to SEQ ID NO: 35721

SEQ ID NO: 35757 - DNA, 201 bp, Homo sapiens; identical to SEQ ID NO: 35722

SEQ ID NO: 35758 - DNA, 201 bp, Homo sapiens; identical to SEQ ID NO: 35706

SEQ ID NO: 35759 - DNA, 201 bp, Homo sapiens; identical to SEQ ID NO: 35724

SEQ ID NO: 35760 - DNA, 201 bp, Homo sapiens; identical to SEQ ID NO: 35725

SEQ ID NO: 35761 - DNA, 201 bp, Homo sapiens; identical to SEQ ID NO: 35726

SEQ ID NO: 35762 - DNA, 201 bp, Homo sapiens; identical to SEQ ID NO: 35708

SEQ ID NO: 35763 - DNA, 201 bp, Homo sapiens; identical to SEQ ID NO: 35709

SEQ ID NO: 35764 - DNA, 201 bp, Homo sapiens; identical to SEQ ID NO: 35710

SEQ ID NO: 35765 - DNA, 201 bp, Homo sapiens; identical to SEQ ID NO: 35711

SEQ ID NO: 35766 - DNA, 201 bp, Homo sapiens; identical to SEQ ID NO: 35712

SEQ ID NO: 35767 - DNA, 201 bp, Homo sapiens; identical to SEQ ID NO: 35713

SEQ ID NO: 35768 - DNA, 201 bp, Homo sapiens; identical to SEQ ID NO: 35714

SEQ ID NO: 35769 - DNA, 201 bp, Homo sapiens; identical to SEQ ID NO: 35715

SEQ ID NO: 35770 - DNA, 201 bp, Homo sapiens; identical to SEQ ID NO: 35716

SEQ ID NO: 35771 - DNA, 201 bp, Homo sapiens; identical to SEQ ID NO: 35717

SEQ ID NO: 35772 - DNA, 201 bp, Homo sapiens; identical to SEQ ID NO: 35718

SEQ ID NO: 35773 - DNA, 201 bp, Homo sapiens; identical to SEQ ID NO: 35719

SEQ ID NO: 35774 - DNA, 201 bp, Homo sapiens; identical to SEQ ID NO: 35720

SEQ ID NO: 35775 - DNA, 201 bp, Homo sapiens; identical to SEQ ID NO: 35721

SEQ ID NO: 35776 - DNA, 201 bp, Homo sapiens; identical to SEQ ID NO: 35722

SEQ ID NO: 35777 - DNA, 201 bp, Homo sapiens; identical to SEQ ID NO: 35706

SEQ ID NO: 35778 - DNA, 201 bp, Homo sapiens; identical to SEQ ID NO: 35724

SEQ ID NO: 35779 - DNA, 201 bp, Homo sapiens; identical to SEQ ID NO: 35725

SEQ ID NO: 35780 - DNA, 201 bp, Homo sapiens; identical to SEQ ID NO: 35726

SEQ ID NO: 35781 - DNA, 201 bp, Homo sapiens
gactctgtatccaggctcagaagcctgggtggctttctggaacagggctgtcctgtgaggtgagcatatggcctgagtgacaggctgggatggtggccagractgcagtattgacaaacagcaggagtaaagccgagagacctgagccctgcttcctcccatgtctcactcctgcctcccacttccattcccctgctgctc

SEQ ID NO: 35782 - DNA, 201 bp, Homo sapiens
ggcagtcgtttcctctctgaagagtatttttttcgattgccctctggttagggtgcacatataaatcagagttaatatatgaacgcgtgtgcatgcacaaktgtgtgtgtgcctgcgtgctgtgcgtggcagggtgtgtgtgtgtgtgtctggctgtgcgttccggagtgtgtgacgatgctgacctagctgtgtggcctt

SEQ ID NO: 35783 - DNA, 201 bp, Homo sapiens
gatgagcattttttcacatgtttgttggccacttgtatgtcttctagtgagagtgtctgttcatgtcctttgcgcataaaagtggattaattgaatcaaargccatgaacattttaaaagaacgaagtatatatttagaaatctcctttttgaaaggttgtagtaatctaccctccctccagcccaatagtgagagggccc

SEQ ID NO: 35784 - DNA, 201 bp, Homo sapiens
gggcactggagcctggcccccaggacatggctgctccccccaacatctggaccagctgccctggcggagagacagcaaggggccggcaggtgctcgatggsccccccagggcttctccagggcagcacagggaccccggatgaagactctgtcccccctcaggcattcagctgcccacaagtttcctgcaccctggaaaag

SEQ ID NO: 35785 - DNA, 201 bp, Homo sapiens
taatctaccctccctccagcccaatagtgagagggcccatcttagacttaggtcaccaaaatgtggtgaataatctctgattttagtttcagtttttgggttttttttttttgtttttttggtttttgtttgtttttttgagactccatctcaaagaaaaaaggaaaaaagatcagagagttgccctggggactctgtatc

SEQ ID NO: 35786 - DNA, 201 bp, Homo sapiens
gctttgggcactgcagctctggacttttctggcccctcctgagatgacctgatggagctgatgctttctctcctaatccctgggcactaggctcttatcartgtgcttgggccagctctcctgcctgtgtctagaggaagccagagacagaaataggctaagcctgcagtaggatctcagccacaagggccccgcaggatg

SEQ ID NO: 35787 - DNA, 201 bp, Homo sapiens
catcctccgcagctgcacaggtcagaggtggaccattaagaactccatcaagtagagggagggagctggggcactggagcctggcccccaggacatggctsctccccccaacatctggaccagctgccctggcggagagacagcaaggggccggcaggtgctcgatgggccccccagggcttctccagggcagcacaggga

SEQ ID NO: 35788 - DNA, 201 bp, Homo sapiens; identical to SEQ ID NO: 35782

SEQ ID NO: 35789 - DNA, 201 bp, Homo sapiens
gggctgagccggttctatcccgcatccaggaaaaccggaagcgtgtgatcctcccctccattgacaacatcaaacaggacaactttgaggtgcagcggtaygagaactcggcccacgggtacagctgggagctgtggtgcatgtacatcagccccccaaaagactggtgggacgccggagacccttctctccccatcagga

SEQ ID NO: 35790 - DNA, 201 bp, Homo sapiens; identical to SEQ ID NO: 35784

SEQ ID NO: 35791 - DNA, 201 bp, Homo sapiens
acctgccgctggagaatccgggaattgacatcggtgatgtctccgaaagaagagcattaaggaaaagtttaaagtgtaagaatttccagtggtacctggaycatgtttacccagaaatgagaagatacaataataccgttgcttacggggagcttcgcaacaacaaggcaaaagacgtctgcttggaccaggggccgctgg

SEQ ID NO: 35792 - DNA, 201 bp, Homo sapiens; identical to SEQ ID NO: 35786

SEQ ID NO: 35793 - DNA, 201 bp, Homo sapiens; identical to SEQ ID NO: 35787

SEQ ID NO: 35794 - DNA, 201 bp, Homo sapiens
gtaagaatttccagtggtacctggaccatgtttacccagaaatgagaagatacaataataccgttgcttacggggagcttcgcaacaacaaggcaaaagaygtctgcttggaccaggggccgctggagaaccacacagcaatattgtatccgtgccatggctggggaccacagcttgcccgctacaccaaggaaggcttcc

SEQ ID NO: 35795 - DNA, 201 bp, Homo sapiens
ctcttcgcgttgctgaggtctggatggacgattacaagtctcatgtgtacatagcgtggaacctgccgctggagaatccgggaattgacatcggtgatgtmtccgaaagaagagcattaaggaaaagtttaaagtgtaagaatttccagtggtacctggaccatgtttacccagaaatgagaagatacaataataccgttg

SEQ ID NO: 35796 - DNA, 201 bp, Homo sapiens
cgaggacttccatgtgagcgattccgttctccccaccaccaatccgacctcccagccgtctccgccgcccgagcatccttgaggtgggacgagcaggggcytggatccctgccggccgtctggtgtgtgaggcttgcacggcccctggctgccccgcgcctcgccggagcccgagggggcgcaggtccggggcgagggccg

SEQ ID NO: 35797 - DNA, 201 bp, Homo sapiens
gtttgatggcttcactgagaagagtcaaagtgctgttggtgttgaacttgatcgcggtagccggcttcgtgctcttcctggccaagtgccggcccatcgcrgtgcgcagcggagacgccttccacgagatccggccgcgcgccgaggtggccaacctcagcgcgcacagcgccagccccatccaggatgcggtcctgaagc

SEQ ID NO: 35798 - DNA, 201 bp, Homo sapiens; identical to SEQ ID NO: 35797

SEQ ID NO: 35799 - DNA, 201 bp, Homo sapiens
ctgttgattttttccgaccatcagctcagagactgatagaagagaaaggtgcagtggatgcattggctgcagctttagcccacatttctggtgcatcaagytttgaaccacgatctttgatcacctctgataaggggtttgtgaccatgactctggaaagcctagaggaaatacaggatgtcagctgtgcttggaaagaac

SEQ ID NO: 35800 - DNA, 201 bp, Homo sapiens
gtatccgggattatttttccccgccgtgcggtgcgtgtcccggaagtgacgcatggccaaggccgggcggccgccttgcccccgcttcctttcacgctgtygctgcccgtaggtggttgtggccactgtgcccggagggaggcggcggtggccagtaatgcctgggaaactcctctggggggacattatggagctggaagc

SEQ ID NO: 35801 - DNA, 201 bp, Homo sapiens
gagccagaagaaggagaggcaaaagagtgacagaaggaagtcaaggcaccattatgactcggatgagaaatcagaaacaagagaaaatggtgttacagatkacctggatgctcccaaggccaaaaaatctaaaatgaaagagaagctaaatggagacactgaagaaggatttaatagactttcagatgaattctccaaatc

SEQ ID NO: 35802 - DNA, 201 bp, Homo sapiens
aaggctctgcgaggccgaggagacccgttcggagtgggggaggggaagataaaccgaactatttatgttaatcagtgcatgcttcctttatggagattggmcagggttttactctagtaaccaatcacttcagaacaagggcgggcccgttgatatctctcacactcattggttgagaggttgcggcgcaatggaaggtct

SEQ ID NO: 35803 - DNA, 201 bp, Homo sapiens
cggcgcaatggaaggtcttaaaccgagagtatccgggattatttttccccgccgtgcggtgcgtgtcccggaagtgacgcatggccaaggccgggcggcckccttgcccccgcttcctttcacgctgtcgctgcccgtaggtggttgtggccactgtgcccggagggaggcggcggtggccagtaatgcctgggaaactcc

SEQ ID NO: 35804 - DNA, 201 bp, Homo sapiens
tagaggaaatacaggatgtcagctgtgcttggaaagaacttaacagaaagctgagtagtaatgcagtgtctcagattaccagaatgtgcctcctgaaaggraatatgggtgtttgctttgatgttcctacaactgagtcagaaaggttacaggcagagtggcatgattccgactggatactctcagtgccagccaaattac

SEQ ID NO: 35805 - DNA, 201 bp, Homo sapiens
ttaaaaaaagccgctcaccaaaggtacttgttttggctccaacaagggaactggcaaaccaagtagccaaagacttcaaagatataactaggaaactcagygtggcgtgtttttatggtggaacatcatatcaaagccaaattaatcatattcgaaatggtattgacatcttggttggaacacctggtcgtatcaaagacc

SEQ ID NO: 35806 - DNA, 201 bp, Homo sapiens
tttagtggaagataatgaggctcactgtaaacactacattgtcctgcaaagtaattctgatgagagtttactgacttctagagccattctctttaaccgtstgcaggtctaaggattaactatatttgtgatttgtaataaaactgagttgtacaacactgcctgtgtttgtctggccaagacatttgcttcacttttaaa

SEQ ID NO: 35807 - DNA, 201 bp, Homo sapiens
cgttatctttggagaggtgaattattctacaaaatgcaccctaaatctcattgtttaaaaccttactgatctaataccatctacacaaaaaaatgttgtasttgcagaacttagtttataaaaacaaagaatgtgtatttcttcaatagccgggtatttggattgttctcttgataatatttgaatgtgactcttggattt

SEQ ID NO: 35808 - DNA, 201 bp, Homo sapiens
tcatggaaaagatatgaccataatttagtctcctcaagtgaaaaacaggagtaatgtttcgttgcactttgaaagatctgcttcaaggcataactcgtgtmgttgtctggtttcagggatagctgtttgaattgtcattctaaagtaggtcatcaggttcacttattatccgaccttaatctgggataaaggttttggtat

SEQ ID NO: 35809 - DNA, 201 bp, Homo sapiens
taacacggtgaaaacccatgtctactaaaaatacaaaaaattagccaggtgtggtggcgggcgcctgtagtcccagctactcaggaggctgaggcaggagmatggtgtgaacccgggaggcagagcttgcagtgagccgagatcgcaccactgcactccagcctgggcgaaagggcaagactccatctcaaaaaaaaaaaa

SEQ ID NO: 35810 - DNA, 201 bp, Homo sapiens
gggcatggtggcttacgcctgtaatcccagcactttgggaggccaaggcgggcggatcatgaggtcaggagatcgagaccatcctggctaacacggtgaawacccatgtctactaaaaatacaaaaaattagccaggtgtggtggcgggcgcctgtagtcccagctactcaggaggctgaggcaggagaatggtgtgaacc

SEQ ID NO: 35811 - DNA, 201 bp, Homo sapiens
gctttggctctattgatttgtccattatgtgttaggcaaatataacttaagtggagggggaagtttatgaatataatatagctctgtgttttaaacctcaraaacagatttgagtgtttcagtattatagaaacagtgatgactattcatgctctgctagtctatgcctgcaactccaaatgtttgtggttcagtatttcc

SEQ ID NO: 35812 - DNA, 201 bp, Homo sapiens
aatcaaacttgtggaagcttgtaatgaccaaacacataacatggaccgatggctcagtaaattggaggcctctaactggctgactcacatcaaagagattytgacaactgcctgcctagcggctcagtgcatcgacagggaaggagcatcaatattgattcacggaacagaaggaactgattccacactccaggtgacctc

SEQ ID NO: 35813 - DNA, 201 bp, Homo sapiens
gtccctcttacccaccaattgtcacagtgcccaaatccatcgatgatgaagctcttcggaaggtagctacatttcgacatggagggcgcttcccagtactmagctattaccacaaaaaaaatgggatggtaattatgcgaagtggtcagccactcactggtacaaacgggaggaggtgcaaggaggacgagaagctgataa

SEQ ID NO: 35814 - DNA, 201 bp, Homo sapiens
ccagttccattgaggcattgtctactctggactccatcactctgatgtaccctttcttttaccgtcctatgtttgaagtgatagaagatggctggcattcyttccttcctgagcaagaatttgaactctattcttcagctaccagtgaatggaggctaagctatgtcaataaggaatttgctgtctgtccctcttacccac

SEQ ID NO: 35815 - DNA, 201 bp, Homo sapiens
ctgggttaatcagcccagtgagctgagtaaattcaccaatcccctctttgaagccaacaaccttgtcatctggccttcagttgctccgcagagtcttccastgtgggaaggtattttcctacgttggaatagatcctctaagtatttggatgaagcatatgaagaaatggttaacatcattgaatataataaagaattaca

SEQ ID NO: 35816 - DNA, 201 bp, Homo sapiens
tgaggcaggagaatggtgtgaacccgggaggcagagcttgcagtgagccgagatcgcaccactgcactccagcctgggcgaaagggcaagactccatctcaaaaaaaaaaaaaaaaaaagactcatttatccatttacatttattctcagatgataaaatatatactgatactataactttcttatggtatcagttttctt

SEQ ID NO: 35817 - DNA, 201 bp, Homo sapiens
gaggcaggagaatggtgtgaacccgggaggcagagcttgcagtgagccgagatcgcaccactgcactccagcctgggcgaaagggcaagactccatctcaaaaaaaaaaaaaaaaaaagactcatttatccatttacatttattctcagatgataaaatatatactgatactataactttcttatggtatcagttttcttt

SEQ ID NO: 35818 - DNA, 201 bp, Homo sapiens
ctgtagttatgaaccttggggcattaaaatcccatggcaaggagcataagagatgttctcgtagctctgcgttgtgtgaaatgtccatcttagttttgttaaaaaaaaaaaaaaaaaaaggaaacagcctcacttttttgtgctccctcagaattgcttgctatgtctgttaatacagctgagctttttgttttcttctct

SEQ ID NO: 35819 - DNA, 201 bp, Homo sapiens
atccatcgatgatgaagctcttcggaaggtagctacatttcgacatggagggcgcttcccagtactaagctattaccacaaaaaaaatgggatggtaattmtgcgaagtggtcagccactcactggtacaaacgggaggaggtgcaaggaggacgagaagctgataaatgctaccctcagggctggaaagcgtggctacat

SEQ ID NO: 35820 - DNA, 201 bp, Homo sapiens
tgcactttgaaagatctgcttcaaggcataactcgtgtagttgtctggtttcagggatagctgtttgaattgtcattctaaagtaggtcatcaggttcacttattatccgaccttaatctgggataaaggttttggtatttgcccacttctagatagaatgaatgaaaacaacacaagcgttttatgagcactctttatca

SEQ ID NO: 35821 - DNA, 201 bp, Homo sapiens
gcactttgaaagatctgcttcaaggcataactcgtgtagttgtctggtttcagggatagctgtttgaattgtcattctaaagtaggtcatcaggttcacttattatccgaccttaatctgggataaaggttttggtatttgcccacttctagatagaatgaatgaaaacaacacaagcgttttatgagcactctttatcag

SEQ ID NO: 35822 - DNA, 201 bp, Homo sapiens
cactttgaaagatctgcttcaaggcataactcgtgtagttgtctggtttcagggatagctgtttgaattgtcattctaaagtaggtcatcaggttcacttattatccgaccttaatctgggataaaggttttggtatttgcccacttctagatagaatgaatgaaaacaacacaagcgttttatgagcactctttatcaga

SEQ ID NO: 35823 - DNA, 201 bp, Homo sapiens
ttcctggaccagaaatgggcaatagttacaatagttgatcctctgttctggaagctttgaaatttatcagagaatgaagtcattcagtacatctgataaakttttgttgttgttgttgttgttgttgttttaattgggcaaccctcagaactgaagaggttcagagaactttccaggtttatactatacctcaagaccaca

SEQ ID NO: 35824 - DNA, 201 bp, Homo sapiens
ccagaaatgggcaatagttacaatagttgatcctctgttctggaagctttgaaatttatcagagaatgaagtcattcagtacatctgataaagttttgttgttgttgttgttgttgttgttttaattgggcaaccctcagaactgaagaggttcagagaactttccaggtttatactatacctcaagaccacatagattag

SEQ ID NO: 35825 - DNA, 201 bp, Homo sapiens
gggccggtaataatcacgtgagggataatcagattcctgcgtattcagcatcttctctattcatgtggagtgaaagctggtttttatacaggagatacgtraagtaggccccacaaataatatttttaaaatacaaaggatcaccacaatcctctattgaacatataaggatcctcagatttaaataagtacttttttttt

SEQ ID NO: 35826 - DNA, 201 bp, Homo sapiens
ttgggagccggaaggaggtgctagtcattttatttttacgtgaaatagatgacctatttaatgccatttgtgtttcatgccattttatccaaagctttttstctgtgtccactctccaaacagcattctagagcagtcaaggagacagctaatctctctagggactatttggtggtttaaaaaaagggtcagacttttaaa

SEQ ID NO: 35827 - DNA, 201 bp, Homo sapiens
tcacttttttgtgctccctcagaattgcttgctatgtctgttaatacagctgagctttttgttttcttctctttttgtctcaagattgtatatgaaggagscttttcttctcagctaacaggcatataaggaaaaccatctagagagttttctttagaagtgactcccattagcctggtgtggtggtgtgtgcctatagtc

SEQ ID NO: 35828 - DNA, 201 bp, Homo sapiens
gtctgttaatacagctgagctttttgttttcttctctttttgtctcaagattgtatatgaaggaggcttttcttctcagctaacaggcatataaggaaaamcatctagagagttttctttagaagtgactcccattagcctggtgtggtggtgtgtgcctatagtcccagccactaggaaagctgaggcagaaggatccct

SEQ ID NO: 35829 - DNA, 201 bp, Homo sapiens
ggtgaaaacccatgtctactaaaaatacaaaaaattagccaggtgtggtggcgggcgcctgtagtcccagctactcaggaggctgaggcaggagaatggtrtgaacccgggaggcagagcttgcagtgagccgagatcgcaccactgcactccagcctgggcgaaagggcaagactccatctcaaaaaaaaaaaaaaaaaa

SEQ ID NO: 35830 - DNA, 201 bp, Homo sapiens
tttttgagaagacttgggggggacaataatagacattcatgtcagatcccatatgggggatttttaaacatttctttgaactttgaggcctgatttagggrtgggattttattgctttttgttttaaaggatgaaattttgtggggttttagtctttgattcagtcagtatttggtttatgttaaataaaaaatcagtatc

SEQ ID NO: 35831 - DNA, 201 bp, Homo sapiens
aaagtaattctgatgagagtttactgacttctagagccattctctttaaccgtctgcaggtctaaggattaactatatttgtgatttgtaataaaactgarttgtacaacactgcctgtgtttgtctggccaagacatttgcttcacttttaaaatgcacgttatctttggagaggtgaattattctacaaaatgcaccct

SEQ ID NO: 35832 - DNA, 201 bp, Homo sapiens
catttctggttcgtaacaccatttgggtggattttcggcattgtctttataaatttcttcttcttcttgccccatcgtattccttgaattggtattgtcartcaccgttcatgaagtgattggatgtgatttaggtaaagtctttaccatttctgaggaaaactaaacagattataaagttatgagtgtctacatgctaca

SEQ ID NO: 35833 - DNA, 201 bp, Homo sapiens
atttcttcttcttcttgccccatcgtattccttgaattggtattgtcagtcaccgttcatgaagtgattggatgtgatttaggtaaagtctttaccatttstgaggaaaactaaacagattataaagttatgagtgtctacatgctacagaaccatttttttaatttctgaaaaatgttcagtgtatcatattatttctta

SEQ ID NO: 35834 - DNA, 201 bp, Homo sapiens
aaggaaaggcatggaccagttaacctcttttttctttttgtactccagactttatctttccaaggcagtgcctcgaagtcaaaaagttaaactttcatctkcattcaaaattcccatctccttagtggctactcgctagccaggagagggcaaactgattatccgttttacacagaagtataaatgaatgacgacaacatt

SEQ ID NO: 35835 - DNA, 201 bp, Homo sapiens
acaatacggaggagctgtggctcctccattcaaacatcgacgccatcgacaagcggtgagtgcccgccccaccccagctccgcagggagccgggggtcccytgtgggcgccccgggaaatacttcctggcgttttccgcgcagcctgccgcccagctagccggcaagatgagccctctgtggcctagaatcaggatttacc

SEQ ID NO: 35836 - DNA, 201 bp, Homo sapiens
gcctcacaggataatttggatattaggaagattcgtacagaggatatgccttaaaataataatctctttctttctttcttttttttttttttttttttttkgagacgaaatctcactgtattgcccaggctggagtgcggtggccaatctcggctcactgtaacctccacctcccaggttctagcgattcttctgtctcag

SEQ ID NO: 35837 - DNA, 201 bp, Homo sapiens
cgcggctcagcgcgtaccggcgggcttcgaaaccgcagtcctccggcgaccccgaactccgctccggagcctcagccccctggaaagtgatcccggcatcsgagagccaagatgccggcccacttgctgcaggacgatatctctagctcctataccaccaccaccaccattacagcgcctccctccagggtcctgcagaat

SEQ ID NO: 35838 - DNA, 103 bp, Homo sapiens
catgttttatgtaaaaatgaaaggataagaaacaaaacacaaaaaaacactgattttgattccaggttctaaaacaatttccaaatgccatgtatgctccrgg

SEQ ID NO: 35839 - DNA, 201 bp, Homo sapiens
tggagacgatgcccctctacttggaagacgacattcgccctgatataaaagatgatatatatgaccccacctacaaggataaggaaggcccaagccccaargttgaatatgtctggagaaacatcatccttatgtctctgctacacttgggagccctgtatgggatcactttgattcctacctgcaagttctacacctggc

SEQ ID NO: 35840 - DNA, 201 bp, Homo sapiens
ccggtcctgggctaggctccgcgccccagccccaaaccgggtccccagccccttccagagagaaagctcccgacgcgggatgccgggcagaggcccagcgrcgggtggaagagaagctgagaaggagaaacagaggggagggggagcgaggagctggcggcagagggaacagcagattgcgccgagccaatggcaacggca

SEQ ID NO: 35841 - DNA, 201 bp, Homo sapiens
cccgttgccagctctagcctttaaattcccggctcggggacctccacgcaccgcggctagcgccgacaaccagctagcgtgcaaggcgccgcggctcagcrcgtaccggcgggcttcgaaaccgcagtcctccggcgaccccgaactccgctccggagcctcagccccctggaaagtgatcccggcatccgagagccaaga

SEQ ID NO: 35842 - DNA, 201 bp, Homo sapiens
ctaccaccactcctttccctatgactactctgccagtgagtaccgctggcacatcaacttcaccacattcttcattgattgcatggccgccctcggtctgrcctatgaccggaagaaagtctccaaggccgccatcttggccaggattaaaagaaccggagatggaaactacaagagtggctgagtttggggtccctcagg

SEQ ID NO: 35843 - DNA, 201 bp, Homo sapiens
ttttctccttggtttgctagtatcttgggtgtattctctgtaagtgtagctcaaataggtcatcatgaaaggttaaaaaagcgaggtggccatgttatgcwggtggttaaggccagggcctctccaaccactgtgccactgacttgctgtgtgaccctgggcaagtcacttaactataaggtgcctcagttttccttctgt

SEQ ID NO: 35844 - DNA, 201 bp, Homo sapiens
gctggtagaaaaaggggcctgagtggaggattatcagtatcacgatttgcaggattcccttctgggcttcattctggaaacttttgttagggctgcttttyttaagtgcccacatttgatggagggtggaaataatttgaatgtatttgatttataagttttttttttttttttgggttaaaagatggttgtagcatttaa

SEQ ID NO: 35845 - DNA, 201 bp, Homo sapiens
ccatgaccctacataaggctggatggcacctcaggctgagggccccaatgtatgtgtggctgtgggtgtgggtgggagtgtgtctgctgagtaaggaacaygattttcaagattctaaagctcaattcaagtgacacattaatgataaactcagatctgatcaagagtccggatttctaacagtccttgctttggggggtg

SEQ ID NO: 35846 - DNA, 201 bp, Homo sapiens
tgagtaaaaactagaaggcttctctccacagtgttgtgccccttcactcatttttttttgaggagaagggggtctctgttaacatctagcctaaagtatasaactgcctggggggcagggttaggaatctcttcactaccctgattcttgattcctggctctaccctgtctgtcccttttctttgaccagatctttctctt

SEQ ID NO: 35847 - DNA, 201 bp, Homo sapiens; identical to SEQ ID NO: 35840

SEQ ID NO: 35848 - DNA, 201 bp, Homo sapiens
ctggaaacttttgttagggctgcttttcttaagtgcccacatttgatggagggtggaaataatttgaatgtatttgatttataagttttttttttttttttgggttaaaagatggttgtagcatttaaaatggaaaattttctccttggtttgctagtatcttgggtgtattctctgtaagtgtagctcaaataggtcatc

SEQ ID NO: 35849 - DNA, 201 bp, Homo sapiens; identical to SEQ ID NO: 35841

SEQ ID NO: 35850 - DNA, 201 bp, Homo sapiens
ggtctctgctggggaagggttttcttttctttttttctttaataacaaggagatttcttagttcatatatcaagaagtcttgaagttgggtgtttccagarttggtaaaaacagcagctcatagaattttgagtattccatgagctgctcattacagttctttcctctttctgctctgccatcttcaggatattggttctt

SEQ ID NO: 35851 - DNA, 201 bp, Homo sapiens
cattaatgataaactcagatctgatcaagagtccggatttctaacagtccttgctttggggggtgtgctgacaacttagctcaggtgccttacatcttttytaatcacagtgttgcatatgagcctgccctcactccctctgcagaatccctttgcacctgagaccctactgaagtggctggtagaaaaaggggcctgagt

SEQ ID NO: 35852 - DNA, 201 bp, Homo sapiens
ctacagcctagggcagacaatagtatagaagtctggaaaaaaacaaaaacagaatttgagaaccttggaccactcctgtccctgtagctcagtcatcaaascagaagtctggctttgctctattaagattggaaatgtacactaccaaacactcagtccactgttgagccccagtgctggaagggaggaaggcctttcttc

SEQ ID NO: 35853 - DNA, 201 bp, Homo sapiens
tttttagaaagcattttgggatccttcagcacaggaattctcaagacctgagtattttttataataggaatgtccaccatgaacttgatacgtccgtgtgycccagatgctgtcattagtctatatggttctccaagaaactgaatgaatccattggagaagcggtggataactagccagacaaaatttgagaatacataa

SEQ ID NO: 35854 - DNA, 201 bp, Homo sapiens
gctcaagacaaggctggcaaaccctcccagaaacatctctggcccagaaagcctctctctccctccctctctcatgaggcacagccaagccaagcgctcaygttgagccagtgggccagccacagagcaaaagagggtttattttcagtcccctctctctgggtcagaaccagagggcatgctgaatgccccctgcttact

SEQ ID NO: 35855 - DNA, 201 bp, Homo sapiens; identical to SEQ ID NO: 35837

SEQ ID NO: 35856 - DNA, 201 bp, Homo sapiens
cttatgacaagaacattagcccccgggagaatatcctggtttcacttggagctgtgggtgagggcttccacaactaccaccactcctttccctatgactaytctgccagtgagtaccgctggcacatcaacttcaccacattcttcattgattgcatggccgccctcggtctggcctatgaccggaagaaagtctccaagg

SEQ ID NO: 35857 - DNA, 201 bp, Homo sapiens; identical to SEQ ID NO: 35839

SEQ ID NO: 35858 - DNA, 201 bp, Homo sapiens
tcttttctttttttctttaataacaaggagatttcttagttcatatatcaagaagtcttgaagttgggtgtttccagaattggtaaaaacagcagctcatrgaattttgagtattccatgagctgctcattacagttctttcctctttctgctctgccatcttcaggatattggttcttcccctcatagtaataagatggc

SEQ ID NO: 35859 - DNA, 201 bp, Homo sapiens
cttggtttgctagtatcttgggtgtattctctgtaagtgtagctcaaataggtcatcatgaaaggttaaaaaagcgaggtggccatgttatgctggtggtyaaggccagggcctctccaaccactgtgccactgacttgctgtgtgaccctgggcaagtcacttaactataaggtgcctcagttttccttctgttaaaatg

SEQ ID NO: 35860 - DNA, 201 bp, Homo sapiens
tctcttccctgaacgttttcttctttccctggacaggcagcctcctttgtgtgtattcagaggcagtgatgacttgctgtccaggcagctccctcctgcasacagaatgctcagggtcactgaaccactgcttctcttttgaaagtagagctagctgccactttcacgtggcctccgcagtgtctccacctacacccctgt

SEQ ID NO: 35861 - DNA, 201 bp, Homo sapiens
ttcttgattcctggctctaccctgtctgtcccttttctttgaccagatctttctcttccctgaacgttttcttctttccctggacaggcagcctcctttgkgtgtattcagaggcagtgatgacttgctgtccaggcagctccctcctgcacacagaatgctcagggtcactgaaccactgcttctcttttgaaagtagag

SEQ ID NO: 35862 - DNA, 201 bp, Homo sapiens
gcagggttaggaatctcttcactaccctgattcttgattcctggctctaccctgtctgtcccttttctttgaccagatctttctcttccctgaacgttttyttctttccctggacaggcagcctcctttgtgtgtattcagaggcagtgatgacttgctgtccaggcagctccctcctgcacacagaatgctcagggtcac

SEQ ID NO: 35863 - DNA, 201 bp, Homo sapiens
attagtctatatggttctccaagaaactgaatgaatccattggagaagcggtggataactagccagacaaaatttgagaatacataaacaacgcattgccmcggaaacatacagaggatgccttttctgtgattgggtgggattttttccctttttatgtgggatatagtagttacttgtgacaagaataattttggaata

SEQ ID NO: 35864 - DNA, 201 bp, Homo sapiens
agcctaaagtatacaactgcctggggggcagggttaggaatctcttcactaccctgattcttgattcctggctctaccctgtctgtcccttttctttgacyagatctttctcttccctgaacgttttcttctttccctggacaggcagcctcctttgtgtgtattcagaggcagtgatgacttgctgtccaggcagctccc

SEQ ID NO: 35865 - DNA, 201 bp, Homo sapiens
gtgcctcagttttccttctgttaaaatggggataataatactgacctacctcaaagggcagttttgaggcatgactaatgctttttagaaagcattttggratccttcagcacaggaattctcaagacctgagtattttttataataggaatgtccaccatgaacttgatacgtccgtgtgtcccagatgctgtcattagt

SEQ ID NO: 35866 - DNA, 201 bp, Homo sapiens
tgaggagaagggggtctctgttaacatctagcctaaagtatacaactgcctggggggcagggttaggaatctcttcactaccctgattcttgattcctggytctaccctgtctgtcccttttctttgaccagatctttctcttccctgaacgttttcttctttccctggacaggcagcctcctttgtgtgtattcagaggc

SEQ ID NO: 35867 - DNA, 201 bp, Homo sapiens; identical to SEQ ID NO: 35842

SEQ ID NO: 35868 - DNA, 201 bp, Homo sapiens; identical to SEQ ID NO: 35843

SEQ ID NO: 35869 - DNA, 201 bp, Homo sapiens; identical to SEQ ID NO: 35844

SEQ ID NO: 35870 - DNA, 201 bp, Homo sapiens; identical to SEQ ID NO: 35845

SEQ ID NO: 35871 - DNA, 201 bp, Homo sapiens; identical to SEQ ID NO: 35846

SEQ ID NO: 35872 - DNA, 201 bp, Homo sapiens; identical to SEQ ID NO: 35840

SEQ ID NO: 35873 - DNA, 201 bp, Homo sapiens; identical to SEQ ID NO: 35848

SEQ ID NO: 35874 - DNA, 201 bp, Homo sapiens; identical to SEQ ID NO: 35841

SEQ ID NO: 35875 - DNA, 201 bp, Homo sapiens; identical to SEQ ID NO: 35850

SEQ ID NO: 35876 - DNA, 201 bp, Homo sapiens; identical to SEQ ID NO: 35851

SEQ ID NO: 35877 - DNA, 201 bp, Homo sapiens; identical to SEQ ID NO: 35853

SEQ ID NO: 35878 - DNA, 201 bp, Homo sapiens; identical to SEQ ID NO: 35854

SEQ ID NO: 35879 - DNA, 201 bp, Homo sapiens; identical to SEQ ID NO: 35837

SEQ ID NO: 35880 - DNA, 201 bp, Homo sapiens; identical to SEQ ID NO: 35856

SEQ ID NO: 35881 - DNA, 201 bp, Homo sapiens; identical to SEQ ID NO: 35839

SEQ ID NO: 35882 - DNA, 201 bp, Homo sapiens; identical to SEQ ID NO: 35858

SEQ ID NO: 35883 - DNA, 201 bp, Homo sapiens; identical to SEQ ID NO: 35859

SEQ ID NO: 35884 - DNA, 201 bp, Homo sapiens; identical to SEQ ID NO: 35860

SEQ ID NO: 35885 - DNA, 201 bp, Homo sapiens; identical to SEQ ID NO: 35861

SEQ ID NO: 35886 - DNA, 201 bp, Homo sapiens; identical to SEQ ID NO: 35862

SEQ ID NO: 35887 - DNA, 201 bp, Homo sapiens; identical to SEQ ID NO: 35863

SEQ ID NO: 35888 - DNA, 201 bp, Homo sapiens; identical to SEQ ID NO: 35864

SEQ ID NO: 35889 - DNA, 201 bp, Homo sapiens; identical to SEQ ID NO: 35865

SEQ ID NO: 35890 - DNA, 201 bp, Homo sapiens; identical to SEQ ID NO: 35866

SEQ ID NO: 35891 - DNA, 201 bp, Homo sapiens; identical to SEQ ID NO: 35842

SEQ ID NO: 35892 - DNA, 201 bp, Homo sapiens; identical to SEQ ID NO: 35843

SEQ ID NO: 35893 - DNA, 201 bp, Homo sapiens; identical to SEQ ID NO: 35844

SEQ ID NO: 35894 - DNA, 201 bp, Homo sapiens; identical to SEQ ID NO: 35845

SEQ ID NO: 35895 - DNA, 201 bp, Homo sapiens; identical to SEQ ID NO: 35846

SEQ ID NO: 35896 - DNA, 201 bp, Homo sapiens; identical to SEQ ID NO: 35848

SEQ ID NO: 35897 - DNA, 201 bp, Homo sapiens; identical to SEQ ID NO: 35850

SEQ ID NO: 35898 - DNA, 201 bp, Homo sapiens; identical to SEQ ID NO: 35851

SEQ ID NO: 35899 - DNA, 201 bp, Homo sapiens; identical to SEQ ID NO: 35852

SEQ ID NO: 35900 - DNA, 201 bp, Homo sapiens; identical to SEQ ID NO: 35853

SEQ ID NO: 35901 - DNA, 201 bp, Homo sapiens; identical to SEQ ID NO: 35854

SEQ ID NO: 35902 - DNA, 201 bp, Homo sapiens
acaaatcaagaaaacctcaatgcaccgtcactccataacttctcgcttttgtttcaggtgagggcttccacaactaccaccactcctttccctatgactaytctgccagtgagtaccgctggcacatcaacttcaccacattcttcattgattgcatggccgccctcggtctggcctatgaccggaagaaagtctccaagg

SEQ ID NO: 35903 - DNA, 201 bp, Homo sapiens; identical to SEQ ID NO: 35858

SEQ ID NO: 35904 - DNA, 201 bp, Homo sapiens; identical to SEQ ID NO: 35859

SEQ ID NO: 35905 - DNA, 201 bp, Homo sapiens; identical to SEQ ID NO: 35860

SEQ ID NO: 35906 - DNA, 201 bp, Homo sapiens; identical to SEQ ID NO: 35861

SEQ ID NO: 35907 - DNA, 201 bp, Homo sapiens; identical to SEQ ID NO: 35862

SEQ ID NO: 35908 - DNA, 201 bp, Homo sapiens; identical to SEQ ID NO: 35864

SEQ ID NO: 35909 - DNA, 201 bp, Homo sapiens; identical to SEQ ID NO: 35863

SEQ ID NO: 35910 - DNA, 201 bp, Homo sapiens; identical to SEQ ID NO: 35866

SEQ ID NO: 35911 - DNA, 201 bp, Homo sapiens; identical to SEQ ID NO: 35865

SEQ ID NO: 35912 - DNA, 201 bp, Homo sapiens
ccgcgtcagccgagaggaagtttggcgtggtggtggttggtgttggccgagccggctccgtgcggatgagggacttgcggaatccacacccttcctcagcrttcctgaacctgattggcttcgtgtcgagaagggagctcgggagcattgatggagtccagcagatttctttggaggatgctctttccagccaagaggtgg

SEQ ID NO: 35913 - DNA, 201 bp, Homo sapiens
tctctcgcctgacctggctggtctccctctttggggagctttctcttgtgtctgccactttggaagagcgaaaggaagatcagtatatgaaaatgacagtrtgtctggagacagagaagaaaagtccactgtcatggattgaagaaaaaggacctggtctaaaacgaaacagatatttaagcttccatttcaagtctgggt

SEQ ID NO: 35914 - DNA, 201 bp, Homo sapiens
cggatgagggacttgcggaatccacacccttcctcagcgttcctgaacctgattggcttcgtgtcgagaagggagctcgggagcattgatggagtccagcrgatttctttggaggatgctctttccagccaagaggtggaggtcgcctatatctgcagtgagagctccagccatgaggactacatcaggcagttccttaat

SEQ ID NO: 35915 - DNA, 201 bp, Homo sapiens
ggacttgcggaatccacacccttcctcagcgttcctgaacctgattggcttcgtgtcgagaagggagctcgggagcattgatggagtccagcagatttctytggaggatgctctttccagccaagaggtggaggtcgcctatatctgcagtgagagctccagccatgaggactacatcaggcagttccttaatgctggcaa

SEQ ID NO: 35916 - DNA, 201 bp, Homo sapiens
ctgccactttggaagagcgaaaggaagatcagtatatgaaaatgacagtgtgtctggagacagagaagaaaagtccactgtcatggattgaagaaaaaggrcctggtctaaaacgaaacagatatttaagcttccatttcaagtctgggtccttggagaatgtgccaaatgtaggagtgaataagaacatatttctgaaag

SEQ ID NO: 35917 - DNA, 201 bp, Homo sapiens
cctccggtcccctcccggtctccgccaccccgcttcggggcccccgccccccagccgggcagccaatcggagctgggatcccgccccggtccgcaaagcckgtggcgcccggaggctgcacggagagcggtgcccgcgtcagccgagaggaagtttggcgtggtggtggttggtgttggccgagccggctccgtgcggatg

SEQ ID NO: 35918 - DNA, 201 bp, Homo sapiens
cgtcagagcccgagaggaagtttggcgtggtggtggttggtgttggccgagccggctccgtgcggatgagggacttgcggaatccacacccttcctcagcrttcctgaacctgattggcttcgtgtcgagaagggagctcgggagcattgatggagtccagcagatttctttggaggatgctctttccagccaagaggtgg

SEQ ID NO: 35919 - DNA, 201 bp, Homo sapiens; identical to SEQ ID NO: 35913

SEQ ID NO: 35920 - DNA, 201 bp, Homo sapiens; identical to SEQ ID NO: 35914

SEQ ID NO: 35921 - DNA, 201 bp, Homo sapiens; identical to SEQ ID NO: 35915

SEQ ID NO: 35922 - DNA, 201 bp, Homo sapiens; identical to SEQ ID NO: 35916

SEQ ID NO: 35923 - DNA, 201 bp, Homo sapiens
cctccggtcccctcccggtctccgccaccccgcttcggggcccccgccccccagccgggcagccaatcggagctgggatcccgccccggtccgcaaagcckgtggcgcccggaggctgcacggagagcggtgcccgcgtcagagcccgagaggaagtttggcgtggtggtggttggtgttggccgagccggctccgtgcgg

SEQ ID NO: 35924 - DNA, 195 bp, Homo sapiens
agcccgagaggaagtttggcgtggtggtggttggtgttggccgagccggctccgtgcggatgagggacttgcggaatccacacccttcctcagcrttcctgaacctgattggcttcgtgtcgagaagggagctcgggagcattgatggagtccagcagatttctttggaggatgctctttccagccaagaggtgg

SEQ ID NO: 35925 - DNA, 201 bp, Homo sapiens; identical to SEQ ID NO: 35913

SEQ ID NO: 35926 - DNA, 201 bp, Homo sapiens; identical to SEQ ID NO: 35914

SEQ ID NO: 35927 - DNA, 201 bp, Homo sapiens; identical to SEQ ID NO: 35915

SEQ ID NO: 35928 - DNA, 201 bp, Homo sapiens; identical to SEQ ID NO: 35916

SEQ ID NO: 35929 - DNA, 201 bp, Homo sapiens
ccagcaccaaggaggagcccttggaggaggaagcaacgacccagagccgggctggaagggaagaagaggagaaggagcaggaggaggagggagatgtgtcyaccctggagcagggagagggcaggctgcagctgcgggcctcggtgaagagaaaaagcaggccctgctccttgcctgtgtccgagctggagacggtgatcg

SEQ ID NO: 35930 - DNA, 113 bp, Homo sapiens
atggcgtctcctkctagaaactcccagagccgacgccggtgcaaggagccgctccgatacagctacaaccccgaccagttccacaacatggacctcaggggcggcccccacga

SEQ ID NO: 35931 - DNA, 201 bp, Homo sapiens
gagacggtgatcgcgtcagcctgcggggaccccgagaccccgcggacacactacatccgcatccacaccctgctgcacagcatgccctccgcccagggcgrcagcgcggcagaggaggaggacggcgcggaggaggagtccaccctcaaggactcctcggagaaggatgggctcagcgaggtggacacggtggccgctgac

SEQ ID NO: 35932 - DNA, 201 bp, Homo sapiens
tttctccagtgaactcacaaaaaatcaccttgctgctgcagtccccagcggtcaagttcatcaccaaccccgagttcttcactgtgctacatgccaattayagtgcctaccgagtcttcaccagtagcacctgcttaaagcacatgattctgaaagtccgacgggatgctcgcaattttgaacgctaccagcacaaccggg

SEQ ID NO: 35933 - DNA, 201 bp, Homo sapiens
atgcggatctggtcattttgctgagtctctttgaagaagagattatgtcctacgtccccctgcaggctgccttccaccctgggtatagcttctctccccgmtgttcaccctgttcttcacctcagaactccccaggtttacagagagccagtgcaagagccccttccccctaccgaagagactttgaggccaagctccgca

SEQ ID NO: 35934 - DNA, 201 bp, Homo sapiens
tcacggaggcaggagaccagggcatggtctctgtgggacctgaaggggctggggagctcctggcccaggtgcaaaaggacatccagcctgcccccagtgcrgaagagctggccgagcagctggacctgggtgaggaggcatcagcactgctgctggaagacggtgaagccccagccagcaccaaggaggagcccttggagg

SEQ ID NO: 35935 - DNA, 201 bp, Homo sapiens
gcagccaaagctgcgagcaagccccagcaggaggaggcggaggtggagggagtgactcagaagccgaatcttcccagtccagcttagatctaaggagagargggtcactttctccagtgaactcacaaaaaatcaccttgctgctgcagtccccagcggtcaagttcatcaccaaccccgagttcttcactgtgctacatg

SEQ ID NO: 35936 - DNA, 201 bp, Homo sapiens
ccagcttagatctaaggagagaagggtcactttctccagtgaactcacaaaaaatcaccttgctgctgcagtccccagcggtcaagttcatcaccaacccmgagttcttcactgtgctacatgccaattatagtgcctaccgagtcttcaccagtagcacctgcttaaagcacatgattctgaaagtccgacgggatgctc

SEQ ID NO: 35937 - DNA, 201 bp, Homo sapiens
accccagcaccgggagcgagagcgactccagccccaggcaaggcggggaccacagttgcgagggctgtgacgcgtcctgctgcagcccctcgtgctacagytcctcgtgctacagcacgtcctgctacagcagctcgtgctacagcgcctcgtgctacagcccctcctgctacaacggcaacaggttcgccagccacacgc

SEQ ID NO: 35938 - DNA, 201 bp, Homo sapiens
ttggtcagggtccggggaaaattaagctcattattcgccgggatcatttgttggagggaaccttcaatcaggtgatggcctattcgcggaaagagctccarcgaaacaagctctacgtcacctttgttggagaggagggcctggactacagtggcccctcgcgggagttcttcttccttctgtctcaggagctcttcaacc

SEQ ID NO: 35939 - DNA, 201 bp, Homo sapiens
agaaggagtacatcgagcgcatggtgaagtggcgggtggagcgcggcgtggtacagcagaccgaggcgctggtgcgcggcttctacgaggttgtagactcraggctggtgtccgtgtttgatgccagggagctggagctggtgatagctggcaccgcggaaatcgacctaaatgactggcggaataacactgagtaccggg

SEQ ID NO: 35940 - DNA, 201 bp, Homo sapiens
caacctgatggaaagcggcagtggggaacctcggtctgaggcaccagagtcctctgagagctggaagccagagcagctgggtgagggcagtgtccccgatsgtccagggaaccaaagcatagagctttccagaccagctgaggaagcagcagtcatcacggaggcaggagaccagggcatggtctctgtgggacctgaagg

SEQ ID NO: 35941 - DNA, 201 bp, Homo sapiens
aagggtcactttctccagtgaactcacaaaaaatcaccttgctgctgcagtccccagcggtcaagttcatcaccaaccccgagttcttcactgtgctacaygccaattatagtgcctaccgagtcttcaccagtagcacctgcttaaagcacatgattctgaaagtccgacgggatgctcgcaattttgaacgctaccagc

SEQ ID NO: 35942 - DNA, 201 bp, Homo sapiens
ctaccactttcattgacccccgaatccctcttcagaacggtcgtcttcccaatcatctaactcaccgacagcacctccagaggctccgaagttacagcgcyggagaggcctcagaagtttctagaaacagaggagcctctttactggccaggccaggacacagcttagtagctgctattcgaagccaacatcaacatgagt

SEQ ID NO: 35943 - DNA, 201 bp, Homo sapiens
tgtccgcatttgtagaaaaccatcttgagtggttcaggtttagcggtcgcatcctgggtctggctctgatccatcagtaccttcttgacgctttcttcacraggcccttctacaaggcactcctgagactgccctgtgatttgagtgacctggaatatttggatgaggaattccaccagagtttgcagtggatgaaggaca

SEQ ID NO: 35944 - DNA, 201 bp, Homo sapiens
actcagaagccgaatcttcccagtccagcttagatctaaggagagaagggtcactttctccagtgaactcacaaaaaatcaccttgctgctgcagtccccmgcggtcaagttcatcaccaaccccgagttcttcactgtgctacatgccaattatagtgcctaccgagtcttcaccagtagcacctgcttaaagcacatga

SEQ ID NO: 35945 - DNA, 201 bp, Homo sapiens
gatacctgaagtctgaacctatcccagagagcaatgatgggcctgtgaaggtagtggtagcagagaattttgatgaaatagtgaataatgaaaataaagaygtgctgattgaattttatgccccttggtgtggtcactgtaagaacctggagcccaagtataaagaacttggcgagaagctcagcaaagacctgaatatcg

SEQ ID NO: 35946 - DNA, 201 bp, Homo sapiens
gagttttcctaccatatacttctctccagccaacaagaagctaaatccaaagaaatatgaaggtggccatgaattaagtgattttattagctatctacaamgagaagctacaaacccccctgtaattcaagaagaaaaacccaagaagaagaaggcacaggaggatctctaaagcagtaggcaaacaccactttgtaaaag

SEQ ID NO: 35947 - DNA, 201 bp, Homo sapiens
tctctggtgaacgagtatgatgataacggagatggtatcatcttatttcgtccttcacatctcactaacaagttggaggacaagactgtggcatatacagwgcaaaaaatgaccagtggcaaaattaaaaagtttatccaggaaaacatttttggtatctgccctcacatgacagaagacaataaagatttgatacagggc

SEQ ID NO: 35948 - DNA, 201 bp, Homo sapiens
agccaatgatgtgccttctccatatgaagtcagagttttcctaccatatacttctctccagccaacaagaagctaaatccaaagaaatatgaaggtggccrtgaattaagtgattttattagctatctacaacgagaagctacaaacccccctgtaattcaagaagaaaaacccaagaagaagaaggcacaggaggatctc

SEQ ID NO: 35949 - DNA, 201 bp, Homo sapiens
aataaagatgtgctgattgaattttatgccccttggtgtggtcactgtaagaacctggagcccaagtataaagaacttggcgagaagctcagcaaagaccygaatatcgtcatagccaagatggatgccacagccaatgatgtgccttctccatatgaagtcagagttttcctaccatatacttctctccagccaacaaga

SEQ ID NO: 35950 - DNA, 201 bp, Homo sapiens
ttggcttggagagcactgctggagagattcctgttgttgctatcagaactgctaaaggagagaagtttgtcatgcaggaggatttctcgcgtgatgggaakgctctggagaggttcctgcaggattactttgatggcaatctgaagagatacctgaagtctgaacctatcccagagagcaatgatgggcctgtgaaggtag

SEQ ID NO: 35951 - DNA, 201 bp, Homo sapiens
ataaagatgtgctgattgaattttatgccccttggtgtggtcactgtaagaacctggagcccaagtataaagaacttggcgagaagctcagcaaagacctraatatcgtcatagccaagatggatgccacagccaatgatgtgccttctccatatgaagtcagagttttcctaccatatacttctctccagccaacaagaa

SEQ ID NO: 35952 - DNA, 201 bp, Homo sapiens
accgatttgcacatacgaatgttgagtctctggtgaacgagtatgatgataacggagatggtatcatcttatttcgtccttcacatctcactaacaagttkgaggacaagactgtggcatatacagtgcaaaaaatgaccagtggcaaaattaaaaagtttatccaggaaaacatttttggtatctgccctcacatgacag

SEQ ID NO: 35953 - DNA, 201 bp, Homo sapiens
aagctcactccgagttcctaaaagcagccagcaacttgagggataactaccgatttgcacatacgaatgttgagtctctggtgaacgagtatgatgataayggagatggtatcatcttatttcgtccttcacatctcactaacaagttggaggacaagactgtggcatatacagtgcaaaaaatgaccagtggcaaaatta

SEQ ID NO: 35954 - DNA, 201 bp, Homo sapiens
gcagccagcaacttgagggataactaccgatttgcacatacgaatgttgagtctctggtgaacgagtatgatgataacggagatggtatcatcttatttcrtccttcacatctcactaacaagttggaggacaagactgtggcatatacagtgcaaaaaatgaccagtggcaaaattaaaaagtttatccaggaaaacatt

SEQ ID NO: 35955 - DNA, 201 bp, Homo sapiens
gcccagcttcagtgcctctcaggactgaggaagaatttaagaaattcattagtgataaagatgcctctatagtaggttttttcgatgattcattcagtgargctcactccgagttcctaaaagcagccagcaacttgagggataactaccgatttgcacatacgaatgttgagtctctggtgaacgagtatgatgataacg

SEQ ID NO: 35956 - DNA, 201 bp, Homo sapiens
atgggcctgtgaaggtagtggtagcagagaattttgatgaaatagtgaataatgaaaataaagatgtgctgattgaattttatgccccttggtgtggtcaytgtaagaacctggagcccaagtataaagaacttggcgagaagctcagcaaagacctgaatatcgtcatagccaagatggatgccacagccaatgatgtgc

SEQ ID NO: 35957 - DNA, 201 bp, Homo sapiens
tcgcggctgcctccgacgtgctaggactcagggacgacaacttggagagtcgcatctccgacacgggctctgcgggcctcatgctcgtcgagttcttcgcyccctggtgtggacactgcaagagacttgctcctgagtatgaagctgcagctaccagattaaaaggaatagtcccattagcaaaggctgattgcactgcca

SEQ ID NO: 35958 - DNA, 201 bp, Homo sapiens
ttcctaccatatacttctctccagccaacaagaagctaaatccaaagaaatatgaaggtggccatgaattaagtgattttattagctatctacaacgagamgctacaaacccccctgtaattcaagaagaaaaacccaagaagaagaaggcacaggaggatctctaaagcagtaggcaaacaccactttgtaaaaggactc

SEQ ID NO: 35959 - DNA, 201 bp, Homo sapiens
cgacgtgctaggactcagggacgacaacttggagagtcgcatctccgacacgggctctgcgggcctcatgctcgtcgagttcttcgccccctggtgtggayactgcaagagacttgctcctgagtatgaagctgcagctaccagattaaaaggaatagtcccattagcaaaggctgattgcactgccaacactaacacctg

SEQ ID NO: 35960 - DNA, 201 bp, Homo sapiens
ccagattaaaaggaatagtcccattagcaaaggctgattgcactgccaacactaacacctgtaataaatatggagtcagtggatatccaaccctgaatatrtttagagatggtgaagaagcaggtgcttatgatggacctaggactgctgatggaattgtcagccacctgaagaagcaggcaggcccagcttcagtgcctc

SEQ ID NO: 35961 - DNA, 201 bp, Homo sapiens
ctttctgattttggcttggagagcactgctggagagattcctgttgttgctatcagaactgctaaaggagagaagtttgtcatgcaggaggatttctcgcrtgatgggaatgctctggagaggttcctgcaggattactttgatggcaatctgaagagatacctgaagtctgaacctatcccagagagcaatgatgggcct

SEQ ID NO: 35962 - DNA, 201 bp, Homo sapiens
ctaacacctgtaataaatatggagtcagtggatatccaaccctgaatatgtttagagatggtgaagaagcaggtgcttatgatggacctaggactgctgayggaattgtcagccacctgaagaagcaggcaggcccagcttcagtgcctctcaggactgaggaagaatttaagaaattcattagtgataaagatgcctcta

SEQ ID NO: 35963 - DNA, 201 bp, Homo sapiens
gccatgaactttctgattttggcttggagagcactgctggagagattcctgttgttgctatcagaactgctaaaggagagaagtttgtcatgcaggaggakttctcgcgtgatgggaatgctctggagaggttcctgcaggattactttgatggcaatctgaagagatacctgaagtctgaacctatcccagagagcaatg

SEQ ID NO: 35964 - DNA, 201 bp, Homo sapiens
caataaagatttgatacagggcaaggacttacttattgcttactatgatgtggactatgaaaagaatgctaaaggttccaactactggagaaacagggtartgatggtggcaaagaaattcctggatgctgggcacaaactcaactttgctgtagctagccgcaaaacctttagccatgaactttctgattttggcttgga

SEQ ID NO: 35965 - DNA, 201 bp, Homo sapiens
cagcttcagtgcctctcaggactgaggaagaatttaagaaattcattagtgataaagatgcctctatagtaggttttttcgatgattcattcagtgaagcwcactccgagttcctaaaagcagccagcaacttgagggataactaccgatttgcacatacgaatgttgagtctctggtgaacgagtatgatgataacggag

SEQ ID NO: 35966 - DNA, 201 bp, Homo sapiens
ccattagcaaaggctgattgcactgccaacactaacacctgtaataaatatggagtcagtggatatccaaccctgaatatgtttagagatggtgaagaagsaggtgcttatgatggacctaggactgctgatggaattgtcagccacctgaagaagcaggcaggcccagcttcagtgcctctcaggactgaggaagaattt

SEQ ID NO: 35967 - DNA, 201 bp, Homo sapiens
ttcccgggcgtggcgctgcttctcgccgcggcccgcctcgcggctgcctccgacgtgctaggactcagggacgacaacttggagagtcgcatctccgacaygggctctgcgggcctcatgctcgtcgagttcttcgccccctggtgtggacactgcaagagacttgctcctgagtatgaagctgcagctaccagattaaaa

SEQ ID NO: 35968 - DNA, 201 bp, Homo sapiens
accccacctcgccgccatgtgcctccgccgcccagcgctgttcccgggcgtggcgctgcttctcgccgcggcccgcctcgcggctgcctccgacgtgctargactcagggacgacaacttggagagtcgcatctccgacacgggctctgcgggcctcatgctcgtcgagttcttcgccccctggtgtggacactgcaagag

SEQ ID NO: 35969 - DNA, 201 bp, Homo sapiens
actccgagttcctaaaagcagccagcaacttgagggataactaccgatttgcacatacgaatgttgagtctctggtgaacgagtatgatgataacggagakggtatcatcttatttcgtccttcacatctcactaacaagttggaggacaagactgtggcatatacagtgcaaaaaatgaccagtggcaaaattaaaaagt

SEQ ID NO: 35970 - DNA, 201 bp, Homo sapiens
gtttgcttctgaggatctccagtgtcacaacaaacacatgccagccctgttttacagggagccctggaggagttgggatagaggccacattgactgagggyagttgccagggtcctgcagttatacacaaagtccttaggataagaccatggccttgagagcatgtggcttgatcatcttccgaagatgcctcattcccaa

SEQ ID NO: 35971 - DNA, 166 bp, Homo sapiens
ccgcctcctacctccttctgcttcggggagggcatgggatcagctacctgtttctgcctcaaccayggaccaataatatgagatctttgttcaccagttctacagtgatggggtgcttccttttggcttctggaatgggtgcgtttgcttctgaggatctccagtg

SEQ ID NO: 35972 - DNA, 201 bp, Homo sapiens; identical to SEQ ID NO: 35970

SEQ ID NO: 35973 - DNA, 201 bp, Homo sapiens; identical to SEQ ID NO: 35970

SEQ ID NO: 35974 - DNA, 201 bp, Homo sapiens; identical to SEQ ID NO: 35970

SEQ ID NO: 35975 - DNA, 201 bp, Homo sapiens
cgaaggtcgaaaggtggcctctcagggacacccgccgctcgctcggctcctcccctcagccgggagacccaaggaataacagcctctgcgataggagcacrctctaccaatcaaccgtagtcttcgcccacgcctcagccggaggaaattgcattggttgcatcattctcggcagccgataaattgttttcttggattggc

SEQ ID NO: 35976 - DNA, 201 bp, Homo sapiens
gtagtcttcgcccacgcctcagccggaggaaattgcattggttgcatcattctcggcagccgataaattgttttcttggattggctaatagcgttccttcycccctgtgccttcgtcgtcagaagctggcgattggttaatcgcgttgccaagctttggacgcggctcgaccattggaggccgcgggcccgcccccgccgg

SEQ ID NO: 35977 - DNA, 201 bp, Homo sapiens
acgcctcagccggaggaaattgcattggttgcatcattctcggcagccgataaattgttttcttggattggctaatagcgttccttctcccctgtgccttygtcgtcagaagctggcgattggttaatcgcgttgccaagctttggacgcggctcgaccattggaggccgcgggcccgcccccgccggctaggtgaaggtg

SEQ ID NO: 35978 - DNA, 201 bp, Homo sapiens
tccccccgcccagggagcacgaattgtggccagcaccctctctaaccctgagctctttgaggaatggacaggtaatgtgaagacaatggctgaccggattytgaccatgagatctgaactcagggcacgactagaagccctcaaaacccctgggacctggaaccacatcactgatcaaattggcatgttcagcttcactgg

SEQ ID NO: 35979 - DNA, 201 bp, Homo sapiens
cggccacgtgcttctatgtggtgtttgactctgtacaaattctagtcccaaagatcaagttgtctgaaggagccaaagtgtgaatgtgggtgtcggctgcrgcattaaattcatcatctcaacccagagtgtctggtctccctgctctttctgcatggttgtgtccctagtcctaagctttggttctttagggtgactgtg

SEQ ID NO: 35980 - DNA, 201 bp, Homo sapiens
ctccctgctctttctgcatggttgtgtccctagtcctaagctttggttctttagggtgactgtggtaagaaggatatttaatcatgacatgcacggacacrtacatatttaactgaaacaagttttaccaaacagtatttactcgtgatgtgcgtagtgcattctgatatttttgagccattctattgtgttctacttcac

SEQ ID NO: 35981 - DNA, 201 bp, Homo sapiens
ccttgagacgaatttggagactgggattagagcctttggaggtcaaagcaaattaagatttttatttaagaataaaagagtactttgatcatgagacatakgtatcttgtccctctcactaaaaaggagtgttgtgtgtggcggccacgtgcttctatgtggtgtttgactctgtacaaattctagtcccaaagatcaagt

SEQ ID NO: 35982 - DNA, 201 bp, Homo sapiens
tttctgcatggttgtgtccctagtcctaagctttggttctttagggtgactgtggtaagaaggatatttaatcatgacatgcacggacacgtacatatttractgaaacaagttttaccaaacagtatttactcgtgatgtgcgtagtgcattctgatatttttgagccattctattgtgttctacttcacctaaaaaaat

SEQ ID NO: 35983 - DNA, 201 bp, Homo sapiens
gatttttatttaagaataaaagagtactttgatcatgagacataggtatcttgtccctctcactaaaaaggagtgttgtgtgtggcggccacgtgcttctmtgtggtgtttgactctgtacaaattctagtcccaaagatcaagttgtctgaaggagccaaagtgtgaatgtgggtgtcggctgcggcattaaattcatca

SEQ ID NO: 35984 - DNA, 201 bp, Homo sapiens
tgtgtgttccctgcctgcacaaacctacatgtacataccatggattagagacacttgcaggactgaaaggctgctctggtgaggcagcctctgtttaaacyggccccacatgaagagaacatcccttgagacgaatttggagactgggattagagcctttggaggtcaaagcaaattaagatttttatttaagaataaaag

SEQ ID NO: 35985 - DNA, 201 bp, Homo sapiens
cccttggggatgacagcccagcactcaaggagaagcgggtaggaggtgtgcaatctttggggggaacaggtgcacttcgaattggagctgatttcttagcrcgttggtacaatggaacaaacaacaagaacacacctgtctatgtgtcctcaccaacctgggagaatcacaatgctgtgttttccgctgctggttttaaag

SEQ ID NO: 35986 - DNA, 201 bp, Homo sapiens; identical to SEQ ID NO: 35975

SEQ ID NO: 35987 - DNA, 201 bp, Homo sapiens; identical to SEQ ID NO: 35978

SEQ ID NO: 35988 - DNA, 201 bp, Homo sapiens; identical to SEQ ID NO: 35976

SEQ ID NO: 35989 - DNA, 201 bp, Homo sapiens; identical to SEQ ID NO: 35977

SEQ ID NO: 35990 - DNA, 201 bp, Homo sapiens; identical to SEQ ID NO: 35979

SEQ ID NO: 35991 - DNA, 201 bp, Homo sapiens; identical to SEQ ID NO: 35980

SEQ ID NO: 35992 - DNA, 201 bp, Homo sapiens; identical to SEQ ID NO: 35981

SEQ ID NO: 35993 - DNA, 201 bp, Homo sapiens; identical to SEQ ID NO: 35982

SEQ ID NO: 35994 - DNA, 201 bp, Homo sapiens; identical to SEQ ID NO: 35983

SEQ ID NO: 35995 - DNA, 201 bp, Homo sapiens; identical to SEQ ID NO: 35984

SEQ ID NO: 35996 - DNA, 201 bp, Homo sapiens; identical to SEQ ID NO: 35985

SEQ ID NO: 35997 - DNA, 201 bp, Homo sapiens; identical to SEQ ID NO: 35975

SEQ ID NO: 35998 - DNA, 201 bp, Homo sapiens; identical to SEQ ID NO: 35978

SEQ ID NO: 35999 - DNA, 201 bp, Homo sapiens; identical to SEQ ID NO: 35976

SEQ ID NO: 36000 - DNA, 201 bp, Homo sapiens; identical to SEQ ID NO: 35977

SEQ ID NO: 36001 - DNA, 201 bp, Homo sapiens; identical to SEQ ID NO: 35979

SEQ ID NO: 36002 - DNA, 201 bp, Homo sapiens; identical to SEQ ID NO: 35980

SEQ ID NO: 36003 - DNA, 201 bp, Homo sapiens; identical to SEQ ID NO: 35981

SEQ ID NO: 36004 - DNA, 201 bp, Homo sapiens; identical to SEQ ID NO: 35982

SEQ ID NO: 36005 - DNA, 201 bp, Homo sapiens; identical to SEQ ID NO: 35983

SEQ ID NO: 36006 - DNA, 201 bp, Homo sapiens; identical to SEQ ID NO: 35984

SEQ ID NO: 36007 - DNA, 201 bp, Homo sapiens; identical to SEQ ID NO: 35985

SEQ ID NO: 36008 - DNA, 201 bp, Homo sapiens
ttctccttcaaaccttgtaaagaaacacagatccccttgaaattagacacgcaaggacttcttcaaccagaaaaacccattgttctaaaggtggattcaasagatggaaccctaagtggagaatgagttattctaaggatttctactttggtcttcaagaaagctgtgccccagaacaccagagatttcaacttagtcaat

SEQ ID NO: 36009 - DNA, 128 bp, Homo sapiens
tgctgtgcagggcagggaagctccaggyaaacagcccagcaaacagcagcactcagctaaaaggaagactcacagaacacagttgaagaaggaaagtggcgatggacctcatcccaaatttggcggtg

SEQ ID NO: 36010 - DNA, 116 bp, Homo sapiens
tgctgtgcagggcagrgaagctccaggcaaacagcccagcaaacagcagcactcagctaaaaggaagactcacagaacacagttgaagaaggaaagtggcgatggacctcatccca

SEQ ID NO: 36011 - DNA, 187 bp, Homo sapiens
tgctgtgcagggcagggaagctccaggcaaacagcccagcaaacagcagcactcagctaaaaggaagactcacagaacacagttgamgaaggaaagtggcgatggacctcatcccaaatttggcggtggaaacctggcttctcctggctgtcagcctggtgctcctctatctatatgggacccgtac

SEQ ID NO: 36012 - DNA, 198 bp, Homo sapiens
aaattagacacgcaaggacttcttcaaccagaaaaacccattgttctaaaggtggattcaagagatggaaccctaagtggagaatgagttattctaaggayttctactttggtcttcaagaaagctgtgccccagaacaccagagatttcaacttagtcaataaaaccttgaaataaagatgggcttaatctaatgta

SEQ ID NO: 36013 - DNA, 201 bp, Homo sapiens
ctatgacacaactagcaccactctccccttcattatgtatgaactggccactcaccctgatgtccagcagaaactgcaggaggagattgacgcagttttasccaataaggcacctgtcacctacgatgccctggtacagatggagtaccttgacatggtggtgaatgaaacgctcagattattcccagttgttagtagagt

SEQ ID NO: 36014 - DNA, 123 bp, Homo sapiens
acctctgggcagagaaacaaagytctatatgcacagcccagcaaagagcagcacacagctgaaagaaaaactcagaagacagagctgaaaaagaaaactggtgatggatctcattccaaactt

SEQ ID NO: 36015 - DNA, 201 bp, Homo sapiens
tcattatgtatgaactggccactcaccctgatgtccagcagaaactgcaggaggagattgacgcagttttacccaataaggcacctgtcacctacgatgcyctggtacagatggagtaccttgacatggtggtgaatgaaacgctcagattattcccagttgttagtagagttacgagagtctgcaagaaagatattgaaa

SEQ ID NO: 36016 - DNA, 201 bp, Homo sapiens
agaacagcaagtccatcaacttgaaagatttctttggggcctacaccatggatgtaatcactggcacattatttggagtgaacttggattctctcaacaayccacaagatccctttctgaaaaatatgaagaagcttttaaaattggattttttggatccctttttactcttaatatcactctttccatttcttaccccag

SEQ ID NO: 36017 - DNA, 201 bp, Homo sapiens
gatttctgaaaagtgccttaagttttgctgaagatgaagaatggaagagaatacgaacattgctatctccagctttcaccagtgtaaaattcaaggaaatkgtccccatcatttcccaatgtggagatatgttggtgagaagcctgaggcaggaagcagagaacagcaagtccatcaacttgaaagatttctttggggcct

SEQ ID NO: 36018 - DNA, 123 bp, Homo sapiens; identical to SEQ ID NO: 36014

SEQ ID NO: 36019 - DNA, 201 bp, Homo sapiens
agaacagcaagtccatcaacttgaaagatttctttggggcctacaccatggatgtaatcactggcacattatttggagtgaacttggattctctcaacaayccacaagatccctttctgaaaaatatgaagaagcttttaaaattggattttttggatccctttttactcttaatatacagagtctcgctgtgttgcctag

SEQ ID NO: 36020 - DNA, 201 bp, Homo sapiens; identical to SEQ ID NO: 36017

SEQ ID NO: 36021 - DNA, 154 bp, Homo sapiens
acaagatccctttctgaaaaatatgaagaagcttttaaaattggattttttggatccctttttactcttaatatacagagtctcgctgtgttgcctaggcyggagtgcatggtgcgatctgggctcactgaaacctccacctcctgggttcgag

SEQ ID NO: 36022 - DNA, 159 bp, Homo sapiens
aatccacaagatccctttctgaaaaatatgaagaagcttttaaaattggattttttggatccctttttactcttaatatacagagtctcgctgtgttgccyaggccggagtgcatggtgcgatctgggctcactgaaacctccacctcctgggttcgag

SEQ ID NO: 36023 - DNA, 201 bp, Homo sapiens; identical to SEQ ID NO: 36013

SEQ ID NO: 36024 - DNA, 123 bp, Homo sapiens; identical to SEQ ID NO: 36014

SEQ ID NO: 36025 - DNA, 201 bp, Homo sapiens; identical to SEQ ID NO: 36015

SEQ ID NO: 36026 - DNA, 201 bp, Homo sapiens; identical to SEQ ID NO: 36016

SEQ ID NO: 36027 - DNA, 201 bp, Homo sapiens; identical to SEQ ID NO: 36017

SEQ ID NO: 36028 - DNA, 201 bp, Homo sapiens; identical to SEQ ID NO: 36013

SEQ ID NO: 36029 - DNA, 123 bp, Homo sapiens; identical to SEQ ID NO: 36014

SEQ ID NO: 36030 - DNA, 201 bp, Homo sapiens; identical to SEQ ID NO: 36015

SEQ ID NO: 36031 - DNA, 201 bp, Homo sapiens; identical to SEQ ID NO: 36016

SEQ ID NO: 36032 - DNA, 201 bp, Homo sapiens; identical to SEQ ID NO: 36017

SEQ ID NO: 36033 - DNA, 201 bp, Homo sapiens
cagccaccatgccagtctctaagtgcccaaaaaagtcggagtccctgtggaaggggtgggaccggaaggcccagaggaacggcctgcggagccaggtataygctgtgaatggcgactactatgtgggcgagtggaaggacaacgtgaaacacgggaaaggaacacaggtctggaagaagaaaggagccatctatgaggggg

SEQ ID NO: 36034 - DNA, 201 bp, Homo sapiens
caccctccagccttgcagaagcagccaccatgccagtctctaagtgcccaaaaaagtcggagtccctgtggaaggggtgggaccggaaggcccagaggaayggcctgcggagccaggtatacgctgtgaatggcgactactatgtgggcgagtggaaggacaacgtgaaacacgggaaaggaacacaggtctggaagaaga

SEQ ID NO: 36035 - DNA, 201 bp, Homo sapiens
ctaaaggatccccactaagggctgttcacctgccccagggactcagaacacacatgactctccccacttgagctcaggatcccggcattacacggggcgcrctgagccccagatgtccctaacccctttccagcaccctccagccttgcagaagcagccaccatgccagtctctaagtgcccaaaaaagtcggagtccctg

SEQ ID NO: 36036 - DNA, 201 bp, Homo sapiens
ccctaacccctttccagcaccctccagccttgcagaagcagccaccatgccagtctctaagtgcccaaaaaagtcggagtccctgtggaaggggtgggacyggaaggcccagaggaacggcctgcggagccaggtatacgctgtgaatggcgactactatgtgggcgagtggaaggacaacgtgaaacacgggaaaggaac

SEQ ID NO: 36037 - DNA, 201 bp, Homo sapiens
ccctgtggaaggggtgggaccggaaggcccagaggaacggcctgcggagccaggtatacgctgtgaatggcgactactatgtgggcgagtggaaggacaaygtgaaacacgggaaaggaacacaggtctggaagaagaaaggagccatctatgagggggactggaagtttgggaagcgagacggctacggcaccctcagcc

SEQ ID NO: 36038 - DNA, 201 bp, Homo sapiens
aggagaaaaagctattggtgtatgaagccctagagtatgcaaaaagagcactagaaaaaaatgaatcaagttttgcatctcataagtggtatgcaatctgycttagtgatgttggagattatgaaggcatcaaggctaaaattgcaaatgcatatatcatcaaggagcattttgagaaagcaattgaactgaaccctaaag

SEQ ID NO: 36039 - DNA, 201 bp, Homo sapiens
gtacaaaagagcctgattctttttaattccacaaatacctagcatctcaaagtaacatgtaaacaaacttctatgctgctcaatgaatccttccaatttcrataataaactaaatagtattggatctagtatatgactttcatgtgtaagttatggttctatccattactttaacaatattactgatgtaacagagaaaaa

SEQ ID NO: 36040 - DNA, 201 bp, Homo sapiens
cagagctgactgctggattgagatgcttatttccccacgtacatgtatatcaaaggttctgtgtagcctcacctagtgcatcgtaatttcttacttgaggragaccagcaccctgaaaacgaactggaaagctgccttcttcagtcaaatctgctaaatcatacctacaatgaatgatattcaataacttctgtcatggca

SEQ ID NO: 36041 - DNA, 201 bp, Homo sapiens
ggggagacccaaaagatttttcatatggttatttaattcagttaaatagaactgttatgaatttgagaggaatgaagatattcaaacactaacagaaaatyattagccttatattagagcattcaaatgcttatgtaactcttcaatccatctggcttcataaaaaccaaaattttgaacacaaaaaagtggcagagttta

SEQ ID NO: 36042 - DNA, 199 bp, Homo sapiens
tgccagtaggctggcgcttcgaggccattctggaggccagtcgcttactgaaaaggcaaaactgactttaaggtaatgggaaacccaggaactttcaamagaggccttttactctcagctttgtcgtatttgggttttgaaacttaccaggttatctctcaggctgctgtggttcatgccacagccaaagttgaagaaa

SEQ ID NO: 36043 - DNA, 201 bp, Homo sapiens
gcctctaaatcctggctgaattttttaaccttcctctgtggatcagcaataggatttcttttatgttctcagctatttagtattttgttgggagaaaaggktgacacccagcctaatgttcttcataatgatcctcatgcaaggcattcagatgataatggacagaatcatctagaaggacaaatgaacttcaatgcagat

SEQ ID NO: 36044 - DNA, 110 bp, Homo sapiens
accatttaattaaaggttatctacctagaacgttttggtactggaattacaactattatcctcctgtagaggtaagtttagaaattttattactatgtcartacttggac

SEQ ID NO: 36045 - DNA, 201 bp, Homo sapiens
aaaacagacaagtgtacacatagttcctccattgaagacttagcactggggagatgcatggaaattatgaatgtagaagcaggagattccagagataccawtggaaaagaaacttttcatccctttgtgccagaacaccatttaattaaaggttatctacctagaacgttttggtactggaattacaactattatcctcct

SEQ ID NO: 36046 - DNA, 201 bp, Homo sapiens
atgcaaggcattcagatgataatggacagaatcatctagaaggacaaatgaacttcaatgcagattctagccaacataaagatgagaacacagacattgcygaaaacctctatcagaaagttagaattctttgctgggttatgaccggccctcaaaacctagagaaaaaggccaaacacgtcaaagctacttgggcccagc

SEQ ID NO: 36047 - DNA, 201 bp, Homo sapiens; identical to SEQ ID NO: 36043

SEQ ID NO: 36048 - DNA, 201 bp, Homo sapiens
ttccttatagaaacctttcacatgaatgactataaactgaagctttaaatgagctgtgaagtgtgttaaaatgtgttttgatacagtaatatataaatatrtctatatatatgaggaacttgtgttttttaaatggtggccaggtagaggaactagaaaagagattttgttgcctgttttctgaccatctgtgttattgtc

SEQ ID NO: 36049 - DNA, 201 bp, Homo sapiens; identical to SEQ ID NO: 36045

SEQ ID NO: 36050 - DNA, 201 bp, Homo sapiens
ttgtgttttttaaatggtggccaggtagaggaactagaaaagagattttgttgcctgttttctgaccatctgtgttattgtcactgagaaactaaaatagwaaatttactaaaactacactgcaccatgttagtaataaacagatctgccttaaagaaaagaaaattttagaaagaaatattgttgctcagtgttgttaat

SEQ ID NO: 36051 - DNA, 201 bp, Homo sapiens
ggaactagaaaagagattttgttgcctgttttctgaccatctgtgttattgtcactgagaaactaaaatagtaaatttactaaaactacactgcaccatgwtagtaataaacagatctgccttaaagaaaagaaaattttagaaagaaatattgttgctcagtgttgttaatatagctcaagaattgagtttatatttgca

SEQ ID NO: 36052 - DNA, 201 bp, Homo sapiens; identical to SEQ ID NO: 36046

SEQ ID NO: 36053 - DNA, 201 bp, Homo sapiens; identical to SEQ ID NO: 36043

SEQ ID NO: 36054 - DNA, 201 bp, Homo sapiens; identical to SEQ ID NO: 36048

SEQ ID NO: 36055 - DNA, 201 bp, Homo sapiens; identical to SEQ ID NO: 36045

SEQ ID NO: 36056 - DNA, 201 bp, Homo sapiens; identical to SEQ ID NO: 36050

SEQ ID NO: 36057 - DNA, 201 bp, Homo sapiens; identical to SEQ ID NO: 36051

SEQ ID NO: 36058 - DNA, 201 bp, Homo sapiens; identical to SEQ ID NO: 36046

SEQ ID NO: 36059 - DNA, 201 bp, Homo sapiens
ctgaggaggcactgaagctgcacaatgggcccctccgcaatgcctacatggagcagagcttccagagcctaaaccccgtcctcagcctgcccatcaacccygcccaggtggaacaggcacggaggaacgcagcctccacgggcacagcgctggagggatggctggactcgttggtgggcgggatgtggactgccatggaca

SEQ ID NO: 36060 - DNA, 201 bp, Homo sapiens
tctcgaacaggcagcccatcaaacctgaggaggcactgaagctgcacaatgggcccctccgcaatgcctacatggagcagagcttccagagcctaaacccygtcctcagcctgcccatcaaccccgcccaggtggaacaggcacggaggaacgcagcctccacgggcacagcgctggagggatggctggactcgttggtgg

SEQ ID NO: 36061 - DNA, 201 bp, Homo sapiens
cacaatgggcccctccgcaatgcctacatggagcagagcttccagagcctaaaccccgtcctcagcctgcccatcaaccccgcccaggtggaacaggcacrgaggaacgcagcctccacgggcacagcgctggagggatggctggactcgttggtgggcgggatgtggactgccatggacatctgtgccacgggccccaca

SEQ ID NO: 36062 - DNA, 201 bp, Homo sapiens
cgagtagacagaaggagcttttgaaaaggaagctggaacagcaggagaaaggaaaaggacatacattccctgggaaaggccccggtgaggtgctgcctccyggggacagagccgcagccaacagcagccacgggaaggatgtgtccagaccgcctcatgccaggaaaactgggggcagctcccccgagaccaagtatgacc

SEQ ID NO: 36063 - DNA, 201 bp, Homo sapiens
cacacactacaagccccctttgaacttgcccctgaggcctggggtctggacagtgaaaattctccaccactgggtgccagttgcagagaccaaattcctcrttgcgcctctgaccttctcgaacaggcagcccatcaaacctgaggaggcactgaagctgcacaatgggcccctccgcaatgcctacatggagcagagctt

SEQ ID NO: 36064 - DNA, 201 bp, Homo sapiens
aaggagcttttgaaaaggaagctggaacagcaggagaaaggaaaaggacatacattccctgggaaaggccccggtgaggtgctgcctcccggggacagagscgcagccaacagcagccacgggaaggatgtgtccagaccgcctcatgccaggaaaactgggggcagctcccccgagaccaagtatgaccagccccctaag

SEQ ID NO: 36065 - DNA, 201 bp, Homo sapiens
cacccaggactcaaaagcagaagcaccagcctgagttggcgaagaagccaccgagtagacagaaggagcttttgaaaaggaagctggaacagcaggagaarggaaaaggacatacattccctgggaaaggccccggtgaggtgctgcctcccggggacagagccgcagccaacagcagccacgggaaggatgtgtccagac

SEQ ID NO: 36066 - DNA, 201 bp, Homo sapiens
tcagaatcgcctttgtcctggtggtccacggccgtgcctctcggcagttgcagcgcatgttcaaggccatctaccacaaagaccacttctactacatccaygtggacaagcgctctaattacctgcatcggcaagtgctccaggtctccaggcagtacagcaatgtccgcgtcaccccctggagaatggccaccatctggg

SEQ ID NO: 36067 - DNA, 201 bp, Homo sapiens
aaagaccacttctactacatccacgtggacaagcgctctaattacctgcatcggcaagtgctccaggtctccaggcagtacagcaatgtccgcgtcacccyctggagaatggccaccatctggggaggagccagcctcctgtccacctacctgcagagcatgcgggacctcctggagatgaccgactggccctgggacttc

SEQ ID NO: 36068 - DNA, 201 bp, Homo sapiens
ctgactgggatgccaaggagaggctattccgcaactttgggggtcttctggggcccatggatgagccggtgggtatgcagaagtgggggaagggacctaaygtgaccgtgaccgtcatttgggtggatcccgtcaatgtcatcgcagccacctacgacatcctcattgagtccactgccgaattcacacactacaagcccc

SEQ ID NO: 36069 - DNA, 201 bp, Homo sapiens
actgggagaatgtctacgatgagcctgacggcatccacagcctgagcgacgtgacactcaccttgtaccactcctttgcccgcctgggtcttcgacgggcygagacgtccctgcacacggatggggagaacagctgccgatactacccaatgggccacccagcatctgtgcacctctacttccttgctgaccgcttccagg

SEQ ID NO: 36070 - DNA, 201 bp, Homo sapiens
ccagcctcctgtccacctacctgcagagcatgcgggacctcctggagatgaccgactggccctgggacttcttcatcaacctgagtgcggccgactacccsatcaggacaaatgaccagttggtggcgtttctctcccgataccgagatatgaatttcttgaagtcacacggccgggacaatgcaaggttcattcggaagc

SEQ ID NO: 36071 - DNA, 201 bp, Homo sapiens
acaacctgcgcatcaccaactggaatcgcaagctgggctgcaagtgccagtacaagcacatcgtggactggtgcggctgctcccccaatgacttcaagccrcaggacttccaccgcttccagcagacagcccggcctaccttctttgcccgcaagtttgaagccgtggtgaatcaggaaatcattgggcagctggactatt

SEQ ID NO: 36072 - DNA, 201 bp, Homo sapiens
cggccgggacaatgcaaggttcattcggaagcagggcctggatcggctcttcctggagtgcgacgctcacatgtggcgcctgggagatcggcggatcccasagggcattgccgtggatggcggttcggactggttcctgctgaaccggaggtttgtagaatatgtgaccttctccacagacgatctggtgaccaagatgaa

SEQ ID NO: 36073 - DNA, 156 bp, Homo sapiens
gccctcaagcccaagagccatcccaggcctgttcaggcctcagctaagcctctcttcatctggaagaagaggcaagggggcaggagaccaggctctagctytgggccctccttcagcccccatcatgggaataaattaattttctcaatgtacata

SEQ ID NO: 36074 - DNA, 201 bp, Homo sapiens
gcccctcccatctacacagatgtcttagagtttgacgatggcaccccagctaccatgtcccagatagccaaggatgtgtgcaccttcctgcgctgggcatytgagccagagcacgaccatcgaaaacgcatggggctcaagatgttgatgatgatggctctgctggtgcccctggtctacaccataaagcggcacaagtgg

SEQ ID NO: 36075 - DNA, 197 bp, Homo sapiens
gtgaccctgtccagtgtctgcttgccatcctgccagaacaggccctcaagcccaagagccatcccaggcctgttcaggcctcagctaagcctctcttcatytggaagaagaggcaagggggcaggagaccaggctctagctctgggccctccttcagcccccatcatgggaataaattaattttctcaatgtacata

SEQ ID NO: 36076 - DNA, 201 bp, Homo sapiens
gtatgaaatctgtcatgatgggaaggtggtgactatattttctgcttctaattattatgaagaaggcagcaatcgaggagcttacatcaaactatgttctrgtacaactcctcgatttttccagtaccaagtaactaaagcaacgtgctttcagcctcttcgccaaagagtggatactatggaaaacagcgccatcaagat

SEQ ID NO: 36077 - DNA, 201 bp, Homo sapiens
gagaggaacccgtatgtttttaatggtgactttgtagatcgaggaaagaattccatagagatcctaatgatcctgtgtgtgagttttcttgtctaccccartgacctgcacttgaacagagggaaccacgaagattttatgatgaatctgaggtatggcttcacgaaagaaattttgcataaatataagctacatggaaaa

SEQ ID NO: 36078 - DNA, 113 bp, Homo sapiens
ccagtgatcctcaattaagggatccacccttcagggatgagaaccatattggattcttggggggaatctgtgggagtgtattgtttgaaaaagcgtatttktgtgtgtgtgta

SEQ ID NO: 36079 - DNA, 201 bp, Homo sapiens
tgccatgtggaaactttttagttctcactacaatgttcacattgatgattcccaagtcaataagcttgccaacataatggacttgaacaaagatggaagcrttgactttaatgagtttttaaaggctttctatgtagtgcatagatatgaagacttgatgaaacctgatgtcaccaaccttggctaaacacaaatgagagc

SEQ ID NO: 36080 - DNA, 201 bp, Homo sapiens
tctatgcctggctcccaatcggtacaatcgttgacaatgaaatcctggtcatccatggtgggatatcagagaccacagacttgaatttactccaccgtgtrgagaggaacaagatgaaatctgtgctgataccaccaacggaaacaaacagagaccatgacactgactcgaagcacaataaagtaggtgtgacttttaatg

SEQ ID NO: 36081 - DNA, 201 bp, Homo sapiens
tttgaaaacatcctgaaaggaactcatacagcacaagagaaaactactaagcttgacatctgtgagtgactgagggagacaggaggaataccaggttattyatggaataaagtctttccatctttaaactgtgatcttctttggagattttataagccagtgatcctcaattaagggatccacccttcagggatgagaacc

SEQ ID NO: 36082 - DNA, 201 bp, Homo sapiens
tacttcttgaggccttcaaggaacaacagatacttcatgcccattatgtcttagaggtgctatttgaaaccaagaaagtcctgaagcaaatgccgaatttyactcacatacaaacttctccctccaaagaggtaacaatctgtggtgatttgcatgggaaactggatgatctttttttgatcttctacaagaatggtctcc

SEQ ID NO: 36083 - DNA, 201 bp, Homo sapiens
tcactcacatacaaacttctccctccaaagaggtaacaatctgtggtgatttgcatgggaaactggatgatctttttttgatcttctacaagaatggtctyccctcagagaggaacccgtatgtttttaatggtgactttgtagatcgaggaaagaattccatagagatcctaatgatcctgtgtgtgagttttcttgtct

SEQ ID NO: 36084 - DNA, 201 bp, Homo sapiens; identical to SEQ ID NO: 36076

SEQ ID NO: 36085 - DNA, 201 bp, Homo sapiens; identical to SEQ ID NO: 36077

SEQ ID NO: 36086 - DNA, 113 bp, Homo sapiens; identical to SEQ ID NO: 36078

SEQ ID NO: 36087 - DNA, 201 bp, Homo sapiens; identical to SEQ ID NO: 36079

SEQ ID NO: 36088 - DNA, 201 bp, Homo sapiens; identical to SEQ ID NO: 36080

SEQ ID NO: 36089 - DNA, 201 bp, Homo sapiens; identical to SEQ ID NO: 36081

SEQ ID NO: 36090 - DNA, 201 bp, Homo sapiens; identical to SEQ ID NO: 36082

SEQ ID NO: 36091 - DNA, 201 bp, Homo sapiens; identical to SEQ ID NO: 36083

SEQ ID NO: 36092 - DNA, 201 bp, Homo sapiens
gcagaataaggagaaggtgtatatcatagcacatgttccagtggggtatctgccatcttcacagaacatcacagcaatgagagaatactataatgagaaaytgatagatatttttcaaaaatacagtgatgtcattgcaggacaattttatggacacactcacagagacagcattatggttctttcagataaaaaaggaag

SEQ ID NO: 36093 - DNA, 201 bp, Homo sapiens
tgtgatcactaatatgacaaccaccatccagagtctctttccaaatctccaggttttccctgcgctgggtaatcatgactattggccacaggatcaactgyctgtagtcaccagtaaagtgtacaatgcagtagcaaacctctggaaaccatggctagatgaagaagctattagtactttaaggaaaggtggtttttattc

SEQ ID NO: 36094 - DNA, 201 bp, Homo sapiens
gtaaattctttgtttgtggctcctgctgttacaccagtgaagagtgttttagaaaaacagaccaacaatcctggtatcagactgtttcagtatgatcctcrtgattataaattattggatatgttgcagtattacttgaatctgacagaggcgaatctaaagggagagtccatctggaagctggagtatatcctgacccag

SEQ ID NO: 36095 - DNA, 201 bp, Homo sapiens
gtccgagtggagctgcgggacagcccgaacctccaggtcagccccgcggccctccatggcgctggtgcgcgcactcgtctgctgcctgctgactgcctggyactgccgctccggcctcgggctgcccgtggcgcccgcaggcggcaggaatcctcctccggcgatagggatagcccacctcatgttcctgtacctgaactc

SEQ ID NO: 36096 - DNA, 201 bp, Homo sapiens
caaaccttaggatcatcagtctaaacacaaacttgtactacggcccaaatataatgacactgaacaagactgacccagccaaccagtttgaatggctagamagtacattgaacaactctcagcagaataaggagaaggtgtatatcatagcacatgttccagtggggtatctgccatcttcacagaacatcacagcaatga

SEQ ID NO: 36097 - DNA, 201 bp, Homo sapiens
gtgggcaagtagacttcctgtctttgctttctttttttttttctttttgatgccttaatgtagatatctttatcattctgaattgtattatatatttaaartgctcattaatagaatgatggatgtaaattggatgtaaatattcagtttatataattatatctaatttgtacccttgttgaaattgtcatttatacaata

SEQ ID NO: 36098 - DNA, 201 bp, Homo sapiens
catgtgataagacatgtaaggcctttcagatttgtgcaattatgaatcttgataatatttcctatgcagattgcctcaaacagctttatataaagcacaawtactagtatttcacagtttttgctaatagaaaatgctgattctgattctgagatcaatttgtgggaattttacataaatctttgttaattactgagtggg

SEQ ID NO: 36099 - DNA, 201 bp, Homo sapiens; identical to SEQ ID NO: 36092

SEQ ID NO: 36100 - DNA, 201 bp, Homo sapiens; identical to SEQ ID NO: 36093

SEQ ID NO: 36101 - DNA, 201 bp, Homo sapiens
gtccgagtggagctgcgggacagcccgaacctccaggtcagccccgcggccctccatggcgctggtgcgcgcactcgtctgctgcctgctgactgcctggyactgccgctccggcctcgggctgcccgtggcgcccgcaggcggcaggaatcctcctccggcgataggacagttttggcatgtgactgacttacacttaga

SEQ ID NO: 36102 - DNA, 201 bp, Homo sapiens; identical to SEQ ID NO: 36094

SEQ ID NO: 36103 - DNA, 201 bp, Homo sapiens; identical to SEQ ID NO: 36096

SEQ ID NO: 36104 - DNA, 201 bp, Homo sapiens; identical to SEQ ID NO: 36097

SEQ ID NO: 36105 - DNA, 201 bp, Homo sapiens; identical to SEQ ID NO: 36098

SEQ ID NO: 36106 - DNA, 201 bp, Homo sapiens; identical to SEQ ID NO: 36092

SEQ ID NO: 36107 - DNA, 201 bp, Homo sapiens; identical to SEQ ID NO: 36093

SEQ ID NO: 36108 - DNA, 201 bp, Homo sapiens; identical to SEQ ID NO: 36101

SEQ ID NO: 36109 - DNA, 201 bp, Homo sapiens; identical to SEQ ID NO: 36094

SEQ ID NO: 36110 - DNA, 201 bp, Homo sapiens; identical to SEQ ID NO: 36096

SEQ ID NO: 36111 - DNA, 201 bp, Homo sapiens; identical to SEQ ID NO: 36097

SEQ ID NO: 36112 - DNA, 201 bp, Homo sapiens; identical to SEQ ID NO: 36098

SEQ ID NO: 36113 - DNA, 201 bp, Homo sapiens
tatataacagtgaagattctgcagaatatcagttcactgggacttattctacaaggctagatgaacagtgtagtgctattcccacccgtaccatgcatttygagaagcactggagattactggaaagtatgaaagcacagtatgttgctgggaatggttttcgaaaagtgtcctgtgtgttaagctcaaatcttcgtcatg

SEQ ID NO: 36114 - DNA, 201 bp, Homo sapiens
ggcttgaaaaagcttggccagtctatagagtcatcatactccagtatacaaaaattggtcataagtcatttacagagtggctcggagtctttattataccrtttgagtgaattgaaaggaatggcttcatggaagcaaaaatatgaacctcttggactagatgctgcaggaatcgaagaagctataactgctgtgggttct

SEQ ID NO: 36115 - DNA, 201 bp, Homo sapiens
gctgctccctgccccgcccacgggccccatcctacccccacctcgatccgcccctcgctcctccctgccccgcccaccgcgccccgtccctgtccgccccktctggctctcagcacccccaagaccggtgcgcgccccgcccctcctcctcctctcgcgaggcagtcccgacgccggaagtgcctggagcgcgcgacagcg

SEQ ID NO: 36116 - DNA, 201 bp, Homo sapiens
ttgaaatggacatagatgatgaatgggagctcgatgagtcttcagatgaagaggaggaggccagtaataagcctgtaaaaataaaggaagaagtgttgtckgagtcagaggcagagaaccaacaagctggtgctgccgctttagctccagagatagtcattaaagtggaaaaacttgaccctgagctagactcctaatcta

SEQ ID NO: 36117 - DNA, 201 bp, Homo sapiens
atcagttaacagtaaagggcttgaaaaagcttggccagtctatagagtcatcatactccagtatacaaaaattggtcataagtcatttacagagtggctcrgagtctttattataccatttgagtgaattgaaaggaatggcttcatggaagcaaaaatatgaacctcttggactagatgctgcaggaatcgaagaagcta

SEQ ID NO: 36118 - DNA, 201 bp, Homo sapiens
tacattatcttctttttactattctagaagattcactttataaaatgtgcatcttaaggagacatactgatatttctcaatctgtgagtaatggactaatwgctattaaatttgggagctttacatatgccacaacagaaaaagtcagaagaagcatctacagttgtttagatgcacagttttatgatgatgaaactgtaa

SEQ ID NO: 36119 - DNA, 201 bp, Homo sapiens
catgtgcttcccgagctgaataagatgactcagaaagatatcacatttgttgctgaatttcttactgaacatttcaatgaggctccagacctttataatcraaaaggaaaatactttaacgttgaaagagttggtcagtacttgaaagatgaagatgatgatcttgtgtcaccccctaacacagaaggaaaccagtggtat

SEQ ID NO: 36120 - DNA, 201 bp, Homo sapiens
gggctccctgccccgcccgcgtgccccacccttcctagctctgccccatcgctgctccctgccccgcccacgggccccatcctacccccacctcgatccgyccctcgctcctccctgccccgcccaccgcgccccgtccctgtccgccccgtctggctctcagcacccccaagaccggtgcgcgccccgcccctcctcctc

SEQ ID NO: 36121 - DNA, 201 bp, Homo sapiens; identical to SEQ ID NO: 36114

SEQ ID NO: 36122 - DNA, 176 bp, Homo sapiens
cccatcctacccccacctcgatccgcccctcgctcctccctgccccgcccaccgcgccccgtccctgtccgccccktctggctctcagcacccccaagaccggtgcgcgccccgcccctcctcctcctctcgcgaggcagtcccgacgccggaagtgcctggagcgcgcgacagcg

SEQ ID NO: 36123 - DNA, 201 bp, Homo sapiens; identical to SEQ ID NO: 36117

SEQ ID NO: 36124 - DNA, 201 bp, Homo sapiens
gtgcttcccgagctgaataaggtaatgactcagaaagatatcacatttgttgctgaatttcttactgaacatttcaatgaggctccagacctttataatcraaaaggaaaatactttaacgttgaaagagttggtcagtacttgaaagatgaagatgatgatcttgtgtcaccccctaacacagaaggaaaccagtggtat

SEQ ID NO: 36125 - DNA, 126 bp, Homo sapiens
cccatcctacccccacctcgatccgyccctcgctcctccctgccccgcccaccgcgccccgtccctgtccgccccgtctggctctcagcacccccaagaccggtgcgcgccccgcccctcctcctc

SEQ ID NO: 36126 - DNA, 201 bp, Homo sapiens; identical to SEQ ID NO: 36113

SEQ ID NO: 36127 - DNA, 201 bp, Homo sapiens; identical to SEQ ID NO: 36114

SEQ ID NO: 36128 - DNA, 201 bp, Homo sapiens; identical to SEQ ID NO: 36116

SEQ ID NO: 36129 - DNA, 201 bp, Homo sapiens; identical to SEQ ID NO: 36117

SEQ ID NO: 36130 - DNA, 201 bp, Homo sapiens; identical to SEQ ID NO: 36118

SEQ ID NO: 36131 - DNA, 201 bp, Homo sapiens; identical to SEQ ID NO: 36119

SEQ ID NO: 36132 - DNA, 201 bp, Homo sapiens; identical to SEQ ID NO: 36113

SEQ ID NO: 36133 - DNA, 201 bp, Homo sapiens; identical to SEQ ID NO: 36114

SEQ ID NO: 36134 - DNA, 176 bp, Homo sapiens; identical to SEQ ID NO: 36122

SEQ ID NO: 36135 - DNA, 201 bp, Homo sapiens; identical to SEQ ID NO: 36116

SEQ ID NO: 36136 - DNA, 201 bp, Homo sapiens; identical to SEQ ID NO: 36117

SEQ ID NO: 36137 - DNA, 201 bp, Homo sapiens; identical to SEQ ID NO: 36118

SEQ ID NO: 36138 - DNA, 201 bp, Homo sapiens; identical to SEQ ID NO: 36119

SEQ ID NO: 36139 - DNA, 126 bp, Homo sapiens; identical to SEQ ID NO: 36125

SEQ ID NO: 36140 - DNA, 105 bp, Homo sapiens
ctaatgtgtggaatgtgcagatttaggttactttagtgtatgttctagttaataagttaaaattctggacacattattaaaggcagaaacttctttcaaarcaaa

SEQ ID NO: 36141 - DNA, 201 bp, Homo sapiens
aagggaggcatgcgccaaaggcctggtctctcaggtatttttgactggaactttcacccaagaggttatgattcaaattaaggagcttgcctcatacaatscaattgtactggaagaatgtaaggccctcgttcgctgtaatattaagttggagttggaacaggccaatgagagagagtgtgaggtgctgaggaagatctg

SEQ ID NO: 36142 - DNA, 201 bp, Homo sapiens
catgttaaaaatacctctgttgggatataaagcagccttccctcccagaaagacacagaatgatcagagatggtgcccttgactttatagtggcacaaacrcttcagagacacacaattataagagacttatcttttagcataaatacttatggctcaaaatccactgacgatcattctcctaaactgaacacatgactag

SEQ ID NO: 36143 - DNA, 201 bp, Homo sapiens
aggacacggtggtcttcaaggtgacagaagggaaactcctccgggaccctttgtcacgtcctggtgcagaacagactggaatacagaacaagactcagatrcacccactaatgtcgcagatgtctggctcagttactgcttctatggccacaggttcagctacccgaaagggtatagtggtattaatagacccattagcag

SEQ ID NO: 36144 - DNA, 201 bp, Homo sapiens
gaaacacagcaagccttgaaatggtggacaccatcaagaactttgtgaatacttttattcaatttaaaaagcctattgttgtatcagtcaatggccctgcsattggactaggtgcatccatcctgcctctttgtgatctcgtgtgggctaatgaaaaggcttggttccaaaccccttatacgacctttggacagagtccag

SEQ ID NO: 36145 - DNA, 201 bp, Homo sapiens
ttaagttggagttggaacaggccaatgagagagagtgtgaggtgctgaggaagatctggagctcagcccaagggatagaatccatgttaaaaatacctctrttgggatataaagcagccttccctcccagaaagacacagaatgatcagagatggtgcccttgactttatagtggcacaaacgcttcagagacacacaatt

SEQ ID NO: 36146 - DNA, 201 bp, Homo sapiens
cgctgctgcagatgacagcaagctcgtgctgttcagtgcagctggaagtgtcttttgctgcggtcttgattttgggtactttgtgaagcacttaaggaatracagaaacacagcaagccttgaaatggtggacaccatcaagaactttgtgaatacttttattcaatttaaaaagcctattgttgtatcagtcaatggccc

SEQ ID NO: 36147 - DNA, 201 bp, Homo sapiens
aatgctctgaatagcgctgctgcagatgacagcaagctcgtgctgttcagtgcagctggaagtgtcttttgctgcggtcttgattttgggtactttgtgargcacttaaggaataacagaaacacagcaagccttgaaatggtggacaccatcaagaactttgtgaatacttttattcaatttaaaaagcctattgttgta

SEQ ID NO: 36148 - DNA, 201 bp, Homo sapiens
gagacattgtagtgaagaaagaggatggattcacccagatagtgctatcaactagatcgacagaaaaaaatgcactgaatacagaagtaattaaagaaatrgttaatgctctgaatagcgctgctgcagatgacagcaagctcgtgctgttcagtgcagctggaagtgtcttttgctgcggtcttgattttgggtactttg

SEQ ID NO: 36149 - DNA, 201 bp, Homo sapiens
ccaagagtgaaaggtgggcaaagaaatattactgatgacagcagaggccagccttttatcaagaagatgcacttcaccataaggctaacagaaagtgccakcacatacagagacattgtagtgaagaaagaggatggattcacccagatagtgctatcaactagatcgacagaaaaaaatgcactgaatacagaagtaatt

SEQ ID NO: 36150 - DNA, 201 bp, Homo sapiens
tggacagagtccagatggctgttcttctattacattccccaaaatgatgggtaaagcatctgccaatgaaatgttaattgctgggcgaaagctgacagcamgggaggcatgcgccaaaggcctggtctctcaggtatttttgactggaactttcacccaagaggttatgattcaaattaaggagcttgcctcatacaatcc

SEQ ID NO: 36151 - DNA, 201 bp, Homo sapiens
gtattaatagacccattagcagccaatgggacaacagacatgcatacctcagttccaagagtgaaaggtgggcaaagaaatattactgatgacagcagagrccagccttttatcaagaagatgcacttcaccataaggctaacagaaagtgccatcacatacagagacattgtagtgaagaaagaggatggattcacccag

SEQ ID NO: 36152 - DNA, 201 bp, Homo sapiens
cagaatgatcagagatggtgcccttgactttatagtggcacaaacgcttcagagacacacaattataagagacttatcttttagcataaatacttatggcwcaaaatccactgacgatcattctcctaaactgaacacatgactagaattggtggtgagatatcgcttgattttcttttcctttataaatgtctagttctt

SEQ ID NO: 36153 - DNA, 201 bp, Homo sapiens; identical to SEQ ID NO: 36141

SEQ ID NO: 36154 - DNA, 201 bp, Homo sapiens; identical to SEQ ID NO: 36143

SEQ ID NO: 36155 - DNA, 201 bp, Homo sapiens; identical to SEQ ID NO: 36144

SEQ ID NO: 36156 - DNA, 201 bp, Homo sapiens; identical to SEQ ID NO: 36146

SEQ ID NO: 36157 - DNA, 201 bp, Homo sapiens; identical to SEQ ID NO: 36147

SEQ ID NO: 36158 - DNA, 201 bp, Homo sapiens; identical to SEQ ID NO: 36148

SEQ ID NO: 36159 - DNA, 201 bp, Homo sapiens; identical to SEQ ID NO: 36150

SEQ ID NO: 36160 - DNA, 201 bp, Homo sapiens; identical to SEQ ID NO: 36149

SEQ ID NO: 36161 - DNA, 201 bp, Homo sapiens; identical to SEQ ID NO: 36151

SEQ ID NO: 36162 - DNA, 201 bp, Homo sapiens
ctaggctcagcaacagcaaacccttacttggtgctggctgcaactgttgctgccggcttagatggacttcatagcagtaatgaggtcttggctggtccagrtgagagcacagacttttaccaagtggaaccttctgagatccctttaaaactagaagatgcccttgtggcactggaagaagatcaatgcctgagacaggct

SEQ ID NO: 36163 - DNA, 201 bp, Homo sapiens
agaatgaagaaatagctgcagagagaaataaattcttagagtattttatttagaatagagctcacaactactcctttagacatgtaattgttacttaaagmtaatctaccaaaacaaaaagactgaacttttgtaattaacaacagcaacaataacaagattacgaatgcttttgacttttttttttgtccatggaatatt

SEQ ID NO: 36164 - DNA, 201 bp, Homo sapiens
acaagccatggccaaaaatcgcctccagtttgtacgatttgaagcaacagacctccacggcgtgtccaggtctaagactatccctgcacacttttttcaaragaaagtgagccatggtgtttgcatgccccgaggttatcttgaagtgataccaaatccaaaggacaatgaaatgaataacataagagccacatgttttaa

SEQ ID NO: 36165 - DNA, 201 bp, Homo sapiens
acaagagatgaaggcaatgagactgaagccaacagcatgaacacattaagaaggacaaggaagaaagtcactaaaccatatgtttgttcaactgaagtggragaaacggatatgtccaattcaaatgattgcatgagggacagcagtcaaattttgaccccacctcaactctcttctagaatgaaacacattagacaagcc

SEQ ID NO: 36166 - DNA, 201 bp, Homo sapiens
tgtctcatagtctctgggatgtcgataggaagaaaaacatgttctgcagcacttctggaactgagcagctcacgatcactgggaaaaaatggttggcaggwctcttgaagcactctgctgcgctcagctgcctgatggcgccttctgttagctgccgaaagcgttattccaaggacaggaaagacctgaagaagagtgtgc

SEQ ID NO: 36167 - DNA, 201 bp, Homo sapiens
aacgctgaacttaaaaagtgttgagatgaataatgaagaggaccttctgcaggaggactcaacaagagatgaaggcaatgagactgaagccaacagcatgwacacattaagaaggacaaggaagaaagtcactaaaccatatgtttgttcaactgaagtgggagaaacggatatgtccaattcaaatgattgcatgaggga

SEQ ID NO: 36168 - DNA, 201 bp, Homo sapiens
gagccaatgtcgagagtttttcctcctctaccaggcctggtcagatggaaatctctttcctgcctgaatttggcattagctcagctgataatgcatttacyctcagaacaggtgtcaaagaagtggcaaggaaatataattacattgccagcttcttcattgagactggattttgtgattcagggattttgtctcatagtc

SEQ ID NO: 36169 - DNA, 201 bp, Homo sapiens
tcagcccttcatgcaggaacttgttgatggcttgtatcacactggagccaatgtcgagagtttttcctcctctaccaggcctggtcagatggaaatctctytcctgcctgaatttggcattagctcagctgataatgcatttaccctcagaacaggtgtcaaagaagtggcaaggaaatataattacattgccagcttctt

SEQ ID NO: 36170 - DNA, 201 bp, Homo sapiens
ctgcaactgttgctgccggcttagatggacttcatagcagtaatgaggtcttggctggtccagatgagagcacagacttttaccaagtggaaccttctgaratccctttaaaactagaagatgcccttgtggcactggaagaagatcaatgcctgagacaggctctaggagaaacctttattcgatattttgttgccatga

SEQ ID NO: 36171 - DNA, 201 bp, Homo sapiens
tatccctgcacacttttttcaagagaaagtgagccatggtgtttgcatgccccgaggttatcttgaagtgataccaaatccaaaggacaatgaaatgaatmacataagagccacatgttttaatagcgacatagtcctaatgccagagttatcaacctttagagttttgccatgggctgacagaactgcaagagtgatatg

SEQ ID NO: 36172 - DNA, 201 bp, Homo sapiens
tgcaagccttactgggtgacccagtgttttacttgacttgcctgatgacgcctgtcgctgcactgctgcccagattgtttttcagatccctccaggggagsgttttccccacacaacttcagctggcacgtcagttgaccaggaagtcccccaggagatgcagtgctcccaaagagacctttgctcagggacgcctcccga

SEQ ID NO: 36173 - DNA, 201 bp, Homo sapiens
gccagccaatgtgctgctgaccaacccgcagctctacaagagtggccagaacatggaggaataccggccacgaacgttctggtttaacatggccgacgccrccttccagagcctggtttgcttttccattccttacctggcctactatgactcgaacgtggacctgtttacctgggggacccctattgtgacaatcgcgct

SEQ ID NO: 36174 - DNA, 201 bp, Homo sapiens
accaagtcccaccggcgcacgggcagccgggccgaggccaagagggccagcatgctgtccaagcacacggccttcagcagccccatggagaaggatatcaygcccgacccaaagctgctggagaaggtgagtgagtgtgacaagagcctagccgtggcgaggcatcaggagcacctgctggcccacctctcgcccgagctg

SEQ ID NO: 36175 - DNA, 201 bp, Homo sapiens
tggggagtgtcttacagttctcccggacggagcagcttgcagatggacaagcgggacgtggacttcctgtccagccccactcaggccgatcaggacttcargggccagaccacagactacttataggagcatcttcaaggcggtcacagtgaaaaccttgaaatggccttttttaatatatataaataaatgttaatatta

SEQ ID NO: 36176 - DNA, 201 bp, Homo sapiens
agtggtgatccggcacccgcttaccgatgagatcaacgtctacaccaagggggccgactcagtggtcatggatctcctgcagccctgctcttcagttgacrccagagggaggcatcaaaaaaagattcggagcaaaactcagaattacctcaacgtgtatgcggcggaaggcctgcgcaccttgtgcatcgccaagagagt

SEQ ID NO: 36177 - DNA, 201 bp, Homo sapiens
gggatgtgccagccaatgtgctgctgaccaacccgcagctctacaagagtggccagaacatggaggaataccggccacgaacgttctggtttaacatggcygacgccgccttccagagcctggtttgcttttccattccttacctggcctactatgactcgaacgtggacctgtttacctgggggacccctattgtgacaa

SEQ ID NO: 36178 - DNA, 201 bp, Homo sapiens
atgataacaacccaaggcaatgatatggcatgtcatcttctgagcccttctttctactttgtcaaacagttcttagttgctggctctgctcggcaccgggrctgtgaagggtgtactccctgctgtgtgggagggacctagggcctctttggatgctgtcttcgaggacagcaatgcagagagggcataggatctgaggac

SEQ ID NO: 36179 - DNA, 201 bp, Homo sapiens
gcatttttgtaatgagccattagttctgtccctctaaaactagaaaaggaagggcaggaaatgataacaacccaaggcaatgatatggcatgtcatcttcygagcccttctttctactttgtcaaacagttcttagttgctggctctgctcggcaccggggctgtgaagggtgtactccctgctgtgtgggagggacctag

SEQ ID NO: 36180 - DNA, 201 bp, Homo sapiens
atcttcaaggcggtcacagtgaaaaccttgaaatggccttttttaatatatataaataaatgttaatattatttatgtttattatttgcacagaagagttmtagggagatgtatttctaaatgtttcccaggctaatacaggaaacaagaggtaccaaaaaagaaagtttattttttaaaattctaagtagagtatattga

SEQ ID NO: 36181 - DNA, 201 bp, Homo sapiens
caaccctgcccagcctgatgccacctcctctgttcttggaacaacgcataggaaaagaatctcctttggaaggtgacactgctccctgaattaaggtaatkgttgcgagcaccaagtacaaggactagacgcatatttacctgcgtatctgagagttccagattcccagcttccagatgatccttgcacagacaacctacc

SEQ ID NO: 36182 - DNA, 201 bp, Homo sapiens
acctcacagagtatgatctgagggcacttccgtaaggcaagtccttttagaggctatgaagaaaacagctgcatggcacataccaaagctgctgcacagcyggccaccatggcaccctgcaccaggccatcagcaccacgtgccaaggagctcagcggtcttcaggcatttttgtaatgagccattagttctgtccctcta

SEQ ID NO: 36183 - DNA, 201 bp, Homo sapiens
tcgtaacaagcaataaacaactttcactttgcaaagacagtgtgtccagttaccactggtgtatgaaatgattaatacctgacctcacagagtatgatctsagggcacttccgtaaggcaagtccttttagaggctatgaagaaaacagctgcatggcacataccaaagctgctgcacagccggccaccatggcaccctgc

SEQ ID NO: 36184 - DNA, 201 bp, Homo sapiens
ggaataccggccacgaacgttctggtttaacatggccgacgccgccttccagagcctggtttgcttttccattccttacctggcctactatgactcgaacrtggacctgtttacctgggggacccctattgtgacaatcgcgctgctcactttcctgctccacctgggcattgaaaccaaaacctggacctggctcaactg

SEQ ID NO: 36185 - DNA, 201 bp, Homo sapiens
gcagctctacaagagtggccagaacatggaggaataccggccacgaacgttctggtttaacatggccgacgccgccttccagagcctggtttgcttttccrttccttacctggcctactatgactcgaacgtggacctgtttacctgggggacccctattgtgacaatcgcgctgctcactttcctgctccacctgggcat

SEQ ID NO: 36186 - DNA, 201 bp, Homo sapiens
gggtgctggacagggatgtgccagccaatgtgctgctgaccaacccgcagctctacaagagtggccagaacatggaggaataccggccacgaacgttctgstttaacatggccgacgccgccttccagagcctggtttgcttttccattccttacctggcctactatgactcgaacgtggacctgtttacctgggggaccc

SEQ ID NO: 36187 - DNA, 201 bp, Homo sapiens
tggtgctactcccgacttgccaacatggtgctgtacttcttctacaaaaacacaatgttcgtgggcctcctgttttggttccagtttttctgtggcttctstgcatctaccatgattgaccagtggtatctaatcttctttaatctgctcttctcgtcacttcccccgctcgtgactggggtgctggacagggatgtgcca

SEQ ID NO: 36188 - DNA, 201 bp, Homo sapiens
tgactggggtgctggacagggatgtgccagccaatgtgctgctgaccaacccgcagctctacaagagtggccagaacatggaggaataccggccacgaacsttctggtttaacatggccgacgccgccttccagagcctggtttgcttttccattccttacctggcctactatgactcgaacgtggacctgtttacctggg

SEQ ID NO: 36189 - DNA, 201 bp, Homo sapiens
tgctccctggaggccagcggggagcccagcacagtggacatgagcatgccagtgagggagcacaccctgctggaggggctgagcgcaccggcccccatgtsctctgcgccaggggaggctgtcctgaggagtccaggagggtgtcctgaggagtccaaggtgagagctgccagcaccggcagggtgacccccctgtcttcc

SEQ ID NO: 36190 - DNA, 201 bp, Homo sapiens
catcgcaagtcacagaaaatgcacctcattccagtcaagcagaaaaacaggcacaggctcagtgtaggtcccaagagagggtgcctggactcagcaactcrgacctgggcttttctcccagctttcagggacagctttgtcctgagtctgcctctgttcacggggatgcttggctggagtcacccccaggacttatccatg

SEQ ID NO: 36191 - DNA, 201 bp, Homo sapiens
tttggaaggtgacactgctccctgaattaaggtaatggttgcgagcaccaagtacaaggactagacgcatatttacctgcgtatctgagagttccagattyccagcttccagatgatccttgcacagacaacctaccttctttccagaggatgtctttctcctctggagagtagatgcttgctcttgggaaacggaatgac

SEQ ID NO: 36192 - DNA, 201 bp, Homo sapiens
ggactctgtcccttctccaagcagaccctgcccctgggcgaggtgggtggtgcccccattccagccaccagggccagagaactggatgcccattcaacgaygtcctcttcagcagcacagccagacttccccagccagccgttcttcctgtctctagaggtccgtgctgataaaagcctcaagaagggcgtggttgagtgg

SEQ ID NO: 36193 - DNA, 168 bp, Homo sapiens
gccctggccaccgtgcagcagggtgagggacagtgccctcccccatcggcctcggcaccagcccatcgggcttccctggggcagtgggctctgctgtctgwggacctcagcgagggcactgtagggagtggggcgatgcccccggtcaccgtcacagggggagatgcc

SEQ ID NO: 36194 - DNA, 201 bp, Homo sapiens
tgacatccacagtgggggctgctgtcacctctgtgcttaagacccccaaatatttctgtctccatctgcctgtcttcaaagctggagacacctccggagascggaccccgcacagccccaccagcttcttgaactcaaagttggtcactgttggactctgtcccttctccaagcagaccctgcccctgggcgaggtgggtg

SEQ ID NO: 36195 - DNA, 201 bp, Homo sapiens
ggtgacgggcacacattcgagatgtccttccagccgtgttcactcggccgtgggaggtgaaggccgaggtgtggaggcagacctgtggctgctggctgggstggcaggcacccaggaaccctgtgtcctccgggccctgtgtggtcagccctggcccaccctgatgccgtgtgctggcgtggcacctctctgcccccagcc

SEQ ID NO: 36196 - DNA, 105 bp, Homo sapiens
atgcrcaagaggactgtctgccttcatggatgtgccactggaagttactgtctccaaaaatggagtaaaactgcggtggtgacgggcacacattcgagatgtcct

SEQ ID NO: 36197 - DNA, 201 bp, Homo sapiens; identical to SEQ ID NO: 36172

SEQ ID NO: 36198 - DNA, 201 bp, Homo sapiens; identical to SEQ ID NO: 36173

SEQ ID NO: 36199 - DNA, 201 bp, Homo sapiens; identical to SEQ ID NO: 36175

SEQ ID NO: 36200 - DNA, 201 bp, Homo sapiens; identical to SEQ ID NO: 36176

SEQ ID NO: 36201 - DNA, 201 bp, Homo sapiens; identical to SEQ ID NO: 36177

SEQ ID NO: 36202 - DNA, 201 bp, Homo sapiens; identical to SEQ ID NO: 36178

SEQ ID NO: 36203 - DNA, 201 bp, Homo sapiens; identical to SEQ ID NO: 36179

SEQ ID NO: 36204 - DNA, 201 bp, Homo sapiens; identical to SEQ ID NO: 36180

SEQ ID NO: 36205 - DNA, 201 bp, Homo sapiens; identical to SEQ ID NO: 36181

SEQ ID NO: 36206 - DNA, 201 bp, Homo sapiens; identical to SEQ ID NO: 36182

SEQ ID NO: 36207 - DNA, 201 bp, Homo sapiens; identical to SEQ ID NO: 36183

SEQ ID NO: 36208 - DNA, 201 bp, Homo sapiens; identical to SEQ ID NO: 36184

SEQ ID NO: 36209 - DNA, 201 bp, Homo sapiens; identical to SEQ ID NO: 36185

SEQ ID NO: 36210 - DNA, 201 bp, Homo sapiens; identical to SEQ ID NO: 36186

SEQ ID NO: 36211 - DNA, 201 bp, Homo sapiens; identical to SEQ ID NO: 36188

SEQ ID NO: 36212 - DNA, 201 bp, Homo sapiens; identical to SEQ ID NO: 36187

SEQ ID NO: 36213 - DNA, 201 bp, Homo sapiens; identical to SEQ ID NO: 36189

SEQ ID NO: 36214 - DNA, 201 bp, Homo sapiens; identical to SEQ ID NO: 36190

SEQ ID NO: 36215 - DNA, 201 bp, Homo sapiens; identical to SEQ ID NO: 36191

SEQ ID NO: 36216 - DNA, 201 bp, Homo sapiens
caacttcagaacccagtactggaatgccatcagccagcaggcccctgccatcatctatgacttctatctgtggctcactggaaggaaacccaggcaaggcsaagatggctcaaagagcaaccagccacctctgcagcctgccacctcctgctggcaagatttgtttttgcatcctgtgaagagccaaggaggcaccagggc

SEQ ID NO: 36217 - DNA, 170 bp, Homo sapiens
ctcaaagagcaaccagccacctctgcagcctgccacctcctgctggcaagatttgtttttgcatcctgtgaagagccaaggaggcaccagggcataagtcyactcacttatatctgtctggaacataacgcttgtttgtttttacaacaaataaaattgatcttgaataa

SEQ ID NO: 36218 - DNA, 142 bp, Homo sapiens
ctaagaaactaaagacaggggcgtggaggggcggagctgggyggggggcgcctcatgaaggccgggctgggtgtcccaaaccagggccacggaagggcagcgggaaggaggcgtgcgggccgtaggggctgaggggcaggtg

SEQ ID NO: 36219 - DNA, 201 bp, Homo sapiens
ggcaaaatgggtttccaggtcttggcaacctttgaaattccaattccatttgagagagctttgacgaggccatatgctgatttcaccaccagcaacttcasaacccagtactggaatgccatcagccagcaggcccctgccatcatctatgacttctatctgtggctcactggaaggaaacccaggcaaggccaagatggc

SEQ ID NO: 36220 - DNA, 201 bp, Homo sapiens
cctgcaaccggggcaaaatgggtttccaggtcttggcaacctttgaaattccaattccatttgagagagctttgacgaggccatatgctgatttcaccacmagcaacttcagaacccagtactggaatgccatcagccagcaggcccctgccatcatctatgacttctatctgtggctcactggaaggaaacccaggcaag

SEQ ID NO: 36221 - DNA, 201 bp, Homo sapiens
tcaatccctgcaaccggggcaaaatgggtttccaggtcttggcaacctttgaaattccaattccatttgagagagctttgacgaggccatatgctgatttyaccaccagcaacttcagaacccagtactggaatgccatcagccagcaggcccctgccatcatctatgacttctatctgtggctcactggaaggaaaccca

SEQ ID NO: 36222 - DNA, 201 bp, Homo sapiens
cactgtacatctggtaacctcaatccctgcaaccggggcaaaatgggtttccaggtcttggcaacctttgaaattccaattccatttgagagagctttgasgaggccatatgctgatttcaccaccagcaacttcagaacccagtactggaatgccatcagccagcaggcccctgccatcatctatgacttctatctgtgg

SEQ ID NO: 36223 - DNA, 201 bp, Homo sapiens
cctaagtcagtgttagtctaccactgtacatctggtaacctcaatccctgcaaccggggcaaaatgggtttccaggtcttggcaacctttgaaattccaaytccatttgagagagctttgacgaggccatatgctgatttcaccaccagcaacttcagaacccagtactggaatgccatcagccagcaggcccctgccatc

SEQ ID NO: 36224 - DNA, 201 bp, Homo sapiens
tttcaccaccagcaacttcagaacccagtactggaatgccatcagccagcaggcccctgccatcatctatgacttctatctgtggctcactggaaggaaasccaggcaaggccaagatggctcaaagagcaaccagccacctctgcagcctgccacctcctgctggcaagatttgtttttgcatcctgtgaagagccaagg

SEQ ID NO: 36225 - DNA, 201 bp, Homo sapiens
gcaggcccctgccatcatctatgacttctatctgtggctcactggaaggaaacccaggcaaggccaagatggctcaaagagcaaccagccacctctgcagyctgccacctcctgctggcaagatttgtttttgcatcctgtgaagagccaaggaggcaccagggcataagtctactcacttatatctgtctggaacataac

SEQ ID NO: 36226 - DNA, 201 bp, Homo sapiens
gaacccagtactggaatgccatcagccagcaggcccctgccatcatctatgacttctatctgtggctcactggaaggaaacccaggcaaggccaagatggstcaaagagcaaccagccacctctgcagcctgccacctcctgctggcaagatttgtttttgcatcctgtgaagagccaaggaggcaccagggcataagtct

SEQ ID NO: 36227 - DNA, 201 bp, Homo sapiens
agcaggcccctgccatcatctatgacttctatctgtggctcactggaaggaaacccaggcaaggccaagatggctcaaagagcaaccagccacctctgcarcctgccacctcctgctggcaagatttgtttttgcatcctgtgaagagccaaggaggcaccagggcataagtctactcacttatatctgtctggaacataa

SEQ ID NO: 36228 - DNA, 150 bp, Homo sapiens
ctctgcagcctgccacctcctgctggcaagatttgtttttgcatcctgtgaagagccaaggaggcaccagggcataagtctactcacttatatctgtctgraacataacgcttgtttgtttttacaacaaataaaattgatcttgaataa

SEQ ID NO: 36229 - DNA, 201 bp, Homo sapiens
ttcagaacccagtactggaatgccatcagccagcaggcccctgccatcatctatgacttctatctgtggctcactggaaggaaacccaggcaaggccaagmtggctcaaagagcaaccagccacctctgcagcctgccacctcctgctggcaagatttgtttttgcatcctgtgaagagccaaggaggcaccagggcataa

SEQ ID NO: 36230 - DNA, 201 bp, Homo sapiens
ggaatgccatcagccagcaggcccctgccatcatctatgacttctatctgtggctcactggaaggaaacccaggcaaggccaagatggctcaaagagcaaycagccacctctgcagcctgccacctcctgctggcaagatttgtttttgcatcctgtgaagagccaaggaggcaccagggcataagtctactcacttatat

SEQ ID NO: 36231 - DNA, 201 bp, Homo sapiens
acccagtactggaatgccatcagccagcaggcccctgccatcatctatgacttctatctgtggctcactggaaggaaacccaggcaaggccaagatggctsaaagagcaaccagccacctctgcagcctgccacctcctgctggcaagatttgtttttgcatcctgtgaagagccaaggaggcaccagggcataagtctac

SEQ ID NO: 36232 - DNA, 201 bp, Homo sapiens
ccaccagcaacttcagaacccagtactggaatgccatcagccagcaggcccctgccatcatctatgacttctatctgtggctcactggaaggaaacccagrcaaggccaagatggctcaaagagcaaccagccacctctgcagcctgccacctcctgctggcaagatttgtttttgcatcctgtgaagagccaaggaggca

SEQ ID NO: 36233 - DNA, 201 bp, Homo sapiens
atgacttctatctgtggctcactggaaggaaacccaggcaaggccaagatggctcaaagagcaaccagccacctctgcagcctgccacctcctgctggcargatttgtttttgcatcctgtgaagagccaaggaggcaccagggcataagtctactcacttatatctgtctggaacataacgcttgtttgtttttacaaca

SEQ ID NO: 36234 - DNA, 201 bp, Homo sapiens
ctgaccaactgcatggaggccggccgggtgaagtgtgagcattactggcctctggactcgcagccctgcacccatgggcacctgcgggtaaccctggtagrtgaggaagtgatggagaactggacggtgcgggaactgctgctcctccaggtggaggagcagaagacactgtctgtgcgccaattccactaccaggcctgg

SEQ ID NO: 36235 - DNA, 201 bp, Homo sapiens
actggcctctggactcgcagccctgcacccatgggcacctgcgggtaaccctggtaggtgaggaagtgatggagaactggacggtgcgggaactgctgctyctccaggtggaggagcagaagacactgtctgtgcgccaattccactaccaggcctggccggatcacggcgttccctcctccccagacaccttgctggctt

SEQ ID NO: 36236 - DNA, 201 bp, Homo sapiens
tccccgatggcccagacccacagaactccacctacggggttgagtacactggagatggtggcagagcagggactcgaagcacagcacacaccaacatcacygtggatagacttgaacccgggtgtttgtatgtgttttccgtgtgggtggggaagaatggaatcaacagctcccgggagactcgaaatgccaccacagccc

SEQ ID NO: 36237 - DNA, 201 bp, Homo sapiens
cccagtgaggaacctgagagtggaggctcagaccaccagctccatctccctgagctgggaggtccccgatggcacagacccacagaactcgacctactgcrttcagtgcactggagatggtggcagaacagagactcgaaacacaacagacaccagagtcaccgtggatggccttggacccgggtcattgtatacgtgttc

SEQ ID NO: 36238 - DNA, 201 bp, Homo sapiens
ggctcagaccaccagctccatctccctgagctgggaggtccccgatggcacagacccacagaactcgacctactgcgttcagtgcactggagatggtggcrgaacagagactcgaaacacaacagacaccagagtcaccgtggatggccttggacccgggtcattgtatacgtgttctgtgtgggtggagaaagacggagt

SEQ ID NO: 36239 - DNA, 201 bp, Homo sapiens
acatccccggagggggcaagatccccaagcgaattgggtcaaccagaccagcaggaccaatgagacgtggtacaaagtggaggccctggaacccgggacgytgtacaatttcaccgtgtgggcagagaggaatgacgtagccagttccacgcagagcctctgtgcgtccacatacccagacacagtcaccatcacttcctg

SEQ ID NO: 36240 - DNA, 201 bp, Homo sapiens
agtgggccagcaagggacatccccggagggggcaagatccccaagcgaattgggtcaaccagaccagcaggaccaatgagacgtggtacaaagtggaggcyctggaacccgggacgttgtacaatttcaccgtgtgggcagagaggaatgacgtagccagttccacgcagagcctctgtgcgtccacatacccagacacag

SEQ ID NO: 36241 - DNA, 201 bp, Homo sapiens
tggagattgtcactagtgccacagctcccaacccagtgagaaacctgacagtggaggctcagaccaacagctccatcgccctgacctgggaggtccccgayggcccagacccacagaactccacctacggggttgagtacactggagatggtggcagagcagggactcgaagcacagcacacaccaacatcaccgtggata

SEQ ID NO: 36242 - DNA, 201 bp, Homo sapiens
cagaactcgacctactgcgttcagtgcactggagatggtggcagaacagagactcgaaacacaacagacaccagagtcaccgtggatggccttggacccgrgtcattgtatacgtgttctgtgtgggtggagaaagacggagtaaatagctctgtggagattgtcactagtgccacagctcccaacccagtgagaaacctg

SEQ ID NO: 36243 - DNA, 201 bp, Homo sapiens
gtactgacatcaccctaaaggaactggaagctggcagcctgtaccacctcaccgtctgggccgagaggaatgaggtcagaggctataacagcaccctcacygcagccactgctcccaatgaggtcacagatctccagaatgaaactcagactaagaactcagtcatgctgtggtggaaggcccctggagacccccactctc

SEQ ID NO: 36244 - DNA, 201 bp, Homo sapiens
gggaggtccccgatggcctagactcacagaactccaactactgggttcagtgtactggagacggcggcacaacagagactcgaaacacaacagccaccaaygtcaccgtggatggccttggacccgggtcattgtatacgtgttctgtgtgggtggagaaagacggagtaaatagctctgtggggactgtcactactgcca

SEQ ID NO: 36245 - DNA, 201 bp, Homo sapiens
cgagggtctccttgggcccttcagctttgtaaggaagatgagagagagtcggccgttgatggtgcagactgaggctcagtacgtattcctgcatcagtgcrtcctgcggttcctccaacagtcagcccaggccccagccgagaaggaagtcccgtatgaggatgtcgaaaacctcatctacgagaacgtggccgccatcca

SEQ ID NO: 36246 - DNA, 201 bp, Homo sapiens
cagggatctggtctttagctccccaggggacatcccagctgaagacttcgctgaccacgtcaggaagaatgagagggacagcaactgtggttttgcagacragtaccagcaactctccctggtgggccacagccagtctcagatggtggcttcggcttcagagaacaacgccaagaaccgctacagaaatgtgctgcccta

SEQ ID NO: 36247 - DNA, 201 bp, Homo sapiens
ggaataagaagaagcagcagaaaccagaactcagggatctggtctttagctccccaggggacatcccagctgaagacttcgctgaccacgtcaggaagaaygagagggacagcaactgtggttttgcagacgagtaccagcaactctccctggtgggccacagccagtctcagatggtggcttcggcttcagagaacaacg

SEQ ID NO: 36248 - DNA, 201 bp, Homo sapiens
acaccgagagtgcaggggtcattgccggagcctttgtgggcatcctcctgtttctcatcctcgtgggcctgctgattttcttcctgaagaggaggaataakaagaagcagcagaaaccagaactcagggatctggtctttagctccccaggggacatcccagctgaagacttcgctgaccacgtcaggaagaatgagaggg

SEQ ID NO: 36249 - DNA, 201 bp, Homo sapiens
cctgacctgggaggtccccgacggcccagacccacagaactccacctacggggttgagtacactggagatggtggcagagcagggactcgaagcacagcayacactaacatcaccgtggatggacttgaacccgggtgtttgtatgcgttttccatgtgggtgggaaagaatggaatcaacagctcccgggagactcgaaa

SEQ ID NO: 36250 - DNA, 201 bp, Homo sapiens
cccacccattgtgcactgcagtgctggcgtgggtcgcacaggaaccctcattgccctggacgtcctgctccggcagctgcagtccgagggtctccttgggsccttcagctttgtaaggaagatgagagagagtcggccgttgatggtgcagactgaggctcagtacgtattcctgcatcagtgcatcctgcggttcctcca

SEQ ID NO: 36251 - DNA, 201 bp, Homo sapiens
cggtcctacccagccaccatcacgaccatctgggacggaatgaaggtcgtgtctcactctgtggtctgccacaccgagagtgcaggggtcattgccggagmctttgtgggcatcctcctgtttctcatcctcgtgggcctgctgattttcttcctgaagaggaggaataagaagaagcagcagaaaccagaactcagggat

SEQ ID NO: 36252 - DNA, 201 bp, Homo sapiens
ccagggtcccctgccacagacagtgggtgacttctggcgcctggtgtgggaacagcagagccacaccctggtcatgctgaccaactgcatggaggccggcygggtgaagtgtgagcattactggcctctggactcgcagccctgcacccatgggcacctgcgggtaaccctggtaggtgaggaagtgatggagaactggac

SEQ ID NO: 36253 - DNA, 201 bp, Homo sapiens
gcccatccatgaggagccaggctctgactacatcaatgccagcttcatgcccggtctctggagcccccaggagttcattgcaacccagggtcccctgccayagacagtgggtgacttctggcgcctggtgtgggaacagcagagccacaccctggtcatgctgaccaactgcatggaggccggccgggtgaagtgtgagca

SEQ ID NO: 36254 - DNA, 201 bp, Homo sapiens
gacatccccggagggggcaagatccccaagcgaattgggtcaaccagaccagcaggaccaatgagacgtggtacaaagtggaggccctggaacccgggacrttgtacaatttcaccgtgtgggcagagaggaatgacgtagccagttccacgcagagcctctgtgcgtccacatacccagacacagtcaccatcacttcct

SEQ ID NO: 36255 - DNA, 201 bp, Homo sapiens
gattcctggaagagcagagggctgggctcccagactcctgggtgctgtgggaggagggggctggtatcccaaactctggtttccccaggagagagtggtcwggtgggcttcagatgagtcctatgggagctggggatctggattcctggttccctgaaggaggagagggatgatagcttggattccctaggtctttccagg

SEQ ID NO: 36256 - DNA, 201 bp, Homo sapiens
cagcctgtaccacctcaccgtctgggccgagaggaatgaggtcagaggctataacagcaccctcactgcagccactgctcccaatgaggtcacagatctcmagaatgaaactcagactaagaactcagtcatgctgtggtggaaggcccctggagacccccactctcagttgtacgtatactgggtccagtgggccagcaa

SEQ ID NO: 36257 - DNA, 201 bp, Homo sapiens
tcagaccaacagctccatcgccctatgctgggaagtccccgatggcccataccctcaggactacacctactgggtagagtacactggagacggtggtggcrcagagacccgaaacacaacaaataccagtgtgacagctgagagacttgagcccggaaccttgtacacattctctgtatgggcagaaaaaaatggagcacg

SEQ ID NO: 36258 - DNA, 201 bp, Homo sapiens
cagctcacaacccagtgaggaacctgagagtggaggctcagaccaccagctccatctccctgagctgggaggtccccgatggcacagacccacagaactcsacctactgcgttcagtgcactggagatggtggcagaacagagactcgaaacacaacagacaccagagtcaccgtggatggccttggacccgggtcattgt

SEQ ID NO: 36259 - DNA, 201 bp, Homo sapiens
cctgggaggtccccgacggcccagacccacagaactccacctacggggttgagtacactggagatggtggcagagcagggactcgaagcacagcacacacyaacatcaccgtggatggacttgaacccgggtgtttgtatgcgttttccatgtgggtgggaaagaatggaatcaacagctcccgggagactcgaaatgcca

SEQ ID NO: 36260 - DNA, 201 bp, Homo sapiens
cctgacctgggaggtccccgatggcccagacccacagaactccacctacggggttgagtacactggagatggtggcagagcagggactcgaagcacagcayacaccaacatcaccgtggatagacttgaacccgggtgtttgtatgtgttttccgtgtgggtggggaagaatggaatcaacagctcccgggagactcgaaa

SEQ ID NO: 36261 - DNA, 201 bp, Homo sapiens
ggggacatcccagctgaagacttcgctgaccacgtcaggaagaatgagagggacagcaactgtggttttgcagacgagtaccagcaactctccctggtggrccacagccagtctcagatggtggcttcggcttcagagaacaacgccaagaaccgctacagaaatgtgctgccctatgactggtcccgggtgcccctgaag

SEQ ID NO: 36262 - DNA, 201 bp, Homo sapiens
ggtctcatgggtcagggaaggcatgactgaccccaggacccaaagcacctcaggtactgacatcaccctaaaggaactggaagctggcagcctgtaccacytcaccgtctgggccgagaggaatgaggtcagaggctataacagcaccctcactgcagccactgctcccaatgaggtcacagatctccagaatgaaactca

SEQ ID NO: 36263 - DNA, 201 bp, Homo sapiens
agggggctgggtcggcagcccaggcatcctcaagctctggacacccacttgagcccagattcctggaagagcagagggctgggctcccagactcctgggtrctgtgggaggagggggctggtatcccaaactctggtttccccaggagagagtggtctggtgggcttcagatgagtcctatgggagctggggatctggatt

SEQ ID NO: 36264 - DNA, 201 bp, Homo sapiens
tcagcccaggccccagccgagaaggaagtcccgtatgaggatgtcgaaaacctcatctacgagaacgtggccgccatccaggcccacaagttggaggtctragtgacgagggggctgggtcggcagcccaggcatcctcaagctctggacacccacttgagcccagattcctggaagagcagagggctgggctcccagact

SEQ ID NO: 36265 - DNA, 201 bp, Homo sapiens
gtcgaaaacctcatctacgagaacgtggccgccatccaggcccacaagttggaggtctaagtgacgagggggctgggtcggcagcccaggcatcctcaagstctggacacccacttgagcccagattcctggaagagcagagggctgggctcccagactcctgggtgctgtgggaggagggggctggtatcccaaactctg

SEQ ID NO: 36266 - DNA, 128 bp, Homo sapiens
atattttccaaatattgaccctgctaaaatagaatatagcatcttccatatggtaggaaccaacaaggaaactttgctttaactccctttttacgatttayggtaggtagcaggggggaaaaatgcat

SEQ ID NO: 36267 - DNA, 201 bp, Homo sapiens
tggtgtttagttgctgctcaggatagttgatacctcaggatttggagatgcagtggatagtagtaattgctggcagcctgttatcgattacattgatagtraatttgaggactacctaaatgcagaatcgcgagtgagcagacgtcagatgcctgataacaggaccattacataactgaagactcccaccttcaggcagga

SEQ ID NO: 36268 - DNA, 176 bp, Homo sapiens
gtggagcagcccctgtaaactggctcgggcgcccccacgcccgcccttccttcttctcccagcattgccccccccrcgtttcagcacagcgctggccgcagtctgacaggaaagggacggagccaagatggcggcggccgacggcgacgactcgctgtaccccatcgcggtgctca

SEQ ID NO: 36269 - DNA, 201 bp, Homo sapiens
cgcactttgtgccgctagtgaagcggctggcgggcggcgactggttcacctcccgcacctcggcctgcggcctcttctccgtctgctacccccgagtgtcyagtgctgtgaaggcggaacttcgacagtacttccggaacctgtgctcagatgacacccccatggtgcggcgggccgcagcctccaagctgggggagtttg

SEQ ID NO: 36270 - DNA, 201 bp, Homo sapiens
ccaagtctctgcagaagatagggcccatcctggacaacagcaccttgcagagtgaagtcaagcccatcctagagaagctgacccaggaccaggatgtggaygtcaaatactttgcccaggaggctctgactgttctgtctctcgcctgatgctggaagaggagcaaacactggcctctggtgtccaccctccaacccccac

SEQ ID NO: 36271 - DNA, 155 bp, Homo sapiens
gtggagcagcccctgtaaactggctcgggcgcccccacgcccgcccttccttctyctcccagcattgccccccccacgtttcagcacagcgctggccgcagtctgacaggaaagggacggagccaagatggcggcggccgacggcgacgactcgc

SEQ ID NO: 36272 - DNA, 201 bp, Homo sapiens
agccaagacatgtgataatcactgtagtagtagctggaaagagaaatctgtgactccaattagccagttcctgcagaccttgtgaggactagaggaagaaygctcctggctgttttgtactgcctgctgtggagtttccagacctccgctggccatttccctagagcctgtgtctcctctaagaacctgatggagaaggaa

SEQ ID NO: 36273 - DNA, 201 bp, Homo sapiens
gcatcattcttctcctcttggcagattgtctgtagccgattggaggagtacaacagccatcagtctttatgcaatggaacgcccgagggacctttacggcrtaatcctggaaaccatgacaaatccagaaccccaaggctcccctcttcagctgatgtagaattttgcctgagtttgacccaatatgaatctggttccatg

SEQ ID NO: 36274 - DNA, 201 bp, Homo sapiens
gtctgtagccgattggaggagtacaacagccatcagtctttatgcaatggaacgcccgagggacctttacggcgtaatcctggaaaccatgacaaatccasaaccccaaggctcccctcttcagctgatgtagaattttgcctgagtttgacccaatatgaatctggttccatggataaagctgccaatttcagctttaga

SEQ ID NO: 36275 - DNA, 201 bp, Homo sapiens
gaagcaccagcttttctgccttggcatagactcttcttgttgcggtgggaacaagaaatccagaagctgacaggagatgaaaacttcactattccatattvggactggcgggatgcagaaaagtgtgacatttgcacagatgagtacatgggaggtcagcaccccacaaatcctaacttactcagcccagcatcattcttc

SEQ ID NO: 36276 - DNA, 201 bp, Homo sapiens
agagcctgtgtctcctctaagaacctgatggagaaggaatgctgtccaccgtggagcggggacaggagtccctgtggccagctttcaggcagaggttcctrtcagaatatccttctgtccaatgcaccacttgggcctcaatttcccttcacaggggtggatgaccgggagtcgtggccttccgtcttttataataggacc

SEQ ID NO: 36277 - DNA, 201 bp, Homo sapiens
tcaatggatgcactgcttgggggatctgaaatctggagagacattgattttgcccatgaagcaccagcttttctgccttggcatagactcttcttgttgcrgtgggaacaagaaatccagaagctgacaggagatgaaaacttcactattccatattgggactggcgggatgcagaaaagtgtgacatttgcacagatgag

SEQ ID NO: 36278 - DNA, 201 bp, Homo sapiens
cagcaccccacaaatcctaacttactcagcccagcatcattcttctcctcttggcagattgtctgtagccgattggaggagtacaacagccatcagtcttyatgcaatggaacgcccgagggacctttacggcgtaatcctggaaaccatgacaaatccagaaccccaaggctcccctcttcagctgatgtagaattttgc

SEQ ID NO: 36279 - DNA, 201 bp, Homo sapiens
cagacctccgctggccatttccctagagcctgtgtctcctctaagaacctgatggagaaggaatgctgtccaccgtggagcggggacaggagtccctgtgrccagctttcaggcagaggttcctgtcagaatatccttctgtccaatgcaccacttgggcctcaatttcccttcacaggggtggatgaccgggagtcgtgg

SEQ ID NO: 36280 - DNA, 201 bp, Homo sapiens
ctgctgtggagtttccagacctccgctggccatttccctagagcctgtgtctcctctaagaacctgatggagaaggaatgctgtccaccgtggagcggggrcaggagtccctgtggccagctttcaggcagaggttcctgtcagaatatccttctgtccaatgcaccacttgggcctcaatttcccttcacaggggtggat

SEQ ID NO: 36281 - DNA, 201 bp, Homo sapiens
tattccatattgggactggcgggatgcagaaaagtgtgacatttgcacagatgagtacatgggaggtcagcaccccacaaatcctaacttactcagcccarcatcattcttctcctcttggcagattgtctgtagccgattggaggagtacaacagccatcagtctttatgcaatggaacgcccgagggacctttacggcg

SEQ ID NO: 36282 - DNA, 201 bp, Homo sapiens
ggaaactgcaagtttggcttttggggaccaaactgcacagagagacgactcttggtgagaagaaacatcttcgatttgagtgccccagagaaggacaaatkttttgcctacctcactttagcaaagcataccatcagctcagactatgtcatccccatagggacctatggccaaatgaaaaatggatcaacacccatgttt

SEQ ID NO: 36283 - DNA, 201 bp, Homo sapiens
gctggccatttccctagagcctgtgtctcctctaagaacctgatggagaaggaatgctgtccaccgtggagcggggacaggagtccctgtggccagctttsaggcagaggttcctgtcagaatatccttctgtccaatgcaccacttgggcctcaatttcccttcacaggggtggatgaccgggagtcgtggccttccgtc

SEQ ID NO: 36284 - DNA, 201 bp, Homo sapiens
ttttgtactgcctgctgtggagtttccagacctccgctggccatttccctagagcctgtgtctcctctaagaacctgatggagaaggaatgctgtccaccrtggagcggggacaggagtccctgtggccagctttcaggcagaggttcctgtcagaatatccttctgtccaatgcaccacttgggcctcaatttcccttca

SEQ ID NO: 36285 - DNA, 201 bp, Homo sapiens
tgaccgggagtcgtggccttccgtcttttataataggacctgccagtgctctggcaacttcatgggattcaactgtggaaactgcaagtttggcttttggrgaccaaactgcacagagagacgactcttggtgagaagaaacatcttcgatttgagtgccccagagaaggacaaattttttgcctacctcactttagcaaa

SEQ ID NO: 36286 - DNA, 201 bp, Homo sapiens
ccagaagctgacaggagatgaaaacttcactattccatattgggactggcgggatgcagaaaagtgtgacatttgcacagatgagtacatgggaggtcagyaccccacaaatcctaacttactcagcccagcatcattcttctcctcttggcagattgtctgtagccgattggaggagtacaacagccatcagtctttatg

SEQ ID NO: 36287 - DNA, 201 bp, Homo sapiens
gggacctttacggcgtaatcctggaaaccatgacaaatccagaaccccaaggctcccctcttcagctgatgtagaattttgcctgagtttgacccaatatsaatctggttccatggataaagctgccaatttcagctttagaaatacactggaagagatgggatttctccatattggctgggctggtctcaaactcctgac

SEQ ID NO: 36288 - DNA, 201 bp, Homo sapiens
ctctaagaacctgatggagaaggaatgctgtccaccgtggagcggggacaggagtccctgtggccagctttcaggcagaggttcctgtcagaatatccttytgtccaatgcaccacttgggcctcaatttcccttcacaggggtggatgaccgggagtcgtggccttccgtcttttataataggacctgccagtgctctgg

SEQ ID NO: 36289 - DNA, 201 bp, Homo sapiens
gagtccctgtggccagctttcaggcagaggttcctgtcagaatatccttctgtccaatgcaccacttgggcctcaatttcccttcacaggggtggatgacygggagtcgtggccttccgtcttttataataggacctgccagtgctctggcaacttcatgggattcaactgtggaaactgcaagtttggcttttggggacc

SEQ ID NO: 36290 - DNA, 201 bp, Homo sapiens
acaagaaatccagaagctgacaggagatgaaaacttcactattccatattgggactggcgggatgcagaaaagtgtgacatttgcacagatgagtacatgrgaggtcagcaccccacaaatcctaacttactcagcccagcatcattcttctcctcttggcagattgtctgtagccgattggaggagtacaacagccatca

SEQ ID NO: 36291 - DNA, 201 bp, Homo sapiens
gccagctttcaggcagaggttcctgtcagaatatccttctgtccaatgcaccacttgggcctcaatttcccttcacaggggtggatgaccgggagtcgtgrccttccgtcttttataataggacctgccagtgctctggcaacttcatgggattcaactgtggaaactgcaagtttggcttttggggaccaaactgcacag

SEQ ID NO: 36292 - DNA, 201 bp, Homo sapiens
agtccctgtggccagctttcaggcagaggttcctgtcagaatatccttctgtccaatgcaccacttgggcctcaatttcccttcacaggggtggatgaccrggagtcgtggccttccgtcttttataataggacctgccagtgctctggcaacttcatgggattcaactgtggaaactgcaagtttggcttttggggacca

SEQ ID NO: 36293 - DNA, 201 bp, Homo sapiens
ctggctgttttgtactgcctgctgtggagtttccagacctccgctggccatttccctagagcctgtgtctcctctaagaacctgatggagaaggaatgctrtccaccgtggagcggggacaggagtccctgtggccagctttcaggcagaggttcctgtcagaatatccttctgtccaatgcaccacttgggcctcaattt

SEQ ID NO: 36294 - DNA, 201 bp, Homo sapiens
cagctttcaggcagaggttcctgtcagaatatccttctgtccaatgcaccacttgggcctcaatttcccttcacaggggtggatgaccgggagtcgtggcyttccgtcttttataataggacctgccagtgctctggcaacttcatgggattcaactgtggaaactgcaagtttggcttttggggaccaaactgcacagag

SEQ ID NO: 36295 - DNA, 201 bp, Homo sapiens
catttccctagagcctgtgtctcctctaagaacctgatggagaaggaatgctgtccaccgtggagcggggacaggagtccctgtggccagctttcaggcakaggttcctgtcagaatatccttctgtccaatgcaccacttgggcctcaatttcccttcacaggggtggatgaccgggagtcgtggccttccgtcttttat

SEQ ID NO: 36296 - DNA, 201 bp, Homo sapiens
gcaccccacaaatcctaacttactcagcccagcatcattcttctcctcttggcagattgtctgtagccgattggaggagtacaacagccatcagtctttabgcaatggaacgcccgagggacctttacggcgtaatcctggaaaccatgacaaatccagaaccccaaggctcccctcttcagctgatgtagaattttgcct

SEQ ID NO: 36297 - DNA, 201 bp, Homo sapiens
tccctgtggccagctttcaggcagaggttcctgtcagaatatccttctgtccaatgcaccacttgggcctcaatttcccttcacaggggtggatgaccggkagtcgtggccttccgtcttttataataggacctgccagtgctctggcaacttcatgggattcaactgtggaaactgcaagtttggcttttggggaccaaa

SEQ ID NO: 36298 - DNA, 201 bp, Homo sapiens
accacttgggcctcaatttcccttcacaggggtggatgaccgggagtcgtggccttccgtcttttataataggacctgccagtgctctggcaacttcatgrgattcaactgtggaaactgcaagtttggcttttggggaccaaactgcacagagagacgactcttggtgagaagaaacatcttcgatttgagtgccccaga

SEQ ID NO: 36299 - DNA, 201 bp, Homo sapiens
cgtcttttataataggacctgccagtgctctggcaacttcatgggattcaactgtggaaactgcaagtttggcttttggggaccaaactgcacagagagaygactcttggtgagaagaaacatcttcgatttgagtgccccagagaaggacaaattttttgcctacctcactttagcaaagcataccatcagctcagacta

SEQ ID NO: 36300 - DNA, 201 bp, Homo sapiens
taacttactcagcccagcatcattcttctcctcttggcagattgtctgtagccgattggaggagtacaacagccatcagtctttatgcaatggaacgcccragggacctttacggcgtaatcctggaaaccatgacaaatccagaaccccaaggctcccctcttcagctgatgtagaattttgcctgagtttgacccaata

SEQ ID NO: 36301 - DNA, 201 bp, Homo sapiens
tggccagctttcaggcagaggttcctgtcagaatatccttctgtccaatgcaccacttgggcctcaatttcccttcacaggggtggatgaccgggagtcgyggccttccgtcttttataataggacctgccagtgctctggcaacttcatgggattcaactgtggaaactgcaagtttggcttttggggaccaaactgcac

SEQ ID NO: 36302 - DNA, 201 bp, Homo sapiens
attggaggagtacaacagccatcagtctttatgcaatggaacgcccgagggacctttacggcgtaatcctggaaaccatgacaaatccagaaccccaaggstcccctcttcagctgatgtagaattttgcctgagtttgacccaatatgaatctggttccatggataaagctgccaatttcagctttagaaatacactgga

SEQ ID NO: 36303 - DNA, 201 bp, Homo sapiens
gaggagtacaacagccatcagtctttatgcaatggaacgcccgagggacctttacggcgtaatcctggaaaccatgacaaatccagaaccccaaggctccsctcttcagctgatgtagaattttgcctgagtttgacccaatatgaatctggttccatggataaagctgccaatttcagctttagaaatacactggaagag

SEQ ID NO: 36304 - DNA, 201 bp, Homo sapiens
atgaaaaatggatcaacacccatgtttaacgacatcaatatttatgacctctttgtctggatgcattattatgtgtcaatggatgcactgcttgggggatmtgaaatctggagagacattgattttgcccatgaagcaccagcttttctgccttggcatagactcttcttgttgcggtgggaacaagaaatccagaagctg

SEQ ID NO: 36305 - DNA, 201 bp, Homo sapiens
gtcaatggatgcactgcttgggggatctgaaatctggagagacattgattttgcccatgaagcaccagcttttctgccttggcatagactcttcttgttgbggtgggaacaagaaatccagaagctgacaggagatgaaaacttcactattccatattgggactggcgggatgcagaaaagtgtgacatttgcacagatga

SEQ ID NO: 36306 - DNA, 201 bp, Homo sapiens
tgtgtcaatggatgcactgcttgggggatctgaaatctggagagacattgattttgcccatgaagcaccagcttttctgccttggcatagactcttcttgwtgcggtgggaacaagaaatccagaagctgacaggagatgaaaacttcactattccatattgggactggcgggatgcagaaaagtgtgacatttgcacaga

SEQ ID NO: 36307 - DNA, 201 bp, Homo sapiens
ttatgacctctttgtctggatgcattattatgtgtcaatggatgcactgcttgggggatctgaaatctggagagacattgattttgcccatgaagcaccarcttttctgccttggcatagactcttcttgttgcggtgggaacaagaaatccagaagctgacaggagatgaaaacttcactattccatattgggactggcg

SEQ ID NO: 36308 - DNA, 201 bp, Homo sapiens
ccaattagccagttcctgcagaccttgtgaggactagaggaagaatgctcctggctgttttgtactgcctgctgtggagtttccagacctccgctggccawttccctagagcctgtgtctcctctaagaacctgatggagaaggaatgctgtccaccgtggagcggggacaggagtccctgtggccagctttcaggcagag

SEQ ID NO: 36309 - DNA, 201 bp, Homo sapiens
atcagctcagactatgtcatccccatagggacctatggccaaatgaaaaatggatcaacacccatgtttaacgacatcaatatttatgacctctttgtctrgatgcattattatgtgtcaatggatgcactgcttgggggatctgaaatctggagagacattgattttgcccatgaagcaccagcttttctgccttggcat

SEQ ID NO: 36310 - DNA, 201 bp, Homo sapiens
gcataccatcagctcagactatgtcatccccatagggacctatggccaaatgaaaaatggatcaacacccatgtttaacgacatcaatatttatgacctcwttgtctggatgcattattatgtgtcaatggatgcactgcttgggggatctgaaatctggagagacattgattttgcccatgaagcaccagcttttctgcc

SEQ ID NO: 36311 - DNA, 201 bp, Homo sapiens
ttagccagttcctgcagaccttgtgaggactagaggaagaatgctcctggctgttttgtactgcctgctgtggagtttccagacctccgctggccatttcyctagagcctgtgtctcctctaagaacctgatggagaaggaatgctgtccaccgtggagcggggacaggagtccctgtggccagctttcaggcagaggttc

SEQ ID NO: 36312 - DNA, 201 bp, Homo sapiens
tcagaatatccttctgtccaatgcaccacttgggcctcaatttcccttcacaggggtggatgaccgggagtcgtggccttccgtcttttataataggaccygccagtgctctggcaacttcatgggattcaactgtggaaactgcaagtttggcttttggggaccaaactgcacagagagacgactcttggtgagaagaaa

SEQ ID NO: 36313 - DNA, 201 bp, Homo sapiens
ggtgagaagaaacatcttcgatttgagtgccccagagaaggacaaattttttgcctacctcactttagcaaagcataccatcagctcagactatgtcatcyccatagggacctatggccaaatgaaaaatggatcaacacccatgtttaacgacatcaatatttatgacctctttgtctggatgcattattatgtgtcaat

SEQ ID NO: 36314 - DNA, 201 bp, Homo sapiens
aacttactcagcccagcatcattcttctcctcttggcagattgtctgtagccgattggaggagtacaacagccatcagtctttatgcaatggaacgcccgrgggacctttacggcgtaatcctggaaaccatgacaaatccagaaccccaaggctcccctcttcagctgatgtagaattttgcctgagtttgacccaatat

SEQ ID NO: 36315 - DNA, 201 bp, Homo sapiens
aagacatgtgataatcactgtagtagtagctggaaagagaaatctgtgactccaattagccagttcctgcagaccttgtgaggactagaggaagaatgctyctggctgttttgtactgcctgctgtggagtttccagacctccgctggccatttccctagagcctgtgtctcctctaagaacctgatggagaaggaatgct

SEQ ID NO: 36316 - DNA, 201 bp, Homo sapiens
tatttatgacctctttgtctggatgcattattatgtgtcaatggatgcactgcttgggggatctgaaatctggagagacattgattttgcccatgaagcamcagcttttctgccttggcatagactcttcttgttgcggtgggaacaagaaatccagaagctgacaggagatgaaaacttcactattccatattgggactg

SEQ ID NO: 36317 - DNA, 201 bp, Homo sapiens
agcatcattcttctcctcttggcagattgtctgtagccgattggaggagtacaacagccatcagtctttatgcaatggaacgcccgagggacctttacggmgtaatcctggaaaccatgacaaatccagaaccccaaggctcccctcttcagctgatgtagaattttgcctgagtttgacccaatatgaatctggttccat

SEQ ID NO: 36318 - DNA, 201 bp, Homo sapiens
aacgcccgagggacctttacggcgtaatcctggaaaccatgacaaatccagaaccccaaggctcccctcttcagctgatgtagaattttgcctgagtttgrcccaatatgaatctggttccatggataaagctgccaatttcagctttagaaatacactggaagagatgggatttctccatattggctgggctggtctcaa

SEQ ID NO: 36319 - DNA, 201 bp, Homo sapiens
ttcagctttagaaatacactggaaggatttgctagtccacttactgggatagcggatgcctctcaaagcagcatgcacaatgccttgcacatctatatgamtggaacaatgtcccaggtacagggatctgccaacgatcctatcttccttcttcaccatgcatttgttgacagtatttttgagcagtggctccgaaggcac

SEQ ID NO: 36320 - DNA, 201 bp, Homo sapiens; identical to SEQ ID NO: 36274

SEQ ID NO: 36321 - DNA, 201 bp, Homo sapiens
gagcagtggctccgaaggcaccgtcctcttcaagaagtttatccagaagccaatgcacccattggacataaccgggaatcctacatggttccttttatacyactgtacagaaatggtgatttctttatttcatccaaagatctgggctatgactatagctatctacaagattcagacccagactcttttcaagactacatt

SEQ ID NO: 36322 - DNA, 201 bp, Homo sapiens
tgagcagtggctccgaaggcaccgtcctcttcaagaagtttatccagaagccaatgcacccattggacataaccgggaatcctacatggttccttttatamcactgtacagaaatggtgatttctttatttcatccaaagatctgggctatgactatagctatctacaagattcagacccagactcttttcaagactacat

SEQ ID NO: 36323 - DNA, 201 bp, Homo sapiens
caccatgcatttgttgacagtatttttgagcagtggctccgaaggcaccgtcctcttcaagaagtttatccagaagccaatgcacccattggacataaccrggaatcctacatggttccttttataccactgtacagaaatggtgatttctttatttcatccaaagatctgggctatgactatagctatctacaagattca

SEQ ID NO: 36324 - DNA, 201 bp, Homo sapiens; identical to SEQ ID NO: 36276

SEQ ID NO: 36325 - DNA, 201 bp, Homo sapiens; identical to SEQ ID NO: 36279

SEQ ID NO: 36326 - DNA, 201 bp, Homo sapiens; identical to SEQ ID NO: 36280

SEQ ID NO: 36327 - DNA, 201 bp, Homo sapiens; identical to SEQ ID NO: 36281

SEQ ID NO: 36328 - DNA, 201 bp, Homo sapiens; identical to SEQ ID NO: 36282

SEQ ID NO: 36329 - DNA, 201 bp, Homo sapiens; identical to SEQ ID NO: 36284

SEQ ID NO: 36330 - DNA, 201 bp, Homo sapiens; identical to SEQ ID NO: 36288

SEQ ID NO: 36331 - DNA, 201 bp, Homo sapiens
gggacctttacggcgtaatcctggaaaccatgacaaatccagaaccccaaggctcccctcttcagctgatgtagaattttgcctgagtttgacccaatatsaatctggttccatggataaagctgccaatttcagctttagaaatacactggaaggatttgctagtccacttactgggatagcggatgcctctcaaagcag

SEQ ID NO: 36332 - DNA, 201 bp, Homo sapiens; identical to SEQ ID NO: 36289

SEQ ID NO: 36333 - DNA, 201 bp, Homo sapiens; identical to SEQ ID NO: 36290

SEQ ID NO: 36334 - DNA, 201 bp, Homo sapiens
ccaatatgaatctggttccatggataaagctgccaatttcagctttagaaatacactggaaggatttgctagtccacttactgggatagcggatgcctctyaaagcagcatgcacaatgccttgcacatctatatgaatggaacaatgtcccaggtacagggatctgccaacgatcctatcttccttcttcaccatgcatt

SEQ ID NO: 36335 - DNA, 201 bp, Homo sapiens; identical to SEQ ID NO: 36291

SEQ ID NO: 36336 - DNA, 201 bp, Homo sapiens; identical to SEQ ID NO: 36293

SEQ ID NO: 36337 - DNA, 201 bp, Homo sapiens; identical to SEQ ID NO: 36296

SEQ ID NO: 36338 - DNA, 201 bp, Homo sapiens; identical to SEQ ID NO: 36295

SEQ ID NO: 36339 - DNA, 201 bp, Homo sapiens; identical to SEQ ID NO: 36297

SEQ ID NO: 36340 - DNA, 201 bp, Homo sapiens
tttcagctttagaaatacactggaaggatttgctagtccacttactgggatagcggatgcctctcaaagcagcatgcacaatgccttgcacatctatatgwatggaacaatgtcccaggtacagggatctgccaacgatcctatcttccttcttcaccatgcatttgttgacagtatttttgagcagtggctccgaaggca

SEQ ID NO: 36341 - DNA, 201 bp, Homo sapiens; identical to SEQ ID NO: 36298

SEQ ID NO: 36342 - DNA, 201 bp, Homo sapiens; identical to SEQ ID NO: 36299

SEQ ID NO: 36343 - DNA, 201 bp, Homo sapiens; identical to SEQ ID NO: 36302

SEQ ID NO: 36344 - DNA, 201 bp, Homo sapiens; identical to SEQ ID NO: 36301

SEQ ID NO: 36345 - DNA, 201 bp, Homo sapiens
gaggagtacaacagccatcagtctttatgcaatggaacgcccgagggacctttacggcgtaatcctggaaaccatgacaaatccagaaccccaaggctccsctcttcagctgatgtagaattttgcctgagtttgacccaatatgaatctggttccatggataaagctgccaatttcagctttagaaatacactggaagga

SEQ ID NO: 36346 - DNA, 201 bp, Homo sapiens
cttccttcttcaccatgcatttgttgacagtatttttgagcagtggctccgaaggcaccgtcctcttcaagaagtttatccagaagccaatgcacccattrgacataaccgggaatcctacatggttccttttataccactgtacagaaatggtgatttctttatttcatccaaagatctgggctatgactatagctatct

SEQ ID NO: 36347 - DNA, 201 bp, Homo sapiens
tatatgaatggaacaatgtcccaggtacagggatctgccaacgatcctatcttccttcttcaccatgcatttgttgacagtatttttgagcagtggctccraaggcaccgtcctcttcaagaagtttatccagaagccaatgcacccattggacataaccgggaatcctacatggttccttttataccactgtacagaaat

SEQ ID NO: 36348 - DNA, 201 bp, Homo sapiens
tacactggaaggatttgctagtccacttactgggatagcggatgcctctcaaagcagcatgcacaatgccttgcacatctatatgaatggaacaatgtccyaggtacagggatctgccaacgatcctatcttccttcttcaccatgcatttgttgacagtatttttgagcagtggctccgaaggcaccgtcctcttcaaga

SEQ ID NO: 36349 - DNA, 201 bp, Homo sapiens
ggaaggatttgctagtccacttactgggatagcggatgcctctcaaagcagcatgcacaatgccttgcacatctatatgaatggaacaatgtcccaggtayagggatctgccaacgatcctatcttccttcttcaccatgcatttgttgacagtatttttgagcagtggctccgaaggcaccgtcctcttcaagaagttta

SEQ ID NO: 36350 - DNA, 201 bp, Homo sapiens
tgagtttgacccaatatgaatctggttccatggataaagctgccaatttcagctttagaaatacactggaaggatttgctagtccacttactgggatagcrgatgcctctcaaagcagcatgcacaatgccttgcacatctatatgaatggaacaatgtcccaggtacagggatctgccaacgatcctatcttccttcttc

SEQ ID NO: 36351 - DNA, 201 bp, Homo sapiens; identical to SEQ ID NO: 36308

SEQ ID NO: 36352 - DNA, 201 bp, Homo sapiens; identical to SEQ ID NO: 36311

SEQ ID NO: 36353 - DNA, 201 bp, Homo sapiens
aatctggttccatggataaagctgccaatttcagctttagaaatacactggaaggatttgctagtccacttactgggatagcggatgcctctcaaagcagmatgcacaatgccttgcacatctatatgaatggaacaatgtcccaggtacagggatctgccaacgatcctatcttccttcttcaccatgcatttgttgaca

SEQ ID NO: 36354 - DNA, 201 bp, Homo sapiens; identical to SEQ ID NO: 36313

SEQ ID NO: 36355 - DNA, 201 bp, Homo sapiens
atttgctagtccacttactgggatagcggatgcctctcaaagcagcatgcacaatgccttgcacatctatatgaatggaacaatgtcccaggtacagggayctgccaacgatcctatcttccttcttcaccatgcatttgttgacagtatttttgagcagtggctccgaaggcaccgtcctcttcaagaagtttatccaga

SEQ ID NO: 36356 - DNA, 201 bp, Homo sapiens; identical to SEQ ID NO: 36317

SEQ ID NO: 36357 - DNA, 201 bp, Homo sapiens
tttagaaatacactggaaggatttgctagtccacttactgggatagcggatgcctctcaaagcagcatgcacaatgccttgcacatctatatgaatggaamaatgtcccaggtacagggatctgccaacgatcctatcttccttcttcaccatgcatttgttgacagtatttttgagcagtggctccgaaggcaccgtcct

SEQ ID NO: 36358 - DNA, 201 bp, Homo sapiens
aacgcccgagggacctttacggcgtaatcctggaaaccatgacaaatccagaaccccaaggctcccctcttcagctgatgtagaattttgcctgagtttgrcccaatatgaatctggttccatggataaagctgccaatttcagctttagaaatacactggaaggatttgctagtccacttactgggatagcggatgcctc

SEQ ID NO: 36359 - DNA, 201 bp, Homo sapiens; identical to SEQ ID NO: 36272

SEQ ID NO: 36360 - DNA, 201 bp, Homo sapiens; identical to SEQ ID NO: 36273

SEQ ID NO: 36361 - DNA, 201 bp, Homo sapiens; identical to SEQ ID NO: 36275

SEQ ID NO: 36362 - DNA, 201 bp, Homo sapiens; identical to SEQ ID NO: 36277

SEQ ID NO: 36363 - DNA, 201 bp, Homo sapiens; identical to SEQ ID NO: 36278

SEQ ID NO: 36364 - DNA, 201 bp, Homo sapiens
aaagctgccaatttcagctttagaaatacactggaaggatttgctagtccacttactgggatagcggatgcctctcaaagcagcatgcacaatgccttgcrcatctatatgaatggaacaatgtcccaggtacagggatctgccaacgatcctatcttccttcttcaccatgcatttgttgacagtatttttgagcagtgg

SEQ ID NO: 36365 - DNA, 201 bp, Homo sapiens
  misc_feature (1)...(201): n = A,T,C or G
tctttatttcatccaaagatctgggctatgactatagctatctacaagattcagacccagactcttttcaagactacattaagtcctatttggaacaagcnagtcggatctggtcatggctccttggggcggcgatggtaggggccgtcctcactgccctgctggcagggcttgtgagcttgctgtgtcgtcacaagagaa

SEQ ID NO: 36366 - DNA, 201 bp, Homo sapiens
atagctatctacaagattcagacccagactcttttcaagactacattaagtcctatttggaacaagcgagtcggatctggtcatggctccttggggcggcsatggtaggggccgtcctcactgccctgctggcagggcttgtgagcttgctgtgtcgtcacaagagaaagcagcttcctgaagaaaagcagccactcctca

SEQ ID NO: 36367 - DNA, 201 bp, Homo sapiens
  misc_feature (1)...(201): n = A,T,C or G
cagagccatttataaaaggcttaggcaatagagtagggccaaaaagcctgacctcactctaactcaaagtaatgtccaggttcccagagaatatctgctgntatttttctgtaaagaccatttgcaaaattgtaacctaatacaaagtgtagccttcttccaactcaggtagaacacacctgtctttgtcttgctgttttc

SEQ ID NO: 36368 - DNA, 201 bp, Homo sapiens
  misc_feature (1)...(201): n = A,T,C or G
tgacctcactctaactcaaagtaatgtccaggttcccagagaatatctgctggtatttttctgtaaagaccatttgcaaaattgtaacctaatacaaagtntagccttcttccaactcaggtagaacacacctgtctttgtcttgctgttttcactcagcccttttaacattttcccctaagcccatatgtctaaggaaag

SEQ ID NO: 36369 - DNA, 201 bp, Homo sapiens; identical to SEQ ID NO: 36283

SEQ ID NO: 36370 - DNA, 201 bp, Homo sapiens; identical to SEQ ID NO: 36285

SEQ ID NO: 36371 - DNA, 201 bp, Homo sapiens; identical to SEQ ID NO: 36286

SEQ ID NO: 36372 - DNA, 201 bp, Homo sapiens; identical to SEQ ID NO: 36292

SEQ ID NO: 36373 - DNA, 201 bp, Homo sapiens; identical to SEQ ID NO: 36294

SEQ ID NO: 36374 - DNA, 201 bp, Homo sapiens; identical to SEQ ID NO: 36300

SEQ ID NO: 36375 - DNA, 201 bp, Homo sapiens; identical to SEQ ID NO: 36304

SEQ ID NO: 36376 - DNA, 201 bp, Homo sapiens; identical to SEQ ID NO: 36305

SEQ ID NO: 36377 - DNA, 201 bp, Homo sapiens; identical to SEQ ID NO: 36306

SEQ ID NO: 36378 - DNA, 201 bp, Homo sapiens; identical to SEQ ID NO: 36307

SEQ ID NO: 36379 - DNA, 201 bp, Homo sapiens; identical to SEQ ID NO: 36309

SEQ ID NO: 36380 - DNA, 201 bp, Homo sapiens; identical to SEQ ID NO: 36310

SEQ ID NO: 36381 - DNA, 201 bp, Homo sapiens; identical to SEQ ID NO: 36312

SEQ ID NO: 36382 - DNA, 201 bp, Homo sapiens
aatttcagctttagaaatacactggaaggatttgctagtccacttactgggatagcggatgcctctcaaagcagcatgcacaatgccttgcacatctataygaatggaacaatgtcccaggtacagggatctgccaacgatcctatcttccttcttcaccatgcatttgttgacagtatttttgagcagtggctccgaagg

SEQ ID NO: 36383 - DNA, 201 bp, Homo sapiens; identical to SEQ ID NO: 36314

SEQ ID NO: 36384 - DNA, 201 bp, Homo sapiens; identical to SEQ ID NO: 36316

SEQ ID NO: 36385 - DNA, 201 bp, Homo sapiens; identical to SEQ ID NO: 36315

SEQ ID NO: 36386 - DNA, 201 bp, Homo sapiens
taaagctgccaatttcagctttagaaatacactggaaggatttgctagtccacttactgggatagcggatgcctctcaaagcagcatgcacaatgccttgyacatctatatgaatggaacaatgtcccaggtacagggatctgccaacgatcctatcttccttcttcaccatgcatttgttgacagtatttttgagcagtg

SEQ ID NO: 36387 - DNA, 201 bp, Homo sapiens
agataaagcagcaaccaagaaaccagttgtgaacataattactccgtctcatgtagaggagcgggggtgccagctaacaataacattttctgttccaaacraagatgttttccaagaactagaaaaaagaggagtggtttgtgacaagcggaatccaaatggcattcgagtggctccagttcctctctataattctttcca

SEQ ID NO: 36388 - DNA, 198 bp, Homo sapiens
tgtttataaatttaccaatctgctcacttctatacttgactctgcagaaacaaaaaattagcagtgttttctagaacaacttaagcaaattatactgaaarctgctgtggttatttcagtattattcgatttttaattattgaaagtatgtcaccattgaccacatgtaactaacaataaataatataccttacagaa

SEQ ID NO: 36389 - DNA, 112 bp, Homo sapiens
aaattatactgaaagctgctgtggttatttcagtattattcgatttttaattattgaaagtatgtcaccattgaccacatgtaactaacaataaataatayaccttacagaa

SEQ ID NO: 36390 - DNA, 201 bp, Homo sapiens
cgatataaaattcttctagaagccaaagccttcccttctgatcattatgctattgagtcacaactacaacttcacggacttaacattgaagaaagtatgcrgatgataaagccaagagagggggaagaaaccttaagaatagaggatatccttgaagtaattgagaaggaaggagactcaattgcagtgatcctgttcagt

SEQ ID NO: 36391 - DNA, 201 bp, Homo sapiens
tttaattaggaatggaatgcaacagatttggacaagtcaaggacaagagctttagagagaccaaagagtttttcactgttaaagtgtccagtatgtagccragaaccatatggagaacatcaaatacagtggaacaaatgtaactgctattgatgtcacactttgtgaagtagtctttgttgcttaaaaagggtgacatct

SEQ ID NO: 36392 - DNA, 201 bp, Homo sapiens; identical to SEQ ID NO: 36390

SEQ ID NO: 36393 - DNA, 201 bp, Homo sapiens; identical to SEQ ID NO: 36387

SEQ ID NO: 36394 - DNA, 198 bp, Homo sapiens; identical to SEQ ID NO: 36388

SEQ ID NO: 36395 - DNA, 112 bp, Homo sapiens; identical to SEQ ID NO: 36389

SEQ ID NO: 36396 - DNA, 201 bp, Homo sapiens; identical to SEQ ID NO: 36390

SEQ ID NO: 36397 - DNA, 201 bp, Homo sapiens
tggctcaacaagaacactgtggagaaggtgaacgtcaagctgcaggtggacccgtaccggctgaagaatgggcggggcatcatcctgctggctgagggtcrgctggttaacctggcttgtgccatgggtcaccctagcttcgtgaggagtaactccttcaccagccaggtgatggcgcagatcaagctgtggacccaccca

SEQ ID NO: 36398 - DNA, 201 bp, Homo sapiens; identical to SEQ ID NO: 36397

SEQ ID NO: 36399 - DNA, 201 bp, Homo sapiens
tttttaataatactctgagtttcatagtgattgaggcataactatcaatcacaaaagtatattcaaaaattatattttgaacaactcgaatcactcatttrtttccatattaaaatcacaaactcatccattaatgtagataaagcactgtttggatatgagatgtagcaaattccaatacattattggacttccatttgg

SEQ ID NO: 36400 - DNA, 201 bp, Homo sapiens
tccaaagttcaggctcaatacccaggagtttgtatcaacaatgaagttgttgagccaagtgctgaacaaattgccaaatacaaagagcttgtagccaagayatcgaacctcgagaacgtaaagtttgcttggcataaggagacatcatctgaataccaaagtagaatgttggagaaaaaggagcttcaaaagtgggacttt

SEQ ID NO: 36401 - DNA, 201 bp, Homo sapiens
ttctatttcttacaaaacaaccgtataggggttaaagtatcagtgcaaagtcccgttcaaatattgactcagtaatgagctctacaagccagcctttgtgrcatgttaaattcaaaacaagcttagcatttttttttttttttggatagaaactggtgggggtggggaaagaaagagggaactgggaagagaaggagggga

SEQ ID NO: 36402 - DNA, 201 bp, Homo sapiens
aactcctataagaccaagagtcatctttggactgtaggatttcaggggggttttgaaaacaaatttgatgtttcttatttttaataataacgctctgttatttttgacataaacagtacatttaataattaataaataaatattttaagtatgtaaataattagtactccctgtcacaaacaaaacaaaagtaaggtttta

SEQ ID NO: 36403 - DNA, 201 bp, Homo sapiens
tgagatgtagcaaattccaatacattattggacttccatttggaatcatatgggatactgctggtcttatcctgtccctcctccaggtagagagaccacawgcaggctcaacataacataagctagaaaaattagatgactgaatttctatggcatattgataataaaattcattccatttgctgattgtctgaaattttc

SEQ ID NO: 36404 - DNA, 201 bp, Homo sapiens
gcttttaccagatttctaggaattgggtaaatgcaaggttctagaaaaccttcaatgcattttgatactttatagtttcttatgtcactctcaagaactcytataagaccaagagtcatctttggactgtaggatttcaggggggttttgaaaacaaatttgatgtttcttatttttaataataacgctctgttatttttg

SEQ ID NO: 36405 - DNA, 116 bp, Homo sapiens
gatcgaggcttcagtgagatatggctgagacactgctctcagcctggatgacagagtgagaacctgtctcaaacaagagaaaaaaataaatcaaatgctaytcaaaattctcatcc

SEQ ID NO: 36406 - DNA, 201 bp, Homo sapiens; identical to SEQ ID NO: 36401

SEQ ID NO: 36407 - DNA, 201 bp, Homo sapiens
tgggtgatgtggacgccaaggcccagaagctgcttgttggcgtggatgagaaactgaatcctgaggacatcaaaaaacacctgttggtccacgcccctgamgacaagaaagaaattctggccagttttatctccggcctcttcaatttctacgaggacttgtacttcacctacctcgagatcaatccccttgtagtgacca

SEQ ID NO: 36408 - DNA, 201 bp, Homo sapiens
tcatgaccagcatctgcgatgagcgaggacaggagctcatctacgcgggcatgcccatcactgaggtcttcaaggaagagatgggcattggcggggtcctyggcctcctctggttccagaaaaggttgcctaagtactcttgccagttcattgagatgtgtctgatggtgacagctgatcacgggccagccgtctctggag

SEQ ID NO: 36409 - DNA, 201 bp, Homo sapiens
ccgcttgctgcaggaccacccctggctgctcagccagaacttggtagtcaagccagaccagctgatcaaacgtcgtggaaaacttggtctcgttggggtcracctcactctggatggggtcaagtcctggctgaagccacggctgggacaggaagccacagttggcaaggccacaggcttcctcaagaactttctgatcga

SEQ ID NO: 36410 - DNA, 201 bp, Homo sapiens
gttaaacatttttttctcctttggaggaagggaatgaaacatttatggcctcaagatactatacatttaaagcaccccaatgtctctctttttttttttttacttccctttcttcttccttatataacatgaagaacattgtattaatctgatttttaaagatctttttgtatgttacgtgttaagggcttgtttggtatc

SEQ ID NO: 36411 - DNA, 201 bp, Homo sapiens
gctgtatcgtcatccgtgggatgatatttcatatgttcttccggaacacatgagcatgtaacagagccaggaaccctactgcagtaaactgaagacaagawctcttcccccaagaaaaagtgtacagacagctggcagtggagcctgctttatttagcaggggcctggaatgtaaacagccactggggtacaggcaccgaa

SEQ ID NO: 36412 - DNA, 201 bp, Homo sapiens
cgggctccacattcatggatcatgtgttacgctatcaggacactccaggagtcaaaatgattgtggttcttggagagattgggggcactgaggaatataaratttgccggggcatcaaggagggccgcctcactaagcccatcgtctgctggtgcatcgggacgtgtgccaccatgttctcctctgaggtccagtttggcc

SEQ ID NO: 36413 - DNA, 201 bp, Homo sapiens
attgtggttcttggagagattgggggcactgaggaatataagatttgccggggcatcaaggagggccgcctcactaagcccatcgtctgctggtgcatcgrgacgtgtgccaccatgttctcctctgaggtccagtttggccatgctggagcttgtgccaaccaggcttctgaaactgcagtagccaagaaccaggctttg

SEQ ID NO: 36414 - DNA, 194 bp, Homo sapiens
tgtcttgtgtcttatgttctctgtatttatgcagctgatttgtctgtctgtaactgaagtgtgggtccaaggactcctaactactttgcatctgtaatccmcaaagattctgggcagctgccacctcagtctcttctctgtattatcatagtctggtttaaataaactatatagtaacaatgaaggcatactgc

SEQ ID NO: 36415 - DNA, 201 bp, Homo sapiens
tctaccctttcactggggaccacaagcagaagttttactgggggcacaaagagatcctgatccctgtcttcaagaacatggctgatgccatgaggaagcayccggaggtagatgtgctcatcaactttgcctctctccgctctgcctatgacagcaccatggagaccatgaactatgcccagatccggaccatcgccatca

SEQ ID NO: 36416 - DNA, 201 bp, Homo sapiens
atttttaaagatctttttgtatgttacgtgttaagggcttgtttggtatcccactgaaatgttctgtgttgcagaccagagtctgtttatgtcagggggakggggccattgcatccttagccattgtcacaaaatatgtggagtagtaacttaatatgtaaagttgtaacatacatacatttaaaatggaaatgcagaaag

SEQ ID NO: 36417 - DNA, 201 bp, Homo sapiens
ctgcagtagccaagaaccaggctttgaaggaagcaggagtgtttgtgccccggagctttgatgagcttggagagatcatccagtctgtatacgaagatctygtggccaatggagtcattgtacctgcccaggaggtgccgcccccaaccgtgcccatggactactcctgggccagggagcttggtttgatccgcaaacctg

SEQ ID NO: 36418 - DNA, 201 bp, Homo sapiens
caccaccctcttcagccgccacaccaaggccattgtgtggggcatgcagacccgggccgtgcaaggcatgctggactttgactatgtctgctcccgagacragccctcagtggctgccatggtctaccctttcactggggaccacaagcagaagttttactgggggcacaaagagatcctgatccctgtcttcaagaacat

SEQ ID NO: 36419 - DNA, 201 bp, Homo sapiens
tgaatgtagatggtctcatcggagtcgcatttgtagacatgcttagaaactgtgggtcctttactcgggaggaagctgatgaatatattgacattggagcsctcaatggcatctttgtgctgggaaggagtatggggttcattggacactatcttgatcagaagaggctgaagcaggggctgtatcgtcatccgtgggatg

SEQ ID NO: 36420 - DNA, 201 bp, Homo sapiens; identical to SEQ ID NO: 36407

SEQ ID NO: 36421 - DNA, 201 bp, Homo sapiens; identical to SEQ ID NO: 36408

SEQ ID NO: 36422 - DNA, 201 bp, Homo sapiens; identical to SEQ ID NO: 36409

SEQ ID NO: 36423 - DNA, 115 bp, Homo sapiens
gttaaacatttttttctcctttggaggaagggaatgaaacatttatggcctcaagatactatacatttaaagcaccccaatgtctctctttttttttttttacttccctttcttc

SEQ ID NO: 36424 - DNA, 201 bp, Homo sapiens; identical to SEQ ID NO: 36411

SEQ ID NO: 36425 - DNA, 201 bp, Homo sapiens; identical to SEQ ID NO: 36412

SEQ ID NO: 36426 - DNA, 201 bp, Homo sapiens; identical to SEQ ID NO: 36413

SEQ ID NO: 36427 - DNA, 201 bp, Homo sapiens; identical to SEQ ID NO: 36415

SEQ ID NO: 36428 - DNA, 201 bp, Homo sapiens; identical to SEQ ID NO: 36417

SEQ ID NO: 36429 - DNA, 201 bp, Homo sapiens; identical to SEQ ID NO: 36419

SEQ ID NO: 36430 - DNA, 201 bp, Homo sapiens; identical to SEQ ID NO: 36418

SEQ ID NO: 36431 - DNA, 201 bp, Homo sapiens; identical to SEQ ID NO: 36407

SEQ ID NO: 36432 - DNA, 201 bp, Homo sapiens; identical to SEQ ID NO: 36408

SEQ ID NO: 36433 - DNA, 201 bp, Homo sapiens; identical to SEQ ID NO: 36409

SEQ ID NO: 36434 - DNA, 115 bp, Homo sapiens; identical to SEQ ID NO: 36423

SEQ ID NO: 36435 - DNA, 201 bp, Homo sapiens; identical to SEQ ID NO: 36411

SEQ ID NO: 36436 - DNA, 201 bp, Homo sapiens; identical to SEQ ID NO: 36412

SEQ ID NO: 36437 - DNA, 201 bp, Homo sapiens; identical to SEQ ID NO: 36413

SEQ ID NO: 36438 - DNA, 201 bp, Homo sapiens; identical to SEQ ID NO: 36415

SEQ ID NO: 36439 - DNA, 201 bp, Homo sapiens; identical to SEQ ID NO: 36417

SEQ ID NO: 36440 - DNA, 201 bp, Homo sapiens; identical to SEQ ID NO: 36419

SEQ ID NO: 36441 - DNA, 201 bp, Homo sapiens; identical to SEQ ID NO: 36418

SEQ ID NO: 36442 - DNA, 143 bp, Homo sapiens
ggctggccccgctcagtcacccgcagcaggcgtgcagtttccsggctctccgcgcggccggggaaggtcagcgccgtaatggcgttcttggcgtcgggaccctacctgacccatcagcaaaaggtgttgcggctttataagcg

SEQ ID NO: 36443 - DNA, 201 bp, Homo sapiens
ggcaatgtatcctgattactttgccaagagagaacagtggaagaaactgcggagggaaagctgggaacgagaggttaagcagctgcaggaggaaacgccayctggtggtcctttaactgaagctttgccccctgcccgaaaggaaggtgatttgcccccactgtggtggtatattgtgaccagaccccgggagcggcccat

SEQ ID NO: 36444 - DNA, 115 bp, Homo sapiens
ggctggccccgctcrgtcacccgcagcaggcgtgcagtttcccggctctccgcgcggccggggaaggtcagcgccgtaatggcgttcttggcgtcgggaccctacctgacccatc

SEQ ID NO: 36445 - DNA, 128 bp, Homo sapiens
ggctggccccgctcagtcacccgcagcrggcgtgcagtttcccggctctccgcgcggccggggaaggtcagcgccgtaatggcgttcttggcgtcgggaccctacctgacccatcagcaaaaggtgtt

SEQ ID NO: 36446 - DNA, 201 bp, Homo sapiens
atttaagagttcttcggggaacatttcatcatactgttgcagtatttttgatcttcccaggacaaatattggcacatttgacatgatttgggatagaggarcattagttgccattaatccaggtgatcgcaaatgctatgcggatataatgttatccctcctgggaaagaagtttcaatatctcctgtgtgtctttcttac

SEQ ID NO: 36447 - DNA, 201 bp, Homo sapiens
tcagctattaaagaaacatttagatacttttcttaaaggagagagtggactgagggtattttttcctctttgcagaaaagaggttgagatgaaatggtttscagaccggggacacagcgtagttggtgtggaaatcagtgaacttgggatacgagaattttttacagagcagaatctatcttactcagaagaaccaatcac

SEQ ID NO: 36448 - DNA, 156 bp, Homo sapiens
cttgggatgacactagtggcggaggcaatggccagcaaccctctgtaagcgaggcrtggaagacatatgcttgtgagaaaaaggtgtctatgaaactatggatggtacaagaacttcacttgacattgaagagtactccaatactgaggtacagaa

SEQ ID NO: 36449 - DNA, 201 bp, Homo sapiens
gagtgcaatggcacaatctcagctcactgcaacctctgcctcccaggttcaagtgattctcctgcctcagcctcccaagtagctgagattacaggtgtgcrccaccatgcccagctaattttttgtatttttagtagagacagggtttcaccatgttggtcaggctggtctcgaactccagacctcaggtgatctacccac

SEQ ID NO: 36450 - DNA, 201 bp, Homo sapiens
ctcctgggaaagaagtttcaatatctcctgtgtgtctttcttacgatccaactaaacatccaggtccaccattttatgttccacatgctgaaattgaaagrttgtttggtaaaatatgcaatatacattgtcttgagaaggttgatgcttttgaagaatgacataaaaattgggggattgactatctttctgaaaagttat

SEQ ID NO: 36451 - DNA, 201 bp, Homo sapiens
acatgctgaaattgaaaggttgtttggtaaaatatgcaatatacattgtcttgagaaggttgatgcttttgaagaatgacataaaaattgggggattgacyatctttctgaaaagttatatctacttacagaaaagtaaatgagacatagataaaatcacattgacatgtttttgaggaattgaaaattatgctaaagcct

SEQ ID NO: 36452 - DNA, 201 bp, Homo sapiens
actgaggtacagaaaaaccaagtactaactctggaagaatggcaagacaagtgggtgaacggcaacactgcttttcatcaggaacaaggacctcagctatyaaagaaacatttagatacttttcttaaaggagagagtggactgagggtattttttcctctttgcagaaaagaggttgagatgaaatggtttgcagaccgg

SEQ ID NO: 36453 - DNA, 201 bp, Homo sapiens
cctgtgtgtctttcttacgatccaactaaacatccaggtccaccattttatgttccacatgctgaaattgaaaggttgtttggtaaaatatgcaatatacrttgtcttgagaaggttgatgcttttgaagaatgacataaaaattgggggattgactatctttctgaaaagttatatctacttacagaaaagtaaatgaga

SEQ ID NO: 36454 - DNA, 201 bp, Homo sapiens
gacatctagtggctccttcccacccagcactgatgaacatcttaaagaccaaaaaagctcagcgacatgcatctagtggctccttcccacccagcactgaygaacatcttaaagaagatctcaaccttcgcttacagaaactgactcatgctgccccctgcatgctgtttatgaaaggaactcctcaagaaccactctgtg

SEQ ID NO: 36455 - DNA, 201 bp, Homo sapiens
aaagcggggcacagcagcctcccgctttacaggttgaaaggattgttgacaaaaggaaaaataaaaaagggaagacagagtatttggttcggtggaaaggytatgacagcgaggacgacacttgggagccggaacagcacctcgtgaactgtgaggaatacatccacgacttcaacagacgccacacggagaagcagaagg

SEQ ID NO: 36456 - DNA, 199 bp, Homo sapiens
ggagagaggacctatttctacctaaggacattcccggaaggcaatgggtttcaaacaatatcctgaagagactcatctcggggaactaagcaggtggtmatcagagaacacagagcccccggaagaattttatgacatttcaggcaagccacaggtcagcctggggaaaaagcaggaagaaaaactggcaatacgaggg

SEQ ID NO: 36457 - DNA, 201 bp, Homo sapiens
aaagagaaagcactaaaatggcagaagctatcagaaacttcgtgaatactttcattcaatttaagaagcccattattgtagcagtcaatggcccagccatyggtctaggagcatctatattgcctctttgcgatgtggtttgggctaatgaaaaggcttggtttcaaacaccctataccaccttcggacagagtccagatg

SEQ ID NO: 36458 - DNA, 201 bp, Homo sapiens
taaagtacttgcagaggaagatcgatgagttctgagtgtcgggctgcccactggtgacaccgggatcgggctgagcaggagaacatcaccggctccagttsccctgatccattctcacagcctgaaacaagctcacccgtagcttacgcttggaagcaggactgggaacatccacgctatttattatcgaggagttttaaa

SEQ ID NO: 36459 - DNA, 201 bp, Homo sapiens
aggaagaaaaactggcaatacgagggcccaacccaaaagttattcctgaagagaaacaacgtgtcagcaccagatgggccttcagaccccagcatctccgygagcagtgagcaaagcggggcacagcagcctcccgctttacaggttgaaaggattgttgacaaaaggaaaaataaaaaagggaagacagagtatttggtt

SEQ ID NO: 36460 - DNA, 201 bp, Homo sapiens
caatatcctgaagagactcatctcggggaactaagcaggtggtcatcagagaacacagagcccccggaagaattttatgacatttcaggcaagccacaggycagcctggggaaaaagcaggaagaaaaactggcaatacgagggcccaacccaaaagttattcctgaagagaaacaacgtgtcagcaccagatgggccttc

SEQ ID NO: 36461 - DNA, 201 bp, Homo sapiens
cggaaggcaatgggtttcaaacaatatcctgaagagactcatctcggggaactaagcaggtggtcatcagagaacacagagcccccggaagaattttatgrcatttcaggcaagccacaggtcagcctggggaaaaagcaggaagaaaaactggcaatacgagggcccaacccaaaagttattcctgaagagaaacaacgt

SEQ ID NO: 36462 - DNA, 201 bp, Homo sapiens
tacctaaggacattcccggaaggcaatgggtttcaaacaatatcctgaagagactcatctcggggaactaagcaggtggtcatcagagaacacagagcccmcggaagaattttatgacatttcaggcaagccacaggtcagcctggggaaaaagcaggaagaaaaactggcaatacgagggcccaacccaaaagttattcc

SEQ ID NO: 36463 - DNA, 201 bp, Homo sapiens
cccaggtgttttggcccgggacgttcactcaggaagtgatggttcgcattaaggagcttgcctcgtgcaatccagttgtgcttgaggaatccaaagccctygtgcgctgcaacatgaagatggagctggagcaggccaacgagagggagtgtgaggtgctgaagaaaatctggggctcggcccaggggatggactccatgt

SEQ ID NO: 36464 - DNA, 201 bp, Homo sapiens
ggaagaacacagctccatctctctccagccggaagaacatggacctagcgaagtcaggtatcaagatcctcgtgcctaaaagccccgttaagagcaggacygcagtggacggctttcagagcgagagccctgagaaactggaccccgtcgagcagggtcaggaggacacagtggcacccgaagtggcagcggaaaagccgg

SEQ ID NO: 36465 - DNA, 201 bp, Homo sapiens
aagttattcctgaagagaaacaacgtgtcagcaccagatgggccttcagaccccagcatctccgtgagcagtgagcaaagcggggcacagcagcctcccgstttacaggttgaaaggattgttgacaaaaggaaaaataaaaaagggaagacagagtatttggttcggtggaaaggctatgacagcgaggacgacacttgg

SEQ ID NO: 36466 - DNA, 201 bp, Homo sapiens
aaaacagaattgtgttttattggttttggatgacagaaaagtctggaataatgtttgttttcctcatttcttccttctagaacacagaatctaaaggggtrttagccagcctcgcctccctgccccacgtagagacacagagtgatgtgaggcgttggctttttctccaagaaggtacagatacctcagattcgggaaact

SEQ ID NO: 36467 - DNA, 201 bp, Homo sapiens
acaccgggatcgggctgagcaggagaacatcaccggctccagttcccctgatccattctcacagcctgaaacaagctcacccgtagcttacgcttggaagyaggactgggaacatccacgctatttattatcgaggagttttaaagtactgtaactttaaaataaataactacaaagcttctttgtccaaacgtcattatt

SEQ ID NO: 36468 - DNA, 201 bp, Homo sapiens
aagggaagacagagtatttggttcggtggaaaggctatgacagcgaggacgacacttgggagccggaacagcacctcgtgaactgtgaggaatacatccaygacttcaacagacgccacacggagaagcagaaggagagcacattgaccagaacaaacaggacctctcccaacaatgctaggaaacaaatctccagatcca

SEQ ID NO: 36469 - DNA, 201 bp, Homo sapiens
gccctgagaaactggaccccgtcgagcagggtcaggaggacacagtggcacccgaagtggcagcggaaaagccggtcggagctttattgggccccggtgcygagagggccaggatggggagcaggcccaggatacacccactagtgcctcaggtgcccggccctgtgactgcagccatggccacaggcttagctgttaacg

SEQ ID NO: 36470 - DNA, 154 bp, Homo sapiens
agctttgacccaaagagagcagtgcagcaactcagagcctgcggggtattggaracgattcgaatcagtgcagctggctacccatccaggaagcagtcacgggtcctgagcttctcccatacacccagttgtgactccttgaccctgtcagggc

SEQ ID NO: 36471 - DNA, 148 bp, Homo sapiens
agctttgacccaaagagagcagtgcagcaactcagagcctgcggggtrttggagacgattcgaatcagtgcagctggctacccatccaggaagcagtcacgggtcctgagcttctcccatacacccagttgtgactccttgaccctgt

SEQ ID NO: 36472 - DNA, 201 bp, Homo sapiens
gaggcccgctcagcagagcatctgaaacgtctcaacgtgggcatggagaacaaggtggtccagctgcagcggaagatcgatgagcagaacaaagagttcargacactttcagagcagttgtccgtgaccacctcaacatacaccatggaggtagagcggctgaagaaggagctggtgcactaccagcagagcccaggtgag

SEQ ID NO: 36473 - DNA, 110 bp, Homo sapiens
ctctgtttggtgaaagagaggtggcccccagggctgccctaggcacagaggtgacagctcattattcagaatctgctctgaaggctgctcaatgggaccasagcaaggct

SEQ ID NO: 36474 - DNA, 201 bp, Homo sapiens
cacagagctgcagagggcccactcggagcgcaagatcttggaggacgcccacagcagggagaaagatgagctgaggaagcctgtgcattgtgtacatttcrttctttttgaaagcttcagcgatccctatgccggctgcttttgtacagctgtgctgttttgcatggctgctctgtttggtgaaagagaggtggcccccag

SEQ ID NO: 36475 - DNA, 201 bp, Homo sapiens
aggagctggtgcactaccagcagagcccaggtgaggacaccagcctcaggctgcaggaggaggtggagagcctgcgcacagagctgcagagggcccactcrgagcgcaagatcttggaggacgcccacagcagggagaaagatgagctgaggaagcctgtgcattgtgtacatttcgttctttttgaaagcttcagcgatc

SEQ ID NO: 36476 - DNA, 201 bp, Homo sapiens
gcactaccagcagagcccaggtgaggacaccagcctcaggctgcaggaggaggtggagagcctgcgcacagagctgcagagggcccactcggagcgcaagwtcttggaggacgcccacagcagggagaaagatgagctgaggaagcctgtgcattgtgtacatttcgttctttttgaaagcttcagcgatccctatgccgg

SEQ ID NO: 36477 - DNA, 201 bp, Homo sapiens
gatgcagccattgtcatccagtgtgccttccggatgctcaaggccaggcgggagctgaaggccctcaggattgaggcccgctcagcagagcatctgaaacrtctcaacgtgggcatggagaacaaggtggtccagctgcagcggaagatcgatgagcagaacaaagagttcaagacactttcagagcagttgtccgtgacc

SEQ ID NO: 36478 - DNA, 142 bp, Homo sapiens
agctttgacccaaagagagcagtgcagcaactcagagcctgsggggtattggagacgattcgaatcagtgcagctggctacccatccaggaagcagtcacgggtcctgagcttctcccatacacccagttgtgactccttga

SEQ ID NO: 36479 - DNA, 201 bp, Homo sapiens
ttcgagcaggccaggtggcctacctggagaagctgcgggctgacaagttccggacagccaccatcatgatccagaaaactgtccggggatggctgcagaasgtgaaatatcacaggctgaagggggctaccttaaccctgcagaggtactgccggggacacctggcccgcaggctggctgagcacctgcggaggatcagag

SEQ ID NO: 36480 - DNA, 201 bp, Homo sapiens
aagtgcagctggagaagagagaacagcaggacagcaagaaagtccaggcggaaccaccacagactgacatagatttggacccgaatgcagatctggcctayaatagtctgaagaggcaagagctggagtcagagaacaaaaagctgaagaatgacctgaatgagctgaggaaagccgtggccgaccaagccacgcagaata

SEQ ID NO: 36481 - DNA, 201 bp, Homo sapiens
ggcctttatacgaacaatccaggcacaactacaagagcggaatgaccctcagcaactgctattagatgccaagcacatgtttcctgttttgtttccatttmatccatcttctctaaccatggactcaatccacatcccagcgtgtctcaatctggaattcctcaatgaagtctgaagatgcatgtttccagcattagtttg

SEQ ID NO: 36482 - DNA, 201 bp, Homo sapiens
cacaactacaagagcggaatgaccctcagcaactgctattagatgccaagcacatgtttcctgttttgtttccatttaatccatcttctctaaccatggastcaatccacatcccagcgtgtctcaatctggaattcctcaatgaagtctgaagatgcatgtttccagcattagtttgattcccaatgtgagcaagaagga

SEQ ID NO: 36483 - DNA, 201 bp, Homo sapiens
ccaattacccctccatctccacatctgagatcggagacactgaggatgccctccagcaggtggaggaaattggcctggagaaggcagccatggacatgacrgtcttcctgaagctgcagaagagagtacgggagctggagcaggagaggaaaaagctgcaagtgcagctggagaagagagaacagcaggacagcaagaaag

SEQ ID NO: 36484 - DNA, 201 bp, Homo sapiens
tctccaacaaggagcacaagaaaaccgttggccaccagttccgtacctccctgcatctgctcatggagaccctgaatgccacgacacctcactatgtccgytgcatcaagcccaacgatgagaagctcccctttcactttgacccaaagagagcagtgcagcaactcagagcctgcggggtattggagacgattcgaatca

SEQ ID NO: 36485 - DNA, 201 bp, Homo sapiens
gaagatgcatgtttccagcattagtttgattcccaatgtgagcaagaaggaagtatatacagtaaagtaaattcaaggatctgttaaatctggtaaaagtmgatcaaatcagagattgacagcctgtggagggtgctgaactatacagaattagacacaactatgtcattattttttgtacctactgctcagaataaaaac

SEQ ID NO: 36486 - DNA, 201 bp, Homo sapiens
atgccacgacacctcactatgtccgctgcatcaagcccaacgatgagaagctcccctttcactttgacccaaagagagcagtgcagcaactcagagcctgsggggtattggagacgattcgaatcagtgcagctggctacccatccaggtgggcctaccatgactttttcaaccggtatcgggtgctggtcaagaagagag

SEQ ID NO: 36487 - DNA, 201 bp, Homo sapiens
atgaccctcagcaactgctattagatgccaagcacatgtttcctgttttgtttccatttaatccatcttctctaaccatggactcaatccacatcccagcrtgtctcaatctggaattcctcaatgaagtctgaagatgcatgtttccagcattagtttgattcccaatgtgagcaagaaggaagtatatacagtaaagta

SEQ ID NO: 36488 - DNA, 201 bp, Homo sapiens
tgctattagatgccaagcacatgtttcctgttttgtttccatttaatccatcttctctaaccatggactcaatccacatcccagcgtgtctcaatctggarttcctcaatgaagtctgaagatgcatgtttccagcattagtttgattcccaatgtgagcaagaaggaagtatatacagtaaagtaaattcaaggatctgt

SEQ ID NO: 36489 - DNA, 201 bp, Homo sapiens
cacatcccagcgtgtctcaatctggaattcctcaatgaagtctgaagatgcatgtttccagcattagtttgattcccaatgtgagcaagaaggaagtatakacagtaaagtaaattcaaggatctgttaaatctggtaaaagtagatcaaatcagagattgacagcctgtggagggtgctgaactatacagaattagacac

SEQ ID NO: 36490 - DNA, 201 bp, Homo sapiens
atgaatttgaagaacgggtaacagtggcctttatacgaacaatccaggcacaactacaagagcggaatgaccctcagcaactgctattagatgccaagcamatgtttcctgttttgtttccatttaatccatcttctctaaccatggactcaatccacatcccagcgtgtctcaatctggaattcctcaatgaagtctgaa

SEQ ID NO: 36491 - DNA, 201 bp, Homo sapiens
gtttcctgttttgtttccatttaatccatcttctctaaccatggactcaatccacatcccagcgtgtctcaatctggaattcctcaatgaagtctgaagaygcatgtttccagcattagtttgattcccaatgtgagcaagaaggaagtatatacagtaaagtaaattcaaggatctgttaaatctggtaaaagtagatca

SEQ ID NO: 36492 - DNA, 201 bp, Homo sapiens
ttaatccatcttctctaaccatggactcaatccacatcccagcgtgtctcaatctggaattcctcaatgaagtctgaagatgcatgtttccagcattagtytgattcccaatgtgagcaagaaggaagtatatacagtaaagtaaattcaaggatctgttaaatctggtaaaagtagatcaaatcagagattgacagcctg

SEQ ID NO: 36493 - DNA, 201 bp, Homo sapiens
aaccatggactcaatccacatcccagcgtgtctcaatctggaattcctcaatgaagtctgaagatgcatgtttccagcattagtttgattcccaatgtgarcaagaaggaagtatatacagtaaagtaaattcaaggatctgttaaatctggtaaaagtagatcaaatcagagattgacagcctgtggagggtgctgaact

SEQ ID NO: 36494 - DNA, 201 bp, Homo sapiens
atggactcaatccacatcccagcgtgtctcaatctggaattcctcaatgaagtctgaagatgcatgtttccagcattagtttgattcccaatgtgagcaaraaggaagtatatacagtaaagtaaattcaaggatctgttaaatctggtaaaagtagatcaaatcagagattgacagcctgtggagggtgctgaactatac

SEQ ID NO: 36495 - DNA, 201 bp, Homo sapiens
agatcaagttggcctaacagtgaaaagcatgttgaccaggaggatgccattgaggcctatcacggggtctgccagacaaacagcaagactgaggattgggratatttaaatgaagatggagaactcggcttggcctaccaaggcctaaagcaagttgccaggctgctggaggctcagctgcaggcccagagcctggagcat

SEQ ID NO: 36496 - DNA, 201 bp, Homo sapiens
ggcaggtcacggtccagcggaaagagaaggatttccagggcatgctggagtaccacaaagaggacgaggccctcctcatccggaacctggtgacagacttraagccccagatgctgtcgggcacagtgccctgtctccccgcctacatcctctacatgtgcatccggcacgcggactacaccaacgacgatctcaaggtgc

SEQ ID NO: 36497 - DNA, 201 bp, Homo sapiens
gatgaatttgcccagaactctgtgaaggaaaatctcatgaagaaagaactggaggaggagcgatcccggtaccagaaccttgtgaaggaatattcacagtkggagcagagatacgacaaccttcgggatgaaatgaccatcataaagcaaactccaggtcataggcggaacccatcaaaccaaagtagcttagaatctgac

SEQ ID NO: 36498 - DNA, 201 bp, Homo sapiens
gaaggaaaatctcatgaagaaagaactggaggaggagcgatcccggtaccagaaccttgtgaaggaatattcacagttggagcagagatacgacaaccttygggatgaaatgaccatcataaagcaaactccaggtcataggcggaacccatcaaaccaaagtagcttagaatctgactccaattacccctccatctccac

SEQ ID NO: 36499 - DNA, 201 bp, Homo sapiens
gagttgcagacctggagcaagaaaatgctctcttgaaagatgagaaagaacagctcaacaaccaaatcctgtgccagtctaaagatgaatttgcccagaastctgtgaaggaaaatctcatgaagaaagaactggaggaggagcgatcccggtaccagaaccttgtgaaggaatattcacagttggagcagagatacgaca

SEQ ID NO: 36500 - DNA, 201 bp, Homo sapiens
aggagctggtgcactaccagcagagcccaggtgaggacaccagcctcaggctgcaggaggaggtggagagcctgcgcacagagctgcagagggcccactcrgagcgcaagatcttggaggacgcccacagcagggagaaagatgagctgaggaagcgagttgcagacctggagcaagaaaatgctctcttgaaagatgaga

SEQ ID NO: 36501 - DNA, 201 bp, Homo sapiens
gcactaccagcagagcccaggtgaggacaccagcctcaggctgcaggaggaggtggagagcctgcgcacagagctgcagagggcccactcggagcgcaagwtcttggaggacgcccacagcagggagaaagatgagctgaggaagcgagttgcagacctggagcaagaaaatgctctcttgaaagatgagaaagaacagct

SEQ ID NO: 36502 - DNA, 201 bp, Homo sapiens
ctcttccaaaagataaaggtatatcctggaattgtacttaaaacttacagatgactaacaaatatatactttatatgtagttaatatttagatctgtcttmtttaatacttggaggctagaagaagcatctttaggggaactatataatcttttgttagcattttctctgcattttaaaaaatcatttcaattcaaacatt

SEQ ID NO: 36503 - DNA, 201 bp, Homo sapiens
tcagttgtcatgggcattatcccctctacatccacattaaacatgccggcttctcttgggcatcggcagagctgtgcctttttctttcagttacagttacrtaatcactgacgtccatgacacttacccatggatccatgtgctgacttcatttagaaggccaatctaaaacaactgggtttgtggctacctctttaaagt

SEQ ID NO: 36504 - DNA, 201 bp, Homo sapiens
cacactccacgctaccttctgcactgtgcccttagagcacagcttcctcagttgttctctgcatctcctggggcttaggccagtcttagcctgggttaagkctgctgacattgtgttccaatcagttgtcatgggcattatcccctctacatccacattaaacatgccggcttctcttgggcatcggcagagctgtgcctt

SEQ ID NO: 36505 - DNA, 201 bp, Homo sapiens
aatagtaaaacaaactaaagttcgcacatcagatcatctgaaaaaccttcaaaaataatcagttcagggatattatacaaaagtttgggttttttttttttaagagaataaaatggcttaggtcaactttcccttttcaggttattttcaacgtttttcaaatttagcacacaaaaaattgtaaatatctctcccacaaaa

SEQ ID NO: 36506 - DNA, 201 bp, Homo sapiens; identical to SEQ ID NO: 36479

SEQ ID NO: 36507 - DNA, 201 bp, Homo sapiens
gatgtaaaaaccaaacaagtcaatatgaaagcttttaatctcttaataccattaagcttccagtaagagcatcacataatgctctactgttccagaaaccmaatagtaaaacaaactaaagttcgcacatcagatcatctgaaaaaccttcaaaaataatcagttcagggatattatacaaaagtttgggttttttttttt

SEQ ID NO: 36508 - DNA, 201 bp, Homo sapiens
catattacatacatgcattttccctgtgccctcatagttgcagttagagttccagtacctgtaggctcacctgggaggcagattagacccaaaggtagatktttttcccctttccatgaagcatgtcagtgggagttgcttcctttgatttccctagtactaaattttaaggcttttgtaaaaacaaaacaaaactaggag

SEQ ID NO: 36509 - DNA, 201 bp, Homo sapiens
actttccaagtcccacaaaactttcacaaaaatgtatataagctaaatattagaaacggataacaaacttgttttatttatagatgtaaaaaccaaacaartcaatatgaaagcttttaatctcttaataccattaagcttccagtaagagcatcacataatgctctactgttccagaaaccaaatagtaaaacaaactaa

SEQ ID NO: 36510 - DNA, 201 bp, Homo sapiens
ctcactatgtccgctgcatcaagcccaacgatgagaagctcccctttcactttgacccaaagagagcagtgcagcaactcagagcctgcggggtattggaracgattcgaatcagtgcagctggctacccatccaggtgggcctaccatgactttttcaaccggtatcgggtgctggtcaagaagagagagctcgccaaca

SEQ ID NO: 36511 - DNA, 201 bp, Homo sapiens
tgatggttttctggagaaaaacagagacacggtgtatgaagagcagatcaatatcctgaaggccagcaagtggctgacttgtttcatgatgacaaggaccytgttcctgccaccacccctgggaaggggtcatcttcgaagatcagcgtccgttctgccagaccccccatgaaagtctccaacaaggagcacaagaaaacc

SEQ ID NO: 36512 - DNA, 201 bp, Homo sapiens
tttacttatagtaaatgtgaatgtacacatgagttgttgctgaagctgacaagcatattacatacatgcattttccctgtgccctcatagttgcagttagmgttccagtacctgtaggctcacctgggaggcagattagacccaaaggtagatgtttttcccctttccatgaagcatgtcagtgggagttgcttcctttga

SEQ ID NO: 36513 - DNA, 201 bp, Homo sapiens
tccccatagacatataaaaggtgtcaattctataaaatgaagctgcctagttttgatctttgcatagaactagagaatgtccaaattaaaataccaaatayatataagtcacataaattgccttcaaagggctttaacaaataatggtactaataaccatgataatggcatatactgacatttcccaaagtttgcaaacca

SEQ ID NO: 36514 - DNA, 201 bp, Homo sapiens
tcggcttggcctaccaaggcctaaagcaagttgccaggctgctggaggctcagctgcaggcccagagcctggagcatgaggaggaggtggagcatctcaargctcagctcgaggccctgaaggaggagatggacaaacagcagcagaccttctgccagacgctactgctctccccagaggcccaggtggaattcggcgttc

SEQ ID NO: 36515 - DNA, 201 bp, Homo sapiens
tatggaagattttaagtttgatttcagtccaacacatatacataatttatagacaccaagcagtccccatagacatataaaaggtgtcaattctataaaaygaagctgcctagttttgatctttgcatagaactagagaatgtccaaattaaaataccaaatatatataagtcacataaattgccttcaaagggctttaac

SEQ ID NO: 36516 - DNA, 201 bp, Homo sapiens
taaattcaaggatctgttaaatctggtaaaagtagatcaaatcagagattgacagcctgtggagggtgctgaactatacagaattagacacaactatgtcrttattttttgtacctactgctcagaataaaaacacttgaaatatggaagattttaagtttgatttcagtccaacacatatacataatttatagacaccaa

SEQ ID NO: 36517 - DNA, 201 bp, Homo sapiens
gtttccagcattagtttgattcccaatgtgagcaagaaggaagtatatacagtaaagtaaattcaaggatctgttaaatctggtaaaagtagatcaaatcagagattgacagcctgtggagggtgctgaactatacagaattagacacaactatgtcattattttttgtacctactgctcagaataaaaacacttgaaata

SEQ ID NO: 36518 - DNA, 201 bp, Homo sapiens
cgacacctcactatgtccgctgcatcaagcccaacgatgagaagctcccctttcactttgacccaaagagagcagtgcagcaactcagagcctgcggggtrttggagacgattcgaatcagtgcagctggctacccatccaggtgggcctaccatgactttttcaaccggtatcgggtgctggtcaagaagagagagctcg

SEQ ID NO: 36519 - DNA, 201 bp, Homo sapiens; identical to SEQ ID NO: 36472

SEQ ID NO: 36520 - DNA, 201 bp, Homo sapiens
agtaaattcaaggatctgttaaatctggtaaaagtagatcaaatcagagattgacagcctgtggagggtgctgaactatacagaattagacacaactatgkcattattttttgtacctactgctcagaataaaaacacttgaaatatggaagattttaagtttgatttcagtccaacacatatacataatttatagacacc

SEQ ID NO: 36521 - DNA, 201 bp, Homo sapiens
ttagcctgggttaaggctgctgacattgtgttccaatcagttgtcatgggcattatcccctctacatccacattaaacatgccggcttctcttgggcatckgcagagctgtgcctttttctttcagttacagttacataatcactgacgtccatgacacttacccatggatccatgtgctgacttcatttagaaggccaat

SEQ ID NO: 36522 - DNA, 201 bp, Homo sapiens; identical to SEQ ID NO: 36477

SEQ ID NO: 36523 - DNA, 201 bp, Homo sapiens
agcaaactccaggtcataggcggaacccatcaaaccaaagtagcttagaatctgactccaattacccctccatctccacatctgagatcggagacactgargatgccctccagcaggtggaggaaattggcctggagaaggcagccatggacatgacggtcttcctgaagctgcagaagagagtacgggagctggagcagg

SEQ ID NO: 36524 - DNA, 201 bp, Homo sapiens
gagcgatcccggtaccagaaccttgtgaaggaatattcacagttggagcagagatacgacaaccttcgggatgaaatgaccatcataaaggcaaggggggygcttctgctgtgccatggcacaggtcataggcggaacccatcaaaccaaagtagcttagaatctgactccaattacccctccatctccacatctgagatc

SEQ ID NO: 36525 - DNA, 201 bp, Homo sapiens; identical to SEQ ID NO: 36481

SEQ ID NO: 36526 - DNA, 201 bp, Homo sapiens
cacaactacaagagcggaatgaccctcagcaactgctattagatgccaagcacatgtttcctgttttgtttccatttaatccatcttctctaaccatggastcaatccacatcccagcgtgtctcaatctggaattcctcaatgaagtctgaagatgcatgtttccagcattagtttgattcccaatgtgtgtttgtagtt

SEQ ID NO: 36527 - DNA, 201 bp, Homo sapiens; identical to SEQ ID NO: 36484

SEQ ID NO: 36528 - DNA, 201 bp, Homo sapiens; identical to SEQ ID NO: 36483

SEQ ID NO: 36529 - DNA, 201 bp, Homo sapiens
atgaccctcagcaactgctattagatgccaagcacatgtttcctgttttgtttccatttaatccatcttctctaaccatggactcaatccacatcccagcrtgtctcaatctggaattcctcaatgaagtctgaagatgcatgtttccagcattagtttgattcccaatgtgtgtttgtagttgctgctaagcgaacgccc

SEQ ID NO: 36530 - DNA, 201 bp, Homo sapiens; identical to SEQ ID NO: 36486

SEQ ID NO: 36531 - DNA, 201 bp, Homo sapiens
tgctattagatgccaagcacatgtttcctgttttgtttccatttaatccatcttctctaaccatggactcaatccacatcccagcgtgtctcaatctggarttcctcaatgaagtctgaagatgcatgtttccagcattagtttgattcccaatgtgtgtttgtagttgctgctaagcgaacgccctttggagcttacgga

SEQ ID NO: 36532 - DNA, 201 bp, Homo sapiens
cctgaagctgcagaagagagtacgggagctggagcaggagaggaaaaagctgcaagtgcagctggagaagagagaacagcaggacagcaagaaagtccagrgagagagccctagggcagggagtaatggcagcggcccttgggctgtcttccagaggcaagagctggagtcagagaacaaaaagctgaagaatgacctgaa

SEQ ID NO: 36533 - DNA, 201 bp, Homo sapiens
ttgatcatgaataggagcccatgctagaagtacattctctcagatttgaaccagtgaaatatgatgtatttctgagctaaaactcaactatagaagacatyaaaagaaatcgtattcttgccaagtaaccaccacttctgccttagataatatgattataaggaaatcaaataaatgttgccttaacttcagttaatattt

SEQ ID NO: 36534 - DNA, 201 bp, Homo sapiens
gtttcctgttttgtttccatttaatccatcttctctaaccatggactcaatccacatcccagcgtgtctcaatctggaattcctcaatgaagtctgaagaygcatgtttccagcattagtttgattcccaatgtgtgtttgtagttgctgctaagcgaacgccctttggagcttacggaggccttctgaaagacttcactg

SEQ ID NO: 36535 - DNA, 201 bp, Homo sapiens; identical to SEQ ID NO: 36490

SEQ ID NO: 36536 - DNA, 201 bp, Homo sapiens
actttgaaagtgcctcatgccttatttcctcgcctcccacagcaagtgcagaggactttttctatacatcacagggaggagacacttccatcgagggtgtkgacgatgctgaggactttgagaagactcgacaagccttcacactcctcggagtgaaagagtcccatcagatgagcatttttaagataattgcttctatct

SEQ ID NO: 36537 - DNA, 201 bp, Homo sapiens
tggccaggccacagtaaaacaagtgaccttcagagcagctgccacaactggccatgccctgccattgaaacagtgattaagtttgatcaagccatggtgayacaaaaatgcattgatcatgaataggagcccatgctagaagtacattctctcagatttgaaccagtgaaatatgatgtatttctgagctaaaactcaact

SEQ ID NO: 36538 - DNA, 201 bp, Homo sapiens
ttaatccatcttctctaaccatggactcaatccacatcccagcgtgtctcaatctggaattcctcaatgaagtctgaagatgcatgtttccagcattagtytgattcccaatgtgtgtttgtagttgctgctaagcgaacgccctttggagcttacggaggccttctgaaagacttcactgctactgacttgtctgaattt

SEQ ID NO: 36539 - DNA, 201 bp, Homo sapiens
ctgaagagaccagtgagctcactgtgacccatccttactctacttggccaggccacagtaaaacaagtgaccttcagagcagctgccacaactggccatgycctgccattgaaacagtgattaagtttgatcaagccatggtgacacaaaaatgcattgatcatgaataggagcccatgctagaagtacattctctcagat

SEQ ID NO: 36540 - DNA, 201 bp, Homo sapiens; identical to SEQ ID NO: 36496

SEQ ID NO: 36541 - DNA, 201 bp, Homo sapiens
gatgaatttgcccagaactctgtgaaggaaaatctcatgaagaaagaactggaggaggagcgatcccggtaccagaaccttgtgaaggaatattcacagtkggagcagagatacgacaaccttcgggatgaaatgaccatcataaaggcaaggggggtgcttctgctgtgccatggcacaggtcataggcggaacccatca

SEQ ID NO: 36542 - DNA, 201 bp, Homo sapiens
gaaggaaaatctcatgaagaaagaactggaggaggagcgatcccggtaccagaaccttgtgaaggaatattcacagttggagcagagatacgacaaccttygggatgaaatgaccatcataaaggcaaggggggtgcttctgctgtgccatggcacaggtcataggcggaacccatcaaaccaaagtagcttagaatctga

SEQ ID NO: 36543 - DNA, 201 bp, Homo sapiens; identical to SEQ ID NO: 36499

SEQ ID NO: 36544 - DNA, 201 bp, Homo sapiens; identical to SEQ ID NO: 36500

SEQ ID NO: 36545 - DNA, 201 bp, Homo sapiens; identical to SEQ ID NO: 36501

SEQ ID NO: 36546 - DNA, 201 bp, Homo sapiens; identical to SEQ ID NO: 36479

SEQ ID NO: 36547 - DNA, 201 bp, Homo sapiens
agtatatcagatgtatacctaagcaacttctgccgactgctaggggtggagcacagtcagatggagcactggctgtgtcatcgcaagctggtcaccacctyggagacctacgtcaagaccatgtccctgcagcaggtgatcaatgcgcgcaacgccctggcgaagcacatctatgcccagttgttcggctggattgtggag

SEQ ID NO: 36548 - DNA, 201 bp, Homo sapiens; identical to SEQ ID NO: 36510

SEQ ID NO: 36549 - DNA, 201 bp, Homo sapiens
ctggagaaaaacagagacacggtgtatgaagagcagatcaatatcctgaaggccagcaagttcccactagtggctgacttgtttcatgatgacaaggaccytgttcctgccaccacccctgggaaggggtcatcttcgaagatcagcgtccgttctgccagaccccccatgaaagtctccaacaaggagcacaagaaaacc

SEQ ID NO: 36550 - DNA, 201 bp, Homo sapiens
ccattgaggcctatcacggggtctgccagacaaacaggctgctggaggctcagctgcaggcccagagcctggagcatgaggaggaggtggagcatctcaargctcagctcgaggccctgaaggaggagatggacaaacagcagcagaccttctgccagacgctactgctctccccagaggcccaggtggaattcggcgttc

SEQ ID NO: 36551 - DNA, 201 bp, Homo sapiens
tttcctcgcctcccacagcaagtgcagaggactttttctatacatcacagggaggagacacttccatcgagggtgtggacgatgctgaggactttgagaakactcgacaagccttcacactcctcggagtgaaagagtcccatcagatgagcatttttaagataattgcttctatcttgcaccttggaagtgtggcgattc

SEQ ID NO: 36552 - DNA, 201 bp, Homo sapiens
tttgcaggtgtcggggagggcagactatttttacactgttcctctgcgtttatccattaaagtaggagagatgctcccagtgaggctcaggcccttgtcakacagagtccctggacggtagcagagcctttccatggccaatgacttatcagagcttttttccttccagagatgagaagaatcagtccatcatagtcagtg

SEQ ID NO: 36553 - DNA, 201 bp, Homo sapiens
cactgttcctctgcgtttatccattaaagtaggagagatgctcccagtgaggctcaggcccttgtcagacagagtccctggacggtagcagagcctttccmtggccaatgacttatcagagcttttttccttccagagatgagaagaatcagtccatcatagtcagtggggagtctggagccgggaagacggtatcagcca

SEQ ID NO: 36554 - DNA, 201 bp, Homo sapiens; identical to SEQ ID NO: 36518

SEQ ID NO: 36555 - DNA, 201 bp, Homo sapiens
aagtaggagagatgctcccagtgaggctcaggcccttgtcagacagagtccctggacggtagcagagcctttccatggccaatgacttatcagagcttttytccttccagagatgagaagaatcagtccatcatagtcagtggggagtctggagccgggaagacggtatcagccaagtatgccatgcgctatttcgccacc

SEQ ID NO: 36556 - DNA, 201 bp, Homo sapiens; identical to SEQ ID NO: 36472

SEQ ID NO: 36557 - DNA, 201 bp, Homo sapiens; identical to SEQ ID NO: 36477

SEQ ID NO: 36558 - DNA, 201 bp, Homo sapiens
gccatggcacaggtcataggcggaacccatcaaaccaaagtagcttagaatctgactccaattacccctccatctccacatctgagatcggagacactgargatgccctccagcaggtggaggaaattggcctggagaaggcagccatggacatgacggtcttcctgaagctgcagaagagagtacgggagctggagcagg

SEQ ID NO: 36559 - DNA, 201 bp, Homo sapiens
tcccaaaggagaccccagctctcacgattaataggctctgtggttctggttttcagtccattgtgaatggatgtcaggaaatttgtgttaaagaagctgargttgttttatgtggaggaaccgaaagcatgagccaagctccctactgtgtcagaaatgtgcgttttggaaccaagcttggatcagatatcaagctggaag

SEQ ID NO: 36560 - DNA, 201 bp, Homo sapiens; identical to SEQ ID NO: 36480

SEQ ID NO: 36561 - DNA, 201 bp, Homo sapiens; identical to SEQ ID NO: 36481

SEQ ID NO: 36562 - DNA, 201 bp, Homo sapiens; identical to SEQ ID NO: 36482

SEQ ID NO: 36563 - DNA, 201 bp, Homo sapiens; identical to SEQ ID NO: 36483

SEQ ID NO: 36564 - DNA, 201 bp, Homo sapiens; identical to SEQ ID NO: 36484

SEQ ID NO: 36565 - DNA, 201 bp, Homo sapiens; identical to SEQ ID NO: 36487

SEQ ID NO: 36566 - DNA, 201 bp, Homo sapiens; identical to SEQ ID NO: 36486

SEQ ID NO: 36567 - DNA, 201 bp, Homo sapiens; identical to SEQ ID NO: 36485

SEQ ID NO: 36568 - DNA, 201 bp, Homo sapiens; identical to SEQ ID NO: 36488

SEQ ID NO: 36569 - DNA, 201 bp, Homo sapiens; identical to SEQ ID NO: 36489

SEQ ID NO: 36570 - DNA, 201 bp, Homo sapiens; identical to SEQ ID NO: 36490

SEQ ID NO: 36571 - DNA, 201 bp, Homo sapiens; identical to SEQ ID NO: 36491

SEQ ID NO: 36572 - DNA, 201 bp, Homo sapiens; identical to SEQ ID NO: 36536

SEQ ID NO: 36573 - DNA, 201 bp, Homo sapiens; identical to SEQ ID NO: 36492

SEQ ID NO: 36574 - DNA, 201 bp, Homo sapiens; identical to SEQ ID NO: 36493

SEQ ID NO: 36575 - DNA, 201 bp, Homo sapiens; identical to SEQ ID NO: 36494

SEQ ID NO: 36576 - DNA, 201 bp, Homo sapiens; identical to SEQ ID NO: 36496

SEQ ID NO: 36577 - DNA, 201 bp, Homo sapiens; identical to SEQ ID NO: 36497

SEQ ID NO: 36578 - DNA, 201 bp, Homo sapiens; identical to SEQ ID NO: 36498

SEQ ID NO: 36579 - DNA, 201 bp, Homo sapiens; identical to SEQ ID NO: 36499

SEQ ID NO: 36580 - DNA, 201 bp, Homo sapiens; identical to SEQ ID NO: 36500

SEQ ID NO: 36581 - DNA, 201 bp, Homo sapiens; identical to SEQ ID NO: 36501

SEQ ID NO: 36582 - DNA, 201 bp, Homo sapiens; identical to SEQ ID NO: 36502

SEQ ID NO: 36583 - DNA, 201 bp, Homo sapiens; identical to SEQ ID NO: 36503

SEQ ID NO: 36584 - DNA, 201 bp, Homo sapiens; identical to SEQ ID NO: 36504

SEQ ID NO: 36585 - DNA, 201 bp, Homo sapiens; identical to SEQ ID NO: 36505

SEQ ID NO: 36586 - DNA, 201 bp, Homo sapiens; identical to SEQ ID NO: 36507

SEQ ID NO: 36587 - DNA, 201 bp, Homo sapiens; identical to SEQ ID NO: 36547

SEQ ID NO: 36588 - DNA, 201 bp, Homo sapiens; identical to SEQ ID NO: 36479

SEQ ID NO: 36589 - DNA, 201 bp, Homo sapiens; identical to SEQ ID NO: 36509

SEQ ID NO: 36590 - DNA, 201 bp, Homo sapiens; identical to SEQ ID NO: 36508

SEQ ID NO: 36591 - DNA, 201 bp, Homo sapiens; identical to SEQ ID NO: 36513

SEQ ID NO: 36592 - DNA, 201 bp, Homo sapiens; identical to SEQ ID NO: 36512

SEQ ID NO: 36593 - DNA, 201 bp, Homo sapiens; identical to SEQ ID NO: 36549

SEQ ID NO: 36594 - DNA, 201 bp, Homo sapiens; identical to SEQ ID NO: 36510

SEQ ID NO: 36595 - DNA, 201 bp, Homo sapiens; identical to SEQ ID NO: 36550

SEQ ID NO: 36596 - DNA, 201 bp, Homo sapiens; identical to SEQ ID NO: 36551

SEQ ID NO: 36597 - DNA, 201 bp, Homo sapiens; identical to SEQ ID NO: 36515

SEQ ID NO: 36598 - DNA, 201 bp, Homo sapiens; identical to SEQ ID NO: 36552

SEQ ID NO: 36599 - DNA, 201 bp, Homo sapiens; identical to SEQ ID NO: 36516

SEQ ID NO: 36600 - DNA, 201 bp, Homo sapiens; identical to SEQ ID NO: 36553

SEQ ID NO: 36601 - DNA, 201 bp, Homo sapiens; identical to SEQ ID NO: 36517

SEQ ID NO: 36602 - DNA, 201 bp, Homo sapiens; identical to SEQ ID NO: 36518

SEQ ID NO: 36603 - DNA, 201 bp, Homo sapiens; identical to SEQ ID NO: 36555

SEQ ID NO: 36604 - DNA, 201 bp, Homo sapiens; identical to SEQ ID NO: 36472

SEQ ID NO: 36605 - DNA, 201 bp, Homo sapiens; identical to SEQ ID NO: 36520

SEQ ID NO: 36606 - DNA, 201 bp, Homo sapiens; identical to SEQ ID NO: 36521

SEQ ID NO: 36607 - DNA, 201 bp, Homo sapiens; identical to SEQ ID NO: 36477

SEQ ID NO: 36608 - DNA, 201 bp, Homo sapiens; identical to SEQ ID NO: 36523

SEQ ID NO: 36609 - DNA, 201 bp, Homo sapiens; identical to SEQ ID NO: 36497

SEQ ID NO: 36610 - DNA, 201 bp, Homo sapiens; identical to SEQ ID NO: 36498

SEQ ID NO: 36611 - DNA, 201 bp, Homo sapiens; identical to SEQ ID NO: 36499

SEQ ID NO: 36612 - DNA, 201 bp, Homo sapiens; identical to SEQ ID NO: 36480

SEQ ID NO: 36613 - DNA, 201 bp, Homo sapiens; identical to SEQ ID NO: 36500

SEQ ID NO: 36614 - DNA, 201 bp, Homo sapiens; identical to SEQ ID NO: 36501

SEQ ID NO: 36615 - DNA, 201 bp, Homo sapiens; identical to SEQ ID NO: 36481

SEQ ID NO: 36616 - DNA, 201 bp, Homo sapiens; identical to SEQ ID NO: 36526

SEQ ID NO: 36617 - DNA, 201 bp, Homo sapiens; identical to SEQ ID NO: 36483

SEQ ID NO: 36618 - DNA, 201 bp, Homo sapiens; identical to SEQ ID NO: 36484

SEQ ID NO: 36619 - DNA, 201 bp, Homo sapiens; identical to SEQ ID NO: 36529

SEQ ID NO: 36620 - DNA, 201 bp, Homo sapiens; identical to SEQ ID NO: 36486

SEQ ID NO: 36621 - DNA, 201 bp, Homo sapiens; identical to SEQ ID NO: 36531

SEQ ID NO: 36622 - DNA, 201 bp, Homo sapiens; identical to SEQ ID NO: 36490

SEQ ID NO: 36623 - DNA, 201 bp, Homo sapiens; identical to SEQ ID NO: 36479

SEQ ID NO: 36624 - DNA, 201 bp, Homo sapiens; identical to SEQ ID NO: 36533

SEQ ID NO: 36625 - DNA, 201 bp, Homo sapiens; identical to SEQ ID NO: 36534

SEQ ID NO: 36626 - DNA, 201 bp, Homo sapiens; identical to SEQ ID NO: 36537

SEQ ID NO: 36627 - DNA, 201 bp, Homo sapiens; identical to SEQ ID NO: 36538

SEQ ID NO: 36628 - DNA, 201 bp, Homo sapiens; identical to SEQ ID NO: 36510

SEQ ID NO: 36629 - DNA, 201 bp, Homo sapiens; identical to SEQ ID NO: 36511

SEQ ID NO: 36630 - DNA, 201 bp, Homo sapiens; identical to SEQ ID NO: 36539

SEQ ID NO: 36631 - DNA, 201 bp, Homo sapiens; identical to SEQ ID NO: 36514

SEQ ID NO: 36632 - DNA, 201 bp, Homo sapiens; identical to SEQ ID NO: 36495

SEQ ID NO: 36633 - DNA, 201 bp, Homo sapiens; identical to SEQ ID NO: 36518

SEQ ID NO: 36634 - DNA, 201 bp, Homo sapiens; identical to SEQ ID NO: 36472

SEQ ID NO: 36635 - DNA, 201 bp, Homo sapiens; identical to SEQ ID NO: 36496

SEQ ID NO: 36636 - DNA, 201 bp, Homo sapiens; identical to SEQ ID NO: 36477

SEQ ID NO: 36637 - DNA, 201 bp, Homo sapiens; identical to SEQ ID NO: 36523

SEQ ID NO: 36638 - DNA, 201 bp, Homo sapiens; identical to SEQ ID NO: 36559

SEQ ID NO: 36639 - DNA, 201 bp, Homo sapiens; identical to SEQ ID NO: 36539

SEQ ID NO: 36640 - DNA, 201 bp, Homo sapiens
tgcccagtgtttagggtgttggcggagacaaaggggaagagtcatcgcctgtcggggctaggatatgatgggtgagaggtgtcaaaccaaattctctcggkttggaaacggagaaaatctaaaaatgaggatgtgaggaaagagtccgctctcaaggcgcgttgtggtctatccgagccccgtcccctgggctccctcggg

SEQ ID NO: 36641 - DNA, 201 bp, Homo sapiens; identical to SEQ ID NO: 36559

SEQ ID NO: 36642 - DNA, 201 bp, Homo sapiens; identical to SEQ ID NO: 36533

SEQ ID NO: 36643 - DNA, 201 bp, Homo sapiens; identical to SEQ ID NO: 36537

SEQ ID NO: 36644 - DNA, 201 bp, Homo sapiens; identical to SEQ ID NO: 36539

SEQ ID NO: 36645 - DNA, 201 bp, Homo sapiens; identical to SEQ ID NO: 36559

SEQ ID NO: 36646 - DNA, 201 bp, Homo sapiens; identical to SEQ ID NO: 36533

SEQ ID NO: 36647 - DNA, 201 bp, Homo sapiens; identical to SEQ ID NO: 36537

SEQ ID NO: 36648 - DNA, 201 bp, Homo sapiens; identical to SEQ ID NO: 36539

SEQ ID NO: 36649 - DNA, 201 bp, Homo sapiens; identical to SEQ ID NO: 36640

SEQ ID NO: 36650 - DNA, 101 bp, Homo sapiens
wgccaccctatgctgcctgcccctccttcagcccctgctcccatctccatccccagcacaacccccacaccccttccttcacctcctgcacagcccccacc

SEQ ID NO: 36651 - DNA, 201 bp, Homo sapiens; identical to SEQ ID NO: 36559

SEQ ID NO: 36652 - DNA, 201 bp, Homo sapiens; identical to SEQ ID NO: 36533

SEQ ID NO: 36653 - DNA, 136 bp, Homo sapiens
tgccaccctatgctgcctgcccctccttcagccccygctcccatctccatccccagcacaacccccacaccccttccttcacctcctgcacagcccccaccctctgtctcctacttgcccttgcacctgcccccat

SEQ ID NO: 36654 - DNA, 201 bp, Homo sapiens; identical to SEQ ID NO: 36537

SEQ ID NO: 36655 - DNA, 201 bp, Homo sapiens
tctggatgtattagatgtaaaatagtagcttttcaaagctttaaatgtgtagaactcatctaagtaaattctgctgtgaccaatcccatgtactcagaacrttacccatctaaagcatttttcatatctcaactaagataactttcagcacgtgcttaaatatcaaggcagttgtcatttggaagtcacttgtgaatagat

SEQ ID NO: 36656 - DNA, 201 bp, Homo sapiens
gtgtgaaagttctaggcatattggctatgattgacgaaggggaaaccgactggaaagtcattgccattaatatggatgatcctgatgcaggcaattatacygatatcagtgatgtcaaacggctgaaacccggctacttagaggctactgtggactggtttagaaggtataaggttcctgatggaaaaccagaaaatgagt

SEQ ID NO: 36657 - DNA, 201 bp, Homo sapiens
acttgggaagacccagggcacaatgataaacatactggctgttgtggtgacaatgacccaattgatgtgtgtgaaattggaagcaaggtatgtgcaagagrtgaaataattggtgtgaaagttctaggcatattggctatgattgacgaaggggaaaccgactggaaagtcattgccattaatatggatgatcctgatgca

SEQ ID NO: 36658 - DNA, 201 bp, Homo sapiens
aaaggacaatatatgtctccatttcaagatattccaatttatgcagataaggatgtgttccacgtggtagttgaagtaccactgtggtctaatgcaaaaakggaggttgctacaaaggaccctttaaaccccattaaacaagatgtgaaaaaaagaaaacttcgctatgttgcgaatttgttcccgtataaaggatatgtc

SEQ ID NO: 36659 - DNA, 201 bp, Homo sapiens
ttctggaatttgtcgatatcacagcctccaaccacactaacaagattcaagattacttgcaacagctcacaggagcgagaatggtgcctcgagtctttatyggtaaagattgtataggcggatgcagtgatctagtctctatgcaacagattggggaactgctgacgcggctaaagcagattggagctctgcagtaaccac

SEQ ID NO: 36660 - DNA, 201 bp, Homo sapiens; identical to SEQ ID NO: 36659

SEQ ID NO: 36661 - DNA, 201 bp, Homo sapiens
cctcaacaaatttaagggttatatggagcatcctgaccagaccaggactggctttggctgtgagagtcttctgcttcgaggctgcaccatcagaaacacckagatggctgttggcattgtcatctatgcaggccatgagacgaaagccatgctgaacaacagtggcccccggtacaaacgcagcaagattgagcggcgcat

SEQ ID NO: 36662 - DNA, 201 bp, Homo sapiens
tttttttcatatgtttgttggctgcataaatgtcttcttttgagaagtgtctgttcatatccttcacccattttttgaagaaaacaaactcttaagagagmagtattcattcttttgagtgtgagggatggagaaagagaaagatggagagagtattataagcagctgtatcccctttgccatggtgatagcagaccattc

SEQ ID NO: 36663 - DNA, 104 bp, Homo sapiens
ttgtaataataataagagccacattaccagtacttagagtatgctagttattttaacacattgtatcattaaatcttcaaaacatccctatgagttagaamcct

SEQ ID NO: 36664 - DNA, 201 bp, Homo sapiens
atttgtactcccaccaacagtgtaaaagtattcctgtttctctacatcctcttcagcatctgttgtgtcctgacattttaatgatcactattctcactggygtgagatgttatctcattgtggttttgatttgcatttctctaatgaccagtaatgatgagctttttttcatatgtttgttggctgcataaatgtcttctt

SEQ ID NO: 36665 - DNA, 201 bp, Homo sapiens
gtccatgtgttctcattgttcaattcccacttatgagtgagaacatgcagtatttggttttctgttcttgtgttagtttgctgatggtttcctgttcatcygtgtccctgcaaaggacatgaactcatccttttttatggctgcataatattccatggtgtatatgtgccacattttctttatccagtctatcgctgatgg

SEQ ID NO: 36666 - DNA, 201 bp, Homo sapiens
tgtcccagcagacatactcctccttttttcctctgaccccaatgggatatgccatctggaaactgccagcttggatggagagacaaacctcaagcaaagaygtgtcgtgaagggcttctcacagcaggaggtacagttcgaaccagagcttttccacaataccatcgtgtgtgagaaacccaacaaccacctcaacaaatt

SEQ ID NO: 36667 - DNA, 201 bp, Homo sapiens
tccggaggtacaaatcggataaagtcatcaataaccgagagtgcctcatctacagcagaaaagagcagacctatgtgcagaagtgctggaaggatgtgcgygtgggagacttcatccaaatgaaatgcaatgagattgtcccagcagacatactcctccttttttcctctgaccccaatgggatatgccatctggaaactg

SEQ ID NO: 36668 - DNA, 201 bp, Homo sapiens
tgcctggactgttaccttgcatggactgaatatgactcataaaactgatctgattccttcagccatcatctgcccaacttcgttcccctccccaccccccsacaacacacacacacactttctaagaaaagaaaagaaattcttttttttcaatactttaagttctgggatacatgtgcagaatgtgcaggtttgttacat

SEQ ID NO: 36669 - DNA, 201 bp, Homo sapiens
gtactacctctacaagaacgtgtgctacgtcaacctgctcttctggtatcagttcttctgtggtttctccagctccaccatgattgattactggcagatgrtattcttcaatctcttctttacctccttgcctcctcttgtctttggagtccttgacaaagacatctctgcagaaacactcctggcattgcctgagctata

SEQ ID NO: 36670 - DNA, 201 bp, Homo sapiens; identical to SEQ ID NO: 36661

SEQ ID NO: 36671 - DNA, 201 bp, Homo sapiens
ctacaccaagggtgctgactcggtcatcatggacctgctggaagacccagcctgcgtacctgacattaatatggaaaagaagctgagaaaaatccgagccyggacccaaaagcatctagacttgtatgcaagagatggcctgcgcacactatgcattgccaagaaggttgtaagcgaagaggacttccggagatgggccag

SEQ ID NO: 36672 - DNA, 201 bp, Homo sapiens
agtgtcatctatcacaggacaggacttcagtgccagcaccccaaagagctctaaccctcccaagaggaagcatgtggaagagtcagtactccacgaacagrgatgtggcacggagtgcatgagggatgactcatgctcaggggactcctcagctcaactctcatccggggagcacctgctgggacctaacaggataatggc

SEQ ID NO: 36673 - DNA, 201 bp, Homo sapiens
tcccaagaggaagcatgtggaagagtcagtactccacgaacagagatgtggcacggagtgcatgagggatgactcatgctcaggggactcctcagctcaaytctcatccggggagcacctgctgggacctaacaggataatggcctactcaagaggacagactgatatgtgccggtgctcaaagaggagcagccatcgccg

SEQ ID NO: 36674 - DNA, 201 bp, Homo sapiens
atggcctgcgcacactatgcattgccaagaaggttgtaagcgaagaggacttccggagatgggccagtttccggcgtgaggctgaggcatccctcgacaamcgagatgagcttctcatggaaactgcacagcatctggagaatcaactcaccttacttggagccactgggatcgaagaccggctgcaggaaggagttccag

SEQ ID NO: 36675 - DNA, 201 bp, Homo sapiens
gtttataccatcaatacagagaatcaggagacctgtgaatccatcctcaattgtgcattggaagagctaaagcaatttcgtgaactacagaagccagaccrcaagctctttggattccgcttaccttccaagacaccatccatcacctcagaagctgtggttccagaagctggattggtcatcgatgggaagacattgaat

SEQ ID NO: 36676 - DNA, 201 bp, Homo sapiens
caactcaccacccagtgtcatctatcacaggacaggacttcagtgccagcaccccaaagagctctaaccctcccaagaggaagcatgtggaagagtcagtrctccacgaacagagatgtggcacggagtgcatgagggatgactcatgctcaggggactcctcagctcaactctcatccggggagcacctgctgggaccta

SEQ ID NO: 36677 - DNA, 201 bp, Homo sapiens; identical to SEQ ID NO: 36666

SEQ ID NO: 36678 - DNA, 201 bp, Homo sapiens
gaagcagacagaggcctgcccctgtccccgaagtggctcgaccaactcaccacccagtgtcatctatcacaggacaggacttcagtgccagcaccccaaaragctctaaccctcccaagaggaagcatgtggaagagtcagtactccacgaacagagatgtggcacggagtgcatgagggatgactcatgctcaggggact

SEQ ID NO: 36679 - DNA, 201 bp, Homo sapiens
agaaaattgacaaactccccccagacaaaagaaacctggaaatccagagttggagaagcagacagaggcctgcccctgtccccgaagtggctcgaccaacycaccacccagtgtcatctatcacaggacaggacttcagtgccagcaccccaaagagctctaaccctcccaagaggaagcatgtggaagagtcagtactcc

SEQ ID NO: 36680 - DNA, 201 bp, Homo sapiens; identical to SEQ ID NO: 36667

SEQ ID NO: 36681 - DNA, 201 bp, Homo sapiens
ctcagaaaattgacaaactccccccagacaaaagaaacctggaaatccagagttggagaagcagacagaggcctgcccctgtccccgaagtggctcgaccmactcaccacccagtgtcatctatcacaggacaggacttcagtgccagcaccccaaagagctctaaccctcccaagaggaagcatgtggaagagtcagtac

SEQ ID NO: 36682 - DNA, 201 bp, Homo sapiens
ctcatccactgcaccctctgacacagacctcggggagagcttaggggccaacgtggccaccacagactcggatgagagagatgatgcatctgtgtgcagtrgaggtgactccactgatgacggtggctacaggagcagcatgtgggaccagggcgacatcctggagtctgggtcaggcacttccttggaggaggcattgga

SEQ ID NO: 36683 - DNA, 201 bp, Homo sapiens
atattcggggacaatctgacatagcaattactaaagatatgtttgaagaagcactgcgtgccctggcagatgatgatttcctgacagtgactgggaagacygtgcgcttgctctgaagccttgtgagcaaggaaggctccctgcatctcagttggccgccatcagtgtaaatagagcttaaagtcatggtttggctgcata

SEQ ID NO: 36684 - DNA, 201 bp, Homo sapiens
gcagtctgacggggcagcagcagaagatatagtggcaagtgagcagtctctaggccaaaaacttgtgatctggggaacagatgtaaatgtggcagcatgcraagaaaactttcagagatttcttcagcgttttattgaccctctggctaaagaagaagaaaatgttggcatagatattactgaacctctatacatgcaacg

SEQ ID NO: 36685 - DNA, 201 bp, Homo sapiens
agcaaatcccattgagtctcagtggaatcctaaaaaaacaaccattgaaaacatccagctgcctcatactttattatcaaggtttgatttgatcttcctcwtgctggaccctcaggacgaagcctatgacaggcgtctggctcaccacctggtcgcactgtactaccagagcgaggagcaggcagaggaggagctcctgga

SEQ ID NO: 36686 - DNA, 201 bp, Homo sapiens
gcatctgtaatgtccttattaaccaaaaacgcctaagggataaagaagcacacgctccctagccaacgctagaggaacacaccccgagagctggtgctgtmggacccagttttcccgcgaaaacgctgccgcgcagggggtcagaccatctggaccaaggggggccgagcgaggcctacttctggtttacgcacgggcgct

SEQ ID NO: 36687 - DNA, 201 bp, Homo sapiens
agatagggtcttactctgtcaccctggctagagtacactggtacaatcacggctcaatgtaggcttaacctcctgggctcaggtgtatgtcactatgcccrgctactttttgtattttttggtagagacggcttcgccacgttgcccaggctgcaagcgatatgcctaggctcaagcgatctgcccacctcaacttccgga

SEQ ID NO: 36688 - DNA, 201 bp, Homo sapiens
acctcctgggctcaggtgtatgtcactatgcccggctactttttgtattttttggtagagacggcttcgccacgttgcccaggctgcaagcgatatgcctrggctcaagcgatctgcccacctcaacttccggaagtgctgagattacaggtgtgagccactgcacccagcctttgttttattttttattttttgagaggt

SEQ ID NO: 36689 - DNA, 201 bp, Homo sapiens
gtcacactggaaggggcaaatttcgggctgagatcaacatcttgctgtgtggcgaccctggtaccagcaagtcccagctgctgcagtacgtgtacaacctygtccccaggggccagtacacgtctgggaagggctccagtgcagttggcctcactgcgtacgtaatgaaagaccctgagacaaggcagctggtcctgcaga

SEQ ID NO: 36690 - DNA, 201 bp, Homo sapiens
acagttatcctgtttgctcacaatgatctcgttgacaaggtccagcctggggacagagtgaatgttacaggcatctatcgagctgtgcctattcgagtcartccaagagtgagtaatgtgaagtctgtctacaaaacccacattgatgtcattcattatcggaaaacggatgcaaaacgtctgcatggccttgatgaagaa

SEQ ID NO: 36691 - DNA, 201 bp, Homo sapiens
tctcctaagcagcaccctcccctcctcctggttttggtaaccaaaagtaacaatccatcaacctccattgtacctagaacaaaaatagccaataaaaacgytgagttgtgaagtccaatcaggcacttctaactcaccccaagctcgccatctggaaaaacagaccagaaggctctcttctacagaaatgaactgtgggga

SEQ ID NO: 36692 - DNA, 201 bp, Homo sapiens
gctagggaacttgaatgcttcaggggacagaaagagagcactttcgacacagtgcttcccagagtgagcttggcagggccaggcggggccaaattccatcwgctgccttgttactcttgctttttgtgctcttaaatggctccatataatcttctacttacatgttccttggcttttttctcttcaaccttttccagctta

SEQ ID NO: 36693 - DNA, 201 bp, Homo sapiens
ggaactttgaaataaccaatcaaagttttaatattgtggacattaagccagccaacatggaggagctcacggaggtgatcacagcagccgagttccacccscatcattgcaacaccttcgtgtacagcagcagcaaagggacaatccggctgtgtgacatgcgggcatctgccctgtgtgacaggcacaccaaattttttg

SEQ ID NO: 36694 - DNA, 201 bp, Homo sapiens
caggcggggccaaattccatctgctgccttgttactcttgctttttgtgctcttaaatggctccatataatcttctacttacatgttccttggcttttttytcttcaaccttttccagcttatttattccattgacttctaaaggccgagtcctgggtgcttattatctggtgttctaaatgaagcagtaagttggaagca

SEQ ID NO: 36695 - DNA, 201 bp, Homo sapiens; identical to SEQ ID NO: 36691

SEQ ID NO: 36696 - DNA, 201 bp, Homo sapiens; identical to SEQ ID NO: 36692

SEQ ID NO: 36697 - DNA, 201 bp, Homo sapiens; identical to SEQ ID NO: 36693

SEQ ID NO: 36698 - DNA, 201 bp, Homo sapiens; identical to SEQ ID NO: 36694

SEQ ID NO: 36699 - DNA, 201 bp, Homo sapiens; identical to SEQ ID NO: 36691

SEQ ID NO: 36700 - DNA, 201 bp, Homo sapiens; identical to SEQ ID NO: 36692

SEQ ID NO: 36701 - DNA, 201 bp, Homo sapiens; identical to SEQ ID NO: 36693

SEQ ID NO: 36702 - DNA, 201 bp, Homo sapiens; identical to SEQ ID NO: 36694

SEQ ID NO: 36703 - DNA, 111 bp, Homo sapiens
gcaaatcctgytcagaggagcttcagccaatgaagaggctatatcccggcttgcttgggggcttctgagtttgagctgcatgcagaaatgtaaggcagtgcttcctggcgc

SEQ ID NO: 36704 - DNA, 201 bp, Homo sapiens; identical to SEQ ID NO: 36691

SEQ ID NO: 36705 - DNA, 201 bp, Homo sapiens; identical to SEQ ID NO: 36692

SEQ ID NO: 36706 - DNA, 201 bp, Homo sapiens; identical to SEQ ID NO: 36693

SEQ ID NO: 36707 - DNA, 201 bp, Homo sapiens; identical to SEQ ID NO: 36694

SEQ ID NO: 36708 - DNA, 201 bp, Homo sapiens; identical to SEQ ID NO: 36691

SEQ ID NO: 36709 - DNA, 201 bp, Homo sapiens; identical to SEQ ID NO: 36692

SEQ ID NO: 36710 - DNA, 201 bp, Homo sapiens; identical to SEQ ID NO: 36693

SEQ ID NO: 36711 - DNA, 201 bp, Homo sapiens; identical to SEQ ID NO: 36694

SEQ ID NO: 36712 - DNA, 201 bp, Homo sapiens; identical to SEQ ID NO: 36691

SEQ ID NO: 36713 - DNA, 201 bp, Homo sapiens; identical to SEQ ID NO: 36692

SEQ ID NO: 36714 - DNA, 201 bp, Homo sapiens; identical to SEQ ID NO: 36693

SEQ ID NO: 36715 - DNA, 201 bp, Homo sapiens; identical to SEQ ID NO: 36694

SEQ ID NO: 36716 - DNA, 201 bp, Homo sapiens
acttttagtattaccgatggggaaaaaaaaactactgttaacactgctaatgaaagaaaatgccctttaactttctaatgattatagataaatataatatrcgtctttttcacaatatcctatgatttttagactaggctctagtgttcagaattcatgaaattatccatggtaaaaactagttataaaaattacataatt

SEQ ID NO: 36717 - DNA, 201 bp, Homo sapiens
cttttagtattaccgatggggaaaaaaaaactactgttaacactgctaatgaaagaaaatgccctttaactttctaatgattatagataaatataatatgygtctttttcacaatatcctatgatttttagactaggctctagtgttcagaattcatgaaattatccatggtaaaaactagttataaaaattacataattc

SEQ ID NO: 36718 - DNA, 201 bp, Homo sapiens
gaagacttagaatagaaacttttagtattaccgatggggaaaaaaaaactactgttaacactgctaatgaaagaaaatgccctttaactttctaatgattrtagataaatataatatgcgtctttttcacaatatcctatgatttttagactaggctctagtgttcagaattcatgaaattatccatggtaaaaactagtt

SEQ ID NO: 36719 - DNA, 201 bp, Homo sapiens
gagtgaagaagcatatgagaaatacataaaatctattgaggagtgaaaatggaactcctaaataaactagtatgaaataacgcaagccagcagagttgtcytaaattagtggtggatagaagacttagaatagaaacttttagtattaccgatggggaaaaaaaaactactgttaacactgctaatgaaagaaaatgccct

SEQ ID NO: 36720 - DNA, 201 bp, Homo sapiens
gtaaattcacagagaaacacgaatgggtaacaacagaaaatggcattggaacagtgggaatcagcaattttgcacaggaagcgttgggagatgttgtttaytgtagtctccctgaagttgggacaaaattgaacaaacaagatgagtttggtgctttggaaagtgtgaaagctgctagtgaactctattctcctttatcag

SEQ ID NO: 36721 - DNA, 201 bp, Homo sapiens
cagagaaacacgaatgggtaacaacagaaaatggcattggaacagtgggaatcagcaattttgcacaggaagcgttgggagatgttgtttattgtagtctscctgaagttgggacaaaattgaacaaacaagatgagtttggtgctttggaaagtgtgaaagctgctagtgaactctattctcctttatcaggagaagtaa

SEQ ID NO: 36722 - DNA, 181 bp, Homo sapiens
ttggctgatcaagatgacactgagtaacccttcagaactagatgaacttatgagtgaagaagcatatgagaaatacataaaatctattgaggaagttgtcytaaattagtggtggatagaagacttagaatagaaacttttagtattaccgatggggaaaaaaaaactactgttaacactg

SEQ ID NO: 36723 - DNA, 201 bp, Homo sapiens
catgtatccatacctggatttgggatgaaatacttaatgatctttccattggaaataactggaagtgaagaggttttgttgcttgtacagtgtcagatgargaacaccactatcttaattttgcgatacactgcatttgctggtgctatttttatacagtgaagcaacagctttgcagcaaaataataaaatacttcttcg

SEQ ID NO: 36724 - DNA, 201 bp, Homo sapiens; identical to SEQ ID NO: 36719

SEQ ID NO: 36725 - DNA, 201 bp, Homo sapiens
cttcccaaagtactgggattacaggcatgagccaccgtgcccggcccttaaagatttaaatgtcattttctgatgcttattacaacctaagagttcttaatttattatggtggaatctattctagccataattattttcatttgttatatacaagtattttaattcttaaggctaaaatttaaagttctatgaacaaataa

SEQ ID NO: 36726 - DNA, 201 bp, Homo sapiens
ttcccaaagtactgggattacaggcatgagccaccgtgcccggcccttaaagatttaaatgtcattttctgatgcttattacaacctaagagttcttaatttattatggtggaatctattctagccataattattttcatttgttatatacaagtattttaattcttaaggctaaaatttaaagttctatgaacaaataat

SEQ ID NO: 36727 - DNA, 201 bp, Homo sapiens
ccaaagtactgggattacaggcatgagccaccgtgcccggcccttaaagatttaaatgtcattttctgatgcttattacaacctaagagttcttaatttattatggtggaatctattctagccataattattttcatttgttatatacaagtattttaattcttaaggctaaaatttaaagttctatgaacaaataatgta

SEQ ID NO: 36728 - DNA, 201 bp, Homo sapiens; identical to SEQ ID NO: 36720

SEQ ID NO: 36729 - DNA, 201 bp, Homo sapiens
caaagtactgggattacaggcatgagccaccgtgcccggcccttaaagatttaaatgtcattttctgatgcttattacaacctaagagttcttaatttattatggtggaatctattctagccataattattttcatttgttatatacaagtattttaattcttaaggctaaaatttaaagttctatgaacaaataatgtat

SEQ ID NO: 36730 - DNA, 201 bp, Homo sapiens; identical to SEQ ID NO: 36716

SEQ ID NO: 36731 - DNA, 201 bp, Homo sapiens; identical to SEQ ID NO: 36721

SEQ ID NO: 36732 - DNA, 201 bp, Homo sapiens; identical to SEQ ID NO: 36717

SEQ ID NO: 36733 - DNA, 201 bp, Homo sapiens
tatccatggtaaaaactagttataaaaattacataattcaaagataacattgttattcttaagccttatataatattgtaacttgcatgtatccatacctrgatttgggatgaaatacttaatgatctttccattggaaataactggaagtgaagaggttttgttgcttgtacagtgtcagatgaggaacaccactatctt

SEQ ID NO: 36734 - DNA, 201 bp, Homo sapiens
gttaatcatgtttgttttgatgttaatatttcatttagtaactctgctagtatttgtgaaagtgctaactttaacttacggaaagttactttttaaaaggmaatttaagccagaacaatgcaaagctccaagaaaatgttttctttagtcacaaatctggtttttcttaagccaagatctgtcacctttaacataataaaa

SEQ ID NO: 36735 - DNA, 201 bp, Homo sapiens
agcttcccagtagctgggatcaagggcaactgccaccacgcccagctaatttttgtggttttggtagagatggggttccactatgttggccaggctggtcyagagctcctagcctcaagtgatttgcttgccttcgcttcccaaagtactgggattacaggcatgagccaccgtgcccggcccttaaagatttaaatgtca

SEQ ID NO: 36736 - DNA, 201 bp, Homo sapiens
tacttcttcgttaatcatgtttgttttgatgttaatatttcatttagtaactctgctagtatttgtgaaagtgctaactttaacttacggaaagttacttyttaaaaggaaatttaagccagaacaatgcaaagctccaagaaaatgttttctttagtcacaaatctggtttttcttaagccaagatctgtcacctttaac

SEQ ID NO: 36737 - DNA, 201 bp, Homo sapiens
agcaaaataataaaatacttcttcgttaatcatgtttgttttgatgttaatatttcatttagtaactctgctagtatttgtgaaagtgctaactttaactyacggaaagttactttttaaaaggaaatttaagccagaacaatgcaaagctccaagaaaatgttttctttagtcacaaatctggtttttcttaagccaaga

SEQ ID NO: 36738 - DNA, 201 bp, Homo sapiens
gatgaaatacttaatgatctttccattggaaataactggaagtgaagaggttttgttgcttgtacagtgtcagatgaggaacaccactatcttaattttgygatacactgcatttgctggtgctatttttatacagtgaagcaacagctttgcagcaaaataataaaatacttcttcgttaatcatgtttgttttgatgtt

SEQ ID NO: 36739 - DNA, 201 bp, Homo sapiens; identical to SEQ ID NO: 36718

SEQ ID NO: 36740 - DNA, 201 bp, Homo sapiens
tcttaagccttatataatattgtaacttgcatgtatccatacctggatttgggatgaaatacttaatgatctttccattggaaataactggaagtgaagargttttgttgcttgtacagtgtcagatgaggaacaccactatcttaattttgcgatacactgcatttgctggtgctatttttatacagtgaagcaacagct

SEQ ID NO: 36741 - DNA, 201 bp, Homo sapiens; identical to SEQ ID NO: 36734

SEQ ID NO: 36742 - DNA, 201 bp, Homo sapiens; identical to SEQ ID NO: 36723

SEQ ID NO: 36743 - DNA, 201 bp, Homo sapiens; identical to SEQ ID NO: 36736

SEQ ID NO: 36744 - DNA, 201 bp, Homo sapiens; identical to SEQ ID NO: 36737

SEQ ID NO: 36745 - DNA, 201 bp, Homo sapiens; identical to SEQ ID NO: 36738

SEQ ID NO: 36746 - DNA, 201 bp, Homo sapiens; identical to SEQ ID NO: 36719

SEQ ID NO: 36747 - DNA, 201 bp, Homo sapiens; identical to SEQ ID NO: 36720

SEQ ID NO: 36748 - DNA, 201 bp, Homo sapiens; identical to SEQ ID NO: 36716

SEQ ID NO: 36749 - DNA, 201 bp, Homo sapiens; identical to SEQ ID NO: 36721

SEQ ID NO: 36750 - DNA, 201 bp, Homo sapiens; identical to SEQ ID NO: 36717

SEQ ID NO: 36751 - DNA, 201 bp, Homo sapiens; identical to SEQ ID NO: 36718

SEQ ID NO: 36752 - DNA, 201 bp, Homo sapiens; identical to SEQ ID NO: 36733

SEQ ID NO: 36753 - DNA, 201 bp, Homo sapiens; identical to SEQ ID NO: 36740

SEQ ID NO: 36754 - DNA, 201 bp, Homo sapiens
gtctactgctttgcttttctaacagagatggttcacttcattttgggtcgactctacaacttccagcccttcctcactcgcactgaagtttacaaaactgrtgtcacacattattttagcttagagaaagccaagaaagagctaggttataaggctcagccatttgacctccaggaagcagtggaatggtttaaagcccat

SEQ ID NO: 36755 - DNA, 165 bp, Homo sapiens
gtctgccgcgcccttgttcctgcagctggcggaggaaacagaggttcagtgaattgcctagggtmacacagggaattggtggaagagccaagtctaatgcccagatttccaaactgggagtcttaacccttcatcagtgctacctgtgccacatgggagaagatg

SEQ ID NO: 36756 - DNA, 201 bp, Homo sapiens
ccgtgaacaactttgagttcttccggcctctggttgagggcctgggctacacattcccgtctacccgcctgccattgaccttggtctactgctttgctttyctaacagagatggttcacttcattttgggtcgactctacaacttccagcccttcctcactcgcactgaagtttacaaaactggtgtcacacattatttta

SEQ ID NO: 36757 - DNA, 201 bp, Homo sapiens
agggcctgggctacacattcccgtctacccgcctgccattgaccttggtctactgctttgcttttctaacagagatggttcacttcattttgggtcgactytacaacttccagcccttcctcactcgcactgaagtttacaaaactggtgtcacacattattttagcttagagaaagccaagaaagagctaggttataagg

SEQ ID NO: 36758 - DNA, 189 bp, Homo sapiens
gtctgccgcgcccttgttcctgcagctggcggaggaaacagaggttcagtgaattgcctagggtcacacagggaattggtggaagagcsaagtctaatgcccagatttccaaactgggagtcttaacccttcatcagtgctacctgtgccacatgggagaagatgggccacctccaattcattttctct

SEQ ID NO: 36759 - DNA, 201 bp, Homo sapiens
aatttatatggctgtggaaaaacgaattaaaatgttttgaggagaaagactttttcacttctttgttgctttcttttctattgagtctgggcttgtttgtrttactgcatactgtgattagcataataattgtttctttgaggtcatctaaatatttttttcctaaaggaataaagggtgaggaaagaaaaatattaaaaa

SEQ ID NO: 36760 - DNA, 201 bp, Homo sapiens
attctttattatcggaagacaataggctataaggttccaaggaatcctgatatcccaaatccagctctggctcaaagagaagagcaaaaaaagattgatgsagctgaacctcttacaccagaagagactgaagaaaaggaaaaacttctcacacaaggtttcacaaactggactaaacgagattttaaccagtttattaaa

SEQ ID NO: 36761 - DNA, 201 bp, Homo sapiens; identical to SEQ ID NO: 36759

SEQ ID NO: 36762 - DNA, 201 bp, Homo sapiens; identical to SEQ ID NO: 36760

SEQ ID NO: 36763 - DNA, 201 bp, Homo sapiens; identical to SEQ ID NO: 36759

SEQ ID NO: 36764 - DNA, 201 bp, Homo sapiens; identical to SEQ ID NO: 36760

SEQ ID NO: 36765 - DNA, 201 bp, Homo sapiens
tctatgagatatttacatcgttttggtgctaaatgtattgctgttggtgagtctgatgggagtatatggaatccagatggtattgacccaaaggaactggmagacttcaaattgcaacatgggtccattctgggcttccccaaggcaaagccctatgaaggaagcatcttggaggtcgactgtgacatactgatcccagct

SEQ ID NO: 36766 - DNA, 201 bp, Homo sapiens
aatgaagcttcttacatgagcattttaggaatgacaccagggtttagagataaaacatttgttgttcagggatttggtaatgtgggcctacactctatgaratatttacatcgttttggtgctaaatgtattgctgttggtgagtctgatgggagtatatggaatccagatggtattgacccaaaggaactggaagacttc

SEQ ID NO: 36767 - DNA, 201 bp, Homo sapiens
gattctaactaccacttgctcctgtctgttcaagagagtttagaaagaaaatttggaaagcatggtggaactattcccattgtacccacggcagagttccragacagtatatcgggtgcatctgagaaagacattgtgcactctgccttggcatacacaatggagcgttctgccaggcaaattatgcacacagccatgaag

SEQ ID NO: 36768 - DNA, 201 bp, Homo sapiens
gggattctaactaccacttgctcctgtctgttcaagagagtttagaaagaaaatttggaaagcatggtggaactattcccattgtacccacggcagagttmcaagacagtatatcgggtgcatctgagaaagacattgtgcactctgccttggcatacacaatggagcgttctgccaggcaaattatgcacacagccatga

SEQ ID NO: 36769 - DNA, 201 bp, Homo sapiens
cttgctcctgtctgttcaagagagtttagaaagaaaatttggaaagcatggtggaactattcccattgtacccacggcagagttccaagacagtatatcgvgtgcatctgagaaagacattgtgcactctgccttggcatacacaatggagcgttctgccaggcaaattatgcacacagccatgaagtataacctgggatt

SEQ ID NO: 36770 - DNA, 201 bp, Homo sapiens
ttactttgagtggctgaagaatctaaatcatgtcagctatggccgtttgaccttcaaatatgaaagggattctaactaccacttgctcctgtctgttcaakagagtttagaaagaaaatttggaaagcatggtggaactattcccattgtacccacggcagagttccaagacagtatatcgggtgcatctgagaaagacat

SEQ ID NO: 36771 - DNA, 201 bp, Homo sapiens
ccacttgctcctgtctgttcaagagagtttagaaagaaaatttggaaagcatggtggaactattcccattgtacccacggcagagttccaagacagtatakcgggtgcatctgagaaagacattgtgcactctgccttggcatacacaatggagcgttctgccaggcaaattatgcacacagccatgaagtataacctggg

SEQ ID NO: 36772 - DNA, 201 bp, Homo sapiens
ttgctcctgtctgttcaagagagtttagaaagaaaatttggaaagcatggtggaactattcccattgtacccacggcagagttccaagacagtatatcggdtgcatctgagaaagacattgtgcactctgccttggcatacacaatggagcgttctgccaggcaaattatgcacacagccatgaagtataacctgggattg

SEQ ID NO: 36773 - DNA, 201 bp, Homo sapiens
cacttgctcctgtctgttcaagagagtttagaaagaaaatttggaaagcatggtggaactattcccattgtacccacggcagagttccaagacagtatatygggtgcatctgagaaagacattgtgcactctgccttggcatacacaatggagcgttctgccaggcaaattatgcacacagccatgaagtataacctggga

SEQ ID NO: 36774 - DNA, 201 bp, Homo sapiens
tttagaaagaaaatttggaaagcatggtggaactattcccattgtacccacggcagagttccaagacagtatatcgggtgcatctgagaaagacattgtgyactctgccttggcatacacaatggagcgttctgccaggcaaattatgcacacagccatgaagtataacctgggattggacctgagaacagctgcctatgt

SEQ ID NO: 36775 - DNA, 201 bp, Homo sapiens
cctgtctgttcaagagagtttagaaagaaaatttggaaagcatggtggaactattcccattgtacccacggcagagttccaagacagtatatcgggtgcayctgagaaagacattgtgcactctgccttggcatacacaatggagcgttctgccaggcaaattatgcacacagccatgaagtataacctgggattggacct

SEQ ID NO: 36776 - DNA, 201 bp, Homo sapiens
tacatgagcattttaggaatgacaccagggtttagagataaaacatttgttgttcagggatttggtaatgtgggcctacactctatgagatatttacatcrttttggtgctaaatgtattgctgttggtgagtctgatgggagtatatggaatccagatggtattgacccaaaggaactggaagacttcaaattgcaacat

SEQ ID NO: 36777 - DNA, 201 bp, Homo sapiens
tggaggagtgacagtatcttactttgagtggctgaagaatctaaatcatgtcagctatggccgtttgaccttcaaatatgaaagggattctaactaccacktgctcctgtctgttcaagagagtttagaaagaaaatttggaaagcatggtggaactattcccattgtacccacggcagagttccaagacagtatatcggg

SEQ ID NO: 36778 - DNA, 201 bp, Homo sapiens
gctcctgtctgttcaagagagtttagaaagaaaatttggaaagcatggtggaactattcccattgtacccacggcagagttccaagacagtatatcgggtrcatctgagaaagacattgtgcactctgccttggcatacacaatggagcgttctgccaggcaaattatgcacacagccatgaagtataacctgggattgga

SEQ ID NO: 36779 - DNA, 201 bp, Homo sapiens
tgttcaagagagtttagaaagaaaatttggaaagcatggtggaactattcccattgtacccacggcagagttccaagacagtatatcgggtgcatctgagraagacattgtgcactctgccttggcatacacaatggagcgttctgccaggcaaattatgcacacagccatgaagtataacctgggattggacctgagaac

SEQ ID NO: 36780 - DNA, 201 bp, Homo sapiens
ttgaatgctggaggagtgacagtatcttactttgagtggctgaagaatctaaatcatgtcagctatggccgtttgaccttcaaatatgaaagggattctamctaccacttgctcctgtctgttcaagagagtttagaaagaaaatttggaaagcatggtggaactattcccattgtacccacggcagagttccaagacagt

SEQ ID NO: 36781 - DNA, 201 bp, Homo sapiens
tgccagcaccatagggcactatgatattaatgcacacgcctgtgttactggtaaacccatcagccaagggggaatccatggacgcatctctgctactggcygtggtgtcttccatgggattgaaaacttcatcaatgaagcttcttacatgagcattttaggaatgacaccagggtttagagataaaacatttgttgttca

SEQ ID NO: 36782 - DNA, 201 bp, Homo sapiens
ccagctgccactgagaagcagttgaccaaatccaacgcacccagagtcaaagccaagatcattgctgaaggtgccaatgggccaacaactccagaagctgrtaagatcttcctggagagaaacattttggttattccagatctctacttgaatgctggaggagtgacagtatcttactttgagtggctgaagaatctaaat

SEQ ID NO: 36783 - DNA, 201 bp, Homo sapiens; identical to SEQ ID NO: 36765

SEQ ID NO: 36784 - DNA, 201 bp, Homo sapiens; identical to SEQ ID NO: 36766

SEQ ID NO: 36785 - DNA, 201 bp, Homo sapiens; identical to SEQ ID NO: 36767

SEQ ID NO: 36786 - DNA, 201 bp, Homo sapiens; identical to SEQ ID NO: 36768

SEQ ID NO: 36787 - DNA, 201 bp, Homo sapiens; identical to SEQ ID NO: 36769

SEQ ID NO: 36788 - DNA, 201 bp, Homo sapiens; identical to SEQ ID NO: 36770

SEQ ID NO: 36789 - DNA, 201 bp, Homo sapiens; identical to SEQ ID NO: 36771

SEQ ID NO: 36790 - DNA, 201 bp, Homo sapiens; identical to SEQ ID NO: 36772

SEQ ID NO: 36791 - DNA, 201 bp, Homo sapiens; identical to SEQ ID NO: 36773

SEQ ID NO: 36792 - DNA, 201 bp, Homo sapiens; identical to SEQ ID NO: 36774

SEQ ID NO: 36793 - DNA, 201 bp, Homo sapiens; identical to SEQ ID NO: 36775

SEQ ID NO: 36794 - DNA, 201 bp, Homo sapiens; identical to SEQ ID NO: 36776

SEQ ID NO: 36795 - DNA, 201 bp, Homo sapiens; identical to SEQ ID NO: 36777

SEQ ID NO: 36796 - DNA, 201 bp, Homo sapiens; identical to SEQ ID NO: 36778

SEQ ID NO: 36797 - DNA, 201 bp, Homo sapiens; identical to SEQ ID NO: 36779

SEQ ID NO: 36798 - DNA, 201 bp, Homo sapiens; identical to SEQ ID NO: 36780

SEQ ID NO: 36799 - DNA, 201 bp, Homo sapiens; identical to SEQ ID NO: 36781

SEQ ID NO: 36800 - DNA, 201 bp, Homo sapiens; identical to SEQ ID NO: 36782

SEQ ID NO: 36801 - DNA, 109 bp, Homo sapiens
gtgtgaaggcactgctgggagccattagaacacagatacaagagaagccaggaggtctatgatggtgacgatttttaaaatcaggaaataaaagatcttgmctctaaca

SEQ ID NO: 36802 - DNA, 201 bp, Homo sapiens
gtcgcgcgccttggtttttctgttccttttttttttttttttttaacttcctgcctatacacacgcagccatcagcccacaaagacatgactaccaacgckggccccttgcacccatactggcctcagcacctaagactggacaactttgtacctaatgaccgccccacctggcatatactggctggcctcttctctgtca

SEQ ID NO: 36803 - DNA, 201 bp, Homo sapiens
tgtcaggtcgtgctgcggttgtcccattggggacttggcggcgactgtccctgtgctggtttgcagtgtgtgggttcattcacctggtgatcgagggctgsttcgttctctactacgaagacctgcttggagaccaagccttcttatctcaactctggaaagagtatgccaagggagacagccgatacatcctgggtgaca

SEQ ID NO: 36804 - DNA, 201 bp, Homo sapiens
ttcttatctcaactctggaaagagtatgccaagggagacagccgatacatcctgggtgacaacttcacagtgtgcatggaaaccatcacagcttgcctgtrgggaccactcagcctgtgggtggtgatcgcctttctccgccagcatcccctccgcttcattctacagcttgtggtctctgtgggccagatctatggggat

SEQ ID NO: 36805 - DNA, 201 bp, Homo sapiens
cagcccacaaagacatgactaccaacgcgggccccttgcacccatactggcctcagcacctaagactggacaactttgtacctaatgaccgccccacctgrcatatactggctggcctcttctctgtcacaggggtcttagtcgtgaccacatggctgttgtcaggtcgtgctgcggttgtcccattggggacttggcggc

SEQ ID NO: 36806 - DNA, 201 bp, Homo sapiens
acagagcgcgagacccagcctaaagagagcccggagccagcgtgggaggccgctgccgtcgcgcgccttggtttttctgttccttttttttttttttttttaacttcctgcctatacacacgcagccatcagcccacaaagacatgactaccaacgcgggccccttgcacccatactggcctcagcacctaagactggaca

SEQ ID NO: 36807 - DNA, 201 bp, Homo sapiens
tctggaaagagtatgccaagggagacagccgatacatcctgggtgacaacttcacagtgtgcatggaaaccatcacagcttgcctgtggggaccactcagsctgtgggtggtgatcgcctttctccgccagcatcccctccgcttcattctacagcttgtggtctctgtgggccagatctatggggatgtgctctacttcc

SEQ ID NO: 36808 - DNA, 201 bp, Homo sapiens
ccgccagcatcccctccgcttcattctacagcttgtggtctctgtgggccagatctatggggatgtgctctacttcctgacagagcaccgcgacggattcyagcacggagagctgggccaccctctctacttctggttttactttgtcttcatgaatgccctgtggctggtgctgcctggagtccttgtgcttgatgctgt

SEQ ID NO: 36809 - DNA, 201 bp, Homo sapiens
caccgcgacggattccagcacggagagctgggccaccctctctacttctggttttactttgtcttcatgaatgccctgtggctggtgctgcctggagtccytgtgcttgatgctgtgaagcacctcactcatgcccagagcacgctggatgccaaggccacaaaagccaagagcaagaagaactgaggagtggtggaccag

SEQ ID NO: 36810 - DNA, 201 bp, Homo sapiens
ttttttaacttcctgcctatacacacgcagccatcagcccacaaagacatgactaccaacgcgggccccttgcacccatactggcctcagcacctaagacyggacaactttgtacctaatgaccgccccacctggcatatactggctggcctcttctctgtcacaggggtcttagtcgtgaccacatggctgttgtcaggt

SEQ ID NO: 36811 - DNA, 201 bp, Homo sapiens
ctcttctctgtcacaggggtcttagtcgtgaccacatggctgttgtcaggtcgtgctgcggttgtcccattggggacttggcggcgactgtccctgtgctrgtttgcagtgtgtgggttcattcacctggtgatcgagggctggttcgttctctactacgaagacctgcttggagaccaagccttcttatctcaactctgg

SEQ ID NO: 36812 - DNA, 201 bp, Homo sapiens
tctgttccttttttttttttttttttaacttcctgcctatacacacgcagccatcagcccacaaagacatgactaccaacgcgggccccttgcacccatastggcctcagcacctaagactggacaactttgtacctaatgaccgccccacctggcatatactggctggcctcttctctgtcacaggggtcttagtcgtga

SEQ ID NO: 36813 - DNA, 201 bp, Homo sapiens
gactggacaactttgtacctaatgaccgccccacctggcatatactggctggcctcttctctgtcacaggggtcttagtcgtgaccacatggctgttgtcwggtcgtgctgcggttgtcccattggggacttggcggcgactgtccctgtgctggtttgcagtgtgtgggttcattcacctggtgatcgagggctggttcg

SEQ ID NO: 36814 - DNA, 201 bp, Homo sapiens
gcatatactggctggcctcttctctgtcacaggggtcttagtcgtgaccacatggctgttgtcaggtcgtgctgcggttgtcccattggggacttggcggygactgtccctgtgctggtttgcagtgtgtgggttcattcacctggtgatcgagggctggttcgttctctactacgaagacctgcttggagaccaagcctt

SEQ ID NO: 36815 - DNA, 178 bp, Homo sapiens
agggacaaagctaattgatctgtcacactcaggctcatgggcaggcacaagaaggggaataaaggggctgtgtgaaggcactgctgggagccattagaacmcagatacaagagaagccaggaggtctatgatggtgacgatttttaaaatcaggaaataaaagatcttgactctaaca

SEQ ID NO: 36816 - DNA, 201 bp, Homo sapiens
atggctgttgtcaggtcgtgctgcggttgtcccattggggacttggcggcgactgtccctgtgctggtttgcagtgtgtgggttcattcacctggtgatcragggctggttcgttctctactacgaagacctgcttggagaccaagccttcttatctcaactctggaaagagtatgccaagggagacagccgatacatcct

SEQ ID NO: 36817 - DNA, 201 bp, Homo sapiens
tggtctctgtgggccagatctatggggatgtgctctacttcctgacagagcaccgcgacggattccagcacggagagctgggccaccctctctacttctgrttttactttgtcttcatgaatgccctgtggctggtgctgcctggagtccttgtgcttgatgctgtgaagcacctcactcatgcccagagcacgctggatg

SEQ ID NO: 36818 - DNA, 201 bp, Homo sapiens
agcacctaagactggacaactttgtacctaatgaccgccccacctggcatatactggctggcctcttctctgtcacaggggtcttagtcgtgaccacatgrctgttgtcaggtcgtgctgcggttgtcccattggggacttggcggcgactgtccctgtgctggtttgcagtgtgtgggttcattcacctggtgatcgagg

SEQ ID NO: 36819 - DNA, 201 bp, Homo sapiens
aggccgctgccgtcgcgcgccttggtttttctgttccttttttttttttttttttaacttcctgcctatacacacgcagccatcagcccacaaagacatgrctaccaacgcgggccccttgcacccatactggcctcagcacctaagactggacaactttgtacctaatgaccgccccacctggcatatactggctggcct

SEQ ID NO: 36820 - DNA, 201 bp, Homo sapiens
cgcctttctccgccagcatcccctccgcttcattctacagcttgtggtctctgtgggccagatctatggggatgtgctctacttcctgacagagcaccgcracggattccagcacggagagctgggccaccctctctacttctggttttactttgtcttcatgaatgccctgtggctggtgctgcctggagtccttgtgct

SEQ ID NO: 36821 - DNA, 201 bp, Homo sapiens
gtgctctacttcctgacagagcaccgcgacggattccagcacggagagctgggccaccctctctacttctggttttactttgtcttcatgaatgccctgtrgctggtgctgcctggagtccttgtgcttgatgctgtgaagcacctcactcatgcccagagcacgctggatgccaaggccacaaaagccaagagcaagaag

SEQ ID NO: 36822 - DNA, 201 bp, Homo sapiens
aataagacatcggctatctaagcgtgtgggtgccccctttctgccagcagttctggttcttaagaaaatcaccataaatcagacatgaaaattctggctcyaaaaatagcattttctttgtgcaaataaaaacgtgtgtatcaagtatgtcacaaagccaagcccgctgcagctgccacatccctgggcttactgtgcagc

SEQ ID NO: 36823 - DNA, 201 bp, Homo sapiens
aacagaagaagagaggaagtgtttccaagcctccaaaaaagaaatcagagccaaccacagcttcccgggtcacagaagcaattcactcaccaggcggcacyactgccgtcatttcagcttctggccactgggaggcgctgcttgaaagggtttgccctgagactccaagaagaagctgcgggaaggacagcaggggccctg

SEQ ID NO: 36824 - DNA, 201 bp, Homo sapiens
ctggccactgggaggcgctgcttgaaagggtttgccctgagactccaagaagaagctgcgggaaggacagcaggggccctggggttttagcctctggcccrggagttatgtgtccataaccaaagggagcacagtctgcacccagctctcatcccatcggagctgctgcaactcccgcaggttcttccggaacaggtttag

SEQ ID NO: 36825 - DNA, 201 bp, Homo sapiens
gcaggggccctggggttttagcctctggcccgggagttatgtgtccataaccaaagggagcacagtctgcacccagctctcatcccatcggagctgctgcractcccgcaggttcttccggaacaggtttagcttgcctgcaggatcaggaaagtttgagaaaagcatctgcataatactaaagagcagagcttacctcat

SEQ ID NO: 36826 - DNA, 201 bp, Homo sapiens
cgacttcaacgggattgtgaggatcaagtcactctcatgggaagaatttttacatgggaaagcggataaaactttcattggactggaatgtttggagaatrttaatttccaaatcaggaaccacaaactgccctctaataagacatcggctatctaagcgtgtgggtgccccctttctgccagcagttctggttcttaaga

SEQ ID NO: 36827 - DNA, 201 bp, Homo sapiens
agaaaagcatctgcataatactaaagagcagagcttacctcattgcctgtccccaccgcatcccaggtcaccacctggctgaccccaggtgcccgacccamcaacagcccctaccaagttcttaactccctcacttggactcaagactcttcacgccccagcagcgctccgcctccaacttgacatcacgctttctggaaa

SEQ ID NO: 36828 - DNA, 201 bp, Homo sapiens
gcatctgcataatactaaagagcagagcttacctcattgcctgtccccaccgcatcccaggtcaccacctggctgaccccaggtgcccgacccaccaacarcccctaccaagttcttaactccctcacttggactcaagactcttcacgccccagcagcgctccgcctccaacttgacatcacgctttctggaaacttccc

SEQ ID NO: 36829 - DNA, 201 bp, Homo sapiens
gatcagatgggaagtggaagcttgtcatgaccagaaactgtttccctacaaagagcacttggagatggcaatgctgaacctaatactgtaggactcacacrcgacttcaacgggattgtgaggatcaagtcactctcatgggaagaatttttacatgggaaagcggataaaactttcattggactggaatgtttggagaat

SEQ ID NO: 36830 - DNA, 201 bp, Homo sapiens
ttttacatgggaaagcggataaaactttcattggactggaatgtttggagaatgttaatttccaaatcaggaaccacaaactgccctctaataagacatcrgctatctaagcgtgtgggtgccccctttctgccagcagttctggttcttaagaaaatcaccataaatcagacatgaaaattctggctctaaaaatagcat

SEQ ID NO: 36831 - DNA, 201 bp, Homo sapiens
ttgcctgtccccaccgcatcccaggtcaccacctggctgaccccaggtgcccgacccaccaacagcccctaccaagttcttaactccctcacttggactcragactcttcacgccccagcagcgctccgcctccaacttgacatcacgctttctggaaacttccccgcatgtcccactttcccacacttggtgtcctgggg

SEQ ID NO: 36832 - DNA, 201 bp, Homo sapiens
acatgggaaagcggataaaactttcattggactggaatgtttggagaatgttaatttccaaatcaggaaccacaaactgccctctaataagacatcggctrtctaagcgtgtgggtgccccctttctgccagcagttctggttcttaagaaaatcaccataaatcagacatgaaaattctggctctaaaaatagcattttc

SEQ ID NO: 36833 - DNA, 201 bp, Homo sapiens
caccaacagcccctaccaagttcttaactccctcacttggactcaagactcttcacgccccagcagcgctccgcctccaacttgacatcacgctttctggraacttccccgcatgtcccactttcccacacttggtgtcctggggcacctcccggcctcttcatgctgtatgctcccctgcgagcaccctcctcttggcct

SEQ ID NO: 36834 - DNA, 201 bp, Homo sapiens
ctgagctagttgagatcagatgggaagtggaagcttgtcatgaccagaaactgtttccctacaaagagcacttggagatggcaatgctgaacctaatactytaggactcacacacgacttcaacgggattgtgaggatcaagtcactctcatgggaagaatttttacatgggaaagcggataaaactttcattggactgga

SEQ ID NO: 36835 - DNA, 201 bp, Homo sapiens
ctaagcgtgtgggtgccccctttctgccagcagttctggttcttaagaaaatcaccataaatcagacatgaaaattctggcttcactcaccaggcggcacyactgccgtcatttcagcttctggccactgggaggcgctgcttgaaagggtttgccctgagactccaagaagaagctgcgggaaggacagcaggggccctg

SEQ ID NO: 36836 - DNA, 201 bp, Homo sapiens; identical to SEQ ID NO: 36824

SEQ ID NO: 36837 - DNA, 201 bp, Homo sapiens; identical to SEQ ID NO: 36825

SEQ ID NO: 36838 - DNA, 201 bp, Homo sapiens; identical to SEQ ID NO: 36826

SEQ ID NO: 36839 - DNA, 201 bp, Homo sapiens; identical to SEQ ID NO: 36827

SEQ ID NO: 36840 - DNA, 201 bp, Homo sapiens; identical to SEQ ID NO: 36829

SEQ ID NO: 36841 - DNA, 201 bp, Homo sapiens; identical to SEQ ID NO: 36828

SEQ ID NO: 36842 - DNA, 201 bp, Homo sapiens; identical to SEQ ID NO: 36831

SEQ ID NO: 36843 - DNA, 201 bp, Homo sapiens
ttttacatgggaaagcggataaaactttcattggactggaatgtttggagaatgttaatttccaaatcaggaaccacaaactgccctctaataagacatcrgctatctaagcgtgtgggtgccccctttctgccagcagttctggttcttaagaaaatcaccataaatcagacatgaaaattctggcttcactcaccaggc

SEQ ID NO: 36844 - DNA, 201 bp, Homo sapiens; identical to SEQ ID NO: 36833

SEQ ID NO: 36845 - DNA, 201 bp, Homo sapiens
acatgggaaagcggataaaactttcattggactggaatgtttggagaatgttaatttccaaatcaggaaccacaaactgccctctaataagacatcggctrtctaagcgtgtgggtgccccctttctgccagcagttctggttcttaagaaaatcaccataaatcagacatgaaaattctggcttcactcaccaggcggca

SEQ ID NO: 36846 - DNA, 201 bp, Homo sapiens
aataagacatcggctatctaagcgtgtgggtgccccctttctgccagcagttctggttcttaagaaaatcaccataaatcagacatgaaaattctggctcyaaaaatagcattttctttgtgcaaataaaaacgtgtgtatcaagtatgatgttcccccaacgtggacacacccggttcctcacaaagccaagcccgctgc

SEQ ID NO: 36847 - DNA, 201 bp, Homo sapiens; identical to SEQ ID NO: 36823

SEQ ID NO: 36848 - DNA, 201 bp, Homo sapiens; identical to SEQ ID NO: 36824

SEQ ID NO: 36849 - DNA, 201 bp, Homo sapiens; identical to SEQ ID NO: 36825

SEQ ID NO: 36850 - DNA, 201 bp, Homo sapiens; identical to SEQ ID NO: 36826

SEQ ID NO: 36851 - DNA, 201 bp, Homo sapiens; identical to SEQ ID NO: 36827

SEQ ID NO: 36852 - DNA, 201 bp, Homo sapiens; identical to SEQ ID NO: 36828

SEQ ID NO: 36853 - DNA, 201 bp, Homo sapiens; identical to SEQ ID NO: 36829

SEQ ID NO: 36854 - DNA, 201 bp, Homo sapiens; identical to SEQ ID NO: 36830

SEQ ID NO: 36855 - DNA, 201 bp, Homo sapiens; identical to SEQ ID NO: 36831

SEQ ID NO: 36856 - DNA, 201 bp, Homo sapiens; identical to SEQ ID NO: 36832

SEQ ID NO: 36857 - DNA, 201 bp, Homo sapiens; identical to SEQ ID NO: 36833

SEQ ID NO: 36858 - DNA, 201 bp, Homo sapiens; identical to SEQ ID NO: 36846

SEQ ID NO: 36859 - DNA, 201 bp, Homo sapiens
cgtgtgtatcaagtatgatgttcccccaacgtggacacacccggttcctcacaaagccaagcccgctgcagctgccacatccctggtcaccaggcggcacyactgccgtcatttcagcttctggccactgggaggcgctgcttgaaagggtttgccctgagactccaagaagaagctgcgggaaggacagcaggggccctg

SEQ ID NO: 36860 - DNA, 201 bp, Homo sapiens; identical to SEQ ID NO: 36824

SEQ ID NO: 36861 - DNA, 201 bp, Homo sapiens; identical to SEQ ID NO: 36825

SEQ ID NO: 36862 - DNA, 201 bp, Homo sapiens; identical to SEQ ID NO: 36826

SEQ ID NO: 36863 - DNA, 201 bp, Homo sapiens; identical to SEQ ID NO: 36827

SEQ ID NO: 36864 - DNA, 201 bp, Homo sapiens; identical to SEQ ID NO: 36828

SEQ ID NO: 36865 - DNA, 201 bp, Homo sapiens; identical to SEQ ID NO: 36829

SEQ ID NO: 36866 - DNA, 201 bp, Homo sapiens; identical to SEQ ID NO: 36830

SEQ ID NO: 36867 - DNA, 201 bp, Homo sapiens; identical to SEQ ID NO: 36831

SEQ ID NO: 36868 - DNA, 201 bp, Homo sapiens; identical to SEQ ID NO: 36832

SEQ ID NO: 36869 - DNA, 201 bp, Homo sapiens; identical to SEQ ID NO: 36833

SEQ ID NO: 36870 - DNA, 201 bp, Homo sapiens
tgttcaccactgagctagccaggccaggatcagatgggaagtggaagcttgtcatgaccagaaactgtttccctacaaagagcacttggagatggcaatgytgaacctaatactgtaggactcacacacgacttcaacgggattgtgaggatcaagtcactctcatgggaagaatttttacatgggaaagcggataaaact

SEQ ID NO: 36871 - DNA, 201 bp, Homo sapiens; identical to SEQ ID NO: 36835

SEQ ID NO: 36872 - DNA, 201 bp, Homo sapiens; identical to SEQ ID NO: 36824

SEQ ID NO: 36873 - DNA, 201 bp, Homo sapiens; identical to SEQ ID NO: 36825

SEQ ID NO: 36874 - DNA, 201 bp, Homo sapiens; identical to SEQ ID NO: 36826

SEQ ID NO: 36875 - DNA, 201 bp, Homo sapiens; identical to SEQ ID NO: 36827

SEQ ID NO: 36876 - DNA, 201 bp, Homo sapiens; identical to SEQ ID NO: 36829

SEQ ID NO: 36877 - DNA, 201 bp, Homo sapiens; identical to SEQ ID NO: 36828

SEQ ID NO: 36878 - DNA, 201 bp, Homo sapiens; identical to SEQ ID NO: 36831

SEQ ID NO: 36879 - DNA, 201 bp, Homo sapiens; identical to SEQ ID NO: 36843

SEQ ID NO: 36880 - DNA, 201 bp, Homo sapiens; identical to SEQ ID NO: 36833

SEQ ID NO: 36881 - DNA, 201 bp, Homo sapiens; identical to SEQ ID NO: 36845

SEQ ID NO: 36882 - DNA, 201 bp, Homo sapiens
acacgtctgaggccgtggagctctgccctgcttacggcttgtacctgaagcccatcaccaagatgaccatcagcgtggcactcccgcagctgaagcagccrgggaagtccatctccaactgggaggtgatggagaggctgaagggcatggtgcagaaccaccagttctccacgctgcgtatttccaagagcaccatggact

SEQ ID NO: 36883 - DNA, 201 bp, Homo sapiens
ggctgtgtgagcgccaccacgctgcaccccctcgggggccagcccccggccggtgcccccaaggagagcgcggcccacccagaggccgacggcgctcccaraagcgtgaacgggagcgtggccgaggaggccccatgcaaggaggttcagagctcctgtcgtgtggtccccgaggatggctctccagagaagaggtgcccg

SEQ ID NO: 36884 - DNA, 201 bp, Homo sapiens
cgtcctggacatcctgcagaccgtgtcgtccggctgtgtgagcgccaccacgctgcaccccctcgggggccagcccccggccggtgcccccaaggagagcscggcccacccagaggccgacggcgctcccaaaagcgtgaacgggagcgtggccgaggaggccccatgcaaggaggttcagagctcctgtcgtgtggtccc

SEQ ID NO: 36885 - DNA, 201 bp, Homo sapiens
acttgatccgatagctttaatgcggccggtcctctctcagtcaggaaaattgcacagaccgacagtcgtgaggatggcagagctgctgcattcccccacayggggatttctgtgtctgcttggcgacctccctgcgtgcacggcctaggaggtgcacgggccaccatagtcacactggcactgaaaagaaagcgttgccct

SEQ ID NO: 36886 - DNA, 201 bp, Homo sapiens
gccacacacacgacgagctgggcgtggcacacgccgacctgctgcagcccgtcctggacatcctgcagaccgtgtcgtccggctgtgtgagcgccaccacrctgcaccccctcgggggccagcccccggccggtgcccccaaggagagcgcggcccacccagaggccgacggcgctcccaaaagcgtgaacgggagcgtgg

SEQ ID NO: 36887 - DNA, 201 bp, Homo sapiens
aaaagcgtgaacgggagcgtggccgaggaggccccatgcaaggaggttcagagctcctgtcgtgtggtccccgaggatggctctccagagaagaggtgccygggcggcgtcctctcctgcattcctgacaacaaccaacagcccaagggcatccctgcctgcgagcagaatgtctccagaaaggacacccggtcagaacag

SEQ ID NO: 36888 - DNA, 201 bp, Homo sapiens
ggaccacacccggtcccggaggtcccacagcaaagacaggcaccggagggagcggagccgggagcggaggggcagcgccagcaggaagcacagccgccacygccgccgaagcgagcggtcgcgctcccggtccccgagcaggcaccgcagtacctggaacaggtaatgacgggcacggcctccccacggcctgtccgggaa

SEQ ID NO: 36889 - DNA, 201 bp, Homo sapiens
tgtgagcgccaccacgctgcaccccctcgggggccagcccccggccggtgcccccaaggagagcgcggcccacccagaggccgacggcgctcccaaaagcrtgaacgggagcgtggccgaggaggccccatgcaaggaggttcagagctcctgtcgtgtggtccccgaggatggctctccagagaagaggtgcccgggcgg

SEQ ID NO: 36890 - DNA, 201 bp, Homo sapiens
cgagcccggaccacacccggtcccggaggtcccacagcaaagacaggcaccggagggagcggagccgggagcggaggggcagcgccagcaggaagcacagycgccaccgccgccgaagcgagcggtcgcgctcccggtccccgagcaggcaccgcagtacctggaacaggtaatgacgggcacggcctccccacggcctgt

SEQ ID NO: 36891 - DNA, 201 bp, Homo sapiens
tccccatgctggacccctaccgggaggagatgacgggccgcaacttccacaccttcagtttcggggggcacttgaacttcgaggcctatgtgcagtaccgygagtacatgggcttcatccaggccatgagcgccctgcgcgggatgaaactcatgtacaagggcgaggacggcaaggccgtggcctgcaacatcaaggttt

SEQ ID NO: 36892 - DNA, 172 bp, Homo sapiens
ttggaatgtttcaaacagatttcaggctgcaaacttgttttataatcgtttgcttctccaagtgaagctcagaaatacctaaaaatagctgtaacgttcgygttaggaaagatggtgtttattccagtttgcatttttatggtgaaataaaatccttttccaatgaactaaa

SEQ ID NO: 36893 - DNA, 201 bp, Homo sapiens
cggtgaggccgcgcctgtccggggatcgtcgagggacggcgggagcttgggccagcggcggcggcggcctgggacgcaggcggagccccgcgcaggcccarggtcccggaggctatggcagcggctaccatcgtgcacgacacgtctgaggccgtggagctctgccctgcttacggcttgtacctgaagcccatcaccaag

SEQ ID NO: 36894 - DNA, 201 bp, Homo sapiens
aggaagaacagattgacttccaggaaggggatttcttcaaagaccctcttccggaagctgatctgtacatcctggccagggtcctccatgactgggcagayggaaagtgctcacacctgctggagaggatctaccacacttgcaagccaggtggtggcattctggtaattgaaagcctcctggatgaagacaggcgaggtc

SEQ ID NO: 36895 - DNA, 183 bp, Homo sapiens
tcaggaactggagcagcaaagagaagaacaaaagcgcagagagaaggaagcggaggagaggcagcgagcggaggaaagcagcygtgagcgggtggctcttccccaccttgccagcaggctctgtgctccttgaagcaagcgctccagaggctccggaagccacggctggattggagacaagat

SEQ ID NO: 36896 - DNA, 201 bp, Homo sapiens; identical to SEQ ID NO: 36882

SEQ ID NO: 36897 - DNA, 201 bp, Homo sapiens; identical to SEQ ID NO: 36883

SEQ ID NO: 36898 - DNA, 201 bp, Homo sapiens; identical to SEQ ID NO: 36884

SEQ ID NO: 36899 - DNA, 201 bp, Homo sapiens; identical to SEQ ID NO: 36885

SEQ ID NO: 36900 - DNA, 201 bp, Homo sapiens; identical to SEQ ID NO: 36886

SEQ ID NO: 36901 - DNA, 201 bp, Homo sapiens; identical to SEQ ID NO: 36887

SEQ ID NO: 36902 - DNA, 201 bp, Homo sapiens; identical to SEQ ID NO: 36888

SEQ ID NO: 36903 - DNA, 201 bp, Homo sapiens; identical to SEQ ID NO: 36889

SEQ ID NO: 36904 - DNA, 201 bp, Homo sapiens; identical to SEQ ID NO: 36890

SEQ ID NO: 36905 - DNA, 201 bp, Homo sapiens; identical to SEQ ID NO: 36891

SEQ ID NO: 36906 - DNA, 201 bp, Homo sapiens; identical to SEQ ID NO: 36893

SEQ ID NO: 36907 - DNA, 172 bp, Homo sapiens; identical to SEQ ID NO: 36892

SEQ ID NO: 36908 - DNA, 201 bp, Homo sapiens
tcgccgagctgctcagcagagccaaggtacccgggggctccctctgcagccgccagccgcgcccgggctgccctcagtgccctcccctgaaatgcgggcgrcgtcacggcgccgtttccccgccggctgcagctgtagctacgaaaccagctttaatgccgaggatgacggctccttcccgggagggtgtagcgctcgtct

SEQ ID NO: 36909 - DNA, 201 bp, Homo sapiens
ctgctgctggcccagaggaacctgcagtccatccggctcatcgccgagctgctcagcagagccaaggtacccgggggctccctctgcagccgccagccgcrcccgggctgccctcagtgccctcccctgaaatgcgggcggcgtcacggcgccgtttccccgccggctgcagctgtagctacgaaaccagctttaatgccg

SEQ ID NO: 36910 - DNA, 201 bp, Homo sapiens; identical to SEQ ID NO: 36882

SEQ ID NO: 36911 - DNA, 201 bp, Homo sapiens
ggcgcgactggtaactcccatgagcccggggccagggcccacagacagacagacctccccaggacagacgtccccggcacgctccttgtcctcaggagggstgcgtccccctggagtccaacgcggggcgaccccataacctgttgtctgattacagttgtgataagtccccgggaaggagcatgacaagaggctgagaca

SEQ ID NO: 36912 - DNA, 201 bp, Homo sapiens; identical to SEQ ID NO: 36891

SEQ ID NO: 36913 - DNA, 201 bp, Homo sapiens; identical to SEQ ID NO: 36893

SEQ ID NO: 36914 - DNA, 177 bp, Homo sapiens
tttcattgcagggctgtgaccgtctatgacaagccggcatctttctttcaagacacacctctggacctgcagcgccrgctcttcatgaagctcagcggcacacactctccgttcagggcccgctcagaacctgaggacccagccacggagcggtcggccttcatgaagagggatgct

SEQ ID NO: 36915 - DNA, 201 bp, Homo sapiens
gcagcgggcttggctttgtgaggaaccgggtgtgtccacgttgggggaacatcatacttgatacacacgtttttatttgcacaaagaaaatgctatttttrgagccagaattttcatgtctgatttatggtgattttcttaagaaccagaactgctggcagaaagggggcacccacacgcttagatagccgatgtcttatt

SEQ ID NO: 36916 - DNA, 122 bp, Homo sapiens
tttcattgcagggctgtgaccrtctatgacaagccggcatctttctttcaagacacacctctggacctgcagcgccagctcttcatgaagctcagcggcacacactctccgttcagggcccg

SEQ ID NO: 36917 - DNA, 201 bp, Homo sapiens
cagggcccctgctgtccttcccgcagcttcttcttggagtctcagggcaaaccctttcaagcagcgcctcccagtggccagaagctgaaatgacggcagtrgtgccgcctggtgagtgaattgcttctgtgacccgggaagctgtggttggctctgatttcttttttggaggcttggaaacacttcctctcttcttctgtt

SEQ ID NO: 36918 - DNA, 201 bp, Homo sapiens
ctaaacctgttccggaagaacctgcgggagttgcagcagctccgatgggatgagagctgggtgcagactgtgctccctttggttatggacacataactccygggccagaggctaaaaccccagggcccctgctgtccttcccgcagcttcttcttggagtctcagggcaaaccctttcaagcagcgcctcccagtggccag

SEQ ID NO: 36919 - DNA, 201 bp, Homo sapiens
gaggactcagaggaactggcagctcagctgcagatgcttttctcaaactttcctgatcctgcaggcaagctaaacctgttccggaagaacctgcgggagtygcagcagctccgatgggatgagagctgggtgcagactgtgctccctttggttatggacacataactcccgggccagaggctaaaaccccagggcccctgc

SEQ ID NO: 36920 - DNA, 201 bp, Homo sapiens
gccgcctcatccaccagtagcatttccagcacatccaggtctgcaccccctggctggagggccgaggactacccccgcttctagggtcggtggacctgggygtctgtctagacacgtcctccagtggcctggacctgcccatgaaggtggtggacatgttcaggagctgtttgcctgtgtgtgcgttgtgaacttcaagtg

SEQ ID NO: 36921 - DNA, 134 bp, Homo sapiens
tcttaagaaccagaactgctggcagaaagggggcacccacacgcttagatagccgatgtcttattagagggcagtttgtggttcctgatttggaaattaayattctccaaacattccagtccaatgaaagtttt

SEQ ID NO: 36922 - DNA, 181 bp, Homo sapiens
atgctatttttagagccagaattttcatgtctgatttatggtgattttcttaagaaccagaactgctggcagaaagggggcacccacacgcttagatagcygatgtcttattagagggcagtttgtggttcctgatttggaaattaacattctccaaacattccagtccaatgaaagtttt

SEQ ID NO: 36923 - DNA, 193 bp, Homo sapiens
tttcattgcagggctgtgaccgtctatgacaagccggcatctttctttcaagacacacctctggacctgcagcgccagctcttcatgaagctsagcggcacacactctccgttcagggcccgctcagaacctgaggacccagccacggagcggtcggccttcatgaagagggatgctgggagcgggctggtga

SEQ ID NO: 36924 - DNA, 185 bp, Homo sapiens
gaaaatgctatttttagagccagaattttcatgtctgatttatggtgattttcttaagaaccagaactgctggcagaaagggggcacccacacgcttagayagccgatgtcttattagagggcagtttgtggttcctgatttggaaattaacattctccaaacattccagtccaatgaaagtttt

SEQ ID NO: 36925 - DNA, 177 bp, Homo sapiens; identical to SEQ ID NO: 36914

SEQ ID NO: 36926 - DNA, 201 bp, Homo sapiens; identical to SEQ ID NO: 36915

SEQ ID NO: 36927 - DNA, 122 bp, Homo sapiens; identical to SEQ ID NO: 36916

SEQ ID NO: 36928 - DNA, 201 bp, Homo sapiens; identical to SEQ ID NO: 36917

SEQ ID NO: 36929 - DNA, 201 bp, Homo sapiens; identical to SEQ ID NO: 36918

SEQ ID NO: 36930 - DNA, 201 bp, Homo sapiens; identical to SEQ ID NO: 36919

SEQ ID NO: 36931 - DNA, 201 bp, Homo sapiens; identical to SEQ ID NO: 36920

SEQ ID NO: 36932 - DNA, 134 bp, Homo sapiens; identical to SEQ ID NO: 36921

SEQ ID NO: 36933 - DNA, 181 bp, Homo sapiens; identical to SEQ ID NO: 36922

SEQ ID NO: 36934 - DNA, 193 bp, Homo sapiens; identical to SEQ ID NO: 36923

SEQ ID NO: 36935 - DNA, 185 bp, Homo sapiens; identical to SEQ ID NO: 36924

SEQ ID NO: 36936 - DNA, 201 bp, Homo sapiens
caccgcatccggagggtccttatcgtagattgggatgtgcaccacggtcaaggaacacagttcaccttcgaccaggaccccagtgtcctctatttctccayccaccgctacgagcagggtaggttctggccccacctgaaggcctctaactggtccaccacaggtttcggccaaggccaaggatataccatcaatgtgcct

SEQ ID NO: 36937 - DNA, 201 bp, Homo sapiens
cttggagacccaccacccctgctgaccctgccacggcccccactatcaggggccctggcctcaatcactgagaccatccaagtccatcgcagatactggcrcagcttacgggtcatgaaggtagaagacagagaaggaccctccagttctaagttggtcaccaagaaggcaccccaaccagccaaacctaggttagctgag

SEQ ID NO: 36938 - DNA, 201 bp, Homo sapiens
tatgtgtccctgcaccgctatgatcatggcaccttcttccccatgggggatgagggtgccagcagccagatcggccgggctgcgggcacaggcttcaccgycaacgtggcatggaacgggccccgcatgggtgatgctgactacctagctgcctggcatcgcctggtgcttcccattgcctacgagtttaacccagaactg

SEQ ID NO: 36939 - DNA, 201 bp, Homo sapiens
attctggaccagaccacctcagaggatgctgttgggggagccacgctgggccagactacctcagaggaggctgtaggaggagctacactggcccagaccayctcggaggcagccatggagggagccacactggaccagactacgtcagaggaggctccagggggcaccgagctgatccaaactcctctagcctcgagcaca

SEQ ID NO: 36940 - DNA, 201 bp, Homo sapiens; identical to SEQ ID NO: 36936

SEQ ID NO: 36941 - DNA, 201 bp, Homo sapiens; identical to SEQ ID NO: 36937

SEQ ID NO: 36942 - DNA, 201 bp, Homo sapiens; identical to SEQ ID NO: 36938

SEQ ID NO: 36943 - DNA, 201 bp, Homo sapiens; identical to SEQ ID NO: 36939

SEQ ID NO: 36944 - DNA, 201 bp, Homo sapiens
cttcaaggctggagaactagatgatctgtaaggtctcttcggttcagagtgtgtcattccattcatgatcctggaatagggcatgaaagccagtggcagamacccgaggccttaagaggtgtgtcccatgaggatgggaaggtggtaaagtttatgcaaacaatagtgtgagggatgcctctccttccggtcggccctcct

SEQ ID NO: 36945 - DNA, 201 bp, Homo sapiens
cccgccgtggagccgtgtggtgtatgtgtggtaacaccatgtctgtgcccctgctcaccgatgctgccaccgtgtctggagctgagcgggaaacggccgcrgcacagctgggctgacgccctctccaccatccggctccctcacgtcaagtacatctgtccccatgcgcctaggatccctgtgaccctcaacatgaagatg

SEQ ID NO: 36946 - DNA, 201 bp, Homo sapiens
gcgggtgagaacccagcgactgcgcggctgaatgacagggagtagccccgccgcctccaacatggcagcttctatccagcgaagccgggtccccgcttcckggttccgtactgtcggccaggctacttccggcagcgcgatggctgggttcccgggactcgaacggaagttccggcgggggcggccgagggggaagagtgt

SEQ ID NO: 36947 - DNA, 201 bp, Homo sapiens; identical to SEQ ID NO: 36944

SEQ ID NO: 36948 - DNA, 201 bp, Homo sapiens
cccgccgtggagccgtgtggtgtatgtgtggtaacaccatgtctgtgcccctgctcaccgatgctgccaccgtgtctggagctgagcgggaaacggccgcrgttatttttttacatggacttggagacacagggcacagctgggctgacgccctctccaccatccggctccctcacgtcaagtacatctgtccccatgcgc

SEQ ID NO: 36949 - DNA, 201 bp, Homo sapiens; identical to SEQ ID NO: 36946

SEQ ID NO: 36950 - DNA, 201 bp, Homo sapiens; identical to SEQ ID NO: 36948

SEQ ID NO: 36951 - DNA, 201 bp, Homo sapiens
ctgctgtgggctccctgtccctgggcaggagtgctggtgaggaggtggagccttttgaggggggccttccctcagctgtttccccacactggggggctggrccctgcctccccgttaccctccttccctgcaggcctggagcctgtagggctggactgaggttcaggtctccccccagctgtctcacccccactttgtccc

SEQ ID NO: 36952 - DNA, 201 bp, Homo sapiens
ctaactagtcgctggccccagtgcagtaccccagctcatgggggactcagcaagcaagcgtggcaccatcttggatctgagccggtcgagcccctgtcccyacccttcctgacctgtccttttcccacaggcctctgggggcaggtggcaaggcctggccgggccttccttcctggccttagccacctggctctgtctgca

SEQ ID NO: 36953 - DNA, 201 bp, Homo sapiens; identical to SEQ ID NO: 36946

SEQ ID NO: 36954 - DNA, 201 bp, Homo sapiens
ctagtcgctggccccagtgcagtaccccagctcatgggggactcagcaagcaagcgtggcaccatcttggatctgagccggtcgagcccctgtccccaccyttcctgacctgtccttttcccacaggcctctgggggcaggtggcaaggcctggccgggccttccttcctggccttagccacctggctctgtctgcagcag

SEQ ID NO: 36955 - DNA, 201 bp, Homo sapiens
gtggcaccatcttggatctgagccggtcgagcccctgtccccacccttcctgacctgtccttttcccacaggcctctgggggcaggtggcaaggcctggcygggccttccttcctggccttagccacctggctctgtctgcagcaggggcaggctgctttcttatccatttccctggaggcgggcccccctggcagcagta

SEQ ID NO: 36956 - DNA, 201 bp, Homo sapiens
gagaaaggggcccagccgctgacccactcactcaggacctcactcactagccccgctttgggccccctcctgtgacctcagggtttggcccatggggcccycccaggcccctgccccaactgattctgcccagataatcgtgtctcctgcctccactcagctgcttctcagtcatgaatgtggccatggccccggggtccc

SEQ ID NO: 36957 - DNA, 201 bp, Homo sapiens
tccttccctgcaggcctggagcctgtagggctggactgaggttcaggtctccccccagctgtctcacccccactttgtccccactctagagcagggaggcrgtgggggaggagttgtgtctcgtcttctgtctccatgtggtttttgggtgtttttcttgttgtgtcctggattccgataaaattaaagaaattgcttcct

SEQ ID NO: 36958 - DNA, 201 bp, Homo sapiens; identical to SEQ ID NO: 36944

SEQ ID NO: 36959 - DNA, 146 bp, Homo sapiens
tgtctcacccccactttgtccccactctagagcagggaggcagtgggggaggagttgtgtctcgtcttctgtctccatgtggtttttgggtgtttttcttsttgtgtcctggattccgataaaattaaagaaattgcttcctcaac

SEQ ID NO: 36960 - DNA, 201 bp, Homo sapiens; identical to SEQ ID NO: 36948

SEQ ID NO: 36961 - DNA, 201 bp, Homo sapiens; identical to SEQ ID NO: 36956

SEQ ID NO: 36962 - DNA, 189 bp, Homo sapiens
ctgctgtgggctccctgtccctgggcaggagtgctggtgaggaggtggagccttttgaggggggccttccctcagctgtttccccacactggggggctggrccctgcctccccgttaccctccttccctgcaggcctggagcctgtagggctggactgaggttcaggtctccccccagctgtctcaccc

SEQ ID NO: 36963 - DNA, 201 bp, Homo sapiens; identical to SEQ ID NO: 36952

SEQ ID NO: 36964 - DNA, 201 bp, Homo sapiens; identical to SEQ ID NO: 36954

SEQ ID NO: 36965 - DNA, 201 bp, Homo sapiens; identical to SEQ ID NO: 36955

SEQ ID NO: 36966 - DNA, 201 bp, Homo sapiens; identical to SEQ ID NO: 36948

SEQ ID NO: 36967 - DNA, 201 bp, Homo sapiens; identical to SEQ ID NO: 36951

SEQ ID NO: 36968 - DNA, 201 bp, Homo sapiens; identical to SEQ ID NO: 36952

SEQ ID NO: 36969 - DNA, 201 bp, Homo sapiens; identical to SEQ ID NO: 36946

SEQ ID NO: 36970 - DNA, 201 bp, Homo sapiens; identical to SEQ ID NO: 36954

SEQ ID NO: 36971 - DNA, 201 bp, Homo sapiens; identical to SEQ ID NO: 36955

SEQ ID NO: 36972 - DNA, 201 bp, Homo sapiens; identical to SEQ ID NO: 36956

SEQ ID NO: 36973 - DNA, 201 bp, Homo sapiens; identical to SEQ ID NO: 36957

SEQ ID NO: 36974 - DNA, 201 bp, Homo sapiens; identical to SEQ ID NO: 36944

SEQ ID NO: 36975 - DNA, 146 bp, Homo sapiens; identical to SEQ ID NO: 36959

SEQ ID NO: 36976 - DNA, 201 bp, Homo sapiens; identical to SEQ ID NO: 36948

SEQ ID NO: 36977 - DNA, 201 bp, Homo sapiens; identical to SEQ ID NO: 36951

SEQ ID NO: 36978 - DNA, 201 bp, Homo sapiens; identical to SEQ ID NO: 36952

SEQ ID NO: 36979 - DNA, 201 bp, Homo sapiens; identical to SEQ ID NO: 36946

SEQ ID NO: 36980 - DNA, 201 bp, Homo sapiens; identical to SEQ ID NO: 36954

SEQ ID NO: 36981 - DNA, 201 bp, Homo sapiens; identical to SEQ ID NO: 36955

SEQ ID NO: 36982 - DNA, 201 bp, Homo sapiens; identical to SEQ ID NO: 36956

SEQ ID NO: 36983 - DNA, 201 bp, Homo sapiens; identical to SEQ ID NO: 36957

SEQ ID NO: 36984 - DNA, 201 bp, Homo sapiens; identical to SEQ ID NO: 36944

SEQ ID NO: 36985 - DNA, 146 bp, Homo sapiens; identical to SEQ ID NO: 36959

SEQ ID NO: 36986 - DNA, 201 bp, Homo sapiens; identical to SEQ ID NO: 36956

SEQ ID NO: 36987 - DNA, 201 bp, Homo sapiens; identical to SEQ ID NO: 36957

SEQ ID NO: 36988 - DNA, 146 bp, Homo sapiens; identical to SEQ ID NO: 36959

SEQ ID NO: 36989 - DNA, 201 bp, Homo sapiens; identical to SEQ ID NO: 36948

SEQ ID NO: 36990 - DNA, 201 bp, Homo sapiens; identical to SEQ ID NO: 36951

SEQ ID NO: 36991 - DNA, 201 bp, Homo sapiens; identical to SEQ ID NO: 36952

SEQ ID NO: 36992 - DNA, 201 bp, Homo sapiens; identical to SEQ ID NO: 36954

SEQ ID NO: 36993 - DNA, 201 bp, Homo sapiens; identical to SEQ ID NO: 36955

SEQ ID NO: 36994 - DNA, 201 bp, Homo sapiens
cgcggtgcctgcgtgggaagctgtggaaatggagattgtggcgggacagcttgtgactgagatccggcagtacttctacaggaacatgacagcacagaatyacacgtatgcaatccgctcccggctcacccatgtgccgcagggccatgacggggagctgctctgccaccggatagagcaggagtaccaagccggccccct

SEQ ID NO: 36995 - DNA, 201 bp, Homo sapiens
cctttcctcacggtccctggcctgcctgagagcaggtctaggccatggcgggtaccagtgcccagcacagggccagcctgccctgggaagcaaggaggccrgcgtgggacctggaagttggtcatctgatgctcccccgtttcacagatggaagcaccaaggccctgagacaaggagacggttgggatggacaccatgact

SEQ ID NO: 36996 - DNA, 201 bp, Homo sapiens
aaggccatcgaggggaagcccaggctgacctccgccgtgtcctgctgcggctctaccacctgtatgaagtgggcgaggacccagtcctgtctcagccagtracagtgaatctggaggtgaacttccccacccccatccagaccataagccagggaagcaaaccctagatgaagccccaagaaactgccttggcaaagagat

SEQ ID NO: 36997 - DNA, 201 bp, Homo sapiens
acagctccaaccacacggagcactctcagaatctccggaaaggccatcgaggggaagcccaggctgacctccgccgtgtcctgctgcggctctaccacctrtatgaagtgggcgaggacccagtcctgtctcagccagtaacagtgaatctggaggtgaacttccccacccccatccagaccataagccagggaagcaaac

SEQ ID NO: 36998 - DNA, 201 bp, Homo sapiens
cctggctcaagtgatcctcccacctcaacctcccaagtaactgggatcacaggggcgcgccaccacgatggctaagtttttttttttttttttttgagacsgagtttcgctctcgtcccccaggctggagtgcaatggtgcgctctcagctggctgcaacctccatctcccaggttcaagtgattctcctgcctcagcctc

SEQ ID NO: 36999 - DNA, 201 bp, Homo sapiens
ctgcgtatgacctgcttattctgaccacaatcccaggcctcagttaccggcactacaacatcagacccactgcaggggcccaagagggcacccaggagccrgctgccactgtggcgagcacccttcaatttggccgcaggctgaggagacgcaccagccatgcgggcaggtacttggtgcctgtggcaaacgactgctaca

SEQ ID NO: 37000 - DNA, 201 bp, Homo sapiens
cttctgctgggatcctggtccctcaccactgccctgcgccagaggagcgcactggcgctgcagcacaggcccgtggtgctgttcggagacctcgctgggamtgcgccgaagctcccaggaccccagcagcaagaggccgtgacgctgcccccgaatcttcacctgcagatcctgagcatccctggctggcgctacagctcc

SEQ ID NO: 37001 - DNA, 201 bp, Homo sapiens
cacccagtgccctcgcagatccagaactcaacagagaccccatctgcgtatgacctgcttattctgaccacaatcccaggcctcagttaccggcactacarcatcagacccactgcaggggcccaagagggcacccaggagccggctgccactgtggcgagcacccttcaatttggccgcaggctgaggagacgcaccagc

SEQ ID NO: 37002 - DNA, 201 bp, Homo sapiens
ggcacaatctcagctcactgcaacctctgcctccctggctcaagtgatcctcccacctcaacctcccaagtaactgggatcacaggggcgcgccaccacgmtggctaagtttttttttttttttttttgagaccgagtttcgctctcgtcccccaggctggagtgcaatggtgcgctctcagctggctgcaacctccatct

SEQ ID NO: 37003 - DNA, 136 bp, Homo sapiens
tggtcagacccggtgcacatccaaccatctgcctgtcccggcctgtgcgaccttgcgaggctgctttcctactctgaacccgcagccctcccaaatctacyacagtcggttaagaaaggctttgggttagtctctg

SEQ ID NO: 37004 - DNA, 201 bp, Homo sapiens
ctcagctcactgcaacctctgcctccctggctcaagtgatcctcccacctcaacctcccaagtaactgggatcacaggggcgcgccaccacgatggctaagtttttttttttttttttttgagaccgagtttcgctctcgtcccccaggctggagtgcaatggtgcgctctcagctggctgcaacctccatctcccaggtt

SEQ ID NO: 37005 - DNA, 201 bp, Homo sapiens
ttcgacatctgagtcttcaggggaatccagagaagccccagtaccttttcgccatgatgtcttactgggccacccacctcctctttcatgatcctcgccasggaggatcctttcctcacggtccctggcctgcctgagagcaggtctaggccatggcgggtaccagtgcccagcacagggccagcctgccctgggaagcaa

SEQ ID NO: 37006 - DNA, 201 bp, Homo sapiens
cccaagaaactgccttggcaaagagatccacgagggcttcctcccaaatggacgctggtatgggccccaccccgcccttcttcatggtcttctgggtttgycaggtattacaactggcctggttttttagggttttttgtgtatatgtgagacaggatctcactctgttgcccagtctggggtgcagtggcacaatctcag

SEQ ID NO: 37007 - DNA, 201 bp, Homo sapiens
gggatgtgacaagcagttcttcaatgcctcggtgcagtttgccaacatggacccgctgctggaccacatcaacagccatgctgccgagctcggtgtctcgrtgcagtatgccacgctgggcgactacttccgtgccctgcacgctctcaatgtcacctggcgtgtccgcgaccaccacgacttcctgccctattccacaga

SEQ ID NO: 37008 - DNA, 201 bp, Homo sapiens
aagctcccaggaccccagcagcaagaggccgtgacgctgcccccgaatcttcacctgcagatcctgagcatccctggctggcgctacagctccaaccacayggagcactctcagaatctccggaaaggccatcgaggggaagcccaggctgacctccgccgtgtcctgctgcggctctaccacctgtatgaagtgggcgag

SEQ ID NO: 37009 - DNA, 201 bp, Homo sapiens
gaagctgtggaaatggagattgtggcgggacagcttgtgactgagatccggcagtacttctacaggaacatgacagcacagaattacacgtatgcaatccrctcccggctcacccatgtgccgcagggccatgacggggagctgctctgccaccggatagagcaggagtaccaagccggccccctggagctgaaccgtgag

SEQ ID NO: 37010 - DNA, 201 bp, Homo sapiens
cctgcacgctctcaatgtcacctggcgtgtccgcgaccaccacgacttcctgccctattccacagaaccattccaggcctggacgggcttctacacgtccygcagctcactgaaggggctggcccggcgagccagcgccttgttgtatgccggggagtccatgttcacacgctacctgtggccggccccccgtgggcatct

SEQ ID NO: 37011 - DNA, 201 bp, Homo sapiens
acaccgggcaaggccgcggtgcctgcgtgggaagctgtggaaatggagattgtggcgggacagcttgtgactgagatccggcagtacttctacaggaacaygacagcacagaattacacgtatgcaatccgctcccggctcacccatgtgccgcagggccatgacggggagctgctctgccaccggatagagcaggagtac

SEQ ID NO: 37012 - DNA, 201 bp, Homo sapiens
atcatggaccagtacagctactgcaccccgtcccacatccctttctccaacaggtcaggattttactggaatggcgtggctgtcttccccaagcctccccmagatggggtgtaccccaacatgagtgagcctgtcaccccagccaacatcaacctctatgccgaggccctggtggccaacgtgaagcagagggccgcctgg

SEQ ID NO: 37013 - DNA, 201 bp, Homo sapiens
gcagctcactgaaggggctggcccggcgagccagcgccttgttgtatgccggggagtccatgttcacacgctacctgtggccggccccccgtgggcatctrgaccccacctgggccctgcagcagctccagcagcttcgctgggccgtctccgaggtccagcaccatgatgccatcactgggactgagtcccccaaggtga

SEQ ID NO: 37014 - DNA, 201 bp, Homo sapiens
gctgctcgaccaggataccaacctgatgcacagcatctgggagagacagagtaaccgaacggtgcgcgtgacccaggaattcctggagtaccacgtcaacrgggatgtgaaacagggccccatttccgataactacctgttcacaccgggcaaggccgcggtgcctgcgtgggaagctgtggaaatggagattgtggcggg

SEQ ID NO: 37015 - DNA, 201 bp, Homo sapiens
ggccgtctccgaggtccagcaccatgatgccatcactgggactgagtcccccaaggtgagagacatgtacgcaacgcacctggcctcggggatgctgggcrtgcgcaagctgatggcctccatcgtcctagatgagctccagccccaggcacccatggcggccagctccgatgcaggacctgcaggacattttgcctcggt

SEQ ID NO: 37016 - DNA, 201 bp, Homo sapiens
tcagctcactgcaacctctgcctccctggctcaagtgatcctcccacctcaacctcccaagtaactgggatcacaggggcgcgccaccacgatggctaagtttttttttttttttttttgagaccgagtttcgctctcgtcccccaggctggagtgcaatggtgcgctctcagctggctgcaacctccatctcccaggttc

SEQ ID NO: 37017 - DNA, 201 bp, Homo sapiens
cagctcactgcaacctctgcctccctggctcaagtgatcctcccacctcaacctcccaagtaactgggatcacaggggcgcgccaccacgatggctaagtttttttttttttttttttgagaccgagtttcgctctcgtcccccaggctggagtgcaatggtgcgctctcagctggctgcaacctccatctcccaggttca

SEQ ID NO: 37018 - DNA, 201 bp, Homo sapiens; identical to SEQ ID NO: 36994

SEQ ID NO: 37019 - DNA, 201 bp, Homo sapiens
aagccagccctctcctcttctgtcacgtaaaggatatttggcacactcatgcgtcattcattcacaaaacacaaacccaggactttctgcctaaggcagarcacaagactcacagcagcaccgaagcgcatctgccgtccgggccctgccaggcttgccaggctgccagtggtaactgtggacctactgcgtgccacgtgt

SEQ ID NO: 37020 - DNA, 201 bp, Homo sapiens
aaggccatcgaggggaagcccaggctgacctccgccgtgtcctgctgcggctctaccacctgtatgaagtgggcgaggacccagtcctgtctcagccagtracagtgaatctggaggctgtgctgcaggcgctggggtccgtggtggcagtggaggagcgctcgctcacagggacctgggatttgagcatgctgcaccgct

SEQ ID NO: 37021 - DNA, 201 bp, Homo sapiens
acagctccaaccacacggagcactctcagaatctccggaaaggccatcgaggggaagcccaggctgacctccgccgtgtcctgctgcggctctaccacctrtatgaagtgggcgaggacccagtcctgtctcagccagtaacagtgaatctggaggctgtgctgcaggcgctggggtccgtggtggcagtggaggagcgct

SEQ ID NO: 37022 - DNA, 201 bp, Homo sapiens
atcacgagtttatgtgaaatgtccagaataggcaaatctgtgtatcagagacaaagcacattggtggttgccaggtactggaggaagagagaagaggcatracagctaacagggacgggctttctttggaagatgatgaaattgtggaatgatggttgcacaactttgtgaatatactagaaaccaatgaattaaaaactt

SEQ ID NO: 37023 - DNA, 201 bp, Homo sapiens; identical to SEQ ID NO: 36999

SEQ ID NO: 37024 - DNA, 201 bp, Homo sapiens; identical to SEQ ID NO: 37000

SEQ ID NO: 37025 - DNA, 201 bp, Homo sapiens; identical to SEQ ID NO: 37009

SEQ ID NO: 37026 - DNA, 201 bp, Homo sapiens; identical to SEQ ID NO: 37001

SEQ ID NO: 37027 - DNA, 201 bp, Homo sapiens; identical to SEQ ID NO: 37011

SEQ ID NO: 37028 - DNA, 201 bp, Homo sapiens
gcctaaggcagaacacaagactcacagcagcaccgaagcgcatctgccgtccgggccctgccaggcttgccaggctgccagtggtaactgtggacctactgcgtgccacgtgttttcatagactcatcccatgctggcaacagccctgcaaggggcttggctctgccacagggcaggagaggaagttgtagcgcctagcga

SEQ ID NO: 37029 - DNA, 201 bp, Homo sapiens; identical to SEQ ID NO: 37014

SEQ ID NO: 37030 - DNA, 201 bp, Homo sapiens; identical to SEQ ID NO: 37008

SEQ ID NO: 37031 - DNA, 201 bp, Homo sapiens; identical to SEQ ID NO: 36994

SEQ ID NO: 37032 - DNA, 201 bp, Homo sapiens; identical to SEQ ID NO: 37019

SEQ ID NO: 37033 - DNA, 201 bp, Homo sapiens; identical to SEQ ID NO: 37020

SEQ ID NO: 37034 - DNA, 201 bp, Homo sapiens; identical to SEQ ID NO: 37021

SEQ ID NO: 37035 - DNA, 201 bp, Homo sapiens; identical to SEQ ID NO: 37022

SEQ ID NO: 37036 - DNA, 201 bp, Homo sapiens; identical to SEQ ID NO: 36999

SEQ ID NO: 37037 - DNA, 201 bp, Homo sapiens; identical to SEQ ID NO: 37000

SEQ ID NO: 37038 - DNA, 201 bp, Homo sapiens; identical to SEQ ID NO: 37001

SEQ ID NO: 37039 - DNA, 201 bp, Homo sapiens; identical to SEQ ID NO: 37028

SEQ ID NO: 37040 - DNA, 201 bp, Homo sapiens; identical to SEQ ID NO: 37007

SEQ ID NO: 37041 - DNA, 201 bp, Homo sapiens; identical to SEQ ID NO: 37008

SEQ ID NO: 37042 - DNA, 201 bp, Homo sapiens; identical to SEQ ID NO: 37010

SEQ ID NO: 37043 - DNA, 201 bp, Homo sapiens; identical to SEQ ID NO: 37009

SEQ ID NO: 37044 - DNA, 201 bp, Homo sapiens; identical to SEQ ID NO: 37012

SEQ ID NO: 37045 - DNA, 201 bp, Homo sapiens; identical to SEQ ID NO: 37011

SEQ ID NO: 37046 - DNA, 201 bp, Homo sapiens; identical to SEQ ID NO: 37013

SEQ ID NO: 37047 - DNA, 201 bp, Homo sapiens; identical to SEQ ID NO: 37014

SEQ ID NO: 37048 - DNA, 201 bp, Homo sapiens; identical to SEQ ID NO: 37015

SEQ ID NO: 37049 - DNA, 201 bp, Homo sapiens; identical to SEQ ID NO: 36994

SEQ ID NO: 37050 - DNA, 201 bp, Homo sapiens; identical to SEQ ID NO: 36995

SEQ ID NO: 37051 - DNA, 201 bp, Homo sapiens; identical to SEQ ID NO: 37019

SEQ ID NO: 37052 - DNA, 201 bp, Homo sapiens; identical to SEQ ID NO: 36996

SEQ ID NO: 37053 - DNA, 201 bp, Homo sapiens; identical to SEQ ID NO: 36997

SEQ ID NO: 37054 - DNA, 201 bp, Homo sapiens; identical to SEQ ID NO: 36998

SEQ ID NO: 37055 - DNA, 201 bp, Homo sapiens; identical to SEQ ID NO: 37022

SEQ ID NO: 37056 - DNA, 201 bp, Homo sapiens; identical to SEQ ID NO: 36999

SEQ ID NO: 37057 - DNA, 201 bp, Homo sapiens; identical to SEQ ID NO: 37000

SEQ ID NO: 37058 - DNA, 201 bp, Homo sapiens; identical to SEQ ID NO: 37001

SEQ ID NO: 37059 - DNA, 201 bp, Homo sapiens; identical to SEQ ID NO: 37002

SEQ ID NO: 37060 - DNA, 201 bp, Homo sapiens; identical to SEQ ID NO: 37028

SEQ ID NO: 37061 - DNA, 201 bp, Homo sapiens; identical to SEQ ID NO: 37004

SEQ ID NO: 37062 - DNA, 201 bp, Homo sapiens; identical to SEQ ID NO: 37005

SEQ ID NO: 37063 - DNA, 201 bp, Homo sapiens; identical to SEQ ID NO: 37006

SEQ ID NO: 37064 - DNA, 201 bp, Homo sapiens; identical to SEQ ID NO: 37007

SEQ ID NO: 37065 - DNA, 201 bp, Homo sapiens; identical to SEQ ID NO: 37008

SEQ ID NO: 37066 - DNA, 201 bp, Homo sapiens; identical to SEQ ID NO: 37009

SEQ ID NO: 37067 - DNA, 201 bp, Homo sapiens; identical to SEQ ID NO: 37010

SEQ ID NO: 37068 - DNA, 201 bp, Homo sapiens; identical to SEQ ID NO: 37011

SEQ ID NO: 37069 - DNA, 201 bp, Homo sapiens; identical to SEQ ID NO: 37012

SEQ ID NO: 37070 - DNA, 201 bp, Homo sapiens; identical to SEQ ID NO: 37013

SEQ ID NO: 37071 - DNA, 201 bp, Homo sapiens; identical to SEQ ID NO: 37014

SEQ ID NO: 37072 - DNA, 201 bp, Homo sapiens; identical to SEQ ID NO: 37015

SEQ ID NO: 37073 - DNA, 201 bp, Homo sapiens; identical to SEQ ID NO: 37016

SEQ ID NO: 37074 - DNA, 201 bp, Homo sapiens; identical to SEQ ID NO: 37017

SEQ ID NO: 37075 - DNA, 201 bp, Homo sapiens
gaggtggaggttgcagtgagccaagactacgccactgcactccagcctggaggccagagtgagactccgtctcaaaacaaaacaaaagtgggtggctcackggtccggaggttatgtcttcggtgtctcagccctaaaagtccagttcccccgtgcggccagcttttccacataaggtgtttttgatttgattaccggaaa

SEQ ID NO: 37076 - DNA, 201 bp, Homo sapiens
agcaggagctgacggccgccgtgctgggcctcatctgcgaggggctgtacccagcctccatcgtggacgagcccaccttcaaggtgctgctgaagacggcygacccccggtatgagctgcccagccggaagtacatctctaccaaggccatccctgagaagtacggggccgtccgggaggtgatcctgaaggagctggccg

SEQ ID NO: 37077 - DNA, 201 bp, Homo sapiens
ggatgctttgctgtaaatacttacccggtcagcttggttttgaacctcagagaccatccactgtctttgacacctagaaggtggaaaaaggaaagagattygagaagtgagagagggtcgggggcggtggctcctgtctataatcgcagcactttgggaggccgaggtgggcagatcagctgaggtcaggagatcgagacc

SEQ ID NO: 37078 - DNA, 201 bp, Homo sapiens
ccgacccccggtatgagctgcccagccggaagtacatctctaccaaggccatccctgagaagtacggggccgtccgggaggtgatcctgaaggagctggcygaggccacctggtgtggcatctccaccgacatgtggaggagtgagaatcagaaccgcgcctacgtcacgctggccgcccacttcctgggcctgggcgccc

SEQ ID NO: 37079 - DNA, 201 bp, Homo sapiens
gcaaggacatcgtgaaggcgtgctccctgctggacgtcgcagtgcacatgccctgcctgggccacaccttcaatgccggcatccagcaggccttccagctmccgaagctgggggcgctgctgtcgcgctgccgcaaactggtggagtacttccagcagtctgccgtggccatgtacatgctctatgagaagcagaagcagc

SEQ ID NO: 37080 - DNA, 201 bp, Homo sapiens
aggtggaaaaaggaaagagattcgagaagtgagagagggtcgggggcggtggctcctgtctataatcgcagcactttgggaggccgaggtgggcagatcarctgaggtcaggagatcgagaccagcctggccaacatggcgaaaccccgtctctactaaaaatacaaaaattagccaggactgatggcatgtgcctgtaat

SEQ ID NO: 37081 - DNA, 201 bp, Homo sapiens
agcctgggcgacaagagcgagactctctcaaaaagaaaaaagaagacacaagagaggtggctttgagtgggtttcctttcctcccctattcccggggccckgacgacttctgcttgggaactgccaacgcttctgcttgggaattgcgtgcagcagagcctagaggagctgttccttccttcacagatacttaagacctcc

SEQ ID NO: 37082 - DNA, 201 bp, Homo sapiens
cctgttctgccccgaggccggggacgcagggcagcccacgcctccgtgggctccattctgtagcattgccagcgttctcttcacgtctctaacaatccttygcttttcctcactcacgtggaaatgtgaactgtcccggctctgtcttcatttttatttttaagccatcgttcccctcctgaacggttgccccttatttaa

SEQ ID NO: 37083 - DNA, 201 bp, Homo sapiens
tctgcgagttcgtcaagagcaacacggagcagatgcgtgaagccttcgccaccgccttctccaagctgaagcccgagtcgtcccagcagcccgggcaggaygcgctggccgtcaaggccggccacggctacgacagcaagaagcagcaggagctgacggccgccgtgctgggcctcatctgcgaggggctgtacccagcct

SEQ ID NO: 37084 - DNA, 201 bp, Homo sapiens
tctccgccttcgagcggcagcaggtggagaatcgcgtggtggaagaggccaagggcctgctggacaaggtcaaagacggcggctaccggccggctgaggayaagatcttcccggtgcccgaggagcctcccgtcaagaagctcatgcggacatccacgccgccgcccgccagcgtcatcaacaacatgctggccgagatct

SEQ ID NO: 37085 - DNA, 201 bp, Homo sapiens
ccctcagctccgggtgttctcggcagaagggcagctggaagggacacagtggggcaggctttggggttgctccctgttctgccccgaggccggggacgcasggcagcccacgcctccgtgggctccattctgtagcattgccagcgttctcttcacgtctctaacaatccttcgcttttcctcactcacgtggaaatgtga

SEQ ID NO: 37086 - DNA, 201 bp, Homo sapiens
gcttctgagaaatggggaagagaccttttagccaaaatgcccttcttaaaaagagagacctttttttttaatgttcggttaaaaatgtgacagatgagtasaaaaatgcagacacttaacaaaaagcaaacagaaaaaaaagtgtggaatgtgttgtattttcgacaggttgctgccagagagcctgcttcctgctgcctg

SEQ ID NO: 37087 - DNA, 201 bp, Homo sapiens
tggagaataaaagcctggagagctcccagacagacctgaagctggtggcccacccccgcgccaagagcaaggtgtggaagtatttcggcttcgacaccaaygccgagggatgcatcctgcagtggaagaaaatctactgccgcatctgcatggcccagatcgcctactccggaaacacctccaacctgtcctaccacctgg

SEQ ID NO: 37088 - DNA, 201 bp, Homo sapiens
aaatccacgtaacctttgctttctttttaagggaagcggttccgccgtgaacttggaaccctcagctccgggtgttctcggcagaagggcagctggaaggsacacagtggggcaggctttggggttgctccctgttctgccccgaggccggggacgcagggcagcccacgcctccgtgggctccattctgtagcattgcca

SEQ ID NO: 37089 - DNA, 201 bp, Homo sapiens
ctggttgcttttcaagacccccgatgaaggagcgtggacttccatctacgcagcagtcaccccagagctggaaggagttggtggccgttacctatacaatragaaagagaccaagtccctccacgtcacctacaaccagaaactgcagcagcagctgtggtctaagagttgtgagatgactggggtccttgatgtgaccct

SEQ ID NO: 37090 - DNA, 201 bp, Homo sapiens
aagaagcttctcggctggttgcttttcaagacccccgatgaaggagcgtggacttccatctacgcagcagtcaccccagagctggaaggagttggtggccrttacctatacaatgagaaagagaccaagtccctccacgtcacctacaaccagaaactgcagcagcagctgtggtctaagagttgtgagatgactggggtc

SEQ ID NO: 37091 - DNA, 201 bp, Homo sapiens
ggcccttgtcctgttcacctaccacctccagcggctgctggcggctgagggaagccacgtgaccgccaacgtggtggaccccggggtggtcaacacggacstctacaagcacgtgttctgggccacccgtctggcgaagaagcttctcggctggttgcttttcaagacccccgatgaaggagcgtggacttccatctacgc

SEQ ID NO: 37092 - DNA, 201 bp, Homo sapiens
cagcctacgcccagagcaagctggcccttgtcctgttcacctaccacctccagcggctgctggcggctgagggaagccacgtgaccgccaacgtggtggaycccggggtggtcaacacggacctctacaagcacgtgttctgggccacccgtctggcgaagaagcttctcggctggttgcttttcaagacccccgatgaag

SEQ ID NO: 37093 - DNA, 201 bp, Homo sapiens; identical to SEQ ID NO: 37075

SEQ ID NO: 37094 - DNA, 201 bp, Homo sapiens; identical to SEQ ID NO: 37076

SEQ ID NO: 37095 - DNA, 201 bp, Homo sapiens; identical to SEQ ID NO: 37077

SEQ ID NO: 37096 - DNA, 201 bp, Homo sapiens; identical to SEQ ID NO: 37078

SEQ ID NO: 37097 - DNA, 201 bp, Homo sapiens; identical to SEQ ID NO: 37079

SEQ ID NO: 37098 - DNA, 201 bp, Homo sapiens; identical to SEQ ID NO: 37080

SEQ ID NO: 37099 - DNA, 201 bp, Homo sapiens; identical to SEQ ID NO: 37081

SEQ ID NO: 37100 - DNA, 201 bp, Homo sapiens; identical to SEQ ID NO: 37082

SEQ ID NO: 37101 - DNA, 201 bp, Homo sapiens; identical to SEQ ID NO: 37083

SEQ ID NO: 37102 - DNA, 201 bp, Homo sapiens; identical to SEQ ID NO: 37084

SEQ ID NO: 37103 - DNA, 201 bp, Homo sapiens; identical to SEQ ID NO: 37085

SEQ ID NO: 37104 - DNA, 201 bp, Homo sapiens; identical to SEQ ID NO: 37086

SEQ ID NO: 37105 - DNA, 201 bp, Homo sapiens; identical to SEQ ID NO: 37087

SEQ ID NO: 37106 - DNA, 201 bp, Homo sapiens; identical to SEQ ID NO: 37088

SEQ ID NO: 37107 - DNA, 201 bp, Homo sapiens; identical to SEQ ID NO: 37089

SEQ ID NO: 37108 - DNA, 201 bp, Homo sapiens; identical to SEQ ID NO: 37090

SEQ ID NO: 37109 - DNA, 201 bp, Homo sapiens; identical to SEQ ID NO: 37091

SEQ ID NO: 37110 - DNA, 201 bp, Homo sapiens; identical to SEQ ID NO: 37092

SEQ ID NO: 37111 - DNA, 201 bp, Homo sapiens
ccttctgcccttgctcctggggacagcccaacactcagaccacgagttcctgatgcattattgtgagaggtttctgcacgcagccaggtggcatcaacggsacagaggaacaatgtggaaagtccactttgtgacgcctgtgttccagccagagggagccggtgcctgctatggaagaaaggtctgcccgtgctttgggga

SEQ ID NO: 37112 - DNA, 201 bp, Homo sapiens
gcccacgagtctgatggacgtgttccccaccgtggtccggctggcgggcggcgaggtgccccaggacagtgattgacggccaagaccttctgcccttgctyctggggacagcccaacactcagaccacgagttcctgatgcattattgtgagaggtttctgcacgcagccaggtggcatcaacgggacagaggaacaatgt

SEQ ID NO: 37113 - DNA, 201 bp, Homo sapiens
agcccgtgttctatcaggtgatggaacgagtccagcaggcggtgtgggaacaccagcggacactcagcccagttcctctgcagctggacaggctgggcaayatctggagaccgtggctgcagccctgctgtggcccgttccccctctgctggtgccttagggaagatgacccacaataaatgtctgcagtgaaaagctgga

SEQ ID NO: 37114 - DNA, 201 bp, Homo sapiens
cgggatcttccgctggcccggggtgctcccggccggccgagtgattggcgagcccacgagtctgatggacgtgttccccaccgtggtccggctggcgggcrgcgaggtgccccaggacagtgattgacggccaagaccttctgcccttgctcctggggacagcccaacactcagaccacgagttcctgatgcattattgtg

SEQ ID NO: 37115 - DNA, 201 bp, Homo sapiens
aggcggtgtgggaacaccagcggacactcagcccagttcctctgcagctggacaggctgggcaacatctggagaccgtggctgcagccctgctgtggcccrttccccctctgctggtgccttagggaagatgacccacaataaatgtctgcagtgaaaagctggagccccgattcctaaattttgtcactcaaattgaaac

SEQ ID NO: 37116 - DNA, 201 bp, Homo sapiens
aggtttctgcacgcagccaggtggcatcaacgggacagaggaacaatgtggaaagtccactttgtgacgcctgtgttccagccagagggagccggtgcctrctatggaagaaaggtctgcccgtgctttggggaaaaagtagtccaccacgatccacctttgctctttgacctctcaagagacccttctgagacccacatc

SEQ ID NO: 37117 - DNA, 201 bp, Homo sapiens
accagcggacactcagcccagttcctctgcagctggacaggctgggcaacatctggagaccgtggctgcagccctgctgtggcccgttccccctctgctgrtgccttagggaagatgacccacaataaatgtctgcagtgaaaagctggagccccgattcctaaattttgtcactcaaattgaaacaaaccagctggccat

SEQ ID NO: 37118 - DNA, 201 bp, Homo sapiens
gaggaagtagagagagagacaacatgttacatctgcaccattcttgtttgtgtttcaggagctggctgccagcgatgctcgctgtactgctaagtttggcrccatcagcttccagcgacatttccgcctcccgaccgaacatccttcttctgatggcggacgaccttggcattggggacattggctgctatggcaacaaca

SEQ ID NO: 37119 - DNA, 201 bp, Homo sapiens
cgggatcttccgctggcccggggtgctcccggccggccgagtgattggcgagcccacgagtctgatggacgtgttccccaccgtggtccggctggcgggcrgcgaggtgccccaggacagagtgattgacggccaagaccttctgcccttgctcctggggacagcccaacactcagaccacgagttcctgatgcattattg

SEQ ID NO: 37120 - DNA, 201 bp, Homo sapiens
tcaactgtgagtcagccagtgatcattgccaccaccctctccatcatggctttgaccatttctacggaatgcctttctccttgatgggtgattgcgcccgytgggaactctcagagaagcgtgtcaacctggaacaaaaactcaacttcctcttccaagtcctggccttggttgccctcacactggtagcagggaagctca

SEQ ID NO: 37121 - DNA, 201 bp, Homo sapiens
ccttggttgccctcacactggtagcagggaagctcacacacctgatacccgtctcgtggatgccggtcatctggtcagccctttcggccgtcctcctcctygcaagctcctattttgtgggtgctctgattgtccatgccgattgctttctgatgagaaaccacaccatcacggagcagcccatgtgcttccaaagaacga

SEQ ID NO: 37122 - DNA, 201 bp, Homo sapiens
ctcaactgtgagtcagccagtgatcattgccaccaccctctccatcatggctttgaccatttctacggaatgcctttctccttgatgggtgattgcgcccrctgggaactctcagagaagcgtgtcaacctggaacaaaaactcaacttcctcttccaagtcctggccttggttgccctcacactggtagcagggaagctc

SEQ ID NO: 37123 - DNA, 201 bp, Homo sapiens
ggtcagccctttcggccgtcctcctcctcgcaagctcctattttgtgggtgctctgattgtccatgccgattgctttctgatgagaaaccacaccatcacrgagcagcccatgtgcttccaaagaacgacaccccttattctgcaggaggttgcgtcctttctcaaaaggaataagcatgggcctttcctcctctttgttt

SEQ ID NO: 37124 - DNA, 201 bp, Homo sapiens
ccacgagtctgatggacgtgttccccaccgtggtccggctggcgggcggcgaggtgccccaggacagagtgattgacggccaagaccttctgcccttgctyctggggacagcccaacactcagaccacgagttcctgatgcattattgtgagaggtttctgcacgcagccaggtggcatcaacgggacagaggaacaatgt

SEQ ID NO: 37125 - DNA, 201 bp, Homo sapiens; identical to SEQ ID NO: 37113

SEQ ID NO: 37126 - DNA, 201 bp, Homo sapiens; identical to SEQ ID NO: 37115

SEQ ID NO: 37127 - DNA, 201 bp, Homo sapiens; identical to SEQ ID NO: 37111

SEQ ID NO: 37128 - DNA, 201 bp, Homo sapiens
atggtttccagcattggttaccgtgttcttcagtggaccggagcatctggaggtcttccaacaaatgagacaacttttgcaaaaatactgaaagagaaagbctatgccactggactcattggaaaatggcatctgggtctcaactgtgagtcagccagtgatcattgccaccaccctctccatcatggctttgaccatttc

SEQ ID NO: 37129 - DNA, 201 bp, Homo sapiens
tactgaaagagaaaggctatgccactggactcattggaaaatggcatctgggtctcaactgtgagtcagccagtgatcattgccaccaccctctccatcayggctttgaccatttctacggaatgcctttctccttgatgggtgattgcgcccgctgggaactctcagagaagcgtgtcaacctggaacaaaaactcaact

SEQ ID NO: 37130 - DNA, 201 bp, Homo sapiens
atctttgtgcaccccaagcagagccgccttcctcacgggcagataccctgtgcgatcagggatggtttccagcattggttaccgtgttcttcagtggaccrgagcatctggaggtcttccaacaaatgagacaacttttgcaaaaatactgaaagagaaaggctatgccactggactcattggaaaatggcatctgggtct

SEQ ID NO: 37131 - DNA, 201 bp, Homo sapiens; identical to SEQ ID NO: 37117

SEQ ID NO: 37132 - DNA, 201 bp, Homo sapiens; identical to SEQ ID NO: 37116

SEQ ID NO: 37133 - DNA, 201 bp, Homo sapiens
caaaaggaataagcatgggcctttcctcctctttgtttcctttctacacgttcacatccctcttatcactatggagaacttcctcgggaagagtctccacrggctgtatggggacaacgtagaggagatggactggatggtaggacggatccttgacactttggacgtggagggtttgagcaacagcaccctcatttattt

SEQ ID NO: 37134 - DNA, 201 bp, Homo sapiens
ggtagcagggaagctcacacacctgatacccgtctcgtggatgccggtcatctggtcagccctttcggccgtcctcctcctcgcaagctcctattttgtgsgtgctctgattgtccatgccgattgctttctgatgagaaaccacaccatcacggagcagcccatgtgcttccaaagaacgacaccccttattctgcagga

SEQ ID NO: 37135 - DNA, 201 bp, Homo sapiens
cgctgtactgctaagtttggcaccatcagcttccagcgacatttccgcctcccgaccgaacatccttcttctgatggcggacgaccttggcattggggacrttggctgctatggcaacaacaccatgaggactccgaatattgaccgccttgcagaggacggcgtgaagctgacccaacacatctctgccgcatctttgtg

SEQ ID NO: 37136 - DNA, 201 bp, Homo sapiens
caggaagtagagagagagacaacatgttacatctgcaccattcttgtttgtgtttcaggagctggctgccagcgatgctcgctgtactgctaagtttggcrccatcagcttccagcgacatttccgcctcccgaccgaacatccttcttctgatggcggacgaccttggcattggggacattggctgctatggcaacaaca

SEQ ID NO: 37137 - DNA, 201 bp, Homo sapiens; identical to SEQ ID NO: 37119

SEQ ID NO: 37138 - DNA, 201 bp, Homo sapiens; identical to SEQ ID NO: 37120

SEQ ID NO: 37139 - DNA, 201 bp, Homo sapiens; identical to SEQ ID NO: 37121

SEQ ID NO: 37140 - DNA, 201 bp, Homo sapiens; identical to SEQ ID NO: 37122

SEQ ID NO: 37141 - DNA, 201 bp, Homo sapiens; identical to SEQ ID NO: 37123

SEQ ID NO: 37142 - DNA, 201 bp, Homo sapiens; identical to SEQ ID NO: 37124

SEQ ID NO: 37143 - DNA, 201 bp, Homo sapiens; identical to SEQ ID NO: 37113

SEQ ID NO: 37144 - DNA, 201 bp, Homo sapiens; identical to SEQ ID NO: 37115

SEQ ID NO: 37145 - DNA, 201 bp, Homo sapiens; identical to SEQ ID NO: 37111

SEQ ID NO: 37146 - DNA, 201 bp, Homo sapiens; identical to SEQ ID NO: 37128

SEQ ID NO: 37147 - DNA, 201 bp, Homo sapiens; identical to SEQ ID NO: 37129

SEQ ID NO: 37148 - DNA, 201 bp, Homo sapiens; identical to SEQ ID NO: 37130

SEQ ID NO: 37149 - DNA, 201 bp, Homo sapiens; identical to SEQ ID NO: 37117

SEQ ID NO: 37150 - DNA, 201 bp, Homo sapiens; identical to SEQ ID NO: 37116

SEQ ID NO: 37151 - DNA, 201 bp, Homo sapiens; identical to SEQ ID NO: 37133

SEQ ID NO: 37152 - DNA, 201 bp, Homo sapiens; identical to SEQ ID NO: 37134

SEQ ID NO: 37153 - DNA, 201 bp, Homo sapiens
cgctgtactgctaagtttggcaccatcagcttccagcgacatttccgcctcccgaccgaacatccttcttctgatggcggacgaccttggcattggggacrttggctgctatggcaacaacaccatgaggcagactccgaatattgaccgccttgcagaggacggcgtgaagctgacccaacacatctctgccgcatcttt

SEQ ID NO: 37154 - DNA, 201 bp, Homo sapiens
cccgactccgagcccctgtaccacgccgtgatagcaagggtaggtgccgcggtgtcggagcatcggcagaccctgagtcctgtgccccagcagttttccaygagcaacatcctgtggaagccgtggctgcagccgtgctgcggacatttcccgttctgttcatgccacgaggatggggatggcaccccctgaatgccagga

SEQ ID NO: 37155 - DNA, 201 bp, Homo sapiens
atttacaaaggtgggaagggcatgggaggatgggaaggtgggatccgcgtgcccgggatcttccactggccgggggtgctcccggccggccgagtgattgragagcccacgagcctgatggacgtgttccctactgtggtccagctggtgggtggcgaggtgccccaggacagggtgattgatggccacagcctggtaccc

SEQ ID NO: 37156 - DNA, 201 bp, Homo sapiens
tgcagtgaaagtgatgccgatactaccctccctgccctagacttgggatacctggcagctatattcttccattcctcaggacttgcaaaaacgggtctcarcatgccttcccagagccatgaggtgtttctttgcccattcattgatctgagaagtgagtgtaaggagtttaaatcaacctctgttctgtgctagttaagg

SEQ ID NO: 37157 - DNA, 201 bp, Homo sapiens
gccttaaacaaagccaggcacggtgactcacacctgtaatcccagcactttgggaggctgaggcgggaggattatttgagcctgggaggtcaaaactgcartgagctaagattgcactactgcactccgggctgggagacagagtaagaccctgccttaaaaaaaaaaaaaaaaaaatgccttaaagaaaataataagaga

SEQ ID NO: 37158 - DNA, 201 bp, Homo sapiens
taggtgccgcggtgtcggagcatcggcagaccctgagtcctgtgccccagcagttttccatgagcaacatcctgtggaagccgtggctgcagccgtgctgyggacatttcccgttctgttcatgccacgaggatggggatggcaccccctgaatgccaggactgtgagagaggatccaggagagcctgactgcgttgcaaa

SEQ ID NO: 37159 - DNA, 201 bp, Homo sapiens
actgtgttgactgaggtttttgacgcatcgctttattgtcaaattaaacaactctatctcattctgcactgaaacacgtactaccattgcctataattggmaaatgatcctcagaggcacagaagatgccctgatggaaagtttgccccttgggcaaagagacagccatgggaaccttcagacatagagagagaaggtggc

SEQ ID NO: 37160 - DNA, 201 bp, Homo sapiens
taaaggaagctgtttcctatattgaaagacacaagcatgggccatttctcctcttcctttctttgctgcatgtgcacattccccttgtgaccacgagtgcrttcctggggaaaagtcagcatggcttatatggtgataatgtggaggagatggactggctcataggtaaggttcttaatgccatcgaagacaatggtttaa

SEQ ID NO: 37161 - DNA, 201 bp, Homo sapiens
catcgctttattgtcaaattaaacaactctatctcattctgcactgaaacacgtactaccattgcctataattggaaaatgatcctcagaggcacagaagwtgccctgatggaaagtttgccccttgggcaaagagacagccatgggaaccttcagacatagagagagaaggtggcttttctccctacattcctcaaatag

SEQ ID NO: 37162 - DNA, 201 bp, Homo sapiens
agcacgctggcaccagaaggacagtggaagcgtctggaaggttcattacacgaccccgcagttccaccccgagggagcgggggcctgctacggccgaggcrtctgcccatgctccggggagggcgtgacccatcacagaccccctttgctctttgacctctccagggacccctccgaggcacggcccctgacccccgactc

SEQ ID NO: 37163 - DNA, 201 bp, Homo sapiens
aaaagtcagcatggcttatatggtgataatgtggaggagatggactggctcataggtaaggttcttaatgccatcgaagacaatggtttaaagaactcaayattcacgtatttcacctctgaccatggaggacatttagaggcaagagatggacacagccagttagggggatggaacggaatttacaaaggtgggaagggc

SEQ ID NO: 37164 - DNA, 201 bp, Homo sapiens
cattcctggggaaaagtcagcatggcttatatggtgataatgtggaggagatggactggctcataggtaaggttcttaatgccatcgaagacaatggtttraagaactcaacattcacgtatttcacctctgaccatggaggacatttagaggcaagagatggacacagccagttagggggatggaacggaatttacaaag

SEQ ID NO: 37165 - DNA, 201 bp, Homo sapiens
tgcttctgaagacgtgtgaacctaaaactgcaaatgcctttaaaccaaatatcctactgatcatggcggatgatctaggcactggggatctcggttgctaygggaacaatacactgagaacgccgaatattgaccagcttgcagaggaaggtgtgaggctcactcagcacctggcggccgccccgctctgcaccccaagcc

SEQ ID NO: 37166 - DNA, 201 bp, Homo sapiens
ggaaaatgatcctcagaggcacagaagatgccctgatggaaagtttgccccttgggcaaagagacagccatgggaaccttcagacatagagagagaaggtrgcttttctccctacattcctcaaatagctaagatttggccagtgtgttttctaagtcaattctagtgtgtttcatcctcacctcttccctctgtggcttt

SEQ ID NO: 37167 - DNA, 201 bp, Homo sapiens
cgtgctgcggacatttcccgttctgttcatgccacgaggatggggatggcaccccctgaatgccaggactgtgagagaggatccaggagagcctgactgcrttgcaaacaaaattctccaagcttggttctatcttcagcttccctttttgcaaggaacatgccctggactgagagtgggtccccactttctttctttctt

SEQ ID NO: 37168 - DNA, 133 bp, Homo sapiens
ctgagagggcggaagccttggcactagcggcgyccgggcgcggagtgcgcagggcaaggtcctgcgctctgggccagcgctcggccatgcgatccgccgcgcggaggggacgcgccgcgcccgccgccaggga

SEQ ID NO: 37169 - DNA, 201 bp, Homo sapiens
gaagtggacgccgccctgagggcgcagctctggggttacacccagttcctggcgctggggattctcaccctggctgccggccagacctgcggtttcttctstgtctccgcgagagcagtcaccggcatggccggcgtgggctgcctgtttttcatctcttggtactcctccttcgggtttgtgcgacgctggaactgtatc

SEQ ID NO: 37170 - DNA, 201 bp, Homo sapiens; identical to SEQ ID NO: 37165

SEQ ID NO: 37171 - DNA, 133 bp, Homo sapiens; identical to SEQ ID NO: 37168

SEQ ID NO: 37172 - DNA, 201 bp, Homo sapiens
gtggaggagatggactggctcatagccagtgacttcatgtcatcatcagaagttaccgaaagtgaagcgataaagttaatgttcaggacaatgcagagacrctgtcttccttctatggccttcaagaaaccctggagaggaccagtgaggctgcagattcttaaaagagcatagacattaaaattcttgcagaatctgaat

SEQ ID NO: 37173 - DNA, 201 bp, Homo sapiens; identical to SEQ ID NO: 37165

SEQ ID NO: 37174 - DNA, 201 bp, Homo sapiens
aatgtggaggagatggactggctcatagccagtgacttcatgtcatcatcagaagttaccgaaagtgaagcgataaagttaatgttcaggacaatgcagasacgctgtcttccttctatggccttcaagaaaccctggagaggaccagtgaggctgcagattcttaaaagagcatagacattaaaattcttgcagaatctg

SEQ ID NO: 37175 - DNA, 201 bp, Homo sapiens; identical to SEQ ID NO: 37169

SEQ ID NO: 37176 - DNA, 201 bp, Homo sapiens
gttctgcaggctgcacaggaagcatggcagcatctgcttctggggagacctcggggagcttttgctcatggtggaaggcgaagggggagcaggcgtcttgyggcaggagaaggaccaagagaggagaggaagagccgcacacttttaaacaaccagatctcgtgagaagctactccctccgcagcaccaagcgggggatgg

SEQ ID NO: 37177 - DNA, 201 bp, Homo sapiens
taaaggaagctgtttcctatattgaaagacacaagcatgggccatttctcctcttcctttctttgctgcatgtgcacattccccttgtgaccacgagtgcrttcctggggaaaagtcagcatggcttatatggtgataatgtggaggagatggactggctcatagccagtgacttcatgtcatcatcagaagttaccgaaa

SEQ ID NO: 37178 - DNA, 133 bp, Homo sapiens; identical to SEQ ID NO: 37168

SEQ ID NO: 37179 - DNA, 201 bp, Homo sapiens; identical to SEQ ID NO: 37155

SEQ ID NO: 37180 - DNA, 201 bp, Homo sapiens; identical to SEQ ID NO: 37156

SEQ ID NO: 37181 - DNA, 201 bp, Homo sapiens; identical to SEQ ID NO: 37160

SEQ ID NO: 37182 - DNA, 201 bp, Homo sapiens; identical to SEQ ID NO: 37162

SEQ ID NO: 37183 - DNA, 201 bp, Homo sapiens; identical to SEQ ID NO: 37163

SEQ ID NO: 37184 - DNA, 133 bp, Homo sapiens; identical to SEQ ID NO: 37168

SEQ ID NO: 37185 - DNA, 201 bp, Homo sapiens; identical to SEQ ID NO: 37164

SEQ ID NO: 37186 - DNA, 201 bp, Homo sapiens; identical to SEQ ID NO: 37165

SEQ ID NO: 37187 - DNA, 201 bp, Homo sapiens; identical to SEQ ID NO: 37169

SEQ ID NO: 37188 - DNA, 201 bp, Homo sapiens; identical to SEQ ID NO: 37154

SEQ ID NO: 37189 - DNA, 201 bp, Homo sapiens; identical to SEQ ID NO: 37155

SEQ ID NO: 37190 - DNA, 201 bp, Homo sapiens; identical to SEQ ID NO: 37167

SEQ ID NO: 37191 - DNA, 201 bp, Homo sapiens; identical to SEQ ID NO: 37158

SEQ ID NO: 37192 - DNA, 201 bp, Homo sapiens; identical to SEQ ID NO: 37160

SEQ ID NO: 37193 - DNA, 201 bp, Homo sapiens; identical to SEQ ID NO: 37162

SEQ ID NO: 37194 - DNA, 201 bp, Homo sapiens; identical to SEQ ID NO: 37163

SEQ ID NO: 37195 - DNA, 133 bp, Homo sapiens; identical to SEQ ID NO: 37168

SEQ ID NO: 37196 - DNA, 201 bp, Homo sapiens; identical to SEQ ID NO: 37164

SEQ ID NO: 37197 - DNA, 201 bp, Homo sapiens; identical to SEQ ID NO: 37165

SEQ ID NO: 37198 - DNA, 201 bp, Homo sapiens; identical to SEQ ID NO: 37169

SEQ ID NO: 37199 - DNA, 201 bp, Homo sapiens
aagcagcttcagcccacgttttattcccatcgagggagggagaatgggtgccgctgagtgggcgggggagtggtccctgaaaggaggtggagtgctacagyccctccccgttggctctcgctgtttgtccgttgttggtttatagtaatttgacaacagccgcctgttgagtctcctccagatcgcagctgaaggatctgt

SEQ ID NO: 37200 - DNA, 201 bp, Homo sapiens
tgggtgccgctgagtgggcgggggagtggtccctgaaaggaggtggagtgctacagcccctccccgttggctctcgctgtttgtccgttgttggtttatastaatttgacaacagccgcctgttgagtctcctccagatcgcagctgaaggatctgttgagcgcttcaggaaaggcggtgagatccggtaccgcagcagag

SEQ ID NO: 37201 - DNA, 201 bp, Homo sapiens
ccccatgccagcagaaagatttcctctggtgaagaggaccgtcgaatctgtcctcctcaagacacctcttgtacagaatttattcgaatgccacggccaakgtcttccttgaaaaatgttaaccgatgtgtgctttttgtcttttgtcatcctttctttaggacaggcgacactaacaggtgaagatctcgggagaccatg

SEQ ID NO: 37202 - DNA, 201 bp, Homo sapiens
ggactcttcacactggctaatagtaaagccacctctacccatacattaagaaaacccacagtggctgggcatggtggctcacgcctgtaatcccagcactytgggaggcggaggcgggtggatcacctgagctcaggagtttgagaccatcctggccaacacggtgaaaccccatctctactaaaaacacaaaattagcca

SEQ ID NO: 37203 - DNA, 201 bp, Homo sapiens
tgaagggaaaaaggagatgaatgtctttgatggagtcatggtttgcactggccatcacaccaatgctcatctacctctggaaagcttccctggaattgagragttcaaagggcagtacttccacagtcgagactataagaacccagagggattcactggaaagagagtcattataattggcattgggaattctggagggga

SEQ ID NO: 37204 - DNA, 201 bp, Homo sapiens
catctttgtatgtctttagcagagttcttgacatgtggtaggtgcttaataaatgtttgttgtttatcaaattttatggtagggagagtaagtcagcatcrgtataaaatcgcttactccacgtaactcttcttctgatagggtttgattttctattagaagctcaattttagttttttttcatattataactaaatatgt

SEQ ID NO: 37205 - DNA, 201 bp, Homo sapiens
tgaaggaattcacggagacagctgccatatttgaggatggctccagggaggatgacattgatgctgttatctttgccacaggctatagctttgactttccrtttctggaagattccgtcaaagtggtcaaaaacaagatatccctgtataaaaaggtcttccctcctaacctggaaaggccaactcttgcaatcataggct

SEQ ID NO: 37206 - DNA, 197 bp, Homo sapiens
ccggccccgcgcgccgcgcaggcgggggccgtggccaccaagcccgggcgcagtttctctccgcccacggcaggagcgaaggaaggccctggcgcgrgcgggtaaactgcccaccgggcggcccacccgctgcgcccccggcccgcaagaggcagtcccaataggttggcccgcctggccgaagtccgcccggagcc

SEQ ID NO: 37207 - DNA, 201 bp, Homo sapiens
atcgtgtacagggccctggaaagtgggatggggctcgaaaagctatcctcaccacagatgatcgcatcaggaagcctctgatgacaagagtagttgaaagkagtagttctatgacttcaacaatgacaataggcaagtttatgctagctcttgccttctttgctataattatagcttacttctagttgtcctattgtcact

SEQ ID NO: 37208 - DNA, 201 bp, Homo sapiens
ctccagggaggatgacattgatgctgttatctttgccacaggctatagctttgactttccatttctggaagattccgtcaaagtggtcaaaaacaagatayccctgtataaaaaggtcttccctcctaacctggaaaggccaactcttgcaatcataggcttgattcagcccttaggagccattatgcccatttcagagct

SEQ ID NO: 37209 - DNA, 201 bp, Homo sapiens; identical to SEQ ID NO: 37203

SEQ ID NO: 37210 - DNA, 201 bp, Homo sapiens; identical to SEQ ID NO: 37199

SEQ ID NO: 37211 - DNA, 201 bp, Homo sapiens; identical to SEQ ID NO: 37204

SEQ ID NO: 37212 - DNA, 201 bp, Homo sapiens; identical to SEQ ID NO: 37200

SEQ ID NO: 37213 - DNA, 201 bp, Homo sapiens; identical to SEQ ID NO: 37207

SEQ ID NO: 37214 - DNA, 201 bp, Homo sapiens; identical to SEQ ID NO: 37201

SEQ ID NO: 37215 - DNA, 201 bp, Homo sapiens; identical to SEQ ID NO: 37203

SEQ ID NO: 37216 - DNA, 201 bp, Homo sapiens; identical to SEQ ID NO: 37199

SEQ ID NO: 37217 - DNA, 201 bp, Homo sapiens; identical to SEQ ID NO: 37204

SEQ ID NO: 37218 - DNA, 201 bp, Homo sapiens; identical to SEQ ID NO: 37205

SEQ ID NO: 37219 - DNA, 201 bp, Homo sapiens; identical to SEQ ID NO: 37207

SEQ ID NO: 37220 - DNA, 201 bp, Homo sapiens
tgggtgccgctgagtgggcgggggagtggtccctgaaaggaggtggagtgctacagcccctccccgttggctctcgctgtttgtccgttgttggtttatastaatttgacaacagccgcctgttgagtctcctccagatcgcagctgaaggatctgttgagcgcttcaggaaaggcggacaggcgacactaacaggtgaag

SEQ ID NO: 37221 - DNA, 201 bp, Homo sapiens; identical to SEQ ID NO: 37208

SEQ ID NO: 37222 - DNA, 201 bp, Homo sapiens; identical to SEQ ID NO: 37203

SEQ ID NO: 37223 - DNA, 201 bp, Homo sapiens; identical to SEQ ID NO: 37199

SEQ ID NO: 37224 - DNA, 201 bp, Homo sapiens; identical to SEQ ID NO: 37204

SEQ ID NO: 37225 - DNA, 201 bp, Homo sapiens; identical to SEQ ID NO: 37205

SEQ ID NO: 37226 - DNA, 201 bp, Homo sapiens; identical to SEQ ID NO: 37207

SEQ ID NO: 37227 - DNA, 201 bp, Homo sapiens
tgggtgccgctgagtgggcgggggagtggtccctgaaaggaggtggagtgctacagcccctccccgttggctctcgctgtttgtccgttgttggtttatastaatttgacaacagccgcctgttgagtctcctccagatcgcagctgaaggatctgttgagcgcttcaggaaaggcggcgacactaacaggtgaagatctc

SEQ ID NO: 37228 - DNA, 201 bp, Homo sapiens; identical to SEQ ID NO: 37208

SEQ ID NO: 37229 - DNA, 201 bp, Homo sapiens; identical to SEQ ID NO: 37203

SEQ ID NO: 37230 - DNA, 201 bp, Homo sapiens
aagagaaaagaatggtggacaacttccgcccccttcagccactgatgaatcgcactgttcgttcatccttccggcatgattatgtgctgaatgtacaagcraaacccaagccggccaccagccaagcaaccccctaaaacattcatatctaggcagtattttgcttttgctttaatatatactagcttactataaattgtt

SEQ ID NO: 37231 - DNA, 201 bp, Homo sapiens
tatagcactatacatagggattataatcaaaatttttaacatgtggtaaggcacagacactgaccagaactcaggccttgcagaaacagcctatgggcccmgactggtacttcctggctgaatattggccatggttttagatgtattttattttataacatgaatgtgtattctttcataagggcttatcagtcagtatat

SEQ ID NO: 37232 - DNA, 201 bp, Homo sapiens
gctaagtgtctgggaccatgagtgggaaggactgaggcttgagcctccttggtcctccagacagcatggggcgccacttgccccttctgcagctgcgcgcsgcaaagctgtggcctggccgtggcctcctgccccatgcaacagttggtggacagaccgtacctggcacacggcgccttgtgcactttccaacattttgat

SEQ ID NO: 37233 - DNA, 201 bp, Homo sapiens
gaaagctgcgccccgcccaaaagcactgggttctgcagtccaggcccttcctcagctcccaggtccaggagaactgcaaggtcacctacttccacaggaarcactgggtccgcatccggcccctccgcaccactcctcccagctgggactacacccgcatctgcatccagagagagatggtccccgcccgcatccgcgtcc

SEQ ID NO: 37234 - DNA, 120 bp, Homo sapiens
caggcccacctctcctctcccttaaagcccttcccttgcccttgcccattcgctcctgccttctccctggggacaggaggcatgcttctccccagtttccrcaataaaatatttgttgtt

SEQ ID NO: 37235 - DNA, 201 bp, Homo sapiens
acagctgccaggcccctctgcccagagctaagtgtctgggaccatgagtgggaaggactgaggcttgagcctccttggtcctccagacagcatggggcgcyacttgccccttctgcagctgcgcgcggcaaagctgtggcctggccgtggcctcctgccccatgcaacagttggtggacagaccgtacctggcacacggcg

SEQ ID NO: 37236 - DNA, 201 bp, Homo sapiens
cagagctaagtgtctgggaccatgagtgggaaggactgaggcttgagcctccttggtcctccagacagcatggggcgccacttgccccttctgcagctgcrcgcggcaaagctgtggcctggccgtggcctcctgccccatgcaacagttggtggacagaccgtacctggcacacggcgccttgtgcactttccaacattt

SEQ ID NO: 37237 - DNA, 201 bp, Homo sapiens
ttagtggaaaatgtgcctcactctactccaggattaccaatagaaatgaaaggacagaaatggcattagtgtttagagaagattatgtatatatggctgtrtgaacactgaaaattatgagggtcaacataaaatcagcattacaggtactaaaacataaatcctgatggctttcaccgttttcttaagagcaaaattgca

SEQ ID NO: 37238 - DNA, 201 bp, Homo sapiens
ttgcccaatcttcaattggttgcgacttttttgtctcttcccgattctggcattccagagggtcaataggttccttctccacgtgcttttgagggaaatgccccccccccaaaaaacttttcacaccaccttgaacagactctaaacttaggcactacagttactaagcagcctttggattctttgtttttgaagttagat

SEQ ID NO: 37239 - DNA, 201 bp, Homo sapiens
tccccgcccgcatccgcgtcctgagagagatggtccccgaggcctggaggtgctttcccaacaggctgccgctgctgagcaacatcaggcctgatttctcsaaggctcccctggcctacgtgaagcggtggctttggaccgcccgccacccccacagcctgtccgcagcctggtgaccgtgaaaatcgccccgccagagag

SEQ ID NO: 37240 - DNA, 201 bp, Homo sapiens
ctctggaagaaaatcagcatcagcaatgtcttcagtgcctatggaggatgaatttgcatccactctgggagagcgtggacctggttcctgggggcgatcgmcagtcacccatcaacattcggtggagggacagtgtttatgatcccggcttaaaaccactgaccatctcttatgacccagccacctgcctccacgtctgga

SEQ ID NO: 37241 - DNA, 201 bp, Homo sapiens
gtcgcaagggtgtaaaaaagaaattcgaattcgcgggacggtcggcctcaggcggaggacgtggctaaacgtgagggggcgtggccaagatggccgcgtgygggatcctcgggtaccgggagcgaacgaggaggttctggctcagttttcctattgtccttgattctacccatccatggtacttctaaaggacagggaaat

SEQ ID NO: 37242 - DNA, 201 bp, Homo sapiens; identical to SEQ ID NO: 37230

SEQ ID NO: 37243 - DNA, 201 bp, Homo sapiens
aggagcgcaggcagcaaggcttagcggaagaggcgtgacccaggcgtaccgcaggggcgtggcccgaacgagctgactttagcccttacgtgaaaggcgtkgcgtagtcgcaagggtgtaaaaaagaaattcgaattcgcgggacggtcggcctcaggcggaggacgtggctaaacgtgagggggcgtggccaagatggcc

SEQ ID NO: 37244 - DNA, 201 bp, Homo sapiens; identical to SEQ ID NO: 37231

SEQ ID NO: 37245 - DNA, 201 bp, Homo sapiens
gtaccgcaggggcgtggcccgaacgagctgactttagcccttacgtgaaaggcgtggcgtagtcgcaagggtgtaaaaaagaaattcgaattcgcgggacrgtcggcctcaggcggaggacgtggctaaacgtgagggggcgtggccaagatggccgcgtgcgggatcctcgggtaccgggagcgaacgaggaggttctgg

SEQ ID NO: 37246 - DNA, 201 bp, Homo sapiens; identical to SEQ ID NO: 37230

SEQ ID NO: 37247 - DNA, 201 bp, Homo sapiens; identical to SEQ ID NO: 37231

SEQ ID NO: 37248 - DNA, 201 bp, Homo sapiens
ggccgcgtgcgggatcctcgggtaccgggagcgaacgaggaggttctggctcagtgcatccactctgggagagcgtggacctggttcctgggggcgatcgmcagtcacccatcaacattcggtggagggacagtgtttatgatcccggcttaaaaccactgaccatctcttatgacccagccacctgcctccacgtctgga

SEQ ID NO: 37249 - DNA, 201 bp, Homo sapiens
gtcgcaagggtgtaaaaaagaaattcgaattcgcgggacggtcggcctcaggcggaggacgtggctaaacgtgagggggcgtggccaagatggccgcgtgygggatcctcgggtaccgggagcgaacgaggaggttctggctcagtgcatccactctgggagagcgtggacctggttcctgggggcgatcgccagtcaccc

SEQ ID NO: 37250 - DNA, 201 bp, Homo sapiens; identical to SEQ ID NO: 37243

SEQ ID NO: 37251 - DNA, 201 bp, Homo sapiens; identical to SEQ ID NO: 37233

SEQ ID NO: 37252 - DNA, 120 bp, Homo sapiens; identical to SEQ ID NO: 37234

SEQ ID NO: 37253 - DNA, 201 bp, Homo sapiens; identical to SEQ ID NO: 37239

SEQ ID NO: 37254 - DNA, 201 bp, Homo sapiens; identical to SEQ ID NO: 37245

SEQ ID NO: 37255 - DNA, 201 bp, Homo sapiens; identical to SEQ ID NO: 37248

SEQ ID NO: 37256 - DNA, 201 bp, Homo sapiens; identical to SEQ ID NO: 37249

SEQ ID NO: 37257 - DNA, 201 bp, Homo sapiens; identical to SEQ ID NO: 37243

SEQ ID NO: 37258 - DNA, 201 bp, Homo sapiens; identical to SEQ ID NO: 37233

SEQ ID NO: 37259 - DNA, 120 bp, Homo sapiens; identical to SEQ ID NO: 37234

SEQ ID NO: 37260 - DNA, 201 bp, Homo sapiens; identical to SEQ ID NO: 37239

SEQ ID NO: 37261 - DNA, 201 bp, Homo sapiens; identical to SEQ ID NO: 37245

SEQ ID NO: 37262 - DNA, 201 bp, Homo sapiens
accctcaggctggggccgaggatgctctcattgtgcactgcgtagatgactctggccactggggcagaggtggtttatttacagctctggaaaagcgatcygctgagccaagaaaaatatatgagctggctgggaaaatgaaagacctgagtttgggaggtgtccttttatttcctgttgatgataaagaatcaagaaaca

SEQ ID NO: 37263 - DNA, 201 bp, Homo sapiens
agcttcgaaagtgtgtggatcacccatatttgtttgatggtgtggagccggagccttttgaagttggagaccacctgactgaggctagtgggaagcttcasctgctggataagctactagcattcctgtattctgggggccatcgggttttacttttctcccaaatgacccagatgttggatattctccaagactatatgg

SEQ ID NO: 37264 - DNA, 201 bp, Homo sapiens
ggttgaaaaaccaaagctccctgctgcataagaccttgtcagagttctcagtagtcttcagtctcctgttgaccggaactcccatccagaacagcctccargagctctactccctcctcagttttgtggagcctgatctcttttccaaggaagaggtgggagattttattcaacgctaccaggatattgagaaagaatctg

SEQ ID NO: 37265 - DNA, 201 bp, Homo sapiens
agcaaccagctaatatttacccagaggtactgcaatagagtatttcaaaatggaatcaggatctggtgggcctcagaaattgtctcttttctgagtttcartttggttctcctggatgttttgctctgttttggtacctgtaatatagggaaacacaactttttttgggaaagccctttgaccccagcttgctagttgcat

SEQ ID NO: 37266 - DNA, 193 bp, Homo sapiens
aatagagtatttcaaaatggaatcaggatctggtgggcctcagaaattgtctcttttctgagtttcagtttggttctcctggatgttttgctctgttttgrtacctgtaatatagggaaacacaactttttttgggaaagccctttgaccccagcttgctagttgcataataataaattttctgttcctaatg

SEQ ID NO: 37267 - DNA, 201 bp, Homo sapiens
actttggacagcagcccattttcgtttttctcctgagtactagggcaggtggagttggcatgaacttaacagcagcagatactgtgatttttgttgacagygactttaatcctcagaatgacttgcaagcagctgccagggctcatcgcattggccaaaacaagtctgttaaagttattcggctgattggtcgagacactg

SEQ ID NO: 37268 - DNA, 157 bp, Homo sapiens
ggggcctctaccggcccgatggagcgcgcgggcgctactagccgcgggggccaagcscctggcttcttactgcggcttcatactgagggccgagccgaggcggcgcgggtgcaggagcaggacttacggcagtgggggctgacagggattcacctac

SEQ ID NO: 37269 - DNA, 201 bp, Homo sapiens
taaaatcattcccttggagtgttcttgttgtggatgaagctcacaggttgaaaaaccaaagctccctgctgcataagaccttgtcagagttctcagtagtyttcagtctcctgttgaccggaactcccatccagaacagcctccaagagctctactccctcctcagttttgtggagcctgatctcttttccaaggaagagg

SEQ ID NO: 37270 - DNA, 192 bp, Homo sapiens
ggggcctctaccggcccgatggagcgcgcgggcgctactagccgcgggggccaagcccctggcttcttactgcggcttcatactgagggccsagccgaggcggcgcgggtgcaggagcaggacttacggcagtgggggctgacagggattcacctacgctcttaccagctggagggagtaaactggctcgcc

SEQ ID NO: 37271 - DNA, 201 bp, Homo sapiens
gccgagccgaggcggcgcgggtgcaggagcaggacttacggcagtgggggctgacagggattcacctacgctcttaccagctggagggagtaaactggctygcccagcgcttccattgtcagaatggctgtatcctgggagatgagatgggcctggggaagacctgccagactattgctctcttcatttatttggcaggaa

SEQ ID NO: 37272 - DNA, 201 bp, Homo sapiens
gctggagggagtaaactggctcgcccagcgcttccattgtcagaatggctgtatcctgggagatgagatgggcctggggaagacctgccagactattgctytcttcatttatttggcaggaagattaaatgatgaagggccatttctgattctttgtcccttgtctgttttgagcaactggaaagaagaaatgcagagatt

SEQ ID NO: 37273 - DNA, 201 bp, Homo sapiens
caagacccagatgctacttccctcaagtacgttagtggtgatgtcacccaccctcaggctggggccgaggatgctctcattgtgcactgcgtagatgactstggccactggggcagaggtggtttatttacagctctggaaaagcgatccgctgagccaagaaaaatatatgagctggctgggaaaatgaaagacctgagt

SEQ ID NO: 37274 - DNA, 201 bp, Homo sapiens
agcttcgaaagtgtgtggatcacccatatttgtttgatggtgtggagccggagccttttgaagttggagaccacctgactgaggctagtgggaagcttcasctgctggataagctactagcattcctgtattctgggctacagctatgagcgtgtggatggttctgtgagaggagaagagagacacttggccattaagaac

SEQ ID NO: 37275 - DNA, 201 bp, Homo sapiens; identical to SEQ ID NO: 37264

SEQ ID NO: 37276 - DNA, 201 bp, Homo sapiens; identical to SEQ ID NO: 37267

SEQ ID NO: 37277 - DNA, 157 bp, Homo sapiens; identical to SEQ ID NO: 37268

SEQ ID NO: 37278 - DNA, 201 bp, Homo sapiens; identical to SEQ ID NO: 37269

SEQ ID NO: 37279 - DNA, 192 bp, Homo sapiens; identical to SEQ ID NO: 37270

SEQ ID NO: 37280 - DNA, 201 bp, Homo sapiens; identical to SEQ ID NO: 37271

SEQ ID NO: 37281 - DNA, 201 bp, Homo sapiens; identical to SEQ ID NO: 37272

SEQ ID NO: 37282 - DNA, 157 bp, Homo sapiens; identical to SEQ ID NO: 37268

SEQ ID NO: 37283 - DNA, 201 bp, Homo sapiens; identical to SEQ ID NO: 37269

SEQ ID NO: 37284 - DNA, 192 bp, Homo sapiens; identical to SEQ ID NO: 37270

SEQ ID NO: 37285 - DNA, 201 bp, Homo sapiens; identical to SEQ ID NO: 37263

SEQ ID NO: 37286 - DNA, 201 bp, Homo sapiens; identical to SEQ ID NO: 37271

SEQ ID NO: 37287 - DNA, 201 bp, Homo sapiens; identical to SEQ ID NO: 37264

SEQ ID NO: 37288 - DNA, 201 bp, Homo sapiens; identical to SEQ ID NO: 37272

SEQ ID NO: 37289 - DNA, 157 bp, Homo sapiens; identical to SEQ ID NO: 37268

SEQ ID NO: 37290 - DNA, 201 bp, Homo sapiens; identical to SEQ ID NO: 37269

SEQ ID NO: 37291 - DNA, 192 bp, Homo sapiens; identical to SEQ ID NO: 37270

SEQ ID NO: 37292 - DNA, 201 bp, Homo sapiens; identical to SEQ ID NO: 37263

SEQ ID NO: 37293 - DNA, 201 bp, Homo sapiens; identical to SEQ ID NO: 37271

SEQ ID NO: 37294 - DNA, 201 bp, Homo sapiens; identical to SEQ ID NO: 37264

SEQ ID NO: 37295 - DNA, 201 bp, Homo sapiens; identical to SEQ ID NO: 37272

SEQ ID NO: 37296 - DNA, 201 bp, Homo sapiens
ttacacaggggaactgtgtcaatctgacagaagcactgtcgctctatgaagaacagctggggcgcctgtattgtcctgtggaattttcaaaggagatcgtmtgtgtcccttcatacttggaattgtgggtattttacactgtttggaagaaagctaaaccctgaagatcagtagcccctaatcacatgtgctgcaaatagc

SEQ ID NO: 37297 - DNA, 201 bp, Homo sapiens
atgggaaatattttacacaggggaactgtgtcaatctgacagaagcactgtcgctctatgaagaacagctggggcgcctgtattgtcctgtggaattttcmaaggagatcgtctgtgtcccttcatacttggaattgtgggtattttacactgtttggaagaaagctaaaccctgaagatcagtagcccctaatcacatgt

SEQ ID NO: 37298 - DNA, 201 bp, Homo sapiens; identical to SEQ ID NO: 37296

SEQ ID NO: 37299 - DNA, 201 bp, Homo sapiens; identical to SEQ ID NO: 37297

SEQ ID NO: 37300 - DNA, 201 bp, Homo sapiens; identical to SEQ ID NO: 37296

SEQ ID NO: 37301 - DNA, 201 bp, Homo sapiens; identical to SEQ ID NO: 37297

SEQ ID NO: 37302 - DNA, 201 bp, Homo sapiens
tcaaaatctcctttattacagatgacccaatgccattacagaaattccattacagaaaccttcttcttggtgaacacgatgtccctttaacatgtattgarcaaattgtcacagtaaacgaccacaagaggaagcagaaagtcctaggccccaaccagaaactgaaatttaatccaacagagttaattatttattgtaaag

SEQ ID NO: 37303 - DNA, 201 bp, Homo sapiens
ggcagtgtgacctagggagcgggaaacctgagttctggccctggtctgggaaaagtgctaggcccatgttccactcaggcttcagcctgagagtccaggtygctaacctgtaaaatggatctgtcaaactaacacttatgcctttagtctcattgtatgaggtgaaacattttgtaaactgtgaatcattatgcaaatttt

SEQ ID NO: 37304 - DNA, 201 bp, Homo sapiens
agggtctcaagccaaacttgaaaccattctgaaccaaagtgccatttcacccacctcgaaccaacaacagaagctgacaaatgccgtggagaccattgagrgaaacagaaaggggcagctcttgtggaccttcaggaagcctttctaggaagaggattgccctcatagtgagctccggggtcttcagcctcagccgtaagg

SEQ ID NO: 37305 - DNA, 116 bp, Homo sapiens
tcattgtatgaggtgaaacattttgtaaactgtgaatcattatgcaaattttcctaaagacatatgaattattctggatttgttggtataaaagacaaaayacactggtcagttaa

SEQ ID NO: 37306 - DNA, 201 bp, Homo sapiens; identical to SEQ ID NO: 37302

SEQ ID NO: 37307 - DNA, 201 bp, Homo sapiens; identical to SEQ ID NO: 37303

SEQ ID NO: 37308 - DNA, 201 bp, Homo sapiens; identical to SEQ ID NO: 37304

SEQ ID NO: 37309 - DNA, 116 bp, Homo sapiens; identical to SEQ ID NO: 37305

SEQ ID NO: 37310 - DNA, 201 bp, Homo sapiens
gatctatgaagcagtgctgctgcagaccccaactcaggctggggaggagcccctgaatgtgggcagtgtggctgctggtgggcgctatgatgggctggtgsgcatgtttgaccccaagggccacaaggtgccatgtgtgggactcagcattggggttgagcgaatcttctacattgtggagcagaggatgaagaccaaagg

SEQ ID NO: 37311 - DNA, 201 bp, Homo sapiens
agcaaggctctgggagagtcacctcaggctcaggattctgaaccattgagatcagaaaccagatacttagccttctactgtagctacggaaccagattctrgtgaatttgtccacaatcagccattggcctgtctggggagtttttggaagacagcaaagaggggcaatggctgctttcagctttgaggacagatgctatc

SEQ ID NO: 37312 - DNA, 201 bp, Homo sapiens
ctggtacttcctcatccaagacaggccttccacttagcacttacttcagtgcagtgaaacttcgttggctccttgacaatgtgagaaaagttcaaaaggcygttgaagaaaaacgagctctttttgggactattgattcatggcttatttggagtttgacaggaggagtcaatggaggtgtccactgtacagatgtaacaa

SEQ ID NO: 37313 - DNA, 201 bp, Homo sapiens
cgacgcgctttttggttttcaattcaaaaacagctgaactacttagtcatcatcaagtagaaataaaacaagagttcccaagagaaggatgggtggaacargaccctaaggaaattctacattctgtctatgagtgtatagagaaaacatgtgagaaacttggacagctcaatattgatatttccaacataaaagctattg

SEQ ID NO: 37314 - DNA, 201 bp, Homo sapiens
ccccctccattgccataacatcctgctccattccctctaagatgtaggaagaattcggatccttaccattggaatcttccatcgaacatactcaaacactwttggaccaggatttgagtctctgcatgacatatacttgattaaaaggttattactaacctgttaaaaatcagcagctctttgcttttaacagacacccta

SEQ ID NO: 37315 - DNA, 201 bp, Homo sapiens
ctacaatgctgtggtccaagacaggccttccacttagcacttacttcagtgcagtgaaacttcgttggctccttgacaatgtgagaaaagttcaaaaggcygttgaagaaaaacgagctctttttgggactattgattcatggcttatttggagtttgacaggaggagtcaatggaggtgtccactgtacagatgtaacaa

SEQ ID NO: 37316 - DNA, 201 bp, Homo sapiens; identical to SEQ ID NO: 37313

SEQ ID NO: 37317 - DNA, 201 bp, Homo sapiens; identical to SEQ ID NO: 37314

SEQ ID NO: 37318 - DNA, 201 bp, Homo sapiens
gcaccctcaactcccaactgccaacttgaagcctgaactaccctttccctgaccagagttcaggaggggaagagctacacctccctgcacatgaatccackcatttgaaagcacaactgaccctggatttaagctggccaggaccctgggagatctttggaaggatttttgcctgggtttagggttaacttaaagaggtgc

SEQ ID NO: 37319 - DNA, 149 bp, Homo sapiens
cccggggcgcgtcccggaaccagagacggggcagcgctcgagttcctgygcgggactgccaaggcacgaccacgggccggaaggctgccaggcccagtgggcaagcgaagaaatgaaccaccgcaacgcgggcgcttcggggcggggcc

SEQ ID NO: 37320 - DNA, 201 bp, Homo sapiens
cgaggccataatgctacccaccccctcctcctaaccactggtctgttggaataacccagatgtctgcatcccctcaagtcagtcaatttcctttctgtccmctgggggtggaatggggtagggtgggatactttaaagtgctcctgcttaaataaattagaccagaccagtgtatttctaaagaaaatcctgacatgcaca

SEQ ID NO: 37321 - DNA, 201 bp, Homo sapiens
agtgggcaagcgaagaaatgaaccaccgcaacgcgggcgcttcggggcggggccgagtgcgaacctgagccccaaatcccgacccaggcaggggcggggcycggagcggggccttggaggcccagcccgcgcggcgacgtctccgcgtggcgtcacggcaccgactgacggccacccaccatggccgcagaccagcgcccg

SEQ ID NO: 37322 - DNA, 201 bp, Homo sapiens
caggatagagacttccaggagttccacctgtcccaccttatctggctgccaactcctgctcagaaacagaacctgccacaccctgccactgcaggccgcamcctcaactcccaactgccaacttgaagcctgaactaccctttccctgaccagagttcaggaggggaagagctacacctccctgcacatgaatccactcat

SEQ ID NO: 37323 - DNA, 201 bp, Homo sapiens
tgccatgatcacaccatacactccagcctgggtgacagagtaaggccctgttaaaaaaaaaaaaaaaagtcctccttaaagacatgggctttctagacagsgttcttctgctgaagcggctttccttctgccagaatctcaggaactcctggatctgcctttccagaaccagcttctctctccctgctctgccttcagact

SEQ ID NO: 37324 - DNA, 201 bp, Homo sapiens
cctgctcaggaggctgaggtgggaggaccacttgagcccaggagtgtgaggatgcagtgaatgccatgatcacaccatacactccagcctgggtgacagagtaaggccctgttaaaaaaaaaaaaaaaagtcctccttaaagacatgggctttctagacagggttcttctgctgaagcggctttccttctgccagaatctc

SEQ ID NO: 37325 - DNA, 201 bp, Homo sapiens
ggctttccttctgccagaatctcaggaactcctggatctgcctttccagaaccagcttctctctccctgctctgccttcagactgccctctttctacctcwccctctagaactacatctcttctggctgggtttatagcttggggctgggggaggcccagtgggactggctgagtggagccagccgtgtgacggaggcggc

SEQ ID NO: 37326 - DNA, 201 bp, Homo sapiens
acctgctcaggaggctgaggtgggaggaccacttgagcccaggagtgtgaggatgcagtgaatgccatgatcacaccatacactccagcctgggtgacagagtaaggccctgttaaaaaaaaaaaaaaaagtcctccttaaagacatgggctttctagacagggttcttctgctgaagcggctttccttctgccagaatct

SEQ ID NO: 37327 - DNA, 201 bp, Homo sapiens; identical to SEQ ID NO: 37318

SEQ ID NO: 37328 - DNA, 201 bp, Homo sapiens; identical to SEQ ID NO: 37320

SEQ ID NO: 37329 - DNA, 201 bp, Homo sapiens
attttataagacttccaggagttccacctgtcccaccttatctggctgccaactcctgctcagaaacagaacctgccacaccctgccactgcaggccgcamcctcaactcccaactgccaacttgaagcctgaactaccctttccctgaccagagttcaggaggggaagagctacacctccctgcacatgaatccactcat

SEQ ID NO: 37330 - DNA, 201 bp, Homo sapiens; identical to SEQ ID NO: 37318

SEQ ID NO: 37331 - DNA, 142 bp, Homo sapiens
cgcgtcccggaaccagagacggggcagcgctcgagttcctgygcgggactgccaaggcacgaccacgggccggaaggctgccaggcccagtgggcaagcgaagaaatgaaccaccgcaacgcgggcgcttcggggcggggcc

SEQ ID NO: 37332 - DNA, 201 bp, Homo sapiens; identical to SEQ ID NO: 37320

SEQ ID NO: 37333 - DNA, 201 bp, Homo sapiens; identical to SEQ ID NO: 37321

SEQ ID NO: 37334 - DNA, 201 bp, Homo sapiens; identical to SEQ ID NO: 37322

SEQ ID NO: 37335 - DNA, 201 bp, Homo sapiens
aggtaaccagatttttgaaatgctgtatctactttcttatgtcttgtttctcctttcatgtaatttttgttctatatggagcaccactaatagagttggcrttggaaacatttttatttgcagttattttgtctacttttactattgggccttacttatgtttgttaggaccaaacctcaaagcatggctaagagttttca

SEQ ID NO: 37336 - DNA, 201 bp, Homo sapiens; identical to SEQ ID NO: 37335

SEQ ID NO: 37337 - DNA, 157 bp, Homo sapiens
gcggccgctcccggggcttgggctcgatgggcgtccactgctcgccacgcacagccrcctgcggggcactgaagggttgagccgcgccccagcgcccgccctccctccctccctccctccccggaggcccaccccgctaggggccctgggacaggct

SEQ ID NO: 37338 - DNA, 201 bp, Homo sapiens
ttaagttggagttggaacaggccaatgagagagagtgtgaggtgctgaggaagatctggagctcagcccaagggatagaatccatgttaaaaatacctctrttgggatataaagcagccttagcttccctcccagaaagacacagaacgatcagagatggtgcccttgactttatagtggcacaaacacttcagagacaca

SEQ ID NO: 37339 - DNA, 201 bp, Homo sapiens
cagaacgatcagagatggtgcccttgactttatagtggcacaaacacttcagagacacacaattataagagacttatcttttagcataaatacttatggcwcaaaatccactgacgatcattctcctaaactgaacacatgactagaattggtggtgagatatcgcttgattttcttttcctttataaatgtctagttctt

SEQ ID NO: 37340 - DNA, 201 bp, Homo sapiens
gtaacaggcaggaagaaagctttctgtactacaccagagggttggggctgtggatttagctactctcacctgaggctactgagcaagttgtcatgcaccaygagacaaagcccaagctgtcccaccaggcagtaagtatggagaggttcaggcacatggcatagctgctatttcgcacaattttcactacaccagtggtga

SEQ ID NO: 37341 - DNA, 201 bp, Homo sapiens; identical to SEQ ID NO: 36143

SEQ ID NO: 37342 - DNA, 201 bp, Homo sapiens
aggaagatctggagctcagcccaagggatagaatccatgttaaaaatacctctattgggatataaagcagccttagcttccctcccagaaagacacagaaygatcagagatggtgcccttgactttatagtggcacaaacacttcagagacacacaattataagagacttatcttttagcataaatacttatggcacaaaa

SEQ ID NO: 37343 - DNA, 201 bp, Homo sapiens
aagaactctcctaaaacgccagtgactgataaacaccacaggtccaaaaaccgcaagttatttgctgccagcaagaacgttaggagaaaggcagcttcaaytctctccgacacaaagaatatggagataataaattcaactattgagacccttgcacctgacagcccctttgaccacaaaactgtgagtggctttcagaaa

SEQ ID NO: 37344 - DNA, 201 bp, Homo sapiens
tttcagaaacttgagaaactggaccctattgcagcagatcagcaggacacggtggtcttcaaggtgacagaagggaaactcctccgggaccctttgtcacrtcctggtgcagaacagactggaatacagaacaagactcagatacacccactaatgtcgcagatgtctggctcagttactgcttctatggccacaggttca

SEQ ID NO: 37345 - DNA, 201 bp, Homo sapiens; identical to SEQ ID NO: 37340

SEQ ID NO: 37346 - DNA, 201 bp, Homo sapiens; identical to SEQ ID NO: 36143

SEQ ID NO: 37347 - DNA, 201 bp, Homo sapiens; identical to SEQ ID NO: 37343

SEQ ID NO: 37348 - DNA, 201 bp, Homo sapiens; identical to SEQ ID NO: 37344

SEQ ID NO: 37349 - DNA, 201 bp, Homo sapiens; identical to SEQ ID NO: 37338

SEQ ID NO: 37350 - DNA, 201 bp, Homo sapiens; identical to SEQ ID NO: 37340

SEQ ID NO: 37351 - DNA, 201 bp, Homo sapiens; identical to SEQ ID NO: 37339

SEQ ID NO: 37352 - DNA, 105 bp, Homo sapiens; identical to SEQ ID NO: 36140

SEQ ID NO: 37353 - DNA, 201 bp, Homo sapiens; identical to SEQ ID NO: 36143

SEQ ID NO: 37354 - DNA, 201 bp, Homo sapiens
tcttttcctttataaatgtctagttcttacccagttaacaaaagaaaactttatcgctctaaagtaaaacttgttacaccacattagtgaattatggaatsattttggtggaaatatccaggttctaatgtgtggaatgtgcagatttaggttactttagtgtatgttctagttaataagttaaaattctggacacattat

SEQ ID NO: 37355 - DNA, 201 bp, Homo sapiens; identical to SEQ ID NO: 37343

SEQ ID NO: 37356 - DNA, 201 bp, Homo sapiens; identical to SEQ ID NO: 37344

SEQ ID NO: 37357 - DNA, 201 bp, Homo sapiens; identical to SEQ ID NO: 37342

SEQ ID NO: 37358 - DNA, 201 bp, Homo sapiens
agcctggatgacatggagaagatatccaggggaccaacggggcgcctgcggattcaccatgccaaactggcccaggctggcgcttaccagtgcattgtggwcaatggggtggcgcctccagcacgacggctgctccgtcttgttgtcagatttgccccccaggtggagcaccccactcccctaactaaggtggctgcagct

SEQ ID NO: 37359 - DNA, 201 bp, Homo sapiens
ctcctgctgaccccagaggcaggcaccatggtcacctgggtagctgggcaggagtacgtggtcaactgtgtgtctggggacgcgaagccagcacctgacawcaccattctcctgagtggacagacaatatctgacatctctgcaaacgtgaacgagggctcccagcagaaactcttcactgtggaggccacagccagggtg

SEQ ID NO: 37360 - DNA, 201 bp, Homo sapiens
ctgaccccagaggcaggcaccatggtcacctgggtagctgggcaggagtacgtggtcaactgtgtgtctggggacgcgaagccagcacctgacatcaccawtctcctgagtggacagacaatatctgacatctctgcaaacgtgaacgagggctcccagcagaaactcttcactgtggaggccacagccagggtgacaccc

SEQ ID NO: 37361 - DNA, 201 bp, Homo sapiens
agccagcacctgacatcaccattctcctgagtggacagacaatatctgacatctctgcaaacgtgaacgagggctcccagcagaaactcttcactgtggargccacagccagggtgacaccccggagctcagataataggcagttgctggtctgtgaggcgtctagcccagcactggaggcccccatcaaggcctcattca

SEQ ID NO: 37362 - DNA, 201 bp, Homo sapiens
ccccggggcttctgggccctgcctgaaaacctgacggtggtggagggggcctcagtggagctgcgttgtggggtcagcacccctggcagtgcggtgcaatsggccaaagatgggctgctcctgggccccgaccccaggatcccaggcttcccgaggtaccgcctggaaggggaccctgctagaggtgaattccacctgcac

SEQ ID NO: 37363 - DNA, 201 bp, Homo sapiens
tgtctcccagagtgatcctctccatcctggttcctcccaagctgctcctgctgaccccagaggcaggcaccatggtcacctgggtagctgggcaggagtasgtggtcaactgtgtgtctggggacgcgaagccagcacctgacatcaccattctcctgagtggacagacaatatctgacatctctgcaaacgtgaacgagg

SEQ ID NO: 37364 - DNA, 201 bp, Homo sapiens
cacactgcaggtcacctttccccctagtgccattattatcttgggatctgcatcccagactgagaacaagaacgtgacactctcctgtgtcagcaagtccmgtcgcccgcgggttctgctacgatggtggctgggctggcggcagctgctgcccatggaggagacagtcatggatggactgcatggcggtcacatctccat

SEQ ID NO: 37365 - DNA, 201 bp, Homo sapiens
ccgcctggaaggggaccctgctagaggtgaattccacctgcacatcgaggcctgtgacctcagcgatgacgcggagtatgagtgccaggtcggccgctctragatggggcccgagctcgtgtctcccagagtgatcctctccatcctggttcctcccaagctgctcctgctgaccccagaggcaggcaccatggtcacctg

SEQ ID NO: 37366 - DNA, 201 bp, Homo sapiens
gcaggtcacctttccccctagtgccattattatcttgggatctgcatcccagactgagaacaagaacgtgacactctcctgtgtcagcaagtccagtcgcycgcgggttctgctacgatggtggctgggctggcggcagctgctgcccatggaggagacagtcatggatggactgcatggcggtcacatctccatgtccaa

SEQ ID NO: 37367 - DNA, 201 bp, Homo sapiens
gcgcgtccacgcagctggcggtgcagtttcccccaactaacgtgacgatcctggccaacgcatccgcactgcgcccgggagacgccttaaacttgacatgmgtcagcgtcagcagcaatccgccggtcaacttgtcctgggacaaggaaggggagaggctggagggcgtggccgccccaccccggagagccccattcaaag

SEQ ID NO: 37368 - DNA, 201 bp, Homo sapiens
aacttgtcctgggacaaggaaggggagaggctggagggcgtggccgccccaccccggagagccccattcaaaggctccgccgccgccaggagcgtccttcwgcaagtgtcatcccgcgatcatggccagcgcgtgacctgccgcgcccacagcgccgagctccgcgaaaccgtgagctccttctatcgcctcaacgtactg

SEQ ID NO: 37369 - DNA, 201 bp, Homo sapiens
cattattatcttgggatctgcatcccagactgagaacaagaacgtgacactctcctgtgtcagcaagtccagtcgcccgcgggttctgctacgatggtggstgggctggcggcagctgctgcccatggaggagacagtcatggatggactgcatggcggtcacatctccatgtccaacctgacattcctggcgcggcggga

SEQ ID NO: 37370 - DNA, 201 bp, Homo sapiens
tggctgggctggcggcagctgctgcccatggaggagacagtcatggatggactgcatggcggtcacatctccatgtccaacctgacattcctggcgcggcrggaggacaacggtctgaccctcacatgtgaggccttcagtgaagccttcaccaaggagaccttcaagaagtcgctcatcctgaacgtaaaatatcccgcc

SEQ ID NO: 37371 - DNA, 201 bp, Homo sapiens
cctcccgggcatgttcaactgggagagactgggagaagatgaggaggaccagagcctggatgacatggagaagatatccaggggaccaacggggcgcctgyggattcaccatgccaaactggcccaggctggcgcttaccagtgcattgtggacaatggggtggcgcctccagcacgacggctgctccgtcttgttgtcag

SEQ ID NO: 37372 - DNA, 201 bp, Homo sapiens
gcgggcggcccccggcatcgcatcctgtccagcggggctctgcatctgtggaatgtgacccgcgcggacgacggcctctatcagctgcactgccagaactstgagggcaccgcggaagcgcggctgcggctggacgtgcactatgctcccaccatccgtgccctccaggaccccactgaggtgaacgtcgggggttctgtg

SEQ ID NO: 37373 - DNA, 201 bp, Homo sapiens
atgtgacccgcgcggacgacggcctctatcagctgcactgccagaactctgagggcaccgcggaagcgcggctgcggctggacgtgcactatgctcccacyatccgtgccctccaggaccccactgaggtgaacgtcgggggttctgtggacatagtctgcactgtcgatgccaatcccatcctcccgggcatgttcaact

SEQ ID NO: 37374 - DNA, 201 bp, Homo sapiens
caggtcacctttccccctagtgccattattatcttgggatctgcatcccagactgagaacaagaacgtgacactctcctgtgtcagcaagtccagtcgccygcgggttctgctacgatggtggctgggctggcggcagctgctgcccatggaggagacagtcatggatggactgcatggcggtcacatctccatgtccaac

SEQ ID NO: 37375 - DNA, 201 bp, Homo sapiens
ctctcctgtgtcagcaagtccagtcgcccgcgggttctgctacgatggtggctgggctggcggcagctgctgcccatggaggagacagtcatggatggacygcatggcggtcacatctccatgtccaacctgacattcctggcgcggcgggaggacaacggtctgaccctcacatgtgaggccttcagtgaagccttcacc

SEQ ID NO: 37376 - DNA, 201 bp, Homo sapiens
atggaggagacagtcatggatggactgcatggcggtcacatctccatgtccaacctgacattcctggcgcggcgggaggacaacggtctgaccctcacatktgaggccttcagtgaagccttcaccaaggagaccttcaagaagtcgctcatcctgaacgtaaaatatcccgcccagaaactgtggattgagggtccccca

SEQ ID NO: 37377 - DNA, 201 bp, Homo sapiens
gagaccttcaagaagtcgctcatcctgaacgtaaaatatcccgcccagaaactgtggattgagggtcccccagagggccagaagctccgggctgggacccrggtgaggctggtgtgtttggctatcgggggcaacccagagccctccctcatgtggtacaaggactcgcgcaccgtgaccgagtcgcggctgccgcaggag

SEQ ID NO: 37378 - DNA, 201 bp, Homo sapiens
tcgctcatcctgaacgtaaaatatcccgcccagaaactgtggattgagggtcccccagagggccagaagctccgggctgggacccgggtgaggctggtgtrtttggctatcgggggcaacccagagccctccctcatgtggtacaaggactcgcgcaccgtgaccgagtcgcggctgccgcaggagtcgcggcgcgtgcat

SEQ ID NO: 37379 - DNA, 201 bp, Homo sapiens
cggcgcgtgcatctcggcagcgtggagaaatctgggagcaccttctcccgagagctggtgctggtcacagggccgtcggacaaccaggccaagttcacgtkcaaggctggacagctcagcgcgtccacgcagctggcggtgcagtttcccccaactaacgtgacgatcctggccaacgcatccgcactgcgcccgggagac

SEQ ID NO: 37380 - DNA, 201 bp, Homo sapiens
ttctgctcctctccaatgcctcctgtgtcgggggggtcctctggcagcggagactcaggcgtcttgctgagggcatctcagagaagacagaggcagggtcvgaagaggaccgagtcaggaacgaatatgaggagagccagtggacaggagagcgggacactcagagctccacggtcagcacaacagaggcagagccgtatt

SEQ ID NO: 37381 - DNA, 201 bp, Homo sapiens
gtggccgccccaccccggagagccccattcaaaggctccgccgccgccaggagcgtccttctgcaagtgtcatcccgcgatcatggccagcgcgtgacctkccgcgcccacagcgccgagctccgcgaaaccgtgagctccttctatcgcctcaacgtactgtaccgtccagagttcctgggggagcaggtgctggtggtg

SEQ ID NO: 37382 - DNA, 201 bp, Homo sapiens
ctcccgggcatgttcaactgggagagactgggagaagatgaggaggaccagagcctggatgacatggagaagatatccaggggaccaacggggcgcctgcsgattcaccatgccaaactggcccaggctggcgcttaccagtgcattgtggacaatggggtggcgcctccagcacgacggctgctccgtcttgttgtcaga

SEQ ID NO: 37383 - DNA, 201 bp, Homo sapiens
aggcaccatggtcacctgggtagctgggcaggagtacgtggtcaactgtgtgtctggggacgcgaagccagcacctgacatcaccattctcctgagtggayagacaatatctgacatctctgcaaacgtgaacgagggctcccagcagaaactcttcactgtggaggccacagccagggtgacaccccggagctcagataa

SEQ ID NO: 37384 - DNA, 201 bp, Homo sapiens
gtggaggccacagccagggtgacaccccggagctcagataataggcagttgctggtctgtgaggcgtctagcccagcactggaggcccccatcaaggcctmattcaccgtgaatgttctgttccctccaggaccccctgtcatcgagtggccaggcctggatgaggggcacgtgcgggcaggacagagcttggagctgccg

SEQ ID NO: 37385 - DNA, 201 bp, Homo sapiens
ctgcaagtgtcatcccgcgatcatggccagcgcgtgacctgccgcgcccacagcgccgagctccgcgaaaccgtgagctccttctatcgcctcaacgtacygtaccgtccagagttcctgggggagcaggtgctggtggtgaccgcggtggagcagggcgaggcgttgctgcccgtgtccgtgtccgctaaccccgccccc

SEQ ID NO: 37386 - DNA, 201 bp, Homo sapiens
ctgtggaatgtgacccgcgcggacgacggcctctatcagctgcactgccagaactctgagggcaccgcggaagcgcggctgcggctggacgtgcactatgytcccaccatccgtgccctccaggaccccactgaggtgaacgtcgggggttctgtggacatagtctgcactgtcgatgccaatcccatcctcccgggcatg

SEQ ID NO: 37387 - DNA, 201 bp, Homo sapiens
gacccgcgcggacgacggcctctatcagctgcactgccagaactctgagggcaccgcggaagcgcggctgcggctggacgtgcactatgctcccaccatcygtgccctccaggaccccactgaggtgaacgtcgggggttctgtggacatagtctgcactgtcgatgccaatcccatcctcccgggcatgttcaactggga

SEQ ID NO: 37388 - DNA, 201 bp, Homo sapiens
aacggggcgcctgcggattcaccatgccaaactggcccaggctggcgcttaccagtgcattgtggacaatggggtggcgcctccagcacgacggctgctcygtcttgttgtcagatttgccccccaggtggagcaccccactcccctaactaaggtggctgcagctggagacagcaccagttctgccaccctccactgccg

SEQ ID NO: 37389 - DNA, 201 bp, Homo sapiens
ccaaagatgggctgctcctgggccccgaccccaggatcccaggcttcccgaggtaccgcctggaaggggaccctgctagaggtgaattccacctgcacatygaggcctgtgacctcagcgatgacgcggagtatgagtgccaggtcggccgctctgagatggggcccgagctcgtgtctcccagagtgatcctctccatcc

SEQ ID NO: 37390 - DNA, 201 bp, Homo sapiens
cctgcggattcaccatgccaaactggcccaggctggcgcttaccagtgcattgtggacaatggggtggcgcctccagcacgacggctgctccgtcttgttktcagatttgccccccaggtggagcaccccactcccctaactaaggtggctgcagctggagacagcaccagttctgccaccctccactgccgtgcccgagg

SEQ ID NO: 37391 - DNA, 201 bp, Homo sapiens
gagctccacggtcagcacaacagaggcagagccgtattaccgctccctgagggacttcagcccccagctgcccccgacgcaggaggaggtgtcttattccygaggtttcacaggtgaagatgaggatatggccttccctgggcacttgtatgatgaggtagaaagaacgtaccccccgtctggagcctggggacccctcta

SEQ ID NO: 37392 - DNA, 201 bp, Homo sapiens
catctctgcaaacgtgaacgagggctcccagcagaaactcttcactgtggaggccacagccagggtgacaccccggagctcagataataggcagttgctgstctgtgaggcgtctagcccagcactggaggcccccatcaaggcctcattcaccgtgaatgttctgttccctccaggaccccctgtcatcgagtggccagg

SEQ ID NO: 37393 - DNA, 201 bp, Homo sapiens
ggccacagccagggtgacaccccggagctcagataataggcagttgctggtctgtgaggcgtctagcccagcactggaggcccccatcaaggcctcattcrccgtgaatgttctgttccctccaggaccccctgtcatcgagtggccaggcctggatgaggggcacgtgcgggcaggacagagcttggagctgccgtgcgt

SEQ ID NO: 37394 - DNA, 201 bp, Homo sapiens
tcattcaccgtgaatgttctgttccctccaggaccccctgtcatcgagtggccaggcctggatgaggggcacgtgcgggcaggacagagcttggagctgcsgtgcgtggcccgagggggtaatcccttagccacactgcagtggctgaagaatggccagccggtgtccacagcgtggggcacagagcacacccaggcggtg

SEQ ID NO: 37395 - DNA, 201 bp, Homo sapiens
tgaggatatggccttccctgggcacttgtatgatgaggtagaaagaacgtaccccccgtctggagcctggggacccctctacgatgaagtgcagatgggaycctgggacctccactggcctgaagacacatatcaggatccaagaggaatctatgaccaggtggccggagacttggacactctggaacccgattctctgcc

SEQ ID NO: 37396 - DNA, 201 bp, Homo sapiens
caagttcacgtgcaaggctggacagctcagcgcgtccacgcagctggcggtgcagtttcccccaactaacgtgacgatcctggccaacgcatccgcactgygcccgggagacgccttaaacttgacatgcgtcagcgtcagcagcaatccgccggtcaacttgtcctgggacaaggaaggggagaggctggagggcgtggc

SEQ ID NO: 37397 - DNA, 201 bp, Homo sapiens
tgaggagagccagtggacaggagagcgggacactcagagctccacggtcagcacaacagaggcagagccgtattaccgctccctgagggacttcagccccyagctgcccccgacgcaggaggaggtgtcttattcccgaggtttcacaggtgaagatgaggatatggccttccctgggcacttgtatgatgaggtagaaag

SEQ ID NO: 37398 - DNA, 201 bp, Homo sapiens
ggcgggaggacaacggtctgaccctcacatgtgaggccttcagtgaagccttcaccaaggagaccttcaagaagtcgctcatcctgaacgtaaaatatccygcccagaaactgtggattgagggtcccccagagggccagaagctccgggctgggacccgggtgaggctggtgtgtttggctatcgggggcaacccagagc

SEQ ID NO: 37399 - DNA, 201 bp, Homo sapiens
ctgaagaccagctgcccacagagccaccttcaggcaagaccctcggggctgcccctgctgcctgtgctgttcgctcttggggggcttctgctcctctccartgcctcctgtgtcgggggggtcctctggcagcggagactcaggcgtcttgctgagggcatctcagagaagacagaggcagggtcggaagaggaccgagtc

SEQ ID NO: 37400 - DNA, 201 bp, Homo sapiens
cgcggctgcggctggacgtgcactatgctcccaccatccgtgccctccaggaccccactgaggtgaacgtcgggggttctgtggacatagtctgcactgtygatgccaatcccatcctcccgggcatgttcaactgggagagactgggagaagatgaggaggaccagagcctggatgacatggagaagatatccaggggac

SEQ ID NO: 37401 - DNA, 201 bp, Homo sapiens
ccgccgccaggagcgtccttctgcaagtgtcatcccgcgatcatggccagcgcgtgacctgccgcgcccacagcgccgagctccgcgaaaccgtgagctcyttctatcgcctcaacgtactgtaccgtccagagttcctgggggagcaggtgctggtggtgaccgcggtggagcagggcgaggcgttgctgcccgtgtccg

SEQ ID NO: 37402 - DNA, 201 bp, Homo sapiens
ggggctggagtggaagcctggctttgatgggggcctgccacagaggttctgcatcaggtatgaggccctggggactccagggttccactatgtggatgtcstaccaccccaggccaccaccttcacgctgactggtctacagccttctacaagatacagggtctggctgctggccagtaatgccttgggggacagtggact

SEQ ID NO: 37403 - DNA, 201 bp, Homo sapiens
actgcaggtcacctttccccctagtgccattattatcttgggatctgcatcccagactgagaacaagaacgtgacactctcctgtgtcagcaagtccagtygcccgcgggttctgctacgatggtggctgggctggcggcagctgctgcccatggaggagacagtcatggatggactgcatggcggtcacatctccatgtc

SEQ ID NO: 37404 - DNA, 201 bp, Homo sapiens
ttcaactgggagagactgggagaagatgaggaggaccagagcctggatgacatggagaagatatccaggggaccaacggggcgcctgcggattcaccatgmcaaactggcccaggctggcgcttaccagtgcattgtggacaatggggtggcgcctccagcacgacggctgctccgtcttgttgtcagatttgccccccag

SEQ ID NO: 37405 - DNA, 201 bp, Homo sapiens; identical to SEQ ID NO: 37358

SEQ ID NO: 37406 - DNA, 201 bp, Homo sapiens; identical to SEQ ID NO: 37359

SEQ ID NO: 37407 - DNA, 201 bp, Homo sapiens; identical to SEQ ID NO: 37360

SEQ ID NO: 37408 - DNA, 201 bp, Homo sapiens; identical to SEQ ID NO: 37361

SEQ ID NO: 37409 - DNA, 201 bp, Homo sapiens; identical to SEQ ID NO: 37362

SEQ ID NO: 37410 - DNA, 201 bp, Homo sapiens; identical to SEQ ID NO: 37363

SEQ ID NO: 37411 - DNA, 201 bp, Homo sapiens; identical to SEQ ID NO: 37364

SEQ ID NO: 37412 - DNA, 201 bp, Homo sapiens; identical to SEQ ID NO: 37365

SEQ ID NO: 37413 - DNA, 201 bp, Homo sapiens; identical to SEQ ID NO: 37366

SEQ ID NO: 37414 - DNA, 201 bp, Homo sapiens; identical to SEQ ID NO: 37367

SEQ ID NO: 37415 - DNA, 201 bp, Homo sapiens; identical to SEQ ID NO: 37368

SEQ ID NO: 37416 - DNA, 201 bp, Homo sapiens; identical to SEQ ID NO: 37369

SEQ ID NO: 37417 - DNA, 201 bp, Homo sapiens; identical to SEQ ID NO: 37370

SEQ ID NO: 37418 - DNA, 201 bp, Homo sapiens; identical to SEQ ID NO: 37371

SEQ ID NO: 37419 - DNA, 201 bp, Homo sapiens; identical to SEQ ID NO: 37372

SEQ ID NO: 37420 - DNA, 201 bp, Homo sapiens; identical to SEQ ID NO: 37373

SEQ ID NO: 37421 - DNA, 201 bp, Homo sapiens; identical to SEQ ID NO: 37374

SEQ ID NO: 37422 - DNA, 201 bp, Homo sapiens; identical to SEQ ID NO: 37375

SEQ ID NO: 37423 - DNA, 201 bp, Homo sapiens; identical to SEQ ID NO: 37376

SEQ ID NO: 37424 - DNA, 201 bp, Homo sapiens; identical to SEQ ID NO: 37377

SEQ ID NO: 37425 - DNA, 201 bp, Homo sapiens; identical to SEQ ID NO: 37378

SEQ ID NO: 37426 - DNA, 201 bp, Homo sapiens; identical to SEQ ID NO: 37379

SEQ ID NO: 37427 - DNA, 201 bp, Homo sapiens; identical to SEQ ID NO: 37380

SEQ ID NO: 37428 - DNA, 201 bp, Homo sapiens; identical to SEQ ID NO: 37381

SEQ ID NO: 37429 - DNA, 201 bp, Homo sapiens; identical to SEQ ID NO: 37382

SEQ ID NO: 37430 - DNA, 201 bp, Homo sapiens; identical to SEQ ID NO: 37383

SEQ ID NO: 37431 - DNA, 201 bp, Homo sapiens; identical to SEQ ID NO: 37384

SEQ ID NO: 37432 - DNA, 201 bp, Homo sapiens; identical to SEQ ID NO: 37385

SEQ ID NO: 37433 - DNA, 201 bp, Homo sapiens; identical to SEQ ID NO: 37386

SEQ ID NO: 37434 - DNA, 201 bp, Homo sapiens; identical to SEQ ID NO: 37387

SEQ ID NO: 37435 - DNA, 201 bp, Homo sapiens; identical to SEQ ID NO: 37388

SEQ ID NO: 37436 - DNA, 201 bp, Homo sapiens; identical to SEQ ID NO: 37389

SEQ ID NO: 37437 - DNA, 201 bp, Homo sapiens; identical to SEQ ID NO: 37390

SEQ ID NO: 37438 - DNA, 201 bp, Homo sapiens; identical to SEQ ID NO: 37391

SEQ ID NO: 37439 - DNA, 201 bp, Homo sapiens; identical to SEQ ID NO: 37392

SEQ ID NO: 37440 - DNA, 201 bp, Homo sapiens; identical to SEQ ID NO: 37393

SEQ ID NO: 37441 - DNA, 201 bp, Homo sapiens; identical to SEQ ID NO: 37394

SEQ ID NO: 37442 - DNA, 201 bp, Homo sapiens; identical to SEQ ID NO: 37396

SEQ ID NO: 37443 - DNA, 201 bp, Homo sapiens; identical to SEQ ID NO: 37395

SEQ ID NO: 37444 - DNA, 201 bp, Homo sapiens; identical to SEQ ID NO: 37397

SEQ ID NO: 37445 - DNA, 201 bp, Homo sapiens; identical to SEQ ID NO: 37398

SEQ ID NO: 37446 - DNA, 201 bp, Homo sapiens
gaacctgaagaccagctgcccacagagccaccttcaggaccctcggggctgcccctgctgcctgtgctgttcgctcttggggggcttctgctcctctccartgcctcctgtgtcgggggggtcctctggcagcggagactcaggcgtcttgctgagggcatctcagagaagacagaggcagggtcggaagaggaccgagtc

SEQ ID NO: 37447 - DNA, 201 bp, Homo sapiens; identical to SEQ ID NO: 37400

SEQ ID NO: 37448 - DNA, 201 bp, Homo sapiens; identical to SEQ ID NO: 37401

SEQ ID NO: 37449 - DNA, 201 bp, Homo sapiens; identical to SEQ ID NO: 37402

SEQ ID NO: 37450 - DNA, 201 bp, Homo sapiens; identical to SEQ ID NO: 37403

SEQ ID NO: 37451 - DNA, 201 bp, Homo sapiens; identical to SEQ ID NO: 37404

SEQ ID NO: 37452 - DNA, 162 bp, Homo sapiens
ccctcggggctgcccctgctgcctgtgctgttcgctcttggggggcttctgctcctctccartgcctcctgtgtcgggggggtcctctggcagcggagactcaggcgtcttgctgaggcactcaacttccccccacaccttcatcctggaaggtcggaagag

SEQ ID NO: 37453 - DNA, 186 bp, Homo sapiens
gaggaggtaatcccctacctgatccggagggcccaggagaaccggagcgtgcttcagggtgcccgcagggaacaggagctgctcagccaagaactgtggcrgcggctgctgccaggatgccgaaggataccccactagcacccctgagggggtcatgtggtcaataaaagtccttaggtgctgcct

SEQ ID NO: 37454 - DNA, 201 bp, Homo sapiens; identical to SEQ ID NO: 37391

SEQ ID NO: 37455 - DNA, 201 bp, Homo sapiens
gggagctgggcattcctctggatgggactgtctgtttcggacaacttctgggcatgtgtgaccacgtctctctagcactggggcaggccggctatgtagtrtataagtccattccctatggctccttggaggaggtaatcccctacctgatccggagggcccaggagaaccggagcgtgcttcagggtgcccgcagggaac

SEQ ID NO: 37456 - DNA, 201 bp, Homo sapiens
tctccaatgcctcctgtgtcgggggggtcctctggcagcggagactcaggcgtcttgctgaggcactcaacttccccccacaccttcatcctggaaggtcvgaagaggaccgagtcaggaacgaatatgaggagagccagtggacaggagagcgggacactcagagctccacggtcagcacaacagaggcagagccgtatt

SEQ ID NO: 37457 - DNA, 201 bp, Homo sapiens
gagctttgatggcggggccttccaccttaagggcacaggagagctgacacgggccttgctggttctccggctgtgtgcctggcccccactcgtcactcacrggctgttgctccaggcctggtctcggcgactcctgggctcccggctctcaggcgcatttctccgagcatccgtctatgggcagtttgtggctggtgagac

SEQ ID NO: 37458 - DNA, 201 bp, Homo sapiens
tgggaggcagaggtgagcagatcacctcagggcactcaggattccccagtgaccaggatgctccggacctgttacgtgctctgttcccaagctggtccccsctccaggggctggcagtccctgagctttgatggcggggccttccaccttaagggcacaggagagctgacacgggccttgctggttctccggctgtgtgcc

SEQ ID NO: 37459 - DNA, 109 bp, Homo sapiens
gctgctcagccaagaactgtggcggcggctgctgccaggatgccgaaggataccccactagcacccctgagggggtcatgtggtcaataaaagtccttagstgctgcct

SEQ ID NO: 37460 - DNA, 201 bp, Homo sapiens; identical to SEQ ID NO: 37395

SEQ ID NO: 37461 - DNA, 201 bp, Homo sapiens; identical to SEQ ID NO: 37397

SEQ ID NO: 37462 - DNA, 201 bp, Homo sapiens
ggctcccggctctcaggcgcatttctccgagcatccgtctatgggcagtttgtggctggtgagacagcagaggaggtgaagggctgcgtgcagcagctgcrgaccctcagcctccgaccactgctggcagtgcccactgaggaggagccggactctgctgccaagaggatgaggcttcaccatgttggccaggctggtctt

SEQ ID NO: 37463 - DNA, 201 bp, Homo sapiens
caggaggcagcattctccccaccatgcggaaggttgcagcttccagcccaacctgcctccagacacggtgctaggggccgaggaagcatgaaggcaaaatycctgacctcgaggcacttacttgcaagtcaggggcaagagacaataattaaaaccaaagtcagaatcccagcactttggaaggctgagcctgggcaacac

SEQ ID NO: 37464 - DNA, 201 bp, Homo sapiens
gtgaacttgctgcctccagagaaccttccctggtgtggaggcagccagggacccaggatgctccggacctgttacgtgctctgttcccaagctggtccccsctccaggggctggcagtccctgagctttgatggcggggccttccaccttaagggcacaggagagctgacacgggccttgctggttctccggctgtgtgcc

SEQ ID NO: 37465 - DNA, 109 bp, Homo sapiens; identical to SEQ ID NO: 37459

SEQ ID NO: 37466 - DNA, 186 bp, Homo sapiens; identical to SEQ ID NO: 37453

SEQ ID NO: 37467 - DNA, 201 bp, Homo sapiens
ggctcccggctctcaggcgcatttctccgagcatccgtctatgggcagtttgtggctggtgagacagcagaggaggtgaagggctgcgtgcagcagctgcrgaccctcagcctccgaccactgctggcagtgcccactgaggaggagccggactctgctgccaagagtggtgaggcgtggtatgaggggaacctcggtgct

SEQ ID NO: 37468 - DNA, 201 bp, Homo sapiens
cggaccctcagcctccgaccactgctggcagtgcccactgaggaggagccggactctgctgccaagagtggtgaggcgtggtatgaggggaacctcggtgmtatgctgcggtgtgtggacctgtcacggggcctcctggagccccccagcctggctgaggccagcctcatgcagctgaaggtgacggcgctgaccagtact

SEQ ID NO: 37469 - DNA, 201 bp, Homo sapiens
tcgcccagggtagtctcaaactcctcggtcttggcctcccaaagtgttgggattacaaacgtgagaaccgtattttcaaatgtattcaataacactacagygtttccaattttaagaggaagcaattgccacaaaatcactgcccctggtctgggcaaggggcagttggtgaacttgctgcctccagagaaccttccctgg

SEQ ID NO: 37470 - DNA, 201 bp, Homo sapiens; identical to SEQ ID NO: 37455

SEQ ID NO: 37471 - DNA, 201 bp, Homo sapiens
agccccccagcctggctgaggccagcctcatgcagctgaaggtgacggcgctgaccagtactcggctctgtaaggagctagcctcgtgggtcagaaggccrggagcctccttggagctgagccccgagaggctggctgaagctatggactctgggcagaacctccaggtctcctgcctcaatgctgagcagaaccagcacc

SEQ ID NO: 37472 - DNA, 201 bp, Homo sapiens
cacggggcctcctggagccccccagcctggctgaggccagcctcatgcagctgaaggtgacggcgctgaccagtactcggctctgtaaggagctagcctcrtgggtcagaaggccaggagcctccttggagctgagccccgagaggctggctgaagctatggactctgggcagaacctccaggtctcctgcctcaatgctg

SEQ ID NO: 37473 - DNA, 201 bp, Homo sapiens; identical to SEQ ID NO: 37457

SEQ ID NO: 37474 - DNA, 201 bp, Homo sapiens
gctctgctgcccacctgctgggattactggacctatgtgggctcgctcaccaccccgccgctgaccgagtcggtcacctggatcatccagaaggagcccgytgaagtggccccaagccaactctctgcatttcgtactctcctgttttctgcacttggtgaagagaagaagatgacggtgaacaactatcgtccacttcaa

SEQ ID NO: 37475 - DNA, 201 bp, Homo sapiens
acctggatcatccagaaggagcccgttgaagtggccccaagccaactctctgcatttcgtactctcctgttttctgcacttggtgaagagaagaagatgayggtgaacaactatcgtccacttcaacccctgatgaactggaaggtctgggcgtccttccaggccactaatgagggcacaagatcctagagacattaggtc

SEQ ID NO: 37476 - DNA, 201 bp, Homo sapiens
caaaattacaaggaagctgtcgtgggagagaatggtttctgtgataggcgtgtttttaaagctcggggcccatcatcagatgctgcagaggctggtggacrtcttgctggaagtaaaacataaggacgcgcaggcggccatgcgccccttcgacccctccgctctgctgcccacctgctgggattactggacctatgtggg

SEQ ID NO: 37477 - DNA, 201 bp, Homo sapiens
atggtttctgtgataggcgtgtttttaaagctcggggcccatcatcagatgctgcagaggctggtggacatcttgctggaagtaaaacataaggacgcgcrggcggccatgcgccccttcgacccctccgctctgctgcccacctgctgggattactggacctatgtgggctcgctcaccaccccgccgctgaccgagtcg

SEQ ID NO: 37478 - DNA, 201 bp, Homo sapiens
ttgctggaagtaaaacataaggacgcgcaggcggccatgcgccccttcgacccctccgctctgctgcccacctgctgggattactggacctatgtgggctygctcaccaccccgccgctgaccgagtcggtcacctggatcatccagaaggagcccgttgaagtggccccaagccaactctctgcatttcgtactctcctg

SEQ ID NO: 37479 - DNA, 201 bp, Homo sapiens
acacacacgtctcgctgcctttatttccaggaattagtggcgggcccttggaaaaccactacagactgaagcaatttcacttccactggggagcagtgaaygaggggggctcagagcacacagtggacggccacgtgtaccccgcagagctgcatttagttcactggaattctgtgaaataccaaaattacaaggaagctg

SEQ ID NO: 37480 - DNA, 201 bp, Homo sapiens
ctgtccctacacctgctccttggaccccccagtctgtggccaccctgaagaatgtgcagaaacacttgtgtggcctgtccctgtctctctgacagccttcyattttccacagaagccacaaacaggctcatagccaagctgtgacctggtcctgaccatctggggcacgaggaggcatggcccactgtgcaggaccccacc

SEQ ID NO: 37481 - DNA, 150 bp, Homo sapiens
cggagcgtggcacgtgggttggtaactgtggcgctgctccctccaccacmacccctgtcctcctcaggccccctccgcctccacccctgccctcctcaggccccctccgcctccacccctgccctcctcaggccccctccgcctccaccc

SEQ ID NO: 37482 - DNA, 201 bp, Homo sapiens
ccttggaccccccagtctgtggccaccctgaagaatgtgcagaaacacttgtgtggcctgtccctgtctctctgacagccttccattttccacagaagccrcaaacaggctcatagccaagctgtgacctggtcctgaccatctggggcacgaggaggcatggcccactgtgcaggaccccaccctcgggggctttcggct

SEQ ID NO: 37483 - DNA, 201 bp, Homo sapiens
tgtgcaggaccccaccctcgggggctttcggctcccacactgatgattctccccagcatccacaccgggcctggcgctacgtactcaggcccccagctctygtgtcctggaggaagagctagctccagacatgggttgatcacctagaggagctctggctaaggcacagttttctagaaataaaacatttattcggttttt

SEQ ID NO: 37484 - DNA, 201 bp, Homo sapiens
cttgtgtggcctgtccctgtctctctgacagccttccattttccacagaagccacaaacaggctcatagccaagctgtgacctggtcctgaccatctgggkcacgaggaggcatggcccactgtgcaggaccccaccctcgggggctttcggctcccacactgatgattctccccagcatccacaccgggcctggcgctac

SEQ ID NO: 37485 - DNA, 201 bp, Homo sapiens
tcctcaggccccctccgcctccacccctgccctcctcaggccccctgcgtccccgcctcgtcctcctcaggccccctccgcctccggctccgtcctcctcwggccccctccgcctccggctccgtcctcctctggccccctccgcccccggccccggccccacggcgggatgcgggacaacaccagccccatcagcgtgat

SEQ ID NO: 37486 - DNA, 201 bp, Homo sapiens
ctccttcacacagaacacatccaagtcccacatcctgacaaaaacatgacccctttgatcacttcctgccaaacctccctttcctcaccgactcctccgcygaccctaagtccccctgctgtgcccactgctccatccttggcaacctgaccacgctgctcttagcactgcagtcatcctcttctccaatcagcttctcat

SEQ ID NO: 37487 - DNA, 201 bp, Homo sapiens
tgatgacctggaccctggccagaagagccctggccctccagcaaggcagcacctgctctgatgcacctgtgcacccctggccctcccagccacctgggagyccgaagcttagcctggaggtggccaagccagtccctactcttgggctgcggccacgtgaggctccgcatcagcagccaggggcgagcactagtggacaaa

SEQ ID NO: 37488 - DNA, 201 bp, Homo sapiens
ctgtccctacacctgctccttggaccccccagtctgtggccaccctgaagaatgtgcagaaacacttgtgtggcctgtccctgtctctctgacagccttcyatttgtgaagtgccctgtggccccctccccagcacctctgtctgccatgcgcttcttcctcccaggctaccctgagcctttcctggcccagtcctcacca

SEQ ID NO: 37489 - DNA, 201 bp, Homo sapiens
tgtggccccctccccagcacctctgtctgccatgcgcttcttcctcccaggctaccctgagcctttcctggcccagtcctcaccacagtccacagaagccrcaaacaggctcatagccaagctgtgacctggtcctgaccatctggggcacgagggcctgggctggccctgctaggctggagaagccctgtcacctgtgca

SEQ ID NO: 37490 - DNA, 201 bp, Homo sapiens
ctcaccaggtggggtgcctgctgcccaccctgacccacctcagtagggaggagcaggaccctctacatccctgtgggtgcagggcacacgcccctcgttgkctcactgagcccccacagagccgcctgcaaatgagtcaaagcctggccgccctcatcaccacagccccgtgccctggctccttcacacagaacacatcca

SEQ ID NO: 37491 - DNA, 201 bp, Homo sapiens
cgaagtctcgcgagcccggagcgtggcacgtgggccccctccgcctccggctccgtcctcctctggccccctccgcccccggccccggccccacggcgggwtgcgggacaacaccagccccatcagcgtgattctggtgagctcggggagcaggggcaataagctgctgttcaggtaccccttccagagaagccaggagca

SEQ ID NO: 37492 - DNA, 201 bp, Homo sapiens
gattcctggctggggacaatgatgacctggaccctggccagaagagccctggccctccagcaaggcagcacctgctctgatgcacctgtgcacccctggcyctcccagccacctgggagtccgaagcttagcctggaggtggccaagccagtccctactcttgggctgcggccacgtgaggctccgcatcagcagccaggg

SEQ ID NO: 37493 - DNA, 201 bp, Homo sapiens
ttgtgaagtgccctgtggccccctccccagcacctctgtctgccatgcgcttcttcctcccaggctaccctgagcctttcctggcccagtcctcaccacartccacagaagccacaaacaggctcatagccaagctgtgacctggtcctgaccatctggggcacgagggcctgggctggccctgctaggctggagaagccc

SEQ ID NO: 37494 - DNA, 201 bp, Homo sapiens
ggagcaggaccctctacatccctgtgggtgcagggcacacgcccctcgttgtctcactgagcccccacagagccgcctgcaaatgagtcaaagcctggccrccctcatcaccacagccccgtgccctggctccttcacacagaacacatccaagtcccacatcctgacaaaaacatgacccctttgatcacttcctgccaa

SEQ ID NO: 37495 - DNA, 201 bp, Homo sapiens
tgtgcaggaccccaccctcgggggctttcggctcccacactgatgattctccccagcatccacaccgggcctggcgctacgtactcaggcccccagctctygtgtcctggaggaagagctagctccagacatgggttgatcacctagaggagctctggctaaggcacagttttctagaaataaaacatttattcggtttgg

SEQ ID NO: 37496 - DNA, 201 bp, Homo sapiens
caggctaccctgagcctttcctggcccagtcctcaccacagtccacagaagccacaaacaggctcatagccaagctgtgacctggtcctgaccatctgggkcacgagggcctgggctggccctgctaggctggagaagccctgtcacctgtgcacatcttgctggtggaggcatggcccactgtgcaggaccccaccctcg

SEQ ID NO: 37497 - DNA, 201 bp, Homo sapiens
ggccagaagagccctggccctccagcaaggcagcacctgctctgatgcacctgtgcacccctggccctcccagccacctgggagtccgaagcttagcctgdaggtggccaagccagtccctactcttgggctgcggccacgtgaggctccgcatcagcagccaggggcgagcactagtggacaaagccagcaaatgcggcg

SEQ ID NO: 37498 - DNA, 201 bp, Homo sapiens; identical to SEQ ID NO: 37486

SEQ ID NO: 37499 - DNA, 201 bp, Homo sapiens; identical to SEQ ID NO: 37487

SEQ ID NO: 37500 - DNA, 201 bp, Homo sapiens; identical to SEQ ID NO: 37488

SEQ ID NO: 37501 - DNA, 201 bp, Homo sapiens; identical to SEQ ID NO: 37489

SEQ ID NO: 37502 - DNA, 201 bp, Homo sapiens; identical to SEQ ID NO: 37490

SEQ ID NO: 37503 - DNA, 201 bp, Homo sapiens
tgcggacctggccttgctgcaggttttccagcttgcagctcatctggtgtactggggcaaggccatcatcatctacccgctgtgtgagaacaacgtctacwtgctgtctcccaatgccagcgtatgtctgtactccccgctggccgagcagttctcccaccagttcccatctcatgacctgccgtccgttcttgccaagtt

SEQ ID NO: 37504 - DNA, 201 bp, Homo sapiens; identical to SEQ ID NO: 37492

SEQ ID NO: 37505 - DNA, 201 bp, Homo sapiens; identical to SEQ ID NO: 37493

SEQ ID NO: 37506 - DNA, 201 bp, Homo sapiens; identical to SEQ ID NO: 37494

SEQ ID NO: 37507 - DNA, 201 bp, Homo sapiens; identical to SEQ ID NO: 37495

SEQ ID NO: 37508 - DNA, 201 bp, Homo sapiens; identical to SEQ ID NO: 37496

SEQ ID NO: 37509 - DNA, 201 bp, Homo sapiens; identical to SEQ ID NO: 37497

SEQ ID NO: 37510 - DNA, 201 bp, Homo sapiens
tgttgatgatggcctagcagctgttggttactccaaagctgatatccccgcactagtgaaaggaacgctgccccaggaaagggtcaccaagcttgcacccygtccccagtcagaagaggatctggctgctctgtttgaagcttcaatgaaactgtattaattgtcattttaactgaaagaattaccgctggccattgtagt

SEQ ID NO: 37511 - DNA, 201 bp, Homo sapiens
aactgtattaattgtcattttaactgaaagaattaccgctggccattgtagtgctgagagcaagagctgatctagctagggctttgtcttttcatctttgygcataacttacctgttaccagtataggtgggatatacatttatcttgcaggaaattccccaaagctcagagtccagttccttccataaaacaggctggac

SEQ ID NO: 37512 - DNA, 201 bp, Homo sapiens
taaaacaggctggacaaatgaccactatgttagacccccaggctcgacttcaggggtcagtgttcctgtcccaaaccccacacagaatactctgcctctgyttcatgtagcaaatgagcaaaaactcagtatctatcaaaagtgtaaattatatttcctatgcctagtaattcacttcatgtctaaaaatttatctgatag

SEQ ID NO: 37513 - DNA, 201 bp, Homo sapiens
aaccaacggattcaagtgccaactacctcaggaaccgggagtgaaactactggggttgccatttttgactatgaacacttgaaagtaaaaattggcatcamttcgagagccatcaaacccacactgggactgattgatcctctgcacaccctccacatgcctgcccgagtggtcgccaacagtggctttgatgtgctttgc

SEQ ID NO: 37514 - DNA, 201 bp, Homo sapiens
tagtgaagatgtataaagcaaaggattacaatgtggatcacccactggtgccccatggcctttctgtggtgctcacgtccccagcggtgttcactttcacsgcccagatgtttccagagcgacacctggagatggcagaaatactgggagccgacacccgcactgccaggatccaagatgcagggctggtgttggcagaca

SEQ ID NO: 37515 - DNA, 201 bp, Homo sapiens
caagagctgatctagctagggctttgtcttttcatctttgcgcataacttacctgttaccagtataggtgggatatacatttatcttgcaggaaattcccmaaagctcagagtccagttccttccataaaacaggctggacaaatgaccactatgttagacccccaggctcgacttcaggggtcagtgttcctgtcccaaa

SEQ ID NO: 37516 - DNA, 201 bp, Homo sapiens; identical to SEQ ID NO: 37510

SEQ ID NO: 37517 - DNA, 201 bp, Homo sapiens; identical to SEQ ID NO: 37511

SEQ ID NO: 37518 - DNA, 201 bp, Homo sapiens; identical to SEQ ID NO: 37512

SEQ ID NO: 37519 - DNA, 201 bp, Homo sapiens
aagcctctgattgcagtgccaactacctcaggaaccgggagtgaaactactggggttgccatttttgactatgaacacttgaaagtaaaaattggcatcamttcgagagccatcaaacccacactgggactgattgatcctctgcacaccctccacatgcctgcccgagtggtcgccaacagtggctttgatgtgctttgc

SEQ ID NO: 37520 - DNA, 201 bp, Homo sapiens
acggtttatgataatgtgagagtggaaccaacggattcaagcttcatggaagctattgagtttgcccaaaagggagcttttgatgcctatgttgctgtcgrtggtggctctaccatggacacctgtaaggctgctaatctgtatgcatccagccctcattctgatttcctagattatgtcagtgcccccattggcaaggga

SEQ ID NO: 37521 - DNA, 201 bp, Homo sapiens; identical to SEQ ID NO: 37514

SEQ ID NO: 37522 - DNA, 201 bp, Homo sapiens; identical to SEQ ID NO: 37515

SEQ ID NO: 37523 - DNA, 201 bp, Homo sapiens
gggctggtgttggcagacacgctccggaaattcttattcgatctggatgttgatgatggcctagcagctgttggttactccaaagctgatatccccgcacyagtgaaaggaacgctgccccaggaaagggtcaccaagcttgcaccctgtccccagtcagaagaggatctggctgctctgtttgaagcttcaatgaaactg

SEQ ID NO: 37524 - DNA, 201 bp, Homo sapiens
tccccagtcagaagaggatctggctgctctgtttgaagcttcaatgaaactgtattaattgtcattttaactgaaagaattaccgctggccattgtagtgytgagagcaagagctgatctagctagggctttgtcttttcatctttgcgcataacttacctgttaccagtataggtgggatatacatttatcttgcaggaa

SEQ ID NO: 37525 - DNA, 201 bp, Homo sapiens
tttatcttgcaggaaattccccaaagctcagagtccagttccttccataaaacaggctggacaaatgaccactatgttagacccccaggctcgacttcagyggtcagtgttcctgtcccaaaccccacacagaatactctgcctctgtttcatgtagcaaatgagcaaaaactcagtatctatcaaaagtgtaaattatat

SEQ ID NO: 37526 - DNA, 201 bp, Homo sapiens
tgctggtgttcatctgtgccatggaatgtcttacccaatttcaggtttagtgaagatgtataaagcaaaggattacaatgtggatcacccactggtgcccsatggcctttctgtggtgctcacgtccccagcggtgttcactttcacggcccagatgtttccagagcgacacctggagatggcagaaatactgggagccga

SEQ ID NO: 37527 - DNA, 201 bp, Homo sapiens
gtcattttaactgaaagaattaccgctggccattgtagtgctgagagcaagagctgatctagctagggctttgtcttttcatctttgcgcataacttaccmgttaccagtataggtgggatatacatttatcttgcaggaaattccccaaagctcagagtccagttccttccataaaacaggctggacaaatgaccactat

SEQ ID NO: 37528 - DNA, 201 bp, Homo sapiens
gcgattaattatttctggagtcatgggaacacacagcacagagggtaggggggccctctaggtgctgaatctacacatctgtggggtctcctgggttcagyggctgttgattcaaggtcaacattgaccattggaggagtggtttaagagtgccaggcgaagggcaaactgtagatcgatctttatgctgttattacagga

SEQ ID NO: 37529 - DNA, 148 bp, Homo sapiens
cgccagccgttcacgcgttcggtcctccttggctgactcaccgccctsgccgccgcaccatggacgcctggtcccgccaagctgccgcactcagtgttgttagagatacaaaaggaattattagactacaaaggagttggcattagtg

SEQ ID NO: 37530 - DNA, 201 bp, Homo sapiens
ttccagacaactataaggtgatttttctgcaaggaggtgggtgcggccagttcagtgctgtccccttaaacctcattggcttgaaagcaggaaggtgtgckgactatgtggtgacaggagcttggtcagctaaggccgcagaagaagccaagaagtttgggactataaatatcgttcaccctaaacttgggagttatacaa

SEQ ID NO: 37531 - DNA, 201 bp, Homo sapiens; identical to SEQ ID NO: 37528

SEQ ID NO: 37532 - DNA, 183 bp, Homo sapiens
ggccggctgcagactctcaccgcagcggccaggaacgccagccgttcacgcgttcggtcctccttggctgactcaccgccctsgccgccgcaccatggacgcccccaggcaggtggtcaactttgggcctggtcccgccaagctgccgcactcagtgttgttagagatacaaaaggaattatt

SEQ ID NO: 37533 - DNA, 201 bp, Homo sapiens; identical to SEQ ID NO: 37530

SEQ ID NO: 37534 - DNA, 201 bp, Homo sapiens; identical to SEQ ID NO: 37528

SEQ ID NO: 37535 - DNA, 183 bp, Homo sapiens; identical to SEQ ID NO: 37532

SEQ ID NO: 37536 - DNA, 201 bp, Homo sapiens; identical to SEQ ID NO: 37530

SEQ ID NO: 37537 - DNA, 201 bp, Homo sapiens; identical to SEQ ID NO: 37528

SEQ ID NO: 37538 - DNA, 183 bp, Homo sapiens; identical to SEQ ID NO: 37532

SEQ ID NO: 37539 - DNA, 201 bp, Homo sapiens; identical to SEQ ID NO: 37530

SEQ ID NO: 37540 - DNA, 201 bp, Homo sapiens; identical to SEQ ID NO: 37528

SEQ ID NO: 37541 - DNA, 183 bp, Homo sapiens; identical to SEQ ID NO: 37532

SEQ ID NO: 37542 - DNA, 201 bp, Homo sapiens; identical to SEQ ID NO: 37530

SEQ ID NO: 37543 - DNA, 201 bp, Homo sapiens; identical to SEQ ID NO: 37528

SEQ ID NO: 37544 - DNA, 183 bp, Homo sapiens; identical to SEQ ID NO: 37532

SEQ ID NO: 37545 - DNA, 201 bp, Homo sapiens; identical to SEQ ID NO: 37530

SEQ ID NO: 37546 - DNA, 201 bp, Homo sapiens
ccgggctggctcggcgccgggccttcgggcttccactcagtctttgaccctcggtcctcgctcagcggcccggcaggccgcacaactgtaaccgctgcccyggccgccgcccgctccttctcgggccggcgggcacagagcgcagcgcggcggggccggcggcatggctgtgtcctggaggagctggctcgccaacgaagg

SEQ ID NO: 37547 - DNA, 201 bp, Homo sapiens
tcgggcttccactcagtctttgaccctcggtcctcgctcagcggcccggcaggccgcacaactgtaaccgctgccccggccgccgcccgctccttctcggkccggcgggcacagagcgcagcgcggcggggccggcggcatggctgtgtcctggaggagctggctcgccaacgaaggggttaaacacctctgcctgttcat

SEQ ID NO: 37548 - DNA, 201 bp, Homo sapiens
agacttggctttggatttctggacctttgtgcctgtactgtgccgaaagactttacaggtatatccggagcaataagccagtcaccatcatttcggtcatragtcatccctcagatgtcatggaaatccgaatggtcaaagaaaattttaaagcaagacctggtcagtatattactctacattgtcccagtgtatctgcat

SEQ ID NO: 37549 - DNA, 172 bp, Homo sapiens
acacttcactcaaatggctggctgcagctggtgctagttatggtctgggatctcagatgaggctgctaagcygaatgtgttgttactcctttacatcgtctctccacatggcttgaacttctcacagcatgcctgctggattcgaagagatggcattcaagtgcttaaaaat

SEQ ID NO: 37550 - DNA, 201 bp, Homo sapiens
ttataggacgtcctcggtggaaacttttgtttgatgaaatagcaaaatataacagaggaaaaacagttggtgttttctgttgtggacccaattcactatcyaagactcttcataaactgagtaaccagaacaactcatatgggacaagatttgaatacaataaagagtctttcagctgaaaacttttgccatgaagcagga

SEQ ID NO: 37551 - DNA, 201 bp, Homo sapiens; identical to SEQ ID NO: 37548

SEQ ID NO: 37552 - DNA, 201 bp, Homo sapiens; identical to SEQ ID NO: 37550

SEQ ID NO: 37553 - DNA, 201 bp, Homo sapiens; identical to SEQ ID NO: 37546

SEQ ID NO: 37554 - DNA, 201 bp, Homo sapiens; identical to SEQ ID NO: 37547

SEQ ID NO: 37555 - DNA, 201 bp, Homo sapiens
ctgcggccgccctgggccgggccccaccggacggcttgctctgctctttacctggggttgctgtcgaggaccctgtgcaagactcggccggtttttctttytccctgatggacagacccaaacatagccgcgcagcatcgtgaagggctggggccttcactcctctgtggctctggaagagcccgatttcctcaggagtcc

SEQ ID NO: 37556 - DNA, 201 bp, Homo sapiens
ccacgtgcctggcaggcatgtcgggccccaggcctgtggtgctgagcgggccttcgggagctgggaagagcaccctgctgaagaggctgctccaggagcamagcggcatctttggcttcagcgtgtcccataccacgaggaacccgaggcccggcgaggagaacggcaaagattactactttgtaaccagggaggtgatgc

SEQ ID NO: 37557 - DNA, 201 bp, Homo sapiens
cgctgtcacgtaggttcagtgggcggaagaggtggccccggatgctgcggcgcccgctggccgggctggctgcggccgccctgggccgggccccaccggamggcttgctctgctctttacctggggttgctgtcgaggaccctgtgcaagactcggccggtttttctttctccctgatggacagacccaaacatagccgcg

SEQ ID NO: 37558 - DNA, 201 bp, Homo sapiens
gcaccccgggcccatacaggaccagggcagcagcattgagccacccccttggcaggcgatacggcagctctgtgcccttggccagcatgtggagtggaggrgatgctgcccctgtggttggaacatcctggggtgacccccgacccagcctcgctgggctgtcccctgtccctatctctcactctggacccagggctgaca

SEQ ID NO: 37559 - DNA, 201 bp, Homo sapiens
ctgtctgttctcggcaccccgggcccatacaggaccagggcagcagcattgagccacccccttggcaggcgatacggcagctctgtgcccttggccagcaygtggagtggaggagatgctgcccctgtggttggaacatcctggggtgacccccgacccagcctcgctgggctgtcccctgtccctatctctcactctgga

SEQ ID NO: 37560 - DNA, 201 bp, Homo sapiens
aaagctcaaaggaccggcgcctgaggcttgctgtctgttctcggcaccccgggcccatacaggaccagggcagcagcattgagccacccccttggcaggcratacggcagctctgtgcccttggccagcatgtggagtggaggagatgctgcccctgtggttggaacatcctggggtgacccccgacccagcctcgctggg

SEQ ID NO: 37561 - DNA, 171 bp, Homo sapiens
agtctcgcgcgcgggcggaggtgggccggtgcggcgctgtcacgtaggttcagtgggcggaagaggtggcyccggatgctgcggcgcccgctggccgggctggctgcggccgccctgggccgggccccaccggacggcttgctctgctctttacctggggttgctgtcgag

SEQ ID NO: 37562 - DNA, 201 bp, Homo sapiens
actttgtaaccagggaggtgatgcagcgtgacatagcagccggcgacttcatcgagcatgccgagttctcggggaacctgtatggcacgagcaaggtggcrgtgcaggccgtgcaggccatgaaccgcatctgtgtgctggacgtggacctgcagggtgtgcggaacatcaaggccaccgatctgcggcccatctacatct

SEQ ID NO: 37563 - DNA, 201 bp, Homo sapiens
ccagggaggtgatgcagcgtgacatagcagccggcgacttcatcgagcatgccgagttctcggggaacctgtatggcacgagcaaggtggcggtgcaggcygtgcaggccatgaaccgcatctgtgtgctggacgtggacctgcagggtgtgcggaacatcaaggccaccgatctgcggcccatctacatctctgtgcagc

SEQ ID NO: 37564 - DNA, 201 bp, Homo sapiens; identical to SEQ ID NO: 37559

SEQ ID NO: 37565 - DNA, 201 bp, Homo sapiens
tagcgaggcactgaggcatgtcgggccccaggcctgtggtgctgagcgggccttcgggagctgggaagagcaccctgctgaagaggctgctccaggagcamagcggcatctttggcttcagcgtgtcccataccacgaggaacccgaggcccggcgaggagaacggcaaagattactactttgtaaccagggaggtgatgc

SEQ ID NO: 37566 - DNA, 201 bp, Homo sapiens; identical to SEQ ID NO: 37560

SEQ ID NO: 37567 - DNA, 201 bp, Homo sapiens; identical to SEQ ID NO: 37558

SEQ ID NO: 37568 - DNA, 201 bp, Homo sapiens; identical to SEQ ID NO: 37562

SEQ ID NO: 37569 - DNA, 201 bp, Homo sapiens; identical to SEQ ID NO: 37563

SEQ ID NO: 37570 - DNA, 201 bp, Homo sapiens
tggctgctgcccaggccgacatggagagcagtgagtgtgccgtgggatcaccagggaatgccaggaggggagtcagggttctgaggtctgtggcaccaggkaccctgtgggtccccagacctcctgacacctggagtccctgtgagggtcctcagacctctcaactacctcccaacacctagagtccccgtgagggtcccc

SEQ ID NO: 37571 - DNA, 167 bp, Homo sapiens
tctggggctccagagagagcaggagtggtgcctgaggactgaggcccagggggcggcccttccctaccctgcacaggcccggctgggctggaaagctgtcycacagccgcagtgaggacagccgcaggccagtgggctgctctgggggtcgtgtgggacctggggtg

SEQ ID NO: 37572 - DNA, 201 bp, Homo sapiens
acgctgggcccgggagggcctgggtgtccctgaagctcctgtaggcctcagagagccctggcacccctgctgacctggcacctctccccagcaaggtggcrgtgcaggccgtgcaggccatgaaccgcatctgtgtgctggacgtggacctgcagggtgtgcggaacatcaaggccaccgatctgcggcccatctacatct

SEQ ID NO: 37573 - DNA, 201 bp, Homo sapiens
ccgggagggcctgggtgtccctgaagctcctgtaggcctcagagagccctggcacccctgctgacctggcacctctccccagcaaggtggcggtgcaggcygtgcaggccatgaaccgcatctgtgtgctggacgtggacctgcagggtgtgcggaacatcaaggccaccgatctgcggcccatctacatctctgtgcagc

SEQ ID NO: 37574 - DNA, 201 bp, Homo sapiens
ctgcggccgccctgggccgggccccaccggacggcttgctctgctctttacctggggttgctgtcgaggaccctgtgcaagactcggccggtttttctttytccctgatggacagacccaaacatagccgcgcagcatcgtgaagggctggggccttcactcctctgtggctctggaagagcccgatttcctcaggaggca

SEQ ID NO: 37575 - DNA, 201 bp, Homo sapiens
cgatttcctcaggaggcatgtcgggccccaggcctgtggtgctgagcgggccttcgggagctgggaagagcaccctgctgaagaggctgctccaggagcamagcggcatctttggcttcagcgtgtcccataccacgaggaacccgaggcccggcgaggagaacggcaaagattactactttgtaaccagggaggtgatgc

SEQ ID NO: 37576 - DNA, 201 bp, Homo sapiens; identical to SEQ ID NO: 37557

SEQ ID NO: 37577 - DNA, 201 bp, Homo sapiens; identical to SEQ ID NO: 37558

SEQ ID NO: 37578 - DNA, 201 bp, Homo sapiens; identical to SEQ ID NO: 37559

SEQ ID NO: 37579 - DNA, 201 bp, Homo sapiens; identical to SEQ ID NO: 37560

SEQ ID NO: 37580 - DNA, 171 bp, Homo sapiens; identical to SEQ ID NO: 37561

SEQ ID NO: 37581 - DNA, 201 bp, Homo sapiens; identical to SEQ ID NO: 37562

SEQ ID NO: 37582 - DNA, 201 bp, Homo sapiens; identical to SEQ ID NO: 37563

SEQ ID NO: 37583 - DNA, 201 bp, Homo sapiens; identical to SEQ ID NO: 37559

SEQ ID NO: 37584 - DNA, 201 bp, Homo sapiens; identical to SEQ ID NO: 37556

SEQ ID NO: 37585 - DNA, 201 bp, Homo sapiens; identical to SEQ ID NO: 37560

SEQ ID NO: 37586 - DNA, 201 bp, Homo sapiens; identical to SEQ ID NO: 37558

SEQ ID NO: 37587 - DNA, 201 bp, Homo sapiens; identical to SEQ ID NO: 37562

SEQ ID NO: 37588 - DNA, 201 bp, Homo sapiens; identical to SEQ ID NO: 37563

SEQ ID NO: 37589 - DNA, 201 bp, Homo sapiens
gggccccaccggacggcatgtcgggccccaggcctgtggtgctgagcgggccttcgggagctgggaagagcaccctgctgaagaggctgctccaggagcamagcggcatctttggcttcagcgtgtcccataccacgaggaacccgaggcccggcgaggagaacggcaaagattactactttgtaaccagggaggtgatgc

SEQ ID NO: 37590 - DNA, 201 bp, Homo sapiens
cgctgtcacgtaggttcagtgggcggaagaggtggccccggatgctgcggcgcccgctggccgggctggctgcggccgccctgggccgggccccaccggamggcatgtcgggccccaggcctgtggtgctgagcgggccttcgggagctgggaagagcaccctgctgaagaggctgctccaggagcacagcggcatctttg

SEQ ID NO: 37591 - DNA, 201 bp, Homo sapiens; identical to SEQ ID NO: 37558

SEQ ID NO: 37592 - DNA, 201 bp, Homo sapiens; identical to SEQ ID NO: 37559

SEQ ID NO: 37593 - DNA, 201 bp, Homo sapiens; identical to SEQ ID NO: 37560

SEQ ID NO: 37594 - DNA, 171 bp, Homo sapiens
agtctcgcgcgcgggcggaggtgggccggtgcggcgctgtcacgtaggttcagtgggcggaagaggtggcyccggatgctgcggcgcccgctggccgggctggctgcggccgccctgggccgggccccaccggacggcatgtcgggccccaggcctgtggtgctgagcggg

SEQ ID NO: 37595 - DNA, 201 bp, Homo sapiens; identical to SEQ ID NO: 37562

SEQ ID NO: 37596 - DNA, 201 bp, Homo sapiens; identical to SEQ ID NO: 37563

SEQ ID NO: 37597 - DNA, 201 bp, Homo sapiens; identical to SEQ ID NO: 37559

SEQ ID NO: 37598 - DNA, 201 bp, Homo sapiens; identical to SEQ ID NO: 37560

SEQ ID NO: 37599 - DNA, 201 bp, Homo sapiens
tcttctcacccccaggcatgtcgggccccaggcctgtggtgctgagcgggccttcgggagctgggaagagcaccctgctgaagaggctgctccaggagcamagcggcatctttggcttcagcgtgtcccgtgagtccagggctctcgtggaggggtgcgtagacctcaaggctgctgagtagtcctagcaccgtgagcagg

SEQ ID NO: 37600 - DNA, 201 bp, Homo sapiens; identical to SEQ ID NO: 37558

SEQ ID NO: 37601 - DNA, 201 bp, Homo sapiens
tggggctgtcttcctcccaccttggaggcggccacagtgctgctgtccccagccctgtcctggactcggcacttatcagcacttttgagctgtcttctggrgtcctggtaaaaagggctactctgcctgcctgattcaagacaagggacccccttcccaacagcacccccgccccttgccgtgcaacccagtggtctccag

SEQ ID NO: 37602 - DNA, 201 bp, Homo sapiens; identical to SEQ ID NO: 37562

SEQ ID NO: 37603 - DNA, 201 bp, Homo sapiens; identical to SEQ ID NO: 37563

SEQ ID NO: 37604 - DNA, 201 bp, Homo sapiens
gaggagaacggcaaaggtgagtggggtggggccctatggctggagcacccccagtgtgggcagggctgctgggccctgcagctgtgttggctgtgctgccygtctcctgcccccatcaatccctaatctgtgagatgggtccttgcctccaagggccggtgaactcaatcagggtgtcagcgccacagcgtggtgtcgcct

SEQ ID NO: 37605 - DNA, 201 bp, Homo sapiens
gggcacaagacacatacagccctgatgagtatctctgggccaccatccaaaggattcctgaagtcccgggctcactccctgccagccataagtatgatctrtctgacatgcaagcagttgccaggtttgtcaagtggcagtactttgagggtgatgtttccaagggtgctccctacccgccctgcgatggagtccatgtgc

SEQ ID NO: 37606 - DNA, 201 bp, Homo sapiens
agtaaaggtagccttgaggccagagcaggtagcaaggcattgtggaaagaggggaccagggtggctggggaagaggccgatgcataaagtcagcctgttcmaagtgctcagggacttagcaaaatgagaagatgtgacctgtgccaaaactattttgagaattttaaatgtgaccatttttctggtatgaataaacttaca

SEQ ID NO: 37607 - DNA, 201 bp, Homo sapiens
ggcggagtttccaatagcatattctatagtggttcatcacaagattgaaatgcttgacaggctgctgagggccatctatatgcctcagaatttctattgcrttcatgtggacacaaaatccgaggattcctatttagctgcagtgatgggcatcgcttcctgttttagtaatgtctttgtggccagccgattggagagtgt

SEQ ID NO: 37608 - DNA, 201 bp, Homo sapiens
gctttggagacattaaaacactgaccattacgggcaattttatgaacaagaagaaggatacacaaaacgtacccttatctgtttccccttccttgtcagcrtcgggaagatggtatgaagtcctctttggggcagggactctagtagatcttcttgtcagagaagctgcatggtttctgcagagcacagttagctagaaag

SEQ ID NO: 37609 - DNA, 113 bp, Homo sapiens
atttctttaaagmctcgtgcagcacatcattatcgctggatgcccggacatgtaatacacctgacagcatgtgaagtgctcagaatggggcaggatgtcacctggaatcagca

SEQ ID NO: 37610 - DNA, 201 bp, Homo sapiens
atgtcacctgtatattcatttgaaaggacttggccctgttcttgggtcttcccgttacctgccccctgggtggtaagtttcctcctttctcaaccttccaygaggaggaaagaagtgtgcagtcattccacatggcctgttggaaggcctggggagggaactttgggtttgggacagatttttttttttgtttttggtatc

SEQ ID NO: 37611 - DNA, 201 bp, Homo sapiens; identical to SEQ ID NO: 37605

SEQ ID NO: 37612 - DNA, 201 bp, Homo sapiens; identical to SEQ ID NO: 37606

SEQ ID NO: 37613 - DNA, 201 bp, Homo sapiens; identical to SEQ ID NO: 37607

SEQ ID NO: 37614 - DNA, 201 bp, Homo sapiens; identical to SEQ ID NO: 37608

SEQ ID NO: 37615 - DNA, 201 bp, Homo sapiens
tgtcacgcctccctctcctcttcccgtctcccagcgtggatgagggcgcctgcagatcccggctagggcacggaccgcctaggccgagatttctttaaagmctcgtgcagcacatcattatcgctggatgcccggacatgtaatacacctgacagcatgtgaagtgctcagaatggggcaggatgtcacctggaatcagca

SEQ ID NO: 37616 - DNA, 201 bp, Homo sapiens; identical to SEQ ID NO: 37610

SEQ ID NO: 37617 - DNA, 201 bp, Homo sapiens
ctggacaacgcgagccacggggagccgcccgagcccccagagcagccagccgcccccgggaccgacggctgggggctgccgagcggcggcggaggcgcccrggacgcctggctccggaccccgctggcccccagcgagatgatcacggctcagagcgcgctgccggagagggaagcgcaggagtccagcaccaccgacgag

SEQ ID NO: 37618 - DNA, 201 bp, Homo sapiens; identical to SEQ ID NO: 37617

SEQ ID NO: 37619 - DNA, 201 bp, Homo sapiens
tacctgcagctttttagtcctttgtgctcccacgggtctgcagagtcccatctgcccaaaggtcttgaagcttgacaggatgttttcattactcagtctcycagggcactgctggtccgtagggattcattggtcggggtgggagagttaaacaacatttaaacagagttctctcaaaaatgtctaaagggattgtaggta

SEQ ID NO: 37620 - DNA, 201 bp, Homo sapiens
gccccagactcgtaaattatggccgcatctccgcacactctctcctcacgcctcctgacaggttgcgtaggaggctctgtctggtatcttgaaagaagaaytatacaggactcccctcacaagttcttacatcttctcaggaatgtcaataagcagtggattacatttcagcactttagcttcctcaaacgcatgtatgtc

SEQ ID NO: 37621 - DNA, 201 bp, Homo sapiens
gatcacctccagacaccacgctctcctttcggagcccgcccgccggaagtgacggcccggaactactcccacaggggggcggggaaggaagatggcggcgyccagcgtcccgtgaggagagaggacacagggatcccggggagcggccccagactcgtaaattatggccgcatctccgcacactctctcctcacgcctcct

SEQ ID NO: 37622 - DNA, 201 bp, Homo sapiens
cctgtgctgccaactccatcaatcagttttttgaggtgccatttgactcaaacatgaataggacaaagaacagaccgctggttcgtggacagatcagcccrttgctagctgtgtcctttgccacttgttgtgctgttccaggagttgccattctgaccttgggggtgaatccactcacaggagccctggggctcttcaaca

SEQ ID NO: 37623 - DNA, 201 bp, Homo sapiens
tatacaggactcccctcacaagttcttacatcttctcaggaatgtcaataagcagtggattacatttcagcactttagcttcctcaaacgcatgtatgtcwcacagctgaacagaagccacaaccagcaagtaagacccaagccagaaccagtagcatctcctttccttgaaaaaacatcttcaggtcaagccaaagcaga

SEQ ID NO: 37624 - DNA, 201 bp, Homo sapiens
catttgactcaaacatgaataggacaaagaacagaccgctggttcgtggacagatcagcccgttgctagctgtgtcctttgccacttgttgtgctgttccdggagttgccattctgaccttgggggtgaatccactcacaggagccctggggctcttcaacattttcctgtatacctgctgctacacaccactgaaaagga

SEQ ID NO: 37625 - DNA, 201 bp, Homo sapiens
ctgaacagaagccacaaccagcaagtaagacccaagccagaaccagtagcatctcctttccttgaaaaaacatcttcaggtcaagccaaagcagaaatatrtgagatgagacctctctcaccgcccagcctatctttgtccagaaagccaaatgaaaaggaattgatagaactagagccagactcagtaattgaagactca

SEQ ID NO: 37626 - DNA, 201 bp, Homo sapiens
ccgctggttcgtggacagatcagcccgttgctagctgtgtcctttgccacttgttgtgctgttccaggagttgccattctgaccttgggggtgaatccacwcacaggagccctggggctcttcaacattttcctgtatacctgctgctacacaccactgaaaaggatcagcattgccaacacatgggtcggagctgtggtt

SEQ ID NO: 37627 - DNA, 137 bp, Homo sapiens
gaatgtattcattacctcagatacttatttttgtgataagaacatttttaatgtactcagtaattttgaaattagaatacattatttcctgcattcacacagtgtgtgatgtacgtcaaagggaggagacgtactca

SEQ ID NO: 37628 - DNA, 201 bp, Homo sapiens
gaaattagcctccacatgtgcaatggctttaagagccagaagcagggttctgggaattttgcaagttatcctgtggccaggtgtggtctcggttaccaaayacggttacctgcagctttttagtcctttgtgctcccacgggtctgcagagtcccatctgcccaaaggtcttgaagcttgacaggatgttttcattactca

SEQ ID NO: 37629 - DNA, 201 bp, Homo sapiens
ctgcctggccctgctcgtgctgtccgcagcagcccctgtgctggacatcaccacatggaccttccccatcatggcccttcccatcaatgcgtacatctccyacctcggcttccgcttctacgtggacgcagaccgcaggagctcgcggagactgttcttctgcagcctgtggcacctgccgctgctgctgctgctcatgct

SEQ ID NO: 37630 - DNA, 201 bp, Homo sapiens
cggcgcccagcgtcccgtgaggagagaggacacagggatcccggggagcggccccagactcgtaaattatggccgcatctccgcacactctctcctcacgyctcctgacaggttgcgtaggaggctctgtctggtatcttgaaagaagaactatacaggactcccctcacaagttcttacatcttctcaggaatgtcaata

SEQ ID NO: 37631 - DNA, 138 bp, Homo sapiens
tgaatgtattcattacctcagatacttatttttgtgataagaacatttttaatgtactcagtaattttgaaattagaatacattatttcctgcattcacacagtgtgtgatgtacgtcaaagggaggagacgtactca

SEQ ID NO: 37632 - DNA, 201 bp, Homo sapiens
gaagttaggaagaagggtgtgctgggctaaccagcccacagagctcacattcctgtcccttgggtgaaaaatacatgtccatcctgatatctcctgaattmagaaattagcctccacatgtgcaatggctttaagagccagaagcagggttctgggaattttgcaagttatcctgtggccaggtgtggtctcggttaccaa

SEQ ID NO: 37633 - DNA, 201 bp, Homo sapiens
aatagctaggacccggctgctgtgcactgggactggggattccacatgtttgccttgggagtctcaagctggactgccagcccctgtcctcccttcacccmcattgcgtatgagcatttcagaactccaaggagtcacaggcatctttatagttcacgttaacatatagacactgttggaagcagttccttctaaaagggt

SEQ ID NO: 37634 - DNA, 201 bp, Homo sapiens
atttttccctttgagggtctttatacatctctcctccaaccccaccctctattctgtttcttcctcctcacatgggggtacacatacacagcttcctcttytggttccatccttaccaccacaccacacgcacactccacatgcccagcagagtggcacttggtggccagaaagtgtgagcctcatgatctgctgtctgta

SEQ ID NO: 37635 - DNA, 201 bp, Homo sapiens
ctcgatgctggcgcatttctcctgggaggaatcctctactcctggcagtttcctcatttcaacgccctgagctggggcctccgtgaagactactcccgggrcggctactgcatgatgtcggtcacccacccgggcctgtgccggcgcgtggcgctgcgccactgcctggccctgctcgtgctgtccgcagcagcccctgtg

SEQ ID NO: 37636 - DNA, 101 bp, Homo sapiens
taagaacatttttaatgtactcagtaattttgaaattagaatacattatttcctgcattcacacagtgtgtgatgtacgtcaaagggaggagacgtactcr

SEQ ID NO: 37637 - DNA, 107 bp, Homo sapiens
ttgtgataagaacatttttaatgtactcagtaattttgaaattagaatacattatttcctgcattcacacagtgtgtgatgtacgtcaaagggaggagacrtactca

SEQ ID NO: 37638 - DNA, 201 bp, Homo sapiens
tcctgggaggaatcctctactcctggcagtttcctcatttcaacgccctgagctggggcctccgtgaagactactcccggggcggctactgcatgatgtcrgtcacccacccgggcctgtgccggcgcgtggcgctgcgccactgcctggccctgctcgtgctgtccgcagcagcccctgtgctggacatcaccacatgga

SEQ ID NO: 37639 - DNA, 146 bp, Homo sapiens
caagctgatgaatgtattcattacctcagatacttatttttgtgataagaacatttttaatgtactcagtaattttgaaattagaatacattatttcctgyattcacacagtgtgtgatgtacgtcaaagggaggagacgtactca

SEQ ID NO: 37640 - DNA, 201 bp, Homo sapiens
taacatccaatcactgtttgcacttatctgaaatcttccctcttggctgcccccaggtatttactgtggagaacattgcataggaatgtctggaaaaagcytctacaacttgttacagccttcacatttgtacaattcattgattctcttttccttccacaataaaatggtatacaagaacaggagtgtgtgtgacgtcat

SEQ ID NO: 37641 - DNA, 201 bp, Homo sapiens
aattagcctccacatgtgcaatggctttaagagccagaagcagggttctgggaattttgcaagttatcctgtggccaggtgtggtctcggttaccaaatayggttacctgcagctttttagtcctttgtgctcccacgggtctgcagagtcccatctgcccaaaggtcttgaagcttgacaggatgttttcattactcagt

SEQ ID NO: 37642 - DNA, 201 bp, Homo sapiens
gagcatttcagaactccaaggagtcacaggcatctttatagttcacgttaacatatagacactgttggaagcagttccttctaaaagggtagccctggacytaataccagccggatacctctggcccccaccccattactgtacctctggagtcactactgtgggtcgccactcctctgctacacagcacggctttttcaa

SEQ ID NO: 37643 - DNA, 201 bp, Homo sapiens
aagagacaaaagaggaaaagcggtggaaagagatgaagctgcaagtgtatgatttgccaggaattttggctcgactatccaaaatcaaactcacagctctrgttgtaagtaccactgcagctggatttgcattggctccgggcccttttgactggccctgtttcctgcttacttctgttgggacaggccttgcatcctgtg

SEQ ID NO: 37644 - DNA, 201 bp, Homo sapiens
gtaattgaagactcaatagatgtagggaaagagacaaaagaggaaaagcggtggaaagagatgaagctgcaagtgtatgatttgccaggaattttggctcractatccaaaatcaaactcacagctctggttgtaagtaccactgcagctggatttgcattggctccgggcccttttgactggccctgtttcctgcttact

SEQ ID NO: 37645 - DNA, 201 bp, Homo sapiens
agtcagtgaatacaaaaaaggaattatttttccctttgagggtctttatacatctctcctccaaccccaccctctattctgtttcttcctcctcacatggrggtacacatacacagcttcctcttttggttccatccttaccaccacaccacacgcacactccacatgcccagcagagtggcacttggtggccagaaagtg

SEQ ID NO: 37646 - DNA, 196 bp, Homo sapiens
ctcagacctgtcagcccgccacactccagccagtcccttccgatcacctccagacaccacgctctcctttcggagcccgcccgccggaagtgacgrcccggaactactcccacaggggggcggggaaggaagatggcggcgcccagcgtcccgtgaggagagaggacacagggatcccggggagcggccccagact

SEQ ID NO: 37647 - DNA, 201 bp, Homo sapiens; identical to SEQ ID NO: 37635

SEQ ID NO: 37648 - DNA, 201 bp, Homo sapiens; identical to SEQ ID NO: 37638

SEQ ID NO: 37649 - DNA, 201 bp, Homo sapiens; identical to SEQ ID NO: 37620

SEQ ID NO: 37650 - DNA, 201 bp, Homo sapiens; identical to SEQ ID NO: 37621

SEQ ID NO: 37651 - DNA, 201 bp, Homo sapiens; identical to SEQ ID NO: 37622

SEQ ID NO: 37652 - DNA, 201 bp, Homo sapiens; identical to SEQ ID NO: 37623

SEQ ID NO: 37653 - DNA, 201 bp, Homo sapiens; identical to SEQ ID NO: 37643

SEQ ID NO: 37654 - DNA, 201 bp, Homo sapiens; identical to SEQ ID NO: 37624

SEQ ID NO: 37655 - DNA, 201 bp, Homo sapiens; identical to SEQ ID NO: 37625

SEQ ID NO: 37656 - DNA, 201 bp, Homo sapiens; identical to SEQ ID NO: 37644

SEQ ID NO: 37657 - DNA, 201 bp, Homo sapiens; identical to SEQ ID NO: 37626

SEQ ID NO: 37658 - DNA, 201 bp, Homo sapiens; identical to SEQ ID NO: 37629

SEQ ID NO: 37659 - DNA, 201 bp, Homo sapiens; identical to SEQ ID NO: 37630

SEQ ID NO: 37660 - DNA, 196 bp, Homo sapiens; identical to SEQ ID NO: 37646

SEQ ID NO: 37661 - DNA, 201 bp, Homo sapiens
agcaaggcaggaatggatggaggagatagcctgctgcaaaaccctatcatcagacaccaccgttggggagggagccgcagcacaggccccagggggctctyctatgacacctctgaatgcaagctcagatgcccaggtcgcccagcccgtaggctttcacggacttcacgctatcattggatcaacatttctcactatctg

SEQ ID NO: 37662 - DNA, 201 bp, Homo sapiens
ggaacctgtgcggtgcagccctgccctctccctccgcccaaaggtcgcccagcgacggcctgcttgacctggtttctcaaaaagggtgaccccccccctccgccccacgctggtcgcgggtcctggcgagaagcctttcggaaagcaccggggcctgtgtgttcccgcttcctcggacgcgagctctgtgtagccgtggtg

SEQ ID NO: 37663 - DNA, 201 bp, Homo sapiens
cggaacctgtgcggtgcagccctgccctctccctccgcccaaaggtcgcccagcgacggcctgcttgacctggtttctcaaaaagggtgaccccccccctccgccccacgctggtcgcgggtcctggcgagaagcctttcggaaagcaccggggcctgtgtgttcccgcttcctcggacgcgagctctgtgtagccgtggt

SEQ ID NO: 37664 - DNA, 201 bp, Homo sapiens
tccttcccccctcccaccatccaccgcagccacttccgcccgtcctccggaagtgggccccggcaacgcagcgttccacatcccgcccatttttctacccmacgtccccagcccgtcaccaccgccaccacgggagcgagggaggtgggtctgcagggcctgagactgttctacagccactgttcacagggctgaagaaca

SEQ ID NO: 37665 - DNA, 201 bp, Homo sapiens
agaagcctgatgcccacccagctgtctcaccatgggaccccaggcggagccgcggcccgccgcgggtcgcaatccaggccccaggcccgatccccagcgcyggcccaggccccaccccctcgacccccagcggcccggccctcccctcgcactccttcccccctcccaccatccaccgcagccacttccgcccgtcctccg

SEQ ID NO: 37666 - DNA, 201 bp, Homo sapiens
gcggaacctgtgcggtgcagccctgccctctccctccgcccaaaggtcgcccagcgacggcctgcttgacctggtttctcaaaaagggtgaccccccccctccgccccacgctggtcgcgggtcctggcgagaagcctttcggaaagcaccggggcctgtgtgttcccgcttcctcggacgcgagctctgtgtagccgtgg

SEQ ID NO: 37667 - DNA, 201 bp, Homo sapiens
gggagcgagggaggtgggtctgcagggcctgagactgttctacagccactgttcacagggctgaagaacaggtgtgggcagaaccaggttgtgagaaggamgccgggcgcagagtagcggccgtacaggagggggaggggcagaagagactggccagcagcggaagcgcgcggcaggtggagccgcgcgggaagaagcacg

SEQ ID NO: 37668 - DNA, 201 bp, Homo sapiens
agcacgcatgcgtcgcgggggggttggcccttggggtgctgggcggagcttgggaggggcgaggacgctgaagtaggggcggaacctgtgcggtgcagccytgccctctccctccgcccaaaggtcgcccagcgacggcctgcttgacctggtttctcaaaaagggtgaccccccccctccgccccacgctggtcgcgggt

SEQ ID NO: 37669 - DNA, 201 bp, Homo sapiens
gtgggtctgcagggcctgagactgttctacagccactgttcacagggctgaagaacaggtgtgggcagaaccaggttgtgagaaggaagccgggcgcagartagcggccgtacaggagggggaggggcagaagagactggccagcagcggaagcgcgcggcaggtggagccgcgcgggaagaagcacgcatgcgtcgcggg

SEQ ID NO: 37670 - DNA, 201 bp, Homo sapiens
gacccccagcggcccggccctcccctcgcactccttcccccctcccaccatccaccgcagccacttccgcccgtcctccggaagtgggccccggcaacgcrgcgttccacatcccgcccatttttctacccaacgtccccagcccgtcaccaccgccaccacgggagcgagggaggtgggtctgcagggcctgagactgtt

SEQ ID NO: 37671 - DNA, 201 bp, Homo sapiens
ggaggggcgaggacgctgaagtaggggcggaacctgtgcggtgcagccctgccctctccctccgcccaaaggtcgcccagcgacggcctgcttgacctggyttctcaaaaagggtgaccccccccctccgccccacgctggtcgcgggtcctggcgagaagcctttcggaaagcaccggggcctgtgtgttcccgcttcct

SEQ ID NO: 37672 - DNA, 201 bp, Homo sapiens
ccccagcggcccggccctcccctcgcactccttcccccctcccaccatccaccgcagccacttccgcccgtcctccggaagtgggccccggcaacgcagcsttccacatcccgcccatttttctacccaacgtccccagcccgtcaccaccgccaccacgggagcgagggaggtgggtctgcagggcctgagactgttcta

SEQ ID NO: 37673 - DNA, 201 bp, Homo sapiens
gaccccaacttcgggagtcggctttccggctccctggcgcaaccctgagggtggacgcccgaccccacccctgccctcggccctccagcgcagctgcccakcctggagccgcgcctgaagtgggcccgcagtctgaggcctggattccacgaggccggtgcaagccaggagccagccccactccctcgcccagctccctcc

SEQ ID NO: 37674 - DNA, 103 bp, Homo sapiens
ccygaaagtactcgaagaagtccggggccacctccaggtcatcctccaccaccacggccgcggggaagcgaaactgccggaagacctggcccagcgcccagcg

SEQ ID NO: 37675 - DNA, 201 bp, Homo sapiens
ccactccctcgcccagctccctccggcctggccctctgcagaagcctgatgcccacccagctgtctcaccatgggaccccaggcggagccgcggcccgccscgggtcgcaatccaggccccaggcccgatccccagcgctggcccaggccccaccccctcgacccccagcggcccggccctcccctcgcactccttccccc

SEQ ID NO: 37676 - DNA, 201 bp, Homo sapiens
aggacgctgaagtaggggcggaacctgtgcggtgcagccctgccctctccctccgcccaaaggtcgcccagcgacggcctgcttgacctggtttctcaaaragggtgaccccccccctccgccccacgctggtcgcgggtcctggcgagaagcctttcggaaagcaccggggcctgtgtgttcccgcttcctcggacgcga

SEQ ID NO: 37677 - DNA, 201 bp, Homo sapiens
gtacgacttacgctgcctccaagcacgcagccctgggcttctttgactgcctccgagccgaagtggaggaatacgatgttgtcatcagcaccgtgagcccractttcatccggtcgtaccacgtgtatccagagcaaggaaactgggaagcttccatttggaaattctttttcaggaagctgacctacggcgtgcacccag

SEQ ID NO: 37678 - DNA, 201 bp, Homo sapiens
gcctccaagcacgcagccctgggcttctttgactgcctccgagccgaagtggaggaatacgatgttgtcatcagcaccgtgagcccgactttcatccggtygtaccacgtgtatccagagcaaggaaactgggaagcttccatttggaaattctttttcaggaagctgacctacggcgtgcacccagtagaggtggcggag

SEQ ID NO: 37679 - DNA, 201 bp, Homo sapiens
agaacaaagtggtggtgatcaccgatgccatctcaggactgggcaaggagtgtgctcgggtgttccacacaggtggggcaaggctggtgctgtgtggaaaraactgggagaggctagagaacctatatgatgccttgatcagcgtggctgaccccagcaagcagacattcaccccaaagctggtcctgttggacctctcag

SEQ ID NO: 37680 - DNA, 201 bp, Homo sapiens
tttggaaattctttttcaggaagctgacctacggcgtgcacccagtagaggtggcggaggaggtgatgcgcaccgtgcggaggaagaagcaagaggtgttyatggccaaccccatccccaaggccgccgtgtacgtccgcaccttcttcccggagttctttttcgccgtggtggcctgtggggtgaaggagaagctcaatg

SEQ ID NO: 37681 - DNA, 201 bp, Homo sapiens
ctttcatccggtcgtaccacgtgtatccagagcaaggaaactgggaagcttccatttggaaattctttttcaggaagctgacctacggcgtgcacccagtrgaggtggcggaggaggtgatgcgcaccgtgcggaggaagaagcaagaggtgtttatggccaaccccatccccaaggccgccgtgtacgtccgcaccttct

SEQ ID NO: 37682 - DNA, 201 bp, Homo sapiens
gtacgacttacgctgcctccaagcacgcagccctgggcttctttgactgcctccgagccgaagtggaggaatacgatgttgtcatcagcaccgtgagcccractttcatccggtcgtaccacgtgtatccagagcaaggaaactgggaagcttccatttggaaatgtgagacttcagagggaagctggggcccctgggggc

SEQ ID NO: 37683 - DNA, 201 bp, Homo sapiens
gcctccaagcacgcagccctgggcttctttgactgcctccgagccgaagtggaggaatacgatgttgtcatcagcaccgtgagcccgactttcatccggtygtaccacgtgtatccagagcaaggaaactgggaagcttccatttggaaatgtgagacttcagagggaagctggggcccctgggggcctcgggaacagtcc

SEQ ID NO: 37684 - DNA, 201 bp, Homo sapiens
agaacaaagtggtggtgatcaccgatgccatctcaggactgggcaaggagtgtgctcgggtgttccacacaggtggggcaaggctggtgctgtgtggaaaraactgggagaggctagagaacctatatgatgccttgatcagcgtggctgaccccagcaagacattcaccccaaagctggtcctgttggacctctcagaca

SEQ ID NO: 37685 - DNA, 201 bp, Homo sapiens
ttcagatggtctttttcaggaagctgacctacggcgtgcacccagtagaggtggcggaggaggtgatgcgcaccgtgcggaggaagaagcaagaggtgttyatggccaaccccatccccaaggccgccgtgtacgtccgcaccttcttcccggagttctttttcgccgtggtggcctgtggggtgaaggagaagctcaatg

SEQ ID NO: 37686 - DNA, 193 bp, Homo sapiens
ctatgatggacgggagcggggaggtgaccgaggagagccactggctctgggtcttgttaagtggcattttctggaggaaatggaaaatgaagggcagggtrgtctgtgccgacatcctcactggcctctcctcggtcagaactcctgctgccatgcttctgcgacaccccagaatgacatgctcaactctcct

SEQ ID NO: 37687 - DNA, 201 bp, Homo sapiens
ggggcccctgggggcctcgggaacagtccggtgtcactggggggatgaatgaccttcagatggtctttttcaggaagctgacctacggcgtgcacccagtrgaggtggcggaggaggtgatgcgcaccgtgcggaggaagaagcaagaggtgtttatggccaaccccatccccaaggccgccgtgtacgtccgcaccttct

SEQ ID NO: 37688 - DNA, 201 bp, Homo sapiens
tgtcagagccaccctgaaagagttcaaggagagactggcaggggataagtaccaggcggccgtgcaggctctccgggaggaggttgagagcttcgcctctytcttccctctgcctggcctgcctgacttctaaaggagcgggcccactctggacccacctggcgccacagaggaagctggctgccggaggacccccacttg

SEQ ID NO: 37689 - DNA, 201 bp, Homo sapiens
gaggttgagagcttcgcctctttcttccctctgcctggcctgcctgacttctaaaggagcgggcccactctggacccacctggcgccacagaggaagctgsctgccggaggacccccacttgagagatggatgagctgctccaaaggggaactgttgacactcgggccctttgagggggtttcttttggacttttttcatg

SEQ ID NO: 37690 - DNA, 192 bp, Homo sapiens
ttagaaagattgtagcgttttactctccctgggctttcctccgccttgctgcaacagagaggaaatgcccatgtccacagcttgtacacactgccccctcwctatcttgttatccagtggcatgccaaaggagaactgaattagcttctgaggcttctgctgtaaatcagaagtgtatgttagtcaagagta

SEQ ID NO: 37691 - DNA, 201 bp, Homo sapiens
ctttcttccctctgcctggcctgcctgacttctaaaggagcgggcccactctggacccacctggcgccacagaggaagctggctgccggaggacccccacytgagagatggatgagctgctccaaaggggaactgttgacactcgggccctttgagggggtttcttttggacttttttcatgttttcttcacaaatcaaaa

SEQ ID NO: 37692 - DNA, 201 bp, Homo sapiens; identical to SEQ ID NO: 37688

SEQ ID NO: 37693 - DNA, 201 bp, Homo sapiens; identical to SEQ ID NO: 37689

SEQ ID NO: 37694 - DNA, 192 bp, Homo sapiens; identical to SEQ ID NO: 37690

SEQ ID NO: 37695 - DNA, 201 bp, Homo sapiens; identical to SEQ ID NO: 37691

SEQ ID NO: 37696 - DNA, 201 bp, Homo sapiens
ggaaaacttagtttgcccagccttgtcagctgagattggttttgctttccagccagaagtagaaacttgatgctttttcctttttgcagtgttaaaaaccvtatctccagttttattatgttccatcacagttttggggcaaagccagaaagctgacttgtttgcttcaaaacacaaaccaaggcactgtcttctgtgctt

SEQ ID NO: 37697 - DNA, 201 bp, Homo sapiens; identical to SEQ ID NO: 37688

SEQ ID NO: 37698 - DNA, 201 bp, Homo sapiens
ttagaaagattgtagcgttttactctccctgggctttcctccgccttgctgcaacagagaggaaatgcccatgtccacagcttgtacacactgccccctcwctatcttgttatccagtggcatgccaaaggagaactgaattagcttctgaggcttctgctgtaaatcagaagtgtatgttagtcaagagtaaacaagatg

SEQ ID NO: 37699 - DNA, 201 bp, Homo sapiens; identical to SEQ ID NO: 37689

SEQ ID NO: 37700 - DNA, 201 bp, Homo sapiens; identical to SEQ ID NO: 37691

SEQ ID NO: 37701 - DNA, 201 bp, Homo sapiens
tttgtttaagtctcattgttagtaattctgggacaggttattaaaggatttaaatttgaacctggctttctcacagctggacataattctaggaaaataaratactatgtcgccacttggtcataatcatttagatggtggtgtagggcaaagctgttagaaagattgtagcgttttactctccctgggctttcctccgcc

SEQ ID NO: 37702 - DNA, 201 bp, Homo sapiens
aattagcttctgaggcttctgctgtaaatcagaagtgtatgttagtcaagagtaaacaagatgcacccagtatggtgggagggttttgctgtcagtagctyaaagtatggtgtagaaatggcctcctccctccatcctgggaagtcccagtcccatcctggtgtgagaatcaaccaggctttcctgctccacctgagataa

SEQ ID NO: 37703 - DNA, 201 bp, Homo sapiens
cagttctgctaccaaagtggtcttcaatttaggggcctgacccctccccagctggagacaagctgccatctccagggctcgctgtaaacagcctccactcytgggctgaataagcactcccaagaagctgggcccctaccaacagattaatcggctgcagagtgctcatcccctccccacacccccatccacccctgcctc

SEQ ID NO: 37704 - DNA, 201 bp, Homo sapiens; identical to SEQ ID NO: 37688

SEQ ID NO: 37705 - DNA, 201 bp, Homo sapiens; identical to SEQ ID NO: 37689

SEQ ID NO: 37706 - DNA, 192 bp, Homo sapiens; identical to SEQ ID NO: 37690

SEQ ID NO: 37707 - DNA, 201 bp, Homo sapiens; identical to SEQ ID NO: 37691

SEQ ID NO: 37708 - DNA, 201 bp, Homo sapiens; identical to SEQ ID NO: 37688

SEQ ID NO: 37709 - DNA, 201 bp, Homo sapiens; identical to SEQ ID NO: 37689

SEQ ID NO: 37710 - DNA, 201 bp, Homo sapiens; identical to SEQ ID NO: 37698

SEQ ID NO: 37711 - DNA, 201 bp, Homo sapiens; identical to SEQ ID NO: 37691

SEQ ID NO: 37712 - DNA, 201 bp, Homo sapiens
tttgtttaagtctcattgttagtaattctgggacaggttattaaaggatttaaatttgaacctggctttctcacagctggacataattctaggaaaataarctgttagaaagattgtagcgttttactctccctgggctttcctccgccttgctgcaacagagaggaaatgcccatgtccacagcttgtacacactgcccc

SEQ ID NO: 37713 - DNA, 129 bp, Homo sapiens
aattagcttctgaggcttctgctgtaaatcagaagtgtatgttagtcaagagtaaacaagatgcacccagtatggtgggagggttttgctgtcagtagctyaaagtatggtgtagaaatggcctcctcc

SEQ ID NO: 37714 - DNA, 201 bp, Homo sapiens; identical to SEQ ID NO: 37696

SEQ ID NO: 37715 - DNA, 201 bp, Homo sapiens; identical to SEQ ID NO: 37688

SEQ ID NO: 37716 - DNA, 201 bp, Homo sapiens; identical to SEQ ID NO: 37698

SEQ ID NO: 37717 - DNA, 201 bp, Homo sapiens; identical to SEQ ID NO: 37689

SEQ ID NO: 37718 - DNA, 201 bp, Homo sapiens; identical to SEQ ID NO: 37691

SEQ ID NO: 37719 - DNA, 201 bp, Homo sapiens; identical to SEQ ID NO: 37701

SEQ ID NO: 37720 - DNA, 201 bp, Homo sapiens; identical to SEQ ID NO: 37702

SEQ ID NO: 37721 - DNA, 201 bp, Homo sapiens; identical to SEQ ID NO: 37703

SEQ ID NO: 37722 - DNA, 201 bp, Homo sapiens
aaggcagcagctttagcatctctaaagaagtatggcgtggggacttgtggacccagaggattttatggcacatttgatgttcatttggatttggaagacckcctggcaaaatttatgaagacagaagaagccattatatactcatatggatttgccaccatagccagtgctattcctgcttactctaaaagaggggacatt

SEQ ID NO: 37723 - DNA, 201 bp, Homo sapiens
tagcccaggccgtcctgctctaggcagagtcccgggaccatggcctcctgccacacaacacgcagagaggactcaagactcccgctggccatggagtggcytgaaagagagcaagaacatgtggatctttgataggattgttaccaaatggtgtcagtatggaccaattgtgtgaccatgagaaggatgcttatttttttt

SEQ ID NO: 37724 - DNA, 201 bp, Homo sapiens
cagagtcccgggaccatggcctcctgccacacaacacgcagagaggactcaagactcccgctggccatggagtggcctgaaagagagcaagaacatgtggrtctttgataggattgttaccaaatggtgtcagtatggaccaattgtgtgaccatgagaaggatgcttattttttttaaaaagaaaacacatctaaaagcc

SEQ ID NO: 37725 - DNA, 107 bp, Homo sapiens
cgacacygagcagcgacgcgcacttttgggacgcgcttgtgacccgccttccggaaggaagcggctaactatggcgaccgccacggagcagtgggttctggtggaga

SEQ ID NO: 37726 - DNA, 201 bp, Homo sapiens
cttccctccctctaatagtaatggttcagtaagcactccttaactccttagtatttcatagaaaaatgactgcaacattaaagctaagaggaacacttcarcatatgtggtacaaatttatattgaagatctaaataaaccacgtattttccagtcttcgttgtgtgaagctaaatggtggctaaaaggaacactttttgt

SEQ ID NO: 37727 - DNA, 201 bp, Homo sapiens; identical to SEQ ID NO: 37722

SEQ ID NO: 37728 - DNA, 201 bp, Homo sapiens; identical to SEQ ID NO: 37723

SEQ ID NO: 37729 - DNA, 201 bp, Homo sapiens; identical to SEQ ID NO: 37724

SEQ ID NO: 37730 - DNA, 107 bp, Homo sapiens; identical to SEQ ID NO: 37725

SEQ ID NO: 37731 - DNA, 201 bp, Homo sapiens; identical to SEQ ID NO: 37726

SEQ ID NO: 37732 - DNA, 201 bp, Homo sapiens
tgtctcagggaacgtcaaagcaacatgcccggatgaggagacagaactcaaggtggaagtaccggagtacctggggccgctgatgtttgtgaaactgcgtwaacgtcacttccttcaggttctgcagctggatctccgtgtagggccccggagccggggacgaggtcaggttcccttgttaccgctgggtggaggtcgacg

SEQ ID NO: 37733 - DNA, 201 bp, Homo sapiens
gaagacaagagtgttgactttaagaatgatctgaatgacttcaaccagattttctgctgtggccagagcaagctggctgagcgcgtgcgggactcctggarggaagatgccttatttgggtaccagtttcttaatggcgccaaccccatggtgctgaggcgctctgctcaccttcctgctcgcctagtgttccctccaggc

SEQ ID NO: 37734 - DNA, 201 bp, Homo sapiens
ctgtctcagggaacgtcaaagcaacatgcccggatgaggagacagaactcaaggtggaagtaccggagtacctggggccgctgatgtttgtgaaactgcgytaacgtcacttccttcaggttctgcagctggatctccgtgtagggccccggagccggggacgaggtcaggttcccttgttaccgctgggtggaggtcgac

SEQ ID NO: 37735 - DNA, 201 bp, Homo sapiens
cgttaacgtcacttccttcaggttctgcagctggatctccgtgtagggccccggagccggggacgaggtcaggttcccttgttaccgctgggtggaggtcracggcgtcctgagcctgcctgaaggcaccagccgtactgtgggcgacgaccctcgaggcctgttccagaaacaccaggaagaggagctggaagagagaag

SEQ ID NO: 37736 - DNA, 201 bp, Homo sapiens
gattttctgctgtggccagagcaagctggctgagcgcgtgcgggactcctggaaggaagatgccttatttgggtaccagtttcttaatggcgccaaccccrtggtgctgaggcgctctgctcaccttcctgctcgcctagtgttccctccaggcatggaggaactgcaggcccagctggagaaggagctggagggaggcac

SEQ ID NO: 37737 - DNA, 201 bp, Homo sapiens
tgcgttaacgtcacttccttcaggttctgcagctggatctccgtgtagggccccggagccggggacgaggtcaggttcccttgttaccgctgggtggaggkcgacggcgtcctgagcctgcctgaaggcaccagccgtactgtgggcgacgaccctcgaggcctgttccagaaacaccaggaagaggagctggaagagaga

SEQ ID NO: 37738 - DNA, 201 bp, Homo sapiens
tccccaaatccggatgtctgtctcagggaacgtcaaagcaacatgcccggatgaggagacagaactcaaggtggaagtaccggagtacctggggccgctgmtgtttgtgaaactgcgttaacgtcacttccttcaggttctgcagctggatctccgtgtagggccccggagccggggacgaggtcaggttcccttgttacc

SEQ ID NO: 37739 - DNA, 201 bp, Homo sapiens
tccctgagggtggagacgtctctgcactgcgcggagagcccgaccccgcgggccaagccggccgcccgccagaacgaaaaaacggcccgatgagatgctgyttcccaaaggccaccaaggggccagggccctcagccaggacagaaaggcctccagttgccagccagccagccagctgccaggtggaccaatcattttcgg

SEQ ID NO: 37740 - DNA, 201 bp, Homo sapiens
agctgcccagcacaggatccccaccacctccccttttcctgcccacggatcccccagtggtctggcttctggcccaatgctgggtgcgcagctctgacttmcagctccgtgagctgcagtctcatcttctgaggggacacttgatggctcaggtcattgttgtggccaccatgaggtgcctgccgtcgatacatcctatct

SEQ ID NO: 37741 - DNA, 201 bp, Homo sapiens
actcctggaaggaagatgccttatttgggtaccagtttcttaatggcgccaaccccatggtgctgaggcgctctgctcaccttcctgctcgcctagtgttycctccaggcatggaggaactgcaggcccagctggagaaggagctggagggaggcacattgttcgaagctgacttctccctgctggatgggatcaaggcca

SEQ ID NO: 37742 - DNA, 201 bp, Homo sapiens
gcagggatggcacaggaccagccactccagcagaggaactgtttgtggaacccagcagggaaagaaattcgactttgagagcagcagctttggcagcttaraaatcatctggaggcttcccgtgcacacattaaacctcaagctccaggagtcccactatggcctgaggagcatcccgctctctggcaaggttctgctcct

SEQ ID NO: 37743 - DNA, 201 bp, Homo sapiens
ggcaccagccgtactgtgggcgacgaccctcgaggcctgttccagaaacaccaggaagaggagctggaagagagaaggaagttgtaccggtggggaaactkgaaggatgggttaattctgaatgtggctggggcaaaactatgtgacctccctgtggatgagcaatttctggaagacaagagtgttgactttaagaatgat

SEQ ID NO: 37744 - DNA, 201 bp, Homo sapiens
gaaacaaaccataaatcaatgtaagaaacagccaagccgcagtttctgaacacagccaacgtttactgaccgtcctgcgtcttggaccagcctacttttgwcccagtgaactattttcacttgaagccagcacagaaggttttcaggcccaggatgctgtctaaatcgggttgatggacaaagagaggctgtttgagcctc

SEQ ID NO: 37745 - DNA, 201 bp, Homo sapiens; identical to SEQ ID NO: 37739

SEQ ID NO: 37746 - DNA, 201 bp, Homo sapiens
ccagcaggggagggggataaaatggagttttcctttctgggaagaaaaagaaacacacacacacacacacacacacacacacacacacacacacacacaccagagcagcattagaagacaaaagaaatctaatcaagggggaataaagctaataaggacaatgaggtaccatctcctacttataaattagctaaagtttac

SEQ ID NO: 37747 - DNA, 201 bp, Homo sapiens
tccaatccagcaggggagggggataaaatggagttttcctttctgggaagaaaaagaaacacacacacacacacacacacacacacacacacacacacacacacaccagagcagcattagaagacaaaagaaatctaatcaagggggaataaagctaataaggacaatgaggtaccatctcctacttataaattagctaaa

SEQ ID NO: 37748 - DNA, 201 bp, Homo sapiens
gggatccacagccctcagaaaaccttcaccccttaggaacagagaccaaactgaaataatgacctgtggaatgattccatgcctgctaaaaactcgagggrcaaggaacagactcataaattattaattggcctttgtttatgtttcaaagtaaatggtcgttttctttatgctaagtctttgtacctggcacccccatcc

SEQ ID NO: 37749 - DNA, 201 bp, Homo sapiens; identical to SEQ ID NO: 37744

SEQ ID NO: 37750 - DNA, 201 bp, Homo sapiens
aagtctttgtacctggcacccccatccatacacttttttaaggtaggttagatgtggttaaaaatgacagtaaacccaccagcaagcaaaaataatcttaraaagtgagaggaggtcactgaaacctggcctgaggtttgaagaagatggagaagagttatatttattgagaaccggctctgtgccaggcactagatgttc

SEQ ID NO: 37751 - DNA, 201 bp, Homo sapiens
gagccaggtgagtttgggatccacagccctcagaaaaccttcaccccttaggaacagagaccaaactgaaataatgacctgtggaatgattccatgcctgmtaaaaactcgaggggcaaggaacagactcataaattattaattggcctttgtttatgtttcaaagtaaatggtcgttttctttatgctaagtctttgtac

SEQ ID NO: 37752 - DNA, 201 bp, Homo sapiens; identical to SEQ ID NO: 37739

SEQ ID NO: 37753 - DNA, 201 bp, Homo sapiens
ctgaggtttgaagaagatggagaagagttatatttattgagaaccggctctgtgccaggcactagatgttcctccacttacgatggggttacctcccgttraaactattgtaagttgaaaatatggtaatttgaaaatgcacttaatacccctaacctactaaacatcatggcttagcctagcctaccttaaacatgctca

SEQ ID NO: 37754 - DNA, 201 bp, Homo sapiens
tttgagcctctgagccaggtgagtttgggatccacagccctcagaaaaccttcaccccttaggaacagagaccaaactgaaataatgacctgtggaatgaytccatgcctgctaaaaactcgaggggcaaggaacagactcataaattattaattggcctttgtttatgtttcaaagtaaatggtcgttttctttatgcta

SEQ ID NO: 37755 - DNA, 201 bp, Homo sapiens
gttgagcaaaatcatctaacagaaagcctgttttataataaaatgttgaatatctcatgtaatttattgcatactgtactaaaagtgaaaaagaatggttstatgagtacttaaagtactatttctactgaatgtcacttttgtaccattgtaaagtcgaaaaatcataagtcaaaccatcttaagttgggaactgtctgt

SEQ ID NO: 37756 - DNA, 201 bp, Homo sapiens
gagcaaaatcatctaacagaaagcctgttttataataaaatgttgaatatctcatgtaatttattgcatactgtactaaaagtgaaaaagaatggttctawgagtacttaaagtactatttctactgaatgtcacttttgtaccattgtaaagtcgaaaaatcataagtcaaaccatcttaagttgggaactgtctgtatt

SEQ ID NO: 37757 - DNA, 201 bp, Homo sapiens
tgggggccgggggcggccgcatgggccttgtctttgctgggactgggcctgtgtgccacgtggcagctgctgcttggcttctggcccccttatctgccccygccccacgcgccctggcagcaccatgagccgccagcttctgcctgtactgctgctgctgctgctcagggcttcgtgcccatggggtcaggaacagggagc

SEQ ID NO: 37758 - DNA, 201 bp, Homo sapiens
gaccagaccctcccctgctgcccctgctgcccctgctgcccctgctctgtcccgggaccccctgggcctggcgctgtcccctgagctgtcccattaaacayggccctgtctcggtgccctgggtgtcgtctctttctgcctcccctcccctgggggccgggggcggccgcatgggccttgtctttgctgggactgggcctg

SEQ ID NO: 37759 - DNA, 201 bp, Homo sapiens
ccctgctgcccctgctgcccctgctctgtcccgggaccccctgggcctggcgctgtcccctgagctgtcccattaaacatggccctgtctcggtgccctgkgtgtcgtctctttctgcctcccctcccctgggggccgggggcggccgcatgggccttgtctttgctgggactgggcctgtgtgccacgtggcagctgctg

SEQ ID NO: 37760 - DNA, 201 bp, Homo sapiens
gctgcccctgctctgtcccgggaccccctgggcctggcgctgtcccctgagctgtcccattaaacatggccctgtctcggtgccctgggtgtcgtctcttwctgcctcccctcccctgggggccgggggcggccgcatgggccttgtctttgctgggactgggcctgtgtgccacgtggcagctgctgcttggcttctggc

SEQ ID NO: 37761 - DNA, 201 bp, Homo sapiens
  misc_feature (1)...(201): n = A,T,C or G
gtcaccgcagcgtccatcactgctttctgccatgcagtcctcaacggccaagtcaagccctatctcctgagccaggagataccccctgattgggatcagcngccagttaagaccctcgtgggcaagaattttgagcaggtggcttttgacgaaaccaagaatgtgtttgtcaagttctatgccccgtggtgcacccactgc

SEQ ID NO: 37762 - DNA, 201 bp, Homo sapiens
accgcacgcacccggaggagtacacaggaccacgggacgctgagggcattgccgagtggctgcgacggcgggtggggcccagtgccatgcggctggaggaygaggcggccgcccaggcgctgatcggtggccgggacctagtggtcattggcttcttccaggacctgcaggacgaggacgtggccaccttcttggccttgg

SEQ ID NO: 37763 - DNA, 201 bp, Homo sapiens
ggggcccagtgccatgcggctggaggacgaggcggccgcccaggcgctgatcggtggccgggacctagtggtcattggcttcttccaggacctgcaggacraggacgtggccaccttcttggccttggcccaggacgccctggacatgacctttggcctcacagaccggccgcggctctttcagcagtttggcctcaccaa

SEQ ID NO: 37764 - DNA, 201 bp, Homo sapiens
cgtggtgcacccactgcaaggagatggcccctgcctgggaggcattggctgagaagtaccaagaccacgaggacatcatcattgctgagctggatgccacrgccaacgagctggatgccttcgctgtgcacggcttccctactctcaagtacttcccagcagggccaggtcggaaggtgattgaatacaaaagcaccaggg

SEQ ID NO: 37765 - DNA, 201 bp, Homo sapiens
agcagggccaggtcggaaggtgattgaatacaaaagcaccagggacctggagactttctccaagttcctggacaacgggggcgtgctgcccacggaggagyccccggaggagccagcagccccgttcccggagccaccggccaactccactatggggtccaaggaggaactgtagctgcccccgtgtcacccccgccatca

SEQ ID NO: 37766 - DNA, 201 bp, Homo sapiens
acacacagcatgcgcctggtcacggagttcaacagccagacgtctgccaagatcttcgcggccaggatcctcaaccacctgctgctgtttgtcaaccagaygctggctgcgcaccgggagctcctagcgggctttggggaggcagctccccgcttccgggggcaggtgctgttcgtggtggtggacgtggcggccgacaat

SEQ ID NO: 37767 - DNA, 201 bp, Homo sapiens
ccaaggtggatgggcccgcgcagcgcgagctggctgaggagtttggtgtgacggagtaccctacgctcaagttcttccgcaatgggaaccgcacgcacccsgaggagtacacaggaccacgggacgctgagggcattgccgagtggctgcgacggcgggtggggcccagtgccatgcggctggaggacgaggcggccgccc

SEQ ID NO: 37768 - DNA, 201 bp, Homo sapiens
cagcgcgagctggctgaggagtttggtgtgacggagtaccctacgctcaagttcttccgcaatgggaaccgcacgcacccggaggagtacacaggaccacrggacgctgagggcattgccgagtggctgcgacggcgggtggggcccagtgccatgcggctggaggacgaggcggccgcccaggcgctgatcggtggccgg

SEQ ID NO: 37769 - DNA, 201 bp, Homo sapiens
acctgcggaggaagcccttctaccctgccctcatccgctacatgagctctgggcctgtggtggccatggtctgggaagggtacaatgtcgtccgcgcctcragggccatgattggacacaccgactcggctgaggctgccccaggaaccataaggggtgacttcagcgtccacatcagcaggaatgtcatccacgccagcg

SEQ ID NO: 37770 - DNA, 201 bp, Homo sapiens
gcaggaccaactacctccgtcagcaagaacccaagcccacatccaaacctgcctgtcccaaaccacttacttccctgttcacctctgccccaccccagccyagaggagtttgagccaccaacttcagtgcctttctgtaccccaagccagcacaagattggaccaatcctttttgcaccaaagtgccggacaacctttgtg

SEQ ID NO: 37771 - DNA, 201 bp, Homo sapiens
tcaatcttcaggcccctttttgtccgtgtttccagggctcacctggagggccctcctggacccgggagcggaccctggtggcggtgaagcccgatggcgtscaacggcggctcgttggggacgtgatccagcgctttgagaggcggggcttcacgctggtggggatgaagatgctgcaggcaccagagagcgtccttgccg

SEQ ID NO: 37772 - DNA, 201 bp, Homo sapiens
acatcagcaggaatgtcatccacgccagcgactccgtggagggggcccagcgggagatccagctgtggttccagagcagtgagctggtgagctgggcagaygggggccagcacagcagcatccacccagcctgaggctcaagctgcccttaccaccccatcccccacgcaggaccaactacctccgtcagcaagaacccaa

SEQ ID NO: 37773 - DNA, 201 bp, Homo sapiens; identical to SEQ ID NO: 37770

SEQ ID NO: 37774 - DNA, 201 bp, Homo sapiens; identical to SEQ ID NO: 37769

SEQ ID NO: 37775 - DNA, 201 bp, Homo sapiens
gccggagggtagcttggctctggagcagcctgggactataggaaggagggccctcctggacccgggagcggaccctggtggcggtgaagcccgatggcgtscaacggcggctcgttggggacgtgatccagcgctttgagaggcggggcttcacgctggtggggatgaagatgctgcaggcaccagagagcgtccttgccg

SEQ ID NO: 37776 - DNA, 201 bp, Homo sapiens; identical to SEQ ID NO: 37772

SEQ ID NO: 37777 - DNA, 201 bp, Homo sapiens
ggctctgtccagattctgtgggacatacagggtctgggctcctctggaaaccagggacccgatgccggagggtagcttggctctggagcagcctgggactrtaggaaggagggccctcctggacccgggagcggaccctggtggcggtgaagcccgatggcgtgcaacggcggctcgttggggacgtgatccagcgctttg

SEQ ID NO: 37778 - DNA, 201 bp, Homo sapiens; identical to SEQ ID NO: 37769

SEQ ID NO: 37779 - DNA, 201 bp, Homo sapiens; identical to SEQ ID NO: 37770

SEQ ID NO: 37780 - DNA, 201 bp, Homo sapiens
ttttcttctgatttttaacagaaattggcgttgaacatttcccccgagggccctcctggacccgggagcggaccctggtggcggtgaagcccgatggcgtscaacggcggctcgttggggacgtgatccagcgctttgagaggcggggcttcacgctggtggggatgaagatgctgcaggcaccagagagcgtccttgccg

SEQ ID NO: 37781 - DNA, 201 bp, Homo sapiens; identical to SEQ ID NO: 37772

SEQ ID NO: 37782 - DNA, 201 bp, Homo sapiens; identical to SEQ ID NO: 37769

SEQ ID NO: 37783 - DNA, 201 bp, Homo sapiens; identical to SEQ ID NO: 37770

SEQ ID NO: 37784 - DNA, 201 bp, Homo sapiens
gcccgcgggccccgggcccgagcctgctagtgcgccacggctcgggagggccctcctggacccgggagcggaccctggtggcggtgaagcccgatggcgtscaacggcggctcgttggggacgtgatccagcgctttgagaggcggggcttcacgctggtggggatgaagatgctgcaggcaccagagagcgtccttgccg

SEQ ID NO: 37785 - DNA, 201 bp, Homo sapiens; identical to SEQ ID NO: 37772

SEQ ID NO: 37786 - DNA, 201 bp, Homo sapiens
gcttctaagtagctttaatgtttctgtacagaaataagtttatccctgtaacattgtggtagagttttaatacagtatttagttttttattgggctttttwaaaaagttaacttttaacatagctgctcagggattaaatcagattggaaaacccattctgactccacatactgctacaaagaaatacatcgttgtttata

SEQ ID NO: 37787 - DNA, 201 bp, Homo sapiens
gaaatacatcgttgtttatattgagctgcaggagatagtacactttaaacttaagaaagttaaatgtttcacaataacattgcaatataatcttcagctaytctctttccattggtaaaatctctgatggtgtgataactctttgccaacctacgaaacccatatctggaagaatcaccagctcccgtgagcagcttcatg

SEQ ID NO: 37788 - DNA, 201 bp, Homo sapiens
ttctcatctgccaaatgggagtaataataataatccttataaaattgggttcataaagtttagagaaaaggaatggaaagtacccagaactatgcctggagcacgcacgacacacgtacagtgagttgggagccgttaggctgaatgttactgcttgccatatgatgtgaagtacagcaatatcccaagttcttgtgactg

SEQ ID NO: 37789 - DNA, 201 bp, Homo sapiens
tcttccactgcaagccggcctgcgtcgtgtacactgagctgctctacaccaacaagtgctacatgcgggacctctgcgtcatagatgcacagtggctgtaygaggctgcccctgagtactttaggaggaagctgagaaccgccagaaactgagccgccccaggatgccgccagaatcactggtccctgggagcttggacta

SEQ ID NO: 37790 - DNA, 201 bp, Homo sapiens
tctcatctgccaaatgggagtaataataataatccttataaaattgggttcataaagtttagagaaaaggaatggaaagtacccagaactatgcctggagcacgcacgacacacgtacagtgagttgggagccgttaggctgaatgttactgcttgccatatgatgtgaagtacagcaatatcccaagttcttgtgactga

SEQ ID NO: 37791 - DNA, 201 bp, Homo sapiens
ctcatctgccaaatgggagtaataataataatccttataaaattgggttcataaagtttagagaaaaggaatggaaagtacccagaactatgcctggagcacgcacgacacacgtacagtgagttgggagccgttaggctgaatgttactgcttgccatatgatgtgaagtacagcaatatcccaagttcttgtgactgag

SEQ ID NO: 37792 - DNA, 201 bp, Homo sapiens
gaaagtacccagaactatgcctggagcacgcacgacacacgtacagtgagttgggagccgttaggctgaatgttactgcttgccatatgatgtgaagtacrgcaatatcccaagttcttgtgactgagggagattttctggaagggccacaggaggttgcggagcttggatgttgcccttagttcttgtttaatgtctctc

SEQ ID NO: 37793 - DNA, 201 bp, Homo sapiens
cctatataccttatcttactgaattcttaaactttgaaccagttcttccacttactgacttgttaccactgctgactttctgaaaagttttccagtttttkttttttgttttttgttttccagtaggggattagaatgtttagtcctacttagtaagaaaaatattgtatttttaatcattcatagtgctggtaaaaaaaa

SEQ ID NO: 37794 - DNA, 201 bp, Homo sapiens
agatgaccgtgccagagatccagaggtgtaacctggccagtgtgatgcttcagcttctagcaatgaaagtcccaaatgtgctcacctttgacttcatgtcraagccatctccagatcacattcaggcggccattgcccaactggacctgttaggtgctcttgaacataaggatgaccagcttaccctgactccaatgggaa

SEQ ID NO: 37795 - DNA, 201 bp, Homo sapiens
agctgctcagggattaaatcagattggaaaacccattctgactccacatactgctacaaagaaatacatcgttgtttatattgagctgcaggagatagtayactttaaacttaagaaagttaaatgtttcacaataacattgcaatataatcttcagctactctctttccattggtaaaatctctgatggtgtgataactc

SEQ ID NO: 37796 - DNA, 201 bp, Homo sapiens
agtatttcaatggcgcccccgtcctctacctagagggtcggcagcatccgatccaggtgttttacaccaaacagcctcagaatgattacctgcacgccgcrcttgtctccgtcttccagatccaccaggaagccccttcttcacaggacatcctggtgttcctcactgggcaggaggagatcgaagccatgagcaagacgt

SEQ ID NO: 37797 - DNA, 201 bp, Homo sapiens
gtgctacatgcgggacctctgcgtcatagatgcacagtggctgtacgaggctgcccctgagtactttaggaggaagctgagaaccgccagaaactgagccrccccaggatgccgccagaatcactggtccctgggagcttggactacagttgtccttacagcaggcttccaggttggcgcttagagaagccttggaatcag

SEQ ID NO: 37798 - DNA, 201 bp, Homo sapiens
ggggcggtgtgctcctgttgtctgcacctgagagggggcaggagctctcggcgcttgcgcctcccgccgcggtgccctcccgacatgccggaggaggcggscttcccgccggccaagagattccggccaggctctggacctccgagccgcgctgggtccttccctcccgggaggcaagtggtgatgctgctgactgcgggc

SEQ ID NO: 37799 - DNA, 201 bp, Homo sapiens
agaagaggagaaaggaactcgggaaacttcctctgaaagtgattgtgatgtcagctacgatggatgtggacctgttctctcagtatttcaatggcgccccsgtcctctacctagagggtcggcagcatccgatccaggtgttttacaccaaacagcctcagaatgattacctgcacgccgcgcttgtctccgtcttccaga

SEQ ID NO: 37800 - DNA, 198 bp, Homo sapiens
atgctgggagatgcagtccctttttctaaagactggggcggccgtgaggtcatcggtggtcgccgggagccgccagcacgtggcggcgaggaaggggyggtgtgctcctgttgtctgcacctgagagggggcaggagctctcggcgcttgcgcctcccgccgcggtgccctcccgacatgccggaggaggcgggcttc

SEQ ID NO: 37801 - DNA, 201 bp, Homo sapiens
gaaagtcccaaatgtgctcacctttgacttcatgtcgaagccatctccagatcacattcaggcggccattgcccaactggacctgttaggtgctcttgaasataaggatgaccagcttaccctgactccaatgggaagaaagatggcagcatttcctttagaacccaaatttgccaaaaccatcctcatgtcccccaaatt

SEQ ID NO: 37802 - DNA, 201 bp, Homo sapiens
tcatctgccaaatgggagtaataataataatccttataaaattgggttcataaagtttagagaaaaggaatggaaagtacccagaactatgcctggagcacgcacgacacacgtacagtgagttgggagccgttaggctgaatgttactgcttgccatatgatgtgaagtacagcaatatcccaagttcttgtgactgagg

SEQ ID NO: 37803 - DNA, 201 bp, Homo sapiens
tatttgtttctggtcctcctcttcgttctcttatgcaggtgattgtgatgtcagctacgatggatgtggacctgttctctcagtatttcaatggcgccccsgtcctctacctagagggtcggcagcatccgatccaggtgttttacaccaaacagcctcagaatgattacctgcacgccgcgcttgtctccgtcttccaga

SEQ ID NO: 37804 - DNA, 201 bp, Homo sapiens; identical to SEQ ID NO: 37786

SEQ ID NO: 37805 - DNA, 201 bp, Homo sapiens; identical to SEQ ID NO: 37787

SEQ ID NO: 37806 - DNA, 201 bp, Homo sapiens; identical to SEQ ID NO: 37788

SEQ ID NO: 37807 - DNA, 201 bp, Homo sapiens; identical to SEQ ID NO: 37789

SEQ ID NO: 37808 - DNA, 201 bp, Homo sapiens; identical to SEQ ID NO: 37790

SEQ ID NO: 37809 - DNA, 201 bp, Homo sapiens; identical to SEQ ID NO: 37791

SEQ ID NO: 37810 - DNA, 201 bp, Homo sapiens; identical to SEQ ID NO: 37792

SEQ ID NO: 37811 - DNA, 201 bp, Homo sapiens; identical to SEQ ID NO: 37793

SEQ ID NO: 37812 - DNA, 201 bp, Homo sapiens; identical to SEQ ID NO: 37794

SEQ ID NO: 37813 - DNA, 201 bp, Homo sapiens; identical to SEQ ID NO: 37795

SEQ ID NO: 37814 - DNA, 201 bp, Homo sapiens; identical to SEQ ID NO: 37801

SEQ ID NO: 37815 - DNA, 201 bp, Homo sapiens; identical to SEQ ID NO: 37796

SEQ ID NO: 37816 - DNA, 201 bp, Homo sapiens; identical to SEQ ID NO: 37802

SEQ ID NO: 37817 - DNA, 201 bp, Homo sapiens; identical to SEQ ID NO: 37797

SEQ ID NO: 37818 - DNA, 201 bp, Homo sapiens
gggtggaagcctcagaggccttgggagctcatccctctcacccagaatccctctaaccccttgggtgcggtttgctcagccccagcttatctcctcctccrcgctgtgtaaatgctccagcactcaataaagtgggctttgcaagctacctccttccctgcctcctggcaccgggtgggtcaagccacctccccataggag

SEQ ID NO: 37819 - DNA, 170 bp, Homo sapiens
ctctaaccgtcttgcaaagatctttaaagtgtatccagcactgctattttttagctcagaaataccttagaggtttcctacttaaaaggtttttttaaaawatatatatatatttaaaaataagggttttaaaaaagcacatatttgtatttaaacaattcattctctaa

SEQ ID NO: 37820 - DNA, 201 bp, Homo sapiens
tgtcagcggaagtggaaacctcagagggggtagacgagtcagaaaaaaagaactctggggccctagaaaaggagaaccaaatgagaatggctgacctctcrgagctcctgaaggaagggaccaaggaagcacacgaccgggcagaaaacacccagtttgtcaaggacttcttgaaaggcaacattaagaaggagctgttta

SEQ ID NO: 37821 - DNA, 201 bp, Homo sapiens
ccaccacggcactttacttcacatactcagccctcgaggaggaaatggagcgcaacaaggaccatccagcctttgcccctttgtacttccccatggagctrcaccggaaggaggcgctgaccaaggacatggagtatttctttggtgaaaactgggaggagcaggtgcagtgccccaaggctgcccagaagtacgtggagc

SEQ ID NO: 37822 - DNA, 201 bp, Homo sapiens
agtataacatgcagatattcaatgaactggaccaggccggctccacactggccagagagaccttggaggatgggttccctgtacacgatgggaaaggagayatgcgtaaatgccctttctacgctgctgaacaagacaaaggtgccctggagggcagcagctgtcccttccgaacagctatggctgtgctgaggaagccca

SEQ ID NO: 37823 - DNA, 201 bp, Homo sapiens
atgcatacacccgctacatgggggatctctcggggggccaggtgctgaagaaggtggcccagcgagcactgaaactccccagcacaggggaagggacccarttctacctgtttgagaatgtggacaatgcccagcagttcaagcagctctaccgggccaggatgaacgccctggacctgaacatgaagaccaaagagagga

SEQ ID NO: 37824 - DNA, 201 bp, Homo sapiens; identical to SEQ ID NO: 37820

SEQ ID NO: 37825 - DNA, 201 bp, Homo sapiens; identical to SEQ ID NO: 37821

SEQ ID NO: 37826 - DNA, 201 bp, Homo sapiens; identical to SEQ ID NO: 37822

SEQ ID NO: 37827 - DNA, 201 bp, Homo sapiens; identical to SEQ ID NO: 37823

SEQ ID NO: 37828 - DNA, 201 bp, Homo sapiens; identical to SEQ ID NO: 37818

SEQ ID NO: 37829 - DNA, 170 bp, Homo sapiens; identical to SEQ ID NO: 37819

SEQ ID NO: 37830 - DNA, 201 bp, Homo sapiens; identical to SEQ ID NO: 37820

SEQ ID NO: 37831 - DNA, 201 bp, Homo sapiens; identical to SEQ ID NO: 37821

SEQ ID NO: 37832 - DNA, 201 bp, Homo sapiens; identical to SEQ ID NO: 37822

SEQ ID NO: 37833 - DNA, 201 bp, Homo sapiens; identical to SEQ ID NO: 37823

SEQ ID NO: 37834 - DNA, 201 bp, Homo sapiens; identical to SEQ ID NO: 37818

SEQ ID NO: 37835 - DNA, 170 bp, Homo sapiens; identical to SEQ ID NO: 37819

SEQ ID NO: 37836 - DNA, 201 bp, Homo sapiens; identical to SEQ ID NO: 37820

SEQ ID NO: 37837 - DNA, 201 bp, Homo sapiens; identical to SEQ ID NO: 37821

SEQ ID NO: 37838 - DNA, 201 bp, Homo sapiens; identical to SEQ ID NO: 37822

SEQ ID NO: 37839 - DNA, 201 bp, Homo sapiens; identical to SEQ ID NO: 37823

SEQ ID NO: 37840 - DNA, 201 bp, Homo sapiens
gctcagaacctgaggacccagtcacggagcggtcggccttcacggagcgggatgctgggagcgggctggtgacgcgtctccgtgagcggccagccctgctsgtcagcagcacgagctggacagaggacgaagacttctccatcctgctggcagctttagaaaagtttgaacaactgactcttgatggacacaaccttcctt

SEQ ID NO: 37841 - DNA, 201 bp, Homo sapiens
ggcacatcagggctgtgaccgtctacgacaagcccgcatctttctttaaagagacacctctggacctgcagcaccggctcttcatgaagctgggcagcatrcactctccgttcagggcccgctcagaacctgaggacccagtcacggagcggtcggccttcacggagcgggatgctgggagcgggctggtgacgcgtctcc

SEQ ID NO: 37842 - DNA, 201 bp, Homo sapiens
ccgaggactaccccctgcttctagggtcggcggacctgggtgtctgtctgcacacgtcctccagtggcctggacctgcccatgaaggtggtggacatgttygggtgctgtttgcctgtgtgtgctgtgaacttcaagtgtttacatgagctggtgaaacatgaagaaaatggcctggtctttgaggactcagaggaactgg

SEQ ID NO: 37843 - DNA, 201 bp, Homo sapiens
tggttatggacacataactcctgggccagaggctataaaaccccaggacccctgctgtccttcccgcagcttcttcttggagtctcagggcaaaccctttygagcagcacctcccagtggccagaagctgaaatgacagcagtggtactgcctggtaaaagaattggttctgtgacccgggaagctttggttggccttgat

SEQ ID NO: 37844 - DNA, 201 bp, Homo sapiens
tgggtgcagactgtgctccctttggttatggacacataactcctgggccagaggctataaaaccccaggacccctgctgtccttcccgcagcttcttcttrgagtctcagggcaaaccctttcgagcagcacctcccagtggccagaagctgaaatgacagcagtggtactgcctggtaaaagaattggttctgtgacccg

SEQ ID NO: 37845 - DNA, 201 bp, Homo sapiens
ttgaggactcagaggaactggcagctcagctgcagatgcttttctcaaactttcctgatcctgcgggcaagctaaaccagttccggaagaacctgcgggartcgcagcagctccgatgggatgagagctgggtgcagactgtgctccctttggttatggacacataactcctgggccagaggctataaaaccccaggaccc

SEQ ID NO: 37846 - DNA, 201 bp, Homo sapiens
agctcagctgcagatgcttttctcaaactttcctgatcctgcgggcaagctaaaccagttccggaagaacctgcgggagtcgcagcagctccgatgggatkagagctgggtgcagactgtgctccctttggttatggacacataactcctgggccagaggctataaaaccccaggacccctgctgtccttcccgcagcttc

SEQ ID NO: 37847 - DNA, 201 bp, Homo sapiens
tggcagctttagaaaagtttgaacaactgactcttgatggacacaaccttccttctctcgtctgtgtgataacaggcaaagggcctctgagggagtattayagccgcctcatccaccagaagcacttccagcacatccaggtctgcaccccctggctggaggccgaggactaccccctgcttctagggtcggcggacctgg

SEQ ID NO: 37848 - DNA, 201 bp, Homo sapiens
agggcaaaccctttcgagcagcacctcccagtggccagaagctgaaatgacagcagtggtactgcctggtaaaagaattggttctgtgacccgggaagctktggttggccttgatttcttctctggaggcttggaaacgcttcctctcttcttctgttcttcacgccccatgcccctgctagcgtattactgttctgtgac

SEQ ID NO: 37849 - DNA, 201 bp, Homo sapiens
ccacctgaacctgtgtgttaccaatgctatgcgagaagacctggcggataactggcacatcagggctgtgaccgtctacgacaagcccgcatctttctttmaagagacacctctggacctgcagcaccggctcttcatgaagctgggcagcatgcactctccgttcagggcccgctcagaacctgaggacccagtcacgga

SEQ ID NO: 37850 - DNA, 201 bp, Homo sapiens
tgaacctgtgtgttaccaatgctatgcgagaagacctggcggataactggcacatcagggctgtgaccgtctacgacaagcccgcatctttctttaaagasacacctctggacctgcagcaccggctcttcatgaagctgggcagcatgcactctccgttcagggcccgctcagaacctgaggacccagtcacggagcggt

SEQ ID NO: 37851 - DNA, 201 bp, Homo sapiens
gtccttcccgcagcttcttcttggagtctcagggcaaaccctttcgagcagcacctcccagtggccagaagctgaaatgacagcagtggtactgcctggtraaagaattggttctgtgacccgggaagctttggttggccttgatttcttctctggaggcttggaaacgcttcctctcttcttctgttcttcacgccccat

SEQ ID NO: 37852 - DNA, 201 bp, Homo sapiens
cccctgctgtccttcccgcagcttcttcttggagtctcagggcaaaccctttcgagcagcacctcccagtggccagaagctgaaatgacagcagtggtacygcctggtaaaagaattggttctgtgacccgggaagctttggttggccttgatttcttctctggaggcttggaaacgcttcctctcttcttctgttcttca

SEQ ID NO: 37853 - DNA, 201 bp, Homo sapiens
cttcccgcagcttcttcttggagtctcagggcaaaccctttcgagcagcacctcccagtggccagaagctgaaatgacagcagtggtactgcctggtaaawgaattggttctgtgacccgggaagctttggttggccttgatttcttctctggaggcttggaaacgcttcctctcttcttctgttcttcacgccccatgcc

SEQ ID NO: 37854 - DNA, 201 bp, Homo sapiens
caggacccctgctgtccttcccgcagcttcttcttggagtctcagggcaaaccctttcgagcagcacctcccagtggccagaagctgaaatgacagcagtrgtactgcctggtaaaagaattggttctgtgacccgggaagctttggttggccttgatttcttctctggaggcttggaaacgcttcctctcttcttctgtt

SEQ ID NO: 37855 - DNA, 201 bp, Homo sapiens
ccctgctgtccttcccgcagcttcttcttggagtctcagggcaaaccctttcgagcagcacctcccagtggccagaagctgaaatgacagcagtggtactrcctggtaaaagaattggttctgtgacccgggaagctttggttggccttgatttcttctctggaggcttggaaacgcttcctctcttcttctgttcttcac

SEQ ID NO: 37856 - DNA, 201 bp, Homo sapiens
gacccctgctgtccttcccgcagcttcttcttggagtctcagggcaaaccctttcgagcagcacctcccagtggccagaagctgaaatgacagcagtggtrctgcctggtaaaagaattggttctgtgacccgggaagctttggttggccttgatttcttctctggaggcttggaaacgcttcctctcttcttctgttctt

SEQ ID NO: 37857 - DNA, 201 bp, Homo sapiens
tccctttggttatggacacataactcctgggccagaggctataaaaccccaggacccctgctgtccttcccgcagcttcttcttggagtctcagggcaaaycctttcgagcagcacctcccagtggccagaagctgaaatgacagcagtggtactgcctggtaaaagaattggttctgtgacccgggaagctttggttggc

SEQ ID NO: 37858 - DNA, 201 bp, Homo sapiens
gcagctgcagtgggcttggctttgtgaggaactgagtgtgtccacgttgggggaacatcatacttgatacacacgtttttatttgcacaaagaaaatgctrtttttggagccagaattttcatgtctgatttatggtgattttcttaagaaccagaactgctggcagaaagggggcacccacacgcttagatagccgatgt

SEQ ID NO: 37859 - DNA, 201 bp, Homo sapiens
aactgactcttgatggacacaaccttccttctctcgtctgtgtgataacaggcaaagggcctctgagggagtattatagccgcctcatccaccagaagcayttccagcacatccaggtctgcaccccctggctggaggccgaggactaccccctgcttctagggtcggcggacctgggtgtctgtctgcacacgtcctcca

SEQ ID NO: 37860 - DNA, 201 bp, Homo sapiens
agcgggatgctgggagcgggctggtgacgcgtctccgtgagcggccagccctgctggtcagcagcacgagctggacaggtctgcaggacccctggggcacytgggaggacgaagacttctccatcctgctggcagctttagaaaagtttgaacaactgactcttgatggacacaaccttccttctctcgtctgtgtgataa

SEQ ID NO: 37861 - DNA, 201 bp, Homo sapiens
gctcagaacctgaggacccagtcacggagcggtcggccttcacggagcgggatgctgggagcgggctggtgacgcgtctccgtgagcggccagccctgctsgtcagcagcacgagctggacaggtctgcaggacccctggggcacttgggaggacgaagacttctccatcctgctggcagctttagaaaagtttgaacaac

SEQ ID NO: 37862 - DNA, 201 bp, Homo sapiens; identical to SEQ ID NO: 37841

SEQ ID NO: 37863 - DNA, 201 bp, Homo sapiens; identical to SEQ ID NO: 37842

SEQ ID NO: 37864 - DNA, 201 bp, Homo sapiens; identical to SEQ ID NO: 37844

SEQ ID NO: 37865 - DNA, 201 bp, Homo sapiens; identical to SEQ ID NO: 37843

SEQ ID NO: 37866 - DNA, 201 bp, Homo sapiens; identical to SEQ ID NO: 37845

SEQ ID NO: 37867 - DNA, 201 bp, Homo sapiens; identical to SEQ ID NO: 37846

SEQ ID NO: 37868 - DNA, 201 bp, Homo sapiens; identical to SEQ ID NO: 37847

SEQ ID NO: 37869 - DNA, 201 bp, Homo sapiens; identical to SEQ ID NO: 37848

SEQ ID NO: 37870 - DNA, 201 bp, Homo sapiens; identical to SEQ ID NO: 37850

SEQ ID NO: 37871 - DNA, 201 bp, Homo sapiens; identical to SEQ ID NO: 37849

SEQ ID NO: 37872 - DNA, 201 bp, Homo sapiens; identical to SEQ ID NO: 37851

SEQ ID NO: 37873 - DNA, 201 bp, Homo sapiens; identical to SEQ ID NO: 37852

SEQ ID NO: 37874 - DNA, 201 bp, Homo sapiens; identical to SEQ ID NO: 37853

SEQ ID NO: 37875 - DNA, 201 bp, Homo sapiens; identical to SEQ ID NO: 37855

SEQ ID NO: 37876 - DNA, 201 bp, Homo sapiens; identical to SEQ ID NO: 37854

SEQ ID NO: 37877 - DNA, 201 bp, Homo sapiens; identical to SEQ ID NO: 37856

SEQ ID NO: 37878 - DNA, 201 bp, Homo sapiens; identical to SEQ ID NO: 37857

SEQ ID NO: 37879 - DNA, 201 bp, Homo sapiens; identical to SEQ ID NO: 37858

SEQ ID NO: 37880 - DNA, 201 bp, Homo sapiens; identical to SEQ ID NO: 37859

SEQ ID NO: 37881 - DNA, 201 bp, Homo sapiens
cggtaatatacaggtggaatgacatggggaatatcactcataacaagtcgaccattctagtggagctcatcaacaaagaagagactgccctctttcacacrgatgatatcgaaaatgccaagtatatttctcggttgtttgccacacgacacaagttttacaaacaaaacaaaatctgcactgaacagtcaaattctccac

SEQ ID NO: 37882 - DNA, 201 bp, Homo sapiens
atgcaaccacgggcttgaaggtcaagcaccttttgtctgggcaagaaaggacggtgtggcatttacaatatactgactggccagatcacggctgtccagargatgtccaaggatttttatcctacttggaggagatccagtcggtccgtcgccataccaacagcatgctggaaggcaccaagaaccggcacccgcccatcg

SEQ ID NO: 37883 - DNA, 201 bp, Homo sapiens
attgcaactctcacaacagcctggacttaaattatttaaatggcactgtcaccaatggcagcgtgtgtagcgttcacagcgtcaactccctcaactgctckcaaagtttcatccaggcctcccctgtatcctccaacctcagtatccctgggagtgacatcatgcgggccgactacatcccgagccaccggcacagcgcga

SEQ ID NO: 37884 - DNA, 201 bp, Homo sapiens
atccagactatcgctcagtacaagtttgtctaccaagtcctcatccagttcctccaaaactccagactcatttaatcaccccaatccagctcctggaggarggacccagctccatcgcgctggaggagagtcacctccagacaacatctgctccccccacaggggtgcaggtggctggcagcaaacaggctctctgaagac

SEQ ID NO: 37885 - DNA, 201 bp, Homo sapiens
tctatgtgccaaatgtgtcatggcttcagcaagaggccacaagatatcagtattacctgcaagtcaaaaaagatgtgcttgaagggcgattacgatgtacrttggaccaggtgattcggctagccggcctagctgtgcaagctgattttggagactataatcagtttgattctcaagatttcctcagagagtatgtgctat

SEQ ID NO: 37886 - DNA, 191 bp, Homo sapiens
gctggagtgcagtggcgcaatctcggctcactgcaacctccgcctcccagattcaagtgattctcctgcctcagcctcccgagtagctggrattataggcacccaccaccacacccagctaatttttgtatttttagtagagacaggatttcaccatgttggccaggctggtcttgaactcctggtctcaa

SEQ ID NO: 37887 - DNA, 201 bp, Homo sapiens
taatttttgtatttttagtagagacaggatttcaccatgttggccaggctggtcttgaactcctggtctcaagtgatctgccctcctcagcctcccaaagygctgggattacaggcgtgagccaccgcgcctggccaactctctcacattttaaaacactactttctgctacaaaagtggcgtgtacaatgggaaatgtca

SEQ ID NO: 37888 - DNA, 188 bp, Homo sapiens
aaatatccgtttttttgagcacttttcccgtgtagactcaacagggtctccctctgttgcccaggctggagtgcagtggtgcgatcatggctcactgcagmcttgaactcctgagctcaagcaatcctgctgcctcagttctccgagtagctgggaccacatgtgtaagtcactaagcctggctaatt

SEQ ID NO: 37889 - DNA, 201 bp, Homo sapiens
agtggcgtgtacaatgggaaatgtcacaaataaataccccaggaagacactcaaaagcccctgtgatgcccccccagccctggtcctggggtgtcggcctygggtctccctcctggtgcggcatccttttaccactgcagttaactgggaggaaacgatccccatgcattgctctaaatcccgctggatctggttttgggg

SEQ ID NO: 37890 - DNA, 201 bp, Homo sapiens
ctgccttcaggcccatggatgggcaaagcatctttcgagagcttgcctgccaaccctcagagtcacatacacgaaggtctcctggagctcagaaggtcagrcacaaagtcactccttgaccctatttattgaaatatccgtttttttgagcacttttcccgtgtagactcaacagggtctccctctgttgcccaggctgga

SEQ ID NO: 37891 - DNA, 201 bp, Homo sapiens
tttgtaagcaaggaggggagaggcttccaccgaagttgggcccagctcaggtgtcctgagtggtgggaatctgtgcagggcccaggcgcatttcctgcccsggagcaggaatgctttacagatgttggagctgcctcaaggcatggccaggaggggccggagaagcagaaccagctgcataggggatgctgggctggtgcc

SEQ ID NO: 37892 - DNA, 201 bp, Homo sapiens
ataaataccccaggaagacactcaaaagcccctgtgatgcccccccagccctggtcctggggtgtcggcctcgggtctccctcctggtgcggcatccttthaccactgcagttaactgggaggaaacgatccccatgcattgctctaaatcccgctggatctggttttgggggtgctgggctgctgcccaggagactggaa

SEQ ID NO: 37893 - DNA, 201 bp, Homo sapiens
caggcttcaagagcagaacccagcagagcgccccggcttcctcccatcgccctcctactccctctcctcccctctcctcccctcccctcccatccttttgkaagcaaggaggggagaggcttccaccgaagttgggcccagctcaggtgtcctgagtggtgggaatctgtgcagggcccaggcgcatttcctgcccgggag

SEQ ID NO: 37894 - DNA, 201 bp, Homo sapiens
attgacatctcgtccaagcaggtggagaacgccggggccatcggcccgtcccggttcgggctcaagagggccgaggtgttgggccacaagacgccagaacyggcccctcggaggacggagatcaccatcgtcaaaccccaggagtcagcccaccggaggatggagccccctgcctccaaggtccccgaggtgcccactgcc

SEQ ID NO: 37895 - DNA, 193 bp, Homo sapiens
aaatatccgtttttttgagcacttttcccgtgtagactcaacagggtctccctctgttgcccaggctggagtgcagtggtgcgatcatggctcactgcagmcttgaactcctgagctcaagcaatcctgctgcctcagttctccgagtagctgggaccacatgtgtaagtcactaagcctggctaattaaaaa

SEQ ID NO: 37896 - DNA, 201 bp, Homo sapiens
acttcgaggcgtaccgtgtgaagcgcctcaacgagggcagcagcgccatggccaacggcgtggaggagaaggagccagaagccccggagatgtagacgccrccctgcccacccccgggatcctgcccccaagtcatttccgtcccccccccaggccctcccaccaccccattttattttatatgattttctccatttgtca

SEQ ID NO: 37897 - DNA, 201 bp, Homo sapiens
gcaggggtgagagcacccactgaattgacatgaccctctgtccccaggcctggctccccgagggctcagaagagcagcttcggtgtgcagatcatccgtcygtgtggggttctcagtgccggaggccttggggtgggggccaggcctcgcacttgcagaggagcccagtgggctgcacgctcccctccatccccatcggcc

SEQ ID NO: 37898 - DNA, 201 bp, Homo sapiens
aggcgtcttcatctccctgccatccccctctcacgccacccccgcccccaccgggctgcaggtgctgctgatgcgctgggatctgattgaggataaaaagraaggagagatgacccctaccccctcatcccccagttttgaaaaggtctaagcaagtgagtctggtggaggagctgagggagggagccatggaaggtgcca

SEQ ID NO: 37899 - DNA, 201 bp, Homo sapiens
gccatccgcagactgcttggccagatgcggggacaggctggaatgagggaggcgtcttcatctccctgccatccccctctcacgccacccccgcccccacygggctgcaggtgctgctgatgcgctgggatctgattgaggataaaaaggaaggagagatgacccctaccccctcatcccccagttttgaaaaggtctaag

SEQ ID NO: 37900 - DNA, 201 bp, Homo sapiens
atgcggggacaggctggaatgagggaggcgtcttcatctccctgccatccccctctcacgccacccccgcccccaccgggctgcaggtgctgctgatgcgstgggatctgattgaggataaaaaggaaggagagatgacccctaccccctcatcccccagttttgaaaaggtctaagcaagtgagtctggtggaggagctg

SEQ ID NO: 37901 - DNA, 201 bp, Homo sapiens; identical to SEQ ID NO: 37893

SEQ ID NO: 37902 - DNA, 201 bp, Homo sapiens
tcagagtggcgtgagctgcccggcgcctgccctgcccaagtgaccagggaagtgtgtgtgtgtccatgtgtatgcgtgtccgtctgtctgtctagtgtctrggtttggcccaagactgggctgtagttacattaatgcccagccagccacccctgccactcacccctcctggcccaggccttgctgactctctgagctggg

SEQ ID NO: 37903 - DNA, 201 bp, Homo sapiens
ggaggagctgagggagggagccatggaaggtgccagaaggaaggttggcgggggcacgtgtgggccgtggcttgggctggtcagagtggcgtgagctgccyggcgcctgccctgcccaagtgaccagggaagtgtgtgtgtgtccatgtgtatgcgtgtccgtctgtctgtctagtgtctgggtttggcccaagactgggc

SEQ ID NO: 37904 - DNA, 201 bp, Homo sapiens
atgtgtatgcgtgtccgtctgtctgtctagtgtctgggtttggcccaagactgggctgtagttacattaatgcccagccagccacccctgccactcacccytcctggcccaggccttgctgactctctgagctggggaggtgggaggccaggcgagcctgactctgttgatctacccccaccgcgcctggccaactctctc

SEQ ID NO: 37905 - DNA, 201 bp, Homo sapiens
gctccccgagggctcagaagagcagcttcggtgtgcagatcatccgtctgtgtggggttctcagtgccggaggccttggggtgggggccaggcctcgcacktgcagaggagcccagtgggctgcacgctcccctccatccccatcggccctgtcccctggagtgtgtcagagcccaggggagaatgcagcccaccaggagc

SEQ ID NO: 37906 - DNA, 201 bp, Homo sapiens
cagggtcccctgccaccgactgcccagccactccaagccccctggcagctgcccctcctggagcagaaagtgcctttatctcagccatccgcagactgctyggccagatgcggggacaggctggaatgagggaggcgtcttcatctccctgccatccccctctcacgccacccccgcccccaccgggctgcaggtgctgct

SEQ ID NO: 37907 - DNA, 201 bp, Homo sapiens
tgaggataaaaaggaaggagagatgacccctaccccctcatcccccagttttgaaaaggtctaagcaagtgagtctggtggaggagctgagggagggagcyatggaaggtgccagaaggaaggttggcgggggcacgtgtgggccgtggcttgggctggtcagagtggcgtgagctgcccggcgcctgccctgcccaagtg

SEQ ID NO: 37908 - DNA, 201 bp, Homo sapiens; identical to SEQ ID NO: 37891

SEQ ID NO: 37909 - DNA, 201 bp, Homo sapiens; identical to SEQ ID NO: 37889

SEQ ID NO: 37910 - DNA, 201 bp, Homo sapiens
tgagggaggcgtcttcatctccctgccatccccctctcacgccacccccgcccccaccgggctgcaggtgctgctgatgcgctgggatctgattgaggatraaaaggaaggagagatgacccctaccccctcatcccccagttttgaaaaggtctaagcaagtgagtctggtggaggagctgagggagggagccatggaag

SEQ ID NO: 37911 - DNA, 201 bp, Homo sapiens; identical to SEQ ID NO: 37892

SEQ ID NO: 37912 - DNA, 201 bp, Homo sapiens
gacgcacatgcagaacatcaaggacatcaccagcagcatccacttcgaggcgtaccgtgtgaagcgcctcaacgagggcagcagcgccatggccaacggcrtggaggagaaggagccagaagccccggagatgtagacgccaccctgcccacccccgggatcctgcccccaagtcatttccgtcccccccccaggccctcc

SEQ ID NO: 37913 - DNA, 201 bp, Homo sapiens
agcaagtgagtctggtggaggagctgagggagggagccatggaaggtgccagaaggaaggttggcgggggcacgtgtgggccgtggcttgggctggtcagrgtggcgtgagctgcccggcgcctgccctgcccaagtgaccagggaagtgtgtgtgtgtccatgtgtatgcgtgtccgtctgtctgtctagtgtctgggtt

SEQ ID NO: 37914 - DNA, 201 bp, Homo sapiens; identical to SEQ ID NO: 37890

SEQ ID NO: 37915 - DNA, 201 bp, Homo sapiens
aggaggtcgagacacccaactccaccccaccccggagggtccagactcccctactccgagccactgtggccagctccacccagaaattccaggacctgggygtgaagaactcagaaccctcggcccgccatgtggactccctaagccaacgctcccccaaggcgtccctgcggagggtggagctctcgggccccaaggcgg

SEQ ID NO: 37916 - DNA, 201 bp, Homo sapiens; identical to SEQ ID NO: 37894

SEQ ID NO: 37917 - DNA, 193 bp, Homo sapiens; identical to SEQ ID NO: 37895

SEQ ID NO: 37918 - DNA, 201 bp, Homo sapiens; identical to SEQ ID NO: 37896

SEQ ID NO: 37919 - DNA, 201 bp, Homo sapiens; identical to SEQ ID NO: 37897

SEQ ID NO: 37920 - DNA, 201 bp, Homo sapiens; identical to SEQ ID NO: 37898

SEQ ID NO: 37921 - DNA, 201 bp, Homo sapiens; identical to SEQ ID NO: 37899

SEQ ID NO: 37922 - DNA, 201 bp, Homo sapiens; identical to SEQ ID NO: 37900

SEQ ID NO: 37923 - DNA, 201 bp, Homo sapiens; identical to SEQ ID NO: 37893

SEQ ID NO: 37924 - DNA, 201 bp, Homo sapiens; identical to SEQ ID NO: 37902

SEQ ID NO: 37925 - DNA, 201 bp, Homo sapiens; identical to SEQ ID NO: 37903

SEQ ID NO: 37926 - DNA, 201 bp, Homo sapiens; identical to SEQ ID NO: 37904

SEQ ID NO: 37927 - DNA, 201 bp, Homo sapiens; identical to SEQ ID NO: 37905

SEQ ID NO: 37928 - DNA, 201 bp, Homo sapiens; identical to SEQ ID NO: 37906

SEQ ID NO: 37929 - DNA, 201 bp, Homo sapiens; identical to SEQ ID NO: 37907

SEQ ID NO: 37930 - DNA, 201 bp, Homo sapiens; identical to SEQ ID NO: 37891

SEQ ID NO: 37931 - DNA, 201 bp, Homo sapiens; identical to SEQ ID NO: 37889

SEQ ID NO: 37932 - DNA, 201 bp, Homo sapiens; identical to SEQ ID NO: 37910

SEQ ID NO: 37933 - DNA, 201 bp, Homo sapiens; identical to SEQ ID NO: 37892

SEQ ID NO: 37934 - DNA, 201 bp, Homo sapiens; identical to SEQ ID NO: 37912

SEQ ID NO: 37935 - DNA, 201 bp, Homo sapiens; identical to SEQ ID NO: 37913

SEQ ID NO: 37936 - DNA, 201 bp, Homo sapiens; identical to SEQ ID NO: 37890

SEQ ID NO: 37937 - DNA, 201 bp, Homo sapiens; identical to SEQ ID NO: 37915

SEQ ID NO: 37938 - DNA, 201 bp, Homo sapiens; identical to SEQ ID NO: 37894

SEQ ID NO: 37939 - DNA, 193 bp, Homo sapiens; identical to SEQ ID NO: 37895

SEQ ID NO: 37940 - DNA, 201 bp, Homo sapiens; identical to SEQ ID NO: 37896

SEQ ID NO: 37941 - DNA, 201 bp, Homo sapiens; identical to SEQ ID NO: 37897

SEQ ID NO: 37942 - DNA, 201 bp, Homo sapiens; identical to SEQ ID NO: 37898

SEQ ID NO: 37943 - DNA, 201 bp, Homo sapiens; identical to SEQ ID NO: 37899

SEQ ID NO: 37944 - DNA, 201 bp, Homo sapiens; identical to SEQ ID NO: 37900

SEQ ID NO: 37945 - DNA, 201 bp, Homo sapiens; identical to SEQ ID NO: 37893

SEQ ID NO: 37946 - DNA, 201 bp, Homo sapiens; identical to SEQ ID NO: 37902

SEQ ID NO: 37947 - DNA, 201 bp, Homo sapiens; identical to SEQ ID NO: 37903

SEQ ID NO: 37948 - DNA, 201 bp, Homo sapiens; identical to SEQ ID NO: 37904

SEQ ID NO: 37949 - DNA, 201 bp, Homo sapiens; identical to SEQ ID NO: 37905

SEQ ID NO: 37950 - DNA, 201 bp, Homo sapiens; identical to SEQ ID NO: 37906

SEQ ID NO: 37951 - DNA, 201 bp, Homo sapiens; identical to SEQ ID NO: 37907

SEQ ID NO: 37952 - DNA, 201 bp, Homo sapiens; identical to SEQ ID NO: 37891

SEQ ID NO: 37953 - DNA, 201 bp, Homo sapiens; identical to SEQ ID NO: 37889

SEQ ID NO: 37954 - DNA, 201 bp, Homo sapiens; identical to SEQ ID NO: 37910

SEQ ID NO: 37955 - DNA, 201 bp, Homo sapiens; identical to SEQ ID NO: 37892

SEQ ID NO: 37956 - DNA, 201 bp, Homo sapiens; identical to SEQ ID NO: 37912

SEQ ID NO: 37957 - DNA, 201 bp, Homo sapiens; identical to SEQ ID NO: 37913

SEQ ID NO: 37958 - DNA, 201 bp, Homo sapiens; identical to SEQ ID NO: 37890

SEQ ID NO: 37959 - DNA, 201 bp, Homo sapiens; identical to SEQ ID NO: 37915

SEQ ID NO: 37960 - DNA, 201 bp, Homo sapiens; identical to SEQ ID NO: 37894

SEQ ID NO: 37961 - DNA, 201 bp, Homo sapiens; identical to SEQ ID NO: 37896

SEQ ID NO: 37962 - DNA, 201 bp, Homo sapiens; identical to SEQ ID NO: 37897

SEQ ID NO: 37963 - DNA, 201 bp, Homo sapiens; identical to SEQ ID NO: 37898

SEQ ID NO: 37964 - DNA, 201 bp, Homo sapiens; identical to SEQ ID NO: 37899

SEQ ID NO: 37965 - DNA, 201 bp, Homo sapiens; identical to SEQ ID NO: 37900

SEQ ID NO: 37966 - DNA, 201 bp, Homo sapiens; identical to SEQ ID NO: 37903

SEQ ID NO: 37967 - DNA, 201 bp, Homo sapiens; identical to SEQ ID NO: 37902

SEQ ID NO: 37968 - DNA, 201 bp, Homo sapiens
atgtgtatgcgtgtccgtctgtctgtctagtgtctgggtttggcccaagactgggctgtagttacattaatgcccagccagccacccctgccactcacccytcctggcccaggccttgctgactctctgagctggggaggtgggaggccaggcgagcctgactctgttgatctacccgtgcctgggcccctcccctcagag

SEQ ID NO: 37969 - DNA, 201 bp, Homo sapiens; identical to SEQ ID NO: 37905

SEQ ID NO: 37970 - DNA, 201 bp, Homo sapiens
gagtgtatgagtgtgagtgtgtgtgcatggaagttggggcactgggcgtctgactccctccccacccaagagaggaaggacccctcaccacccccactggygagacagtttactttgccgacttgccatgtttttgccaaaaccaagattttgaaggaaatgagtggccagcgccagggcccaggccatgtggcctgccca

SEQ ID NO: 37971 - DNA, 201 bp, Homo sapiens; identical to SEQ ID NO: 37906

SEQ ID NO: 37972 - DNA, 201 bp, Homo sapiens
cgacttgccatgtttttgccaaaaccaagattttgaaggaaatgagtggccagcgccagggcccaggccatgtggcctgcccagcctcaatgtcacttggyggcggggtggggtgggggtgggcagcagcatcccagccttgagatgcttcactttccttctctgtaaccagactttgaaaaattgttcgtttcatcaggc

SEQ ID NO: 37973 - DNA, 201 bp, Homo sapiens; identical to SEQ ID NO: 37907

SEQ ID NO: 37974 - DNA, 201 bp, Homo sapiens; identical to SEQ ID NO: 37910

SEQ ID NO: 37975 - DNA, 201 bp, Homo sapiens; identical to SEQ ID NO: 37912

SEQ ID NO: 37976 - DNA, 201 bp, Homo sapiens
tgtgtgcatggaagttggggcactgggcgtctgactccctccccacccaagagaggaaggacccctcaccacccccactggcgagacagtttactttgccracttgccatgtttttgccaaaaccaagattttgaaggaaatgagtggccagcgccagggcccaggccatgtggcctgcccagcctcaatgtcacttggcg

SEQ ID NO: 37977 - DNA, 201 bp, Homo sapiens; identical to SEQ ID NO: 37913

SEQ ID NO: 37978 - DNA, 201 bp, Homo sapiens; identical to SEQ ID NO: 37915

SEQ ID NO: 37979 - DNA, 201 bp, Homo sapiens; identical to SEQ ID NO: 37894

SEQ ID NO: 37980 - DNA, 188 bp, Homo sapiens; identical to SEQ ID NO: 37888

SEQ ID NO: 37981 - DNA, 201 bp, Homo sapiens; identical to SEQ ID NO: 37896

SEQ ID NO: 37982 - DNA, 201 bp, Homo sapiens; identical to SEQ ID NO: 37897

SEQ ID NO: 37983 - DNA, 201 bp, Homo sapiens; identical to SEQ ID NO: 37898

SEQ ID NO: 37984 - DNA, 201 bp, Homo sapiens; identical to SEQ ID NO: 37899

SEQ ID NO: 37985 - DNA, 201 bp, Homo sapiens; identical to SEQ ID NO: 37900

SEQ ID NO: 37986 - DNA, 201 bp, Homo sapiens; identical to SEQ ID NO: 37893

SEQ ID NO: 37987 - DNA, 201 bp, Homo sapiens; identical to SEQ ID NO: 37902

SEQ ID NO: 37988 - DNA, 201 bp, Homo sapiens; identical to SEQ ID NO: 37903

SEQ ID NO: 37989 - DNA, 201 bp, Homo sapiens
atgtgtatgcgtgtccgtctgtctgtctagtgtctgggtttggcccaagactgggctgtagttacattaatgcccagccagccacccctgccactcacccytcctggcccaggccttgctgactctctgagctggggaggtgggaggccaggcgagcctgactctgttgatctacccgccaccgcgcctggccaactctct

SEQ ID NO: 37990 - DNA, 201 bp, Homo sapiens; identical to SEQ ID NO: 37905

SEQ ID NO: 37991 - DNA, 201 bp, Homo sapiens; identical to SEQ ID NO: 37906

SEQ ID NO: 37992 - DNA, 201 bp, Homo sapiens; identical to SEQ ID NO: 37907

SEQ ID NO: 37993 - DNA, 201 bp, Homo sapiens; identical to SEQ ID NO: 37891

SEQ ID NO: 37994 - DNA, 201 bp, Homo sapiens; identical to SEQ ID NO: 37889

SEQ ID NO: 37995 - DNA, 201 bp, Homo sapiens; identical to SEQ ID NO: 37910

SEQ ID NO: 37996 - DNA, 201 bp, Homo sapiens; identical to SEQ ID NO: 37892

SEQ ID NO: 37997 - DNA, 201 bp, Homo sapiens; identical to SEQ ID NO: 37912

SEQ ID NO: 37998 - DNA, 201 bp, Homo sapiens; identical to SEQ ID NO: 37913

SEQ ID NO: 37999 - DNA, 201 bp, Homo sapiens; identical to SEQ ID NO: 37890

SEQ ID NO: 38000 - DNA, 201 bp, Homo sapiens; identical to SEQ ID NO: 37915

SEQ ID NO: 38001 - DNA, 201 bp, Homo sapiens; identical to SEQ ID NO: 37894

SEQ ID NO: 38002 - DNA, 201 bp, Homo sapiens; identical to SEQ ID NO: 37915

SEQ ID NO: 38003 - DNA, 201 bp, Homo sapiens
agagcaagttatggccacagcatggtggtagacccctggggaacagtggtggcccgctgctctgaggggccaggcctctgccttgcccgaatagacctcarctatctgcgacagttgcgccgacacctgcctgtgttccagcaccgcaggcctgacctctatggcaatctgggtcacccactgtcttaagacttgacttct

SEQ ID NO: 38004 - DNA, 179 bp, Homo sapiens
ccggatcggaccctgcgaatggttttggctatatcttcatgtaggacctactccctatcccgtcggccgcggctgggcktcatcaccaggcctcctcacagattcctgtcccttctgtgtcctggactccggatacctcaactctcagtactttgtgctcagcccaggcccagagccat

SEQ ID NO: 38005 - DNA, 172 bp, Homo sapiens
ccggatcggaccctgcgaatggttttggctatatcttcatgtaggacctactccctatcccgtcggccgcgkctgggcttcatcaccaggcctcctcacagattcctgtcccttctgtgtcctggactccggatacctcaactctcagtactttgtgctcagcccaggccca

SEQ ID NO: 38006 - DNA, 201 bp, Homo sapiens
gctgctctgaggggccaggcctctgccttgcccgaatagacctcaactatctgcgacagttgcgccgacacctgcctgtgttccagcaccgcaggcctgasctctatggcaatctgggtcacccactgtcttaagacttgacttctgtgagtttagacctgcccctcccacccccaccctgccactatgagctagtgctca

SEQ ID NO: 38007 - DNA, 115 bp, Homo sapiens
aagggaaataaaggggaagcccaggcacatgggtgcagggaggggtggggaataccacttccactttcttttgtctttttctttaaaaaaaaaaaaaaaaaggcaggggtgtgat

SEQ ID NO: 38008 - DNA, 201 bp, Homo sapiens; identical to SEQ ID NO: 38003

SEQ ID NO: 38009 - DNA, 201 bp, Homo sapiens
gaccctgcgaatggttttggctatatcttcatgtaggacctactccctatcccgtcggccgcggtgaatcccacctgcggtgctttaacttgtgctgggcktcatcaccaggcctcctcacagattcctgtcccttctgtgtcctggactccggatacctcaactctcagtactttgtgctcagcccaggcccagagccat

SEQ ID NO: 38010 - DNA, 201 bp, Homo sapiens
cttcatcaccaggcctcctcacagattcctgtcccttctgtgtcctggactccggatacctcaactctcagtactttgtgctcagcccaggcccagagccktggctatctcctcttcctcctgcgaactgcccctggtggctgtgtgccaggtaacatcgacgccagacaagcaacagaactttaaaacatgtgctgagct

SEQ ID NO: 38011 - DNA, 201 bp, Homo sapiens; identical to SEQ ID NO: 38006

SEQ ID NO: 38012 - DNA, 115 bp, Homo sapiens; identical to SEQ ID NO: 38007

SEQ ID NO: 38013 - DNA, 201 bp, Homo sapiens; identical to SEQ ID NO: 38003

SEQ ID NO: 38014 - DNA, 195 bp, Homo sapiens
cgagttaccgcccactcgctgcggcgcttctggctccagaccgccctccggatcggaccctgcgaatggttttggctatatcttcatgctgggcktcatcaccaggcctcctcacagattcctgtcccttctgtgtcctggactccggatacctcaactctcagtactttgtgctcagcccaggcccagagccat

SEQ ID NO: 38015 - DNA, 188 bp, Homo sapiens
cgagttaccgcccactcgctgcggcgcttctggctccagaccgccctccggatcggaccctgcgaatggttttggctatatcttcatkctgggcttcatcaccaggcctcctcacagattcctgtcccttctgtgtcctggactccggatacctcaactctcagtactttgtgctcagcccaggccca

SEQ ID NO: 38016 - DNA, 201 bp, Homo sapiens; identical to SEQ ID NO: 38006

SEQ ID NO: 38017 - DNA, 115 bp, Homo sapiens; identical to SEQ ID NO: 38007

SEQ ID NO: 38018 - DNA, 201 bp, Homo sapiens; identical to SEQ ID NO: 38003

SEQ ID NO: 38019 - DNA, 201 bp, Homo sapiens
ggccctgattcaggctcacagtataaagagagaagtcagagaatcctagaaatttattgcttgaagaaggggttggtgtcctcatatctcaccttcctcakgctgggcttcatcaccaggcctcctcacagattcctgtcccttctgtgtcctggactccggatacctcaactctcagtactttgtgctcagcccaggccc

SEQ ID NO: 38020 - DNA, 201 bp, Homo sapiens
ttcaggctcacagtataaagagagaagtcagagaatcctagaaatttattgcttgaagaaggggttggtgtcctcatatctcaccttcctcaggctgggcktcatcaccaggcctcctcacagattcctgtcccttctgtgtcctggactccggatacctcaactctcagtactttgtgctcagcccaggcccagagccat

SEQ ID NO: 38021 - DNA, 201 bp, Homo sapiens; identical to SEQ ID NO: 38006

SEQ ID NO: 38022 - DNA, 115 bp, Homo sapiens; identical to SEQ ID NO: 38007

SEQ ID NO: 38023 - DNA, 201 bp, Homo sapiens
agtgtcaggtggaggatgtgctgcctatactcagcagctttggccatgccaagaccatcctcaatgccaatgccagccgcttcggccaggtcttctgcctytacctacagcaaggggtcatcgtgggagcctctgtgtctcattatctacttgagacctccagggtggtgtttcaggcccaggctgagcggagcttccatg

SEQ ID NO: 38024 - DNA, 201 bp, Homo sapiens
gccgcattgccctgaagagcctgcagcggctccacctgctaagccctctggaggagaaggggccccctggcctggaagtcaactatggctcagctgacaayccccagaccatctggtttgagctgccacaggcccaggagctgctatacaccactgtcttcctgatagacagcagtgcctcttgcactgagtggcccagca

SEQ ID NO: 38025 - DNA, 201 bp, Homo sapiens
cagcagcccgactgctgcgggtaccaccagagtgcctggagggggctgtcaccaggagggtcacggagacgccctatggccaggtctcgcgatccctgccygtggaaagtgccgttgatgccagggacgccctggccaaggcactgtattcccgcctcttccaccggcttctgaggagaaccaatgcacggctggcaccac

SEQ ID NO: 38026 - DNA, 201 bp, Homo sapiens
cgtcctgccccggatgcaggctcgcatgcgtgggttccaggccaggaagcggtacctccggcggcgggcagctttgggacagctgaacaccatcctgctgstggcccagcccctgctccagaggcggcagagactgcagcttgggcgttggcagggctggcatagcagcgaaagggccttggagagagtgccaagcatgga

SEQ ID NO: 38027 - DNA, 201 bp, Homo sapiens
ctgcagcctcctcagcttccaccgtggggacctcatcaagctgctgccggtggccaccctggagccaggctggcagtttggctctgccgggggccgttccrgactctttcctgccgacatagtgcagccggctgccgctcccgacttttccttctccaaggagcagaggagtggctggcacaagggtcagctgtccaacgg

SEQ ID NO: 38028 - DNA, 201 bp, Homo sapiens
tggaagctggcatcgtaatggatgggggagtgggtggaggatctgagggtcccctgggtaggttccgataccttggacaggtgggcctcatcctgacttaraactcggggaggggccactcttccttccccttcttccagcagcagctccaccaccctccaccttctgtcctcgacatgtgtcccagaaaacccagccatg

SEQ ID NO: 38029 - DNA, 201 bp, Homo sapiens
tgctatcagatcactgttctagaacctgcctcagcacagcccagccggcccacatgcaggccatgaggcaggggctgctatcacgtcaccagcaggcaaaraaaacagccagaccctctccaggacggcctggggccaaagcgggctgcaggaactcggctggggcacctgaggttgcccagtctgagggagatgcccacc

SEQ ID NO: 38030 - DNA, 201 bp, Homo sapiens
tgctgtccgtctcctgtggctgcccctctgcccgctcctgatggctcgccttgtctctccagcaagactgtgcactccttgcaggcaggggctgggctggrtgctgctcttgtgtcccacgtggtacttagttcaaggctgccccagcagatgcttaataaacagctcttcactttcctggcttctggtcttgctcctttg

SEQ ID NO: 38031 - DNA, 201 bp, Homo sapiens
caactgagaggagtgcaggccggggagagaagaggatgaggcctcccccggcccaagtctcacccacatggtctgccttggatgctatcagatcactgttytagaacctgcctcagcacagcccagccggcccacatgcaggccatgaggcaggggctgctatcacgtcaccagcaggcaaagaaaacagccagaccctct

SEQ ID NO: 38032 - DNA, 201 bp, Homo sapiens
ctgaggaaggaaaggggtttgaccactcccgaggctgccatgcggtgggaccaccctgctgtccgtctcctgtggctgcccctctgcccgctcctgatggmtcgccttgtctctccagcaagactgtgcactccttgcaggcaggggctgggctggatgctgctcttgtgtcccacgtggtacttagttcaaggctgcccc

SEQ ID NO: 38033 - DNA, 201 bp, Homo sapiens
gtgggctgcgactgctcaaggtgacccaaggccccggcctccgccccgaccagctgaagattctctgctcatacagcttcgcggaggtgctgggtgtggartgccggggcggctccaccctggagctgtcactgaagagcgagcagctggtgctgcacacagcccgggcaagggccatcgaggcgctggttgagctattcc

SEQ ID NO: 38034 - DNA, 201 bp, Homo sapiens
cctgcctgagactgaggaaggaaaggggtttgaccactcccgaggctgccatgcggtgggaccaccctgctgtccgtctcctgtggctgcccctctgcccsctcctgatggctcgccttgtctctccagcaagactgtgcactccttgcaggcaggggctgggctggatgctgctcttgtgtcccacgtggtacttagttc

SEQ ID NO: 38035 - DNA, 201 bp, Homo sapiens
gcatcctcctgtgtgggcacagtggctcagggaagacggaagccgccaaaaagatcatgcagttcctaagcagcctggagcaggatcagacggggaaccgrgagtgtcaggtggaggatgtgctgcctatactcagcagctttggccatgccaagaccatcctcaatgccaatgccagccgcttcggccaggtcttctgcc

SEQ ID NO: 38036 - DNA, 201 bp, Homo sapiens
agctgttagccgtgtcccaccgtgggctgcgactgctcaaggtgacccaaggccccggcctccgccccgaccagctgaagattctctgctcatacagcttygcggaggtgctgggtgtggaatgccggggcggctccaccctggagctgtcactgaagagcgagcagctggtgctgcacacagcccgggcaagggccatcg

SEQ ID NO: 38037 - DNA, 201 bp, Homo sapiens
ggggcaaggatgagatggatctgctctatgaactgctgaagctgtgccagcaggagaagctgagggatgagatttactgccaggttatcaagcaggtcacrggacacccccggccggaacactgcactcgaggctggagcttcctcagccttctcacaggcttcttccccccgtcgaccaggctgatgccctacctgacca

SEQ ID NO: 38038 - DNA, 201 bp, Homo sapiens
gacacagcccgtggaggaccagggggtctccacccagctactcgcgccctctggcagcgtgtgcttctcctacaccggcacaccctggaagttgttcctaygcaaggaggtgttctacccacgggagaacttcagccatccctactacctgaggctcctctgtgagcagatcctacgggacaccttctccgagtcctgtat

SEQ ID NO: 38039 - DNA, 201 bp, Homo sapiens
gcggctccaccctggagctgtcactgaagagcgagcagctggtgctgcacacagcccgggcaagggccatcgaggcgctggttgagctattcctgaacgascttaagaaggactccggctatgtcatcgccctgcgcagctacatcactgacaactgcagcctcctcagcttccaccgtggggacctcatcaagctgctgc

SEQ ID NO: 38040 - DNA, 201 bp, Homo sapiens
ctggtcttgctcctttggtgtctggctggggagggatggggctggggcaggacccctgggacagggcactggacactcaggtggcaccaggtttcttgtgmtcccagcgccctgcccacccttggagccaggcacacagtgacgactcggaggccaccagcctgtcctctgtggcctatgcctttctgcccgactcccaca

SEQ ID NO: 38041 - DNA, 201 bp, Homo sapiens
cagcagagcgtcgttgcttgacacagcccgtggaggaccagggggtctccacccagctactcgcgccctctggcagcgtgtgcttctcctacaccggcacrccctggaagttgttcctacgcaaggaggtgttctacccacgggagaacttcagccatccctactacctgaggctcctctgtgagcagatcctacgggaca

SEQ ID NO: 38042 - DNA, 201 bp, Homo sapiens
ctccaccagcgccaccactgcctctgcccgaggacccagggaccctttcagcagagcgtcgttgcttgacacagcccgtggaggaccagggggtctccacmcagctactcgcgccctctggcagcgtgtgcttctcctacaccggcacaccctggaagttgttcctacgcaaggaggtgttctacccacgggagaacttca

SEQ ID NO: 38043 - DNA, 201 bp, Homo sapiens
gccggcggatgcccccaccgggtgaaatgaaggctttcctgaaaggacaagcgattcgcctgcttcttattcacctgccggggggtgtggattataggacraatatccagactttcacagtagcagcagaagtgcaggaggagctgtgccggcaaatgggtatcacggagcctcaggaagtgcaggaattcgccctcttcc

SEQ ID NO: 38044 - DNA, 201 bp, Homo sapiens
cccagcctgactctcccacagaactttatccagcagcaggcgctaatcctggcccagcagatgacagcccaggccatgtccctgtccctggagcagcagaygcagcagcggcagcagcaggctcgggcctccgaggctgcgtcccaggcctcaccctcagccgtcacctccaagcccaggaagccccccacacccccggag

SEQ ID NO: 38045 - DNA, 201 bp, Homo sapiens
ccacccgaccccaggctccgcccaggccccacattagcacaagcccaggcatgggagaaacagctgctgaggaaataaaactccctggagaaaagggctgkgtgcacgcctgcatgccccacaacaacacaactttattcctctcccaaacatctgtcaggcctggccttcctgagcaggagctgagcaggaacagggcct

SEQ ID NO: 38046 - DNA, 201 bp, Homo sapiens
cttcgcggaggtgctgggtgtggaatgccggggcggctccaccctggagctgtcactgaagagcgagcagctggtgctgcacacagcccgggcaagggccmtcgaggcgctggttgagctattcctgaacgagcttaagaaggactccggctatgtcatcgccctgcgcagctacatcactgacaactgcagcctcctcag

SEQ ID NO: 38047 - DNA, 201 bp, Homo sapiens
gagaacttcagccatccctactacctgaggctcctctgtgagcagatcctacgggacaccttctccgagtcctgtatccggatttcccagaatgagcggcrgaaaatgaaagacctgctgggaggcttggaggtggacctggattctctcaccaccaccgaagacagcgtcaagaagcgcatcgtggtggccgctcgggac

SEQ ID NO: 38048 - DNA, 201 bp, Homo sapiens
cttccacacctgcatctcccgccagcgcgtcctgccccggatgcaggctcgcatgcgtgggttccaggccaggaagcggtacctccggcggcgggcagctytgggacagctgaacaccatcctgctggtggcccagcccctgctccagaggcggcagagactgcagcttgggcgttggcagggctggcatagcagcgaaag

SEQ ID NO: 38049 - DNA, 201 bp, Homo sapiens
gcaaggggtcatcgtgggagcctctgtgtctcattatctacttgagacctccagggtggtgtttcaggcccaggctgagcggagcttccatgttttttacragctgctggcagggctggactccatagagcgggagcggctctccctgcagggaccggagacttactactacctcaaccagggccaggcctgcaggctgca

SEQ ID NO: 38050 - DNA, 201 bp, Homo sapiens
ttctgaacccccaccggtccttgcctcttttttcacctgaggtccaggcaagctaccaccccaggaaggccctcagcaccactccacacatctttgccatygtggcatcagcctatgacctggctcagaatactgggcaggacccatgcatcctcctgtgtgggcacagtggctcagggaagacggaagccgccaaaaaga

SEQ ID NO: 38051 - DNA, 201 bp, Homo sapiens
ggggcggctccaccctggagctgtcactgaagagcgagcagctggtgctgcacacagcccgggcaagggccatcgaggcgctggttgagctattcctgaaygagcttaagaaggactccggctatgtcatcgccctgcgcagctacatcactgacaactgcagcctcctcagcttccaccgtggggacctcatcaagctgc

SEQ ID NO: 38052 - DNA, 201 bp, Homo sapiens
agcctgtcctctgtggcctatgcctttctgcccgactcccacagctacaccatgcaggaattcgcccggcgttacttccggaggtcccaggccttgctggkccagactgatggaggtgccgcaggaaaggacacggacagcctggtgcagtacaccaaggctcccatccaggagtcgctcctcagcctcagtgatgatgtg

SEQ ID NO: 38053 - DNA, 201 bp, Homo sapiens
gctgcgggtaccaccagagtgcctggagggggctgtcaccaggagggtcacggagacgccctatggccaggtctcgcgatccctgcccgtggaaagtgcckttgatgccagggacgccctggccaaggcactgtattcccgcctcttccaccggcttctgaggagaaccaatgcacggctggcaccaccaggggagggagg

SEQ ID NO: 38054 - DNA, 201 bp, Homo sapiens
cagcctgtcctctgtggcctatgcctttctgcccgactcccacagctacaccatgcaggaattcgcccggcgttacttccggaggtcccaggccttgctgrgccagactgatggaggtgccgcaggaaaggacacggacagcctggtgcagtacaccaaggctcccatccaggagtcgctcctcagcctcagtgatgatgt

SEQ ID NO: 38055 - DNA, 201 bp, Homo sapiens
cctgggacagggcactggacactcaggtggcaccaggtttcttgtgatcccagcgccctgcccacccttggagccaggcacacagtgacgactcggaggcyaccagcctgtcctctgtggcctatgcctttctgcccgactcccacagctacaccatgcaggaattcgcccggcgttacttccggaggtcccaggccttgc

SEQ ID NO: 38056 - DNA, 201 bp, Homo sapiens
tctcccgcttctttcctgtctcgggcgagagtggcagcgacgtgcagctgttagccgtgtcccaccgtgggctgcgactgctcaaggtgacccaaggcccyggcctccgccccgaccagctgaagattctctgctcatacagcttcgcggaggtgctgggtgtggaatgccggggcggctccaccctggagctgtcactga

SEQ ID NO: 38057 - DNA, 201 bp, Homo sapiens
tcctgtctcgggcgagagtggcagcgacgtgcagctgttagccgtgtcccaccgtgggctgcgactgctcaaggtgacccaaggccccggcctccgccccraccagctgaagattctctgctcatacagcttcgcggaggtgctgggtgtggaatgccggggcggctccaccctggagctgtcactgaagagcgagcagct

SEQ ID NO: 38058 - DNA, 201 bp, Homo sapiens
ctttctgcccgactcccacagctacaccatgcaggaattcgcccggcgttacttccggaggtcccaggccttgctgggccagactgatggaggtgccgcargaaaggacacggacagcctggtgcagtacaccaaggctcccatccaggagtcgctcctcagcctcagtgatgatgtgagcaagctggctgtagccagctt

SEQ ID NO: 38059 - DNA, 201 bp, Homo sapiens
cagtggctcagggaagacggaagccgccaaaaagatcatgcagttcctaagcagcctggagcaggatcagacggggaaccgggagtgtcaggtggaggatrtgctgcctatactcagcagctttggccatgccaagaccatcctcaatgccaatgccagccgcttcggccaggtcttctgcctctacctacagcaaggggt

SEQ ID NO: 38060 - DNA, 201 bp, Homo sapiens
cgccaccactgcctctgcccgaggacccagggaccctttcagcagagcgtcgttgcttgacacagcccgtggaggaccagggggtctccacccagctactygcgccctctggcagcgtgtgcttctcctacaccggcacaccctggaagttgttcctacgcaaggaggtgttctacccacgggagaacttcagccatccct

SEQ ID NO: 38061 - DNA, 201 bp, Homo sapiens
gtgtgggcacagtggctcagggaagacggaagccgccaaaaagatcatgcagttcctaagcagcctggagcaggatcagacggggaaccgggagtgtcagktggaggatgtgctgcctatactcagcagctttggccatgccaagaccatcctcaatgccaatgccagccgcttcggccaggtcttctgcctctacctaca

SEQ ID NO: 38062 - DNA, 201 bp, Homo sapiens
cagcagcagctccaccaccctccaccttctgtcctcgacatgtgtcccagaaaacccagccatgaggaccgctctgagaagggtctataggctttgcaagyagaaagaaaggtgggctgacctctgacctggattcagggggtgtctggggtcatccccaaagccaagtatggttggaaaggagaaggactgagaaaagac

SEQ ID NO: 38063 - DNA, 201 bp, Homo sapiens
ccctggagcagcagacgcagcagcggcagcagcaggctcgggcctccgaggctgcgtcccaggcctcaccctcagccgtcacctccaagcccaggaagccycccacacccccggagaagccacagcgtgacctgggatcagagggtggctgcctgagggtgaggaggagacctccgaggaggctgaagacaggccctatca

SEQ ID NO: 38064 - DNA, 201 bp, Homo sapiens; identical to SEQ ID NO: 38024

SEQ ID NO: 38065 - DNA, 201 bp, Homo sapiens; identical to SEQ ID NO: 38026

SEQ ID NO: 38066 - DNA, 201 bp, Homo sapiens; identical to SEQ ID NO: 38027

SEQ ID NO: 38067 - DNA, 201 bp, Homo sapiens
aggaacagggcctggctgcctctcctctgccacagctctgacctgggcaaggctggaagctggcatcgtaatggatgggggagtgggtgatcctgacttaraactcggggaggggccactcttccttccccttcttccagcagcagctccaccaccctccaccttctgtcctcgacatgtgtcccagaaaacccagccatg

SEQ ID NO: 38068 - DNA, 201 bp, Homo sapiens
gcccagcctgactctcccagcagacattgacctgttccctttctccagcttcgtcgccatcggctttcaggaaccgtccctgcccaggccagggcagccaytggcgaagcccctaacccagctggatggagacaaccctcagcgtgccctggacatcaacaaagtgatgctgcggctcctgggggacggatccctggagtc

SEQ ID NO: 38069 - DNA, 201 bp, Homo sapiens; identical to SEQ ID NO: 38029

SEQ ID NO: 38070 - DNA, 201 bp, Homo sapiens; identical to SEQ ID NO: 38031

SEQ ID NO: 38071 - DNA, 201 bp, Homo sapiens; identical to SEQ ID NO: 38030

SEQ ID NO: 38072 - DNA, 201 bp, Homo sapiens; identical to SEQ ID NO: 38032

SEQ ID NO: 38073 - DNA, 201 bp, Homo sapiens; identical to SEQ ID NO: 38033

SEQ ID NO: 38074 - DNA, 201 bp, Homo sapiens; identical to SEQ ID NO: 38034

SEQ ID NO: 38075 - DNA, 201 bp, Homo sapiens; identical to SEQ ID NO: 38036

SEQ ID NO: 38076 - DNA, 201 bp, Homo sapiens; identical to SEQ ID NO: 38038

SEQ ID NO: 38077 - DNA, 201 bp, Homo sapiens; identical to SEQ ID NO: 38037

SEQ ID NO: 38078 - DNA, 201 bp, Homo sapiens; identical to SEQ ID NO: 38039

SEQ ID NO: 38079 - DNA, 201 bp, Homo sapiens; identical to SEQ ID NO: 38040

SEQ ID NO: 38080 - DNA, 201 bp, Homo sapiens; identical to SEQ ID NO: 38041

SEQ ID NO: 38081 - DNA, 201 bp, Homo sapiens; identical to SEQ ID NO: 38042

SEQ ID NO: 38082 - DNA, 201 bp, Homo sapiens; identical to SEQ ID NO: 38043

SEQ ID NO: 38083 - DNA, 201 bp, Homo sapiens; identical to SEQ ID NO: 38045

SEQ ID NO: 38084 - DNA, 201 bp, Homo sapiens
cagctggccgtccagcagcagaactttatccagcagcaggcgctaatcctggcccagcagatgacagcccaggccatgtccctgtccctggagcagcagaygcagcagcggcagcagcaggctcgggcctccgaggctgcgtcccaggcctcaccctcagccgtcacctccaagcccaggaagccccccacacccccggag

SEQ ID NO: 38085 - DNA, 201 bp, Homo sapiens; identical to SEQ ID NO: 38046

SEQ ID NO: 38086 - DNA, 201 bp, Homo sapiens; identical to SEQ ID NO: 38047

SEQ ID NO: 38087 - DNA, 201 bp, Homo sapiens; identical to SEQ ID NO: 38048

SEQ ID NO: 38088 - DNA, 201 bp, Homo sapiens; identical to SEQ ID NO: 38051

SEQ ID NO: 38089 - DNA, 201 bp, Homo sapiens
ggacatcaacaaagtgatgctgcggctcctgggggacggatccctggagtcctggcagaggcagatcatgggcgcatacctggtgcggcaggggcagtgcyggccagggctgcggaatgagctctttagccagctggtggcccagctatggcagaacccagatgaacagcagagccagcgtggctgggccctcatggctgt

SEQ ID NO: 38090 - DNA, 201 bp, Homo sapiens; identical to SEQ ID NO: 38052

SEQ ID NO: 38091 - DNA, 201 bp, Homo sapiens
gtgggcagctagagggacctgtggctgggcagggctgaggtagcccgtgtgctgtgccggatcctttagacttgaccctgttggctacacagcatcagccytgggtattactcatccctgcgccctggccagaatgaaggaagcctctggggtggggggagggcacagccccatgtgcccacctcactgccacatgccccc

SEQ ID NO: 38092 - DNA, 201 bp, Homo sapiens; identical to SEQ ID NO: 38054

SEQ ID NO: 38093 - DNA, 201 bp, Homo sapiens; identical to SEQ ID NO: 38055

SEQ ID NO: 38094 - DNA, 201 bp, Homo sapiens; identical to SEQ ID NO: 38056

SEQ ID NO: 38095 - DNA, 201 bp, Homo sapiens; identical to SEQ ID NO: 38057

SEQ ID NO: 38096 - DNA, 201 bp, Homo sapiens
ggatggagacaaccctcagcgtgccctggacatcaacaaagtgatgctgcggctcctgggggacggatccctggagtcctggcagaggcagatcatgggcrcatacctggtgcggcaggggcagtgccggccagggctgcggaatgagctctttagccagctggtggcccagctatggcagaacccagatgaacagcagag

SEQ ID NO: 38097 - DNA, 201 bp, Homo sapiens; identical to SEQ ID NO: 38058

SEQ ID NO: 38098 - DNA, 201 bp, Homo sapiens; identical to SEQ ID NO: 38060

SEQ ID NO: 38099 - DNA, 201 bp, Homo sapiens
ccctggagcagcagacgcagcagcggcagcagcaggctcgggcctccgaggctgcgtcccaggcctcaccctcagccgtcacctccaagcccaggaagccycccacacccccggagaagccacagcgtgacctgggatcagagggtggctgcctgagggagacctccgaggaggctgaagacaggccctatcagcccaaga

SEQ ID NO: 38100 - DNA, 201 bp, Homo sapiens; identical to SEQ ID NO: 38023

SEQ ID NO: 38101 - DNA, 201 bp, Homo sapiens; identical to SEQ ID NO: 38024

SEQ ID NO: 38102 - DNA, 201 bp, Homo sapiens; identical to SEQ ID NO: 38025

SEQ ID NO: 38103 - DNA, 201 bp, Homo sapiens; identical to SEQ ID NO: 38026

SEQ ID NO: 38104 - DNA, 201 bp, Homo sapiens; identical to SEQ ID NO: 38027

SEQ ID NO: 38105 - DNA, 201 bp, Homo sapiens; identical to SEQ ID NO: 38067

SEQ ID NO: 38106 - DNA, 201 bp, Homo sapiens; identical to SEQ ID NO: 38029

SEQ ID NO: 38107 - DNA, 201 bp, Homo sapiens; identical to SEQ ID NO: 38030

SEQ ID NO: 38108 - DNA, 201 bp, Homo sapiens; identical to SEQ ID NO: 38031

SEQ ID NO: 38109 - DNA, 201 bp, Homo sapiens; identical to SEQ ID NO: 38032

SEQ ID NO: 38110 - DNA, 201 bp, Homo sapiens; identical to SEQ ID NO: 38033

SEQ ID NO: 38111 - DNA, 201 bp, Homo sapiens; identical to SEQ ID NO: 38034

SEQ ID NO: 38112 - DNA, 201 bp, Homo sapiens; identical to SEQ ID NO: 38035

SEQ ID NO: 38113 - DNA, 201 bp, Homo sapiens; identical to SEQ ID NO: 38036

SEQ ID NO: 38114 - DNA, 201 bp, Homo sapiens; identical to SEQ ID NO: 38037

SEQ ID NO: 38115 - DNA, 201 bp, Homo sapiens; identical to SEQ ID NO: 38038

SEQ ID NO: 38116 - DNA, 201 bp, Homo sapiens; identical to SEQ ID NO: 38039

SEQ ID NO: 38117 - DNA, 201 bp, Homo sapiens; identical to SEQ ID NO: 38040

SEQ ID NO: 38118 - DNA, 201 bp, Homo sapiens; identical to SEQ ID NO: 38041

SEQ ID NO: 38119 - DNA, 201 bp, Homo sapiens; identical to SEQ ID NO: 38042

SEQ ID NO: 38120 - DNA, 201 bp, Homo sapiens; identical to SEQ ID NO: 38043

SEQ ID NO: 38121 - DNA, 201 bp, Homo sapiens; identical to SEQ ID NO: 38044

SEQ ID NO: 38122 - DNA, 201 bp, Homo sapiens; identical to SEQ ID NO: 38045

SEQ ID NO: 38123 - DNA, 201 bp, Homo sapiens; identical to SEQ ID NO: 38046

SEQ ID NO: 38124 - DNA, 201 bp, Homo sapiens; identical to SEQ ID NO: 38047

SEQ ID NO: 38125 - DNA, 201 bp, Homo sapiens; identical to SEQ ID NO: 38048

SEQ ID NO: 38126 - DNA, 201 bp, Homo sapiens; identical to SEQ ID NO: 38049

SEQ ID NO: 38127 - DNA, 201 bp, Homo sapiens; identical to SEQ ID NO: 38050

SEQ ID NO: 38128 - DNA, 201 bp, Homo sapiens; identical to SEQ ID NO: 38051

SEQ ID NO: 38129 - DNA, 201 bp, Homo sapiens; identical to SEQ ID NO: 38052

SEQ ID NO: 38130 - DNA, 201 bp, Homo sapiens; identical to SEQ ID NO: 38053

SEQ ID NO: 38131 - DNA, 201 bp, Homo sapiens; identical to SEQ ID NO: 38054

SEQ ID NO: 38132 - DNA, 201 bp, Homo sapiens; identical to SEQ ID NO: 38055

SEQ ID NO: 38133 - DNA, 201 bp, Homo sapiens; identical to SEQ ID NO: 38056

SEQ ID NO: 38134 - DNA, 201 bp, Homo sapiens; identical to SEQ ID NO: 38057

SEQ ID NO: 38135 - DNA, 201 bp, Homo sapiens; identical to SEQ ID NO: 38058

SEQ ID NO: 38136 - DNA, 201 bp, Homo sapiens; identical to SEQ ID NO: 38059

SEQ ID NO: 38137 - DNA, 201 bp, Homo sapiens; identical to SEQ ID NO: 38060

SEQ ID NO: 38138 - DNA, 201 bp, Homo sapiens; identical to SEQ ID NO: 38061

SEQ ID NO: 38139 - DNA, 201 bp, Homo sapiens; identical to SEQ ID NO: 38063

SEQ ID NO: 38140 - DNA, 201 bp, Homo sapiens; identical to SEQ ID NO: 38024

SEQ ID NO: 38141 - DNA, 201 bp, Homo sapiens; identical to SEQ ID NO: 38026

SEQ ID NO: 38142 - DNA, 201 bp, Homo sapiens; identical to SEQ ID NO: 38027

SEQ ID NO: 38143 - DNA, 201 bp, Homo sapiens; identical to SEQ ID NO: 38067

SEQ ID NO: 38144 - DNA, 201 bp, Homo sapiens; identical to SEQ ID NO: 38068

SEQ ID NO: 38145 - DNA, 201 bp, Homo sapiens; identical to SEQ ID NO: 38029

SEQ ID NO: 38146 - DNA, 201 bp, Homo sapiens; identical to SEQ ID NO: 38031

SEQ ID NO: 38147 - DNA, 201 bp, Homo sapiens; identical to SEQ ID NO: 38030

SEQ ID NO: 38148 - DNA, 201 bp, Homo sapiens; identical to SEQ ID NO: 38032

SEQ ID NO: 38149 - DNA, 201 bp, Homo sapiens; identical to SEQ ID NO: 38033

SEQ ID NO: 38150 - DNA, 201 bp, Homo sapiens; identical to SEQ ID NO: 38034

SEQ ID NO: 38151 - DNA, 201 bp, Homo sapiens; identical to SEQ ID NO: 38036

SEQ ID NO: 38152 - DNA, 201 bp, Homo sapiens; identical to SEQ ID NO: 38037

SEQ ID NO: 38153 - DNA, 201 bp, Homo sapiens; identical to SEQ ID NO: 38038

SEQ ID NO: 38154 - DNA, 201 bp, Homo sapiens; identical to SEQ ID NO: 38039

SEQ ID NO: 38155 - DNA, 201 bp, Homo sapiens; identical to SEQ ID NO: 38040

SEQ ID NO: 38156 - DNA, 201 bp, Homo sapiens; identical to SEQ ID NO: 38041

SEQ ID NO: 38157 - DNA, 201 bp, Homo sapiens; identical to SEQ ID NO: 38042

SEQ ID NO: 38158 - DNA, 201 bp, Homo sapiens; identical to SEQ ID NO: 38043

SEQ ID NO: 38159 - DNA, 201 bp, Homo sapiens; identical to SEQ ID NO: 38045

SEQ ID NO: 38160 - DNA, 201 bp, Homo sapiens; identical to SEQ ID NO: 38084

SEQ ID NO: 38161 - DNA, 201 bp, Homo sapiens; identical to SEQ ID NO: 38046

SEQ ID NO: 38162 - DNA, 201 bp, Homo sapiens; identical to SEQ ID NO: 38047

SEQ ID NO: 38163 - DNA, 201 bp, Homo sapiens; identical to SEQ ID NO: 38048

SEQ ID NO: 38164 - DNA, 201 bp, Homo sapiens; identical to SEQ ID NO: 38089

SEQ ID NO: 38165 - DNA, 201 bp, Homo sapiens; identical to SEQ ID NO: 38051

SEQ ID NO: 38166 - DNA, 201 bp, Homo sapiens; identical to SEQ ID NO: 38052

SEQ ID NO: 38167 - DNA, 201 bp, Homo sapiens; identical to SEQ ID NO: 38091

SEQ ID NO: 38168 - DNA, 201 bp, Homo sapiens; identical to SEQ ID NO: 38054

SEQ ID NO: 38169 - DNA, 201 bp, Homo sapiens; identical to SEQ ID NO: 38055

SEQ ID NO: 38170 - DNA, 201 bp, Homo sapiens; identical to SEQ ID NO: 38056

SEQ ID NO: 38171 - DNA, 201 bp, Homo sapiens; identical to SEQ ID NO: 38057

SEQ ID NO: 38172 - DNA, 201 bp, Homo sapiens; identical to SEQ ID NO: 38096

SEQ ID NO: 38173 - DNA, 201 bp, Homo sapiens; identical to SEQ ID NO: 38058

SEQ ID NO: 38174 - DNA, 201 bp, Homo sapiens; identical to SEQ ID NO: 38060

SEQ ID NO: 38175 - DNA, 201 bp, Homo sapiens; identical to SEQ ID NO: 38063

SEQ ID NO: 38176 - DNA, 201 bp, Homo sapiens; identical to SEQ ID NO: 38024

SEQ ID NO: 38177 - DNA, 133 bp, Homo sapiens
gctggcagtttggctctgccgggggccgttccrgactctttcctgccgacatagtgcagccggctgccgctcccgacttttccttctccaaggagcagaggagtggctggcacaagggtcagctgtccaacgg

SEQ ID NO: 38178 - DNA, 201 bp, Homo sapiens; identical to SEQ ID NO: 38028

SEQ ID NO: 38179 - DNA, 201 bp, Homo sapiens; identical to SEQ ID NO: 38029

SEQ ID NO: 38180 - DNA, 201 bp, Homo sapiens; identical to SEQ ID NO: 38031

SEQ ID NO: 38181 - DNA, 201 bp, Homo sapiens; identical to SEQ ID NO: 38030

SEQ ID NO: 38182 - DNA, 201 bp, Homo sapiens; identical to SEQ ID NO: 38032

SEQ ID NO: 38183 - DNA, 201 bp, Homo sapiens; identical to SEQ ID NO: 38034

SEQ ID NO: 38184 - DNA, 201 bp, Homo sapiens; identical to SEQ ID NO: 38052

SEQ ID NO: 38185 - DNA, 201 bp, Homo sapiens; identical to SEQ ID NO: 38054

SEQ ID NO: 38186 - DNA, 201 bp, Homo sapiens; identical to SEQ ID NO: 38037

SEQ ID NO: 38187 - DNA, 201 bp, Homo sapiens; identical to SEQ ID NO: 38055

SEQ ID NO: 38188 - DNA, 201 bp, Homo sapiens; identical to SEQ ID NO: 38040

SEQ ID NO: 38189 - DNA, 201 bp, Homo sapiens; identical to SEQ ID NO: 38058

SEQ ID NO: 38190 - DNA, 201 bp, Homo sapiens; identical to SEQ ID NO: 38045

SEQ ID NO: 38191 - DNA, 201 bp, Homo sapiens; identical to SEQ ID NO: 38043

SEQ ID NO: 38192 - DNA, 201 bp, Homo sapiens; identical to SEQ ID NO: 38062

SEQ ID NO: 38193 - DNA, 201 bp, Homo sapiens
gccggccagggcctctgccaggttagaagtcaccatcgcgctcccccaggggctgtgccgcctgctgcctggcagcctccaggaaggccagctccttggcwtccttcttctggtttcgcgcctcatactccaacctgttggtgatgatccgctggacgatgaggtctgtggtgaggttgctgccactgtcaatctgacgga

SEQ ID NO: 38194 - DNA, 201 bp, Homo sapiens
ggaaagagcggagagcctgctgcaaaccaggcaccttgtaggcaggcaaggaggcagagtcctcaccagcccttccagagccaggccagttagagagggcrgccctgcagagtcctatgtccaaacgcagaaggcgcagaagcagagcagggggagggccggccagggcctctgccaggttagaagtcaccatcgcgctcc

SEQ ID NO: 38195 - DNA, 201 bp, Homo sapiens
ggacaccctctctgagcagctttgctggaaagagcggagagcctgctgcaaaccaggcaccttgtaggcaggcaaggaggcagagtcctcaccagcccttscagagccaggccagttagagagggcggccctgcagagtcctatgtccaaacgcagaaggcgcagaagcagagcagggggagggccggccagggcctctgc

SEQ ID NO: 38196 - DNA, 201 bp, Homo sapiens
cgctggacgatgaggtctgtggtgaggttgctgccactgtcaatctgacggaagatgccccttctcttgggctcctggtatgggtcggagccatccctgtmagggataatttctgtcttgccgtgacacaccaggtccaccttgaagtgacttaggagctctgctgtgaccgcgtacggggctccaatcaccacttctgac

SEQ ID NO: 38197 - DNA, 201 bp, Homo sapiens
ttgtaggcaggcaaggaggcagagtcctcaccagcccttccagagccaggccagttagagagggcggccctgcagagtcctatgtccaaacgcagaaggcrcagaagcagagcagggggagggccggccagggcctctgccaggttagaagtcaccatcgcgctcccccaggggctgtgccgcctgctgcctggcagcctc

SEQ ID NO: 38198 - DNA, 201 bp, Homo sapiens
agtcaggggaaggagcgagattccaacttcaacatctgtgacctcaagagggagacagagtctgggttccagggctgctttctcctggctaataataaatmtccagccagctggaggaaggaagggcaggctgggcccacctagcctttccctgctgcccaactggatggaaaataaaaggttcttgtattctcactgctt

SEQ ID NO: 38199 - DNA, 178 bp, Homo sapiens
aacctggggcccgttggccagagctcggcctctcagagaccgctgcaggccctgcctcacctcatgttcctcctggccctgcacctccagccatccactgmggctctcacggctcagtagggtcggaatttgcgctgggcccgcagcagctcgatcctctgcttgtcctcctcaaact

SEQ ID NO: 38200 - DNA, 201 bp, Homo sapiens
cctggctaataataaatatccagccagctggaggaaggaagggcaggctgggcccacctagcctttccctgctgcccaactggatggaaaataaaaggttyttgtattctcactgcttttgaggcttttttgttgccagcaagggcttttgcattgagggaaaaggaagcacagaacggattcatccagggtcctcaaggg

SEQ ID NO: 38201 - DNA, 201 bp, Homo sapiens
tcactagtcttgaggcccagcctaggatggtagtcaggggaaggagcgagattccaacttcaacatctgtgacctcaagagggagacagagtctgggttcsagggctgctttctcctggctaataataaatatccagccagctggaggaaggaagggcaggctgggcccacctagcctttccctgctgcccaactggatgg

SEQ ID NO: 38202 - DNA, 201 bp, Homo sapiens
ggctaataataaatatccagccagctggaggaaggaagggcaggctgggcccacctagcctttccctgctgcccaactggatggaaaataaaaggttcttktattctcactgcttttgaggcttttttgttgccagcaagggcttttgcattgagggaaaaggaagcacagaacggattcatccagggtcctcaagggtgt

SEQ ID NO: 38203 - DNA, 201 bp, Homo sapiens
gcacgcctgggtctccaggactgctgaagcacaagacccgaggggtggcctggtccttcactcctggcctgtgtggactctgatggggctgttggacgcgrtggccttcaacctggggcccgttggccagagctcggcctctcagagaccgctgcaggccctgcctcacctcatgttcctcctggccctgcacctccagcc

SEQ ID NO: 38204 - DNA, 201 bp, Homo sapiens
ctaataataaatatccagccagctggaggaaggaagggcaggctgggcccacctagcctttccctgctgcccaactggatggaaaataaaaggttcttgtwttctcactgcttttgaggcttttttgttgccagcaagggcttttgcattgagggaaaaggaagcacagaacggattcatccagggtcctcaagggtgtgg

SEQ ID NO: 38205 - DNA, 184 bp, Homo sapiens
gccttcaacctggggcccgttggccagagctcggcctctcagagaccgctgcaggccctgcctcacctcatgttcctcctggccctgcacctccagccatycactgcggctctcacggctcagtagggtcggaatttgcgctgggcccgcagcagctcgatcctctgcttgtcctcctcaaact

SEQ ID NO: 38206 - DNA, 201 bp, Homo sapiens
gcaagggcttttgcattgagggaaaaggaagcacagaacggattcatccagggtcctcaagggtgtggaggcaagaggtgggaaggacaagtcctcctctmggcacgcctgggtctccaggactgctgaagcacaagacccgaggggtggcctggtccttcactcctggcctgtgtggactctgatggggctgttggacgc

SEQ ID NO: 38207 - DNA, 201 bp, Homo sapiens
cagggatggtggggacaggcctcactagtcttgaggcccagcctaggatggtagtcaggggaaggagcgagattccaacttcaacatctgtgacctcaagrgggagacagagtctgggttccagggctgctttctcctggctaataataaatatccagccagctggaggaaggaagggcaggctgggcccacctagccttt

SEQ ID NO: 38208 - DNA, 201 bp, Homo sapiens
ctggcctgtgtggactctgatggggctgttggacgcgatggccttcaacctggggcccgttggccagagctcggcctctcagagaccgctgcaggccctgyctcacctcatgttcctcctggccctgcacctccagccatccactgcggctctcacggctcagtagggtcggaatttgcgctgggcccgcagcagctcgat

SEQ ID NO: 38209 - DNA, 201 bp, Homo sapiens
actctgatggggctgttggacgcgatggccttcaacctggggcccgttggccagagctcggcctctcagagaccgctgcaggccctgcctcacctcatgtkcctcctggccctgcacctccagccatccactgcggctctcacggctcagtagggtcggaatttgcgctgggcccgcagcagctcgatcctctgcttgtcc

SEQ ID NO: 38210 - DNA, 201 bp, Homo sapiens
cggggagcttctcctgcaaagaggaaccacgaaggtggccacaggtctggttctgaacagagaccagaggctcgcctgggcagagaacagcattgacttcrtcagcagggagctgtgtgcgcattccatcaggaagctgcaggcccatgtcctgttgatcaaagcagtccacggatattttgattcaagacagaattactc

SEQ ID NO: 38211 - DNA, 159 bp, Homo sapiens
agagctcggcctctcagagaccgctgcaggccctgcctcacctcatgttcctcctggccctgcacctccagccatccactgcggctctcacggctcagtasggtcggaatttgcgctgggcccgcagcagctcgatcctctgcttgtcctcctcaaact

SEQ ID NO: 38212 - DNA, 168 bp, Homo sapiens
ccgttggccagagctcggcctctcagagaccgctgcaggccctgcctcacctcatgttcctcctggccctgcacctccagccatccactgcggctctcacrgctcagtagggtcggaatttgcgctgggcccgcagcagctcgatcctctgcttgtcctcctcaaact

SEQ ID NO: 38213 - DNA, 201 bp, Homo sapiens
atccagggtcctcaagggtgtggaggcaagaggtgggaaggacaagtcctcctctcggcacgcctgggtctccaggactgctgaagcacaagacccgaggrgtggcctggtccttcactcctggcctgtgtggactctgatggggctgttggacgcgatggccttcaacctggggcccgttggccagagctcggcctctca

SEQ ID NO: 38214 - DNA, 201 bp, Homo sapiens
cagttccagtttgtggaagtcccaggcaatcactgtgtccacatgagcgaaccccagcacgtggccagtatcatcagctccttcttacagtgcacacacaygctcccagcccagctgtagctctgggcctggaactatgaagacctagtgctcccagactcaacactgggactctgagttcctgagccccacaacaaggcc

SEQ ID NO: 38215 - DNA, 201 bp, Homo sapiens
cgttcatgatagacacgatgaaatccaccctcaaagagcagttccagtttgtggaagtcccaggcaatcactgtgtccacatgagcgaaccccagcacgtsgccagtatcatcagctccttcttacagtgcacacacatgctcccagcccagctgtagctctgggcctggaactatgaagacctagtgctcccagactcaa

SEQ ID NO: 38216 - DNA, 201 bp, Homo sapiens
ggtgtggaggcaagaggtgggaaggacaagtcctcctctcggcacgcctgggtctccaggactgctgaagcacaagacccgaggggtggcctggtccttcmctcctggcctgtgtggactctgatggggctgttggacgcgatggccttcaacctggggcccgttggccagagctcggcctctcagagaccgctgcaggcc

SEQ ID NO: 38217 - DNA, 201 bp, Homo sapiens
ttcaacatctgtgacctcaagagggagacagagtctgggttccagggctgctttctcctggctaataataaatatccagccagctggaggaaggaagggcrggctgggcccacctagcctttccctgctgcccaactggatggaaaataaaaggttcttgtattctcactgcttttgaggcttttttgttgccagcaaggg

SEQ ID NO: 38218 - DNA, 201 bp, Homo sapiens
cctcaaagagcagttccagtttgtggaagtcccaggcaatcactgtgtccacatgagcgaaccccagcacgtggccagtatcatcagctccttcttacagygcacacacatgctcccagcccagctgtagctctgggcctggaactatgaagacctagtgctcccagactcaacactgggactctgagttcctgagcccca

SEQ ID NO: 38219 - DNA, 201 bp, Homo sapiens
tgaggcccagcctaggatggtagtcaggggaaggagcgagattccaacttcaacatctgtgacctcaagagggagacagagtctgggttccagggctgctktctcctggctaataataaatatccagccagctggaggaaggaagggcaggctgggcccacctagcctttccctgctgcccaactggatggaaaataaaag

SEQ ID NO: 38220 - DNA, 201 bp, Homo sapiens
gcagggagctgtgtgcgcattccatcaggaagctgcaggcccatgtcctgttgatcaaagcagtccacggatattttgattcaagacagaattactctgasaaggagtccctgtcgttcatgatagacacgatgaaatccaccctcaaagagcagttccagtttgtggaagtcccaggcaatcactgtgtccacatgagcg

SEQ ID NO: 38221 - DNA, 201 bp, Homo sapiens
cagtatcatcagctccttcttacagtgcacacacatgctcccagcccagctgtagctctgggcctggaactatgaagacctagtgctcccagactcaacaytgggactctgagttcctgagccccacaacaaggccagggatggtggggacaggcctcactagtcttgaggcccagcctaggatggtagtcaggggaagga

SEQ ID NO: 38222 - DNA, 201 bp, Homo sapiens
atcaaagcagtccacggatattttgattcaagacagaattactctgagaaggagtccctgtcgttcatgatagacacgatgaaatccaccctcaaagagcrgttccagtttgtggaagtcccaggcaatcactgtgtccacatgagcgaaccccagcacgtggccagtatcatcagctccttcttacagtgcacacacatg

SEQ ID NO: 38223 - DNA, 201 bp, Homo sapiens; identical to SEQ ID NO: 38198

SEQ ID NO: 38224 - DNA, 178 bp, Homo sapiens; identical to SEQ ID NO: 38199

SEQ ID NO: 38225 - DNA, 201 bp, Homo sapiens; identical to SEQ ID NO: 38200

SEQ ID NO: 38226 - DNA, 201 bp, Homo sapiens; identical to SEQ ID NO: 38201

SEQ ID NO: 38227 - DNA, 201 bp, Homo sapiens; identical to SEQ ID NO: 38202

SEQ ID NO: 38228 - DNA, 201 bp, Homo sapiens; identical to SEQ ID NO: 38203

SEQ ID NO: 38229 - DNA, 201 bp, Homo sapiens; identical to SEQ ID NO: 38204

SEQ ID NO: 38230 - DNA, 184 bp, Homo sapiens; identical to SEQ ID NO: 38205

SEQ ID NO: 38231 - DNA, 201 bp, Homo sapiens; identical to SEQ ID NO: 38206

SEQ ID NO: 38232 - DNA, 201 bp, Homo sapiens; identical to SEQ ID NO: 38207

SEQ ID NO: 38233 - DNA, 201 bp, Homo sapiens; identical to SEQ ID NO: 38208

SEQ ID NO: 38234 - DNA, 201 bp, Homo sapiens; identical to SEQ ID NO: 38209

SEQ ID NO: 38235 - DNA, 201 bp, Homo sapiens
gagccatagagcacgtgctgcaggtagaggcctcccaggagccctcgcacgtgttcagcctgaagcagctgctgcagaggcagagaacagcattgacttcrtcagcagggagctgtgtgcgcattccatcaggaagctgcaggcccatgtcctgttgatcaaagcagtccacggatattttgattcaagacagaattactc

SEQ ID NO: 38236 - DNA, 159 bp, Homo sapiens; identical to SEQ ID NO: 38211

SEQ ID NO: 38237 - DNA, 168 bp, Homo sapiens; identical to SEQ ID NO: 38212

SEQ ID NO: 38238 - DNA, 201 bp, Homo sapiens; identical to SEQ ID NO: 38213

SEQ ID NO: 38239 - DNA, 201 bp, Homo sapiens; identical to SEQ ID NO: 38214

SEQ ID NO: 38240 - DNA, 201 bp, Homo sapiens
gctggcctagacccctgggaggcctccaagtccctaggcagttccagtttgtggaagtcccaggcaatcactgtgtccacatgagcgaaccccagcacgtsgccagtatcatcagctccttcttacagtgcacacacatgctcccagcccagctgtagctctgggcctggaactatgaagacctagtgctcccagactcaa

SEQ ID NO: 38241 - DNA, 201 bp, Homo sapiens; identical to SEQ ID NO: 38216

SEQ ID NO: 38242 - DNA, 201 bp, Homo sapiens
gatgaaatccaccctcaaagaggtacctcttctgatacaatcacagcaaccctggcctcggccccgccctgtccctgccatgcaacttcacaactcagctrgcctagacccctgggaggcctccaagtccctaggcagttccagtttgtggaagtcccaggcaatcactgtgtccacatgagcgaaccccagcacgtggcc

SEQ ID NO: 38243 - DNA, 201 bp, Homo sapiens
gaattactctgagaaggagtccctgtcgttcatgatagacacgatgaaatccaccctcaaagaggtacctcttctgatacaatcacagcaaccctggcctyggccccgccctgtccctgccatgcaacttcacaactcagctggcctagacccctgggaggcctccaagtccctaggcagttccagtttgtggaagtccca

SEQ ID NO: 38244 - DNA, 201 bp, Homo sapiens; identical to SEQ ID NO: 38217

SEQ ID NO: 38245 - DNA, 201 bp, Homo sapiens
agtccctaggcagttccagtttgtggaagtcccaggcaatcactgtgtccacatgagcgaaccccagcacgtggccagtatcatcagctccttcttacagygcacacacatgctcccagcccagctgtagctctgggcctggaactatgaagacctagtgctcccagactcaacactgggactctgagttcctgagcccca

SEQ ID NO: 38246 - DNA, 201 bp, Homo sapiens
gcagggagctgtgtgcgcattccatcaggaagctgcaggcccatgtcctgttgatcaaagcagtccacggatattttgattcaagacagaattactctgasaaggagtccctgtcgttcatgatagacacgatgaaatccaccctcaaagaggtacctcttctgatacaatcacagcaaccctggcctcggccccgccctg

SEQ ID NO: 38247 - DNA, 201 bp, Homo sapiens; identical to SEQ ID NO: 38219

SEQ ID NO: 38248 - DNA, 201 bp, Homo sapiens; identical to SEQ ID NO: 38221

SEQ ID NO: 38249 - DNA, 201 bp, Homo sapiens
acaatcacagcaaccctggcctcggccccgccctgtccctgccatgcaacttcacaactcagctggcctagacccctgggaggcctccaagtccctaggcrgttccagtttgtggaagtcccaggcaatcactgtgtccacatgagcgaaccccagcacgtggccagtatcatcagctccttcttacagtgcacacacatg

SEQ ID NO: 38250 - DNA, 201 bp, Homo sapiens
ctgaagctggctgtgccctggggccacatcgcagccaaagcctggggctccctgcagggccctccagttctctgcctgcacggctggctggacaatgccarctccttcgacagactcatccctcttctcccgcaagacttttattacgttgccatggatttcggaggtcatgggctctcgtcccattacagcccaggtgtc

SEQ ID NO: 38251 - DNA, 201 bp, Homo sapiens; identical to SEQ ID NO: 38198

SEQ ID NO: 38252 - DNA, 178 bp, Homo sapiens; identical to SEQ ID NO: 38199

SEQ ID NO: 38253 - DNA, 201 bp, Homo sapiens; identical to SEQ ID NO: 38200

SEQ ID NO: 38254 - DNA, 201 bp, Homo sapiens; identical to SEQ ID NO: 38201

SEQ ID NO: 38255 - DNA, 201 bp, Homo sapiens; identical to SEQ ID NO: 38202

SEQ ID NO: 38256 - DNA, 201 bp, Homo sapiens; identical to SEQ ID NO: 38203

SEQ ID NO: 38257 - DNA, 201 bp, Homo sapiens; identical to SEQ ID NO: 38204

SEQ ID NO: 38258 - DNA, 184 bp, Homo sapiens; identical to SEQ ID NO: 38205

SEQ ID NO: 38259 - DNA, 201 bp, Homo sapiens; identical to SEQ ID NO: 38206

SEQ ID NO: 38260 - DNA, 201 bp, Homo sapiens; identical to SEQ ID NO: 38207

SEQ ID NO: 38261 - DNA, 201 bp, Homo sapiens; identical to SEQ ID NO: 38208

SEQ ID NO: 38262 - DNA, 201 bp, Homo sapiens; identical to SEQ ID NO: 38209

SEQ ID NO: 38263 - DNA, 201 bp, Homo sapiens; identical to SEQ ID NO: 38235

SEQ ID NO: 38264 - DNA, 159 bp, Homo sapiens; identical to SEQ ID NO: 38211

SEQ ID NO: 38265 - DNA, 168 bp, Homo sapiens; identical to SEQ ID NO: 38212

SEQ ID NO: 38266 - DNA, 201 bp, Homo sapiens
tggagatagggcccggaattgcgggcgtcactctgctcctgcgacctagccaggcgtgagggagtgacagcagcgcattcgcgggacgagagcgatgagtragaacgccgcaccaggtctgatctcagagctgaagctggctgtgccctggggccacatcgcagccaaagcctggggctccctgcagggccctccagttct

SEQ ID NO: 38267 - DNA, 201 bp, Homo sapiens; identical to SEQ ID NO: 38213

SEQ ID NO: 38268 - DNA, 201 bp, Homo sapiens; identical to SEQ ID NO: 38214

SEQ ID NO: 38269 - DNA, 201 bp, Homo sapiens; identical to SEQ ID NO: 38240

SEQ ID NO: 38270 - DNA, 201 bp, Homo sapiens; identical to SEQ ID NO: 38216

SEQ ID NO: 38271 - DNA, 201 bp, Homo sapiens; identical to SEQ ID NO: 38217

SEQ ID NO: 38272 - DNA, 201 bp, Homo sapiens; identical to SEQ ID NO: 38243

SEQ ID NO: 38273 - DNA, 201 bp, Homo sapiens; identical to SEQ ID NO: 38242

SEQ ID NO: 38274 - DNA, 201 bp, Homo sapiens; identical to SEQ ID NO: 38245

SEQ ID NO: 38275 - DNA, 201 bp, Homo sapiens; identical to SEQ ID NO: 38219

SEQ ID NO: 38276 - DNA, 201 bp, Homo sapiens; identical to SEQ ID NO: 38246

SEQ ID NO: 38277 - DNA, 201 bp, Homo sapiens; identical to SEQ ID NO: 38221

SEQ ID NO: 38278 - DNA, 201 bp, Homo sapiens; identical to SEQ ID NO: 38249

SEQ ID NO: 38279 - DNA, 201 bp, Homo sapiens; identical to SEQ ID NO: 38250

SEQ ID NO: 38280 - DNA, 201 bp, Homo sapiens; identical to SEQ ID NO: 38266

SEQ ID NO: 38281 - DNA, 128 bp, Homo sapiens
tcctctggcctcttggtcagcaccctccccccagcctaaaagatgtttcggggaactccagggtccccagggaaaggcgggagtgtcctttccttcttccycctattcattctccccttttggcatcc

SEQ ID NO: 38282 - DNA, 129 bp, Homo sapiens
ctcctctggcctcttggtcagcaccctccccccagcctaaaagatgtttcggggaactccagggtccccagggaaaggcgggagtgtcctttccttcttcmccctattcattctccccttttggcatcc

SEQ ID NO: 38283 - DNA, 201 bp, Homo sapiens; identical to SEQ ID NO: 38250

SEQ ID NO: 38284 - DNA, 201 bp, Homo sapiens; identical to SEQ ID NO: 38198

SEQ ID NO: 38285 - DNA, 178 bp, Homo sapiens; identical to SEQ ID NO: 38199

SEQ ID NO: 38286 - DNA, 201 bp, Homo sapiens; identical to SEQ ID NO: 38200

SEQ ID NO: 38287 - DNA, 201 bp, Homo sapiens; identical to SEQ ID NO: 38201

SEQ ID NO: 38288 - DNA, 201 bp, Homo sapiens; identical to SEQ ID NO: 38202

SEQ ID NO: 38289 - DNA, 201 bp, Homo sapiens; identical to SEQ ID NO: 38203

SEQ ID NO: 38290 - DNA, 201 bp, Homo sapiens; identical to SEQ ID NO: 38204

SEQ ID NO: 38291 - DNA, 184 bp, Homo sapiens; identical to SEQ ID NO: 38205

SEQ ID NO: 38292 - DNA, 201 bp, Homo sapiens; identical to SEQ ID NO: 38206

SEQ ID NO: 38293 - DNA, 201 bp, Homo sapiens; identical to SEQ ID NO: 38207

SEQ ID NO: 38294 - DNA, 201 bp, Homo sapiens; identical to SEQ ID NO: 38208

SEQ ID NO: 38295 - DNA, 201 bp, Homo sapiens; identical to SEQ ID NO: 38209

SEQ ID NO: 38296 - DNA, 201 bp, Homo sapiens; identical to SEQ ID NO: 38210

SEQ ID NO: 38297 - DNA, 159 bp, Homo sapiens; identical to SEQ ID NO: 38211

SEQ ID NO: 38298 - DNA, 168 bp, Homo sapiens; identical to SEQ ID NO: 38212

SEQ ID NO: 38299 - DNA, 201 bp, Homo sapiens; identical to SEQ ID NO: 38213

SEQ ID NO: 38300 - DNA, 201 bp, Homo sapiens; identical to SEQ ID NO: 38214

SEQ ID NO: 38301 - DNA, 201 bp, Homo sapiens; identical to SEQ ID NO: 38215

SEQ ID NO: 38302 - DNA, 201 bp, Homo sapiens; identical to SEQ ID NO: 38216

SEQ ID NO: 38303 - DNA, 201 bp, Homo sapiens; identical to SEQ ID NO: 38217

SEQ ID NO: 38304 - DNA, 201 bp, Homo sapiens; identical to SEQ ID NO: 38218

SEQ ID NO: 38305 - DNA, 201 bp, Homo sapiens; identical to SEQ ID NO: 38219

SEQ ID NO: 38306 - DNA, 201 bp, Homo sapiens; identical to SEQ ID NO: 38220

SEQ ID NO: 38307 - DNA, 201 bp, Homo sapiens; identical to SEQ ID NO: 38221

SEQ ID NO: 38308 - DNA, 201 bp, Homo sapiens; identical to SEQ ID NO: 38222

SEQ ID NO: 38309 - DNA, 201 bp, Homo sapiens; identical to SEQ ID NO: 38250

SEQ ID NO: 38310 - DNA, 201 bp, Homo sapiens; identical to SEQ ID NO: 38198

SEQ ID NO: 38311 - DNA, 178 bp, Homo sapiens; identical to SEQ ID NO: 38199

SEQ ID NO: 38312 - DNA, 201 bp, Homo sapiens; identical to SEQ ID NO: 38200

SEQ ID NO: 38313 - DNA, 201 bp, Homo sapiens; identical to SEQ ID NO: 38201

SEQ ID NO: 38314 - DNA, 201 bp, Homo sapiens; identical to SEQ ID NO: 38202

SEQ ID NO: 38315 - DNA, 201 bp, Homo sapiens; identical to SEQ ID NO: 38203

SEQ ID NO: 38316 - DNA, 201 bp, Homo sapiens; identical to SEQ ID NO: 38204

SEQ ID NO: 38317 - DNA, 184 bp, Homo sapiens; identical to SEQ ID NO: 38205

SEQ ID NO: 38318 - DNA, 201 bp, Homo sapiens; identical to SEQ ID NO: 38206

SEQ ID NO: 38319 - DNA, 201 bp, Homo sapiens; identical to SEQ ID NO: 38207

SEQ ID NO: 38320 - DNA, 201 bp, Homo sapiens; identical to SEQ ID NO: 38208

SEQ ID NO: 38321 - DNA, 201 bp, Homo sapiens; identical to SEQ ID NO: 38209

SEQ ID NO: 38322 - DNA, 201 bp, Homo sapiens; identical to SEQ ID NO: 38210

SEQ ID NO: 38323 - DNA, 159 bp, Homo sapiens; identical to SEQ ID NO: 38211

SEQ ID NO: 38324 - DNA, 168 bp, Homo sapiens; identical to SEQ ID NO: 38212

SEQ ID NO: 38325 - DNA, 201 bp, Homo sapiens; identical to SEQ ID NO: 38213

SEQ ID NO: 38326 - DNA, 201 bp, Homo sapiens; identical to SEQ ID NO: 38214

SEQ ID NO: 38327 - DNA, 201 bp, Homo sapiens; identical to SEQ ID NO: 38215

SEQ ID NO: 38328 - DNA, 201 bp, Homo sapiens; identical to SEQ ID NO: 38216

SEQ ID NO: 38329 - DNA, 201 bp, Homo sapiens; identical to SEQ ID NO: 38217

SEQ ID NO: 38330 - DNA, 201 bp, Homo sapiens; identical to SEQ ID NO: 38218

SEQ ID NO: 38331 - DNA, 201 bp, Homo sapiens; identical to SEQ ID NO: 38219

SEQ ID NO: 38332 - DNA, 201 bp, Homo sapiens; identical to SEQ ID NO: 38220

SEQ ID NO: 38333 - DNA, 201 bp, Homo sapiens; identical to SEQ ID NO: 38221

SEQ ID NO: 38334 - DNA, 201 bp, Homo sapiens; identical to SEQ ID NO: 38222

SEQ ID NO: 38335 - DNA, 201 bp, Homo sapiens; identical to SEQ ID NO: 38250

SEQ ID NO: 38336 - DNA, 201 bp, Homo sapiens
aggtaactggatttttgaaatgctgtatctactttcttatgtcttgtttctcctttcatgtaatttttgttctgtatggagcaccactgatagagttggcrttggaaacatttttatttgcagttattttgtctacttttactactgtgccttgcttatgtttgttaggaccaaacctcaaagcatggctaagagtgttca

SEQ ID NO: 38337 - DNA, 201 bp, Homo sapiens
atggcccatctcctgtacgcttggagcgacctttggctacgtggctggccttgttatttcaccactctggatatactggaatagaaagcaacttacatacmagaacaattaactggagcaaagggagatatttctttgtgcagattctgtaagggctgggcagaaatgtgtatggtcaaagccaagcagttccatttacag

SEQ ID NO: 38338 - DNA, 201 bp, Homo sapiens
aagataacgatatcaagagactactgtatacccatcttttatgcatattttcaattatcctaagtgtcttcattccatcactcttcttggagaacttctcratattggaaacacacttgacatggttgtgcatctgttctggttttgtaactgctgtcaatctagtactatatttagtagtgaaaccaaatacatcctcta

SEQ ID NO: 38339 - DNA, 201 bp, Homo sapiens
tccactggattgggaaagaccatggcagaagcagatagcaaggtaatttttgcagcagcggcctgtgttatcaagaaagctcacaaacatcagatttttcrtcttgtatcacaataagataaagctgatatgctaggtaaagcactgtgaggtatggcccatctcctgtacgcttggagcgacctttggctacgtggctgg

SEQ ID NO: 38340 - DNA, 201 bp, Homo sapiens
tgtacgcttggagcgacctttggctacgtggctggccttgttatttcaccactctggatatactggaatagaaagcaacttacatacaagaacaattaacyggagcaaagggagatatttctttgtgcagattctgtaagggctgggcagaaatgtgtatggtcaaagccaagcagttccatttacagctctgttttttac

SEQ ID NO: 38341 - DNA, 201 bp, Homo sapiens
ggatatactggaatagaaagcaacttacatacaagaacaattaactggagcaaagggagatatttctttgtgcagattctgtaagggctgggcagaaatgkgtatggtcaaagccaagcagttccatttacagctctgttttttacgtagttacaacatgatgtgattgtagctttttaaactatgaaacccctgagagat

SEQ ID NO: 38342 - DNA, 201 bp, Homo sapiens; identical to SEQ ID NO: 38336

SEQ ID NO: 38343 - DNA, 201 bp, Homo sapiens; identical to SEQ ID NO: 38337

SEQ ID NO: 38344 - DNA, 201 bp, Homo sapiens; identical to SEQ ID NO: 38338

SEQ ID NO: 38345 - DNA, 201 bp, Homo sapiens; identical to SEQ ID NO: 38340

SEQ ID NO: 38346 - DNA, 201 bp, Homo sapiens; identical to SEQ ID NO: 38341

SEQ ID NO: 38347 - DNA, 155 bp, Homo sapiens
ggttttgttttctttcaagttttgaactgcttcattacctataaaaggtctgggtatagctgtagcatttcatttgctttctgagagaaatggacagtttccttggccactgaagatgtttctcacgtaattaaacaacagtttatacatcttga

SEQ ID NO: 38348 - DNA, 201 bp, Homo sapiens; identical to SEQ ID NO: 38336

SEQ ID NO: 38349 - DNA, 201 bp, Homo sapiens; identical to SEQ ID NO: 38337

SEQ ID NO: 38350 - DNA, 201 bp, Homo sapiens; identical to SEQ ID NO: 38338

SEQ ID NO: 38351 - DNA, 201 bp, Homo sapiens; identical to SEQ ID NO: 38340

SEQ ID NO: 38352 - DNA, 201 bp, Homo sapiens; identical to SEQ ID NO: 38341

SEQ ID NO: 38353 - DNA, 201 bp, Homo sapiens; identical to SEQ ID NO: 38336

SEQ ID NO: 38354 - DNA, 201 bp, Homo sapiens; identical to SEQ ID NO: 38337

SEQ ID NO: 38355 - DNA, 201 bp, Homo sapiens; identical to SEQ ID NO: 38338

SEQ ID NO: 38356 - DNA, 201 bp, Homo sapiens; identical to SEQ ID NO: 38340

SEQ ID NO: 38357 - DNA, 201 bp, Homo sapiens; identical to SEQ ID NO: 38341

SEQ ID NO: 38358 - DNA, 201 bp, Homo sapiens; identical to SEQ ID NO: 38336

SEQ ID NO: 38359 - DNA, 201 bp, Homo sapiens; identical to SEQ ID NO: 38337

SEQ ID NO: 38360 - DNA, 201 bp, Homo sapiens; identical to SEQ ID NO: 38340

SEQ ID NO: 38361 - DNA, 201 bp, Homo sapiens; identical to SEQ ID NO: 38341

SEQ ID NO: 38362 - DNA, 155 bp, Homo sapiens; identical to SEQ ID NO: 38347

SEQ ID NO: 38363 - DNA, 201 bp, Homo sapiens; identical to SEQ ID NO: 38336

SEQ ID NO: 38364 - DNA, 201 bp, Homo sapiens; identical to SEQ ID NO: 38337

SEQ ID NO: 38365 - DNA, 201 bp, Homo sapiens; identical to SEQ ID NO: 38338

SEQ ID NO: 38366 - DNA, 201 bp, Homo sapiens; identical to SEQ ID NO: 38340

SEQ ID NO: 38367 - DNA, 201 bp, Homo sapiens; identical to SEQ ID NO: 38341

SEQ ID NO: 38368 - DNA, 155 bp, Homo sapiens; identical to SEQ ID NO: 38347

SEQ ID NO: 38369 - DNA, 201 bp, Homo sapiens
aattttagtattagatactaatagaagagaaaaattgtaacacactgaacaatagatactgtatgttcttaagactatgtatactagaataatagtagcaragtagggtgaaaaggaactttctgttctgaaagctaagcgactgtacgtgctactaaaaatgtctgacactgaaataattttactcaactatgttttcaa

SEQ ID NO: 38370 - DNA, 201 bp, Homo sapiens
gtacgtgctactaaaaatgtctgacactgaaataattttactcaactatgttttcaacaagcaaaaatatagtattctaagattaaaatgtcattacaaartatttagtgtgaacatttaatttaaacttgtctcatggaatctttaatttcaatgaacattacagcatatatatgttatttggcgagacatcaaataaag

SEQ ID NO: 38371 - DNA, 201 bp, Homo sapiens
gcagagtagggtgaaaaggaactttctgttctgaaagctaagcgactgtacgtgctactaaaaatgtctgacactgaaataattttactcaactatgtttycaacaagcaaaaatatagtattctaagattaaaatgtcattacaaaatatttagtgtgaacatttaatttaaacttgtctcatggaatctttaatttcaa

SEQ ID NO: 38372 - DNA, 201 bp, Homo sapiens
ctgtatgttcttaagactatgtatactagaataatagtagcagagtagggtgaaaaggaactttctgttctgaaagctaagcgactgtacgtgctactaawaatgtctgacactgaaataattttactcaactatgttttcaacaagcaaaaatatagtattctaagattaaaatgtcattacaaaatatttagtgtgaac

SEQ ID NO: 38373 - DNA, 201 bp, Homo sapiens; identical to SEQ ID NO: 38369

SEQ ID NO: 38374 - DNA, 201 bp, Homo sapiens; identical to SEQ ID NO: 38370

SEQ ID NO: 38375 - DNA, 201 bp, Homo sapiens; identical to SEQ ID NO: 38371

SEQ ID NO: 38376 - DNA, 201 bp, Homo sapiens; identical to SEQ ID NO: 38372

SEQ ID NO: 38377 - DNA, 201 bp, Homo sapiens
ggttggcgtgggagccagcctagggcttcgggtcgcggcagcgctgaccgccatggacaagcccctgggtcgctgcgtgggccacgccctggaggtggagraggcgctgctctgcatggacggcgcaggcccgccagacttaagggacctggtcaccacgctcgggggcgccctgctctggctcagcggacacgcggggac

SEQ ID NO: 38378 - DNA, 201 bp, Homo sapiens
gcttcgaacccggctgctgatcacaggcctgttcggggctggactcggtggggcctggctggccctgagggctgagaaggagaggctgcagcagcaaaagygaacagaagccctgcgccaggcagctgtgggccagggcgacttccacctgctggatcacagaggccgggctcgctgcaaggctgacttccggggccagtg

SEQ ID NO: 38379 - DNA, 201 bp, Homo sapiens
tggccctgagggctgagaaggagaggctgcagcagcaaaagcgaacagaagccctgcgccaggcagctgtgggccagggcgacttccacctgctggatcayagaggccgggctcgctgcaaggctgacttccggggccagtgggtgctgatgtactttggcttcactcactgccctgacatctgcccagacgagctggaga

SEQ ID NO: 38380 - DNA, 201 bp, Homo sapiens
cccagacgagctggagaagctggtgcaggtggtgcggcagctggaagcagagcctggtttgcctccagtgcagcctgtcttcatcactgtggaccccgagygggacgacgttgaagccatggcccgctacgtccaggacttccacccaagactgttgggtctgaccggctccaccaaacaggttgcccaggctagtcacag

SEQ ID NO: 38381 - DNA, 201 bp, Homo sapiens
gggtgtgggtgacaaggtcagcctggtcctcgcacctgccctggcggcatgtggctgcaaggtgccaatgatcagcggacgtggtctggggcacacaggargcaccttggataagctggagtctattcctggattcaatgtcatccagagcccagagcagatgcaagtgctgctggaccaggcgggctgctgtatcgtggg

SEQ ID NO: 38382 - DNA, 201 bp, Homo sapiens
gcttgtggacaagcattccacagggggtgtgggtgacaaggtcagcctggtcctcgcacctgccctggcggcatgtggctgcaaggtgccaatgatcagcrgacgtggtctggggcacacaggaggcaccttggataagctggagtctattcctggattcaatgtcatccagagcccagagcagatgcaagtgctgctgga

SEQ ID NO: 38383 - DNA, 201 bp, Homo sapiens
gtgccaatgatcagcggacgtggtctggggcacacaggaggcaccttggataagctggagtctattcctggattcaatgtcatccagagcccagagcagakgcaagtgctgctggaccaggcgggctgctgtatcgtgggtcagagtgagcagctggttcctgcggacggaatcctatatgcagccagagatgtgacagcc

SEQ ID NO: 38384 - DNA, 201 bp, Homo sapiens
gagcagctggttcctgcggacggaatcctatatgcagccagagatgtgacagccaccgtggacagcctgccactcatcacagcctccattctcagtaagaractcgtggaggggctgtccgctctggtggtggacgttaagttcggaggggccgccgtcttccccaaccaggagcaggcccgggagctggcaaagacgctg

SEQ ID NO: 38385 - DNA, 201 bp, Homo sapiens
aagggagccagggacttcccgacccttcgccagagcccaagcagctcccggagctgatccgcatgaagcgagacggaggccgcctgagcgaagcggacatsaggggcttcgtggccgctgtggtgaatgggagcgcgcagggcgcacagatcggggccatgctgatggccatccgacttcggggcatggatctggaggaga

SEQ ID NO: 38386 - DNA, 201 bp, Homo sapiens
gcgccgtgggaccccctggctccgcgtgcaccgggacggccccgcgctcagcggcccgcagagccgcgccctgcaggaggcgctcgtactctccgaccgcrcgccattcgccgccccctcgcccttcgcagagctcgttctgccgccgcagcaataaagctcctttgccgcgaaaccttgtcagtgcttgggcgggagcgg

SEQ ID NO: 38387 - DNA, 201 bp, Homo sapiens
ggaccccctggctccgcgtgcaccgggacggccccgcgctcagcggcccgcagagccgcgccctgcaggaggcgctcgtactctccgaccgcgcgccattygccgccccctcgcccttcgcagagctcgttctgccgccgcagcaataaagctcctttgccgcgaaaccttgtcagtgcttgggcgggagcggaaggatcc

SEQ ID NO: 38388 - DNA, 201 bp, Homo sapiens
ctccgcgtgcaccgggacggccccgcgctcagcggcccgcagagccgcgccctgcaggaggcgctcgtactctccgaccgcgcgccattcgccgccccctygcccttcgcagagctcgttctgccgccgcagcaataaagctcctttgccgcgaaaccttgtcagtgcttgggcgggagcggaaggatccagggctgcgga

SEQ ID NO: 38389 - DNA, 201 bp, Homo sapiens
tgccgctggcgctggtgctgcacgagctcggggccgggcgcagccgcgctggggagccgctccgcctgggggtgggcgcagagctgctggtcgacgtgggwcagaggctgcgccgtgggaccccctggctccgcgtgcaccgggacggccccgcgctcagcggcccgcagagccgcgccctgcaggaggcgctcgtactct

SEQ ID NO: 38390 - DNA, 201 bp, Homo sapiens
cggaaggatccagggctgcggaggcgggggccgtctcgatgaacacgtgacccccggcgggctccgccttccgcgcacgcgctgagagcctgtcagcagcscagggagctggaggtcggcgcttcctctcgtgcttggtccactgacgcgcggccccgccgcgaggagcatcagatccatgctgctgctgactcggagccc

SEQ ID NO: 38391 - DNA, 201 bp, Homo sapiens
gttggcgtgggagccagcctagggcttcgggtcgcggcagcgctgaccgccatggacaagcccctgggtcgctgcgtgggccacgccctggaggtggaggmggcgctgctctgcatggacggcgcaggcccgccagacttaagggacctggtcaccacgctcgggggcgccctgctctggctcagcggacacgcggggact

SEQ ID NO: 38392 - DNA, 201 bp, Homo sapiens
ggtccactgacgcgcggccccgccgcgaggagcatcagatccatgctgctgctgactcggagccccacagcttggcacaggctctctcagctcaagcctcsggtcctccctgggaccctgggaggccaggccctgcatctgaggtcctggcttttgtcaaggcagggccctgcagagacaggtgggcagggccagccccag

SEQ ID NO: 38393 - DNA, 201 bp, Homo sapiens
cccgctacgtccaggacttccacccaagactgttgggtctgaccggctccaccaaacaggttgcccaggctagtcacagttaccgcgtgtactacaatgcmggccccaaggatgaggaccaggactacatcgtggaccactccattgccatctacctgctcaaccctgacggcctcttcacggattactacggccggagca

SEQ ID NO: 38394 - DNA, 201 bp, Homo sapiens
agctcccggagctgatccgcatgaagcgagacggaggccgcctgagcgaagcggacatcaggggcttcgtggccgctgtggtgaatgggagcgcgcagggygcacagatcggggccatgctgatggccatccgacttcggggcatggatctggaggagacctcggtgctgacccaggccctggctcagtcgggacagcagc

SEQ ID NO: 38395 - DNA, 201 bp, Homo sapiens
tcgggtcctccctgggaccctgggaggccaggccctgcatctgaggtcctggcttttgtcaaggcagggccctgcagagacaggtgggcagggccagcccyagggccctgggcttcgaacccggctgctgatcacaggcctgttcggggctggactcggtggggcctggctggccctgagggctgagaaggagaggctgca

SEQ ID NO: 38396 - DNA, 201 bp, Homo sapiens
tgctctgcatggacggcgcaggcccgccagacttaagggacctggtcaccacgctcgggggcgccctgctctggctcagcggacacgcggggactcaggcycagggcgctgcccgggtggccgcggcgctggacgacggctcggcccttggccgcttcgagcggatgctggcggcgcagggcgtggatcccggtctggccc

SEQ ID NO: 38397 - DNA, 201 bp, Homo sapiens
agcctgtcttcatcactgtggaccccgagcgggacgacgttgaagccatggcccgctacgtccaggacttccacccaagactgttgggtctgaccggctcyaccaaacaggttgcccaggctagtcacagttaccgcgtgtactacaatgcaggccccaaggatgaggaccaggactacatcgtggaccactccattgcca

SEQ ID NO: 38398 - DNA, 201 bp, Homo sapiens
gctggatcacagaggccgggctcgctgcaaggctgacttccggggccagtgggtgctgatgtactttggcttcactcactgccctgacatctgcccagacragctggagaagctggtgcaggtggtgcggcagctggaagcagagcctggtttgcctccagtgcagcctgtcttcatcactgtggaccccgagcgggacga

SEQ ID NO: 38399 - DNA, 201 bp, Homo sapiens
gccattcgccgccccctcgcccttcgcagagctcgttctgccgccgcagcaataaagctcctttgccgcgaaaccttgtcagtgcttgggcgggagcggarggatccagggctgcggaggcgggggccgtctcgatgaacacgtgacccccggcgggctccgccttccgcgcacgcgctgagagcctgtcagcagcgcagg

SEQ ID NO: 38400 - DNA, 201 bp, Homo sapiens
accggctccaccaaacaggttgcccaggctagtcacagttaccgcgtgtactacaatgcaggccccaaggatgaggaccaggactacatcgtggaccactycattgccatctacctgctcaaccctgacggcctcttcacggattactacggccggagcagatcggctgagcagatctcagacagtgtgcggcggcacatg

SEQ ID NO: 38401 - DNA, 201 bp, Homo sapiens; identical to SEQ ID NO: 38377

SEQ ID NO: 38402 - DNA, 201 bp, Homo sapiens; identical to SEQ ID NO: 38378

SEQ ID NO: 38403 - DNA, 201 bp, Homo sapiens; identical to SEQ ID NO: 38379

SEQ ID NO: 38404 - DNA, 201 bp, Homo sapiens; identical to SEQ ID NO: 38380

SEQ ID NO: 38405 - DNA, 201 bp, Homo sapiens; identical to SEQ ID NO: 38381

SEQ ID NO: 38406 - DNA, 201 bp, Homo sapiens; identical to SEQ ID NO: 38382

SEQ ID NO: 38407 - DNA, 201 bp, Homo sapiens; identical to SEQ ID NO: 38383

SEQ ID NO: 38408 - DNA, 201 bp, Homo sapiens; identical to SEQ ID NO: 38384

SEQ ID NO: 38409 - DNA, 201 bp, Homo sapiens
aacactcggaagccagggcccgcggcctacaacgtggatcaggtggcctggagcccagggtcaagggtcagagtcaggagagtggggagggcctgaggtcsgagtgatgggatcagagtccccgggggtccaggggtcccggcgcggagaggatgccggccccgcgaggtcagcggtgtctccgggcccgcagcaccggaa

SEQ ID NO: 38410 - DNA, 201 bp, Homo sapiens; identical to SEQ ID NO: 38385

SEQ ID NO: 38411 - DNA, 201 bp, Homo sapiens; identical to SEQ ID NO: 38386

SEQ ID NO: 38412 - DNA, 201 bp, Homo sapiens
aaccccgaaccccacggggctttgataaatcgtggctcagactccccactagtcccaggaccccatctcgggtacccaccaggctcccacgcagttctagscccccacacccttgatccgccccgcaggcaggtacttcccggagcgagcggggaacgcgacgtaccccagtgcgcctcggcacaccattgctccccgaaa

SEQ ID NO: 38413 - DNA, 201 bp, Homo sapiens; identical to SEQ ID NO: 38387

SEQ ID NO: 38414 - DNA, 201 bp, Homo sapiens; identical to SEQ ID NO: 38390

SEQ ID NO: 38415 - DNA, 201 bp, Homo sapiens; identical to SEQ ID NO: 38388

SEQ ID NO: 38416 - DNA, 201 bp, Homo sapiens; identical to SEQ ID NO: 38389

SEQ ID NO: 38417 - DNA, 201 bp, Homo sapiens; identical to SEQ ID NO: 38392

SEQ ID NO: 38418 - DNA, 201 bp, Homo sapiens; identical to SEQ ID NO: 38391

SEQ ID NO: 38419 - DNA, 201 bp, Homo sapiens
ccagggtcaagggtcagagtcaggagagtggggagggcctgaggtcggagtgatgggatcagagtccccgggggtccaggggtcccggcgcggagaggatsccggccccgcgaggtcagcggtgtctccgggcccgcagcaccggaagccccgcggctggagtttcgggatccggcactcggactacctggccccgctggt

SEQ ID NO: 38420 - DNA, 201 bp, Homo sapiens; identical to SEQ ID NO: 38393

SEQ ID NO: 38421 - DNA, 201 bp, Homo sapiens
gtgtcacatctttttttcaatttgtgtgattattttgtggcccaatacatgattttttttgcgaatatttcatggacttaaatagataagtcctctctctrcacataattaaatggagtgtgtgctttgcattattcagttcctttattcccatccttgcttttgtctgcagatttgtcctattccagaatgggtatactg

SEQ ID NO: 38422 - DNA, 201 bp, Homo sapiens
ggccagcgttctgggtggcccaggctactatcccacccgtgccacagaatccacacagaggcccagcggcggcactgggtggtggggaagggggaggcggrcccaggttgggggggcaggcagtcagtgcggttgccaggaagcgggaaagggccacaatggggtctgggaggtgggcggggcggagcggggatgtccagc

SEQ ID NO: 38423 - DNA, 201 bp, Homo sapiens; identical to SEQ ID NO: 38394

SEQ ID NO: 38424 - DNA, 201 bp, Homo sapiens; identical to SEQ ID NO: 38396

SEQ ID NO: 38425 - DNA, 201 bp, Homo sapiens; identical to SEQ ID NO: 38397

SEQ ID NO: 38426 - DNA, 201 bp, Homo sapiens; identical to SEQ ID NO: 38395

SEQ ID NO: 38427 - DNA, 201 bp, Homo sapiens; identical to SEQ ID NO: 38399

SEQ ID NO: 38428 - DNA, 201 bp, Homo sapiens; identical to SEQ ID NO: 38398

SEQ ID NO: 38429 - DNA, 201 bp, Homo sapiens; identical to SEQ ID NO: 38400

SEQ ID NO: 38430 - DNA, 201 bp, Homo sapiens
gaggagctgctgggaagcctggatgtgaggagggtggggttttgtggcgggtggaagtgtcgtgcgtctctgccaggagaggttaaacacagccggcgggsagagtctgagctccgggggttttctgctgggagtgtggaggaaggccgcggttggttgaagtggctggaggtaacaggaaagtgttggaggaatcggttg

SEQ ID NO: 38431 - DNA, 201 bp, Homo sapiens
gcggttggttgaagtggctggaggtaacaggaaagtgttggaggaatcggttgctctcggggattgcaagccagagagttacccacctccttttaagaaaygggtttattgcaaatagataacgtggttagttcaggcaaggcatgcacttggaatgctttccgtcagcaagaggttcaccttgctgaggtgcaggtgcag

SEQ ID NO: 38432 - DNA, 201 bp, Homo sapiens; identical to SEQ ID NO: 38377

SEQ ID NO: 38433 - DNA, 201 bp, Homo sapiens; identical to SEQ ID NO: 38378

SEQ ID NO: 38434 - DNA, 201 bp, Homo sapiens; identical to SEQ ID NO: 38379

SEQ ID NO: 38435 - DNA, 201 bp, Homo sapiens; identical to SEQ ID NO: 38380

SEQ ID NO: 38436 - DNA, 201 bp, Homo sapiens; identical to SEQ ID NO: 38381

SEQ ID NO: 38437 - DNA, 201 bp, Homo sapiens; identical to SEQ ID NO: 38382

SEQ ID NO: 38438 - DNA, 201 bp, Homo sapiens; identical to SEQ ID NO: 38383

SEQ ID NO: 38439 - DNA, 201 bp, Homo sapiens; identical to SEQ ID NO: 38384

SEQ ID NO: 38440 - DNA, 201 bp, Homo sapiens; identical to SEQ ID NO: 38409

SEQ ID NO: 38441 - DNA, 201 bp, Homo sapiens; identical to SEQ ID NO: 38385

SEQ ID NO: 38442 - DNA, 201 bp, Homo sapiens; identical to SEQ ID NO: 38386

SEQ ID NO: 38443 - DNA, 201 bp, Homo sapiens; identical to SEQ ID NO: 38412

SEQ ID NO: 38444 - DNA, 201 bp, Homo sapiens; identical to SEQ ID NO: 38387

SEQ ID NO: 38445 - DNA, 201 bp, Homo sapiens
tcagcggctgcgcccgtgtgcgcatgcgcagctccggggacgcctgcgccctgcctgtgagcgtgtggcgcccgctttccctgagccggcggggcagagcscagggagctggaggtcggcgcttcctctcgtgcttggtccactgacgcgcggccccgccgcgaggtgcggacgccggggctgggaggggaggaggtagcc

SEQ ID NO: 38446 - DNA, 201 bp, Homo sapiens; identical to SEQ ID NO: 38388

SEQ ID NO: 38447 - DNA, 201 bp, Homo sapiens; identical to SEQ ID NO: 38389

SEQ ID NO: 38448 - DNA, 201 bp, Homo sapiens
tggctcctgacgcctgtgcttgtttccaggagcatcagatccatgctgctgctgactcggagccccacagcttggcacaggctctctcagctcaagcctcsggtcctccctgggaccctgggaggccaggccctgcatctgaggtcctggcttttgtcaaggcagggccctgcagagacaggtgggcagggccagccccag

SEQ ID NO: 38449 - DNA, 201 bp, Homo sapiens; identical to SEQ ID NO: 38419

SEQ ID NO: 38450 - DNA, 201 bp, Homo sapiens; identical to SEQ ID NO: 38391

SEQ ID NO: 38451 - DNA, 201 bp, Homo sapiens; identical to SEQ ID NO: 38393

SEQ ID NO: 38452 - DNA, 201 bp, Homo sapiens; identical to SEQ ID NO: 38421

SEQ ID NO: 38453 - DNA, 201 bp, Homo sapiens; identical to SEQ ID NO: 38422

SEQ ID NO: 38454 - DNA, 201 bp, Homo sapiens; identical to SEQ ID NO: 38394

SEQ ID NO: 38455 - DNA, 201 bp, Homo sapiens; identical to SEQ ID NO: 38395

SEQ ID NO: 38456 - DNA, 201 bp, Homo sapiens; identical to SEQ ID NO: 38397

SEQ ID NO: 38457 - DNA, 201 bp, Homo sapiens; identical to SEQ ID NO: 38396

SEQ ID NO: 38458 - DNA, 201 bp, Homo sapiens; identical to SEQ ID NO: 38398

SEQ ID NO: 38459 - DNA, 201 bp, Homo sapiens
gccattcgccgccccctcgcccttcgcagagctcgttctgccgccgcagcaataaagctcctttgccgcgaaaccttgtcagtgcttgggcgggagcggarggatccagggctgcggaggcgggggccgtctcgatgaacacgtgacccccggcgggctccgccttccgcgcacgcgctgagagcctgtcagcggctgcgc

SEQ ID NO: 38460 - DNA, 201 bp, Homo sapiens; identical to SEQ ID NO: 38400

SEQ ID NO: 38461 - DNA, 201 bp, Homo sapiens
ggggagggcacaaacccagaaccgcccgggcgggggtgcagtgagtcctcgggagggtgccctcagcaggagggggcagtgaccgggagtcctgagacctscacctagcaaaccttctgcgggggcccgtgggaaaggctcaaaggtcaccaacgcaaaggcagggcgtcggctgtgagcccggaggagctgctgggaagc

SEQ ID NO: 38462 - DNA, 201 bp, Homo sapiens; identical to SEQ ID NO: 38377

SEQ ID NO: 38463 - DNA, 201 bp, Homo sapiens; identical to SEQ ID NO: 38378

SEQ ID NO: 38464 - DNA, 201 bp, Homo sapiens; identical to SEQ ID NO: 38379

SEQ ID NO: 38465 - DNA, 201 bp, Homo sapiens; identical to SEQ ID NO: 38380

SEQ ID NO: 38466 - DNA, 201 bp, Homo sapiens; identical to SEQ ID NO: 38381

SEQ ID NO: 38467 - DNA, 201 bp, Homo sapiens; identical to SEQ ID NO: 38382

SEQ ID NO: 38468 - DNA, 201 bp, Homo sapiens; identical to SEQ ID NO: 38383

SEQ ID NO: 38469 - DNA, 201 bp, Homo sapiens; identical to SEQ ID NO: 38384

SEQ ID NO: 38470 - DNA, 201 bp, Homo sapiens; identical to SEQ ID NO: 38385

SEQ ID NO: 38471 - DNA, 201 bp, Homo sapiens; identical to SEQ ID NO: 38386

SEQ ID NO: 38472 - DNA, 201 bp, Homo sapiens; identical to SEQ ID NO: 38387

SEQ ID NO: 38473 - DNA, 201 bp, Homo sapiens; identical to SEQ ID NO: 38388

SEQ ID NO: 38474 - DNA, 201 bp, Homo sapiens; identical to SEQ ID NO: 38389

SEQ ID NO: 38475 - DNA, 201 bp, Homo sapiens; identical to SEQ ID NO: 38390

SEQ ID NO: 38476 - DNA, 201 bp, Homo sapiens; identical to SEQ ID NO: 38391

SEQ ID NO: 38477 - DNA, 201 bp, Homo sapiens; identical to SEQ ID NO: 38392

SEQ ID NO: 38478 - DNA, 201 bp, Homo sapiens; identical to SEQ ID NO: 38421

SEQ ID NO: 38479 - DNA, 201 bp, Homo sapiens; identical to SEQ ID NO: 38393

SEQ ID NO: 38480 - DNA, 201 bp, Homo sapiens; identical to SEQ ID NO: 38422

SEQ ID NO: 38481 - DNA, 201 bp, Homo sapiens; identical to SEQ ID NO: 38394

SEQ ID NO: 38482 - DNA, 201 bp, Homo sapiens; identical to SEQ ID NO: 38397

SEQ ID NO: 38483 - DNA, 201 bp, Homo sapiens; identical to SEQ ID NO: 38396

SEQ ID NO: 38484 - DNA, 201 bp, Homo sapiens; identical to SEQ ID NO: 38395

SEQ ID NO: 38485 - DNA, 201 bp, Homo sapiens; identical to SEQ ID NO: 38399

SEQ ID NO: 38486 - DNA, 201 bp, Homo sapiens; identical to SEQ ID NO: 38398

SEQ ID NO: 38487 - DNA, 201 bp, Homo sapiens; identical to SEQ ID NO: 38400

SEQ ID NO: 38488 - DNA, 119 bp, Homo sapiens
gaggagctgctgggaagcctggatgtgaggagggtggggttttgtggcgggtggaagtgtcgtgcgtctctgccaggagaggttaaacacagccggcgggsagagtctgagctccgggg

SEQ ID NO: 38489 - DNA, 201 bp, Homo sapiens; identical to SEQ ID NO: 38377

SEQ ID NO: 38490 - DNA, 201 bp, Homo sapiens; identical to SEQ ID NO: 38381

SEQ ID NO: 38491 - DNA, 201 bp, Homo sapiens; identical to SEQ ID NO: 38382

SEQ ID NO: 38492 - DNA, 201 bp, Homo sapiens; identical to SEQ ID NO: 38383

SEQ ID NO: 38493 - DNA, 201 bp, Homo sapiens; identical to SEQ ID NO: 38384

SEQ ID NO: 38494 - DNA, 201 bp, Homo sapiens; identical to SEQ ID NO: 38385

SEQ ID NO: 38495 - DNA, 201 bp, Homo sapiens; identical to SEQ ID NO: 38386

SEQ ID NO: 38496 - DNA, 201 bp, Homo sapiens; identical to SEQ ID NO: 38387

SEQ ID NO: 38497 - DNA, 201 bp, Homo sapiens; identical to SEQ ID NO: 38388

SEQ ID NO: 38498 - DNA, 201 bp, Homo sapiens; identical to SEQ ID NO: 38389

SEQ ID NO: 38499 - DNA, 201 bp, Homo sapiens; identical to SEQ ID NO: 38445

SEQ ID NO: 38500 - DNA, 201 bp, Homo sapiens; identical to SEQ ID NO: 38391

SEQ ID NO: 38501 - DNA, 201 bp, Homo sapiens; identical to SEQ ID NO: 38394

SEQ ID NO: 38502 - DNA, 201 bp, Homo sapiens; identical to SEQ ID NO: 38396

SEQ ID NO: 38503 - DNA, 201 bp, Homo sapiens; identical to SEQ ID NO: 38459

SEQ ID NO: 38504 - DNA, 201 bp, Homo sapiens; identical to SEQ ID NO: 38461

SEQ ID NO: 38505 - DNA, 201 bp, Homo sapiens
aagcagtgagaatacaagaaccttttattttccatccagttgggcagcagggaaaggctaggtgggcccagcctgcccttccttcctccagctggctggakatttattattagccaggagaaagcagccctggaacccagactctgtctccctcttgaggtcacagatgttgaagttggaatctcgctccttcccctgact

SEQ ID NO: 38506 - DNA, 201 bp, Homo sapiens
tgtcagcggccttggccctgaagggccccctgctggtgtccacagagagccaccctgtgaagagtggcattcacaaatggatcagtgactacgcagactcygtgcccgaccctgaggccctgagggtggaagtggacacgttcatggaggcatatgaccagaagatcgctgaggaagaagctaaggccaaggaggaggagg

SEQ ID NO: 38507 - DNA, 201 bp, Homo sapiens
gcatctagcgcagctgcgcaagaagtttgaggaggacaagcagaggatcgagctgctgcgggcccagcgcaaattccgaccctactgagccgtgagagcckcagtggatggctggaggtgcagggccaggaggaacatgaggtgaggcagggcctgcagcggtctctgagaggccgagctctggccaacgggccccaggtt

SEQ ID NO: 38508 - DNA, 201 bp, Homo sapiens
cccttgaggaccctggatgaatccgttctgtgcttccttttccctcaatgcaaaagcccttgctggcaacaaaaaagcctcaaaagcagtgagaatacaaraaccttttattttccatccagttgggcagcagggaaaggctaggtgggcccagcctgcccttccttcctccagctggctggatatttattattagccagg

SEQ ID NO: 38509 - DNA, 201 bp, Homo sapiens
ccatccagttgggcagcagggaaaggctaggtgggcccagcctgcccttccttcctccagctggctggatatttattattagccaggagaaagcagccctsgaacccagactctgtctccctcttgaggtcacagatgttgaagttggaatctcgctccttcccctgactaccatcctaggctgggcctcaagactagtga

SEQ ID NO: 38510 - DNA, 201 bp, Homo sapiens
acacccttgaggaccctggatgaatccgttctgtgcttccttttccctcaatgcaaaagcccttgctggcaacaaaaaagcctcaaaagcagtgagaatamaagaaccttttattttccatccagttgggcagcagggaaaggctaggtgggcccagcctgcccttccttcctccagctggctggatatttattattagcc

SEQ ID NO: 38511 - DNA, 201 bp, Homo sapiens
ggctggaggtgcagggccaggaggaacatgaggtgaggcagggcctgcagcggtctctgagaggccgagctctggccaacgggccccaggttgaaggccaycgcgtccaacagccccatcagagtccacacaggccaggagtgaaggaccaggccacccctcgggtcttgtgcttcagcagtcctggagacccaggcgtgc

SEQ ID NO: 38512 - DNA, 201 bp, Homo sapiens
ccacacccttgaggaccctggatgaatccgttctgtgcttccttttccctcaatgcaaaagcccttgctggcaacaaaaaagcctcaaaagcagtgagaawacaagaaccttttattttccatccagttgggcagcagggaaaggctaggtgggcccagcctgcccttccttcctccagctggctggatatttattattag

SEQ ID NO: 38513 - DNA, 201 bp, Homo sapiens
agcgcagctgcgcaagaagtttgaggaggacaagcagaggatcgagctgctgcgggcccagcgcaaattccgaccctactgagccgtgagagccgcagtgratggctggaggtgcagggccaggaggaacatgaggtgaggcagggcctgcagcggtctctgagaggccgagctctggccaacgggccccaggttgaaggc

SEQ ID NO: 38514 - DNA, 201 bp, Homo sapiens
gcgtccaacagccccatcagagtccacacaggccaggagtgaaggaccaggccacccctcgggtcttgtgcttcagcagtcctggagacccaggcgtgcckagaggaggacttgtccttcccacctcttgcctccacacccttgaggaccctggatgaatccgttctgtgcttccttttccctcaatgcaaaagcccttgc

SEQ ID NO: 38515 - DNA, 201 bp, Homo sapiens
aaaggctaggtgggcccagcctgcccttccttcctccagctggctggatatttattattagccaggagaaagcagccctggaacccagactctgtctcccycttgaggtcacagatgttgaagttggaatctcgctccttcccctgactaccatcctaggctgggcctcaagactagtgaggcctgtccccaccatccctg

SEQ ID NO: 38516 - DNA, 201 bp, Homo sapiens
atcgagctgctgcgggcccagcgcaaattccgaccctactgagccgtgagagccgcagtggatggctggaggtgcagggccaggaggaacatgaggtgagrcagggcctgcagcggtctctgagaggccgagctctggccaacgggccccaggttgaaggccatcgcgtccaacagccccatcagagtccacacaggccag

SEQ ID NO: 38517 - DNA, 201 bp, Homo sapiens
ggacaagcagaggatcgagctgctgcgggcccagcgcaaattccgaccctactgagccgtgagagccgcagtggatggctggaggtgcagggccaggaggmacatgaggtgaggcagggcctgcagcggtctctgagaggccgagctctggccaacgggccccaggttgaaggccatcgcgtccaacagccccatcagagt

SEQ ID NO: 38518 - DNA, 201 bp, Homo sapiens
cctgacgaggagggctgggtgaaggtgacccgccggggccggcggcctgtgctcccccggactgaggcagccagcttgcgggtgctggagagggagagacrgaagcgcagccaaaaagagctgctcaactacgcctggcagcatcgagagagcaagatggagcatctagcgcagctgcgcaagaagtttgaggaggacaag

SEQ ID NO: 38519 - DNA, 201 bp, Homo sapiens
ggctgggtgaaggtgacccgccggggccggcggcctgtgctcccccggactgaggcagccagcttgcgggtgctggagagggagagacggaagcgcagccraaaagagctgctcaactacgcctggcagcatcgagagagcaagatggagcatctagcgcagctgcgcaagaagtttgaggaggacaagcagaggatcgag

SEQ ID NO: 38520 - DNA, 201 bp, Homo sapiens
atcgagagagcaagatggagcatctagcgcagctgcgcaagaagtttgaggaggacaagcagaggatcgagctgctgcgggcccagcgcaaattccgaccstactgagccgtgagagccgcagtggatggctggaggtgcagggccaggaggaacatgaggtgaggcagggcctgcagcggtctctgagaggccgagctct

SEQ ID NO: 38521 - DNA, 201 bp, Homo sapiens
taattctgtcttgaatcaaaatatccgtggactacttacttgatcaacaggacatgggcctgcagcttcctgatggaatgcgcacacagctccctgctgaygaagtcaatgctgttctctgcctgcgagcctctggtctctgttcagaaccagacctgtggccaccttcgtggttcctctttgcaggagaagctccccgca

SEQ ID NO: 38522 - DNA, 201 bp, Homo sapiens
gcaagatggagcatctagcgcagctgcgcaagaagtttgaggaggacaagcagaggatcgagctgctgcgggcccagcgcaaattccgaccctactgagcygtgagagccgcagtggatggctggaggtgcagggccaggaggaacatgaggtgaggcagggcctgcagcggtctctgagaggccgagctctggccaacgg

SEQ ID NO: 38523 - DNA, 201 bp, Homo sapiens
tgagaggccgagctctggccaacgggccccaggttgaaggccatcgcgtccaacagccccatcagagtccacacaggccaggagtgaaggaccaggccacycctcgggtcttgtgcttcagcagtcctggagacccaggcgtgccgagaggaggacttgtccttcccacctcttgcctccacacccttgaggaccctggat

SEQ ID NO: 38524 - DNA, 201 bp, Homo sapiens
ggccttgttgtggggctcaggaactcagagtcccagtgttgagtctgggagcactaggtcttcatagttccaggcccagagctacagctgggctgggagcrtgtgtgtgcactgtaagaaggagctgatgatactggccacgtgctggggttcgctcatgtggacacagtgattgcctgggacttccacaaactggaactg

SEQ ID NO: 38525 - DNA, 201 bp, Homo sapiens
ggccaaggaggaggagggggtccctgacgaggagggctgggtgaaggtgacccgccggggccggcggcctgtgctcccccggactgaggcagccagcttgygggtgctggagagggagagacggaagcgcagccaaaaagagctgctcaactacgcctggcagcatcgagagagcaagatggagcatctagcgcagctgcg

SEQ ID NO: 38526 - DNA, 201 bp, Homo sapiens
ggaggacggtatcccgagcccaccgtgctacgcagctattccaatcaagttctctgaaaagcaacaggcttctcactacctctatgtgagagcacacggcrttcaacaaggcaccaagtccacctggcctcagaagaggactctttttgtcttcaatgtgcccccatactgcacagaggagagcctgtcctgcctccagtc

SEQ ID NO: 38527 - DNA, 201 bp, Homo sapiens
ttgagtctgggagcactaggtcttcatagttccaggcccagagctacagctgggctgggagcatgtgtgtgcactgtaagaaggagctgatgatactggcsacgtgctggggttcgctcatgtggacacagtgattgcctgggacttccacaaactggaactgctctttgagggtggatttcatcgtgtctatcatgaacg

SEQ ID NO: 38528 - DNA, 201 bp, Homo sapiens
cccactttggcgcgctgatttgcctctgagcggatgaaggttgagccatggcgggcggggccggggaggcgggcttggagcgagggggcggggcaggcgcyacaaaaacgcgctcgcgccggcgccgaaccgcaactcccggcgacccccgcgctcccgggtggcaagatggtggcgcgcaggacgaagctcgcggcgcgg

SEQ ID NO: 38529 - DNA, 201 bp, Homo sapiens
ggcctgcagcggtctctgagaggccgagctctggccaacgggccccaggttgaaggccatcgcgtccaacagccccatcagagtccacacaggccaggagkgaaggaccaggccacccctcgggtcttgtgcttcagcagtcctggagacccaggcgtgccgagaggaggacttgtccttcccacctcttgcctccacacc

SEQ ID NO: 38530 - DNA, 201 bp, Homo sapiens
cccttgctggcaacaaaaaagcctcaaaagcagtgagaatacaagaaccttttattttccatccagttgggcagcagggaaaggctaggtgggcccagccygcccttccttcctccagctggctggatatttattattagccaggagaaagcagccctggaacccagactctgtctccctcttgaggtcacagatgttgaa

SEQ ID NO: 38531 - DNA, 201 bp, Homo sapiens
tggggctcaggaactcagagtcccagtgttgagtctgggagcactaggtcttcatagttccaggcccagagctacagctgggctgggagcatgtgtgtgcrctgtaagaaggagctgatgatactggccacgtgctggggttcgctcatgtggacacagtgattgcctgggacttccacaaactggaactgctctttgagg

SEQ ID NO: 38532 - DNA, 201 bp, Homo sapiens
cttttattttccatccagttgggcagcagggaaaggctaggtgggcccagcctgcccttccttcctccagctggctggatatttattattagccaggagamagcagccctggaacccagactctgtctccctcttgaggtcacagatgttgaagttggaatctcgctccttcccctgactaccatcctaggctgggcctca

SEQ ID NO: 38533 - DNA, 201 bp, Homo sapiens
cgctcatgtggacacagtgattgcctgggacttccacaaactggaactgctctttgagggtggatttcatcgtgtctatcatgaacgacagggactccttstcagagtaattctgtcttgaatcaaaatatccgtggactacttacttgatcaacaggacatgggcctgcagcttcctgatggaatgcgcacacagctccc

SEQ ID NO: 38534 - DNA, 201 bp, Homo sapiens
tccttcccctgactaccatcctaggctgggcctcaagactagtgaggcctgtccccaccatccctggccttgttgtggggctcaggaactcagagtcccartgttgagtctgggagcactaggtcttcatagttccaggcccagagctacagctgggctgggagcatgtgtgtgcactgtaagaaggagctgatgatactg

SEQ ID NO: 38535 - DNA, 201 bp, Homo sapiens
catgtgtgtgcactgtaagaaggagctgatgatactggccacgtgctggggttcgctcatgtggacacagtgattgcctgggacttccacaaactggaacygctctttgagggtggatttcatcgtgtctatcatgaacgacagggactccttctcagagtaattctgtcttgaatcaaaatatccgtggactacttactt

SEQ ID NO: 38536 - DNA, 201 bp, Homo sapiens; identical to SEQ ID NO: 38505

SEQ ID NO: 38537 - DNA, 201 bp, Homo sapiens; identical to SEQ ID NO: 38506

SEQ ID NO: 38538 - DNA, 201 bp, Homo sapiens; identical to SEQ ID NO: 38507

SEQ ID NO: 38539 - DNA, 201 bp, Homo sapiens; identical to SEQ ID NO: 38508

SEQ ID NO: 38540 - DNA, 201 bp, Homo sapiens; identical to SEQ ID NO: 38510

SEQ ID NO: 38541 - DNA, 201 bp, Homo sapiens; identical to SEQ ID NO: 38511

SEQ ID NO: 38542 - DNA, 201 bp, Homo sapiens; identical to SEQ ID NO: 38512

SEQ ID NO: 38543 - DNA, 201 bp, Homo sapiens; identical to SEQ ID NO: 38514

SEQ ID NO: 38544 - DNA, 201 bp, Homo sapiens; identical to SEQ ID NO: 38516

SEQ ID NO: 38545 - DNA, 201 bp, Homo sapiens; identical to SEQ ID NO: 38517

SEQ ID NO: 38546 - DNA, 201 bp, Homo sapiens; identical to SEQ ID NO: 38518

SEQ ID NO: 38547 - DNA, 201 bp, Homo sapiens; identical to SEQ ID NO: 38519

SEQ ID NO: 38548 - DNA, 201 bp, Homo sapiens; identical to SEQ ID NO: 38524

SEQ ID NO: 38549 - DNA, 201 bp, Homo sapiens; identical to SEQ ID NO: 38526

SEQ ID NO: 38550 - DNA, 201 bp, Homo sapiens
ttgagtctgggagcactaggtcttcatagttccaggcccagagctacagctgggctgggagcatgtgtgtgcactgtaagaaggagctgatgatactggcsacgtgctggggttcgctcatgtggacacagtgattgcctgggacttccacaaactggaactgctggagaggggagggggtgggtggtgaggtgtggccag

SEQ ID NO: 38551 - DNA, 201 bp, Homo sapiens; identical to SEQ ID NO: 38530

SEQ ID NO: 38552 - DNA, 201 bp, Homo sapiens
catgtgtgtgcactgtaagaaggagctgatgatactggccacgtgctggggttcgctcatgtggacacagtgattgcctgggacttccacaaactggaacygctggagaggggagggggtgggtggtgaggtgtggccagaggagcctagggagctccatgggccccggggtcagggccctcccacagcattccagctccc

SEQ ID NO: 38553 - DNA, 201 bp, Homo sapiens; identical to SEQ ID NO: 38509

SEQ ID NO: 38554 - DNA, 201 bp, Homo sapiens; identical to SEQ ID NO: 38513

SEQ ID NO: 38555 - DNA, 201 bp, Homo sapiens; identical to SEQ ID NO: 38515

SEQ ID NO: 38556 - DNA, 201 bp, Homo sapiens; identical to SEQ ID NO: 38520

SEQ ID NO: 38557 - DNA, 201 bp, Homo sapiens; identical to SEQ ID NO: 38522

SEQ ID NO: 38558 - DNA, 201 bp, Homo sapiens; identical to SEQ ID NO: 38523

SEQ ID NO: 38559 - DNA, 201 bp, Homo sapiens; identical to SEQ ID NO: 38525

SEQ ID NO: 38560 - DNA, 201 bp, Homo sapiens; identical to SEQ ID NO: 38528

SEQ ID NO: 38561 - DNA, 201 bp, Homo sapiens; identical to SEQ ID NO: 38529

SEQ ID NO: 38562 - DNA, 201 bp, Homo sapiens
caaactggaactgctggagaggggagggggtgggtggtgaggtgtggccagaggagcctagggagctccatgggccccggggtcagggccctcccacagcmttccagctccctgcaggtcaggagcgcctcccacagtgagtttcccccacactcggctccttggagccccgacagtccatagcaccccaggaggtgtcta

SEQ ID NO: 38563 - DNA, 201 bp, Homo sapiens
acagtgattgcctgggacttccacaaactggaactgctggagaggggagggggtgggtggtgaggtgtggccagaggagcctagggagctccatgggcccyggggtcagggccctcccacagcattccagctccctgcaggtcaggagcgcctcccacagtgagtttcccccacactcggctccttggagccccgacagtc

SEQ ID NO: 38564 - DNA, 201 bp, Homo sapiens
atagcaccccaggaggtgtctaaccctagggacttggaggcctcccaggggtctaggccagctgagttgtgaagttgcatggcagggacagggcggggccraggccagggttgctgtgattgtatcagaagaggtacccgtgagaaaagataatgagatgggggcgtgaacagcctgcagacttgtgtctgccttcaagaa

SEQ ID NO: 38565 - DNA, 201 bp, Homo sapiens
tgagtttcccccacactcggctccttggagccccgacagtccatagcaccccaggaggtgtctaaccctagggacttggaggcctcccaggggtctaggcyagctgagttgtgaagttgcatggcagggacagggcggggccgaggccagggttgctgtgattgtatcagaagaggtacccgtgagaaaagataatgagat

SEQ ID NO: 38566 - DNA, 201 bp, Homo sapiens
tggggctcaggaactcagagtcccagtgttgagtctgggagcactaggtcttcatagttccaggcccagagctacagctgggctgggagcatgtgtgtgcrctgtaagaaggagctgatgatactggccacgtgctggggttcgctcatgtggacacagtgattgcctgggacttccacaaactggaactgctggagaggg

SEQ ID NO: 38567 - DNA, 201 bp, Homo sapiens; identical to SEQ ID NO: 38534

SEQ ID NO: 38568 - DNA, 201 bp, Homo sapiens; identical to SEQ ID NO: 38532

SEQ ID NO: 38569 - DNA, 201 bp, Homo sapiens; identical to SEQ ID NO: 38505

SEQ ID NO: 38570 - DNA, 201 bp, Homo sapiens; identical to SEQ ID NO: 38506

SEQ ID NO: 38571 - DNA, 201 bp, Homo sapiens; identical to SEQ ID NO: 38507

SEQ ID NO: 38572 - DNA, 201 bp, Homo sapiens; identical to SEQ ID NO: 38508

SEQ ID NO: 38573 - DNA, 201 bp, Homo sapiens; identical to SEQ ID NO: 38510

SEQ ID NO: 38574 - DNA, 201 bp, Homo sapiens; identical to SEQ ID NO: 38511

SEQ ID NO: 38575 - DNA, 201 bp, Homo sapiens; identical to SEQ ID NO: 38512

SEQ ID NO: 38576 - DNA, 201 bp, Homo sapiens; identical to SEQ ID NO: 38514

SEQ ID NO: 38577 - DNA, 201 bp, Homo sapiens; identical to SEQ ID NO: 38516

SEQ ID NO: 38578 - DNA, 201 bp, Homo sapiens; identical to SEQ ID NO: 38517

SEQ ID NO: 38579 - DNA, 201 bp, Homo sapiens; identical to SEQ ID NO: 38518

SEQ ID NO: 38580 - DNA, 201 bp, Homo sapiens; identical to SEQ ID NO: 38519

SEQ ID NO: 38581 - DNA, 201 bp, Homo sapiens; identical to SEQ ID NO: 38524

SEQ ID NO: 38582 - DNA, 201 bp, Homo sapiens
ggaggacggtatcccgagcccaccgtgctacgcagctattccaatcaagttctctgaaaagcaacaggcttctcactacctctatgtgagagcacacggcrttcaacaaggcaccaagtccacctggcctcagaagaggactctttttgtcttcaatgtgcccccatactgcacagagaaactaaagggaattgctggatt

SEQ ID NO: 38583 - DNA, 201 bp, Homo sapiens; identical to SEQ ID NO: 38550

SEQ ID NO: 38584 - DNA, 201 bp, Homo sapiens; identical to SEQ ID NO: 38530

SEQ ID NO: 38585 - DNA, 201 bp, Homo sapiens; identical to SEQ ID NO: 38552

SEQ ID NO: 38586 - DNA, 201 bp, Homo sapiens; identical to SEQ ID NO: 38509

SEQ ID NO: 38587 - DNA, 201 bp, Homo sapiens; identical to SEQ ID NO: 38513

SEQ ID NO: 38588 - DNA, 201 bp, Homo sapiens; identical to SEQ ID NO: 38515

SEQ ID NO: 38589 - DNA, 201 bp, Homo sapiens; identical to SEQ ID NO: 38520

SEQ ID NO: 38590 - DNA, 201 bp, Homo sapiens; identical to SEQ ID NO: 38522

SEQ ID NO: 38591 - DNA, 201 bp, Homo sapiens
acagaacatagctgtgtagtcagcacccaggtggagacacagcagcacatcccagaacccccgaacccccactgcctccaccagagacaaccaccatcccractgtcacagcatagggtcgctactgctgattcagcaggagagcctgtcctgcctccagtccacctgtggccttgtccagtctgtagagttgaaggagaa

SEQ ID NO: 38592 - DNA, 201 bp, Homo sapiens; identical to SEQ ID NO: 38523

SEQ ID NO: 38593 - DNA, 201 bp, Homo sapiens; identical to SEQ ID NO: 38525

SEQ ID NO: 38594 - DNA, 201 bp, Homo sapiens; identical to SEQ ID NO: 38528

SEQ ID NO: 38595 - DNA, 201 bp, Homo sapiens; identical to SEQ ID NO: 38529

SEQ ID NO: 38596 - DNA, 201 bp, Homo sapiens; identical to SEQ ID NO: 38562

SEQ ID NO: 38597 - DNA, 201 bp, Homo sapiens; identical to SEQ ID NO: 38563

SEQ ID NO: 38598 - DNA, 201 bp, Homo sapiens; identical to SEQ ID NO: 38564

SEQ ID NO: 38599 - DNA, 201 bp, Homo sapiens; identical to SEQ ID NO: 38565

SEQ ID NO: 38600 - DNA, 201 bp, Homo sapiens; identical to SEQ ID NO: 38566

SEQ ID NO: 38601 - DNA, 201 bp, Homo sapiens; identical to SEQ ID NO: 38532

SEQ ID NO: 38602 - DNA, 201 bp, Homo sapiens; identical to SEQ ID NO: 38534

SEQ ID NO: 38603 - DNA, 201 bp, Homo sapiens
ggctttgattacttaccctggttccacatactgtaagatcaaaaaaccatctccacatttgaaagagatgtaaggtgtattcatagggatggtggctcaamaaatcaagcaaactgaaatcaaggggagggggaagggaatgaaatggaaagggaggctgattcccttcccctgacttaccactaatttactaggctacct

SEQ ID NO: 38604 - DNA, 201 bp, Homo sapiens
tgagtaacctctcacagctatccagcacatgccacaaccctatgctcttgccttcttttatctgcagtgtgtgaagggactcttttaaataaatgagcaastgtcctaagctatgtcatccaaagattgtcctttccgttctcaaatcttgtgactgggatcactcaacagcactgtgatgtattattttcaatgaggtgc

SEQ ID NO: 38605 - DNA, 201 bp, Homo sapiens; identical to SEQ ID NO: 38603

SEQ ID NO: 38606 - DNA, 201 bp, Homo sapiens; identical to SEQ ID NO: 38604

SEQ ID NO: 38607 - DNA, 201 bp, Homo sapiens
tcctggtggaattctcttgtgaggagggccaaggcctgaactacctgccaagggagcaccttggggtttgcccaggcaaccagctggccctggtccaaggyatgctggagcgagtggtggatggccccacaccccaccagacagggcacctggaggctctggatgagagcagtgagccctgggccagggagccagtgctgc

SEQ ID NO: 38608 - DNA, 201 bp, Homo sapiens
ccagcgtcgcggcccttctctgggtgccaccctccaccgcgcccgcagaccctgtctccagccgcccgagcggtctccactgtaggcttcctacccccaayccggccagacaaagccccggcagcagggccggcacttccgagcctccggactcgggacgccgcgctcttaccctggcctcatccagagtgacgccggcgc

SEQ ID NO: 38609 - DNA, 183 bp, Homo sapiens
ctgcgtttttaaacaaagcgaggcagggtcgttttctatccccttagccagatctaaggcggagccaaagaatgagtaccctgtaagagccgcctctatcrccgccccctgcccccggcccgctgaagaattaagaatacaaaaagctgaacccacagataaagcatttgcaatttaacttcc

SEQ ID NO: 38610 - DNA, 201 bp, Homo sapiens
cttcctacccccaacccggccagacaaagccccggcagcagggccggcacttccgagcctccggactcgggacgccgcgctcttaccctggcctcatccaragtgacgccggcgccaccgcttcccccggctttggcggcggggcagctggcggcgcgggtcttggaggagcgggtccgagaggagatgaaatggctgctg

SEQ ID NO: 38611 - DNA, 116 bp, Homo sapiens
gcttcctacccccaayccggccagacaaagccccggcagcagggccggcacttccgagcctccggactcgggacgccgcgctcttaccctggcctcatccagagtgacgccggcgc

SEQ ID NO: 38612 - DNA, 201 bp, Homo sapiens; identical to SEQ ID NO: 38610

SEQ ID NO: 38613 - DNA, 201 bp, Homo sapiens; identical to SEQ ID NO: 38608

SEQ ID NO: 38614 - DNA, 201 bp, Homo sapiens
tcgagtactattgaactctctcctgatgagaagatgtttagataagtacaagttaagaaagtagcatatgactggaaactatattcagtgcactttctccraaagactacccagaaaaatagacttattttcaaataccagttatcaagatatattaaatagctgtattgtttagaatcttaatatggtataaattagcat

SEQ ID NO: 38615 - DNA, 201 bp, Homo sapiens; identical to SEQ ID NO: 38610

SEQ ID NO: 38616 - DNA, 201 bp, Homo sapiens
gtgcactttctccaaaagactacccagaaaaatagacttattttcaaataccagttatcaagatatattaaatagctgtattgtttagaatcttaatatgrtataaattagcatatgtattcacaatattcattcagacatcattcccagacagcagggatttatttaaatgttagctgtctgagtttttaaatagctaat

SEQ ID NO: 38617 - DNA, 201 bp, Homo sapiens; identical to SEQ ID NO: 38608

SEQ ID NO: 38618 - DNA, 201 bp, Homo sapiens; identical to SEQ ID NO: 38614

SEQ ID NO: 38619 - DNA, 201 bp, Homo sapiens
tattattatattaaatattaaatttttaaaatatttatttatggccactgtgcccagccaataataacttataaaacatgaaacgatttagtgagaaaagyggccggttttttggggggaattactttctgtcataaagaagatagatgggttctcatgtcttctacattcagtctgttgtgcagtcacatatcatgtaga

SEQ ID NO: 38620 - DNA, 201 bp, Homo sapiens
ttcacttcctcaccaacttgaaccacccccaaactgagagtaagctggagttagacagcggcaggaactgacacactttcaagaagggtttgacaccgcakaaaactttcacttctccaacccttccacccaggggctctggcccttcgctcttgcttccccgctagaattcccctctggggcaggacaaggacacggaca

SEQ ID NO: 38621 - DNA, 201 bp, Homo sapiens; identical to SEQ ID NO: 38610

SEQ ID NO: 38622 - DNA, 201 bp, Homo sapiens; identical to SEQ ID NO: 38616

SEQ ID NO: 38623 - DNA, 201 bp, Homo sapiens
gacgcctttacaggagagtgcgaccatggctgtagtaaaaggtaacaaggacgtctttgtgtgcatgcccacaggggcaggaaaatccctatgctatcagstccctgctctgttggccaaaggcatcaccattgtagtctctcctctcattgctttgattcaggaccaagtggaccacttgctaaccctaaaggtacgagt

SEQ ID NO: 38624 - DNA, 201 bp, Homo sapiens
gcttaccatgcagggctgaaggcctctgaaagaacgctggtgcagaacgactggatggaggagaaggtccctgtaattgttgcaaccattagttttgggaygggagtggataaagccaatgtcaggtttgtcgcccattggaatattgccaagtctatggctgggtactaccaggagtctggccgggctggcagggatggg

SEQ ID NO: 38625 - DNA, 201 bp, Homo sapiens
ttggctaagatgagcagccaccataccacctttccttttgaccctgagcggcgagtccggagtacgctgaagaaggtctttgggtttgactcttttaagaygcctttacaggagagtgcgaccatggctgtagtaaaaggtaacaaggacgtctttgtgtgcatgcccacaggggcaggaaaatccctatgctatcagctc

SEQ ID NO: 38626 - DNA, 201 bp, Homo sapiens
catggctgggttttctgggacacatgtcgaggacagaaggtggagggtggtggagctgctgctggaagaaggggaaggaagagtggcccctccccgagttytaagtcaggatgaggcccacctgtccaaggtatcggaacctacccaggggaccctcagatcctccacccactcccccatccattacgatgccagcttcca

SEQ ID NO: 38627 - DNA, 201 bp, Homo sapiens
gtcttttctcagtccttctcctttccaaccatacttggctttggggatgaccccagacaccccctgaatccaggtcagaggtcagcccacctttctttctrcttgcaaagcctatagacccttctcagagcggtcctcatggctgggttttctgggacacatgtcgaggacagaaggtggagggtggtggagctgctgctg

SEQ ID NO: 38628 - DNA, 201 bp, Homo sapiens; identical to SEQ ID NO: 38623

SEQ ID NO: 38629 - DNA, 201 bp, Homo sapiens
cgggtgggagctggtttccccaaaggctcctgcccgttccagacggccacggaactgatggagacgactcggatcagggagcaagccccccagcccgagcsgggaggcgagcacgagcccccgagccggccctgtggcctcctggatgaggatgggagtgagcccctccctgggcccagaggggaggtccctggaggcagc

SEQ ID NO: 38630 - DNA, 201 bp, Homo sapiens
gctggagcaagacctgcatcgggccctcccaggggaacggctttgaccccgagctgtacgagggaggccgcaagggctacggggacttcagcaggtatgaygaaggttctggaggcagcggggatgaaggcagagatgaggcccacaagcgggagtggaacctcttctatcagaagcagatgcagctgcgcaagggcaaag

SEQ ID NO: 38631 - DNA, 201 bp, Homo sapiens; identical to SEQ ID NO: 38624

SEQ ID NO: 38632 - DNA, 201 bp, Homo sapiens
cgctttggcttctctgagttggggttgtgtataggggtcttcgaacagttccggaaccagccagcagcctttaattcttgggcggaccacggccggttctrtgttcttggctaagatgagcagccaccataccacctttccttttgaccctgagcggcgagtccggagtacgctgaagaaggtctttgggtttgactcttt

SEQ ID NO: 38633 - DNA, 201 bp, Homo sapiens
aacctctacaaggccagcgtgctgaagaaggtggccgatatccacagagcctccaaggatgggcagccctatgacatgggaggcagtgccaagagctgcartgcccaagctgagcccccggagcccaatgagtatgacattccaccagcctcccatgtgtactcgctcaaacccaagcgggtgggagctggtttccccaaa

SEQ ID NO: 38634 - DNA, 201 bp, Homo sapiens
caccagcctcccatgtgtactcgctcaaacccaagcgggtgggagctggtttccccaaaggctcctgcccgttccagacggccacggaactgatggagacractcggatcagggagcaagccccccagcccgagcggggaggcgagcacgagcccccgagccggccctgtggcctcctggatgaggatgggagtgagcccc

SEQ ID NO: 38635 - DNA, 201 bp, Homo sapiens
cggccgtgcggaggcggctggaggccttggagcgcagcagcagctggagcaagacctgcatcgggccctcccaggggaacggctttgaccccgagctgtaygagggaggccgcaagggctacggggacttcagcaggtatgacgaaggttctggaggcagcggggatgaaggcagagatgaggcccacaagcgggagtgga

SEQ ID NO: 38636 - DNA, 201 bp, Homo sapiens; identical to SEQ ID NO: 38627

SEQ ID NO: 38637 - DNA, 201 bp, Homo sapiens
gtgagcccctccctgggcccagaggggaggtccctggaggcagcgctcactatggggggccctcccctgagaagaaggcaaaaagttcctctgggggcagytcccttgccaagggccgggctagcaagaaacagcagctcctagccacagcggcccacaaggattctcagagcatcgcccgcttcttctgccgaagggtgg

SEQ ID NO: 38638 - DNA, 201 bp, Homo sapiens; identical to SEQ ID NO: 38626

SEQ ID NO: 38639 - DNA, 201 bp, Homo sapiens
ggccgggctagcaagaaacagcagctcctagccacagcggcccacaaggattctcagagcatcgcccgcttcttctgccgaagggtggaaagcccagctcygctggcatcagccccagaggcagaaggtgcctgcccctcctgtgagggggttcagggacccccgatggccccagagaagtacacaggggaggaagatgga

SEQ ID NO: 38640 - DNA, 201 bp, Homo sapiens
ccagaggcagaaggtgcctgcccctcctgtgagggggttcagggacccccgatggccccagagaagtacacaggggaggaagatggagccgggggacattygcctgcccctccccagactgaggagtgcctcagggagaggccaagcacctgcccgcccagagaccagggcacccctgaagtccagcccacccctgcaaag

SEQ ID NO: 38641 - DNA, 201 bp, Homo sapiens
ttggagcgcagcagcagctggagcaagacctgcatcgggccctcccaggggaacggctttgaccccgagctgtacgagggaggccgcaagggctacggggrcttcagcaggtatgacgaaggttctggaggcagcggggatgaaggcagagatgaggcccacaagcgggagtggaacctcttctatcagaagcagatgcag

SEQ ID NO: 38642 - DNA, 201 bp, Homo sapiens
gtttccccaaaggctcctgcccgttccagacggccacggaactgatggagacgactcggatcagggagcaagccccccagcccgagcggggaggcgagcaygagcccccgagccggccctgtggcctcctggatgaggatgggagtgagcccctccctgggcccagaggggaggtccctggaggcagcgctcactatgggg

SEQ ID NO: 38643 - DNA, 201 bp, Homo sapiens; identical to SEQ ID NO: 38625

SEQ ID NO: 38644 - DNA, 201 bp, Homo sapiens; identical to SEQ ID NO: 38623

SEQ ID NO: 38645 - DNA, 201 bp, Homo sapiens; identical to SEQ ID NO: 38629

SEQ ID NO: 38646 - DNA, 201 bp, Homo sapiens; identical to SEQ ID NO: 38630

SEQ ID NO: 38647 - DNA, 201 bp, Homo sapiens; identical to SEQ ID NO: 38624

SEQ ID NO: 38648 - DNA, 201 bp, Homo sapiens; identical to SEQ ID NO: 38633

SEQ ID NO: 38649 - DNA, 201 bp, Homo sapiens; identical to SEQ ID NO: 38634

SEQ ID NO: 38650 - DNA, 201 bp, Homo sapiens; identical to SEQ ID NO: 38635

SEQ ID NO: 38651 - DNA, 201 bp, Homo sapiens; identical to SEQ ID NO: 38627

SEQ ID NO: 38652 - DNA, 201 bp, Homo sapiens; identical to SEQ ID NO: 38637

SEQ ID NO: 38653 - DNA, 201 bp, Homo sapiens; identical to SEQ ID NO: 38626

SEQ ID NO: 38654 - DNA, 201 bp, Homo sapiens; identical to SEQ ID NO: 38639

SEQ ID NO: 38655 - DNA, 201 bp, Homo sapiens; identical to SEQ ID NO: 38640

SEQ ID NO: 38656 - DNA, 201 bp, Homo sapiens; identical to SEQ ID NO: 38641

SEQ ID NO: 38657 - DNA, 201 bp, Homo sapiens; identical to SEQ ID NO: 38642

SEQ ID NO: 38658 - DNA, 201 bp, Homo sapiens; identical to SEQ ID NO: 38625

SEQ ID NO: 38659 - DNA, 201 bp, Homo sapiens; identical to SEQ ID NO: 38623

SEQ ID NO: 38660 - DNA, 201 bp, Homo sapiens
cggggctgtggcagccagcggttttcctctcttctctatctgtagctactttctctgggctgcagccttgaaaaagcagtgtttgattattcataacaatgagtgtcttttagtgtcacagggaacagttattaggtttgaagcaacctccagcttgaggcctcggcatcttgagatggaagagcagccttgtgtttagac

SEQ ID NO: 38661 - DNA, 201 bp, Homo sapiens; identical to SEQ ID NO: 38625

SEQ ID NO: 38662 - DNA, 201 bp, Homo sapiens; identical to SEQ ID NO: 38632

SEQ ID NO: 38663 - DNA, 201 bp, Homo sapiens; identical to SEQ ID NO: 38624

SEQ ID NO: 38664 - DNA, 201 bp, Homo sapiens
caaagtgtcagtgagatcatttacttccccggcacgccctagttaagcagctgacataagacagcccgtaggctaccaagggacacctgcctgcaaaggcyattgtgtcgggcagtgtggaagtcaggaccttgctcttctctattggaggccccgggatctctcgcagtgtggggatttgctcagtattctgagtggtgt

SEQ ID NO: 38665 - DNA, 201 bp, Homo sapiens
gaccagtgagtcggtggcttctggactgaagctattttcttctccaaactgctgtctctaatttggcctctgtggcaagaccacgcccagcaaaagtggtyggctgcagtgccaggaccacccttgcctgcagcctttgcgaccagagcccttttcaagcacaattaatatgggagttgctaaatttggccttcttaggct

SEQ ID NO: 38666 - DNA, 201 bp, Homo sapiens
aaagtgtcagtgagatcatttacttccccggcacgccctagttaagcagctgacataagacagcccgtaggctaccaagggacacctgcctgcaaaggccrttgtgtcgggcagtgtggaagtcaggaccttgctcttctctattggaggccccgggatctctcgcagtgtggggatttgctcagtattctgagtggtgtc

SEQ ID NO: 38667 - DNA, 201 bp, Homo sapiens; identical to SEQ ID NO: 38623

SEQ ID NO: 38668 - DNA, 201 bp, Homo sapiens; identical to SEQ ID NO: 38660

SEQ ID NO: 38669 - DNA, 201 bp, Homo sapiens; identical to SEQ ID NO: 38624

SEQ ID NO: 38670 - DNA, 201 bp, Homo sapiens; identical to SEQ ID NO: 38665

SEQ ID NO: 38671 - DNA, 201 bp, Homo sapiens; identical to SEQ ID NO: 38664

SEQ ID NO: 38672 - DNA, 201 bp, Homo sapiens; identical to SEQ ID NO: 38666

SEQ ID NO: 38673 - DNA, 201 bp, Homo sapiens; identical to SEQ ID NO: 38625

SEQ ID NO: 38674 - DNA, 201 bp, Homo sapiens
atgcagatcagacccattgtgatgtcacagaaagatggggacaggccaaagaaaaaagtgactttcaactcttcttccatcatttttatcatcaccagtgrtgaatcactgtcagttgacgacagcgacaaaaccaatgggtccaaagttgatgtaatccaagttcgtcctttgtaggaatgaagaatggcaacgaaagat

SEQ ID NO: 38675 - DNA, 201 bp, Homo sapiens
tcaagttatcaaggagataattctagaatgaaaaagaaaatcctcttgttggaaacaaaagacgttttatatgtgcagtatgacaaagaggagtttcagaracaactttgaatccttgtcagcctggagaccagcaccagaggaatctacaaggcaaactcccatatatttgcttcccccaaattgctgcccctacagact

SEQ ID NO: 38676 - DNA, 201 bp, Homo sapiens
cccgttctatgtaatatcaacagaaccttgtggtccagcaggaaatccgaattgcccatatgctcttgggcctcaggaagaggttgaacaaaaacaaattmttttaattcaacgggtgctttacataatgaaaaaaccacttgtggcacacgatgggcatctaacatcatcatcttctaatgtgttggagattttcatttc

SEQ ID NO: 38677 - DNA, 201 bp, Homo sapiens; identical to SEQ ID NO: 38674

SEQ ID NO: 38678 - DNA, 201 bp, Homo sapiens; identical to SEQ ID NO: 38675

SEQ ID NO: 38679 - DNA, 201 bp, Homo sapiens; identical to SEQ ID NO: 38676

SEQ ID NO: 38680 - DNA, 201 bp, Homo sapiens
gtgctggcctatgaacgttacattcgcgtggtccatgccagagtgatcaatttttcctgggcctggagggccattacctacatctggctctactcactggygtgggcaggagcacctctcctgggatggaacaggtacatcctggacgtacacggactaggctgcactgtggactggaaatccaaggatgccaacgattcc

SEQ ID NO: 38681 - DNA, 201 bp, Homo sapiens
caatttttcctgggcctggagggccattacctacatctggctctactcactggcgtgggcaggagcacctctcctgggatggaacaggtacatcctggacrtacacggactaggctgcactgtggactggaaatccaaggatgccaacgattcctcctttgtgcttttcttatttcttggctgcctggtggtgcccctggg

SEQ ID NO: 38682 - DNA, 201 bp, Homo sapiens
cacctcccgggttcaagcgattctcctgcctcagcctcccgagtagctgagattacaggcgcccgccaccacgcccagcctctaaagagagcaatcactayacttatggctgggattttgcgcttagtagttcaatggcccccaggcagactacagaccgtgacaaaaggtgtggagtctcttatttgtacagattggatt

SEQ ID NO: 38683 - DNA, 201 bp, Homo sapiens
tatctaaacgcattttcttgtgtcacagaatcaagcccttgaagttgccacaaggacttccaacagaggagaacatgtctaacacgtgcctcaaaagcacyggggagttagtagtgcagtggcatctgaaacctgtggagcagaaagcacatgagtcctaatgccccagcagcttccgattggaaaatgcaaattgttttt

SEQ ID NO: 38684 - DNA, 176 bp, Homo sapiens
cactgaaacctccacctcccgggttcaagcgattctcctgcctcagcctcccgagtagctgagattacaggcgccygccaccacgcccagcctctaaagagagcaatcactacacttatggctgggattttgcgcttagtagttcaatggcccccaggcagactacagaccgtgac

SEQ ID NO: 38685 - DNA, 201 bp, Homo sapiens
taattgtacatatttatggggtacatagtgacgtttcaatatatataaagtatagtgatccgatcagggtaattggcatatccatcatctcagacatttaycatttcttcatgttgggaacattcaacatcctcctcctagctatttgaaactatgtgttattgttaactgtagttatcctgcggggatatagaacgctag

SEQ ID NO: 38686 - DNA, 201 bp, Homo sapiens
atcctgcggggatatagaacgctagaacgtattcctcctatctaaacgcattttcttgtgtcacagaatcaagcccttgaagttgccacaaggacttccarcagaggagaacatgtctaacacgtgcctcaaaagcactggggagttagtagtgcagtggcatctgaaacctgtggagcagaaagcacatgagtcctaatg

SEQ ID NO: 38687 - DNA, 201 bp, Homo sapiens
gcgcccgccaccacgcccagcctctaaagagagcaatcactacacttatggctgggattttgcgcttagtagttcaatggcccccaggcagactacagacygtgacaaaaggtgtggagtctcttatttgtacagattggattcgtcacaaattcaccagatcaagaattccagaaaaagtgtttcaggcctcacctgaag

SEQ ID NO: 38688 - DNA, 201 bp, Homo sapiens
aattaattgtgagagctctgaatgctgtccaaccccagctggatgtgcaggctaccaaaagatttgaccttttacttgatggacagtttaaaatctcaggracagcttctaagatcggccggactactgcctatcaccattgcactttattatgtagtactgatgggacgttcttgtcttctttgctaaagagcccttacc

SEQ ID NO: 38689 - DNA, 201 bp, Homo sapiens
ctctgttgcccagcccatctcggcccactgaaacctccacctcccgggttcaagcgattctcctgcctcagcctcccgagtagctgagattacaggcgccygccaccacgcccagcatgctgatcccattttcaatgaagaattgcttccagttactttgtaactgccaggtcccagcagctggctttaaaaaaacagtaa

SEQ ID NO: 38690 - DNA, 201 bp, Homo sapiens
ttgtaattggtaggcatcaaaatccttggcaggaatgtaacctgaatctaatgagagaagaaggtataaaactggctcggagaagaagtggaggaggaacrgtctaccatgatatgggtaatatcaatttgactttctttacaaccaaaaaaaagtatgatagaatggaaaatctgaaattaattgtgagagctctgaatg

SEQ ID NO: 38691 - DNA, 201 bp, Homo sapiens
ccactgctagcataccttccttagtgaaaaatcttttggaaaaggatcccactctgacctgtgaagtactaatgaatgctgttgctacagagtatgctgcytatcatcaaattgataatcacattcacctaataaacccaacggatgagacactgtttcctggaataaatagcaaagccaaagaactgcaaacttgggagt

SEQ ID NO: 38692 - DNA, 201 bp, Homo sapiens
acttgatggacagtttaaaatctcaggaacagcttctaagatcggccggactactgcctatcaccattgcactttattatgtagtactgatgggacgttcytgtcttctttgctaaagagcccttaccaagggatcaggagcaatgccactgctagcataccttccttagtgaaaaatcttttggaaaaggatcccactct

SEQ ID NO: 38693 - DNA, 201 bp, Homo sapiens; identical to SEQ ID NO: 38682

SEQ ID NO: 38694 - DNA, 201 bp, Homo sapiens
aattgaaagtagttaagcatttgataagaatcaagcccttgaagttgccacaaggacttccaacagaggagaacatgtctaacacgtgcctcaaaagcacyggggagttagtagtgcagtggcatctgaaacctgtggagcagaaagcacatgagtcctaatgccccagcagcttccgattggaaaatgcaaattgttttt

SEQ ID NO: 38695 - DNA, 176 bp, Homo sapiens; identical to SEQ ID NO: 38684

SEQ ID NO: 38696 - DNA, 201 bp, Homo sapiens
ccctcaagttcacaagaatatcccttcagtgaatgcaaaattgaaagtagttaagcatttgataagaatcaagcccttgaagttgccacaaggacttccarcagaggagaacatgtctaacacgtgcctcaaaagcactggggagttagtagtgcagtggcatctgaaacctgtggagcagaaagcacatgagtcctaatg

SEQ ID NO: 38697 - DNA, 201 bp, Homo sapiens
atcctaaggaacctctgtcaacagttgaggttgctgttgaaaagaaagaagaaggaggcggaaatctctcagggagaattatttcctttcttttctatttyagatacctggaggggtggggagaagtaagaattgtaagggaggttcagtagtggggaattctgtgacagctgattgaagatgatgatgaagaacctctgc

SEQ ID NO: 38698 - DNA, 201 bp, Homo sapiens; identical to SEQ ID NO: 38687

SEQ ID NO: 38699 - DNA, 163 bp, Homo sapiens
agctgagattacaggcgcccgccaccacgcccagccacagcctctaaagagagcaatcactayacttatggctgggattttgcgcttagtagttcaatggcccccaggcagactacagaccgtgacaaaaggtgtggagtctcttatttgtacagattggatt

SEQ ID NO: 38700 - DNA, 201 bp, Homo sapiens; identical to SEQ ID NO: 38694

SEQ ID NO: 38701 - DNA, 120 bp, Homo sapiens
agctgagattacaggcgccrgccaccacgcccagccacagcctctaaagagagcaatcactacacttatggctgggattttgcgcttagtagttcaatggcccccaggcagactacagac

SEQ ID NO: 38702 - DNA, 201 bp, Homo sapiens; identical to SEQ ID NO: 38696

SEQ ID NO: 38703 - DNA, 128 bp, Homo sapiens
atcctaaggaacctctgtcaacagttgaggttgctgttgaaaagaaagaagaaggaggcggaaatctctcagggagaattatttcctttcttttctatttyagatacctggaggggtggggagaagta

SEQ ID NO: 38704 - DNA, 201 bp, Homo sapiens
gccaccacgcccagccacagcctctaaagagagcaatcactacacttatggctgggattttgcgcttagtagttcaatggcccccaggcagactacagacygtgacaaaaggtgtggagtctcttatttgtacagattggattcgtcacaaattcaccagatcaagaattccagaaaaagtgtttcaggcctcacctgaag

SEQ ID NO: 38705 - DNA, 129 bp, Homo sapiens
ccacagcctctaaagagagcaatcactayacttatggctgggattttgcgcttagtagttcaatggcccccaggcagactacaggcttgcttttagaaagtgcagtggtgctgcctaatctgctcataa

SEQ ID NO: 38706 - DNA, 201 bp, Homo sapiens; identical to SEQ ID NO: 38694

SEQ ID NO: 38707 - DNA, 201 bp, Homo sapiens; identical to SEQ ID NO: 38696

SEQ ID NO: 38708 - DNA, 128 bp, Homo sapiens; identical to SEQ ID NO: 38703

SEQ ID NO: 38709 - DNA, 201 bp, Homo sapiens
ttgcttttagaaagtgcagtggtgctgcctaatctgctcataagggccagagcctagatgagcctattgacctgctcctggctgcagaggacaacaatacygtgacaaaaggtgtggagtctcttatttgtacagattggattcgtcacaaattcaccagatcaagaattccagaaaaagtgtttcaggcctcacctgaag

SEQ ID NO: 38710 - DNA, 201 bp, Homo sapiens
gtgtagcacttggtagttcttcctctgctctgcttcccttcggaggaaaatttcaggctgaaggtttagcgggtgccgcctctaaagagagcaatcactayacttatggctgggattttgcgcttagtagttcaatggcccccaggcagactacagaccgtgacaaaaggtgtggagtctcttatttgtacagattggatt

SEQ ID NO: 38711 - DNA, 201 bp, Homo sapiens; identical to SEQ ID NO: 38694

SEQ ID NO: 38712 - DNA, 141 bp, Homo sapiens
caggctttgagtgtagcacttggtagttcttcctctgctcygcttcccttcggaggaaaatttcaggctgaaggtttagcgggtgccgcctctaaagagagcaatcactacacttatggctgggattttgcgcttagtagt

SEQ ID NO: 38713 - DNA, 201 bp, Homo sapiens; identical to SEQ ID NO: 38696

SEQ ID NO: 38714 - DNA, 128 bp, Homo sapiens; identical to SEQ ID NO: 38703

SEQ ID NO: 38715 - DNA, 201 bp, Homo sapiens
tgaaggtttagcgggtgccgcctctaaagagagcaatcactacacttatggctgggattttgcgcttagtagttcaatggcccccaggcagactacagacygtgacaaaaggtgtggagtctcttatttgtacagattggattcgtcacaaattcaccagatcaagaattccagaaaaagtgtttcaggcctcacctgaag

SEQ ID NO: 38716 - DNA, 201 bp, Homo sapiens; identical to SEQ ID NO: 38710

SEQ ID NO: 38717 - DNA, 201 bp, Homo sapiens; identical to SEQ ID NO: 38694

SEQ ID NO: 38718 - DNA, 141 bp, Homo sapiens; identical to SEQ ID NO: 38712

SEQ ID NO: 38719 - DNA, 201 bp, Homo sapiens; identical to SEQ ID NO: 38696

SEQ ID NO: 38720 - DNA, 201 bp, Homo sapiens; identical to SEQ ID NO: 38715

SEQ ID NO: 38721 - DNA, 201 bp, Homo sapiens; identical to SEQ ID NO: 38682

SEQ ID NO: 38722 - DNA, 201 bp, Homo sapiens; identical to SEQ ID NO: 38683

SEQ ID NO: 38723 - DNA, 176 bp, Homo sapiens
cactgaaacctccacctcccgggttcaagcgattctcctgcctcagcctcccgagtagctgagattacaggcgccrgccaccacgcccagcctctaaagagagcaatcactacacttatggctgggattttgcgcttagtagttcaatggcccccaggcagactacagaccgtgac

SEQ ID NO: 38724 - DNA, 201 bp, Homo sapiens; identical to SEQ ID NO: 38685

SEQ ID NO: 38725 - DNA, 201 bp, Homo sapiens; identical to SEQ ID NO: 38686

SEQ ID NO: 38726 - DNA, 201 bp, Homo sapiens; identical to SEQ ID NO: 38687

SEQ ID NO: 38727 - DNA, 201 bp, Homo sapiens
ttgagacttccttctaaaggagccacgtttgagaaatgggatgcaggcctaagattttctgccgtctcttggcaaaaatggcaaataatgatgctgttctsaagagactggagcagaagggtgcagaggcagatcaaatcattgaatatcttaagcagcaagtttctctacttaaggagaaagcaattttgcaggcaactt

SEQ ID NO: 38728 - DNA, 201 bp, Homo sapiens
tactccactgcacgctaattctatggtttctgaaaatgtgatacagtctacagcagtaacaaccgtatcttctggtaccaaagaacagataaaaggaggarcaggagacgaaaagaaagcgaaagagaaaattgaaaagaaaggagagaagaaggagaaaaaacagcaatcaatagctggaagtgccgactctaagccaat

SEQ ID NO: 38729 - DNA, 201 bp, Homo sapiens
gaagaaacttcgagttgaaaatgctaaactgaagaaagaaattgaagaactgaaacaagagctaattcaggcagaaattcaaaatggagtgaagcaaatascatttccatctggtactccactgcacgctaattctatggtttctgaaaatgtgatacagtctacagcagtaacaaccgtatcttctggtaccaaagaaca

SEQ ID NO: 38730 - DNA, 201 bp, Homo sapiens
aattcaaaatggagtgaagcaaataccatttccatctggtactccactgcacgctaattctatggtttctgaaaatgtgatacagtctacagcagtaacarccgtatcttctggtaccaaagaacagataaaaggaggaacaggagacgaaaagaaagcgaaagagaaaattgaaaagaaaggagagaagaaggagaaaaa

SEQ ID NO: 38731 - DNA, 201 bp, Homo sapiens
tttgggtacctaataaaggataatttatatcttattacagactgatattttgctttttcatgtgtcatcatactgtcagtatattaaaagaaattacagcytaaaacttaacatataccatacatatatattaaggtgtcaaatagctattctcactcatcttacaaatattgtaagagcaataaaaattaattgaggaat

SEQ ID NO: 38732 - DNA, 201 bp, Homo sapiens
ataagcctacaggtcatcagccttgaggtgattactgatgatttgggcttacacacatgtcagcaagatagggagtgtggataggggagggctggtagctwacaaggggcctcacagagaaatattagtgactttaaccaggtttcagaatctgggccttacctttacaggttcaacaaaagaatggcatcaatagaggca

SEQ ID NO: 38733 - DNA, 201 bp, Homo sapiens; identical to SEQ ID NO: 38730

SEQ ID NO: 38734 - DNA, 201 bp, Homo sapiens
aaatgcttccactaccaaaagacattagagaaaaccttaaaagtaataaagagaaatatatttgtcacttatacctaaaatatgagtggctcatttttgcrttactctcttctagacttgactagtcatttacttggtatatattgttttcattgattggggaaacactagatttttacctcggtttttgatcatttataa

SEQ ID NO: 38735 - DNA, 201 bp, Homo sapiens; identical to SEQ ID NO: 38727

SEQ ID NO: 38736 - DNA, 201 bp, Homo sapiens; identical to SEQ ID NO: 38728

SEQ ID NO: 38737 - DNA, 201 bp, Homo sapiens; identical to SEQ ID NO: 38729

SEQ ID NO: 38738 - DNA, 201 bp, Homo sapiens
cctcacagagaaatattagtgactttaaccaggtttcagaatctgggccttacctttacaggttcaacaaaagaatggcatcaatagaggcagaagtataracattgttttaaaaatacacacatgcacacacacacaaaacattttagcattatagctgtctgaatccttcaataagaaggagaggcacacacaaataca

SEQ ID NO: 38739 - DNA, 201 bp, Homo sapiens
ctctcttctagacttgactagtcatttacttggtatatattgttttcattgattggggaaacactagatttttacctcggtttttgatcatttataatggrgagaggaagttgcctatgttttgtaataatttattttttagcaggaatattgattagcagcttttttttctttatacacatagataactaactagattaa

SEQ ID NO: 38740 - DNA, 201 bp, Homo sapiens; identical to SEQ ID NO: 38731

SEQ ID NO: 38741 - DNA, 201 bp, Homo sapiens; identical to SEQ ID NO: 38732

SEQ ID NO: 38742 - DNA, 201 bp, Homo sapiens; identical to SEQ ID NO: 38730

SEQ ID NO: 38743 - DNA, 201 bp, Homo sapiens; identical to SEQ ID NO: 38734

SEQ ID NO: 38744 - DNA, 149 bp, Homo sapiens
gattttctgccgtctcttggcaaaaatggcaaataatgatgctgttctsaagagactggagcagaagggtgcagaggcagatcaaatcattgaatatcttaagcagcaagtttctctacttaaggagaaagcaattttgcaggcaactt

SEQ ID NO: 38745 - DNA, 201 bp, Homo sapiens; identical to SEQ ID NO: 38728

SEQ ID NO: 38746 - DNA, 201 bp, Homo sapiens; identical to SEQ ID NO: 38729

SEQ ID NO: 38747 - DNA, 201 bp, Homo sapiens; identical to SEQ ID NO: 38738

SEQ ID NO: 38748 - DNA, 201 bp, Homo sapiens; identical to SEQ ID NO: 38739

SEQ ID NO: 38749 - DNA, 201 bp, Homo sapiens; identical to SEQ ID NO: 38731

SEQ ID NO: 38750 - DNA, 201 bp, Homo sapiens; identical to SEQ ID NO: 38732

SEQ ID NO: 38751 - DNA, 201 bp, Homo sapiens; identical to SEQ ID NO: 38730

SEQ ID NO: 38752 - DNA, 201 bp, Homo sapiens; identical to SEQ ID NO: 38734

SEQ ID NO: 38753 - DNA, 201 bp, Homo sapiens
cctacatgcttcctgctgtggctgtctcggaacccgtggtcctccgcttcatgattttctgccgtctcttggcaaaaatggcaaataatgatgctgttctsaagagactggagcagaagggtgcagaggcagatcaaatcattgaatatcttaagcagcaagtttctctacttaaggagaaagcaattttgcaggcaactt

SEQ ID NO: 38754 - DNA, 201 bp, Homo sapiens; identical to SEQ ID NO: 38728

SEQ ID NO: 38755 - DNA, 201 bp, Homo sapiens; identical to SEQ ID NO: 38729

SEQ ID NO: 38756 - DNA, 201 bp, Homo sapiens; identical to SEQ ID NO: 38738

SEQ ID NO: 38757 - DNA, 201 bp, Homo sapiens; identical to SEQ ID NO: 38739

SEQ ID NO: 38758 - DNA, 201 bp, Homo sapiens
gggcactgtgtcaggcattgcagtggacacgcatgtgcacagaatcgccaacaggctgaggtggaccaagaaggcaaccaagtccccagaggagacccgcrccgccctggaggagtggctgcctagggagctgtggcacgagatcaatggactcttggtgggcttcggccagcagacctgtctgcctgtgcaccctcgctg

SEQ ID NO: 38759 - DNA, 201 bp, Homo sapiens
atggactcttggtgggcttcggccagcagacctgtctgcctgtgcaccctcgctgccacgcctgcctcaaccaagccctctgcccggccgcccagggtctytgatggccgcatggctctggccgaggtgccgctgtggccaccgtctgtgaagtggctttacgcttcaggaagccacgcctgttgaataaagctttggtgt

SEQ ID NO: 38760 - DNA, 164 bp, Homo sapiens
gggatgtgtagtccgcaggagtccggcatgaccgccttgagcgcgaggatgctgacccggagcyggagcctgggacccggggctgggccgcgggggtgtagggaggagcccgggcctctccggagaagagaggctgcagcagaagcgaggaaaagccacagccc

SEQ ID NO: 38761 - DNA, 201 bp, Homo sapiens
aaagaccaggtgacggcgggcgccatgcagcgactgcgggcgcggggcctgacggtggacagcatcctgcagacagatgatgccacgctgggcaagctcayctaccccgtcggtttctggaggagcaaggtgaaatacatcaagcagaccagcgccatcctgcagcagcactacggtggggacatcccagcctctgtggcc

SEQ ID NO: 38762 - DNA, 201 bp, Homo sapiens
gggatgtgtagtccgcaggagtccggcatgaccgccttgagcgcgaggatgctgacccggagccggagcctgggacccggggctgggccgcgggggtgtarggaggagcccgggcctctccggagaagagaggctgcagcagaagcgaggaaaagccacagccccgtgaagcgtccgcggaaagcacagagactgcgtgtg

SEQ ID NO: 38763 - DNA, 201 bp, Homo sapiens
agcctctgtggccgagctggtggcgctgccgggtgttgggcccaagatggcacacctggctatggctgtggcctggggcactgtgtcaggcattgcagtgkacacgcatgtgcacagaatcgccaacaggctgaggtggaccaagaaggcaaccaagtccccagaggagacccgcgccgccctggaggagtggctgcctag

SEQ ID NO: 38764 - DNA, 201 bp, Homo sapiens
gcattgcagtggacacgcatgtgcacagaatcgccaacaggctgaggtggaccaagaaggcaaccaagtccccagaggagacccgcgccgccctggaggartggctgcctagggagctgtggcacgagatcaatggactcttggtgggcttcggccagcagacctgtctgcctgtgcaccctcgctgccacgcctgcctca

SEQ ID NO: 38765 - DNA, 201 bp, Homo sapiens
acagaggacatcctggcaaaatccaaaaagggaattgaggaaagccttaggaaagtggcaaagaagaagtttgcagaaaaccctaaggccggcgatgaatktgtggagaagaccctgagcaccatagcgaccagcacggatgcagcctccgttgtccacagcacagacttggtggtggaagccatcgtggagaatctgaag

SEQ ID NO: 38766 - DNA, 201 bp, Homo sapiens
ttctccggctctgagaagaacacctgagagcgctttccagccagtgccccgagtgcctgtgggaatgctctttggtcagacattccctcacacagtacagwttaataaatgtgcattttgattgtaatctatcgaagtgattattacaccagttacagcagtaatagattctccattaagaaataattcccttttttagtc

SEQ ID NO: 38767 - DNA, 155 bp, Homo sapiens
cgtgtatacccgctcaacgctgggacgttacagccagggccaatgggcagagcgsgactcgaggccccgcccccgccttgtggcgtcacggggacgccgggggcgcgcgggctgcagggccgcgtaggtccccgcccccagagtctggctttccg

SEQ ID NO: 38768 - DNA, 127 bp, Homo sapiens
cgtgtatacccgctcaacgctgggacrttacagccagggccaatgggcagagcgggactcgaggccccgcccccgccttgtggcgtcacggggacgccgggggcgcgcgggctgcagggccgcgtag

SEQ ID NO: 38769 - DNA, 201 bp, Homo sapiens
agagcgggactcgaggccccgcccccgccttgtggcgtcacggggacgccgggggcgcgcgggctgcagggccgcgtaggtccccgcccccagagtctggytttccgcggctgcccgcctcgcgcgtcttccctgcccgggtctcctcgctgtcgccgccgctgccacaccatggccttcgtcaccaggcagttcatgcgt

SEQ ID NO: 38770 - DNA, 201 bp, Homo sapiens
gtagtgttggtagaccagacagaggacatcctggcaaaatccaaaaagggaattgaggaaagccttaggaaagtggcaaagaagaagtttgcagaaaaccytaaggccggcgatgaatttgtggagaagaccctgagcaccatagcgaccagcacggatgcagcctccgttgtccacagcacagacttggtggtggaagcc

SEQ ID NO: 38771 - DNA, 201 bp, Homo sapiens
cttctagattatgtcggactggatactacgaagttcatcgtggatgggtggcatgaaatggatgcagagaacccattacatcagcccagcccatccttaartaagctggtagcagagaacaagttcggcaagaagactggagaaggattttacaaatacaagtgatgtgcagcttctccggctctgagaagaacacctgag

SEQ ID NO: 38772 - DNA, 201 bp, Homo sapiens
ggcgtcacggggacgccgggggcgcgcgggctgcagggccgcgtaggtccccgcccccagagtctggctttccgcggctgcccgcctcgcgcgtcttcccygcccgggtctcctcgctgtcgccgccgctgccacaccatggccttcgtcaccaggcagttcatgcgttccgtgtcctcctcgtccaccgcctcggcctcg

SEQ ID NO: 38773 - DNA, 201 bp, Homo sapiens
ggtgattctaactcgggtttgggcttttctttaaaaggtgacgcatccaaagaagacattgacactgctatgaaattaggagccggttaccccatgggccyatttgagcttctagattatgtcggactggatactacgaagttcatcgtggatgggtggcatgaaatggatgcagagaacccattacatcagcccagccca

SEQ ID NO: 38774 - DNA, 201 bp, Homo sapiens
tagtctgttcatttctgtgtattttctaaacagctttacacccttggtgccttggagcaaacatgttttttgaaccttgtcatttttgtgaagaattgccwagattccttctctcatcaacgggaaagtacttcctctgagagtgcgagtgcaccatgctcactgttgctgcgtgggagagtcacaagccactggcaagca

SEQ ID NO: 38775 - DNA, 201 bp, Homo sapiens
ggactcgaggccccgcccccgccttgtggcgtcacggggacgccgggggcgcgcgggctgcagggccgcgtaggtccccgcccccagagtctggctttccrcggctgcccgcctcgcgcgtcttccctgcccgggtctcctcgctgtcgccgccgctgccacaccatggccttcgtcaccaggcagttcatgcgttccgtg

SEQ ID NO: 38776 - DNA, 201 bp, Homo sapiens
cggcaagaagactggagaaggattttacaaatacaagtgatgtgcagcttctccggctctgagaagaacacctgagagcgctttccagccagtgccccgartgcctgtgggaatgctctttggtcagacattccctcacacagtacagtttaataaatgtgcattttgattgtaatctatcgaagtgattattacaccagt

SEQ ID NO: 38777 - DNA, 201 bp, Homo sapiens
ccatcgtggagaatctgaaggtgaaaaacgagctcttcaaaaggctggacaagtttgctgctgaacatacaatctttgccagcaacacttcctccttgcakattacaagcatagctaatgccaccaccagacaagaccgattcgctggcctccatttcttcaacccagtgcctgtcatgaaacttgtggaggtcattaaaa

SEQ ID NO: 38778 - DNA, 201 bp, Homo sapiens; identical to SEQ ID NO: 38765

SEQ ID NO: 38779 - DNA, 201 bp, Homo sapiens; identical to SEQ ID NO: 38766

SEQ ID NO: 38780 - DNA, 155 bp, Homo sapiens; identical to SEQ ID NO: 38767

SEQ ID NO: 38781 - DNA, 127 bp, Homo sapiens; identical to SEQ ID NO: 38768

SEQ ID NO: 38782 - DNA, 201 bp, Homo sapiens; identical to SEQ ID NO: 38769

SEQ ID NO: 38783 - DNA, 201 bp, Homo sapiens; identical to SEQ ID NO: 38770

SEQ ID NO: 38784 - DNA, 201 bp, Homo sapiens; identical to SEQ ID NO: 38771

SEQ ID NO: 38785 - DNA, 201 bp, Homo sapiens; identical to SEQ ID NO: 38772

SEQ ID NO: 38786 - DNA, 201 bp, Homo sapiens
ccatacctcatggaagcaatcaggctgtatgaacgaggtgacgcatccaaagaagacattgacactgctatgaaattaggagccggttaccccatgggccyatttgagcttctagattatgtcggactggatactacgaagttcatcgtggatgggtggcatgaaatggatgcagagaacccattacatcagcccagccca

SEQ ID NO: 38787 - DNA, 201 bp, Homo sapiens; identical to SEQ ID NO: 38774

SEQ ID NO: 38788 - DNA, 201 bp, Homo sapiens; identical to SEQ ID NO: 38775

SEQ ID NO: 38789 - DNA, 201 bp, Homo sapiens; identical to SEQ ID NO: 38776

SEQ ID NO: 38790 - DNA, 201 bp, Homo sapiens; identical to SEQ ID NO: 38777

SEQ ID NO: 38791 - DNA, 201 bp, Homo sapiens; identical to SEQ ID NO: 38771

SEQ ID NO: 38792 - DNA, 201 bp, Homo sapiens; identical to SEQ ID NO: 38766

SEQ ID NO: 38793 - DNA, 201 bp, Homo sapiens
cagattgatatcctggatctctgcttttgattaaaaggtgacgcatccaaagaagacattgacactgctatgaaattaggagccggttaccccatgggccyatttgagcttctagattatgtcggactggatactacgaagttcatcgtggatgggtggcatgaaatggatgcagagaacccattacatcagcccagccca

SEQ ID NO: 38794 - DNA, 201 bp, Homo sapiens; identical to SEQ ID NO: 38774

SEQ ID NO: 38795 - DNA, 201 bp, Homo sapiens; identical to SEQ ID NO: 38776

SEQ ID NO: 38796 - DNA, 192 bp, Homo sapiens
atccacccacctcggtctcccaaagtgctgggattacaggcgtgagccaccacagacatacaatctttgccagcaacacttcctccttgcakattacaagcatagctaatgccaccaccagacaagaccgattcgctggcctccatttcttcaacccagtgcctgtcatgaaacttgtggaggtcattaaaa

SEQ ID NO: 38797 - DNA, 201 bp, Homo sapiens
cgccggtgacggaagtgcggtgttgagcgccggcggctcgcgcccacgctgggccgggagtcgaaatgcttcccggtgccgggagtgagcgatgagctggyttctgttcctggcccacagagtcgccttggccgccttgccctgccgccgcggctctcgcgggttcgggatgttctatgccgtgaggaggggccgcaagac

SEQ ID NO: 38798 - DNA, 201 bp, Homo sapiens
gccccatcccagacctcgcccgccttcgggatctcagccctggctccgcttcttcaagtaccgacaggaagttgacgagttcgggctcgtcaggggccgarctccgggctccgccctacgacaccgcccctccctaggccccggccctcatcaggactccgcccagacgtgcgtcatcttcccgcgccggtgacggaagtg

SEQ ID NO: 38799 - DNA, 201 bp, Homo sapiens
gcttcttcaagtaccgacaggaagttgacgagttcgggctcgtcaggggccgagctccgggctccgccctacgacaccgcccctccctaggccccggcccycatcaggactccgcccagacgtgcgtcatcttcccgcgccggtgacggaagtgcggtgttgagcgccggcggctcgcgcccacgctgggccgggagtcga

SEQ ID NO: 38800 - DNA, 201 bp, Homo sapiens
ttcttcaagtaccgacaggaagttgacgagttcgggctcgtcaggggccgagctccgggctccgccctacgacaccgcccctccctaggccccggccctcrtcaggactccgcccagacgtgcgtcatcttcccgcgccggtgacggaagtgcggtgttgagcgccggcggctcgcgcccacgctgggccgggagtcgaaa

SEQ ID NO: 38801 - DNA, 201 bp, Homo sapiens
gacaccgcccctccctaggccccggccctcatcaggactccgcccagacgtgcgtcatcttcccgcgccggtgacggaagtgcggtgttgagcgccggcgkctcgcgcccacgctgggccgggagtcgaaatgcttcccggtgccgggagtgagcgatgagctggcttctgttcctggcccacagagtcgccttggccgcc

SEQ ID NO: 38802 - DNA, 201 bp, Homo sapiens
tttcctacatgggagacttcgtcgtcgtctacactgatggctgctgctccagtaatgggcgtagaaggccgcgagcaggaatcggcgtttactgggggccrggccatcctttaaatgtaggcattagacttcctgggcggcagacaaaccaaagagcggaaattcatgcagcctgcaaagccattgaacaagcaaagactc

SEQ ID NO: 38803 - DNA, 201 bp, Homo sapiens
cgcctccagttagcagagacacgttttcctacatgggagacttcgtcgtcgtctacactgatggctgctgctccagtaatgggcgtagaaggccgcgagcrggaatcggcgtttactgggggccaggccatcctttaaatgtaggcattagacttcctgggcggcagacaaaccaaagagcggaaattcatgcagcctgca

SEQ ID NO: 38804 - DNA, 201 bp, Homo sapiens; identical to SEQ ID NO: 38797

SEQ ID NO: 38805 - DNA, 201 bp, Homo sapiens; identical to SEQ ID NO: 38798

SEQ ID NO: 38806 - DNA, 109 bp, Homo sapiens
ctaggccattctctaggaacagctgcgactcataaagaccaagaagcataaataaactttcaaaaatttatttggctctttcgttaaaaactgtgcaaattaaaaaaaa

SEQ ID NO: 38807 - DNA, 201 bp, Homo sapiens; identical to SEQ ID NO: 38799

SEQ ID NO: 38808 - DNA, 201 bp, Homo sapiens; identical to SEQ ID NO: 38800

SEQ ID NO: 38809 - DNA, 201 bp, Homo sapiens; identical to SEQ ID NO: 38801

SEQ ID NO: 38810 - DNA, 201 bp, Homo sapiens; identical to SEQ ID NO: 38802

SEQ ID NO: 38811 - DNA, 201 bp, Homo sapiens; identical to SEQ ID NO: 38803

SEQ ID NO: 38812 - DNA, 201 bp, Homo sapiens
aacccacctctggccctgtgtaggggcagggatgggggtggctgggactcctggtgcccctcgccagcttctcctgcgccccgcccacaccctcgggggggtcacaggcccagaagggtagctgggcggggctcgaggctggtgccaggcgcgtgtaaatggttttgttttgcacgtttggtttgcgcagtagtttggttt

SEQ ID NO: 38813 - DNA, 201 bp, Homo sapiens
ctttgggaaagcccagactttagtgccctgccccctggctgactggccagttgcccagagcactttagcagatgtggtttcaaagtaaaggcctcctcccmcaccccttaggccccgtggtgacatttcccaagtcagacagatgtcagcttcccagccatgcccaggacgtcctatctcccccaacccacctctggccct

SEQ ID NO: 38814 - DNA, 201 bp, Homo sapiens
ctgggctgggtggcacaccacccgaggggggccccgggacccacggagccctccctatgtctgcaaagtgattcactgtgcttcgagccaactctaacagrcactttgagatgtgttcctcctgctgtagtcctttctgccttggcctcggcgggcttttctggggcccaggaagcccacactatgcacagagcccaatgc

SEQ ID NO: 38815 - DNA, 201 bp, Homo sapiens
cctccctatgtctgcaaagtgattcactgtgcttcgagccaactctaacaggcactttgagatgtgttcctcctgctgtagtcctttctgccttggcctcrgcgggcttttctggggcccaggaagcccacactatgcacagagcccaatgcatagagccctggccagcccttcctctcactcctgcctccgctggctttg

SEQ ID NO: 38816 - DNA, 201 bp, Homo sapiens
aaggcattgccaagccccccgagtgaggacgcaccgccgccaccagcccgcaactctccagccgaagctgcaggggcaggagaggctgggctgggtggcayaccacccgaggggggccccgggacccacggagccctccctatgtctgcaaagtgattcactgtgcttcgagccaactctaacaggcactttgagatgtgt

SEQ ID NO: 38817 - DNA, 201 bp, Homo sapiens
gagccctccctatgtctgcaaagtgattcactgtgcttcgagccaactctaacaggcactttgagatgtgttcctcctgctgtagtcctttctgccttggmctcggcgggcttttctggggcccaggaagcccacactatgcacagagcccaatgcatagagccctggccagcccttcctctcactcctgcctccgctggc

SEQ ID NO: 38818 - DNA, 201 bp, Homo sapiens
tgagggaccttcacgaatccagcttcagcctctctggctctcagatcgatgaccatgttccaaagcgagcttcagctcggatcctcgctcctcccggaggmaggtcgagtggcatttggtaaaggcattgccaagccccccgagtgaggacgcaccgccgccaccagcccgcaactctccagccgaagctgcaggggcagg

SEQ ID NO: 38819 - DNA, 201 bp, Homo sapiens
tgctgctcaggtgccgtgatctcccgtggtcggcaccaggcccttgccagctcatggcctcatcttctcccctgtccatccaggtgggccctccctgcttytaaagccccacagaagttcccatggaaacactagaggccgggtgtctccttccacctccagtgatctgggaagtgacccagccgcctgcccttgttaagc

SEQ ID NO: 38820 - DNA, 201 bp, Homo sapiens
tttggtaaaggcattgccaagccccccgagtgaggacgcaccgccgccaccagcccgcaactctccagccgaagctgcaggggcaggagaggctgggctgrgtggcacaccacccgaggggggccccgggacccacggagccctccctatgtctgcaaagtgattcactgtgcttcgagccaactctaacaggcactttga

SEQ ID NO: 38821 - DNA, 201 bp, Homo sapiens; identical to SEQ ID NO: 38812

SEQ ID NO: 38822 - DNA, 201 bp, Homo sapiens; identical to SEQ ID NO: 38813

SEQ ID NO: 38823 - DNA, 201 bp, Homo sapiens; identical to SEQ ID NO: 38814

SEQ ID NO: 38824 - DNA, 201 bp, Homo sapiens; identical to SEQ ID NO: 38815

SEQ ID NO: 38825 - DNA, 201 bp, Homo sapiens; identical to SEQ ID NO: 38816

SEQ ID NO: 38826 - DNA, 201 bp, Homo sapiens; identical to SEQ ID NO: 38817

SEQ ID NO: 38827 - DNA, 201 bp, Homo sapiens; identical to SEQ ID NO: 38818

SEQ ID NO: 38828 - DNA, 201 bp, Homo sapiens; identical to SEQ ID NO: 38819

SEQ ID NO: 38829 - DNA, 201 bp, Homo sapiens; identical to SEQ ID NO: 38820

SEQ ID NO: 38830 - DNA, 201 bp, Homo sapiens; identical to SEQ ID NO: 38812

SEQ ID NO: 38831 - DNA, 201 bp, Homo sapiens; identical to SEQ ID NO: 38813

SEQ ID NO: 38832 - DNA, 201 bp, Homo sapiens; identical to SEQ ID NO: 38814

SEQ ID NO: 38833 - DNA, 201 bp, Homo sapiens; identical to SEQ ID NO: 38815

SEQ ID NO: 38834 - DNA, 201 bp, Homo sapiens; identical to SEQ ID NO: 38816

SEQ ID NO: 38835 - DNA, 201 bp, Homo sapiens; identical to SEQ ID NO: 38817

SEQ ID NO: 38836 - DNA, 201 bp, Homo sapiens; identical to SEQ ID NO: 38818

SEQ ID NO: 38837 - DNA, 201 bp, Homo sapiens; identical to SEQ ID NO: 38819

SEQ ID NO: 38838 - DNA, 201 bp, Homo sapiens; identical to SEQ ID NO: 38820

SEQ ID NO: 38839 - DNA, 201 bp, Homo sapiens
actacatggtttacatgttccaatatgactccacccatagcaaattccatggcaccgtcaaggctgagaatgggaagcttgtcatcaatggaaatccctcyaaaatcaagtggggcgatgctggcgctgagtacgtcatggagtccactggcgtcttcaccaccatgtagaaggctgggcctcatttgcaggggggagcca

SEQ ID NO: 38840 - DNA, 201 bp, Homo sapiens
actccacccatagcaaattccatggcaccgtcaaggctgagaatgggaagcttgtcatcaatggaaatcccatcaccatcttccaggagcgagatccctcyaaaatcaagtggggcgatgctggcgctgagtacgtcatggagtccactggcgtcttcaccaccatgtagaaggctgggcctcatttgcaggggggagcca

SEQ ID NO: 38841 - DNA, 201 bp, Homo sapiens
actccacccatagcaaattccatggcaccgtcaaggctgagaatgggaagcttgtcatcaatggaaatcccatcaccatcttccaggagcgagatccctcyaaaatcaagtggggcgatgctggcgctgagtacgtcatggagtccactggcgtcttcaccaccattgagaagtatgacaacaacctcaagattgtcggca

SEQ ID NO: 38842 - DNA, 201 bp, Homo sapiens; identical to SEQ ID NO: 38841

SEQ ID NO: 38843 - DNA, 201 bp, Homo sapiens
tggctcccccctgcaaatgaggcccagccttctacatggtggtgaagacgccagtggactccatgacgtactcagcgccagcatcgccccacttgattttrgagggatctcgctcctggaagatggtgatgggatttccattgatgacaagcttcccattctcagccttgacggtgccatggaatttgctatgggtggagt

SEQ ID NO: 38844 - DNA, 201 bp, Homo sapiens
agacttggctttggatttctggacctttgtgcctgtactgtgctgaaagactttacaggtatatgcggagcaataagccagtcaccatcattttggtcacragtcatccctcagatgtcatggaaatccgaatggtcaaagaaaattttaaagcaagacctggtcagtatattactctacattgtcccagtatatctgcat

SEQ ID NO: 38845 - DNA, 201 bp, Homo sapiens
acctttccctgaaggattttcaaaactggaagagtttacccagaacacatttgtgaagatttgtatggaagagcccagattccaagctaattttccacagrcttggctttggatttctggacctttgtgcctgtactgtgctgaaagactttacaggtatatgcggagcaataagccagtcaccatcattttggtcacaag

SEQ ID NO: 38846 - DNA, 201 bp, Homo sapiens
gcctgtactgtgctgaaagactttacaggtatatgcggagcaataagccagtcaccatcattttggtcacaagtcatccctcagatgtcatggaaatccgratggtcaaagaaaattttaaagcaagacctggtcagtatattactctacattgtcccagtatatctgcattagaaaatcatccatttaccctcacaatgt

SEQ ID NO: 38847 - DNA, 201 bp, Homo sapiens
cagacttggctttggatttctggacctttgtgcctgtactgtgctgaaagactttacaggtatatgcggagcaataagccagtcaccatcattttggtcayaagtcatccctcagatgtcatggaaatccgaatggtcaaagaaaattttaaagcaagacctggtcagtatattactctacattgtcccagtatatctgca

SEQ ID NO: 38848 - DNA, 201 bp, Homo sapiens
tttacatcgtctctccacatggcttgaacttctcacagcatgcctgctggattcgaagagatggcattcaagtgcttaaaaatggctgctgaagtatcaarctaatttagataccaaccctcccggctgtatcagtcttaactgaaccagctctcagaatatttccttaccagagtatatctcagaacattttcatgaacc

SEQ ID NO: 38849 - DNA, 201 bp, Homo sapiens
taaagagtctttcagctgaaaacttttgccatgaagcaggactctaaagaaggaatgagtgcaatttctaagactttggaactcagcggaatcagacagckgtgttatgccaaagaatagtaaggttttctaatttatgattatttaaaatggaaatgtgagaatctggcaagatgaccggtcacattacatgtttaatct

SEQ ID NO: 38850 - DNA, 201 bp, Homo sapiens
ttcttggacgtcctcggtggaaacttttgtttgatgaaatagcaaaatataacagagggaaaacagttggtgttttctgttgtggacccaattcactatcyaagactcttcataaactgagaaaccagaacaactcatatgggacgagatttgaatacaataaagagtctttcagctgaaaacttttgccatgaagcagga

SEQ ID NO: 38851 - DNA, 201 bp, Homo sapiens
atgtaatgccttgtttcagaccatgtccagtgtcacgaacctcacgccacactattttcttgaagaaattattttggtagatgacatgagcaaagttgatkatttgaaagaaaaactagactatcacctggaaacttttcggggaaaggtaggaacattcctggggacaagagccagtgacggcgtcacagagatcttccc

SEQ ID NO: 38852 - DNA, 201 bp, Homo sapiens
cttcaaaaacattacccagcccgcctcccgactgccagcattgtcatttgcttctataatgaagaatgtaatgccttgtttcagaccatgtccagtgtcaygaacctcacgccacactattttcttgaagaaattattttggtagatgacatgagcaaagttgatgatttgaaagaaaaactagactatcacctggaaact

SEQ ID NO: 38853 - DNA, 104 bp, Homo sapiens
aggsggactgtactgccctttgagtactactgtgtggccccgcaacccagcacaaccaggtatctgcttggaacccagccaccataaagcctgctagctaaaaa

SEQ ID NO: 38854 - DNA, 201 bp, Homo sapiens
catttgcttctataatgaagaatgtaatgccttgtttcagaccatgtccagtgtcacgaacctcacgccacactattttcttgaagaaattattttggtasatgacatgagcaaagttgatgatttgaaagaaaaactagactatcacctggaaacttttcggggaaaggtaggaacattcctggggacaagagccagtga

SEQ ID NO: 38855 - DNA, 141 bp, Homo sapiens
agggggactgtactgccctttgagtactactgtgtggcccsgcaacccagcacaaccaggtatctgcttggaacccagccaccataaagcctgctagctaaaaaaaattttacatctctcagttcattcggcacagacccc

SEQ ID NO: 38856 - DNA, 201 bp, Homo sapiens
gagcaaataccaaaacctcatgtaatagtcaaaaggactgatgaagataaagcaaagtctatgttaggtacagattttaaccatacaaacccagaacttcrtaaagaacttttaaaatatggatttaatgtgattatcagtagaagcttgggcatcgaaagagaagtgccagataccaggagtaaaatgcgtcttcaaaaa

SEQ ID NO: 38857 - DNA, 201 bp, Homo sapiens
ttgtttcagaccatgtccagtgtcacgaacctcacgccacactattttcttgaagaaattattttggtagatgacatgagcaaagttgatgatttgaaagraaaactagactatcacctggaaacttttcggggaaaggtaggaacattcctggggacaagagccagtgacggcgtcacagagatcttcccttctgagcgg

SEQ ID NO: 38858 - DNA, 201 bp, Homo sapiens
cccagaacttcataaagaacttttaaaatatggatttaatgtgattatcagtagaagcttgggcatcgaaagagaagtgccagataccaggagtaaaatgygtcttcaaaaacattacccagcccgcctcccgactgccagcattgtcatttgcttctataatgaagaatgtaatgccttgtttcagaccatgtccagtgt

SEQ ID NO: 38859 - DNA, 201 bp, Homo sapiens
ttgggcatcgaaagagaagtgccagataccaggagtaaaatgcgtcttcaaaaacattacccagcccgcctcccgactgccagcattgtcatttgcttctrtaatgaagaatgtaatgccttgtttcagaccatgtccagtgtcacgaacctcacgccacactattttcttgaagaaattattttggtagatgacatgagc

SEQ ID NO: 38860 - DNA, 201 bp, Homo sapiens
atgtaatgccttgtttcagaccatgtccagtgtcacgaacctcacgccacactattttcttgaagaaattattttggtagatgacatgagcaaagttgatkatttgaaagaaaaactagactatcacctggaaacttttcggggaaaggttaaaataataagaaacaaaaagagagaggggctgattcgagcaaggctgat

SEQ ID NO: 38861 - DNA, 201 bp, Homo sapiens; identical to SEQ ID NO: 38852

SEQ ID NO: 38862 - DNA, 104 bp, Homo sapiens; identical to SEQ ID NO: 38853

SEQ ID NO: 38863 - DNA, 201 bp, Homo sapiens
catttgcttctataatgaagaatgtaatgccttgtttcagaccatgtccagtgtcacgaacctcacgccacactattttcttgaagaaattattttggtasatgacatgagcaaagttgatgatttgaaagaaaaactagactatcacctggaaacttttcggggaaaggttaaaataataagaaacaaaaagagagaggg

SEQ ID NO: 38864 - DNA, 141 bp, Homo sapiens; identical to SEQ ID NO: 38855

SEQ ID NO: 38865 - DNA, 201 bp, Homo sapiens; identical to SEQ ID NO: 38856

SEQ ID NO: 38866 - DNA, 201 bp, Homo sapiens
gatgacatgagcaaagttgatgatttgaaagaaaaactagactatcacctggaaacttttcggggaaaggttaaaataataagaaacaaaaagagagaggsgctgattcgagcaaggctgattggagcttctcatgcttcaggggatgttctggtgttcctggacagccactgtgaggtgaacagagtatggctggagccc

SEQ ID NO: 38867 - DNA, 201 bp, Homo sapiens
ttgtttcagaccatgtccagtgtcacgaacctcacgccacactattttcttgaagaaattattttggtagatgacatgagcaaagttgatgatttgaaagraaaactagactatcacctggaaacttttcggggaaaggttaaaataataagaaacaaaaagagagaggggctgattcgagcaaggctgattggagcttct

SEQ ID NO: 38868 - DNA, 201 bp, Homo sapiens; identical to SEQ ID NO: 38858

SEQ ID NO: 38869 - DNA, 201 bp, Homo sapiens; identical to SEQ ID NO: 38859

SEQ ID NO: 38870 - DNA, 201 bp, Homo sapiens
aagaagatccctccttctgctgggattaccatgaacctgttcctgttcaacctgcccctgacccagattgctgggacttaggaatttagacctctgagatkatttgaaagaaaaactagactatcacctggaaacttttcggggaaaggttaaaataataagaaacaaaaagagagaggggctgattcgagcaaggctgat

SEQ ID NO: 38871 - DNA, 104 bp, Homo sapiens; identical to SEQ ID NO: 38853

SEQ ID NO: 38872 - DNA, 201 bp, Homo sapiens
cttcaaaaacattacccagcccgcctcccgactgccagcattgtcatttgcttctataatgaagaatgtaatgccttgtttcagaccatgtccagtgtcaygaacctcacgccacactattttcttgaagaaattattttggtagatgacatgagcaaagttgctatgaggagctattaagggcttaatgcaggaaaatga

SEQ ID NO: 38873 - DNA, 201 bp, Homo sapiens
catttgcttctataatgaagaatgtaatgccttgtttcagaccatgtccagtgtcacgaacctcacgccacactattttcttgaagaaattattttggtasatgacatgagcaaagttgctatgaggagctattaagggcttaatgcaggaaaatgagatgatctaggaattccatgaaagaagcggaatcagaccaactg

SEQ ID NO: 38874 - DNA, 141 bp, Homo sapiens; identical to SEQ ID NO: 38855

SEQ ID NO: 38875 - DNA, 201 bp, Homo sapiens
gagcaaataccaaaacctcatgtaatagtcaaaaggactgatgaagataaagcaaagtctatgttaggtacagattttaaccatacaaacccagaacttcrtaaagaacttttaaaatatggatttaatgtgattatcagtagaagcttgggcatcgaaagagaagtgccagataccaggagtaaaatatgtactgtcacc

SEQ ID NO: 38876 - DNA, 201 bp, Homo sapiens
aggaatttagacctctgagatgatttgaaagaaaaactagactatcacctggaaacttttcggggaaaggttaaaataataagaaacaaaaagagagaggsgctgattcgagcaaggctgattggagcttctcatgcttcaggggatgttctggtgttcctggacagccactgtgaggtgaacagagtatggctggagccc

SEQ ID NO: 38877 - DNA, 201 bp, Homo sapiens
ctccttctgctgggattaccatgaacctgttcctgttcaacctgcccctgacccagattgctgggacttaggaatttagacctctgagatgatttgaaagraaaactagactatcacctggaaacttttcggggaaaggttaaaataataagaaacaaaaagagagaggggctgattcgagcaaggctgattggagcttct

SEQ ID NO: 38878 - DNA, 201 bp, Homo sapiens
agtcaaaaagatgcaaataaggagaagtgtttgaacgagatgacacaacatccaaggcatttagatggatggttttcttcatattgcttctgcctgcaggygtcttcaaaaacattacccagcccgcctcccgactgccagcattgtcatttgcttctataatgaagaatgtaatgccttgtttcagaccatgtccagtgt

SEQ ID NO: 38879 - DNA, 201 bp, Homo sapiens
atttagatggatggttttcttcatattgcttctgcctgcaggcgtcttcaaaaacattacccagcccgcctcccgactgccagcattgtcatttgcttctrtaatgaagaatgtaatgccttgtttcagaccatgtccagtgtcacgaacctcacgccacactattttcttgaagaaattattttggtagatgacatgagc

SEQ ID NO: 38880 - DNA, 201 bp, Homo sapiens; identical to SEQ ID NO: 38870

SEQ ID NO: 38881 - DNA, 104 bp, Homo sapiens; identical to SEQ ID NO: 38853

SEQ ID NO: 38882 - DNA, 201 bp, Homo sapiens; identical to SEQ ID NO: 38872

SEQ ID NO: 38883 - DNA, 201 bp, Homo sapiens; identical to SEQ ID NO: 38873

SEQ ID NO: 38884 - DNA, 141 bp, Homo sapiens; identical to SEQ ID NO: 38855

SEQ ID NO: 38885 - DNA, 201 bp, Homo sapiens; identical to SEQ ID NO: 38875

SEQ ID NO: 38886 - DNA, 201 bp, Homo sapiens; identical to SEQ ID NO: 38876

SEQ ID NO: 38887 - DNA, 201 bp, Homo sapiens; identical to SEQ ID NO: 38877

SEQ ID NO: 38888 - DNA, 201 bp, Homo sapiens; identical to SEQ ID NO: 38878

SEQ ID NO: 38889 - DNA, 201 bp, Homo sapiens; identical to SEQ ID NO: 38879

SEQ ID NO: 38890 - DNA, 201 bp, Homo sapiens
aaatgagatgatctaggaattccatgaaagaagcggaatcagaccaactgcagttaaggcctggctcatggcgtcccacttttccctcctcttgctgcctyctacatcctggatgtgagtgaggtgtctggagatctttgagctgagatgctgcccaggcctgcaagtgcagctatgcagcctgtatccctgcctctttct

SEQ ID NO: 38891 - DNA, 201 bp, Homo sapiens
cagtggatcccctgggtcagaagggctctgtcgccatggcgatctgcgatggctcctcttcacagcagtggcatttggaaggttaaggtggatgctgtggygggaacgttgcttcatcaggcgttgcctccggtgtggagtttggggctttaggaaagcctgggttgggtggagcagaaccatcttggagaagatgacagt

SEQ ID NO: 38892 - DNA, 201 bp, Homo sapiens; identical to SEQ ID NO: 38891

SEQ ID NO: 38893 - DNA, 201 bp, Homo sapiens
gttttctgccttgcttcggacagtgcacagtgtcatagaccgcacgccagcacacctgcttcatgagatcatccttgtggatgatgatagtgactttgatkatttgaaaggagaactagatgaatatgtccaaaaatacctccctggaaaaattaaagtcataagaaatacaaagcgtgaggggttgattcgagggagaat

SEQ ID NO: 38894 - DNA, 201 bp, Homo sapiens
acccccgtcgcctggtgcagctgctccgccagcacagcagcccctggcaggtgtacggcttcgtgcgggcctgcctgcgccggctggtgcccccaggcctstggggctccaggcacaacgaacgccgcttcctcaggaacaccaagaagttcatctccctggggaagcatgccaagctctcgctgcaggagctgacgtgga

SEQ ID NO: 38895 - DNA, 201 bp, Homo sapiens
tgaagtgtcacagcctgtttctggatttgcaggtgaacagcctccagacggtgtgcaccaacatctacaagatcctcctgctgcaggcgtacaggtttcaygcatgtgtgctgcagctcccatttcatcagcaagtttggaagaaccccacatttttcctgcgcgtcatctctgacacggcctccctctgctactccatcc

SEQ ID NO: 38896 - DNA, 201 bp, Homo sapiens
tggtgtcacctgccagacccgccgaagaagccacctctttggagggtgcgctctctggcacgcgccactcccacccatccgtgggccgccagcaccacgcrggccccccatccacatcgcggccaccacgtccctgggacacgccttgtcccccggtgtacgccgagaccaagcacttcctctactcctcaggcgacaagg

SEQ ID NO: 38897 - DNA, 201 bp, Homo sapiens
ctgagtatggctgcgtggtgaacttgcggaagacagtggtgaacttccctgtagaagacgaggccctgggtggcacggcttttgttcagatgccggcccayggcctattcccctggtgcggcctgctgctggatacccggaccctggaggtgcagagcgactactccagctatgcccggacctccatcagagccagtctca

SEQ ID NO: 38898 - DNA, 201 bp, Homo sapiens
acaggctctttttctaccggaagagtgtctggagcaagttgcaaagcattggaatcagacagcacttgaagagggtgcagctgcgggagctgtcggaagcrgaggtcaggcagcatcgggaagccaggcccgccctgctgacgtccagactccgcttcatccccaagcctgacgggctgcggccgattgtgaacatggact

SEQ ID NO: 38899 - DNA, 201 bp, Homo sapiens
cgttccgcagagaaaagagggccgagcgtctcacctcgagggtgaaggcactgttcagcgtgctcaactacgagcgggcgcggcgccccggcctcctgggygcctctgtgctgggcctggacgatatccacagggcctggcgcaccttcgtgctgcgtgtgcgggcccaggacccgccgcctgagctgtactttgtcaagg

SEQ ID NO: 38900 - DNA, 201 bp, Homo sapiens
gtggcacggcttttgttcagatgccggcccacggcctattcccctggtgcggcctgctgctggatacccggaccctggaggtgcagagcgactactccagmtatgcccggacctccatcagagccagtctcaccttcaaccgcggcttcaaggctgggaggaacatgcgtcgcaaactctttggggtcttgcggctgaagt

SEQ ID NO: 38901 - DNA, 201 bp, Homo sapiens; identical to SEQ ID NO: 38894

SEQ ID NO: 38902 - DNA, 201 bp, Homo sapiens; identical to SEQ ID NO: 38896

SEQ ID NO: 38903 - DNA, 116 bp, Homo sapiens
gagctgaatgcagtaggggctcagaaaagggggcaggcagagccctggtcctcctgtctccatcgtcacgtgggcacacgtggcttttcgctcaggacgtmgagtggacacggtga

SEQ ID NO: 38904 - DNA, 201 bp, Homo sapiens; identical to SEQ ID NO: 38894

SEQ ID NO: 38905 - DNA, 201 bp, Homo sapiens; identical to SEQ ID NO: 38895

SEQ ID NO: 38906 - DNA, 201 bp, Homo sapiens
gatggccacccgcccacagccaggccgagagcagacaccagcagccctgtcacgccgggctctacgtcccagggagggaggggcggcccacacccaggccygcaccgctgggagtctgaggcctgagtgagtgtttggccgaggcctgcatgtccggctgaaggctgagtgtccggctgaggcctgagcgagtgtccagcc

SEQ ID NO: 38907 - DNA, 201 bp, Homo sapiens; identical to SEQ ID NO: 38896

SEQ ID NO: 38908 - DNA, 201 bp, Homo sapiens; identical to SEQ ID NO: 38897

SEQ ID NO: 38909 - DNA, 201 bp, Homo sapiens; identical to SEQ ID NO: 38898

SEQ ID NO: 38910 - DNA, 201 bp, Homo sapiens; identical to SEQ ID NO: 38899

SEQ ID NO: 38911 - DNA, 201 bp, Homo sapiens; identical to SEQ ID NO: 38900

SEQ ID NO: 38912 - DNA, 201 bp, Homo sapiens
cctgcaagattgtggtgcacacgccctgcatcgagcagctggagaagataaatttccgctgtaagccgtccttccgtgaatcaggctccaggaatgtccgsgagccaacctttgtacggcaccactgggtacacagacgacgccaggacggcaagtgtcggcactgtgggaagggattccagcagaagttcaccttccaca

SEQ ID NO: 38913 - DNA, 201 bp, Homo sapiens
tcgctcccccgctgggcaggcctcctcctcactggcacagcggcgccgctccagcgcccagctccagggctgcctcctgagttgcggggtgagggcccagkgttccagccgccggcgctccagcactgtgcccccttcctgcaacccccgcttcatcgtggataaggtgctcactccacagcctaccaccgtgggggccca

SEQ ID NO: 38914 - DNA, 201 bp, Homo sapiens
tcagcctgggctttgacgcccacgtcaccctggagttccacgagtctcgagaggccaacccagagaaattcaacagccgctttcggaataagatgttctaygccgggacagctttctctgacttcctgatgggcagctccaaggacctggccaagcacatccgagtggtgtgtgatggaatggacttgactcccaagatcc

SEQ ID NO: 38915 - DNA, 201 bp, Homo sapiens
gggcaggcctcctcctcactggcacagcggcgccgctccagcgcccagctccagggctgcctcctgagttgcggggtgagggcccagggttccagccgccrgcgctccagcactgtgcccccttcctgcaacccccgcttcatcgtggataaggtgctcactccacagcctaccaccgtgggggcccagcttctgggtgca

SEQ ID NO: 38916 - DNA, 201 bp, Homo sapiens
ttccagatcagccaaccgcctgccatggagactttctttaggagacatttccgggggaaggtgccaggccctggagaggggcagcagcggcccagcagcgyggggctgcccacaggcaaggcccggcgtcgctcccccgctgggcaggcctcctcctcactggcacagcggcgccgctccagcgcccagctccagggctgc

SEQ ID NO: 38917 - DNA, 201 bp, Homo sapiens
cacctgcgccctgccttccagatcagccaaccgcctgccatggagactttctttaggagacatttccgggggaaggtgccaggccctggagaggggcagcrgcggcccagcagcgtggggctgcccacaggcaaggcccggcgtcgctcccccgctgggcaggcctcctcctcactggcacagcggcgccgctccagcgcc

SEQ ID NO: 38918 - DNA, 201 bp, Homo sapiens
gtgcacccctgctgttgaccgggcttgtgggcatgaatgaggaggagggtgtccaggaggatgtggtagccgaggcatcgagcgccatccagccaggcacyaagacaccagggccacccccacctcggggcgcccagccgctgttgcccctaccccgctacctgcgccgagcctcctcccacctgctccccgcggatgccg

SEQ ID NO: 38919 - DNA, 201 bp, Homo sapiens
cgccaggtagccctacggcgcaaggcggccggaccccaggcctggagcgccctgctcgcgaaagccatcaccaagtcgggcctccagcacctggccccccytccgcccacccctggggccccgtgcagcgagtcagagcggcagatccggagtacagtggactggagcgagtcagcgacatatggggagcacatctggttc

SEQ ID NO: 38920 - DNA, 201 bp, Homo sapiens; identical to SEQ ID NO: 38912

SEQ ID NO: 38921 - DNA, 201 bp, Homo sapiens
aaggcgccgcggcgactcaacaagcggcgcttcccggggctgcggctcttcgggcacaggaaagccatcaccaagtcgggcctccagcacctggccccccytccgcccacccctggggccccgtgcagcgagtcagagcggcagatccggagtacagtggactggagcgagtcagcgacatatggggagcacatctggttc

SEQ ID NO: 38922 - DNA, 201 bp, Homo sapiens; identical to SEQ ID NO: 38914

SEQ ID NO: 38923 - DNA, 201 bp, Homo sapiens; identical to SEQ ID NO: 38912

SEQ ID NO: 38924 - DNA, 201 bp, Homo sapiens; identical to SEQ ID NO: 38921

SEQ ID NO: 38925 - DNA, 201 bp, Homo sapiens; identical to SEQ ID NO: 38914

SEQ ID NO: 38926 - DNA, 201 bp, Homo sapiens
ggccagaagacggccgccttgccccggacccgcggcgccggcctcttggagtcggagcttcgcgacggcagcggcaagaaggtagcagtagctgatgtgcwgtttggccccatgagatttcatcaagatcaacttcaggtacttttagtgtttaccaaagaagataaccaatgtaatggattctgcagggcatgtgaaaaa

SEQ ID NO: 38927 - DNA, 201 bp, Homo sapiens
ttttagtgtttaccaaagaagataaccaatgtaatggattctgcagggcatgtgaaaaagcagggtttaagtgtacagttaccaaggaggctcaggctgtycttgcctgtttcctggacaaacatcatgacattatcatcatagaccacagaaatcctcgacagctggatgcagaggcactgtgcaggtctatcagatcat

SEQ ID NO: 38928 - DNA, 201 bp, Homo sapiens
gaagtgcctataaatgaaaaaaaggctgacttgctcgatactataaattcatgcatcaggataggcaaggagtggcaaggaatttactatgccaaaaagaraaacggagataatatacaacaaaatgtgaagataatacctgtcattggacagggaggaaaaattagacactatgtgtccattatcagagtgtgcaatggc

SEQ ID NO: 38929 - DNA, 201 bp, Homo sapiens; identical to SEQ ID NO: 38926

SEQ ID NO: 38930 - DNA, 201 bp, Homo sapiens; identical to SEQ ID NO: 38927

SEQ ID NO: 38931 - DNA, 201 bp, Homo sapiens; identical to SEQ ID NO: 38928

SEQ ID NO: 38932 - DNA, 201 bp, Homo sapiens; identical to SEQ ID NO: 38926

SEQ ID NO: 38933 - DNA, 201 bp, Homo sapiens; identical to SEQ ID NO: 38927

SEQ ID NO: 38934 - DNA, 201 bp, Homo sapiens
tcagtattcactgcattagaaaacagtgaagatgcaattgaaattacaagcgaagaccgttttatacaggagtggcaaggaatttactatgccaaaaagaraaacggagataatatacaacaaaatgtgaagataatacctgtcattggacagggaggaaaaattagacactatgtgtccattatcagagtgtgcaatggc

SEQ ID NO: 38935 - DNA, 201 bp, Homo sapiens
tccagcctgtaggaaaccaaagatgggaagtggctcctagggggctgactcttccttcctcctcctccccagtaccacatatactttctctccttctatcyccagggccccaccaatctgtttacatatttattatcctatgggggcctgagcaggattgagggagccaggggaggggcaggagtcccagcaccatcggtt

SEQ ID NO: 38936 - DNA, 201 bp, Homo sapiens
ggcaagatcctcaccaagacaggggagctgcccaggcagcccaccacccaccctgaggagacagaggaggagctgacggagcagcaggaggtcttgctggvggagggagccctgaccatgccccgggagggctccacagagagtgagagcacacaggaagacctggaggaggaggacgaggaagaggatggggaggaggag

SEQ ID NO: 38937 - DNA, 201 bp, Homo sapiens
agctcccccaaccagttcagcctctacacgtctccttctctgcccaacatctccctagggctgcaggccacggtcactgtcaccaactcacacctcactgsctccccgaagctgtcgacacagcaggaggccgagaggcaggccctccagtccctgcggcagggtggcacgctgaccggcaagttcatgagcacatcctct

SEQ ID NO: 38938 - DNA, 201 bp, Homo sapiens
atgggggcctgagcaggattgagggagccaggggaggggcaggagtcccagcaccatcggttcatagtgtgcttgtgtgtttgttttagatcctcctgggrgatggggatggggccaggctcagtgtactaggcctctctgtgctgagccccaggctcccggccccttacccactctctccctgtggctggtctggttctc

SEQ ID NO: 38939 - DNA, 201 bp, Homo sapiens
cttctctttcccaggagccctgccaggggctgtgggcctacaaggcttccaggggatgccatccagcctgtaggaaaccaaagatgggaagtggctcctakggggctgactcttccttcctcctcctccccagtaccacatatactttctctccttctatctccagggccccaccaatctgtttacatatttattatccta

SEQ ID NO: 38940 - DNA, 201 bp, Homo sapiens
ccatcaccgcaaaactcctacagcagaagttgaacgtgggcaaggtcctcatcgtggactgggacattcaccatggcaatggcacccagcaggcgttctayaatgacccctctgtgctctacatctctctgcatcgctatgacaacgggaacttctttccaggctctggggctcctgaagaggttggtggaggaccaggcg

SEQ ID NO: 38941 - DNA, 201 bp, Homo sapiens
ttgctgtcggtgggggccgagcaggcccaggctgcggcagcccgggaacacagccccaggccggcagaggagcccatggagcaggagcctgccctgtgacrccccggcccccatccctctgggcttcaccattgtgattttgtttattttttctattaaaaacaaaaagtcacacattcaacaaggtgtgccgtgtgggtc

SEQ ID NO: 38942 - DNA, 201 bp, Homo sapiens
ctcaggcccccagccctgtggcttccacctcagctctagaagcctgctccctctgcagggggtggtggtgtcttcccagccctgtcccatgtgtccctccmcccattttcctgcattctgtctgtccttttcctccttggagcctgggccagctcaaggtgggcacgggggcccagacagtactctccagttctggggccc

SEQ ID NO: 38943 - DNA, 201 bp, Homo sapiens
aggaggtcttgctgggggagggagccctgaccatgccccgggagggctccacagagagtgagagcacacaggaagacctggaggaggaggacgaggaagasgatggggaggaggaggaggattgcatccaggttaaggacgaggagggcgagagtggtgctgaggaggggcccgacttggaggagcctggtgctggataca

SEQ ID NO: 38944 - DNA, 201 bp, Homo sapiens
cacctgacaaggcagcatgaggtccagctgcagaagcacctcaagcagcagcaggagatgctggcagccaagcagcagcaggagatgctggcagccaagcrgcagcaggagctggagcagcagcggcagcgggagcagcagcggcaggaagagctggagaagcagcggctggagcagcagctgctcatcctgcggaacaag

SEQ ID NO: 38945 - DNA, 201 bp, Homo sapiens
gggagggctccacagagagtgagagcacacaggaagacctggaggaggaggacgaggaagaggatggggaggaggaggaggattgcatccaggttaaggaygaggagggcgagagtggtgctgaggaggggcccgacttggaggagcctggtgctggatacaaaaaactgttctcagatgcccagccgctgcagcctttgc

SEQ ID NO: 38946 - DNA, 201 bp, Homo sapiens
tccaccctttccccttctttcgtcctcaccatctctgcagacccctctcctcctccttcctcttggtctcagcactgatgggaggctggtgcccaagctgwggcctgcagtctgtgaggagggctgtcttgcctcacactcctcacagcctacttccccttccccggggctgagagggtgaaagtgtgtggggaaggagag

SEQ ID NO: 38947 - DNA, 165 bp, Homo sapiens
gaatcttacgtgcttgtggttgggcacaatggctcaaagcctgtacctcccaaaatgctaggattacaggcatgagctacagtgctcagctgacaggtggmatttgaccattgggtcagagcgcgggccattttcccgatgcttctacctcccctcataggacat

SEQ ID NO: 38948 - DNA, 201 bp, Homo sapiens; identical to SEQ ID NO: 38936

SEQ ID NO: 38949 - DNA, 201 bp, Homo sapiens; identical to SEQ ID NO: 38937

SEQ ID NO: 38950 - DNA, 108 bp, Homo sapiens
ctaggattacaggcatgagctacagtgctcagctgacaggtggaatttgaccattgggtcagagcgcgggccattttcccgatgcttctacctcccctcayaggacat

SEQ ID NO: 38951 - DNA, 201 bp, Homo sapiens; identical to SEQ ID NO: 38944

SEQ ID NO: 38952 - DNA, 201 bp, Homo sapiens; identical to SEQ ID NO: 38943

SEQ ID NO: 38953 - DNA, 201 bp, Homo sapiens; identical to SEQ ID NO: 38945

SEQ ID NO: 38954 - DNA, 201 bp, Homo sapiens; identical to SEQ ID NO: 38935

SEQ ID NO: 38955 - DNA, 201 bp, Homo sapiens; identical to SEQ ID NO: 38936

SEQ ID NO: 38956 - DNA, 201 bp, Homo sapiens; identical to SEQ ID NO: 38937

SEQ ID NO: 38957 - DNA, 201 bp, Homo sapiens; identical to SEQ ID NO: 38938

SEQ ID NO: 38958 - DNA, 201 bp, Homo sapiens; identical to SEQ ID NO: 38939

SEQ ID NO: 38959 - DNA, 201 bp, Homo sapiens; identical to SEQ ID NO: 38940

SEQ ID NO: 38960 - DNA, 201 bp, Homo sapiens; identical to SEQ ID NO: 38941

SEQ ID NO: 38961 - DNA, 201 bp, Homo sapiens; identical to SEQ ID NO: 38942

SEQ ID NO: 38962 - DNA, 201 bp, Homo sapiens; identical to SEQ ID NO: 38943

SEQ ID NO: 38963 - DNA, 201 bp, Homo sapiens; identical to SEQ ID NO: 38944

SEQ ID NO: 38964 - DNA, 201 bp, Homo sapiens; identical to SEQ ID NO: 38945

SEQ ID NO: 38965 - DNA, 201 bp, Homo sapiens; identical to SEQ ID NO: 38946

SEQ ID NO: 38966 - DNA, 201 bp, Homo sapiens
agaattccctcaaagagctctggtccttgctgcactttattatgccggagaagtttgaattttgggaagattttgaagaagaccatgggaaggggagagaraatggctaccagagtcttcataaggtgctagagcctttccttctccggagagtcaaaaaagatgtggagaaatcccttcctgctaaagtggaacagattc

SEQ ID NO: 38967 - DNA, 201 bp, Homo sapiens
gaatcaatttggcttcagcggacacagtcgtcatctttgactctgactggaacccccagaatgacttgcaggcacaagcccgagcgcatagaattggtcaraagaagcaggtaaatatttaccgcttagttacaaaggggactgtggaggaggagatcatagaacgggccaaaaagaagatggtattagatcatctggtga

SEQ ID NO: 38968 - DNA, 201 bp, Homo sapiens
acagaatttgatgctcgaaaactgcataagttatacaagatggctcataagaaaaggtctcaagaagaagaggagcaaaagaagaaagacgacgtgactgsgggtaagaaaccatttcgtccagaggcctcaggctccagccgggactctctgatatctcagtcccatacctcacacaaccttcaccctcagaagcctcat

SEQ ID NO: 38969 - DNA, 201 bp, Homo sapiens
accaccggggacacagagattattatgacaggtatgcaaaaggctgtgagacaccaggtgccaacctttgccaggagctgtttctagggagaaagtgacgyatacatgaatgtatttatctatcaaattactgaagatctcatcatgcatgtgtcagccacagcgaatcccatgtcttggttataggttttatgttttgtt

SEQ ID NO: 38970 - DNA, 201 bp, Homo sapiens
acagtccttacctgccacgagcccataattgaagagtcaaagtcttctgaagctgcaccctctttacttcagtacaatgccaccagtagtacgatgagccraagctttacattgtgagagtagcaagtccagggagagctaaagaggttttatctgtatttcctaatttcaaatcttggataatttaacctcatagcagct

SEQ ID NO: 38971 - DNA, 201 bp, Homo sapiens
ggtcgggggccggctctcgccggcgggatgcgcctcggtgccctgggcccgagtcgtagggtcctggggtagggggcacgcggggccccgctgcagagccygcgggcggcaggtgggcggggggcagcctcgtcgccgggactggatccgccgggaaaggggcggcgggtgaatgccggcgagagcccgaaggggatcggg

SEQ ID NO: 38972 - DNA, 201 bp, Homo sapiens
acatgaatgtatttatctatcaaattactgaagatctcatcatgcatgtgtcagccacagcgaatcccatgtcttggttataggttttatgttttgttttstgggtcatagggagcacatttcacctgtgcaggaaaagagttttctgccgtcttttgaggaaatctagtgaagaggtcgccataaaatattagagtcaac

SEQ ID NO: 38973 - DNA, 201 bp, Homo sapiens
ttcaaatattttttctgatcccccactctctcttcttctttggagattctcattacacctatattagcttgcttgaagttgtctcacagctcacttgtatyctgttgacttttaaaaaattatgctttctgtttcactgtggatagtttctattgctacctcttcaagttcactaatactttccttttcaatgtcaagact

SEQ ID NO: 38974 - DNA, 201 bp, Homo sapiens
cccgcgggcggcaggtgggcggggggcagcctcgtcgccgggactggatccgccgggaaaggggcggcgggtgaatgccggcgagagcccgaaggggatckggcgtggagagcccctttctgtcctggtgacttaagagattaaaattaatttggttgctgttggttctgaacaaataatgagttcttttatttgaggtat

SEQ ID NO: 38975 - DNA, 201 bp, Homo sapiens
gtgaggcccatccagtgtactttgcattttatacattgtagttctaaaagttcggaaagttgtttttgggtctttttatatatgttctgtgtctaaccttytaaaacctggaacacagatataacaatggttttgatgtccttgtctgcgaatcttatcacttgggtcagtttcagttgatacctcctcactgtgggtctt

SEQ ID NO: 38976 - DNA, 201 bp, Homo sapiens
aagagaacaaggagaacaaggagaaacaaatgagttctaggaaagacaaagaaggggacaaggaaagaaagaagtcaaaagataagaaagagaagcctaaragtggtgatgccaaatcttcgagtaaatcaaagcgatctcagggtcctgtccatattacagcaggaagtgaacctgtccccattggagaggatgaggatg

SEQ ID NO: 38977 - DNA, 201 bp, Homo sapiens
tgaggcccgtgaaaaaggcactgaaacagctcgacaaacctgacaaggggctcaacgtgcaagaacagctggaacacacccggaactgcctgctgaaaatyggagaccggatagccgagtgccttaaagcctactcagatcaggagcacatcaaactctggaggaggaacctatggatttttgtttccaagtttacagaat

SEQ ID NO: 38978 - DNA, 201 bp, Homo sapiens
gcatagcacgtgatgctgagctggtagataagtcggtggcagatctgaagcgcctgggtgaactgatccacaacagctgtgtgtcagcaatgcaggaataygaagagcagctgaaagaaaatgccagcgagggaaaaggaccagggaaaaggagaggtccaacaatcaagatatccggagttcaggttaatgtgaaatcca

SEQ ID NO: 38979 - DNA, 201 bp, Homo sapiens
aaaggctgtgagacaccaggtgccaacctttgccaggagctgtttctagggagaaagtgacgtatacatgaatgtatttatctatcaaattactgaagatstcatcatgcatgtgtcagccacagcgaatcccatgtcttggttataggttttatgttttgttttctgggtcatagggagcacatttcacctgtgcaggaa

SEQ ID NO: 38980 - DNA, 201 bp, Homo sapiens; identical to SEQ ID NO: 38966

SEQ ID NO: 38981 - DNA, 201 bp, Homo sapiens; identical to SEQ ID NO: 38967

SEQ ID NO: 38982 - DNA, 201 bp, Homo sapiens; identical to SEQ ID NO: 38968

SEQ ID NO: 38983 - DNA, 201 bp, Homo sapiens; identical to SEQ ID NO: 38969

SEQ ID NO: 38984 - DNA, 201 bp, Homo sapiens; identical to SEQ ID NO: 38970

SEQ ID NO: 38985 - DNA, 119 bp, Homo sapiens
taaagaaggaaaaacttgwatttatattatgaaattaaggttttacttttatttagcaatcatttcacccattgggggattaatttttaaaaagattagtacttagctgagctttagat

SEQ ID NO: 38986 - DNA, 201 bp, Homo sapiens; identical to SEQ ID NO: 38972

SEQ ID NO: 38987 - DNA, 201 bp, Homo sapiens; identical to SEQ ID NO: 38973

SEQ ID NO: 38988 - DNA, 201 bp, Homo sapiens; identical to SEQ ID NO: 38975

SEQ ID NO: 38989 - DNA, 201 bp, Homo sapiens; identical to SEQ ID NO: 38976

SEQ ID NO: 38990 - DNA, 201 bp, Homo sapiens; identical to SEQ ID NO: 38977

SEQ ID NO: 38991 - DNA, 201 bp, Homo sapiens; identical to SEQ ID NO: 38978

SEQ ID NO: 38992 - DNA, 201 bp, Homo sapiens; identical to SEQ ID NO: 38979

SEQ ID NO: 38993 - DNA, 201 bp, Homo sapiens
taactttgaagtgggattaatatcttgtatcgtctttattttgtacaattggggatttagaataaatgaattgcaccctgccatagattacttacgtttgmtttttaaatgccaggttttcatttattactaatcaactgataccagttttggtaactattacaaaggtggtaggcattattttggtagacaaaatgagtt

SEQ ID NO: 38994 - DNA, 201 bp, Homo sapiens
ggatattgttcttgctacgaaatttatctttgtgtgtagagtatggaattgaaacagtttggattatggattttacctagattggacattgttgcttttgtttggtgtaaatctaaagtggatttcttcagtgagggagagacatggttctggcagattatgttgaataaggaaagttgattggatttttttgggtgtgtg

SEQ ID NO: 38995 - DNA, 201 bp, Homo sapiens
gactttttttgtggacattttgacatttggagaagaaagatggcacactaacccagataatagtttttatgcctggaattttttgcagtttgatttgtatrcgtatgacctcttgaaatgttaatttttaataaaatttgtaacacttaaaaatttctcagtttgggtttttttttttaagtggaagtttaattaaatgtt

SEQ ID NO: 38996 - DNA, 201 bp, Homo sapiens
aattttggatattgttcttgctacgaaatttatctttgtgtgtagagtatggaattgaaacagtttggattatggattttacctagattggacattgttgmttttgtttggtgtaaatctaaagtggatttcttcagtgagggagagacatggttctggcagattatgttgaataaggaaagttgattggatttttttggg

SEQ ID NO: 38997 - DNA, 201 bp, Homo sapiens
gaggaagaagtgttggatttatgggttagggtccttggagtattcacaattttttaaatttgaaattatgtgtgtaatccattttatataactttgaagtrggattaatatcttgtatcgtctttattttgtacaattggggatttagaataaatgaattgcaccctgccatagattacttacgtttgatttttaaatgcc

SEQ ID NO: 38998 - DNA, 201 bp, Homo sapiens; identical to SEQ ID NO: 38966

SEQ ID NO: 38999 - DNA, 201 bp, Homo sapiens; identical to SEQ ID NO: 38967

SEQ ID NO: 39000 - DNA, 201 bp, Homo sapiens; identical to SEQ ID NO: 38968

SEQ ID NO: 39001 - DNA, 201 bp, Homo sapiens; identical to SEQ ID NO: 38969

SEQ ID NO: 39002 - DNA, 201 bp, Homo sapiens; identical to SEQ ID NO: 38970

SEQ ID NO: 39003 - DNA, 119 bp, Homo sapiens; identical to SEQ ID NO: 38985

SEQ ID NO: 39004 - DNA, 201 bp, Homo sapiens; identical to SEQ ID NO: 38972

SEQ ID NO: 39005 - DNA, 201 bp, Homo sapiens; identical to SEQ ID NO: 38973

SEQ ID NO: 39006 - DNA, 201 bp, Homo sapiens; identical to SEQ ID NO: 38975

SEQ ID NO: 39007 - DNA, 201 bp, Homo sapiens; identical to SEQ ID NO: 38976

SEQ ID NO: 39008 - DNA, 201 bp, Homo sapiens; identical to SEQ ID NO: 38977

SEQ ID NO: 39009 - DNA, 201 bp, Homo sapiens; identical to SEQ ID NO: 38978

SEQ ID NO: 39010 - DNA, 201 bp, Homo sapiens; identical to SEQ ID NO: 38979

SEQ ID NO: 39011 - DNA, 201 bp, Homo sapiens
gagttgtgacttaaggcctcttacagcagtcaaaaggtaaggtacctttattcaaaggggcctttactgtaatgtacagtttttctgtcagtaaatttcartttttaggtttttgtactgcagaaaaatgaccttgtcggtttagccattgctgcattgcaccattttacatacaaggcaaattttttctttgaagaatcc

SEQ ID NO: 39012 - DNA, 119 bp, Homo sapiens; identical to SEQ ID NO: 38985

SEQ ID NO: 39013 - DNA, 201 bp, Homo sapiens; identical to SEQ ID NO: 38966

SEQ ID NO: 39014 - DNA, 201 bp, Homo sapiens
gtccgaggagtgtgcggaaggacctcgtggagggatttactgatgcagagatccgaaggttggtggaggctctgttctcactgagcttgtttgaaagtgcrtactttgctcaaggtctttctcaggctcagacaaatgacagtgactctgacagtgagtccaagaggcaggcccagagatcctctgcttctgagagtgaga

SEQ ID NO: 39015 - DNA, 201 bp, Homo sapiens; identical to SEQ ID NO: 38967

SEQ ID NO: 39016 - DNA, 201 bp, Homo sapiens; identical to SEQ ID NO: 38968

SEQ ID NO: 39017 - DNA, 201 bp, Homo sapiens; identical to SEQ ID NO: 38971

SEQ ID NO: 39018 - DNA, 201 bp, Homo sapiens; identical to SEQ ID NO: 38974

SEQ ID NO: 39019 - DNA, 201 bp, Homo sapiens
aggaaaacaaagtgcccaggctgaaagaggagcatggaattgagctttcatctcctaggcattcagataatccatcagaagagggagaagtgaaacctaaragtggtgatgccaaatcttcgagtaaatcaaagcgatctcagggtcctgtccatattacagcaggaagtgaacctgtccccattggagaggatgaggatg

SEQ ID NO: 39020 - DNA, 201 bp, Homo sapiens; identical to SEQ ID NO: 38977

SEQ ID NO: 39021 - DNA, 201 bp, Homo sapiens
atgacaagaagccaaagcgcagagggcgtccgaggagtgtgcggaaggacctcgtggagggatttactgatgcagagatccgaaggttggtggaggctctrttctcactgagcttgtttgaaagtgcgtactttgctcaaggtctttctcaggctcagacaaatgacagtgactctgacagtgagtccaagaggcaggccc

SEQ ID NO: 39022 - DNA, 201 bp, Homo sapiens; identical to SEQ ID NO: 38978

SEQ ID NO: 39023 - DNA, 201 bp, Homo sapiens
tccgtcagattgacagtggcagcaacctcaccacagacctcatcgtccagcggatcatcaccaacaggttggagtatgaggcgcgaaaccagaagaaggawgccaaggagctggccttcctggaggctgccaggcagcaggcggcacagcccctgggggagcgcgatggtgacttctaacctggcagaggccctggccggc

SEQ ID NO: 39024 - DNA, 201 bp, Homo sapiens
ggagcgcgatggtgacttctaacctggcagaggccctggccggccctccccctgctctgcttctgcgccttctgcgtttggacataggactctgcagggcygccctctctaactggcctggctctggaagggctggtgaggactctgcctccttgcctgcctacaaggtgcctggtttgcagcaggctctccgctctttcc

SEQ ID NO: 39025 - DNA, 201 bp, Homo sapiens
gcaagaggaaggcagccaggggctccagcccatgccctcacagatttggctctcgagttggggagcgaagggctgggggaggacactgggaaccgggccarccgtggccctgcacttcccccagggagcaccaaggctaggcgcggcttcaccgcggggctgggtcgtggccagcttcgcccctgggtctgaagacctctg

SEQ ID NO: 39026 - DNA, 201 bp, Homo sapiens
ggcatgtggacttcctggagaaggtgcacaggctggcagagaggccctacatcatcgcgggcttacactttgaccaggaggtcaatcactacaaggggaaraactaccccatcatgaatctgcatgaacggactctgagcgtgctggcctgccggtacgtgtcagaagtggtgattggagccccgtacgcggtcacagcag

SEQ ID NO: 39027 - DNA, 201 bp, Homo sapiens
gcagaggccctggccggccctccccctgctctgcttctgcgccttctgcgtttggacataggactctgcagggccgccctctctaactggcctggctctgsaagggctggtgaggactctgcctccttgcctgcctacaaggtgcctggtttgcagcaggctctccgctctttccagcaaagctgctcagagagggtgtcc

SEQ ID NO: 39028 - DNA, 201 bp, Homo sapiens
gtcagaagtggtgattggagccccgtacgcggtcacagcagagctcctaagtcacttcaaggtggacctggtgtgtcacggcaagacagaaattatccctkacagggatggctccgacccataccaggagcccaagagaaggggcatcttccgtcagattgacagtggcagcaacctcaccacagacctcatcgtccagcg

SEQ ID NO: 39029 - DNA, 201 bp, Homo sapiens
gaggctgccaggcagcaggcggcacagcccctgggggagcgcgatggtgacttctaacctggcagaggccctggccggccctccccctgctctgcttctgygccttctgcgtttggacataggactctgcagggccgccctctctaactggcctggctctggaagggctggtgaggactctgcctccttgcctgcctacaa

SEQ ID NO: 39030 - DNA, 201 bp, Homo sapiens
cactcaggaggagagatacaagatggtgcaggccatcaaatgggtggacgaggtggtgccagcggctccctacgtcactacactagagaccctggacaaayacaactgtgacttctgtgttcacggcaatgacatcaccctgactgtagatggccgggacacctatgaggaagtaaagcaggctgggaggtacagagaatg

SEQ ID NO: 39031 - DNA, 201 bp, Homo sapiens
tgctgctggtaaccaaagcccatcacagcagccaggagatgtcctctgagtaccgggagtatgcagacagttttggcaagtgccctggtgggcggaacccytggaccggggtatcccagttcctgcagacatctcagaagatcatccagtttgcttctgggaaggagccccagccaggggagacagtcatctatgtggctg

SEQ ID NO: 39032 - DNA, 201 bp, Homo sapiens
gtccccaggcctcagatgctgcatattgctggcccagctcctgaggctctttggacctccaggaatcggtgtctctatcaggaacccttaaccctgacccrgactcccggctgggacccagggtgttggagtggcaggagcgctgtcaggcttggtgaagggtgtgagctgtccaacggggcaaggaggaggcagggcctg

SEQ ID NO: 39033 - DNA, 201 bp, Homo sapiens
caggagaacgagaaggctgcctgatcagagagtctctgaagaagattctgtggctacaggcttcagcagagtgtgagggagaccccagttatttcctcagstgtttccaccaaatcctcctgtctttcgtggccaacaccccaggcaaggcttggggcccccgtctgctgctggacgcagagccatgaagaagaagttagt

SEQ ID NO: 39034 - DNA, 201 bp, Homo sapiens
gcagccctggagacccggcaccatcacacccagatcgcgtccaccttcatcgctgtggtgcaagccatcgtccgcacggctggtggctgggcagctgcctyagactccaggaaaggcggggagcctgccggctactgagtgctccgggcagacaaggctgacaagcaatccagggacaagatactcacgaggacgaggaag

SEQ ID NO: 39035 - DNA, 201 bp, Homo sapiens
gaggacggcagtgctgtgtccgccaccagcaccatcaacctctactttggctccaaggtctgctccccggtcagcgggatcctgttcaataatgaatggaygacttcagctctcccagcatcaccaatgagtttggggtacccccctcacctgccaatttcatccagccagggaagcagccgctctcgtccatgttcccaa

SEQ ID NO: 39036 - DNA, 201 bp, Homo sapiens
ctcttcctcaccatctacaacagcaccactcgaaaagctgaggtcatcaatgcctgagaggtggcccccaggctggcctttgccagcatgttcaacagctyggagcagtcccagaagggagggctgtcagtggcagtgcctggggagatccgaggctatgagctggcacaccagcggcatgggcggctgccctgggctcgc

SEQ ID NO: 39037 - DNA, 201 bp, Homo sapiens
aggtgctctcctgggcccccactgtccccaggcctcagatgctgcatattgctggcccagctcctgaggctctttggacctccaggaatcggtgtctctaycaggaacccttaaccctgacccggactcccggctgggacccagggtgttggagtggcaggagcgctgtcaggcttggtgaagggtgtgagctgtccaacg

SEQ ID NO: 39038 - DNA, 201 bp, Homo sapiens
gcaccatcacacccagatcgcgtccaccttcatcgctgtggtgcaagccatcgtccgcacggctggtggctgggcagctgcctcagactccaggaaaggcrgggagcctgccggctactgagtgctccgggcagacaaggctgacaagcaatccagggacaagatactcacgaggacgaggaagaggactttgggggacgg

SEQ ID NO: 39039 - DNA, 201 bp, Homo sapiens
gggcagctgcctcagactccaggaaaggcggggagcctgccggctactgagtgctccgggcagacaaggctgacaagcaatccagggacaagatactcacsaggacgaggaagaggactttgggggacgggcttcccctgtgagcagcagagcagcataataaatgaggccactgtgccaggctccaggtggcctccctgg

SEQ ID NO: 39040 - DNA, 201 bp, Homo sapiens
gctgcctcagactccaggaaaggcggggagcctgccggctactgagtgctccgggcagacaaggctgacaagcaatccagggacaagatactcacgaggaygaggaagaggactttgggggacgggcttcccctgtgagcagcagagcagcataataaatgaggccactgtgccaggctccaggtggcctccctggcctgt

SEQ ID NO: 39041 - DNA, 201 bp, Homo sapiens
ggcgtcgggtgagcccagaagtgagagcagttggctgcgccccagtgctgtgtgacccagaggcgccacacaccctctctgagctggtggacatcatagcrggtgcagcccagaactgtcttctgaggaagaggtgctctcctgggcccccactgtccccaggcctcagatgctgcatattgctggcccagctcctgaggc

SEQ ID NO: 39042 - DNA, 201 bp, Homo sapiens
gtgtggggctcatgaatgcccacagcatgagcatcgggggtggcctcttcctcaccatctacaacagcaccactcgaaaagctgaggtcatcaatgcctgmgaggtggcccccaggctggcctttgccagcatgttcaacagcttggagcagtcccagaagggagggctgtcagtggcagtgcctggggagatccgaggct

SEQ ID NO: 39043 - DNA, 201 bp, Homo sapiens
gtgtgtggggctcatgaatgcccacagcatgagcatcgggggtggcctcttcctcaccatctacaacagcaccactcgaaaagctgaggtcatcaatgccygagaggtggcccccaggctggcctttgccagcatgttcaacagcttggagcagtcccagaagggagggctgtcagtggcagtgcctggggagatccgagg

SEQ ID NO: 39044 - DNA, 201 bp, Homo sapiens
agaggcagagggaggtaacccggagtcccccagaaaggtctgggctgtgcgtgcttcaggcttcagcagagtgtgagggagaccccagttatttcctcagstgtttccaccaaatcctcctgtctttcgtggccaacaccccaggcaaggcttggggcccccgtctgctgctggacgagccatgaagaagaagttagtggt

SEQ ID NO: 39045 - DNA, 201 bp, Homo sapiens; identical to SEQ ID NO: 39034

SEQ ID NO: 39046 - DNA, 201 bp, Homo sapiens; identical to SEQ ID NO: 39035

SEQ ID NO: 39047 - DNA, 201 bp, Homo sapiens; identical to SEQ ID NO: 39036

SEQ ID NO: 39048 - DNA, 201 bp, Homo sapiens
gctgcctcagactccaggaaaggcggggagcctgccggctactgagtgctccgggcagacaaggctgacaagcaatccagggacaagatactcacgaggaygaggaagaggactttgggggacgggcttcccctgtgagcagcagagcagcataataaatgaggccactgtgccaggctccagcagtcccccaatctcagt

SEQ ID NO: 39049 - DNA, 201 bp, Homo sapiens
gggcagctgcctcagactccaggaaaggcggggagcctgccggctactgagtgctccgggcagacaaggctgacaagcaatccagggacaagatactcacsaggacgaggaagaggactttgggggacgggcttcccctgtgagcagcagagcagcataataaatgaggccactgtgccaggctccagcagtcccccaatc

SEQ ID NO: 39050 - DNA, 201 bp, Homo sapiens; identical to SEQ ID NO: 39038

SEQ ID NO: 39051 - DNA, 201 bp, Homo sapiens; identical to SEQ ID NO: 39042

SEQ ID NO: 39052 - DNA, 201 bp, Homo sapiens
agggtcccagcagcaaggcaagtgaggtgctgccatcttccaggctggacagttcagtgatttgcctgaggccccacagcagagttcaactggagacagaraaaccagctagaggcagagggaggtaacccggagtcccccagaaaggtctgggctgtgcgtgcttcaggcttcagcagagtgtgagggagaccccagtta

SEQ ID NO: 39053 - DNA, 201 bp, Homo sapiens; identical to SEQ ID NO: 39043

SEQ ID NO: 39054 - DNA, 201 bp, Homo sapiens; identical to SEQ ID NO: 39033

SEQ ID NO: 39055 - DNA, 201 bp, Homo sapiens; identical to SEQ ID NO: 39034

SEQ ID NO: 39056 - DNA, 201 bp, Homo sapiens; identical to SEQ ID NO: 39035

SEQ ID NO: 39057 - DNA, 201 bp, Homo sapiens
ggcctcttcctcaccatctacaacagcaccagaaaagctgaggtcatcaatgcctgagaggtggcccccaggctggcctttgccagcatgttcaacagctyggagcagtcccagaagggagggctgtcagtggcagtgcctggggagatccgaggctatgagctggcacaccagcggcatgggcggctgccctgggctcgc

SEQ ID NO: 39058 - DNA, 201 bp, Homo sapiens; identical to SEQ ID NO: 39040

SEQ ID NO: 39059 - DNA, 201 bp, Homo sapiens; identical to SEQ ID NO: 39039

SEQ ID NO: 39060 - DNA, 201 bp, Homo sapiens; identical to SEQ ID NO: 39038

SEQ ID NO: 39061 - DNA, 201 bp, Homo sapiens
gagcatcgggggtggcctcttcctcaccatctacaacagcaccagaaaagctgaggtcatcaatgcctgagaggtggcccccaggctggcctttgccagcrtgttcaacagcttggagcagtcccagaagggagggctgtcagtggcagtgcctggggagatccgaggctatgagctggcacaccagcggcatgggcggct

SEQ ID NO: 39062 - DNA, 201 bp, Homo sapiens
tgtgtgtggggctcatgaatgcccacagcatgagcatcgggggtggcctcttcctcaccatctacaacagcaccagaaaagctgaggtcatcaatgcctgmgaggtggcccccaggctggcctttgccagcatgttcaacagcttggagcagtcccagaagggagggctgtcagtggcagtgcctggggagatccgaggct

SEQ ID NO: 39063 - DNA, 201 bp, Homo sapiens
gttgtgtgtggggctcatgaatgcccacagcatgagcatcgggggtggcctcttcctcaccatctacaacagcaccagaaaagctgaggtcatcaatgccygagaggtggcccccaggctggcctttgccagcatgttcaacagcttggagcagtcccagaagggagggctgtcagtggcagtgcctggggagatccgagg

SEQ ID NO: 39064 - DNA, 201 bp, Homo sapiens
cccagcatccagctggcccgccagggcttccccgtgggcaagggcttggcggcagtcctggaaaacaagcggaccgtcatcgagcagcagcctgtcttgtytgaggtgttctgccgggatagaaaggtgcttcgggagggggagagactgaccctgccgcgggtggctgacacctacgagacgctggccattgagggtgcc

SEQ ID NO: 39065 - DNA, 201 bp, Homo sapiens; identical to SEQ ID NO: 39033

SEQ ID NO: 39066 - DNA, 201 bp, Homo sapiens; identical to SEQ ID NO: 39034

SEQ ID NO: 39067 - DNA, 201 bp, Homo sapiens; identical to SEQ ID NO: 39035

SEQ ID NO: 39068 - DNA, 201 bp, Homo sapiens
ctcatgaatgcccacagcatgagcatcgggggaaaagctgaggtcatcaatgcctgagaggtggcccccaggctggcctttgccagcatgttcaacagctyggagcagagggctgtcagtggcagtgcctggggagatccgaggctatgagctggcacaccagcggcatgggcggctgccctgggctcgcctcttccagcc

SEQ ID NO: 39069 - DNA, 201 bp, Homo sapiens; identical to SEQ ID NO: 39040

SEQ ID NO: 39070 - DNA, 201 bp, Homo sapiens; identical to SEQ ID NO: 39039

SEQ ID NO: 39071 - DNA, 201 bp, Homo sapiens; identical to SEQ ID NO: 39038

SEQ ID NO: 39072 - DNA, 201 bp, Homo sapiens
gatggtggctctgcggtggatgcagccattgcagccctgttgtgtgtggggctcatgaatgcccacagcatgagcatcgggggaaaagctgaggtcatcartgcctgagaggtggcccccaggctggcctttgccagcatgttcaacagcttggagcagagggctgtcagtggcagtgcctggggagatccgaggctatga

SEQ ID NO: 39073 - DNA, 201 bp, Homo sapiens
gctctgcggtggatgcagccattgcagccctgttgtgtgtggggctcatgaatgcccacagcatgagcatcgggggaaaagctgaggtcatcaatgcctgmgaggtggcccccaggctggcctttgccagcatgttcaacagcttggagcagagggctgtcagtggcagtgcctggggagatccgaggctatgagctggca

SEQ ID NO: 39074 - DNA, 201 bp, Homo sapiens
tggctctgcggtggatgcagccattgcagccctgttgtgtgtggggctcatgaatgcccacagcatgagcatcgggggaaaagctgaggtcatcaatgccygagaggtggcccccaggctggcctttgccagcatgttcaacagcttggagcagagggctgtcagtggcagtgcctggggagatccgaggctatgagctgg

SEQ ID NO: 39075 - DNA, 201 bp, Homo sapiens; identical to SEQ ID NO: 39064

SEQ ID NO: 39076 - DNA, 201 bp, Homo sapiens; identical to SEQ ID NO: 39038

SEQ ID NO: 39077 - DNA, 201 bp, Homo sapiens; identical to SEQ ID NO: 39039

SEQ ID NO: 39078 - DNA, 201 bp, Homo sapiens; identical to SEQ ID NO: 39040

SEQ ID NO: 39079 - DNA, 201 bp, Homo sapiens; identical to SEQ ID NO: 39034

SEQ ID NO: 39080 - DNA, 201 bp, Homo sapiens; identical to SEQ ID NO: 39035

SEQ ID NO: 39081 - DNA, 201 bp, Homo sapiens; identical to SEQ ID NO: 39033

SEQ ID NO: 39082 - DNA, 201 bp, Homo sapiens; identical to SEQ ID NO: 39034

SEQ ID NO: 39083 - DNA, 201 bp, Homo sapiens; identical to SEQ ID NO: 39035

SEQ ID NO: 39084 - DNA, 201 bp, Homo sapiens; identical to SEQ ID NO: 39036

SEQ ID NO: 39085 - DNA, 201 bp, Homo sapiens; identical to SEQ ID NO: 39040

SEQ ID NO: 39086 - DNA, 201 bp, Homo sapiens; identical to SEQ ID NO: 39039

SEQ ID NO: 39087 - DNA, 201 bp, Homo sapiens; identical to SEQ ID NO: 39038

SEQ ID NO: 39088 - DNA, 201 bp, Homo sapiens; identical to SEQ ID NO: 39042

SEQ ID NO: 39089 - DNA, 201 bp, Homo sapiens
agggtcccagcagcaaggcaagtgaggtgctgccatcttccaggctggacagttcagtgatttgcctgaggccccacagcagagttcaactggagacagaraaaccagctagaggcagagggaggtaacccggagtcccccagaaaggtctgggctgtgcgtgcttcaggtaacctcccttgaccttcaggagaacgagaa

SEQ ID NO: 39090 - DNA, 201 bp, Homo sapiens; identical to SEQ ID NO: 39043

SEQ ID NO: 39091 - DNA, 201 bp, Homo sapiens
cagcatccagctggcccgccagggcttccccgtgggcaagggcttggcggcagtcctggaaaacaagcggaccgtcatcgagcagcagcctgtcttgtggyatgtgttctgccgggatagaaaggtgcttcgggagggggagagactgaccctgccgcgggtggctgacacctacgagacgctggccattgagggtgccca

SEQ ID NO: 39092 - DNA, 201 bp, Homo sapiens
tgttgtcacacctgtcacttgctgccatagccatgagacttcccaagggtcactgctgccactcactgcacagcctggaagggagtccacaggggacatayagtgagcaagagacctgtgccactcaggcctcctgggggtgtccccagtgcagccatgatgataatcacagctaccattcaccaagtcctgcccacagtc

SEQ ID NO: 39093 - DNA, 201 bp, Homo sapiens
ggccccacagcagagttcaactggagacagagaaaccagctagaggcagagggaggtaacccggagtcccccagaaaggtctgggctgtgcgtgcttcagstgtttccaccaaatcctcctgtctttcgtggccaacaccccaggcaaggcttggggcccccgtctgctgctggacgcagagccatgaagaagaagttagt

SEQ ID NO: 39094 - DNA, 201 bp, Homo sapiens; identical to SEQ ID NO: 39034

SEQ ID NO: 39095 - DNA, 201 bp, Homo sapiens; identical to SEQ ID NO: 39035

SEQ ID NO: 39096 - DNA, 201 bp, Homo sapiens; identical to SEQ ID NO: 39036

SEQ ID NO: 39097 - DNA, 201 bp, Homo sapiens; identical to SEQ ID NO: 39040

SEQ ID NO: 39098 - DNA, 201 bp, Homo sapiens; identical to SEQ ID NO: 39039

SEQ ID NO: 39099 - DNA, 201 bp, Homo sapiens; identical to SEQ ID NO: 39038

SEQ ID NO: 39100 - DNA, 201 bp, Homo sapiens; identical to SEQ ID NO: 39042

SEQ ID NO: 39101 - DNA, 201 bp, Homo sapiens
acactcccagcagcaaggcaagtgaggtgctgccatcttccaggctggacagttcagtgatttgcctgaggccccacagcagagttcaactggagacagaraaaccagctagaggcagagggaggtaacccggagtcccccagaaaggtctgggctgtgcgtgcttcaggtgtttccaccaaatcctcctgtctttcgtgg

SEQ ID NO: 39102 - DNA, 190 bp, Homo sapiens
caggcccaccaagcctggggaggtggccacccttccacgatggcatttggatgttccctgtgtgtggggagggcacagggactccattcrtagaccacctctgggacagtgtgtctgcctctgaggtcagacgctctgcactgggacagggtggagtggagggaaacccagcttggggctcattggaggg

SEQ ID NO: 39103 - DNA, 201 bp, Homo sapiens; identical to SEQ ID NO: 39043

SEQ ID NO: 39104 - DNA, 201 bp, Homo sapiens; identical to SEQ ID NO: 39064

SEQ ID NO: 39105 - DNA, 201 bp, Homo sapiens; identical to SEQ ID NO: 39038

SEQ ID NO: 39106 - DNA, 201 bp, Homo sapiens; identical to SEQ ID NO: 39039

SEQ ID NO: 39107 - DNA, 201 bp, Homo sapiens; identical to SEQ ID NO: 39040

SEQ ID NO: 39108 - DNA, 201 bp, Homo sapiens; identical to SEQ ID NO: 39034

SEQ ID NO: 39109 - DNA, 201 bp, Homo sapiens; identical to SEQ ID NO: 39035

SEQ ID NO: 39110 - DNA, 201 bp, Homo sapiens; identical to SEQ ID NO: 39033

SEQ ID NO: 39111 - DNA, 201 bp, Homo sapiens; identical to SEQ ID NO: 39034

SEQ ID NO: 39112 - DNA, 201 bp, Homo sapiens; identical to SEQ ID NO: 39035

SEQ ID NO: 39113 - DNA, 201 bp, Homo sapiens; identical to SEQ ID NO: 39057

SEQ ID NO: 39114 - DNA, 201 bp, Homo sapiens; identical to SEQ ID NO: 39040

SEQ ID NO: 39115 - DNA, 201 bp, Homo sapiens; identical to SEQ ID NO: 39039

SEQ ID NO: 39116 - DNA, 201 bp, Homo sapiens; identical to SEQ ID NO: 39038

SEQ ID NO: 39117 - DNA, 201 bp, Homo sapiens; identical to SEQ ID NO: 39061

SEQ ID NO: 39118 - DNA, 201 bp, Homo sapiens; identical to SEQ ID NO: 39062

SEQ ID NO: 39119 - DNA, 201 bp, Homo sapiens; identical to SEQ ID NO: 39063

SEQ ID NO: 39120 - DNA, 201 bp, Homo sapiens; identical to SEQ ID NO: 39064

SEQ ID NO: 39121 - DNA, 201 bp, Homo sapiens
agggtgtgagctgtccaacggggcaaggaggaggcagggcctgttctgtagttggacagacagagccctctagctgctttctggaagactgaagggcaggygatcaaggcaagtgaggtgctgccatcttccaggctggacagttcagtgatttgcctgaggccccacagcaggagaacgagaaggctgcctgatcagaga

SEQ ID NO: 39122 - DNA, 201 bp, Homo sapiens; identical to SEQ ID NO: 39032

SEQ ID NO: 39123 - DNA, 201 bp, Homo sapiens; identical to SEQ ID NO: 39033

SEQ ID NO: 39124 - DNA, 201 bp, Homo sapiens; identical to SEQ ID NO: 39034

SEQ ID NO: 39125 - DNA, 201 bp, Homo sapiens; identical to SEQ ID NO: 39035

SEQ ID NO: 39126 - DNA, 201 bp, Homo sapiens; identical to SEQ ID NO: 39036

SEQ ID NO: 39127 - DNA, 201 bp, Homo sapiens; identical to SEQ ID NO: 39040

SEQ ID NO: 39128 - DNA, 201 bp, Homo sapiens; identical to SEQ ID NO: 39039

SEQ ID NO: 39129 - DNA, 201 bp, Homo sapiens; identical to SEQ ID NO: 39038

SEQ ID NO: 39130 - DNA, 201 bp, Homo sapiens; identical to SEQ ID NO: 39037

SEQ ID NO: 39131 - DNA, 201 bp, Homo sapiens; identical to SEQ ID NO: 39041

SEQ ID NO: 39132 - DNA, 201 bp, Homo sapiens; identical to SEQ ID NO: 39042

SEQ ID NO: 39133 - DNA, 201 bp, Homo sapiens; identical to SEQ ID NO: 39043

SEQ ID NO: 39134 - DNA, 201 bp, Homo sapiens; identical to SEQ ID NO: 39033

SEQ ID NO: 39135 - DNA, 201 bp, Homo sapiens; identical to SEQ ID NO: 39034

SEQ ID NO: 39136 - DNA, 201 bp, Homo sapiens; identical to SEQ ID NO: 39035

SEQ ID NO: 39137 - DNA, 201 bp, Homo sapiens; identical to SEQ ID NO: 39036

SEQ ID NO: 39138 - DNA, 201 bp, Homo sapiens; identical to SEQ ID NO: 39040

SEQ ID NO: 39139 - DNA, 201 bp, Homo sapiens; identical to SEQ ID NO: 39039

SEQ ID NO: 39140 - DNA, 201 bp, Homo sapiens; identical to SEQ ID NO: 39038

SEQ ID NO: 39141 - DNA, 102 bp, Homo sapiens
crggtgcagcccagaactgtcttctgaggaagaggtgctctcctgggcccccactgtccccaggcctcagcaaggcaagtgaggtgctgccatcttccaggc

SEQ ID NO: 39142 - DNA, 201 bp, Homo sapiens; identical to SEQ ID NO: 39042

SEQ ID NO: 39143 - DNA, 201 bp, Homo sapiens
ccccaggcctcagcaaggcaagtgaggtgctgccatcttccaggctggacagttcagtgatttgcctgaggccccacagcagagttcaactggagacagaraaaccagctagaggcagagggaggtaacccggagtcccccagaaaggtctgggctgtgcgtgcttcaggtaacctcccttgaccttcaggagaacgagaa

SEQ ID NO: 39144 - DNA, 201 bp, Homo sapiens; identical to SEQ ID NO: 39043

SEQ ID NO: 39145 - DNA, 201 bp, Homo sapiens; identical to SEQ ID NO: 39038

SEQ ID NO: 39146 - DNA, 201 bp, Homo sapiens; identical to SEQ ID NO: 39049

SEQ ID NO: 39147 - DNA, 201 bp, Homo sapiens; identical to SEQ ID NO: 39048

SEQ ID NO: 39148 - DNA, 201 bp, Homo sapiens; identical to SEQ ID NO: 39034

SEQ ID NO: 39149 - DNA, 201 bp, Homo sapiens; identical to SEQ ID NO: 39035

SEQ ID NO: 39150 - DNA, 201 bp, Homo sapiens; identical to SEQ ID NO: 39033

SEQ ID NO: 39151 - DNA, 201 bp, Homo sapiens; identical to SEQ ID NO: 39034

SEQ ID NO: 39152 - DNA, 201 bp, Homo sapiens; identical to SEQ ID NO: 39035

SEQ ID NO: 39153 - DNA, 171 bp, Homo sapiens
tcccagccaggctggatctctgtgagaggcctgcctgtcctgcaccctgtgcggatgcctcccactgtccrccagggctgctgggcaccccctggctggtctcttggactagcaggtgcagcccagaactgtcttctgaggaagaggtgctctcctgggcccccactgtcc

SEQ ID NO: 39154 - DNA, 174 bp, Homo sapiens
tcccagccaggctggatctctgtgagaggcctgcctgtcctgcaccctgtgcggatgcctcccactgtccaccrgggctgctgggcaccccctggctggtctcttggactagcaggtgcagcccagaactgtcttctgaggaagaggtgctctcctgggcccccactgtcccca

SEQ ID NO: 39155 - DNA, 201 bp, Homo sapiens; identical to SEQ ID NO: 39036

SEQ ID NO: 39156 - DNA, 201 bp, Homo sapiens; identical to SEQ ID NO: 39040

SEQ ID NO: 39157 - DNA, 201 bp, Homo sapiens; identical to SEQ ID NO: 39039

SEQ ID NO: 39158 - DNA, 201 bp, Homo sapiens; identical to SEQ ID NO: 39038

SEQ ID NO: 39159 - DNA, 201 bp, Homo sapiens
ggatctctgtgagaggcctgcctgtcctgcaccctgtgcggatgcctcccactgtccaccagggctgctgggcaccccctggctggtctcttggactagcrggtgcagcccagaactgtcttctgaggaagaggtgctctcctgggcccccactgtccccaggcctcagcaaggcaagtgaggtgctgccatcttccaggc

SEQ ID NO: 39160 - DNA, 201 bp, Homo sapiens; identical to SEQ ID NO: 39042

SEQ ID NO: 39161 - DNA, 201 bp, Homo sapiens; identical to SEQ ID NO: 39043

SEQ ID NO: 39162 - DNA, 201 bp, Homo sapiens; identical to SEQ ID NO: 39092

SEQ ID NO: 39163 - DNA, 201 bp, Homo sapiens; identical to SEQ ID NO: 39093

SEQ ID NO: 39164 - DNA, 201 bp, Homo sapiens; identical to SEQ ID NO: 39034

SEQ ID NO: 39165 - DNA, 201 bp, Homo sapiens; identical to SEQ ID NO: 39035

SEQ ID NO: 39166 - DNA, 201 bp, Homo sapiens
ctcatgaatgcccacagcatgagcatcgggggaaaagctgaggtcatcaatgcctgagaggtggcccccaggctggcctttgccagcatgttcaacagctyggagcagtcccagaagggagggctgtcagtggcagtgcctggggagatccgaggctatgagctggcacaccagcggcatgggcggctgccctgggctcgc

SEQ ID NO: 39167 - DNA, 201 bp, Homo sapiens; identical to SEQ ID NO: 39040

SEQ ID NO: 39168 - DNA, 201 bp, Homo sapiens; identical to SEQ ID NO: 39039

SEQ ID NO: 39169 - DNA, 201 bp, Homo sapiens; identical to SEQ ID NO: 39038

SEQ ID NO: 39170 - DNA, 201 bp, Homo sapiens
gctctgcggtggatgcagccattgcagccctgttgtgtgtggggctcatgaatgcccacagcatgagcatcgggggaaaagctgaggtcatcaatgcctgmgaggtggcccccaggctggcctttgccagcatgttcaacagcttggagcagtcccagaagggagggctgtcagtggcagtgcctggggagatccgaggct

SEQ ID NO: 39171 - DNA, 201 bp, Homo sapiens; identical to SEQ ID NO: 39101

SEQ ID NO: 39172 - DNA, 190 bp, Homo sapiens; identical to SEQ ID NO: 39102

SEQ ID NO: 39173 - DNA, 201 bp, Homo sapiens
tggctctgcggtggatgcagccattgcagccctgttgtgtgtggggctcatgaatgcccacagcatgagcatcgggggaaaagctgaggtcatcaatgccygagaggtggcccccaggctggcctttgccagcatgttcaacagcttggagcagtcccagaagggagggctgtcagtggcagtgcctggggagatccgagg

SEQ ID NO: 39174 - DNA, 201 bp, Homo sapiens; identical to SEQ ID NO: 39064

SEQ ID NO: 39175 - DNA, 201 bp, Homo sapiens; identical to SEQ ID NO: 39033

SEQ ID NO: 39176 - DNA, 201 bp, Homo sapiens; identical to SEQ ID NO: 39034

SEQ ID NO: 39177 - DNA, 201 bp, Homo sapiens; identical to SEQ ID NO: 39035

SEQ ID NO: 39178 - DNA, 201 bp, Homo sapiens; identical to SEQ ID NO: 39036

SEQ ID NO: 39179 - DNA, 201 bp, Homo sapiens; identical to SEQ ID NO: 39040

SEQ ID NO: 39180 - DNA, 201 bp, Homo sapiens; identical to SEQ ID NO: 39039

SEQ ID NO: 39181 - DNA, 201 bp, Homo sapiens; identical to SEQ ID NO: 39038

SEQ ID NO: 39182 - DNA, 201 bp, Homo sapiens
ggcgtcgggtgagcccagaagtgagagcagttggctgcgccccagtgctgtgtgacccagaggcgccacacaccctctctgagctggtggacatcatagcrggtgcagcccagaactgtcttctgaggaagaggtgctctcctgggcccccactgtccccaggcctcagcaaggcaagtgaggtgctgccatcttccaggc

SEQ ID NO: 39183 - DNA, 201 bp, Homo sapiens; identical to SEQ ID NO: 39042

SEQ ID NO: 39184 - DNA, 201 bp, Homo sapiens; identical to SEQ ID NO: 39143

SEQ ID NO: 39185 - DNA, 201 bp, Homo sapiens; identical to SEQ ID NO: 39043

SEQ ID NO: 39186 - DNA, 201 bp, Homo sapiens; identical to SEQ ID NO: 39032

SEQ ID NO: 39187 - DNA, 201 bp, Homo sapiens; identical to SEQ ID NO: 39033

SEQ ID NO: 39188 - DNA, 201 bp, Homo sapiens; identical to SEQ ID NO: 39034

SEQ ID NO: 39189 - DNA, 201 bp, Homo sapiens; identical to SEQ ID NO: 39035

SEQ ID NO: 39190 - DNA, 201 bp, Homo sapiens; identical to SEQ ID NO: 39166

SEQ ID NO: 39191 - DNA, 201 bp, Homo sapiens; identical to SEQ ID NO: 39040

SEQ ID NO: 39192 - DNA, 201 bp, Homo sapiens; identical to SEQ ID NO: 39039

SEQ ID NO: 39193 - DNA, 201 bp, Homo sapiens; identical to SEQ ID NO: 39038

SEQ ID NO: 39194 - DNA, 201 bp, Homo sapiens; identical to SEQ ID NO: 39037

SEQ ID NO: 39195 - DNA, 201 bp, Homo sapiens; identical to SEQ ID NO: 39041

SEQ ID NO: 39196 - DNA, 201 bp, Homo sapiens; identical to SEQ ID NO: 39170

SEQ ID NO: 39197 - DNA, 201 bp, Homo sapiens; identical to SEQ ID NO: 39173

SEQ ID NO: 39198 - DNA, 201 bp, Homo sapiens; identical to SEQ ID NO: 39064

SEQ ID NO: 39199 - DNA, 109 bp, Homo sapiens
cgcctggtcctccaccaacctcttcaggagccccagagcctggaaagaagttcccgttgtcatagcgatgcagagagatgtagagcacagaggggtcattrtagaacgc

SEQ ID NO: 39200 - DNA, 201 bp, Homo sapiens
cagagatgaggatgtactccgacatcattgcctatggagtgctgcagaattctctgaagactgatttgtgtcttgaccaggggccagatacagagaatgtycccatcatgtacatctgccatgggatgacgcctcagaacgtgtactacacgagcagtcagcagatccatgtgggcattctgagccccaccgtggatgatg

SEQ ID NO: 39201 - DNA, 201 bp, Homo sapiens
cagcactggagcatcaccaacgtcctgaggagcctcgcgtcctgacccaccggggccacttccggctgcctctttgctactgtgtagcacctgctgcaacrttgcctgctgtccacgtggggttgtttggagtctggggaaccaggttagtgggcccccaagaagagctttttatttcctattcaattttcatggagttta

SEQ ID NO: 39202 - DNA, 201 bp, Homo sapiens
agcagatccatgtgggcattctgagccccaccgtggatgatgatgacaaccgatgcctggtggacgtcaacagccggccccggctcatcgaatgcagctaygccaaagccaagaggatgaagcttcactggcagttctctcagggaggacccatccagaaccgcaagtctaagcgctgtctggagctgcaggagaatagcg

SEQ ID NO: 39203 - DNA, 113 bp, Homo sapiens
tgccgctgccgckgttctcctagcagcgcgggccggtcggaccgccaaggcagccggcgctggcgatgggaagcggcgtggccgccgacacaggcagtggcaaagtttcccag

SEQ ID NO: 39204 - DNA, 201 bp, Homo sapiens
gggtggctgaagtctggatggatgaatttaaaagccacgtctacatggcatggaacataccgcaggaggactcaggaattgacattggggacatcactgcraggaaggctctcaggaaacagctgcagtgcaagaccttccggtggtacctggtcagcgtgtacccagagatgaggatgtactccgacatcattgcctatg

SEQ ID NO: 39205 - DNA, 201 bp, Homo sapiens
cctcgggactcaggtgctgaggtgcccagcggctccggacgtgctacggggtgcgagcgcgggggagttcggggcgcacgacaaggaagggcccccgggasctctatatggaggaaggagcccagaatggtgtgcaccaggaagaccaaaactttggtgtccacttgcgtgatcctgagcggcatgactaacatcatctgc

SEQ ID NO: 39206 - DNA, 201 bp, Homo sapiens
tggagctgcaggagaatagcgacctggagttcggcttccagctggtgttgcagaagtgctcgggccagcactggagcatcaccaacgtcctgaggagcctsgcgtcctgacccaccggggccacttccggctgcctctttgctactgtgtagcacctgctgcaacgttgcctgctgtccacgtggggttgtttggagtctg

SEQ ID NO: 39207 - DNA, 201 bp, Homo sapiens
ggatgacgcctcagaacgtgtactacacgagcagtcagcagatccatgtgggcattctgagccccaccgtggatgatgatgacaaccgatgcctggtggaygtcaacagccggccccggctcatcgaatgcagctacgccaaagccaagaggatgaagcttcactggcagttctctcagggaggacccatccagaaccgca

SEQ ID NO: 39208 - DNA, 201 bp, Homo sapiens
tccatagggcctgttttactatgatgtaaaaattaggtcatgtacattttcatattagactttttgttaaataaacttttgtaatagtcaaaaatgctttytcagatgttctgaatatagaatatcagctctcattccagttttttctaacatgaattttcctggttgacattgatttcaaagggttttatgcattaaagt

SEQ ID NO: 39209 - DNA, 201 bp, Homo sapiens
tgtacattttcatattagactttttgttaaataaacttttgtaatagtcaaaaatgctttctcagatgttctgaatatagaatatcagctctcattccagytttttctaacatgaattttcctggttgacattgatttcaaagggttttatgcattaaagtgaaagaatcttattaaatgtgaaacatggcaaggattcct

SEQ ID NO: 39210 - DNA, 201 bp, Homo sapiens
ttttcatattagactttttgttaaataaacttttgtaatagtcaaaaatgctttctcagatgttctgaatatagaatatcagctctcattccagttttttytaacatgaattttcctggttgacattgatttcaaagggttttatgcattaaagtgaaagaatcttattaaatgtgaaacatggcaaggattccttctgtc

SEQ ID NO: 39211 - DNA, 124 bp, Homo sapiens
agacgcaagacgccgggcctacarcgggagcgtgaggaaagccgtgcgttgcgttccaaggcatctgtgagcccgcggagtatacaccatgagcaaagctcaccctcccgagttgaaaaaattt

SEQ ID NO: 39212 - DNA, 201 bp, Homo sapiens
ataaacttttgtaatagtcaaaaatgctttctcagatgttctgaatatagaatatcagctctcattccagttttttctaacatgaattttcctggttgacrttgatttcaaagggttttatgcattaaagtgaaagaatcttattaaatgtgaaacatggcaaggattccttctgtccatcatctttcaacactgaacaga

SEQ ID NO: 39213 - DNA, 201 bp, Homo sapiens
catctttcaacactgaacagataaagaagttacaaacatgagtgagtttcttctaaaacactaattttcaaaacttgtaagaatagtaactttgatctagyctgactttcccaagtacatctacattccaaatatagtacaacagaagcaaaagacaagaagtaatgatgtagttgtttattttgaatataatcatgaagt

SEQ ID NO: 39214 - DNA, 201 bp, Homo sapiens
ctacaaagacgtgctgccttatgatcagacgcgagtaatcctctccctgctccaggaagagggacacagcgactacattaatggcaacttcatccggggcrtggatggaagcctggcctacattgccacgcaaggacccttgcctcacaccctgctagacttctggagactggtctgggagtttggggtcaaggtgatcct

SEQ ID NO: 39215 - DNA, 201 bp, Homo sapiens
gcccccactaccagaacatcaaagagaattgtgccccactctacgacgatgccctcttcctccggactccccaggcacttctcgccataccccgcccaccmggaggggtcctcaggagcatctctgtgcccgggtccccgggccacgccatggctgacacctacgcggtggtgcagaagcgcggggctccagcgggcgccg

SEQ ID NO: 39216 - DNA, 201 bp, Homo sapiens
gaagcagcggcctgcggccgtgcagacagaggagcagtacaggttcctgtaccacacggtggctcagatgttctgctccacactccagaatgccagccccsactaccagaacatcaaagagaattgtgccccactctacgacgatgccctcttcctccggactccccaggcacttctcgccataccccgcccaccaggagg

SEQ ID NO: 39217 - DNA, 201 bp, Homo sapiens
cactctgataaaggagaagtggctgaatgaggacatcatgctcaggaccctcaaggtcacattccagaaggagtcccgttctgtgtaccagctacagtatrtgtcctggccagaccgtggggtccccagcagtcctgaccacatgctcgccatggtggaggaagcccgtcgcctccagggatctggccctgaacccctctg

SEQ ID NO: 39218 - DNA, 201 bp, Homo sapiens
atgtggtccttaagatgaggaagcagcggcctgcggccgtgcagacagaggagcagtacaggttcctgtaccacacggtggctcagatgttctgctccacrctccagaatgccagcccccactaccagaacatcaaagagaattgtgccccactctacgacgatgccctcttcctccggactccccaggcacttctcgcca

SEQ ID NO: 39219 - DNA, 201 bp, Homo sapiens
cacactccagaatgccagcccccactaccagaacatcaaagagaattgtgccccactctacgacgatgccctcttcctccggactccccaggcacttctcsccataccccgcccaccaggaggggtcctcaggagcatctctgtgcccgggtccccgggccacgccatggctgacacctacgcggtggtgcagaagcgcgg

SEQ ID NO: 39220 - DNA, 201 bp, Homo sapiens; identical to SEQ ID NO: 39215

SEQ ID NO: 39221 - DNA, 201 bp, Homo sapiens; identical to SEQ ID NO: 39216

SEQ ID NO: 39222 - DNA, 201 bp, Homo sapiens; identical to SEQ ID NO: 39217

SEQ ID NO: 39223 - DNA, 201 bp, Homo sapiens; identical to SEQ ID NO: 39218

SEQ ID NO: 39224 - DNA, 201 bp, Homo sapiens; identical to SEQ ID NO: 39219

SEQ ID NO: 39225 - DNA, 201 bp, Homo sapiens; identical to SEQ ID NO: 39214

SEQ ID NO: 39226 - DNA, 201 bp, Homo sapiens
agcccccaaaagacagacatctctgctagctggacagccaggtggaccccctaagttagattactagacagatataaacagatcccctgctgaacagatayacagagttctcagaccccacccccaccctcaggtgggctggctggctgacagaccttctggccagacagactcctaaccaaccagatggactgccagaca

SEQ ID NO: 39227 - DNA, 201 bp, Homo sapiens
agagatacagtccacaggtggacaaagggatccccagccagagagagagagaccagccaacagcttgatagaccagtgcagccagagagaccaccaaacasagcccccaaaagacagacatctctgctagctggacagccaggtggaccccctaagttagattactagacagatataaacagatcccctgctgaacagata

SEQ ID NO: 39228 - DNA, 201 bp, Homo sapiens; identical to SEQ ID NO: 39216

SEQ ID NO: 39229 - DNA, 201 bp, Homo sapiens; identical to SEQ ID NO: 39215

SEQ ID NO: 39230 - DNA, 201 bp, Homo sapiens; identical to SEQ ID NO: 39217

SEQ ID NO: 39231 - DNA, 201 bp, Homo sapiens; identical to SEQ ID NO: 39218

SEQ ID NO: 39232 - DNA, 201 bp, Homo sapiens; identical to SEQ ID NO: 39219

SEQ ID NO: 39233 - DNA, 201 bp, Homo sapiens
gggtggagtaaccctgcctttgaaagatttcaacttgagcaaagagacggttaaatggtatcagctgactgcggcaacatacttgtaaactagtgaatgtytgagctttggaagcatgaacagttataaacgtgcatgcatacatgcacacacacacagacacacacacacacacttgttaattttgtatagtatttttat

SEQ ID NO: 39234 - DNA, 201 bp, Homo sapiens
ctcttagattcttatcacaaccaagtagaactggctcttcaaattgaaaaccaacaccgagcagtagatcaagtaattaaagctgtaagaaaaatctgtartgctttagatggtgtcgagactcttgccattacagaatcagtaaagaagctaaagagagcagttaatcttccaaggagtaaaactgctgatgtgacttct

SEQ ID NO: 39235 - DNA, 201 bp, Homo sapiens
acacatctgttggaccaacagtcacataactaacctttttgaatttttggaagccattgctgttttaaagtcattatgtagaatgctacaaaccctaaacktaatatatactaattcctgaaaaagactttgagacagtactatgtcagttcagccacctattttgcattgttttctataaggaggcaaagcatatgtgtt

SEQ ID NO: 39236 - DNA, 201 bp, Homo sapiens
ctcattttgtgccttctttactcattcaaacacacatacattttacatatagtttatttctttatgaaatgctaatcttcagcccgtaccaaaaagtagagtggagcctctttgcactactactatcaataaattttaaatcagttggatttttaagcattttttaaaagctgacattaaagtaaatctaaaaaaagttta

SEQ ID NO: 39237 - DNA, 201 bp, Homo sapiens
actcattttgtgccttctttactcattcaaacacacatacattttacatatagtttatttctttatgaaatgctaatcttcagcccgtaccaaaaagtagagtggagcctctttgcactactactatcaataaattttaaatcagttggatttttaagcattttttaaaagctgacattaaagtaaatctaaaaaaagttt

SEQ ID NO: 39238 - DNA, 201 bp, Homo sapiens
tgtcaagcagcaccagaaaaaaagcacaggtttataacaagcaggattatgatctcatggtgtttcctgaatcagattcccaaaaaagagcattagatatygatgtagaaaagctcacccaagctgaacttgagaaactattgctggatgacagtttcgagactaaaaaaacacctgtattaccagttactcctattctga

SEQ ID NO: 39239 - DNA, 201 bp, Homo sapiens
acatatcataagaaatacaacccagataaacattatatttatgtagtccgaattttgagggaaggacagattgaaccatcatttgtcttccgaacatttgwcgaatttcaggaacttcacaataagctcagtattatttttccactttggaagttaccaggctttcctaataggatggttctaggaagaacacacataaaa

SEQ ID NO: 39240 - DNA, 201 bp, Homo sapiens
aaatttttggtgcctaacactaatggtccatatgtagttaaacccatgagtatggtatatgaatgtcttttttaaatgttaaaatgtgttgtctatttaargttaattaaaatgcagatcaaagcaccaccatttgctttttccacagatcattaacatttccttaaagtatgtaagtacctttgcaaatgcaaatgtact

SEQ ID NO: 39241 - DNA, 201 bp, Homo sapiens
atgatctcatggtgtttcctgaatcagattcccaaaaaagagcattagatatcgatgtagaaaagctcacccaagctgaacttgagaaactattgctggaygacagtttcgagactaaaaaaacacctgtattaccagttactcctattctgagcccttccttttcagcacagctctattttagacctactattcagagag

SEQ ID NO: 39242 - DNA, 201 bp, Homo sapiens
ggcttcaatccaagaatgcccacttttccatctacagaacctatatatttaagtcttccgggacaatctccatatttctcatatcctttgacacctgccayaccctttcatccacaaggaagcttacctatctatcgtccagtagtcagtactgacatggcaaaactatttgacaaaatagctagtacatcagaattttta

SEQ ID NO: 39243 - DNA, 201 bp, Homo sapiens
agaggaaggaaggtttggtctttttagtggacatggctcagatatctagcaacagcggatttaaagaatgtccatcttcacatccggaaccaacaagagcraaagatgtggacaaagaagaagcattacagatggaagcagaggctttagcaaaactgcaaaaggatagacaagtgactgacaatcagagaggctttgagt

SEQ ID NO: 39244 - DNA, 201 bp, Homo sapiens
  misc_feature (1)...(201): n = A,T,C or G
cattgccacaaagtttaacttcttcattcacaaccttgctcagcttcgtttttctggtcttccttctaatgatgagcccatcctttcattttcacctaaancatactcctttagacaagatggtcgaatcaaggaagtctctgtttttacatatcataagaaatacaacccagataaacattatatttatgtagtccgaat

SEQ ID NO: 39245 - DNA, 201 bp, Homo sapiens
agatggcagctttttgtcgatccattacaaaattgaagaccaaatttccatataccaatcaccgcacaaacccaggctatttgttaagtccagtcacagcrcaaagaaacatatgcggagaaaatgctagtgtgaaggtctccattgacattgaaggatttcagctaccagttacttttacgtgtgatgtgagttctactg

SEQ ID NO: 39246 - DNA, 201 bp, Homo sapiens
tgcagcaatttatgatcttctcagactccatgcaaattctggtaggagtcctacagactgtgcccaaagtagcaagagtgtcaaggaagcatggactacarcagagcagctccagtttactatttttgctgctcatggaatttcaagtaattgggtatcaaattatgaaaaatactacttgatatgttcactgtctcacaa

SEQ ID NO: 39247 - DNA, 182 bp, Homo sapiens
gaaggacattttataatgaagaaagagtcaattcatcaagaagatacaacaattataaaaactatatcattgaaagcctttyctctaagatcgggaataagacaaggacgcccactttcacaactgttattcaacacagtactgggagtcctagcttgcagagagcccaaaggatggtatga

SEQ ID NO: 39248 - DNA, 201 bp, Homo sapiens
tgacctgttgaccacggtggaggagctgtgtgaccagaacgagttccacgggtctcaggagagatactttgaactggtggagagatgtgcggaccagaggyctgagtcctccctcctgaacctgatctcctatagagcgcagtccatccacccggccaaggacggctggattcagaacctgcaggcgctgatggagagatt

SEQ ID NO: 39249 - DNA, 201 bp, Homo sapiens
ccctcctgaacctgatctcctatagagcgcagtccatccacccggccaaggacggctggattcagaacctgcaggcgctgatggagagattcttcaggagygagtcccgaggcgccgtgcgcatcaaggtgctggacgtgctgtcctttgtgctgctcatcaacaggcagttctatgaggaggagctgattaactcagtgg

SEQ ID NO: 39250 - DNA, 201 bp, Homo sapiens
cgcggagcagtatgccagtgtgttcgccatctccctgccgtacaccaacccctccaagtttaatcagtacatcgtgtgtctggcccatcacgtcatagccrtgtggttcatcaggtgccgcctgcccttccggaaggattttgtccctttcatcactaagggcctgcggtccaatgtcctcttgtcttttgatgacacccc

SEQ ID NO: 39251 - DNA, 201 bp, Homo sapiens
gaacctgatctcctatagagcgcagtccatccacccggccaaggacggctggattcagaacctgcaggcgctgatggagagattcttcaggagcgagtccygaggcgccgtgcgcatcaaggtgctggacgtgctgtcctttgtgctgctcatcaacaggcagttctatgaggaggagctgattaactcagtggtcatctc

SEQ ID NO: 39252 - DNA, 201 bp, Homo sapiens
agccacgccacgcgtgtgtatgagatgctggtcagccacattcagctccactacaagcacagctacaccctgccaatcgcgagcagcatccggctgcaggmctttgacttcctgttgctgctgcgggccgactcactgcaccgcctgggcctgcccaacaaggatggagtcgtgcggttcagcccctactgcgtctgcgac

SEQ ID NO: 39253 - DNA, 201 bp, Homo sapiens
tccagccacggcgcggcgctacctgctgcagcctctcttctccggagaggcccgggctcctccctacacccccgcggcccagccccgggtcccaggctccrgctccgggtcagcatcctcgcgctcaaggcggtcatgccggactcctgcggactacacatcccggcggcccatgcggccccgtcacgtgatgcaaggatc

SEQ ID NO: 39254 - DNA, 201 bp, Homo sapiens
tcttctttaaggtcatcaaggattacccttccaacgaagaccttcacgaaaggctggaggttttcaaggccctcacagacaatgggagacacatcacctasttggaggaagagctggctgactttgtcctgcagtggatggatgttggcttgtcctcggaattccttctggtgctggtgaacttggtcaaattcaatagct

SEQ ID NO: 39255 - DNA, 201 bp, Homo sapiens
gaatgtggcctcaacaatcgcatccggatgatagggcagatttgtgaagtcgcaaaaaccaagaaatttgaagagcacgcagtggaagcactctggaaggyggtcgcggatctgttgcagccggagcggccgctggaggcccggcacgcggtgctggctctgctgaaggccatcgtgcaggggcagggcgagcgtttgggg

SEQ ID NO: 39256 - DNA, 201 bp, Homo sapiens
gcgtcggggcggcccggagcgcggtggcgcggcgcgggaggggttttctggtgcgtcctggtccaccatggccaaaccaacaagcaaagattcaggcttgwaggagaagtttaagattctgttgggactgggaacaccgaggccaaatcccaggtctgcagagggtaaacagacggagtttatcatcaccgcggaaatact

SEQ ID NO: 39257 - DNA, 201 bp, Homo sapiens
gcgccggccaagctggagtcccaggctgggcagcaggtgtcccgtggggcccgggatcgggtccgttccatgtcggggggccatggtcttcgagttggcgycctggacgtgccggcctcccagttcctgggcagtgccacttctccaggaccacggactgcaccagccgcgaaacctgagaaggcctcagctggcacccgg

SEQ ID NO: 39258 - DNA, 201 bp, Homo sapiens
catggagggccttgtggacaccagcgtggccaagatcgtgtctgaccgcaacctgcccttcgtggcccgccagatggccctgcacgcaaatatggcctcayaggtgcatcatagccgctccaaccccaccgatatctacccctccaagtggattgcccggctccgccacatcaagcggctccgccagcggatctgcgagga

SEQ ID NO: 39259 - DNA, 201 bp, Homo sapiens
cctgcacgcaaatatggcctcacaggtgcatcatagccgctccaaccccaccgatatctacccctccaagtggattgcccggctccgccacatcaagcggytccgccagcggatctgcgaggaagccgcctactccaaccccagcctacctctggtgcaccctccgtcccatagcaaagcccctgcacagactccagccga

SEQ ID NO: 39260 - DNA, 201 bp, Homo sapiens
acctcgacgagtacatcgcaaggatggttcagatgatctgtctgctgtgcgtccggaccgcgtcctctgtggacatagaggtctccctgcaggtgctggaygccgtggtctgctacaactgcctgccggctgagagcctcccgctgttcatcgttaccctctgtcgcaccatcaacgtcaaggagctctgcgagccttgct

SEQ ID NO: 39261 - DNA, 201 bp, Homo sapiens
aagccaatcctgctgcccaatgagtcacagtcctttgagcggtcggtgcagctcctcgaccagatcccatcatacgacacccacaagatcgccgtcctgtrtgttggagaaggccagagcaacagcgagctcgccatcctgtccaatgagcatggctcctacaggtacacggagttcctgacgggcctgggccggctcatc

SEQ ID NO: 39262 - DNA, 201 bp, Homo sapiens
gacagccgtcctggggcttctggtcatccttcagaccaagctgtacaccctgcctgcaagccacgccacgcgtgtgtatgagatgctggtcagccacattyagctccactacaagcacagctacaccctgccaatcgcgagcagcatccggctgcaggcctttgacttcctgttgctgctgcgggccgactcactgcaccg

SEQ ID NO: 39263 - DNA, 201 bp, Homo sapiens
caagcaccgctgcgacaagaagcgccacctgggcaacgactttgtgtccattgtctacaatgactccggtgaggacttcaagcttggcaccatcaagggcyagttcaactttgtccacgtgatcgtcaccccgctggactacgagtgcaacctggtgtccctgcagtgcaggaaagacatggagggccttgtggacaccag

SEQ ID NO: 39264 - DNA, 201 bp, Homo sapiens
gactcggccccatcacgcaggggcaagagagtagagagggacgccttaaagagcagagccacagcctccaatgcagagaaagtgccaggcatcaaccccartttcgtgttcctgcagctctaccattcccccttctttggcgacgagtcaaacaagccaatcctgctgcccaatgagtcacagtcctttgagcggtcggtg

SEQ ID NO: 39265 - DNA, 201 bp, Homo sapiens
gccgtcttccacatcgccaccctgatgcccaccaaggacgtggacaagcaccgctgcgacaagaagcgccacctgggcaacgactttgtgtccattgtctrcaatgactccggtgaggacttcaagcttggcaccatcaagggccagttcaactttgtccacgtgatcgtcaccccgctggactacgagtgcaacctggtg

SEQ ID NO: 39266 - DNA, 201 bp, Homo sapiens
tggcacgatgacatcatgcaagccgtcttccacatcgccaccctgatgcccaccaaggacgtggacaagcaccgctgcgacaagaagcgccacctgggcawcgactttgtgtccattgtctacaatgactccggtgaggacttcaagcttggcaccatcaagggccagttcaactttgtccacgtgatcgtcaccccgctg

SEQ ID NO: 39267 - DNA, 201 bp, Homo sapiens
ctacagcaggtcgtcctcagtctccagccaggaggagaagtcgctccacgcggaggagctggttggcaggggcatccccatcgagcgagtcgtctcctcgkagggtggccggccctctgtggacctctccttccagccctcgcagcccctgagcaagtccagctcctctcccgagctgcagactctgcaggacatcctcgg

SEQ ID NO: 39268 - DNA, 201 bp, Homo sapiens
gccctttctcctcggacatcaacaacatgcccctgcaggagctgtctaacgccctcatggcggctgagcgcttcaaggagcaccgggacacagccctgtasaagtcactgtcggtgccggcagccagcacggccaaaccccctcctctgcctcgctccaacacagtggcctctttctcctccctgtaccagtccagctgcc

SEQ ID NO: 39269 - DNA, 201 bp, Homo sapiens
catcctgtccaatgagcatggctcctacaggtacacggagttcctgacgggcctgggccggctcatcgagctgaaggactgccagccggacaaggtgtacmtgggaggcctggacgtgtgtggtgaggacggccagttcacctactgctggcacgatgacatcatgcaagccgtcttccacatcgccaccctgatgcccac

SEQ ID NO: 39270 - DNA, 201 bp, Homo sapiens
ctgctgaaggccatcgtgcaggggcagggcgagcgtttgggggtcctcagagccctcttctttaaggtcatcaaggattacccttccaacgaagaccttcrcgaaaggctggaggttttcaaggccctcacagacaatgggagacacatcacctacttggaggaagagctggctgactttgtcctgcagtggatggatgtt

SEQ ID NO: 39271 - DNA, 201 bp, Homo sapiens
accaaacagcgcgagatggtctactgcctggagcagggcctcatccaccgctgtgccagccagtgcgtcgtggccttgtccatctgcagcgtggagatgcytgacatcatcatcaaggcgctgcctgttctggtggtgaagctcacgcacatctcagccacagccagcatggccgtcccactgctggagttcctgtccact

SEQ ID NO: 39272 - DNA, 201 bp, Homo sapiens
ggagatcctggtccggaggcccacagggaacaccagctggctgatgagcctggagaacccgctcagccctttctcctcggacatcaacaacatgcccctgyaggagctgtctaacgccctcatggcggctgagcgcttcaaggagcaccgggacacagccctgtacaagtcactgtcggtgccggcagccagcacggccaa

SEQ ID NO: 39273 - DNA, 201 bp, Homo sapiens
cacgcacatctcagccacagccagcatggccgtcccactgctggagttcctgtccactctggccaggctgccgcacctctacaggaactttgccgcggagyagtatgccagtgtgttcgccatctccctgccgtacaccaacccctccaagtttaatcagtacatcgtgtgtctggcccatcacgtcatagccatgtggtt

SEQ ID NO: 39274 - DNA, 201 bp, Homo sapiens
agatcgtcctgtccatcaccaggctcatcaagaagtataggaaggagctccaggtggtggcgtgggacattctgctgaacatcatcgaacggctccttcarcagctccagaccttggacagcccggagctcaggaccatcgtccatgacctgttgaccacggtggaggagctgtgtgaccagaacgagttccacgggtctc

SEQ ID NO: 39275 - DNA, 201 bp, Homo sapiens
tgtggccgcatactcggcctccttggaggatgtgaagacagccgtcctggggcttctggtcatccttcagaccaagctgtacaccctgcctgcaagccacrccacgcgtgtgtatgagatgctggtcagccacattcagctccactacaagcacagctacaccctgccaatcgcgagcagcatccggctgcaggcctttga

SEQ ID NO: 39276 - DNA, 201 bp, Homo sapiens
gggcctgcggtccaatgtcctcttgtcttttgatgacacccccgagaaggacagcttcagggcccggagtactagtctcaacgagagacccaagaggatayagacgtccctcaccagtgccagcttggggtctgcagatgagaactccgtggcccaggctgacgatagcctgaaaaacctccacctggagctcacggaaac

SEQ ID NO: 39277 - DNA, 201 bp, Homo sapiens
ctccagcctgcagcccctatcccgcctcctcccacgctccagccacggcgcggcgctacctgctgcagcctctcttctccggagaggcccgggctcctccytacacccccgcggcccagccccgggtcccaggctccggctccgggtcagcatcctcgcgctcaaggcggtcatgccggactcctgcggactacacatccc

SEQ ID NO: 39278 - DNA, 201 bp, Homo sapiens
gaccaaggaggcgccggccaagctggagtcccaggctgggcagcaggtgtcccgtggggcccgggatcgggtccgttccatgtcggggggccatggtcttygagttggcgccctggacgtgccggcctcccagttcctgggcagtgccacttctccaggaccacggactgcaccagccgcgaaacctgagaaggcctcagc

SEQ ID NO: 39279 - DNA, 201 bp, Homo sapiens
gcaacgactttgtgtccattgtctacaatgactccggtgaggacttcaagcttggcaccatcaagggccagttcaactttgtccacgtgatcgtcaccccrctggactacgagtgcaacctggtgtccctgcagtgcaggaaagacatggagggccttgtggacaccagcgtggccaagatcgtgtctgaccgcaacctgc

SEQ ID NO: 39280 - DNA, 201 bp, Homo sapiens
acgcaggggcaagagagtagagagggacgccttaaagagcagagccacagcctccaatgcagagaaagtgccaggcatcaaccccagtttcgtgttcctgyagctctaccattcccccttctttggcgacgagtcaaacaagccaatcctgctgcccaatgagtcacagtcctttgagcggtcggtgcagctcctcgacca

SEQ ID NO: 39281 - DNA, 201 bp, Homo sapiens
acgccgtggtctgctacaactgcctgccggctgagagcctcccgctgttcatcgttaccctctgtcgcaccatcaacgtcaaggagctctgcgagccttgmtggaagctgatgcggaacctccttggcacccacctgggccacagcgccatctacaacatgtgccacctcatggaggacagagcctacatggaggacgcgc

SEQ ID NO: 39282 - DNA, 201 bp, Homo sapiens
acacaccacttcaacagcctgctggacatcatcgagaaggtgatggcccgctccctctccccacccccggagctggaagaaagggatgtggccgcatactmggcctccttggaggatgtgaagacagccgtcctggggcttctggtcatccttcagaccaagctgtacaccctgcctgcaagccacgccacgcgtgtgtat

SEQ ID NO: 39283 - DNA, 201 bp, Homo sapiens
cctgcaggcgctgatggagagattcttcaggagcgagtcccgaggcgccgtgcgcatcaaggtgctggacgtgctgtcctttgtgctgctcatcaacaggyagttctatgaggaggagctgattaactcagtggtcatctcgcagctctcccacatccccgaggataaagaccaccaggtccgaaagctggccacccagtt

SEQ ID NO: 39284 - DNA, 201 bp, Homo sapiens
ggcctttgacttcctgttgctgctgcgggccgactcactgcaccgcctgggcctgcccaacaaggatggagtcgtgcggttcagcccctactgcgtctgcractacatggagccagagagaggctctgagaagaagaccagcggccccctttctcctcccacagggcctcctggcccggcgcctgcaggccccgccgtgcg

SEQ ID NO: 39285 - DNA, 201 bp, Homo sapiens
tacaactgcctgccggctgagagcctcccgctgttcatcgttaccctctgtcgcaccatcaacgtcaaggagctctgcgagccttgctggaagctgatgcsgaacctccttggcacccacctgggccacagcgccatctacaacatgtgccacctcatggaggacagagcctacatggaggacgcgcccctgctgagagga

SEQ ID NO: 39286 - DNA, 201 bp, Homo sapiens
caacgaagaccttcacgaaaggctggaggttttcaaggccctcacagacaatgggagacacatcacctacttggaggaagagctggctgactttgtcctgyagtggatggatgttggcttgtcctcggaattccttctggtgctggtgaacttggtcaaattcaatagctgttacctcgacgagtacatcgcaaggatggt

SEQ ID NO: 39287 - DNA, 201 bp, Homo sapiens
tgctgagaggagccgtgttttttgtgggcatggctctctggggagcccaccggctctattctctcaggaactcgccgacatctgtgttgccatcattttascaggccatggcatgtccgaacgaggtggtgtcctatgagatcgtcctgtccatcaccaggctcatcaagaagtataggaaggagctccaggtggtggcgt

SEQ ID NO: 39288 - DNA, 201 bp, Homo sapiens
gaccttggacagcccggagctcaggaccatcgtccatgacctgttgaccacggtggaggagctgtgtgaccagaacgagttccacgggtctcaggagagakactttgaactggtggagagatgtgcggaccagaggcctgagtcctccctcctgaacctgatctcctatagagcgcagtccatccacccggccaaggacgg

SEQ ID NO: 39289 - DNA, 201 bp, Homo sapiens
cacgtgatcgtcaccccgctggactacgagtgcaacctggtgtccctgcagtgcaggaaagacatggagggccttgtggacaccagcgtggccaagatcgkgtctgaccgcaacctgcccttcgtggcccgccagatggccctgcacgcaaatatggcctcacaggtgcatcatagccgctccaaccccaccgatatctac

SEQ ID NO: 39290 - DNA, 201 bp, Homo sapiens
ccagaggcctgagtcctccctcctgaacctgatctcctatagagcgcagtccatccacccggccaaggacggctggattcagaacctgcaggcgctgatgkagagattcttcaggagcgagtcccgaggcgccgtgcgcatcaaggtgctggacgtgctgtcctttgtgctgctcatcaacaggcagttctatgaggagga

SEQ ID NO: 39291 - DNA, 201 bp, Homo sapiens
cccaggctgacgatagcctgaaaaacctccacctggagctcacggaaacctgtctggacatgatggctcgatacgtcttctccaacttcacggctgtcccsaagaggtctcctgtgggcgagttcctcctagcgggtggcaggaccaaaacctggctggttgggaacaagcttgtcactgtgacgacaagcgtgggaaccg

SEQ ID NO: 39292 - DNA, 201 bp, Homo sapiens
cctgcctgcaagccacgccacgcgtgtgtatgagatgctggtcagccacattcagctccactacaagcacagctacaccctgccaatcgcgagcagcatcyggctgcaggcctttgacttcctgttgctgctgcgggccgactcactgcaccgcctgggcctgcccaacaaggatggagtcgtgcggttcagcccctactg

SEQ ID NO: 39293 - DNA, 201 bp, Homo sapiens
catcatacgacacccacaagatcgccgtcctgtatgttggagaaggccagagcaacagcgagctcgccatcctgtccaatgagcatggctcctacaggtasacggagttcctgacgggcctgggccggctcatcgagctgaaggactgccagccggacaaggtgtacctgggaggcctggacgtgtgtggtgaggacggcc

SEQ ID NO: 39294 - DNA, 201 bp, Homo sapiens
ctggcccggcgcctgcaggccccgccgtgcggctggggtccgtgccctactccctgctcttccgcgtcctgctgcagtgcttgaagcaggagtctgactgraaggtgctgaagctggttctgggcaggctgcctgagtccctgcgctataaagtgctcatctttacttccccttgcagtgtggaccagctgtgctctgctc

SEQ ID NO: 39295 - DNA, 201 bp, Homo sapiens
ccttaaagagcagagccacagcctccaatgcagagaaagtgccaggcatcaaccccagtttcgtgttcctgcagctctaccattcccccttctttggcgaygagtcaaacaagccaatcctgctgcccaatgagtcacagtcctttgagcggtcggtgcagctcctcgaccagatcccatcatacgacacccacaagatcg

SEQ ID NO: 39296 - DNA, 201 bp, Homo sapiens
gttctgggcaggctgcctgagtccctgcgctataaagtgctcatctttacttccccttgcagtgtggaccagctgtgctctgctctctgctccatgctttsaggcccaaagacactggagcggctccgaggcgccccagaaggcttctccagaactgacttgcacctggccgtggttccagtgctgacagcattaatctct

SEQ ID NO: 39297 - DNA, 201 bp, Homo sapiens
tctccagaactgacttgcacctggccgtggttccagtgctgacagcattaatctcttaccataactacctggacaaaaccaaacagcgcgagatggtctastgcctggagcagggcctcatccaccgctgtgccagccagtgcgtcgtggccttgtccatctgcagcgtggagatgcctgacatcatcatcaaggcgctgc

SEQ ID NO: 39298 - DNA, 201 bp, Homo sapiens
atgcaagccgtcttccacatcgccaccctgatgcccaccaaggacgtggacaagcaccgctgcgacaagaagcgccacctgggcaacgactttgtgtccaytgtctacaatgactccggtgaggacttcaagcttggcaccatcaagggccagttcaactttgtccacgtgatcgtcaccccgctggactacgagtgcaac

SEQ ID NO: 39299 - DNA, 201 bp, Homo sapiens
tcgcatccggatgatagggcagatttgtgaagtcgcaaaaaccaagaaatttgaagagcacgcagtggaagcactctggaaggcggtcgcggatctgttgyagccggagcggccgctggaggcccggcacgcggtgctggctctgctgaaggccatcgtgcaggggcagggcgagcgtttgggggtcctcagagccctctt

SEQ ID NO: 39300 - DNA, 201 bp, Homo sapiens
ggcacgatgacatcatgcaagccgtcttccacatcgccaccctgatgcccaccaaggacgtggacaagcaccgctgcgacaagaagcgccacctgggcaasgactttgtgtccattgtctacaatgactccggtgaggacttcaagcttggcaccatcaagggccagttcaactttgtccacgtgatcgtcaccccgctgg

SEQ ID NO: 39301 - DNA, 201 bp, Homo sapiens
tggtgaagctcacgcacatctcagccacagccagcatggccgtcccactgctggagttcctgtccactctggccaggctgccgcacctctacaggaacttygccgcggagcagtatgccagtgtgttcgccatctccctgccgtacaccaacccctccaagtttaatcagtacatcgtgtgtctggcccatcacgtcatag

SEQ ID NO: 39302 - DNA, 201 bp, Homo sapiens
ggaaagtgctgcctggtcggcctcgggcgaagacagtcggggccagcccgagggtcccttgccttccagctccccccgctcgcccagtggcctccggcccygaggttacaccatctccgactcggccccatcacgcaggggcaagagagtagagagggacgccttaaagagcagagccacagcctccaatgcagagaaagt

SEQ ID NO: 39303 - DNA, 201 bp, Homo sapiens
ttcacggctgtcccgaagaggtctcctgtgggcgagttcctcctagcgggtggcaggaccaaaacctggctggttgggaacaagcttgtcactgtgacgasaagcgtgggaaccgggacccggtcgttactaggcctggactcgggggagctgcagtccggcccggagtcgagctccagccccggggtgcatgtgagacag

SEQ ID NO: 39304 - DNA, 201 bp, Homo sapiens
ctggcacgatgacatcatgcaagccgtcttccacatcgccaccctgatgcccaccaaggacgtggacaagcaccgctgcgacaagaagcgccacctgggcmacgactttgtgtccattgtctacaatgactccggtgaggacttcaagcttggcaccatcaagggccagttcaactttgtccacgtgatcgtcaccccgct

SEQ ID NO: 39305 - DNA, 201 bp, Homo sapiens
gaccctggggacaaggccgacgtgggccggctgagccctgaggttaaggcccggtcacagtcagggaccctggacggggaaagtgctgcctggtcggcctmgggcgaagacagtcggggccagcccgagggtcccttgccttccagctccccccgctcgcccagtggcctccggccccgaggttacaccatctccgactcg

SEQ ID NO: 39306 - DNA, 201 bp, Homo sapiens
tctggacatgatggctcgatacgtcttctccaacttcacggctgtcccgaagaggtctcctgtgggcgagttcctcctagcgggtggcaggaccaaaaccyggctggttgggaacaagcttgtcactgtgacgacaagcgtgggaaccgggacccggtcgttactaggcctggactcgggggagctgcagtccggcccgga

SEQ ID NO: 39307 - DNA, 201 bp, Homo sapiens
ctctggtgcaccctccgtcccatagcaaagcccctgcacagactccagccgagcccacacctggctatgaggtgggccagcggaagcgcctcatctcctcsgtggaggacttcaccgagtttgtgtgaggccggggccctccctcctgcactggccttggacggtattgcctgtcagtgaaataaataaagtcctgacccc

SEQ ID NO: 39308 - DNA, 201 bp, Homo sapiens
cagctcctctcccgagctgcagactctgcaggacatcctcggggaccctggggacaaggccgacgtgggccggctgagccctgaggttaaggcccggtcayagtcagggaccctggacggggaaagtgctgcctggtcggcctcgggcgaagacagtcggggccagcccgagggtcccttgccttccagctccccccgctc

SEQ ID NO: 39309 - DNA, 201 bp, Homo sapiens
agatcgtgtctgaccgcaacctgcccttcgtggcccgccagatggccctgcacgcaaatatggcctcacaggtgcatcatagccgctccaaccccaccgayatctacccctccaagtggattgcccggctccgccacatcaagcggctccgccagcggatctgcgaggaagccgcctactccaaccccagcctacctctgg

SEQ ID NO: 39310 - DNA, 201 bp, Homo sapiens
cccctgctgacccagggctgggcggagatcctggtccggaggcccacagggaacaccagctggctgatgagcctggagaacccgctcagccctttctcctmggacatcaacaacatgcccctgcaggagctgtctaacgccctcatggcggctgagcgcttcaaggagcaccgggacacagccctgtacaagtcactgtcg

SEQ ID NO: 39311 - DNA, 201 bp, Homo sapiens
cagcttggggtctgcagatgagaactccgtggcccaggctgacgatagcctgaaaaacctccacctggagctcacggaaacctgtctggacatgatggctygatacgtcttctccaacttcacggctgtcccgaagaggtctcctgtgggcgagttcctcctagcgggtggcaggaccaaaacctggctggttgggaacaa

SEQ ID NO: 39312 - DNA, 201 bp, Homo sapiens
tgctgacagcattaatctcttaccataactacctggacaaaaccaaacagcgcgagatggtctactgcctggagcagggcctcatccaccgctgtgccagmcagtgcgtcgtggccttgtccatctgcagcgtggagatgcctgacatcatcatcaaggcgctgcctgttctggtggtgaagctcacgcacatctcagcca

SEQ ID NO: 39313 - DNA, 201 bp, Homo sapiens
gtggttcatcaggtgccgcctgcccttccggaaggattttgtccctttcatcactaagggcctgcggtccaatgtcctcttgtcttttgatgacaccccckagaaggacagcttcagggcccggagtactagtctcaacgagagacccaagaggatacagacgtccctcaccagtgccagcttggggtctgcagatgagaa

SEQ ID NO: 39314 - DNA, 201 bp, Homo sapiens
cgatatctacccctccaagtggattgcccggctccgccacatcaagcggctccgccagcggatctgcgaggaagccgcctactccaaccccagcctacctytggtgcaccctccgtcccatagcaaagcccctgcacagactccagccgagcccacacctggctatgaggtgggccagcggaagcgcctcatctcctcggt

SEQ ID NO: 39315 - DNA, 201 bp, Homo sapiens
attgcccggctccgccacatcaagcggctccgccagcggatctgcgaggaagccgcctactccaaccccagcctacctctggtgcaccctccgtcccatascaaagcccctgcacagactccagccgagcccacacctggctatgaggtgggccagcggaagcgcctcatctcctcggtggaggacttcaccgagtttgtg

SEQ ID NO: 39316 - DNA, 201 bp, Homo sapiens
caagccaatcctgctgcccaatgagtcacagtcctttgagcggtcggtgcagctcctcgaccagatcccatcatacgacacccacaagatcgccgtcctgwatgttggagaaggccagagcaacagcgagctcgccatcctgtccaatgagcatggctcctacaggtacacggagttcctgacgggcctgggccggctcat

SEQ ID NO: 39317 - DNA, 201 bp, Homo sapiens
cttcaagcttggcaccatcaagggccagttcaactttgtccacgtgatcgtcaccccgctggactacgagtgcaacctggtgtccctgcagtgcaggaaakacatggagggccttgtggacaccagcgtggccaagatcgtgtctgaccgcaacctgcccttcgtggcccgccagatggccctgcacgcaaatatggcctc

SEQ ID NO: 39318 - DNA, 201 bp, Homo sapiens
tccgccgtggtcatggaggagggaagtccgggcgaggttcctgtgctggtggagcccccagggttggaggacgttgaggcagcgctaggcatggacaggcrcacggatgcctacagcaggtcgtcctcagtctccagccaggaggagaagtcgctccacgcggaggagctggttggcaggggcatccccatcgagcgagtc

SEQ ID NO: 39319 - DNA, 201 bp, Homo sapiens
cgcacctctacaggaactttgccgcggagcagtatgccagtgtgttcgccatctccctgccgtacaccaacccctccaagtttaatcagtacatcgtgtgwctggcccatcacgtcatagccatgtggttcatcaggtgccgcctgcccttccggaaggattttgtccctttcatcactaagggcctgcggtccaatgtcc

SEQ ID NO: 39320 - DNA, 201 bp, Homo sapiens
tgagaaggcctcagctggcacccgggttcctgtgcaggagaagacgaacctggcggcctatgtgcccctgctgacccagggctgggcggagatcctggtcyggaggcccacagggaacaccagctggctgatgagcctggagaacccgctcagccctttctcctcggacatcaacaacatgcccctgcaggagctgtctaa

SEQ ID NO: 39321 - DNA, 201 bp, Homo sapiens
aaaccccctcctctgcctcgctccaacacagtggcctctttctcctccctgtaccagtccagctgccaaggacagctgcacaggagcgtttcctgggcagwctccgccgtggtcatggaggagggaagtccgggcgaggttcctgtgctggtggagcccccagggttggaggacgttgaggcagcgctaggcatggacagg

SEQ ID NO: 39322 - DNA, 201 bp, Homo sapiens
tccgactcggccccatcacgcaggggcaagagagtagagagggacgccttaaagagcagagccacagcctccaatgcagagaaagtgccaggcatcaaccscagtttcgtgttcctgcagctctaccattcccccttctttggcgacgagtcaaacaagccaatcctgctgcccaatgagtcacagtcctttgagcggtcg

SEQ ID NO: 39323 - DNA, 201 bp, Homo sapiens
tggtctgctacaactgcctgccggctgagagcctcccgctgttcatcgttaccctctgtcgcaccatcaacgtcaaggagctctgcgagccttgctggaasctgatgcggaacctccttggcacccacctgggccacagcgccatctacaacatgtgccacctcatggaggacagagcctacatggaggacgcgcccctgc

SEQ ID NO: 39324 - DNA, 201 bp, Homo sapiens
aatgagcatggctcctacaggtacacggagttcctgacgggcctgggccggctcatcgagctgaaggactgccagccggacaaggtgtacctgggaggccyggacgtgtgtggtgaggacggccagttcacctactgctggcacgatgacatcatgcaagccgtcttccacatcgccaccctgatgcccaccaaggacgtg

SEQ ID NO: 39325 - DNA, 201 bp, Homo sapiens
gccagttcacctactgctggcacgatgacatcatgcaagccgtcttccacatcgccaccctgatgcccaccaaggacgtggacaagcaccgctgcgacaaraagcgccacctgggcaacgactttgtgtccattgtctacaatgactccggtgaggacttcaagcttggcaccatcaagggccagttcaactttgtccacg

SEQ ID NO: 39326 - DNA, 201 bp, Homo sapiens
ggtggtgtcctatgagatcgtcctgtccatcaccaggctcatcaagaagtataggaaggagctccaggtggtggcgtgggacattctgctgaacatcatckaacggctccttcagcagctccagaccttggacagcccggagctcaggaccatcgtccatgacctgttgaccacggtggaggagctgtgtgaccagaacga

SEQ ID NO: 39327 - DNA, 201 bp, Homo sapiens
accagaggcctgagtcctccctcctgaacctgatctcctatagagcgcagtccatccacccggccaaggacggctggattcagaacctgcaggcgctgatsgagagattcttcaggagcgagtcccgaggcgccgtgcgcatcaaggtgctggacgtgctgtcctttgtgctgctcatcaacaggcagttctatgaggagg

SEQ ID NO: 39328 - DNA, 201 bp, Homo sapiens
aggacgtggacaagcaccgctgcgacaagaagcgccacctgggcaacgactttgtgtccattgtctacaatgactccggtgaggacttcaagcttggcacyatcaagggccagttcaactttgtccacgtgatcgtcaccccgctggactacgagtgcaacctggtgtccctgcagtgcaggaaagacatggagggccttg

SEQ ID NO: 39329 - DNA, 201 bp, Homo sapiens
ggagcagggcctcatccaccgctgtgccagccagtgcgtcgtggccttgtccatctgcagcgtggagatgcctgacatcatcatcaaggcgctgcctgttmtggtggtgaagctcacgcacatctcagccacagccagcatggccgtcccactgctggagttcctgtccactctggccaggctgccgcacctctacaggaa

SEQ ID NO: 39330 - DNA, 201 bp, Homo sapiens
tgtgctgctcatcaacaggcagttctatgaggaggagctgattaactcagtggtcatctcgcagctctcccacatccccgaggataaagaccaccaggtcygaaagctggccacccagttgctggtggacctggcagagggctgccacacacaccacttcaacagcctgctggacatcatcgagaaggtgatggcccgctc

SEQ ID NO: 39331 - DNA, 201 bp, Homo sapiens
tggggcttctggtcatccttcagaccaagctgtacaccctgcctgcaagccacgccacgcgtgtgtatgagatgctggtcagccacattcagctccactasaagcacagctacaccctgccaatcgcgagcagcatccggctgcaggcctttgacttcctgttgctgctgcgggccgactcactgcaccgcctgggcctgc

SEQ ID NO: 39332 - DNA, 201 bp, Homo sapiens
gggcttctggtcatccttcagaccaagctgtacaccctgcctgcaagccacgccacgcgtgtgtatgagatgctggtcagccacattcagctccactacawgcacagctacaccctgccaatcgcgagcagcatccggctgcaggcctttgacttcctgttgctgctgcgggccgactcactgcaccgcctgggcctgccc

SEQ ID NO: 39333 - DNA, 201 bp, Homo sapiens
gccggcctcccagttcctgggcagtgccacttctccaggaccacggactgcaccagccgcgaaacctgagaaggcctcagctggcacccgggttcctgtgyaggagaagacgaacctggcggcctatgtgcccctgctgacccagggctgggcggagatcctggtccggaggcccacagggaacaccagctggctgatgag

SEQ ID NO: 39334 - DNA, 201 bp, Homo sapiens
ccaggctgggcagcaggtgtcccgtggggcccgggatcgggtccgttccatgtcggggggccatggtcttcgagttggcgccctggacgtgccggcctccyagttcctgggcagtgccacttctccaggaccacggactgcaccagccgcgaaacctgagaaggcctcagctggcacccgggttcctgtgcaggagaagac

SEQ ID NO: 39335 - DNA, 201 bp, Homo sapiens
acagtcctttgagcggtcggtgcagctcctcgaccagatcccatcatacgacacccacaagatcgccgtcctgtatgttggagaaggccagagcaacagcragctcgccatcctgtccaatgagcatggctcctacaggtacacggagttcctgacgggcctgggccggctcatcgagctgaaggactgccagccggacaa

SEQ ID NO: 39336 - DNA, 201 bp, Homo sapiens
agcagtatgccagtgtgttcgccatctccctgccgtacaccaacccctccaagtttaatcagtacatcgtgtgtctggcccatcacgtcatagccatgtgrttcatcaggtgccgcctgcccttccggaaggattttgtccctttcatcactaagggcctgcggtccaatgtcctcttgtcttttgatgacacccccgaga

SEQ ID NO: 39337 - DNA, 201 bp, Homo sapiens
ctgccagccggacaaggtgtacctgggaggcctggacgtgtgtggtgaggacggccagttcacctactgctggcacgatgacatcatgcaagccgtcttcyacatcgccaccctgatgcccaccaaggacgtggacaagcaccgctgcgacaagaagcgccacctgggcaacgactttgtgtccattgtctacaatgactc

SEQ ID NO: 39338 - DNA, 201 bp, Homo sapiens
gtgtcctatgagatcgtcctgtccatcaccaggctcatcaagaagtataggaaggagctccaggtggtggcgtgggacattctgctgaacatcatcgaacrgctccttcagcagctccagaccttggacagcccggagctcaggaccatcgtccatgacctgttgaccacggtggaggagctgtgtgaccagaacgagttc

SEQ ID NO: 39339 - DNA, 201 bp, Homo sapiens
agacatggagggccttgtggacaccagcgtggccaagatcgtgtctgaccgcaacctgcccttcgtggcccgccagatggccctgcacgcaaatatggccycacaggtgcatcatagccgctccaaccccaccgatatctacccctccaagtggattgcccggctccgccacatcaagcggctccgccagcggatctgcga

SEQ ID NO: 39340 - DNA, 201 bp, Homo sapiens
cttcagggcccggagtactagtctcaacgagagacccaagaggatacagacgtccctcaccagtgccagcttggggtctgcagatgagaactccgtggccyaggctgacgatagcctgaaaaacctccacctggagctcacggaaacctgtctggacatgatggctcgatacgtcttctccaacttcacggctgtcccgaa

SEQ ID NO: 39341 - DNA, 201 bp, Homo sapiens
caggaccaaaacctggctggttgggaacaagcttgtcactgtgacgacaagcgtgggaaccgggacccggtcgttactaggcctggactcgggggagctgyagtccggcccggagtcgagctccagccccggggtgcatgtgagacagaccaaggaggcgccggccaagctggagtcccaggctgggcagcaggtgtcccg

SEQ ID NO: 39342 - DNA, 201 bp, Homo sapiens
ggacaaaaccaaacagcgcgagatggtctactgcctggagcagggcctcatccaccgctgtgccagccagtgcgtcgtggccttgtccatctgcagcgtgragatgcctgacatcatcatcaaggcgctgcctgttctggtggtgaagctcacgcacatctcagccacagccagcatggccgtcccactgctggagttcct

SEQ ID NO: 39343 - DNA, 201 bp, Homo sapiens
gtgccctactccctgctcttccgcgtcctgctgcagtgcttgaagcaggagtctgactggaaggtgctgaagctggttctgggcaggctgcctgagtccckgcgctataaagtgctcatctttacttccccttgcagtgtggaccagctgtgctctgctctctgctccatgctttcaggcccaaagacactggagcggctc

SEQ ID NO: 39344 - DNA, 140 bp, Homo sapiens
ctcatctcctcggtggaggacttcaccgagtttgtgtgaggccggggccctccctcctgcactggccttggacggtattgcctgtcagtgaaataaataaagtcctgaccccagtgcacagacatagaggcacagattgc

SEQ ID NO: 39345 - DNA, 201 bp, Homo sapiens
gctctctgctccatgctttcaggcccaaagacactggagcggctccgaggcgccccagaaggcttctccagaactgacttgcacctggccgtggttccagwgctgacagcattaatctcttaccataactacctggacaaaaccaaacagcgcgagatggtctactgcctggagcagggcctcatccaccgctgtgccagc

SEQ ID NO: 39346 - DNA, 201 bp, Homo sapiens
gcgccatctacaacatgtgccacctcatggaggacagagcctacatggaggacgcgcccctgctgagaggagccgtgttttttgtgggcatggctctctgrggagcccaccggctctattctctcaggaactcgccgacatctgtgttgccatcattttaccaggccatggcatgtccgaacgaggtggtgtcctatgaga

SEQ ID NO: 39347 - DNA, 141 bp, Homo sapiens
cctcatctcctcggtggaggacttcaccgagtttgtgtgaggccggggccctccctcctgcactggccttggacggtattgcctgtcagtgaaataaataaagtcctgaccccagtgcacagacatagaggcacagattgc

SEQ ID NO: 39348 - DNA, 201 bp, Homo sapiens
ctctttctcctccctgtaccagtccagctgccaaggacagctgcacaggagcgtttcctgggcagactccgccgtggtcatggaggagggaagtccgggcraggttcctgtgctggtggagcccccagggttggaggacgttgaggcagcgctaggcatggacaggcgcacggatgcctacagcaggtcgtcctcagtctc

SEQ ID NO: 39349 - DNA, 201 bp, Homo sapiens
cgaggaagccgcctactccaaccccagcctacctctggtgcaccctccgtcccatagcaaagcccctgcacagactccagccgagcccacacctggctatsaggtgggccagcggaagcgcctcatctcctcggtggaggacttcaccgagtttgtgtgaggccggggccctccctcctgcactggccttggacggtattg

SEQ ID NO: 39350 - DNA, 201 bp, Homo sapiens
tggattgcccggctccgccacatcaagcggctccgccagcggatctgcgaggaagccgcctactccaaccccagcctacctctggtgcaccctccgtcccmtagcaaagcccctgcacagactccagccgagcccacacctggctatgaggtgggccagcggaagcgcctcatctcctcggtggaggacttcaccgagttt

SEQ ID NO: 39351 - DNA, 176 bp, Homo sapiens
cccacacctggctatgaggtgggccagcggaagcgcctcatctcctcggtggaggacttcaccgagtttgtgtgaggccggggccctccctcctgcactgrccttggacggtattgcctgtcagtgaaataaataaagtcctgaccccagtgcacagacatagaggcacagattgc

SEQ ID NO: 39352 - DNA, 201 bp, Homo sapiens
tcctctgtggacatagaggtctccctgcaggtgctggacgccgtggtctgctacaactgcctgccggctgagagcctcccgctgttcatcgttaccctctrtcgcaccatcaacgtcaaggagctctgcgagccttgctggaagctgatgcggaacctccttggcacccacctgggccacagcgccatctacaacatgtgc

SEQ ID NO: 39353 - DNA, 201 bp, Homo sapiens
tccagctccccccgctcgcccagtggcctccggccccgaggttacaccatctccgactcggccccatcacgcaggggcaagagagtagagagggacgcctwaaagagcagagccacagcctccaatgcagagaaagtgccaggcatcaaccccagtttcgtgttcctgcagctctaccattcccccttctttggcgacgag

SEQ ID NO: 39354 - DNA, 201 bp, Homo sapiens
cgtgatcgtcaccccgctggactacgagtgcaacctggtgtccctgcagtgcaggaaagacatggagggccttgtggacaccagcgtggccaagatcgtgwctgaccgcaacctgcccttcgtggcccgccagatggccctgcacgcaaatatggcctcacaggtgcatcatagccgctccaaccccaccgatatctaccc

SEQ ID NO: 39355 - DNA, 201 bp, Homo sapiens
ttcaggagcgagtcccgaggcgccgtgcgcatcaaggtgctggacgtgctgtcctttgtgctgctcatcaacaggcagttctatgaggaggagctgattawctcagtggtcatctcgcagctctcccacatccccgaggataaagaccaccaggtccgaaagctggccacccagttgctggtggacctggcagagggctgc

SEQ ID NO: 39356 - DNA, 201 bp, Homo sapiens
gatagggcagatttgtgaagtcgcaaaaaccaagaaatttgaagagcacgcagtggaagcactctggaaggcggtcgcggatctgttgcagccggagcggmcgctggaggcccggcacgcggtgctggctctgctgaaggccatcgtgcaggggcagggcgagcgtttgggggtcctcagagccctcttctttaaggtcat

SEQ ID NO: 39357 - DNA, 201 bp, Homo sapiens
ctgcctgcaagccacgccacgcgtgtgtatgagatgctggtcagccacattcagctccactacaagcacagctacaccctgccaatcgcgagcagcatccrgctgcaggcctttgacttcctgttgctgctgcgggccgactcactgcaccgcctgggcctgcccaacaaggatggagtcgtgcggttcagcccctactgc

SEQ ID NO: 39358 - DNA, 201 bp, Homo sapiens
ctttctcctcccacagggcctcctggcccggcgcctgcaggccccgccgtgcggctggggtccgtgccctactccctgctcttccgcgtcctgctgcagtrcttgaagcaggagtctgactggaaggtgctgaagctggttctgggcaggctgcctgagtccctgcgctataaagtgctcatctttacttccccttgcagt

SEQ ID NO: 39359 - DNA, 201 bp, Homo sapiens
gtggatggatgttggcttgtcctcggaattccttctggtgctggtgaacttggtcaaattcaatagctgttacctcgacgagtacatcgcaaggatggttyagatgatctgtctgctgtgcgtccggaccgcgtcctctgtggacatagaggtctccctgcaggtgctggacgccgtggtctgctacaactgcctgccggc

SEQ ID NO: 39360 - DNA, 201 bp, Homo sapiens
cgcaggggcaagagagtagagagggacgccttaaagagcagagccacagcctccaatgcagagaaagtgccaggcatcaaccccagtttcgtgttcctgcmgctctaccattcccccttctttggcgacgagtcaaacaagccaatcctgctgcccaatgagtcacagtcctttgagcggtcggtgcagctcctcgaccag

SEQ ID NO: 39361 - DNA, 201 bp, Homo sapiens
ctgcgagccttgctggaagctgatgcggaacctccttggcacccacctgggccacagcgccatctacaacatgtgccacctcatggaggacagagcctacrtggaggacgcgcccctgctgagaggagccgtgttttttgtgggcatggctctctggggagcccaccggctctattctctcaggaactcgccgacatctgt

SEQ ID NO: 39362 - DNA, 201 bp, Homo sapiens
ggaggagctgattaactcagtggtcatctcgcagctctcccacatccccgaggataaagaccaccaggtccgaaagctggccacccagttgctggtggacytggcagagggctgccacacacaccacttcaacagcctgctggacatcatcgagaaggtgatggcccgctccctctccccacccccggagctggaagaaag

SEQ ID NO: 39363 - DNA, 201 bp, Homo sapiens
tctcccacatccccgaggataaagaccaccaggtccgaaagctggccacccagttgctggtggacctggcagagggctgccacacacaccacttcaacagyctgctggacatcatcgagaaggtgatggcccgctccctctccccacccccggagctggaagaaagggatgtggccgcatactcggcctccttggaggatg

SEQ ID NO: 39364 - DNA, 201 bp, Homo sapiens
aggtgctggacgccgtggtctgctacaactgcctgccggctgagagcctcccgctgttcatcgttaccctctgtcgcaccatcaacgtcaaggagctctgmgagccttgctggaagctgatgcggaacctccttggcacccacctgggccacagcgccatctacaacatgtgccacctcatggaggacagagcctacatgg

SEQ ID NO: 39365 - DNA, 201 bp, Homo sapiens
tccagccacggcgcggcgctacctgctgcagcctctcttctccggagaggcccgggctcctccctacacccccgcggcccagccccgggtcccaggctccrgctccgggaccacgtccacctccggctcccggcaggccagcacctggacggtcaccgtggcctgcgccacgaagaagctcaccaggttggaggcgttcac

SEQ ID NO: 39366 - DNA, 201 bp, Homo sapiens
caccctcccctcttctccctctcaaccctcccctcttctccccgcagcacctccctctccaccctccccccatcctcccagcgcctccctccccaccctcytcccccattcccccagcgcctccctccctaccattcccctcctgtccccgcagagcctccctccccaccctccccctttctccccccagcacctccctcc

SEQ ID NO: 39367 - DNA, 201 bp, Homo sapiens
ctccagcctgcagcccctatcccgcctcctcccacgctccagccacggcgcggcgctacctgctgcagcctctcttctccggagaggcccgggctcctccytacacccccgcggcccagccccgggtcccaggctccggctccgggaccacgtccacctccggctcccggcaggccagcacctggacggtcaccgtggcct

SEQ ID NO: 39368 - DNA, 201 bp, Homo sapiens
gccgccttctccaccaccaggcggagaggcctgggggcctcagccctctgcacccatctcagccctatgccgagtgccacctggacctgtccacccagggycaggaagggcacggacccccaacccatcccacgcagggccaaggccccccatcccctgtccacagtcccccacagagccaaggtctcccaaccctgtcca

SEQ ID NO: 39369 - DNA, 201 bp, Homo sapiens
ggcgctacctgctgcagcctctcttctccggagaggcccgggctcctccctacacccccgcggcccagccccgggtcccaggctccggctccgggaccacrtccacctccggctcccggcaggccagcacctggacggtcaccgtggcctgcgccacgaagaagctcaccaggttggaggcgttcacctgcacgcggtagt

SEQ ID NO: 39370 - DNA, 201 bp, Homo sapiens
gccacgaagaagctcaccaggttggaggcgttcacctgcacgcggtagtccccaggcctcaggaagcgctgcacggcgggactgtccaccattgccagggyggccccggcccaggcctgacactgctcctgcgcctgcagccaggccgccttctccaccaccaggcggagaggcctgggggcctcagccctctgcacccat

SEQ ID NO: 39371 - DNA, 201 bp, Homo sapiens
caggttggaggcgttcacctgcacgcggtagtccccaggcctcaggaagcgctgcacggcgggactgtccaccattgccagggcggccccggcccaggccygacactgctcctgcgcctgcagccaggccgccttctccaccaccaggcggagaggcctgggggcctcagccctctgcacccatctcagccctatgccgag

SEQ ID NO: 39372 - DNA, 201 bp, Homo sapiens
gccaggaagggcacggacccccaacccatcccacgcagggccaaggccccccatcccctgtccacagtcccccacagagccaaggtctcccaaccctgtcyacagcccccacacagactcgaggggcccccatctcctgttctgaacccaacagggtggtcccactgtgggaccacaaccaggtatgactgtgtgagaagc

SEQ ID NO: 39373 - DNA, 201 bp, Homo sapiens
tctcctgttctgaacccaacagggtggtcccactgtgggaccacaaccaggtatgactgtgtgagaagcaggctcactaccaggctaccagggagcacagsggagcaggcgccaccttgaggcataaacccagagaaacaagacctccaagacggccaggcactggggcacacgccggtaacacagcaccgtgggagctga

SEQ ID NO: 39374 - DNA, 201 bp, Homo sapiens
aacagggtggtcccactgtgggaccacaaccaggtatgactgtgtgagaagcaggctcactaccaggctaccagggagcacaggggagcaggcgccacctygaggcataaacccagagaaacaagacctccaagacggccaggcactggggcacacgccggtaacacagcaccgtgggagctgagacggaaggatcgcctg

SEQ ID NO: 39375 - DNA, 201 bp, Homo sapiens
tcagccctctgcacccatctcagccctatgccgagtgccacctggacctgtccacccagggccaggaagggcacggacccccaacccatcccacgcagggmcaaggccccccatcccctgtccacagtcccccacagagccaaggtctcccaaccctgtccacagcccccacacagactcgaggggcccccatctcctgtt

SEQ ID NO: 39376 - DNA, 201 bp, Homo sapiens
gctcctgcgcctgcagccaggccgccttctccaccaccaggcggagaggcctgggggcctcagccctctgcacccatctcagccctatgccgagtgccacmtggacctgtccacccagggccaggaagggcacggacccccaacccatcccacgcagggccaaggccccccatcccctgtccacagtcccccacagagcca

SEQ ID NO: 39377 - DNA, 201 bp, Homo sapiens
gctgcacggcgggactgtccaccattgccagggcggccccggcccaggcctgacactgctcctgcgcctgcagccaggccgccttctccaccaccaggcgragaggcctgggggcctcagccctctgcacccatctcagccctatgccgagtgccacctggacctgtccacccagggccaggaagggcacggacccccaac

SEQ ID NO: 39378 - DNA, 201 bp, Homo sapiens
accctgtccacagcccccacacagactcgaggggcccccatctcctgttctgaacccaacagggtggtcccactgtgggaccacaaccaggtatgactgtrtgagaagcaggctcactaccaggctaccagggagcacaggggagcaggcgccaccttgaggcataaacccagagaaacaagacctccaagacggccaggc

SEQ ID NO: 39379 - DNA, 201 bp, Homo sapiens
gaggcataaacccagagaaacaagacctccaagacggccaggcactggggcacacgccggtaacacagcaccgtgggagctgagacggaaggatcgcctgrgcccaggattttgaaaccaccctgggcaacacagtgagaccccgtatctacaaaaaaatacacattagccaggcatggcggcatgcgcctggggtcccaa

SEQ ID NO: 39380 - DNA, 201 bp, Homo sapiens
gcgcctccctccccaccctcctcccccattcccccagcgcctccctccctaccattcccctcctgtccccgcagagcctccctccccaccctccccctttmtccccccagcacctccctccccaccccacctgctgaggggatactcttcctcctccctcctcagaggcggcccgggactccagcctgcagcccctatccc

SEQ ID NO: 39381 - DNA, 119 bp, Homo sapiens
cctccccccagtgcctccmtccccaccctcccctcttctccctctcaaccctcccctcttctccccgcagcacctccctctccaccctccccccatcctcccagcgcctccctccccac

SEQ ID NO: 39382 - DNA, 201 bp, Homo sapiens; identical to SEQ ID NO: 39248

SEQ ID NO: 39383 - DNA, 201 bp, Homo sapiens; identical to SEQ ID NO: 39249

SEQ ID NO: 39384 - DNA, 201 bp, Homo sapiens; identical to SEQ ID NO: 39250

SEQ ID NO: 39385 - DNA, 201 bp, Homo sapiens; identical to SEQ ID NO: 39251

SEQ ID NO: 39386 - DNA, 201 bp, Homo sapiens; identical to SEQ ID NO: 39252

SEQ ID NO: 39387 - DNA, 201 bp, Homo sapiens; identical to SEQ ID NO: 39253

SEQ ID NO: 39388 - DNA, 201 bp, Homo sapiens; identical to SEQ ID NO: 39254

SEQ ID NO: 39389 - DNA, 201 bp, Homo sapiens; identical to SEQ ID NO: 39255

SEQ ID NO: 39390 - DNA, 201 bp, Homo sapiens; identical to SEQ ID NO: 39256

SEQ ID NO: 39391 - DNA, 201 bp, Homo sapiens; identical to SEQ ID NO: 39257

SEQ ID NO: 39392 - DNA, 201 bp, Homo sapiens; identical to SEQ ID NO: 39258

SEQ ID NO: 39393 - DNA, 201 bp, Homo sapiens; identical to SEQ ID NO: 39259

SEQ ID NO: 39394 - DNA, 201 bp, Homo sapiens; identical to SEQ ID NO: 39260

SEQ ID NO: 39395 - DNA, 201 bp, Homo sapiens; identical to SEQ ID NO: 39261

SEQ ID NO: 39396 - DNA, 201 bp, Homo sapiens; identical to SEQ ID NO: 39262

SEQ ID NO: 39397 - DNA, 201 bp, Homo sapiens; identical to SEQ ID NO: 39263

SEQ ID NO: 39398 - DNA, 201 bp, Homo sapiens; identical to SEQ ID NO: 39264

SEQ ID NO: 39399 - DNA, 201 bp, Homo sapiens; identical to SEQ ID NO: 39265

SEQ ID NO: 39400 - DNA, 201 bp, Homo sapiens; identical to SEQ ID NO: 39266

SEQ ID NO: 39401 - DNA, 201 bp, Homo sapiens; identical to SEQ ID NO: 39267

SEQ ID NO: 39402 - DNA, 201 bp, Homo sapiens
gccctttctcctcggacatcaacaacatgcccctgcaggagctgtctaacgccctcatggcggctgagcgcttcaaggagcaccgggacacagccctgtasaagtcactgtcggtgccggcagccagcacggccaaaccccctcctctgcctcgctccaacacagactccgccgtggtcatggaggagggaagtccgggcg

SEQ ID NO: 39403 - DNA, 201 bp, Homo sapiens; identical to SEQ ID NO: 39269

SEQ ID NO: 39404 - DNA, 201 bp, Homo sapiens; identical to SEQ ID NO: 39270

SEQ ID NO: 39405 - DNA, 201 bp, Homo sapiens; identical to SEQ ID NO: 39271

SEQ ID NO: 39406 - DNA, 201 bp, Homo sapiens; identical to SEQ ID NO: 39272

SEQ ID NO: 39407 - DNA, 201 bp, Homo sapiens; identical to SEQ ID NO: 39273

SEQ ID NO: 39408 - DNA, 201 bp, Homo sapiens; identical to SEQ ID NO: 39274

SEQ ID NO: 39409 - DNA, 201 bp, Homo sapiens; identical to SEQ ID NO: 39275

SEQ ID NO: 39410 - DNA, 201 bp, Homo sapiens
taactctccacccgtgaaagaattcaaggagagctctgcagccgaggccttccggtgccgcagcatcagtgtgtctgaacatgtggtccgcagcaggatayagacgtccctcaccagtgccagcttggggtctgcagatgagaactccgtggcccaggctgacgatagcctgaaaaacctccacctggagctcacggaaac

SEQ ID NO: 39411 - DNA, 201 bp, Homo sapiens; identical to SEQ ID NO: 39277

SEQ ID NO: 39412 - DNA, 201 bp, Homo sapiens; identical to SEQ ID NO: 39278

SEQ ID NO: 39413 - DNA, 201 bp, Homo sapiens; identical to SEQ ID NO: 39279

SEQ ID NO: 39414 - DNA, 201 bp, Homo sapiens; identical to SEQ ID NO: 39280

SEQ ID NO: 39415 - DNA, 201 bp, Homo sapiens; identical to SEQ ID NO: 39281

SEQ ID NO: 39416 - DNA, 201 bp, Homo sapiens; identical to SEQ ID NO: 39282

SEQ ID NO: 39417 - DNA, 201 bp, Homo sapiens; identical to SEQ ID NO: 39283

SEQ ID NO: 39418 - DNA, 201 bp, Homo sapiens; identical to SEQ ID NO: 39284

SEQ ID NO: 39419 - DNA, 201 bp, Homo sapiens; identical to SEQ ID NO: 39285

SEQ ID NO: 39420 - DNA, 201 bp, Homo sapiens; identical to SEQ ID NO: 39286

SEQ ID NO: 39421 - DNA, 201 bp, Homo sapiens; identical to SEQ ID NO: 39287

SEQ ID NO: 39422 - DNA, 201 bp, Homo sapiens; identical to SEQ ID NO: 39288

SEQ ID NO: 39423 - DNA, 201 bp, Homo sapiens; identical to SEQ ID NO: 39289

SEQ ID NO: 39424 - DNA, 201 bp, Homo sapiens; identical to SEQ ID NO: 39290

SEQ ID NO: 39425 - DNA, 201 bp, Homo sapiens; identical to SEQ ID NO: 39291

SEQ ID NO: 39426 - DNA, 201 bp, Homo sapiens; identical to SEQ ID NO: 39292

SEQ ID NO: 39427 - DNA, 201 bp, Homo sapiens; identical to SEQ ID NO: 39293

SEQ ID NO: 39428 - DNA, 201 bp, Homo sapiens; identical to SEQ ID NO: 39294

SEQ ID NO: 39429 - DNA, 201 bp, Homo sapiens; identical to SEQ ID NO: 39295

SEQ ID NO: 39430 - DNA, 201 bp, Homo sapiens; identical to SEQ ID NO: 39296

SEQ ID NO: 39431 - DNA, 201 bp, Homo sapiens; identical to SEQ ID NO: 39297

SEQ ID NO: 39432 - DNA, 201 bp, Homo sapiens; identical to SEQ ID NO: 39298

SEQ ID NO: 39433 - DNA, 201 bp, Homo sapiens; identical to SEQ ID NO: 39299

SEQ ID NO: 39434 - DNA, 201 bp, Homo sapiens; identical to SEQ ID NO: 39300

SEQ ID NO: 39435 - DNA, 201 bp, Homo sapiens; identical to SEQ ID NO: 39301

SEQ ID NO: 39436 - DNA, 201 bp, Homo sapiens; identical to SEQ ID NO: 39302

SEQ ID NO: 39437 - DNA, 201 bp, Homo sapiens; identical to SEQ ID NO: 39303

SEQ ID NO: 39438 - DNA, 201 bp, Homo sapiens; identical to SEQ ID NO: 39304

SEQ ID NO: 39439 - DNA, 201 bp, Homo sapiens; identical to SEQ ID NO: 39305

SEQ ID NO: 39440 - DNA, 201 bp, Homo sapiens; identical to SEQ ID NO: 39306

SEQ ID NO: 39441 - DNA, 201 bp, Homo sapiens; identical to SEQ ID NO: 39307

SEQ ID NO: 39442 - DNA, 201 bp, Homo sapiens; identical to SEQ ID NO: 39308

SEQ ID NO: 39443 - DNA, 201 bp, Homo sapiens; identical to SEQ ID NO: 39309

SEQ ID NO: 39444 - DNA, 201 bp, Homo sapiens; identical to SEQ ID NO: 39310

SEQ ID NO: 39445 - DNA, 201 bp, Homo sapiens; identical to SEQ ID NO: 39311

SEQ ID NO: 39446 - DNA, 201 bp, Homo sapiens
gaaggacagcttcagggcccggagtactagtctcaacgagagacccaagagtctgaggatagccagaccccccaaacaaggcttgaataactctccacccrtgaaagaattcaaggagagctctgcagccgaggccttccggtgccgcagcatcagtgtgtctgaacatgtggtccgcagcaggatacagacgtccctcac

SEQ ID NO: 39447 - DNA, 201 bp, Homo sapiens; identical to SEQ ID NO: 39312

SEQ ID NO: 39448 - DNA, 201 bp, Homo sapiens
gtggttcatcaggtgccgcctgcccttccggaaggattttgtccctttcatcactaagggcctgcggtccaatgtcctcttgtcttttgatgacaccccckagaaggacagcttcagggcccggagtactagtctcaacgagagacccaagagtctgaggatagccagaccccccaaacaaggcttgaataactctccacc

SEQ ID NO: 39449 - DNA, 201 bp, Homo sapiens; identical to SEQ ID NO: 39314

SEQ ID NO: 39450 - DNA, 201 bp, Homo sapiens; identical to SEQ ID NO: 39315

SEQ ID NO: 39451 - DNA, 201 bp, Homo sapiens; identical to SEQ ID NO: 39316

SEQ ID NO: 39452 - DNA, 201 bp, Homo sapiens; identical to SEQ ID NO: 39317

SEQ ID NO: 39453 - DNA, 201 bp, Homo sapiens; identical to SEQ ID NO: 39318

SEQ ID NO: 39454 - DNA, 201 bp, Homo sapiens; identical to SEQ ID NO: 39319

SEQ ID NO: 39455 - DNA, 201 bp, Homo sapiens; identical to SEQ ID NO: 39320

SEQ ID NO: 39456 - DNA, 201 bp, Homo sapiens
gagcgcttcaaggagcaccgggacacagccctgtacaagtcactgtcggtgccggcagccagcacggccaaaccccctcctctgcctcgctccaacacagwctccgccgtggtcatggaggagggaagtccgggcgaggttcctgtgctggtggagcccccagggttggaggacgttgaggcagcgctaggcatggacagg

SEQ ID NO: 39457 - DNA, 201 bp, Homo sapiens; identical to SEQ ID NO: 39322

SEQ ID NO: 39458 - DNA, 201 bp, Homo sapiens; identical to SEQ ID NO: 39323

SEQ ID NO: 39459 - DNA, 201 bp, Homo sapiens; identical to SEQ ID NO: 39324

SEQ ID NO: 39460 - DNA, 201 bp, Homo sapiens; identical to SEQ ID NO: 39325

SEQ ID NO: 39461 - DNA, 201 bp, Homo sapiens; identical to SEQ ID NO: 39326

SEQ ID NO: 39462 - DNA, 201 bp, Homo sapiens; identical to SEQ ID NO: 39327

SEQ ID NO: 39463 - DNA, 201 bp, Homo sapiens; identical to SEQ ID NO: 39328

SEQ ID NO: 39464 - DNA, 201 bp, Homo sapiens; identical to SEQ ID NO: 39329

SEQ ID NO: 39465 - DNA, 201 bp, Homo sapiens; identical to SEQ ID NO: 39330

SEQ ID NO: 39466 - DNA, 201 bp, Homo sapiens; identical to SEQ ID NO: 39331

SEQ ID NO: 39467 - DNA, 201 bp, Homo sapiens; identical to SEQ ID NO: 39332

SEQ ID NO: 39468 - DNA, 201 bp, Homo sapiens; identical to SEQ ID NO: 39333

SEQ ID NO: 39469 - DNA, 201 bp, Homo sapiens; identical to SEQ ID NO: 39334

SEQ ID NO: 39470 - DNA, 201 bp, Homo sapiens; identical to SEQ ID NO: 39335

SEQ ID NO: 39471 - DNA, 201 bp, Homo sapiens; identical to SEQ ID NO: 39336

SEQ ID NO: 39472 - DNA, 201 bp, Homo sapiens; identical to SEQ ID NO: 39337

SEQ ID NO: 39473 - DNA, 201 bp, Homo sapiens; identical to SEQ ID NO: 39338

SEQ ID NO: 39474 - DNA, 201 bp, Homo sapiens; identical to SEQ ID NO: 39339

SEQ ID NO: 39475 - DNA, 201 bp, Homo sapiens
gtgccgcagcatcagtgtgtctgaacatgtggtccgcagcaggatacagacgtccctcaccagtgccagcttggggtctgcagatgagaactccgtggccyaggctgacgatagcctgaaaaacctccacctggagctcacggaaacctgtctggacatgatggctcgatacgtcttctccaacttcacggctgtcccgaa

SEQ ID NO: 39476 - DNA, 201 bp, Homo sapiens; identical to SEQ ID NO: 39341

SEQ ID NO: 39477 - DNA, 201 bp, Homo sapiens; identical to SEQ ID NO: 39342

SEQ ID NO: 39478 - DNA, 201 bp, Homo sapiens; identical to SEQ ID NO: 39343

SEQ ID NO: 39479 - DNA, 140 bp, Homo sapiens; identical to SEQ ID NO: 39344

SEQ ID NO: 39480 - DNA, 201 bp, Homo sapiens; identical to SEQ ID NO: 39345

SEQ ID NO: 39481 - DNA, 201 bp, Homo sapiens; identical to SEQ ID NO: 39346

SEQ ID NO: 39482 - DNA, 141 bp, Homo sapiens; identical to SEQ ID NO: 39347

SEQ ID NO: 39483 - DNA, 201 bp, Homo sapiens
caagtcactgtcggtgccggcagccagcacggccaaaccccctcctctgcctcgctccaacacagactccgccgtggtcatggaggagggaagtccgggcraggttcctgtgctggtggagcccccagggttggaggacgttgaggcagcgctaggcatggacaggcgcacggatgcctacagcaggtcgtcctcagtctc

SEQ ID NO: 39484 - DNA, 201 bp, Homo sapiens; identical to SEQ ID NO: 39349

SEQ ID NO: 39485 - DNA, 201 bp, Homo sapiens; identical to SEQ ID NO: 39350

SEQ ID NO: 39486 - DNA, 176 bp, Homo sapiens; identical to SEQ ID NO: 39351

SEQ ID NO: 39487 - DNA, 201 bp, Homo sapiens; identical to SEQ ID NO: 39352

SEQ ID NO: 39488 - DNA, 201 bp, Homo sapiens; identical to SEQ ID NO: 39353

SEQ ID NO: 39489 - DNA, 201 bp, Homo sapiens; identical to SEQ ID NO: 39354

SEQ ID NO: 39490 - DNA, 201 bp, Homo sapiens; identical to SEQ ID NO: 39355

SEQ ID NO: 39491 - DNA, 201 bp, Homo sapiens; identical to SEQ ID NO: 39356

SEQ ID NO: 39492 - DNA, 201 bp, Homo sapiens; identical to SEQ ID NO: 39357

SEQ ID NO: 39493 - DNA, 201 bp, Homo sapiens; identical to SEQ ID NO: 39358

SEQ ID NO: 39494 - DNA, 201 bp, Homo sapiens; identical to SEQ ID NO: 39359

SEQ ID NO: 39495 - DNA, 201 bp, Homo sapiens; identical to SEQ ID NO: 39360

SEQ ID NO: 39496 - DNA, 201 bp, Homo sapiens; identical to SEQ ID NO: 39361

SEQ ID NO: 39497 - DNA, 201 bp, Homo sapiens; identical to SEQ ID NO: 39362

SEQ ID NO: 39498 - DNA, 201 bp, Homo sapiens; identical to SEQ ID NO: 39363

SEQ ID NO: 39499 - DNA, 201 bp, Homo sapiens; identical to SEQ ID NO: 39364

SEQ ID NO: 39500 - DNA, 201 bp, Homo sapiens; identical to SEQ ID NO: 39248

SEQ ID NO: 39501 - DNA, 201 bp, Homo sapiens; identical to SEQ ID NO: 39249

SEQ ID NO: 39502 - DNA, 201 bp, Homo sapiens; identical to SEQ ID NO: 39250

SEQ ID NO: 39503 - DNA, 201 bp, Homo sapiens; identical to SEQ ID NO: 39251

SEQ ID NO: 39504 - DNA, 201 bp, Homo sapiens; identical to SEQ ID NO: 39252

SEQ ID NO: 39505 - DNA, 201 bp, Homo sapiens; identical to SEQ ID NO: 39253

SEQ ID NO: 39506 - DNA, 201 bp, Homo sapiens; identical to SEQ ID NO: 39254

SEQ ID NO: 39507 - DNA, 201 bp, Homo sapiens; identical to SEQ ID NO: 39255

SEQ ID NO: 39508 - DNA, 201 bp, Homo sapiens; identical to SEQ ID NO: 39256

SEQ ID NO: 39509 - DNA, 201 bp, Homo sapiens; identical to SEQ ID NO: 39257

SEQ ID NO: 39510 - DNA, 201 bp, Homo sapiens; identical to SEQ ID NO: 39258

SEQ ID NO: 39511 - DNA, 201 bp, Homo sapiens; identical to SEQ ID NO: 39259

SEQ ID NO: 39512 - DNA, 201 bp, Homo sapiens; identical to SEQ ID NO: 39260

SEQ ID NO: 39513 - DNA, 201 bp, Homo sapiens; identical to SEQ ID NO: 39261

SEQ ID NO: 39514 - DNA, 201 bp, Homo sapiens; identical to SEQ ID NO: 39262

SEQ ID NO: 39515 - DNA, 201 bp, Homo sapiens; identical to SEQ ID NO: 39263

SEQ ID NO: 39516 - DNA, 201 bp, Homo sapiens; identical to SEQ ID NO: 39264

SEQ ID NO: 39517 - DNA, 201 bp, Homo sapiens; identical to SEQ ID NO: 39265

SEQ ID NO: 39518 - DNA, 201 bp, Homo sapiens; identical to SEQ ID NO: 39266

SEQ ID NO: 39519 - DNA, 201 bp, Homo sapiens; identical to SEQ ID NO: 39267

SEQ ID NO: 39520 - DNA, 201 bp, Homo sapiens; identical to SEQ ID NO: 39268

SEQ ID NO: 39521 - DNA, 201 bp, Homo sapiens; identical to SEQ ID NO: 39269

SEQ ID NO: 39522 - DNA, 201 bp, Homo sapiens; identical to SEQ ID NO: 39270

SEQ ID NO: 39523 - DNA, 201 bp, Homo sapiens; identical to SEQ ID NO: 39271

SEQ ID NO: 39524 - DNA, 201 bp, Homo sapiens; identical to SEQ ID NO: 39272

SEQ ID NO: 39525 - DNA, 201 bp, Homo sapiens; identical to SEQ ID NO: 39273

SEQ ID NO: 39526 - DNA, 201 bp, Homo sapiens; identical to SEQ ID NO: 39274

SEQ ID NO: 39527 - DNA, 201 bp, Homo sapiens; identical to SEQ ID NO: 39275

SEQ ID NO: 39528 - DNA, 201 bp, Homo sapiens
cctgcggtccaatgtcctcttgtcttttgatgacacccccgagaaggacagcttcagggcccggagtactagtctcaacgagagacccaagagcaggatayagacgtccctcaccagtgccagcttggggtctgcagatgagaactccgtggcccaggctgacgatagcctgaaaaacctccacctggagctcacggaaac

SEQ ID NO: 39529 - DNA, 201 bp, Homo sapiens; identical to SEQ ID NO: 39277

SEQ ID NO: 39530 - DNA, 201 bp, Homo sapiens; identical to SEQ ID NO: 39278

SEQ ID NO: 39531 - DNA, 201 bp, Homo sapiens; identical to SEQ ID NO: 39279

SEQ ID NO: 39532 - DNA, 201 bp, Homo sapiens; identical to SEQ ID NO: 39280

SEQ ID NO: 39533 - DNA, 201 bp, Homo sapiens; identical to SEQ ID NO: 39281

SEQ ID NO: 39534 - DNA, 201 bp, Homo sapiens; identical to SEQ ID NO: 39282

SEQ ID NO: 39535 - DNA, 201 bp, Homo sapiens; identical to SEQ ID NO: 39283

SEQ ID NO: 39536 - DNA, 201 bp, Homo sapiens; identical to SEQ ID NO: 39284

SEQ ID NO: 39537 - DNA, 201 bp, Homo sapiens; identical to SEQ ID NO: 39285

SEQ ID NO: 39538 - DNA, 201 bp, Homo sapiens; identical to SEQ ID NO: 39286

SEQ ID NO: 39539 - DNA, 201 bp, Homo sapiens; identical to SEQ ID NO: 39287

SEQ ID NO: 39540 - DNA, 201 bp, Homo sapiens; identical to SEQ ID NO: 39288

SEQ ID NO: 39541 - DNA, 201 bp, Homo sapiens; identical to SEQ ID NO: 39289

SEQ ID NO: 39542 - DNA, 201 bp, Homo sapiens; identical to SEQ ID NO: 39290

SEQ ID NO: 39543 - DNA, 201 bp, Homo sapiens; identical to SEQ ID NO: 39291

SEQ ID NO: 39544 - DNA, 201 bp, Homo sapiens; identical to SEQ ID NO: 39292

SEQ ID NO: 39545 - DNA, 201 bp, Homo sapiens; identical to SEQ ID NO: 39293

SEQ ID NO: 39546 - DNA, 201 bp, Homo sapiens; identical to SEQ ID NO: 39294

SEQ ID NO: 39547 - DNA, 201 bp, Homo sapiens; identical to SEQ ID NO: 39295

SEQ ID NO: 39548 - DNA, 201 bp, Homo sapiens; identical to SEQ ID NO: 39296

SEQ ID NO: 39549 - DNA, 201 bp, Homo sapiens; identical to SEQ ID NO: 39297

SEQ ID NO: 39550 - DNA, 201 bp, Homo sapiens; identical to SEQ ID NO: 39298

SEQ ID NO: 39551 - DNA, 201 bp, Homo sapiens; identical to SEQ ID NO: 39299

SEQ ID NO: 39552 - DNA, 201 bp, Homo sapiens; identical to SEQ ID NO: 39300

SEQ ID NO: 39553 - DNA, 201 bp, Homo sapiens; identical to SEQ ID NO: 39301

SEQ ID NO: 39554 - DNA, 201 bp, Homo sapiens; identical to SEQ ID NO: 39302

SEQ ID NO: 39555 - DNA, 201 bp, Homo sapiens; identical to SEQ ID NO: 39303

SEQ ID NO: 39556 - DNA, 201 bp, Homo sapiens; identical to SEQ ID NO: 39304

SEQ ID NO: 39557 - DNA, 201 bp, Homo sapiens; identical to SEQ ID NO: 39305

SEQ ID NO: 39558 - DNA, 201 bp, Homo sapiens; identical to SEQ ID NO: 39306

SEQ ID NO: 39559 - DNA, 201 bp, Homo sapiens; identical to SEQ ID NO: 39307

SEQ ID NO: 39560 - DNA, 201 bp, Homo sapiens; identical to SEQ ID NO: 39308

SEQ ID NO: 39561 - DNA, 201 bp, Homo sapiens; identical to SEQ ID NO: 39309

SEQ ID NO: 39562 - DNA, 201 bp, Homo sapiens; identical to SEQ ID NO: 39310

SEQ ID NO: 39563 - DNA, 201 bp, Homo sapiens; identical to SEQ ID NO: 39311

SEQ ID NO: 39564 - DNA, 201 bp, Homo sapiens; identical to SEQ ID NO: 39312

SEQ ID NO: 39565 - DNA, 201 bp, Homo sapiens
gtggttcatcaggtgccgcctgcccttccggaaggattttgtccctttcatcactaagggcctgcggtccaatgtcctcttgtcttttgatgacaccccckagaaggacagcttcagggcccggagtactagtctcaacgagagacccaagagcaggatacagacgtccctcaccagtgccagcttggggtctgcagatga

SEQ ID NO: 39566 - DNA, 201 bp, Homo sapiens; identical to SEQ ID NO: 39314

SEQ ID NO: 39567 - DNA, 201 bp, Homo sapiens; identical to SEQ ID NO: 39315

SEQ ID NO: 39568 - DNA, 201 bp, Homo sapiens; identical to SEQ ID NO: 39316

SEQ ID NO: 39569 - DNA, 201 bp, Homo sapiens; identical to SEQ ID NO: 39317

SEQ ID NO: 39570 - DNA, 201 bp, Homo sapiens; identical to SEQ ID NO: 39318

SEQ ID NO: 39571 - DNA, 201 bp, Homo sapiens; identical to SEQ ID NO: 39319

SEQ ID NO: 39572 - DNA, 201 bp, Homo sapiens; identical to SEQ ID NO: 39320

SEQ ID NO: 39573 - DNA, 201 bp, Homo sapiens; identical to SEQ ID NO: 39321

SEQ ID NO: 39574 - DNA, 201 bp, Homo sapiens; identical to SEQ ID NO: 39322

SEQ ID NO: 39575 - DNA, 201 bp, Homo sapiens; identical to SEQ ID NO: 39323

SEQ ID NO: 39576 - DNA, 201 bp, Homo sapiens; identical to SEQ ID NO: 39324

SEQ ID NO: 39577 - DNA, 201 bp, Homo sapiens; identical to SEQ ID NO: 39325

SEQ ID NO: 39578 - DNA, 201 bp, Homo sapiens; identical to SEQ ID NO: 39326

SEQ ID NO: 39579 - DNA, 201 bp, Homo sapiens; identical to SEQ ID NO: 39327

SEQ ID NO: 39580 - DNA, 201 bp, Homo sapiens; identical to SEQ ID NO: 39328

SEQ ID NO: 39581 - DNA, 201 bp, Homo sapiens; identical to SEQ ID NO: 39329

SEQ ID NO: 39582 - DNA, 201 bp, Homo sapiens; identical to SEQ ID NO: 39330

SEQ ID NO: 39583 - DNA, 201 bp, Homo sapiens; identical to SEQ ID NO: 39331

SEQ ID NO: 39584 - DNA, 201 bp, Homo sapiens; identical to SEQ ID NO: 39332

SEQ ID NO: 39585 - DNA, 201 bp, Homo sapiens; identical to SEQ ID NO: 39333

SEQ ID NO: 39586 - DNA, 201 bp, Homo sapiens; identical to SEQ ID NO: 39334

SEQ ID NO: 39587 - DNA, 201 bp, Homo sapiens; identical to SEQ ID NO: 39335

SEQ ID NO: 39588 - DNA, 201 bp, Homo sapiens; identical to SEQ ID NO: 39336

SEQ ID NO: 39589 - DNA, 201 bp, Homo sapiens; identical to SEQ ID NO: 39337

SEQ ID NO: 39590 - DNA, 201 bp, Homo sapiens; identical to SEQ ID NO: 39338

SEQ ID NO: 39591 - DNA, 201 bp, Homo sapiens; identical to SEQ ID NO: 39339

SEQ ID NO: 39592 - DNA, 201 bp, Homo sapiens
cagggcccggagtactagtctcaacgagagacccaagagcaggatacagacgtccctcaccagtgccagcttggggtctgcagatgagaactccgtggccyaggctgacgatagcctgaaaaacctccacctggagctcacggaaacctgtctggacatgatggctcgatacgtcttctccaacttcacggctgtcccgaa

SEQ ID NO: 39593 - DNA, 201 bp, Homo sapiens; identical to SEQ ID NO: 39341

SEQ ID NO: 39594 - DNA, 201 bp, Homo sapiens; identical to SEQ ID NO: 39342

SEQ ID NO: 39595 - DNA, 201 bp, Homo sapiens; identical to SEQ ID NO: 39343

SEQ ID NO: 39596 - DNA, 140 bp, Homo sapiens; identical to SEQ ID NO: 39344

SEQ ID NO: 39597 - DNA, 201 bp, Homo sapiens; identical to SEQ ID NO: 39345

SEQ ID NO: 39598 - DNA, 201 bp, Homo sapiens; identical to SEQ ID NO: 39346

SEQ ID NO: 39599 - DNA, 141 bp, Homo sapiens; identical to SEQ ID NO: 39347

SEQ ID NO: 39600 - DNA, 201 bp, Homo sapiens; identical to SEQ ID NO: 39348

SEQ ID NO: 39601 - DNA, 201 bp, Homo sapiens; identical to SEQ ID NO: 39349

SEQ ID NO: 39602 - DNA, 201 bp, Homo sapiens; identical to SEQ ID NO: 39350

SEQ ID NO: 39603 - DNA, 176 bp, Homo sapiens; identical to SEQ ID NO: 39351

SEQ ID NO: 39604 - DNA, 201 bp, Homo sapiens; identical to SEQ ID NO: 39352

SEQ ID NO: 39605 - DNA, 201 bp, Homo sapiens; identical to SEQ ID NO: 39353

SEQ ID NO: 39606 - DNA, 201 bp, Homo sapiens; identical to SEQ ID NO: 39354

SEQ ID NO: 39607 - DNA, 201 bp, Homo sapiens; identical to SEQ ID NO: 39355

SEQ ID NO: 39608 - DNA, 201 bp, Homo sapiens; identical to SEQ ID NO: 39356

SEQ ID NO: 39609 - DNA, 201 bp, Homo sapiens; identical to SEQ ID NO: 39357

SEQ ID NO: 39610 - DNA, 201 bp, Homo sapiens; identical to SEQ ID NO: 39358

SEQ ID NO: 39611 - DNA, 201 bp, Homo sapiens; identical to SEQ ID NO: 39359

SEQ ID NO: 39612 - DNA, 201 bp, Homo sapiens; identical to SEQ ID NO: 39360

SEQ ID NO: 39613 - DNA, 201 bp, Homo sapiens; identical to SEQ ID NO: 39361

SEQ ID NO: 39614 - DNA, 201 bp, Homo sapiens; identical to SEQ ID NO: 39362

SEQ ID NO: 39615 - DNA, 201 bp, Homo sapiens; identical to SEQ ID NO: 39363

SEQ ID NO: 39616 - DNA, 201 bp, Homo sapiens; identical to SEQ ID NO: 39364

SEQ ID NO: 39617 - DNA, 201 bp, Homo sapiens; identical to SEQ ID NO: 39248

SEQ ID NO: 39618 - DNA, 201 bp, Homo sapiens; identical to SEQ ID NO: 39249

SEQ ID NO: 39619 - DNA, 201 bp, Homo sapiens; identical to SEQ ID NO: 39250

SEQ ID NO: 39620 - DNA, 201 bp, Homo sapiens; identical to SEQ ID NO: 39251

SEQ ID NO: 39621 - DNA, 201 bp, Homo sapiens; identical to SEQ ID NO: 39252

SEQ ID NO: 39622 - DNA, 201 bp, Homo sapiens; identical to SEQ ID NO: 39253

SEQ ID NO: 39623 - DNA, 201 bp, Homo sapiens; identical to SEQ ID NO: 39254

SEQ ID NO: 39624 - DNA, 201 bp, Homo sapiens; identical to SEQ ID NO: 39255

SEQ ID NO: 39625 - DNA, 201 bp, Homo sapiens; identical to SEQ ID NO: 39256

SEQ ID NO: 39626 - DNA, 201 bp, Homo sapiens; identical to SEQ ID NO: 39257

SEQ ID NO: 39627 - DNA, 201 bp, Homo sapiens; identical to SEQ ID NO: 39258

SEQ ID NO: 39628 - DNA, 201 bp, Homo sapiens; identical to SEQ ID NO: 39259

SEQ ID NO: 39629 - DNA, 201 bp, Homo sapiens; identical to SEQ ID NO: 39260

SEQ ID NO: 39630 - DNA, 201 bp, Homo sapiens; identical to SEQ ID NO: 39261

SEQ ID NO: 39631 - DNA, 201 bp, Homo sapiens; identical to SEQ ID NO: 39262

SEQ ID NO: 39632 - DNA, 201 bp, Homo sapiens; identical to SEQ ID NO: 39263

SEQ ID NO: 39633 - DNA, 201 bp, Homo sapiens; identical to SEQ ID NO: 39264

SEQ ID NO: 39634 - DNA, 201 bp, Homo sapiens; identical to SEQ ID NO: 39265

SEQ ID NO: 39635 - DNA, 201 bp, Homo sapiens; identical to SEQ ID NO: 39266

SEQ ID NO: 39636 - DNA, 201 bp, Homo sapiens; identical to SEQ ID NO: 39267

SEQ ID NO: 39637 - DNA, 201 bp, Homo sapiens; identical to SEQ ID NO: 39268

SEQ ID NO: 39638 - DNA, 201 bp, Homo sapiens; identical to SEQ ID NO: 39269

SEQ ID NO: 39639 - DNA, 201 bp, Homo sapiens; identical to SEQ ID NO: 39270

SEQ ID NO: 39640 - DNA, 201 bp, Homo sapiens; identical to SEQ ID NO: 39271

SEQ ID NO: 39641 - DNA, 201 bp, Homo sapiens; identical to SEQ ID NO: 39272

SEQ ID NO: 39642 - DNA, 201 bp, Homo sapiens; identical to SEQ ID NO: 39273

SEQ ID NO: 39643 - DNA, 201 bp, Homo sapiens; identical to SEQ ID NO: 39274

SEQ ID NO: 39644 - DNA, 201 bp, Homo sapiens; identical to SEQ ID NO: 39275

SEQ ID NO: 39645 - DNA, 201 bp, Homo sapiens; identical to SEQ ID NO: 39410

SEQ ID NO: 39646 - DNA, 201 bp, Homo sapiens; identical to SEQ ID NO: 39277

SEQ ID NO: 39647 - DNA, 201 bp, Homo sapiens; identical to SEQ ID NO: 39278

SEQ ID NO: 39648 - DNA, 201 bp, Homo sapiens; identical to SEQ ID NO: 39279

SEQ ID NO: 39649 - DNA, 201 bp, Homo sapiens; identical to SEQ ID NO: 39280

SEQ ID NO: 39650 - DNA, 201 bp, Homo sapiens; identical to SEQ ID NO: 39281

SEQ ID NO: 39651 - DNA, 201 bp, Homo sapiens; identical to SEQ ID NO: 39282

SEQ ID NO: 39652 - DNA, 201 bp, Homo sapiens; identical to SEQ ID NO: 39283

SEQ ID NO: 39653 - DNA, 201 bp, Homo sapiens; identical to SEQ ID NO: 39284

SEQ ID NO: 39654 - DNA, 201 bp, Homo sapiens; identical to SEQ ID NO: 39285

SEQ ID NO: 39655 - DNA, 201 bp, Homo sapiens; identical to SEQ ID NO: 39286

SEQ ID NO: 39656 - DNA, 201 bp, Homo sapiens; identical to SEQ ID NO: 39287

SEQ ID NO: 39657 - DNA, 201 bp, Homo sapiens; identical to SEQ ID NO: 39288

SEQ ID NO: 39658 - DNA, 201 bp, Homo sapiens; identical to SEQ ID NO: 39289

SEQ ID NO: 39659 - DNA, 201 bp, Homo sapiens; identical to SEQ ID NO: 39290

SEQ ID NO: 39660 - DNA, 201 bp, Homo sapiens; identical to SEQ ID NO: 39291

SEQ ID NO: 39661 - DNA, 201 bp, Homo sapiens; identical to SEQ ID NO: 39292

SEQ ID NO: 39662 - DNA, 201 bp, Homo sapiens; identical to SEQ ID NO: 39293

SEQ ID NO: 39663 - DNA, 201 bp, Homo sapiens; identical to SEQ ID NO: 39294

SEQ ID NO: 39664 - DNA, 201 bp, Homo sapiens; identical to SEQ ID NO: 39295

SEQ ID NO: 39665 - DNA, 201 bp, Homo sapiens; identical to SEQ ID NO: 39296

SEQ ID NO: 39666 - DNA, 201 bp, Homo sapiens; identical to SEQ ID NO: 39297

SEQ ID NO: 39667 - DNA, 201 bp, Homo sapiens; identical to SEQ ID NO: 39298

SEQ ID NO: 39668 - DNA, 201 bp, Homo sapiens; identical to SEQ ID NO: 39299

SEQ ID NO: 39669 - DNA, 201 bp, Homo sapiens; identical to SEQ ID NO: 39300

SEQ ID NO: 39670 - DNA, 201 bp, Homo sapiens; identical to SEQ ID NO: 39301

SEQ ID NO: 39671 - DNA, 201 bp, Homo sapiens; identical to SEQ ID NO: 39302

SEQ ID NO: 39672 - DNA, 201 bp, Homo sapiens; identical to SEQ ID NO: 39303

SEQ ID NO: 39673 - DNA, 201 bp, Homo sapiens; identical to SEQ ID NO: 39304

SEQ ID NO: 39674 - DNA, 201 bp, Homo sapiens; identical to SEQ ID NO: 39305

SEQ ID NO: 39675 - DNA, 201 bp, Homo sapiens; identical to SEQ ID NO: 39306

SEQ ID NO: 39676 - DNA, 201 bp, Homo sapiens; identical to SEQ ID NO: 39307

SEQ ID NO: 39677 - DNA, 201 bp, Homo sapiens; identical to SEQ ID NO: 39308

SEQ ID NO: 39678 - DNA, 201 bp, Homo sapiens; identical to SEQ ID NO: 39309

SEQ ID NO: 39679 - DNA, 201 bp, Homo sapiens; identical to SEQ ID NO: 39310

SEQ ID NO: 39680 - DNA, 201 bp, Homo sapiens; identical to SEQ ID NO: 39311

SEQ ID NO: 39681 - DNA, 201 bp, Homo sapiens; identical to SEQ ID NO: 39446

SEQ ID NO: 39682 - DNA, 201 bp, Homo sapiens; identical to SEQ ID NO: 39312

SEQ ID NO: 39683 - DNA, 201 bp, Homo sapiens; identical to SEQ ID NO: 39448

SEQ ID NO: 39684 - DNA, 201 bp, Homo sapiens; identical to SEQ ID NO: 39314

SEQ ID NO: 39685 - DNA, 201 bp, Homo sapiens; identical to SEQ ID NO: 39315

SEQ ID NO: 39686 - DNA, 201 bp, Homo sapiens; identical to SEQ ID NO: 39316

SEQ ID NO: 39687 - DNA, 201 bp, Homo sapiens; identical to SEQ ID NO: 39317

SEQ ID NO: 39688 - DNA, 201 bp, Homo sapiens; identical to SEQ ID NO: 39318

SEQ ID NO: 39689 - DNA, 201 bp, Homo sapiens; identical to SEQ ID NO: 39319

SEQ ID NO: 39690 - DNA, 201 bp, Homo sapiens; identical to SEQ ID NO: 39320

SEQ ID NO: 39691 - DNA, 201 bp, Homo sapiens; identical to SEQ ID NO: 39321

SEQ ID NO: 39692 - DNA, 201 bp, Homo sapiens; identical to SEQ ID NO: 39322

SEQ ID NO: 39693 - DNA, 201 bp, Homo sapiens; identical to SEQ ID NO: 39323

SEQ ID NO: 39694 - DNA, 201 bp, Homo sapiens; identical to SEQ ID NO: 39324

SEQ ID NO: 39695 - DNA, 201 bp, Homo sapiens; identical to SEQ ID NO: 39325

SEQ ID NO: 39696 - DNA, 201 bp, Homo sapiens; identical to SEQ ID NO: 39326

SEQ ID NO: 39697 - DNA, 201 bp, Homo sapiens; identical to SEQ ID NO: 39327

SEQ ID NO: 39698 - DNA, 201 bp, Homo sapiens; identical to SEQ ID NO: 39328

SEQ ID NO: 39699 - DNA, 201 bp, Homo sapiens; identical to SEQ ID NO: 39329

SEQ ID NO: 39700 - DNA, 201 bp, Homo sapiens; identical to SEQ ID NO: 39330

SEQ ID NO: 39701 - DNA, 201 bp, Homo sapiens; identical to SEQ ID NO: 39331

SEQ ID NO: 39702 - DNA, 201 bp, Homo sapiens; identical to SEQ ID NO: 39332

SEQ ID NO: 39703 - DNA, 201 bp, Homo sapiens; identical to SEQ ID NO: 39333

SEQ ID NO: 39704 - DNA, 201 bp, Homo sapiens; identical to SEQ ID NO: 39334

SEQ ID NO: 39705 - DNA, 201 bp, Homo sapiens; identical to SEQ ID NO: 39335

SEQ ID NO: 39706 - DNA, 201 bp, Homo sapiens; identical to SEQ ID NO: 39336

SEQ ID NO: 39707 - DNA, 201 bp, Homo sapiens; identical to SEQ ID NO: 39337

SEQ ID NO: 39708 - DNA, 201 bp, Homo sapiens; identical to SEQ ID NO: 39338

SEQ ID NO: 39709 - DNA, 201 bp, Homo sapiens; identical to SEQ ID NO: 39339

SEQ ID NO: 39710 - DNA, 201 bp, Homo sapiens; identical to SEQ ID NO: 39475

SEQ ID NO: 39711 - DNA, 201 bp, Homo sapiens; identical to SEQ ID NO: 39341

SEQ ID NO: 39712 - DNA, 201 bp, Homo sapiens; identical to SEQ ID NO: 39342

SEQ ID NO: 39713 - DNA, 201 bp, Homo sapiens; identical to SEQ ID NO: 39343

SEQ ID NO: 39714 - DNA, 140 bp, Homo sapiens; identical to SEQ ID NO: 39344

SEQ ID NO: 39715 - DNA, 201 bp, Homo sapiens; identical to SEQ ID NO: 39345

SEQ ID NO: 39716 - DNA, 201 bp, Homo sapiens; identical to SEQ ID NO: 39346

SEQ ID NO: 39717 - DNA, 141 bp, Homo sapiens; identical to SEQ ID NO: 39347

SEQ ID NO: 39718 - DNA, 201 bp, Homo sapiens; identical to SEQ ID NO: 39348

SEQ ID NO: 39719 - DNA, 201 bp, Homo sapiens; identical to SEQ ID NO: 39349

SEQ ID NO: 39720 - DNA, 201 bp, Homo sapiens; identical to SEQ ID NO: 39350

SEQ ID NO: 39721 - DNA, 176 bp, Homo sapiens; identical to SEQ ID NO: 39351

SEQ ID NO: 39722 - DNA, 201 bp, Homo sapiens; identical to SEQ ID NO: 39352

SEQ ID NO: 39723 - DNA, 201 bp, Homo sapiens; identical to SEQ ID NO: 39353

SEQ ID NO: 39724 - DNA, 201 bp, Homo sapiens; identical to SEQ ID NO: 39354

SEQ ID NO: 39725 - DNA, 201 bp, Homo sapiens; identical to SEQ ID NO: 39355

SEQ ID NO: 39726 - DNA, 201 bp, Homo sapiens; identical to SEQ ID NO: 39356

SEQ ID NO: 39727 - DNA, 201 bp, Homo sapiens; identical to SEQ ID NO: 39357

SEQ ID NO: 39728 - DNA, 201 bp, Homo sapiens; identical to SEQ ID NO: 39358

SEQ ID NO: 39729 - DNA, 201 bp, Homo sapiens; identical to SEQ ID NO: 39359

SEQ ID NO: 39730 - DNA, 201 bp, Homo sapiens; identical to SEQ ID NO: 39360

SEQ ID NO: 39731 - DNA, 201 bp, Homo sapiens; identical to SEQ ID NO: 39361

SEQ ID NO: 39732 - DNA, 201 bp, Homo sapiens; identical to SEQ ID NO: 39362

SEQ ID NO: 39733 - DNA, 201 bp, Homo sapiens; identical to SEQ ID NO: 39363

SEQ ID NO: 39734 - DNA, 201 bp, Homo sapiens; identical to SEQ ID NO: 39364

SEQ ID NO: 39735 - DNA, 201 bp, Homo sapiens
cacaggacagtttgctgtgttctacaagggggacgagtgcctgggcagcgggaagatcctgcggctggggccgtctgcctacacgctccagaagggccagygcagagctgggatggccactgagagccccagtgacagcccagaagatggtccaggcctgagtcccttgctctgacagagatggatctgctagaaggaacc

SEQ ID NO: 39736 - DNA, 201 bp, Homo sapiens
tgtggataatcttggggcagatgccattgccacaggtcactatgcaagaacttccctggaagatgaagaagtctttgagcagaagcacgttaagaagcccraagggcttttcagaaatcggtttgaagttagaaatgcggtaaaactcctccaggcagctgacagctttaaagaccagaccttctttctcagccaggtttc

SEQ ID NO: 39737 - DNA, 201 bp, Homo sapiens
agctggcgaagttgggcgactggcggatgcaggccttgcggcacgtcgtgtgcgccctgtccggcggcgtggacagcgccgtggccgcgctgctgctgagkcggagaggttaccaggtgacaggggtgtttatgaagaactgggactcactggatgaacatggggtctgtactgccgacaaagactgtgaagatgcttaca

SEQ ID NO: 39738 - DNA, 161 bp, Homo sapiens
caggctggggctctggctgctggagcatctgctggctggtggggtggcccgagttccccttcaccgcccccagggagggtttcccacctcagagtacaccraggggacctgcagagggggctgtcgggacagcgtggaataaacattatttcaaggacaca

SEQ ID NO: 39739 - DNA, 201 bp, Homo sapiens
acctggagagcaggacccatggctgggcggctggtgagcagtccaggtgcccaagggccagcttgctgctgcccaaagcagaggaagccgggctggctgasggtccgaaaagcctgcaggggcccggcgagccccaggaagagcctcagctccaggctggggctctggctgctggagcatctgctggctggtggggtggcc

SEQ ID NO: 39740 - DNA, 179 bp, Homo sapiens
  misc_feature (1)...(179): n = A,T,C or G
aaggcgcggaagcggcggtagctgcagctggcgaagttgggcgactggcggatgcaggccttgcggcacgtcgtgtgcnccctgtccggcggcgtggacagcgccgtggccgcgctgctgctgaggcggagaggttaccaggtgacaggggtgtttatgaagaactgggactcactgga

SEQ ID NO: 39741 - DNA, 201 bp, Homo sapiens
cggctggtgagcagtccaggtgcccaagggccagcttgctgctgcccaaagcagaggaagccgggctggctgagggtccgaaaagcctgcaggggcccggygagccccaggaagagcctcagctccaggctggggctctggctgctggagcatctgctggctggtggggtggcccgagttccccttcaccgcccccaggga

SEQ ID NO: 39742 - DNA, 201 bp, Homo sapiens
cactatgcaagaacttccctggaagatgaagaagtctttgagcagaagcacgttaagaagcccgaagggcttttcagaaatcggtttgaagttagaaatgyggtaaaactcctccaggcagctgacagctttaaagaccagaccttctttctcagccaggtttcccaggatgccctgaggagaaccatcttccctctgggg

SEQ ID NO: 39743 - DNA, 201 bp, Homo sapiens
cacataaaggttggttcctgtataccttgggccagagagcaaacataggtggcctgagagagccctggtacgtggtggagaaggacagcgtcaagggtgaygtgtttgtggccccccggacagaccacccagccctgtacagggacctgctgaggaccagccgcgtgcactggattgcggaggagcctcccgcagcactgg

SEQ ID NO: 39744 - DNA, 201 bp, Homo sapiens
tcagaaatcggtttgaagttagaaatgcggtaaaactcctccaggcagctgacagctttaaagaccagaccttctttctcagccaggtttcccaggatgcyctgaggagaaccatcttccctctggggggattaacgaaagagtttgtaaagaaaatcgctgctgagaatagacttcatcatgtgcttcagaagaaagaga

SEQ ID NO: 39745 - DNA, 201 bp, Homo sapiens
cactgagagccccagtgacagcccagaagatggtccaggcctgagtcccttgctctgacagagatggatctgctagaaggaacctggagagcaggacccakggctgggcggctggtgagcagtccaggtgcccaagggccagcttgctgctgcccaaagcagaggaagccgggctggctgagggtccgaaaagcctgcagg

SEQ ID NO: 39746 - DNA, 201 bp, Homo sapiens
ctgtgcgtgcccttgccacaggacagtttgctgtgttctacaagggggacgagtgcctgggcagcgggaagatcctgcggctggggccgtctgcctacacrctccagaagggccagcgcagagctgggatggccactgagagccccagtgacagcccagaagatggtccaggcctgagtcccttgctctgacagagatgga

SEQ ID NO: 39747 - DNA, 201 bp, Homo sapiens
cctggtacgtggtggagaaggacagcgtcaagggtgacgtgtttgtggccccccggacagaccacccagccctgtacagggacctgctgaggaccagccgygtgcactggattgcggaggagcctcccgcagcactggtccgggacaagatgatggagtgccacttccgattccgccaccagatggcactagtgccctgtg

SEQ ID NO: 39748 - DNA, 201 bp, Homo sapiens
acgctccagaagggccagcgcagagctgggatggccactgagagccccagtgacagcccagaagatggtccaggcctgagtcccttgctctgacagagatsgatctgctagaaggaacctggagagcaggacccatggctgggcggctggtgagcagtccaggtgcccaagggccagcttgctgctgcccaaagcagagga

SEQ ID NO: 39749 - DNA, 201 bp, Homo sapiens; identical to SEQ ID NO: 39735

SEQ ID NO: 39750 - DNA, 201 bp, Homo sapiens
tgtggataatcttggggcagatgccattgccacaggtcactatgcaagaacttccctggaagatgaagaagtctttgagcagaagcacgttaagaagcccraagggcttttcagaaatcggtttgaagttagaaatgccaggtttcccaggatgccctgaggagaaccatcttccctctggggggattaacgaaagagttt

SEQ ID NO: 39751 - DNA, 201 bp, Homo sapiens; identical to SEQ ID NO: 39737

SEQ ID NO: 39752 - DNA, 161 bp, Homo sapiens; identical to SEQ ID NO: 39738

SEQ ID NO: 39753 - DNA, 201 bp, Homo sapiens; identical to SEQ ID NO: 39739

SEQ ID NO: 39754 - DNA, 179 bp, Homo sapiens; identical to SEQ ID NO: 39740
  misc_feature (1)...(179): n = A,T,C or G

SEQ ID NO: 39755 - DNA, 201 bp, Homo sapiens; identical to SEQ ID NO: 39741

SEQ ID NO: 39756 - DNA, 201 bp, Homo sapiens
ctggaagatgaagaagtctttgagcagaagcacgttaagaagcccgaagggcttttcagaaatcggtttgaagttagaaatgccaggtttcccaggatgcyctgaggagaaccatcttccctctggggggattaacgaaagagtttgtaaagaaaatcgctgctgagaatagacttcatcatgtgcttcagaagaaagaga

SEQ ID NO: 39757 - DNA, 201 bp, Homo sapiens; identical to SEQ ID NO: 39743

SEQ ID NO: 39758 - DNA, 201 bp, Homo sapiens; identical to SEQ ID NO: 39745

SEQ ID NO: 39759 - DNA, 201 bp, Homo sapiens; identical to SEQ ID NO: 39746

SEQ ID NO: 39760 - DNA, 201 bp, Homo sapiens; identical to SEQ ID NO: 39747

SEQ ID NO: 39761 - DNA, 201 bp, Homo sapiens; identical to SEQ ID NO: 39748

SEQ ID NO: 39762 - DNA, 201 bp, Homo sapiens
taatgacctgtgttatacttactatttttaatgggcttttatgatgtttttaggtttctttggattcccatgtccttcaagtgctttgcaactttgagaaraagaaattgaccacctggactatggaactatgaagttctttctgttgcttttcaccattgggttctgctgggctcagtattccccaaatacacaacaagg

SEQ ID NO: 39763 - DNA, 201 bp, Homo sapiens
tacttactatttttaatgggcttttatgatgtttttaggtttctttggattcccatgtccttcaagtgctttgcaactttgagaagaagaaattgaccacytggactatggaactatgaagttctttctgttgcttttcaccattgggttctgctgggctcagtattccccaaatacacaacaaggacggacatctattgt

SEQ ID NO: 39764 - DNA, 201 bp, Homo sapiens
ttttatgatgtttttaggtttctttggattcccatgtccttcaagtgctttgcaactttgagaagaagaaattgaccacctggactatggaactatgaagytctttctgttgcttttcaccattgggttctgctgggctcagtattccccaaatacacaacaaggacggacatctattgttcatctgtttgaatggcgatg

SEQ ID NO: 39765 - DNA, 201 bp, Homo sapiens
ggtgggaaagataccaaccagttagctataaattatgcacaagatctggaaatgaagatgaatttagaaacatggtgactagatgtaacaatgttggggtkcgtatttatgtggatgctgtaattaatcatatgtgtggtaacgctgtgagtgcaggaacaagcagtacctgtggaagttacttcaaccctggaagtaggg

SEQ ID NO: 39766 - DNA, 201 bp, Homo sapiens
gatctggaaatgaagatgaatttagaaacatggtgactagatgtaacaatgttggggttcgtatttatgtggatgctgtaattaatcatatgtgtggtaaygctgtgagtgcaggaacaagcagtacctgtggaagttacttcaaccctggaagtagggactttccagcagtcccatattctggatgggatttcaatgatg

SEQ ID NO: 39767 - DNA, 201 bp, Homo sapiens
cttgcactggagaaggattacgtgcgttctaagattgccgaatatatgaaccatctcattgacattggtgttgcagggttcagacttgatgcttccaagcwcatgtggcctggagacataaaggcaattttggacaaactgcataatctaaacagtaactggttccctgcaggaagtaaacctttcatttaccaggaggta

SEQ ID NO: 39768 - DNA, 201 bp, Homo sapiens
gtaaatgtaaaactggaagtggagatatcgagaactacaatgatgctactcaggtcagagattgtcgtctgactggtcttcttgatcttgcactggagaargattacgtgcgttctaagattgccgaatatatgaaccatctcattgacattggtgttgcagggttcagacttgatgcttccaagcacatgtggcctggag

SEQ ID NO: 39769 - DNA, 201 bp, Homo sapiens
gaagtggagatatcgagaactacaatgatgctactcaggtcagagattgtcgtctgactggtcttcttgatcttgcactggagaaggattacgtgcgttcyaagattgccgaatatatgaaccatctcattgacattggtgttgcagggttcagacttgatgcttccaagcacatgtggcctggagacataaaggcaattt

SEQ ID NO: 39770 - DNA, 201 bp, Homo sapiens
acaatgatgctactcaggtcagagattgtcgtctgactggtcttcttgatcttgcactggagaaggattacgtgcgttctaagattgccgaatatatgaaycatctcattgacattggtgttgcagggttcagacttgatgcttccaagcacatgtggcctggagacataaaggcaattttggacaaactgcataatctaa

SEQ ID NO: 39771 - DNA, 201 bp, Homo sapiens; identical to SEQ ID NO: 39765

SEQ ID NO: 39772 - DNA, 201 bp, Homo sapiens; identical to SEQ ID NO: 39766

SEQ ID NO: 39773 - DNA, 201 bp, Homo sapiens; identical to SEQ ID NO: 39767

SEQ ID NO: 39774 - DNA, 201 bp, Homo sapiens; identical to SEQ ID NO: 39768

SEQ ID NO: 39775 - DNA, 201 bp, Homo sapiens; identical to SEQ ID NO: 39769

SEQ ID NO: 39776 - DNA, 201 bp, Homo sapiens; identical to SEQ ID NO: 39770

SEQ ID NO: 39777 - DNA, 201 bp, Homo sapiens; identical to SEQ ID NO: 39765

SEQ ID NO: 39778 - DNA, 201 bp, Homo sapiens; identical to SEQ ID NO: 39766

SEQ ID NO: 39779 - DNA, 201 bp, Homo sapiens; identical to SEQ ID NO: 39767

SEQ ID NO: 39780 - DNA, 201 bp, Homo sapiens; identical to SEQ ID NO: 39768

SEQ ID NO: 39781 - DNA, 201 bp, Homo sapiens; identical to SEQ ID NO: 39769

SEQ ID NO: 39782 - DNA, 201 bp, Homo sapiens; identical to SEQ ID NO: 39770

SEQ ID NO: 39783 - DNA, 201 bp, Homo sapiens
ctacttgggagactaaagcaaggggatcacttgagcccccgaggttgaggttgcagtgagccatgatcactccactgcattctagcttggttgacagagtragaacctctccctcctaaaaaagtccttaagaaatgtgttgatgcctggttcccttggtcagaattttcatttgatgtgttgagagtgtagcacagatgt

SEQ ID NO: 39784 - DNA, 201 bp, Homo sapiens
ggatcacttgagcccccgaggttgaggttgcagtgagccatgatcactccactgcattctagcttggttgacagagtaagaacctctccctcctaaaaaartccttaagaaatgtgttgatgcctggttcccttggtcagaattttcatttgatgtgttgagagtgtagcacagatgttggaatgaacctctcaagctgat

SEQ ID NO: 39785 - DNA, 201 bp, Homo sapiens
gagtaagaacctctccctcctaaaaaagtccttaagaaatgtgttgatgcctggttcccttggtcagaattttcatttgatgtgttgagagtgtagcacasatgttggaatgaacctctcaagctgattttaatgtgcaaccaagtttgagaaccaccaaggaagagtttttatgaattaagattcctatactctatccta

SEQ ID NO: 39786 - DNA, 201 bp, Homo sapiens
tttgatgtgttgagagtgtagcacagatgttggaatgaacctctcaagctgattttaatgtgcaaccaagtttgagaaccaccaaggaagagtttttatgmattaagattcctatactctatcctagaactaatacaactgaatctctgggaatggagtatcagaatcagatttgaaaaggtttccttagtaattctaagg

SEQ ID NO: 39787 - DNA, 201 bp, Homo sapiens
actattcttagttctatgaaaacaattgaaaatttggttattatcaccttaaaagtacaaaacctatagatattgaaaatgtaattatttttctataggcrtagttgaaatgattttgtaaatgttataaatcagtttctttataagcagttcatttacataaattttgttaaactgacatgattcactaattttctaaat

SEQ ID NO: 39788 - DNA, 201 bp, Homo sapiens
cacctacttcgagcgctgcctgaaatagggttggcgcatacccacccccgccacggccgcaagccctggcatcccctgcaaatatttattgggggccatcrgtaggggtttggggggcggccggtgggggaatcccctgccttggccttgcctccccttcctgccacgtgcccctagttattttttattaacaccatgtga

SEQ ID NO: 39789 - DNA, 201 bp, Homo sapiens
ctaagatttattactgtagtcggacacactcccagctggcccagtttgtgcatgaggtgaagaagagcccctttggcaaggatgttcggctggtctccctyggctcccggcagaacctttgtgtaaatgaagacgtgaaaagcctaggttctgtgcagcttatcaacgaccgctgcgtggacatgcagagaagcaggcacg

SEQ ID NO: 39790 - DNA, 201 bp, Homo sapiens
gcaaggatgttcggctggtctcccttggctcccggcagaacctttgtgtaaatgaagacgtgaaaagcctaggttctgtgcagcttatcaacgaccgctgygtggacatgcagagaagcaggcacgaagaagaaaggagctgaggaggagaagccaaagaggaggaggcaggagaagcaggcagcctgccccttctacaac

SEQ ID NO: 39791 - DNA, 201 bp, Homo sapiens
gcccagtttgtgcatgaggtgaagaagagcccctttggcaaggatgttcggctggtctcccttggctcccggcagaacctttgtgtaaatgaagacgtgaraagcctaggttctgtgcagcttatcaacgaccgctgcgtggacatgcagagaagcaggcacgaagaagaaaggagctgaggaggagaagccaaagaggag

SEQ ID NO: 39792 - DNA, 201 bp, Homo sapiens
cgtgttcgcgcgcgtcccggagtgcgcatgcgcagcggcgggggttgttccggctgcctttcactgaggggacccgccagtttcaaactcagtggcgtttkccctgattcccggggcctggctttcagcgtagcaattctgccggcgaagaaggtgagcgcagtgctgtgtggcagcagagctccttaggacgaggagcag

SEQ ID NO: 39793 - DNA, 201 bp, Homo sapiens
gctggcccagtttgtgcatgaggtgaagaagagcccctttggcaaggatgttcggctggtctcccttggctcccggcagaacctttgtgtaaatgaagacrtgaaaagcctaggttctgtgcagcttatcaacgaccgctgcgtggacatgcagagaagcaggcacgaagaagaaaggagctgaggaggagaagccaaaga

SEQ ID NO: 39794 - DNA, 201 bp, Homo sapiens
tattactgtagtcggacacactcccagctggcccagtttgtgcatgaggtgaagaagagcccctttggcaaggatgttcggctggtctcccttggctcccrgcagaacctttgtgtaaatgaagacgtgaaaagcctaggttctgtgcagcttatcaacgaccgctgcgtggacatgcagagaagcaggcacgaagaagaa

SEQ ID NO: 39795 - DNA, 201 bp, Homo sapiens
tgcagctcaagtatgcagccaagcgcctgaggcaggaagaagaagaaagagagaatctcctccgcctcagcagggagatgctagagacaggcccggaggcygagcggctggagcagctggagtctggggaggaggagctggtcctcgccgaatacgagagtgatgaggagaaaaaggtggcgagcagggcgccttctgacg

SEQ ID NO: 39796 - DNA, 201 bp, Homo sapiens
taactaagatttattactgtagtcggacacactcccagctggcccagtttgtgcatgaggtgaagaagagcccctttggcaaggatgttcggctggtctcycttggctcccggcagaacctttgtgtaaatgaagacgtgaaaagcctaggttctgtgcagcttatcaacgaccgctgcgtggacatgcagagaagcaggc

SEQ ID NO: 39797 - DNA, 201 bp, Homo sapiens
tgagagtccaactggcactgggaagtccttaagtcttatttgtggggccctctcttggctccgtgactttgaacagaagaagcgtgaagaagaggcacgaytccttgaaactggaactggccccttacatgatgagaaagatgaatccctgtgtctgtcttcttcctgcgaaggggctgcaggcaccccgaggcctgctgg

SEQ ID NO: 39798 - DNA, 201 bp, Homo sapiens
ttcatagaaagaatggcagaggagaccccagttccttcctgagtcccctctccttgggaaaaagtgttcctactctctgggtcagtgtctggtccgaatcsttggcttggagatgattttacgggctctttctggagaacagaagtaaaaccttacagtgttccgatgagaccacagtaggcagtacttgggagggtctta

SEQ ID NO: 39799 - DNA, 201 bp, Homo sapiens; identical to SEQ ID NO: 39789

SEQ ID NO: 39800 - DNA, 201 bp, Homo sapiens
gcaaggatgttcggctggtctcccttggctcccggcagaacctttgtgtaaatgaagacgtgaaaagcctaggttctgtgcagcttatcaacgaccgctgygtggacatgcagagaagcaggcacggtagccactgggaccgtggtgtagccgcaggtggtctggagagagtgaggcaggggtggcagtgactgaagacca

SEQ ID NO: 39801 - DNA, 201 bp, Homo sapiens
ccttgggaaaaagtgttcctactctctgggtcagtgtctggtccgaatccttggcttggagatgattttacgggctctttctggagaacagaagtaaaacsttacagtgttccgatgagaccacagtaggcagtacttgggagggtcttatagaccccaccccacggaagtgggtctcaacattacacaaccccctcttgg

SEQ ID NO: 39802 - DNA, 201 bp, Homo sapiens
gcccagtttgtgcatgaggtgaagaagagcccctttggcaaggatgttcggctggtctcccttggctcccggcagaacctttgtgtaaatgaagacgtgaraagcctaggttctgtgcagcttatcaacgaccgctgcgtggacatgcagagaagcaggcacggtagccactgggaccgtggtgtagccgcaggtggtctg

SEQ ID NO: 39803 - DNA, 201 bp, Homo sapiens
cagaacctttgtgtaaatgaagacgtgaaaagcctaggttctgtgcagcttatcaacgaccgctgcgtggacatgcagagaagcaggcacggtagccactrggaccgtggtgtagccgcaggtggtctggagagagtgaggcaggggtggcagtgactgaagaccattaagtgtctttcatagaaagaatggcagaggaga

SEQ ID NO: 39804 - DNA, 201 bp, Homo sapiens
ctttgtgtaaatgaagacgtgaaaagcctaggttctgtgcagcttatcaacgaccgctgcgtggacatgcagagaagcaggcacggtagccactgggaccrtggtgtagccgcaggtggtctggagagagtgaggcaggggtggcagtgactgaagaccattaagtgtctttcatagaaagaatggcagaggagaccccag

SEQ ID NO: 39805 - DNA, 201 bp, Homo sapiens
gctggcccagtttgtgcatgaggtgaagaagagcccctttggcaaggatgttcggctggtctcccttggctcccggcagaacctttgtgtaaatgaagacrtgaaaagcctaggttctgtgcagcttatcaacgaccgctgcgtggacatgcagagaagcaggcacggtagccactgggaccgtggtgtagccgcaggtgg

SEQ ID NO: 39806 - DNA, 201 bp, Homo sapiens; identical to SEQ ID NO: 39796

SEQ ID NO: 39807 - DNA, 201 bp, Homo sapiens; identical to SEQ ID NO: 39797

SEQ ID NO: 39808 - DNA, 201 bp, Homo sapiens
gattttacgggctctttctggagaacagaagtaaaaccttacagtgttccgatgagaccacagtaggcagtacttgggagggtcttatagaccccaccccrcggaagtgggtctcaacattacacaaccccctcttgggcccgtggacagttgctgtcctctctgttttctctctttgtgcctgtgccaccctcagagaag

SEQ ID NO: 39809 - DNA, 201 bp, Homo sapiens
gaagaccattaagtgtctttcatagaaagaatggcagaggagaccccagttccttcctgagtcccctctccttgggaaaaagtgttcctactctctgggtsagtgtctggtccgaatccttggcttggagatgattttacgggctctttctggagaacagaagtaaaaccttacagtgttccgatgagaccacagtaggca

SEQ ID NO: 39810 - DNA, 201 bp, Homo sapiens
tgattttacgggctctttctggagaacagaagtaaaaccttacagtgttccgatgagaccacagtaggcagtacttgggagggtcttatagaccccacccyacggaagtgggtctcaacattacacaaccccctcttgggcccgtggacagttgctgtcctctctgttttctctctttgtgcctgtgccaccctcagagaa

SEQ ID NO: 39811 - DNA, 201 bp, Homo sapiens
gaccattaagtgtctttcatagaaagaatggcagaggagaccccagttccttcctgagtcccctctccttgggaaaaagtgttcctactctctgggtcagygtctggtccgaatccttggcttggagatgattttacgggctctttctggagaacagaagtaaaaccttacagtgttccgatgagaccacagtaggcagta

SEQ ID NO: 39812 - DNA, 201 bp, Homo sapiens
ggcagtgactgaagaccattaagtgtctttcatagaaagaatggcagaggagaccccagttccttcctgagtcccctctccttgggaaaaagtgttcctaytctctgggtcagtgtctggtccgaatccttggcttggagatgattttacgggctctttctggagaacagaagtaaaaccttacagtgttccgatgagacc

SEQ ID NO: 39813 - DNA, 201 bp, Homo sapiens
accttacagtgttccgatgagaccacagtaggcagtacttgggagggtcttatagaccccaccccacggaagtgggtctcaacattacacaaccccctctygggcccgtggacagttgctgtcctctctgttttctctctttgtgcctgtgccaccctcagagaagaagaaaggagctgaggaggagaagccaaagaggag

SEQ ID NO: 39814 - DNA, 201 bp, Homo sapiens
attttacgggctctttctggagaacagaagtaaaaccttacagtgttccgatgagaccacagtaggcagtacttgggagggtcttatagaccccaccccayggaagtgggtctcaacattacacaaccccctcttgggcccgtggacagttgctgtcctctctgttttctctctttgtgcctgtgccaccctcagagaaga

SEQ ID NO: 39815 - DNA, 201 bp, Homo sapiens
agtcccctctccttgggaaaaagtgttcctactctctgggtcagtgtctggtccgaatccttggcttggagatgattttacgggctctttctggagaacaraagtaaaaccttacagtgttccgatgagaccacagtaggcagtacttgggagggtcttatagaccccaccccacggaagtgggtctcaacattacacaac

SEQ ID NO: 39816 - DNA, 201 bp, Homo sapiens
ggagatgattttacgggctctttctggagaacagaagtaaaaccttacagtgttccgatgagaccacagtaggcagtacttgggagggtcttatagacccyaccccacggaagtgggtctcaacattacacaaccccctcttgggcccgtggacagttgctgtcctctctgttttctctctttgtgcctgtgccaccctca

SEQ ID NO: 39817 - DNA, 201 bp, Homo sapiens
tattactgtagtcggacacactcccagctggcccagtttgtgcatgaggtgaagaagagcccctttggcaaggatgttcggctggtctcccttggctcccrgcagaacctttgtgtaaatgaagacgtgaaaagcctaggttctgtgcagcttatcaacgaccgctgcgtggacatgcagagaagcaggcacggtagccac

SEQ ID NO: 39818 - DNA, 201 bp, Homo sapiens
tgcagctcaagtatgcagccaagcgcctgaggcaggaagaagaagaaagagagaatctcctccgcctcagcagggagatgctagagacaggcccggaggcygagcggctggagcagctggagtctggggaggaggagctggtcctcgccgaatacgagagtgatgaggagaaaaaggtggcgagcagagtggatgaggatg

SEQ ID NO: 39819 - DNA, 201 bp, Homo sapiens
agaccccaccccacggaagtgggtctcaacattacacaaccccctcttgggcccgtggacagttgctgtcctctctgttttctctctttgtgcctgtgccmccctcagagaagaagaaaggagctgaggaggagaagccaaagaggaggaggcaggagaagcaggcagcctgccccttctacaaccacgagcagatgggcc

SEQ ID NO: 39820 - DNA, 201 bp, Homo sapiens; identical to SEQ ID NO: 39789

SEQ ID NO: 39821 - DNA, 201 bp, Homo sapiens
gcaaggatgttcggctggtctcccttggctcccggcagaacctttgtgtaaatgaagacgtgaaaagcctaggttctgtgcagcttatcaacgaccgctgygtggacatgcagagaagcaggcacgagaagaagaaaggagctgaggaggagaagccaaagaggaggaggcaggagaagcaggcagcctgccccttctaca

SEQ ID NO: 39822 - DNA, 201 bp, Homo sapiens
gcccagtttgtgcatgaggtgaagaagagcccctttggcaaggatgttcggctggtctcccttggctcccggcagaacctttgtgtaaatgaagacgtgaraagcctaggttctgtgcagcttatcaacgaccgctgcgtggacatgcagagaagcaggcacgagaagaagaaaggagctgaggaggagaagccaaagagg

SEQ ID NO: 39823 - DNA, 201 bp, Homo sapiens; identical to SEQ ID NO: 39792

SEQ ID NO: 39824 - DNA, 201 bp, Homo sapiens
tattactgtagtcggacacactcccagctggcccagtttgtgcatgaggtgaagaagagcccctttggcaaggatgttcggctggtctcccttggctcccrgcagaacctttgtgtaaatgaagacgtgaaaagcctaggttctgtgcagcttatcaacgaccgctgcgtggacatgcagagaagcaggcacgagaagaag

SEQ ID NO: 39825 - DNA, 201 bp, Homo sapiens
gctggcccagtttgtgcatgaggtgaagaagagcccctttggcaaggatgttcggctggtctcccttggctcccggcagaacctttgtgtaaatgaagacrtgaaaagcctaggttctgtgcagcttatcaacgaccgctgcgtggacatgcagagaagcaggcacgagaagaagaaaggagctgaggaggagaagccaaa

SEQ ID NO: 39826 - DNA, 201 bp, Homo sapiens; identical to SEQ ID NO: 39818

SEQ ID NO: 39827 - DNA, 201 bp, Homo sapiens; identical to SEQ ID NO: 39796

SEQ ID NO: 39828 - DNA, 201 bp, Homo sapiens; identical to SEQ ID NO: 39797

SEQ ID NO: 39829 - DNA, 201 bp, Homo sapiens
ggataatgagctgcagtatgtggaccaacttctgaaagaggatgtgagaaataactctgtctggaaccaaagatacttcgttatttctaacaccactggcwacaatgatcgtgctgtattggagagagaagtccaatacactctggaaatgattaaactagtaccacataatgaaagtgcatggaactatttgaaagggat

SEQ ID NO: 39830 - DNA, 201 bp, Homo sapiens
agtgtcccccagtcaccctcagttgcagcttccgtccaaagaaggaatcgccctctccctgctggggccactaacagcactaacacggtccgaatggcatyggcaaagctcgggaacggcgacagatgggaagacgcgtgggagcctgggggatctcgggagagccgcgcaaactcgcggcggacgcagccagcacccgca

SEQ ID NO: 39831 - DNA, 156 bp, Homo sapiens
agtcccataaaggaacttttgtagtcttatcaacatatataagcagggaatacagtcgttccatcagagctggtctgcacactcacattatcttgctatcmctgtaaccaactaatgccaaaagaacggttttgtaataaaattatagctgtatct

SEQ ID NO: 39832 - DNA, 201 bp, Homo sapiens; identical to SEQ ID NO: 39829

SEQ ID NO: 39833 - DNA, 201 bp, Homo sapiens; identical to SEQ ID NO: 39830

SEQ ID NO: 39834 - DNA, 164 bp, Homo sapiens
tgtatgtaatggatgtgaggtagccgaagtttggttcagtaagcagggaatacagtcgttccatcagagctggtctgcacactcacattatcttgctatcmctgtaaccaactaatgccaaaagaacggttttgtaataaaattatagctgtatctaaaaacaa

SEQ ID NO: 39835 - DNA, 201 bp, Homo sapiens; identical to SEQ ID NO: 39829

SEQ ID NO: 39836 - DNA, 201 bp, Homo sapiens; identical to SEQ ID NO: 39830

SEQ ID NO: 39837 - DNA, 164 bp, Homo sapiens; identical to SEQ ID NO: 39834

SEQ ID NO: 39838 - DNA, 201 bp, Homo sapiens
acactaactttgagaaaaatagaaattccatcttatcaactcaagatcgcctcgtagggggatttgccaagtggccagtaatccaggtgctttgcatgcayactttgggatctgtggcctgtcactaatggaggaaagtggaatttgttaagttcatcttgctctgaatgtaagcacacagacttctgaacgccttctaga

SEQ ID NO: 39839 - DNA, 201 bp, Homo sapiens
tactttttgtggcattgcctcactatgtctgatgggtaaactagaagttttttcagaaaaagaattgaacacgataaagaggtggtgtataatggggcaayaaaatagttatcatggaagacctaataagcctgtagacacccgttattctttttgggtgggagcaactctaaagcttctaaaaattttccaatacactaa

SEQ ID NO: 39840 - DNA, 201 bp, Homo sapiens
gcgggatctgcacgtgcgatttttccagcgctgcctcgaggttttgccggagcgctgttcttcacttgagacaagcaggtctttcccacagaagacagatsaaatctaaatcgctgtggtttccgaggctcttcatacctgggtattcttttcaatccatcaaaggctcctggaacagctcatccttatgatagtggccac

SEQ ID NO: 39841 - DNA, 201 bp, Homo sapiens
gagcgctgttcttcacttgagacaagcaggtctttcccacagaagacagatcaaatctaaatcgctgtggtttccgaggctcttcatacctgggtattctkttcaatccatcaaaggctcctggaacagctcatccttatgatagtggccacattgcaatgacctacactggcctttcatgcttacttattcttggagacg

SEQ ID NO: 39842 - DNA, 201 bp, Homo sapiens
aatgtaagcacacagacttctgaacgccttctagatctccatcaaagctggaaaaccaaggactcttaaacaatgctcagagaatgtacatatctctacaygactgactttagattgggagggtggggggatttgtagcataactgtagctcaagtttaaaagccatgtataaccaagtgtgctctttttttaaaaggtag

SEQ ID NO: 39843 - DNA, 201 bp, Homo sapiens
tgaacgccttctagatctccatcaaagctggaaaaccaaggactcttaaacaatgctcagagaatgtacatatctctacatgactgactttagattgggarggtggggggatttgtagcataactgtagctcaagtttaaaagccatgtataaccaagtgtgctctttttttaaaaggtagagtcttacaatcaaatctcc

SEQ ID NO: 39844 - DNA, 201 bp, Homo sapiens
cctatataaatgaaattaataacttcatagtaagaataaataggtttaactaatgtgatagttttctaaaaggagattgtttgaagacaactattatgtarctgagggaaaagcaactaactatatgtgattgtgaatgaggaagttttgtgttatgtgggtcatttatttagacattgctgtggtgaataccagttatgt

SEQ ID NO: 39845 - DNA, 201 bp, Homo sapiens
ctatctacaaggaaagatacttcgtgtttttatttttagccatttgaattttttaatttgttgcccccagtgtgttagctgctttaatttcaaactaatasttttctaatttttttcaaattaaataagtaaaaaaatgcaaaaacagaaccattcaaatagattcagtggtgcaactctatacatggtcatttttattct

SEQ ID NO: 39846 - DNA, 201 bp, Homo sapiens
atctaaatcgctgtggtttccgaggctcttcatacctgggtattcttttcaatccatcaaaggctcctggaacagctcatccttatgatagtggccacatygcaatgacctacactggcctttcatgcttacttattcttggagacgacttaagccgagtaaataaagaagcttgcttagcaggcttgagagcccttcagc

SEQ ID NO: 39847 - DNA, 201 bp, Homo sapiens
acttaagccgagtaaataaagaagcttgcttagcaggcttgagagcccttcagctggaagatgggagtttttgtgcagtacctgaaggcagtgaaaatgayatgcgatttttgtactgtgcttcctgtatttgctatatgctcaataaccagtcaggcatggatatgaaaaaagccatctcctatattaaaagaagtatgt

SEQ ID NO: 39848 - DNA, 201 bp, Homo sapiens
tttcttgcgggatctgcacgtgcgatttttccagcgctgcctcgaggttttgccggagcgctgttcttcacttgagacaagcaggtctttcccacagaagrcagatcaaatctaaatcgctgtggtttccgaggctcttcatacctgggtattcttttcaatccatcaaaggctcctggaacagctcatccttatgatagt

SEQ ID NO: 39849 - DNA, 201 bp, Homo sapiens
ggagcgctgttcttcacttgagacaagcaggtctttcccacagaagacagatcaaatctaaatcgctgtggtttccgaggctcttcatacctgggtattcytttcaatccatcaaaggctcctggaacagctcatccttatgatagtggccacattgcaatgacctacactggcctttcatgcttacttattcttggagac

SEQ ID NO: 39850 - DNA, 201 bp, Homo sapiens
agtcaggcatggatatgaaaaaagccatctcctatattaaaagaagtatgtcctatgacaatggactggcacagggagctggacttgaatctcatggaggrtctactttttgtggcattgcctcactatgtctgatgggtaaactagaagttttttcagaaaaagaattgaacacgataaagaggtggtgtataatggggc

SEQ ID NO: 39851 - DNA, 158 bp, Homo sapiens
tctaggtcgaggccgacgtcgcttccggagcagcatggcggccactgaggaggagagrctagcagggagcggtgagggagagcggctggatttcttgcgggatctgcacgtgcgatttttccagcgctgcctcgaggttttgccggagcgctgttctt

SEQ ID NO: 39852 - DNA, 201 bp, Homo sapiens
atacctgggtattcttttcaatccatcaaaggctcctggaacagctcatccttatgatagtggccacattgcaatgacctacactggcctttcatgcttasttattcttggagacgacttaagccgagtaaataaagaagcttgcttagcaggcttgagagcccttcagctggaagatgggagtttttgtgcagtacctga

SEQ ID NO: 39853 - DNA, 201 bp, Homo sapiens
gcggccactgaggaggagaggctagcagggagcggtgagggagagcggctggatttcttgcgggatctgcacgtgcgatttttccagcgctgcctcgaggwtttgccggagcgctgttcttcacttgagacaagcaggtctttcccacagaagacagatcaaatctaaatcgctgtggtttccgaggctcttcatacctgg

SEQ ID NO: 39854 - DNA, 201 bp, Homo sapiens
agaagcttgcttagcaggcttgagagcccttcagctggaagatgggagtttttgtgcagtacctgaaggcagtgaaaatgatatgcgatttttgtactgtrcttcctgtatttgctatatgctcaataaccagtcaggcatggatatgaaaaaagccatctcctatattaaaagaagtatgtcctatgacaatggactggc

SEQ ID NO: 39855 - DNA, 201 bp, Homo sapiens
cagggagcggtgagggagagcggctggatttcttgcgggatctgcacgtgcgatttttccagcgctgcctcgaggttttgccggagcgctgttcttcactygagacaagcaggtctttcccacagaagacagatcaaatctaaatcgctgtggtttccgaggctcttcatacctgggtattcttttcaatccatcaaaggc

SEQ ID NO: 39856 - DNA, 201 bp, Homo sapiens
ttccggagcagcatggcggccactgaggaggagaggctagcagggagcggtgagggagagcggctggatttcttgcgggatctgcacgtgcgatttttccmgcgctgcctcgaggttttgccggagcgctgttcttcacttgagacaagcaggtctttcccacagaagacagatcaaatctaaatcgctgtggtttccgag

SEQ ID NO: 39857 - DNA, 187 bp, Homo sapiens
tctaggtcgaggccgacgtcgcttccggagcagcatggcggccactgaggaggagaggctagcagggagcggtgagggagagcggckggatttcttgcgggatctgcacgtgcgatttttccagcgctgcctcgaggttttgccggagcgctgttcttcacttgagacaagcaggtctttcccacag

SEQ ID NO: 39858 - DNA, 201 bp, Homo sapiens
ggaacagctcatccttatgatagtggccacattgcaatgacctacactggcctttcatgcttacttattcttggagacgacttaagccgagtaaataaagragcttgcttagcaggcttgagagcccttcagctggaagatgggagtttttgtgcagtacctgaaggcagtgaaaatgatatgcgatttttgtactgtgct

SEQ ID NO: 39859 - DNA, 201 bp, Homo sapiens
gtctttcccacagaagacagatcaaatctaaatcgctgtggtttccgaggctcttcatacctgggtattcttttcaatccatcaaaggctcctggaacagstcatccttatgatagtggccacattgcaatgacctacactggcctttcatgcttacttattcttggagacgacttaagccgagtaaataaagaagcttgc

SEQ ID NO: 39860 - DNA, 127 bp, Homo sapiens
gagggaggagacgtgcacaacgccacgacggacggggacaggtttccggggacacattcgctcggcggggggcgggagcctcggacgcctcacctctccgmctcagcagcagcgcggccacggcgct

SEQ ID NO: 39861 - DNA, 107 bp, Homo sapiens
caaagcmgagctccacaaacgtgactctgtgaatgaggcctcccgcggggagccacacaggtgaagttaaacaagtgctcatttcagcgccgggcccgaggaatgct

SEQ ID NO: 39862 - DNA, 182 bp, Homo sapiens
aaagtcagaggacggggtatcctcctgccgacccgcgcgcaaccagcggcccagggagggaggagacgtgcacaacgccacgacggacggggacaggtttycggggacacattcgctcggcggggggcgggagcctcggacgcctcacctctccgcctcagcagcagcgcggccacggcgct

SEQ ID NO: 39863 - DNA, 162 bp, Homo sapiens
cctcctgccgacccgcgcgcaaccagcggcccagggagggaggagacgtgcacaacgccacgacggacggggacaggtttccggggacacattcgctcggsggggggcgggagcctcggacgcctcacctctccgcctcagcagcagcgcggccacggcgct

SEQ ID NO: 39864 - DNA, 201 bp, Homo sapiens
cttctctcgtctgtgtgataacaggcaaagggcctccgagggagtattacagccgcctcatccaccagaagcatttccagcacatccaggtctgcaccccytggctggaggccgaggactacccccgcttctagggtcggtggatctgggtgtctgtctgcacacgtcctgcagtggcctggacctgcccatgaaggtggt

SEQ ID NO: 39865 - DNA, 201 bp, Homo sapiens
actctccgttcagggcctgctcagaacctgaggacccagacacggagcggtcggccttcatggagcgggatgctgggagcgggctggtgatgcgcctccgygagcggccagccctgctggtcagcagcacaggctggacaggtctgcacgacccctagaacacttgggcttgaggacgaagacttctccatctgctggcag

SEQ ID NO: 39866 - DNA, 201 bp, Homo sapiens
caaccttccttctctcgtctgtgtgataacaggcaaagggcctccgagggagtattacagccgcctcatccaccagaagcatttccagcacatccaggtcwgcaccccttggctggaggccgaggactacccccgcttctagggtcggtggatctgggtgtctgtctgcacacgtcctgcagtggcctggacctgcccatg

SEQ ID NO: 39867 - DNA, 201 bp, Homo sapiens
ttgaggactcagaggaactggcagctcagctgcaggtgcttttctcaaactttcctgatcctgcgggcaagctaaaccagttccggaagaacctgcgggartcgcagcagctccgatgggattagagctgggtgcagactgtgctccctttggttatggacacataactcctgggccagaggctaaaaccccgggacccct

SEQ ID NO: 39868 - DNA, 201 bp, Homo sapiens
tgaattggttctgtgacccgggaagctgtgcttggctctgatttcttttctggaggctcggaaacacttcctctcttcttctgttcttcacgccccatgcycctgctagcgtattactgttctgtgacttccctgtgacctctgcagtactcctcatcctgcgtttggtctccaggtgtcacctttctgccgtgttcctaa

SEQ ID NO: 39869 - DNA, 201 bp, Homo sapiens
agcgggatgctgggagcgggctggtgatgcgcctccgcgagcggccagccctgctggtcagcagcacaggctggacaggtctgcacgacccctagaacacytgggcttgaggacgaagacttctccatctgctggcagctttagaaaagtttgaacaactgactcttgatggacacaaccttccttctctcgtctgtgtga

SEQ ID NO: 39870 - DNA, 201 bp, Homo sapiens
tctgatttcttttctggaggctcggaaacacttcctctcttcttctgttcttcacgccccatgcccctgctagcgtattactgttctgtgacttccctgtracctctgcagtactcctcatcctgcgtttggtctccaggtgtcacctttctgccgtgttcctaacattttgattcctgtcttgaaaaaagcacctgctgc

SEQ ID NO: 39871 - DNA, 201 bp, Homo sapiens
caatgaggtaagctctgctctttatttttttgcaggtgcttttctcaaactttcctgatcctgcgggcaagctaaaccagttccggaagaacctgcgggartcgcagcagctccgatgggattagagctgggtgcagactgtgctccctttggttatggacacataactcctgggccagaggctaaaaccccgggacccct

SEQ ID NO: 39872 - DNA, 201 bp, Homo sapiens; identical to SEQ ID NO: 39868

SEQ ID NO: 39873 - DNA, 201 bp, Homo sapiens; identical to SEQ ID NO: 39870

SEQ ID NO: 39874 - DNA, 201 bp, Homo sapiens; identical to SEQ ID NO: 39864

SEQ ID NO: 39875 - DNA, 201 bp, Homo sapiens
actctccgttcagggcctgctcagaacctgaggacccagacacggagcggtcggccttcatggagcgggatgctgggagcgggctggtgatgcgcctccgygagcggccagccctgctggtcagcagcacaggctggacagaggacgaagacttctccatctgctggcagctttagaaaagtttgaacaactgactcttga

SEQ ID NO: 39876 - DNA, 201 bp, Homo sapiens; identical to SEQ ID NO: 39866

SEQ ID NO: 39877 - DNA, 201 bp, Homo sapiens; identical to SEQ ID NO: 39867

SEQ ID NO: 39878 - DNA, 201 bp, Homo sapiens; identical to SEQ ID NO: 39868

SEQ ID NO: 39879 - DNA, 201 bp, Homo sapiens; identical to SEQ ID NO: 39870

SEQ ID NO: 39880 - DNA, 201 bp, Homo sapiens
tccgccgactcggccgcgttgctgggctgggcccggggacagcccgccgccgccccgcagccggggctggcattggccgcccggcgccactacagcgaggyggtggccgaccgcgaggacgaccccaacttcttcaagatggtggagggcttcttcgatcgcggcgccagcatcgtggaggacaagctggtggaggacctg

SEQ ID NO: 39881 - DNA, 201 bp, Homo sapiens
cccgggccgggcccgctgccctgggctcggcgtccgccgactcggccgcgttgctgggctgggcccggggacagcccgccgccgccccgcagccggggctsgcattggccgcccggcgccactacagcgaggcggtggccgaccgcgaggacgaccccaacttcttcaagatggtggagggcttcttcgatcgcggcgcca

SEQ ID NO: 39882 - DNA, 201 bp, Homo sapiens
ctatggttgactaattaaacaataattcaagtagagtgtcccagaaaaaaaccacttgggctccctgtttggagtctggctggctctgagcattgccaatrgcccctactcacctgactttgtatcctctccttttagaggctttgcattctgcacccagcttcactaacagtgggctgaaaacatccttgggttgagtgt

SEQ ID NO: 39883 - DNA, 201 bp, Homo sapiens
gttcttagtattttatatcagcaaaataattcaattttgcaggttgcaaacaaatataaaacctgtttctgtttatgaatattattcttttagaatagaawaagtacatgctgctgtaataaaattgcctttaatcacttaacaagcctaaccttgactcaaacagtgaatgcctatagaaataataaatgaaaaaaacta

SEQ ID NO: 39884 - DNA, 201 bp, Homo sapiens
ctgtggcttttcccaacacaatcagtgctagtgctggggaggaacagtcaagagcagtcagttgcttgcttattttttctggatgagtctgggacacactktaactttaacacatttaagaagtaggtgtgtggccttttcagaaggtggcatggtcctcaagtgagttcttagtattttatatcagcaaaataattcaat

SEQ ID NO: 39885 - DNA, 201 bp, Homo sapiens
accatcacgcacctcccctccgcttgtggccatgtaccgctacctgggcgaagcgctgttgctgtcccgggccgggcccgctgccctgggctcggcgtccrccgactcggccgcgttgctgggctgggcccggggacagcccgccgccgccccgcagccggggctggcattggccgcccggcgccactacagcgaggcggt

SEQ ID NO: 39886 - DNA, 201 bp, Homo sapiens
ctgaaaacatccttgggttgagtgtttcatttgggagttatttggccagggccttttgaacagtagtgtccccatgaagtgctagataatatatgtgtaaragtcagctttttttttttttttaactctaacacccttcagaaatttctaactactttgtaactgcatggcttaacctggtgataaaagcagttattaaaa

SEQ ID NO: 39887 - DNA, 201 bp, Homo sapiens
gactttgtatcctctccttttagaggctttgcattctgcacccagcttcactaacagtgggctgaaaacatccttgggttgagtgtttcatttgggagttrtttggccagggccttttgaacagtagtgtccccatgaagtgctagataatatatgtgtaagagtcagctttttttttttttttaactctaacacccttca

SEQ ID NO: 39888 - DNA, 201 bp, Homo sapiens
accacttgggctccctgtttggagtctggctggctctgagcattgccaatggcccctactcacctgactttgtatcctctccttttagaggctttgcattytgcacccagcttcactaacagtgggctgaaaacatccttgggttgagtgtttcatttgggagttatttggccagggccttttgaacagtagtgtccccat

SEQ ID NO: 39889 - DNA, 201 bp, Homo sapiens
gtcccagaaaaaaaccacttgggctccctgtttggagtctggctggctctgagcattgccaatggcccctactcacctgactttgtatcctctccttttaraggctttgcattctgcacccagcttcactaacagtgggctgaaaacatccttgggttgagtgtttcatttgggagttatttggccagggccttttgaaca

SEQ ID NO: 39890 - DNA, 201 bp, Homo sapiens
ttctcttttgaagatctatggttgactaattaaacaataattcaagtagagtgtcccagaaaaaaaccacttgggctccctgtttggagtctggctggctytgagcattgccaatggcccctactcacctgactttgtatcctctccttttagaggctttgcattctgcacccagcttcactaacagtgggctgaaaacat

SEQ ID NO: 39891 - DNA, 201 bp, Homo sapiens
gaccgcgaggacgaccccaacttcttcaagatggtggagggcttcttcgatcgcggcgccagcatcgtggaggacaagctggtggaggacctgaggacccrggagagcgaggagcagaagcggaaccgggtgcgcggcatcctgcggatcatcaagccctgcaaccatgtgctgagtctctccttccccatccggcgcgac

SEQ ID NO: 39892 - DNA, 201 bp, Homo sapiens; identical to SEQ ID NO: 39882

SEQ ID NO: 39893 - DNA, 201 bp, Homo sapiens; identical to SEQ ID NO: 39883

SEQ ID NO: 39894 - DNA, 201 bp, Homo sapiens; identical to SEQ ID NO: 39884

SEQ ID NO: 39895 - DNA, 201 bp, Homo sapiens; identical to SEQ ID NO: 39886

SEQ ID NO: 39896 - DNA, 201 bp, Homo sapiens; identical to SEQ ID NO: 39887

SEQ ID NO: 39897 - DNA, 201 bp, Homo sapiens; identical to SEQ ID NO: 39888

SEQ ID NO: 39898 - DNA, 201 bp, Homo sapiens; identical to SEQ ID NO: 39889

SEQ ID NO: 39899 - DNA, 201 bp, Homo sapiens; identical to SEQ ID NO: 39890

SEQ ID NO: 39900 - DNA, 187 bp, Homo sapiens
agaaagcgcgcctgtttcgcgaccatcacgcacctcccctccgcttgtggccatgtaccgctacctggtggaggacctgaggacccrggagagcgaggagcagaagcggaaccgggtgcgcggcatcctgcggatcatcaagccctgcaaccatgtgctgagtctctccttccccatccggcgcgac

SEQ ID NO: 39901 - DNA, 201 bp, Homo sapiens; identical to SEQ ID NO: 39882

SEQ ID NO: 39902 - DNA, 201 bp, Homo sapiens; identical to SEQ ID NO: 39883

SEQ ID NO: 39903 - DNA, 201 bp, Homo sapiens; identical to SEQ ID NO: 39884

SEQ ID NO: 39904 - DNA, 201 bp, Homo sapiens; identical to SEQ ID NO: 39886

SEQ ID NO: 39905 - DNA, 201 bp, Homo sapiens; identical to SEQ ID NO: 39887

SEQ ID NO: 39906 - DNA, 201 bp, Homo sapiens; identical to SEQ ID NO: 39888

SEQ ID NO: 39907 - DNA, 201 bp, Homo sapiens; identical to SEQ ID NO: 39889

SEQ ID NO: 39908 - DNA, 201 bp, Homo sapiens; identical to SEQ ID NO: 39890

SEQ ID NO: 39909 - DNA, 201 bp, Homo sapiens; identical to SEQ ID NO: 39880

SEQ ID NO: 39910 - DNA, 201 bp, Homo sapiens; identical to SEQ ID NO: 39881

SEQ ID NO: 39911 - DNA, 201 bp, Homo sapiens; identical to SEQ ID NO: 39882

SEQ ID NO: 39912 - DNA, 201 bp, Homo sapiens
ggctagcagtcagttgcttgcttattttttctggatgagtctgggacacactgtaactttaacactttctgtttatgaatattattcttttagaatagaawaagtacatgctgctgtaataaaattgcctttaatcacttaacaagcctaaccttgactcaaacagtgaatgcctatagaaataataaatgaaaaaaacta

SEQ ID NO: 39913 - DNA, 201 bp, Homo sapiens
gagagccattttggtattttgcctttaaataaaaagcctcctttatctggctagcagtcagttgcttgcttattttttctggatgagtctgggacacactktaactttaacactttctgtttatgaatattattcttttagaatagaataagtacatgctgctgtaataaaattgcctttaatcacttaacaagcctaacc

SEQ ID NO: 39914 - DNA, 201 bp, Homo sapiens; identical to SEQ ID NO: 39885

SEQ ID NO: 39915 - DNA, 201 bp, Homo sapiens; identical to SEQ ID NO: 39886

SEQ ID NO: 39916 - DNA, 201 bp, Homo sapiens; identical to SEQ ID NO: 39887

SEQ ID NO: 39917 - DNA, 201 bp, Homo sapiens; identical to SEQ ID NO: 39888

SEQ ID NO: 39918 - DNA, 201 bp, Homo sapiens; identical to SEQ ID NO: 39889

SEQ ID NO: 39919 - DNA, 201 bp, Homo sapiens; identical to SEQ ID NO: 39890

SEQ ID NO: 39920 - DNA, 201 bp, Homo sapiens; identical to SEQ ID NO: 39891

SEQ ID NO: 39921 - DNA, 201 bp, Homo sapiens
ggagtttgtggggcgctccctgccagaggagaccgtggacttcatggttcagcacacgtcgttcaaggagatgaagaagaaccctatgaccaactacaccmccgtcccccaggagttcatggaccacagcatctcccccttcatgaggaaaggcatggctggggactggaagaccaccttcaccgtggcgcagaatgagcg

SEQ ID NO: 39922 - DNA, 201 bp, Homo sapiens
aggaaaggcatggctggggactggaagaccaccttcaccgtggcgcagaatgagcgcttcgatgcggactatgcggagaagatggcaggctgcagcctcascttccgctctgagctgtgagaggggctcctggagtcactgcagagggagtgtgcgaatcaaacctgaccaagcggctcaagaataaaatatgaattgagg

SEQ ID NO: 39923 - DNA, 201 bp, Homo sapiens
ccgctctgagctgtgagaggggctcctggagtcactgcagagggagtgtgcgaatcaaacctgaccaagcggctcaagaataaaatatgaattgagggccygggacggtaggtcatgtctgtaatcccagcaatttggaggctgaggtgggaggatcatttgagcccaggagttcgagaccaacctgggcaacatagtgag

SEQ ID NO: 39924 - DNA, 201 bp, Homo sapiens
gttcaacattacaagacatcatccctacaaaaatttgagaaaattatctgtacgtgatggtgggcacctgtagtcccagctacttgacaagtgaaggcagkaggatcgcctgagccagggaggttatggctgcagtgggctgactgggctaatccactcaagcctgagggacagagcaaatcttgcttgagaaataaataa

SEQ ID NO: 39925 - DNA, 201 bp, Homo sapiens
aggggagcatctccactgggtggaggctgggggtcccagcaggaagtggtgagacaaagggcgctggctggcagggagacagcacaggaaggtcctagagsttcctcagtgcagctggactctcctggagaccttcacacaccctgacatctgggccttgcccgacgagggtgctttcactggtctgcaccatggcccagg

SEQ ID NO: 39926 - DNA, 201 bp, Homo sapiens
ccagactctgttggatcagaaggtcaaggtggtctatgttgcccgcaacgcaaaggatgtggcagtttcctactaccacttctaccacatggccaaggtgyaccctgagcctgggacctgggacagcttcctggagaagttcatggtcggagaagtgtcctacggatcctggtaccagcacgtgcaggagtggtgggagct

SEQ ID NO: 39927 - DNA, 201 bp, Homo sapiens
tctgttggatcagaaggtcaaggtggtctatgttgcccgcaacgcaaaggatgtggcagtttcctactaccacttctaccacatggccaaggtgcaccctsagcctgggacctgggacagcttcctggagaagttcatggtcggagaagtgtcctacggatcctggtaccagcacgtgcaggagtggtgggagctgagccg

SEQ ID NO: 39928 - DNA, 201 bp, Homo sapiens
tgcagagcttccaggcccggcctgatgacctgctcatcagcacctaccccaagtccggcactacctgggtaagccagattctggacatgatctaccagggyggtgacctggagaagtgtcaccgagctcccatcttcatgcgggtgcccttccttgagttcaaagccccagggattccctcagggatggagactctgaaag

SEQ ID NO: 39929 - DNA, 201 bp, Homo sapiens
aggcccggcctgatgacctgctcatcagcacctaccccaagtccggcactacctgggtaagccagattctggacatgatctaccagggtggtgacctggaraagtgtcaccgagctcccatcttcatgcgggtgcccttccttgagttcaaagccccagggattccctcagggatggagactctgaaagacacaccggccc

SEQ ID NO: 39930 - DNA, 201 bp, Homo sapiens
tgggtaagccagattctggacatgatctaccagggtggtgacctggagaagtgtcaccgagctcccatcttcatgcgggtgcccttccttgagttcaaagycccagggattccctcagggatggagactctgaaagacacaccggccccacgactcctgaagacacacctgcccctggctctgctcccccagactctgttg

SEQ ID NO: 39931 - DNA, 201 bp, Homo sapiens
tgggagctgagccgcacccaccctgttctctacctcttctatgaagacatgaaggagaacccgaaaagggagattcaaaagatcctggagtttgtggggcrctccctgccagaggagaccgtggacttcatggttcagcacacgtcgttcaaggagatgaagaagaaccctatgaccaactacaccaccgtcccccaggag

SEQ ID NO: 39932 - DNA, 201 bp, Homo sapiens
accctgttctctacctcttctatgaagacatgaaggagaacccgaaaagggagattcaaaagatcctggagtttgtggggcgctccctgccagaggagacygtggacttcatggttcagcacacgtcgttcaaggagatgaagaagaaccctatgaccaactacaccaccgtcccccaggagttcatggaccacagcatct

SEQ ID NO: 39933 - DNA, 201 bp, Homo sapiens
ctacctcttctatgaagacatgaaggagaacccgaaaagggagattcaaaagatcctggagtttgtggggcgctccctgccagaggagaccgtggacttcrtggttcagcacacgtcgttcaaggagatgaagaagaaccctatgaccaactacaccaccgtcccccaggagttcatggaccacagcatctcccccttcat

SEQ ID NO: 39934 - DNA, 201 bp, Homo sapiens
ttgaacagctccgcaggtgaatgaaaggtgaggccaggctggggaaccaccgcattagagcccgacctggttttcagccccagccccgccactgagtggcyttgtgagtgcgggcaagtcactcagcctccctaggcctcagtgacttccctgaaagcaagaattccactttcttgctgttgtgatggtggtaagggaacg

SEQ ID NO: 39935 - DNA, 201 bp, Homo sapiens
cttctatgaagacatgaaggagaacccgaaaagggagattcaaaagatcctggagtttgtggggcgctccctgccagaggagaccgtggacttcatggttsagcacacgtcgttcaaggagatgaagaagaaccctatgaccaactacaccaccgtcccccaggagttcatggaccacagcatctcccccttcatgaggaa

SEQ ID NO: 39936 - DNA, 178 bp, Homo sapiens
tttccacatgtgaggggctgaggggctcaaggaggggagcatctccactgggtggaggctgggggtcccagcaggaartggtgagacaaagggcgctggctggcagggagacagcacaggaaggtcctagagcttcctcagtgcagctggactctcctggagaccttcacacaccctg

SEQ ID NO: 39937 - DNA, 201 bp, Homo sapiens
tcccgctcatcaagtactttgcagaggcactggggcccctgcagagcttccaggcccggcctgatgacctgctcatcagcacctaccccaagtccggcacyacctgggtaagccagattctggacatgatctaccagggtggtgacctggagaagtgtcaccgagctcccatcttcatgcgggtgcccttccttgagttca

SEQ ID NO: 39938 - DNA, 201 bp, Homo sapiens
agggagattcaaaagatcctggagtttgtggggcgctccctgccagaggagaccgtggacttcatggttcagcacacgtcgttcaaggagatgaagaagamccctatgaccaactacaccaccgtcccccaggagttcatggaccacagcatctcccccttcatgaggaaaggcatggctggggactggaagaccaccttc

SEQ ID NO: 39939 - DNA, 201 bp, Homo sapiens
cgagaccaacctgggcaacatagtgagattctgttaaaaaaataaaataaaataaaaccaatttttaaaaagagaataaaatatgattgtgggccaggcakagtggctcatgcctgtaatcccagcaatttgagaagttgaggctagaggatcactggaggacaggagtttgggaccagcctgttcaacattacaagacat

SEQ ID NO: 39940 - DNA, 201 bp, Homo sapiens
gacaggagtttgggaccagcctgttcaacattacaagacatcatccctacaaaaatttgagaaaattatctgtacgtgatggtgggcacctgtagtcccarctacttgacaagtgaaggcaggaggatcgcctgagccagggaggttatggctgcagtgggctgactgggctaatccactcaagcctgagggacagagcaa

SEQ ID NO: 39941 - DNA, 201 bp, Homo sapiens
gactcctgaagacacacctgcccctggctctgctcccccagactctgttggatcagaaggtcaaggtggtctatgttgcccgcaacgcaaaggatgtggcrgtttcctactaccacttctaccacatggccaaggtgcaccctgagcctgggacctgggacagcttcctggagaagttcatggtcggagaagtgtcctacg

SEQ ID NO: 39942 - DNA, 201 bp, Homo sapiens
ttcaccgtggcgcagaatgagcgcttcgatgcggactatgcggagaagatggcaggctgcagcctcagcttccgctctgagctgtgagaggggctcctggrgtcactgcagagggagtgtgcgaatcaaacctgaccaagcggctcaagaataaaatatgaattgagggcccgggacggtaggtcatgtctgtaatcccag

SEQ ID NO: 39943 - DNA, 201 bp, Homo sapiens
tgttggatcagaaggtcaaggtggtctatgttgcccgcaacgcaaaggatgtggcagtttcctactaccacttctaccacatggccaaggtgcaccctgascctgggacctgggacagcttcctggagaagttcatggtcggagaagtgtcctacggatcctggtaccagcacgtgcaggagtggtgggagctgagccgca

SEQ ID NO: 39944 - DNA, 201 bp, Homo sapiens
gaccaccttcaccgtggcgcagaatgagcgcttcgatgcggactatgcggagaagatggcaggctgcagcctcagcttccgctctgagctgtgagaggggytcctggagtcactgcagagggagtgtgcgaatcaaacctgaccaagcggctcaagaataaaatatgaattgagggcccgggacggtaggtcatgtctgta

SEQ ID NO: 39945 - DNA, 201 bp, Homo sapiens
aaagcaagaattccactttcttgctgttgtgatggtggtaagggaacgggcctggctctggcccctgacgcaggaacatggagctgatccaggacacctcycgcccgccactggagtacgtgaagggggtcccgctcatcaagtactttgcagaggcactggggcccctgcagagcttccaggcccggcctgatgacctgc

SEQ ID NO: 39946 - DNA, 201 bp, Homo sapiens
tcaagtactttgcagaggcactggggcccctgcagagcttccaggcccggcctgatgacctgctcatcagcacctaccccaagtccggcactacctgggtragccagattctggacatgatctaccagggtggtgacctggagaagtgtcaccgagctcccatcttcatgcgggtgcccttccttgagttcaaagccccag

SEQ ID NO: 39947 - DNA, 201 bp, Homo sapiens
ggaccacagcatctcccccttcatgaggaaaggcatggctggggactggaagaccaccttcaccgtggcgcagaatgagcgcttcgatgcggactatgcgragaagatggcaggctgcagcctcagcttccgctctgagctgtgagaggggctcctggagtcactgcagagggagtgtgcgaatcaaacctgaccaagcgg

SEQ ID NO: 39948 - DNA, 201 bp, Homo sapiens
cctgaaagcaagaattccactttcttgctgttgtgatggtggtaagggaacgggcctggctctggcccctgacgcaggaacatggagctgatccaggacayctcccgcccgccactggagtacgtgaagggggtcccgctcatcaagtactttgcagaggcactggggcccctgcagagcttccaggcccggcctgatgac

SEQ ID NO: 39949 - DNA, 201 bp, Homo sapiens
tgaagaagaaccctatgaccaactacaccaccgtcccccaggagttcatggaccacagcatctcccccttcatgaggaaaggcatggctggggactggaaraccaccttcaccgtggcgcagaatgagcgcttcgatgcggactatgcggagaagatggcaggctgcagcctcagcttccgctctgagctgtgagaggggc

SEQ ID NO: 39950 - DNA, 201 bp, Homo sapiens
tcccccagactctgttggatcagaaggtcaaggtggtctatgttgcccgcaacgcaaaggatgtggcagtttcctactaccacttctaccacatggccaargtgcaccctgagcctgggacctgggacagcttcctggagaagttcatggtcggagaagtgtcctacggatcctggtaccagcacgtgcaggagtggtggg

SEQ ID NO: 39951 - DNA, 201 bp, Homo sapiens
acatggccaaggtgcaccctgagcctgggacctgggacagcttcctggagaagttcatggtcggagaagtgtcctacggatcctggtaccagcacgtgcargagtggtgggagctgagccgcacccaccctgttctctacctcttctatgaagacatgaaggagaacccgaaaagggagattcaaaagatcctggagtttg

SEQ ID NO: 39952 - DNA, 201 bp, Homo sapiens
ggattttgaacagctccgcaggtgaatgaaaggtgaggccaggctggggaaccaccgcattagagcccgacctggttttcagccccagccccgccactgastggctttgtgagtgcgggcaagtcactcagcctccctaggcctcagtgacttccctgaaagcaagaattccactttcttgctgttgtgatggtggtaagg

SEQ ID NO: 39953 - DNA, 201 bp, Homo sapiens
cgacgagggtgctttcactggtctgcaccatggcccaggccctgggattttgaacagctccgcaggtgaatgaaaggtgaggccaggctggggaaccaccrcattagagcccgacctggttttcagccccagccccgccactgagtggctttgtgagtgcgggcaagtcactcagcctccctaggcctcagtgacttccct

SEQ ID NO: 39954 - DNA, 201 bp, Homo sapiens; identical to SEQ ID NO: 39938

SEQ ID NO: 39955 - DNA, 201 bp, Homo sapiens; identical to SEQ ID NO: 39939

SEQ ID NO: 39956 - DNA, 201 bp, Homo sapiens; identical to SEQ ID NO: 39941

SEQ ID NO: 39957 - DNA, 201 bp, Homo sapiens; identical to SEQ ID NO: 39921

SEQ ID NO: 39958 - DNA, 201 bp, Homo sapiens; identical to SEQ ID NO: 39940

SEQ ID NO: 39959 - DNA, 201 bp, Homo sapiens; identical to SEQ ID NO: 39943

SEQ ID NO: 39960 - DNA, 201 bp, Homo sapiens; identical to SEQ ID NO: 39942

SEQ ID NO: 39961 - DNA, 201 bp, Homo sapiens; identical to SEQ ID NO: 39922

SEQ ID NO: 39962 - DNA, 201 bp, Homo sapiens; identical to SEQ ID NO: 39944

SEQ ID NO: 39963 - DNA, 201 bp, Homo sapiens; identical to SEQ ID NO: 39946

SEQ ID NO: 39964 - DNA, 201 bp, Homo sapiens
ctctggcccctagtagcagctcagttcctcaatgggccgtgtttgtcctggagcccagatggactgtggccaggaacatggagctgatccaggacacctcycgcccgccactggagtacgtgaagggggtcccgctcatcaagtactttgcagaggcactggggcccctgcagagcttccaggcccggcctgatgacctgc

SEQ ID NO: 39965 - DNA, 201 bp, Homo sapiens
gcattctccagggaaaggatgacatatttttggacctgaaacagaaattctggaacacctatatgcacccacaatcagccactgcgggcgaggagggcacraggccaggttcccaagagctcagcagctctggcccctagtagcagctcagttcctcaatgggccgtgtttgtcctggagcccagatggactgtggccagg

SEQ ID NO: 39966 - DNA, 201 bp, Homo sapiens; identical to SEQ ID NO: 39923

SEQ ID NO: 39967 - DNA, 201 bp, Homo sapiens; identical to SEQ ID NO: 39949

SEQ ID NO: 39968 - DNA, 201 bp, Homo sapiens
gcagctctggcccctagtagcagctcagttcctcaatgggccgtgtttgtcctggagcccagatggactgtggccaggaacatggagctgatccaggacayctcccgcccgccactggagtacgtgaagggggtcccgctcatcaagtactttgcagaggcactggggcccctgcagagcttccaggcccggcctgatgac

SEQ ID NO: 39969 - DNA, 201 bp, Homo sapiens; identical to SEQ ID NO: 39947

SEQ ID NO: 39970 - DNA, 201 bp, Homo sapiens; identical to SEQ ID NO: 39924

SEQ ID NO: 39971 - DNA, 201 bp, Homo sapiens; identical to SEQ ID NO: 39926

SEQ ID NO: 39972 - DNA, 201 bp, Homo sapiens
ccaggttcccaagagctcagcagctctggcccctagtagcagctcagttcctcaatgggccgtgtttgtcctggagcccagatggactgtggccaggaacrtggagctgatccaggacacctcccgcccgccactggagtacgtgaagggggtcccgctcatcaagtactttgcagaggcactggggcccctgcagagctt

SEQ ID NO: 39973 - DNA, 201 bp, Homo sapiens; identical to SEQ ID NO: 39950

SEQ ID NO: 39974 - DNA, 201 bp, Homo sapiens; identical to SEQ ID NO: 39927

SEQ ID NO: 39975 - DNA, 201 bp, Homo sapiens; identical to SEQ ID NO: 39928

SEQ ID NO: 39976 - DNA, 201 bp, Homo sapiens; identical to SEQ ID NO: 39929

SEQ ID NO: 39977 - DNA, 201 bp, Homo sapiens; identical to SEQ ID NO: 39930

SEQ ID NO: 39978 - DNA, 201 bp, Homo sapiens; identical to SEQ ID NO: 39951

SEQ ID NO: 39979 - DNA, 201 bp, Homo sapiens; identical to SEQ ID NO: 39931

SEQ ID NO: 39980 - DNA, 201 bp, Homo sapiens; identical to SEQ ID NO: 39932

SEQ ID NO: 39981 - DNA, 201 bp, Homo sapiens; identical to SEQ ID NO: 39933

SEQ ID NO: 39982 - DNA, 201 bp, Homo sapiens; identical to SEQ ID NO: 39935

SEQ ID NO: 39983 - DNA, 201 bp, Homo sapiens; identical to SEQ ID NO: 39937

SEQ ID NO: 39984 - DNA, 201 bp, Homo sapiens; identical to SEQ ID NO: 39938

SEQ ID NO: 39985 - DNA, 201 bp, Homo sapiens; identical to SEQ ID NO: 39939

SEQ ID NO: 39986 - DNA, 201 bp, Homo sapiens; identical to SEQ ID NO: 39941

SEQ ID NO: 39987 - DNA, 201 bp, Homo sapiens; identical to SEQ ID NO: 39921

SEQ ID NO: 39988 - DNA, 201 bp, Homo sapiens; identical to SEQ ID NO: 39940

SEQ ID NO: 39989 - DNA, 201 bp, Homo sapiens; identical to SEQ ID NO: 39943

SEQ ID NO: 39990 - DNA, 201 bp, Homo sapiens; identical to SEQ ID NO: 39942

SEQ ID NO: 39991 - DNA, 201 bp, Homo sapiens; identical to SEQ ID NO: 39922

SEQ ID NO: 39992 - DNA, 201 bp, Homo sapiens; identical to SEQ ID NO: 39944

SEQ ID NO: 39993 - DNA, 201 bp, Homo sapiens; identical to SEQ ID NO: 39946

SEQ ID NO: 39994 - DNA, 201 bp, Homo sapiens
cattccccacacagcacccacaatcagccactgcgggcgaggagggcacgaggccaggttcccaagagctcaggaacatggagctgatccaggacacctcycgcccgccactggagtacgtgaagggggtcccgctcatcaagtactttgcagaggcactggggcccctgcagagcttccaggcccggcctgatgacctgc

SEQ ID NO: 39995 - DNA, 201 bp, Homo sapiens
gatccctcccacagtggacctaggaaaccctcagctcagagaacaaccctgcattccccacacagcacccacaatcagccactgcgggcgaggagggcacraggccaggttcccaagagctcaggaacatggagctgatccaggacacctcccgcccgccactggagtacgtgaagggggtcccgctcatcaagtactttg

SEQ ID NO: 39996 - DNA, 201 bp, Homo sapiens; identical to SEQ ID NO: 39923

SEQ ID NO: 39997 - DNA, 201 bp, Homo sapiens; identical to SEQ ID NO: 39949

SEQ ID NO: 39998 - DNA, 201 bp, Homo sapiens
cctgcattccccacacagcacccacaatcagccactgcgggcgaggagggcacgaggccaggttcccaagagctcaggaacatggagctgatccaggacayctcccgcccgccactggagtacgtgaagggggtcccgctcatcaagtactttgcagaggcactggggcccctgcagagcttccaggcccggcctgatgac

SEQ ID NO: 39999 - DNA, 201 bp, Homo sapiens; identical to SEQ ID NO: 39947

SEQ ID NO: 40000 - DNA, 201 bp, Homo sapiens; identical to SEQ ID NO: 39924

SEQ ID NO: 40001 - DNA, 201 bp, Homo sapiens; identical to SEQ ID NO: 39926

SEQ ID NO: 40002 - DNA, 201 bp, Homo sapiens
cttccggaagcaaatctaagtccagccccggctccagatccctcccacagtggacctaggaaaccctcagctcagagaacaaccctgcattccccacacarcacccacaatcagccactgcgggcgaggagggcacgaggccaggttcccaagagctcaggaacatggagctgatccaggacacctcccgcccgccactgg

SEQ ID NO: 40003 - DNA, 201 bp, Homo sapiens; identical to SEQ ID NO: 39950

SEQ ID NO: 40004 - DNA, 201 bp, Homo sapiens; identical to SEQ ID NO: 39927

SEQ ID NO: 40005 - DNA, 201 bp, Homo sapiens; identical to SEQ ID NO: 39928

SEQ ID NO: 40006 - DNA, 201 bp, Homo sapiens; identical to SEQ ID NO: 39929

SEQ ID NO: 40007 - DNA, 201 bp, Homo sapiens; identical to SEQ ID NO: 39930

SEQ ID NO: 40008 - DNA, 201 bp, Homo sapiens; identical to SEQ ID NO: 39951

SEQ ID NO: 40009 - DNA, 201 bp, Homo sapiens; identical to SEQ ID NO: 39931

SEQ ID NO: 40010 - DNA, 201 bp, Homo sapiens; identical to SEQ ID NO: 39932

SEQ ID NO: 40011 - DNA, 201 bp, Homo sapiens; identical to SEQ ID NO: 39933

SEQ ID NO: 40012 - DNA, 201 bp, Homo sapiens; identical to SEQ ID NO: 39935

SEQ ID NO: 40013 - DNA, 201 bp, Homo sapiens; identical to SEQ ID NO: 39937

SEQ ID NO: 40014 - DNA, 201 bp, Homo sapiens; identical to SEQ ID NO: 39938

SEQ ID NO: 40015 - DNA, 201 bp, Homo sapiens; identical to SEQ ID NO: 39939

SEQ ID NO: 40016 - DNA, 201 bp, Homo sapiens; identical to SEQ ID NO: 39941

SEQ ID NO: 40017 - DNA, 201 bp, Homo sapiens; identical to SEQ ID NO: 39921

SEQ ID NO: 40018 - DNA, 201 bp, Homo sapiens; identical to SEQ ID NO: 39940

SEQ ID NO: 40019 - DNA, 201 bp, Homo sapiens; identical to SEQ ID NO: 39943

SEQ ID NO: 40020 - DNA, 201 bp, Homo sapiens; identical to SEQ ID NO: 39942

SEQ ID NO: 40021 - DNA, 201 bp, Homo sapiens; identical to SEQ ID NO: 39922

SEQ ID NO: 40022 - DNA, 201 bp, Homo sapiens; identical to SEQ ID NO: 39944

SEQ ID NO: 40023 - DNA, 201 bp, Homo sapiens; identical to SEQ ID NO: 39994

SEQ ID NO: 40024 - DNA, 201 bp, Homo sapiens; identical to SEQ ID NO: 39995

SEQ ID NO: 40025 - DNA, 201 bp, Homo sapiens; identical to SEQ ID NO: 39923

SEQ ID NO: 40026 - DNA, 201 bp, Homo sapiens; identical to SEQ ID NO: 39998

SEQ ID NO: 40027 - DNA, 201 bp, Homo sapiens; identical to SEQ ID NO: 39949

SEQ ID NO: 40028 - DNA, 201 bp, Homo sapiens; identical to SEQ ID NO: 39947

SEQ ID NO: 40029 - DNA, 201 bp, Homo sapiens; identical to SEQ ID NO: 39924

SEQ ID NO: 40030 - DNA, 201 bp, Homo sapiens; identical to SEQ ID NO: 39926

SEQ ID NO: 40031 - DNA, 201 bp, Homo sapiens; identical to SEQ ID NO: 40002

SEQ ID NO: 40032 - DNA, 201 bp, Homo sapiens; identical to SEQ ID NO: 39950

SEQ ID NO: 40033 - DNA, 201 bp, Homo sapiens; identical to SEQ ID NO: 39927

SEQ ID NO: 40034 - DNA, 201 bp, Homo sapiens; identical to SEQ ID NO: 39951

SEQ ID NO: 40035 - DNA, 201 bp, Homo sapiens; identical to SEQ ID NO: 39931

SEQ ID NO: 40036 - DNA, 201 bp, Homo sapiens; identical to SEQ ID NO: 39932

SEQ ID NO: 40037 - DNA, 201 bp, Homo sapiens; identical to SEQ ID NO: 39933

SEQ ID NO: 40038 - DNA, 201 bp, Homo sapiens; identical to SEQ ID NO: 39935

SEQ ID NO: 40039 - DNA, 201 bp, Homo sapiens; identical to SEQ ID NO: 39938

SEQ ID NO: 40040 - DNA, 201 bp, Homo sapiens; identical to SEQ ID NO: 39939

SEQ ID NO: 40041 - DNA, 201 bp, Homo sapiens; identical to SEQ ID NO: 39941

SEQ ID NO: 40042 - DNA, 201 bp, Homo sapiens; identical to SEQ ID NO: 39921

SEQ ID NO: 40043 - DNA, 201 bp, Homo sapiens; identical to SEQ ID NO: 39940

SEQ ID NO: 40044 - DNA, 201 bp, Homo sapiens; identical to SEQ ID NO: 39943

SEQ ID NO: 40045 - DNA, 201 bp, Homo sapiens; identical to SEQ ID NO: 39942

SEQ ID NO: 40046 - DNA, 201 bp, Homo sapiens; identical to SEQ ID NO: 39922

SEQ ID NO: 40047 - DNA, 201 bp, Homo sapiens; identical to SEQ ID NO: 39944

SEQ ID NO: 40048 - DNA, 201 bp, Homo sapiens; identical to SEQ ID NO: 39946

SEQ ID NO: 40049 - DNA, 201 bp, Homo sapiens
gcacactaaggaggcacccacaatcagccactgcgggcgaggagggcacgaggccaggttcccaagagctcaggaacatggagctgatccaggacacctcycgcccgccactggagtacgtgaagggggtcccgctcatcaagtactttgcagaggcactggggcccctgcagagcttccaggcccggcctgatgacctgc

SEQ ID NO: 40050 - DNA, 201 bp, Homo sapiens
atgcaaactcagtcgtggctttggagatcactttaagcttgtctccagctggcacactaaggaggcacccacaatcagccactgcgggcgaggagggcacraggccaggttcccaagagctcaggaacatggagctgatccaggacacctcccgcccgccactggagtacgtgaagggggtcccgctcatcaagtactttg

SEQ ID NO: 40051 - DNA, 201 bp, Homo sapiens; identical to SEQ ID NO: 39923

SEQ ID NO: 40052 - DNA, 201 bp, Homo sapiens; identical to SEQ ID NO: 39949

SEQ ID NO: 40053 - DNA, 201 bp, Homo sapiens
gctggcacactaaggaggcacccacaatcagccactgcgggcgaggagggcacgaggccaggttcccaagagctcaggaacatggagctgatccaggacayctcccgcccgccactggagtacgtgaagggggtcccgctcatcaagtactttgcagaggcactggggcccctgcagagcttccaggcccggcctgatgac

SEQ ID NO: 40054 - DNA, 201 bp, Homo sapiens; identical to SEQ ID NO: 39947

SEQ ID NO: 40055 - DNA, 201 bp, Homo sapiens; identical to SEQ ID NO: 39924

SEQ ID NO: 40056 - DNA, 201 bp, Homo sapiens; identical to SEQ ID NO: 39926

SEQ ID NO: 40057 - DNA, 201 bp, Homo sapiens
cactttaagcttgtctccagctggcacactaaggaggcacccacaatcagccactgcgggcgaggagggcacgaggccaggttcccaagagctcaggaacrtggagctgatccaggacacctcccgcccgccactggagtacgtgaagggggtcccgctcatcaagtactttgcagaggcactggggcccctgcagagctt

SEQ ID NO: 40058 - DNA, 201 bp, Homo sapiens; identical to SEQ ID NO: 39950

SEQ ID NO: 40059 - DNA, 201 bp, Homo sapiens; identical to SEQ ID NO: 39927

SEQ ID NO: 40060 - DNA, 201 bp, Homo sapiens; identical to SEQ ID NO: 39928

SEQ ID NO: 40061 - DNA, 201 bp, Homo sapiens; identical to SEQ ID NO: 39929

SEQ ID NO: 40062 - DNA, 201 bp, Homo sapiens; identical to SEQ ID NO: 39930

SEQ ID NO: 40063 - DNA, 201 bp, Homo sapiens; identical to SEQ ID NO: 39951

SEQ ID NO: 40064 - DNA, 201 bp, Homo sapiens; identical to SEQ ID NO: 39931

SEQ ID NO: 40065 - DNA, 201 bp, Homo sapiens; identical to SEQ ID NO: 39932

SEQ ID NO: 40066 - DNA, 201 bp, Homo sapiens; identical to SEQ ID NO: 39933

SEQ ID NO: 40067 - DNA, 201 bp, Homo sapiens; identical to SEQ ID NO: 39935

SEQ ID NO: 40068 - DNA, 201 bp, Homo sapiens; identical to SEQ ID NO: 39937

SEQ ID NO: 40069 - DNA, 201 bp, Homo sapiens; identical to SEQ ID NO: 39938

SEQ ID NO: 40070 - DNA, 201 bp, Homo sapiens; identical to SEQ ID NO: 39939

SEQ ID NO: 40071 - DNA, 201 bp, Homo sapiens
gcattctccagggaaaggatgacatatttttggacctgaaacagaaattctggaacacctatatggtggtctatgttgcccgcaacgcaaaggatgtggcrgtttcctactaccacttctaccacatggccaaggtgcaccctgagcctgggacctgggacagcttcctggagaagttcatggtcggagaagtgtcctacg

SEQ ID NO: 40072 - DNA, 201 bp, Homo sapiens; identical to SEQ ID NO: 39921

SEQ ID NO: 40073 - DNA, 201 bp, Homo sapiens; identical to SEQ ID NO: 39940

SEQ ID NO: 40074 - DNA, 201 bp, Homo sapiens
aattctggaacacctatatggtggtctatgttgcccgcaacgcaaaggatgtggcagtttcctactaccacttctaccacatggccaaggtgcaccctgascctgggacctgggacagcttcctggagaagttcatggtcggagaagtgtcctacggatcctggtaccagcacgtgcaggagtggtgggagctgagccgca

SEQ ID NO: 40075 - DNA, 201 bp, Homo sapiens; identical to SEQ ID NO: 39942

SEQ ID NO: 40076 - DNA, 201 bp, Homo sapiens; identical to SEQ ID NO: 39922

SEQ ID NO: 40077 - DNA, 201 bp, Homo sapiens; identical to SEQ ID NO: 39944

SEQ ID NO: 40078 - DNA, 201 bp, Homo sapiens; identical to SEQ ID NO: 39923

SEQ ID NO: 40079 - DNA, 201 bp, Homo sapiens; identical to SEQ ID NO: 39949

SEQ ID NO: 40080 - DNA, 201 bp, Homo sapiens; identical to SEQ ID NO: 39947

SEQ ID NO: 40081 - DNA, 201 bp, Homo sapiens; identical to SEQ ID NO: 39924

SEQ ID NO: 40082 - DNA, 201 bp, Homo sapiens
gaaacagaaattctggaacacctatatggtggtctatgttgcccgcaacgcaaaggatgtggcagtttcctactaccacttctaccacatggccaaggtgyaccctgagcctgggacctgggacagcttcctggagaagttcatggtcggagaagtgtcctacggatcctggtaccagcacgtgcaggagtggtgggagct

SEQ ID NO: 40083 - DNA, 201 bp, Homo sapiens
acctgaaacagaaattctggaacacctatatggtggtctatgttgcccgcaacgcaaaggatgtggcagtttcctactaccacttctaccacatggccaargtgcaccctgagcctgggacctgggacagcttcctggagaagttcatggtcggagaagtgtcctacggatcctggtaccagcacgtgcaggagtggtggg

SEQ ID NO: 40084 - DNA, 201 bp, Homo sapiens
gaaattctggaacacctatatggtggtctatgttgcccgcaacgcaaaggatgtggcagtttcctactaccacttctaccacatggccaaggtgcaccctsagcctgggacctgggacagcttcctggagaagttcatggtcggagaagtgtcctacggatcctggtaccagcacgtgcaggagtggtgggagctgagccg

SEQ ID NO: 40085 - DNA, 201 bp, Homo sapiens; identical to SEQ ID NO: 39951

SEQ ID NO: 40086 - DNA, 201 bp, Homo sapiens; identical to SEQ ID NO: 39931

SEQ ID NO: 40087 - DNA, 201 bp, Homo sapiens; identical to SEQ ID NO: 39932

SEQ ID NO: 40088 - DNA, 201 bp, Homo sapiens; identical to SEQ ID NO: 39933

SEQ ID NO: 40089 - DNA, 201 bp, Homo sapiens; identical to SEQ ID NO: 39935

SEQ ID NO: 40090 - DNA, 201 bp, Homo sapiens
ggagcagccaggctcagtttgtggcagaatcacacattattctggtactgaatgccgctatcaccatggggatggttcttctaaatgaagcagcaacttcraaaggcgatgttggaaaaagacggataatttgcctagtgggattgggcctggtggtcttcttcttcagttttctactttcaatatttcgttccaagtacc

SEQ ID NO: 40091 - DNA, 201 bp, Homo sapiens
aactgtgggttttcctagtaaatttaatttacagaaatcaatggtagcatttagtaatctacaaaggaaatatcaaagtgtttttcaagcctgttatattsagtgtgtgccacaggattgaaataaatgacaatgtaattatgaattcatgttttagagctgtttactcattagtaaaggaccgcaatgttagtaaagaaa

SEQ ID NO: 40092 - DNA, 201 bp, Homo sapiens
gaatgattcaatgaagctttcttgaaaacaaacataggagtgtaatgtactattatgtttgtatcctgttttagtttataaagcactttcacatacattayggtatttcttcctcacaataaccttgtaaattagtcaggaaatgtaaattttatctgactcatagaactaatggaagctgaaagccaaaaataaagttta

SEQ ID NO: 40093 - DNA, 201 bp, Homo sapiens
agcaaacttaacacactatccattttcgagcaaacttaacccactatatccattttgctcatgtgttttatgcaaccagctttccatcaaatcctcaatcyttgaatccaggtaaaaggttaattatcctaggattagtgaatgattcaatgaagctttcttgaaaacaaacataggagtgtaatgtactattatgtttgt

SEQ ID NO: 40094 - DNA, 201 bp, Homo sapiens
ataaccaggccttcaaactctcaaacatggatttttatattctgtggagttatccaaattaattagggtttaggaaagcagttcttcttgagtcagttcartaagtgtttgctttttgtttttaaggtttgttatctaattttcattaagatttgagtaacagaccatggagaattgttttcattgggagttccagctata

SEQ ID NO: 40095 - DNA, 201 bp, Homo sapiens
tcgagcaaacttaacccactatatccattttgctcatgtgttttatgcaaccagctttccatcaaatcctcaatccttgaatccaggtaaaaggttaattwtcctaggattagtgaatgattcaatgaagctttcttgaaaacaaacataggagtgtaatgtactattatgtttgtatcctgttttagtttataaagcact

SEQ ID NO: 40096 - DNA, 201 bp, Homo sapiens
atgacaatgtaattatgaattcatgttttagagctgtttactcattagtaaaggaccgcaatgttagtaaagaaaacctatgaaatgtatgttaaagattyttagtattgtacagggataaagcaaatgcatgaaaatatgtcatgtactgaaaattaaacttacttcagtttcagttataaaggacgtgcactgttacga

SEQ ID NO: 40097 - DNA, 201 bp, Homo sapiens
ataccacaactaggagttatttctcaaacttaaatgtcctctgggaatccagacttaaaaataagagcaaacttaacacactatccattttcgagcaaacytaacccactatatccattttgctcatgtgttttatgcaaccagctttccatcaaatcctcaatccttgaatccaggtaaaaggttaattatcctaggatt

SEQ ID NO: 40098 - DNA, 201 bp, Homo sapiens; identical to SEQ ID NO: 40090

SEQ ID NO: 40099 - DNA, 201 bp, Homo sapiens; identical to SEQ ID NO: 40091

SEQ ID NO: 40100 - DNA, 201 bp, Homo sapiens; identical to SEQ ID NO: 40092

SEQ ID NO: 40101 - DNA, 201 bp, Homo sapiens; identical to SEQ ID NO: 40093

SEQ ID NO: 40102 - DNA, 201 bp, Homo sapiens; identical to SEQ ID NO: 40094

SEQ ID NO: 40103 - DNA, 201 bp, Homo sapiens; identical to SEQ ID NO: 40095

SEQ ID NO: 40104 - DNA, 201 bp, Homo sapiens; identical to SEQ ID NO: 40096

SEQ ID NO: 40105 - DNA, 201 bp, Homo sapiens; identical to SEQ ID NO: 40097

SEQ ID NO: 40106 - DNA, 201 bp, Homo sapiens
ctggaggagctttatttgtgcacagagatactcctgagaataaccctgatactccatttgatttcacaccagaaaactataagaggatagaggcaattgtwaaaaactatccagaaggccataaagcagcagctgttcttccagtcctggatttagcccaaaggcagaatgggtggttgcccatctctgctatgaacaagg

SEQ ID NO: 40107 - DNA, 201 bp, Homo sapiens
tttggtgtacaagcaggcctttaatttatattgaactgtaaatatgtcactagagaaataaaatatggacttccaatctacgtaaacttatttgtttattstgctctgtgtacatcctcatgctaaccgtagcaacttgcagctctaagtattatgtcataatgacagaggaccattttaaagtcttctatctatggctgt

SEQ ID NO: 40108 - DNA, 201 bp, Homo sapiens
tctatggctgtgaagacatcattatataatctagttaacagttactctagtgtcacccattttcaatttccagatcgcttttatcaagatcaggttactgkgaagtaaaaatttggttaaattacaaatgttttgctttcccatctttagccacagccaagttttaagttaacatgatctttctataaactttgtcagtgc

SEQ ID NO: 40109 - DNA, 201 bp, Homo sapiens
aacttatttgtttattctgctctgtgtacatcctcatgctaaccgtagcaacttgcagctctaagtattatgtcataatgacagaggaccattttaaagtsttctatctatggctgtgaagacatcattatataatctagttaacagttactctagtgtcacccattttcaatttccagatcgcttttatcaagatcaggt

SEQ ID NO: 40110 - DNA, 201 bp, Homo sapiens
acagtgtggcccgccatgttcttctccgcggcgctccgggcccgggcggctggcctcaccgcccactggggaagacatgtaaggaatttgcataagacagytatgcaaaatggagctggaggagctttatttgtgcacagagatactcctgagaataaccctgatactccatttgatttcacaccagaaaactataagagg

SEQ ID NO: 40111 - DNA, 201 bp, Homo sapiens
gtgggaagagtttttatatgggaaagcggataaaactttcattggactggaatgtttggagaatgttaatttccaaatcaggaaccacaaactgccctctrataagacatcggctatctaagcttgtgggtgctccctttctgccagcagttctggttcttaagaaaatcgccatcaatcagacatgaaaactctggctcc

SEQ ID NO: 40112 - DNA, 201 bp, Homo sapiens
tacgaagagcacttggagatggcaatgctgaacctcacactgtaggactcacacacgactccaacgggattgtgagaatcaagtcactctcgtgggaagartttttatatgggaaagcggataaaactttcattggactggaatgtttggagaatgttaatttccaaatcaggaaccacaaactgccctctgataagacat

SEQ ID NO: 40113 - DNA, 201 bp, Homo sapiens
ctgtttccctacgaagagcacttggagatggcaatgctgaacctcacactgtaggactcacacacgactccaacgggattgtgagaatcaagtcactctcrtgggaagagtttttatatgggaaagcggataaaactttcattggactggaatgtttggagaatgttaatttccaaatcaggaaccacaaactgccctctg

SEQ ID NO: 40114 - DNA, 201 bp, Homo sapiens
ttaggaacacggcagaaaggtgacacctggagaccaaacgcaggatgaggagtactgcagaggtcacagggaagtcacagaacagtaatacgctagcaggrgcatggggcgtgaagaacagaagaagagaggaagtgtttccgagcctccagaaaagaaatcagagccaagcacagcttcccgggtcacagaaccaattca

SEQ ID NO: 40115 - DNA, 201 bp, Homo sapiens
cgtcatgaccagaaactgtttccctacgaagagcacttggagatggcaatgctgaacctcacactgtaggactcacacacgactccaacgggattgtgagratcaagtcactctcgtgggaagagtttttatatgggaaagcggataaaactttcattggactggaatgtttggagaatgttaatttccaaatcaggaacc

SEQ ID NO: 40116 - DNA, 201 bp, Homo sapiens
gcagcaggtgcttttttcaagacaggaatcaaaatgttaggaacacggcagaaaggtgacacctggagaccaaacgcaggatgaggagtactgcagaggtyacagggaagtcacagaacagtaatacgctagcaggggcatggggcgtgaagaacagaagaagagaggaagtgtttccgagcctccagaaaagaaatcaga

SEQ ID NO: 40117 - DNA, 201 bp, Homo sapiens
cctcgtcatgaccagaaactgtttccctacgaagagcacttggagatggcaatgctgaacctcacactgtaggactcacacacgactccaacgggattgtkagaatcaagtcactctcgtgggaagagtttttatatgggaaagcggataaaactttcattggactggaatgtttggagaatgttaatttccaaatcagga

SEQ ID NO: 40118 - DNA, 185 bp, Homo sapiens
cctagcagccccacacaatacgctcatgtcctgtccccaaacactgccatcttcaaacacatgtcctctgtttccaggccgggcygggatcagatgggaagtggaacctcgtcatgaccagaaactgtttccctacgaagagcacttggagatggcaatgctgaacctcacactgtaggactcac

SEQ ID NO: 40119 - DNA, 201 bp, Homo sapiens
ttccaaatcaggaaccacaaactgccctctgataagacatcggctatctaagcttgtgggtgctccctttctgccagcagttctggttcttaagaaaatcrccatcaatcagacatgaaaactctggctccaaaaatagcattttctttgtgcaaataaaaacgtgtgtatcaagtatgatgacacactcggttcttcaca

SEQ ID NO: 40120 - DNA, 201 bp, Homo sapiens; identical to SEQ ID NO: 40111

SEQ ID NO: 40121 - DNA, 201 bp, Homo sapiens; identical to SEQ ID NO: 40112

SEQ ID NO: 40122 - DNA, 201 bp, Homo sapiens; identical to SEQ ID NO: 40113

SEQ ID NO: 40123 - DNA, 201 bp, Homo sapiens; identical to SEQ ID NO: 40114

SEQ ID NO: 40124 - DNA, 201 bp, Homo sapiens; identical to SEQ ID NO: 40115

SEQ ID NO: 40125 - DNA, 201 bp, Homo sapiens; identical to SEQ ID NO: 40116

SEQ ID NO: 40126 - DNA, 201 bp, Homo sapiens; identical to SEQ ID NO: 40117

SEQ ID NO: 40127 - DNA, 185 bp, Homo sapiens; identical to SEQ ID NO: 40118

SEQ ID NO: 40128 - DNA, 201 bp, Homo sapiens
ttccaaatcaggaaccacaaactgccctctgataagacatcggctatctaagcttgtgggtgctccctttctgccagcagttctggttcttaagaaaatcrccatcaatcagacatgaaaactctggctccaaaaatagcattttctttgtgcaaataaaaacgtgtgtatcaagtatgatgttcccccatccctggacac

SEQ ID NO: 40129 - DNA, 201 bp, Homo sapiens
gcaacaacccaacagctgcctactgtgctcccatccctcaagacctgtcatctctcttgtcccaggcagtgagcacaggtgtgtggagatcgtccacctcytccaccaaagggatgacacggtgagggtggaccctgagctgcaggcctgggatcaggagatcatggaggtggggctgtgccaggcccaggaccgaggccc

SEQ ID NO: 40130 - DNA, 201 bp, Homo sapiens
  misc_feature (1)...(201): n = A,T,C or G
aggcagtgagcacaggtgtgtggagatcgtccacctcttccaccaaagggatgacacggtgagggtggaccctgagctgcaggcctgggatcaggagatcntggaggtggggctgtgccaggcccaggaccgaggccctgagcccaaagctgtgctgagacaatttcaaacagatctggacaacctggaaagggaaattgt

SEQ ID NO: 40131 - DNA, 201 bp, Homo sapiens
tctttccatggagttttccaggttcaagccaacatatactgaaagcattgggcagatgtcacagaaagaggaggagaggtgtgtggagatcgtccacctcytccaccaaagggatgacacggtgagggtggaccctgagctgcaggcctgggatcaggagatcatggaggtggggctgtgccaggcccaggaccgaggttt

SEQ ID NO: 40132 - DNA, 201 bp, Homo sapiens
atgggtaggaggttcagttcggggaacaccctgcagcccgaggaggaagaacggaacacggacttgctaaaactcccctgggatttgaggaggaagcctgrcgtggaaagagtgggaggggcacatgaacatcagactcagggaagccctgtgaggggcccgcctgcagtagatactcctatagccaggcctctggagatg

SEQ ID NO: 40133 - DNA, 201 bp, Homo sapiens
agaaattggccccaaacgtgaccctgcgaccctgaagctgttcctgagtaacatggagcggctgctgcatgccaaggcgcatgggtaggaggttcagttcrgggaacaccctgcagcccgaggaggaagaacggaacacggacttgctaaaactcccctgggatttgaggaggaagcctggcgtggaaagagtgggagggg

SEQ ID NO: 40134 - DNA, 201 bp, Homo sapiens
aatcctctttgtctcttgccttcccagtagggctgtgctgtgagccctagccatgtgagaccactgacacttaatgtcacgttcagtagaggaggattcarttctctggttgctgcatctcaggtgctcagtagctaggtcagctgggagctgtcatggcacaaggcatttgcgtctggcggaggcctgttggttggtggc

SEQ ID NO: 40135 - DNA, 201 bp, Homo sapiens
tttggcagaagtgctgtgcttcatttttcactagggaaaatgcccagccggggtacctggctgaagtcggcttgcacaccacagaaaaggctccactcccrcctgcatctgtcctcccttccctctccccagggtccgagtgattggaagctccacattggcactctgccacctggcctcaggggccgcggatgcctatta

SEQ ID NO: 40136 - DNA, 201 bp, Homo sapiens
gacagaaacagatcaccttgtggaagatttaattatttctgagttgcgagagaggtttccttcacacaggttcattgcagaagaggccgcggcttctgggrccaagtgtgtgctcacccacagcccgacgtggatcatcgaccccatcgacggcacctgcaattttgtgcacagcttgaattcggagtgatttaccactgc

SEQ ID NO: 40137 - DNA, 201 bp, Homo sapiens
cagatcttgtgacagaaacagatcaccttgtggaagatttaattatttctgagttgcgagagaggtttccttcacacaggttcattgcagaagaggccgcrgcttctggggccaagtgtgtgctcacccacagcccgacgtggatcatcgaccccatcgacggcacctgcaattttgtgcacagcttgaattcggagtgat

SEQ ID NO: 40138 - DNA, 201 bp, Homo sapiens
catcgaccccatcgacggcacctgcaattttgtgcacagcttgaattcggagtgatttaccactgcacagaggagcggctgtacacgggccggcggggtcrgggcgccttctgcaatggccagcggctccgggtctccggggagacagatctctcaaaggccttggttctgacagaaattggccccaaacgtgaccctgcg

SEQ ID NO: 40139 - DNA, 201 bp, Homo sapiens
aacggaacacggacttgctaaaactcccctgggatttgaggaggaagcctggcgtggaaagagtgggaggggcacatgaacatcagactcagggaagcccygtgaggggcccgcctgcagtagatactcctatagccaggcctctggagatgcgtgggcacctgtgttgcttctgatcagaatccatggaactgacctcat

SEQ ID NO: 40140 - DNA, 201 bp, Homo sapiens
gggtaggaggttcagttcggggaacaccctgcagcccgaggaggaagaacggaacacggacttgctaaaactcccctgggatttgaggaggaagcctggcrtggaaagagtgggaggggcacatgaacatcagactcagggaagccctgtgaggggcccgcctgcagtagatactcctatagccaggcctctggagatgcg

SEQ ID NO: 40141 - DNA, 201 bp, Homo sapiens
atggccagcggctccgggtctccggggagacagatctctcaaaggccttggttctgacagaaattggccccaaacgtgaccctgcgaccctgaagctgttyctgagtaacatggagcggctgctgcatgccaaggcgcatgggtaggaggttcagttcggggaacaccctgcagcccgaggaggaagaacggaacacggac

SEQ ID NO: 40142 - DNA, 201 bp, Homo sapiens
cagatcttgtgacagaaacagatcaccttgtggaagatttaattatttctgagttgcgagagaggtttccttcacacaggttcattgcagaagaggccgcrgcttctggggccaagtgtgtgctcacccacagcccgacgtggatcatcgaccccatcgacggcacctgcaattttgtgcacagattcccgactgtggcgg

SEQ ID NO: 40143 - DNA, 201 bp, Homo sapiens
actgtggcggttagcattggatttgctgttcgacaagagcttgaattcggagtgatttaccactgcacagaggagcggctgtacacgggccggcggggtcrgggcgccttctgcaatggccagcggctccgggtctccggggagacagatctctcaaaggccttggttctgacagaaattggccccaaacgtgaccctgcg

SEQ ID NO: 40144 - DNA, 201 bp, Homo sapiens
gacagaaacagatcaccttgtggaagatttaattatttctgagttgcgagagaggtttccttcacacaggttcattgcagaagaggccgcggcttctgggrccaagtgtgtgctcacccacagcccgacgtggatcatcgaccccatcgacggcacctgcaattttgtgcacagattcccgactgtggcggttagcattgg

SEQ ID NO: 40145 - DNA, 201 bp, Homo sapiens
atggccagcggctccgggtctccggggagacagatctctcaaaggccttggttctgacagaaattggccccaaacgtgaccctgcgaccctgaagctgttyctgagtaacatggagcggctgctgcatgccaaggcgcatggggtccgagtgattggaagctccacattggcactctgccacctggcctcaggggccgcgg

SEQ ID NO: 40146 - DNA, 201 bp, Homo sapiens
tcttgtgacagaaacagatcaccttgtggaagatttaattatttctgagttgcgagagaggtttccttcacacaggtaggttcattgcagaagaggccgcrgcttctggggccaagtgtgtgctcacccacagcccgacgtggatcatcgaccccatcgacggcacctgcaattttgtgcacagattcccgactgtggcgg

SEQ ID NO: 40147 - DNA, 201 bp, Homo sapiens; identical to SEQ ID NO: 40143

SEQ ID NO: 40148 - DNA, 201 bp, Homo sapiens
gaaacagatcaccttgtggaagatttaattatttctgagttgcgagagaggtttccttcacacaggtaggttcattgcagaagaggccgcggcttctgggrccaagtgtgtgctcacccacagcccgacgtggatcatcgaccccatcgacggcacctgcaattttgtgcacagattcccgactgtggcggttagcattgg

SEQ ID NO: 40149 - DNA, 201 bp, Homo sapiens; identical to SEQ ID NO: 40145

SEQ ID NO: 40150 - DNA, 201 bp, Homo sapiens
gggccgatgtgtagttggtgactgcctctccagatgctgaggtgcctgtatcattggcacaggccagtgctgaaccgtaggtggagtaggctgtgccttcygaagcagtatctattcacaatgaagttgcagtctcccgaattccagtcacttttcacagaaggactgaagagtctgacagaattatttgtcaaagagaat

SEQ ID NO: 40151 - DNA, 201 bp, Homo sapiens
tttctgccagtcataacatctttgtactctatgagcaaatagtaattttggaccttgataaaacaattttgtagagtgtaatatttctaagaggaaatgtyacaggggctatgatgcaagaaagcctcagaaatgactgcatacaggaaataatctcatcatttccaaagatgtcttcatgtcccatcaatgacatgctac

SEQ ID NO: 40152 - DNA, 201 bp, Homo sapiens
aaaatgttgatggtttttcaccaaagccagtgactcttttggcctcattattcaaagtacaagatgatgtcacaaaattggatttgaggttgaagatcgcraaagaggagaaaaaccttggcttatttatagttaaaaataggaaagatttaattaaagcaacagatagttcagacccattgaaaccctatcaagacttca

SEQ ID NO: 40153 - DNA, 201 bp, Homo sapiens; identical to SEQ ID NO: 40150

SEQ ID NO: 40154 - DNA, 201 bp, Homo sapiens
ggttgatatttttctgtcacaatgatttctttatgcatgcagagcctgggaaagtcatgggattaacttgagggtcactattgagcctattaattaattaattattgttttaataaaacaaacattggtattggaagataaatatgtttatgtggtatctgacaatgtgtattaggtgtcatatacaatggtaatatgcct

SEQ ID NO: 40155 - DNA, 201 bp, Homo sapiens
gttgatatttttctgtcacaatgatttctttatgcatgcagagcctgggaaagtcatgggattaacttgagggtcactattgagcctattaattaattaattattgttttaataaaacaaacattggtattggaagataaatatgtttatgtggtatctgacaatgtgtattaggtgtcatatacaatggtaatatgcctg

SEQ ID NO: 40156 - DNA, 146 bp, Homo sapiens
gtgtagccagtcataacatctttgtactctatgagcaaatagtaattttggaccttgataaaacaattttgtagagtgtaatatttctaagaggaaatgtyacaggggctatgatgcaagaaagcctcagaaatgactgcatacag

SEQ ID NO: 40157 - DNA, 201 bp, Homo sapiens
ttgatatttttctgtcacaatgatttctttatgcatgcagagcctgggaaagtcatgggattaacttgagggtcactattgagcctattaattaattaattattgttttaataaaacaaacattggtattggaagataaatatgtttatgtggtatctgacaatgtgtattaggtgtcatatacaatggtaatatgcctgt

SEQ ID NO: 40158 - DNA, 201 bp, Homo sapiens; identical to SEQ ID NO: 40152

SEQ ID NO: 40159 - DNA, 201 bp, Homo sapiens
tggcattcatatgtacaggatttgttctagcaagctatgcttcagtatgtggttgatatttttctgtcacaatgatttctttatgcatgcagagcctgggraagtcatgggattaacttgagggtcactattgagcctattaattaattaattattgttttaataaaacaaacattggtattggaagataaatatgtttat

SEQ ID NO: 40160 - DNA, 195 bp, Homo sapiens
atgtgtagttggtgactgcctctccagatgctgaggtgcctgtatcattggcacaggccagtgctgaaccgtaggtggagtaggctgtgccttcygaagcagtatctattcacaatgaagttgcagtctcccgaattccagtcacttttcacagaaggactgaagagtctgacagaattatttgtcaaagagaat

SEQ ID NO: 40161 - DNA, 201 bp, Homo sapiens; identical to SEQ ID NO: 40151

SEQ ID NO: 40162 - DNA, 201 bp, Homo sapiens; identical to SEQ ID NO: 40152

SEQ ID NO: 40163 - DNA, 201 bp, Homo sapiens; identical to SEQ ID NO: 40150

SEQ ID NO: 40164 - DNA, 201 bp, Homo sapiens; identical to SEQ ID NO: 40154

SEQ ID NO: 40165 - DNA, 201 bp, Homo sapiens; identical to SEQ ID NO: 40155

SEQ ID NO: 40166 - DNA, 201 bp, Homo sapiens
gtgtagccagtcataacatctttgtactctatgagcaaatagtaattttggaccttgataaaacaattttgtagagtgtaatatttctaagaggaaatgtyacaggggctatgatgcaagaaagcctcagaaatgactgcatacaggaaataatctcatcatttccaaagatgtcttcatgtcccatcaatgacatgctac

SEQ ID NO: 40167 - DNA, 201 bp, Homo sapiens; identical to SEQ ID NO: 40157

SEQ ID NO: 40168 - DNA, 201 bp, Homo sapiens; identical to SEQ ID NO: 40152

SEQ ID NO: 40169 - DNA, 201 bp, Homo sapiens; identical to SEQ ID NO: 40159

SEQ ID NO: 40170 - DNA, 201 bp, Homo sapiens
agatactggcagagctgccaagttaatacagagagctgaagaaatgaagagtggactgaaagatttcaaaacatttttgacaaatgatcaaacaaaagtcrctgaggaagaaaataagggttcaggtacaggtgcggccggtgcctcagacacaacaataaaacccaatcctgaaaacactgggcccacattagaatggga

SEQ ID NO: 40171 - DNA, 201 bp, Homo sapiens
ataaacactctaagagcccaggaaaaacatggccttcaacctgctctgcttgtacattgggcagaatgccttcagaaaacgggcagcggtcttaattcttyttatgatcaacgagaatacatagggagaagtgttcattattggaagaaagttttgccattgttgaagataataaaaaagaagaacagtattcctgaacct

SEQ ID NO: 40172 - DNA, 201 bp, Homo sapiens
tgatgctctgttttctagtcagtcacctaaggatacatcttttcttggtagcgatgatattggaaacattgatgtacgagaaccagagcttgaagatttgrctagatacgatgttggtgctattcgagcacataatggtagtcttcagcaccttacttggcttggcttacagtggaattcattgcctgctttacctggaat

SEQ ID NO: 40173 - DNA, 201 bp, Homo sapiens
aaaagcgggcagtctgcattatatgatgctctgttttctagtcagtcacctaaggatacatcttttcttggtagcgatgatattggaaacattgatgtacragaaccagagcttgaagatttgactagatacgatgttggtgctattcgagcacataatggtagtcttcagcaccttacttggcttggcttacagtggaat

SEQ ID NO: 40174 - DNA, 201 bp, Homo sapiens
acaggatttaacttcagttttaaatctgctttgagtccatctaagtctcctgccaagttgaatcagagtgggacttcagttggcactgatgaagaatctgwtgttactcaagaagaagagagagatggacagtactttgaacctgttgttcctttacctgatctagttgaagtatccagtggtgaggaaaataagcaagtt

SEQ ID NO: 40175 - DNA, 201 bp, Homo sapiens
agaaagaccagggactacctaataaagattatagatgacagtgattcaaatctttcagtggtcaagaaattgcctgtgcccctggagtctgtaaaagagakgcttaattcagtcatgcaggaactcgaagactatagtgaaggaggtcctctctataaaaatggttctttgcgaaatgcagattcagaaataaaacattct

SEQ ID NO: 40176 - DNA, 201 bp, Homo sapiens
tgaagcaaaaacagcccaggaaaaagattctttgataacacctcatgtttctcggtcaagcactcccagagagtcaccatgtggcaaaattgctgtagctrtattagaagaaaccacaagagagaggacagatgttattcagggtgatgatgtagcagatgcagcttcagaagttgaagtgtctagcacatctgaaacaac

SEQ ID NO: 40177 - DNA, 201 bp, Homo sapiens
ctttcgttaaagatttgctttatacaagattgttgcagtacctttttctggtaaattttgtagcagaaataaaatgacaattcctaagagccactgacatycaaaaaattcattacttacgcttcgggttcattctaaagtaaggaagacaatttaaaggcagtaaattcaaactgctgcataatttccagagctcctagt

SEQ ID NO: 40178 - DNA, 201 bp, Homo sapiens
tgttgaagataataaaaaagaagaacagtattcctgaacctattgatcctctgtttaaacattttcatagtgtagacattcaggcatcagaaattgttgartatgaagaagacgcacacataacttttgctatattggatgcagtaaatggaaatatagaagatgctgtgactgcttttgaatctataaaaagtgttgttt

SEQ ID NO: 40179 - DNA, 201 bp, Homo sapiens
taaaaaagaagaacagtattcctgaacctattgatcctctgtttaaacattttcatagtgtagacattcaggcatcagaaattgttgaatatgaagaagaygcacacataacttttgctatattggatgcagtaaatggaaatatagaagatgctgtgactgcttttgaatctataaaaagtgttgtttcttattggaatc

SEQ ID NO: 40180 - DNA, 201 bp, Homo sapiens
tcctctgtttaaacattttcatagtgtagacattcaggcatcagaaattgttgaatatgaagaagacgcacacataacttttgctatattggatgcagtamatggaaatatagaagatgctgtgactgcttttgaatctataaaaagtgttgtttcttattggaatcttgcactgatttttcacaggaaggcagaagacat

SEQ ID NO: 40181 - DNA, 201 bp, Homo sapiens
gaaagcaaagtggaacctaaaaaatgtgaactgtcaaagaactctgatatcgaacagtcttcagatagcaaagtcaaaaatctctttgcttcctttccaayggaagaatcttcaatcaactacacatttaaaacaccagaaaaggcaaaagagaagaaaaaacctgaagattctccctcagatgatgatgttctcattgta

SEQ ID NO: 40182 - DNA, 201 bp, Homo sapiens
gatcttgcaaaatcaacttcaggagaaggatttcagtttggcaaaaaagaccccaatttcaagggattttcaggtgctggagaaaaattattctcatcacratacggtaaaatggccaataaagcaaacacttccggtgactttgagaaagatgatgatgcctataagactgaggacagcgatgacatccattttgaacca

SEQ ID NO: 40183 - DNA, 201 bp, Homo sapiens
gcccaggaaaaagattctttgataacacctcatgtttctcggtcaagcactcccagagagtcaccatgtggcaaaattgctgtagctgtattagaagaaaycacaagagagaggacagatgttattcagggtgatgatgtagcagatgcagcttcagaagttgaagtgtctagcacatctgaaacaacaacaaaagcagtg

SEQ ID NO: 40184 - DNA, 201 bp, Homo sapiens
tggacaaaatctgctggaaatgatggcctgtgaccgactgagccaatcagggcacatgttgctaaacttaagtcgtggcaagcaagattttttaaaagagrttgttgaaacttttgccaacaaaagcgggcagtctgcattatatgatgctctgttttctagtcagtcacctaaggatacatcttttcttggtagcgatga

SEQ ID NO: 40185 - DNA, 201 bp, Homo sapiens
gctggacaaaatctgctggaaatgatggcctgtgaccgactgagccaatcagggcacatgttgctaaacttaagtcgtggcaagcaagattttttaaaagwgattgttgaaacttttgccaacaaaagcgggcagtctgcattatatgatgctctgttttctagtcagtcacctaaggatacatcttttcttggtagcgat

SEQ ID NO: 40186 - DNA, 201 bp, Homo sapiens
catttcaggttccaagaccaaagattaaattaataaaaggtgaagctggacaaaatctgctggaaatgatggcctgtgaccgactgagccaatcagggcayatgttgctaaacttaagtcgtggcaagcaagattttttaaaagagattgttgaaacttttgccaacaaaagcgggcagtctgcattatatgatgctctgt

SEQ ID NO: 40187 - DNA, 201 bp, Homo sapiens
ctcccaaaacaccacctcgatgggcagaagatcagaattctttactgaaaatgatttgccaacaagtagaggccattaagttgaaactaaatagcagtaastcagcatcccctcatcgttggcccacagagaattatggaccagactcggtgcctgatggatatcaggggtcacagacatttcatggggctccactaacag

SEQ ID NO: 40188 - DNA, 201 bp, Homo sapiens
tagttcagcatgaaataaacactctaagagcccaggaaaaacatggccttcaacctgctctgcttgtacattgggcagaatgccttcagaaaacgggcagyggtcttaattctttttatgatcaacgagaatacatagggagaagtgttcattattggaagaaagttttgccattgttgaagataataaaaaagaagaaca

SEQ ID NO: 40189 - DNA, 201 bp, Homo sapiens
gcccagagtggatctgaaagcaaagtggaacctaaaaaatgtgaactgtcaaagaactctgatatcgaacagtcttcagatagcaaagtcaaaaatctctytgcttcctttccaacggaagaatcttcaatcaactacacatttaaaacaccagaaaaggcaaaagagaagaaaaaacctgaagattctccctcagatgat

SEQ ID NO: 40190 - DNA, 201 bp, Homo sapiens
ctgccccttcctgtgtgtaaacagctttgtacagaaagacaaaaatcttggtgggatgcggtttgtactctgattcacagaaaagcagtacctggaaacgyagcaaaattgagacttctagttcagcatgaaataaacactctaagagcccaggaaaaacatggccttcaacctgctctgcttgtacattgggcagaatgc

SEQ ID NO: 40191 - DNA, 201 bp, Homo sapiens
tttttagtagtgaaaaatcaaaaccatttgcattcggcaacagttcagccactgggtctttgtttggatttagttttaatgcacctttgaaaagtaacaayagtgaaactagttcagtagcccagagtggatctgaaagcaaagtggaacctaaaaaatgtgaactgtcaaagaactctgatatcgaacagtcttcagata

SEQ ID NO: 40192 - DNA, 201 bp, Homo sapiens
catttttagtagtgaaaaatcaaaaccatttgcattcggcaacagttcagccactgggtctttgtttggatttagttttaatgcacctttgaaaagtaacratagtgaaactagttcagtagcccagagtggatctgaaagcaaagtggaacctaaaaaatgtgaactgtcaaagaactctgatatcgaacagtcttcaga

SEQ ID NO: 40193 - DNA, 201 bp, Homo sapiens
agagtctgttaaaagcatttttagtagtgaaaaatcaaaaccatttgcattcggcaacagttcagccactgggtctttgtttggatttagttttaatgcayctttgaaaagtaacaatagtgaaactagttcagtagcccagagtggatctgaaagcaaagtggaacctaaaaaatgtgaactgtcaaagaactctgatat

SEQ ID NO: 40194 - DNA, 201 bp, Homo sapiens
aaagtttgtatttggttcagagtctgttaaaagcatttttagtagtgaaaaatcaaaaccatttgcattcggcaacagttcagccactgggtctttgtttrgatttagttttaatgcacctttgaaaagtaacaatagtgaaactagttcagtagcccagagtggatctgaaagcaaagtggaacctaaaaaatgtgaact

SEQ ID NO: 40195 - DNA, 201 bp, Homo sapiens
cttgcactgatttttcacaggaaggcagaagacattgaaaatgatgccctttctcctgaagaacaagaagaatgcaaaaattatctgagaaagaccagggrctacctaataaagattatagatgacagtgattcaaatctttcagtggtcaagaaattgcctgtgcccctggagtctgtaaaagagatgcttaattcagtc

SEQ ID NO: 40196 - DNA, 201 bp, Homo sapiens
ctagcacatctgaaacaacaacaaaagcagtggtttctcctccaaagtttgtatttggttcagagtctgttaaaagcatttttagtagtgaaaaatcaaamccatttgcattcggcaacagttcagccactgggtctttgtttggatttagttttaatgcacctttgaaaagtaacaatagtgaaactagttcagtagccc

SEQ ID NO: 40197 - DNA, 201 bp, Homo sapiens
ccacctcgatgggcagaagatcagaattctttactgaaaatgatttgccaacaagtagaggccattaagttgaaactaaatagcagtaactcagcatcccrtcatcgttggcccacagagaattatggaccagactcggtgcctgatggatatcaggggtcacagacatttcatggggctccactaacagttgcaactact

SEQ ID NO: 40198 - DNA, 201 bp, Homo sapiens
agaagacattgaaaatgatgccctttctcctgaagaacaagaagaatgcaaaaattatctgagaaagaccagggactacctaataaagattatagatgacrgtgattcaaatctttcagtggtcaagaaattgcctgtgcccctggagtctgtaaaagagatgcttaattcagtcatgcaggaactcgaagactatagtga

SEQ ID NO: 40199 - DNA, 201 bp, Homo sapiens
atgcagcttcagaagttgaagtgtctagcacatctgaaacaacaacaaaagcagtggtttctcctccaaagtttgtatttggttcagagtctgttaaaagmatttttagtagtgaaaaatcaaaaccatttgcattcggcaacagttcagccactgggtctttgtttggatttagttttaatgcacctttgaaaagtaaca

SEQ ID NO: 40200 - DNA, 201 bp, Homo sapiens
cagggtgatgatgtagcagatgcagcttcagaagttgaagtgtctagcacatctgaaacaacaacaaaagcagtggtttctcctccaaagtttgtatttgkttcagagtctgttaaaagcatttttagtagtgaaaaatcaaaaccatttgcattcggcaacagttcagccactgggtctttgtttggatttagttttaat

SEQ ID NO: 40201 - DNA, 201 bp, Homo sapiens
attagaagaaaccacaagagagaggacagatgttattcagggtgatgatgtagcagatgcagcttcagaagttgaagtgtctagcacatctgaaacaacamcaaaagcagtggtttctcctccaaagtttgtatttggttcagagtctgttaaaagcatttttagtagtgaaaaatcaaaaccatttgcattcggcaacag

SEQ ID NO: 40202 - DNA, 201 bp, Homo sapiens
tcccagagagtcaccatgtggcaaaattgctgtagctgtattagaagaaaccacaagagagaggacagatgttattcagggtgatgatgtagcagatgcarcttcagaagttgaagtgtctagcacatctgaaacaacaacaaaagcagtggtttctcctccaaagtttgtatttggttcagagtctgttaaaagcatttt

SEQ ID NO: 40203 - DNA, 201 bp, Homo sapiens
tctgagaaagaccagggactacctaataaagattatagatgacagtgattcaaatctttcagtggtcaagaaattgcctgtgcccctggagtctgtaaaasagatgcttaattcagtcatgcaggaactcgaagactatagtgaaggaggtcctctctataaaaatggttctttgcgaaatgcagattcagaaataaaaca

SEQ ID NO: 40204 - DNA, 201 bp, Homo sapiens
agagcagccaaacttttcccaggaagtcctgcaatttataaactaaaggaacagcttctagattgtgaaggtgaagatggatggaataaactttttgactkgattcagtcagaactttatgtaagacctgatgacgtccatgtgaacatccggctagtggaggtgtatcgctcaactaaaagattgaaggatgctgtggcc

SEQ ID NO: 40205 - DNA, 201 bp, Homo sapiens
attcagtcatgcaggaactcgaagactatagtgaaggaggtcctctctataaaaatggttctttgcgaaatgcagattcagaaataaaacattctacaccrtctcctaccagatattcactatcaccaagtaaaagttacaagtattctcccaaaacaccacctcgatgggcagaagatcagaattctttactgaaaatga

SEQ ID NO: 40206 - DNA, 201 bp, Homo sapiens
actaaaggaacagcttctagattgtgaaggtgaagatggatggaataaactttttgacttgattcagtcagaactttatgtaagacctgatgacgtccatrtgaacatccggctagtggaggtgtatcgctcaactaaaagattgaaggatgctgtggcccactgccatgaggcagagaggaacatagctttgcgttcaag

SEQ ID NO: 40207 - DNA, 201 bp, Homo sapiens
caggaactcgaagactatagtgaaggaggtcctctctataaaaatggttctttgcgaaatgcagattcagaaataaaacattctacaccgtctcctaccaratattcactatcaccaagtaaaagttacaagtattctcccaaaacaccacctcgatgggcagaagatcagaattctttactgaaaatgatttgccaacaa

SEQ ID NO: 40208 - DNA, 201 bp, Homo sapiens
tttaagggaagatgctttggatgatagtgtcagtagtagctcagtacatgcttctccattggcaagtagccctgtgagaaaaaatcttttccgttttggtragtcaacaacaggatttaacttcagttttaaatctgctttgagtccatctaagtctcctgccaagttgaatcagagtgggacttcagttggcactgatga

SEQ ID NO: 40209 - DNA, 201 bp, Homo sapiens
aactatgatttaagggaagatgctttggatgatagtgtcagtagtagctcagtacatgcttctccattggcaagtagccctgtgagaaaaaatcttttccrttttggtgagtcaacaacaggatttaacttcagttttaaatctgctttgagtccatctaagtctcctgccaagttgaatcagagtgggacttcagttggc

SEQ ID NO: 40210 - DNA, 201 bp, Homo sapiens
acatttctacatgcatgctggttctctgcttttgaagatgggtcagcatagtagtaatgttcaatggcgagctctttctgagctggctgcattgtgctatstcatagcatttcaggttccaagaccaaagattaaattaataaaaggtgaagctggacaaaatctgctggaaatgatggcctgtgaccgactgagccaatc

SEQ ID NO: 40211 - DNA, 201 bp, Homo sapiens
aaatgaaaggacatttctacatgcatgctggttctctgcttttgaagatgggtcagcatagtagtaatgttcaatggcgagctctttctgagctggctgcrttgtgctatctcatagcatttcaggttccaagaccaaagattaaattaataaaaggtgaagctggacaaaatctgctggaaatgatggcctgtgaccgac

SEQ ID NO: 40212 - DNA, 201 bp, Homo sapiens
ccaagtaaaagttacaagtattctcccaaaacaccacctcgatgggcagaagatcagaattctttactgaaaatgatttgccaacaagtagaggccattahgttgaaactaaatagcagtaactcagcatcccctcatcgttggcccacagagaattatggaccagactcggtgcctgatggatatcaggggtcacagaca

SEQ ID NO: 40213 - DNA, 201 bp, Homo sapiens
tcctaccagatattcactatcaccaagtaaaagttacaagtattctcccaaaacaccacctcgatgggcagaagatcagaattctttactgaaaatgattygccaacaagtagaggccattaagttgaaactaaatagcagtaactcagcatcccctcatcgttggcccacagagaattatggaccagactcggtgcctga

SEQ ID NO: 40214 - DNA, 201 bp, Homo sapiens
tctacaccgtctcctaccagatattcactatcaccaagtaaaagttacaagtattctcccaaaacaccacctcgatgggcagaagatcagaattctttackgaaaatgatttgccaacaagtagaggccattaagttgaaactaaatagcagtaactcagcatcccctcatcgttggcccacagagaattatggaccagac

SEQ ID NO: 40215 - DNA, 201 bp, Homo sapiens
gaaataaaacattctacaccgtctcctaccagatattcactatcaccaagtaaaagttacaagtattctcccaaaacaccacctcgatgggcagaagatcrgaattctttactgaaaatgatttgccaacaagtagaggccattaagttgaaactaaatagcagtaactcagcatcccctcatcgttggcccacagagaat

SEQ ID NO: 40216 - DNA, 201 bp, Homo sapiens
ggattttcaggtgctggagaaaaattattctcatcacaatacggtaaaatggccaataaagcaaacacttccggtgactttgagaaagatgatgatgcctrtaagactgaggacagcgatgacatccattttgaaccagtagttcaaatgcccgaaaaagtagaacttgtaacaggagaagaagatgaaaaagttctgtat

SEQ ID NO: 40217 - DNA, 201 bp, Homo sapiens
aaatgatttgccaacaagtagaggccattaagttgaaactaaatagcagtaactcagcatcccctcatcgttggcccacagagaattatggaccagactcrgtgcctgatggatatcaggggtcacagacatttcatggggctccactaacagttgcaactactggcccttcagtatattatagtcagtcaccagcatata

SEQ ID NO: 40218 - DNA, 201 bp, Homo sapiens
taacgactacgatgaacctgaagcctctctctggatcagatagagcatggatgtggttagccagtgatttctctgatggtgatgccaaactagagcagttrgcagcaaaatttaaaacaccagagctggctgaagaattcaagcagaaatttgaggaatgccagcggcttctgttagacataccacttcaaactccccata

SEQ ID NO: 40219 - DNA, 201 bp, Homo sapiens
cagaaagagtatgggtgtggactgcatgtgattttgcagatggagaaagaaaagtagagcatttagctgttcgttttaaactacaggatgttgcagactcrtttaagaaaatttttgatgaagcaaaaacagcccaggaaaaagattctttgataacacctcatgtttctcggtcaagcactcccagagagtcaccatgtg

SEQ ID NO: 40220 - DNA, 201 bp, Homo sapiens
tatagtgatgagaagggaccaagtattaaaactttgtgccaatcacagaataactccagacatgagtttgcaaaatatgaaagggacagaaagagtatggktgtggactgcatgtgattttgcagatggagaaagaaaagtagagcatttagctgttcgttttaaactacaggatgttgcagactcgtttaagaaaatttt

SEQ ID NO: 40221 - DNA, 201 bp, Homo sapiens
gatttctctgatggtgatgccaaactagagcagttggcagcaaaatttaaaacaccagagctggctgaagaattcaagcagaaatttgaggaatgccagcrgcttctgttagacataccacttcaaactccccataaacttgtagatactggcagagctgccaagttaatacagagagctgaagaaatgaagagtggactg

SEQ ID NO: 40222 - DNA, 201 bp, Homo sapiens
gaagtatccagtggtgaggaaaataagcaagttcgtatagtgatgagaagggaccaagtattaaaactttgtgccaatcacagaataactccagacatgastttgcaaaatatgaaagggacagaaagagtatgggtgtggactgcatgtgattttgcagatggagaaagaaaagtagagcatttagctgttcgttttaaa

SEQ ID NO: 40223 - DNA, 201 bp, Homo sapiens
cctttacctgatctagttgaagtatccagtggtgaggaaaataagcaagttcgtatagtgatgagaagggaccaagtattaaaactttgtgccaatcacasaataactccagacatgagtttgcaaaatatgaaagggacagaaagagtatgggtgtggactgcatgtgattttgcagatggagaaagaaaagtagagcat

SEQ ID NO: 40224 - DNA, 201 bp, Homo sapiens
catgcttctccattggcaagtagccctgtgagaaaaaatcttttccgttttggtgagtcaacaacaggatttaacttcagttttaaatctgctttgagtcyatctaagtctcctgccaagttgaatcagagtgggacttcagttggcactgatgaagaatctgatgttactcaagaagaagagagagatggacagtacttt

SEQ ID NO: 40225 - DNA, 201 bp, Homo sapiens
ttggatgatagtgtcagtagtagctcagtacatgcttctccattggcaagtagccctgtgagaaaaaatcttttccgttttggtgagtcaacaacaggatytaacttcagttttaaatctgctttgagtccatctaagtctcctgccaagttgaatcagagtgggacttcagttggcactgatgaagaatctgatgttact

SEQ ID NO: 40226 - DNA, 201 bp, Homo sapiens
gttcagtggaattaaacccaacacaaaaagatcttgtgttgaagattgcagaattgctttgtaaaaatgatgttactgatggaagagcaaaatactggctsgaaagagcagccaaacttttcccaggaagtcctgcaatttataaactaaaggaacagcttctagattgtgaaggtgaagatggatggaataaactttttg

SEQ ID NO: 40227 - DNA, 201 bp, Homo sapiens
gaactgtcagctactttcttagaaatgaaaggacatttctacatgcatgctggttctctgcttttgaagatgggtcagcatagtagtaatgttcaatggcragctctttctgagctggctgcattgtgctatctcatagcatttcaggttccaagaccaaagattaaattaataaaaggtgaagctggacaaaatctgctg

SEQ ID NO: 40228 - DNA, 201 bp, Homo sapiens
caccgtctcctaccagatattcactatcaccaagtaaaagttacaagtattctcccaaaacaccacctcgatgggcagaagatcagaattctttactgaawatgatttgccaacaagtagaggccattaagttgaaactaaatagcagtaactcagcatcccctcatcgttggcccacagagaattatggaccagactcgg

SEQ ID NO: 40229 - DNA, 201 bp, Homo sapiens
atacagaatttaagtcaaccaaagaaggattttccatccctgtgtctgctgatggatttaaatttggcatttcggaaccaggaaatcaagaaaagaaaagkgaaaagcctcttgaaaatggtactggcttccaggctcaggatattagtggccagaagaatggccgtggtgtgatttttggccaaacaagtagcactttta

SEQ ID NO: 40230 - DNA, 201 bp, Homo sapiens
acagatttctgggtcttctttatgaattggaagaaaacacagacaaagccgttgaatgttacaggcgttcagtggaattaaacccaacacaaaaagatctkgtgttgaagattgcagaattgctttgtaaaaatgatgttactgatggaagagcaaaatactggcttgaaagagcagccaaacttttcccaggaagtcctg

SEQ ID NO: 40231 - DNA, 201 bp, Homo sapiens
actgcaaagttttgatagtgctcttcagtctgtgaaatctttgggtggaaatgatgaactgtcagctactttcttagaaatgaaaggacatttctacatgyatgctggttctctgcttttgaagatgggtcagcatagtagtaatgttcaatggcgagctctttctgagctggctgcattgtgctatctcatagcatttca

SEQ ID NO: 40232 - DNA, 201 bp, Homo sapiens
aattactgcaaagttttgatagtgctcttcagtctgtgaaatctttgggtggaaatgatgaactgtcagctactttcttagaaatgaaaggacatttctayatgcatgctggttctctgcttttgaagatgggtcagcatagtagtaatgttcaatggcgagctctttctgagctggctgcattgtgctatctcatagcat

SEQ ID NO: 40233 - DNA, 201 bp, Homo sapiens
tgctggcctatgctaatcttatgcttcttacgctttccactagagatgtgcaggaaagtagagaattactgcaaagttttgatagtgctcttcagtctgtraaatctttgggtggaaatgatgaactgtcagctactttcttagaaatgaaaggacatttctacatgcatgctggttctctgcttttgaagatgggtcagc

SEQ ID NO: 40234 - DNA, 201 bp, Homo sapiens
gatggatggaataaactttttgacttgattcagtcagaactttatgtaagacctgatgacgtccatgtgaacatccggctagtggaggtgtatcgctcaamtaaaagattgaaggatgctgtggcccactgccatgaggcagagaggaacatagctttgcgttcaagtttagaatggaattcgtgtgttgtacagaccctt

SEQ ID NO: 40235 - DNA, 201 bp, Homo sapiens
aagtcgtggcaagcaagattttttaaaagagattgttgaaacttttgccaacaaaagcgggcagtctgcattatatgatgctctgttttctagtcagtcayctaaggatacatcttttcttggtagcgatgatattggaaacattgatgtacgagaaccagagcttgaagatttgactagatacgatgttggtgctattcg

SEQ ID NO: 40236 - DNA, 201 bp, Homo sapiens
tgcagattcagaaataaaacattctacaccgtctcctaccagatattcactatcaccaagtaaaagttacaagtattctcccaaaacaccacctcgatggrcagaagatcagaattctttactgaaaatgatttgccaacaagtagaggccattaagttgaaactaaatagcagtaactcagcatcccctcatcgttggcc

SEQ ID NO: 40237 - DNA, 201 bp, Homo sapiens
cactgatgaagaatctgatgttactcaagaagaagagagagatggacagtactttgaacctgttgttcctttacctgatctagttgaagtatccagtggtsaggaaaataagcaagttcgtatagtgatgagaagggaccaagtattaaaactttgtgccaatcacagaataactccagacatgagtttgcaaaatatgaa

SEQ ID NO: 40238 - DNA, 201 bp, Homo sapiens
aaatggttctttgcgaaatgcagattcagaaataaaacattctacaccgtctcctaccagatattcactatcaccaagtaaaagttacaagtattctcccraaacaccacctcgatgggcagaagatcagaattctttactgaaaatgatttgccaacaagtagaggccattaagttgaaactaaatagcagtaactcagc

SEQ ID NO: 40239 - DNA, 201 bp, Homo sapiens
ccctggagtctgtaaaagagatgcttaattcagtcatgcaggaactcgaagactatagtgaaggaggtcctctctataaaaatggttctttgcgaaatgcrgattcagaaataaaacattctacaccgtctcctaccagatattcactatcaccaagtaaaagttacaagtattctcccaaaacaccacctcgatgggcag

SEQ ID NO: 40240 - DNA, 201 bp, Homo sapiens
gatttaagggaagatgctttggatgatagtgtcagtagtagctcagtacatgcttctccattggcaagtagccctgtgagaaaaaatcttttccgttttgrtgagtcaacaacaggatttaacttcagttttaaatctgctttgagtccatctaagtctcctgccaagttgaatcagagtgggacttcagttggcactgat

SEQ ID NO: 40241 - DNA, 201 bp, Homo sapiens
tatagatgacagtgattcaaatctttcagtggtcaagaaattgcctgtgcccctggagtctgtaaaagagatgcttaattcagtcatgcaggaactcgaaractatagtgaaggaggtcctctctataaaaatggttctttgcgaaatgcagattcagaaataaaacattctacaccgtctcctaccagatattcactatc

SEQ ID NO: 40242 - DNA, 201 bp, Homo sapiens
actatgatttaagggaagatgctttggatgatagtgtcagtagtagctcagtacatgcttctccattggcaagtagccctgtgagaaaaaatcttttccgytttggtgagtcaacaacaggatttaacttcagttttaaatctgctttgagtccatctaagtctcctgccaagttgaatcagagtgggacttcagttggca

SEQ ID NO: 40243 - DNA, 201 bp, Homo sapiens
aaaataagggttcaggtacaggtgcggccggtgcctcagacacaacaataaaacccaatcctgaaaacactgggcccacattagaatgggataactatgayttaagggaagatgctttggatgatagtgtcagtagtagctcagtacatgcttctccattggcaagtagccctgtgagaaaaaatcttttccgttttggtg

SEQ ID NO: 40244 - DNA, 201 bp, Homo sapiens
tccggctagtggaggtgtatcgctcaactaaaagattgaaggatgctgtggcccactgccatgaggcagagaggaacatagctttgcgttcaagtttagartggaattcgtgtgttgtacagacccttaaggaatatctggagtctttacagtgtttggagtctgataaaagtgactggcgagcaaccaatacagacttac

SEQ ID NO: 40245 - DNA, 201 bp, Homo sapiens
gaagaaaataagggttcaggtacaggtgcggccggtgcctcagacacaacaataaaacccaatcctgaaaacactgggcccacattagaatgggataactrtgatttaagggaagatgctttggatgatagtgtcagtagtagctcagtacatgcttctccattggcaagtagccctgtgagaaaaaatcttttccgtttt

SEQ ID NO: 40246 - DNA, 201 bp, Homo sapiens
aacatttttgacaaatgatcaaacaaaagtcactgaggaagaaaataagggttcaggtacaggtgcggccggtgcctcagacacaacaataaaacccaatsctgaaaacactgggcccacattagaatgggataactatgatttaagggaagatgctttggatgatagtgtcagtagtagctcagtacatgcttctccatt

SEQ ID NO: 40247 - DNA, 201 bp, Homo sapiens
tggataacgactacgatgaacctgaagcctctctctggatcagatagagcatggatgtggttagccagtgatttctctgatggtgatgccaaactagagcrgttggcagcaaaatttaaaacaccagagctggctgaagaattcaagcagaaatttgaggaatgccagcggcttctgttagacataccacttcaaactccc

SEQ ID NO: 40248 - DNA, 201 bp, Homo sapiens
caggaaggcagaagacattgaaaatgatgccctttctcctgaagaacaagaagaatgcaaaaattatctgagaaagaccagggactacctaataaagattwtagatgacagtgattcaaatctttcagtggtcaagaaattgcctgtgcccctggagtctgtaaaagagatgcttaattcagtcatgcaggaactcgaaga

SEQ ID NO: 40249 - DNA, 201 bp, Homo sapiens
taaaagtgtgtgctaatcattggataacgactacgatgaacctgaagcctctctctggatcagatagagcatggatgtggttagccagtgatttctctgayggtgatgccaaactagagcagttggcagcaaaatttaaaacaccagagctggctgaagaattcaagcagaaatttgaggaatgccagcggcttctgttag

SEQ ID NO: 40250 - DNA, 201 bp, Homo sapiens
tcttattggaatcttgcactgatttttcacaggaaggcagaagacattgaaaatgatgccctttctcctgaagaacaagaagaatgcaaaaattatctgasaaagaccagggactacctaataaagattatagatgacagtgattcaaatctttcagtggtcaagaaattgcctgtgcccctggagtctgtaaaagagatg

SEQ ID NO: 40251 - DNA, 201 bp, Homo sapiens
atgcgaagagaacaagtactaaaagtgtgtgctaatcattggataacgactacgatgaacctgaagcctctctctggatcagatagagcatggatgtggtyagccagtgatttctctgatggtgatgccaaactagagcagttggcagcaaaatttaaaacaccagagctggctgaagaattcaagcagaaatttgaggaa

SEQ ID NO: 40252 - DNA, 201 bp, Homo sapiens
acgaggtcaatggcaaactaagaatgctgatgcgaagagaacaagtactaaaagtgtgtgctaatcattggataacgactacgatgaacctgaagcctctstctggatcagatagagcatggatgtggttagccagtgatttctctgatggtgatgccaaactagagcagttggcagcaaaatttaaaacaccagagctgg

SEQ ID NO: 40253 - DNA, 201 bp, Homo sapiens
acttaaaaattctcaaaaacgaggtcaatggcaaactaagaatgctgatgcgaagagaacaagtactaaaagtgtgtgctaatcattggataacgactacratgaacctgaagcctctctctggatcagatagagcatggatgtggttagccagtgatttctctgatggtgatgccaaactagagcagttggcagcaaaat

SEQ ID NO: 40254 - DNA, 201 bp, Homo sapiens
tagtagtaatgttcaatggcgagctctttctgagctggctgcattgtgctatctcatagcatttcaggttccaagaccaaagattaaattaataaaaggtraagctggacaaaatctgctggaaatgatggcctgtgaccgactgagccaatcagggcacatgttgctaaacttaagtcgtggcaagcaagattttttaaa

SEQ ID NO: 40255 - DNA, 201 bp, Homo sapiens
tcagcatagtagtaatgttcaatggcgagctctttctgagctggctgcattgtgctatctcatagcatttcaggttccaagaccaaagattaaattaataraaggtgaagctggacaaaatctgctggaaatgatggcctgtgaccgactgagccaatcagggcacatgttgctaaacttaagtcgtggcaagcaagattt

SEQ ID NO: 40256 - DNA, 201 bp, Homo sapiens
ggtcagcatagtagtaatgttcaatggcgagctctttctgagctggctgcattgtgctatctcatagcatttcaggttccaagaccaaagattaaattaakaaaaggtgaagctggacaaaatctgctggaaatgatggcctgtgaccgactgagccaatcagggcacatgttgctaaacttaagtcgtggcaagcaagat

SEQ ID NO: 40257 - DNA, 201 bp, Homo sapiens
taaacagctttgtacagaaagacaaaaatcttggtgggatgcggtttgtactctgattcacagaaaagcagtacctggaaacgtagcaaaattgagacttytagttcagcatgaaataaacactctaagagcccaggaaaaacatggccttcaacctgctctgcttgtacattgggcagaatgccttcagaaaacgggcag

SEQ ID NO: 40258 - DNA, 201 bp, Homo sapiens
aaaagtgttgtttcttattggaatcttgcactgatttttcacaggaaggcagaagacattgaaaatgatgccctttctcctgaagaacaagaagaatgcaraaattatctgagaaagaccagggactacctaataaagattatagatgacagtgattcaaatctttcagtggtcaagaaattgcctgtgcccctggagtct

SEQ ID NO: 40259 - DNA, 201 bp, Homo sapiens
tagtgtagacattcaggcatcagaaattgttgaatatgaagaagacgcacacataacttttgctatattggatgcagtaaatggaaatatagaagatgctrtgactgcttttgaatctataaaaagtgttgtttcttattggaatcttgcactgatttttcacaggaaggcagaagacattgaaaatgatgccctttctcc

SEQ ID NO: 40260 - DNA, 201 bp, Homo sapiens
ctgaacctattgatcctctgtttaaacattttcatagtgtagacattcaggcatcagaaattgttgaatatgaagaagacgcacacataacttttgctatrttggatgcagtaaatggaaatatagaagatgctgtgactgcttttgaatctataaaaagtgttgtttcttattggaatcttgcactgatttttcacagga

SEQ ID NO: 40261 - DNA, 201 bp, Homo sapiens
ttgatgctgaggtaagtcagtggaaagaaaggggcttggggaacttaaaaattctcaaaaacgaggtcaatggcaaactaagaatgctgatgcgaagagamcaagtactaaaagtgtgtgctaatcattggataacgactacgatgaacctgaagcctctctctggatcagatagagcatggatgtggttagccagtgatt

SEQ ID NO: 40262 - DNA, 201 bp, Homo sapiens
gaagaacagtattcctgaacctattgatcctctgtttaaacattttcatagtgtagacattcaggcatcagaaattgttgaatatgaagaagacgcacacrtaacttttgctatattggatgcagtaaatggaaatatagaagatgctgtgactgcttttgaatctataaaaagtgttgtttcttattggaatcttgcact

SEQ ID NO: 40263 - DNA, 201 bp, Homo sapiens
cagcgggtaaaactatttagatttgatgctgaggtaagtcagtggaaagaaaggggcttggggaacttaaaaattctcaaaaacgaggtcaatggcaaacyaagaatgctgatgcgaagagaacaagtactaaaagtgtgtgctaatcattggataacgactacgatgaacctgaagcctctctctggatcagatagagca

SEQ ID NO: 40264 - DNA, 201 bp, Homo sapiens
caacagttgaagagaaggcaaaagcagatacgttaaaacttccacctacatttttttgtggagtctgtagtgatactgatgaagacaatggaaatggggargactttcaatcagagcttcaaaaagttcaggaagctcaaaaatctcagacagaagaaataactagcacaactgacagtgtatatacaggtgggactgaag

SEQ ID NO: 40265 - DNA, 201 bp, Homo sapiens
ttcaaatgcccgaaaaagtagaacttgtaacaggagaagaagatgaaaaagttctgtattcacagcgggtaaaactatttagatttgatgctgaggtaagkcagtggaaagaaaggggcttggggaacttaaaaattctcaaaaacgaggtcaatggcaaactaagaatgctgatgcgaagagaacaagtactaaaagtgt

SEQ ID NO: 40266 - DNA, 201 bp, Homo sapiens
agtagttcaaatgcccgaaaaagtagaacttgtaacaggagaagaagatgaaaaagttctgtattcacagcgggtaaaactatttagatttgatgctgagrtaagtcagtggaaagaaaggggcttggggaacttaaaaattctcaaaaacgaggtcaatggcaaactaagaatgctgatgcgaagagaacaagtactaaa

SEQ ID NO: 40267 - DNA, 201 bp, Homo sapiens
ggtgactttgagaaagatgatgatgcctataagactgaggacagcgatgacatccattttgaaccagtagttcaaatgcccgaaaaagtagaacttgtaayaggagaagaagatgaaaaagttctgtattcacagcgggtaaaactatttagatttgatgctgaggtaagtcagtggaaagaaaggggcttggggaactta

SEQ ID NO: 40268 - DNA, 201 bp, Homo sapiens
gccaataaagcaaacacttccggtgactttgagaaagatgatgatgcctataagactgaggacagcgatgacatccattttgaaccagtagttcaaatgcscgaaaaagtagaacttgtaacaggagaagaagatgaaaaagttctgtattcacagcgggtaaaactatttagatttgatgctgaggtaagtcagtggaaa

SEQ ID NO: 40269 - DNA, 201 bp, Homo sapiens
agagcccaggaaaaacatggccttcaacctgctctgcttgtacattgggcagaatgccttcagaaaacgggcagcggtcttaattctttttatgatcaackagaatacatagggagaagtgttcattattggaagaaagttttgccattgttgaagataataaaaaagaagaacagtattcctgaacctattgatcctctg

SEQ ID NO: 40270 - DNA, 201 bp, Homo sapiens
cttgcaaaatcaacttcaggagaaggatttcagtttggcaaaaaagaccccaatttcaagggattttcaggtgctggagaaaaattattctcatcacaatrcggtaaaatggccaataaagcaaacacttccggtgactttgagaaagatgatgatgcctataagactgaggacagcgatgacatccattttgaaccagta

SEQ ID NO: 40271 - DNA, 201 bp, Homo sapiens
actctaagagcccaggaaaaacatggccttcaacctgctctgcttgtacattgggcagaatgccttcagaaaacgggcagcggtcttaattctttttatgrtcaacgagaatacatagggagaagtgttcattattggaagaaagttttgccattgttgaagataataaaaaagaagaacagtattcctgaacctattgat

SEQ ID NO: 40272 - DNA, 201 bp, Homo sapiens
ggccgtggtgtgatttttggccaaacaagtagcacttttacatttgcagatcttgcaaaatcaacttcaggagaaggatttcagtttggcaaaaaagaccycaatttcaagggattttcaggtgctggagaaaaattattctcatcacaatacggtaaaatggccaataaagcaaacacttccggtgactttgagaaagat

SEQ ID NO: 40273 - DNA, 201 bp, Homo sapiens
tgaaaatggtactggcttccaggctcaggatattagtggccagaagaatggccgtggtgtgatttttggccaaacaagtagcacttttacatttgcagatsttgcaaaatcaacttcaggagaaggatttcagtttggcaaaaaagaccccaatttcaagggattttcaggtgctggagaaaaattattctcatcacaata

SEQ ID NO: 40274 - DNA, 201 bp, Homo sapiens
cctgccccttcctgtgtgtaaacagctttgtacagaaagacaaaaatcttggtgggatgcggtttgtactctgattcacagaaaagcagtacctggaaacktagcaaaattgagacttctagttcagcatgaaataaacactctaagagcccaggaaaaacatggccttcaacctgctctgcttgtacattgggcagaatg

SEQ ID NO: 40275 - DNA, 201 bp, Homo sapiens
aatttggcatttcggaaccaggaaatcaagaaaagaaaagtgaaaagcctcttgaaaatggtactggcttccaggctcaggatattagtggccagaagaakggccgtggtgtgatttttggccaaacaagtagcacttttacatttgcagatcttgcaaaatcaacttcaggagaaggatttcagtttggcaaaaaagacc

SEQ ID NO: 40276 - DNA, 201 bp, Homo sapiens
ggatttaaatttggcatttcggaaccaggaaatcaagaaaagaaaagtgaaaagcctcttgaaaatggtactggcttccaggctcaggatattagtggccrgaagaatggccgtggtgtgatttttggccaaacaagtagcacttttacatttgcagatcttgcaaaatcaacttcaggagaaggatttcagtttggcaaa

SEQ ID NO: 40277 - DNA, 201 bp, Homo sapiens
aaagaaggattttccatccctgtgtctgctgatggatttaaatttggcatttcggaaccaggaaatcaagaaaagaaaagtgaaaagcctcttgaaaatgrtactggcttccaggctcaggatattagtggccagaagaatggccgtggtgtgatttttggccaaacaagtagcacttttacatttgcagatcttgcaaaa

SEQ ID NO: 40278 - DNA, 201 bp, Homo sapiens
ataccagccacttacaattaaaggagaaatgtaattctcaccacagctcctatcagccgttatgcctgccccttcctgtgtgtaaacagctttgtacagaragacaaaaatcttggtgggatgcggtttgtactctgattcacagaaaagcagtacctggaaacgtagcaaaattgagacttctagttcagcatgaaataa

SEQ ID NO: 40279 - DNA, 201 bp, Homo sapiens
tgccccttcctgtgtgtaaacagctttgtacagaaagacaaaaatcttggtgggatgcggtttgtactctgattcacagaaaagcagtacctggaaacgtrgcaaaattgagacttctagttcagcatgaaataaacactctaagagcccaggaaaaacatggccttcaacctgctctgcttgtacattgggcagaatgcc

SEQ ID NO: 40280 - DNA, 201 bp, Homo sapiens
cttggagtagtatataccagccacttacaattaaaggagaaatgtaattctcaccacagctcctatcagccgttatgcctgccccttcctgtgtgtaaacrgctttgtacagaaagacaaaaatcttggtgggatgcggtttgtactctgattcacagaaaagcagtacctggaaacgtagcaaaattgagacttctagtt

SEQ ID NO: 40281 - DNA, 201 bp, Homo sapiens
tccaactttcttctgctacaagaatagaccagattatgttagtgaagaagaggaggatgatgaagatttcgaaacagctgtcaagaaacttaatggaaaaytatatttggatggctcagaaaaatgtagacccttggaagaaaatacagcagataatgagaaagaatgtattattgtttgggaaaagaaaccaacagttga

SEQ ID NO: 40282 - DNA, 201 bp, Homo sapiens
tatttctccttggagtagtatataccagccacttacaattaaaggagaaatgtaattctcaccacagctcctatcagccgttatgcctgccccttcctgtrtgtaaacagctttgtacagaaagacaaaaatcttggtgggatgcggtttgtactctgattcacagaaaagcagtacctggaaacgtagcaaaattgagac

SEQ ID NO: 40283 - DNA, 201 bp, Homo sapiens
aaacgtagcaaaattgagacttctagttcagcatgaaataaacactctaagagcccaggaaaaacatggccttcaacctgctctgcttgtacattgggcaraatgccttcagaaaacgggcagcggtcttaattctttttatgatcaacgagaatacatagggagaagtgttcattattggaagaaagttttgccattgtt

SEQ ID NO: 40284 - DNA, 201 bp, Homo sapiens
tcttgaagtatttctccttggagtagtatataccagccacttacaattaaaggagaaatgtaattctcaccacagctcctatcagccgttatgcctgcccyttcctgtgtgtaaacagctttgtacagaaagacaaaaatcttggtgggatgcggtttgtactctgattcacagaaaagcagtacctggaaacgtagcaaa

SEQ ID NO: 40285 - DNA, 201 bp, Homo sapiens
atgcacctgaatcaatatgtattttagatcttgaagtatttctccttggagtagtatataccagccacttacaattaaaggagaaatgtaattctcaccayagctcctatcagccgttatgcctgccccttcctgtgtgtaaacagctttgtacagaaagacaaaaatcttggtgggatgcggtttgtactctgattcaca

SEQ ID NO: 40286 - DNA, 201 bp, Homo sapiens
gtagcaaaattgagacttctagttcagcatgaaataaacactctaagagcccaggaaaaacatggccttcaacctgctctgcttgtacattgggcagaatrccttcagaaaacgggcagcggtcttaattctttttatgatcaacgagaatacatagggagaagtgttcattattggaagaaagttttgccattgttgaag

SEQ ID NO: 40287 - DNA, 201 bp, Homo sapiens
tataattccccagtatcttctcagaccagcagctaatgttactcccacaaagggttcttctaatacagaatttaagtcaaccaaagaaggattttccatcsctgtgtctgctgatggatttaaatttggcatttcggaaccaggaaatcaagaaaagaaaagtgaaaagcctcttgaaaatggtactggcttccaggctca

SEQ ID NO: 40288 - DNA, 201 bp, Homo sapiens
ccagggactacctaataaagattatagatgacagtgattcaaatctttcagtggtcaagaaattgcctgtgcccctggagtctgtaaaagagatgcttaaktcagtcatgcaggaactcgaagactatagtgaaggaggtcctctctataaaaatggttctttgcgaaatgcagattcagaaataaaacattctacaccgt

SEQ ID NO: 40289 - DNA, 201 bp, Homo sapiens
gctttgcgttcaagtttagaatggaattcgtgtgttgtacagacccttaaggaatatctggagtctttacagtgtttggagtctgataaaagtgactggcragcaaccaatacagacttactgctggcctatgctaatcttatgcttcttacgctttccactagagatgtgcaggaaagtagagaattactgcaaagtttt

SEQ ID NO: 40290 - DNA, 201 bp, Homo sapiens
aaaacgaggtcaatggcaaactaagaatgctgatgcgaagagaacaagtactaaaagtgtgtgctaatcattggataacgactacgatgaacctgaagccyctctctggatcagatagagcatggatgtggttagccagtgatttctctgatggtgatgccaaactagagcagttggcagcaaaatttaaaacaccagagc

SEQ ID NO: 40291 - DNA, 201 bp, Homo sapiens
attcagtcagaactttatgtaagacctgatgacgtccatgtgaacatccggctagtggaggtgtatcgctcaactaaaagattgaaggatgctgtggcccrctgccatgaggcagagaggaacatagctttgcgttcaagtttagaatggaattcgtgtgttgtacagacccttaaggaatatctggagtctttacagtgt

SEQ ID NO: 40292 - DNA, 201 bp, Homo sapiens
tacagtggaattcattgcctgctttacctggaatccgaaaatggctaaaacagcttttccatcatttgccccatgaaacctcaaggcttgaaacaaatgcrcctgaatcaatatgtattttagatcttgaagtatttctccttggagtagtatataccagccacttacaattaaaggagaaatgtaattctcaccacagct

SEQ ID NO: 40293 - DNA, 201 bp, Homo sapiens
gtcttcagcaccttacttggcttggcttacagtggaattcattgcctgctttacctggaatccgaaaatggctaaaacagcttttccatcatttgccccakgaaacctcaaggcttgaaacaaatgcacctgaatcaatatgtattttagatcttgaagtatttctccttggagtagtatataccagccacttacaattaa

SEQ ID NO: 40294 - DNA, 201 bp, Homo sapiens
cataatggtagtcttcagcaccttacttggcttggcttacagtggaattcattgcctgctttacctggaatccgaaaatggctaaaacagcttttccatcrtttgccccatgaaacctcaaggcttgaaacaaatgcacctgaatcaatatgtattttagatcttgaagtatttctccttggagtagtatataccagccac

SEQ ID NO: 40295 - DNA, 201 bp, Homo sapiens
gcgatgatattggaaacattgatgtacgagaaccagagcttgaagatttgactagatacgatgttggtgctattcgagcacataatggtagtcttcagcaycttacttggcttggcttacagtggaattcattgcctgctttacctggaatccgaaaatggctaaaacagcttttccatcatttgccccatgaaacctcaa

SEQ ID NO: 40296 - DNA, 201 bp, Homo sapiens
cctaaggatacatcttttcttggtagcgatgatattggaaacattgatgtacgagaaccagagcttgaagatttgactagatacgatgttggtgctattcragcacataatggtagtcttcagcaccttacttggcttggcttacagtggaattcattgcctgctttacctggaatccgaaaatggctaaaacagcttttc

SEQ ID NO: 40297 - DNA, 201 bp, Homo sapiens
ccaaagattgacagctgaactgagagaccatcacccacagacacaactggccactgggtggtgcacaagtcagacagaactgaatagtcctgtgaagactytggacactgaactgactttggaaccagactgcagaatggaggggtgggaacttgtggcttgaacctaatcaggtttcattagggttttctgtatataaga

SEQ ID NO: 40298 - DNA, 201 bp, Homo sapiens
ttgtgaaggtgaagatggatggaataaactttttgacttgattcagtcagaactttatgtaagacctgatgacgtccatgtgaacatccggctagtggagktgtatcgctcaactaaaagattgaaggatgctgtggcccactgccatgaggcagagaggaacatagctttgcgttcaagtttagaatggaattcgtgtgt

SEQ ID NO: 40299 - DNA, 201 bp, Homo sapiens
tttgtaaaaatgatgttactgatggaagagcaaaatactggcttgaaagagcagccaaacttttcccaggaagtcctgcaatttataaactaaaggaacakcttctagattgtgaaggtgaagatggatggaataaactttttgacttgattcagtcagaactttatgtaagacctgatgacgtccatgtgaacatccggc

SEQ ID NO: 40300 - DNA, 201 bp, Homo sapiens
tcaaatctttcagtggtcaagaaattgcctgtgcccctggagtctgtaaaagagatgcttaattcagtcatgcaggaactcgaagactatagtgaaggagrtcctctctataaaaatggttctttgcgaaatgcagattcagaaataaaacattctacaccgtctcctaccagatattcactatcaccaagtaaaagttac

SEQ ID NO: 40301 - DNA, 201 bp, Homo sapiens
gactacctaataaagattatagatgacagtgattcaaatctttcagtggtcaagaaattgcctgtgcccctggagtctgtaaaagagatgcttaattcagycatgcaggaactcgaagactatagtgaaggaggtcctctctataaaaatggttctttgcgaaatgcagattcagaaataaaacattctacaccgtctcct

SEQ ID NO: 40302 - DNA, 201 bp, Homo sapiens
aatgtgaactgtcaaagaactctgatatcgaacagtcttcagatagcaaagtcaaaaatctctttgcttcctttccaacggaagaatcttcaatcaactayacatttaaaacaccagaaaaggcaaaagagaagaaaaaacctgaagattctccctcagatgatgatgttctcattgtatatgaactaactccaaccgctg

SEQ ID NO: 40303 - DNA, 201 bp, Homo sapiens
aatgttactcccacaaagggttcttctaatacagaatttaagtcaaccaaagaaggattttccatccctgtgtctgctgatggatttaaatttggcatttyggaaccaggaaatcaagaaaagaaaagtgaaaagcctcttgaaaatggtactggcttccaggctcaggatattagtggccagaagaatggccgtggtgtg

SEQ ID NO: 40304 - DNA, 201 bp, Homo sapiens; identical to SEQ ID NO: 40171

SEQ ID NO: 40305 - DNA, 201 bp, Homo sapiens
tgcagattcagaaataaaacattctacaccgtctcctaccagatattcactatcaccaagtaaaagttacaagtattctcccaaaacaccacctcgatggrcagaagatcagaattctttactgaaaatgatttgccaacaagtagaggccattaagaaagaaatgcaggagttgaaactaaatagcagtaactcagcatc

SEQ ID NO: 40306 - DNA, 201 bp, Homo sapiens
aaatggttctttgcgaaatgcagattcagaaataaaacattctacaccgtctcctaccagatattcactatcaccaagtaaaagttacaagtattctcccraaacaccacctcgatgggcagaagatcagaattctttactgaaaatgatttgccaacaagtagaggccattaagaaagaaatgcaggagttgaaactaaa

SEQ ID NO: 40307 - DNA, 201 bp, Homo sapiens; identical to SEQ ID NO: 40239

SEQ ID NO: 40308 - DNA, 201 bp, Homo sapiens; identical to SEQ ID NO: 40241

SEQ ID NO: 40309 - DNA, 201 bp, Homo sapiens; identical to SEQ ID NO: 40244

SEQ ID NO: 40310 - DNA, 201 bp, Homo sapiens; identical to SEQ ID NO: 40248

SEQ ID NO: 40311 - DNA, 201 bp, Homo sapiens; identical to SEQ ID NO: 40250

SEQ ID NO: 40312 - DNA, 201 bp, Homo sapiens; identical to SEQ ID NO: 40172

SEQ ID NO: 40313 - DNA, 201 bp, Homo sapiens; identical to SEQ ID NO: 40173

SEQ ID NO: 40314 - DNA, 201 bp, Homo sapiens; identical to SEQ ID NO: 40254

SEQ ID NO: 40315 - DNA, 201 bp, Homo sapiens; identical to SEQ ID NO: 40255

SEQ ID NO: 40316 - DNA, 201 bp, Homo sapiens; identical to SEQ ID NO: 40256

SEQ ID NO: 40317 - DNA, 201 bp, Homo sapiens; identical to SEQ ID NO: 40175

SEQ ID NO: 40318 - DNA, 201 bp, Homo sapiens; identical to SEQ ID NO: 40257

SEQ ID NO: 40319 - DNA, 201 bp, Homo sapiens; identical to SEQ ID NO: 40178

SEQ ID NO: 40320 - DNA, 201 bp, Homo sapiens; identical to SEQ ID NO: 40258

SEQ ID NO: 40321 - DNA, 201 bp, Homo sapiens; identical to SEQ ID NO: 40179

SEQ ID NO: 40322 - DNA, 201 bp, Homo sapiens; identical to SEQ ID NO: 40180

SEQ ID NO: 40323 - DNA, 201 bp, Homo sapiens; identical to SEQ ID NO: 40259

SEQ ID NO: 40324 - DNA, 201 bp, Homo sapiens; identical to SEQ ID NO: 40260

SEQ ID NO: 40325 - DNA, 201 bp, Homo sapiens; identical to SEQ ID NO: 40262

SEQ ID NO: 40326 - DNA, 201 bp, Homo sapiens; identical to SEQ ID NO: 40269

SEQ ID NO: 40327 - DNA, 201 bp, Homo sapiens; identical to SEQ ID NO: 40184

SEQ ID NO: 40328 - DNA, 201 bp, Homo sapiens; identical to SEQ ID NO: 40271

SEQ ID NO: 40329 - DNA, 201 bp, Homo sapiens; identical to SEQ ID NO: 40185

SEQ ID NO: 40330 - DNA, 201 bp, Homo sapiens; identical to SEQ ID NO: 40274

SEQ ID NO: 40331 - DNA, 201 bp, Homo sapiens; identical to SEQ ID NO: 40186

SEQ ID NO: 40332 - DNA, 201 bp, Homo sapiens
ctcgatgggcagaagatcagaattctttactgaaaatgatttgccaacaagtagaggccattaagaaagaaatgcaggagttgaaactaaatagcagtaastcagcatcccctcatcgttggcccacagagaattatggaccagactcggtgcctgatggatatcaggggtcacagacatttcatggggctccactaacag

SEQ ID NO: 40333 - DNA, 201 bp, Homo sapiens; identical to SEQ ID NO: 40188

SEQ ID NO: 40334 - DNA, 201 bp, Homo sapiens; identical to SEQ ID NO: 40190

SEQ ID NO: 40335 - DNA, 201 bp, Homo sapiens
gaagatcagaattctttactgaaaatgatttgccaacaagtagaggccattaagaaagaaatgcaggagttgaaactaaatagcagtaactcagcatcccrtcatcgttggcccacagagaattatggaccagactcggtgcctgatggatatcaggggtcacagacatttcatggggctccactaacagaagcagcacat

SEQ ID NO: 40336 - DNA, 201 bp, Homo sapiens; identical to SEQ ID NO: 40195

SEQ ID NO: 40337 - DNA, 201 bp, Homo sapiens; identical to SEQ ID NO: 40198

SEQ ID NO: 40338 - DNA, 201 bp, Homo sapiens; identical to SEQ ID NO: 40278

SEQ ID NO: 40339 - DNA, 201 bp, Homo sapiens; identical to SEQ ID NO: 40279

SEQ ID NO: 40340 - DNA, 201 bp, Homo sapiens; identical to SEQ ID NO: 40203

SEQ ID NO: 40341 - DNA, 201 bp, Homo sapiens; identical to SEQ ID NO: 40280

SEQ ID NO: 40342 - DNA, 201 bp, Homo sapiens; identical to SEQ ID NO: 40204

SEQ ID NO: 40343 - DNA, 201 bp, Homo sapiens; identical to SEQ ID NO: 40282

SEQ ID NO: 40344 - DNA, 201 bp, Homo sapiens; identical to SEQ ID NO: 40205

SEQ ID NO: 40345 - DNA, 201 bp, Homo sapiens; identical to SEQ ID NO: 40206

SEQ ID NO: 40346 - DNA, 201 bp, Homo sapiens; identical to SEQ ID NO: 40207

SEQ ID NO: 40347 - DNA, 201 bp, Homo sapiens; identical to SEQ ID NO: 40283

SEQ ID NO: 40348 - DNA, 201 bp, Homo sapiens; identical to SEQ ID NO: 40284

SEQ ID NO: 40349 - DNA, 201 bp, Homo sapiens; identical to SEQ ID NO: 40285

SEQ ID NO: 40350 - DNA, 201 bp, Homo sapiens
aagtaaaagttacaagtattctcccaaaacaccacctcgatgggcagaagatcagaattctttactgaaaatgatttgccaacaagtagaggccattaagraagaaatgcaggagttgaaactaaatagcagtaactcagcatcccctcatcgttggcccacagagaattatggaccagactcggtgcctgatggatatca

SEQ ID NO: 40351 - DNA, 201 bp, Homo sapiens; identical to SEQ ID NO: 40286

SEQ ID NO: 40352 - DNA, 201 bp, Homo sapiens; identical to SEQ ID NO: 40210

SEQ ID NO: 40353 - DNA, 201 bp, Homo sapiens; identical to SEQ ID NO: 40211

SEQ ID NO: 40354 - DNA, 201 bp, Homo sapiens
ccctcatcgttggcccacagagaattatggaccagactcggtgcctgatggatatcaggggtcacagacatttcatggggctccactaacagaagcagcayatcgtcattttacaattgagaaacatggagactccaaatggattatttacaggttcacaaaacagctttgtggcactgaaagggcgagagccaagatctc

SEQ ID NO: 40355 - DNA, 201 bp, Homo sapiens
ccaagtaaaagttacaagtattctcccaaaacaccacctcgatgggcagaagatcagaattctttactgaaaatgatttgccaacaagtagaggccattahgaaagaaatgcaggagttgaaactaaatagcagtaactcagcatcccctcatcgttggcccacagagaattatggaccagactcggtgcctgatggatat

SEQ ID NO: 40356 - DNA, 201 bp, Homo sapiens
tcctaccagatattcactatcaccaagtaaaagttacaagtattctcccaaaacaccacctcgatgggcagaagatcagaattctttactgaaaatgattygccaacaagtagaggccattaagaaagaaatgcaggagttgaaactaaatagcagtaactcagcatcccctcatcgttggcccacagagaattatggacc

SEQ ID NO: 40357 - DNA, 201 bp, Homo sapiens
tctacaccgtctcctaccagatattcactatcaccaagtaaaagttacaagtattctcccaaaacaccacctcgatgggcagaagatcagaattctttackgaaaatgatttgccaacaagtagaggccattaagaaagaaatgcaggagttgaaactaaatagcagtaactcagcatcccctcatcgttggcccacagag

SEQ ID NO: 40358 - DNA, 201 bp, Homo sapiens
gaaataaaacattctacaccgtctcctaccagatattcactatcaccaagtaaaagttacaagtattctcccaaaacaccacctcgatgggcagaagatcrgaattctttactgaaaatgatttgccaacaagtagaggccattaagaaagaaatgcaggagttgaaactaaatagcagtaactcagcatcccctcatcgt

SEQ ID NO: 40359 - DNA, 201 bp, Homo sapiens; identical to SEQ ID NO: 40288

SEQ ID NO: 40360 - DNA, 201 bp, Homo sapiens; identical to SEQ ID NO: 40289

SEQ ID NO: 40361 - DNA, 201 bp, Homo sapiens
aagtagaggccattaagaaagaaatgcaggagttgaaactaaatagcagtaactcagcatcccctcatcgttggcccacagagaattatggaccagactcrgtgcctgatggatatcaggggtcacagacatttcatggggctccactaacagaagcagcacatcgtcattttacaattgagaaacatggagactccaaat

SEQ ID NO: 40362 - DNA, 201 bp, Homo sapiens; identical to SEQ ID NO: 40291

SEQ ID NO: 40363 - DNA, 201 bp, Homo sapiens; identical to SEQ ID NO: 40292

SEQ ID NO: 40364 - DNA, 201 bp, Homo sapiens; identical to SEQ ID NO: 40293

SEQ ID NO: 40365 - DNA, 201 bp, Homo sapiens; identical to SEQ ID NO: 40294

SEQ ID NO: 40366 - DNA, 201 bp, Homo sapiens; identical to SEQ ID NO: 40295

SEQ ID NO: 40367 - DNA, 201 bp, Homo sapiens; identical to SEQ ID NO: 40227

SEQ ID NO: 40368 - DNA, 201 bp, Homo sapiens
caccgtctcctaccagatattcactatcaccaagtaaaagttacaagtattctcccaaaacaccacctcgatgggcagaagatcagaattctttactgaawatgatttgccaacaagtagaggccattaagaaagaaatgcaggagttgaaactaaatagcagtaactcagcatcccctcatcgttggcccacagagaatt

SEQ ID NO: 40369 - DNA, 201 bp, Homo sapiens; identical to SEQ ID NO: 40226

SEQ ID NO: 40370 - DNA, 201 bp, Homo sapiens; identical to SEQ ID NO: 40296

SEQ ID NO: 40371 - DNA, 201 bp, Homo sapiens; identical to SEQ ID NO: 40231

SEQ ID NO: 40372 - DNA, 201 bp, Homo sapiens; identical to SEQ ID NO: 40230

SEQ ID NO: 40373 - DNA, 201 bp, Homo sapiens; identical to SEQ ID NO: 40232

SEQ ID NO: 40374 - DNA, 201 bp, Homo sapiens; identical to SEQ ID NO: 40233

SEQ ID NO: 40375 - DNA, 201 bp, Homo sapiens; identical to SEQ ID NO: 40297

SEQ ID NO: 40376 - DNA, 201 bp, Homo sapiens
catcgttggcccacagagaattatggaccagactcggtgcctgatggatatcaggggtcacagacatttcatggggctccactaacagaagcagcacatcstcattttacaattgagaaacatggagactccaaatggattatttacaggttcacaaaacagctttgtggcactgaaagggcgagagccaagatctcctga

SEQ ID NO: 40377 - DNA, 167 bp, Homo sapiens
aagcagcacatcgtcattttacaattgagaaacatggagactccaaatggattatttacaggttcacaaaacagctttgtggcactgaaagggcgagagcyaagatctcctgatttctgttcctgtgttcatagattctttttccttaataaaagtaaacatatatc

SEQ ID NO: 40378 - DNA, 201 bp, Homo sapiens; identical to SEQ ID NO: 40298

SEQ ID NO: 40379 - DNA, 201 bp, Homo sapiens; identical to SEQ ID NO: 40299

SEQ ID NO: 40380 - DNA, 201 bp, Homo sapiens; identical to SEQ ID NO: 40300

SEQ ID NO: 40381 - DNA, 201 bp, Homo sapiens; identical to SEQ ID NO: 40301

SEQ ID NO: 40382 - DNA, 201 bp, Homo sapiens; identical to SEQ ID NO: 40234

SEQ ID NO: 40383 - DNA, 201 bp, Homo sapiens; identical to SEQ ID NO: 40235

SEQ ID NO: 40384 - DNA, 201 bp, Homo sapiens; identical to SEQ ID NO: 40170

SEQ ID NO: 40385 - DNA, 201 bp, Homo sapiens; identical to SEQ ID NO: 40171

SEQ ID NO: 40386 - DNA, 201 bp, Homo sapiens; identical to SEQ ID NO: 40172

SEQ ID NO: 40387 - DNA, 201 bp, Homo sapiens; identical to SEQ ID NO: 40173

SEQ ID NO: 40388 - DNA, 201 bp, Homo sapiens
acaggatttaacttcagttttaaatctgctttgagtccatctaagtctcctgccaagttgaatcagagtgggacttcagttggcactgatgaagaatctgwtgttactcaagaagaagagagagatggacagtactttgaacctgttgttcctttacctgatctagttgaagtatccagtggtgaggaaaatgaacaagtt

SEQ ID NO: 40389 - DNA, 201 bp, Homo sapiens; identical to SEQ ID NO: 40175

SEQ ID NO: 40390 - DNA, 201 bp, Homo sapiens; identical to SEQ ID NO: 40176

SEQ ID NO: 40391 - DNA, 201 bp, Homo sapiens; identical to SEQ ID NO: 40177

SEQ ID NO: 40392 - DNA, 201 bp, Homo sapiens; identical to SEQ ID NO: 40178

SEQ ID NO: 40393 - DNA, 201 bp, Homo sapiens; identical to SEQ ID NO: 40179

SEQ ID NO: 40394 - DNA, 201 bp, Homo sapiens; identical to SEQ ID NO: 40180

SEQ ID NO: 40395 - DNA, 201 bp, Homo sapiens; identical to SEQ ID NO: 40181

SEQ ID NO: 40396 - DNA, 201 bp, Homo sapiens; identical to SEQ ID NO: 40182

SEQ ID NO: 40397 - DNA, 201 bp, Homo sapiens; identical to SEQ ID NO: 40183

SEQ ID NO: 40398 - DNA, 201 bp, Homo sapiens; identical to SEQ ID NO: 40184

SEQ ID NO: 40399 - DNA, 201 bp, Homo sapiens; identical to SEQ ID NO: 40185

SEQ ID NO: 40400 - DNA, 201 bp, Homo sapiens; identical to SEQ ID NO: 40186

SEQ ID NO: 40401 - DNA, 201 bp, Homo sapiens; identical to SEQ ID NO: 40332

SEQ ID NO: 40402 - DNA, 201 bp, Homo sapiens; identical to SEQ ID NO: 40188

SEQ ID NO: 40403 - DNA, 201 bp, Homo sapiens; identical to SEQ ID NO: 40189

SEQ ID NO: 40404 - DNA, 201 bp, Homo sapiens; identical to SEQ ID NO: 40190

SEQ ID NO: 40405 - DNA, 201 bp, Homo sapiens; identical to SEQ ID NO: 40191

SEQ ID NO: 40406 - DNA, 201 bp, Homo sapiens; identical to SEQ ID NO: 40192

SEQ ID NO: 40407 - DNA, 201 bp, Homo sapiens; identical to SEQ ID NO: 40193

SEQ ID NO: 40408 - DNA, 201 bp, Homo sapiens; identical to SEQ ID NO: 40194

SEQ ID NO: 40409 - DNA, 201 bp, Homo sapiens; identical to SEQ ID NO: 40195

SEQ ID NO: 40410 - DNA, 201 bp, Homo sapiens
gaagatcagaattctttactgaaaatgatttgccaacaagtagaggccattaagaaagaaatgcaggagttgaaactaaatagcagtaactcagcatcccrtcatcgttggcccacagagaattatggaccagactcggtgcctgatggatatcaggggtcacagacatttcatggggctccactaacagttgcaactact

SEQ ID NO: 40411 - DNA, 201 bp, Homo sapiens; identical to SEQ ID NO: 40196

SEQ ID NO: 40412 - DNA, 201 bp, Homo sapiens; identical to SEQ ID NO: 40198

SEQ ID NO: 40413 - DNA, 201 bp, Homo sapiens; identical to SEQ ID NO: 40199

SEQ ID NO: 40414 - DNA, 201 bp, Homo sapiens; identical to SEQ ID NO: 40200

SEQ ID NO: 40415 - DNA, 201 bp, Homo sapiens; identical to SEQ ID NO: 40201

SEQ ID NO: 40416 - DNA, 201 bp, Homo sapiens; identical to SEQ ID NO: 40202

SEQ ID NO: 40417 - DNA, 201 bp, Homo sapiens; identical to SEQ ID NO: 40203

SEQ ID NO: 40418 - DNA, 201 bp, Homo sapiens; identical to SEQ ID NO: 40205

SEQ ID NO: 40419 - DNA, 201 bp, Homo sapiens; identical to SEQ ID NO: 40207

SEQ ID NO: 40420 - DNA, 201 bp, Homo sapiens; identical to SEQ ID NO: 40350

SEQ ID NO: 40421 - DNA, 201 bp, Homo sapiens; identical to SEQ ID NO: 40208

SEQ ID NO: 40422 - DNA, 201 bp, Homo sapiens; identical to SEQ ID NO: 40209

SEQ ID NO: 40423 - DNA, 201 bp, Homo sapiens; identical to SEQ ID NO: 40210

SEQ ID NO: 40424 - DNA, 201 bp, Homo sapiens; identical to SEQ ID NO: 40211

SEQ ID NO: 40425 - DNA, 201 bp, Homo sapiens; identical to SEQ ID NO: 40355

SEQ ID NO: 40426 - DNA, 201 bp, Homo sapiens; identical to SEQ ID NO: 40356

SEQ ID NO: 40427 - DNA, 201 bp, Homo sapiens; identical to SEQ ID NO: 40357

SEQ ID NO: 40428 - DNA, 201 bp, Homo sapiens; identical to SEQ ID NO: 40358

SEQ ID NO: 40429 - DNA, 201 bp, Homo sapiens; identical to SEQ ID NO: 40216

SEQ ID NO: 40430 - DNA, 201 bp, Homo sapiens
aagtagaggccattaagaaagaaatgcaggagttgaaactaaatagcagtaactcagcatcccctcatcgttggcccacagagaattatggaccagactcrgtgcctgatggatatcaggggtcacagacatttcatggggctccactaacagttgcaactactggcccttcagtatattatagtcagtcaccagcatata

SEQ ID NO: 40431 - DNA, 201 bp, Homo sapiens; identical to SEQ ID NO: 40218

SEQ ID NO: 40432 - DNA, 201 bp, Homo sapiens; identical to SEQ ID NO: 40219

SEQ ID NO: 40433 - DNA, 201 bp, Homo sapiens; identical to SEQ ID NO: 40220

SEQ ID NO: 40434 - DNA, 201 bp, Homo sapiens; identical to SEQ ID NO: 40221

SEQ ID NO: 40435 - DNA, 201 bp, Homo sapiens
aagattttacagaattatgataataagcaagttcgtatagtgatgagaagggaccaagtattaaaactttgtgccaatcacagaataactccagacatgastttgcaaaatatgaaagggacagaaagagtatgggtgtggactgcatgtgattttgcagatggagaaagaaaagtagagcatttagctgttcgttttaaa

SEQ ID NO: 40436 - DNA, 201 bp, Homo sapiens
aggggcattggtgatataaagattttacagaattatgataataagcaagttcgtatagtgatgagaagggaccaagtattaaaactttgtgccaatcacasaataactccagacatgagtttgcaaaatatgaaagggacagaaagagtatgggtgtggactgcatgtgattttgcagatggagaaagaaaagtagagcat

SEQ ID NO: 40437 - DNA, 201 bp, Homo sapiens
agatggacagtactttgaacctgttgttcctttacctgatctagttgaagtatccagtggtgaggaaaatgaacaagttgtttttagtcacagggcagaamtctacagatatgataaagatgttggtcaatggaaagaaaggggcattggtgatataaagattttacagaattatgataataagcaagttcgtatagtgat

SEQ ID NO: 40438 - DNA, 201 bp, Homo sapiens
gagagatggacagtactttgaacctgttgttcctttacctgatctagttgaagtatccagtggtgaggaaaatgaacaagttgtttttagtcacagggcaraactctacagatatgataaagatgttggtcaatggaaagaaaggggcattggtgatataaagattttacagaattatgataataagcaagttcgtatagt

SEQ ID NO: 40439 - DNA, 201 bp, Homo sapiens
gaagagagagatggacagtactttgaacctgttgttcctttacctgatctagttgaagtatccagtggtgaggaaaatgaacaagttgtttttagtcacakggcagaactctacagatatgataaagatgttggtcaatggaaagaaaggggcattggtgatataaagattttacagaattatgataataagcaagttcgt

SEQ ID NO: 40440 - DNA, 201 bp, Homo sapiens
atctgatgttactcaagaagaagagagagatggacagtactttgaacctgttgttcctttacctgatctagttgaagtatccagtggtgaggaaaatgaamaagttgtttttagtcacagggcagaactctacagatatgataaagatgttggtcaatggaaagaaaggggcattggtgatataaagattttacagaatta

SEQ ID NO: 40441 - DNA, 201 bp, Homo sapiens; identical to SEQ ID NO: 40224

SEQ ID NO: 40442 - DNA, 201 bp, Homo sapiens; identical to SEQ ID NO: 40225

SEQ ID NO: 40443 - DNA, 201 bp, Homo sapiens; identical to SEQ ID NO: 40227

SEQ ID NO: 40444 - DNA, 201 bp, Homo sapiens; identical to SEQ ID NO: 40368

SEQ ID NO: 40445 - DNA, 192 bp, Homo sapiens
ttttgatagtgctcttcagtctgtgaaatctttgggtggaaatgatgaactgtcagctactttcttagaaatgaaaggacatttctacatgyatgctggttctctgcttttgaagatgggtcagcatagtagtaatgttcaatggcgagctctttctgagctggctgcattgtgctatctcatagcatttca

SEQ ID NO: 40446 - DNA, 201 bp, Homo sapiens; identical to SEQ ID NO: 40229

SEQ ID NO: 40447 - DNA, 188 bp, Homo sapiens
ttttgatagtgctcttcagtctgtgaaatctttgggtggaaatgatgaactgtcagctactttcttagaaatgaaaggacatttctayatgcatgctggttctctgcttttgaagatgggtcagcatagtagtaatgttcaatggcgagctctttctgagctggctgcattgtgctatctcatagcat

SEQ ID NO: 40448 - DNA, 125 bp, Homo sapiens
ttttgatagtgctcttcagtctgtraaatctttgggtggaaatgatgaactgtcagctactttcttagaaatgaaaggacatttctacatgcatgctggttctctgcttttgaagatgggtcagc

SEQ ID NO: 40449 - DNA, 201 bp, Homo sapiens; identical to SEQ ID NO: 40235

SEQ ID NO: 40450 - DNA, 201 bp, Homo sapiens; identical to SEQ ID NO: 40305

SEQ ID NO: 40451 - DNA, 201 bp, Homo sapiens
cactgatgaagaatctgatgttactcaagaagaagagagagatggacagtactttgaacctgttgttcctttacctgatctagttgaagtatccagtggtsaggaaaatgaacaagttgtttttagtcacagggcagaactctacagatatgataaagatgttggtcaatggaaagaaaggggcattggtgatataaagat

SEQ ID NO: 40452 - DNA, 201 bp, Homo sapiens; identical to SEQ ID NO: 40306

SEQ ID NO: 40453 - DNA, 201 bp, Homo sapiens; identical to SEQ ID NO: 40239

SEQ ID NO: 40454 - DNA, 201 bp, Homo sapiens; identical to SEQ ID NO: 40240

SEQ ID NO: 40455 - DNA, 201 bp, Homo sapiens; identical to SEQ ID NO: 40241

SEQ ID NO: 40456 - DNA, 201 bp, Homo sapiens; identical to SEQ ID NO: 40242

SEQ ID NO: 40457 - DNA, 201 bp, Homo sapiens; identical to SEQ ID NO: 40243

SEQ ID NO: 40458 - DNA, 201 bp, Homo sapiens; identical to SEQ ID NO: 40245

SEQ ID NO: 40459 - DNA, 201 bp, Homo sapiens; identical to SEQ ID NO: 40246

SEQ ID NO: 40460 - DNA, 201 bp, Homo sapiens; identical to SEQ ID NO: 40247

SEQ ID NO: 40461 - DNA, 201 bp, Homo sapiens; identical to SEQ ID NO: 40248

SEQ ID NO: 40462 - DNA, 201 bp, Homo sapiens; identical to SEQ ID NO: 40249

SEQ ID NO: 40463 - DNA, 201 bp, Homo sapiens; identical to SEQ ID NO: 40250

SEQ ID NO: 40464 - DNA, 201 bp, Homo sapiens; identical to SEQ ID NO: 40251

SEQ ID NO: 40465 - DNA, 201 bp, Homo sapiens; identical to SEQ ID NO: 40252

SEQ ID NO: 40466 - DNA, 201 bp, Homo sapiens; identical to SEQ ID NO: 40253

SEQ ID NO: 40467 - DNA, 201 bp, Homo sapiens; identical to SEQ ID NO: 40254

SEQ ID NO: 40468 - DNA, 201 bp, Homo sapiens; identical to SEQ ID NO: 40255

SEQ ID NO: 40469 - DNA, 201 bp, Homo sapiens; identical to SEQ ID NO: 40256

SEQ ID NO: 40470 - DNA, 201 bp, Homo sapiens; identical to SEQ ID NO: 40257

SEQ ID NO: 40471 - DNA, 201 bp, Homo sapiens; identical to SEQ ID NO: 40258

SEQ ID NO: 40472 - DNA, 201 bp, Homo sapiens; identical to SEQ ID NO: 40259

SEQ ID NO: 40473 - DNA, 201 bp, Homo sapiens; identical to SEQ ID NO: 40260

SEQ ID NO: 40474 - DNA, 201 bp, Homo sapiens; identical to SEQ ID NO: 40261

SEQ ID NO: 40475 - DNA, 201 bp, Homo sapiens; identical to SEQ ID NO: 40262

SEQ ID NO: 40476 - DNA, 201 bp, Homo sapiens; identical to SEQ ID NO: 40263

SEQ ID NO: 40477 - DNA, 201 bp, Homo sapiens; identical to SEQ ID NO: 40264

SEQ ID NO: 40478 - DNA, 201 bp, Homo sapiens; identical to SEQ ID NO: 40265

SEQ ID NO: 40479 - DNA, 201 bp, Homo sapiens; identical to SEQ ID NO: 40266

SEQ ID NO: 40480 - DNA, 201 bp, Homo sapiens; identical to SEQ ID NO: 40267

SEQ ID NO: 40481 - DNA, 201 bp, Homo sapiens; identical to SEQ ID NO: 40268

SEQ ID NO: 40482 - DNA, 201 bp, Homo sapiens; identical to SEQ ID NO: 40269

SEQ ID NO: 40483 - DNA, 201 bp, Homo sapiens; identical to SEQ ID NO: 40270

SEQ ID NO: 40484 - DNA, 201 bp, Homo sapiens; identical to SEQ ID NO: 40271

SEQ ID NO: 40485 - DNA, 201 bp, Homo sapiens; identical to SEQ ID NO: 40272

SEQ ID NO: 40486 - DNA, 201 bp, Homo sapiens; identical to SEQ ID NO: 40273

SEQ ID NO: 40487 - DNA, 201 bp, Homo sapiens; identical to SEQ ID NO: 40274

SEQ ID NO: 40488 - DNA, 201 bp, Homo sapiens; identical to SEQ ID NO: 40275

SEQ ID NO: 40489 - DNA, 201 bp, Homo sapiens; identical to SEQ ID NO: 40276

SEQ ID NO: 40490 - DNA, 201 bp, Homo sapiens; identical to SEQ ID NO: 40277

SEQ ID NO: 40491 - DNA, 201 bp, Homo sapiens
ccatgccgggtgaaggattaaggccatctttgccaacacaagcacacacaacacagccaactccttttaaatttaactcaaatttcaaatcaaatgatggkgacttcacgttttcctcaccacaggttgtgacacagccccctcctgcagcttacagtaacagtgaaagccttttaggtctcctgacttcagataaaccct

SEQ ID NO: 40492 - DNA, 201 bp, Homo sapiens; identical to SEQ ID NO: 40278

SEQ ID NO: 40493 - DNA, 201 bp, Homo sapiens; identical to SEQ ID NO: 40279

SEQ ID NO: 40494 - DNA, 201 bp, Homo sapiens; identical to SEQ ID NO: 40280

SEQ ID NO: 40495 - DNA, 201 bp, Homo sapiens; identical to SEQ ID NO: 40281

SEQ ID NO: 40496 - DNA, 201 bp, Homo sapiens; identical to SEQ ID NO: 40282

SEQ ID NO: 40497 - DNA, 201 bp, Homo sapiens; identical to SEQ ID NO: 40283

SEQ ID NO: 40498 - DNA, 201 bp, Homo sapiens; identical to SEQ ID NO: 40284

SEQ ID NO: 40499 - DNA, 201 bp, Homo sapiens; identical to SEQ ID NO: 40285

SEQ ID NO: 40500 - DNA, 201 bp, Homo sapiens; identical to SEQ ID NO: 40286

SEQ ID NO: 40501 - DNA, 201 bp, Homo sapiens
gtgggaacaggatttaaaagtaatttctcagaaaaagcttctaagtttggcaatacagagcaaggattcaaatttgggcatgtggatcaagaaaattcacyttcatttatgtttcagggttcttctaatacagaatttaagtcaaccaaagaaggattttccatccctgtgtctgctgatggatttaaatttggcatttcg

SEQ ID NO: 40502 - DNA, 201 bp, Homo sapiens
attcaaatttgggcatgtggatcaagaaaattcaccttcatttatgtttcagggttcttctaatacagaatttaagtcaaccaaagaaggattttccatcsctgtgtctgctgatggatttaaatttggcatttcggaaccaggaaatcaagaaaagaaaagtgaaaagcctcttgaaaatggtactggcttccaggctca

SEQ ID NO: 40503 - DNA, 201 bp, Homo sapiens; identical to SEQ ID NO: 40288

SEQ ID NO: 40504 - DNA, 201 bp, Homo sapiens; identical to SEQ ID NO: 40290

SEQ ID NO: 40505 - DNA, 201 bp, Homo sapiens; identical to SEQ ID NO: 40292

SEQ ID NO: 40506 - DNA, 201 bp, Homo sapiens; identical to SEQ ID NO: 40293

SEQ ID NO: 40507 - DNA, 201 bp, Homo sapiens; identical to SEQ ID NO: 40294

SEQ ID NO: 40508 - DNA, 201 bp, Homo sapiens; identical to SEQ ID NO: 40295

SEQ ID NO: 40509 - DNA, 201 bp, Homo sapiens; identical to SEQ ID NO: 40296

SEQ ID NO: 40510 - DNA, 201 bp, Homo sapiens; identical to SEQ ID NO: 40300

SEQ ID NO: 40511 - DNA, 201 bp, Homo sapiens; identical to SEQ ID NO: 40301

SEQ ID NO: 40512 - DNA, 201 bp, Homo sapiens; identical to SEQ ID NO: 40302

SEQ ID NO: 40513 - DNA, 201 bp, Homo sapiens
ccttcatttatgtttcagggttcttctaatacagaatttaagtcaaccaaagaaggattttccatccctgtgtctgctgatggatttaaatttggcatttyggaaccaggaaatcaagaaaagaaaagtgaaaagcctcttgaaaatggtactggcttccaggctcaggatattagtggccagaagaatggccgtggtgtg

SEQ ID NO: 40514 - DNA, 201 bp, Homo sapiens; identical to SEQ ID NO: 40170

SEQ ID NO: 40515 - DNA, 201 bp, Homo sapiens; identical to SEQ ID NO: 40171

SEQ ID NO: 40516 - DNA, 201 bp, Homo sapiens; identical to SEQ ID NO: 40172

SEQ ID NO: 40517 - DNA, 201 bp, Homo sapiens; identical to SEQ ID NO: 40173

SEQ ID NO: 40518 - DNA, 201 bp, Homo sapiens; identical to SEQ ID NO: 40175

SEQ ID NO: 40519 - DNA, 201 bp, Homo sapiens; identical to SEQ ID NO: 40388

SEQ ID NO: 40520 - DNA, 201 bp, Homo sapiens; identical to SEQ ID NO: 40176

SEQ ID NO: 40521 - DNA, 201 bp, Homo sapiens; identical to SEQ ID NO: 40178

SEQ ID NO: 40522 - DNA, 201 bp, Homo sapiens; identical to SEQ ID NO: 40179

SEQ ID NO: 40523 - DNA, 201 bp, Homo sapiens; identical to SEQ ID NO: 40180

SEQ ID NO: 40524 - DNA, 201 bp, Homo sapiens
tataaatgatgctttgtgaacacccccaaaatatttgagcaattttttttctcccttaataagttcacggtgaggtttcaaagagcaagagaacttagttwaagacatttcagtaactggaagatacttttatcatgctagggcagagcaaaagaactcggtacggtatacggactcatgcttgaatcatgcgcattaacg

SEQ ID NO: 40525 - DNA, 201 bp, Homo sapiens
actacacatttaaaacaccagaaaagggtaagtactttgttgttaaagttaagcacaatttttctttcttttaatgtttagcttgatgcagactctttgtrggatactaatgttgggatataaatgatgctttgtgaacacccccaaaatatttgagcaattttttttctcccttaataagttcacggtgaggtttcaaag

SEQ ID NO: 40526 - DNA, 201 bp, Homo sapiens
atcgaacagtcttcagatagcaaagtcaaaaatctctttgcttcctttccaacggaagaatcttcaatcaactacacatttaaaacaccagaaaagggtargtactttgttgttaaagttaagcacaatttttctttcttttaatgtttagcttgatgcagactctttgtaggatactaatgttgggatataaatgatgct

SEQ ID NO: 40527 - DNA, 201 bp, Homo sapiens
gaaagcaaagtggaacctaaaaaatgtgaactgtcaaagaactctgatatcgaacagtcttcagatagcaaagtcaaaaatctctttgcttcctttccaayggaagaatcttcaatcaactacacatttaaaacaccagaaaagggtaagtactttgttgttaaagttaagcacaatttttctttcttttaatgtttagct

SEQ ID NO: 40528 - DNA, 201 bp, Homo sapiens; identical to SEQ ID NO: 40182

SEQ ID NO: 40529 - DNA, 201 bp, Homo sapiens; identical to SEQ ID NO: 40183

SEQ ID NO: 40530 - DNA, 201 bp, Homo sapiens; identical to SEQ ID NO: 40184

SEQ ID NO: 40531 - DNA, 201 bp, Homo sapiens; identical to SEQ ID NO: 40185

SEQ ID NO: 40532 - DNA, 201 bp, Homo sapiens; identical to SEQ ID NO: 40186

SEQ ID NO: 40533 - DNA, 201 bp, Homo sapiens; identical to SEQ ID NO: 40332

SEQ ID NO: 40534 - DNA, 201 bp, Homo sapiens; identical to SEQ ID NO: 40188

SEQ ID NO: 40535 - DNA, 201 bp, Homo sapiens
gcccagagtggatctgaaagcaaagtggaacctaaaaaatgtgaactgtcaaagaactctgatatcgaacagtcttcagatagcaaagtcaaaaatctctytgcttcctttccaacggaagaatcttcaatcaactacacatttaaaacaccagaaaagggtaagtactttgttgttaaagttaagcacaatttttctttc

SEQ ID NO: 40536 - DNA, 201 bp, Homo sapiens; identical to SEQ ID NO: 40191

SEQ ID NO: 40537 - DNA, 201 bp, Homo sapiens; identical to SEQ ID NO: 40190

SEQ ID NO: 40538 - DNA, 201 bp, Homo sapiens; identical to SEQ ID NO: 40192

SEQ ID NO: 40539 - DNA, 201 bp, Homo sapiens; identical to SEQ ID NO: 40193

SEQ ID NO: 40540 - DNA, 201 bp, Homo sapiens; identical to SEQ ID NO: 40194

SEQ ID NO: 40541 - DNA, 201 bp, Homo sapiens; identical to SEQ ID NO: 40196

SEQ ID NO: 40542 - DNA, 201 bp, Homo sapiens; identical to SEQ ID NO: 40410

SEQ ID NO: 40543 - DNA, 201 bp, Homo sapiens; identical to SEQ ID NO: 40195

SEQ ID NO: 40544 - DNA, 201 bp, Homo sapiens; identical to SEQ ID NO: 40199

SEQ ID NO: 40545 - DNA, 201 bp, Homo sapiens; identical to SEQ ID NO: 40198

SEQ ID NO: 40546 - DNA, 201 bp, Homo sapiens; identical to SEQ ID NO: 40200

SEQ ID NO: 40547 - DNA, 201 bp, Homo sapiens; identical to SEQ ID NO: 40201

SEQ ID NO: 40548 - DNA, 201 bp, Homo sapiens; identical to SEQ ID NO: 40202

SEQ ID NO: 40549 - DNA, 201 bp, Homo sapiens; identical to SEQ ID NO: 40203

SEQ ID NO: 40550 - DNA, 201 bp, Homo sapiens; identical to SEQ ID NO: 40204

SEQ ID NO: 40551 - DNA, 201 bp, Homo sapiens; identical to SEQ ID NO: 40205

SEQ ID NO: 40552 - DNA, 201 bp, Homo sapiens; identical to SEQ ID NO: 40206

SEQ ID NO: 40553 - DNA, 201 bp, Homo sapiens; identical to SEQ ID NO: 40207

SEQ ID NO: 40554 - DNA, 201 bp, Homo sapiens; identical to SEQ ID NO: 40350

SEQ ID NO: 40555 - DNA, 201 bp, Homo sapiens; identical to SEQ ID NO: 40208

SEQ ID NO: 40556 - DNA, 201 bp, Homo sapiens; identical to SEQ ID NO: 40209

SEQ ID NO: 40557 - DNA, 201 bp, Homo sapiens; identical to SEQ ID NO: 40210

SEQ ID NO: 40558 - DNA, 201 bp, Homo sapiens; identical to SEQ ID NO: 40211

SEQ ID NO: 40559 - DNA, 201 bp, Homo sapiens; identical to SEQ ID NO: 40355

SEQ ID NO: 40560 - DNA, 201 bp, Homo sapiens; identical to SEQ ID NO: 40356

SEQ ID NO: 40561 - DNA, 201 bp, Homo sapiens; identical to SEQ ID NO: 40357

SEQ ID NO: 40562 - DNA, 201 bp, Homo sapiens; identical to SEQ ID NO: 40358

SEQ ID NO: 40563 - DNA, 201 bp, Homo sapiens
agggtaagtactttgttgttaaagttaagcacaatttttctttcttttaatgtttagcttgatgcagactctttgtaggatactaatgttgggatataaaygatgctttgtgaacacccccaaaatatttgagcaattttttttctcccttaataagttcacggtgaggtttcaaagagcaagagaacttagtttaagaca

SEQ ID NO: 40564 - DNA, 201 bp, Homo sapiens; identical to SEQ ID NO: 40216

SEQ ID NO: 40565 - DNA, 201 bp, Homo sapiens; identical to SEQ ID NO: 40430

SEQ ID NO: 40566 - DNA, 201 bp, Homo sapiens; identical to SEQ ID NO: 40218

SEQ ID NO: 40567 - DNA, 201 bp, Homo sapiens; identical to SEQ ID NO: 40219

SEQ ID NO: 40568 - DNA, 201 bp, Homo sapiens; identical to SEQ ID NO: 40221

SEQ ID NO: 40569 - DNA, 201 bp, Homo sapiens; identical to SEQ ID NO: 40220

SEQ ID NO: 40570 - DNA, 201 bp, Homo sapiens; identical to SEQ ID NO: 40435

SEQ ID NO: 40571 - DNA, 201 bp, Homo sapiens; identical to SEQ ID NO: 40436

SEQ ID NO: 40572 - DNA, 201 bp, Homo sapiens; identical to SEQ ID NO: 40437

SEQ ID NO: 40573 - DNA, 201 bp, Homo sapiens; identical to SEQ ID NO: 40438

SEQ ID NO: 40574 - DNA, 201 bp, Homo sapiens; identical to SEQ ID NO: 40439

SEQ ID NO: 40575 - DNA, 201 bp, Homo sapiens; identical to SEQ ID NO: 40440

SEQ ID NO: 40576 - DNA, 201 bp, Homo sapiens; identical to SEQ ID NO: 40224

SEQ ID NO: 40577 - DNA, 201 bp, Homo sapiens; identical to SEQ ID NO: 40225

SEQ ID NO: 40578 - DNA, 201 bp, Homo sapiens; identical to SEQ ID NO: 40226

SEQ ID NO: 40579 - DNA, 201 bp, Homo sapiens; identical to SEQ ID NO: 40368

SEQ ID NO: 40580 - DNA, 201 bp, Homo sapiens; identical to SEQ ID NO: 40227

SEQ ID NO: 40581 - DNA, 201 bp, Homo sapiens; identical to SEQ ID NO: 40230

SEQ ID NO: 40582 - DNA, 201 bp, Homo sapiens; identical to SEQ ID NO: 40231

SEQ ID NO: 40583 - DNA, 201 bp, Homo sapiens; identical to SEQ ID NO: 40229

SEQ ID NO: 40584 - DNA, 201 bp, Homo sapiens; identical to SEQ ID NO: 40232

SEQ ID NO: 40585 - DNA, 201 bp, Homo sapiens; identical to SEQ ID NO: 40233

SEQ ID NO: 40586 - DNA, 201 bp, Homo sapiens; identical to SEQ ID NO: 40234

SEQ ID NO: 40587 - DNA, 201 bp, Homo sapiens; identical to SEQ ID NO: 40235

SEQ ID NO: 40588 - DNA, 201 bp, Homo sapiens; identical to SEQ ID NO: 40305

SEQ ID NO: 40589 - DNA, 201 bp, Homo sapiens; identical to SEQ ID NO: 40451

SEQ ID NO: 40590 - DNA, 201 bp, Homo sapiens; identical to SEQ ID NO: 40306

SEQ ID NO: 40591 - DNA, 201 bp, Homo sapiens; identical to SEQ ID NO: 40239

SEQ ID NO: 40592 - DNA, 201 bp, Homo sapiens; identical to SEQ ID NO: 40241

SEQ ID NO: 40593 - DNA, 201 bp, Homo sapiens; identical to SEQ ID NO: 40240

SEQ ID NO: 40594 - DNA, 201 bp, Homo sapiens; identical to SEQ ID NO: 40242

SEQ ID NO: 40595 - DNA, 201 bp, Homo sapiens; identical to SEQ ID NO: 40244

SEQ ID NO: 40596 - DNA, 201 bp, Homo sapiens; identical to SEQ ID NO: 40243

SEQ ID NO: 40597 - DNA, 201 bp, Homo sapiens; identical to SEQ ID NO: 40245

SEQ ID NO: 40598 - DNA, 201 bp, Homo sapiens; identical to SEQ ID NO: 40246

SEQ ID NO: 40599 - DNA, 201 bp, Homo sapiens; identical to SEQ ID NO: 40248

SEQ ID NO: 40600 - DNA, 201 bp, Homo sapiens; identical to SEQ ID NO: 40247

SEQ ID NO: 40601 - DNA, 201 bp, Homo sapiens; identical to SEQ ID NO: 40250

SEQ ID NO: 40602 - DNA, 201 bp, Homo sapiens; identical to SEQ ID NO: 40249

SEQ ID NO: 40603 - DNA, 201 bp, Homo sapiens; identical to SEQ ID NO: 40251

SEQ ID NO: 40604 - DNA, 201 bp, Homo sapiens; identical to SEQ ID NO: 40252

SEQ ID NO: 40605 - DNA, 201 bp, Homo sapiens; identical to SEQ ID NO: 40253

SEQ ID NO: 40606 - DNA, 201 bp, Homo sapiens; identical to SEQ ID NO: 40254

SEQ ID NO: 40607 - DNA, 201 bp, Homo sapiens; identical to SEQ ID NO: 40255

SEQ ID NO: 40608 - DNA, 201 bp, Homo sapiens; identical to SEQ ID NO: 40256

SEQ ID NO: 40609 - DNA, 201 bp, Homo sapiens; identical to SEQ ID NO: 40257

SEQ ID NO: 40610 - DNA, 201 bp, Homo sapiens; identical to SEQ ID NO: 40258

SEQ ID NO: 40611 - DNA, 201 bp, Homo sapiens; identical to SEQ ID NO: 40259

SEQ ID NO: 40612 - DNA, 201 bp, Homo sapiens; identical to SEQ ID NO: 40260

SEQ ID NO: 40613 - DNA, 201 bp, Homo sapiens; identical to SEQ ID NO: 40262

SEQ ID NO: 40614 - DNA, 201 bp, Homo sapiens; identical to SEQ ID NO: 40261

SEQ ID NO: 40615 - DNA, 201 bp, Homo sapiens; identical to SEQ ID NO: 40263

SEQ ID NO: 40616 - DNA, 201 bp, Homo sapiens; identical to SEQ ID NO: 40265

SEQ ID NO: 40617 - DNA, 201 bp, Homo sapiens; identical to SEQ ID NO: 40266

SEQ ID NO: 40618 - DNA, 201 bp, Homo sapiens; identical to SEQ ID NO: 40267

SEQ ID NO: 40619 - DNA, 201 bp, Homo sapiens; identical to SEQ ID NO: 40269

SEQ ID NO: 40620 - DNA, 201 bp, Homo sapiens; identical to SEQ ID NO: 40268

SEQ ID NO: 40621 - DNA, 201 bp, Homo sapiens; identical to SEQ ID NO: 40270

SEQ ID NO: 40622 - DNA, 201 bp, Homo sapiens; identical to SEQ ID NO: 40271

SEQ ID NO: 40623 - DNA, 201 bp, Homo sapiens; identical to SEQ ID NO: 40272

SEQ ID NO: 40624 - DNA, 201 bp, Homo sapiens; identical to SEQ ID NO: 40273

SEQ ID NO: 40625 - DNA, 201 bp, Homo sapiens; identical to SEQ ID NO: 40274

SEQ ID NO: 40626 - DNA, 201 bp, Homo sapiens; identical to SEQ ID NO: 40275

SEQ ID NO: 40627 - DNA, 201 bp, Homo sapiens; identical to SEQ ID NO: 40276

SEQ ID NO: 40628 - DNA, 201 bp, Homo sapiens; identical to SEQ ID NO: 40277

SEQ ID NO: 40629 - DNA, 201 bp, Homo sapiens; identical to SEQ ID NO: 40278

SEQ ID NO: 40630 - DNA, 201 bp, Homo sapiens; identical to SEQ ID NO: 40280

SEQ ID NO: 40631 - DNA, 201 bp, Homo sapiens; identical to SEQ ID NO: 40279

SEQ ID NO: 40632 - DNA, 201 bp, Homo sapiens; identical to SEQ ID NO: 40282

SEQ ID NO: 40633 - DNA, 201 bp, Homo sapiens
acttagtttaagacatttcagtaactggaagatacttttatcatgctagggcagagcaaaagaactcggtacggtatacggactcatgcttgaatcatgcrcattaacgtgagtctttttttaaagtgttcattttcatttgttcagtttcttttgtcactcagaaaacatgatattgaggctgggcacggtggctcactc

SEQ ID NO: 40634 - DNA, 201 bp, Homo sapiens; identical to SEQ ID NO: 40284

SEQ ID NO: 40635 - DNA, 201 bp, Homo sapiens; identical to SEQ ID NO: 40283

SEQ ID NO: 40636 - DNA, 201 bp, Homo sapiens; identical to SEQ ID NO: 40285

SEQ ID NO: 40637 - DNA, 201 bp, Homo sapiens; identical to SEQ ID NO: 40286

SEQ ID NO: 40638 - DNA, 201 bp, Homo sapiens; identical to SEQ ID NO: 40287

SEQ ID NO: 40639 - DNA, 201 bp, Homo sapiens; identical to SEQ ID NO: 40288

SEQ ID NO: 40640 - DNA, 201 bp, Homo sapiens; identical to SEQ ID NO: 40289

SEQ ID NO: 40641 - DNA, 201 bp, Homo sapiens; identical to SEQ ID NO: 40291

SEQ ID NO: 40642 - DNA, 201 bp, Homo sapiens; identical to SEQ ID NO: 40290

SEQ ID NO: 40643 - DNA, 201 bp, Homo sapiens; identical to SEQ ID NO: 40292

SEQ ID NO: 40644 - DNA, 201 bp, Homo sapiens; identical to SEQ ID NO: 40293

SEQ ID NO: 40645 - DNA, 201 bp, Homo sapiens; identical to SEQ ID NO: 40294

SEQ ID NO: 40646 - DNA, 201 bp, Homo sapiens; identical to SEQ ID NO: 40295

SEQ ID NO: 40647 - DNA, 201 bp, Homo sapiens; identical to SEQ ID NO: 40296

SEQ ID NO: 40648 - DNA, 201 bp, Homo sapiens; identical to SEQ ID NO: 40298

SEQ ID NO: 40649 - DNA, 201 bp, Homo sapiens; identical to SEQ ID NO: 40299

SEQ ID NO: 40650 - DNA, 201 bp, Homo sapiens; identical to SEQ ID NO: 40300

SEQ ID NO: 40651 - DNA, 201 bp, Homo sapiens
aatgtgaactgtcaaagaactctgatatcgaacagtcttcagatagcaaagtcaaaaatctctttgcttcctttccaacggaagaatcttcaatcaactayacatttaaaacaccagaaaagggtaagtactttgttgttaaagttaagcacaatttttctttcttttaatgtttagcttgatgcagactctttgtaggat

SEQ ID NO: 40652 - DNA, 201 bp, Homo sapiens; identical to SEQ ID NO: 40301

SEQ ID NO: 40653 - DNA, 201 bp, Homo sapiens; identical to SEQ ID NO: 40303

SEQ ID NO: 40654 - DNA, 201 bp, Homo sapiens; identical to SEQ ID NO: 40170

SEQ ID NO: 40655 - DNA, 201 bp, Homo sapiens; identical to SEQ ID NO: 40171

SEQ ID NO: 40656 - DNA, 201 bp, Homo sapiens; identical to SEQ ID NO: 40172

SEQ ID NO: 40657 - DNA, 201 bp, Homo sapiens; identical to SEQ ID NO: 40173

SEQ ID NO: 40658 - DNA, 201 bp, Homo sapiens; identical to SEQ ID NO: 40175

SEQ ID NO: 40659 - DNA, 201 bp, Homo sapiens; identical to SEQ ID NO: 40388

SEQ ID NO: 40660 - DNA, 201 bp, Homo sapiens; identical to SEQ ID NO: 40176

SEQ ID NO: 40661 - DNA, 201 bp, Homo sapiens; identical to SEQ ID NO: 40178

SEQ ID NO: 40662 - DNA, 201 bp, Homo sapiens; identical to SEQ ID NO: 40179

SEQ ID NO: 40663 - DNA, 201 bp, Homo sapiens; identical to SEQ ID NO: 40180

SEQ ID NO: 40664 - DNA, 201 bp, Homo sapiens; identical to SEQ ID NO: 40524

SEQ ID NO: 40665 - DNA, 201 bp, Homo sapiens; identical to SEQ ID NO: 40525

SEQ ID NO: 40666 - DNA, 201 bp, Homo sapiens; identical to SEQ ID NO: 40526

SEQ ID NO: 40667 - DNA, 201 bp, Homo sapiens; identical to SEQ ID NO: 40527

SEQ ID NO: 40668 - DNA, 201 bp, Homo sapiens; identical to SEQ ID NO: 40182

SEQ ID NO: 40669 - DNA, 201 bp, Homo sapiens; identical to SEQ ID NO: 40183

SEQ ID NO: 40670 - DNA, 201 bp, Homo sapiens; identical to SEQ ID NO: 40184

SEQ ID NO: 40671 - DNA, 201 bp, Homo sapiens; identical to SEQ ID NO: 40185

SEQ ID NO: 40672 - DNA, 201 bp, Homo sapiens; identical to SEQ ID NO: 40186

SEQ ID NO: 40673 - DNA, 201 bp, Homo sapiens; identical to SEQ ID NO: 40332

SEQ ID NO: 40674 - DNA, 201 bp, Homo sapiens; identical to SEQ ID NO: 40188

SEQ ID NO: 40675 - DNA, 201 bp, Homo sapiens; identical to SEQ ID NO: 40535

SEQ ID NO: 40676 - DNA, 201 bp, Homo sapiens; identical to SEQ ID NO: 40191

SEQ ID NO: 40677 - DNA, 201 bp, Homo sapiens; identical to SEQ ID NO: 40190

SEQ ID NO: 40678 - DNA, 201 bp, Homo sapiens; identical to SEQ ID NO: 40192

SEQ ID NO: 40679 - DNA, 201 bp, Homo sapiens; identical to SEQ ID NO: 40193

SEQ ID NO: 40680 - DNA, 201 bp, Homo sapiens; identical to SEQ ID NO: 40194

SEQ ID NO: 40681 - DNA, 201 bp, Homo sapiens; identical to SEQ ID NO: 40196

SEQ ID NO: 40682 - DNA, 201 bp, Homo sapiens; identical to SEQ ID NO: 40410

SEQ ID NO: 40683 - DNA, 201 bp, Homo sapiens; identical to SEQ ID NO: 40195

SEQ ID NO: 40684 - DNA, 201 bp, Homo sapiens; identical to SEQ ID NO: 40199

SEQ ID NO: 40685 - DNA, 201 bp, Homo sapiens; identical to SEQ ID NO: 40198

SEQ ID NO: 40686 - DNA, 201 bp, Homo sapiens; identical to SEQ ID NO: 40200

SEQ ID NO: 40687 - DNA, 201 bp, Homo sapiens; identical to SEQ ID NO: 40201

SEQ ID NO: 40688 - DNA, 201 bp, Homo sapiens; identical to SEQ ID NO: 40202

SEQ ID NO: 40689 - DNA, 201 bp, Homo sapiens; identical to SEQ ID NO: 40203

SEQ ID NO: 40690 - DNA, 201 bp, Homo sapiens; identical to SEQ ID NO: 40204

SEQ ID NO: 40691 - DNA, 201 bp, Homo sapiens; identical to SEQ ID NO: 40205

SEQ ID NO: 40692 - DNA, 201 bp, Homo sapiens; identical to SEQ ID NO: 40206

SEQ ID NO: 40693 - DNA, 201 bp, Homo sapiens; identical to SEQ ID NO: 40207

SEQ ID NO: 40694 - DNA, 201 bp, Homo sapiens; identical to SEQ ID NO: 40350

SEQ ID NO: 40695 - DNA, 201 bp, Homo sapiens; identical to SEQ ID NO: 40208

SEQ ID NO: 40696 - DNA, 201 bp, Homo sapiens; identical to SEQ ID NO: 40209

SEQ ID NO: 40697 - DNA, 201 bp, Homo sapiens; identical to SEQ ID NO: 40210

SEQ ID NO: 40698 - DNA, 201 bp, Homo sapiens; identical to SEQ ID NO: 40211

SEQ ID NO: 40699 - DNA, 201 bp, Homo sapiens; identical to SEQ ID NO: 40355

SEQ ID NO: 40700 - DNA, 201 bp, Homo sapiens; identical to SEQ ID NO: 40356

SEQ ID NO: 40701 - DNA, 201 bp, Homo sapiens; identical to SEQ ID NO: 40357

SEQ ID NO: 40702 - DNA, 201 bp, Homo sapiens; identical to SEQ ID NO: 40358

SEQ ID NO: 40703 - DNA, 201 bp, Homo sapiens; identical to SEQ ID NO: 40563

SEQ ID NO: 40704 - DNA, 201 bp, Homo sapiens; identical to SEQ ID NO: 40216

SEQ ID NO: 40705 - DNA, 201 bp, Homo sapiens; identical to SEQ ID NO: 40430

SEQ ID NO: 40706 - DNA, 201 bp, Homo sapiens; identical to SEQ ID NO: 40218

SEQ ID NO: 40707 - DNA, 201 bp, Homo sapiens; identical to SEQ ID NO: 40219

SEQ ID NO: 40708 - DNA, 201 bp, Homo sapiens; identical to SEQ ID NO: 40221

SEQ ID NO: 40709 - DNA, 201 bp, Homo sapiens; identical to SEQ ID NO: 40220

SEQ ID NO: 40710 - DNA, 201 bp, Homo sapiens; identical to SEQ ID NO: 40435

SEQ ID NO: 40711 - DNA, 201 bp, Homo sapiens; identical to SEQ ID NO: 40436

SEQ ID NO: 40712 - DNA, 201 bp, Homo sapiens; identical to SEQ ID NO: 40437

SEQ ID NO: 40713 - DNA, 201 bp, Homo sapiens; identical to SEQ ID NO: 40438

SEQ ID NO: 40714 - DNA, 201 bp, Homo sapiens; identical to SEQ ID NO: 40439

SEQ ID NO: 40715 - DNA, 201 bp, Homo sapiens; identical to SEQ ID NO: 40440

SEQ ID NO: 40716 - DNA, 201 bp, Homo sapiens; identical to SEQ ID NO: 40224

SEQ ID NO: 40717 - DNA, 201 bp, Homo sapiens; identical to SEQ ID NO: 40225

SEQ ID NO: 40718 - DNA, 201 bp, Homo sapiens; identical to SEQ ID NO: 40226

SEQ ID NO: 40719 - DNA, 201 bp, Homo sapiens; identical to SEQ ID NO: 40368

SEQ ID NO: 40720 - DNA, 201 bp, Homo sapiens; identical to SEQ ID NO: 40227

SEQ ID NO: 40721 - DNA, 201 bp, Homo sapiens; identical to SEQ ID NO: 40230

SEQ ID NO: 40722 - DNA, 201 bp, Homo sapiens; identical to SEQ ID NO: 40231

SEQ ID NO: 40723 - DNA, 201 bp, Homo sapiens; identical to SEQ ID NO: 40229

SEQ ID NO: 40724 - DNA, 201 bp, Homo sapiens; identical to SEQ ID NO: 40232

SEQ ID NO: 40725 - DNA, 201 bp, Homo sapiens; identical to SEQ ID NO: 40233

SEQ ID NO: 40726 - DNA, 201 bp, Homo sapiens; identical to SEQ ID NO: 40234

SEQ ID NO: 40727 - DNA, 201 bp, Homo sapiens; identical to SEQ ID NO: 40235

SEQ ID NO: 40728 - DNA, 201 bp, Homo sapiens; identical to SEQ ID NO: 40305

SEQ ID NO: 40729 - DNA, 201 bp, Homo sapiens; identical to SEQ ID NO: 40451

SEQ ID NO: 40730 - DNA, 201 bp, Homo sapiens; identical to SEQ ID NO: 40306

SEQ ID NO: 40731 - DNA, 201 bp, Homo sapiens; identical to SEQ ID NO: 40239

SEQ ID NO: 40732 - DNA, 201 bp, Homo sapiens; identical to SEQ ID NO: 40241

SEQ ID NO: 40733 - DNA, 201 bp, Homo sapiens; identical to SEQ ID NO: 40240

SEQ ID NO: 40734 - DNA, 201 bp, Homo sapiens; identical to SEQ ID NO: 40242

SEQ ID NO: 40735 - DNA, 201 bp, Homo sapiens; identical to SEQ ID NO: 40244

SEQ ID NO: 40736 - DNA, 201 bp, Homo sapiens; identical to SEQ ID NO: 40243

SEQ ID NO: 40737 - DNA, 201 bp, Homo sapiens; identical to SEQ ID NO: 40245

SEQ ID NO: 40738 - DNA, 201 bp, Homo sapiens; identical to SEQ ID NO: 40246

SEQ ID NO: 40739 - DNA, 201 bp, Homo sapiens; identical to SEQ ID NO: 40248

SEQ ID NO: 40740 - DNA, 201 bp, Homo sapiens; identical to SEQ ID NO: 40247

SEQ ID NO: 40741 - DNA, 201 bp, Homo sapiens; identical to SEQ ID NO: 40250

SEQ ID NO: 40742 - DNA, 201 bp, Homo sapiens; identical to SEQ ID NO: 40249

SEQ ID NO: 40743 - DNA, 201 bp, Homo sapiens; identical to SEQ ID NO: 40251

SEQ ID NO: 40744 - DNA, 201 bp, Homo sapiens; identical to SEQ ID NO: 40252

SEQ ID NO: 40745 - DNA, 201 bp, Homo sapiens; identical to SEQ ID NO: 40253

SEQ ID NO: 40746 - DNA, 201 bp, Homo sapiens; identical to SEQ ID NO: 40254

SEQ ID NO: 40747 - DNA, 201 bp, Homo sapiens; identical to SEQ ID NO: 40255

SEQ ID NO: 40748 - DNA, 201 bp, Homo sapiens; identical to SEQ ID NO: 40256

SEQ ID NO: 40749 - DNA, 201 bp, Homo sapiens; identical to SEQ ID NO: 40257

SEQ ID NO: 40750 - DNA, 201 bp, Homo sapiens; identical to SEQ ID NO: 40258

SEQ ID NO: 40751 - DNA, 201 bp, Homo sapiens; identical to SEQ ID NO: 40259

SEQ ID NO: 40752 - DNA, 201 bp, Homo sapiens; identical to SEQ ID NO: 40260

SEQ ID NO: 40753 - DNA, 201 bp, Homo sapiens; identical to SEQ ID NO: 40262

SEQ ID NO: 40754 - DNA, 201 bp, Homo sapiens; identical to SEQ ID NO: 40261

SEQ ID NO: 40755 - DNA, 201 bp, Homo sapiens; identical to SEQ ID NO: 40263

SEQ ID NO: 40756 - DNA, 201 bp, Homo sapiens; identical to SEQ ID NO: 40265

SEQ ID NO: 40757 - DNA, 201 bp, Homo sapiens; identical to SEQ ID NO: 40266

SEQ ID NO: 40758 - DNA, 201 bp, Homo sapiens; identical to SEQ ID NO: 40267

SEQ ID NO: 40759 - DNA, 201 bp, Homo sapiens; identical to SEQ ID NO: 40269

SEQ ID NO: 40760 - DNA, 201 bp, Homo sapiens; identical to SEQ ID NO: 40268

SEQ ID NO: 40761 - DNA, 201 bp, Homo sapiens; identical to SEQ ID NO: 40270

SEQ ID NO: 40762 - DNA, 201 bp, Homo sapiens; identical to SEQ ID NO: 40271

SEQ ID NO: 40763 - DNA, 201 bp, Homo sapiens; identical to SEQ ID NO: 40272

SEQ ID NO: 40764 - DNA, 201 bp, Homo sapiens; identical to SEQ ID NO: 40273

SEQ ID NO: 40765 - DNA, 201 bp, Homo sapiens; identical to SEQ ID NO: 40274

SEQ ID NO: 40766 - DNA, 201 bp, Homo sapiens; identical to SEQ ID NO: 40275

SEQ ID NO: 40767 - DNA, 201 bp, Homo sapiens; identical to SEQ ID NO: 40276

SEQ ID NO: 40768 - DNA, 201 bp, Homo sapiens; identical to SEQ ID NO: 40277

SEQ ID NO: 40769 - DNA, 201 bp, Homo sapiens; identical to SEQ ID NO: 40278

SEQ ID NO: 40770 - DNA, 201 bp, Homo sapiens; identical to SEQ ID NO: 40280

SEQ ID NO: 40771 - DNA, 201 bp, Homo sapiens; identical to SEQ ID NO: 40279

SEQ ID NO: 40772 - DNA, 201 bp, Homo sapiens; identical to SEQ ID NO: 40282

SEQ ID NO: 40773 - DNA, 201 bp, Homo sapiens; identical to SEQ ID NO: 40633

SEQ ID NO: 40774 - DNA, 201 bp, Homo sapiens; identical to SEQ ID NO: 40284

SEQ ID NO: 40775 - DNA, 201 bp, Homo sapiens; identical to SEQ ID NO: 40283

SEQ ID NO: 40776 - DNA, 201 bp, Homo sapiens; identical to SEQ ID NO: 40285

SEQ ID NO: 40777 - DNA, 201 bp, Homo sapiens; identical to SEQ ID NO: 40286

SEQ ID NO: 40778 - DNA, 201 bp, Homo sapiens; identical to SEQ ID NO: 40287

SEQ ID NO: 40779 - DNA, 201 bp, Homo sapiens; identical to SEQ ID NO: 40288

SEQ ID NO: 40780 - DNA, 201 bp, Homo sapiens; identical to SEQ ID NO: 40289

SEQ ID NO: 40781 - DNA, 201 bp, Homo sapiens; identical to SEQ ID NO: 40291

SEQ ID NO: 40782 - DNA, 201 bp, Homo sapiens; identical to SEQ ID NO: 40290

SEQ ID NO: 40783 - DNA, 201 bp, Homo sapiens; identical to SEQ ID NO: 40292

SEQ ID NO: 40784 - DNA, 201 bp, Homo sapiens; identical to SEQ ID NO: 40293

SEQ ID NO: 40785 - DNA, 201 bp, Homo sapiens; identical to SEQ ID NO: 40294

SEQ ID NO: 40786 - DNA, 201 bp, Homo sapiens; identical to SEQ ID NO: 40295

SEQ ID NO: 40787 - DNA, 201 bp, Homo sapiens; identical to SEQ ID NO: 40296

SEQ ID NO: 40788 - DNA, 201 bp, Homo sapiens; identical to SEQ ID NO: 40297

SEQ ID NO: 40789 - DNA, 201 bp, Homo sapiens; identical to SEQ ID NO: 40298

SEQ ID NO: 40790 - DNA, 201 bp, Homo sapiens; identical to SEQ ID NO: 40299

SEQ ID NO: 40791 - DNA, 201 bp, Homo sapiens; identical to SEQ ID NO: 40300

SEQ ID NO: 40792 - DNA, 201 bp, Homo sapiens; identical to SEQ ID NO: 40651

SEQ ID NO: 40793 - DNA, 201 bp, Homo sapiens; identical to SEQ ID NO: 40301

SEQ ID NO: 40794 - DNA, 201 bp, Homo sapiens; identical to SEQ ID NO: 40303

SEQ ID NO: 40795 - DNA, 201 bp, Homo sapiens; identical to SEQ ID NO: 40170

SEQ ID NO: 40796 - DNA, 201 bp, Homo sapiens; identical to SEQ ID NO: 40171

SEQ ID NO: 40797 - DNA, 201 bp, Homo sapiens; identical to SEQ ID NO: 40172

SEQ ID NO: 40798 - DNA, 201 bp, Homo sapiens; identical to SEQ ID NO: 40173

SEQ ID NO: 40799 - DNA, 201 bp, Homo sapiens; identical to SEQ ID NO: 40388

SEQ ID NO: 40800 - DNA, 201 bp, Homo sapiens; identical to SEQ ID NO: 40175

SEQ ID NO: 40801 - DNA, 201 bp, Homo sapiens; identical to SEQ ID NO: 40176

SEQ ID NO: 40802 - DNA, 201 bp, Homo sapiens; identical to SEQ ID NO: 40177

SEQ ID NO: 40803 - DNA, 201 bp, Homo sapiens; identical to SEQ ID NO: 40178

SEQ ID NO: 40804 - DNA, 201 bp, Homo sapiens; identical to SEQ ID NO: 40179

SEQ ID NO: 40805 - DNA, 201 bp, Homo sapiens; identical to SEQ ID NO: 40180

SEQ ID NO: 40806 - DNA, 201 bp, Homo sapiens; identical to SEQ ID NO: 40181

SEQ ID NO: 40807 - DNA, 201 bp, Homo sapiens; identical to SEQ ID NO: 40182

SEQ ID NO: 40808 - DNA, 201 bp, Homo sapiens; identical to SEQ ID NO: 40183

SEQ ID NO: 40809 - DNA, 201 bp, Homo sapiens; identical to SEQ ID NO: 40184

SEQ ID NO: 40810 - DNA, 201 bp, Homo sapiens; identical to SEQ ID NO: 40185

SEQ ID NO: 40811 - DNA, 201 bp, Homo sapiens; identical to SEQ ID NO: 40186

SEQ ID NO: 40812 - DNA, 201 bp, Homo sapiens; identical to SEQ ID NO: 40332

SEQ ID NO: 40813 - DNA, 201 bp, Homo sapiens; identical to SEQ ID NO: 40188

SEQ ID NO: 40814 - DNA, 201 bp, Homo sapiens; identical to SEQ ID NO: 40189

SEQ ID NO: 40815 - DNA, 201 bp, Homo sapiens; identical to SEQ ID NO: 40190

SEQ ID NO: 40816 - DNA, 201 bp, Homo sapiens; identical to SEQ ID NO: 40191

SEQ ID NO: 40817 - DNA, 201 bp, Homo sapiens; identical to SEQ ID NO: 40192

SEQ ID NO: 40818 - DNA, 201 bp, Homo sapiens; identical to SEQ ID NO: 40193

SEQ ID NO: 40819 - DNA, 201 bp, Homo sapiens; identical to SEQ ID NO: 40194

SEQ ID NO: 40820 - DNA, 201 bp, Homo sapiens; identical to SEQ ID NO: 40195

SEQ ID NO: 40821 - DNA, 201 bp, Homo sapiens; identical to SEQ ID NO: 40410

SEQ ID NO: 40822 - DNA, 201 bp, Homo sapiens; identical to SEQ ID NO: 40196

SEQ ID NO: 40823 - DNA, 201 bp, Homo sapiens; identical to SEQ ID NO: 40198

SEQ ID NO: 40824 - DNA, 201 bp, Homo sapiens; identical to SEQ ID NO: 40199

SEQ ID NO: 40825 - DNA, 201 bp, Homo sapiens; identical to SEQ ID NO: 40200

SEQ ID NO: 40826 - DNA, 201 bp, Homo sapiens; identical to SEQ ID NO: 40201

SEQ ID NO: 40827 - DNA, 201 bp, Homo sapiens; identical to SEQ ID NO: 40202

SEQ ID NO: 40828 - DNA, 201 bp, Homo sapiens; identical to SEQ ID NO: 40203

SEQ ID NO: 40829 - DNA, 201 bp, Homo sapiens; identical to SEQ ID NO: 40204

SEQ ID NO: 40830 - DNA, 201 bp, Homo sapiens; identical to SEQ ID NO: 40205

SEQ ID NO: 40831 - DNA, 201 bp, Homo sapiens; identical to SEQ ID NO: 40206

SEQ ID NO: 40832 - DNA, 201 bp, Homo sapiens; identical to SEQ ID NO: 40207

SEQ ID NO: 40833 - DNA, 201 bp, Homo sapiens; identical to SEQ ID NO: 40350

SEQ ID NO: 40834 - DNA, 201 bp, Homo sapiens; identical to SEQ ID NO: 40208

SEQ ID NO: 40835 - DNA, 201 bp, Homo sapiens; identical to SEQ ID NO: 40209

SEQ ID NO: 40836 - DNA, 201 bp, Homo sapiens; identical to SEQ ID NO: 40210

SEQ ID NO: 40837 - DNA, 201 bp, Homo sapiens; identical to SEQ ID NO: 40211

SEQ ID NO: 40838 - DNA, 201 bp, Homo sapiens; identical to SEQ ID NO: 40355

SEQ ID NO: 40839 - DNA, 201 bp, Homo sapiens; identical to SEQ ID NO: 40356

SEQ ID NO: 40840 - DNA, 201 bp, Homo sapiens; identical to SEQ ID NO: 40357

SEQ ID NO: 40841 - DNA, 201 bp, Homo sapiens; identical to SEQ ID NO: 40358

SEQ ID NO: 40842 - DNA, 201 bp, Homo sapiens; identical to SEQ ID NO: 40216

SEQ ID NO: 40843 - DNA, 201 bp, Homo sapiens; identical to SEQ ID NO: 40430

SEQ ID NO: 40844 - DNA, 201 bp, Homo sapiens; identical to SEQ ID NO: 40218

SEQ ID NO: 40845 - DNA, 201 bp, Homo sapiens; identical to SEQ ID NO: 40219

SEQ ID NO: 40846 - DNA, 201 bp, Homo sapiens; identical to SEQ ID NO: 40220

SEQ ID NO: 40847 - DNA, 201 bp, Homo sapiens; identical to SEQ ID NO: 40221

SEQ ID NO: 40848 - DNA, 201 bp, Homo sapiens; identical to SEQ ID NO: 40435

SEQ ID NO: 40849 - DNA, 201 bp, Homo sapiens; identical to SEQ ID NO: 40436

SEQ ID NO: 40850 - DNA, 201 bp, Homo sapiens; identical to SEQ ID NO: 40437

SEQ ID NO: 40851 - DNA, 201 bp, Homo sapiens; identical to SEQ ID NO: 40438

SEQ ID NO: 40852 - DNA, 201 bp, Homo sapiens; identical to SEQ ID NO: 40439

SEQ ID NO: 40853 - DNA, 201 bp, Homo sapiens; identical to SEQ ID NO: 40440

SEQ ID NO: 40854 - DNA, 201 bp, Homo sapiens; identical to SEQ ID NO: 40224

SEQ ID NO: 40855 - DNA, 201 bp, Homo sapiens; identical to SEQ ID NO: 40225

SEQ ID NO: 40856 - DNA, 201 bp, Homo sapiens; identical to SEQ ID NO: 40226

SEQ ID NO: 40857 - DNA, 201 bp, Homo sapiens; identical to SEQ ID NO: 40227

SEQ ID NO: 40858 - DNA, 201 bp, Homo sapiens; identical to SEQ ID NO: 40368

SEQ ID NO: 40859 - DNA, 201 bp, Homo sapiens; identical to SEQ ID NO: 40230

SEQ ID NO: 40860 - DNA, 201 bp, Homo sapiens; identical to SEQ ID NO: 40231

SEQ ID NO: 40861 - DNA, 201 bp, Homo sapiens; identical to SEQ ID NO: 40229

SEQ ID NO: 40862 - DNA, 201 bp, Homo sapiens; identical to SEQ ID NO: 40232

SEQ ID NO: 40863 - DNA, 201 bp, Homo sapiens; identical to SEQ ID NO: 40233

SEQ ID NO: 40864 - DNA, 201 bp, Homo sapiens; identical to SEQ ID NO: 40234

SEQ ID NO: 40865 - DNA, 201 bp, Homo sapiens; identical to SEQ ID NO: 40235

SEQ ID NO: 40866 - DNA, 201 bp, Homo sapiens; identical to SEQ ID NO: 40305

SEQ ID NO: 40867 - DNA, 201 bp, Homo sapiens; identical to SEQ ID NO: 40451

SEQ ID NO: 40868 - DNA, 201 bp, Homo sapiens; identical to SEQ ID NO: 40306

SEQ ID NO: 40869 - DNA, 201 bp, Homo sapiens; identical to SEQ ID NO: 40239

SEQ ID NO: 40870 - DNA, 201 bp, Homo sapiens; identical to SEQ ID NO: 40240

SEQ ID NO: 40871 - DNA, 201 bp, Homo sapiens; identical to SEQ ID NO: 40241

SEQ ID NO: 40872 - DNA, 201 bp, Homo sapiens; identical to SEQ ID NO: 40242

SEQ ID NO: 40873 - DNA, 201 bp, Homo sapiens; identical to SEQ ID NO: 40244

SEQ ID NO: 40874 - DNA, 201 bp, Homo sapiens; identical to SEQ ID NO: 40243

SEQ ID NO: 40875 - DNA, 201 bp, Homo sapiens; identical to SEQ ID NO: 40245

SEQ ID NO: 40876 - DNA, 201 bp, Homo sapiens; identical to SEQ ID NO: 40246

SEQ ID NO: 40877 - DNA, 201 bp, Homo sapiens; identical to SEQ ID NO: 40247

SEQ ID NO: 40878 - DNA, 201 bp, Homo sapiens; identical to SEQ ID NO: 40248

SEQ ID NO: 40879 - DNA, 201 bp, Homo sapiens; identical to SEQ ID NO: 40249

SEQ ID NO: 40880 - DNA, 201 bp, Homo sapiens; identical to SEQ ID NO: 40250

SEQ ID NO: 40881 - DNA, 201 bp, Homo sapiens; identical to SEQ ID NO: 40251

SEQ ID NO: 40882 - DNA, 201 bp, Homo sapiens; identical to SEQ ID NO: 40252

SEQ ID NO: 40883 - DNA, 201 bp, Homo sapiens; identical to SEQ ID NO: 40253

SEQ ID NO: 40884 - DNA, 201 bp, Homo sapiens; identical to SEQ ID NO: 40254

SEQ ID NO: 40885 - DNA, 201 bp, Homo sapiens; identical to SEQ ID NO: 40255

SEQ ID NO: 40886 - DNA, 201 bp, Homo sapiens; identical to SEQ ID NO: 40256

SEQ ID NO: 40887 - DNA, 201 bp, Homo sapiens; identical to SEQ ID NO: 40257

SEQ ID NO: 40888 - DNA, 201 bp, Homo sapiens; identical to SEQ ID NO: 40258

SEQ ID NO: 40889 - DNA, 201 bp, Homo sapiens; identical to SEQ ID NO: 40259

SEQ ID NO: 40890 - DNA, 201 bp, Homo sapiens; identical to SEQ ID NO: 40260

SEQ ID NO: 40891 - DNA, 201 bp, Homo sapiens; identical to SEQ ID NO: 40261

SEQ ID NO: 40892 - DNA, 201 bp, Homo sapiens; identical to SEQ ID NO: 40262

SEQ ID NO: 40893 - DNA, 201 bp, Homo sapiens; identical to SEQ ID NO: 40263

SEQ ID NO: 40894 - DNA, 201 bp, Homo sapiens; identical to SEQ ID NO: 40264

SEQ ID NO: 40895 - DNA, 201 bp, Homo sapiens; identical to SEQ ID NO: 40265

SEQ ID NO: 40896 - DNA, 201 bp, Homo sapiens; identical to SEQ ID NO: 40266

SEQ ID NO: 40897 - DNA, 201 bp, Homo sapiens; identical to SEQ ID NO: 40267

SEQ ID NO: 40898 - DNA, 201 bp, Homo sapiens; identical to SEQ ID NO: 40268

SEQ ID NO: 40899 - DNA, 201 bp, Homo sapiens; identical to SEQ ID NO: 40269

SEQ ID NO: 40900 - DNA, 201 bp, Homo sapiens; identical to SEQ ID NO: 40270

SEQ ID NO: 40901 - DNA, 201 bp, Homo sapiens; identical to SEQ ID NO: 40271

SEQ ID NO: 40902 - DNA, 201 bp, Homo sapiens; identical to SEQ ID NO: 40272

SEQ ID NO: 40903 - DNA, 201 bp, Homo sapiens; identical to SEQ ID NO: 40273

SEQ ID NO: 40904 - DNA, 201 bp, Homo sapiens; identical to SEQ ID NO: 40274

SEQ ID NO: 40905 - DNA, 201 bp, Homo sapiens; identical to SEQ ID NO: 40275

SEQ ID NO: 40906 - DNA, 201 bp, Homo sapiens; identical to SEQ ID NO: 40276

SEQ ID NO: 40907 - DNA, 201 bp, Homo sapiens; identical to SEQ ID NO: 40277

SEQ ID NO: 40908 - DNA, 201 bp, Homo sapiens; identical to SEQ ID NO: 40491

SEQ ID NO: 40909 - DNA, 201 bp, Homo sapiens; identical to SEQ ID NO: 40278

SEQ ID NO: 40910 - DNA, 201 bp, Homo sapiens; identical to SEQ ID NO: 40279

SEQ ID NO: 40911 - DNA, 201 bp, Homo sapiens; identical to SEQ ID NO: 40280

SEQ ID NO: 40912 - DNA, 201 bp, Homo sapiens; identical to SEQ ID NO: 40281

SEQ ID NO: 40913 - DNA, 201 bp, Homo sapiens; identical to SEQ ID NO: 40282

SEQ ID NO: 40914 - DNA, 201 bp, Homo sapiens; identical to SEQ ID NO: 40283

SEQ ID NO: 40915 - DNA, 201 bp, Homo sapiens; identical to SEQ ID NO: 40284

SEQ ID NO: 40916 - DNA, 201 bp, Homo sapiens; identical to SEQ ID NO: 40285

SEQ ID NO: 40917 - DNA, 201 bp, Homo sapiens; identical to SEQ ID NO: 40286

SEQ ID NO: 40918 - DNA, 201 bp, Homo sapiens; identical to SEQ ID NO: 40501

SEQ ID NO: 40919 - DNA, 201 bp, Homo sapiens; identical to SEQ ID NO: 40502

SEQ ID NO: 40920 - DNA, 201 bp, Homo sapiens; identical to SEQ ID NO: 40288

SEQ ID NO: 40921 - DNA, 201 bp, Homo sapiens; identical to SEQ ID NO: 40289

SEQ ID NO: 40922 - DNA, 201 bp, Homo sapiens; identical to SEQ ID NO: 40291

SEQ ID NO: 40923 - DNA, 201 bp, Homo sapiens; identical to SEQ ID NO: 40290

SEQ ID NO: 40924 - DNA, 201 bp, Homo sapiens; identical to SEQ ID NO: 40292

SEQ ID NO: 40925 - DNA, 201 bp, Homo sapiens; identical to SEQ ID NO: 40293

SEQ ID NO: 40926 - DNA, 201 bp, Homo sapiens; identical to SEQ ID NO: 40294

SEQ ID NO: 40927 - DNA, 201 bp, Homo sapiens; identical to SEQ ID NO: 40295

SEQ ID NO: 40928 - DNA, 201 bp, Homo sapiens; identical to SEQ ID NO: 40296

SEQ ID NO: 40929 - DNA, 201 bp, Homo sapiens; identical to SEQ ID NO: 40297

SEQ ID NO: 40930 - DNA, 201 bp, Homo sapiens; identical to SEQ ID NO: 40298

SEQ ID NO: 40931 - DNA, 201 bp, Homo sapiens; identical to SEQ ID NO: 40299

SEQ ID NO: 40932 - DNA, 201 bp, Homo sapiens; identical to SEQ ID NO: 40300

SEQ ID NO: 40933 - DNA, 201 bp, Homo sapiens; identical to SEQ ID NO: 40301

SEQ ID NO: 40934 - DNA, 201 bp, Homo sapiens; identical to SEQ ID NO: 40302

SEQ ID NO: 40935 - DNA, 201 bp, Homo sapiens; identical to SEQ ID NO: 40513

SEQ ID NO: 40936 - DNA, 201 bp, Homo sapiens
gacatctgcctcacctcagtgcagaagagagtgatccggaccctctggacagtgctagatgccattgatcagatgtggctgccagtggtgaggacttggcrcctcaatgagcggcactatgggggtctaaccggtctcaataaagcagaaactgctgcaaagcatggtgaggcccaggtgaagatctggaggcgctcctat

SEQ ID NO: 40937 - DNA, 153 bp, Homo sapiens
attgcagcccaccgccatggccgcctacaaactggtgctgatccggcacggcragagcacatggaacctggagaaccgcttcagctgctggtacgacgccgatctgagcccggcgggccacgaggaggcgaagcgcggcgggcaggcgctacg

SEQ ID NO: 40938 - DNA, 201 bp, Homo sapiens
acctcagtgcagaagagagtgatccggaccctctggacagtgctagatgccattgatcagatgtggctgccagtggtgaggacttggcgcctcaatgagcrgcactatgggggtctaaccggtctcaataaagcagaaactgctgcaaagcatggtgaggcccaggtgaagatctggaggcgctcctatgatgtcccacca

SEQ ID NO: 40939 - DNA, 201 bp, Homo sapiens; identical to SEQ ID NO: 40936

SEQ ID NO: 40940 - DNA, 154 bp, Homo sapiens
tattgcagcccaccgccatggccgcctacaaactggtgctgatccggcacggcragagcacatggaacctggagaaccgcttcagctgctggtacgacgccgatctgagcccggcgggccacgaggaggcgaagcgcggcgggcaggcgctacg

SEQ ID NO: 40941 - DNA, 201 bp, Homo sapiens; identical to SEQ ID NO: 40938

SEQ ID NO: 40942 - DNA, 201 bp, Homo sapiens; identical to SEQ ID NO: 40936

SEQ ID NO: 40943 - DNA, 154 bp, Homo sapiens; identical to SEQ ID NO: 40940

SEQ ID NO: 40944 - DNA, 201 bp, Homo sapiens; identical to SEQ ID NO: 40938

SEQ ID NO: 40945 - DNA, 153 bp, Homo sapiens; identical to SEQ ID NO: 40937

SEQ ID NO: 40946 - DNA, 201 bp, Homo sapiens
gagccaggtgggagaaggagaagcacgaagacggggtgaagtggagacagctggagcacaagggcccgtacttcgcacccccatacgagccccttcccgayggagtgcgtttcttctatgaaggaaggcctgtgagattgagcgtggcagcggaggaggtcgccactttttatgggaggatgttagatcatgaatacacaa

SEQ ID NO: 40947 - DNA, 201 bp, Homo sapiens
cagcagggactcgaagatccccgagccgccggcggggcaccagtggaaggaggtgcgctccgataacaccgtcacgtggctggcagcttggaccgagagcrttcagaactccatcaagtacatcatgctgaacccttgctcgaagctgaagggggagacagcttggcagaagtttgaaacagctcgacgcctgcggggatt

SEQ ID NO: 40948 - DNA, 201 bp, Homo sapiens
ggagcaggtggctgaggccagggcagagctgaggagggcgagggctgagcacaaagcccaaggggatggcaagtccaggagtgtcctggagaagaagaggyggctcctggagaagctgcaggagcagctggcgcagctgagtgtgcaggccacggacaaggaggagaacaagcaggtggccctgggcacgtccaagctcaa

SEQ ID NO: 40949 - DNA, 201 bp, Homo sapiens
ggaaatgaagacgagacagcgggcggtggccctgtatttcatcgataaggtaggtgtacaagaacttacagctctttatggagaacaaggacccccgggaygacctcttcgacaggctgaccacgaccagcctgaacaagcacctccaggagctgatggacgggctgacggccaaggtgttccggacctacaacgcctcca

SEQ ID NO: 40950 - DNA, 201 bp, Homo sapiens
gttcgcctgggctctcgccatggcaggagaagactttgaattctaacgacgagccgtgttgaaacttcttttatgctttaggtactgattttctcctctcygcctggctggaacatccgtctgcatcggacgggcttccttctgcacctgtgacctcacaagggctctccttggggaggcaggaccagagcagccctgagt

SEQ ID NO: 40951 - DNA, 201 bp, Homo sapiens; identical to SEQ ID NO: 40946

SEQ ID NO: 40952 - DNA, 201 bp, Homo sapiens; identical to SEQ ID NO: 40948

SEQ ID NO: 40953 - DNA, 201 bp, Homo sapiens; identical to SEQ ID NO: 40947

SEQ ID NO: 40954 - DNA, 201 bp, Homo sapiens
gggaaatgaagacgagacagcgggcggtggccctgtatttcatcgataaggtagtgtacaagaacttacagctctttatggagaacaaggacccccgggaygacctcttcgacaggctgaccacgaccagcctgaacaagcacctccaggagctgatggacgggctgacggccaaggtgttccggacctacaacgcctcca

SEQ ID NO: 40955 - DNA, 102 bp, Homo sapiens
cyctttcccggaggctggcagatgcgcgtggtgcggctgctgcggctccgggcggctctgacgctgctcggggaggtcccccgccgcccggcctcccggggt

SEQ ID NO: 40956 - DNA, 201 bp, Homo sapiens
cggctctgacgctgctcggggaggtcccccgccgcccggcctcccggggtgtcccgggctcgcgcaggacgcagaagggcagtggagccaggcacaagccrcatggatccagtggccctggtggccgttggtggtcccaggcgctttcctggaggacatgtgagaagccctgccggcgcatactgggcctggggtagccgc

SEQ ID NO: 40957 - DNA, 201 bp, Homo sapiens
tcccaggcgctttcctggaggacatgtgagaagccctgccggcgcatactgggcctggggtagccgcatggggatgggtctctgcgcatgaaatgctggagtttccgaagagctggagagttgacagcctcactggtgggagaaggagaagcacgaagacggggtgaagtggagacagctggagcacaagggcccgtactt

SEQ ID NO: 40958 - DNA, 201 bp, Homo sapiens
ctcactggtgggagaaggagaagcacgaagacggggtgaagtggagacagctggagcacaagggcccgtacttcgcacccccatacgagccccttcccgayggagtgcgtttcttctatgaaggaaggcctgtgagattgagcgtggcagcggaggaggtcgccactttttatgggaggatgttagatcatgaatacacaa

SEQ ID NO: 40959 - DNA, 201 bp, Homo sapiens; identical to SEQ ID NO: 40947

SEQ ID NO: 40960 - DNA, 201 bp, Homo sapiens; identical to SEQ ID NO: 40948

SEQ ID NO: 40961 - DNA, 201 bp, Homo sapiens; identical to SEQ ID NO: 40949

SEQ ID NO: 40962 - DNA, 201 bp, Homo sapiens
cagccaggtgggagaaggagaagcacgaagacggggtgaagtggagacagctggagcacaagggcccgtacttcgcacccccatacgagccccttcccgayggagtgcgtttcttctatgaaggaaggcctgtgagattgagcgtggcagcggaggaggtcgccactttttatgggaggatgttagatcatgaatacacaa

SEQ ID NO: 40963 - DNA, 201 bp, Homo sapiens; identical to SEQ ID NO: 40947

SEQ ID NO: 40964 - DNA, 201 bp, Homo sapiens; identical to SEQ ID NO: 40948

SEQ ID NO: 40965 - DNA, 201 bp, Homo sapiens
tcgggaaatgaagacgagacagcgggcggtggccctgtatttcatcgataagggtgtacaagaacttacagctctttatggagaacaaggacccccgggaygacctcttcgacaggctgaccacgaccagcctgaacaagcacctccaggagctgatggacgggctgacggccaaggtgttccggacctacaacgcctcca

SEQ ID NO: 40966 - DNA, 201 bp, Homo sapiens
ctggcaggtgggagaaggagaagcacgaagacggggtgaagtggagacagctggagcacaagggcccgtacttcgcacccccatacgagccccttcccgayggagtgcgtttcttctatgaaggaaggcctgtgagattgagcgtggcagcggaggaggtcgccactttttatgggaggatgttagatcatgaatacacaa

SEQ ID NO: 40967 - DNA, 201 bp, Homo sapiens; identical to SEQ ID NO: 40947

SEQ ID NO: 40968 - DNA, 201 bp, Homo sapiens; identical to SEQ ID NO: 40948

SEQ ID NO: 40969 - DNA, 201 bp, Homo sapiens; identical to SEQ ID NO: 40949

SEQ ID NO: 40970 - DNA, 201 bp, Homo sapiens
tggagccagacccttcagagacttcctgttgctctgaggacactcatcccagccgaccaggcccaccaggcccccaacagcactacctggctggggtcacrtgcaggtctcctggctctggcaggtgggagaaggagaagcacgaagacggggtgaagtggagacagctggagcacaagggcccgtacttcgcacccccat

SEQ ID NO: 40971 - DNA, 201 bp, Homo sapiens; identical to SEQ ID NO: 40946

SEQ ID NO: 40972 - DNA, 201 bp, Homo sapiens; identical to SEQ ID NO: 40947

SEQ ID NO: 40973 - DNA, 201 bp, Homo sapiens; identical to SEQ ID NO: 40948

SEQ ID NO: 40974 - DNA, 201 bp, Homo sapiens; identical to SEQ ID NO: 40949

SEQ ID NO: 40975 - DNA, 201 bp, Homo sapiens
gctcgcgcaggacgcagaagggcagtggagccaggagcttgggacccaaagagagccccagatggggcagggtgtcttgggaggagggagttctggcctgygcttggagctggggctggctgtgggccctgcattgaggcacatctctccgagggtgcacaggcagacccttcagagacttcctgttgctctgaggacact

SEQ ID NO: 40976 - DNA, 201 bp, Homo sapiens; identical to SEQ ID NO: 40966

SEQ ID NO: 40977 - DNA, 201 bp, Homo sapiens; identical to SEQ ID NO: 40947

SEQ ID NO: 40978 - DNA, 201 bp, Homo sapiens; identical to SEQ ID NO: 40948

SEQ ID NO: 40979 - DNA, 201 bp, Homo sapiens; identical to SEQ ID NO: 40949

SEQ ID NO: 40980 - DNA, 201 bp, Homo sapiens
cacaggcagacccttcagagacttcctgttgctctgaggacactcatcccagccgaccaggcccaccaggcccccaacagcactacctggctggggtcacrtgcaggtctcctggctctggcaggtgggagaaggagaagcacgaagacggggtgaagtggagacagctggagcacaagggcccgtacttcgcacccccat

SEQ ID NO: 40981 - DNA, 201 bp, Homo sapiens
gacagtggcctgggactcggaggcatcaggagggcctgtggagctcagcctgcccacagggagtgggaggtggctgagcgccctgctcggtggacacctgrgccacagcaggttgtctttgacacctcgctgatgctccagggtggcggcacgcgtggggtggggttggcctagaggagcaggtcccagctacaccaggcg

SEQ ID NO: 40982 - DNA, 201 bp, Homo sapiens
tgacagtggcctgggactcggaggcatcaggagggcctgtggagctcagcctgcccacagggagtgggaggtggctgagcgccctgctcggtggacacctragccacagcaggttgtctttgacacctcgctgatgctccagggtggcggcacgcgtggggtggggttggcctagaggagcaggtcccagctacaccaggc

SEQ ID NO: 40983 - DNA, 201 bp, Homo sapiens
ggtgctgacagtggcctgggactcggaggcatcaggagggcctgtggagctcagcctgcccacagggagtgggaggtggctgagcgccctgctcggtggayacctgagccacagcaggttgtctttgacacctcgctgatgctccagggtggcggcacgcgtggggtggggttggcctagaggagcaggtcccagctacac

SEQ ID NO: 40984 - DNA, 201 bp, Homo sapiens; identical to SEQ ID NO: 40947

SEQ ID NO: 40985 - DNA, 121 bp, Homo sapiens
gctgatgctccagggtggcggcacgcgtggggtggggttggcctagaggagcaggtcccagctacaccaggcggctctggtgtctctgctgcatggaggaygctcgcccttgccgagcacc

SEQ ID NO: 40986 - DNA, 201 bp, Homo sapiens; identical to SEQ ID NO: 40949

SEQ ID NO: 40987 - DNA, 201 bp, Homo sapiens
ggcctatggggggcctgggttttccaggaggcctctgttcagtcccagcattgcccttgtcccgtgtcccctggggtcagcacaggccctccctgtgacarggacccatgatgctgagtcctgtgtcatcagctctccctgccctgaacgttcggatggacagggtgaagtgggggtgctgacagtggcctgggactcgga

SEQ ID NO: 40988 - DNA, 198 bp, Homo sapiens
gcccacagggagtgggaggtggctgagcgccctgctcggtggacacctgagccacagcaggttgtctttgacacctcgctgatgctccagggtggcggcaygcgtggggtggggttggcctagaggagcaggtcccagctacaccaggcggctctggtgtctctgctgcatggaggacgctcgcccttgccgagcacc

SEQ ID NO: 40989 - DNA, 201 bp, Homo sapiens
tggcctatggggggcctgggttttccaggaggcctctgttcagtcccagcattgcccttgtcccgtgtcccctggggtcagcacaggccctccctgtgacmgggacccatgatgctgagtcctgtgtcatcagctctccctgccctgaacgttcggatggacagggtgaagtgggggtgctgacagtggcctgggactcgg

SEQ ID NO: 40990 - DNA, 201 bp, Homo sapiens; identical to SEQ ID NO: 40946

SEQ ID NO: 40991 - DNA, 201 bp, Homo sapiens; identical to SEQ ID NO: 40948

SEQ ID NO: 40992 - DNA, 201 bp, Homo sapiens
gatccacaaatgctaaagagctgtcttccaagggagtgaaaatctgggatgccaatggatcccgagactttttggacagcctgggattctccaccagagargaaggggacttgggcccagtttatggcttccagtggaggcattttggggcagaatacagagatatggaatcagattattcaggacagggagttgaccaac

SEQ ID NO: 40993 - DNA, 201 bp, Homo sapiens
actaaccatactcttagagggaagcaatctggttttgtgcagaggcacctgagggaggcaggaccctgggaacttcccccagccacatggttgattgtgtgacgttgggcaagtcacattttgctgcactttcaccttcagatcatgaggttgggcccagaggattttttttttttttttttttttttgagacagagtttt

SEQ ID NO: 40994 - DNA, 201 bp, Homo sapiens
tccaccagagaagaaggggacttgggcccagtttatggcttccagtggaggcattttggggcagaatacagagatatggaatcagattattcaggacaggkagttgaccaactgcaaagagtgattgacaccatcaaaaccaaccctgacgacagaagaatcatcatgtgcgcttggaatccaagaggttgaaagaacccc

SEQ ID NO: 40995 - DNA, 201 bp, Homo sapiens
tactaaccatactcttagagggaagcaatctggttttgtgcagaggcacctgagggaggcaggaccctgggaacttcccccagccacatggttgattgtgtgacgttgggcaagtcacattttgctgcactttcaccttcagatcatgaggttgggcccagaggattttttttttttttttttttttttgagacagagttt

SEQ ID NO: 40996 - DNA, 201 bp, Homo sapiens
tttatactaaccatactcttagagggaagcaatctggttttgtgcagaggcacctgagggaggcaggaccctgggaacttcccccagccacatggttgattgtgtgacgttgggcaagtcacattttgctgcactttcaccttcagatcatgaggttgggcccagaggattttttttttttttttttttttttgagacaga

SEQ ID NO: 40997 - DNA, 201 bp, Homo sapiens
cctgagagatgaattccctctgctgacaaccaaacgtgtgttctggaagggtgttttggaggagttgctgtggtttatcaagggatccacaaatgctaaasagctgtcttccaagggagtgaaaatctgggatgccaatggatcccgagactttttggacagcctgggattctccaccagagaagaaggggacttgggccc

SEQ ID NO: 40998 - DNA, 201 bp, Homo sapiens
catttatactaaccatactcttagagggaagcaatctggttttgtgcagaggcacctgagggaggcaggaccctgggaacttcccccagccacatggttgattgtgtgacgttgggcaagtcacattttgctgcactttcaccttcagatcatgaggttgggcccagaggattttttttttttttttttttttttgagaca

SEQ ID NO: 40999 - DNA, 201 bp, Homo sapiens
gatccacaaatgctaaagagctgtcttccaagggagtgaaaatctgggatgccaatggatcccgagactttttggacagcctgggattctccaccagagargaaggggacttgggcccagtttatggcttccagtggaggcattttggggcagaatacagagatatggaatcagatcttcctctgatggcgctgcctccat

SEQ ID NO: 41000 - DNA, 201 bp, Homo sapiens
aattgatgacttcaaagctgaagactttcagattgaagggtacaatccgcatccaactattaaaatggaaatggctgtttagggtgctttcaaaggagctygaaggatattgtcagtctttaggggttgggctggatgccgaggtaaaagttctttttgctctaaaagaaaaaggaactaggtcaaaaatctgtccgtgac

SEQ ID NO: 41001 - DNA, 201 bp, Homo sapiens; identical to SEQ ID NO: 40997

SEQ ID NO: 41002 - DNA, 201 bp, Homo sapiens
atggctgtttagggtgctttcaaaggagctcgaaggatattgtcagtctttaggggttgggctggatgccgaggtaaaagttctttttgctctaaaagaaraaggaactaggtcaaaaatctgtccgtgacctatcagttattaatttttaaggatgttgccactggcaaatgtaactgtgccagttctttccataataaa

SEQ ID NO: 41003 - DNA, 201 bp, Homo sapiens
ctccgctgcggcgtcaggaaggacgaccgcacgggcaccggcaccctgtcggtattcggcatgcaggcgcgctacagcctgagagattattcaggacaggkagttgaccaactgcaaagagtgattgacaccatcaaaaccaaccctgacgacagaagaatcatcatgtgcgcttggaatccaagagatcttcctctgatg

SEQ ID NO: 41004 - DNA, 201 bp, Homo sapiens; identical to SEQ ID NO: 41000

SEQ ID NO: 41005 - DNA, 201 bp, Homo sapiens; identical to SEQ ID NO: 41002

SEQ ID NO: 41006 - DNA, 201 bp, Homo sapiens; identical to SEQ ID NO: 40992

SEQ ID NO: 41007 - DNA, 201 bp, Homo sapiens
tccaccagagaagaaggggacttgggcccagtttatggcttccagtggaggcattttggggcagaatacagagatatggaatcagattattcaggacaggkagttgaccaactgcaaagagtgattgacaccatcaaaaccaaccctgacgacagaagaatcatcatgtgcgcttggaatccaagagatcttcctctgatg

SEQ ID NO: 41008 - DNA, 201 bp, Homo sapiens; identical to SEQ ID NO: 41000

SEQ ID NO: 41009 - DNA, 201 bp, Homo sapiens; identical to SEQ ID NO: 40997

SEQ ID NO: 41010 - DNA, 201 bp, Homo sapiens; identical to SEQ ID NO: 41002

SEQ ID NO: 41011 - DNA, 201 bp, Homo sapiens; identical to SEQ ID NO: 41000

SEQ ID NO: 41012 - DNA, 136 bp, Homo sapiens
agacggggtttcactatgttggccaggctagtctcraactcaagttggcctcaagtgatctgcccaccctggcgtcccagtgttgggatttcaggcatgagccactgtgcctggccatgtaatagagacttttaat

SEQ ID NO: 41013 - DNA, 201 bp, Homo sapiens; identical to SEQ ID NO: 41002

SEQ ID NO: 41014 - DNA, 201 bp, Homo sapiens
ttcagctctgatggaagagcattgcttcagccgtaaatggacacctgcagaaaccttgcaccgatggatagtctccctcagctccgtgccatcgctgcagrggctgttatggacatcactgcagcccagtggctctctctcctggtctccaccatatgagttggcttctgtttctctcctgttttactttgcctttagctg

SEQ ID NO: 41015 - DNA, 201 bp, Homo sapiens
actgtgcctggccatgtaatagagacttttaatataggagggtgtaccagaagcaccagtttcctgtggcaaacagaattattcctgctgtatttgtaatytggtgccacgaggtagcccagatcccttcagctctgatggaagagcattgcttcagccgtaaatggacacctgcagaaaccttgcaccgatggatagtct

SEQ ID NO: 41016 - DNA, 201 bp, Homo sapiens; identical to SEQ ID NO: 40992

SEQ ID NO: 41017 - DNA, 201 bp, Homo sapiens; identical to SEQ ID NO: 41007

SEQ ID NO: 41018 - DNA, 201 bp, Homo sapiens; identical to SEQ ID NO: 41000

SEQ ID NO: 41019 - DNA, 201 bp, Homo sapiens
tttttcagatgaattccctctgctgacaaccaaacgtgtgttctggaagggtgttttggaggagttgctgtggtttatcaagggatccacaaatgctaaasagctgtcttccaagggagtgaaaatctgggatgccaatggatcccgagactttttggacagcctgggattctccaccagagaagaaggggacttgggccc

SEQ ID NO: 41020 - DNA, 201 bp, Homo sapiens; identical to SEQ ID NO: 41002

SEQ ID NO: 41021 - DNA, 148 bp, Homo sapiens
aagctgctgcgtgggccaagttacttgtgcagattattcaggacaggkagttgaccaactgcaaagagtgattgacaccatcaaaaccaaccctgacgacagaagaatcatcatgtgcgcttggaatccaagagatcttcctctgatg

SEQ ID NO: 41022 - DNA, 201 bp, Homo sapiens; identical to SEQ ID NO: 41000

SEQ ID NO: 41023 - DNA, 201 bp, Homo sapiens; identical to SEQ ID NO: 41002

SEQ ID NO: 41024 - DNA, 201 bp, Homo sapiens
cttaacaaaaaaatatattttgtgatcttgaggtcacttcgtttaggtcattatctcaacccaacctccccaaactctggtttgagccaatatgtgttctrttgttctcagagcaccagccgactgtacaacaattgttataaaaatgtttattgtttaccaaaaccagtggacctcttatcaaatgctgcttggtaacaa

SEQ ID NO: 41025 - DNA, 201 bp, Homo sapiens
tttcttttaaagttggcaaacaaacattttctgtaatggacaagatagatagattagatagatagatagatagatagatgatgattgattgatgattgatwgtaaattatttcaggctttgcaggctataaagtgctgcagctccttagctttgctgttgttatagtgtagctggagccatagacagttagttagttagtt

SEQ ID NO: 41026 - DNA, 201 bp, Homo sapiens
agacttcatttcttttaaagttggcaaacaaacattttctgtaatggacaagatagatagattagatagatagatagatagatagatgatgattgattgadgattgatagtaaattatttcaggctttgcaggctataaagtgctgcagctccttagctttgctgttgttatagtgtagctggagccatagacagttagtt

SEQ ID NO: 41027 - DNA, 201 bp, Homo sapiens
cctaaactttgacttggcaatcaatactttctactttgtggaggggattaagaatagaatgggcaggatgagaccatgaaaattataatgattcatgtatwtttgtatgatgcttgtaactttgcaaagtcttttttattcattgtctcatttggtcagaacaattttattgaggacatgaatttaacaattagaatttag

SEQ ID NO: 41028 - DNA, 201 bp, Homo sapiens
tgggaggctgaggtgggagaattgcttgaacctggaaggcagaagttgcagtgagctgagatcacaccactgcactccagcctgggtgacagagagactctgtctcaaaaaaaaaaagaaaaaattcccaaatcttaatgtctgtttcagaattttagtgattttaaagtgatagtagaaaataccaagcatatgaggtat

SEQ ID NO: 41029 - DNA, 201 bp, Homo sapiens
ttgggaggctgaggtgggagaattgcttgaacctggaaggcagaagttgcagtgagctgagatcacaccactgcactccagcctgggtgacagagagactctgtctcaaaaaaaaaaagaaaaaattcccaaatcttaatgtctgtttcagaattttagtgattttaaagtgatagtagaaaataccaagcatatgaggta

SEQ ID NO: 41030 - DNA, 201 bp, Homo sapiens
cttctgagtgttggagcttggctgaagacatgtttaatactgtacaatttctgaagatggttattaacactgtgctgttaagcatccatttaaaaatatttgttatcttctttgcctgcctgtattttaaaaagaaatacaaagttgtaaaagtaatggatttctttggatgctgaatgcagtgatgttatcagtcagatt

SEQ ID NO: 41031 - DNA, 201 bp, Homo sapiens
tcaggattaaaaacgatgatgacctcatcttagagccctaaagggaaatgcttatgtgggaacaagaaaagtcggtggtactgtcttctgctactactacytagtgctttgctgtgtatagggtgtgttcacatatatctcagttgaatgtcacaagaatccctgaagtgattaaaagtcttgagaggtcaggcaattttt

SEQ ID NO: 41032 - DNA, 201 bp, Homo sapiens
tcttctgagtgttggagcttggctgaagacatgtttaatactgtacaatttctgaagatggttattaacactgtgctgttaagcatccatttaaaaatatttgttatcttctttgcctgcctgtattttaaaaagaaatacaaagttgtaaaagtaatggatttctttggatgctgaatgcagtgatgttatcagtcagat

SEQ ID NO: 41033 - DNA, 201 bp, Homo sapiens
aaccttggtaacacttgttacatgaatgccacagttcagtgtattcgttctgtgcctgaactcaaagatgcccttaaaagcccttagagatttgtttgatyccatggataaaacttcttccagtattccacctattattctactgcagtttttgcacatggctttcccacagtttgccgagaaaggtgaacaaggacagta

SEQ ID NO: 41034 - DNA, 201 bp, Homo sapiens
agctgtttgcgttgactggagtccagcctgccagacagaaagttatggtgaaaggaggaacgctaaaggatgatgattggggaaacatcaaaataaaaaayggaatgactctactaatgatggggtcagcagatgctcttccagaagaaccctcagccaaaactgtcttcgtagaagacatgacagaagaacagttagcat

SEQ ID NO: 41035 - DNA, 201 bp, Homo sapiens
gttgatcctctgcttgaaagcacgaataagtgagaacagagcagtcatatggtttcagaaagtgttattctgggatttcaggataaattttgtaaaactastaacaaacaacacacaggaaactaatttggtataagaaacgacatatccctaaatagtgcttatttaacttcattataaatacatctacttaacaaaaaa

SEQ ID NO: 41036 - DNA, 201 bp, Homo sapiens
gggaaatgcttatgtgggaacaagaaaagtcggtggtactgtcttctgctactactacttagtgctttgctgtgtatagggtgtgttcacatatatctcarttgaatgtcacaagaatccctgaagtgattaaaagtcttgagaggtcaggcaatttttgtaaggctagaaggaaaagtgaggttttagacttcatttctt

SEQ ID NO: 41037 - DNA, 201 bp, Homo sapiens
attttaaagtgatagtagaaaataccaagcatatgaggtatttcaatatgataggcttcttacattttaatagttactcatctttgttccaggacccttgmctgatgctagggaaaggataaagcatagaataccagccagtttggctctgattttgagttatttataataaagtttggggattatcataacatctcatat

SEQ ID NO: 41038 - DNA, 201 bp, Homo sapiens
ttgtgtgactcagtgctgctgtccatcccatggaaacatgggcacaatcaagtatttgtccagcctattgcaggcttttcctgactttaaaataaattgtratcaataatagtacctttgattatacatttattattgtgtctctctctgatgtactgtggattgtacatttaactttggaatggctttgtaataatcagt

SEQ ID NO: 41039 - DNA, 201 bp, Homo sapiens
cacagtttgccgagaaaggtgaacaaggacagtatcttcaacaggatgctaatgaatgttggatacaaatgatgcgagtattgcaacagaaattggaagcmatagaggatgattctgttaaagagacagactcctcatctgcatcggcagcgacaccttctaaaaagaaaagtttaatcgatcagttcttcggtgttgagt

SEQ ID NO: 41040 - DNA, 201 bp, Homo sapiens
tgagtaagttacttattaaaacatcaatcatgaagccttaactatgattggacagtagtatcttattggattctgataatactttcgtaatgtgaactttrgagttattcttgttacttagcttgagaaggcacatgtctattcattgtctaatattaatggatttacatctttctttagatattggctccaataattgtg

SEQ ID NO: 41041 - DNA, 201 bp, Homo sapiens
tgaactttagagttattcttgttacttagcttgagaaggcacatgtctattcattgtctaatattaatggatttacatctttctttagatattggctccartaattgtggatactatgacttacaagcagtactaacacaccagggaaggtctagttcttcaggtcattatgtatcatgggtgaaaaggaaacaagatgaa

SEQ ID NO: 41042 - DNA, 201 bp, Homo sapiens; identical to SEQ ID NO: 41024

SEQ ID NO: 41043 - DNA, 201 bp, Homo sapiens; identical to SEQ ID NO: 41025

SEQ ID NO: 41044 - DNA, 201 bp, Homo sapiens; identical to SEQ ID NO: 41026

SEQ ID NO: 41045 - DNA, 201 bp, Homo sapiens; identical to SEQ ID NO: 41027

SEQ ID NO: 41046 - DNA, 201 bp, Homo sapiens; identical to SEQ ID NO: 41028

SEQ ID NO: 41047 - DNA, 201 bp, Homo sapiens; identical to SEQ ID NO: 41029

SEQ ID NO: 41048 - DNA, 201 bp, Homo sapiens; identical to SEQ ID NO: 41030

SEQ ID NO: 41049 - DNA, 201 bp, Homo sapiens; identical to SEQ ID NO: 41031

SEQ ID NO: 41050 - DNA, 201 bp, Homo sapiens; identical to SEQ ID NO: 41032

SEQ ID NO: 41051 - DNA, 201 bp, Homo sapiens
actcaaagatgcccttaaaaggtatgcaggtgccttgagagcttcaggggaaatggcttcagcgcagtatattactgcagcccttagagatttgtttgatyccatggataaaacttcttccagtattccacctattattctactgcagtttttgcacatggctttcccacagtttgccgagaaaggtgaacaaggacagta

SEQ ID NO: 41052 - DNA, 201 bp, Homo sapiens; identical to SEQ ID NO: 41034

SEQ ID NO: 41053 - DNA, 201 bp, Homo sapiens; identical to SEQ ID NO: 41035

SEQ ID NO: 41054 - DNA, 201 bp, Homo sapiens; identical to SEQ ID NO: 41037

SEQ ID NO: 41055 - DNA, 201 bp, Homo sapiens; identical to SEQ ID NO: 41036

SEQ ID NO: 41056 - DNA, 201 bp, Homo sapiens; identical to SEQ ID NO: 41038

SEQ ID NO: 41057 - DNA, 201 bp, Homo sapiens; identical to SEQ ID NO: 41039

SEQ ID NO: 41058 - DNA, 201 bp, Homo sapiens
aaaaaagtgaatcagcagccaaatacaagtgacaaaaagagtagtccccagaaagaagttaagtatgaacccttttcttttgctgatgatattggctccartaattgtggatactatgacttacaagcagtactaacacaccagggaaggtctagttcttcaggtcattatgtatcatgggtgaaaaggaaacaagatgaa

SEQ ID NO: 41059 - DNA, 201 bp, Homo sapiens; identical to SEQ ID NO: 41024

SEQ ID NO: 41060 - DNA, 201 bp, Homo sapiens; identical to SEQ ID NO: 41025

SEQ ID NO: 41061 - DNA, 201 bp, Homo sapiens; identical to SEQ ID NO: 41026

SEQ ID NO: 41062 - DNA, 201 bp, Homo sapiens; identical to SEQ ID NO: 41027

SEQ ID NO: 41063 - DNA, 201 bp, Homo sapiens; identical to SEQ ID NO: 41028

SEQ ID NO: 41064 - DNA, 201 bp, Homo sapiens; identical to SEQ ID NO: 41029

SEQ ID NO: 41065 - DNA, 201 bp, Homo sapiens; identical to SEQ ID NO: 41030

SEQ ID NO: 41066 - DNA, 201 bp, Homo sapiens; identical to SEQ ID NO: 41031

SEQ ID NO: 41067 - DNA, 201 bp, Homo sapiens; identical to SEQ ID NO: 41032

SEQ ID NO: 41068 - DNA, 201 bp, Homo sapiens; identical to SEQ ID NO: 41051

SEQ ID NO: 41069 - DNA, 201 bp, Homo sapiens; identical to SEQ ID NO: 41034

SEQ ID NO: 41070 - DNA, 201 bp, Homo sapiens; identical to SEQ ID NO: 41035

SEQ ID NO: 41071 - DNA, 201 bp, Homo sapiens; identical to SEQ ID NO: 41037

SEQ ID NO: 41072 - DNA, 201 bp, Homo sapiens; identical to SEQ ID NO: 41036

SEQ ID NO: 41073 - DNA, 201 bp, Homo sapiens; identical to SEQ ID NO: 41038

SEQ ID NO: 41074 - DNA, 201 bp, Homo sapiens; identical to SEQ ID NO: 41039

SEQ ID NO: 41075 - DNA, 201 bp, Homo sapiens; identical to SEQ ID NO: 41058

SEQ ID NO: 41076 - DNA, 201 bp, Homo sapiens
gtgccatctctcaatgttgacggacagcctatttttgccaatatcacactgccagtgtatactctgaaagagcgatgcctccaggttgtccggagcctagdcaagcctgagaattacaggagactggacatcgtcaggtcgctctacgaagatctggaagaccacccaaatgtgcagaaagacctggagcggctgacacag

SEQ ID NO: 41077 - DNA, 201 bp, Homo sapiens
gctgcgctcggtgaactcgcgcgagccctcccaggtcatcttctgcaatcgcagtccgcgcgtcgtgctgcccgtatggctcaacttcgacggcgagccgyagccctacccaacgctgccgcctggcacgggccgccgcatccacagctaccgaggtcacctttggctcttcagagatgcagggacacacgatgggcttct

SEQ ID NO: 41078 - DNA, 201 bp, Homo sapiens
ttgacggacagcctatttttgccaatatcacactgccagtgtatactctgaaagagcgatgcctccaggttgtccggagcctagtcaagcctgagaattasaggagactggacatcgtcaggtcgctctacgaagatctggaagaccacccaaatgtgcagaaagacctggagcggctgacacaggagcgcattgcacatc

SEQ ID NO: 41079 - DNA, 119 bp, Homo sapiens
cctcgcctccgttacaacrgcctacggtgctggaggatccttctgcgcacgcgcacagcctccggccggctatttccgcgagcgcgttccatcctctaccgagcgcgcgcgaagactac

SEQ ID NO: 41080 - DNA, 201 bp, Homo sapiens
ccaatttttgtacttttagtagagacagtgtttcgtcatgttggccaggctggtttcaaactcctgacctcaggtgatccgcccacctcagcctcccaaartggtgggattacaggtgtgtgggccaccgtgcctggctgattcagcattttttatcaggcaggaccaggtggcacttccacctccagcctctggtcctac

SEQ ID NO: 41081 - DNA, 201 bp, Homo sapiens
cccggaggaactgggcgccgaggaggagatggaggccgggcggccgcggcccgtgctgcgctcggtgaactcgcgcgagccctcccaggtcatcttctgcmatcgcagtccgcgcgtcgtgctgcccgtatggctcaacttcgacggcgagccgcagccctacccaacgctgccgcctggcacgggccgccgcatccacag

SEQ ID NO: 41082 - DNA, 201 bp, Homo sapiens
gcccgtgctgcgctcggtgaactcgcgcgagccctcccaggtcatcttctgcaatcgcagtccgcgcgtcgtgctgcccgtatggctcaacttcgacggckagccgcagccctacccaacgctgccgcctggcacgggccgccgcatccacagctaccgaggtcacctttggctcttcagagatgcagggacacacgatgg

SEQ ID NO: 41083 - DNA, 201 bp, Homo sapiens
gaggagatggaggccgggcggccgcggcccgtgctgcgctcggtgaactcgcgcgagccctcccaggtcatcttctgcaatcgcagtccgcgcgtcgtgcygcccgtatggctcaacttcgacggcgagccgcagccctacccaacgctgccgcctggcacgggccgccgcatccacagctaccgaggtcacctttggctc

SEQ ID NO: 41084 - DNA, 201 bp, Homo sapiens
gaataatgtttgtttttcatttcgaatcttgtgaatgtattaaatatatcgctcttaagagacggtgaagttcctatttcaagtttttttttttttttttktttttaaagctgttttttaatacattaaatggtgctgagtaaaggaaataggcagggtgtgttgtgtggtgttttaactaggcgcttctctctcagagag

SEQ ID NO: 41085 - DNA, 201 bp, Homo sapiens
tacccaacgctgccgcctggcacgggccgccgcatccacagctaccgaggtcacctttggctcttcagagatgcagggacacacgatgggcttctggttabccaaactgaattatttgtgccatctctcaatgttgacggacagcctatttttgccaatatcacactgccagtgtatactctgaaagagcgatgcctccag

SEQ ID NO: 41086 - DNA, 201 bp, Homo sapiens
ggaggctgcagtgagccatgagtatgccactgcactccagcctgggggacagagcaagaccctgcctcaaaaaaaaaaaaaaaaaaaaaatcaggccgggmatggtggctcacgcctgtaatcccagcactttgggaggtcgaggtgggcagatcacctgaggtcaggagttcgagaccagcctggccaacatggtaaaac

SEQ ID NO: 41087 - DNA, 201 bp, Homo sapiens
ggctaattttgtgtttttagtggagacggggtttcaccatgttgtccaggatggtcttgatctcctgaccttgtgatccacccacctcagcctcccaaagygctgggattacaggtgtgagccaccgcgtccagccagctttattattttttttaagctgtctttgtgtcaaaatgatagttcatgctcctcttgttaaaa

SEQ ID NO: 41088 - DNA, 201 bp, Homo sapiens
gctaattttgtgtttttagtggagacggggtttcaccatgttgtccaggatggtcttgatctcctgaccttgtgatccacccacctcagcctcccaaagtsctgggattacaggtgtgagccaccgcgtccagccagctttattattttttttaagctgtctttgtgtcaaaatgatagttcatgctcctcttgttaaaac

SEQ ID NO: 41089 - DNA, 201 bp, Homo sapiens
ccagctttattattttttttaagctgtctttgtgtcaaaatgatagttcatgctcctcttgttaaaacctgcaggccgagcacagtggctcatgcctgtartcccagcattttgggagaccaaggcggatggatcacctgaggtcaggagctgaagaccagcctggctaacatggtgaaacctcatctccacttaaaatac

SEQ ID NO: 41090 - DNA, 201 bp, Homo sapiens
ctgtagcatgaataatgtttgtttttcatttcgaatcttgtgaatgtattaaatatatcgctcttaagagacggtgaagttcctatttcaagttttttttkttttttttttttttaaagctgttttttaatacattaaatggtgctgagtaaaggaaataggcagggtgtgttgtgtggtgttttaactaggcgcttctct

SEQ ID NO: 41091 - DNA, 201 bp, Homo sapiens
ggtcacctttggctcttcagagatgcagggacacacgatgggcttctggttaaccaaactgaattatttgtgccatctctcaatgttgacggacagcctayttttgccaatatcacactgccagtgtatactctgaaagagcgatgcctccaggttgtccggagcctagtcaagcctgagaattacaggagactggacatc

SEQ ID NO: 41092 - DNA, 201 bp, Homo sapiens
gcatgaataatgtttgtttttcatttcgaatcttgtgaatgtattaaatatatcgctcttaagagacggtgaagttcctatttcaagtttttttttttttktttttttttaaagctgttttttaatacattaaatggtgctgagtaaaggaaataggcagggtgtgttgtgtggtgttttaactaggcgcttctctctcag

SEQ ID NO: 41093 - DNA, 201 bp, Homo sapiens
cctttggctcttcagagatgcagggacacacgatgggcttctggttaaccaaactgaattatttgtgccatctctcaatgttgacggacagcctatttttdccaatatcacactgccagtgtatactctgaaagagcgatgcctccaggttgtccggagcctagtcaagcctgagaattacaggagactggacatcgtcag

SEQ ID NO: 41094 - DNA, 201 bp, Homo sapiens
cgggcggccgcggcccgtgctgcgctcggtgaactcgcgcgagccctcccaggtcatcttctgcaatcgcagtccgcgcgtcgtgctgcccgtatggctcwacttcgacggcgagccgcagccctacccaacgctgccgcctggcacgggccgccgcatccacagctaccgaggtcacctttggctcttcagagatgcagg

SEQ ID NO: 41095 - DNA, 201 bp, Homo sapiens
ctcttcagagatgcagggacacacgatgggcttctggttaaccaaactgaattatttgtgccatctctcaatgttgacggacagcctatttttgccaataycacactgccagtgtatactctgaaagagcgatgcctccaggttgtccggagcctagtcaagcctgagaattacaggagactggacatcgtcaggtcgctc

SEQ ID NO: 41096 - DNA, 201 bp, Homo sapiens
gatgcagggacacacgatgggcttctggttaaccaaactgaattatttgtgccatctctcaatgttgacggacagcctatttttgccaatatcacactgcyagtgtatactctgaaagagcgatgcctccaggttgtccggagcctagtcaagcctgagaattacaggagactggacatcgtcaggtcgctctacgaagat

SEQ ID NO: 41097 - DNA, 201 bp, Homo sapiens
agggacacacgatgggcttctggttaaccaaactgaattatttgtgccatctctcaatgttgacggacagcctatttttgccaatatcacactgccagtgwatactctgaaagagcgatgcctccaggttgtccggagcctagtcaagcctgagaattacaggagactggacatcgtcaggtcgctctacgaagatctgga

SEQ ID NO: 41098 - DNA, 201 bp, Homo sapiens
gggacacacgatgggcttctggttaaccaaactgaattatttgtgccatctctcaatgttgacggacagcctatttttgccaatatcacactgccagtgtrtactctgaaagagcgatgcctccaggttgtccggagcctagtcaagcctgagaattacaggagactggacatcgtcaggtcgctctacgaagatctggaa

SEQ ID NO: 41099 - DNA, 201 bp, Homo sapiens
gaagagtccggcccggaggaactgggcgccgaggaggagatggaggccgggcggccgcggcccgtgctgcgctcggtgaactcgcgcgagccctcccaggkcatcttctgcaatcgcagtccgcgcgtcgtgctgcccgtatggctcaacttcgacggcgagccgcagccctacccaacgctgccgcctggcacgggccgc

SEQ ID NO: 41100 - DNA, 201 bp, Homo sapiens
ggacacacgatgggcttctggttaaccaaactgaattatttgtgccatctctcaatgttgacggacagcctatttttgccaatatcacactgccagtgtakactctgaaagagcgatgcctccaggttgtccggagcctagtcaagcctgagaattacaggagactggacatcgtcaggtcgctctacgaagatctggaag

SEQ ID NO: 41101 - DNA, 201 bp, Homo sapiens
acacacgatgggcttctggttaaccaaactgaattatttgtgccatctctcaatgttgacggacagcctatttttgccaatatcacactgccagtgtataytctgaaagagcgatgcctccaggttgtccggagcctagtcaagcctgagaattacaggagactggacatcgtcaggtcgctctacgaagatctggaagac

SEQ ID NO: 41102 - DNA, 201 bp, Homo sapiens
tgtgccatctctcaatgttgacggacagcctatttttgccaatatcacactgccagtgtatactctgaaagagcgatgcctccaggttgtccggagcctaktcaagcctgagaattacaggagactggacatcgtcaggtcgctctacgaagatctggaagaccacccaaatgtgcagaaagacctggagcggctgacaca

SEQ ID NO: 41103 - DNA, 201 bp, Homo sapiens
cacgatgggcttctggttaaccaaactgaattatttgtgccatctctcaatgttgacggacagcctatttttgccaatatcacactgccagtgtatactcygaaagagcgatgcctccaggttgtccggagcctagtcaagcctgagaattacaggagactggacatcgtcaggtcgctctacgaagatctggaagaccac

SEQ ID NO: 41104 - DNA, 201 bp, Homo sapiens
  misc_feature (1)...(201): n = A,T,C or G
cagcctatttttgccaatatcacactgccagtgtatactctgaaagagcgatgcctccaggttgtccggagcctagtcaagcctgagaattacaggagacnggacatcgtcaggtcgctctacgaagatctggaagaccacccaaatgtgcagaaagacctggagcggctgacacaggagcgcattgcacatcaacggatg

SEQ ID NO: 41105 - DNA, 201 bp, Homo sapiens
acacgatgggcttctggttaaccaaactgaattatttgtgccatctctcaatgttgacggacagcctatttttgccaatatcacactgccagtgtatactstgaaagagcgatgcctccaggttgtccggagcctagtcaagcctgagaattacaggagactggacatcgtcaggtcgctctacgaagatctggaagacca

SEQ ID NO: 41106 - DNA, 201 bp, Homo sapiens
gcgcttctctctcagagagttttgaaacctgtttacataaaggcccaggatgggaaggagatccaaacataagccaccagcctcattccaagtctcttctmtttccaaccctggattttttttttttatttaacattgtttcttttagctttatttttcttataaaagaaatgtatcactataaaaaattacacactacag

SEQ ID NO: 41107 - DNA, 201 bp, Homo sapiens
ggaactgggcgccgaggaggagatggaggccgggcggccgcggcccgtgctgcgctcggtgaactcgcgcgagccctcccaggtcatcttctgcaatcgcrgtccgcgcgtcgtgctgcccgtatggctcaacttcgacggcgagccgcagccctacccaacgctgccgcctggcacgggccgccgcatccacagctaccg

SEQ ID NO: 41108 - DNA, 201 bp, Homo sapiens
gaggagtcgggcgccgaggagtccggcccggaagagtccggcccggaggaactgggcgccgaggaggagatggaggccgggcggccgcggcccgtgctgcsctcggtgaactcgcgcgagccctcccaggtcatcttctgcaatcgcagtccgcgcgtcgtgctgcccgtatggctcaacttcgacggcgagccgcagccc

SEQ ID NO: 41109 - DNA, 201 bp, Homo sapiens
tgttgacggacagcctatttttgccaatatcacactgccagtgtatactctgaaagagcgatgcctccaggttgtccggagcctagtcaagcctgagaatkacaggagactggacatcgtcaggtcgctctacgaagatctggaagaccacccaaatgtgcagaaagacctggagcggctgacacaggagcgcattgcaca

SEQ ID NO: 41110 - DNA, 201 bp, Homo sapiens
cccggaagagtccggcccggaggaactgggcgccgaggaggagatggaggccgggcggccgcggcccgtgctgcgctcggtgaactcgcgcgagccctccyaggtcatcttctgcaatcgcagtccgcgcgtcgtgctgcccgtatggctcaacttcgacggcgagccgcagccctacccaacgctgccgcctggcacggg

SEQ ID NO: 41111 - DNA, 201 bp, Homo sapiens
gaactgggcgccgaggaggagatggaggccgggcggccgcggcccgtgctgcgctcggtgaactcgcgcgagccctcccaggtcatcttctgcaatcgcadtccgcgcgtcgtgctgcccgtatggctcaacttcgacggcgagccgcagccctacccaacgctgccgcctggcacgggccgccgcatccacagctaccga

SEQ ID NO: 41112 - DNA, 201 bp, Homo sapiens
gaggccgggcggccgcggcccgtgctgcgctcggtgaactcgcgcgagccctcccaggtcatcttctgcaatcgcagtccgcgcgtcgtgctgcccgtatsgctcaacttcgacggcgagccgcagccctacccaacgctgccgcctggcacgggccgccgcatccacagctaccgaggtcacctttggctcttcagagat

SEQ ID NO: 41113 - DNA, 201 bp, Homo sapiens
gggcgccgaggaggagatggaggccgggcggccgcggcccgtgctgcgctcggtgaactcgcgcgagccctcccaggtcatcttctgcaatcgcagtccgsgcgtcgtgctgcccgtatggctcaacttcgacggcgagccgcagccctacccaacgctgccgcctggcacgggccgccgcatccacagctaccgaggtca

SEQ ID NO: 41114 - DNA, 201 bp, Homo sapiens
  misc_feature (1)...(201): n = A,T,C or G
gcggcccgtgctgcgctcggtgaactcgcgcgagccctcccaggtcatcttctgcaatcgcagtccgcgcgtcgtgctgcccgtatggctcaacttcgacngcgagccgcagccctacccaacgctgccgcctggcacgggccgccgcatccacagctaccgaggtcacctttggctcttcagagatgcagggacacacga

SEQ ID NO: 41115 - DNA, 201 bp, Homo sapiens
agtgtatactctgaaagagcgatgcctccaggttgtccggagcctagtcaagcctgagaattacaggagactggacatcgtcaggtcgctctacgaagatstggaagaccacccaaatgtgcagaaagacctggagcggctgacacaggagcgcattgcacatcaacggatgggagattgaagatttctgttgaaacttac

SEQ ID NO: 41116 - DNA, 201 bp, Homo sapiens
aaaaaaaaaaacaaaaaacaaaaattatccaggtgtggcggtgggcgcctgtgaggcaggcgaatctcttgaacccgggaggcggaggttgcagtgagccragatcacaccattgcactccagcctgggaaacaagagtgaaattccatctcaaaaccaaattttcaaaaaaaaaacatgccgcttgagtactgtgttttt

SEQ ID NO: 41117 - DNA, 201 bp, Homo sapiens
gaggaactgggcgccgaggaggagatggaggccgggcggccgcggcccgtgctgcgctcggtgaactcgcgcgagccctcccaggtcatcttctgcaatcscagtccgcgcgtcgtgctgcccgtatggctcaacttcgacggcgagccgcagccctacccaacgctgccgcctggcacgggccgccgcatccacagctac

SEQ ID NO: 41118 - DNA, 201 bp, Homo sapiens
cctggcacgggccgccgcatccacagctaccgaggtcacctttggctcttcagagatgcagggacacacgatgggcttctggttaaccaaactgaattatvtgtgccatctctcaatgttgacggacagcctatttttgccaatatcacactgccagtgtatactctgaaagagcgatgcctccaggttgtccggagccta

SEQ ID NO: 41119 - DNA, 201 bp, Homo sapiens
gctcggtgaactcgcgcgagccctcccaggtcatcttctgcaatcgcagtccgcgcgtcgtgctgcccgtatggctcaacttcgacggcgagccgcagccstacccaacgctgccgcctggcacgggccgccgcatccacagctaccgaggtcacctttggctcttcagagatgcagggacacacgatgggcttctggtta

SEQ ID NO: 41120 - DNA, 201 bp, Homo sapiens
actgccagtgtatactctgaaagagcgatgcctccaggttgtccggagcctagtcaagcctgagaattacaggagactggacatcgtcaggtcgctctacdaagatctggaagaccacccaaatgtgcagaaagacctggagcggctgacacaggagcgcattgcacatcaacggatgggagattgaagatttctgttgaa

SEQ ID NO: 41121 - DNA, 201 bp, Homo sapiens
gtgtatactctgaaagagcgatgcctccaggttgtccggagcctagtcaagcctgagaattacaggagactggacatcgtcaggtcgctctacgaagatchggaagaccacccaaatgtgcagaaagacctggagcggctgacacaggagcgcattgcacatcaacggatgggagattgaagatttctgttgaaacttaca

SEQ ID NO: 41122 - DNA, 201 bp, Homo sapiens
atcacactgccagtgtatactctgaaagagcgatgcctccaggttgtccggagcctagtcaagcctgagaattacaggagactggacatcgtcaggtcgcbctacgaagatctggaagaccacccaaatgtgcagaaagacctggagcggctgacacaggagcgcattgcacatcaacggatgggagattgaagatttctg

SEQ ID NO: 41123 - DNA, 201 bp, Homo sapiens
atgcctccaggttgtccggagcctagtcaagcctgagaattacaggagactggacatcgtcaggtcgctctacgaagatctggaagaccacccaaatgtgyagaaagacctggagcggctgacacaggagcgcattgcacatcaacggatgggagattgaagatttctgttgaaacttacactgtttcatctcagcttttg

SEQ ID NO: 41124 - DNA, 201 bp, Homo sapiens
cgatgggcttctggttaaccaaactgaattatttgtgccatctctcaatgttgacggacagcctatttttgccaatatcacactgccagtgtatactctgraagagcgatgcctccaggttgtccggagcctagtcaagcctgagaattacaggagactggacatcgtcaggtcgctctacgaagatctggaagaccaccc

SEQ ID NO: 41125 - DNA, 201 bp, Homo sapiens
cttctggttaaccaaactgaattatttgtgccatctctcaatgttgacggacagcctatttttgccaatatcacactgccagtgtatactctgaaagagcvatgcctccaggttgtccggagcctagtcaagcctgagaattacaggagactggacatcgtcaggtcgctctacgaagatctggaagaccacccaaatgtg

SEQ ID NO: 41126 - DNA, 201 bp, Homo sapiens
gcttctggttaaccaaactgaattatttgtgccatctctcaatgttgacggacagcctatttttgccaatatcacactgccagtgtatactctgaaagagbgatgcctccaggttgtccggagcctagtcaagcctgagaattacaggagactggacatcgtcaggtcgctctacgaagatctggaagaccacccaaatgt

SEQ ID NO: 41127 - DNA, 201 bp, Homo sapiens
tctggttaaccaaactgaattatttgtgccatctctcaatgttgacggacagcctatttttgccaatatcacactgccagtgtatactctgaaagagcgaygcctccaggttgtccggagcctagtcaagcctgagaattacaggagactggacatcgtcaggtcgctctacgaagatctggaagaccacccaaatgtgca

SEQ ID NO: 41128 - DNA, 201 bp, Homo sapiens
tttgtgccatctctcaatgttgacggacagcctatttttgccaatatcacactgccagtgtatactctgaaagagcgatgcctccaggttgtccggagccyagtcaagcctgagaattacaggagactggacatcgtcaggtcgctctacgaagatctggaagaccacccaaatgtgcagaaagacctggagcggctgaca

SEQ ID NO: 41129 - DNA, 201 bp, Homo sapiens
ctcctcttgttaaaacctgcaggccgagcacagtggctcatgcctgtaatcccagcattttgggagaccaaggcggatggatcacctgaggtcaggagctsaagaccagcctggctaacatggtgaaacctcatctccacttaaaatacaaaaattgccggccgcggcggctcatgcctgtaatcccagcactttgggagg

SEQ ID NO: 41130 - DNA, 201 bp, Homo sapiens
ggtcatcttctgcaatcgcagtccgcgcgtcgtgctgcccgtatggctcaacttcgacggcgagccgcagccctacccaacgctgccgcctggcacgggcsgccgcatccacagctaccgaggtcacctttggctcttcagagatgcagggacacacgatgggcttctggttaaccaaactgaattatttgtgccatctct

SEQ ID NO: 41131 - DNA, 201 bp, Homo sapiens
gtcatcttctgcaatcgcagtccgcgcgtcgtgctgcccgtatggctcaacttcgacggcgagccgcagccctacccaacgctgccgcctggcacgggccsccgcatccacagctaccgaggtcacctttggctcttcagagatgcagggacacacgatgggcttctggttaaccaaactgaattatttgtgccatctctc

SEQ ID NO: 41132 - DNA, 201 bp, Homo sapiens
atcgcagtccgcgcgtcgtgctgcccgtatggctcaacttcgacggcgagccgcagccctacccaacgctgccgcctggcacgggccgccgcatccacagstaccgaggtcacctttggctcttcagagatgcagggacacacgatgggcttctggttaaccaaactgaattatttgtgccatctctcaatgttgacggac

SEQ ID NO: 41133 - DNA, 201 bp, Homo sapiens
gtccggcccggaggaactgggcgccgaggaggagatggaggccgggcggccgcggcccgtgctgcgctcggtgaactcgcgcgagccctcccaggtcatcwtctgcaatcgcagtccgcgcgtcgtgctgcccgtatggctcaacttcgacggcgagccgcagccctacccaacgctgccgcctggcacgggccgccgcat

SEQ ID NO: 41134 - DNA, 201 bp, Homo sapiens
aatcgcagtccgcgcgtcgtgctgcccgtatggctcaacttcgacggcgagccgcagccctacccaacgctgccgcctggcacgggccgccgcatccacadctaccgaggtcacctttggctcttcagagatgcagggacacacgatgggcttctggttaaccaaactgaattatttgtgccatctctcaatgttgacgga

SEQ ID NO: 41135 - DNA, 201 bp, Homo sapiens
actgggcgccgaggaggagatggaggccgggcggccgcggcccgtgctgcgctcggtgaactcgcgcgagccctcccaggtcatcttctgcaatcgcagtycgcgcgtcgtgctgcccgtatggctcaacttcgacggcgagccgcagccctacccaacgctgccgcctggcacgggccgccgcatccacagctaccgagg

SEQ ID NO: 41136 - DNA, 201 bp, Homo sapiens
ggagtcgggcgccgaggagtccggcccggaagagtccggcccggaggaactgggcgccgaggaggagatggaggccgggcggccgcggcccgtgctgcgckcggtgaactcgcgcgagccctcccaggtcatcttctgcaatcgcagtccgcgcgtcgtgctgcccgtatggctcaacttcgacggcgagccgcagcccta

SEQ ID NO: 41137 - DNA, 201 bp, Homo sapiens
tcgcagtccgcgcgtcgtgctgcccgtatggctcaacttcgacggcgagccgcagccctacccaacgctgccgcctggcacgggccgccgcatccacagchaccgaggtcacctttggctcttcagagatgcagggacacacgatgggcttctggttaaccaaactgaattatttgtgccatctctcaatgttgacggaca

SEQ ID NO: 41138 - DNA, 201 bp, Homo sapiens
gcagtccgcgcgtcgtgctgcccgtatggctcaacttcgacggcgagccgcagccctacccaacgctgccgcctggcacgggccgccgcatccacagctamcgaggtcacctttggctcttcagagatgcagggacacacgatgggcttctggttaaccaaactgaattatttgtgccatctctcaatgttgacggacagc

SEQ ID NO: 41139 - DNA, 201 bp, Homo sapiens
gagatggaggccgggcggccgcggcccgtgctgcgctcggtgaactcgcgcgagccctcccaggtcatcttctgcaatcgcagtccgcgcgtcgtgctgcbcgtatggctcaacttcgacggcgagccgcagccctacccaacgctgccgcctggcacgggccgccgcatccacagctaccgaggtcacctttggctcttc

SEQ ID NO: 41140 - DNA, 201 bp, Homo sapiens
cgaggaggagatggaggccgggcggccgcggcccgtgctgcgctcggtgaactcgcgcgagccctcccaggtcatcttctgcaatcgcagtccgcgcgtcktgctgcccgtatggctcaacttcgacggcgagccgcagccctacccaacgctgccgcctggcacgggccgccgcatccacagctaccgaggtcacctttg

SEQ ID NO: 41141 - DNA, 201 bp, Homo sapiens
cagtccgcgcgtcgtgctgcccgtatggctcaacttcgacggcgagccgcagccctacccaacgctgccgcctggcacgggccgccgcatccacagctacygaggtcacctttggctcttcagagatgcagggacacacgatgggcttctggttaaccaaactgaattatttgtgccatctctcaatgttgacggacagcc

SEQ ID NO: 41142 - DNA, 201 bp, Homo sapiens
ggagatggaggccgggcggccgcggcccgtgctgcgctcggtgaactcgcgcgagccctcccaggtcatcttctgcaatcgcagtccgcgcgtcgtgctgbccgtatggctcaacttcgacggcgagccgcagccctacccaacgctgccgcctggcacgggccgccgcatccacagctaccgaggtcacctttggctctt

SEQ ID NO: 41143 - DNA, 201 bp, Homo sapiens
tccgcgcgtcgtgctgcccgtatggctcaacttcgacggcgagccgcagccctacccaacgctgccgcctggcacgggccgccgcatccacagctaccgabgtcacctttggctcttcagagatgcagggacacacgatgggcttctggttaaccaaactgaattatttgtgccatctctcaatgttgacggacagcctat

SEQ ID NO: 41144 - DNA, 201 bp, Homo sapiens
cccaacgctgccgcctggcacgggccgccgcatccacagctaccgaggtcacctttggctcttcagagatgcagggacacacgatgggcttctggttaacraaactgaattatttgtgccatctctcaatgttgacggacagcctatttttgccaatatcacactgccagtgtatactctgaaagagcgatgcctccaggt

SEQ ID NO: 41145 - DNA, 201 bp, Homo sapiens
ggtaggcgcggaggaggcaggcgtcgaagagtacggccctgaagaagacggcggggaggagtcgggcgccgaggagtccggcccggaagagtccggcccgkaggaactgggcgccgaggaggagatggaggccgggcggccgcggcccgtgctgcgctcggtgaactcgcgcgagccctcccaggtcatcttctgcaatcg

SEQ ID NO: 41146 - DNA, 201 bp, Homo sapiens
ggggaggagtcgggcgccgaggagtccggcccggaagagtccggcccggaggaactgggcgccgaggaggagatggaggccgggcggccgcggcccgtgcygcgctcggtgaactcgcgcgagccctcccaggtcatcttctgcaatcgcagtccgcgcgtcgtgctgcccgtatggctcaacttcgacggcgagccgcag

SEQ ID NO: 41147 - DNA, 201 bp, Homo sapiens
tctcaatgttgacggacagcctatttttgccaatatcacactgccagtgtatactctgaaagagcgatgcctccaggttgtccggagcctagtcaagcctkagaattacaggagactggacatcgtcaggtcgctctacgaagatctggaagaccacccaaatgtgcagaaagacctggagcggctgacacaggagcgcat

SEQ ID NO: 41148 - DNA, 201 bp, Homo sapiens
ctgcctcctgggttcacgtaatcctcctgagtagctgggattacaggcgcctgccaccacgctggccaatttttgtacttttagtagagacagtgtttcgycatgttggccaggctggtttcaaactcctgacctcaggtgatccgcccacctcagcctcccaaaatggtgggattacaggtgtgtgggccaccgtgcctg

SEQ ID NO: 41149 - DNA, 201 bp, Homo sapiens
ctcttgtcacccaggctggagtgcagtggcgccatctcggctcactgcaacctctgcctcctgggttcacgtaatcctcctgagtagctgggattacaggygcctgccaccacgctggccaatttttgtacttttagtagagacagtgtttcgtcatgttggccaggctggtttcaaactcctgacctcaggtgatccgcc

SEQ ID NO: 41150 - DNA, 201 bp, Homo sapiens
gttttgttttgttttgtttttttgagatggagtctcactcttgtcacccaggctggagtgcagtggcgccatctcggctcactgcaacctctgcctcctgrgttcacgtaatcctcctgagtagctgggattacaggcgcctgccaccacgctggccaatttttgtacttttagtagagacagtgtttcgtcatgttggcc

SEQ ID NO: 41151 - DNA, 201 bp, Homo sapiens
tgtaatttaatgcctgcccattagagaagtatttatcaggagaaggtggtggcatttttgcttcctagtaagtcaggacagcttgtatgtaaggaggtttrtataagtaattcagtgggaattgcagcatatcgtttaattttaagaaggcattggcatctgcttttaatggatgtataatacatccattctacatccgta

SEQ ID NO: 41152 - DNA, 201 bp, Homo sapiens
atccttctgcgcacgcgcacagcctccggccggctatttccgcgagcgcgttccatcctctaccgagcgcgcgcgaagactacggaggtcgactcgggagygcgcacgcagctccgccccgcgtccgacccgcggatcccgcggcgtccggcccgggtggtctggatcgcggagggaatgccccggagggcggagaactgg

SEQ ID NO: 41153 - DNA, 201 bp, Homo sapiens
gttgtccggagcctagtcaagcctgagaattacaggagactggacatcgtcaggtcgctctacgaagatctggaagaccacccaaatgtgcagaaagaccdggagcggctgacacaggagcgcattgcacatcaacggatgggagattgaagatttctgttgaaacttacactgtttcatctcagcttttgatggtactga

SEQ ID NO: 41154 - DNA, 201 bp, Homo sapiens
cggcccgtgctgcgctcggtgaactcgcgcgagccctcccaggtcatcttctgcaatcgcagtccgcgcgtcgtgctgcccgtatggctcaacttcgacgrcgagccgcagccctacccaacgctgccgcctggcacgggccgccgcatccacagctaccgaggtcacctttggctcttcagagatgcagggacacacgat

SEQ ID NO: 41155 - DNA, 201 bp, Homo sapiens
cgcgtcgtgctgcccgtatggctcaacttcgacggcgagccgcagccctacccaacgctgccgcctggcacgggccgccgcatccacagctaccgaggtcycctttggctcttcagagatgcagggacacacgatgggcttctggttaaccaaactgaattatttgtgccatctctcaatgttgacggacagcctattttt

SEQ ID NO: 41156 - DNA, 201 bp, Homo sapiens
gcgcgtcgtgctgcccgtatggctcaacttcgacggcgagccgcagccctacccaacgctgccgcctggcacgggccgccgcatccacagctaccgaggtvacctttggctcttcagagatgcagggacacacgatgggcttctggttaaccaaactgaattatttgtgccatctctcaatgttgacggacagcctatttt

SEQ ID NO: 41157 - DNA, 201 bp, Homo sapiens
ccaacgctgccgcctggcacgggccgccgcatccacagctaccgaggtcacctttggctcttcagagatgcagggacacacgatgggcttctggttaacckaactgaattatttgtgccatctctcaatgttgacggacagcctatttttgccaatatcacactgccagtgtatactctgaaagagcgatgcctccaggtt

SEQ ID NO: 41158 - DNA, 201 bp, Homo sapiens
aatatcacactgccagtgtatactctgaaagagcgatgcctccaggttgtccggagcctagtcaagcctgagaattacaggagactggacatcgtcaggtmgctctacgaagatctggaagaccacccaaatgtgcagaaagacctggagcggctgacacaggagcgcattgcacatcaacggatgggagattgaagattt

SEQ ID NO: 41159 - DNA, 201 bp, Homo sapiens
gcgtcgtgctgcccgtatggctcaacttcgacggcgagccgcagccctacccaacgctgccgcctggcacgggccgccgcatccacagctaccgaggtcakctttggctcttcagagatgcagggacacacgatgggcttctggttaaccaaactgaattatttgtgccatctctcaatgttgacggacagcctatttttg

SEQ ID NO: 41160 - DNA, 201 bp, Homo sapiens
cgtcgtgctgcccgtatggctcaacttcgacggcgagccgcagccctacccaacgctgccgcctggcacgggccgccgcatccacagctaccgaggtcacstttggctcttcagagatgcagggacacacgatgggcttctggttaaccaaactgaattatttgtgccatctctcaatgttgacggacagcctatttttgc

SEQ ID NO: 41161 - DNA, 201 bp, Homo sapiens
tgctgcccgtatggctcaacttcgacggcgagccgcagccctacccaacgctgccgcctggcacgggccgccgcatccacagctaccgaggtcacctttghctcttcagagatgcagggacacacgatgggcttctggttaaccaaactgaattatttgtgccatctctcaatgttgacggacagcctatttttgccaata

SEQ ID NO: 41162 - DNA, 201 bp, Homo sapiens
gtgctgcccgtatggctcaacttcgacggcgagccgcagccctacccaacgctgccgcctggcacgggccgccgcatccacagctaccgaggtcacctttygctcttcagagatgcagggacacacgatgggcttctggttaaccaaactgaattatttgtgccatctctcaatgttgacggacagcctatttttgccaat

SEQ ID NO: 41163 - DNA, 201 bp, Homo sapiens
ctgcccgtatggctcaacttcgacggcgagccgcagccctacccaacgctgccgcctggcacgggccgccgcatccacagctaccgaggtcacctttggcvcttcagagatgcagggacacacgatgggcttctggttaaccaaactgaattatttgtgccatctctcaatgttgacggacagcctatttttgccaatatc

SEQ ID NO: 41164 - DNA, 201 bp, Homo sapiens
cggacagcctatttttgccaatatcacactgccagtgtatactctgaaagagcgatgcctccaggttgtccggagcctagtcaagcctgagaattacaggwgactggacatcgtcaggtcgctctacgaagatctggaagaccacccaaatgtgcagaaagacctggagcggctgacacaggagcgcattgcacatcaacg

SEQ ID NO: 41165 - DNA, 201 bp, Homo sapiens
ccgtatggctcaacttcgacggcgagccgcagccctacccaacgctgccgcctggcacgggccgccgcatccacagctaccgaggtcacctttggctcttsagagatgcagggacacacgatgggcttctggttaaccaaactgaattatttgtgccatctctcaatgttgacggacagcctatttttgccaatatcacac

SEQ ID NO: 41166 - DNA, 201 bp, Homo sapiens
cggagaactgggacgaggccgaggtaggcgcggaggaggcaggcgtcgaagagtacggccctgaagaagacggcggggaggagtcgggcgccgaggagtcsggcccggaagagtccggcccggaggaactgggcgccgaggaggagatggaggccgggcggccgcggcccgtgctgcgctcggtgaactcgcgcgagccct

SEQ ID NO: 41167 - DNA, 201 bp, Homo sapiens
ccggagcctagtcaagcctgagaattacaggagactggacatcgtcaggtcgctctacgaagatctggaagaccacccaaatgtgcagaaagacctggagyggctgacacaggagcgcattgcacatcaacggatgggagattgaagatttctgttgaaacttacactgtttcatctcagcttttgatggtactgatgagt

SEQ ID NO: 41168 - DNA, 201 bp, Homo sapiens
gggcggccgcggcccgtgctgcgctcggtgaactcgcgcgagccctcccaggtcatcttctgcaatcgcagtccgcgcgtcgtgctgcccgtatggctcawcttcgacggcgagccgcagccctacccaacgctgccgcctggcacgggccgccgcatccacagctaccgaggtcacctttggctcttcagagatgcaggg

SEQ ID NO: 41169 - DNA, 201 bp, Homo sapiens
cccgtatggctcaacttcgacggcgagccgcagccctacccaacgctgccgcctggcacgggccgccgcatccacagctaccgaggtcacctttggctctrcagagatgcagggacacacgatgggcttctggttaaccaaactgaattatttgtgccatctctcaatgttgacggacagcctatttttgccaatatcaca

SEQ ID NO: 41170 - DNA, 201 bp, Homo sapiens
tcgcggagggaatgccccggagggcggagaactgggacgaggccgaggtaggcgcggaggaggcaggcgtcgaagagtacggccctgaagaagacggcggsgaggagtcgggcgccgaggagtccggcccggaagagtccggcccggaggaactgggcgccgaggaggagatggaggccgggcggccgcggcccgtgctgc

SEQ ID NO: 41171 - DNA, 201 bp, Homo sapiens
tcggtgaactcgcgcgagccctcccaggtcatcttctgcaatcgcagtccgcgcgtcgtgctgcccgtatggctcaacttcgacggcgagccgcagccctrcccaacgctgccgcctggcacgggccgccgcatccacagctaccgaggtcacctttggctcttcagagatgcagggacacacgatgggcttctggttaac

SEQ ID NO: 41172 - DNA, 201 bp, Homo sapiens
tggctcaacttcgacggcgagccgcagccctacccaacgctgccgcctggcacgggccgccgcatccacagctaccgaggtcacctttggctcttcagagytgcagggacacacgatgggcttctggttaaccaaactgaattatttgtgccatctctcaatgttgacggacagcctatttttgccaatatcacactgcca

SEQ ID NO: 41173 - DNA, 201 bp, Homo sapiens
aactgggcgccgaggaggagatggaggccgggcggccgcggcccgtgctgcgctcggtgaactcgcgcgagccctcccaggtcatcttctgcaatcgcagkccgcgcgtcgtgctgcccgtatggctcaacttcgacggcgagccgcagccctacccaacgctgccgcctggcacgggccgccgcatccacagctaccgag

SEQ ID NO: 41174 - DNA, 201 bp, Homo sapiens
gccgggcggccgcggcccgtgctgcgctcggtgaactcgcgcgagccctcccaggtcatcttctgcaatcgcagtccgcgcgtcgtgctgcccgtatggcycaacttcgacggcgagccgcagccctacccaacgctgccgcctggcacgggccgccgcatccacagctaccgaggtcacctttggctcttcagagatgca

SEQ ID NO: 41175 - DNA, 201 bp, Homo sapiens
cgtatggctcaacttcgacggcgagccgcagccctacccaacgctgccgcctggcacgggccgccgcatccacagctaccgaggtcacctttggctcttcygagatgcagggacacacgatgggcttctggttaaccaaactgaattatttgtgccatctctcaatgttgacggacagcctatttttgccaatatcacact

SEQ ID NO: 41176 - DNA, 201 bp, Homo sapiens
ctcggtgaactcgcgcgagccctcccaggtcatcttctgcaatcgcagtccgcgcgtcgtgctgcccgtatggctcaacttcgacggcgagccgcagcccyacccaacgctgccgcctggcacgggccgccgcatccacagctaccgaggtcacctttggctcttcagagatgcagggacacacgatgggcttctggttaa

SEQ ID NO: 41177 - DNA, 201 bp, Homo sapiens
gccgaggagtccggcccggaagagtccggcccggaggaactgggcgccgaggaggagatggaggccgggcggccgcggcccgtgctgcgctcggtgaactvgcgcgagccctcccaggtcatcttctgcaatcgcagtccgcgcgtcgtgctgcccgtatggctcaacttcgacggcgagccgcagccctacccaacgctg

SEQ ID NO: 41178 - DNA, 201 bp, Homo sapiens
ccgcctggcacgggccgccgcatccacagctaccgaggtcacctttggctcttcagagatgcagggacacacgatgggcttctggttaaccaaactgaatwatttgtgccatctctcaatgttgacggacagcctatttttgccaatatcacactgccagtgtatactctgaaagagcgatgcctccaggttgtccggagc

SEQ ID NO: 41179 - DNA, 201 bp, Homo sapiens
gccgcagccctacccaacgctgccgcctggcacgggccgccgcatccacagctaccgaggtcacctttggctcttcagagatgcagggacacacgatgggrttctggttaaccaaactgaattatttgtgccatctctcaatgttgacggacagcctatttttgccaatatcacactgccagtgtatactctgaaagagcg

SEQ ID NO: 41180 - DNA, 201 bp, Homo sapiens
tatttttgccaatatcacactgccagtgtatactctgaaagagcgatgcctccaggttgtccggagcctagtcaagcctgagaattacaggagactggacrtcgtcaggtcgctctacgaagatctggaagaccacccaaatgtgcagaaagacctggagcggctgacacaggagcgcattgcacatcaacggatgggaga

SEQ ID NO: 41181 - DNA, 201 bp, Homo sapiens
ggagtccggcccggaagagtccggcccggaggaactgggcgccgaggaggagatggaggccgggcggccgcggcccgtgctgcgctcggtgaactcgcgckagccctcccaggtcatcttctgcaatcgcagtccgcgcgtcgtgctgcccgtatggctcaacttcgacggcgagccgcagccctacccaacgctgccgcc

SEQ ID NO: 41182 - DNA, 201 bp, Homo sapiens
cactgccagtgtatactctgaaagagcgatgcctccaggttgtccggagcctagtcaagcctgagaattacaggagactggacatcgtcaggtcgctctasgaagatctggaagaccacccaaatgtgcagaaagacctggagcggctgacacaggagcgcattgcacatcaacggatgggagattgaagatttctgttga

SEQ ID NO: 41183 - DNA, 201 bp, Homo sapiens
  misc_feature (1)...(201): n = A,T,C or G
ccggaggaactgggcgccgaggaggagatggaggccgggcggccgcggcccgtgctgcgctcggtgaactcgcgcgagccctcccaggtcatcttctgcantcgcagtccgcgcgtcgtgctgcccgtatggctcaacttcgacggcgagccgcagccctacccaacgctgccgcctggcacgggccgccgcatccacagc

SEQ ID NO: 41184 - DNA, 201 bp, Homo sapiens
tctttaattccttatcctagcctttgggcacaattcctgtgctcaaaaatgagagtgacggctggcatggtggctcccgcctgtaatcccagtactttggraagccaaggtaagaggattgcttgagcccagaacttcaagatgagcctgggctcatagtgagaacccatctatacaaaaaatttttaaaaattagcatgg

SEQ ID NO: 41185 - DNA, 201 bp, Homo sapiens
gcccgggtggtctggatcgcggagggaatgccccggagggcggagaactgggacgaggccgaggtaggcgcggaggaggcaggcgtcgaagagtacggccytgaagaagacggcggggaggagtcgggcgccgaggagtccggcccggaagagtccggcccggaggaactgggcgccgaggaggagatggaggccgggcgg

SEQ ID NO: 41186 - DNA, 201 bp, Homo sapiens
ggaggccgggcggccgcggcccgtgctgcgctcggtgaactcgcgcgagccctcccaggtcatcttctgcaatcgcagtccgcgcgtcgtgctgcccgtawggctcaacttcgacggcgagccgcagccctacccaacgctgccgcctggcacgggccgccgcatccacagctaccgaggtcacctttggctcttcagaga

SEQ ID NO: 41187 - DNA, 201 bp, Homo sapiens
ggcggagaactgggacgaggccgaggtaggcgcggaggaggcaggcgtcgaagagtacggccctgaagaagacggcggggaggagtcgggcgccgaggagyccggcccggaagagtccggcccggaggaactgggcgccgaggaggagatggaggccgggcggccgcggcccgtgctgcgctcggtgaactcgcgcgagcc

SEQ ID NO: 41188 - DNA, 201 bp, Homo sapiens
tccggcccggaggaactgggcgccgaggaggagatggaggccgggcggccgcggcccgtgctgcgctcggtgaactcgcgcgagccctcccaggtcatctyctgcaatcgcagtccgcgcgtcgtgctgcccgtatggctcaacttcgacggcgagccgcagccctacccaacgctgccgcctggcacgggccgccgcatc

SEQ ID NO: 41189 - DNA, 201 bp, Homo sapiens
ctgcgctcggtgaactcgcgcgagccctcccaggtcatcttctgcaatcgcagtccgcgcgtcgtgctgcccgtatggctcaacttcgacggcgagccgcmgccctacccaacgctgccgcctggcacgggccgccgcatccacagctaccgaggtcacctttggctcttcagagatgcagggacacacgatgggcttctg

SEQ ID NO: 41190 - DNA, 201 bp, Homo sapiens
ccggcccggaggaactgggcgccgaggaggagatggaggccgggcggccgcggcccgtgctgcgctcggtgaactcgcgcgagccctcccaggtcatcttstgcaatcgcagtccgcgcgtcgtgctgcccgtatggctcaacttcgacggcgagccgcagccctacccaacgctgccgcctggcacgggccgccgcatcc

SEQ ID NO: 41191 - DNA, 201 bp, Homo sapiens
gccctacccaacgctgccgcctggcacgggccgccgcatccacagctaccgaggtcacctttggctcttcagagatgcagggacacacgatgggcttctgsttaaccaaactgaattatttgtgccatctctcaatgttgacggacagcctatttttgccaatatcacactgccagtgtatactctgaaagagcgatgcct

SEQ ID NO: 41192 - DNA, 201 bp, Homo sapiens
  misc_feature (1)...(201): n = A,T,C or G
gagtcgggcgccgaggagtccggcccggaagagtccggcccggaggaactgggcgccgaggaggagatggaggccgggcggccgcggcccgtgctgcgctnggtgaactcgcgcgagccctcccaggtcatcttctgcaatcgcagtccgcgcgtcgtgctgcccgtatggctcaacttcgacggcgagccgcagccctac

SEQ ID NO: 41193 - DNA, 201 bp, Homo sapiens
aggccgggcggccgcggcccgtgctgcgctcggtgaactcgcgcgagccctcccaggtcatcttctgcaatcgcagtccgcgcgtcgtgctgcccgtatgvctcaacttcgacggcgagccgcagccctacccaacgctgccgcctggcacgggccgccgcatccacagctaccgaggtcacctttggctcttcagagatg

SEQ ID NO: 41194 - DNA, 201 bp, Homo sapiens
gctgcgctcggtgaactcgcgcgagccctcccaggtcatcttctgcaatcgcagtccgcgcgtcgtgctgcccgtatggctcaacttcgacggcgagccgyagccctacccaacgctgccgcctggcacgggccgccgcatccacagctaccgagtcctcatgactccagtgggccagttctgcgtagtccctgccctcgt

SEQ ID NO: 41195 - DNA, 201 bp, Homo sapiens; identical to SEQ ID NO: 41081

SEQ ID NO: 41196 - DNA, 201 bp, Homo sapiens
gcccgtgctgcgctcggtgaactcgcgcgagccctcccaggtcatcttctgcaatcgcagtccgcgcgtcgtgctgcccgtatggctcaacttcgacggckagccgcagccctacccaacgctgccgcctggcacgggccgccgcatccacagctaccgagtcctcatgactccagtgggccagttctgcgtagtccctgc

SEQ ID NO: 41197 - DNA, 201 bp, Homo sapiens
ggtcatcttctgcaatcgcagtccgcgcgtcgtgctgcccgtatggctcaacttcgacggcgagccgcagccctacccaacgctgccgcctggcacgggcsgccgcatccacagctaccgagtcctcatgactccagtgggccagttctgcgtagtccctgccctcgtggagaacacattcctcctggggagactgacaga

SEQ ID NO: 41198 - DNA, 201 bp, Homo sapiens
gtcatcttctgcaatcgcagtccgcgcgtcgtgctgcccgtatggctcaacttcgacggcgagccgcagccctacccaacgctgccgcctggcacgggccsccgcatccacagctaccgagtcctcatgactccagtgggccagttctgcgtagtccctgccctcgtggagaacacattcctcctggggagactgacagat

SEQ ID NO: 41199 - DNA, 201 bp, Homo sapiens
gaggagatggaggccgggcggccgcggcccgtgctgcgctcggtgaactcgcgcgagccctcccaggtcatcttctgcaatcgcagtccgcgcgtcgtgcygcccgtatggctcaacttcgacggcgagccgcagccctacccaacgctgccgcctggcacgggccgccgcatccacagctaccgagtcctcatgactcca

SEQ ID NO: 41200 - DNA, 201 bp, Homo sapiens
atcgcagtccgcgcgtcgtgctgcccgtatggctcaacttcgacggcgagccgcagccctacccaacgctgccgcctggcacgggccgccgcatccacagstaccgagtcctcatgactccagtgggccagttctgcgtagtccctgccctcgtggagaacacattcctcctggggagactgacagatgcaaagacaggaa

SEQ ID NO: 41201 - DNA, 201 bp, Homo sapiens; identical to SEQ ID NO: 41133

SEQ ID NO: 41202 - DNA, 201 bp, Homo sapiens
aatcgcagtccgcgcgtcgtgctgcccgtatggctcaacttcgacggcgagccgcagccctacccaacgctgccgcctggcacgggccgccgcatccacadctaccgagtcctcatgactccagtgggccagttctgcgtagtccctgccctcgtggagaacacattcctcctggggagactgacagatgcaaagacagga

SEQ ID NO: 41203 - DNA, 201 bp, Homo sapiens
tcgcagtccgcgcgtcgtgctgcccgtatggctcaacttcgacggcgagccgcagccctacccaacgctgccgcctggcacgggccgccgcatccacagchaccgagtcctcatgactccagtgggccagttctgcgtagtccctgccctcgtggagaacacattcctcctggggagactgacagatgcaaagacaggaac

SEQ ID NO: 41204 - DNA, 201 bp, Homo sapiens
actgggcgccgaggaggagatggaggccgggcggccgcggcccgtgctgcgctcggtgaactcgcgcgagccctcccaggtcatcttctgcaatcgcagtycgcgcgtcgtgctgcccgtatggctcaacttcgacggcgagccgcagccctacccaacgctgccgcctggcacgggccgccgcatccacagctaccgagt

SEQ ID NO: 41205 - DNA, 186 bp, Homo sapiens
ggagtccggcccggaagagtccggcccggaggaactgggcgccgaggaggagatggaggccgggcggccgcggcccgtgctgcgckcggtgaactcgcgcgagccctcccaggtcatcttctgcaatcgcagtccgcgcgtcgtgctgcccgtatggctcaacttcgacggcgagccgcagcccta

SEQ ID NO: 41206 - DNA, 201 bp, Homo sapiens
gcagtccgcgcgtcgtgctgcccgtatggctcaacttcgacggcgagccgcagccctacccaacgctgccgcctggcacgggccgccgcatccacagctamcgagtcctcatgactccagtgggccagttctgcgtagtccctgccctcgtggagaacacattcctcctggggagactgacagatgcaaagacaggaacaa

SEQ ID NO: 41207 - DNA, 201 bp, Homo sapiens
gagatggaggccgggcggccgcggcccgtgctgcgctcggtgaactcgcgcgagccctcccaggtcatcttctgcaatcgcagtccgcgcgtcgtgctgcbcgtatggctcaacttcgacggcgagccgcagccctacccaacgctgccgcctggcacgggccgccgcatccacagctaccgagtcctcatgactccagtg

SEQ ID NO: 41208 - DNA, 201 bp, Homo sapiens
cgaggaggagatggaggccgggcggccgcggcccgtgctgcgctcggtgaactcgcgcgagccctcccaggtcatcttctgcaatcgcagtccgcgcgtcktgctgcccgtatggctcaacttcgacggcgagccgcagccctacccaacgctgccgcctggcacgggccgccgcatccacagctaccgagtcctcatgac

SEQ ID NO: 41209 - DNA, 201 bp, Homo sapiens
cagtccgcgcgtcgtgctgcccgtatggctcaacttcgacggcgagccgcagccctacccaacgctgccgcctggcacgggccgccgcatccacagctacygagtcctcatgactccagtgggccagttctgcgtagtccctgccctcgtggagaacacattcctcctggggagactgacagatgcaaagacaggaacaag

SEQ ID NO: 41210 - DNA, 201 bp, Homo sapiens
ggagatggaggccgggcggccgcggcccgtgctgcgctcggtgaactcgcgcgagccctcccaggtcatcttctgcaatcgcagtccgcgcgtcgtgctgbccgtatggctcaacttcgacggcgagccgcagccctacccaacgctgccgcctggcacgggccgccgcatccacagctaccgagtcctcatgactccagt

SEQ ID NO: 41211 - DNA, 201 bp, Homo sapiens
tccgcgcgtcgtgctgcccgtatggctcaacttcgacggcgagccgcagccctacccaacgctgccgcctggcacgggccgccgcatccacagctaccgabtcctcatgactccagtgggccagttctgcgtagtccctgccctcgtggagaacacattcctcctggggagactgacagatgcaaagacaggaacaagcca

SEQ ID NO: 41212 - DNA, 129 bp, Homo sapiens
ggagtccggcccggaagagtccggcccgkaggaactgggcgccgaggaggagatggaggccgggcggccgcggcccgtgctgcgctcggtgaactcgcgcgagccctcccaggtcatcttctgcaatcg

SEQ ID NO: 41213 - DNA, 129 bp, Homo sapiens
ggaggctgcagtgagccatgagtatgccactgcactccagcctgggggacagagcaagaccctgcctcaaaaaaaaaaaaaaaaaaaaaatcaggccgggmatggtggctcacgcctgtaatcccagca

SEQ ID NO: 41214 - DNA, 181 bp, Homo sapiens
ggagtccggcccggaagagtccggcccggaggaactgggcgccgaggaggagatggaggccgggcggccgcggcccgtgcygcgctcggtgaactcgcgcgagccctcccaggtcatcttctgcaatcgcagtccgcgcgtcgtgctgcccgtatggctcaacttcgacggcgagccgcag

SEQ ID NO: 41215 - DNA, 201 bp, Homo sapiens
cgggcggccgcggcccgtgctgcgctcggtgaactcgcgcgagccctcccaggtcatcttctgcaatcgcagtccgcgcgtcgtgctgcccgtatggctcwacttcgacggcgagccgcagccctacccaacgctgccgcctggcacgggccgccgcatccacagctaccgagtcctcatgactccagtgggccagttctg

SEQ ID NO: 41216 - DNA, 201 bp, Homo sapiens; identical to SEQ ID NO: 41099

SEQ ID NO: 41217 - DNA, 201 bp, Homo sapiens; identical to SEQ ID NO: 41107

SEQ ID NO: 41218 - DNA, 201 bp, Homo sapiens
cggcccgtgctgcgctcggtgaactcgcgcgagccctcccaggtcatcttctgcaatcgcagtccgcgcgtcgtgctgcccgtatggctcaacttcgacgrcgagccgcagccctacccaacgctgccgcctggcacgggccgccgcatccacagctaccgagtcctcatgactccagtgggccagttctgcgtagtccct

SEQ ID NO: 41219 - DNA, 184 bp, Homo sapiens
ggagtccggcccggaagagtccggcccggaggaactgggcgccgaggaggagatggaggccgggcggccgcggcccgtgctgcsctcggtgaactcgcgcgagccctcccaggtcatcttctgcaatcgcagtccgcgcgtcgtgctgcccgtatggctcaacttcgacggcgagccgcagccc

SEQ ID NO: 41220 - DNA, 201 bp, Homo sapiens; identical to SEQ ID NO: 41110

SEQ ID NO: 41221 - DNA, 201 bp, Homo sapiens; identical to SEQ ID NO: 41111

SEQ ID NO: 41222 - DNA, 201 bp, Homo sapiens
gggcgccgaggaggagatggaggccgggcggccgcggcccgtgctgcgctcggtgaactcgcgcgagccctcccaggtcatcttctgcaatcgcagtccgsgcgtcgtgctgcccgtatggctcaacttcgacggcgagccgcagccctacccaacgctgccgcctggcacgggccgccgcatccacagctaccgagtcct

SEQ ID NO: 41223 - DNA, 201 bp, Homo sapiens
gaggccgggcggccgcggcccgtgctgcgctcggtgaactcgcgcgagccctcccaggtcatcttctgcaatcgcagtccgcgcgtcgtgctgcccgtatsgctcaacttcgacggcgagccgcagccctacccaacgctgccgcctggcacgggccgccgcatccacagctaccgagtcctcatgactccagtgggccag

SEQ ID NO: 41224 - DNA, 201 bp, Homo sapiens
  misc_feature (1)...(201): n = A,T,C or G
gcggcccgtgctgcgctcggtgaactcgcgcgagccctcccaggtcatcttctgcaatcgcagtccgcgcgtcgtgctgcccgtatggctcaacttcgacngcgagccgcagccctacccaacgctgccgcctggcacgggccgccgcatccacagctaccgagtcctcatgactccagtgggccagttctgcgtagtccc

SEQ ID NO: 41225 - DNA, 201 bp, Homo sapiens
gggcggccgcggcccgtgctgcgctcggtgaactcgcgcgagccctcccaggtcatcttctgcaatcgcagtccgcgcgtcgtgctgcccgtatggctcawcttcgacggcgagccgcagccctacccaacgctgccgcctggcacgggccgccgcatccacagctaccgagtcctcatgactccagtgggccagttctgc

SEQ ID NO: 41226 - DNA, 107 bp, Homo sapiens
ggagtcsggcccggaagagtccggcccggaggaactgggcgccgaggaggagatggaggccgggcggccgcggcccgtgctgcgctcggtgaactcgcgcgagccct

SEQ ID NO: 41227 - DNA, 201 bp, Homo sapiens
tcggtgaactcgcgcgagccctcccaggtcatcttctgcaatcgcagtccgcgcgtcgtgctgcccgtatggctcaacttcgacggcgagccgcagccctrcccaacgctgccgcctggcacgggccgccgcatccacagctaccgagtcctcatgactccagtgggccagttctgcgtagtccctgccctcgtggagaac

SEQ ID NO: 41228 - DNA, 201 bp, Homo sapiens; identical to SEQ ID NO: 41173

SEQ ID NO: 41229 - DNA, 201 bp, Homo sapiens
gccgggcggccgcggcccgtgctgcgctcggtgaactcgcgcgagccctcccaggtcatcttctgcaatcgcagtccgcgcgtcgtgctgcccgtatggcycaacttcgacggcgagccgcagccctacccaacgctgccgcctggcacgggccgccgcatccacagctaccgagtcctcatgactccagtgggccagttc

SEQ ID NO: 41230 - DNA, 201 bp, Homo sapiens; identical to SEQ ID NO: 41117

SEQ ID NO: 41231 - DNA, 196 bp, Homo sapiens
ggagtccggcccggaagagtccggcccggaggaactgggcgccgaggaggagatggaggccgggcggccgcggcccgtgctgcgctcggtgaactvgcgcgagccctcccaggtcatcttctgcaatcgcagtccgcgcgtcgtgctgcccgtatggctcaacttcgacggcgagccgcagccctacccaacgctg

SEQ ID NO: 41232 - DNA, 201 bp, Homo sapiens
gctcggtgaactcgcgcgagccctcccaggtcatcttctgcaatcgcagtccgcgcgtcgtgctgcccgtatggctcaacttcgacggcgagccgcagccstacccaacgctgccgcctggcacgggccgccgcatccacagctaccgagtcctcatgactccagtgggccagttctgcgtagtccctgccctcgtggaga

SEQ ID NO: 41233 - DNA, 201 bp, Homo sapiens
ctcggtgaactcgcgcgagccctcccaggtcatcttctgcaatcgcagtccgcgcgtcgtgctgcccgtatggctcaacttcgacggcgagccgcagcccyacccaacgctgccgcctggcacgggccgccgcatccacagctaccgagtcctcatgactccagtgggccagttctgcgtagtccctgccctcgtggagaa

SEQ ID NO: 41234 - DNA, 201 bp, Homo sapiens; identical to SEQ ID NO: 41181

SEQ ID NO: 41235 - DNA, 201 bp, Homo sapiens; identical to SEQ ID NO: 41183
  misc_feature (1)...(201): n = A,T,C or G

SEQ ID NO: 41236 - DNA, 201 bp, Homo sapiens; identical to SEQ ID NO: 41184

SEQ ID NO: 41237 - DNA, 201 bp, Homo sapiens
ggaggccgggcggccgcggcccgtgctgcgctcggtgaactcgcgcgagccctcccaggtcatcttctgcaatcgcagtccgcgcgtcgtgctgcccgtawggctcaacttcgacggcgagccgcagccctacccaacgctgccgcctggcacgggccgccgcatccacagctaccgagtcctcatgactccagtgggcca

SEQ ID NO: 41238 - DNA, 105 bp, Homo sapiens
ggagyccggcccggaagagtccggcccggaggaactgggcgccgaggaggagatggaggccgggcggccgcggcccgtgctgcgctcggtgaactcgcgcgagcc

SEQ ID NO: 41239 - DNA, 201 bp, Homo sapiens
ctgcgctcggtgaactcgcgcgagccctcccaggtcatcttctgcaatcgcagtccgcgcgtcgtgctgcccgtatggctcaacttcgacggcgagccgcmgccctacccaacgctgccgcctggcacgggccgccgcatccacagctaccgagtcctcatgactccagtgggccagttctgcgtagtccctgccctcgtg

SEQ ID NO: 41240 - DNA, 201 bp, Homo sapiens; identical to SEQ ID NO: 41188

SEQ ID NO: 41241 - DNA, 187 bp, Homo sapiens
  misc_feature (1)...(187): n = A,T,C or G
ggagtccggcccggaagagtccggcccggaggaactgggcgccgaggaggagatggaggccgggcggccgcggcccgtgctgcgctnggtgaactcgcgcgagccctcccaggtcatcttctgcaatcgcagtccgcgcgtcgtgctgcccgtatggctcaacttcgacggcgagccgcagccctac

SEQ ID NO: 41242 - DNA, 201 bp, Homo sapiens
aggccgggcggccgcggcccgtgctgcgctcggtgaactcgcgcgagccctcccaggtcatcttctgcaatcgcagtccgcgcgtcgtgctgcccgtatgvctcaacttcgacggcgagccgcagccctacccaacgctgccgcctggcacgggccgccgcatccacagctaccgagtcctcatgactccagtgggccagt

SEQ ID NO: 41243 - DNA, 201 bp, Homo sapiens; identical to SEQ ID NO: 41190

SEQ ID NO: 41244 - DNA, 201 bp, Homo sapiens; identical to SEQ ID NO: 41076

SEQ ID NO: 41245 - DNA, 201 bp, Homo sapiens; identical to SEQ ID NO: 41077

SEQ ID NO: 41246 - DNA, 201 bp, Homo sapiens; identical to SEQ ID NO: 41078

SEQ ID NO: 41247 - DNA, 119 bp, Homo sapiens; identical to SEQ ID NO: 41079

SEQ ID NO: 41248 - DNA, 201 bp, Homo sapiens; identical to SEQ ID NO: 41081

SEQ ID NO: 41249 - DNA, 201 bp, Homo sapiens; identical to SEQ ID NO: 41082

SEQ ID NO: 41250 - DNA, 201 bp, Homo sapiens; identical to SEQ ID NO: 41083

SEQ ID NO: 41251 - DNA, 201 bp, Homo sapiens
tacccaacgctgccgcctggcacgggccgccgcatccacagctaccgaggtcacctttggctcttcagagatgcagggacacacgatgggcttctggttavccaaactgaattatttgtgccatctctcaatgttgacggacagcctatttttgccaatatcacactgccagtgtatactctgaaagagcgatgcctccag

SEQ ID NO: 41252 - DNA, 201 bp, Homo sapiens; identical to SEQ ID NO: 41091

SEQ ID NO: 41253 - DNA, 201 bp, Homo sapiens; identical to SEQ ID NO: 41093

SEQ ID NO: 41254 - DNA, 201 bp, Homo sapiens; identical to SEQ ID NO: 41094

SEQ ID NO: 41255 - DNA, 201 bp, Homo sapiens; identical to SEQ ID NO: 41095

SEQ ID NO: 41256 - DNA, 201 bp, Homo sapiens; identical to SEQ ID NO: 41096

SEQ ID NO: 41257 - DNA, 201 bp, Homo sapiens; identical to SEQ ID NO: 41097

SEQ ID NO: 41258 - DNA, 201 bp, Homo sapiens; identical to SEQ ID NO: 41098

SEQ ID NO: 41259 - DNA, 201 bp, Homo sapiens; identical to SEQ ID NO: 41099

SEQ ID NO: 41260 - DNA, 201 bp, Homo sapiens; identical to SEQ ID NO: 41100

SEQ ID NO: 41261 - DNA, 201 bp, Homo sapiens; identical to SEQ ID NO: 41101

SEQ ID NO: 41262 - DNA, 201 bp, Homo sapiens; identical to SEQ ID NO: 41102

SEQ ID NO: 41263 - DNA, 201 bp, Homo sapiens; identical to SEQ ID NO: 41103

SEQ ID NO: 41264 - DNA, 201 bp, Homo sapiens; identical to SEQ ID NO: 41104
  misc_feature (1)...(201): n = A,T,C or G

SEQ ID NO: 41265 - DNA, 201 bp, Homo sapiens; identical to SEQ ID NO: 41105

SEQ ID NO: 41266 - DNA, 201 bp, Homo sapiens; identical to SEQ ID NO: 41107

SEQ ID NO: 41267 - DNA, 201 bp, Homo sapiens; identical to SEQ ID NO: 41108

SEQ ID NO: 41268 - DNA, 201 bp, Homo sapiens; identical to SEQ ID NO: 41109

SEQ ID NO: 41269 - DNA, 201 bp, Homo sapiens; identical to SEQ ID NO: 41110

SEQ ID NO: 41270 - DNA, 201 bp, Homo sapiens; identical to SEQ ID NO: 41111

SEQ ID NO: 41271 - DNA, 201 bp, Homo sapiens; identical to SEQ ID NO: 41113

SEQ ID NO: 41272 - DNA, 201 bp, Homo sapiens; identical to SEQ ID NO: 41112

SEQ ID NO: 41273 - DNA, 201 bp, Homo sapiens; identical to SEQ ID NO: 41115

SEQ ID NO: 41274 - DNA, 201 bp, Homo sapiens; identical to SEQ ID NO: 41114
  misc_feature (1)...(201): n = A,T,C or G

SEQ ID NO: 41275 - DNA, 201 bp, Homo sapiens
ctgattgatttgggtttttttgttgttgttgttttgttttgttttgtttttttgagatggagtctcactcttgtcacccaggctggagttgcagtgagccragatcacaccattgcactccagcctgggaaacaagagtgaaattccatctcaaaaccaaattttcaaaaaaaaaacatgccgcttgagtactgtgttttt

SEQ ID NO: 41276 - DNA, 201 bp, Homo sapiens; identical to SEQ ID NO: 41117

SEQ ID NO: 41277 - DNA, 201 bp, Homo sapiens
cctggcacgggccgccgcatccacagctaccgaggtcacctttggctcttcagagatgcagggacacacgatgggcttctggttaaccaaactgaattatbtgtgccatctctcaatgttgacggacagcctatttttgccaatatcacactgccagtgtatactctgaaagagcgatgcctccaggttgtccggagccta

SEQ ID NO: 41278 - DNA, 201 bp, Homo sapiens; identical to SEQ ID NO: 41119

SEQ ID NO: 41279 - DNA, 201 bp, Homo sapiens; identical to SEQ ID NO: 41120

SEQ ID NO: 41280 - DNA, 201 bp, Homo sapiens; identical to SEQ ID NO: 41121

SEQ ID NO: 41281 - DNA, 201 bp, Homo sapiens; identical to SEQ ID NO: 41122

SEQ ID NO: 41282 - DNA, 201 bp, Homo sapiens; identical to SEQ ID NO: 41123

SEQ ID NO: 41283 - DNA, 201 bp, Homo sapiens; identical to SEQ ID NO: 41124

SEQ ID NO: 41284 - DNA, 201 bp, Homo sapiens; identical to SEQ ID NO: 41125

SEQ ID NO: 41285 - DNA, 201 bp, Homo sapiens; identical to SEQ ID NO: 41126

SEQ ID NO: 41286 - DNA, 201 bp, Homo sapiens; identical to SEQ ID NO: 41127

SEQ ID NO: 41287 - DNA, 201 bp, Homo sapiens; identical to SEQ ID NO: 41128

SEQ ID NO: 41288 - DNA, 201 bp, Homo sapiens; identical to SEQ ID NO: 41130

SEQ ID NO: 41289 - DNA, 201 bp, Homo sapiens; identical to SEQ ID NO: 41131

SEQ ID NO: 41290 - DNA, 201 bp, Homo sapiens; identical to SEQ ID NO: 41132

SEQ ID NO: 41291 - DNA, 201 bp, Homo sapiens; identical to SEQ ID NO: 41133

SEQ ID NO: 41292 - DNA, 201 bp, Homo sapiens; identical to SEQ ID NO: 41134

SEQ ID NO: 41293 - DNA, 201 bp, Homo sapiens; identical to SEQ ID NO: 41135

SEQ ID NO: 41294 - DNA, 201 bp, Homo sapiens; identical to SEQ ID NO: 41136

SEQ ID NO: 41295 - DNA, 201 bp, Homo sapiens; identical to SEQ ID NO: 41137

SEQ ID NO: 41296 - DNA, 201 bp, Homo sapiens; identical to SEQ ID NO: 41138

SEQ ID NO: 41297 - DNA, 201 bp, Homo sapiens; identical to SEQ ID NO: 41139

SEQ ID NO: 41298 - DNA, 201 bp, Homo sapiens; identical to SEQ ID NO: 41140

SEQ ID NO: 41299 - DNA, 201 bp, Homo sapiens; identical to SEQ ID NO: 41141

SEQ ID NO: 41300 - DNA, 201 bp, Homo sapiens; identical to SEQ ID NO: 41142

SEQ ID NO: 41301 - DNA, 201 bp, Homo sapiens; identical to SEQ ID NO: 41143

SEQ ID NO: 41302 - DNA, 201 bp, Homo sapiens
cccaacgctgccgcctggcacgggccgccgcatccacagctaccgaggtcacctttggctcttcagagatgcagggacacacgatgggcttctggttaacyaaactgaattatttgtgccatctctcaatgttgacggacagcctatttttgccaatatcacactgccagtgtatactctgaaagagcgatgcctccaggt

SEQ ID NO: 41303 - DNA, 201 bp, Homo sapiens; identical to SEQ ID NO: 41145

SEQ ID NO: 41304 - DNA, 201 bp, Homo sapiens; identical to SEQ ID NO: 41146

SEQ ID NO: 41305 - DNA, 201 bp, Homo sapiens; identical to SEQ ID NO: 41147

SEQ ID NO: 41306 - DNA, 201 bp, Homo sapiens; identical to SEQ ID NO: 41152

SEQ ID NO: 41307 - DNA, 201 bp, Homo sapiens
gttgtccggagcctagtcaagcctgagaattacaggagactggacatcgtcaggtcgctctacgaagatctggaagaccacccaaatgtgcagaaagaccdggagcggctgacacaggagcgcattgcacatcaacggatgggagattgaagatttctgttgaaacttacactgtttcatctcagcttttgatggattgac

SEQ ID NO: 41308 - DNA, 201 bp, Homo sapiens; identical to SEQ ID NO: 41154

SEQ ID NO: 41309 - DNA, 201 bp, Homo sapiens
cgcgtcgtgctgcccgtatggctcaacttcgacggcgagccgcagccctacccaacgctgccgcctggcacgggccgccgcatccacagctaccgaggtcrcctttggctcttcagagatgcagggacacacgatgggcttctggttaaccaaactgaattatttgtgccatctctcaatgttgacggacagcctattttt

SEQ ID NO: 41310 - DNA, 201 bp, Homo sapiens; identical to SEQ ID NO: 41158

SEQ ID NO: 41311 - DNA, 201 bp, Homo sapiens
ccaacgctgccgcctggcacgggccgccgcatccacagctaccgaggtcacctttggctcttcagagatgcagggacacacgatgggcttctggttaaccmaactgaattatttgtgccatctctcaatgttgacggacagcctatttttgccaatatcacactgccagtgtatactctgaaagagcgatgcctccaggtt

SEQ ID NO: 41312 - DNA, 201 bp, Homo sapiens
gcgcgtcgtgctgcccgtatggctcaacttcgacggcgagccgcagccctacccaacgctgccgcctggcacgggccgccgcatccacagctaccgaggtbacctttggctcttcagagatgcagggacacacgatgggcttctggttaaccaaactgaattatttgtgccatctctcaatgttgacggacagcctatttt

SEQ ID NO: 41313 - DNA, 201 bp, Homo sapiens
gcgtcgtgctgcccgtatggctcaacttcgacggcgagccgcagccctacccaacgctgccgcctggcacgggccgccgcatccacagctaccgaggtcamctttggctcttcagagatgcagggacacacgatgggcttctggttaaccaaactgaattatttgtgccatctctcaatgttgacggacagcctatttttg

SEQ ID NO: 41314 - DNA, 201 bp, Homo sapiens; identical to SEQ ID NO: 41160

SEQ ID NO: 41315 - DNA, 201 bp, Homo sapiens
tgctgcccgtatggctcaacttcgacggcgagccgcagccctacccaacgctgccgcctggcacgggccgccgcatccacagctaccgaggtcacctttgdctcttcagagatgcagggacacacgatgggcttctggttaaccaaactgaattatttgtgccatctctcaatgttgacggacagcctatttttgccaata

SEQ ID NO: 41316 - DNA, 201 bp, Homo sapiens
gtgctgcccgtatggctcaacttcgacggcgagccgcagccctacccaacgctgccgcctggcacgggccgccgcatccacagctaccgaggtcacctttrgctcttcagagatgcagggacacacgatgggcttctggttaaccaaactgaattatttgtgccatctctcaatgttgacggacagcctatttttgccaat

SEQ ID NO: 41317 - DNA, 201 bp, Homo sapiens
ctgcccgtatggctcaacttcgacggcgagccgcagccctacccaacgctgccgcctggcacgggccgccgcatccacagctaccgaggtcacctttggcbcttcagagatgcagggacacacgatgggcttctggttaaccaaactgaattatttgtgccatctctcaatgttgacggacagcctatttttgccaatatc

SEQ ID NO: 41318 - DNA, 201 bp, Homo sapiens; identical to SEQ ID NO: 41164

SEQ ID NO: 41319 - DNA, 201 bp, Homo sapiens; identical to SEQ ID NO: 41165

SEQ ID NO: 41320 - DNA, 201 bp, Homo sapiens; identical to SEQ ID NO: 41166

SEQ ID NO: 41321 - DNA, 201 bp, Homo sapiens
ccggagcctagtcaagcctgagaattacaggagactggacatcgtcaggtcgctctacgaagatctggaagaccacccaaatgtgcagaaagacctggagyggctgacacaggagcgcattgcacatcaacggatgggagattgaagatttctgttgaaacttacactgtttcatctcagcttttgatggattgacattct

SEQ ID NO: 41322 - DNA, 201 bp, Homo sapiens; identical to SEQ ID NO: 41168

SEQ ID NO: 41323 - DNA, 201 bp, Homo sapiens
cccgtatggctcaacttcgacggcgagccgcagccctacccaacgctgccgcctggcacgggccgccgcatccacagctaccgaggtcacctttggctctycagagatgcagggacacacgatgggcttctggttaaccaaactgaattatttgtgccatctctcaatgttgacggacagcctatttttgccaatatcaca

SEQ ID NO: 41324 - DNA, 201 bp, Homo sapiens; identical to SEQ ID NO: 41170

SEQ ID NO: 41325 - DNA, 201 bp, Homo sapiens; identical to SEQ ID NO: 41171

SEQ ID NO: 41326 - DNA, 201 bp, Homo sapiens
tggctcaacttcgacggcgagccgcagccctacccaacgctgccgcctggcacgggccgccgcatccacagctaccgaggtcacctttggctcttcagagrtgcagggacacacgatgggcttctggttaaccaaactgaattatttgtgccatctctcaatgttgacggacagcctatttttgccaatatcacactgcca

SEQ ID NO: 41327 - DNA, 201 bp, Homo sapiens; identical to SEQ ID NO: 41173

SEQ ID NO: 41328 - DNA, 201 bp, Homo sapiens; identical to SEQ ID NO: 41174

SEQ ID NO: 41329 - DNA, 201 bp, Homo sapiens
cgtatggctcaacttcgacggcgagccgcagccctacccaacgctgccgcctggcacgggccgccgcatccacagctaccgaggtcacctttggctcttcrgagatgcagggacacacgatgggcttctggttaaccaaactgaattatttgtgccatctctcaatgttgacggacagcctatttttgccaatatcacact

SEQ ID NO: 41330 - DNA, 201 bp, Homo sapiens; identical to SEQ ID NO: 41176

SEQ ID NO: 41331 - DNA, 201 bp, Homo sapiens; identical to SEQ ID NO: 41177

SEQ ID NO: 41332 - DNA, 201 bp, Homo sapiens; identical to SEQ ID NO: 41178

SEQ ID NO: 41333 - DNA, 201 bp, Homo sapiens
gccgcagccctacccaacgctgccgcctggcacgggccgccgcatccacagctaccgaggtcacctttggctcttcagagatgcagggacacacgatgggyttctggttaaccaaactgaattatttgtgccatctctcaatgttgacggacagcctatttttgccaatatcacactgccagtgtatactctgaaagagcg

SEQ ID NO: 41334 - DNA, 201 bp, Homo sapiens; identical to SEQ ID NO: 41180

SEQ ID NO: 41335 - DNA, 201 bp, Homo sapiens; identical to SEQ ID NO: 41181

SEQ ID NO: 41336 - DNA, 201 bp, Homo sapiens; identical to SEQ ID NO: 41182

SEQ ID NO: 41337 - DNA, 201 bp, Homo sapiens; identical to SEQ ID NO: 41183
  misc_feature (1)...(201): n = A,T,C or G

SEQ ID NO: 41338 - DNA, 201 bp, Homo sapiens; identical to SEQ ID NO: 41185

SEQ ID NO: 41339 - DNA, 201 bp, Homo sapiens; identical to SEQ ID NO: 41186

SEQ ID NO: 41340 - DNA, 201 bp, Homo sapiens; identical to SEQ ID NO: 41187

SEQ ID NO: 41341 - DNA, 201 bp, Homo sapiens; identical to SEQ ID NO: 41188

SEQ ID NO: 41342 - DNA, 201 bp, Homo sapiens; identical to SEQ ID NO: 41189

SEQ ID NO: 41343 - DNA, 201 bp, Homo sapiens; identical to SEQ ID NO: 41190

SEQ ID NO: 41344 - DNA, 201 bp, Homo sapiens; identical to SEQ ID NO: 41191

SEQ ID NO: 41345 - DNA, 201 bp, Homo sapiens; identical to SEQ ID NO: 41192
  misc_feature (1)...(201): n = A,T,C or G

SEQ ID NO: 41346 - DNA, 201 bp, Homo sapiens; identical to SEQ ID NO: 41193

SEQ ID NO: 41347 - DNA, 201 bp, Homo sapiens
gctgcgctcggtgaactcgcgcgagccctcccaggtcatcttctgcaatcgcagtccgcgcgtcgtgctgcccgtatggctcaacttcgacggcgagccgyagccctacccaacgctgccgcctggcacgggccgccgcatccacagctaccgaggtacgggcccggcgcttaggcccgacccagcagggacgatagcacg

SEQ ID NO: 41348 - DNA, 162 bp, Homo sapiens
gcggccgcggcccgtgctgcgctcggtgaactcgcgcgagccctcccaggtcatcttctgcmatcgcagtccgcgcgtcgtgctgcccgtatggctcaacttcgacggcgagccgcagccctacccaacgctgccgcctggcacgggccgccgcatccacag

SEQ ID NO: 41349 - DNA, 201 bp, Homo sapiens
ggtcatcttctgcaatcgcagtccgcgcgtcgtgctgcccgtatggctcaacttcgacggcgagccgcagccctacccaacgctgccgcctggcacgggcsgccgcatccacagctaccgaggtacgggcccggcgcttaggcccgacccagcagggacgatagcacggtctgaagcccctctaccgccccggggtccatt

SEQ ID NO: 41350 - DNA, 201 bp, Homo sapiens
gcccgtgctgcgctcggtgaactcgcgcgagccctcccaggtcatcttctgcaatcgcagtccgcgcgtcgtgctgcccgtatggctcaacttcgacggckagccgcagccctacccaacgctgccgcctggcacgggccgccgcatccacagctaccgaggtacgggcccggcgcttaggcccgacccagcagggacgat

SEQ ID NO: 41351 - DNA, 184 bp, Homo sapiens
gcggccgcggcccgtgctgcgctcggtgaactcgcgcgagccctcccaggtcatcttctgcaatcgcagtccgcgcgtcgtgcygcccgtatggctcaacttcgacggcgagccgcagccctacccaacgctgccgcctggcacgggccgccgcatccacagctaccgaggtacgggcccggcg

SEQ ID NO: 41352 - DNA, 201 bp, Homo sapiens
gtcatcttctgcaatcgcagtccgcgcgtcgtgctgcccgtatggctcaacttcgacggcgagccgcagccctacccaacgctgccgcctggcacgggccsccgcatccacagctaccgaggtacgggcccggcgcttaggcccgacccagcagggacgatagcacggtctgaagcccctctaccgccccggggtccattt

SEQ ID NO: 41353 - DNA, 201 bp, Homo sapiens
atcgcagtccgcgcgtcgtgctgcccgtatggctcaacttcgacggcgagccgcagccctacccaacgctgccgcctggcacgggccgccgcatccacagstaccgaggtacgggcccggcgcttaggcccgacccagcagggacgatagcacggtctgaagcccctctaccgccccggggtccattttgcagacggggaa

SEQ ID NO: 41354 - DNA, 201 bp, Homo sapiens
aatcgcagtccgcgcgtcgtgctgcccgtatggctcaacttcgacggcgagccgcagccctacccaacgctgccgcctggcacgggccgccgcatccacadctaccgaggtacgggcccggcgcttaggcccgacccagcagggacgatagcacggtctgaagcccctctaccgccccggggtccattttgcagacgggga

SEQ ID NO: 41355 - DNA, 156 bp, Homo sapiens
gcggccgcggcccgtgctgcgctcggtgaactcgcgcgagccctcccaggtcatcwtctgcaatcgcagtccgcgcgtcgtgctgcccgtatggctcaacttcgacggcgagccgcagccctacccaacgctgccgcctggcacgggccgccgcat

SEQ ID NO: 41356 - DNA, 171 bp, Homo sapiens
gcggccgcggcccgtgctgcgctcggtgaactcgcgcgagccctcccaggtcatcttctgcaatcgcagtycgcgcgtcgtgctgcccgtatggctcaacttcgacggcgagccgcagccctacccaacgctgccgcctggcacgggccgccgcatccacagctaccgagg

SEQ ID NO: 41357 - DNA, 123 bp, Homo sapiens
gcggccgcggcccgtgctgcgckcggtgaactcgcgcgagccctcccaggtcatcttctgcaatcgcagtccgcgcgtcgtgctgcccgtatggctcaacttcgacggcgagccgcagcccta

SEQ ID NO: 41358 - DNA, 201 bp, Homo sapiens
tcgcagtccgcgcgtcgtgctgcccgtatggctcaacttcgacggcgagccgcagccctacccaacgctgccgcctggcacgggccgccgcatccacagchaccgaggtacgggcccggcgcttaggcccgacccagcagggacgatagcacggtctgaagcccctctaccgccccggggtccattttgcagacggggaac

SEQ ID NO: 41359 - DNA, 187 bp, Homo sapiens
gcggccgcggcccgtgctgcgctcggtgaactcgcgcgagccctcccaggtcatcttctgcaatcgcagtccgcgcgtcgtgctgcbcgtatggctcaacttcgacggcgagccgcagccctacccaacgctgccgcctggcacgggccgccgcatccacagctaccgaggtacgggcccggcgctt

SEQ ID NO: 41360 - DNA, 180 bp, Homo sapiens
gcggccgcggcccgtgctgcgctcggtgaactcgcgcgagccctcccaggtcatcttctgcaatcgcagtccgcgcgtcktgctgcccgtatggctcaacttcgacggcgagccgcagccctacccaacgctgccgcctggcacgggccgccgcatccacagctaccgaggtacgggccc

SEQ ID NO: 41361 - DNA, 201 bp, Homo sapiens
gcagtccgcgcgtcgtgctgcccgtatggctcaacttcgacggcgagccgcagccctacccaacgctgccgcctggcacgggccgccgcatccacagctamcgaggtacgggcccggcgcttaggcccgacccagcagggacgatagcacggtctgaagcccctctaccgccccggggtccattttgcagacggggaactg

SEQ ID NO: 41362 - DNA, 186 bp, Homo sapiens
gcggccgcggcccgtgctgcgctcggtgaactcgcgcgagccctcccaggtcatcttctgcaatcgcagtccgcgcgtcgtgctgbccgtatggctcaacttcgacggcgagccgcagccctacccaacgctgccgcctggcacgggccgccgcatccacagctaccgaggtacgggcccggcgct

SEQ ID NO: 41363 - DNA, 201 bp, Homo sapiens
cagtccgcgcgtcgtgctgcccgtatggctcaacttcgacggcgagccgcagccctacccaacgctgccgcctggcacgggccgccgcatccacagctacygaggtacgggcccggcgcttaggcccgacccagcagggacgatagcacggtctgaagcccctctaccgccccggggtccattttgcagacggggaactga

SEQ ID NO: 41364 - DNA, 201 bp, Homo sapiens
tccgcgcgtcgtgctgcccgtatggctcaacttcgacggcgagccgcagccctacccaacgctgccgcctggcacgggccgccgcatccacagctaccgabgtacgggcccggcgcttaggcccgacccagcagggacgatagcacggtctgaagcccctctaccgccccggggtccattttgcagacggggaactgaggc

SEQ ID NO: 41365 - DNA, 118 bp, Homo sapiens
gcggccgcggcccgtgcygcgctcggtgaactcgcgcgagccctcccaggtcatcttctgcaatcgcagtccgcgcgtcgtgctgcccgtatggctcaacttcgacggcgagccgcag

SEQ ID NO: 41366 - DNA, 198 bp, Homo sapiens
gcggccgcggcccgtgctgcgctcggtgaactcgcgcgagccctcccaggtcatcttctgcaatcgcagtccgcgcgtcgtgctgcccgtatggctcwacttcgacggcgagccgcagccctacccaacgctgccgcctggcacgggccgccgcatccacagctaccgaggtacgggcccggcgcttaggcccgaccc

SEQ ID NO: 41367 - DNA, 151 bp, Homo sapiens
gcggccgcggcccgtgctgcgctcggtgaactcgcgcgagccctcccaggkcatcttctgcaatcgcagtccgcgcgtcgtgctgcccgtatggctcaacttcgacggcgagccgcagccctacccaacgctgccgcctggcacgggccgc

SEQ ID NO: 41368 - DNA, 201 bp, Homo sapiens
cggcccgtgctgcgctcggtgaactcgcgcgagccctcccaggtcatcttctgcaatcgcagtccgcgcgtcgtgctgcccgtatggctcaacttcgacgrcgagccgcagccctacccaacgctgccgcctggcacgggccgccgcatccacagctaccgaggtacgggcccggcgcttaggcccgacccagcagggacg

SEQ ID NO: 41369 - DNA, 168 bp, Homo sapiens
gcggccgcggcccgtgctgcgctcggtgaactcgcgcgagccctcccaggtcatcttctgcaatcgcrgtccgcgcgtcgtgctgcccgtatggctcaacttcgacggcgagccgcagccctacccaacgctgccgcctggcacgggccgccgcatccacagctaccg

SEQ ID NO: 41370 - DNA, 121 bp, Homo sapiens
gcggccgcggcccgtgctgcsctcggtgaactcgcgcgagccctcccaggtcatcttctgcaatcgcagtccgcgcgtcgtgctgcccgtatggctcaacttcgacggcgagccgcagccc

SEQ ID NO: 41371 - DNA, 147 bp, Homo sapiens
gcggccgcggcccgtgctgcgctcggtgaactcgcgcgagccctccyaggtcatcttctgcaatcgcagtccgcgcgtcgtgctgcccgtatggctcaacttcgacggcgagccgcagccctacccaacgctgccgcctggcacggg

SEQ ID NO: 41372 - DNA, 169 bp, Homo sapiens
gcggccgcggcccgtgctgcgctcggtgaactcgcgcgagccctcccaggtcatcttctgcaatcgcadtccgcgcgtcgtgctgcccgtatggctcaacttcgacggcgagccgcagccctacccaacgctgccgcctggcacgggccgccgcatccacagctaccga

SEQ ID NO: 41373 - DNA, 193 bp, Homo sapiens
gcggccgcggcccgtgctgcgctcggtgaactcgcgcgagccctcccaggtcatcttctgcaatcgcagtccgcgcgtcgtgctgcccgtatsgctcaacttcgacggcgagccgcagccctacccaacgctgccgcctggcacgggccgccgcatccacagctaccgaggtacgggcccggcgcttaggccc

SEQ ID NO: 41374 - DNA, 174 bp, Homo sapiens
gcggccgcggcccgtgctgcgctcggtgaactcgcgcgagccctcccaggtcatcttctgcaatcgcagtccgsgcgtcgtgctgcccgtatggctcaacttcgacggcgagccgcagccctacccaacgctgccgcctggcacgggccgccgcatccacagctaccgaggtac

SEQ ID NO: 41375 - DNA, 201 bp, Homo sapiens
  misc_feature (1)...(201): n = A,T,C or G
gcggcccgtgctgcgctcggtgaactcgcgcgagccctcccaggtcatcttctgcaatcgcagtccgcgcgtcgtgctgcccgtatggctcaacttcgacngcgagccgcagccctacccaacgctgccgcctggcacgggccgccgcatccacagctaccgaggtacgggcccggcgcttaggcccgacccagcagggac

SEQ ID NO: 41376 - DNA, 199 bp, Homo sapiens
gcggccgcggcccgtgctgcgctcggtgaactcgcgcgagccctcccaggtcatcttctgcaatcgcagtccgcgcgtcgtgctgcccgtatggctcawcttcgacggcgagccgcagccctacccaacgctgccgcctggcacgggccgccgcatccacagctaccgaggtacgggcccggcgcttaggcccgaccca

SEQ ID NO: 41377 - DNA, 201 bp, Homo sapiens
tcggtgaactcgcgcgagccctcccaggtcatcttctgcaatcgcagtccgcgcgtcgtgctgcccgtatggctcaacttcgacggcgagccgcagccctrcccaacgctgccgcctggcacgggccgccgcatccacagctaccgaggtacgggcccggcgcttaggcccgacccagcagggacgatagcacggtctgaa

SEQ ID NO: 41378 - DNA, 170 bp, Homo sapiens
gcggccgcggcccgtgctgcgctcggtgaactcgcgcgagccctcccaggtcatcttctgcaatcgcagkccgcgcgtcgtgctgcccgtatggctcaacttcgacggcgagccgcagccctacccaacgctgccgcctggcacgggccgccgcatccacagctaccgag

SEQ ID NO: 41379 - DNA, 196 bp, Homo sapiens
gcggccgcggcccgtgctgcgctcggtgaactcgcgcgagccctcccaggtcatcttctgcaatcgcagtccgcgcgtcgtgctgcccgtatggcycaacttcgacggcgagccgcagccctacccaacgctgccgcctggcacgggccgccgcatccacagctaccgaggtacgggcccggcgcttaggcccgac

SEQ ID NO: 41380 - DNA, 166 bp, Homo sapiens
gcggccgcggcccgtgctgcgctcggtgaactcgcgcgagccctcccaggtcatcttctgcaatcscagtccgcgcgtcgtgctgcccgtatggctcaacttcgacggcgagccgcagccctacccaacgctgccgcctggcacgggccgccgcatccacagctac

SEQ ID NO: 41381 - DNA, 201 bp, Homo sapiens
ctcggtgaactcgcgcgagccctcccaggtcatcttctgcaatcgcagtccgcgcgtcgtgctgcccgtatggctcaacttcgacggcgagccgcagcccyacccaacgctgccgcctggcacgggccgccgcatccacagctaccgaggtacgggcccggcgcttaggcccgacccagcagggacgatagcacggtctga

SEQ ID NO: 41382 - DNA, 201 bp, Homo sapiens
gctcggtgaactcgcgcgagccctcccaggtcatcttctgcaatcgcagtccgcgcgtcgtgctgcccgtatggctcaacttcgacggcgagccgcagccstacccaacgctgccgcctggcacgggccgccgcatccacagctaccgaggtacgggcccggcgcttaggcccgacccagcagggacgatagcacggtctg

SEQ ID NO: 41383 - DNA, 133 bp, Homo sapiens
gcggccgcggcccgtgctgcgctcggtgaactvgcgcgagccctcccaggtcatcttctgcaatcgcagtccgcgcgtcgtgctgcccgtatggctcaacttcgacggcgagccgcagccctacccaacgctg

SEQ ID NO: 41384 - DNA, 138 bp, Homo sapiens
gcggccgcggcccgtgctgcgctcggtgaactcgcgckagccctcccaggtcatcttctgcaatcgcagtccgcgcgtcgtgctgcccgtatggctcaacttcgacggcgagccgcagccctacccaacgctgccgcc

SEQ ID NO: 41385 - DNA, 163 bp, Homo sapiens
  misc_feature (1)...(163): n = A,T,C or G
gcggccgcggcccgtgctgcgctcggtgaactcgcgcgagccctcccaggtcatcttctgcantcgcagtccgcgcgtcgtgctgcccgtatggctcaacttcgacggcgagccgcagccctacccaacgctgccgcctggcacgggccgccgcatccacagc

SEQ ID NO: 41386 - DNA, 192 bp, Homo sapiens
gcggccgcggcccgtgctgcgctcggtgaactcgcgcgagccctcccaggtcatcttctgcaatcgcagtccgcgcgtcgtgctgcccgtawggctcaacttcgacggcgagccgcagccctacccaacgctgccgcctggcacgggccgccgcatccacagctaccgaggtacgggcccggcgcttaggcc

SEQ ID NO: 41387 - DNA, 157 bp, Homo sapiens
gcggccgcggcccgtgctgcgctcggtgaactcgcgcgagccctcccaggtcatctyctgcaatcgcagtccgcgcgtcgtgctgcccgtatggctcaacttcgacggcgagccgcagccctacccaacgctgccgcctggcacgggccgccgcatc

SEQ ID NO: 41388 - DNA, 201 bp, Homo sapiens
ctgcgctcggtgaactcgcgcgagccctcccaggtcatcttctgcaatcgcagtccgcgcgtcgtgctgcccgtatggctcaacttcgacggcgagccgcmgccctacccaacgctgccgcctggcacgggccgccgcatccacagctaccgaggtacgggcccggcgcttaggcccgacccagcagggacgatagcacgg

SEQ ID NO: 41389 - DNA, 158 bp, Homo sapiens
gcggccgcggcccgtgctgcgctcggtgaactcgcgcgagccctcccaggtcatcttstgcaatcgcagtccgcgcgtcgtgctgcccgtatggctcaacttcgacggcgagccgcagccctacccaacgctgccgcctggcacgggccgccgcatcc

SEQ ID NO: 41390 - DNA, 124 bp, Homo sapiens
  misc_feature (1)...(124): n = A,T,C or G
gcggccgcggcccgtgctgcgctnggtgaactcgcgcgagccctcccaggtcatcttctgcaatcgcagtccgcgcgtcgtgctgcccgtatggctcaacttcgacggcgagccgcagccctac

SEQ ID NO: 41391 - DNA, 194 bp, Homo sapiens
gcggccgcggcccgtgctgcgctcggtgaactcgcgcgagccctcccaggtcatcttctgcaatcgcagtccgcgcgtcgtgctgcccgtatgvctcaacttcgacggcgagccgcagccctacccaacgctgccgcctggcacgggccgccgcatccacagctaccgaggtacgggcccggcgcttaggcccg

SEQ ID NO: 41392 - DNA, 201 bp, Homo sapiens
ttaacttgaaagatttgggattttttcccacctcatcatagatgggaacttttgttttcagtgcaaacaatgttggagctgtaatagtaagagctttcttacaaagctttgtattactgtgtggttttgttttttttgttgttgtttatttgattttgatttttttttcttttatgtgatctttgggaaaacacattcaga

SEQ ID NO: 41393 - DNA, 201 bp, Homo sapiens; identical to SEQ ID NO: 41392

SEQ ID NO: 41394 - DNA, 201 bp, Homo sapiens; identical to SEQ ID NO: 41392

SEQ ID NO: 41395 - DNA, 201 bp, Homo sapiens
ggacttcgggatgggaaagcggagtgtggaggagcggattcaggaggaggctcagtgtctgatagaggagcttcggaaatccaagggggccctcatggacsccaccttcctcttccagtccattaccgccaacatcatctgctccatcgtctttggaaaacgattccactaccaagatcaagagttcctgaagatgctgaa

SEQ ID NO: 41396 - DNA, 169 bp, Homo sapiens
caggaccatggaactcagcgtcctcctcttccttgcactcctcacaggactcttgctactcctggttcwgcgccaccctaacacccatgaccgcctcccaccagggccccgccctctgccccttttgggaaaccttctgcagatggatagaagaggcctactcaaatcc

SEQ ID NO: 41397 - DNA, 171 bp, Homo sapiens
caggaccatggaactcagcgtcctcctcttccttgcactcctcacaggactcttgctactcctggttcagygccaccctaacacccatgaccgcctcccaccagggccccgccctctgccccttttgggaaaccttctgcagatggatagaagaggcctactcaaatcctt

SEQ ID NO: 41398 - DNA, 201 bp, Homo sapiens
ctctgtagacaatggctctgactccccgcaacttcctgcctctgagagacctgctacaagccagcttccttcccctccatggcaccagttgtctgaggtcrcattgcaagtgagtgcaggagtgagattatcgaaaattataatatacaaaatcatatatatatatatgttcttgttttttgagacagagtctcacactgt

SEQ ID NO: 41399 - DNA, 201 bp, Homo sapiens
tgtagacaatggctctgactccccgcaacttcctgcctctgagagacctgctacaagccagcttccttcccctccatggcaccagttgtctgaggtcacaktgcaagtgagtgcaggagtgagattatcgaaaattataatatacaaaatcatatatatatatatgttcttgttttttgagacagagtctcacactgttgc

SEQ ID NO: 41400 - DNA, 201 bp, Homo sapiens
taccatgcctggctaattttcttgtagttttagtagggacatgttggccaggctggtggtgagctcctggcctcaggtgatccacccacctcagtgttccwaagtgctgatattacaggcataatatgtgatcttttgtgtctggttgctttcatgttgaatgctatttttgaggttcgtgcctgttgtagaccacagtca

SEQ ID NO: 41401 - DNA, 201 bp, Homo sapiens
gatccacccacctcagtgttccaaagtgctgatattacaggcataatatgtgatcttttgtgtctggttgctttcatgttgaatgctatttttgaggttcrtgcctgttgtagaccacagtcacacactgctgtagtcttccccagtcctcattcccagctgcctcttcctactgcttccgtctatcaaaaagcccccttg

SEQ ID NO: 41402 - DNA, 201 bp, Homo sapiens
cgaaaattataatatacaaaatcatatatatatatatgttcttgttttttgagacagagtctcacactgttgcccaggctggagtgcagtggcgtgatctyggctcactgcaacctccacccccggggatcaagcaactctcctgcctcagcctccctagtagctgggattacaggcatgcactaccacgcttggctaatt

SEQ ID NO: 41403 - DNA, 201 bp, Homo sapiens
ctccagtctcagctcccaagtagctgggattacaggcatgtactaccatgcctggctaattttcttgtagttttagtagggacatgttggccaggctggtkgtgagctcctggcctcaggtgatccacccacctcagtgttccaaagtgctgatattacaggcataatatgtgatcttttgtgtctggttgctttcatgtt

SEQ ID NO: 41404 - DNA, 201 bp, Homo sapiens
ggctcagtgtctgatagaggagcttcggaaatccaagggggccctcatggaccccaccttcctcttccagtccattaccgccaacatcatctgctccatcrtctttggaaaacgattccactaccaagatcaagagttcctgaagatgctgaacttgttctaccagactttttcactcatcagctctgtattcggccagct

SEQ ID NO: 41405 - DNA, 201 bp, Homo sapiens
agctcctggcctcaggtgatccacccacctcagtgttccaaagtgctgatattacaggcataatatgtgatcttttgtgtctggttgctttcatgttgaaygctatttttgaggttcgtgcctgttgtagaccacagtcacacactgctgtagtcttccccagtcctcattcccagctgcctcttcctactgcttccgtct

SEQ ID NO: 41406 - DNA, 201 bp, Homo sapiens
ccaggctggtggtgagctcctggcctcaggtgatccacccacctcagtgttccaaagtgctgatattacaggcataatatgtgatcttttgtgtctggttsctttcatgttgaatgctatttttgaggttcgtgcctgttgtagaccacagtcacacactgctgtagtcttccccagtcctcattcccagctgcctcttcc

SEQ ID NO: 41407 - DNA, 201 bp, Homo sapiens
ggttcgtgcctgttgtagaccacagtcacacactgctgtagtcttccccagtcctcattcccagctgcctcttcctactgcttccgtctatcaaaaagccyccttggcccaggttccctgagctgtgggattctgcactggtgctttggattccctgatatgttccttcaaatctgctgagaattaaataaacatctctaa

SEQ ID NO: 41408 - DNA, 192 bp, Homo sapiens
caggaccatggaactcagcgtcctcctcttccttgcactcctcacaggactcttgctactcctggttcagcgccaccctaacacccatgacmgcctcccaccagggccccgccctctgccccttttgggaaaccttctgcagatggatagaagaggcctactcaaatcctttctgaggttccgagagaaata

SEQ ID NO: 41409 - DNA, 201 bp, Homo sapiens
cctgttgtagaccacagtcacacactgctgtagtcttccccagtcctcattcccagctgcctcttcctactgcttccgtctatcaaaaagcccccttggcscaggttccctgagctgtgggattctgcactggtgctttggattccctgatatgttccttcaaatctgctgagaattaaataaacatctctaaagcctgac

SEQ ID NO: 41410 - DNA, 201 bp, Homo sapiens
ttttatccccttctccttagggaagcggatttgtcttggtgaaggcatcgcccgtgcggaattgttcctcttcttcaccaccatcctccagaacttctccrtggccagccccgtggccccagaagacatcgatctgacaccccaggagtgtggtgtgggcaaaatacccccaacataccagatccgcttcctgccccgctg

SEQ ID NO: 41411 - DNA, 201 bp, Homo sapiens
ggaagcggatttgtcttggtgaaggcatcgcccgtgcggaattgttcctcttcttcaccaccatcctccagaacttctccatggccagccccgtggccccwgaagacatcgatctgacaccccaggagtgtggtgtgggcaaaatacccccaacataccagatccgcttcctgccccgctgaaggggctgagggaaggggg

SEQ ID NO: 41412 - DNA, 201 bp, Homo sapiens
gttgctttcatgttgaatgctatttttgaggttcgtgcctgttgtagaccacagtcacacactgctgtagtcttccccagtcctcattcccagctgcctcytcctactgcttccgtctatcaaaaagcccccttggcccaggttccctgagctgtgggattctgcactggtgctttggattccctgatatgttccttcaaa

SEQ ID NO: 41413 - DNA, 201 bp, Homo sapiens
agcggagtgtggaggagcggattcaggaggaggctcagtgtctgatagaggagcttcggaaatccaagggggccctcatggaccccaccttcctcttccaktccattaccgccaacatcatctgctccatcgtctttggaaaacgattccactaccaagatcaagagttcctgaagatgctgaacttgttctaccagactt

SEQ ID NO: 41414 - DNA, 201 bp, Homo sapiens
atacccccaacataccagatccgcttcctgccccgctgaaggggctgagggaagggggtcaaaggattccagggtcattcagtgtccccgcctctgtagayaatggctctgactccccgcaacttcctgcctctgagagacctgctacaagccagcttccttcccctccatggcaccagttgtctgaggtcacattgcaag

SEQ ID NO: 41415 - DNA, 201 bp, Homo sapiens
gtgtgggcaaaatacccccaacataccagatccgcttcctgccccgctgaaggggctgagggaagggggtcaaaggattccagggtcattcagtgtccccrcctctgtagacaatggctctgactccccgcaacttcctgcctctgagagacctgctacaagccagcttccttcccctccatggcaccagttgtctgaggt

SEQ ID NO: 41416 - DNA, 201 bp, Homo sapiens
tgcaacctctgccttccaagatcaagagattctccagtctcagctcccaagtagctgggattacaggcatgtactaccatgcctggctaattttcttgtakttttagtagggacatgttggccaggctggtggtgagctcctggcctcaggtgatccacccacctcagtgttccaaagtgctgatattacaggcataatat

SEQ ID NO: 41417 - DNA, 201 bp, Homo sapiens
gagggaagggggtcaaaggattccagggtcattcagtgtccccgcctctgtagacaatggctctgactccccgcaacttcctgcctctgagagacctgctrcaagccagcttccttcccctccatggcaccagttgtctgaggtcacattgcaagtgagtgcaggagtgagattatcgaaaattataatatacaaaatcat

SEQ ID NO: 41418 - DNA, 201 bp, Homo sapiens
ggtggtgagctcctggcctcaggtgatccacccacctcagtgttccaaagtgctgatattacaggcataatatgtgatcttttgtgtctggttgctttcaygttgaatgctatttttgaggttcgtgcctgttgtagaccacagtcacacactgctgtagtcttccccagtcctcattcccagctgcctcttcctactgct

SEQ ID NO: 41419 - DNA, 201 bp, Homo sapiens
caatggctctgactccccgcaacttcctgcctctgagagacctgctacaagccagcttccttcccctccatggcaccagttgtctgaggtcacattgcaartgagtgcaggagtgagattatcgaaaattataatatacaaaatcatatatatatatatgttcttgttttttgagacagagtctcacactgttgcccaggc

SEQ ID NO: 41420 - DNA, 201 bp, Homo sapiens
atatgtgatcttttgtgtctggttgctttcatgttgaatgctatttttgaggttcgtgcctgttgtagaccacagtcacacactgctgtagtcttccccagtcctcattcccagctgcctcttcctactgcttccgtctatcaaaaagcccccttggcccaggttccctgagctgtgggattctgcactggtgctttggat

SEQ ID NO: 41421 - DNA, 201 bp, Homo sapiens
ttttgggaaaccttctgcagatggatagaagaggcctactcaaatcctttctgaggttccgagagaaatatggggacgtcttcacggtacacctgggaccsaggcccgtggtcatgctgtgtggagtagaggccatacgggaggcccttgtggacaaggctgaggccttctctggccggggaaaaatcgccatggtcgacc

SEQ ID NO: 41422 - DNA, 201 bp, Homo sapiens
gcataatatgtgatcttttgtgtctggttgctttcatgttgaatgctatttttgaggttcgtgcctgttgtagaccacagtcacacactgctgtagtcttccccagtcctcattcccagctgcctcttcctactgcttccgtctatcaaaaagcccccttggcccaggttccctgagctgtgggattctgcactggtgctt

SEQ ID NO: 41423 - DNA, 201 bp, Homo sapiens
atgtacacagtgcacctgggacccaggcgggtggtggtcctcagcgggtaccaagctgtgaaggaggccctggtggaccagggagaggagtttagtggccscggtgactaccctgcctttttcaactttaccaagggcaatggcatcgccttctccagtggggatcgatggaaggtcctgagacagttctctatccagatt

SEQ ID NO: 41424 - DNA, 201 bp, Homo sapiens
agcgctttgcagacatcatccccatgaacttgccgcaccgcgtcactagggacacggcctttcgcggcttcctgatacccaagggcaccgatgtcatcacmctccttaacaccgtccactacgaccccagccagttcctgacgccccaggagttcaaccccgagcattttttggatgccaatcagtccttcaagaagagtc

SEQ ID NO: 41425 - DNA, 201 bp, Homo sapiens
aagcacagccatcttactcctgctcctggctctcgtctgtctgctcctgaccctaagctcaagagataagggaaagctgcctccgggacccagacccctcycaatcctgggaaacctgctgctgctttgctcccaagacatgctgacttctctcactaagctgagcaaggagtatggctccatgtacacagtgcacctggg

SEQ ID NO: 41426 - DNA, 201 bp, Homo sapiens
attctacggaatttcgggatggggaagagaagcattgaggagcgaatcctagaggagggcagcttcctgctggcggagctgcggaaaactgaagttgtacracatcttcccgagcctcctggactgggtgcctgggccgcaccaacgcatcttccagaacttcaagtgcctgagagacctcatcgcccacagcgtccacga

SEQ ID NO: 41427 - DNA, 153 bp, Homo sapiens
ttcccccatccctccaatctgtaccctgtctgcagggcagaggcagatgtggcatgtctttttgtacccacagagcttgttctatggcacgcccttttctrggctttttgtatcatttcttagtacattgtaatagattcaaaccagtcttgg

SEQ ID NO: 41428 - DNA, 171 bp, Homo sapiens
gcaggctctagcgcatcccagccagtgtctcctgcagctcagcagctgccttcaccatggacagcataagcacagccatcttactcctgctcctggctctcgtctgtctgctcctgaccctaagctcaagagataagggaaagctgcctccgggacccagacccctctcaa

SEQ ID NO: 41429 - DNA, 201 bp, Homo sapiens
tcagctcaggtcttggcaatttgccgcggcctttccagctgtgcctgcgcccgcgctaacgccccggcccttccagattcgcctgtgagcgatgaggcccrcccatgcgggttgctacgtccccttcttggtccacagtctgccctcatccctctggcagtcacgctgtcttccctgcatgctgtgcctgccgcgtgccct

SEQ ID NO: 41430 - DNA, 201 bp, Homo sapiens
agtccttcaagaagagtccagccttcatgcccttctcagctgggcgccgtctgtgcctgggagagtcgctggcgcgcatggagctctttctgtacctcacygccatcctgcagagcttttcgctgcagccgctgggtgcgcccgaggacatcgacctgaccccactcagctcaggtcttggcaatttgccgcggcctttcc

SEQ ID NO: 41431 - DNA, 201 bp, Homo sapiens
gagtcgctggcgcgcatggagctctttctgtacctcaccgccatcctgcagagcttttcgctgcagccgctgggtgcgcccgaggacatcgacctgacccyactcagctcaggtcttggcaatttgccgcggcctttccagctgtgcctgcgcccgcgctaacgccccggcccttccagattcgcctgtgagcgatgaggc

SEQ ID NO: 41432 - DNA, 201 bp, Homo sapiens
tcaccatggacagcataagcacagccatcttactcctgctcctggctctcgtctgtctgctcctgaccctaagctcaagagataagggaaagctgcctccrggacccagacccctctcaatcctgggaaacctgctgctgctttgctcccaagacatgctgacttctctcactaagctgagcaaggagtatggctccatgt

SEQ ID NO: 41433 - DNA, 201 bp, Homo sapiens
ccttcttggtccacagtctgccctcatccctctggcagtcacgctgtcttccctgcatgctgtgcctgccgcgtgcccttcccccatccctccaatctgtrccctgtctgcagggcagaggcagatgtggcatgtctttttgtacccacagagcttgttctatggcacgcccttttctgggctttttgtatcatttcttag

SEQ ID NO: 41434 - DNA, 201 bp, Homo sapiens; identical to SEQ ID NO: 41423

SEQ ID NO: 41435 - DNA, 201 bp, Homo sapiens; identical to SEQ ID NO: 41424

SEQ ID NO: 41436 - DNA, 201 bp, Homo sapiens; identical to SEQ ID NO: 41425

SEQ ID NO: 41437 - DNA, 201 bp, Homo sapiens; identical to SEQ ID NO: 41430

SEQ ID NO: 41438 - DNA, 201 bp, Homo sapiens; identical to SEQ ID NO: 41429

SEQ ID NO: 41439 - DNA, 201 bp, Homo sapiens
cggcagccgcttcgactatgatgatgagcgtctgctcaccattatccgccttatcaatgacaacttccaaatcatgagcagcccctggggcgagttgtacracatcttcccgagcctcctggactgggtgcctgggccgcaccaacgcatcttccagaacttcaagtgcctgagagacctcatcgcccacagcgtccacga

SEQ ID NO: 41440 - DNA, 201 bp, Homo sapiens; identical to SEQ ID NO: 41431

SEQ ID NO: 41441 - DNA, 201 bp, Homo sapiens; identical to SEQ ID NO: 41432

SEQ ID NO: 41442 - DNA, 201 bp, Homo sapiens; identical to SEQ ID NO: 41433

SEQ ID NO: 41443 - DNA, 201 bp, Homo sapiens
cattgaggagcgaatcctagaggagggcagcttcctgctggcggagctgcggaaaactgaaggcgagccctttgaccccacgtttgtgctgagtcgctcastgtccaacattatctgttccgtgctcttcggcagccgcttcgactatgatgatgagcgtctgctcaccattatccgccttatcaatgacaacttccaaat

SEQ ID NO: 41444 - DNA, 153 bp, Homo sapiens; identical to SEQ ID NO: 41427

SEQ ID NO: 41445 - DNA, 201 bp, Homo sapiens
attgaggagcgaatcctagaggagggcagcttcctgctggcggagctgcggaaaactgaaggcgagccctttgaccccacgtttgtgctgagtcgctcagkgtccaacattatctgttccgtgctcttcggcagccgcttcgactatgatgatgagcgtctgctcaccattatccgccttatcaatgacaacttccaaatc

SEQ ID NO: 41446 - DNA, 201 bp, Homo sapiens
gccggggaaaaatcgtcatcatggacccagtctaccagggatatggcatgctctttgccaatggaaaccgctggaaggtgcttcggcgattctctgtgacyaccatgagggacttcgggatgggaaagcggagtgtggaggagcggattcaggacgaggctcagtgtctgatagaggaacttcggaaatccaagggagccc

SEQ ID NO: 41447 - DNA, 201 bp, Homo sapiens
agcggattcaggacgaggctcagtgtctgatagaggaacttcggaaatccaagggagccctcgtggaccccaccttcctcttccattccattaccgccaasatcatctgctccatcatctttggaaaacgcttccactaccaagatcaagagttcctgaagacgctgaacttgttctgccagagtttcttactcatcagct

SEQ ID NO: 41448 - DNA, 201 bp, Homo sapiens
tctgaatatttcctataaacagaatcacacaatatttgattttttttttaaaactaagccttgctctgtctcccaggctggagtgctgtggcgtgattttkgttcactgcaacctccgccttccaagttcaagagattctcctgcctcagcttccaagtagctgggattacaggcatgtggtaccacgcctggctaatttt

SEQ ID NO: 41449 - DNA, 201 bp, Homo sapiens
gtgtggagtagaggccatacgggaggccctggtggacaacgctgaggccttctctggccggggaaaaatcgtcatcatggacccagtctaccagggatatrgcatgctctttgccaatggaaaccgctggaaggtgcttcggcgattctctgtgaccaccatgagggacttcgggatgggaaagcggagtgtggaggagcg

SEQ ID NO: 41450 - DNA, 201 bp, Homo sapiens
tgaccaccatgagggacttcgggatgggaaagcggagtgtggaggagcggattcaggacgaggctcagtgtctgatagaggaacttcggaaatccaagggrgccctcgtggaccccaccttcctcttccattccattaccgccaacatcatctgctccatcatctttggaaaacgcttccactaccaagatcaagagttcc

SEQ ID NO: 41451 - DNA, 201 bp, Homo sapiens
tttttttaaaactaagccttgctctgtctcccaggctggagtgctgtggcgtgattttggttcactgcaacctccgccttccaagttcaagagattctccwgcctcagcttccaagtagctgggattacaggcatgtggtaccacgcctggctaattttcttgtatttttagtagggacatgttggccaggctggttgtga

SEQ ID NO: 41452 - DNA, 201 bp, Homo sapiens
cacaatatttgattttttttttaaaactaagccttgctctgtctcccaggctggagtgctgtggcgtgattttggttcactgcaacctccgccttccaagwtcaagagattctcctgcctcagcttccaagtagctgggattacaggcatgtggtaccacgcctggctaattttcttgtatttttagtagggacatgttgg

SEQ ID NO: 41453 - DNA, 201 bp, Homo sapiens
tttttaaaactaagccttgctctgtctcccaggctggagtgctgtggcgtgattttggttcactgcaacctccgccttccaagttcaagagattctcctgyctcagcttccaagtagctgggattacaggcatgtggtaccacgcctggctaattttcttgtatttttagtagggacatgttggccaggctggttgtgagc

SEQ ID NO: 41454 - DNA, 201 bp, Homo sapiens
actaagccttgctctgtctcccaggctggagtgctgtggcgtgattttggttcactgcaacctccgccttccaagttcaagagattctcctgcctcagctyccaagtagctgggattacaggcatgtggtaccacgcctggctaattttcttgtatttttagtagggacatgttggccaggctggttgtgagctcctggcc

SEQ ID NO: 41455 - DNA, 201 bp, Homo sapiens
ttgccaatggaaaccgctggaaggtgcttcggcgattctctgtgaccaccatgagggacttcgggatgggaaagcggagtgtggaggagcggattcaggaygaggctcagtgtctgatagaggaacttcggaaatccaagggagccctcgtggaccccaccttcctcttccattccattaccgccaacatcatctgctcca

SEQ ID NO: 41456 - DNA, 201 bp, Homo sapiens
aaacagaatcacacaatatttgattttttttttaaaactaagccttgctctgtctcccaggctggagtgctgtggcgtgattttggttcactgcaacctcygccttccaagttcaagagattctcctgcctcagcttccaagtagctgggattacaggcatgtggtaccacgcctggctaattttcttgtatttttagtag

SEQ ID NO: 41457 - DNA, 201 bp, Homo sapiens
ccattctctttttcatctcagcccctgtcaatctggtttttgtccttatggacttaccaattctgaatatttcctataaacagaatcacacaatatttgattttttttttaaaactaagccttgctctgtctcccaggctggagtgctgtggcgtgattttggttcactgcaacctccgccttccaagttcaagagattct

SEQ ID NO: 41458 - DNA, 201 bp, Homo sapiens
tgtggcgtgattttggttcactgcaacctccgccttccaagttcaagagattctcctgcctcagcttccaagtagctgggattacaggcatgtggtaccaygcctggctaattttcttgtatttttagtagggacatgttggccaggctggttgtgagctcctggcctcaggtgatccacacgcctcagtgtcccagagtg

SEQ ID NO: 41459 - DNA, 201 bp, Homo sapiens
caaaatgccatacacagaggcagtcatccgtgagattcagagatttgctgaccttctccccatgggtgtgccccacattgtcacccaacacaccagcttcygagggtacaccatccccaaggacacggaagtatttctcatcctgagcactgctctccgtgacccacactactttgaaaaaccagacgccttcaatcctga

SEQ ID NO: 41460 - DNA, 201 bp, Homo sapiens
ccttcttggtccacggtctgcctccatccctctggcagtcacgctgtcttccctgcatgctgtgcctgccgcgtgcccttcccccatccctccaatctgtrccccgtctgcagggcagaggcagatgtggcatgtctttttgtacccacagagcttgttctatggcacgcccttttctgggctttttgtatcatttcttag

SEQ ID NO: 41461 - DNA, 201 bp, Homo sapiens
ctatggtctgttcagctgttggacggccagatgctacgtgttgtgttgagatatttctgggtgagattgtagagttgtcaggcactgcatgtgattttgcrttgtgtcatctgctggctgccaacgttgttgcgttgctgcatagtgtgtcctttgttctgctgccttgactgtatgtgttgtgatgccacatcgtgtgtt

SEQ ID NO: 41462 - DNA, 201 bp, Homo sapiens
tgccaacctgttctgtggttgggcgttgttgctgtcgatgtgctgcaggaagctgtgggttcggtgctgtctgtggcattgacagatgcttttggggtgtygttaagcagcatgttgtgaccatgtgcccgtgtttgcaccgtaagacacgttgccatggttgagtcggatgttgtgcaaattaatggtgttgctgcatga

SEQ ID NO: 41463 - DNA, 201 bp, Homo sapiens
agcttttcgctgcagccgctgggtgcgcccgaggacatcgacctgaccccgctcagctcaggtcttggcaatttgccgcggcctttccagctgtgcctgcrcccgcgctaacgccccggcccttccagattcgcctgtgagcgatgaggcccacccatgtgggttgctacgtccccttcttggtccacggtctgcctccat

SEQ ID NO: 41464 - DNA, 201 bp, Homo sapiens
ctacgtgttgtgttgagatatttctgggtgagattgtagagttgtcaggcactgcatgtgattttgcattgtgtcatctgctggctgccaacgttgttgcrttgctgcatagtgtgtcctttgttctgctgccttgactgtatgtgttgtgatgccacatcgtgtgttctgtgctgtctgctgggttgctgtgtactagcg

SEQ ID NO: 41465 - DNA, 201 bp, Homo sapiens
caggaggagatcaaccttgtggtgggacacgtgcggctgccagcgctgaaggaccgcgcggccatgccttacacagacatggtgatccacgaggtgcagcrctttgcagacatcatccccatgaacttgccgcaccgcatcactagggacacggcctttcacggcttcctgatacccaagggcaccgatgtcatcaccctc

SEQ ID NO: 41466 - DNA, 114 bp, Homo sapiens
gtctgcagggcagaggcagatgtggcatgtctttttgtacccacagagcttgttctatggcacgcccttttctgggctttttgtatcatttcttagtacaytgtaatagattca

SEQ ID NO: 41467 - DNA, 201 bp, Homo sapiens
cgttgctgcatagtgtgtcctttgttctgctgccttgactgtatgtgttgtgatgccacatcgtgtgttctgtgctgtctgctgggttgctgtgtactagygtgtgttgtgtggcaggattatgtagcggtatgctggcattacgtgttggtgtgtggttaccgtgtcttgggatgtttccgggctggctattaggtcact

SEQ ID NO: 41468 - DNA, 201 bp, Homo sapiens
cgttgttgctgtcgatgtgctgcaggaagctgtgggttcggtgctgtctgtggcattgacagatgcttttggggtgttgttaagcagcatgttgtgaccaygtgcccgtgtttgcaccgtaagacacgttgccatggttgagtcggatgttgtgcaaattaatggtgttgctgcatgaggtctggtgtgctgcacatcgcg

SEQ ID NO: 41469 - DNA, 201 bp, Homo sapiens
acagcgtccacgaccaccaggcctcgctagaccccagatctccccgggacttcatccactgcttcctcaccaagatggcagagaagaaggaggacccgctragccacttccacatggataccctgctgatgaccacacataacctgctctttggcggcaccgagacggtgggcaccacgctgcgccacgccttcctggcat

SEQ ID NO: 41470 - DNA, 141 bp, Homo sapiens
ttcccccatccctccaatctgtaccccgtctgcagggcagaggcagatgtggcatgtctttttgtacccacagagcttgttctatggcacgcccttttctrggctttttgtatcatttcttagtacattgtaatagattca

SEQ ID NO: 41471 - DNA, 201 bp, Homo sapiens
tgcacccgcgctaacgccccggcccttccagattcgcctgtgagcgatgaggcccacccatgtgggttgctacgtccccttcttggtccacggtctgcctycatccctctggcagtcacgctgtcttccctgcatgctgtgcctgccgcgtgcccttcccccatccctccaatctgtaccccgtctgcagggcagaggcag

SEQ ID NO: 41472 - DNA, 201 bp, Homo sapiens
taggagcatgctgctatgtggaatgttcagctttaacccagaagggattgaagactgtttttgatgaggctatcatagccattttaactccaaagaaacayactgtaaaaaaaagaataggatcaagatgtataaactgttgtttaattacgtgagaaacatcttcagtggccaaggaaactgtccatttctctcagaaag

SEQ ID NO: 41473 - DNA, 201 bp, Homo sapiens
cttacccaatgaccgatgtcttccttatatgcttctcggtggtaaatccagcctcatttcaaaatgtgaaagaggagtgggtaccggaacttaaggaataygcaccaaatgtaccctttttattaataggaactcagattgatctccgagatgaccccaaaactttagcaagactgaatgatatgaaagaaaaacctatat

SEQ ID NO: 41474 - DNA, 201 bp, Homo sapiens
caagaaactttctttaagttgtgttaaagaggaaagacctagaatccaagcgtgttacatgaaaattgtaacagagcagctgcttccacctttcagatatrgatgttggaaccacagcagaagttatagagcgacaacttatatacacacctagaatgtaagttaaacaaaataccggcttccagagaccccttttctcca

SEQ ID NO: 41475 - DNA, 201 bp, Homo sapiens
ttctttaagttgtgttaaagaggaaagacctagaatccaagcgtgttacatgaaaattgtaacagagcagctgcttccacctttcagatatagatgttggraccacagcagaagttatagagcgacaacttatatacacacctagaatgtaagttaaacaaaataccggcttccagagaccccttttctccagccatatta

SEQ ID NO: 41476 - DNA, 201 bp, Homo sapiens
agacctagaatccaagcgtgttacatgaaaattgtaacagagcagctgcttccacctttcagatatagatgttggaaccacagcagaagttatagagcgasaacttatatacacacctagaatgtaagttaaacaaaataccggcttccagagaccccttttctccagccatattacatcaggctagaagtaattaatgtt

SEQ ID NO: 41477 - DNA, 201 bp, Homo sapiens
gaatccaagcgtgttacatgaaaattgtaacagagcagctgcttccacctttcagatatagatgttggaaccacagcagaagttatagagcgacaacttayatacacacctagaatgtaagttaaacaaaataccggcttccagagaccccttttctccagccatattacatcaggctagaagtaattaatgttgatttat

SEQ ID NO: 41478 - DNA, 201 bp, Homo sapiens
agccattttaactccaaagaaacacactgtaaaaaaaagaataggatcaagatgtataaactgttgtttaattacgtgagaaacatcttcagtggccaaggaaactgtccatttctctcagaaagcaaatgaaatgctacagctatacccagaccttttataggtaatgaagcagttcaaaacttgaaagaaaacaaaacc

SEQ ID NO: 41479 - DNA, 201 bp, Homo sapiens
cttccacctttcagatatagatgttggaaccacagcagaagttatagagcgacaacttatatacacacctagaatgtaagttaaacaaaataccggcttcsagagaccccttttctccagccatattacatcaggctagaagtaattaatgttgatttatttcatctacaagcagttggtccctaagtgaaaggctctgct

SEQ ID NO: 41480 - DNA, 201 bp, Homo sapiens
aactttctttaagttgtgttaaagaggaaagacctagaatccaagcgtgttacatgaaaattgtaacagagcagctgcttccacctttcagatatagatgytggaaccacagcagaagttatagagcgacaacttatatacacacctagaatgtaagttaaacaaaataccggcttccagagaccccttttctccagccat

SEQ ID NO: 41481 - DNA, 201 bp, Homo sapiens
ttaaagcttaatgtgctttcttaaagaatgccaaaagtgtaataaggtcataactgcatttatcatgaacactaaaaatgtacacattttagttaatgtgyattaaactgtaacaaggcttctggcaattgtagatttagtttgacgctccccaaagtgcatgagacacatgctaaaattacaaattaaaattttgggtca

SEQ ID NO: 41482 - DNA, 201 bp, Homo sapiens
ctatattaaagcttaatgtgctttcttaaagaatgccaaaagtgtaataaggtcataactgcatttatcatgaacactaaaaatgtacacattttagttartgtgcattaaactgtaacaaggcttctggcaattgtagatttagtttgacgctccccaaagtgcatgagacacatgctaaaattacaaattaaaattttg

SEQ ID NO: 41483 - DNA, 201 bp, Homo sapiens
ctgtaaatggaactgcttggctttgaccatacacatttctgcccagcccttacagaatctgcacaaagaaatatctccctttgctccagttaattgttctkgtatgtaagttgctttctattccagtatatccagagtggtgaaataacaaggccagccacgtagccaaaggtcgctccaagcgtacaggagatgggccat

SEQ ID NO: 41484 - DNA, 201 bp, Homo sapiens
gtaaaaaacagagctgtaaatggaactgcttggctttgaccatacacatttctgcccagcccttacagaatctgcacaaagaaatatctccctttgctccrgttaattgttcttgtatgtaagttgctttctattccagtatatccagagtggtgaaataacaaggccagccacgtagccaaaggtcgctccaagcgtaca

SEQ ID NO: 41485 - DNA, 201 bp, Homo sapiens
atctctcaggggtttcatagtttaaaaagctacaatcacatcatgttgtaactacgtaaaaaacagagctgtaaatggaactgcttggctttgaccatacmcatttctgcccagcccttacagaatctgcacaaagaaatatctccctttgctccagttaattgttcttgtatgtaagttgctttctattccagtatatcc

SEQ ID NO: 41486 - DNA, 201 bp, Homo sapiens
agactgtttttgatgaggctatcatagccattttaactccaaagaaacacactgtaaaaaaaagaataggatcaagatgtataaactgttgtttaattacrtgagaaacatcttcagtggccaaggaaactgtccatttctctcagaaagcaaatgaaatgctacagctatacccagaccttttataggtaatgaagcagt

SEQ ID NO: 41487 - DNA, 201 bp, Homo sapiens; identical to SEQ ID NO: 41472

SEQ ID NO: 41488 - DNA, 201 bp, Homo sapiens; identical to SEQ ID NO: 41478

SEQ ID NO: 41489 - DNA, 201 bp, Homo sapiens; identical to SEQ ID NO: 41480

SEQ ID NO: 41490 - DNA, 201 bp, Homo sapiens; identical to SEQ ID NO: 41481

SEQ ID NO: 41491 - DNA, 201 bp, Homo sapiens; identical to SEQ ID NO: 41482

SEQ ID NO: 41492 - DNA, 201 bp, Homo sapiens; identical to SEQ ID NO: 41483

SEQ ID NO: 41493 - DNA, 201 bp, Homo sapiens; identical to SEQ ID NO: 41484

SEQ ID NO: 41494 - DNA, 201 bp, Homo sapiens; identical to SEQ ID NO: 41485

SEQ ID NO: 41495 - DNA, 201 bp, Homo sapiens; identical to SEQ ID NO: 41473

SEQ ID NO: 41496 - DNA, 201 bp, Homo sapiens; identical to SEQ ID NO: 41474

SEQ ID NO: 41497 - DNA, 201 bp, Homo sapiens; identical to SEQ ID NO: 41475

SEQ ID NO: 41498 - DNA, 201 bp, Homo sapiens
ggccacagaactgtgttagaggtgaaccatcttaattactagttctattacctaattcagcttccttgtttggtctgctgtggatctgccttattgcataygccatgcatcagataatggatgcatcagataatggtgttagacaaagcttcattgtgaacaacctaatgcattttagagaaacaatctcatcacattttt

SEQ ID NO: 41499 - DNA, 201 bp, Homo sapiens; identical to SEQ ID NO: 41476

SEQ ID NO: 41500 - DNA, 201 bp, Homo sapiens; identical to SEQ ID NO: 41477

SEQ ID NO: 41501 - DNA, 201 bp, Homo sapiens; identical to SEQ ID NO: 41479

SEQ ID NO: 41502 - DNA, 201 bp, Homo sapiens
tctccagccatattacatcaggctagaagtaattaatgttgatttatttcatctacaagcagttggtccctaagtgaaaggctctgcttgaaaaaaaaaaraaaaaaaagttggaggaaaattttcatgttcttctgtgaagcttatttggtacactggagccatttctaatctttctctggggggaacaggccacagaac

SEQ ID NO: 41503 - DNA, 201 bp, Homo sapiens; identical to SEQ ID NO: 41472

SEQ ID NO: 41504 - DNA, 201 bp, Homo sapiens; identical to SEQ ID NO: 41478

SEQ ID NO: 41505 - DNA, 201 bp, Homo sapiens; identical to SEQ ID NO: 41480

SEQ ID NO: 41506 - DNA, 201 bp, Homo sapiens; identical to SEQ ID NO: 41481

SEQ ID NO: 41507 - DNA, 201 bp, Homo sapiens; identical to SEQ ID NO: 41482

SEQ ID NO: 41508 - DNA, 201 bp, Homo sapiens; identical to SEQ ID NO: 41483

SEQ ID NO: 41509 - DNA, 201 bp, Homo sapiens; identical to SEQ ID NO: 41484

SEQ ID NO: 41510 - DNA, 201 bp, Homo sapiens; identical to SEQ ID NO: 41485

SEQ ID NO: 41511 - DNA, 201 bp, Homo sapiens; identical to SEQ ID NO: 41473

SEQ ID NO: 41512 - DNA, 201 bp, Homo sapiens; identical to SEQ ID NO: 41474

SEQ ID NO: 41513 - DNA, 201 bp, Homo sapiens; identical to SEQ ID NO: 41475

SEQ ID NO: 41514 - DNA, 201 bp, Homo sapiens; identical to SEQ ID NO: 41498

SEQ ID NO: 41515 - DNA, 201 bp, Homo sapiens; identical to SEQ ID NO: 41476

SEQ ID NO: 41516 - DNA, 201 bp, Homo sapiens; identical to SEQ ID NO: 41477

SEQ ID NO: 41517 - DNA, 201 bp, Homo sapiens; identical to SEQ ID NO: 41479

SEQ ID NO: 41518 - DNA, 201 bp, Homo sapiens; identical to SEQ ID NO: 41502

SEQ ID NO: 41519 - DNA, 201 bp, Homo sapiens; identical to SEQ ID NO: 41472

SEQ ID NO: 41520 - DNA, 201 bp, Homo sapiens; identical to SEQ ID NO: 41474

SEQ ID NO: 41521 - DNA, 201 bp, Homo sapiens; identical to SEQ ID NO: 41475

SEQ ID NO: 41522 - DNA, 201 bp, Homo sapiens; identical to SEQ ID NO: 41498

SEQ ID NO: 41523 - DNA, 201 bp, Homo sapiens; identical to SEQ ID NO: 41476

SEQ ID NO: 41524 - DNA, 201 bp, Homo sapiens; identical to SEQ ID NO: 41477

SEQ ID NO: 41525 - DNA, 201 bp, Homo sapiens; identical to SEQ ID NO: 41478

SEQ ID NO: 41526 - DNA, 201 bp, Homo sapiens; identical to SEQ ID NO: 41479

SEQ ID NO: 41527 - DNA, 201 bp, Homo sapiens; identical to SEQ ID NO: 41480

SEQ ID NO: 41528 - DNA, 201 bp, Homo sapiens; identical to SEQ ID NO: 41481

SEQ ID NO: 41529 - DNA, 201 bp, Homo sapiens; identical to SEQ ID NO: 41482

SEQ ID NO: 41530 - DNA, 201 bp, Homo sapiens; identical to SEQ ID NO: 41483

SEQ ID NO: 41531 - DNA, 201 bp, Homo sapiens; identical to SEQ ID NO: 41484

SEQ ID NO: 41532 - DNA, 201 bp, Homo sapiens; identical to SEQ ID NO: 41485

SEQ ID NO: 41533 - DNA, 201 bp, Homo sapiens; identical to SEQ ID NO: 41502

SEQ ID NO: 41534 - DNA, 201 bp, Homo sapiens; identical to SEQ ID NO: 41472

SEQ ID NO: 41535 - DNA, 201 bp, Homo sapiens; identical to SEQ ID NO: 41478

SEQ ID NO: 41536 - DNA, 201 bp, Homo sapiens; identical to SEQ ID NO: 41480

SEQ ID NO: 41537 - DNA, 201 bp, Homo sapiens; identical to SEQ ID NO: 41481

SEQ ID NO: 41538 - DNA, 201 bp, Homo sapiens; identical to SEQ ID NO: 41482

SEQ ID NO: 41539 - DNA, 201 bp, Homo sapiens; identical to SEQ ID NO: 41483

SEQ ID NO: 41540 - DNA, 201 bp, Homo sapiens; identical to SEQ ID NO: 41484

SEQ ID NO: 41541 - DNA, 201 bp, Homo sapiens; identical to SEQ ID NO: 41485

SEQ ID NO: 41542 - DNA, 201 bp, Homo sapiens; identical to SEQ ID NO: 41473

SEQ ID NO: 41543 - DNA, 201 bp, Homo sapiens; identical to SEQ ID NO: 41474

SEQ ID NO: 41544 - DNA, 201 bp, Homo sapiens; identical to SEQ ID NO: 41475

SEQ ID NO: 41545 - DNA, 201 bp, Homo sapiens; identical to SEQ ID NO: 41498

SEQ ID NO: 41546 - DNA, 201 bp, Homo sapiens; identical to SEQ ID NO: 41476

SEQ ID NO: 41547 - DNA, 201 bp, Homo sapiens; identical to SEQ ID NO: 41477

SEQ ID NO: 41548 - DNA, 201 bp, Homo sapiens; identical to SEQ ID NO: 41479

SEQ ID NO: 41549 - DNA, 201 bp, Homo sapiens; identical to SEQ ID NO: 41502

SEQ ID NO: 41550 - DNA, 201 bp, Homo sapiens; identical to SEQ ID NO: 41472

SEQ ID NO: 41551 - DNA, 201 bp, Homo sapiens; identical to SEQ ID NO: 41473

SEQ ID NO: 41552 - DNA, 201 bp, Homo sapiens; identical to SEQ ID NO: 41474

SEQ ID NO: 41553 - DNA, 201 bp, Homo sapiens; identical to SEQ ID NO: 41475

SEQ ID NO: 41554 - DNA, 201 bp, Homo sapiens; identical to SEQ ID NO: 41476

SEQ ID NO: 41555 - DNA, 201 bp, Homo sapiens; identical to SEQ ID NO: 41477

SEQ ID NO: 41556 - DNA, 201 bp, Homo sapiens; identical to SEQ ID NO: 41478

SEQ ID NO: 41557 - DNA, 201 bp, Homo sapiens; identical to SEQ ID NO: 41479

SEQ ID NO: 41558 - DNA, 201 bp, Homo sapiens; identical to SEQ ID NO: 41480

SEQ ID NO: 41559 - DNA, 201 bp, Homo sapiens; identical to SEQ ID NO: 41481

SEQ ID NO: 41560 - DNA, 201 bp, Homo sapiens; identical to SEQ ID NO: 41482

SEQ ID NO: 41561 - DNA, 201 bp, Homo sapiens; identical to SEQ ID NO: 41483

SEQ ID NO: 41562 - DNA, 201 bp, Homo sapiens; identical to SEQ ID NO: 41484

SEQ ID NO: 41563 - DNA, 201 bp, Homo sapiens; identical to SEQ ID NO: 41485

SEQ ID NO: 41564 - DNA, 201 bp, Homo sapiens; identical to SEQ ID NO: 41486

SEQ ID NO: 41565 - DNA, 201 bp, Homo sapiens
acctccatatgctgtacatgacatcaaaatgagtcaggcaattgattgtgaagtccttaaagttttcctttttttagtaattatttttaatttaaaaaagyaaatggaaaatgtatattttgatgagcttagggtgttttttttgaaagtcagctgaaggatggttagacagcacagcgaagactgctaaatgcactgacc

SEQ ID NO: 41566 - DNA, 176 bp, Homo sapiens
cactcccagccggccacagcctgacacgccgcgcggccccccagtctcccgcggccgctcccccaggcatggcacrgggcctcgcctcactatggcagcagcacggcacagcacgctcgacttcatgctcagtgccaaagctgatggtgagaccattctaaaaggcctccagtcca

SEQ ID NO: 41567 - DNA, 106 bp, Homo sapiens
tgctgaagattcagcctttcagagagctgtgctgatggagaagccagatgtgttacagccatggtgcatgttgcatgcagtcgtctatacattatttaaaygggct

SEQ ID NO: 41568 - DNA, 201 bp, Homo sapiens
ttggcatgtcggccctgttactccctgggaactttgagtcttatttggaacttgtgaagtccctgtgtctggggccagcactgatccacacagctaagttygcacttgtcttccctctcatgtatcatacctggaatgggatccgacacttgatgtgggacctaggaaaaggcctgaagattccccagctataccagtctg

SEQ ID NO: 41569 - DNA, 201 bp, Homo sapiens
tccttcttcctgagacagtggaaacaatgccagctctgtggcttctgccctggggatgggccgggttggggggtgggttggtgaggctttgggtgccactrcctgtgggttgctggcttaaaggacaattctcttcattggtgagagcccaggccattaacacctacacagtgttattgaaagaagagaggtgggggtgga

SEQ ID NO: 41570 - DNA, 201 bp, Homo sapiens
ctgacctttaccaggagggaaacagttctcctacatctcatcattggaaaagttttcagggaatcagatagaacttagccagagatttaaatatcacagaraagcctcagagaaggaaggagaaaaagaaaagaagtgacgcatgtagagtgcttttgggttataggcaccaaaatcccattaaggactgattataagctt

SEQ ID NO: 41571 - DNA, 201 bp, Homo sapiens
gctttgatttgtgctgagggtcagcttttggctccttcttcctgagacagtggaaacaatgccagctctgtggcttctgccctggggatgggccgggttgrggggtgggttggtgaggctttgggtgccactgcctgtgggttgctggcttaaaggacaattctcttcattggtgagagcccaggccattaacacctacac

SEQ ID NO: 41572 - DNA, 201 bp, Homo sapiens; identical to SEQ ID NO: 41568

SEQ ID NO: 41573 - DNA, 201 bp, Homo sapiens; identical to SEQ ID NO: 41569

SEQ ID NO: 41574 - DNA, 201 bp, Homo sapiens; identical to SEQ ID NO: 41570

SEQ ID NO: 41575 - DNA, 201 bp, Homo sapiens; identical to SEQ ID NO: 41571

SEQ ID NO: 41576 - DNA, 201 bp, Homo sapiens; identical to SEQ ID NO: 41568

SEQ ID NO: 41577 - DNA, 201 bp, Homo sapiens; identical to SEQ ID NO: 41569

SEQ ID NO: 41578 - DNA, 201 bp, Homo sapiens; identical to SEQ ID NO: 41570

SEQ ID NO: 41579 - DNA, 201 bp, Homo sapiens; identical to SEQ ID NO: 41571

SEQ ID NO: 41580 - DNA, 201 bp, Homo sapiens; identical to SEQ ID NO: 41568

SEQ ID NO: 41581 - DNA, 201 bp, Homo sapiens; identical to SEQ ID NO: 41569

SEQ ID NO: 41582 - DNA, 201 bp, Homo sapiens; identical to SEQ ID NO: 41570

SEQ ID NO: 41583 - DNA, 201 bp, Homo sapiens; identical to SEQ ID NO: 41571

SEQ ID NO: 41584 - DNA, 201 bp, Homo sapiens; identical to SEQ ID NO: 41568

SEQ ID NO: 41585 - DNA, 201 bp, Homo sapiens
ttgctgatgcctactctaatatgggaaacactctaaaggagatgcaggatgttcagggagccttgcagtgttatacgcgtgccatccaaattaatcctgcmtttgcagatgcacatagcaatctggcttccattcataaggattcagggaatattccagaagccatagcttcttaccgcacggctctgaaacttaagcctg

SEQ ID NO: 41586 - DNA, 201 bp, Homo sapiens
gcctgcagattgtctgtgattggacagactatgatgagcgaatgaagaagttggtcagtattgtggctgaccagttagagaagaataggttgccttctgtrcatcctcatcatagtatgctatatcctctttctcatggcttcaggaaggctattgctgagaggcacggcaacctgtgcttagataagattaatgttcttc

SEQ ID NO: 41587 - DNA, 201 bp, Homo sapiens
gaaaattcaagccagcatattcctagtagatggaagcaaaattaagttgtctttgtagaaaatgaagagcctttcttccagcaaaaatccctgctgtatgmaatagccctgattaaccctctcccttctgcatgtttcccatattacagacttgagactgtcctcattcccatatgtaatagacatccaaagaatttcaat

SEQ ID NO: 41588 - DNA, 201 bp, Homo sapiens; identical to SEQ ID NO: 41585

SEQ ID NO: 41589 - DNA, 201 bp, Homo sapiens; identical to SEQ ID NO: 41586

SEQ ID NO: 41590 - DNA, 201 bp, Homo sapiens
cctgctcaaagccctgggtcgcttggaagaagccaaggtaggtgtttgatagaacacatttaaacatcagtattatgaaaacttgtactttttgccaagtsttcaactcttcattgagctatcttcacaaaacagtcctttgaaactgaggaaaactgacggcacgaatcgcctcagaatagagcagggccaggctttggc

SEQ ID NO: 41591 - DNA, 201 bp, Homo sapiens; identical to SEQ ID NO: 41587

SEQ ID NO: 41592 - DNA, 201 bp, Homo sapiens; identical to SEQ ID NO: 41585

SEQ ID NO: 41593 - DNA, 201 bp, Homo sapiens; identical to SEQ ID NO: 41586

SEQ ID NO: 41594 - DNA, 201 bp, Homo sapiens; identical to SEQ ID NO: 41590

SEQ ID NO: 41595 - DNA, 201 bp, Homo sapiens; identical to SEQ ID NO: 41585

SEQ ID NO: 41596 - DNA, 201 bp, Homo sapiens; identical to SEQ ID NO: 41586

SEQ ID NO: 41597 - DNA, 201 bp, Homo sapiens
gatcgagggatgcagtacagccacagcatcatcacgaacctcctgtaccatgtggtcggctggaccgactggaaccttgccctgaaccccgaaggaggacycaattgggtgcgtaactttgtcgacagtcccatcattgtagacatcaccaaggacacgttttacaaacagcccatgttctaccaccttggccacttcagc

SEQ ID NO: 41598 - DNA, 201 bp, Homo sapiens
tcggtggtgtgtgtctgcaatgccacatactgtgactcctttgaccccccgacctttcctgcccttggtaccttcagccgctatgagagtacacgcagtgrgcgacggatggagctgagtatggggcccatccaggctaatcacacgggcacaggcctgctactgaccctgcagccagaacagaagttccagaaagtgaag

SEQ ID NO: 41599 - DNA, 201 bp, Homo sapiens
cgagggatgcagtacagccacagcatcatcacgaacctcctgtaccatgtggtcggctggaccgactggaaccttgccctgaaccccgaaggaggacccawttgggtgcgtaactttgtcgacagtcccatcattgtagacatcaccaaggacacgttttacaaacagcccatgttctaccaccttggccacttcagcaag

SEQ ID NO: 41600 - DNA, 201 bp, Homo sapiens
gcacaacttcagcctcccagaggaagataccaagctcaagatacccctgattcaccgagccctgcagttggcccagcgtcccgtttcactccttgccagcycctggacatcacccacttggctcaagaccaatggagcggtgaatgggaaggggtcactcaagggacagcccggagacatctaccaccagacctgggccag

SEQ ID NO: 41601 - DNA, 201 bp, Homo sapiens
aagctcaagatacccctgattcaccgagccctgcagttggcccagcgtcccgtttcactccttgccagcccctggacatcacccacttggctcaagaccartggagcggtgaatgggaaggggtcactcaagggacagcccggagacatctaccaccagacctgggccagatactttgtgaagttcctggatgcctatgct

SEQ ID NO: 41602 - DNA, 201 bp, Homo sapiens
agggatgcagtacagccacagcatcatcacgaacctcctgtaccatgtggtcggctggaccgactggaaccttgccctgaaccccgaaggaggacccaatwgggtgcgtaactttgtcgacagtcccatcattgtagacatcaccaaggacacgttttacaaacagcccatgttctaccaccttggccacttcagcaagtt

SEQ ID NO: 41603 - DNA, 201 bp, Homo sapiens
agctcaagatacccctgattcaccgagccctgcagttggcccagcgtcccgtttcactccttgccagcccctggacatcacccacttggctcaagaccaakggagcggtgaatgggaaggggtcactcaagggacagcccggagacatctaccaccagacctgggccagatactttgtgaagttcctggatgcctatgctg

SEQ ID NO: 41604 - DNA, 201 bp, Homo sapiens
gatgcagtacagccacagcatcatcacgaacctcctgtaccatgtggtcggctggaccgactggaaccttgccctgaaccccgaaggaggacccaattggktgcgtaactttgtcgacagtcccatcattgtagacatcaccaaggacacgttttacaaacagcccatgttctaccaccttggccacttcagcaagttcat

SEQ ID NO: 41605 - DNA, 201 bp, Homo sapiens
ctcaagatacccctgattcaccgagccctgcagttggcccagcgtcccgtttcactccttgccagcccctggacatcacccacttggctcaagaccaatgkagcggtgaatgggaaggggtcactcaagggacagcccggagacatctaccaccagacctgggccagatactttgtgaagttcctggatgcctatgctgag

SEQ ID NO: 41606 - DNA, 201 bp, Homo sapiens
tacagccacagcatcatcacgaacctcctgtaccatgtggtcggctggaccgactggaaccttgccctgaaccccgaaggaggacccaattgggtgcgtamctttgtcgacagtcccatcattgtagacatcaccaaggacacgttttacaaacagcccatgttctaccaccttggccacttcagcaagttcattcctgag

SEQ ID NO: 41607 - DNA, 201 bp, Homo sapiens
caagatacccctgattcaccgagccctgcagttggcccagcgtcccgtttcactccttgccagcccctggacatcacccacttggctcaagaccaatggarcggtgaatgggaaggggtcactcaagggacagcccggagacatctaccaccagacctgggccagatactttgtgaagttcctggatgcctatgctgagca

SEQ ID NO: 41608 - DNA, 201 bp, Homo sapiens
ccacagcatcatcacgaacctcctgtaccatgtggtcggctggaccgactggaaccttgccctgaaccccgaaggaggacccaattgggtgcgtaactttbtcgacagtcccatcattgtagacatcaccaaggacacgttttacaaacagcccatgttctaccaccttggccacttcagcaagttcattcctgagggctc

SEQ ID NO: 41609 - DNA, 201 bp, Homo sapiens
ttcctgagggctcccagagagtggggctggttgccagtcagaagaacgacccggacgcagtggcactgatgcatcccgatggctctcctgttgtggtcgtsctaaaccgctcctctaaggatgtgcctcttaccatcaaggatcctgctgtgggcttcctggagacaatctcacctggctactccattcacacctacctgt

SEQ ID NO: 41610 - DNA, 201 bp, Homo sapiens
aagatacccctgattcaccgagccctgcagttggcccagcgtcccgtttcactccttgccagcccctggacatcacccacttggctcaagaccaatggagmggtgaatgggaaggggtcactcaagggacagcccggagacatctaccaccagacctgggccagatactttgtgaagttcctggatgcctatgctgagcac

SEQ ID NO: 41611 - DNA, 201 bp, Homo sapiens
cagcatcatcacgaacctcctgtaccatgtggtcggctggaccgactggaaccttgccctgaaccccgaaggaggacccaattgggtgcgtaactttgtcdacagtcccatcattgtagacatcaccaaggacacgttttacaaacagcccatgttctaccaccttggccacttcagcaagttcattcctgagggctccca

SEQ ID NO: 41612 - DNA, 201 bp, Homo sapiens
gccaccctaggggagacacaccgcctgttccccaacaccatgctctttgcctcagaggcctgtgtgggctccaagttctgggagcagagtgtgcggctagrctcctgggatcgagggatgcagtacagccacagcatcatcacgaacctcctgtaccatgtggtcggctggaccgactggaaccttgccctgaaccccgaa

SEQ ID NO: 41613 - DNA, 201 bp, Homo sapiens
atacccctgattcaccgagccctgcagttggcccagcgtcccgtttcactccttgccagcccctggacatcacccacttggctcaagaccaatggagcggkgaatgggaaggggtcactcaagggacagcccggagacatctaccaccagacctgggccagatactttgtgaagttcctggatgcctatgctgagcacaag

SEQ ID NO: 41614 - DNA, 201 bp, Homo sapiens
caccgagccctgcagttggcccagcgtcccgtttcactccttgccagcccctggacatcacccacttggctcaagaccaatggagcggtgaatgggaaggrgtcactcaagggacagcccggagacatctaccaccagacctgggccagatactttgtgaagttcctggatgcctatgctgagcacaagttacagttctgg

SEQ ID NO: 41615 - DNA, 201 bp, Homo sapiens
ccgagccctgcagttggcccagcgtcccgtttcactccttgccagcccctggacatcacccacttggctcaagaccaatggagcggtgaatgggaaggggycactcaagggacagcccggagacatctaccaccagacctgggccagatactttgtgaagttcctggatgcctatgctgagcacaagttacagttctgggc

SEQ ID NO: 41616 - DNA, 201 bp, Homo sapiens
cctgcagttggcccagcgtcccgtttcactccttgccagcccctggacatcacccacttggctcaagaccaatggagcggtgaatgggaaggggtcactcragggacagcccggagacatctaccaccagacctgggccagatactttgtgaagttcctggatgcctatgctgagcacaagttacagttctgggcagtgac

SEQ ID NO: 41617 - DNA, 201 bp, Homo sapiens
ccagcgtcccgtttcactccttgccagcccctggacatcacccacttggctcaagaccaatggagcggtgaatgggaaggggtcactcaagggacagcccrgagacatctaccaccagacctgggccagatactttgtgaagttcctggatgcctatgctgagcacaagttacagttctgggcagtgacagctgaaaatga

SEQ ID NO: 41618 - DNA, 201 bp, Homo sapiens
aagggacagcccggagacatctaccaccagacctgggccagatactttgtgaagttcctggatgcctatgctgagcacaagttacagttctgggcagtgasagctgaaaatgagccttctgctgggctgttgagtggataccccttccagtgcctgggcttcacccctgaacatcagcgagacttcattgcccgtgaccta

SEQ ID NO: 41619 - DNA, 201 bp, Homo sapiens
atccttaaatctccctaagcctcagtttctcccctgtggaatgggggtaagaatctctttctctgaatgcccctgtgttaggaaataatttagaatacttyggaaactggaaaagctctgttcacacctaagcaatcagggcagtggcctcggctctgccaggaactttggcttttatctggatcctctctttccaggcct

SEQ ID NO: 41620 - DNA, 201 bp, Homo sapiens
atcacgaacctcctgtaccatgtggtcggctggaccgactggaaccttgccctgaaccccgaaggaggacccaattgggtgcgtaactttgtcgacagtcycatcattgtagacatcaccaaggacacgttttacaaacagcccatgttctaccaccttggccacttcagcaagttcattcctgagggctcccagagagtg

SEQ ID NO: 41621 - DNA, 201 bp, Homo sapiens
tgaggacaaatcattcctcttcatcctcctcagccatgcccagggtccgggtgcctggggcccgagcaggcgctccagtccctgttcctcagcatcccccwccacatcctgagtaagctttgtccccagataacctcttcagcatgatccttaaatctccctaagcctcagtttctcccctgtggaatgggggtaagaatc

SEQ ID NO: 41622 - DNA, 201 bp, Homo sapiens
tgcaggctgcggtgggatttcgttttgcctccggttggggctgctgtttctcttcgccgacgtggatcctctatccttcagagactctggaacccctgtgstcttctcttcatctaatgaccctgaggggatggagttttcaagtccttccagagaggaatgtcccaagcctttgagtagggtaagcatcatggctggcag

SEQ ID NO: 41623 - DNA, 201 bp, Homo sapiens
gcggtgggatttcgttttgcctccggttggggctgctgtttctcttcgccgacgtggatcctctatccttcagagactctggaacccctgtggtcttctcytcatctaatgaccctgaggggatggagttttcaagtccttccagagaggaatgtcccaagcctttgagtagggtaagcatcatggctggcagcctcacag

SEQ ID NO: 41624 - DNA, 201 bp, Homo sapiens
tttcaagtccttccagagaggaatgtcccaagcctttgagtagggtaagcatcatggctggcagcctcacaggattgcttctacttcaggcagtgtcgtgrgcatcaggtgcccgcccctgcatccctaaaagcttcggctacagctcggtggtgtgtgtctgcaatgccacatactgtgactcctttgaccccccgacct

SEQ ID NO: 41625 - DNA, 201 bp, Homo sapiens
atttcgttttgcctccggttggggctgctgtttctcttcgccgacgtggatcctctatccttcagagactctggaacccctgtggtcttctcttcatctartgaccctgaggggatggagttttcaagtccttccagagaggaatgtcccaagcctttgagtagggtaagcatcatggctggcagcctcacaggattgctt

SEQ ID NO: 41626 - DNA, 201 bp, Homo sapiens
ctccggttggggctgctgtttctcttcgccgacgtggatcctctatccttcagagactctggaacccctgtggtcttctcttcatctaatgaccctgaggkgatggagttttcaagtccttccagagaggaatgtcccaagcctttgagtagggtaagcatcatggctggcagcctcacaggattgcttctacttcaggca

SEQ ID NO: 41627 - DNA, 201 bp, Homo sapiens
aagttccagaaagtgaagggatttggaggggccatgacagatgctgctgctctcaacatccttgccctgtcaccccctgcccaaaatttgctacttaaatygtacttctctgaagaaggaatcggatataacatcatccgggtacccatggccagctgtgacttctccatccgcacctacacctatgcagacacccctgat

SEQ ID NO: 41628 - DNA, 201 bp, Homo sapiens
ggatttggaggggccatgacagatgctgctgctctcaacatccttgccctgtcaccccctgcccaaaatttgctacttaaatcgtacttctctgaagaagraatcggatataacatcatccgggtacccatggccagctgtgacttctccatccgcacctacacctatgcagacacccctgatgatttccagttgcacaac

SEQ ID NO: 41629 - DNA, 201 bp, Homo sapiens
ggccatgacagatgctgctgctctcaacatccttgccctgtcaccccctgcccaaaatttgctacttaaatcgtacttctctgaagaaggaatcggatatracatcatccgggtacccatggccagctgtgacttctccatccgcacctacacctatgcagacacccctgatgatttccagttgcacaacttcagcctccc

SEQ ID NO: 41630 - DNA, 201 bp, Homo sapiens
acagatgctgctgctctcaacatccttgccctgtcaccccctgcccaaaatttgctacttaaatcgtacttctctgaagaaggaatcggatataacatcayccgggtacccatggccagctgtgacttctccatccgcacctacacctatgcagacacccctgatgatttccagttgcacaacttcagcctcccagaggaa

SEQ ID NO: 41631 - DNA, 201 bp, Homo sapiens
gatgctgctgctctcaacatccttgccctgtcaccccctgcccaaaatttgctacttaaatcgtacttctctgaagaaggaatcggatataacatcatccrggtacccatggccagctgtgacttctccatccgcacctacacctatgcagacacccctgatgatttccagttgcacaacttcagcctcccagaggaagat

SEQ ID NO: 41632 - DNA, 201 bp, Homo sapiens
catggctggcagcctcacaggattgcttctacttcaggcagtgtcgtgggcatcaggtgcccgcccctgcatccctaaaagcttcggctacagctcggtgstgtgtgtctgcaatgccacatactgtgactcctttgaccccccgacctttcctgcccttggtaccttcagccgctatgagagtacacgcagtgggcgacg

SEQ ID NO: 41633 - DNA, 201 bp, Homo sapiens
gaaaatgagccttctgctgggctgttgagtggataccccttccagtgcctgggcttcacccctgaacatcagcgagacttcattgcccgtgacctaggtcbtaccctcgccaacagtactcaccacaatgtccgcctactcatgctggatgaccaacgcttgctgctgccccactgggcaaaggtggtactgacagaccca

SEQ ID NO: 41634 - DNA, 201 bp, Homo sapiens
ggatgaccaacgcttgctgctgccccactgggcaaaggtggtactgacagacccagaagcagctaaatatgttcatggcattgctgtacattggtacctgsactttctggctccagccaaagccaccctaggggagacacaccgcctgttccccaacaccatgctctttgcctcagaggcctgtgtgggctccaagttctg

SEQ ID NO: 41635 - DNA, 201 bp, Homo sapiens
gcccctgtgttaggaaataatttagaatactttggaaactggaaaagctctgttcacacctaagcaatcagggcagtggcctcggctctgccaggaacttwggcttttatctggatcctctctttccaggcctctcaattaattccccaggtcctcaacctttgggaagttagaaatgaggaagagtgtcctacttctgac

SEQ ID NO: 41636 - DNA, 201 bp, Homo sapiens
tcaccgagccctgcagttggcccagcgtcccgtttcactccttgccagcccctggacatcacccacttggctcaagaccaatggagcggtgaatgggaagkggtcactcaagggacagcccggagacatctaccaccagacctgggccagatactttgtgaagttcctggatgcctatgctgagcacaagttacagttctg

SEQ ID NO: 41637 - DNA, 201 bp, Homo sapiens
acagcccggagacatctaccaccagacctgggccagatactttgtgaagttcctggatgcctatgctgagcacaagttacagttctgggcagtgacagctkaaaatgagccttctgctgggctgttgagtggataccccttccagtgcctgggcttcacccctgaacatcagcgagacttcattgcccgtgacctaggtcc

SEQ ID NO: 41638 - DNA, 201 bp, Homo sapiens
gacatcacccacttggctcaagaccaatggagcggtgaatgggaaggggtcactcaagggacagcccggagacatctaccaccagacctgggccagatacwttgtgaagttcctggatgcctatgctgagcacaagttacagttctgggcagtgacagctgaaaatgagccttctgctgggctgttgagtggatacccctt

SEQ ID NO: 41639 - DNA, 201 bp, Homo sapiens
cagcgtcccgtttcactccttgccagcccctggacatcacccacttggctcaagaccaatggagcggtgaatgggaaggggtcactcaagggacagcccgragacatctaccaccagacctgggccagatactttgtgaagttcctggatgcctatgctgagcacaagttacagttctgggcagtgacagctgaaaatgag

SEQ ID NO: 41640 - DNA, 201 bp, Homo sapiens
agcacaagttacagttctgggcagtgacagctgaaaatgagccttctgctgggctgttgagtggataccccttccagtgcctgggcttcacccctgaacakcagcgagacttcattgcccgtgacctaggtcctaccctcgccaacagtactcaccacaatgtccgcctactcatgctggatgaccaacgcttgctgctgc

SEQ ID NO: 41641 - DNA, 201 bp, Homo sapiens
aagttacagttctgggcagtgacagctgaaaatgagccttctgctgggctgttgagtggataccccttccagtgcctgggcttcacccctgaacatcagcragacttcattgcccgtgacctaggtcctaccctcgccaacagtactcaccacaatgtccgcctactcatgctggatgaccaacgcttgctgctgccccac

SEQ ID NO: 41642 - DNA, 201 bp, Homo sapiens
agttctgggcagtgacagctgaaaatgagccttctgctgggctgttgagtggataccccttccagtgcctgggcttcacccctgaacatcagcgagacttmattgcccgtgacctaggtcctaccctcgccaacagtactcaccacaatgtccgcctactcatgctggatgaccaacgcttgctgctgccccactgggcaa

SEQ ID NO: 41643 - DNA, 201 bp, Homo sapiens
gctgaaaatgagccttctgctgggctgttgagtggataccccttccagtgcctgggcttcacccctgaacatcagcgagacttcattgcccgtgacctagrtcctaccctcgccaacagtactcaccacaatgtccgcctactcatgctggatgaccaacgcttgctgctgccccactgggcaaaggtggtactgacagac

SEQ ID NO: 41644 - DNA, 201 bp, Homo sapiens
agccttctgctgggctgttgagtggataccccttccagtgcctgggcttcacccctgaacatcagcgagacttcattgcccgtgacctaggtcctaccctygccaacagtactcaccacaatgtccgcctactcatgctggatgaccaacgcttgctgctgccccactgggcaaaggtggtactgacagacccagaagcag

SEQ ID NO: 41645 - DNA, 201 bp, Homo sapiens
cgcttgctgctgccccactgggcaaaggtggtactgacagacccagaagcagctaaatatgttcatggcattgctgtacattggtacctggactttctggmtccagccaaagccaccctaggggagacacaccgcctgttccccaacaccatgctctttgcctcagaggcctgtgtgggctccaagttctgggagcagagt

SEQ ID NO: 41646 - DNA, 201 bp, Homo sapiens
tgctgggctgttgagtggataccccttccagtgcctgggcttcacccctgaacatcagcgagacttcattgcccgtgacctaggtcctaccctcgccaacrgtactcaccacaatgtccgcctactcatgctggatgaccaacgcttgctgctgccccactgggcaaaggtggtactgacagacccagaagcagctaaata

SEQ ID NO: 41647 - DNA, 201 bp, Homo sapiens
gctgggctgttgagtggataccccttccagtgcctgggcttcacccctgaacatcagcgagacttcattgcccgtgacctaggtcctaccctcgccaacartactcaccacaatgtccgcctactcatgctggatgaccaacgcttgctgctgccccactgggcaaaggtggtactgacagacccagaagcagctaaatat

SEQ ID NO: 41648 - DNA, 201 bp, Homo sapiens
gtccgcctactcatgctggatgaccaacgcttgctgctgccccactgggcaaaggtggtactgacagacccagaagcagctaaatatgttcatggcattgytgtacattggtacctggactttctggctccagccaaagccaccctaggggagacacaccgcctgttccccaacaccatgctctttgcctcagaggcctgt

SEQ ID NO: 41649 - DNA, 201 bp, Homo sapiens
ctggacatcacccacttggctcaagaccaatggagcggtgaatgggaaggggtcactcaagggacagcccggagacatctaccaccagacctgggccagayactttgtgaagttcctggatgcctatgctgagcacaagttacagttctgggcagtgacagctgaaaatgagccttctgctgggctgttgagtggataccc

SEQ ID NO: 41650 - DNA, 201 bp, Homo sapiens
ctgcatccctaaaagcttcggctacagctcggtggtgtgtgtctgcaatgccacatactgtgactcctttgaccccccgacctttcctgcccttggtaccktcagccgctatgagagtacacgcagtgggcgacggatggagctgagtatggggcccatccaggctaatcacacgggcacaggcctgctactgaccctgca

SEQ ID NO: 41651 - DNA, 201 bp, Homo sapiens
cagcgagacttcattgcccgtgacctaggtcctaccctcgccaacagtactcaccacaatgtccgcctactcatgctggatgaccaacgcttgctgctgcyccactgggcaaaggtggtactgacagacccagaagcagctaaatatgttcatggcattgctgtacattggtacctggactttctggctccagccaaagcc

SEQ ID NO: 41652 - DNA, 201 bp, Homo sapiens
aaagcttcggctacagctcggtggtgtgtgtctgcaatgccacatactgtgactcctttgaccccccgacctttcctgcccttggtaccttcagccgctaygagagtacacgcagtgggcgacggatggagctgagtatggggcccatccaggctaatcacacgggcacaggcctgctactgaccctgcagccagaacaga

SEQ ID NO: 41653 - DNA, 201 bp, Homo sapiens
ctgtgtgggctccaagttctgggagcagagtgtgcggctaggctcctgggatcgagggatgcagtacagccacagcatcatcacgaacctcctgtaccatktggtcggctggaccgactggaaccttgccctgaaccccgaaggaggacccaattgggtgcgtaactttgtcgacagtcccatcattgtagacatcaccaa

SEQ ID NO: 41654 - DNA, 201 bp, Homo sapiens
cattcctgagggctcccagagagtggggctggttgccagtcagaagaacgacccggacgcagtggcactgatgcatcccgatggctctcctgttgtggtcrtcctaaaccgctcctctaaggatgtgcctcttaccatcaaggatcctgctgtgggcttcctggagacaatctcacctggctactccattcacacctacct

SEQ ID NO: 41655 - DNA, 201 bp, Homo sapiens
aagcttcggctacagctcggtggtgtgtgtctgcaatgccacatactgtgactcctttgaccccccgacctttcctgcccttggtaccttcagccgctatragagtacacgcagtgggcgacggatggagctgagtatggggcccatccaggctaatcacacgggcacaggcctgctactgaccctgcagccagaacagaa

SEQ ID NO: 41656 - DNA, 201 bp, Homo sapiens
agggctcccagagagtggggctggttgccagtcagaagaacgacccggacgcagtggcactgatgcatcccgatggctctcctgttgtggtcgtcctaaascgctcctctaaggatgtgcctcttaccatcaaggatcctgctgtgggcttcctggagacaatctcacctggctactccattcacacctacctgtggcgtc

SEQ ID NO: 41657 - DNA, 201 bp, Homo sapiens
tcggctacagctcggtggtgtgtgtctgcaatgccacatactgtgactcctttgaccccccgacctttcctgcccttggtaccttcagccgctatgagagyacacgcagtgggcgacggatggagctgagtatggggcccatccaggctaatcacacgggcacaggcctgctactgaccctgcagccagaacagaagttcc

SEQ ID NO: 41658 - DNA, 201 bp, Homo sapiens
ggctacagctcggtggtgtgtgtctgcaatgccacatactgtgactcctttgaccccccgacctttcctgcccttggtaccttcagccgctatgagagtabacgcagtgggcgacggatggagctgagtatggggcccatccaggctaatcacacgggcacaggcctgctactgaccctgcagccagaacagaagttccag

SEQ ID NO: 41659 - DNA, 201 bp, Homo sapiens
accccctgcccaaaatttgctacttaaatcgtacttctctgaagaaggaatcggatataacatcatccgggtacccatggccagctgtgacttctccatcygcacctacacctatgcagacacccctgatgatttccagttgcacaacttcagcctcccagaggaagataccaagctcaagatacccctgattcaccgagc

SEQ ID NO: 41660 - DNA, 201 bp, Homo sapiens
ctacagctcggtggtgtgtgtctgcaatgccacatactgtgactcctttgaccccccgacctttcctgcccttggtaccttcagccgctatgagagtacamgcagtgggcgacggatggagctgagtatggggcccatccaggctaatcacacgggcacaggcctgctactgaccctgcagccagaacagaagttccagaa

SEQ ID NO: 41661 - DNA, 201 bp, Homo sapiens
ggtgtgtgtctgcaatgccacatactgtgactcctttgaccccccgacctttcctgcccttggtaccttcagccgctatgagagtacacgcagtgggcgayggatggagctgagtatggggcccatccaggctaatcacacgggcacaggcctgctactgaccctgcagccagaacagaagttccagaaagtgaagggatt

SEQ ID NO: 41662 - DNA, 201 bp, Homo sapiens
ggcgacggatggagctgagtatggggcccatccaggctaatcacacgggcacaggcctgctactgaccctgcagccagaacagaagttccagaaagtgaasggatttggaggggccatgacagatgctgctgctctcaacatccttgccctgtcaccccctgcccaaaatttgctacttaaatcgtacttctctgaagaag

SEQ ID NO: 41663 - DNA, 201 bp, Homo sapiens
ccaggctaatcacacgggcacaggcctgctactgaccctgcagccagaacagaagttccagaaagtgaagggatttggaggggccatgacagatgctgctrctctcaacatccttgccctgtcaccccctgcccaaaatttgctacttaaatcgtacttctctgaagaaggaatcggatataacatcatccgggtacccat

SEQ ID NO: 41664 - DNA, 201 bp, Homo sapiens
gctggcagcctcacaggattgcttctacttcaggcagtgtcgtgggcatcaggtgcccgcccctgcatccctaaaagcttcggctacagctcggtggtgtstgtctgcaatgccacatactgtgactcctttgaccccccgacctttcctgcccttggtaccttcagccgctatgagagtacacgcagtgggcgacggatg

SEQ ID NO: 41665 - DNA, 201 bp, Homo sapiens
accctaggggagacacaccgcctgttccccaacaccatgctctttgcctcagaggcctgtgtgggctccaagttctgggagcagagtgtgcggctaggctyctgggatcgagggatgcagtacagccacagcatcatcacgaacctcctgtaccatgtggtcggctggaccgactggaaccttgccctgaaccccgaagga

SEQ ID NO: 41666 - DNA, 201 bp, Homo sapiens
ggcgctccagtccctgttcctcagcatccccctccacatcctgagtaagctttgtccccagataacctcttcagcatgatccttaaatctccctaagcctyagtttctcccctgtggaatgggggtaagaatctctttctctgaatgcccctgtgttaggaaataatttagaatactttggaaactggaaaagctctgttc

SEQ ID NO: 41667 - DNA, 201 bp, Homo sapiens
tcatgctggatgaccaacgcttgctgctgccccactgggcaaaggtggtactgacagacccagaagcagctaaatatgttcatggcattgctgtacattgktacctggactttctggctccagccaaagccaccctaggggagacacaccgcctgttccccaacaccatgctctttgcctcagaggcctgtgtgggctcca

SEQ ID NO: 41668 - DNA, 201 bp, Homo sapiens
catgctggatgaccaacgcttgctgctgccccactgggcaaaggtggtactgacagacccagaagcagctaaatatgttcatggcattgctgtacattggyacctggactttctggctccagccaaagccaccctaggggagacacaccgcctgttccccaacaccatgctctttgcctcagaggcctgtgtgggctccaa

SEQ ID NO: 41669 - DNA, 201 bp, Homo sapiens
cactgggcaaaggtggtactgacagacccagaagcagctaaatatgttcatggcattgctgtacattggtacctggactttctggctccagccaaagccaycctaggggagacacaccgcctgttccccaacaccatgctctttgcctcagaggcctgtgtgggctccaagttctgggagcagagtgtgcggctaggctcc

SEQ ID NO: 41670 - DNA, 201 bp, Homo sapiens
tgggcaaaggtggtactgacagacccagaagcagctaaatatgttcatggcattgctgtacattggtacctggactttctggctccagccaaagccacccyaggggagacacaccgcctgttccccaacaccatgctctttgcctcagaggcctgtgtgggctccaagttctgggagcagagtgtgcggctaggctcctgg

SEQ ID NO: 41671 - DNA, 201 bp, Homo sapiens
aaaggtggtactgacagacccagaagcagctaaatatgttcatggcattgctgtacattggtacctggactttctggctccagccaaagccaccctagggragacacaccgcctgttccccaacaccatgctctttgcctcagaggcctgtgtgggctccaagttctgggagcagagtgtgcggctaggctcctgggatcg

SEQ ID NO: 41672 - DNA, 201 bp, Homo sapiens
ctgacagacccagaagcagctaaatatgttcatggcattgctgtacattggtacctggactttctggctccagccaaagccaccctaggggagacacaccrcctgttccccaacaccatgctctttgcctcagaggcctgtgtgggctccaagttctgggagcagagtgtgcggctaggctcctgggatcgagggatgcag

SEQ ID NO: 41673 - DNA, 201 bp, Homo sapiens
cattgctgtacattggtacctggactttctggctccagccaaagccaccctaggggagacacaccgcctgttccccaacaccatgctctttgcctcagagrcctgtgtgggctccaagttctgggagcagagtgtgcggctaggctcctgggatcgagggatgcagtacagccacagcatcatcacgaacctcctgtacca

SEQ ID NO: 41674 - DNA, 201 bp, Homo sapiens
tgctgtacattggtacctggactttctggctccagccaaagccaccctaggggagacacaccgcctgttccccaacaccatgctctttgcctcagaggcckgtgtgggctccaagttctgggagcagagtgtgcggctaggctcctgggatcgagggatgcagtacagccacagcatcatcacgaacctcctgtaccatgt

SEQ ID NO: 41675 - DNA, 201 bp, Homo sapiens
cacgaacctcctgtaccatgtggtcggctggaccgactggaaccttgccctgaaccccgaaggaggacccaattgggtgcgtaactttgtcgacagtcccwtcattgtagacatcaccaaggacacgttttacaaacagcccatgttctaccaccttggccacttcagcaagttcattcctgagggctcccagagagtggg

SEQ ID NO: 41676 - DNA, 201 bp, Homo sapiens
acgaacctcctgtaccatgtggtcggctggaccgactggaaccttgccctgaaccccgaaggaggacccaattgggtgcgtaactttgtcgacagtcccaycattgtagacatcaccaaggacacgttttacaaacagcccatgttctaccaccttggccacttcagcaagttcattcctgagggctcccagagagtgggg

SEQ ID NO: 41677 - DNA, 201 bp, Homo sapiens
ctcgccagcgacacttgttcgttcaacttgaccaatgagacttgaggaagggctctgagtcccgcctctgcatgagtgaccgtctcttttccaatccaggycccgccccgactccccagggctgcttttctcgcggctgcgggtggtcgggctgcatcctgccttcagagtcttactgcgcggggccccagtctccagtcc

SEQ ID NO: 41678 - DNA, 201 bp, Homo sapiens
agatgctgctgctctcaacatccttgccctgtcaccccctgcccaaaatttgctacttaaatcgtacttctctgaagaaggaatcggatataacatcatcygggtacccatggccagctgtgacttctccatccgcacctacacctatgcagacacccctgatgatttccagttgcacaacttcagcctcccagaggaaga

SEQ ID NO: 41679 - DNA, 201 bp, Homo sapiens
atttgctacttaaatcgtacttctctgaagaaggaatcggatataacatcatccgggtacccatggccagctgtgacttctccatccgcacctacacctakgcagacacccctgatgatttccagttgcacaacttcagcctcccagaggaagataccaagctcaagatacccctgattcaccgagccctgcagttggccc

SEQ ID NO: 41680 - DNA, 201 bp, Homo sapiens
ttgctacttaaatcgtacttctctgaagaaggaatcggatataacatcatccgggtacccatggccagctgtgacttctccatccgcacctacacctatgmagacacccctgatgatttccagttgcacaacttcagcctcccagaggaagataccaagctcaagatacccctgattcaccgagccctgcagttggcccag

SEQ ID NO: 41681 - DNA, 201 bp, Homo sapiens
cagttgcacaacttcagcctcccagaggaagataccaagctcaagatacccctgattcaccgagccctgcagttggcccagcgtcccgtttcactccttgmcagcccctggacatcacccacttggctcaagaccaatggagcggtgaatgggaaggggtcactcaagggacagcccggagacatctaccaccagacctgg

SEQ ID NO: 41682 - DNA, 201 bp, Homo sapiens
aacttcagcctcccagaggaagataccaagctcaagatacccctgattcaccgagccctgcagttggcccagcgtcccgtttcactccttgccagcccctrgacatcacccacttggctcaagaccaatggagcggtgaatgggaaggggtcactcaagggacagcccggagacatctaccaccagacctgggccagatac

SEQ ID NO: 41683 - DNA, 201 bp, Homo sapiens
cctcccagaggaagataccaagctcaagatacccctgattcaccgagccctgcagttggcccagcgtcccgtttcactccttgccagcccctggacatcamccacttggctcaagaccaatggagcggtgaatgggaaggggtcactcaagggacagcccggagacatctaccaccagacctgggccagatactttgtgaa

SEQ ID NO: 41684 - DNA, 201 bp, Homo sapiens
agaggaagataccaagctcaagatacccctgattcaccgagccctgcagttggcccagcgtcccgtttcactccttgccagcccctggacatcacccactyggctcaagaccaatggagcggtgaatgggaaggggtcactcaagggacagcccggagacatctaccaccagacctgggccagatactttgtgaagttcct

SEQ ID NO: 41685 - DNA, 201 bp, Homo sapiens
gatgatttccagttgcacaacttcagcctcccagaggaagataccaagctcaagatacccctgattcaccgagccctgcagttggcccagcgtcccgtttsactccttgccagcccctggacatcacccacttggctcaagaccaatggagcggtgaatgggaaggggtcactcaagggacagcccggagacatctaccac

SEQ ID NO: 41686 - DNA, 201 bp, Homo sapiens
ccccctgcccaaaatttgctacttaaatcgtacttctctgaagaaggaatcggatataacatcatccgggtacccatggccagctgtgacttctccatcckcacctacacctatgcagacacccctgatgatttccagttgcacaacttcagcctcccagaggaagataccaagctcaagatacccctgattcaccgagcc

SEQ ID NO: 41687 - DNA, 201 bp, Homo sapiens
ctactcatgctggatgaccaacgcttgctgctgccccactgggcaaaggtggtactgacagacccagaagcagctaaatatgttcatggcattgctgtacrttggtacctggactttctggctccagccaaagccaccctaggggagacacaccgcctgttccccaacaccatgctctttgcctcagaggcctgtgtgggc

SEQ ID NO: 41688 - DNA, 201 bp, Homo sapiens
caaaatttgctacttaaatcgtacttctctgaagaaggaatcggatataacatcatccgggtacccatggccagctgtgacttctccatccgcacctacayctatgcagacacccctgatgatttccagttgcacaacttcagcctcccagaggaagataccaagctcaagatacccctgattcaccgagccctgcagttg

SEQ ID NO: 41689 - DNA, 201 bp, Homo sapiens
atcgtacttctctgaagaaggaatcggatataacatcatccgggtacccatggccagctgtgacttctccatccgcacctacacctatgcagacacccctsatgatttccagttgcacaacttcagcctcccagaggaagataccaagctcaagatacccctgattcaccgagccctgcagttggcccagcgtcccgtttc

SEQ ID NO: 41690 - DNA, 201 bp, Homo sapiens
caagttacagttctgggcagtgacagctgaaaatgagccttctgctgggctgttgagtggataccccttccagtgcctgggcttcacccctgaacatcagygagacttcattgcccgtgacctaggtcctaccctcgccaacagtactcaccacaatgtccgcctactcatgctggatgaccaacgcttgctgctgcccca

SEQ ID NO: 41691 - DNA, 201 bp, Homo sapiens
ggcaaaggtggtactgacagacccagaagcagctaaatatgttcatggcattgctgtacattggtacctggactttctggctccagccaaagccaccctakgggagacacaccgcctgttccccaacaccatgctctttgcctcagaggcctgtgtgggctccaagttctgggagcagagtgtgcggctaggctcctggga

SEQ ID NO: 41692 - DNA, 201 bp, Homo sapiens
ggtcggctggaccgactggaaccttgccctgaaccccgaaggaggacccaattgggtgcgtaactttgtcgacagtcccatcattgtagacatcaccaagsacacgttttacaaacagcccatgttctaccaccttggccacttcagcaagttcattcctgagggctcccagagagtggggctggttgccagtcagaagaa

SEQ ID NO: 41693 - DNA, 201 bp, Homo sapiens
tccagccaaagccaccctaggggagacacaccgcctgttccccaacaccatgctctttgcctcagaggcctgtgtgggctccaagttctgggagcagagtstgcggctaggctcctgggatcgagggatgcagtacagccacagcatcatcacgaacctcctgtaccatgtggtcggctggaccgactggaaccttgccct

SEQ ID NO: 41694 - DNA, 201 bp, Homo sapiens
gtcggctggaccgactggaaccttgccctgaaccccgaaggaggacccaattgggtgcgtaactttgtcgacagtcccatcattgtagacatcaccaaggwcacgttttacaaacagcccatgttctaccaccttggccacttcagcaagttcattcctgagggctcccagagagtggggctggttgccagtcagaagaac

SEQ ID NO: 41695 - DNA, 201 bp, Homo sapiens
agccaaagccaccctaggggagacacaccgcctgttccccaacaccatgctctttgcctcagaggcctgtgtgggctccaagttctgggagcagagtgtgsggctaggctcctgggatcgagggatgcagtacagccacagcatcatcacgaacctcctgtaccatgtggtcggctggaccgactggaaccttgccctgaa

SEQ ID NO: 41696 - DNA, 201 bp, Homo sapiens
ggagcagatactcaaggaggcactgggctcagcctgggcattaaagggacagagtcagctcacacgctgtctgtgactaaagagggcacaacagggccagygtgagcttacagcgacgtaagcccaggggcaatggtttgggtgactcactttcccctctaggtggtgccaggggctggaggcccctagaaaaagatcagt

SEQ ID NO: 41697 - DNA, 201 bp, Homo sapiens
ttttacaaacagcccatgttctaccaccttggccacttcagcaagttcattcctgagggctcccagagagtggggctggttgccagtcagaagaacgaccbggacgcagtggcactgatgcatcccgatggctctcctgttgtggtcgtcctaaaccgctcctctaaggatgtgcctcttaccatcaaggatcctgctgtg

SEQ ID NO: 41698 - DNA, 201 bp, Homo sapiens
caaacagcccatgttctaccaccttggccacttcagcaagttcattcctgagggctcccagagagtggggctggttgccagtcagaagaacgacccggacscagtggcactgatgcatcccgatggctctcctgttgtggtcgtcctaaaccgctcctctaaggatgtgcctcttaccatcaaggatcctgctgtgggctt

SEQ ID NO: 41699 - DNA, 201 bp, Homo sapiens
cttcagcaagttcattcctgagggctcccagagagtggggctggttgccagtcagaagaacgacccggacgcagtggcactgatgcatcccgatggctctsctgttgtggtcgtcctaaaccgctcctctaaggatgtgcctcttaccatcaaggatcctgctgtgggcttcctggagacaatctcacctggctactccat

SEQ ID NO: 41700 - DNA, 201 bp, Homo sapiens
ctaggctcctgggatcgagggatgcagtacagccacagcatcatcacgaacctcctgtaccatgtggtcggctggaccgactggaaccttgccctgaaccycgaaggaggacccaattgggtgcgtaactttgtcgacagtcccatcattgtagacatcaccaaggacacgttttacaaacagcccatgttctaccacctt

SEQ ID NO: 41701 - DNA, 201 bp, Homo sapiens
tcctgggatcgagggatgcagtacagccacagcatcatcacgaacctcctgtaccatgtggtcggctggaccgactggaaccttgccctgaaccccgaagraggacccaattgggtgcgtaactttgtcgacagtcccatcattgtagacatcaccaaggacacgttttacaaacagcccatgttctaccaccttggccac

SEQ ID NO: 41702 - DNA, 201 bp, Homo sapiens; identical to SEQ ID NO: 41597

SEQ ID NO: 41703 - DNA, 201 bp, Homo sapiens; identical to SEQ ID NO: 41598

SEQ ID NO: 41704 - DNA, 201 bp, Homo sapiens; identical to SEQ ID NO: 41599

SEQ ID NO: 41705 - DNA, 201 bp, Homo sapiens; identical to SEQ ID NO: 41600

SEQ ID NO: 41706 - DNA, 201 bp, Homo sapiens; identical to SEQ ID NO: 41601

SEQ ID NO: 41707 - DNA, 201 bp, Homo sapiens; identical to SEQ ID NO: 41602

SEQ ID NO: 41708 - DNA, 201 bp, Homo sapiens; identical to SEQ ID NO: 41603

SEQ ID NO: 41709 - DNA, 201 bp, Homo sapiens; identical to SEQ ID NO: 41604

SEQ ID NO: 41710 - DNA, 201 bp, Homo sapiens; identical to SEQ ID NO: 41605

SEQ ID NO: 41711 - DNA, 201 bp, Homo sapiens; identical to SEQ ID NO: 41606

SEQ ID NO: 41712 - DNA, 201 bp, Homo sapiens; identical to SEQ ID NO: 41607

SEQ ID NO: 41713 - DNA, 201 bp, Homo sapiens; identical to SEQ ID NO: 41608

SEQ ID NO: 41714 - DNA, 201 bp, Homo sapiens; identical to SEQ ID NO: 41609

SEQ ID NO: 41715 - DNA, 201 bp, Homo sapiens; identical to SEQ ID NO: 41610

SEQ ID NO: 41716 - DNA, 201 bp, Homo sapiens; identical to SEQ ID NO: 41611

SEQ ID NO: 41717 - DNA, 201 bp, Homo sapiens; identical to SEQ ID NO: 41612

SEQ ID NO: 41718 - DNA, 201 bp, Homo sapiens; identical to SEQ ID NO: 41613

SEQ ID NO: 41719 - DNA, 201 bp, Homo sapiens; identical to SEQ ID NO: 41614

SEQ ID NO: 41720 - DNA, 201 bp, Homo sapiens; identical to SEQ ID NO: 41615

SEQ ID NO: 41721 - DNA, 201 bp, Homo sapiens; identical to SEQ ID NO: 41616

SEQ ID NO: 41722 - DNA, 201 bp, Homo sapiens; identical to SEQ ID NO: 41617

SEQ ID NO: 41723 - DNA, 201 bp, Homo sapiens; identical to SEQ ID NO: 41618

SEQ ID NO: 41724 - DNA, 201 bp, Homo sapiens; identical to SEQ ID NO: 41620

SEQ ID NO: 41725 - DNA, 201 bp, Homo sapiens
agtcccgcccaggcgcctttgcaggctgcggtgggatttcgttttgcctccggttggggctgctgtttctcttcgccgacgagactctggaacccctgtgstcttctcttcatctaatgaccctgaggggatggagttttcaagtccttccagagaggaatgtcccaagcctttgagtagggtaagcatcatggctggcag

SEQ ID NO: 41726 - DNA, 201 bp, Homo sapiens
ccaggcgcctttgcaggctgcggtgggatttcgttttgcctccggttggggctgctgtttctcttcgccgacgagactctggaacccctgtggtcttctcytcatctaatgaccctgaggggatggagttttcaagtccttccagagaggaatgtcccaagcctttgagtagggtaagcatcatggctggcagcctcacag

SEQ ID NO: 41727 - DNA, 201 bp, Homo sapiens; identical to SEQ ID NO: 41624

SEQ ID NO: 41728 - DNA, 201 bp, Homo sapiens
ctttgcaggctgcggtgggatttcgttttgcctccggttggggctgctgtttctcttcgccgacgagactctggaacccctgtggtcttctcttcatctartgaccctgaggggatggagttttcaagtccttccagagaggaatgtcccaagcctttgagtagggtaagcatcatggctggcagcctcacaggattgctt

SEQ ID NO: 41729 - DNA, 201 bp, Homo sapiens
cggtgggatttcgttttgcctccggttggggctgctgtttctcttcgccgacgagactctggaacccctgtggtcttctcttcatctaatgaccctgaggkgatggagttttcaagtccttccagagaggaatgtcccaagcctttgagtagggtaagcatcatggctggcagcctcacaggattgcttctacttcaggca

SEQ ID NO: 41730 - DNA, 201 bp, Homo sapiens; identical to SEQ ID NO: 41627

SEQ ID NO: 41731 - DNA, 201 bp, Homo sapiens; identical to SEQ ID NO: 41628

SEQ ID NO: 41732 - DNA, 201 bp, Homo sapiens; identical to SEQ ID NO: 41629

SEQ ID NO: 41733 - DNA, 201 bp, Homo sapiens; identical to SEQ ID NO: 41630

SEQ ID NO: 41734 - DNA, 201 bp, Homo sapiens; identical to SEQ ID NO: 41631

SEQ ID NO: 41735 - DNA, 201 bp, Homo sapiens; identical to SEQ ID NO: 41632

SEQ ID NO: 41736 - DNA, 201 bp, Homo sapiens; identical to SEQ ID NO: 41633

SEQ ID NO: 41737 - DNA, 201 bp, Homo sapiens; identical to SEQ ID NO: 41634

SEQ ID NO: 41738 - DNA, 201 bp, Homo sapiens; identical to SEQ ID NO: 41636

SEQ ID NO: 41739 - DNA, 201 bp, Homo sapiens; identical to SEQ ID NO: 41637

SEQ ID NO: 41740 - DNA, 201 bp, Homo sapiens; identical to SEQ ID NO: 41638

SEQ ID NO: 41741 - DNA, 201 bp, Homo sapiens; identical to SEQ ID NO: 41639

SEQ ID NO: 41742 - DNA, 201 bp, Homo sapiens; identical to SEQ ID NO: 41640

SEQ ID NO: 41743 - DNA, 201 bp, Homo sapiens; identical to SEQ ID NO: 41641

SEQ ID NO: 41744 - DNA, 201 bp, Homo sapiens; identical to SEQ ID NO: 41642

SEQ ID NO: 41745 - DNA, 201 bp, Homo sapiens
cgccagtgatggagcagatactcaaggaggcactgggctcagcctgggcattaaagggacagagtcagctcacacgctgtctgtgactaaagagggcacarcagggccagtgtgagcttacagcgacgtaagcccaggggcaatggtttgggtgactcactttcccctctaggtggtgccaggggctggaggcccctagaa

SEQ ID NO: 41746 - DNA, 201 bp, Homo sapiens; identical to SEQ ID NO: 41643

SEQ ID NO: 41747 - DNA, 201 bp, Homo sapiens; identical to SEQ ID NO: 41644

SEQ ID NO: 41748 - DNA, 201 bp, Homo sapiens; identical to SEQ ID NO: 41645

SEQ ID NO: 41749 - DNA, 201 bp, Homo sapiens; identical to SEQ ID NO: 41646

SEQ ID NO: 41750 - DNA, 201 bp, Homo sapiens; identical to SEQ ID NO: 41647

SEQ ID NO: 41751 - DNA, 201 bp, Homo sapiens; identical to SEQ ID NO: 41648

SEQ ID NO: 41752 - DNA, 201 bp, Homo sapiens; identical to SEQ ID NO: 41649

SEQ ID NO: 41753 - DNA, 201 bp, Homo sapiens; identical to SEQ ID NO: 41650

SEQ ID NO: 41754 - DNA, 201 bp, Homo sapiens; identical to SEQ ID NO: 41651

SEQ ID NO: 41755 - DNA, 201 bp, Homo sapiens; identical to SEQ ID NO: 41652

SEQ ID NO: 41756 - DNA, 201 bp, Homo sapiens
ccgctcctctaaggatgtgcctcttaccatcaaggatcctgctgtgggcttcctggagacaatctcacctggctactccattcacacctacctgtggcgtygccagtgatggagcagatactcaaggaggcactgggctcagcctgggcattaaagggacagagtcagctcacacgctgtctgtgactaaagagggcacaa

SEQ ID NO: 41757 - DNA, 201 bp, Homo sapiens; identical to SEQ ID NO: 41653

SEQ ID NO: 41758 - DNA, 201 bp, Homo sapiens; identical to SEQ ID NO: 41654

SEQ ID NO: 41759 - DNA, 201 bp, Homo sapiens; identical to SEQ ID NO: 41655

SEQ ID NO: 41760 - DNA, 201 bp, Homo sapiens; identical to SEQ ID NO: 41656

SEQ ID NO: 41761 - DNA, 201 bp, Homo sapiens; identical to SEQ ID NO: 41657

SEQ ID NO: 41762 - DNA, 201 bp, Homo sapiens; identical to SEQ ID NO: 41658

SEQ ID NO: 41763 - DNA, 201 bp, Homo sapiens; identical to SEQ ID NO: 41659

SEQ ID NO: 41764 - DNA, 201 bp, Homo sapiens; identical to SEQ ID NO: 41660

SEQ ID NO: 41765 - DNA, 201 bp, Homo sapiens; identical to SEQ ID NO: 41661

SEQ ID NO: 41766 - DNA, 201 bp, Homo sapiens; identical to SEQ ID NO: 41662

SEQ ID NO: 41767 - DNA, 201 bp, Homo sapiens; identical to SEQ ID NO: 41663

SEQ ID NO: 41768 - DNA, 201 bp, Homo sapiens
gtggtcgtcctaaaccgctcctctaaggatgtgcctcttaccatcaaggatcctgctgtgggcttcctggagacaatctcacctggctactccattcacayctacctgtggcgtcgccagtgatggagcagatactcaaggaggcactgggctcagcctgggcattaaagggacagagtcagctcacacgctgtctgtgac

SEQ ID NO: 41769 - DNA, 201 bp, Homo sapiens; identical to SEQ ID NO: 41664

SEQ ID NO: 41770 - DNA, 201 bp, Homo sapiens; identical to SEQ ID NO: 41665

SEQ ID NO: 41771 - DNA, 201 bp, Homo sapiens; identical to SEQ ID NO: 41667

SEQ ID NO: 41772 - DNA, 201 bp, Homo sapiens; identical to SEQ ID NO: 41668

SEQ ID NO: 41773 - DNA, 201 bp, Homo sapiens; identical to SEQ ID NO: 41669

SEQ ID NO: 41774 - DNA, 201 bp, Homo sapiens; identical to SEQ ID NO: 41670

SEQ ID NO: 41775 - DNA, 201 bp, Homo sapiens; identical to SEQ ID NO: 41671

SEQ ID NO: 41776 - DNA, 201 bp, Homo sapiens; identical to SEQ ID NO: 41672

SEQ ID NO: 41777 - DNA, 201 bp, Homo sapiens; identical to SEQ ID NO: 41673

SEQ ID NO: 41778 - DNA, 201 bp, Homo sapiens; identical to SEQ ID NO: 41674

SEQ ID NO: 41779 - DNA, 201 bp, Homo sapiens; identical to SEQ ID NO: 41675

SEQ ID NO: 41780 - DNA, 201 bp, Homo sapiens; identical to SEQ ID NO: 41676

SEQ ID NO: 41781 - DNA, 109 bp, Homo sapiens
aatccaggycccgccccgactccccagggctgcttttctcgcggctgcgggtggtcgggctgcatcctgccttcagagtcttactgcgcggggccccagtctccagtcc

SEQ ID NO: 41782 - DNA, 201 bp, Homo sapiens; identical to SEQ ID NO: 41678

SEQ ID NO: 41783 - DNA, 201 bp, Homo sapiens; identical to SEQ ID NO: 41679

SEQ ID NO: 41784 - DNA, 201 bp, Homo sapiens; identical to SEQ ID NO: 41680

SEQ ID NO: 41785 - DNA, 201 bp, Homo sapiens; identical to SEQ ID NO: 41681

SEQ ID NO: 41786 - DNA, 201 bp, Homo sapiens; identical to SEQ ID NO: 41682

SEQ ID NO: 41787 - DNA, 201 bp, Homo sapiens; identical to SEQ ID NO: 41683

SEQ ID NO: 41788 - DNA, 201 bp, Homo sapiens; identical to SEQ ID NO: 41684

SEQ ID NO: 41789 - DNA, 201 bp, Homo sapiens; identical to SEQ ID NO: 41685

SEQ ID NO: 41790 - DNA, 201 bp, Homo sapiens; identical to SEQ ID NO: 41686

SEQ ID NO: 41791 - DNA, 201 bp, Homo sapiens; identical to SEQ ID NO: 41687

SEQ ID NO: 41792 - DNA, 201 bp, Homo sapiens; identical to SEQ ID NO: 41688

SEQ ID NO: 41793 - DNA, 201 bp, Homo sapiens; identical to SEQ ID NO: 41689

SEQ ID NO: 41794 - DNA, 201 bp, Homo sapiens; identical to SEQ ID NO: 41690

SEQ ID NO: 41795 - DNA, 201 bp, Homo sapiens; identical to SEQ ID NO: 41691

SEQ ID NO: 41796 - DNA, 201 bp, Homo sapiens; identical to SEQ ID NO: 41692

SEQ ID NO: 41797 - DNA, 201 bp, Homo sapiens; identical to SEQ ID NO: 41693

SEQ ID NO: 41798 - DNA, 201 bp, Homo sapiens; identical to SEQ ID NO: 41694

SEQ ID NO: 41799 - DNA, 201 bp, Homo sapiens; identical to SEQ ID NO: 41695

SEQ ID NO: 41800 - DNA, 201 bp, Homo sapiens; identical to SEQ ID NO: 41697

SEQ ID NO: 41801 - DNA, 201 bp, Homo sapiens; identical to SEQ ID NO: 41698

SEQ ID NO: 41802 - DNA, 201 bp, Homo sapiens; identical to SEQ ID NO: 41699

SEQ ID NO: 41803 - DNA, 201 bp, Homo sapiens; identical to SEQ ID NO: 41696

SEQ ID NO: 41804 - DNA, 201 bp, Homo sapiens; identical to SEQ ID NO: 41700

SEQ ID NO: 41805 - DNA, 201 bp, Homo sapiens
acgctgtctgtgactaaagagggcacaacagggccagtgtgagcttacagcgacgtaagcccaggggcaatggtttgggtgactcactttcccctctaggyggtgccaggggctggaggcccctagaaaaagatcagtaagccccagtgtccccccagcccccatgcttatgtgaacatgcgctgtgtgctgcttgctttg

SEQ ID NO: 41806 - DNA, 201 bp, Homo sapiens; identical to SEQ ID NO: 41701

SEQ ID NO: 41807 - DNA, 201 bp, Homo sapiens; identical to SEQ ID NO: 41597

SEQ ID NO: 41808 - DNA, 201 bp, Homo sapiens; identical to SEQ ID NO: 41598

SEQ ID NO: 41809 - DNA, 201 bp, Homo sapiens; identical to SEQ ID NO: 41599

SEQ ID NO: 41810 - DNA, 201 bp, Homo sapiens; identical to SEQ ID NO: 41600

SEQ ID NO: 41811 - DNA, 201 bp, Homo sapiens; identical to SEQ ID NO: 41601

SEQ ID NO: 41812 - DNA, 201 bp, Homo sapiens; identical to SEQ ID NO: 41602

SEQ ID NO: 41813 - DNA, 201 bp, Homo sapiens; identical to SEQ ID NO: 41603

SEQ ID NO: 41814 - DNA, 201 bp, Homo sapiens; identical to SEQ ID NO: 41604

SEQ ID NO: 41815 - DNA, 105 bp, Homo sapiens
acatygggaagccggaattacttgcagggctaacctagtgcctatagctaaggcaggtacctgcatccttgtttttgtttagtggatcctctatccttcagagac

SEQ ID NO: 41816 - DNA, 201 bp, Homo sapiens; identical to SEQ ID NO: 41605

SEQ ID NO: 41817 - DNA, 201 bp, Homo sapiens; identical to SEQ ID NO: 41606

SEQ ID NO: 41818 - DNA, 201 bp, Homo sapiens; identical to SEQ ID NO: 41607

SEQ ID NO: 41819 - DNA, 201 bp, Homo sapiens; identical to SEQ ID NO: 41608

SEQ ID NO: 41820 - DNA, 201 bp, Homo sapiens; identical to SEQ ID NO: 41609

SEQ ID NO: 41821 - DNA, 201 bp, Homo sapiens; identical to SEQ ID NO: 41610

SEQ ID NO: 41822 - DNA, 201 bp, Homo sapiens; identical to SEQ ID NO: 41611

SEQ ID NO: 41823 - DNA, 201 bp, Homo sapiens; identical to SEQ ID NO: 41612

SEQ ID NO: 41824 - DNA, 201 bp, Homo sapiens; identical to SEQ ID NO: 41613

SEQ ID NO: 41825 - DNA, 201 bp, Homo sapiens; identical to SEQ ID NO: 41614

SEQ ID NO: 41826 - DNA, 201 bp, Homo sapiens; identical to SEQ ID NO: 41615

SEQ ID NO: 41827 - DNA, 201 bp, Homo sapiens; identical to SEQ ID NO: 41616

SEQ ID NO: 41828 - DNA, 201 bp, Homo sapiens; identical to SEQ ID NO: 41617

SEQ ID NO: 41829 - DNA, 201 bp, Homo sapiens; identical to SEQ ID NO: 41618

SEQ ID NO: 41830 - DNA, 201 bp, Homo sapiens; identical to SEQ ID NO: 41620

SEQ ID NO: 41831 - DNA, 151 bp, Homo sapiens
acatcgggaagccggaattacttgcagggctaacctagtgcctatagctawggcaggtacctgcatccttgtttttgtttagtggatcctctatccttcagagactctggaacccctgtggtcttctcttcatctaatgaccctgagggga

SEQ ID NO: 41832 - DNA, 201 bp, Homo sapiens
cttgcagggctaacctagtgcctatagctaaggcaggtacctgcatccttgtttttgtttagtggatcctctatccttcagagactctggaacccctgtgstcttctcttcatctaatgaccctgaggggatggagttttcaagtccttccagagaggaatgtcccaagcctttgagtagggtaagcatcatggctggcag

SEQ ID NO: 41833 - DNA, 201 bp, Homo sapiens
gctaacctagtgcctatagctaaggcaggtacctgcatccttgtttttgtttagtggatcctctatccttcagagactctggaacccctgtggtcttctcytcatctaatgaccctgaggggatggagttttcaagtccttccagagaggaatgtcccaagcctttgagtagggtaagcatcatggctggcagcctcacag

SEQ ID NO: 41834 - DNA, 201 bp, Homo sapiens; identical to SEQ ID NO: 41624

SEQ ID NO: 41835 - DNA, 201 bp, Homo sapiens
agtgcctatagctaaggcaggtacctgcatccttgtttttgtttagtggatcctctatccttcagagactctggaacccctgtggtcttctcttcatctartgaccctgaggggatggagttttcaagtccttccagagaggaatgtcccaagcctttgagtagggtaagcatcatggctggcagcctcacaggattgctt

SEQ ID NO: 41836 - DNA, 201 bp, Homo sapiens
taaggcaggtacctgcatccttgtttttgtttagtggatcctctatccttcagagactctggaacccctgtggtcttctcttcatctaatgaccctgaggkgatggagttttcaagtccttccagagaggaatgtcccaagcctttgagtagggtaagcatcatggctggcagcctcacaggattgcttctacttcaggca

SEQ ID NO: 41837 - DNA, 201 bp, Homo sapiens; identical to SEQ ID NO: 41627

SEQ ID NO: 41838 - DNA, 201 bp, Homo sapiens; identical to SEQ ID NO: 41628

SEQ ID NO: 41839 - DNA, 201 bp, Homo sapiens; identical to SEQ ID NO: 41629

SEQ ID NO: 41840 - DNA, 201 bp, Homo sapiens; identical to SEQ ID NO: 41630

SEQ ID NO: 41841 - DNA, 201 bp, Homo sapiens; identical to SEQ ID NO: 41631

SEQ ID NO: 41842 - DNA, 201 bp, Homo sapiens; identical to SEQ ID NO: 41632

SEQ ID NO: 41843 - DNA, 201 bp, Homo sapiens; identical to SEQ ID NO: 41633

SEQ ID NO: 41844 - DNA, 201 bp, Homo sapiens; identical to SEQ ID NO: 41634

SEQ ID NO: 41845 - DNA, 201 bp, Homo sapiens; identical to SEQ ID NO: 41636

SEQ ID NO: 41846 - DNA, 201 bp, Homo sapiens; identical to SEQ ID NO: 41637

SEQ ID NO: 41847 - DNA, 201 bp, Homo sapiens; identical to SEQ ID NO: 41638

SEQ ID NO: 41848 - DNA, 201 bp, Homo sapiens; identical to SEQ ID NO: 41639

SEQ ID NO: 41849 - DNA, 201 bp, Homo sapiens; identical to SEQ ID NO: 41640

SEQ ID NO: 41850 - DNA, 201 bp, Homo sapiens; identical to SEQ ID NO: 41641

SEQ ID NO: 41851 - DNA, 201 bp, Homo sapiens; identical to SEQ ID NO: 41642

SEQ ID NO: 41852 - DNA, 201 bp, Homo sapiens; identical to SEQ ID NO: 41745

SEQ ID NO: 41853 - DNA, 201 bp, Homo sapiens; identical to SEQ ID NO: 41643

SEQ ID NO: 41854 - DNA, 201 bp, Homo sapiens; identical to SEQ ID NO: 41644

SEQ ID NO: 41855 - DNA, 201 bp, Homo sapiens; identical to SEQ ID NO: 41645

SEQ ID NO: 41856 - DNA, 201 bp, Homo sapiens; identical to SEQ ID NO: 41646

SEQ ID NO: 41857 - DNA, 201 bp, Homo sapiens; identical to SEQ ID NO: 41647

SEQ ID NO: 41858 - DNA, 201 bp, Homo sapiens; identical to SEQ ID NO: 41648

SEQ ID NO: 41859 - DNA, 201 bp, Homo sapiens; identical to SEQ ID NO: 41649

SEQ ID NO: 41860 - DNA, 201 bp, Homo sapiens; identical to SEQ ID NO: 41650

SEQ ID NO: 41861 - DNA, 201 bp, Homo sapiens; identical to SEQ ID NO: 41651

SEQ ID NO: 41862 - DNA, 201 bp, Homo sapiens; identical to SEQ ID NO: 41652

SEQ ID NO: 41863 - DNA, 201 bp, Homo sapiens; identical to SEQ ID NO: 41756

SEQ ID NO: 41864 - DNA, 201 bp, Homo sapiens; identical to SEQ ID NO: 41653

SEQ ID NO: 41865 - DNA, 201 bp, Homo sapiens; identical to SEQ ID NO: 41654

SEQ ID NO: 41866 - DNA, 201 bp, Homo sapiens; identical to SEQ ID NO: 41655

SEQ ID NO: 41867 - DNA, 201 bp, Homo sapiens; identical to SEQ ID NO: 41656

SEQ ID NO: 41868 - DNA, 201 bp, Homo sapiens; identical to SEQ ID NO: 41657

SEQ ID NO: 41869 - DNA, 201 bp, Homo sapiens; identical to SEQ ID NO: 41658

SEQ ID NO: 41870 - DNA, 201 bp, Homo sapiens; identical to SEQ ID NO: 41659

SEQ ID NO: 41871 - DNA, 201 bp, Homo sapiens; identical to SEQ ID NO: 41660

SEQ ID NO: 41872 - DNA, 201 bp, Homo sapiens; identical to SEQ ID NO: 41661

SEQ ID NO: 41873 - DNA, 201 bp, Homo sapiens; identical to SEQ ID NO: 41662

SEQ ID NO: 41874 - DNA, 201 bp, Homo sapiens; identical to SEQ ID NO: 41663

SEQ ID NO: 41875 - DNA, 201 bp, Homo sapiens; identical to SEQ ID NO: 41768

SEQ ID NO: 41876 - DNA, 201 bp, Homo sapiens; identical to SEQ ID NO: 41664

SEQ ID NO: 41877 - DNA, 201 bp, Homo sapiens; identical to SEQ ID NO: 41665

SEQ ID NO: 41878 - DNA, 201 bp, Homo sapiens; identical to SEQ ID NO: 41667

SEQ ID NO: 41879 - DNA, 201 bp, Homo sapiens; identical to SEQ ID NO: 41668

SEQ ID NO: 41880 - DNA, 201 bp, Homo sapiens; identical to SEQ ID NO: 41669

SEQ ID NO: 41881 - DNA, 201 bp, Homo sapiens; identical to SEQ ID NO: 41670

SEQ ID NO: 41882 - DNA, 201 bp, Homo sapiens; identical to SEQ ID NO: 41671

SEQ ID NO: 41883 - DNA, 201 bp, Homo sapiens; identical to SEQ ID NO: 41672

SEQ ID NO: 41884 - DNA, 201 bp, Homo sapiens; identical to SEQ ID NO: 41673

SEQ ID NO: 41885 - DNA, 201 bp, Homo sapiens; identical to SEQ ID NO: 41674

SEQ ID NO: 41886 - DNA, 201 bp, Homo sapiens; identical to SEQ ID NO: 41675

SEQ ID NO: 41887 - DNA, 201 bp, Homo sapiens; identical to SEQ ID NO: 41676

SEQ ID NO: 41888 - DNA, 201 bp, Homo sapiens; identical to SEQ ID NO: 41678

SEQ ID NO: 41889 - DNA, 201 bp, Homo sapiens; identical to SEQ ID NO: 41679

SEQ ID NO: 41890 - DNA, 201 bp, Homo sapiens; identical to SEQ ID NO: 41680

SEQ ID NO: 41891 - DNA, 201 bp, Homo sapiens; identical to SEQ ID NO: 41681

SEQ ID NO: 41892 - DNA, 201 bp, Homo sapiens; identical to SEQ ID NO: 41682

SEQ ID NO: 41893 - DNA, 201 bp, Homo sapiens; identical to SEQ ID NO: 41683

SEQ ID NO: 41894 - DNA, 201 bp, Homo sapiens; identical to SEQ ID NO: 41684

SEQ ID NO: 41895 - DNA, 201 bp, Homo sapiens; identical to SEQ ID NO: 41685

SEQ ID NO: 41896 - DNA, 201 bp, Homo sapiens; identical to SEQ ID NO: 41686

SEQ ID NO: 41897 - DNA, 201 bp, Homo sapiens; identical to SEQ ID NO: 41687

SEQ ID NO: 41898 - DNA, 201 bp, Homo sapiens; identical to SEQ ID NO: 41688

SEQ ID NO: 41899 - DNA, 201 bp, Homo sapiens; identical to SEQ ID NO: 41689

SEQ ID NO: 41900 - DNA, 201 bp, Homo sapiens; identical to SEQ ID NO: 41690

SEQ ID NO: 41901 - DNA, 201 bp, Homo sapiens; identical to SEQ ID NO: 41691

SEQ ID NO: 41902 - DNA, 201 bp, Homo sapiens; identical to SEQ ID NO: 41692

SEQ ID NO: 41903 - DNA, 201 bp, Homo sapiens; identical to SEQ ID NO: 41693

SEQ ID NO: 41904 - DNA, 201 bp, Homo sapiens; identical to SEQ ID NO: 41694

SEQ ID NO: 41905 - DNA, 201 bp, Homo sapiens; identical to SEQ ID NO: 41695

SEQ ID NO: 41906 - DNA, 201 bp, Homo sapiens; identical to SEQ ID NO: 41697

SEQ ID NO: 41907 - DNA, 201 bp, Homo sapiens; identical to SEQ ID NO: 41698

SEQ ID NO: 41908 - DNA, 201 bp, Homo sapiens; identical to SEQ ID NO: 41699

SEQ ID NO: 41909 - DNA, 201 bp, Homo sapiens; identical to SEQ ID NO: 41696

SEQ ID NO: 41910 - DNA, 201 bp, Homo sapiens; identical to SEQ ID NO: 41700

SEQ ID NO: 41911 - DNA, 201 bp, Homo sapiens; identical to SEQ ID NO: 41805

SEQ ID NO: 41912 - DNA, 201 bp, Homo sapiens; identical to SEQ ID NO: 41701

SEQ ID NO: 41913 - DNA, 201 bp, Homo sapiens
agaggaagataccaagctcaagatacccctgattcaccgagccctgcagttggcccagcgtcccgtttcactccttgccagcccctggacatcacccactyggctcaagaccaagggagcggggaatgggaaggggccactcaagggacagcccagagacatctaccaccagacctgggccagatacattgtgaagttcct

SEQ ID NO: 41914 - DNA, 201 bp, Homo sapiens
ggacagcccagagacatctaccaccagacctgggccagatacattgtgaagttcctggatgcctatgctgagcacaagttacagttctgggcagtgacagstgaaaatgagccttctgctgggctgttgagtggataccccttccagtgcctgggcttcacccctgaacatcagcgagacttcattgcccgtgacctaggt

SEQ ID NO: 41915 - DNA, 201 bp, Homo sapiens
gtacagccacagcatcatcacagtaagccaccccagtctcccttcctgcaaaggagacctcagacccattagtagtctcaccaaagactgatagaagcccktcctgtccagctttccccaggtagcctgcccttttgggcaactctggggaaccatgattccctgtcttgcctttccttcacaggtctgcacacctcattg

SEQ ID NO: 41916 - DNA, 201 bp, Homo sapiens
agagaggaatgtcccaagccttcgggtagggtaagcatcatggctggcagcctcacaggattgcttctacttcaggcagtgtcgtgggcatcagatgagtrccttcagccgctacaagagcagaagcagtgggcattggatggagctgagtacaggaccatacaggctaattgcaccggcacaggaatcggatataacatc

SEQ ID NO: 41917 - DNA, 201 bp, Homo sapiens
ccagcgtcccgtttcactccttgccagcccctggacatcacccacttggctcaagaccaagggagcggggaatgggaaggggccactcaagggacagcccrgagacatctaccaccagacctgggccagatacattgtgaagttcctggatgcctatgctgagcacaagttacagttctgggcagtgacagctgaaaatga

SEQ ID NO: 41918 - DNA, 201 bp, Homo sapiens
gctggcagcctcacaggattgcttctacttcaggcagtgtcgtgggcatcagatgagtgccttcagccgctacaagagcagaagcagtgggcattggatgragctgagtacaggaccatacaggctaattgcaccggcacaggaatcggatataacatcatctgggtacccatggccagctgtgacttctccatccgcacc

SEQ ID NO: 41919 - DNA, 201 bp, Homo sapiens
ctcccttcctgcaaaggagacctcagacccattagtagtctcaccaaagactgatagaagcccttcctgtccagctttccccaggtagcctgcccttttgsgcaactctggggaaccatgattccctgtcttgcctttccttcacaggtctgcacacctcattgccccttttgcaactactgaggcacttgcagctgcctc

SEQ ID NO: 41920 - DNA, 201 bp, Homo sapiens; identical to SEQ ID NO: 41913

SEQ ID NO: 41921 - DNA, 201 bp, Homo sapiens; identical to SEQ ID NO: 41914

SEQ ID NO: 41922 - DNA, 201 bp, Homo sapiens
tgaagagctttgagattttgaagaaacaggaaccatgaaatttgctttgcaactgtttgcaacctttaaggaagactgaaaaggcattcctgaagcatgtrccttcagccgctacaagagcagaagcagtgggcattggatggagctgagtacaggaccatacaggctaattgcaccggcacaggaatcggatataacatc

SEQ ID NO: 41923 - DNA, 201 bp, Homo sapiens; identical to SEQ ID NO: 41917

SEQ ID NO: 41924 - DNA, 201 bp, Homo sapiens
tgctttgcaactgtttgcaacctttaaggaagactgaaaaggcattcctgaagcatgtgccttcagccgctacaagagcagaagcagtgggcattggatgragctgagtacaggaccatacaggctaattgcaccggcacaggaatcggatataacatcatctgggtacccatggccagctgtgacttctccatccgcacc

SEQ ID NO: 41925 - DNA, 167 bp, Homo sapiens
ggttctcactatgagcccaggctcatcttgaagttctgggctcaagcaatcctcttaccttggcttyccaaacacaggaattgtgcccaaaggctaggataaggaattaaagatgcatgccaagaaatacccacaaacattaattataaaagggagactatactaat

SEQ ID NO: 41926 - DNA, 179 bp, Homo sapiens
gtaggaccagaggctggaggtggaagtgccacctggtcctgcctgataaaaaatgctgaatcagccaggcacggtggcccacacacctgtaatcccaccaytttgggaggctgaggtgggcggatcacctgagcctcccaaaatgctgggattacaggcatgagccactgtgcccagcc

SEQ ID NO: 41927 - DNA, 201 bp, Homo sapiens
cgatggcatcgtcctggtgcagtgcactgagcatctgctcaagcacatgacgcagagcagcaggaagctgatccgagcagactccgtcagcgagctccccrccccccggaggctgcggtggaaatgctccccggaaattcaaggccacttagcctcctcggcagaaaaacttcaacgaatagtaaagaaccttgacttcat

SEQ ID NO: 41928 - DNA, 201 bp, Homo sapiens
cgtcctggtgcagtgcactgagcatctgctcaagcacatgacgcagagcagcaggaagctgatccgagcagactccgtcagcgagctccccgccccccggrggctgcggtggaaatgctccccggaaattcaaggccacttagcctcctcggcagaaaaacttcaacgaatagtaaagaaccttgacttcattgtctataa

SEQ ID NO: 41929 - DNA, 201 bp, Homo sapiens
aaaaggtcccccgtaagatggcagcaaaaactcccagcagtgaggagtctgggctgcccaaactgcccgtgcccccgctgcagcagaccctggccacgtayctgcagtgcatgcgacacttggtgtctgaggagcagttcaggaagagccaggccattgtgcagcagtttggggcccctggtggcctcggcgagaccctgc

SEQ ID NO: 41930 - DNA, 201 bp, Homo sapiens
agcaggaagctgatccgagcagactccgtcagcgagctccccgccccccggaggctgcggtggaaatgctccccggaaattcaaggccacttagcctcctyggcagaaaaacttcaacgaatagtaaagaaccttgacttcattgtctataagtttgacaactatgggaaaacattcattaagaagcagaaatgcagccct

SEQ ID NO: 41931 - DNA, 201 bp, Homo sapiens
agaagcagaaatgcagccctgatgccttcatccaggtggccctccagctggccttctacaggctccatcgaagactggtgcccacctacgagagcgcgtcyatccgccgattccaggagggacgcgtggacaacatcagatcggccactccagaggcactggcttttgtgagagccgtgactgaccacaaggctgctgtgc

SEQ ID NO: 41932 - DNA, 201 bp, Homo sapiens
ctccgtcagcgagctccccgccccccggaggctgcggtggaaatgctccccggaaattcaaggccacttagcctcctcggcagaaaaacttcaacgaataktaaagaaccttgacttcattgtctataagtttgacaactatgggaaaacattcattaagaagcagaaatgcagccctgatgccttcatccaggtggccct

SEQ ID NO: 41933 - DNA, 201 bp, Homo sapiens
tctcagtgagggggatctgttcactcagttgagaaagatagtcaaaatggcttccaacgaggacgagcgtttgcctccaattggcctgctgacgtctgacrggaggagcgagtgggccgaggccaggacggtcctcgtgaaagactccaccaaccgggactcgctggacatgattgagcgctgcatctgccttgtatgcct

SEQ ID NO: 41934 - DNA, 201 bp, Homo sapiens
cagaaatgcagccctgatgccttcatccaggtggccctccagctggccttctacaggctccatcgaagactggtgcccacctacgagagcgcgtccatccrccgattccaggagggacgcgtggacaacatcagatcggccactccagaggcactggcttttgtgagagccgtgactgaccacaaggctgctgtgccagct

SEQ ID NO: 41935 - DNA, 201 bp, Homo sapiens
gagaccctgcagcagaaactcctggagcggcaggagaagacagccaactgggtgtctgagtactggctgaatgacatgtatctcaacaaccgcctggcccygcctgtcaactccagccctgccgtgatctttgctcggcagcacttccctggcaccgatgaccagctgaggtttgcagccagcctcatctctggtgtactc

SEQ ID NO: 41936 - DNA, 201 bp, Homo sapiens
gaccctgcagcagaaactcctggagcggcaggagaagacagccaactgggtgtctgagtactggctgaatgacatgtatctcaacaaccgcctggccctgsctgtcaactccagccctgccgtgatctttgctcggcagcacttccctggcaccgatgaccagctgaggtttgcagccagcctcatctctggtgtactcag

SEQ ID NO: 41937 - DNA, 190 bp, Homo sapiens
cccgccccgttgaggctttgagaaaggagtaggagccgagcattccggcagaggaagaaaaacggcccatcttttagagtccgacctctrgaaattcgggtggccgcggggacccgggcgacgtcggaggccctgccgggaacccaggctgcagcccccacccccgcgctgcgacacgccccccacccct

SEQ ID NO: 41938 - DNA, 201 bp, Homo sapiens
caatactatgggctcttctcctcctaccggctccccggccatacccaggacacgctggtggctcagaacagcagcatcatgccggagcctgagcacgtcaycgtagcctgctgcaatcagttctttgtcttggatgttgtcattaatttccgccgtctcagtgagggggatctgttcactcagttgagaaagatagtcaaa

SEQ ID NO: 41939 - DNA, 138 bp, Homo sapiens
cccgccccgttgaggctttgagaaaggagtaggagcckagcattccggcagaggaagaaaaacggcccatcttttagagtccgacctctggaaattcgggtggccgcggggacccgggcgacgtcggaggccctgccg

SEQ ID NO: 41940 - DNA, 201 bp, Homo sapiens
ggccgaggcagcagagccgaggagagcaggtccacacctctgcatccctgcaccaggactcaccaagacgcccatcctggaaaaggtcccccgtaagatgrcagcaaaaactcccagcagtgaggagtctgggctgcccaaactgcccgtgcccccgctgcagcagaccctggccacgtacctgcagtgcatgcgacactt

SEQ ID NO: 41941 - DNA, 201 bp, Homo sapiens
gaaaggagtaggagccgagcattccggcagaggaagaaaaacggcccatcttttagagtccgacctctggaaattcgggtggccgcggggacccgggcgasgtcggaggccctgccgggaacccaggctgcagcccccacccccgcgctgcgacacgccccccaccccttccggctcacacccccgcccacactcctgagt

SEQ ID NO: 41942 - DNA, 201 bp, Homo sapiens
ataagtttgacaactatgggaaaacattcattaagaagcagaaatgcagccctgatgccttcatccaggtggccctccagctggccttctacaggctccaycgaagactggtgcccacctacgagagcgcgtccatccgccgattccaggagggacgcgtggacaacatcagatcggccactccagaggcactggcttttg

SEQ ID NO: 41943 - DNA, 201 bp, Homo sapiens
cagcccctttgcatgaagcaatactatgggctcttctcctcctaccggctccccggccatacccaggacacgctggtggctcagaacagcagcatcatgcyggagcctgagcacgtcatcgtagcctgctgcaatcagttctttgtcttggatgttgtcattaatttccgccgtctcagtgagggggatctgttcactcag

SEQ ID NO: 41944 - DNA, 201 bp, Homo sapiens
ccactagccaggtgcccacaaccacggagatgttctgctgctatggtcctgtggtcccaaatgggtatggtgcctgctacaacccccagccagagaccatycttttctgcatctctagctttcacagctgcaaagagacttcttctagcaagtttgcaaaagctgtggaagaaagcctcattgacatgagagacctctgca

SEQ ID NO: 41945 - DNA, 201 bp, Homo sapiens; identical to SEQ ID NO: 41927

SEQ ID NO: 41946 - DNA, 201 bp, Homo sapiens; identical to SEQ ID NO: 41928

SEQ ID NO: 41947 - DNA, 201 bp, Homo sapiens; identical to SEQ ID NO: 41929

SEQ ID NO: 41948 - DNA, 201 bp, Homo sapiens; identical to SEQ ID NO: 41930

SEQ ID NO: 41949 - DNA, 201 bp, Homo sapiens; identical to SEQ ID NO: 41931

SEQ ID NO: 41950 - DNA, 201 bp, Homo sapiens; identical to SEQ ID NO: 41932

SEQ ID NO: 41951 - DNA, 201 bp, Homo sapiens; identical to SEQ ID NO: 41933

SEQ ID NO: 41952 - DNA, 201 bp, Homo sapiens; identical to SEQ ID NO: 41934

SEQ ID NO: 41953 - DNA, 201 bp, Homo sapiens; identical to SEQ ID NO: 41935

SEQ ID NO: 41954 - DNA, 201 bp, Homo sapiens; identical to SEQ ID NO: 41936

SEQ ID NO: 41955 - DNA, 201 bp, Homo sapiens; identical to SEQ ID NO: 41938

SEQ ID NO: 41956 - DNA, 201 bp, Homo sapiens; identical to SEQ ID NO: 41942

SEQ ID NO: 41957 - DNA, 201 bp, Homo sapiens; identical to SEQ ID NO: 41943

SEQ ID NO: 41958 - DNA, 201 bp, Homo sapiens; identical to SEQ ID NO: 41944

SEQ ID NO: 41959 - DNA, 201 bp, Homo sapiens
tcaaggggtgcggccctctcagaaggaaggtccacacctctgcatccctgcaccaggactcaccaagacgcccatcctggaaaaggtcccccgtaagatgrcagcaaaaactcccagcagtgaggagtctgggctgcccaaactgcccgtgcccccgctgcagcagaccctggccacgtacctgcagtgcatgcgacactt

SEQ ID NO: 41960 - DNA, 201 bp, Homo sapiens; identical to SEQ ID NO: 41927

SEQ ID NO: 41961 - DNA, 201 bp, Homo sapiens; identical to SEQ ID NO: 41928

SEQ ID NO: 41962 - DNA, 201 bp, Homo sapiens; identical to SEQ ID NO: 41929

SEQ ID NO: 41963 - DNA, 201 bp, Homo sapiens; identical to SEQ ID NO: 41930

SEQ ID NO: 41964 - DNA, 201 bp, Homo sapiens; identical to SEQ ID NO: 41931

SEQ ID NO: 41965 - DNA, 201 bp, Homo sapiens; identical to SEQ ID NO: 41932

SEQ ID NO: 41966 - DNA, 201 bp, Homo sapiens; identical to SEQ ID NO: 41933

SEQ ID NO: 41967 - DNA, 201 bp, Homo sapiens; identical to SEQ ID NO: 41934

SEQ ID NO: 41968 - DNA, 201 bp, Homo sapiens; identical to SEQ ID NO: 41935

SEQ ID NO: 41969 - DNA, 201 bp, Homo sapiens; identical to SEQ ID NO: 41936

SEQ ID NO: 41970 - DNA, 201 bp, Homo sapiens; identical to SEQ ID NO: 41938

SEQ ID NO: 41971 - DNA, 201 bp, Homo sapiens; identical to SEQ ID NO: 41942

SEQ ID NO: 41972 - DNA, 201 bp, Homo sapiens; identical to SEQ ID NO: 41943

SEQ ID NO: 41973 - DNA, 201 bp, Homo sapiens; identical to SEQ ID NO: 41944

SEQ ID NO: 41974 - DNA, 201 bp, Homo sapiens
atgcagagatgaagcactgagcacagtaggtccacacctctgcatccctgcaccaggactcaccaagacgcccatcctggaaaaggtcccccgtaagatgrcagcaaaaactcccagcagtgaggagtctgggctgcccaaactgcccgtgcccccgctgcagcagaccctggccacgtacctgcagtgcatgcgacactt

SEQ ID NO: 41975 - DNA, 119 bp, Homo sapiens
atgtggccggaatgcagaratgaagcactgagcacagtaggtccacacctctgcatccctgcaccaggactcaccaagacgcccatcctggaaaaggtcccccgtaagatggcagcaaa

SEQ ID NO: 41976 - DNA, 201 bp, Homo sapiens; identical to SEQ ID NO: 41927

SEQ ID NO: 41977 - DNA, 201 bp, Homo sapiens; identical to SEQ ID NO: 41928

SEQ ID NO: 41978 - DNA, 201 bp, Homo sapiens; identical to SEQ ID NO: 41929

SEQ ID NO: 41979 - DNA, 201 bp, Homo sapiens; identical to SEQ ID NO: 41930

SEQ ID NO: 41980 - DNA, 201 bp, Homo sapiens; identical to SEQ ID NO: 41931

SEQ ID NO: 41981 - DNA, 201 bp, Homo sapiens; identical to SEQ ID NO: 41932

SEQ ID NO: 41982 - DNA, 201 bp, Homo sapiens; identical to SEQ ID NO: 41933

SEQ ID NO: 41983 - DNA, 201 bp, Homo sapiens; identical to SEQ ID NO: 41934

SEQ ID NO: 41984 - DNA, 201 bp, Homo sapiens; identical to SEQ ID NO: 41935

SEQ ID NO: 41985 - DNA, 201 bp, Homo sapiens; identical to SEQ ID NO: 41936

SEQ ID NO: 41986 - DNA, 201 bp, Homo sapiens
gctaggggcaggaggcatgggcgggacagtgttctgtgcccccttctagagcctaaatttgttgcccgagttcctccgggaagcgctccgggtagattctsggggccgggagctgagatccctgggcggggagcgggggaagggatggggctgaggacagcgaagaagagggggcttgggggaggggggaaatggaagaga

SEQ ID NO: 41987 - DNA, 201 bp, Homo sapiens; identical to SEQ ID NO: 41938

SEQ ID NO: 41988 - DNA, 201 bp, Homo sapiens; identical to SEQ ID NO: 41940

SEQ ID NO: 41989 - DNA, 201 bp, Homo sapiens
gggggaaatggaagagagaggagggaggaggtacaagaggaaggagagaagtgcggccagcttgctttctccagtcgggtggccgcggggacccgggcgasgtcggaggccctgccgggaacccaggctgcagcccccacccccgcgctgcgacacgccccccaccccttccggctcacacccccgcccacactcctgagt

SEQ ID NO: 41990 - DNA, 201 bp, Homo sapiens; identical to SEQ ID NO: 41942

SEQ ID NO: 41991 - DNA, 201 bp, Homo sapiens; identical to SEQ ID NO: 41943

SEQ ID NO: 41992 - DNA, 201 bp, Homo sapiens; identical to SEQ ID NO: 41944

SEQ ID NO: 41993 - DNA, 201 bp, Homo sapiens; identical to SEQ ID NO: 41927

SEQ ID NO: 41994 - DNA, 201 bp, Homo sapiens; identical to SEQ ID NO: 41928

SEQ ID NO: 41995 - DNA, 201 bp, Homo sapiens; identical to SEQ ID NO: 41929

SEQ ID NO: 41996 - DNA, 201 bp, Homo sapiens; identical to SEQ ID NO: 41930

SEQ ID NO: 41997 - DNA, 201 bp, Homo sapiens; identical to SEQ ID NO: 41931

SEQ ID NO: 41998 - DNA, 201 bp, Homo sapiens; identical to SEQ ID NO: 41932

SEQ ID NO: 41999 - DNA, 201 bp, Homo sapiens; identical to SEQ ID NO: 41933

SEQ ID NO: 42000 - DNA, 201 bp, Homo sapiens; identical to SEQ ID NO: 41934

SEQ ID NO: 42001 - DNA, 201 bp, Homo sapiens; identical to SEQ ID NO: 41935

SEQ ID NO: 42002 - DNA, 201 bp, Homo sapiens; identical to SEQ ID NO: 41936

SEQ ID NO: 42003 - DNA, 179 bp, Homo sapiens
gaggctttgagaaaggagtaggagccgagcattccggcagaggaagaaaaacggcccatcttttagagtccgacctctrgaaatgtccacacctctgcatccctgcaccaggactcaccaagacgcccatcctggaaaaggtcccccgtaagatggcagcaaaaactcccagcagtgag

SEQ ID NO: 42004 - DNA, 201 bp, Homo sapiens; identical to SEQ ID NO: 41938

SEQ ID NO: 42005 - DNA, 127 bp, Homo sapiens
gaggctttgagaaaggagtaggagcckagcattccggcagaggaagaaaaacggcccatcttttagagtccgacctctggaaatgtccacacctctgcatccctgcaccaggactcaccaagacgcc

SEQ ID NO: 42006 - DNA, 201 bp, Homo sapiens
ccatcttttagagtccgacctctggaaatgtccacacctctgcatccctgcaccaggactcaccaagacgcccatcctggaaaaggtcccccgtaagatgrcagcaaaaactcccagcagtgaggagtctgggctgcccaaactgcccgtgcccccgctgcagcagaccctggccacgtacctgcagtgcatgcgacactt

SEQ ID NO: 42007 - DNA, 201 bp, Homo sapiens; identical to SEQ ID NO: 41942

SEQ ID NO: 42008 - DNA, 201 bp, Homo sapiens; identical to SEQ ID NO: 41943

SEQ ID NO: 42009 - DNA, 201 bp, Homo sapiens; identical to SEQ ID NO: 41944

SEQ ID NO: 42010 - DNA, 201 bp, Homo sapiens
atctcaaagccaagtgttttacagagaagagaagatagaaaaggcatattatctaggagtggaaaagaattttatgctgaaaatgttgaagagagaattcraaatcaaattcaacattccacctaggaggcttccatctctgcttaggagctgagtaatggaggtgattggtgtaagtgttcagtacctatgaagacctaa

SEQ ID NO: 42011 - DNA, 201 bp, Homo sapiens
tctcaaagccaagtgttttacagagaagagaagatagaaaaggcatattatctaggagtggaaaagaattttatgctgaaaatgttgaagagagaattcawaatcaaattcaacattccacctaggaggcttccatctctgcttaggagctgagtaatggaggtgattggtgtaagtgttcagtacctatgaagacctaac

SEQ ID NO: 42012 - DNA, 201 bp, Homo sapiens
ctcactgtcagccctgctttttgcaaagctactgggatggcataggcaggtccaatgcccatgatgtcaggtgggaccccaaccactgcataagacctcakgaccccaaggatgggaaggcccaactcttctgccttggacctccgggccagcaggatggccagctgtggtagaaccatctttcttgaaggcaggcttcag

SEQ ID NO: 42013 - DNA, 201 bp, Homo sapiens
accccaaccactgcataagacctcaggaccccaaggatgggaaggcccaactcttctgccttggacctccgggccagcaggatggccagctgtggtagaamcatctttcttgaaggcaggcttcagtttggccaggccctccatggtggtgctggggcggataccctcatcctgggtcacagtgatgctcctcttggtgcc

SEQ ID NO: 42014 - DNA, 201 bp, Homo sapiens
gggaaggcccaactcttctgccttggacctccgggccagcaggatggccagctgtggtagaaccatctttcttgaaggcaggcttcagtttggccaggccytccatggtggtgctggggcggataccctcatcctgggtcacagtgatgctcctcttggtgcccttgtcatcatggaccgtggtggtcacaggcacaatct

SEQ ID NO: 42015 - DNA, 165 bp, Homo sapiens
tgaaggcaggcttcagtttggccaggccctccatggtggtgctggggcggataccctcatcctgggtcacagtgatgctcctcttggtgcccttgtcatcmtggaccgtggtggtcacaggcacaatctcagcttggaaacagcccttgctctgggctcttgctg

SEQ ID NO: 42016 - DNA, 180 bp, Homo sapiens
tgacccaggctgcttttatcttgcacagctaaagagggtctgatgggtggctcaacaccccacccactcctataccatgwcatcagtgttcacattttccaaatgagttgaagtgccttgatctgtccactgccaccaccaccagtgctgagttttcccatgtggttttgcttttgtggt

SEQ ID NO: 42017 - DNA, 201 bp, Homo sapiens
ttggacacaagccttctccaggtgtggttcccaacaaaggtcagtttcccttggctgtgggagcccaggagttgtttctgtgcactggtcctatgtgccgytatgctgaagacctggcccccatgttgaaggtcatggcaggacctgggatcaaaaggttaaaactagacacaaaggtacatttaaaagacttaaaatttt

SEQ ID NO: 42018 - DNA, 201 bp, Homo sapiens
cgatggcaccttcatttaccgcccgcattcagttgttcctcttgcgggcgctaggctttctcataggcttagtaggccgagcagctttagtcttagggggyccaaagtttgcctcaaagacccctcggccggtgactgaaccattgcttctgctttcggggatgcagctggccaagctgatccgacagagaaaggtgaaat

SEQ ID NO: 42019 - DNA, 201 bp, Homo sapiens
tgcgtaaagagctggtggatatgctaggtgatgatggtgtgttcttatatccctcacatcccacagtggcacctaagcatcatgtccctctaacacggccyttcaactttgcttacacaggtgtcttcagtgccctgggtttgcctgtgacccaatgcccactgggactgaatgccaaaggactccctttaggcatccagg

SEQ ID NO: 42020 - DNA, 201 bp, Homo sapiens
ggctgggtctgtccaggaaagttttaggaggaccttctgcaaggttaatgtgtgtgtgtgtttgtgttcgtgtggtggtgtttctattaattgggtgaaaycaagcaccagcagacaagcagagaaacaactggggaatttattgactcatttagttattctttctacttttatttccttctctaactgttggtcttacta

SEQ ID NO: 42021 - DNA, 201 bp, Homo sapiens; identical to SEQ ID NO: 42017

SEQ ID NO: 42022 - DNA, 201 bp, Homo sapiens; identical to SEQ ID NO: 42018

SEQ ID NO: 42023 - DNA, 201 bp, Homo sapiens; identical to SEQ ID NO: 42019

SEQ ID NO: 42024 - DNA, 201 bp, Homo sapiens; identical to SEQ ID NO: 42020

SEQ ID NO: 42025 - DNA, 201 bp, Homo sapiens
attaactctaaagcctcaccctaaggatgatgggcaatcgagttatgctctgaaaccaggagagatcattccagcagagagaagtgctgataggagtcatytggaaataagaagaagtgccttttgcctcccgccatgatcctgaggactccccagccatgtggaactgtaagtccaattaaacctcttttcttcccagtc

SEQ ID NO: 42026 - DNA, 140 bp, Homo sapiens
ttgatcatgtggcctctctgttgctaatctctcctggaaacatctgccacatttagtgtgtgtatgtgtattcattctttctcataacttcttaaagtttyttcccctcattattaaaatgaatttaccagtaagaatga

SEQ ID NO: 42027 - DNA, 140 bp, Homo sapiens; identical to SEQ ID NO: 42026

SEQ ID NO: 42028 - DNA, 201 bp, Homo sapiens
actgatctttttctaggggcctccagcccctggcaccacctagaggggaaagtgagtcacccaaaccattgcccctgggcttacgtcgctgtaagctcacrctggccctgttgtgccctctttagtcacagacagcgtgtgagctgactctgtccctttaatgcccaggctgagcccagtgcctccttgagtatctgctcc

SEQ ID NO: 42029 - DNA, 201 bp, Homo sapiens
ctcggcaaggggcagacaccctggccttcatgtctctcctggaggagaagttgctcccggtgctggtacatactttttggatagacaccaagaactacgtrgaagtgacccggaagtggtatgcagaggctatgccctttcccctcaacttcttcctgcctggccgcatgcagcggcagtacatggaacggctacagctgc

SEQ ID NO: 42030 - DNA, 201 bp, Homo sapiens
acaagatcatcacccaccttcgaaaagagaagtacaatgctgattatgatctgtcagctcggcaaggggcagacaccctggccttcatgtctctcctggargagaagttgctcccggtgctggtacatactttttggatagacaccaagaactacgtggaagtgacccggaagtggtatgcagaggctatgccctttcccc

SEQ ID NO: 42031 - DNA, 201 bp, Homo sapiens
caagagcccccagacctggcccaggcgcacaagaccccgctctccagagcctgccgcgccttcaggggttcggggctccacttggacgaggcgccgtgacwctccgaggcgcgccgggccgacagcgctgtcccgctacgtgggccacctctggatgggccggcggccgccctcccccgaggcccgcggcccagtcccccg

SEQ ID NO: 42032 - DNA, 201 bp, Homo sapiens
ctgcaacgggccactccagaacagtaccagatcctgaaggaaaattacgggcagaaggaggctgagaaagtggcccgggtgaaggcgctatatgaggagcwggatctgccagcagtgttcttgcaatatgaggaagacagttacagccacattatggctctcattgaacagtacgcagcacccctgcccccagccgtcttt

SEQ ID NO: 42033 - DNA, 201 bp, Homo sapiens
agagtctggctctttccagaatgtgcagggtggggtgctgggaggactcgctgcacggaaccaggacccaggggccaaaagcttaggatatatcaaaccckctaggtgggtgacaaaagacgctaaacgctgggggcgggtctgagctacgccacgcccatgcgcgaaggggtgcagctgcgcagcgcagggtaggttgtg

SEQ ID NO: 42034 - DNA, 201 bp, Homo sapiens
gctgccagccccctactgggcaccccgggagaggtggctgggttccctacggcggccctccctggtgcacgggtacccagtcctggcctggcacagtgccygctgctggtgccaagcgtggacagaggaacctcgagccctttgctcctccctcagaatgaacggagaccagaattcagatgtttatgcccaagaaaagca

SEQ ID NO: 42035 - DNA, 201 bp, Homo sapiens
ttctcccagatcgttagggtgctgactgaggatgagatggggcacccagagataggagatgctattgcccggctcaaggaggtcctggagtacaatgccaytggaggcaagtataaccggggtttgacggtggtagtagcattccgggagctggtggagccaaggaaacaggatgctgatagtctccagcgggcctggact

SEQ ID NO: 42036 - DNA, 201 bp, Homo sapiens
ggatctgccagcagtgttcttgcaatatgaggaagacagttacagccacattatggctctcattgaacagtacgcagcacccctgcccccagccgtctttytggggcttgcgcgcaaaatctacaagcggagaaagtgacctagagattgcaagggcggggagaggaggctctcaataaataatcgtgtaaccttcttgtg

SEQ ID NO: 42037 - DNA, 201 bp, Homo sapiens
cttctcccagatcgttagggtgctgactgaggatgagatggggcacccagagataggagatgctattgcccggctcaaggaggtcctggagtacaatgccrttggaggcaagtataaccggggtttgacggtggtagtagcattccgggagctggtggagccaaggaaacaggatgctgatagtctccagcgggcctggac

SEQ ID NO: 42038 - DNA, 201 bp, Homo sapiens
gcagaaggaggctgagaaagtggcccgggtgaaggcgctatatgaggagctggatctgccagcagtgttcttgcaatatgaggaagacagttacagccacrttatggctctcattgaacagtacgcagcacccctgcccccagccgtctttctggggcttgcgcgcaaaatctacaagcggagaaagtgacctagagattg

SEQ ID NO: 42039 - DNA, 201 bp, Homo sapiens; identical to SEQ ID NO: 42032

SEQ ID NO: 42040 - DNA, 201 bp, Homo sapiens; identical to SEQ ID NO: 42033

SEQ ID NO: 42041 - DNA, 201 bp, Homo sapiens; identical to SEQ ID NO: 42034

SEQ ID NO: 42042 - DNA, 201 bp, Homo sapiens; identical to SEQ ID NO: 42035

SEQ ID NO: 42043 - DNA, 201 bp, Homo sapiens; identical to SEQ ID NO: 42036

SEQ ID NO: 42044 - DNA, 201 bp, Homo sapiens; identical to SEQ ID NO: 42037

SEQ ID NO: 42045 - DNA, 201 bp, Homo sapiens; identical to SEQ ID NO: 42038

SEQ ID NO: 42046 - DNA, 201 bp, Homo sapiens; identical to SEQ ID NO: 42032

SEQ ID NO: 42047 - DNA, 201 bp, Homo sapiens; identical to SEQ ID NO: 42033

SEQ ID NO: 42048 - DNA, 201 bp, Homo sapiens
gagccgatcgcggagcggattctgcttttaggagtacccgccaacaagcgggaccgagcaggaatccgtatctgggaacaggtcctggagtacaatgccaytggaggcaagtataaccggggtttgacggtggtagtagcattccgggagctggtggagccaaggaaacaggatgctgatagtctccagcgggcctggact

SEQ ID NO: 42049 - DNA, 201 bp, Homo sapiens; identical to SEQ ID NO: 42036

SEQ ID NO: 42050 - DNA, 201 bp, Homo sapiens
agagccgatcgcggagcggattctgcttttaggagtacccgccaacaagcgggaccgagcaggaatccgtatctgggaacaggtcctggagtacaatgccrttggaggcaagtataaccggggtttgacggtggtagtagcattccgggagctggtggagccaaggaaacaggatgctgatagtctccagcgggcctggac

SEQ ID NO: 42051 - DNA, 201 bp, Homo sapiens; identical to SEQ ID NO: 42038

SEQ ID NO: 42052 - DNA, 201 bp, Homo sapiens
gggcggctgctgaggtgagggccgggccagaggagaggcatacccactggggcgtaggtctgggactccccctgtccgccctggcgcgacctcaggactckccgtgtcccctccgtgacccccgcggcccgggccgctctttgcatcttgtcttgcccacagctggcctcggccaggtccgagggcctggatgcgaccttg

SEQ ID NO: 42053 - DNA, 166 bp, Homo sapiens
gcgtccgcagcgggcggctgctgaggtgagggccgggccagaggagaggcatacccactggggcgyaggtctgggactccccctgtccgccctggcgcgacctcaggactctccgtgtcccctccgtgacccccgcggcccgggccgctctttgcatcttgtcttg

SEQ ID NO: 42054 - DNA, 184 bp, Homo sapiens
ctgctccaggcctcttgctaagccttctcctcactgccctttaggctcccagggccagaggagccagggactattttctgcaccagcccccagggctgccrcccctgttgtgtctttttttcagactcacagtggagcttccaggacccagaataaagccaatgatttacttgtttcacctgga

SEQ ID NO: 42055 - DNA, 201 bp, Homo sapiens
agcccactgcccctgagaagggcaaggagtaacccatggcctgcaccctcctgcagtgcagttgctgaggaactgagcagactctccagcagactctccarccctcttcctccttcctctgggggaggaggggttcctgagggacctgacttcccctgctccaggcctcttgctaagccttctcctcactgccctttaggc

SEQ ID NO: 42056 - DNA, 201 bp, Homo sapiens
agtggctctgggagcccactgcccctgagaagggcaaggagtaacccatggcctgcaccctcctgcagtgcagttgctgaggaactgagcagactctccakcagactctccagccctcttcctccttcctctgggggaggaggggttcctgagggacctgacttcccctgctccaggcctcttgctaagccttctcctcac

SEQ ID NO: 42057 - DNA, 201 bp, Homo sapiens
agcggctcctcttttgaggagctggacttggagggcgaggggcccttaggggagtcacggctggaccctgggactgagcccctggggactaccaagtggcyctgggagcccactgcccctgagaagggcaaggagtaacccatggcctgcaccctcctgcagtgcagttgctgaggaactgagcagactctccagcagact

SEQ ID NO: 42058 - DNA, 201 bp, Homo sapiens
agcgagcacagctacagcgagtcaggtgccagcggctcctcttttgaggagctggacttggagggcgaggggcccttaggggagtcacggctggaccctgrgactgagcccctggggactaccaagtggctctgggagcccactgcccctgagaagggcaaggagtaacccatggcctgcaccctcctgcagtgcagttgc

SEQ ID NO: 42059 - DNA, 201 bp, Homo sapiens
tgcccgcctggtgtttccagtgactactgaccctctggtgccagcaggccccgtcagttcctcttccacggctacctcagtcactgccagcaacccctccytcatgctcaacccttctgtgccagggatactacccagctattcactcccattctcacagccactcctgtccgagccgaggatgtttgcgccttttccttc

SEQ ID NO: 42060 - DNA, 201 bp, Homo sapiens
atgaggataaagacgatgatgtgatagaggtcactgggaaatagctagggagcccctccccacctcacttggggcccccagcaggttgcccaccaagctgraaggcagtgatttagaccttttgagaataggacacttggcaggagggaaaaggaagaggacaaaggagggtggttggccaaagtggcagagctctgttgc

SEQ ID NO: 42061 - DNA, 201 bp, Homo sapiens; identical to SEQ ID NO: 42052

SEQ ID NO: 42062 - DNA, 166 bp, Homo sapiens; identical to SEQ ID NO: 42053

SEQ ID NO: 42063 - DNA, 184 bp, Homo sapiens; identical to SEQ ID NO: 42054

SEQ ID NO: 42064 - DNA, 201 bp, Homo sapiens; identical to SEQ ID NO: 42055

SEQ ID NO: 42065 - DNA, 201 bp, Homo sapiens; identical to SEQ ID NO: 42056

SEQ ID NO: 42066 - DNA, 201 bp, Homo sapiens; identical to SEQ ID NO: 42057

SEQ ID NO: 42067 - DNA, 201 bp, Homo sapiens; identical to SEQ ID NO: 42058

SEQ ID NO: 42068 - DNA, 184 bp, Homo sapiens; identical to SEQ ID NO: 42054

SEQ ID NO: 42069 - DNA, 201 bp, Homo sapiens; identical to SEQ ID NO: 42055

SEQ ID NO: 42070 - DNA, 201 bp, Homo sapiens; identical to SEQ ID NO: 42056

SEQ ID NO: 42071 - DNA, 201 bp, Homo sapiens; identical to SEQ ID NO: 42057

SEQ ID NO: 42072 - DNA, 201 bp, Homo sapiens; identical to SEQ ID NO: 42058

SEQ ID NO: 42073 - DNA, 184 bp, Homo sapiens; identical to SEQ ID NO: 42054

SEQ ID NO: 42074 - DNA, 201 bp, Homo sapiens; identical to SEQ ID NO: 42055

SEQ ID NO: 42075 - DNA, 201 bp, Homo sapiens; identical to SEQ ID NO: 42056

SEQ ID NO: 42076 - DNA, 201 bp, Homo sapiens; identical to SEQ ID NO: 42057

SEQ ID NO: 42077 - DNA, 201 bp, Homo sapiens; identical to SEQ ID NO: 42058

SEQ ID NO: 42078 - DNA, 155 bp, Homo sapiens
cccccaggttcctaaaagtaaagctttagaggccaccaaattggcaattgaagcyggcttccgccatattgattctgctcatttatacaataatgaggagcaggttggactggccatccgaagcaagattgcagatggcagtgtgaagagagaag

SEQ ID NO: 42079 - DNA, 158 bp, Homo sapiens
cccccaggttcctaaaagtaaagctttagaggccaccaaattggcaattgaagctggsttccgccatattgattctgctcatttatacaataatgaggagcaggttggactggccatccgaagcaagattgcagatggcagtgtgaagagagaagaca

SEQ ID NO: 42080 - DNA, 163 bp, Homo sapiens
cccccaggttcctaaaagtaaagctttagaggccaccaaattggcaattgaagctggcttccrccatattgattctgctcatttatacaataatgaggagcaggttggactggccatccgaagcaagattgcagatggcagtgtgaagagagaagacatattc

SEQ ID NO: 42081 - DNA, 179 bp, Homo sapiens
cccccaggttcctaaaagtaaagctttagaggccaccaaattggcaattgaagctggcttccgccatattgattctgcwcatttatacaataatgaggagcaggttggactggccatccgaagcaagattgcagatggcagtgtgaagagagaagacatattctacacttcaaagcttt

SEQ ID NO: 42082 - DNA, 201 bp, Homo sapiens
atactatttgacacagtggatctctgtgccacgtgggaggccgtggagaagtgtaaagatgcaggattggccaagtccatcggggtgtccaacttcaaccrcaggcagctggagatgatcctcaacaagccagggctcaagtacaagcctgtctgcaaccaggtggaatgtcatccttacttcaaccagagaaaactgctg

SEQ ID NO: 42083 - DNA, 171 bp, Homo sapiens
tggacccgaactccccggtgctcttggaggacccagtcctttgtgccttggcaaaaaagcacaagcgaaccccagccctgattgccctgcgctaccagctrcagcgtggggttgtggtcctggccaagagctacaatgagcagcgcatcagacagaacgtgcaggtgagga

SEQ ID NO: 42084 - DNA, 201 bp, Homo sapiens
tttgacacagtggatctctgtgccacgtgggaggccgtggagaagtgtaaagatgcaggattggccaagtccatcggggtgtccaacttcaaccgcaggcwgctggagatgatcctcaacaagccagggctcaagtacaagcctgtctgcaaccaggtggaatgtcatccttacttcaaccagagaaaactgctggatttc

SEQ ID NO: 42085 - DNA, 201 bp, Homo sapiens
gagaagacatattctacacttcaaagctttggtgcaattcccatcgaccagagttggtccgaccagccttggaaaggtcactgaaaaatcttcaattggaytatgttgacctctaccttattcattttccagtgtctgtaaagccaggtgaggaagtgatcccaaaagatgaaaatggaaaaatactatttgacacagtgg

SEQ ID NO: 42086 - DNA, 149 bp, Homo sapiens
cccccaggttcctaaaagtaaagctttagaggccaccaaattggcaatwgaagctggcttccgccatattgattctgctcatttatacaataatgaggagcaggttggactggccatccgaagcaagattgcagatggcagtgtgaaga

SEQ ID NO: 42087 - DNA, 201 bp, Homo sapiens
acacttcaaagctttggtgcaattcccatcgaccagagttggtccgaccagccttggaaaggtcactgaaaaatcttcaattggattatgttgacctctaycttattcattttccagtgtctgtaaagccaggtgaggaagtgatcccaaaagatgaaaatggaaaaatactatttgacacagtggatctctgtgccacgt

SEQ ID NO: 42088 - DNA, 201 bp, Homo sapiens
accttattcattttccagtgtctgtaaagccaggtgaggaagtgatcccaaaagatgaaaatggaaaaatactatttgacacagtggatctctgtgccacrtgggaggccgtggagaagtgtaaagatgcaggattggccaagtccatcggggtgtccaacttcaaccgcaggcagctggagatgatcctcaacaagccag

SEQ ID NO: 42089 - DNA, 155 bp, Homo sapiens; identical to SEQ ID NO: 42078

SEQ ID NO: 42090 - DNA, 158 bp, Homo sapiens; identical to SEQ ID NO: 42079

SEQ ID NO: 42091 - DNA, 163 bp, Homo sapiens; identical to SEQ ID NO: 42080

SEQ ID NO: 42092 - DNA, 179 bp, Homo sapiens; identical to SEQ ID NO: 42081

SEQ ID NO: 42093 - DNA, 201 bp, Homo sapiens; identical to SEQ ID NO: 42082

SEQ ID NO: 42094 - DNA, 173 bp, Homo sapiens
tggacccgaactccccggtgctcttggaggacccagtcctttgtgccttggcaaaaaagcacaagcgaaccccagccctgattgccctgcgctaccagctrcagcgtggggttgtggtcctggccaagagctacaatgagcagcgcatcagacagaacgtgcaggtgaggagc

SEQ ID NO: 42095 - DNA, 201 bp, Homo sapiens; identical to SEQ ID NO: 42084

SEQ ID NO: 42096 - DNA, 201 bp, Homo sapiens; identical to SEQ ID NO: 42085

SEQ ID NO: 42097 - DNA, 149 bp, Homo sapiens; identical to SEQ ID NO: 42086

SEQ ID NO: 42098 - DNA, 201 bp, Homo sapiens; identical to SEQ ID NO: 42087

SEQ ID NO: 42099 - DNA, 201 bp, Homo sapiens; identical to SEQ ID NO: 42088

SEQ ID NO: 42100 - DNA, 201 bp, Homo sapiens
tagtttttgtgagcagtgaggaaaaagaaatgacaggcatacaaaagagagaagtggaggagaagaattgggggtaaggaggactgggatttatttccttrccttttcactaatctctccagtttcccaaggaggaaacagaaatacttactcttgcaatcactatcttcttccccaattttctgttttattttttccctt

SEQ ID NO: 42101 - DNA, 155 bp, Homo sapiens; identical to SEQ ID NO: 42078

SEQ ID NO: 42102 - DNA, 158 bp, Homo sapiens; identical to SEQ ID NO: 42079

SEQ ID NO: 42103 - DNA, 163 bp, Homo sapiens; identical to SEQ ID NO: 42080

SEQ ID NO: 42104 - DNA, 201 bp, Homo sapiens
tcacttttgttctcagcataaatattgtttttatggatatttgaactaagcattttcttaggaggacatagggattataacatagaagaagaatcctaaayctaactcctaattcctttctatgggatacattttgaatccatacttccgtgattgcatgtctataagaaaagaaagtgcagaactctcaaagcctctgcc

SEQ ID NO: 42105 - DNA, 179 bp, Homo sapiens; identical to SEQ ID NO: 42081

SEQ ID NO: 42106 - DNA, 201 bp, Homo sapiens
tatcttgatcttccacacctcacaattcctttttcccaggccgtggagaagtgtaaagatgcaggattggccaagtccatcggggtgtccaacttcaaccrcaggcagctggagatgatcctcaacaagccagggctcaagtacaagcctgtctgcaaccaggtggaatgtcatccttacttcaaccagagaaaactgctg

SEQ ID NO: 42107 - DNA, 201 bp, Homo sapiens
ggatacatctgtttcctatcttcttagtacaagtatggaaaatgcaccattggatcaaaaacttaggaactttacaaaggtagtttttgtgagcagtgagraaaaagaaatgacaggcatacaaaagagagaagtggaggagaagaattgggggtaaggaggactgggatttatttccttgccttttcactaatctctcca

SEQ ID NO: 42108 - DNA, 201 bp, Homo sapiens
ggagtgtcttaaactacagaccttcatgggaaaccttgttgcttctgcttcctctcttttcacactggaggttttatttttgcttagccatgaattcttgkgtcattcataacttttgtcttaaggtactgaaaactagtcaggctagttaatgcaaaagggtatattagatatgataatgggaaatcaaagccagggcta

SEQ ID NO: 42109 - DNA, 201 bp, Homo sapiens
gatcttccacacctcacaattcctttttcccaggccgtggagaagtgtaaagatgcaggattggccaagtccatcggggtgtccaacttcaaccgcaggcwgctggagatgatcctcaacaagccagggctcaagtacaagcctgtctgcaaccaggtggaatgtcatccttacttcaaccagagaaaactgctggatttc

SEQ ID NO: 42110 - DNA, 201 bp, Homo sapiens
tgggaaaccttgttgcttctgcttcctctcttttcacactggaggttttatttttgcttagccatgaattcttgggtcattcataacttttgtcttaaggwactgaaaactagtcaggctagttaatgcaaaagggtatattagatatgataatgggaaatcaaagccagggctacattaagaatttgataaaaactctaa

SEQ ID NO: 42111 - DNA, 201 bp, Homo sapiens
gagaagacatattctacacttcaaagctttggtgcaattcccatcgaccagagttggtccgaccagccttggaaaggtcactgaaaaatcttcaattggaytatgttgacctctaccttattcattttccagtgtctgtaaaggtaggcagcttgtgtgatcaaattaatttcacttttgttctcagcataaatattgttt

SEQ ID NO: 42112 - DNA, 149 bp, Homo sapiens; identical to SEQ ID NO: 42086

SEQ ID NO: 42113 - DNA, 201 bp, Homo sapiens
gcccatgttcattaccgtgagctcctgtgcatctcctaatttccaaactagccttgaaaacacctccattgaccatgattggttcatggtcctgtgcatgkaacatcatatgttcagggagataaagaactctgatagtggcacctgggtaaaaagtacaatccattatatctggatatcaagatcttttgcagttgaaga

SEQ ID NO: 42114 - DNA, 201 bp, Homo sapiens
acacttcaaagctttggtgcaattcccatcgaccagagttggtccgaccagccttggaaaggtcactgaaaaatcttcaattggattatgttgacctctaycttattcattttccagtgtctgtaaaggtaggcagcttgtgtgatcaaattaatttcacttttgttctcagcataaatattgtttttatggatatttgaa

SEQ ID NO: 42115 - DNA, 201 bp, Homo sapiens
cccatgttcattaccgtgagctcctgtgcatctcctaatttccaaactagccttgaaaacacctccattgaccatgattggttcatggtcctgtgcatggracatcatatgttcagggagataaagaactctgatagtggcacctgggtaaaaagtacaatccattatatctggatatcaagatcttttgcagttgaagag

SEQ ID NO: 42116 - DNA, 201 bp, Homo sapiens
ggtaggatacatctgtttcctatcttcttagtacaagtatggaaaatgcaccattggatcaaaaacttaggaactttacaaaggtagtttttgtgagcagygaggaaaaagaaatgacaggcatacaaaagagagaagtggaggagaagaattgggggtaaggaggactgggatttatttccttgccttttcactaatctc

SEQ ID NO: 42117 - DNA, 201 bp, Homo sapiens
gtgtgatcaaattaatttcacttttgttctcagcataaatattgtttttatggatatttgaactaagcattttcttaggaggacatagggattataacatrgaagaagaatcctaaatctaactcctaattcctttctatgggatacattttgaatccatacttccgtgattgcatgtctataagaaaagaaagtgcagaa

SEQ ID NO: 42118 - DNA, 201 bp, Homo sapiens
catcactaaactgactgcttctacttcagccaggtgaggaagtgatcccaaaagatgaaaatggaaaaatactatttgacacagtggatctctgtgccacrtgggaggtgagtgtttggaggtgagagaacggataagaaagatgaggtaggatacatctgtttcctatcttcttagtacaagtatggaaaatgcaccatt

SEQ ID NO: 42119 - DNA, 201 bp, Homo sapiens
ctgctggatttctgcaagtcaaaagacattgttctggttgcctatagtgctctgggatcccatcgagaagaaccatggtaataagagatacaggaagtttrcctaaaacactggtttgataaaaaaaatttaatcagatcatgctgtttcctggagttcactcacagctgacttggggtgagggaagaatttgcatttctg

SEQ ID NO: 42120 - DNA, 201 bp, Homo sapiens
ctggatttctgcaagtcaaaagacattgttctggttgcctatagtgctctgggatcccatcgagaagaaccatggtaataagagatacaggaagtttacckaaaacactggtttgataaaaaaaatttaatcagatcatgctgtttcctggagttcactcacagctgacttggggtgagggaagaatttgcatttctgacg

SEQ ID NO: 42121 - DNA, 201 bp, Homo sapiens
aagtcaaaagacattgttctggttgcctatagtgctctgggatcccatcgagaagaaccatggtaataagagatacaggaagtttacctaaaacactggtwtgataaaaaaaatttaatcagatcatgctgtttcctggagttcactcacagctgacttggggtgagggaagaatttgcatttctgacgagatcccaggtg

SEQ ID NO: 42122 - DNA, 201 bp, Homo sapiens
cagtggatctctgtgccacgtgggaggtgagtgtttggaggtgagagaacggataagaaagatgaggtaggatacatctgtttcctatcttcttagtacargtatggaaaatgcaccattggatcaaaaacttaggaactttacaaaggtagtttttgtgagcagtgaggaaaaagaaatgacaggcatacaaaagagaga

SEQ ID NO: 42123 - DNA, 201 bp, Homo sapiens
ttaaggtactgaaaactagtcaggctagttaatgcaaaagggtatattagatatgataatgggaaatcaaagccagggctacattaagaatttgataaaarctctaaaaatatatcctttctccacccttatctctgctttattacaaaaggctttttaagtatttgttccaacctttttcgttggtggcatttatggctt

SEQ ID NO: 42124 - DNA, 201 bp, Homo sapiens
tggacccgaactccccggtgctcttggaggacccagtcctttgtgccttggcaaaaaagcacaagcgaaccccagccctgattgccctgcgctaccagctrcagcgtggggttgtggtcctggccaagagctacaatgagcagcgcatcagacagaacgtgcaggtgaggagcggggctgtgggcctcaggtctcctgcac

SEQ ID NO: 42125 - DNA, 201 bp, Homo sapiens
gagaagtggaggagaagaattgggggtaaggaggactgggatttatttccttgccttttcactaatctctccagtttcccaaggaggaaacagaaatactyactcttgcaatcactatcttcttccccaattttctgttttattttttcccttttaagaaccacggctagctagttttattgtcatatctagacagttgtt

SEQ ID NO: 42126 - DNA, 201 bp, Homo sapiens
agagagaagtggaggagaagaattgggggtaaggaggactgggatttatttccttgccttttcactaatctctccagtttcccaaggaggaaacagaaatwcttactcttgcaatcactatcttcttccccaattttctgttttattttttcccttttaagaaccacggctagctagttttattgtcatatctagacagtt

SEQ ID NO: 42127 - DNA, 170 bp, Homo sapiens
acaagcacctgcaggagctggcccaggaggaggtgaagcagcatgcccaggaactctgggctgcctacaggtgggctcggtggcaaacgggacagctactrccctgtgacactagtgtgccctttccaggcatcagttctgccttgcatttgggaggaatgccaagtgtc

SEQ ID NO: 42128 - DNA, 201 bp, Homo sapiens
gcgcatcgctgggccaggccctccaccagccactcgcccatcacgtgcaacagtacgtgctcctcctgctgagcctcggggacaccattggggagcatcayccaacccgggagctggtggtgaacgcagtcaccctctttgggaacctgcagtccttcatgaagcaggagttggaccaggctgtggccacacaggctctct

SEQ ID NO: 42129 - DNA, 201 bp, Homo sapiens
gcctggagcatggcttcggcatccgcctgctgccccaggcctctgaggacaagttcgactgttacaagtgtcactggcgagaaggcagcatgtgtggctayggcatctgtgagtacagcaccgacgaggtgtacaagggctacttccaggagggcctgcggcacggatttggggtccttgagagtggtccgcaggcccccc

SEQ ID NO: 42130 - DNA, 201 bp, Homo sapiens
aggccctccaccagccactcgcccatcacgtgcaacagtacgtgctcctcctgctgagcctcggggacaccattggggagcatcacccaacccgggagctkgtggtgaacgcagtcaccctctttgggaacctgcagtccttcatgaagcaggagttggaccaggctgtggccacacaggctctctggcacaccctgagag

SEQ ID NO: 42131 - DNA, 201 bp, Homo sapiens
ccttccaggcagagggccggctctgccaggccacctacgagggcgagtggtgcaggggccggccccagggaaccctgaaatggccggatgggcggaatcaygtggggaatttctgccagggcctggagcatggcttcggcatccgcctgctgccccaggcctctgaggacaagttcgactgttacaagtgtcactggcgag

SEQ ID NO: 42132 - DNA, 201 bp, Homo sapiens
gctggaggaggtcttctcagccaccctcgcccatgtcaacagccttgtcctccagcccctgctcccagccgccccagatccctcggatccctggggcagasagtgcctgcggctcttgcaacagctgcacaagagctcccagcaactctgggaggtgacggaggaaagcctgcactcactgcaggagaggctgcgttaccc

SEQ ID NO: 42133 - DNA, 201 bp, Homo sapiens
tccccaatggcttcaccctggagggctcgttcggcagtggggcagggagaggactgcacacacagggtgtgctggacacggctgccctcccaccagacccragcagtacctgcaagaggcagctgggcgtgggtgccttccccgtggaaagccgctggcagggagtctacagccccttccgggactttgtgtgtgctggct

SEQ ID NO: 42134 - DNA, 201 bp, Homo sapiens
atcgctgggccaggccctccaccagccactcgcccatcacgtgcaacagtacgtgctcctcctgctgagcctcggggacaccattggggagcatcacccarcccgggagctggtggtgaacgcagtcaccctctttgggaacctgcagtccttcatgaagcaggagttggaccaggctgtggccacacaggctctctggca

SEQ ID NO: 42135 - DNA, 201 bp, Homo sapiens; identical to SEQ ID NO: 42128

SEQ ID NO: 42136 - DNA, 201 bp, Homo sapiens; identical to SEQ ID NO: 42129

SEQ ID NO: 42137 - DNA, 201 bp, Homo sapiens; identical to SEQ ID NO: 42130

SEQ ID NO: 42138 - DNA, 201 bp, Homo sapiens
aggcagagggccggctctgccaggccacctacgagggcgagtggtgcaggggccggccccacggcaagggaaccctgaaatggccggatgggcggaatcaygtggggaatttctgccagggcctggagcatggcttcggcatccgcctgctgccccaggcctctgaggacaagttcgactgttacaagtgtcactggcgag

SEQ ID NO: 42139 - DNA, 201 bp, Homo sapiens; identical to SEQ ID NO: 42132

SEQ ID NO: 42140 - DNA, 201 bp, Homo sapiens; identical to SEQ ID NO: 42134

SEQ ID NO: 42141 - DNA, 201 bp, Homo sapiens
gggccactgggagaggggccagaggagcggctatggcattgaggaggatggtgacaggtgagcgccctgcagccaccactcccaggacggaggggtggacmgggccctcacagaccagattgttgcaggacacaggctcctgtttgtcccccactgtgtctctcttaagcccctcacttcccctccagtccctcggttgct

SEQ ID NO: 42142 - DNA, 201 bp, Homo sapiens
agttcctggggaagaggccatggtttgttggagacaagatcacctttgtagatttcctcgcctatgatgtccttgacctccaccgtatatttgagcccaastgcttggacgccttcccaaatctgaaggacttcatctcccgctttgagggcttggagaagatctctgcctacatgaagtccagccgcttcctcccaaaac

SEQ ID NO: 42143 - DNA, 201 bp, Homo sapiens
ggccatggtttgttggagacaagatcacctttgtagatttcctcgcctatgatgtccttgacctccaccgtatatttgagcccaactgcttggacgccttyccaaatctgaaggacttcatctcccgctttgagggcttggagaagatctctgcctacatgaagtccagccgcttcctcccaaaacctctgtacacaaggg

SEQ ID NO: 42144 - DNA, 201 bp, Homo sapiens
tgcagcgcagctggactctgcatcccagcacctgcctcctcgttcctttctcctgtttattcccatctttacccccaagactttattgggcctcttcactycccctaaacccctgtcccatgcaggccctttgaagcctcagctacccactttccttcatgaacatccccctcccaacactacccttccctgcactaaagc

SEQ ID NO: 42145 - DNA, 201 bp, Homo sapiens
cctgtttattcccatctttacccccaagactttattgggcctcttcacttcccctaaacccctgtcccatgcaggccctttgaagcctcagctacccactwtccttcatgaacatccccctcccaacactacccttccctgcactaaagccagcctgaccttccttcctgttagtggttgtatctgctttgaagggcctac

SEQ ID NO: 42146 - DNA, 201 bp, Homo sapiens
actttattgggcctcttcacttcccctaaacccctgtcccatgcaggccctttgaagcctcagctacccactttccttcatgaacatccccctcccaacaytacccttccctgcactaaagccagcctgaccttccttcctgttagtggttgtatctgctttgaagggcctacctggcccctcgcctgtggagctcagccc

SEQ ID NO: 42147 - DNA, 201 bp, Homo sapiens
cccgctttgagggcttggagaagatctctgcctacatgaagtccagccgcttcctcccaaaacctctgtacacaagggtggctgtctggggcaacaagtartgccttgaaggccaggaggtgggagtgaggagcccatactcagcctgctgcccaggctgtgcagcgcagctggactctgcatcccagcacctgcctcctc

SEQ ID NO: 42148 - DNA, 201 bp, Homo sapiens
gcccatactcagcctgctgcccaggctgtgcagcgcagctggactctgcatcccagcacctgcctcctcgttcctttctcctgtttattcccatctttacycccaagactttattgggcctcttcacttcccctaaacccctgtcccatgcaggccctttgaagcctcagctacccactttccttcatgaacatccccctc

SEQ ID NO: 42149 - DNA, 201 bp, Homo sapiens
gcctgctgcccaggctgtgcagcgcagctggactctgcatcccagcacctgcctcctcgttcctttctcctgtttattcccatctttacccccaagacttyattgggcctcttcacttcccctaaacccctgtcccatgcaggccctttgaagcctcagctacccactttccttcatgaacatccccctcccaacactacc

SEQ ID NO: 42150 - DNA, 201 bp, Homo sapiens
ctgcccaggctgtgcagcgcagctggactctgcatcccagcacctgcctcctcgttcctttctcctgtttattcccatctttacccccaagactttattgkgcctcttcacttcccctaaacccctgtcccatgcaggccctttgaagcctcagctacccactttccttcatgaacatccccctcccaacactacccttcc

SEQ ID NO: 42151 - DNA, 201 bp, Homo sapiens
tgcccaggctgtgcagcgcagctggactctgcatcccagcacctgcctcctcgttcctttctcctgtttattcccatctttacccccaagactttattggscctcttcacttcccctaaacccctgtcccatgcaggccctttgaagcctcagctacccactttccttcatgaacatccccctcccaacactacccttccc

SEQ ID NO: 42152 - DNA, 201 bp, Homo sapiens
tttccttcatgaacatccccctcccaacactacccttccctgcactaaagccagcctgaccttccttcctgttagtggttgtatctgctttgaagggcctrcctggcccctcgcctgtggagctcagccctgagctgtccccgtgttgcatgacagcattgactggtttacaggccctgctcctgcagcatggcccctgcc

SEQ ID NO: 42153 - DNA, 201 bp, Homo sapiens
cccaaatctgaaggacttcatctcccgctttgagggcttggagaagatctctgcctacatgaagtccagccgcttcctcccaaaacctctgtacacaaggrtggctgtctggggcaacaagtaatgccttgaaggccaggaggtgggagtgaggagcccatactcagcctgctgcccaggctgtgcagcgcagctggactc

SEQ ID NO: 42154 - DNA, 150 bp, Homo sapiens
aagggcctacctggcccctcgcctgtggagctcagccctgagctgtccccgtgttgcatgacagcattgactggtttacaggccctgctcctgcagcatgscccctgccttaggcctacctgatcaaaataaagcctcagccacatttgc

SEQ ID NO: 42155 - DNA, 149 bp, Homo sapiens
agggcctacctggcccctcgcctgtggagctcagccctgagctgtccccgtgttgcatgacagcattgactggtttacaggccctgctcctgcagcatggyccctgccttaggcctacctgatcaaaataaagcctcagccacatttgc

SEQ ID NO: 42156 - DNA, 201 bp, Homo sapiens
tacccttccctgcactaaagccagcctgaccttccttcctgttagtggttgtatctgctttgaagggcctacctggcccctcgcctgtggagctcagcccygagctgtccccgtgttgcatgacagcattgactggtttacaggccctgctcctgcagcatggcccctgccttaggcctacctgatcaaaataaagcctca

SEQ ID NO: 42157 - DNA, 138 bp, Homo sapiens
ggctacggaagctggcgaggccgagcccctcctagtgsttccggaccttgctccctgaacactcggaggtggcggtggatcttactccttccagccagtgaggatccagcaacctgctccgtgcctcccgcgcctgtt

SEQ ID NO: 42158 - DNA, 201 bp, Homo sapiens
agttcctggggaagaggccatggtttgttggagacaagatcacctttgtagatttcctcgcctatgatgtccttgacctccaccgtatatttgagcccaastgcttggacgccttcccaaatctgaaggacttcatctcccgctttgaggtttcctgtggcataatgtgatggtcaattttctgcatcaacttgactgggc

SEQ ID NO: 42159 - DNA, 135 bp, Homo sapiens
tgataccactggctttcctgcttctctatcctgcagtcggcagatcatgggacttcttcactccaaaattgtgtgagccaattcccataacagatagatawatttataaataaacacacaaatttcctacagcct

SEQ ID NO: 42160 - DNA, 201 bp, Homo sapiens
ggccatggtttgttggagacaagatcacctttgtagatttcctcgcctatgatgtccttgacctccaccgtatatttgagcccaactgcttggacgccttyccaaatctgaaggacttcatctcccgctttgaggtttcctgtggcataatgtgatggtcaattttctgcatcaacttgactgggctaagggatgctcaga

SEQ ID NO: 42161 - DNA, 138 bp, Homo sapiens; identical to SEQ ID NO: 42157

SEQ ID NO: 42162 - DNA, 201 bp, Homo sapiens
acagagattccagcccacacattcttggccttctgcagatcacctttgtagatttcctcgcctatgatgtccttgacctccaccgtatatttgagcccaastgcttggacgccttcccaaatctgaaggacttcatctcccgctttgagggcttggagaagatctctgcctacatgaagtccagccgcttcctcccaaaac

SEQ ID NO: 42163 - DNA, 201 bp, Homo sapiens
cacacattcttggccttctgcagatcacctttgtagatttcctcgcctatgatgtccttgacctccaccgtatatttgagcccaactgcttggacgccttyccaaatctgaaggacttcatctcccgctttgagggcttggagaagatctctgcctacatgaagtccagccgcttcctcccaaaacctctgtacacaaggg

SEQ ID NO: 42164 - DNA, 201 bp, Homo sapiens; identical to SEQ ID NO: 42144

SEQ ID NO: 42165 - DNA, 201 bp, Homo sapiens; identical to SEQ ID NO: 42145

SEQ ID NO: 42166 - DNA, 201 bp, Homo sapiens; identical to SEQ ID NO: 42146

SEQ ID NO: 42167 - DNA, 201 bp, Homo sapiens
gcagcacttctcacagttcctggggaagaggccatggtttgttggagacaaggtaatgggggcatgtgatgaggacactagagatttgccatacatcctaygttacagagattccagcccacacattcttggccttctgcagatcacctttgtagatttcctcgcctatgatgtccttgacctccaccgtatatttgagcc

SEQ ID NO: 42168 - DNA, 201 bp, Homo sapiens; identical to SEQ ID NO: 42147

SEQ ID NO: 42169 - DNA, 201 bp, Homo sapiens; identical to SEQ ID NO: 42148

SEQ ID NO: 42170 - DNA, 201 bp, Homo sapiens; identical to SEQ ID NO: 42149

SEQ ID NO: 42171 - DNA, 201 bp, Homo sapiens; identical to SEQ ID NO: 42150

SEQ ID NO: 42172 - DNA, 201 bp, Homo sapiens; identical to SEQ ID NO: 42151

SEQ ID NO: 42173 - DNA, 201 bp, Homo sapiens; identical to SEQ ID NO: 42152

SEQ ID NO: 42174 - DNA, 201 bp, Homo sapiens; identical to SEQ ID NO: 42153

SEQ ID NO: 42175 - DNA, 150 bp, Homo sapiens; identical to SEQ ID NO: 42154

SEQ ID NO: 42176 - DNA, 149 bp, Homo sapiens; identical to SEQ ID NO: 42155

SEQ ID NO: 42177 - DNA, 201 bp, Homo sapiens; identical to SEQ ID NO: 42156

SEQ ID NO: 42178 - DNA, 138 bp, Homo sapiens; identical to SEQ ID NO: 42157

SEQ ID NO: 42179 - DNA, 201 bp, Homo sapiens; identical to SEQ ID NO: 42142

SEQ ID NO: 42180 - DNA, 201 bp, Homo sapiens; identical to SEQ ID NO: 42143

SEQ ID NO: 42181 - DNA, 201 bp, Homo sapiens; identical to SEQ ID NO: 42144

SEQ ID NO: 42182 - DNA, 201 bp, Homo sapiens; identical to SEQ ID NO: 42145

SEQ ID NO: 42183 - DNA, 201 bp, Homo sapiens; identical to SEQ ID NO: 42146

SEQ ID NO: 42184 - DNA, 201 bp, Homo sapiens; identical to SEQ ID NO: 42147

SEQ ID NO: 42185 - DNA, 201 bp, Homo sapiens; identical to SEQ ID NO: 42148

SEQ ID NO: 42186 - DNA, 201 bp, Homo sapiens; identical to SEQ ID NO: 42149

SEQ ID NO: 42187 - DNA, 201 bp, Homo sapiens; identical to SEQ ID NO: 42150

SEQ ID NO: 42188 - DNA, 201 bp, Homo sapiens; identical to SEQ ID NO: 42151

SEQ ID NO: 42189 - DNA, 201 bp, Homo sapiens; identical to SEQ ID NO: 42152

SEQ ID NO: 42190 - DNA, 201 bp, Homo sapiens; identical to SEQ ID NO: 42153

SEQ ID NO: 42191 - DNA, 144 bp, Homo sapiens
aagggcctacctggcccctcgcctgtggagctcagccctgagctgtccccgtgttgcatgacagcattgactggtttacaggccctgctcctgcagcatgscccctgccttaggcctacctgatcaaaataaagcctcagccac

SEQ ID NO: 42192 - DNA, 143 bp, Homo sapiens
agggcctacctggcccctcgcctgtggagctcagccctgagctgtccccgtgttgcatgacagcattgactggtttacaggccctgctcctgcagcatggyccctgccttaggcctacctgatcaaaataaagcctcagccac

SEQ ID NO: 42193 - DNA, 201 bp, Homo sapiens; identical to SEQ ID NO: 42156

SEQ ID NO: 42194 - DNA, 138 bp, Homo sapiens; identical to SEQ ID NO: 42157

SEQ ID NO: 42195 - DNA, 201 bp, Homo sapiens
aaaggtatcctaggaatacctgcctgcttagaccctctataaaagctctgtgcatcctgccactgaggactccgaagaggtagcagtcttctgaaaggtcyccgtcggatcaatcagtggaagaagggggttgctgattcacattacgtaaaaacacaagtcctcacttgagtcatagacttcaactgtgaggacatgtcg

SEQ ID NO: 42196 - DNA, 201 bp, Homo sapiens
gagctccagaaacatgacaaggaggactttcctgcctcttggagatcagaggaggaaatggcagcagaagccgcagctctgcgggtctactttcagtgacrcagatgtttttcagatcctgaattccagcaaaagagctattgccaaccagtttgaagaccgcccccccgcctctccccaagaggaactgaatcagcatga

SEQ ID NO: 42197 - DNA, 201 bp, Homo sapiens
tggccgatttgtttcagacgacccagagagtcgggacagtggtggaaaaacatttccatgggacctctctcaccttttccatgcaggatggccccgaagcyggacagactgtgaagcacgttcacgtccatgttcttcccaggaaggctggagactttcacaggaatgacagcatctatgaggagctccagaaacatgaca

SEQ ID NO: 42198 - DNA, 201 bp, Homo sapiens
cagatcctgaattccagcaaaagagctattgccaaccagtttgaagaccgcccccccgcctctccccaagaggaactgaatcagcatgaaaatgcagtttyttcatctcaccatcctgtattcttcaaccagtgatcccccacctcggtcactccaactcccttaaaatacctagacctaaacggctcagacaggcagatt

SEQ ID NO: 42199 - DNA, 201 bp, Homo sapiens
agccgcagctctgcgggtctactttcagtgacacagatgtttttcagatcctgaattccagcaaaagagctattgccaaccagtttgaagaccgcccccccgcctctccccaagaggaactgaatcagcatgaaaatgcagtttcttcatctcaccatcctgtattcttcaaccagtgatcccccacctcggtcactccaa

SEQ ID NO: 42200 - DNA, 201 bp, Homo sapiens
tcgggacagtggtggaaaaacatttccatgggacctctctcaccttttccatgcaggatggccccgaagccggacagactgtgaagcacgttcacgtccaygttcttcccaggaaggctggagactttcacaggaatgacagcatctatgaggagctccagaaacatgacaaggaggactttcctgcctcttggagatcag

SEQ ID NO: 42201 - DNA, 133 bp, Homo sapiens
ctgggaattgcagtccccgctctgctctgtccrgtcacaggactttttgccctctgttcccgggtccctcaggcggccacccagtgggcacactcccaggcggcgctccggccccgcgctccctccctctgcc

SEQ ID NO: 42202 - DNA, 201 bp, Homo sapiens; identical to SEQ ID NO: 42196

SEQ ID NO: 42203 - DNA, 201 bp, Homo sapiens; identical to SEQ ID NO: 42197

SEQ ID NO: 42204 - DNA, 201 bp, Homo sapiens; identical to SEQ ID NO: 42198

SEQ ID NO: 42205 - DNA, 201 bp, Homo sapiens; identical to SEQ ID NO: 42199

SEQ ID NO: 42206 - DNA, 201 bp, Homo sapiens; identical to SEQ ID NO: 42200

SEQ ID NO: 42207 - DNA, 133 bp, Homo sapiens; identical to SEQ ID NO: 42201

SEQ ID NO: 42208 - DNA, 201 bp, Homo sapiens
gccggggggactatgtccgtgtcatgccgcgcgtatggaagggggtgctggccgaccggctacctgcagcgggccctggactggttccgggcctgctgccrcctcccggtctttgtggtcaccagcgatgacatggcctggtgccgggagagcatcaacagctcccttggggacgtggtgttcgctggcaatggcctccag

SEQ ID NO: 42209 - DNA, 201 bp, Homo sapiens
caccctgccggtgctgcacagcgccacggccagcaggatcccctggcagaactaccacctgaacgactggatggaggaggagtaccgccacatcccggggsgctgtgtccgcctcacgggctacccctgctcctggaccttctaccaccacctccgccaggagatcctccaggagttcaccctgcacgaccacgtgcgcga

SEQ ID NO: 42210 - DNA, 201 bp, Homo sapiens
tctggaaccttttgtcagctgtgggttcaccgagccttaagccgtcaagggattctgggccacccgcccttccttctccaccttctacttcgtctttgccrtttttgtggtgtccaccatctttcactgccaccagcacctggctctggtgcctgcgccctgggcatactcagcccgtgtggtcctggcccccagacacct

SEQ ID NO: 42211 - DNA, 201 bp, Homo sapiens
ctttgctcagcccctgcctctggctgcgtgaccccaagccagcccctcctcctcctctctggaaccttttgtcagctgtgggttcaccgagccttaagccrtcaagggattctgggccacccgcccttccttctccaccttctacttcgtctttgccatttttgtggtgtccaccatctttcactgccaccagcacctggc

SEQ ID NO: 42212 - DNA, 201 bp, Homo sapiens
tggcccccatcttcagaatcaccctgccggtgctgcacagcgccacggccagcaggatcccctggcagaactaccacctgaacgactggatggaggaggartaccgccacatcccggggcgctgtgtccgcctcacgggctacccctgctcctggaccttctaccaccacctccgccaggagatcctccaggagttcaccc

SEQ ID NO: 42213 - DNA, 201 bp, Homo sapiens
gtgctgcacagcgccacggccagcaggatcccctggcagaactaccacctgaacgactggatggaggaggagtaccgccacatcccggggcgctgtgtccrcctcacgggctacccctgctcctggaccttctaccaccacctccgccaggagatcctccaggagttcaccctgcacgaccacgtgcgcgaggaggcccag

SEQ ID NO: 42214 - DNA, 201 bp, Homo sapiens
gctgcacagcgccacggccagcaggatcccctggcagaactaccacctgaacgactggatggaggaggagtaccgccacatcccggggcgctgtgtccgcytcacgggctacccctgctcctggaccttctaccaccacctccgccaggagatcctccaggagttcaccctgcacgaccacgtgcgcgaggaggcccagaa

SEQ ID NO: 42215 - DNA, 201 bp, Homo sapiens
accctgccggtgctgcacagcgccacggccagcaggatcccctggcagaactaccacctgaacgactggatggaggaggagtaccgccacatcccggggcrctgtgtccgcctcacgggctacccctgctcctggaccttctaccaccacctccgccaggagatcctccaggagttcaccctgcacgaccacgtgcgcgag

SEQ ID NO: 42216 - DNA, 201 bp, Homo sapiens
ccctgccggtgctgcacagcgccacggccagcaggatcccctggcagaactaccacctgaacgactggatggaggaggagtaccgccacatcccggggcgstgtgtccgcctcacgggctacccctgctcctggaccttctaccaccacctccgccaggagatcctccaggagttcaccctgcacgaccacgtgcgcgagg

SEQ ID NO: 42217 - DNA, 201 bp, Homo sapiens
acagcgccacggccagcaggatcccctggcagaactaccacctgaacgactggatggaggaggagtaccgccacatcccggggcgctgtgtccgcctcacsggctacccctgctcctggaccttctaccaccacctccgccaggagatcctccaggagttcaccctgcacgaccacgtgcgcgaggaggcccagaagttcc

SEQ ID NO: 42218 - DNA, 201 bp, Homo sapiens
ctgccggtgctgcacagcgccacggccagcaggatcccctggcagaactaccacctgaacgactggatggaggaggagtaccgccacatcccggggcgctrtgtccgcctcacgggctacccctgctcctggaccttctaccaccacctccgccaggagatcctccaggagttcaccctgcacgaccacgtgcgcgaggag

SEQ ID NO: 42219 - DNA, 201 bp, Homo sapiens
tgccggtgctgcacagcgccacggccagcaggatcccctggcagaactaccacctgaacgactggatggaggaggagtaccgccacatcccggggcgctgygtccgcctcacgggctacccctgctcctggaccttctaccaccacctccgccaggagatcctccaggagttcaccctgcacgaccacgtgcgcgaggagg

SEQ ID NO: 42220 - DNA, 201 bp, Homo sapiens
cctgcccaactcccctttcaacgtggtctttaggccgtaagcggccttcctgccagagtgggtgggccttgcggctgaccttggacaggctggacagaacrgcctctagccagccctgcatgtgcctggtcctcatcctgtgacccgaggggcagtgagtggggcgtgcggggcatggactcacggtccctcatgcagttt

SEQ ID NO: 42221 - DNA, 201 bp, Homo sapiens
cgcgcacagctggtggtgacccgactttcctgcctccaccctggggctcctcagaggcttcatggaacccaaactgctggtctcacctccgagccctgccstcgcccagggagggcggctccgtccctcctgcactccctaatcccgctctgaatcaccgcttctgttctgggtcggagaataaaggtggggtttccaagt

SEQ ID NO: 42222 - DNA, 201 bp, Homo sapiens
aaaaaaagaaaagaaaaagaaatgaatgggttcaaagaccataatcatgcatatcacataagaccagaagtggcccaggtccagggtcagttaatttagcrgctccacaaagtcatcagtcacctgagctccatccatcttcacatgctgtgctaccatttcttagctgtatcatcccatggtcccaaaagggctgctaca

SEQ ID NO: 42223 - DNA, 201 bp, Homo sapiens
gcagtgagccaagatggtgccgctgcactccagtctgggtgacacagcaagactccatctcaaaaaaaaaaaaaaaaaaaagaaaagaaaaagaaatgaaygggttcaaagaccataatcatgcatatcacataagaccagaagtggcccaggtccagggtcagttaatttagcggctccacaaagtcatcagtcacctga

SEQ ID NO: 42224 - DNA, 201 bp, Homo sapiens
aggatcccctggcagaactaccacctgaacgactggatggaggaggaataccgccacatcccgggggagtacgtccgcttcaccggctacccctgctcctrgaccttctaccaccacctccgccaggagatcctccaggagttcaccctgcacgaccacgtgcgggaggaggcccagaagttcctgcggggcctgcaggtg

SEQ ID NO: 42225 - DNA, 201 bp, Homo sapiens
ggatcacttgaggtcaggagttcaagactagcctggccaacatggtgaaaccccatctcgactaaaaatacaaaaattagccaggcgtggtggtgcacacytgtaatcccagctactcgggaggctgaggcaagagaatcacttgaacccaggaggcggaggttgcagtgagccaagatggtgccgctgcactccagtctg

SEQ ID NO: 42226 - DNA, 201 bp, Homo sapiens
gcaggccctggactggttccgagctcgctacagctccctcatcttcgtggtcaccagtaatggcatggcctggtgtcgggagaacattgacacctcccacrgtgatgtggtgtttgctggcgatggcattgagggctcacctgccaaagattttgctctactcacacagtgtaaccacaccatcatgaccattgggacgtt

SEQ ID NO: 42227 - DNA, 201 bp, Homo sapiens
cccagatgcacagcaccctggcccccatcttcagaatcaccctgccggtgctgcacagcgccacggccagcaggatcccctggcagaactaccacctgaaygactggatggaggaggaataccgccacatcccgggggagtacgtccgcttcaccggctacccctgctcctggaccttctaccaccacctccgccaggaga

SEQ ID NO: 42228 - DNA, 201 bp, Homo sapiens
tgtttgctggcgatggcattgagggctcacctgccaaagattttgctctactcacacagtgtaaccacaccatcatgaccattgggacgttcgggatctgrgccgcatacctcacgggcggagacaccatctacctggccaattacaccctccccgactcccctttcctcaaaatctttaagccagaggcagccttcctgc

SEQ ID NO: 42229 - DNA, 201 bp, Homo sapiens
tcacgggcggagacaccatctacctggccaattacaccctccccgactcccctttcctcaaaatctttaagccagaggcagccttcctgccggagtggacrgggattgccgcagacctgtcccccttactcaagcactaatgctggcccattctttgagaccttttctccttctctgcctccctcaagatgagtgcccggg

SEQ ID NO: 42230 - DNA, 201 bp, Homo sapiens
acgccctggccaagatgaacgggcggcccgccttcatcccggcccagatgcacagcaccctggcccccatcttcagaatcaccctgccggtgctgcacagygccacggccagcaggatcccctggcagaactaccacctgaacgactggatggaggaggaataccgccacatcccgggggagtacgtccgcttcaccggct

SEQ ID NO: 42231 - DNA, 201 bp, Homo sapiens
ccctttcctcaaaatctttaagccagaggcagccttcctgccggagtggacagggattgccgcagacctgtcccccttactcaagcactaatgctggcccrttctttgagaccttttctccttctctgcctccctcaagatgagtgcccgggcatgagaagcacatggttccatgagcaggacccatctctcttctgtgaa

SEQ ID NO: 42232 - DNA, 201 bp, Homo sapiens
ggatcccctggcagaactaccacctgaacgactggatggaggaggaataccgccacatcccgggggagtacgtccgcttcaccggctacccctgctcctgraccttctaccaccacctccgccaggagatcctccaggagttcaccctgcacgaccacgtgcgggaggaggcccagaagttcctgcggggcctgcaggtga

SEQ ID NO: 42233 - DNA, 201 bp, Homo sapiens
tcctccaggagttcaccctgcacgaccacgtgcgggaggaggcccagaagttcctgcggggcctgcaggtgaacgggagccggccgggcacctttgtaggkgtccatgttcgccgaggggactatgtccatgtcatgccaaaagtgtggaagggggtggtggccgaccggcgatacctacagcaggccctggactggttcc

SEQ ID NO: 42234 - DNA, 201 bp, Homo sapiens
gaacgggagccggccgggcacctttgtaggggtccatgttcgccgaggggactatgtccatgtcatgccaaaagtgtggaagggggtggtggccgaccggygatacctacagcaggccctggactggttccgagctcgctacagctccctcatcttcgtggtcaccagtaatggcatggcctggtgtcgggagaacattga

SEQ ID NO: 42235 - DNA, 201 bp, Homo sapiens
ctttcctcaaaatctttaagccagaggcagccttcctgccggagtggacagggattgccgcagacctgtcccccttactcaagcactaatgctggcccatyctttgagaccttttctccttctctgcctccctcaagatgagtgcccgggcatgagaagcacatggttccatgagcaggacccatctctcttctgtgaaga

SEQ ID NO: 42236 - DNA, 201 bp, Homo sapiens
caccctgcacgaccacgtgcgggaggaggcccagaagttcctgcggggcctgcaggtgaacgggagccggccgggcacctttgtaggggtccatgttcgcygaggggactatgtccatgtcatgccaaaagtgtggaagggggtggtggccgaccggcgatacctacagcaggccctggactggttccgagctcgctacag

SEQ ID NO: 42237 - DNA, 201 bp, Homo sapiens
ccatctctcttctgtgaagatgcgttgggctgcaagtaacagaaatctcagtgaacagtggcctggcgtggtggctcatgcctgtaatgctcgcactttgkgaggccagggtgggtggatcacttgaggtcaggagttcaagactagcctggccaacatggtgaaaccccatctcgactaaaaatacaaaaattagccagg

SEQ ID NO: 42238 - DNA, 201 bp, Homo sapiens
ccacatcccgggggagtacgtccgcttcaccggctacccctgctcctggaccttctaccaccacctccgccaggagatcctccaggagttcaccctgcacraccacgtgcgggaggaggcccagaagttcctgcggggcctgcaggtgaacgggagccggccgggcacctttgtaggggtccatgttcgccgaggggacta

SEQ ID NO: 42239 - DNA, 201 bp, Homo sapiens
caggccacccgcaacggtgtgggacgtgagtgccgttgcccccggcggtccagcagcaggacagccccgagcagcctggcctaggaggctcaccgcagccrtcaagggattctgggccacccgcccttccttctccaccttctacttcgtctttgccatttttgtggtgtccaccatctttcactgccaccagcacctggc

SEQ ID NO: 42240 - DNA, 201 bp, Homo sapiens
gccacatcccgggggagtacgtccgcttcaccggctacccctgctcctggaccttctaccaccacctccgccaggagatcctccaggagttcaccctgcaygaccacgtgcgggaggaggcccagaagttcctgcggggcctgcaggtgaacgggagccggccgggcacctttgtaggggtccatgttcgccgaggggact

SEQ ID NO: 42241 - DNA, 201 bp, Homo sapiens
cttcagaatcaccctgccggtgctgcacagcgccacggccagcaggatcccctggcagaactaccacctgaacgactggatggaggaggaataccgccacwtcccgggggagtacgtccgcttcaccggctacccctgctcctggaccttctaccaccacctccgccaggagatcctccaggagttcaccctgcacgacca

SEQ ID NO: 42242 - DNA, 201 bp, Homo sapiens
tccataggtcctgcctcttcaatcctggctttctagggcctgggatgatcattgctagaactgagagaccagcctggctcagtgaacttcagggcgttccrttcattctttcagtaaatgtttgcagcacatgtgttacatgtcaggcagtgaaaccccccacagcagccttccctctcagaggatacatttgtaaccatt

SEQ ID NO: 42243 - DNA, 201 bp, Homo sapiens
gtaaatgtttgcagcacatgtgttacatgtcaggcagtgaaaccccccacagcagccttccctctcagaggatacatttgtaaccattacacagtcatcaraggaataattttttttaatcaccagtgtgcatacagtcatggagttgggtattcccagctaccagggaggctgaggtgggaggattgcttgatgccagga

SEQ ID NO: 42244 - DNA, 201 bp, Homo sapiens
acctggctctggtgcctgcgccctgggcatactcagcccgtgtggtcctggcccccagacacctgccccgggaggacctggggatgtggacgatcaatgcrataggccgcctggggaaccagatgggcgagtacgccacactgtacgccctggccaagatgaacgggcggcccgccttcatcccggcccagatgcacagca

SEQ ID NO: 42245 - DNA, 201 bp, Homo sapiens
ctctgagagcgtattacataagtatcacatgaactccaaaatacatcttaggccaggcatggtggctgtaatcccagcactttgggagggtaaggcgggcrgatcacctgaggtcaggagttcgagactagcctgggcaacatagtgaaaccctgtctctactaaacatacaaaacattagccaggggtggtggtgcagac

SEQ ID NO: 42246 - DNA, 201 bp, Homo sapiens
tcctggcccccagacacctgccccgggaggacctggggatgtggacgatcaatgcaataggccgcctggggaaccagatgggcgagtacgccacactgtaygccctggccaagatgaacgggcggcccgccttcatcccggcccagatgcacagcaccctggcccccatcttcagaatcaccctgccggtgctgcacagcg

SEQ ID NO: 42247 - DNA, 201 bp, Homo sapiens
ggtccatgttcgccgaggggactatgtccatgtcatgccaaaagtgtggaagggggtggtggccgaccggcgatacctacagcaggccctggactggttcygagctcgctacagctccctcatcttcgtggtcaccagtaatggcatggcctggtgtcgggagaacattgacacctcccacggtgatgtggtgtttgctgg

SEQ ID NO: 42248 - DNA, 201 bp, Homo sapiens
cacctgtaatcccagctactcgggaggctgaggcaagagaatcacttgaacccaggaggcggaggttgcagtgagccaagatggtgccgctgcactccagyctgggtgacacagcaagactccatctcaaaaaaaaaaaaaaaaaaaagaaaagaaaaagaaatgaatgggttcaaagaccataatcatgcatatcacata

SEQ ID NO: 42249 - DNA, 201 bp, Homo sapiens
gaacccaggaggcggaggttgcagtgagccaagatggtgccgctgcactccagtctgggtgacacagcaagactccatctcaaaaaaaaaaaaaaaaaaargaaaagaaaaagaaatgaatgggttcaaagaccataatcatgcatatcacataagaccagaagtggcccaggtccagggtcagttaatttagcggctcca

SEQ ID NO: 42250 - DNA, 201 bp, Homo sapiens
gtcttggtcccttttgaagaatgaatgaaaccttcctaagccttccagcaatttccccccaactccgatgggtaggaattgtcacatacccatgtgacccrataggaggcaaaagaaatgagacttctgggattagtttagcctcagattctgcagctgagaagttgatcagccacctctgaaggacatgcagcttgcaga

SEQ ID NO: 42251 - DNA, 201 bp, Homo sapiens
tgcatcccccaggctggagtgcagtggcatgatcttggctcactgcagcctccgcctcccaggttcaagcgattctcctgcctcagcctcccgagtagctrggattacaggtgcgtgccaccacgcccagctaatttttatacgtttagtggaaatggagttttaccatgttggtcaggctggtctcaaactcctgacctc

SEQ ID NO: 42252 - DNA, 201 bp, Homo sapiens
caagtggggtttaaacagacccacagtctactcatcaaaccaggtgtccttggcattgtgtccacccagagagctcactgttttcttttctttttcttttytttttttttttttttttgagatggagtcttgctgcatcccccaggctggagtgcagtggcatgatcttggctcactgcagcctccgcctcccaggttcaa

SEQ ID NO: 42253 - DNA, 195 bp, Homo sapiens
agcgtattacataagtatcacatgaactccaaaatacatcttaggccaggcatggtggctgtaatcccagcactttgggagggtaaggcgggcggatcacytgaggtcaggagttcgagactagcctgggcaacatagtgaaaccctgtctctactaaacatacaaaacattagccaggggtggtggtgcagacc

SEQ ID NO: 42254 - DNA, 201 bp, Homo sapiens
ttcaagcgattctcctgcctcagcctcccgagtagctaggattacaggtgcgtgccaccacgcccagctaatttttatacgtttagtggaaatggagtttyaccatgttggtcaggctggtctcaaactcctgacctcatgatccgccttcctcggcctcccaaactgctgggattacaggtgttagccactgcgcccggc

SEQ ID NO: 42255 - DNA, 181 bp, Homo sapiens
gtatcacatgaactccaaaatacatcttaggccaggcatggtggctgtaatcccagcactttgggagggtaaggcgggcggatcacctgaggtcaggagtycgagactagcctgggcaacatagtgaaaccctgtctctactaaacatacaaaacattagccaggggtggtggtgcagacc

SEQ ID NO: 42256 - DNA, 201 bp, Homo sapiens
ggcagtgaaaccccccacagcagccttccctctcagaggatacatttgtaaccattacacagtcatcaaaggaataattttttttaatcaccagtgtgcayacagtcatggagttgggtattcccagctaccagggaggctgaggtgggaggattgcttgatgccaggagttagggaatatagtgcaccgtgattggactt

SEQ ID NO: 42257 - DNA, 201 bp, Homo sapiens
actgcggcctggacgacgtagtgataccctgactcttataaataaataaatgaataaacacaattatgactttgcggatgggagaaaaggttctctgagarcgtattacataagtatcacatgaactccaaaatacatcttaggccaggcatggtggctgtaatcccagcactttgggagggtaaggcgggcggatcacct

SEQ ID NO: 42258 - DNA, 201 bp, Homo sapiens
aggacagccccgagcagcctggcctaggaggctcaccgcagccgtcaagggattctgggccacccgcccttccttctccaccttctacttcgtctttgccrtttttgtggtgtccaccatctttcactgccaccagcacctggctctggtgcctgcgccctgggcatactcagcccgtgtggtcctggcccccagacacct

SEQ ID NO: 42259 - DNA, 201 bp, Homo sapiens
tggcccccatcttcagaatcaccctgccggtgctgcacagcgccacggccagcaggatcccctggcagaactaccacctgaacgactggatggaggaggartaccgccacatcccgggggagtacgtccgcttcaccggctacccctgctcctggaccttctaccaccacctccgccaggagatcctccaggagttcaccc

SEQ ID NO: 42260 - DNA, 201 bp, Homo sapiens
ccccatcttcagaatcaccctgccggtgctgcacagcgccacggccagcaggatcccctggcagaactaccacctgaacgactggatggaggaggaatacygccacatcccgggggagtacgtccgcttcaccggctacccctgctcctggaccttctaccaccacctccgccaggagatcctccaggagttcaccctgca

SEQ ID NO: 42261 - DNA, 201 bp, Homo sapiens; identical to SEQ ID NO: 42222

SEQ ID NO: 42262 - DNA, 201 bp, Homo sapiens; identical to SEQ ID NO: 42223

SEQ ID NO: 42263 - DNA, 201 bp, Homo sapiens; identical to SEQ ID NO: 42224

SEQ ID NO: 42264 - DNA, 201 bp, Homo sapiens; identical to SEQ ID NO: 42225

SEQ ID NO: 42265 - DNA, 201 bp, Homo sapiens; identical to SEQ ID NO: 42226

SEQ ID NO: 42266 - DNA, 201 bp, Homo sapiens; identical to SEQ ID NO: 42227

SEQ ID NO: 42267 - DNA, 201 bp, Homo sapiens; identical to SEQ ID NO: 42228

SEQ ID NO: 42268 - DNA, 201 bp, Homo sapiens; identical to SEQ ID NO: 42229

SEQ ID NO: 42269 - DNA, 201 bp, Homo sapiens; identical to SEQ ID NO: 42230

SEQ ID NO: 42270 - DNA, 201 bp, Homo sapiens; identical to SEQ ID NO: 42231

SEQ ID NO: 42271 - DNA, 201 bp, Homo sapiens; identical to SEQ ID NO: 42232

SEQ ID NO: 42272 - DNA, 201 bp, Homo sapiens; identical to SEQ ID NO: 42233

SEQ ID NO: 42273 - DNA, 201 bp, Homo sapiens; identical to SEQ ID NO: 42234

SEQ ID NO: 42274 - DNA, 201 bp, Homo sapiens; identical to SEQ ID NO: 42235

SEQ ID NO: 42275 - DNA, 201 bp, Homo sapiens; identical to SEQ ID NO: 42236

SEQ ID NO: 42276 - DNA, 201 bp, Homo sapiens; identical to SEQ ID NO: 42237

SEQ ID NO: 42277 - DNA, 201 bp, Homo sapiens; identical to SEQ ID NO: 42238

SEQ ID NO: 42278 - DNA, 201 bp, Homo sapiens; identical to SEQ ID NO: 42211

SEQ ID NO: 42279 - DNA, 201 bp, Homo sapiens; identical to SEQ ID NO: 42240

SEQ ID NO: 42280 - DNA, 201 bp, Homo sapiens; identical to SEQ ID NO: 42241

SEQ ID NO: 42281 - DNA, 201 bp, Homo sapiens; identical to SEQ ID NO: 42242

SEQ ID NO: 42282 - DNA, 201 bp, Homo sapiens; identical to SEQ ID NO: 42243

SEQ ID NO: 42283 - DNA, 201 bp, Homo sapiens; identical to SEQ ID NO: 42244

SEQ ID NO: 42284 - DNA, 201 bp, Homo sapiens; identical to SEQ ID NO: 42245

SEQ ID NO: 42285 - DNA, 201 bp, Homo sapiens; identical to SEQ ID NO: 42246

SEQ ID NO: 42286 - DNA, 201 bp, Homo sapiens; identical to SEQ ID NO: 42247

SEQ ID NO: 42287 - DNA, 201 bp, Homo sapiens; identical to SEQ ID NO: 42248

SEQ ID NO: 42288 - DNA, 201 bp, Homo sapiens; identical to SEQ ID NO: 42249

SEQ ID NO: 42289 - DNA, 201 bp, Homo sapiens; identical to SEQ ID NO: 42250

SEQ ID NO: 42290 - DNA, 201 bp, Homo sapiens; identical to SEQ ID NO: 42251

SEQ ID NO: 42291 - DNA, 201 bp, Homo sapiens; identical to SEQ ID NO: 42252

SEQ ID NO: 42292 - DNA, 195 bp, Homo sapiens; identical to SEQ ID NO: 42253

SEQ ID NO: 42293 - DNA, 201 bp, Homo sapiens; identical to SEQ ID NO: 42254

SEQ ID NO: 42294 - DNA, 181 bp, Homo sapiens; identical to SEQ ID NO: 42255

SEQ ID NO: 42295 - DNA, 201 bp, Homo sapiens; identical to SEQ ID NO: 42256

SEQ ID NO: 42296 - DNA, 201 bp, Homo sapiens; identical to SEQ ID NO: 42257

SEQ ID NO: 42297 - DNA, 201 bp, Homo sapiens; identical to SEQ ID NO: 42210

SEQ ID NO: 42298 - DNA, 201 bp, Homo sapiens; identical to SEQ ID NO: 42259

SEQ ID NO: 42299 - DNA, 201 bp, Homo sapiens; identical to SEQ ID NO: 42260

SEQ ID NO: 42300 - DNA, 201 bp, Homo sapiens; identical to SEQ ID NO: 42222

SEQ ID NO: 42301 - DNA, 201 bp, Homo sapiens; identical to SEQ ID NO: 42223

SEQ ID NO: 42302 - DNA, 201 bp, Homo sapiens; identical to SEQ ID NO: 42224

SEQ ID NO: 42303 - DNA, 201 bp, Homo sapiens; identical to SEQ ID NO: 42225

SEQ ID NO: 42304 - DNA, 201 bp, Homo sapiens; identical to SEQ ID NO: 42226

SEQ ID NO: 42305 - DNA, 201 bp, Homo sapiens; identical to SEQ ID NO: 42227

SEQ ID NO: 42306 - DNA, 201 bp, Homo sapiens; identical to SEQ ID NO: 42228

SEQ ID NO: 42307 - DNA, 201 bp, Homo sapiens
gtcccggtttccttcagcaggaccagccatgctggtcgttcagatgcctttctcctttcccatggcccacttcatcctctttgtctttacggtttccactrtatttcacgttcagcagcggctagcgaagattcaagccatgtgggagttaccggtgcagataccagtgctagcctcaacatcaaaggcactgggacccag

SEQ ID NO: 42308 - DNA, 201 bp, Homo sapiens; identical to SEQ ID NO: 42229

SEQ ID NO: 42309 - DNA, 201 bp, Homo sapiens; identical to SEQ ID NO: 42230

SEQ ID NO: 42310 - DNA, 201 bp, Homo sapiens; identical to SEQ ID NO: 42231

SEQ ID NO: 42311 - DNA, 201 bp, Homo sapiens; identical to SEQ ID NO: 42232

SEQ ID NO: 42312 - DNA, 201 bp, Homo sapiens; identical to SEQ ID NO: 42233

SEQ ID NO: 42313 - DNA, 201 bp, Homo sapiens; identical to SEQ ID NO: 42234

SEQ ID NO: 42314 - DNA, 201 bp, Homo sapiens; identical to SEQ ID NO: 42235

SEQ ID NO: 42315 - DNA, 201 bp, Homo sapiens; identical to SEQ ID NO: 42236

SEQ ID NO: 42316 - DNA, 201 bp, Homo sapiens; identical to SEQ ID NO: 42237

SEQ ID NO: 42317 - DNA, 201 bp, Homo sapiens; identical to SEQ ID NO: 42238

SEQ ID NO: 42318 - DNA, 201 bp, Homo sapiens; identical to SEQ ID NO: 42240

SEQ ID NO: 42319 - DNA, 201 bp, Homo sapiens; identical to SEQ ID NO: 42241

SEQ ID NO: 42320 - DNA, 201 bp, Homo sapiens; identical to SEQ ID NO: 42242

SEQ ID NO: 42321 - DNA, 201 bp, Homo sapiens; identical to SEQ ID NO: 42243

SEQ ID NO: 42322 - DNA, 201 bp, Homo sapiens
ttcaagccatgtgggagttaccggtgcagataccagtgctagcctcaacatcaaaggcactgggacccagccagctcagggggatgtggacgatcaatgcrataggccgcctggggaaccagatgggcgagtacgccacactgtacgccctggccaagatgaacgggcggcccgccttcatcccggcccagatgcacagca

SEQ ID NO: 42323 - DNA, 201 bp, Homo sapiens; identical to SEQ ID NO: 42245

SEQ ID NO: 42324 - DNA, 201 bp, Homo sapiens
caacatcaaaggcactgggacccagccagctcagggggatgtggacgatcaatgcaataggccgcctggggaaccagatgggcgagtacgccacactgtaygccctggccaagatgaacgggcggcccgccttcatcccggcccagatgcacagcaccctggcccccatcttcagaatcaccctgccggtgctgcacagcg

SEQ ID NO: 42325 - DNA, 201 bp, Homo sapiens; identical to SEQ ID NO: 42247

SEQ ID NO: 42326 - DNA, 201 bp, Homo sapiens; identical to SEQ ID NO: 42248

SEQ ID NO: 42327 - DNA, 201 bp, Homo sapiens; identical to SEQ ID NO: 42249

SEQ ID NO: 42328 - DNA, 201 bp, Homo sapiens; identical to SEQ ID NO: 42250

SEQ ID NO: 42329 - DNA, 201 bp, Homo sapiens; identical to SEQ ID NO: 42251

SEQ ID NO: 42330 - DNA, 201 bp, Homo sapiens; identical to SEQ ID NO: 42252

SEQ ID NO: 42331 - DNA, 195 bp, Homo sapiens; identical to SEQ ID NO: 42253

SEQ ID NO: 42332 - DNA, 201 bp, Homo sapiens; identical to SEQ ID NO: 42254

SEQ ID NO: 42333 - DNA, 181 bp, Homo sapiens; identical to SEQ ID NO: 42255

SEQ ID NO: 42334 - DNA, 201 bp, Homo sapiens; identical to SEQ ID NO: 42256

SEQ ID NO: 42335 - DNA, 201 bp, Homo sapiens; identical to SEQ ID NO: 42257

SEQ ID NO: 42336 - DNA, 201 bp, Homo sapiens; identical to SEQ ID NO: 42259

SEQ ID NO: 42337 - DNA, 201 bp, Homo sapiens; identical to SEQ ID NO: 42260

SEQ ID NO: 42338 - DNA, 201 bp, Homo sapiens; identical to SEQ ID NO: 42208

SEQ ID NO: 42339 - DNA, 201 bp, Homo sapiens; identical to SEQ ID NO: 42209

SEQ ID NO: 42340 - DNA, 201 bp, Homo sapiens; identical to SEQ ID NO: 42258

SEQ ID NO: 42341 - DNA, 201 bp, Homo sapiens; identical to SEQ ID NO: 42212

SEQ ID NO: 42342 - DNA, 201 bp, Homo sapiens; identical to SEQ ID NO: 42213

SEQ ID NO: 42343 - DNA, 201 bp, Homo sapiens; identical to SEQ ID NO: 42214

SEQ ID NO: 42344 - DNA, 201 bp, Homo sapiens; identical to SEQ ID NO: 42239

SEQ ID NO: 42345 - DNA, 201 bp, Homo sapiens; identical to SEQ ID NO: 42215

SEQ ID NO: 42346 - DNA, 201 bp, Homo sapiens; identical to SEQ ID NO: 42216

SEQ ID NO: 42347 - DNA, 201 bp, Homo sapiens; identical to SEQ ID NO: 42217

SEQ ID NO: 42348 - DNA, 201 bp, Homo sapiens; identical to SEQ ID NO: 42218

SEQ ID NO: 42349 - DNA, 201 bp, Homo sapiens; identical to SEQ ID NO: 42219

SEQ ID NO: 42350 - DNA, 201 bp, Homo sapiens; identical to SEQ ID NO: 42220

SEQ ID NO: 42351 - DNA, 201 bp, Homo sapiens; identical to SEQ ID NO: 42222

SEQ ID NO: 42352 - DNA, 201 bp, Homo sapiens; identical to SEQ ID NO: 42223

SEQ ID NO: 42353 - DNA, 201 bp, Homo sapiens; identical to SEQ ID NO: 42224

SEQ ID NO: 42354 - DNA, 201 bp, Homo sapiens; identical to SEQ ID NO: 42225

SEQ ID NO: 42355 - DNA, 201 bp, Homo sapiens; identical to SEQ ID NO: 42226

SEQ ID NO: 42356 - DNA, 201 bp, Homo sapiens; identical to SEQ ID NO: 42227

SEQ ID NO: 42357 - DNA, 201 bp, Homo sapiens
gtctgtgctctgaggcctctcccatgcactgtggtgctcaggacagaggcttggatggattgagtgagtgaatgaatgactttggcagggggtgggtgaaragactcctgtccccccagccctgcctcctgaccatgtcctctctcctccccacagccgtcaagggattctgggccacccgcccttccttctccaccttct

SEQ ID NO: 42358 - DNA, 201 bp, Homo sapiens; identical to SEQ ID NO: 42228

SEQ ID NO: 42359 - DNA, 201 bp, Homo sapiens; identical to SEQ ID NO: 42229

SEQ ID NO: 42360 - DNA, 201 bp, Homo sapiens; identical to SEQ ID NO: 42230

SEQ ID NO: 42361 - DNA, 201 bp, Homo sapiens; identical to SEQ ID NO: 42231

SEQ ID NO: 42362 - DNA, 201 bp, Homo sapiens; identical to SEQ ID NO: 42232

SEQ ID NO: 42363 - DNA, 201 bp, Homo sapiens; identical to SEQ ID NO: 42233

SEQ ID NO: 42364 - DNA, 201 bp, Homo sapiens; identical to SEQ ID NO: 42234

SEQ ID NO: 42365 - DNA, 201 bp, Homo sapiens; identical to SEQ ID NO: 42235

SEQ ID NO: 42366 - DNA, 201 bp, Homo sapiens; identical to SEQ ID NO: 42236

SEQ ID NO: 42367 - DNA, 201 bp, Homo sapiens; identical to SEQ ID NO: 42237

SEQ ID NO: 42368 - DNA, 201 bp, Homo sapiens; identical to SEQ ID NO: 42238

SEQ ID NO: 42369 - DNA, 201 bp, Homo sapiens
attgagtgagtgaatgaatgactttggcagggggtgggtgaagagactcctgtccccccagccctgcctcctgaccatgtcctctctcctccccacagccrtcaagggattctgggccacccgcccttccttctccaccttctacttcgtctttgccatttttgtggtgtccaccatctttcactgccaccagcacctggc

SEQ ID NO: 42370 - DNA, 201 bp, Homo sapiens; identical to SEQ ID NO: 42240

SEQ ID NO: 42371 - DNA, 201 bp, Homo sapiens; identical to SEQ ID NO: 42241

SEQ ID NO: 42372 - DNA, 201 bp, Homo sapiens; identical to SEQ ID NO: 42242

SEQ ID NO: 42373 - DNA, 201 bp, Homo sapiens; identical to SEQ ID NO: 42243

SEQ ID NO: 42374 - DNA, 201 bp, Homo sapiens; identical to SEQ ID NO: 42244

SEQ ID NO: 42375 - DNA, 201 bp, Homo sapiens; identical to SEQ ID NO: 42245

SEQ ID NO: 42376 - DNA, 201 bp, Homo sapiens; identical to SEQ ID NO: 42246

SEQ ID NO: 42377 - DNA, 201 bp, Homo sapiens; identical to SEQ ID NO: 42247

SEQ ID NO: 42378 - DNA, 201 bp, Homo sapiens; identical to SEQ ID NO: 42248

SEQ ID NO: 42379 - DNA, 201 bp, Homo sapiens; identical to SEQ ID NO: 42249

SEQ ID NO: 42380 - DNA, 201 bp, Homo sapiens; identical to SEQ ID NO: 42250

SEQ ID NO: 42381 - DNA, 201 bp, Homo sapiens; identical to SEQ ID NO: 42251

SEQ ID NO: 42382 - DNA, 201 bp, Homo sapiens; identical to SEQ ID NO: 42252

SEQ ID NO: 42383 - DNA, 195 bp, Homo sapiens; identical to SEQ ID NO: 42253

SEQ ID NO: 42384 - DNA, 201 bp, Homo sapiens; identical to SEQ ID NO: 42254

SEQ ID NO: 42385 - DNA, 181 bp, Homo sapiens; identical to SEQ ID NO: 42255

SEQ ID NO: 42386 - DNA, 201 bp, Homo sapiens; identical to SEQ ID NO: 42256

SEQ ID NO: 42387 - DNA, 201 bp, Homo sapiens; identical to SEQ ID NO: 42257

SEQ ID NO: 42388 - DNA, 201 bp, Homo sapiens
ccagccctgcctcctgaccatgtcctctctcctccccacagccgtcaagggattctgggccacccgcccttccttctccaccttctacttcgtctttgccrtttttgtggtgtccaccatctttcactgccaccagcacctggctctggtgcctgcgccctgggcatactcagcccgtgtggtcctggcccccagacacct

SEQ ID NO: 42389 - DNA, 201 bp, Homo sapiens; identical to SEQ ID NO: 42259

SEQ ID NO: 42390 - DNA, 201 bp, Homo sapiens; identical to SEQ ID NO: 42260

SEQ ID NO: 42391 - DNA, 201 bp, Homo sapiens
taactgggcttagagtctaagggcttgggggctgcatctgatacaggttggagtttggggtgggagagtcctaggaagggggccccaagtagaaatgagaraaatcaggaagggatatcgggggcgtccacgggggtgctccgactggccttgcacccgtaccccagctctgcaccccccgtcacgagcagttcaatgccc

SEQ ID NO: 42392 - DNA, 201 bp, Homo sapiens
gcaccttgctaactgggcttagagtctaagggcttgggggctgcatctgatacaggttggagtttggggtgggagagtcctaggaagggggccccaagtaraaatgagagaaatcaggaagggatatcgggggcgtccacgggggtgctccgactggccttgcacccgtaccccagctctgcaccccccgtcacgagcagt

SEQ ID NO: 42393 - DNA, 169 bp, Homo sapiens
tccttctggctgcaaatcgtttttatgggaacctgcagggtgacccggcaccttgctaactgggcttaragtctaagggcttgggggctgcatctgatacaggttggagtttggggtgggagagtcctaggaagggggccccaagtagaaatgagagaaatcaggaagg

SEQ ID NO: 42394 - DNA, 201 bp, Homo sapiens
tggaatgtcgtggaagcaaatactgcacatgcgtgttggtcctgtgagggaaaccagctagtggagagggagaggttgaaggaacagaaaaatgagaagayaactcactggtgaagctgaacccagatctacacatacagctaatcttaccaaaatgtgtggaagtaaagcaatctgaaggaaattcagtaccatacaatt

SEQ ID NO: 42395 - DNA, 201 bp, Homo sapiens
aagatattctaatggtcacaaaagatgtcataaaagaatttgcagatgacggcgtcaagtacctggaactaaggagcacacccagaagagaaaatgctacyggaatgactaaaaagacttatgtggaatctatacttgaaggtataaaacagtccaaacaagaaaacttggacattgatgttaggtatttgatagcagttg

SEQ ID NO: 42396 - DNA, 158 bp, Homo sapiens
ccgggaagagcgcatctcgccaaccagaattgaggagggtgtagccagtgctaagttygcttgcggctgacctttctttggaatgtcgtggaagcaaatactgcacatgcgtgttggtcctgtgagggaaaccagctagtggagagggagaggttgaa

SEQ ID NO: 42397 - DNA, 201 bp, Homo sapiens
tcagtaaatacgtgtcttcaactgactcacaagctctcaggtgcttactgggtgggacttgactgttgttgctaattaaatccccattccaccagtgattmttgtgactcagcagtccttccctattagtgatcataaaatttcagggaaatcgaagtttctcatcaggaaatgttttggaattactagtataaagttagg

SEQ ID NO: 42398 - DNA, 201 bp, Homo sapiens
cataatggaccactggtgcaggcttacataaacacacatactgtggccacttcagctgaagacaagggacaaactaagatagttctgaaaggtaaaaaaamaaacaaacaaaaaacaaaaacaaaattattagataccaagttatgcttgaattgctttgctctttagaatgtgtgtttttccctggtatcagaagaagtt

SEQ ID NO: 42399 - DNA, 201 bp, Homo sapiens
gggccctcaatctgtgggatcaaatgccatctctaggggatagcatgggaaactggaggacacctagctggtatctgctgcaaaattgattgcttgcttgrtggtggggaaaaaactccacacatttggtcagagaagttttctgtctttattgtggtgtgagagcagaggaaaaaagtttgttttttccgctcagacttt

SEQ ID NO: 42400 - DNA, 187 bp, Homo sapiens
ccgggaagagcgcatctcgccaaccagaattgaggagggtgtagccagtgctaagttcgcttgcggctgacctttctttggaatgtygtggaagcaaatactgcacatgcgtgttggtcctgtgagggaaaccagctagtggagagggagaggttgaaggaacagaaaaatgagaagacaactcact

SEQ ID NO: 42401 - DNA, 201 bp, Homo sapiens
aagcacacaccaccgtgcctacttatttttttgtagagatggggatctgactttgttgcctgggctggtcttaaactcctggctttaagtgatccttctgycttggcctcccaaagtgctggaattataggcgtgagccaccatgcccagcctataccacaaccctcattcagctggtctcccccggggaggcttcatcta

SEQ ID NO: 42402 - DNA, 201 bp, Homo sapiens
atccatttatatgcaaaattaatagaaataaaggatgcaatttgtcatcaatgatggttcataataatcatttaggcacttgtagaatgaaaactactaargtttctaggactaagaagaaatactaaagtaatacacttattaccaccaaagccactacattttttgaggtgtatatttcacaaggtatgcataatttag

SEQ ID NO: 42403 - DNA, 201 bp, Homo sapiens
taatacagtagccaaagccacacatagttattaagcacttaaaatgtggtcaatgtgactaagccactgaatttattaattcgtttaaatagtcacatgtygtcaatagctaccacattggacagtacagttcaggtctagcaaagagccatcacaactcctaggcctgaaaaggtgaagtaaaggaacaattactgaaac

SEQ ID NO: 42404 - DNA, 201 bp, Homo sapiens
tgcccccattcccctctggtgcctctgactggtggaactcaaccaaaaagtaaagagagctccttgatgcagcccataaaggtcagcctcttggagcacaraacagtgaaaggtggagagtatatctggaacaaaacattattataccccgtgcaaaatgaattgaggcatcaaaagtttgctttattgacacttataaat

SEQ ID NO: 42405 - DNA, 201 bp, Homo sapiens
gaactggccaaaggcgtcttgaggcctcatctgctcatagaccacgaaaagggcattaggaaaacgctgggctgcccaggcgatgagggccgcggcactckccggctcgaggtaggtcagcaccgcctcggccaggagcagagtgggtgaggctgcgtcgagccccgcggcgcccagggcctcctccactcgctggagctg

SEQ ID NO: 42406 - DNA, 201 bp, Homo sapiens
ccgcgcctgcccgacgctcacggctccgggggcccatggccagaagagactcaggaatggcagtctgtcacggttgtgagccgccccttggttagcacacmcctcacggacctcggtagggggaaaaaaaccacccatgctcctggacttccccttccgccggcacttgtgcgtcacttccgggaagagcgcatctcgcca

SEQ ID NO: 42407 - DNA, 201 bp, Homo sapiens
cggcgcccagggcctcctccactcgctggagctgccgcaagtccagacccaggatgcagtagtctgcgctctcaaagcacagcgcggacgcgggctccccmctctcgaaaggcccggttaacgcgcacagctctggcgtctctccaatcctttctgctttgcgccgcgccacgtccggaaaatccacctcccagactgcag

SEQ ID NO: 42408 - DNA, 201 bp, Homo sapiens
cgggaagaaagcagtgatagaattcattcatgtccacggcaccgcaggcggtccagccagcttgaaggaagcggcgccgctgcgcctccacgtcaggaaarcgctccaggccatgcaggggggagtttagctgccgaaaatgttgcagcatgaactggccaaaggcgtcttgaggcctcatctgctcatagaccacgaaaa

SEQ ID NO: 42409 - DNA, 201 bp, Homo sapiens
atgctcctggacttccccttccgccggcacttgtgcgtcacttccgggaagagcgcatctcgccaaccagaattgaggagggtgtagccagtgctaagttygcttgcggctgacctttctttggaatgtcgaggctgaagtgggaggatcgcttgagtctggaagcttgagactgcagcaagctgtgatcgtgacactgca

SEQ ID NO: 42410 - DNA, 201 bp, Homo sapiens
tgaagttggacaacaaccttttttttttttctttttaagagacggggtctcactctgtcaaccaggcaggagtgcagtggcacaatcacagctcactatcrcctcagcctccagagtatccaagactacaagcacacaccaccgtgcctacttatttttttgtagagatggggatctgactttgttgcctgggctggtctt

SEQ ID NO: 42411 - DNA, 201 bp, Homo sapiens
cttgtgcgtcacttccgggaagagcgcatctcgccaaccagaattgaggagggtgtagccagtgctaagttcgcttgcggctgacctttctttggaatgtygaggctgaagtgggaggatcgcttgagtctggaagcttgagactgcagcaagctgtgatcgtgacactgcactccagcctgggcaacaaagtaagatcct

SEQ ID NO: 42412 - DNA, 201 bp, Homo sapiens
ctaaagaccactgtaactcaataaacgaacttagattagaaaattagaggcagaccactactcctctcggactgcatggccactgtcttcagctgttttcygtagtgattgtttctaggtattttacctattttaccaacctttttcactttttgcactgaatagtgctaagggaaaaaaaggatggggaaaggaggagtg

SEQ ID NO: 42413 - DNA, 201 bp, Homo sapiens
attgaggcatcaaaagtttgctttattgacacttataaatctaaataaatatggaaccaatagcaaaacatttaaaaagtatgttggtaaaggaagtcctmcaagtgtttcctgttgttaaaactatccgagttttctgttgcaacaaacaggacaatgttttaatcaaactgtgactgtgttcatttcaggtttcctaca

SEQ ID NO: 42414 - DNA, 201 bp, Homo sapiens
gatcacagagcctgtttacccagaagtagtccatatgtttgcagttaacatgtttcgaatattaccaccttcctccaatcctacgggagcagaatttgacycagaggaagatgaaccaacgttagaagcaggctggcttcatctacacttatttatgaatttttcttaagatttttagagtctgcagatttccaatctaat

SEQ ID NO: 42415 - DNA, 201 bp, Homo sapiens
cagataaataatatattttataggtttatttatgaaacagagcatcataatggcatagcagagttactggaaatattgggaagtataattaatggatttgycttaccactaaaagaagaacacaagattttcttattgaaggtgttactacctttgcacaaagtgaaatctcttgagtgtctaccacccccagctggcata

SEQ ID NO: 42416 - DNA, 188 bp, Homo sapiens
ggtggccgcgggggcgcgacggcggggcgggggcgctgctgctgcgggggcaggaagcggcaagggcggtggcggcccgctccagccrtgccgaataaaacaagaaggagaaagaatcaccaaaagcagggaagagtggaaaaagttcaaaagaaggacaagacacagtagaatcagagcaaatttcc

SEQ ID NO: 42417 - DNA, 201 bp, Homo sapiens
gttgtctcctccaactataacagtgacatcgaccttccactttcgacgttggggctggcattgtcctcagcgataactctgtcaagctcatattctgataygacaaggaatttggctacagcaacagggtggtagactttatggtacacatggcctccaaggagtaagagccccctagaccatcagccccagtgagaacac

SEQ ID NO: 42418 - DNA, 134 bp, Homo sapiens
gacacgaaggttgaagtgaaggccagagtaaacrgatttggccttactgggtgcctgatcactaggacagttttaactgtagcaaagtggttattgtcaccatcagtgacctcttcattgacctcaattacatg

SEQ ID NO: 42419 - DNA, 167 bp, Homo sapiens
gacatcaccccaaggacaacggcacaagtagagagaaactacctacctcacttcaaattatgtttggacttgacaaaaatgtatgcaaatgatgggggatrgtagaaaaaaattatttacacaaccttggaagattaggcatgaatacacagagatttaccttttgg

SEQ ID NO: 42420 - DNA, 201 bp, Homo sapiens
atccaagatacaagagaacgcattgccactgatgcttgctgagcccccacagaacttaattgcccaatctcagtctggtactggtaaaacagctgccttcktgctggccatgcttagccaagtagaacctgcaaacaaatacccccagtgtctatgtctctccccaacgtatgagctcgccctccaaacaggaaaagtgat

SEQ ID NO: 42421 - DNA, 201 bp, Homo sapiens
cagatgatttggacgagattgagaaaatagccaactgagaagctccaccagccactgatgccagccctggcactgcccctgcacaggagacaagtgcgttyagggcacaggccccgacatcaccccaaggacaacggcacaagtagagagaaactacctacctcacttcaaattatgtttggacttgacaaaaatgtatgc

SEQ ID NO: 42422 - DNA, 201 bp, Homo sapiens
atgagacctacctgcaccggatcgggcgcacgggccgctttggcaagaggggcctggcagtgaacatggtggacagcaagcacagcatgaacatcctgaayagaatccaggagcattttaataagaagatagaaagattggacacagatgatttggacgagattgagaaaatagccaactgagaagctccaccagccactg

SEQ ID NO: 42423 - DNA, 201 bp, Homo sapiens
aagctccaccagccactgatgccagccctggcactgcccctgcacaggagacaagtgcgttcagggcacaggccccgacatcaccccaaggacaacggcasaagtagagagaaactacctacctcacttcaaattatgtttggacttgacaaaaatgtatgcaaatgatgggggatggtagaaaaaaattatttacacaac

SEQ ID NO: 42424 - DNA, 186 bp, Homo sapiens
cgttcagggcacaggccccgacatcaccccaaggacaacggcacaagtagagagaaactacctacctcacttcaaattatgtttggacttgacaaaaatgkatgcaaatgatgggggatggtagaaaaaaattatttacacaaccttggaagattaggcatgaatacacagagatttaccttttgg

SEQ ID NO: 42425 - DNA, 165 bp, Homo sapiens
catcaccccaaggacaacggcacaagtagagagaaactacctacctcacttcaaattatgtttggacttgacaaaaatgtatgcaaatgatgggggatggwagaaaaaaattatttacacaaccttggaagattaggcatgaatacacagagatttaccttttgg

SEQ ID NO: 42426 - DNA, 148 bp, Homo sapiens
tgccatgctcagccgcgatggctggggctgccgggcgcgtccaagatygcgccctgcggcggtttcccatcaccctgcctgtgggcgacttgagcaacttgcatcttaaggaagagaaaatcaaaccagataccaatggtgctgttgt

SEQ ID NO: 42427 - DNA, 196 bp, Homo sapiens
gagacaagtgcgttcagggcacaggccccgacatcaccccaaggacaacggcacaagtagagagaaactacctacctcacttcaaattatgtttggacttracaaaaatgtatgcaaatgatgggggatggtagaaaaaaattatttacacaaccttggaagattaggcatgaatacacagagatttaccttttgg

SEQ ID NO: 42428 - DNA, 164 bp, Homo sapiens
gacatcaccccaaggacaacggcacaagtagagagaaactacctacctcacttcaaattatgtttggacttgacaaaaatgtatgcaaatgatgggggatrgtagaaaaaaattatttacacaaccttggaagattaggcatgaatacacagagatttaccttt

SEQ ID NO: 42429 - DNA, 201 bp, Homo sapiens; identical to SEQ ID NO: 42420

SEQ ID NO: 42430 - DNA, 201 bp, Homo sapiens; identical to SEQ ID NO: 42421

SEQ ID NO: 42431 - DNA, 201 bp, Homo sapiens; identical to SEQ ID NO: 42422

SEQ ID NO: 42432 - DNA, 201 bp, Homo sapiens; identical to SEQ ID NO: 42423

SEQ ID NO: 42433 - DNA, 183 bp, Homo sapiens
cgttcagggcacaggccccgacatcaccccaaggacaacggcacaagtagagagaaactacctacctcacttcaaattatgtttggacttgacaaaaatgkatgcaaatgatgggggatggtagaaaaaaattatttacacaaccttggaagattaggcatgaatacacagagatttaccttt

SEQ ID NO: 42434 - DNA, 162 bp, Homo sapiens
catcaccccaaggacaacggcacaagtagagagaaactacctacctcacttcaaattatgtttggacttgacaaaaatgtatgcaaatgatgggggatggwagaaaaaaattatttacacaaccttggaagattaggcatgaatacacagagatttaccttt

SEQ ID NO: 42435 - DNA, 193 bp, Homo sapiens
gagacaagtgcgttcagggcacaggccccgacatcaccccaaggacaacggcacaagtagagagaaactacctacctcacttcaaattatgtttggacttracaaaaatgtatgcaaatgatgggggatggtagaaaaaaattatttacacaaccttggaagattaggcatgaatacacagagatttaccttt

SEQ ID NO: 42436 - DNA, 124 bp, Homo sapiens
agcagagcctgccgcgaacccccrgagcccacgatccctcgtgccatccctcgaatccaccagcacgagcgtcccacccgcgcctgggaccatggccactgactcatgggccctggcggtggac

SEQ ID NO: 42437 - DNA, 167 bp, Homo sapiens; identical to SEQ ID NO: 42419

SEQ ID NO: 42438 - DNA, 201 bp, Homo sapiens
aaactcccctctgtactcggtgaagtcttttgaagagcttcggctcccacagaacttaattgcccaatctcagtctggtactggtaaaacagctgccttcktgctggccatgcttagccaagtagaacctgcaaacaaatacccccagtgtctatgtctctccccaacgtatgagctcgccctccaaacaggaaaagtgat

SEQ ID NO: 42439 - DNA, 201 bp, Homo sapiens; identical to SEQ ID NO: 42421

SEQ ID NO: 42440 - DNA, 201 bp, Homo sapiens; identical to SEQ ID NO: 42422

SEQ ID NO: 42441 - DNA, 201 bp, Homo sapiens; identical to SEQ ID NO: 42423

SEQ ID NO: 42442 - DNA, 186 bp, Homo sapiens; identical to SEQ ID NO: 42424

SEQ ID NO: 42443 - DNA, 165 bp, Homo sapiens; identical to SEQ ID NO: 42425

SEQ ID NO: 42444 - DNA, 196 bp, Homo sapiens; identical to SEQ ID NO: 42427

SEQ ID NO: 42445 - DNA, 144 bp, Homo sapiens
cagccttgtagtggggctggagcagagcctgccgcgaacccccrgagcccacgatccctcgtgccatccctcgaatccaccagcacgagcgtcccacccgcgcctgggaccatggccactgactcatgggccctggcggtggac

SEQ ID NO: 42446 - DNA, 201 bp, Homo sapiens; identical to SEQ ID NO: 42422

SEQ ID NO: 42447 - DNA, 167 bp, Homo sapiens; identical to SEQ ID NO: 42419

SEQ ID NO: 42448 - DNA, 201 bp, Homo sapiens; identical to SEQ ID NO: 42423

SEQ ID NO: 42449 - DNA, 165 bp, Homo sapiens; identical to SEQ ID NO: 42425

SEQ ID NO: 42450 - DNA, 186 bp, Homo sapiens; identical to SEQ ID NO: 42424

SEQ ID NO: 42451 - DNA, 196 bp, Homo sapiens; identical to SEQ ID NO: 42427

SEQ ID NO: 42452 - DNA, 201 bp, Homo sapiens; identical to SEQ ID NO: 42420

SEQ ID NO: 42453 - DNA, 201 bp, Homo sapiens; identical to SEQ ID NO: 42421

SEQ ID NO: 42454 - DNA, 201 bp, Homo sapiens
tttggctttggtatagagtggccactttctctaggacctggaagaagagtttgatggctaagaacgattgtgatcctaggtcttctttgtacgcatctccrtatttaggccagatctgcctcctgggaagggaaggggccaatgtcagcctccaggtgatttctttaatctgacattacaaagagaccaacagactgccaa

SEQ ID NO: 42455 - DNA, 201 bp, Homo sapiens
gacatcaccccaaggacaacggcacaagtagagagaaactacctacctcacttcaaattatgtttggacttgacaaaaatgtatgcaaatgatgggggatrgtagaaaaaaattatttacacaaccttggaagattaggcatgaatacacagagatttaccttttggaagtttcatcttttaatttggccagtgtttcctt

SEQ ID NO: 42456 - DNA, 201 bp, Homo sapiens; identical to SEQ ID NO: 42420

SEQ ID NO: 42457 - DNA, 201 bp, Homo sapiens; identical to SEQ ID NO: 42421

SEQ ID NO: 42458 - DNA, 201 bp, Homo sapiens; identical to SEQ ID NO: 42422

SEQ ID NO: 42459 - DNA, 201 bp, Homo sapiens; identical to SEQ ID NO: 42423

SEQ ID NO: 42460 - DNA, 201 bp, Homo sapiens
cgttcagggcacaggccccgacatcaccccaaggacaacggcacaagtagagagaaactacctacctcacttcaaattatgtttggacttgacaaaaatgkatgcaaatgatgggggatggtagaaaaaaattatttacacaaccttggaagattaggcatgaatacacagagatttaccttttggaagtttcatctttta

SEQ ID NO: 42461 - DNA, 201 bp, Homo sapiens
catcaccccaaggacaacggcacaagtagagagaaactacctacctcacttcaaattatgtttggacttgacaaaaatgtatgcaaatgatgggggatggwagaaaaaaattatttacacaaccttggaagattaggcatgaatacacagagatttaccttttggaagtttcatcttttaatttggccagtgtttccttca

SEQ ID NO: 42462 - DNA, 201 bp, Homo sapiens
gagacaagtgcgttcagggcacaggccccgacatcaccccaaggacaacggcacaagtagagagaaactacctacctcacttcaaattatgtttggacttracaaaaatgtatgcaaatgatgggggatggtagaaaaaaattatttacacaaccttggaagattaggcatgaatacacagagatttaccttttggaagtt

SEQ ID NO: 42463 - DNA, 151 bp, Homo sapiens
cggtctgcagccttgtagtggggctggagcagagcctgccgcgaacccccrgagcccacgatccctcgtgccatccctcgaatccaccagcacgagcgtcccacccgcgcctgggaccatggccactgactcatgggccctggcggtggac

SEQ ID NO: 42464 - DNA, 201 bp, Homo sapiens; identical to SEQ ID NO: 42454

SEQ ID NO: 42465 - DNA, 201 bp, Homo sapiens; identical to SEQ ID NO: 42455

SEQ ID NO: 42466 - DNA, 201 bp, Homo sapiens; identical to SEQ ID NO: 42420

SEQ ID NO: 42467 - DNA, 201 bp, Homo sapiens; identical to SEQ ID NO: 42421

SEQ ID NO: 42468 - DNA, 201 bp, Homo sapiens; identical to SEQ ID NO: 42422

SEQ ID NO: 42469 - DNA, 201 bp, Homo sapiens; identical to SEQ ID NO: 42423

SEQ ID NO: 42470 - DNA, 201 bp, Homo sapiens; identical to SEQ ID NO: 42460

SEQ ID NO: 42471 - DNA, 201 bp, Homo sapiens; identical to SEQ ID NO: 42461

SEQ ID NO: 42472 - DNA, 201 bp, Homo sapiens; identical to SEQ ID NO: 42462

SEQ ID NO: 42473 - DNA, 154 bp, Homo sapiens
ttccggtctgcagccttgtagtggggctggagcagagcctgccgcgaacccccrgagcccacgatccctcgtgccatccctcgaatccaccagcacgagcgtcccacccgcgcctgggaccatggccactgactcatgggccctggcggtggac

SEQ ID NO: 42474 - DNA, 167 bp, Homo sapiens; identical to SEQ ID NO: 42419

SEQ ID NO: 42475 - DNA, 201 bp, Homo sapiens
tcatgggccctggcggtggacgagcaggaagctgcggctgagtcgcccacagaacttaattgcccaatctcagtctggtactggtaaaacagctgccttcktgctggccatgcttagccaagtagaacctgcaaacaaatacccccagtgtctatgtctctccccaacgtatgagctcgccctccaaacaggaaaagtgat

SEQ ID NO: 42476 - DNA, 201 bp, Homo sapiens; identical to SEQ ID NO: 42421

SEQ ID NO: 42477 - DNA, 201 bp, Homo sapiens; identical to SEQ ID NO: 42422

SEQ ID NO: 42478 - DNA, 201 bp, Homo sapiens; identical to SEQ ID NO: 42423

SEQ ID NO: 42479 - DNA, 186 bp, Homo sapiens; identical to SEQ ID NO: 42424

SEQ ID NO: 42480 - DNA, 165 bp, Homo sapiens; identical to SEQ ID NO: 42425

SEQ ID NO: 42481 - DNA, 196 bp, Homo sapiens; identical to SEQ ID NO: 42427

SEQ ID NO: 42482 - DNA, 161 bp, Homo sapiens
cgcccgcttccggtctgcagccttgtagtggggctggagcagagcctgccgcgaacccccrgagcccacgatccctcgtgccatccctcgaatccaccagcacgagcgtcccacccgcgcctgggaccatggccactgactcatgggccctggcggtggac

SEQ ID NO: 42483 - DNA, 201 bp, Homo sapiens; identical to SEQ ID NO: 42422

SEQ ID NO: 42484 - DNA, 161 bp, Homo sapiens
gacatcaccccaaggacaacggcacaagtagagagaaactacctacctcacttcaaattatgtttggacttgacaaaaatgtatgcaaatgatgggggatrgtagaaaaaaattatttacacaaccttggaagattaggcatgaatacacagagatttacc

SEQ ID NO: 42485 - DNA, 201 bp, Homo sapiens; identical to SEQ ID NO: 42423

SEQ ID NO: 42486 - DNA, 159 bp, Homo sapiens
catcaccccaaggacaacggcacaagtagagagaaactacctacctcacttcaaattatgtttggacttgacaaaaatgtatgcaaatgatgggggatggwagaaaaaaattatttacacaaccttggaagattaggcatgaatacacagagatttacc

SEQ ID NO: 42487 - DNA, 180 bp, Homo sapiens
cgttcagggcacaggccccgacatcaccccaaggacaacggcacaagtagagagaaactacctacctcacttcaaattatgtttggacttgacaaaaatgkatgcaaatgatgggggatggtagaaaaaaattatttacacaaccttggaagattaggcatgaatacacagagatttacc

SEQ ID NO: 42488 - DNA, 190 bp, Homo sapiens
gagacaagtgcgttcagggcacaggccccgacatcaccccaaggacaacggcacaagtagagagaaactacctacctcacttcaaattatgtttggacttracaaaaatgtatgcaaatgatgggggatggtagaaaaaaattatttacacaaccttggaagattaggcatgaatacacagagatttacc

SEQ ID NO: 42489 - DNA, 201 bp, Homo sapiens; identical to SEQ ID NO: 42420

SEQ ID NO: 42490 - DNA, 201 bp, Homo sapiens; identical to SEQ ID NO: 42421

SEQ ID NO: 42491 - DNA, 201 bp, Homo sapiens
attacccaagtatatggcttttatgatgaatgtccgcgaaagtatgggaatgccaatgtttgaaaatactttacagatctctttgattatcttccacttayaactttagtagatggacagatattctgcctccatggtggcctgtctccatccacatacacactggatcatataagagccctgggtcatttacaagaagtt

SEQ ID NO: 42492 - DNA, 201 bp, Homo sapiens
cagccactgagacggccgaatcccgccgccgctcttcctctgacacagctgcctacccagcaggcaccactgcggtgggcactcctggcaacggcaccccytgctcccaggacacaagcttctccagcagccgacaagataccccatcttcctttggccagttcacacctcagtcctcccaaggaaccccctacacgtctc

SEQ ID NO: 42493 - DNA, 201 bp, Homo sapiens
gattccactgaaggaagtgacttttgcaaggctgaatgacaacgtgcgggagaccttcctgaaggatatgtgccgtaagtacggtgaggtggaagaggtaragatcctccttcacccccgtacgcgcaagcacctgggcctggcccgtgtgctcttcaccagcactcggggcgccaaggaaacggtcaaaaacctccacct

SEQ ID NO: 42494 - DNA, 201 bp, Homo sapiens
cgctggccgtggccaacaccaccttcaccgtcagcaccgacaaggctcagcgccatttcggctatgagcccctgttctcgtgggaggatagccggacccgyaccattctctgggtacaggccgctacgggttcagcccagtgacggtggggctggggcctggaggcccagatacagcacatccacccaggtcccgagccct

SEQ ID NO: 42495 - DNA, 201 bp, Homo sapiens
tccgaggccagtgaggaaaagaggcctcgtccctccactcctgctgaggaagatgaagacgaccctgaacaagagaaggaggctggagagccaggacgtcyggggaccaagcccccgaagcgggacgaagagcgaggcaagacccagggcaagcaccgcaagtcctttgctctggacagcgaaggggaggaggcatcccag

SEQ ID NO: 42496 - DNA, 201 bp, Homo sapiens
atgggccccgggagcaccagacaggctcagcccgcagcgaaggctactaccccatcagcaagaaggagaaggacaagtacctggacgtgtgcccagtctcrgcccggcagctggagggcgtggacactcaggggacgaaccgcgtgctgtccgagcgccggtccgagcagcggcggctgctgagcgccatcggtacctccg

SEQ ID NO: 42497 - DNA, 201 bp, Homo sapiens
ttcctttggccagttcacacctcagtcctcccaaggaaccccctacacgtctcggggcagcaccccctactctcaggactctgcctactccagcagacctratgggccgccgccccctgagtaccccccacctcctccaccacccccgcacatctatgactttgtgaactccttggagctcatggaccgacttggggctca

SEQ ID NO: 42498 - DNA, 201 bp, Homo sapiens
cttccgggccatcccggcctctgtggagcatggccgggtctatgtgggcaatgttgcctggatgcacgtgctggcagcccgggagctggagcagcgggcarccctgatgggcggccaggtatacttctgctacgatggatcaccctacaggagctacgaggatttcaacatggagttcctgggcccctgcggactgcggct

SEQ ID NO: 42499 - DNA, 201 bp, Homo sapiens
ggcccctgcggactgcggctggtgggcgcccgcccattgctgccctactggctgctggtgttcctggctgccctcaatgccctgctgcagtggctgctgcrgccactggtgctctacgcacccctgctgaacccctacacgctggccgtggccaacaccaccttcaccgtcagcaccgacaaggctcagcgccatttcggc

SEQ ID NO: 42500 - DNA, 201 bp, Homo sapiens
ctctacgcacccctgctgaacccctacacgctggccgtggccaacaccaccttcaccgtcagcaccgacaaggctcagcgccatttcggctatgagccccygttctcgtgggaggatagccggacccgcaccattctctgggtacaggccgctacgggttcagcccagtgacggtggggctggggcctggaggcccagata

SEQ ID NO: 42501 - DNA, 201 bp, Homo sapiens
agaagctgtaaatgttttgtagcagccagcagctgtttcctgtggaaacctggggtgccggcctgtacagattctgtcctggggggctacacagtcctctygctttgtgttaatggggacttccccttacgccctgcgtgtacccctccccagtttaggggtctctggggcagtggccatgttctccccctgggggggctc

SEQ ID NO: 42502 - DNA, 201 bp, Homo sapiens
cctggatgcacgtgctggcagcccgggagctggagcagcgggcagccctgatgggcggccaggtatacttctgctacgatggatcaccctacaggagctaygaggatttcaacatggagttcctgggcccctgcggactgcggctggtgggcgcccgcccattgctgccctactggctgctggtgttcctggctgccctca

SEQ ID NO: 42503 - DNA, 201 bp, Homo sapiens
cccagtcctgatggccgcttggtgagtgtctggtgccctggtggcctgccccagctctcttctggctttctgagcaggaagcgagcagaggctccacaggsttacgctgctctcctgacagccacacgcgaccctcggtgcagagtgcagaggcggctctggttcctccagccacctcagtccctctttgggaggtgatgt

SEQ ID NO: 42504 - DNA, 201 bp, Homo sapiens
agcagcaagccaaggaggaggataaagagaagacgaagctgaaggagcctggcctgctgtccctcgtggactgggccaagagcgggggcactacgggcatmgaggctttcgcctttgggtcagggctgagaggggccctgcggctgccttcattcaaggtaaagcggaaagagccatcggaaatttccgaggccagtgagg

SEQ ID NO: 42505 - DNA, 201 bp, Homo sapiens
aggctggagagccaggacgtccggggaccaagcccccgaagcgggacgaagagcgaggcaagacccagggcaagcaccgcaagtcctttgctctggacagygaaggggaggaggcatcccaggagtcctcctcggagaaggatgaggaggatgacgaggaagatgaggaagatgaagatcgagaggaagctgtggatacca

SEQ ID NO: 42506 - DNA, 201 bp, Homo sapiens
cagcagggcccacatgcccccatctccaagcgtggggttgggggccccaagcccagcgagggagcctcagtccctggaggcagcttctgcctctcctgtcrcccctgcccaccaccccctgattgtttttctttgcggagaagaagctgtaaatgttttgtagcagccagcagctgtttcctgtggaaacctggggtgccg

SEQ ID NO: 42507 - DNA, 201 bp, Homo sapiens
caagtcctttgctctggacagcgaaggggaggaggcatcccaggagtcctcctcggagaaggatgaggaggatgacgaggaagatgaggaagatgaagatygagaggaagctgtggataccacaaagaaggagacagaggtgtcggatggcgaggacgaggaaagcgattcgtcttccaaatgttctctgtatgctgactc

SEQ ID NO: 42508 - DNA, 201 bp, Homo sapiens; identical to SEQ ID NO: 42492

SEQ ID NO: 42509 - DNA, 201 bp, Homo sapiens; identical to SEQ ID NO: 42493

SEQ ID NO: 42510 - DNA, 201 bp, Homo sapiens; identical to SEQ ID NO: 42494

SEQ ID NO: 42511 - DNA, 201 bp, Homo sapiens; identical to SEQ ID NO: 42495

SEQ ID NO: 42512 - DNA, 201 bp, Homo sapiens; identical to SEQ ID NO: 42496

SEQ ID NO: 42513 - DNA, 201 bp, Homo sapiens; identical to SEQ ID NO: 42497

SEQ ID NO: 42514 - DNA, 201 bp, Homo sapiens; identical to SEQ ID NO: 42498

SEQ ID NO: 42515 - DNA, 201 bp, Homo sapiens; identical to SEQ ID NO: 42499

SEQ ID NO: 42516 - DNA, 201 bp, Homo sapiens; identical to SEQ ID NO: 42500

SEQ ID NO: 42517 - DNA, 201 bp, Homo sapiens; identical to SEQ ID NO: 42501

SEQ ID NO: 42518 - DNA, 201 bp, Homo sapiens; identical to SEQ ID NO: 42502

SEQ ID NO: 42519 - DNA, 201 bp, Homo sapiens; identical to SEQ ID NO: 42503

SEQ ID NO: 42520 - DNA, 201 bp, Homo sapiens; identical to SEQ ID NO: 42504

SEQ ID NO: 42521 - DNA, 201 bp, Homo sapiens; identical to SEQ ID NO: 42505

SEQ ID NO: 42522 - DNA, 201 bp, Homo sapiens; identical to SEQ ID NO: 42506

SEQ ID NO: 42523 - DNA, 201 bp, Homo sapiens; identical to SEQ ID NO: 42507

SEQ ID NO: 42524 - DNA, 201 bp, Homo sapiens; identical to SEQ ID NO: 42500

SEQ ID NO: 42525 - DNA, 201 bp, Homo sapiens; identical to SEQ ID NO: 42502

SEQ ID NO: 42526 - DNA, 201 bp, Homo sapiens; identical to SEQ ID NO: 42503

SEQ ID NO: 42527 - DNA, 201 bp, Homo sapiens; identical to SEQ ID NO: 42494

SEQ ID NO: 42528 - DNA, 201 bp, Homo sapiens; identical to SEQ ID NO: 42498

SEQ ID NO: 42529 - DNA, 201 bp, Homo sapiens; identical to SEQ ID NO: 42499

SEQ ID NO: 42530 - DNA, 201 bp, Homo sapiens; identical to SEQ ID NO: 42501

SEQ ID NO: 42531 - DNA, 201 bp, Homo sapiens; identical to SEQ ID NO: 42504

SEQ ID NO: 42532 - DNA, 201 bp, Homo sapiens; identical to SEQ ID NO: 42505

SEQ ID NO: 42533 - DNA, 201 bp, Homo sapiens; identical to SEQ ID NO: 42506

SEQ ID NO: 42534 - DNA, 201 bp, Homo sapiens; identical to SEQ ID NO: 42492

SEQ ID NO: 42535 - DNA, 201 bp, Homo sapiens; identical to SEQ ID NO: 42493

SEQ ID NO: 42536 - DNA, 201 bp, Homo sapiens; identical to SEQ ID NO: 42495

SEQ ID NO: 42537 - DNA, 201 bp, Homo sapiens
atgggccccgggagcaccagacaggctcagcccgcagcgaaggctactaccccatcagcaagaaggagaaggacaagtacctggacgtgtgcccagtctcrgcccggcagctggagggcgtggacactcagttccggaagaagaagctccgatttggccggagccggatccacgagtggggtctgtttgccatggaaccca

SEQ ID NO: 42538 - DNA, 201 bp, Homo sapiens
caagtcctttgctctggacagcgaaggggaggaggcatcccaggagtcctcctcggagaaggatgaggaggatgacgaggaagatgaggaagatgaagatygagaggaagctgtggataccacaaagaaggagacagaggtgtcggatggtgagcacaagacagtgaaatcgactttgggctcggaggagggagaagtccc

SEQ ID NO: 42539 - DNA, 201 bp, Homo sapiens; identical to SEQ ID NO: 42497

SEQ ID NO: 42540 - DNA, 201 bp, Homo sapiens; identical to SEQ ID NO: 42501

SEQ ID NO: 42541 - DNA, 201 bp, Homo sapiens; identical to SEQ ID NO: 42504

SEQ ID NO: 42542 - DNA, 201 bp, Homo sapiens; identical to SEQ ID NO: 42505

SEQ ID NO: 42543 - DNA, 201 bp, Homo sapiens; identical to SEQ ID NO: 42506

SEQ ID NO: 42544 - DNA, 201 bp, Homo sapiens; identical to SEQ ID NO: 42495

SEQ ID NO: 42545 - DNA, 201 bp, Homo sapiens; identical to SEQ ID NO: 42496

SEQ ID NO: 42546 - DNA, 201 bp, Homo sapiens; identical to SEQ ID NO: 42507

SEQ ID NO: 42547 - DNA, 201 bp, Homo sapiens
gccacctccccctcccccgccgcctcctcctccctacctggcgtcccttcctcttggttatcctccccaccaacctgcctacctcctcccacccagacctratgggccgccgccccctgagtaccccccacctcctccaccacccccgcacatctatgactttgtgaactccttggagctcatggaccgacttggggctca

SEQ ID NO: 42548 - DNA, 201 bp, Homo sapiens; identical to SEQ ID NO: 42500

SEQ ID NO: 42549 - DNA, 201 bp, Homo sapiens; identical to SEQ ID NO: 42503

SEQ ID NO: 42550 - DNA, 201 bp, Homo sapiens; identical to SEQ ID NO: 42502

SEQ ID NO: 42551 - DNA, 201 bp, Homo sapiens; identical to SEQ ID NO: 42494

SEQ ID NO: 42552 - DNA, 201 bp, Homo sapiens
gcaaggccctggccgagtggctggtcctggaggccaacgggaggaaggcaatgttgcctggatgcacgtgctggcagcccgggagctggagcagcgggcarccctgatgggcggccaggtatacttctgctacgatggatcaccctacaggagctacgaggatttcaacatggagttcctgggcccctgcggactgcggct

SEQ ID NO: 42553 - DNA, 201 bp, Homo sapiens; identical to SEQ ID NO: 42499

SEQ ID NO: 42554 - DNA, 201 bp, Homo sapiens; identical to SEQ ID NO: 42500

SEQ ID NO: 42555 - DNA, 201 bp, Homo sapiens; identical to SEQ ID NO: 42501

SEQ ID NO: 42556 - DNA, 201 bp, Homo sapiens; identical to SEQ ID NO: 42502

SEQ ID NO: 42557 - DNA, 201 bp, Homo sapiens; identical to SEQ ID NO: 42503

SEQ ID NO: 42558 - DNA, 201 bp, Homo sapiens; identical to SEQ ID NO: 42506

SEQ ID NO: 42559 - DNA, 201 bp, Homo sapiens; identical to SEQ ID NO: 42494

SEQ ID NO: 42560 - DNA, 201 bp, Homo sapiens; identical to SEQ ID NO: 42498

SEQ ID NO: 42561 - DNA, 201 bp, Homo sapiens; identical to SEQ ID NO: 42499

SEQ ID NO: 42562 - DNA, 201 bp, Homo sapiens
tagatgaagcctccccgggggagaccagctgaatgagggttgtggtataggctgggcatggtggctcacgcctataattccagcactttgggaggccaagrcagaaggatcacttaaagccaggagtttaagaccagcccaggcaacaaagtcagatccccatctctacaaaaaaataagtaggcacggtggtgtgtgctt

SEQ ID NO: 42563 - DNA, 201 bp, Homo sapiens
ctaaattatgcataccttgtgaaatatacacctcaaaaaatgtagtggctttggtggtaataagtgtattactttagtatttcttcttagtcctagaaacyttagtagttttcattctacaagtgcctaaatgattattatgaaccatcattgatgacaaattgcatcctttatttctattaattttgcatataaatggat

SEQ ID NO: 42564 - DNA, 201 bp, Homo sapiens
gtttcagtaattgttcctttacttcaccttttcaggcctaggagttgtgatggctctttgctagacctgaactgtactgtccaatgtggtagctattgacracatgtgactatttaaacgaattaataaattcagtggcttagtcacattgaccacattttaagtgcttaataactatgtgtggctttggctactgtatta

SEQ ID NO: 42565 - DNA, 201 bp, Homo sapiens
cagctccagcgagtggaggaggccctgggcgccgcggggctcgacgcagcctcacccactctgctcctggccgaggcggtgctgacctacctcgagccggmgagtgccgcggccctcatcgcctgggcagcccagcgttttcctaatgcccttttcgtggtctatgagcagatgaggcctcaagacgcctttggccagttc

SEQ ID NO: 42566 - DNA, 201 bp, Homo sapiens
atttataagtgtcaataaagcaaacttttgatgcctcaattcattttgcacggggtataataatgttttgttccagatatactctccacctttcactgttytgtgctccaagaggctgacctttatgggctgcatcaaggagctctctttactttttggttgagttccaccagtcagaggcaccagaggggaatgggggca

SEQ ID NO: 42567 - DNA, 201 bp, Homo sapiens
tggcgagatgcgctcttcccggaagtgacgcacaagtgccggcggaaggggaagtccaggagcatgggtggtttttttccccctaccgaggtccgtgaggkgtgtgctaaccaaggggcggctcacaaccgtgacagactgccattcctgagtctcttctggccatgggcccccggagccgtgagcgtcgggcaggcgcgg

SEQ ID NO: 42568 - DNA, 201 bp, Homo sapiens
ctgcagtctgggaggtggattttccggacgtggcgcggcgcaaagcagaaaggattggagagacgccagagctgtgcgcgttaaccgggcctttcgagagkggggagcccgcgtccgcgctgtgctttgagagcgcagactactgcatcctgggtctggacttgcggcagctccagcgagtggaggaggccctgggcgccg

SEQ ID NO: 42569 - DNA, 201 bp, Homo sapiens
ttttcgtggtctatgagcagatgaggcctcaagacgcctttggccagttcatgctgcaacattttcggcagctaaactcccccctgcatggcctggagcgytttcctgacgtggaggcgcagcggcgccgcttccttcaagctggctggaccgcctgcggtgccgtggacatgaatgaattctatcactgctttcttcccg

SEQ ID NO: 42570 - DNA, 105 bp, Homo sapiens
aagcraacttagcactggctacaccctcctcaattctggttggcgagatgcgctcttcccggaagtgacgcacaagtgccggcggaaggggaagtccaggagcat

SEQ ID NO: 42571 - DNA, 201 bp, Homo sapiens
aagaccagcccaggcaacaaagtcagatccccatctctacaaaaaaataagtaggcacggtggtgtgtgcttgtagtcttggatactctggaggctgaggygatagtgagctgtgattgtgccactgcactcctgcctggttgacagagtgagaccccgtctcttaaaaagaaaaaaaaaaaaggttgttgtccaacttca

SEQ ID NO: 42572 - DNA, 201 bp, Homo sapiens
tgtaggaaacctgaaatgaacacagtcacagtttgattaaaacattgtcctgtttgttgcaacagaaaactcggatagttttaacaacaggaaacacttgkaggacttcctttaccaacatactttttaaatgttttgctattggttccatatttatttagatttataagtgtcaataaagcaaacttttgatgcctcaat

SEQ ID NO: 42573 - DNA, 201 bp, Homo sapiens
cactcctcctttccccatcctttttttcccttagcactattcagtgcaaaaagtgaaaaaggttggtaaaataggtaaaatacctagaaacaatcactacrgaaaacagctgaagacagtggccatgcagtccgagaggagtagtggtctgcctctaattttctaatctaagttcgtttattgagttacagtggtctttag

SEQ ID NO: 42574 - DNA, 198 bp, Homo sapiens
gcaacgcgctgagggactaggcagagccgtggaaccgccgccaggtcgctgtcggtccacgccgcccgtcgcgctgcccgcccgctcggcgtcggccrccgccatgggagtgcacgtggaaaccatctccccaggagactggcgcaccttcccgaagcgcagccagacctgcgtgatgcactacaccgggatgcttga

SEQ ID NO: 42575 - DNA, 201 bp, Homo sapiens
atcatcccaccacatgccactctcgtcttcgatgtggagcttctaaaactggaatgacaggaatggcctcctcccttagctccctgttcttggatctgccrtggagggatctggtgcctccagacgtgtgcacataaatccatatggagcttttcctgatgttccactccactttgtatagacatctgccccgactgaatg

SEQ ID NO: 42576 - DNA, 201 bp, Homo sapiens
agcttctaaaactggaatgacaggaatggcctcctcccttagctccctgttcttggatctgccatggagggatctggtgcctccagacgtgtgcacataartccatatggagcttttcctgatgttccactccactttgtatagacatctgccccgactgaatgtgttctgtcactcagctttgcttccgacacctctgtt

SEQ ID NO: 42577 - DNA, 201 bp, Homo sapiens
ctcgtcttcgatgtggagcttctaaaactggaatgacaggaatggcctcctcccttagctccctgttcttggatctgccatggagggatctggtgcctccrgacgtgtgcacataaatccatatggagcttttcctgatgttccactccactttgtatagacatctgccccgactgaatgtgttctgtcactcagctttgc

SEQ ID NO: 42578 - DNA, 201 bp, Homo sapiens
cgactgaatgtgttctgtcactcagctttgcttccgacacctctgtttcctcttcccctttctcctggtatgtgcgtttacctaaactatatgccataaaygtcaagttattcattttactttttcattttggggtgaagattcagtttcagtcttttgaatataggtttccaattaagtacatggtcaagtgttaacagc

SEQ ID NO: 42579 - DNA, 201 bp, Homo sapiens
tgttctgtcactcagctttgcttccgacacctctgtttcctcttcccctttctcctggtatgtgcgtttacctaaactatatgccataaacgtcaagttaytcattttactttttcattttggggtgaagattcagtttcagtcttttgaatataggtttccaattaagtacatggtcaagtgttaacagcacaagtgata

SEQ ID NO: 42580 - DNA, 201 bp, Homo sapiens
tctaaaactggaatgacaggaatggcctcctcccttagctccctgttcttggatctgccatggagggatctggtgcctccagacgtgtgcacataaatccwtatggagcttttcctgatgttccactccactttgtatagacatctgccccgactgaatgtgttctgtcactcagctttgcttccgacacctctgtttcct

SEQ ID NO: 42581 - DNA, 129 bp, Homo sapiens
tcctgtgtagtgatttggtgagaggaatcgttgctgcccccttcccctagcaccatatatgagtctcaagttttattattgcaataaaagtgctttatgcyggcttttctcaaaaaataaataaataaa

SEQ ID NO: 42582 - DNA, 111 bp, Homo sapiens
tgagaggaatcgttgctgcccccttcccctagcaccatatatgagtctcaagttttattattgcaataaaagtgctttatgctggcttttctcaaaaaatwaataaataaa

SEQ ID NO: 42583 - DNA, 201 bp, Homo sapiens
ctcgtcttcgatgtggagcttctaaaactggaatgacaggaatggcctcctcccttagctccctgttcttggatctgccatggagggatctggtgcctccrgacgtgtgcacataaatccatatggagcttttcctgatgttccactccactttgtatagacatctgccccgatgaattattctccaagttgagagatgtc

SEQ ID NO: 42584 - DNA, 169 bp, Homo sapiens
tggaaccgccgccaggtcgctgtcggtccacgccgcccgtcgcgctgcccgcccgctcggcgtcggccrccgccatgggagtgcacgtggaaaccatctccccaggagactggcgcaccttcccgaagcgcagccagacctgcgtgatgcactacaccgatgagtgtgg

SEQ ID NO: 42585 - DNA, 201 bp, Homo sapiens
tctaaaactggaatgacaggaatggcctcctcccttagctccctgttcttggatctgccatggagggatctggtgcctccagacgtgtgcacataaatccwtatggagcttttcctgatgttccactccactttgtatagacatctgccccgatgaattattctccaagttgagagatgtccttgggttaaattaaaagcc

SEQ ID NO: 42586 - DNA, 201 bp, Homo sapiens
atcatcccaccacatgccactctcgtcttcgatgtggagcttctaaaactggaatgacaggaatggcctcctcccttagctccctgttcttggatctgccrtggagggatctggtgcctccagacgtgtgcacataaatccatatggagcttttcctgatgttccactccactttgtatagacatctgccccgatgaatta

SEQ ID NO: 42587 - DNA, 201 bp, Homo sapiens
agcttctaaaactggaatgacaggaatggcctcctcccttagctccctgttcttggatctgccatggagggatctggtgcctccagacgtgtgcacataartccatatggagcttttcctgatgttccactccactttgtatagacatctgccccgatgaattattctccaagttgagagatgtccttgggttaaattaaa

SEQ ID NO: 42588 - DNA, 201 bp, Homo sapiens
caggcaacgcgctgagggactaggcagagccgtggaaccgccgccaggtcgctgtcggtccacgccgcccgtcgcgctgcccgcccgctcggcgtcggccrccgccatgggagtgcacgtggaaaccatctccccaggagactggcgcaccttcccgaagcgcagccagacctgcgtgatgcactacaccgggatgcttga

SEQ ID NO: 42589 - DNA, 201 bp, Homo sapiens; identical to SEQ ID NO: 42578

SEQ ID NO: 42590 - DNA, 201 bp, Homo sapiens; identical to SEQ ID NO: 42579

SEQ ID NO: 42591 - DNA, 129 bp, Homo sapiens; identical to SEQ ID NO: 42581

SEQ ID NO: 42592 - DNA, 111 bp, Homo sapiens; identical to SEQ ID NO: 42582

SEQ ID NO: 42593 - DNA, 201 bp, Homo sapiens
aaggcatgtgcccctagccgcgtggtggtggtagcctcagctgcccactgtcggggacgtcttgacttcaaacgcctggaccgcccagtggtgggctggcrgcaggagctgcgggcatatgctgacactaagctggctaatgtactgtttgcccgggagctcgccaaccagcttgaggccactggcgtcacctgctatgca

SEQ ID NO: 42594 - DNA, 201 bp, Homo sapiens
tgggtaggacggtcactgtcctctctcctggactggtcttcccagccctaaaccctgccccaggaagcccacagcctcacctgctgctgcccctctaggtmtgggcagccatgacctgcagggcccagagacactgtccttcccctcatccacccaaggccccagccagcgctcataccctgtcctttctccctgacccca

SEQ ID NO: 42595 - DNA, 201 bp, Homo sapiens
cactgtcctgggtgttgggcccttctggtggacaaggctgtgccaaccctgtacagaatcgagtgctgtagcctggccagaccccagagcccttgtgccawctttcttcctggccagagtgatggggttccagccatggggaagcaacccaatcctctgtctccttgctccaatggaggcagaagagcccaggacccaagc

SEQ ID NO: 42596 - DNA, 201 bp, Homo sapiens
ctttcttcctggccagagtgatggggttccagccatggggaagcaacccaatcctctgtctccttgctccaatggaggcagaagagcccaggacccaagcrtcttggcaggggtgctgtgaatgtccagtggtcccagctccccaccctggccctgccccagcctgtgtagctcttcctgcatgtggatgctgcatgtctg

SEQ ID NO: 42597 - DNA, 201 bp, Homo sapiens
gaattcaggctaaagttgagcctgagatccagctctcctaaccctcaggccaggatgcttgccatggcacttcatggtccttgaaaacctcggatgtgtgygaggccatgccctggacactgacgggtttgtgatcttgacctccgtggttactttctggggccccaagctgtgccctggacatctcttttcctggttgaa

SEQ ID NO: 42598 - DNA, 201 bp, Homo sapiens
atcctcagcagggggcaggaaccctacaaaggcctaagccatccctggcccacagggcgtctcttaccatggctcgagactaagggccacccaggctgctytggggttggagtgagttaaggaagggagggagagatgctggaccgggctgagaacagagtcagcgccaaccaggctgtcctcccactcttacctcctaga

SEQ ID NO: 42599 - DNA, 201 bp, Homo sapiens
tggcctcggtgcgggcctttgccactgcctttctgagctctgagccacggttggacatcctcatccacaatgccggtatcagttcctgtggccggacccgygaggcgtttaacctgctgcttcgggtgaaccatatcggtccctttctgctgacacatctgctgctgccttgcctgaaggcatgtgcccctagccgcgtgg

SEQ ID NO: 42600 - DNA, 201 bp, Homo sapiens
atctgagctccctgggcaagacgcagactgccgtggtgcagagagatgctgacattggcgtggccgaggctgaacgggacgcaggcatccgggaagctgaktgcaagaaggagatgctggatgtgaagttcatggcagacaccaagattgctgactctaagcgagccttcgagctgcaaaagtcagccttcagtgaggagg

SEQ ID NO: 42601 - DNA, 201 bp, Homo sapiens
ctggccgagctgcctgcctctgtgcatgccctcacaggcgtggacctgtctaagatacccctgatcaagaaggccactggtgtgcaggtgtgaggctcctrcaggcccactctcttcagcagccacccggccctccctccagcacccgttttaatcccacagaacaacgggaacgttactgactctggtgccttatctcga

SEQ ID NO: 42602 - DNA, 201 bp, Homo sapiens
cgagggtgaaaaggtgaagcaggtcctcttggcacaggcagaggctgagaagatccgcaaaatcggggaggcggaagcggcagtcatcgaggcgatgggcraggcagaggctgagcggatgaagctcaaggcagaagcctaccagaaatacggggatgcagccaagatggccttggtgctagaggccctgccccaggtgag

SEQ ID NO: 42603 - DNA, 201 bp, Homo sapiens
gcagccacccggccctccctccagcacccgttttaatcccacagaacaacgggaacgttactgactctggtgccttatctcgaagggaccagaagtgctgygtgttcaggccatctctggctgtcttcctgtctctcctgtctgtccacctcctcctcttcctctcctttaccccactttcactgccactttcatcaggtt

SEQ ID NO: 42604 - DNA, 201 bp, Homo sapiens
ccaccgcatccagcagattgccgagggtgaaaaggtgaagcaggtcctcttggcacaggcagaggctgagaagatccgcaaaatcggggaggcggaagcgrcagtcatcgaggcgatgggcaaggcagaggctgagcggatgaagctcaaggcagaagcctaccagaaatacggggatgcagccaagatggccttggtgct

SEQ ID NO: 42605 - DNA, 201 bp, Homo sapiens
cctggtgccttgaagttctctgtgcatctgtccatcctccctatggccctggccagagctcagcatgggcaggggttctgggtaggacggtcactgtcctytctcctggactggtcttcccagccctaaaccctgccccaggaagcccacagcctcacctgctgctgcccctctaggtctgggcagccatgacctgcaggg

SEQ ID NO: 42606 - DNA, 201 bp, Homo sapiens
gcggatgaagctcaaggcagaagcctaccagaaatacggggatgcagccaagatggccttggtgctagaggccctgccccaggtgaggcttccacccaagygggtcctagggttcaagtgtccttgcttgacaagctgggcaagtgccagaacttctctgggccttgcgagtaacacagggacagatggctagaagggtta

SEQ ID NO: 42607 - DNA, 201 bp, Homo sapiens
tcctgggtgttgggcccttctggtggacaaggctgtgccaaccctgtacagaatcgagtgctgtagcctggccagaccccagagcccttgtgccatctttyttcctggccagagtgatggggttccagccatggggaagcaacccaatcctctgtctccttgctccaatggaggcagaagagcccaggacccaagcgtctt

SEQ ID NO: 42608 - DNA, 179 bp, Homo sapiens
gcgtcttggcaggggtgctgtgaatgtccagtggtcccagctccccaccctggccctgccccagcctgtgtagctcttcctgcatgtggatgctgcatgtytggtctggggcttggatgttgcactgccccactgcctgtcccttctggtaaaataaagaactcttaatgcccacccct

SEQ ID NO: 42609 - DNA, 174 bp, Homo sapiens
ttggcaggggtgctgtgaatgtccagtggtcccagctccccaccctggccctgccccagcctgtgtagctcttcctgcatgtggatgctgcatgtctggtytggggcttggatgttgcactgccccactgcctgtcccttctggtaaaataaagaactcttaatgcccacccct

SEQ ID NO: 42610 - DNA, 201 bp, Homo sapiens
tgacttcaaacgcctggaccgcccagtggtgggctggcggcaggagctgcgggcatatgctgacactaagctggctaatgtactgtttgcccgggagctcsccaaccagcttgaggccactggcgtcacctgctatgcagcccacccagggcctgtgaactcggagctgttcctgcgccatgttcctggatggctgcgccc

SEQ ID NO: 42611 - DNA, 201 bp, Homo sapiens
cccgtgaggcgtttaacctgctgcttcgggtgaaccatatcggtccctttctgctgacacatctgctgctgccttgcctgaaggcatgtgcccctagccgygtggtggtggtagcctcagctgcccactgtcggggacgtcttgacttcaaacgcctggaccgcccagtggtgggctggcggcaggagctgcgggcatatg

SEQ ID NO: 42612 - DNA, 201 bp, Homo sapiens
ctatgggaggccagcaagaggctggcagggcttgggcctggggaggatgctgaacccgatgaagacccccagtctgaggactcagaggccccatcttctcwaagcaccccccaccctgaggagcccacagtttctcaaccttaccccagccctcagagctcaccagatttgtctaagatgacgcaccgaattcaggctaaa

SEQ ID NO: 42613 - DNA, 201 bp, Homo sapiens
gggagtttgcaatgtgatgcactgccaacattgagaattagtgaactgatccctttgcaaccgtctagctaggtagttaaattacccccatgttaatgaarcggaattaggctcccgagctaagggactcgcctagggtctcacagtgagtaggaggagggcctgggatctgaacccaagggtctgaggccagggccgact

SEQ ID NO: 42614 - DNA, 201 bp, Homo sapiens
cataccctgtcctttctccctgaccccaagggcacagaggcaaggcctcctgtctacagcagcttcctcagtttcctactgccttaggaggcccctgcttstgctcagggaaggcctcttcatgggcatgttcctgctggggcggtgcggtttggtcccaactctgctaagttttctgagatgagggtctagccctgttgg

SEQ ID NO: 42615 - DNA, 201 bp, Homo sapiens; identical to SEQ ID NO: 42593

SEQ ID NO: 42616 - DNA, 201 bp, Homo sapiens; identical to SEQ ID NO: 42594

SEQ ID NO: 42617 - DNA, 201 bp, Homo sapiens; identical to SEQ ID NO: 42595

SEQ ID NO: 42618 - DNA, 201 bp, Homo sapiens; identical to SEQ ID NO: 42596

SEQ ID NO: 42619 - DNA, 201 bp, Homo sapiens; identical to SEQ ID NO: 42597

SEQ ID NO: 42620 - DNA, 201 bp, Homo sapiens; identical to SEQ ID NO: 42600

SEQ ID NO: 42621 - DNA, 201 bp, Homo sapiens; identical to SEQ ID NO: 42599

SEQ ID NO: 42622 - DNA, 201 bp, Homo sapiens; identical to SEQ ID NO: 42601

SEQ ID NO: 42623 - DNA, 201 bp, Homo sapiens
cgagggtgaaaaggtgaagcaggtcctcttggcacaggcagaggctgagaagatccgcaaaatcggggaggcggaagcggcagtcatcgaggcgatgggcraggcagaggctgagcggatgaagctcaaggcagaagcctaccagaaatacggggatgcagccaagatggccttggtgctagaggccctgccccagattgc

SEQ ID NO: 42624 - DNA, 201 bp, Homo sapiens; identical to SEQ ID NO: 42603

SEQ ID NO: 42625 - DNA, 201 bp, Homo sapiens; identical to SEQ ID NO: 42604

SEQ ID NO: 42626 - DNA, 201 bp, Homo sapiens; identical to SEQ ID NO: 42605

SEQ ID NO: 42627 - DNA, 201 bp, Homo sapiens; identical to SEQ ID NO: 42607

SEQ ID NO: 42628 - DNA, 179 bp, Homo sapiens; identical to SEQ ID NO: 42608

SEQ ID NO: 42629 - DNA, 174 bp, Homo sapiens; identical to SEQ ID NO: 42609

SEQ ID NO: 42630 - DNA, 201 bp, Homo sapiens; identical to SEQ ID NO: 42610

SEQ ID NO: 42631 - DNA, 201 bp, Homo sapiens; identical to SEQ ID NO: 42611

SEQ ID NO: 42632 - DNA, 201 bp, Homo sapiens; identical to SEQ ID NO: 42612

SEQ ID NO: 42633 - DNA, 201 bp, Homo sapiens; identical to SEQ ID NO: 42613

SEQ ID NO: 42634 - DNA, 201 bp, Homo sapiens; identical to SEQ ID NO: 42614

SEQ ID NO: 42635 - DNA, 201 bp, Homo sapiens; identical to SEQ ID NO: 42612

SEQ ID NO: 42636 - DNA, 201 bp, Homo sapiens; identical to SEQ ID NO: 42613

SEQ ID NO: 42637 - DNA, 201 bp, Homo sapiens; identical to SEQ ID NO: 42597

SEQ ID NO: 42638 - DNA, 201 bp, Homo sapiens; identical to SEQ ID NO: 42593

SEQ ID NO: 42639 - DNA, 201 bp, Homo sapiens; identical to SEQ ID NO: 42594

SEQ ID NO: 42640 - DNA, 201 bp, Homo sapiens
gtctagccctgttggggacagaaaagtgtggacaaggctgtgccaaccctgtacagaatcgagtgctgtagcctggccagaccccagagcccttgtgccawctttcttcctggccagagtgatggggttccagccatggggaagcaacccaatcctctgtctccttgctccaatggaggcagaagagcccaggacccaagc

SEQ ID NO: 42641 - DNA, 201 bp, Homo sapiens; identical to SEQ ID NO: 42596

SEQ ID NO: 42642 - DNA, 201 bp, Homo sapiens; identical to SEQ ID NO: 42597

SEQ ID NO: 42643 - DNA, 201 bp, Homo sapiens; identical to SEQ ID NO: 42600

SEQ ID NO: 42644 - DNA, 201 bp, Homo sapiens; identical to SEQ ID NO: 42599

SEQ ID NO: 42645 - DNA, 201 bp, Homo sapiens; identical to SEQ ID NO: 42601

SEQ ID NO: 42646 - DNA, 201 bp, Homo sapiens; identical to SEQ ID NO: 42623

SEQ ID NO: 42647 - DNA, 201 bp, Homo sapiens; identical to SEQ ID NO: 42603

SEQ ID NO: 42648 - DNA, 201 bp, Homo sapiens; identical to SEQ ID NO: 42604

SEQ ID NO: 42649 - DNA, 201 bp, Homo sapiens; identical to SEQ ID NO: 42605

SEQ ID NO: 42650 - DNA, 201 bp, Homo sapiens
gccctgttggggacagaaaagtgtggacaaggctgtgccaaccctgtacagaatcgagtgctgtagcctggccagaccccagagcccttgtgccatctttyttcctggccagagtgatggggttccagccatggggaagcaacccaatcctctgtctccttgctccaatggaggcagaagagcccaggacccaagcgtctt

SEQ ID NO: 42651 - DNA, 172 bp, Homo sapiens
gcgtcttggcaggggtgctgtgaatgtccagtggtcccagctccccaccctggccctgccccagcctgtgtagctcttcctgcatgtggatgctgcatgtytggtctggggcttggatgttgcactgccccactgcctgtcccttctggtaaaataaagaactcttaatgcc

SEQ ID NO: 42652 - DNA, 167 bp, Homo sapiens
ttggcaggggtgctgtgaatgtccagtggtcccagctccccaccctggccctgccccagcctgtgtagctcttcctgcatgtggatgctgcatgtctggtytggggcttggatgttgcactgccccactgcctgtcccttctggtaaaataaagaactcttaatgcc

SEQ ID NO: 42653 - DNA, 201 bp, Homo sapiens; identical to SEQ ID NO: 42610

SEQ ID NO: 42654 - DNA, 201 bp, Homo sapiens; identical to SEQ ID NO: 42611

SEQ ID NO: 42655 - DNA, 201 bp, Homo sapiens; identical to SEQ ID NO: 42612

SEQ ID NO: 42656 - DNA, 201 bp, Homo sapiens; identical to SEQ ID NO: 42613

SEQ ID NO: 42657 - DNA, 201 bp, Homo sapiens; identical to SEQ ID NO: 42614

SEQ ID NO: 42658 - DNA, 201 bp, Homo sapiens; identical to SEQ ID NO: 42593

SEQ ID NO: 42659 - DNA, 201 bp, Homo sapiens; identical to SEQ ID NO: 42594

SEQ ID NO: 42660 - DNA, 201 bp, Homo sapiens; identical to SEQ ID NO: 42595

SEQ ID NO: 42661 - DNA, 201 bp, Homo sapiens; identical to SEQ ID NO: 42596

SEQ ID NO: 42662 - DNA, 201 bp, Homo sapiens; identical to SEQ ID NO: 42597

SEQ ID NO: 42663 - DNA, 201 bp, Homo sapiens; identical to SEQ ID NO: 42600

SEQ ID NO: 42664 - DNA, 201 bp, Homo sapiens; identical to SEQ ID NO: 42599

SEQ ID NO: 42665 - DNA, 201 bp, Homo sapiens; identical to SEQ ID NO: 42601

SEQ ID NO: 42666 - DNA, 201 bp, Homo sapiens; identical to SEQ ID NO: 42603

SEQ ID NO: 42667 - DNA, 201 bp, Homo sapiens; identical to SEQ ID NO: 42623

SEQ ID NO: 42668 - DNA, 201 bp, Homo sapiens; identical to SEQ ID NO: 42605

SEQ ID NO: 42669 - DNA, 201 bp, Homo sapiens; identical to SEQ ID NO: 42604

SEQ ID NO: 42670 - DNA, 201 bp, Homo sapiens; identical to SEQ ID NO: 42607

SEQ ID NO: 42671 - DNA, 179 bp, Homo sapiens; identical to SEQ ID NO: 42608

SEQ ID NO: 42672 - DNA, 174 bp, Homo sapiens; identical to SEQ ID NO: 42609

SEQ ID NO: 42673 - DNA, 201 bp, Homo sapiens; identical to SEQ ID NO: 42610

SEQ ID NO: 42674 - DNA, 201 bp, Homo sapiens; identical to SEQ ID NO: 42611

SEQ ID NO: 42675 - DNA, 201 bp, Homo sapiens; identical to SEQ ID NO: 42612

SEQ ID NO: 42676 - DNA, 201 bp, Homo sapiens; identical to SEQ ID NO: 42613

SEQ ID NO: 42677 - DNA, 201 bp, Homo sapiens; identical to SEQ ID NO: 42614

SEQ ID NO: 42678 - DNA, 201 bp, Homo sapiens; identical to SEQ ID NO: 42593

SEQ ID NO: 42679 - DNA, 201 bp, Homo sapiens; identical to SEQ ID NO: 42594

SEQ ID NO: 42680 - DNA, 201 bp, Homo sapiens; identical to SEQ ID NO: 42595

SEQ ID NO: 42681 - DNA, 201 bp, Homo sapiens; identical to SEQ ID NO: 42596

SEQ ID NO: 42682 - DNA, 201 bp, Homo sapiens; identical to SEQ ID NO: 42597

SEQ ID NO: 42683 - DNA, 201 bp, Homo sapiens; identical to SEQ ID NO: 42600

SEQ ID NO: 42684 - DNA, 201 bp, Homo sapiens; identical to SEQ ID NO: 42599

SEQ ID NO: 42685 - DNA, 201 bp, Homo sapiens; identical to SEQ ID NO: 42601

SEQ ID NO: 42686 - DNA, 201 bp, Homo sapiens; identical to SEQ ID NO: 42603

SEQ ID NO: 42687 - DNA, 201 bp, Homo sapiens; identical to SEQ ID NO: 42623

SEQ ID NO: 42688 - DNA, 201 bp, Homo sapiens; identical to SEQ ID NO: 42605

SEQ ID NO: 42689 - DNA, 201 bp, Homo sapiens; identical to SEQ ID NO: 42604

SEQ ID NO: 42690 - DNA, 201 bp, Homo sapiens; identical to SEQ ID NO: 42607

SEQ ID NO: 42691 - DNA, 179 bp, Homo sapiens; identical to SEQ ID NO: 42608

SEQ ID NO: 42692 - DNA, 174 bp, Homo sapiens; identical to SEQ ID NO: 42609

SEQ ID NO: 42693 - DNA, 201 bp, Homo sapiens; identical to SEQ ID NO: 42610

SEQ ID NO: 42694 - DNA, 201 bp, Homo sapiens; identical to SEQ ID NO: 42611

SEQ ID NO: 42695 - DNA, 201 bp, Homo sapiens; identical to SEQ ID NO: 42612

SEQ ID NO: 42696 - DNA, 201 bp, Homo sapiens; identical to SEQ ID NO: 42613

SEQ ID NO: 42697 - DNA, 201 bp, Homo sapiens; identical to SEQ ID NO: 42614

SEQ ID NO: 42698 - DNA, 201 bp, Homo sapiens; identical to SEQ ID NO: 42611

SEQ ID NO: 42699 - DNA, 201 bp, Homo sapiens; identical to SEQ ID NO: 42593

SEQ ID NO: 42700 - DNA, 201 bp, Homo sapiens; identical to SEQ ID NO: 42599

SEQ ID NO: 42701 - DNA, 201 bp, Homo sapiens; identical to SEQ ID NO: 42612

SEQ ID NO: 42702 - DNA, 201 bp, Homo sapiens; identical to SEQ ID NO: 42613

SEQ ID NO: 42703 - DNA, 201 bp, Homo sapiens; identical to SEQ ID NO: 42610

SEQ ID NO: 42704 - DNA, 201 bp, Homo sapiens; identical to SEQ ID NO: 42597

SEQ ID NO: 42705 - DNA, 201 bp, Homo sapiens; identical to SEQ ID NO: 42611

SEQ ID NO: 42706 - DNA, 201 bp, Homo sapiens; identical to SEQ ID NO: 42593

SEQ ID NO: 42707 - DNA, 201 bp, Homo sapiens; identical to SEQ ID NO: 42599

SEQ ID NO: 42708 - DNA, 201 bp, Homo sapiens; identical to SEQ ID NO: 42612

SEQ ID NO: 42709 - DNA, 201 bp, Homo sapiens; identical to SEQ ID NO: 42613

SEQ ID NO: 42710 - DNA, 201 bp, Homo sapiens; identical to SEQ ID NO: 42610

SEQ ID NO: 42711 - DNA, 201 bp, Homo sapiens; identical to SEQ ID NO: 42597

SEQ ID NO: 42712 - DNA, 174 bp, Homo sapiens; identical to SEQ ID NO: 42609

SEQ ID NO: 42713 - DNA, 201 bp, Homo sapiens; identical to SEQ ID NO: 42594

SEQ ID NO: 42714 - DNA, 201 bp, Homo sapiens; identical to SEQ ID NO: 42595

SEQ ID NO: 42715 - DNA, 201 bp, Homo sapiens; identical to SEQ ID NO: 42596

SEQ ID NO: 42716 - DNA, 201 bp, Homo sapiens; identical to SEQ ID NO: 42600

SEQ ID NO: 42717 - DNA, 201 bp, Homo sapiens; identical to SEQ ID NO: 42601

SEQ ID NO: 42718 - DNA, 201 bp, Homo sapiens; identical to SEQ ID NO: 42623

SEQ ID NO: 42719 - DNA, 201 bp, Homo sapiens; identical to SEQ ID NO: 42603

SEQ ID NO: 42720 - DNA, 201 bp, Homo sapiens; identical to SEQ ID NO: 42604

SEQ ID NO: 42721 - DNA, 201 bp, Homo sapiens; identical to SEQ ID NO: 42605

SEQ ID NO: 42722 - DNA, 201 bp, Homo sapiens; identical to SEQ ID NO: 42607

SEQ ID NO: 42723 - DNA, 201 bp, Homo sapiens; identical to SEQ ID NO: 42614

SEQ ID NO: 42724 - DNA, 179 bp, Homo sapiens; identical to SEQ ID NO: 42608

SEQ ID NO: 42725 - DNA, 201 bp, Homo sapiens; identical to SEQ ID NO: 42611

SEQ ID NO: 42726 - DNA, 201 bp, Homo sapiens; identical to SEQ ID NO: 42593

SEQ ID NO: 42727 - DNA, 201 bp, Homo sapiens
tctactacaacctggtgaaggccccgccgtgcggcggcatgggcaacctgcggggccgcacggccgtggtcacgggtatcagttcctgtggccggacccgygaggcgtttaacctgctgcttcgggtgaaccatatcggtccctttctgctgacacatctgctgctgccttgcctgaaggcatgtgcccctagccgcgtgg

SEQ ID NO: 42728 - DNA, 201 bp, Homo sapiens; identical to SEQ ID NO: 42612

SEQ ID NO: 42729 - DNA, 201 bp, Homo sapiens; identical to SEQ ID NO: 42613

SEQ ID NO: 42730 - DNA, 201 bp, Homo sapiens; identical to SEQ ID NO: 42610

SEQ ID NO: 42731 - DNA, 201 bp, Homo sapiens; identical to SEQ ID NO: 42597

SEQ ID NO: 42732 - DNA, 174 bp, Homo sapiens; identical to SEQ ID NO: 42609

SEQ ID NO: 42733 - DNA, 201 bp, Homo sapiens; identical to SEQ ID NO: 42594

SEQ ID NO: 42734 - DNA, 201 bp, Homo sapiens; identical to SEQ ID NO: 42595

SEQ ID NO: 42735 - DNA, 201 bp, Homo sapiens; identical to SEQ ID NO: 42596

SEQ ID NO: 42736 - DNA, 201 bp, Homo sapiens; identical to SEQ ID NO: 42600

SEQ ID NO: 42737 - DNA, 201 bp, Homo sapiens; identical to SEQ ID NO: 42601

SEQ ID NO: 42738 - DNA, 201 bp, Homo sapiens; identical to SEQ ID NO: 42623

SEQ ID NO: 42739 - DNA, 201 bp, Homo sapiens; identical to SEQ ID NO: 42603

SEQ ID NO: 42740 - DNA, 201 bp, Homo sapiens; identical to SEQ ID NO: 42604

SEQ ID NO: 42741 - DNA, 201 bp, Homo sapiens; identical to SEQ ID NO: 42605

SEQ ID NO: 42742 - DNA, 201 bp, Homo sapiens; identical to SEQ ID NO: 42607

SEQ ID NO: 42743 - DNA, 201 bp, Homo sapiens; identical to SEQ ID NO: 42614

SEQ ID NO: 42744 - DNA, 179 bp, Homo sapiens; identical to SEQ ID NO: 42608

SEQ ID NO: 42745 - DNA, 201 bp, Homo sapiens; identical to SEQ ID NO: 42593

SEQ ID NO: 42746 - DNA, 201 bp, Homo sapiens; identical to SEQ ID NO: 42594

SEQ ID NO: 42747 - DNA, 201 bp, Homo sapiens; identical to SEQ ID NO: 42595

SEQ ID NO: 42748 - DNA, 201 bp, Homo sapiens; identical to SEQ ID NO: 42596

SEQ ID NO: 42749 - DNA, 201 bp, Homo sapiens; identical to SEQ ID NO: 42597

SEQ ID NO: 42750 - DNA, 201 bp, Homo sapiens; identical to SEQ ID NO: 42600

SEQ ID NO: 42751 - DNA, 201 bp, Homo sapiens; identical to SEQ ID NO: 42599

SEQ ID NO: 42752 - DNA, 201 bp, Homo sapiens; identical to SEQ ID NO: 42601

SEQ ID NO: 42753 - DNA, 201 bp, Homo sapiens; identical to SEQ ID NO: 42623

SEQ ID NO: 42754 - DNA, 201 bp, Homo sapiens; identical to SEQ ID NO: 42603

SEQ ID NO: 42755 - DNA, 201 bp, Homo sapiens; identical to SEQ ID NO: 42604

SEQ ID NO: 42756 - DNA, 201 bp, Homo sapiens; identical to SEQ ID NO: 42605

SEQ ID NO: 42757 - DNA, 201 bp, Homo sapiens; identical to SEQ ID NO: 42607

SEQ ID NO: 42758 - DNA, 179 bp, Homo sapiens; identical to SEQ ID NO: 42608

SEQ ID NO: 42759 - DNA, 174 bp, Homo sapiens; identical to SEQ ID NO: 42609

SEQ ID NO: 42760 - DNA, 201 bp, Homo sapiens; identical to SEQ ID NO: 42610

SEQ ID NO: 42761 - DNA, 201 bp, Homo sapiens; identical to SEQ ID NO: 42611

SEQ ID NO: 42762 - DNA, 201 bp, Homo sapiens; identical to SEQ ID NO: 42612

SEQ ID NO: 42763 - DNA, 201 bp, Homo sapiens; identical to SEQ ID NO: 42613

SEQ ID NO: 42764 - DNA, 201 bp, Homo sapiens; identical to SEQ ID NO: 42614

SEQ ID NO: 42765 - DNA, 201 bp, Homo sapiens; identical to SEQ ID NO: 42593

SEQ ID NO: 42766 - DNA, 201 bp, Homo sapiens; identical to SEQ ID NO: 42594

SEQ ID NO: 42767 - DNA, 201 bp, Homo sapiens; identical to SEQ ID NO: 42640

SEQ ID NO: 42768 - DNA, 201 bp, Homo sapiens; identical to SEQ ID NO: 42596

SEQ ID NO: 42769 - DNA, 201 bp, Homo sapiens; identical to SEQ ID NO: 42597

SEQ ID NO: 42770 - DNA, 201 bp, Homo sapiens; identical to SEQ ID NO: 42600

SEQ ID NO: 42771 - DNA, 201 bp, Homo sapiens; identical to SEQ ID NO: 42599

SEQ ID NO: 42772 - DNA, 201 bp, Homo sapiens; identical to SEQ ID NO: 42601

SEQ ID NO: 42773 - DNA, 201 bp, Homo sapiens; identical to SEQ ID NO: 42623

SEQ ID NO: 42774 - DNA, 201 bp, Homo sapiens; identical to SEQ ID NO: 42603

SEQ ID NO: 42775 - DNA, 201 bp, Homo sapiens; identical to SEQ ID NO: 42604

SEQ ID NO: 42776 - DNA, 201 bp, Homo sapiens; identical to SEQ ID NO: 42605

SEQ ID NO: 42777 - DNA, 201 bp, Homo sapiens; identical to SEQ ID NO: 42650

SEQ ID NO: 42778 - DNA, 172 bp, Homo sapiens; identical to SEQ ID NO: 42651

SEQ ID NO: 42779 - DNA, 167 bp, Homo sapiens; identical to SEQ ID NO: 42652

SEQ ID NO: 42780 - DNA, 201 bp, Homo sapiens; identical to SEQ ID NO: 42610

SEQ ID NO: 42781 - DNA, 201 bp, Homo sapiens; identical to SEQ ID NO: 42611

SEQ ID NO: 42782 - DNA, 201 bp, Homo sapiens; identical to SEQ ID NO: 42612

SEQ ID NO: 42783 - DNA, 201 bp, Homo sapiens; identical to SEQ ID NO: 42613

SEQ ID NO: 42784 - DNA, 201 bp, Homo sapiens; identical to SEQ ID NO: 42614

SEQ ID NO: 42785 - DNA, 201 bp, Homo sapiens; identical to SEQ ID NO: 42594

SEQ ID NO: 42786 - DNA, 201 bp, Homo sapiens; identical to SEQ ID NO: 42595

SEQ ID NO: 42787 - DNA, 201 bp, Homo sapiens; identical to SEQ ID NO: 42596

SEQ ID NO: 42788 - DNA, 201 bp, Homo sapiens; identical to SEQ ID NO: 42597

SEQ ID NO: 42789 - DNA, 201 bp, Homo sapiens; identical to SEQ ID NO: 42600

SEQ ID NO: 42790 - DNA, 201 bp, Homo sapiens; identical to SEQ ID NO: 42601

SEQ ID NO: 42791 - DNA, 201 bp, Homo sapiens; identical to SEQ ID NO: 42623

SEQ ID NO: 42792 - DNA, 201 bp, Homo sapiens; identical to SEQ ID NO: 42603

SEQ ID NO: 42793 - DNA, 201 bp, Homo sapiens; identical to SEQ ID NO: 42604

SEQ ID NO: 42794 - DNA, 201 bp, Homo sapiens; identical to SEQ ID NO: 42605

SEQ ID NO: 42795 - DNA, 201 bp, Homo sapiens; identical to SEQ ID NO: 42607

SEQ ID NO: 42796 - DNA, 179 bp, Homo sapiens; identical to SEQ ID NO: 42608

SEQ ID NO: 42797 - DNA, 174 bp, Homo sapiens; identical to SEQ ID NO: 42609

SEQ ID NO: 42798 - DNA, 201 bp, Homo sapiens; identical to SEQ ID NO: 42612

SEQ ID NO: 42799 - DNA, 201 bp, Homo sapiens; identical to SEQ ID NO: 42613

SEQ ID NO: 42800 - DNA, 201 bp, Homo sapiens; identical to SEQ ID NO: 42614

SEQ ID NO: 42801 - DNA, 201 bp, Homo sapiens; identical to SEQ ID NO: 42611

SEQ ID NO: 42802 - DNA, 201 bp, Homo sapiens; identical to SEQ ID NO: 42593

SEQ ID NO: 42803 - DNA, 201 bp, Homo sapiens; identical to SEQ ID NO: 42599

SEQ ID NO: 42804 - DNA, 201 bp, Homo sapiens; identical to SEQ ID NO: 42612

SEQ ID NO: 42805 - DNA, 201 bp, Homo sapiens; identical to SEQ ID NO: 42613

SEQ ID NO: 42806 - DNA, 201 bp, Homo sapiens; identical to SEQ ID NO: 42610

SEQ ID NO: 42807 - DNA, 201 bp, Homo sapiens; identical to SEQ ID NO: 42597

SEQ ID NO: 42808 - DNA, 201 bp, Homo sapiens
gttttgaaaagagtggtcattgtacagcttgtctcactggaaaatatcctgtagaattagaatggtagctggtagggttggatgtgtgtagtttcaagatrgaaaggtggtcaagaagttatagtggtcacacctcatctatttactgttactcagttggtacaatgtaaaatgccatgcttatgtttacctttataagtt

SEQ ID NO: 42809 - DNA, 201 bp, Homo sapiens
aaacagtgttgtgtatctgtcagtagaaggactggtttcatctgtgcaagaagggatacagtttaaaaaacagaaagagaaaaagcacgatattatgatcyaagaaaatggaaatggtctggaatgttttgaaaagagtggtcattgtacagcttgtctcactggaaaatatcctgtagaattagaatggtagctggtagg

SEQ ID NO: 42810 - DNA, 201 bp, Homo sapiens
aatatctaggagcaaacagtgttgtgtatctgtcagtagaaggactggtttcatctgtgcaagaagggatacagtttaaaaaacagaaagagaaaaagcaygatattatgatccaagaaaatggaaatggtctggaatgttttgaaaagagtggtcattgtacagcttgtctcactggaaaatatcctgtagaattagaat

SEQ ID NO: 42811 - DNA, 201 bp, Homo sapiens
gttccggtgcatcgcctcaggagagtggcccacgcagctggatgtgccgcatgtgatcactctgggacgccgcagcgccggggtcaggagagtgctggtaytctgactagtgacgggagttcagcgccaacattcaaatcacacaagggaatgggtcttgtaaatcacgtctttactgaagacaatttgaaaaaatgacat

SEQ ID NO: 42812 - DNA, 201 bp, Homo sapiens
ctcctcaggaacaagatgacaccccagactgggtagccaggattaaaaacttgatgaaggaaacacccacagcatactccctgcttaaaatgcccagagaygttatttacgcagtatgagatcattatggaaatcgtcccttatgcgttgatcgtcttattccagcgtctgatataaatgacaaagagaaaaaaacatcgg

SEQ ID NO: 42813 - DNA, 201 bp, Homo sapiens
ttctgagctcgatgggccgagctggcagctggttggtgcttacaccttggccgcagcggcaggtccctccacgtgctttcggcggcgacctggagctggakgagtcggggatccgagaggaatgtggcgtgttccggtgcatcgcctcaggagagtggcccacgcagctggatgtgccgcatgtgatcactctgggacgcc

SEQ ID NO: 42814 - DNA, 201 bp, Homo sapiens
aataaaataccgtcgtggccagcagctagctattgaagcacctatggatgcagatttggttagctctgttccagaatctgctacgcctgctgctcttgctyatgcagggaagtgtggacttccatatgtggaggtgctgtgtaaaacctgatatgtagggagaaccttcattcagccaaacatgaggttaagacaacttgg

SEQ ID NO: 42815 - DNA, 201 bp, Homo sapiens
tctgatataaatgacaaagagaaaaaaacatcggaaacagaaggacgggtggtgtcttcagaatcttgtagcttcttatctattggtgcaagatattaccrtgaagtcttgcctggagaaattgtggaaatatccagacgtaatgtccgaactcttgatattatatcaaggtctgaaggaaaccctatggctttttgtatc

SEQ ID NO: 42816 - DNA, 201 bp, Homo sapiens
gagtggcccacgcagctggatgtgccgcatgtgatcactctgggacgccgcagcgccggggtcaggagagtgctggtattctgactagtgacgggagttcsgcgccaacattcaaatcacacaagggaatgggtcttgtaaatcacgtctttactgaagacaatttgaaaaaatgacatgtttcaaatcttggaattggac

SEQ ID NO: 42817 - DNA, 201 bp, Homo sapiens
tcaaggtctgaaggaaaccctatggctttttgtatctttgaatatgtttattttgcaagaccagacagtatgtttgaagaccaaatggtttatacaataarataccgtcgtggccagcagctagctattgaagcacctatggatgcagatttggttagctctgttccagaatctgctacgcctgctgctcttgctcatgca

SEQ ID NO: 42818 - DNA, 201 bp, Homo sapiens
aaacttgatgaaggaaacacccacagcatactccctgcttaaaatgcccagagatgttatttacgcagtatgagatcattatggaaatcgtcccttatgcrttgatcgtcttattccagcgtctgatataaatgacaaagagaaaaaaacatcggaaacagaaggacgggtggtgtcttcagaatcttgtagcttcttatc

SEQ ID NO: 42819 - DNA, 201 bp, Homo sapiens
agggttgtaaaaatctgtgaaaaagtttttcctacatttgattagaaaatgtgatccacagtatttagcgccctgatactataagctcagcaagtaacctrgtacgtttgaaataaaaaccaaatttttagaataaaacaatccctttatccttaatttaattaattatcatatagttttttaatgaagggcttgatcact

SEQ ID NO: 42820 - DNA, 201 bp, Homo sapiens
gatgccaaactcagccaaggagcagccccagtggccgagaggctagcctgtggtcgtcaggctttgggatgaagctggaggctgtcactccattcctgggsaagtatcgcccctttgtgggtcgctgttgccagacctgcacccccaagagctgggagtccctcttccacagaagcataacggacctaggcttctgcaatg

SEQ ID NO: 42821 - DNA, 201 bp, Homo sapiens
atgataggaggaaatgaaacttgtaagatcaggacaattgttatttttatgaaatgactttaaatatgaattttactaactgtacctaaatagcaaagccytatgtagattctgttagtgatgtatctcagggtattggtatttttgaagagtattgtgtccttagttttaattttgggtaaagaaaaaactaaaatctgg

SEQ ID NO: 42822 - DNA, 195 bp, Homo sapiens
attagttacaagcaacagcaccaacttatgtgacccttgaggggtggggctgtgagctcttaatttgtttttgattctgaaaatctctgcttcctggcatycaggagttagagattgagcctttcatcttctttctcaaaactagtttttgatgctttctttcctgggaatagtcactttttaattttatttaat

SEQ ID NO: 42823 - DNA, 201 bp, Homo sapiens; identical to SEQ ID NO: 42821

SEQ ID NO: 42824 - DNA, 195 bp, Homo sapiens; identical to SEQ ID NO: 42822

SEQ ID NO: 42825 - DNA, 201 bp, Homo sapiens; identical to SEQ ID NO: 42821

SEQ ID NO: 42826 - DNA, 201 bp, Homo sapiens
attagttacaagcaacagcaccaacttatgtgacccttgaggggtggggctgtgagctcttaatttgtttttgattctgaaaatctctgcttcctggcatycaggagttagagattgagcctttcatcttctttctcaaaactagtttttgatgctttctttcctgggaatagtcactttttaattttatttaataaactg

SEQ ID NO: 42827 - DNA, 199 bp, Homo sapiens
ctactaaaaatacaaaaaattagccgggcatggtggcacacgcctgtaatcccagctactcaggaggctgaggcaggagaatcgcttgaacccgggaggtrgaggttgcagtgagctgagattgcgccactgcacccccctaggcgacagagcgagactctgtctctaaataaataaataaataaataaatacaaactg

SEQ ID NO: 42828 - DNA, 117 bp, Homo sapiens
taatctgtttgaggatrtaggcactggtgtgaaggaacatggccctgtatcagaggtggcggtgtctccggctccaaggtttacaggcttgcaggctacacacggcagttgtgtcga

SEQ ID NO: 42829 - DNA, 201 bp, Homo sapiens
aggcactggtgtgaaggaacatggccctgtatcagaggtggcggtgtctccggctccaaggtttacaggcttgcaggctacacacggcagttgtgtcgacycctccacgctggttggcagagcggcttggcctttttgaggagctgtgggctgctcaggtaaagagattagcaagcatggcacagaaggaaccccggacta

SEQ ID NO: 42830 - DNA, 201 bp, Homo sapiens
ctatgaactgccctgcacactgcctgatgttcgcccaccggcccagatcctggcgggaactgcccctgcgactagctgactttggggctctacaccgggcygaagcctctggtggtctggggggactgacccgactgcggtgcttccagcaggatgacgctcacatcttctgtacaacagatcagctggaagcagagatcc

SEQ ID NO: 42831 - DNA, 201 bp, Homo sapiens
ggcactgggagcattatcaggaagacatgtttgccgtgcagcccccaggctctgacaggcctcccagctcccagagtgacgattctaccaggcatatcacrgatacactcgccctcaagcctatgaactgccctgcacactgcctgatgttcgcccaccggcccagatcctggcgggaactgcccctgcgactagctgact

SEQ ID NO: 42832 - DNA, 201 bp, Homo sapiens
cggaggctagaggcttcacgggatcagcttcgccagttgttcaaggctgagtatgcccatcgtggtttctccgaggtgaaaactcccacactgttttctaygaagctctgggaacagtcagggcactgggagcattatcaggaagacatgtttgccgtgcagcccccaggctctgacaggcctcccagctcccagagtgac

SEQ ID NO: 42833 - DNA, 201 bp, Homo sapiens
ctcaagtgaatggagaaccttatgatctggagcggcccttggagacagattctgacctcagatttctgacattcgattccccagaggggaaagcagtgttytggcactccagcacccatgtcctgggggcagcagctgaacaattcctaggtgctgttctctgcagaggtccaagtacagaatatggcttttaccatgatt

SEQ ID NO: 42834 - DNA, 201 bp, Homo sapiens
tctgggaggctgaggcggacggatcatgaggtcaggagatcaagaccaccctggctaacacggtgaaaccctgtctctactaaaaatacaaaaaattagcygggcatggtggcacacgcctgtaatcccagctactcaggaggctgaggcaggagaatcgcttgaacccgggaggtagaggttgcagtgagctgagattgc

SEQ ID NO: 42835 - DNA, 199 bp, Homo sapiens; identical to SEQ ID NO: 42827

SEQ ID NO: 42836 - DNA, 117 bp, Homo sapiens; identical to SEQ ID NO: 42828

SEQ ID NO: 42837 - DNA, 201 bp, Homo sapiens; identical to SEQ ID NO: 42829

SEQ ID NO: 42838 - DNA, 201 bp, Homo sapiens; identical to SEQ ID NO: 42830

SEQ ID NO: 42839 - DNA, 201 bp, Homo sapiens; identical to SEQ ID NO: 42831

SEQ ID NO: 42840 - DNA, 201 bp, Homo sapiens
ccacgagggacaagggtgtataatgcactagtggcgtttatcagggctgagtatgcccatcgtggtttctccgaggtgaaaactcccacactgttttctaygaagctctgggaacagtcagggcactgggagcattatcaggaagacatgtttgccgtgcagcccccaggctctgacaggcctcccagctcccagagtgac

SEQ ID NO: 42841 - DNA, 201 bp, Homo sapiens; identical to SEQ ID NO: 42833

SEQ ID NO: 42842 - DNA, 201 bp, Homo sapiens; identical to SEQ ID NO: 42834

SEQ ID NO: 42843 - DNA, 201 bp, Homo sapiens
cccagactaggatagtggccaactgcagtgaccccgagtggaatgagaccttccactaccagatccatggtgctgtgaagaacgtcctggagctcaccctytatgacaaggacatcctgggcagcgaccagctctctctgctcctgtttgacctgagaagcctcaagtgtggccaacctcacaaacacaccttcccactca

SEQ ID NO: 42844 - DNA, 201 bp, Homo sapiens
agtggaatgagaccttccactaccagatccatggtgctgtgaagaacgtcctggagctcaccctctatgacaaggacatcctgggcagcgaccagctctcyctgctcctgtttgacctgagaagcctcaagtgtggccaacctcacaaacacaccttcccactcaaccaccaggattcacaagagctgcaggtggaatttg

SEQ ID NO: 42845 - DNA, 201 bp, Homo sapiens
ttttgagaggcttgctcctgctcaggtcttgaagatgacagagaagtactgcctggaccgaggaatccccttccctagcatcgaggtgggccctgaggacrtggaggaggcccgtgagtgctatctgtttgccaaggctgaggacccccgctcccccattgtgctgcacttccccctggttaaccgtaccttccgcacaca

SEQ ID NO: 42846 - DNA, 178 bp, Homo sapiens
tggccacatcatgcaaatatagtctcaccattcctaggagctaaatgggtgtgtctagtaggggcatcagttcatcgggggagaggtgtgcacctgtatgkggggcaggagggtgtgcaagttcctggaggtgggttactccaaggcatgggcagtgcagagggagcctcgcctgggc

SEQ ID NO: 42847 - DNA, 201 bp, Homo sapiens
tgtggagagaatcaggtgagccacagagcccaccccagacacagaaggacctcagagggcccaagtcctcagacccacacagaacaggggctgagggcacygagaagccagctgtcctccttacactgagatggaaagcagagatgcatccatccacacttcctgcagagcggcccaagccccaaccccacctcgagctcc

SEQ ID NO: 42848 - DNA, 201 bp, Homo sapiens
cccaggttcacgtctgcagcagtaagatgggagctttgtccacggagcggctacagtactacactcaggaactgggggtccgggagcgcagtggccacagygtgtccctcatcgacctctggggcctccttgttgagtatctcctgtaccaggaggagaaccctgccaagctgtctgaccaacaggaggcggtccgccagg

SEQ ID NO: 42849 - DNA, 201 bp, Homo sapiens
tcaacaggccagacaccccctatggcatgatgaacttcacctatgagccccaggacttttatcggctggtggccctcagtcgatacaacgtcctgaacaaygtggagaccttgaagtgcgccctccagctggctctggaccggcaccaggctcgggagagggcaggggcctgaccaaggcaggaagcggaggactgtgaca

SEQ ID NO: 42850 - DNA, 201 bp, Homo sapiens
cactcttcgaacctggaccacagtctctggtgatgtgtgtagtggccacatcatgcaaatatagtctcaccattcctaggagctaaatgggtgtgtctagwaggggcatcagttcatcgggggagaggtgtgcacctgtatgtggggcaggagggtgtgcaagttcctggaggtgggttactccaaggcatgggcagtgca

SEQ ID NO: 42851 - DNA, 201 bp, Homo sapiens
ggctgcccagccatgctttgggcactctggccaaggtggctggcagacaagatgctgcccctcctgggggcagtgctgcttcagaagagagagaagagggkccctctgtggaggcactggcggcgggaaacctacccatactatgacctccaggtgaaggtgctgagggccacaaacatccggggcacagacctgctgtcc

SEQ ID NO: 42852 - DNA, 201 bp, Homo sapiens
atgcagggggaagcaaacctctcaccttccaaatccagggcaacaagctgactttgactggtgcccaggtgcgccagcttgctgtggggcagccccgcccrctgcaaatgccaccaaccatggtgaataatacaggcgtggtgaagattgtagtgagacaagcccctcgggatggactgactcctgttcctccattggccc

SEQ ID NO: 42853 - DNA, 201 bp, Homo sapiens
acagcaattctggctccttctccagctcctcctctggctcctcttccggtcctggcaccatcgccaggtgctgctcctgtcctggcttcatcacagactcyggttccagttatggctccatcgtctactccaggaacctctttagcctcagcttcaccggtaccagctccaacccctgtgttggctccatcatcaactcaa

SEQ ID NO: 42854 - DNA, 201 bp, Homo sapiens
atatcttgccttctcctccccctccttcacagattcctccttgttcttctcctgcctgcacccctcctcctgcctgtacccctccaccagctcatacacckcctccagcccaaacctgtcttgtaactccttcctctcctctcttgcttggtccaccttctgtgcccatctctgcctcagtcactaatctccccttgggct

SEQ ID NO: 42855 - DNA, 201 bp, Homo sapiens
ctctgcttgcccacttggcttgtgagaaaggtaactggggtccccatttaatcattgttcccaccagcgtgatgttgaactgggagatggagttgaaacgktggtgccccagctttaaaatcctcacttactatggagcccagaaagagaggaagctcaagcggcagggctggaccaagcccaatgcctttcatgtgtgta

SEQ ID NO: 42856 - DNA, 201 bp, Homo sapiens
ctcttctcaagctggtccacagtccttcacctgaagtcagtgcttcagcccccggagctgcccccttgaccatctcttctcctctccacgtgccatcctcmctccctgggccagcctcttctccaatgccaattcccaactcctctccccttgctagtcctgtgtcctctacagtctcagttccattgtcatcttcactcc

SEQ ID NO: 42857 - DNA, 201 bp, Homo sapiens
ctagtcaaacgcctccacaaggttttgaggccttttttactgcgccgagttaaggtggatgttgagaagcagatgcccaaaaagtacgagcatgttatccrctgcaggctctccaagcgtcaacgctgtctctatgatgacttcatggcacagaccacaactaaggagacactagccacaggccatttcatgagcgtcatc

SEQ ID NO: 42858 - DNA, 201 bp, Homo sapiens
ggtctccagcagatgctgggagaggtgtggatgaggcaccctcatccaccttgaagggaaaaaccaatggggctgacccagtccctgggcctgagaccctrattgttgcagatcctgtcctggaaccacagcttattcctgggccccagcctcttggaccccagccagttcacagacccaatcccctcctgtcacctgtgg

SEQ ID NO: 42859 - DNA, 201 bp, Homo sapiens; identical to SEQ ID NO: 42852

SEQ ID NO: 42860 - DNA, 201 bp, Homo sapiens
ccttttccgtcagcaccaaatccagctcctcctctggctcctcttccggtcctggcaccatcgccaggtgctgctcctgtcctggcttcatcacagactcyggttccagttatggctccatcgtctactccaggaacctctttagcctcagcttcaccggtaccagctccaacccctgtgttggctccatcatcaactcaa

SEQ ID NO: 42861 - DNA, 201 bp, Homo sapiens; identical to SEQ ID NO: 42854

SEQ ID NO: 42862 - DNA, 201 bp, Homo sapiens; identical to SEQ ID NO: 42855

SEQ ID NO: 42863 - DNA, 201 bp, Homo sapiens; identical to SEQ ID NO: 42856

SEQ ID NO: 42864 - DNA, 201 bp, Homo sapiens; identical to SEQ ID NO: 42857

SEQ ID NO: 42865 - DNA, 201 bp, Homo sapiens; identical to SEQ ID NO: 42858

SEQ ID NO: 42866 - DNA, 201 bp, Homo sapiens; identical to SEQ ID NO: 42852

SEQ ID NO: 42867 - DNA, 201 bp, Homo sapiens; identical to SEQ ID NO: 42853

SEQ ID NO: 42868 - DNA, 201 bp, Homo sapiens; identical to SEQ ID NO: 42854

SEQ ID NO: 42869 - DNA, 201 bp, Homo sapiens; identical to SEQ ID NO: 42855

SEQ ID NO: 42870 - DNA, 201 bp, Homo sapiens; identical to SEQ ID NO: 42856

SEQ ID NO: 42871 - DNA, 201 bp, Homo sapiens; identical to SEQ ID NO: 42857

SEQ ID NO: 42872 - DNA, 201 bp, Homo sapiens; identical to SEQ ID NO: 42858

SEQ ID NO: 42873 - DNA, 201 bp, Homo sapiens; identical to SEQ ID NO: 42852

SEQ ID NO: 42874 - DNA, 201 bp, Homo sapiens; identical to SEQ ID NO: 42853

SEQ ID NO: 42875 - DNA, 201 bp, Homo sapiens; identical to SEQ ID NO: 42854

SEQ ID NO: 42876 - DNA, 201 bp, Homo sapiens; identical to SEQ ID NO: 42855

SEQ ID NO: 42877 - DNA, 201 bp, Homo sapiens; identical to SEQ ID NO: 42856

SEQ ID NO: 42878 - DNA, 201 bp, Homo sapiens; identical to SEQ ID NO: 42857

SEQ ID NO: 42879 - DNA, 201 bp, Homo sapiens; identical to SEQ ID NO: 42858

SEQ ID NO: 42880 - DNA, 201 bp, Homo sapiens; identical to SEQ ID NO: 42852

SEQ ID NO: 42881 - DNA, 201 bp, Homo sapiens; identical to SEQ ID NO: 42853

SEQ ID NO: 42882 - DNA, 201 bp, Homo sapiens; identical to SEQ ID NO: 42854

SEQ ID NO: 42883 - DNA, 201 bp, Homo sapiens; identical to SEQ ID NO: 42855

SEQ ID NO: 42884 - DNA, 201 bp, Homo sapiens; identical to SEQ ID NO: 42856

SEQ ID NO: 42885 - DNA, 201 bp, Homo sapiens; identical to SEQ ID NO: 42857

SEQ ID NO: 42886 - DNA, 201 bp, Homo sapiens; identical to SEQ ID NO: 42858

SEQ ID NO: 42887 - DNA, 201 bp, Homo sapiens
gatgttgaggtggcccgcaatgaccagctggcctggctgtgggctgagagcacggccctcttcccgtctgtctacctggacgagacacttgcttcctccckccatggccgcaactttgtgagcttccgtgttcaggaggcccttcgtgtggctcgcacccaccatgccaaccatgcactcccagtctacgtcttcacacga

SEQ ID NO: 42888 - DNA, 201 bp, Homo sapiens
tagctggagaggctcaccccaggaaggagggaggccaccgacctactgggccgacggactcccacacagttcctgagctggtgccaggcaggtgacacctsctgcagcccccagcatgcgggcaggcccaggccccaccgttacattggccctggtgctggcggtggcatgggccatggagctcaagcccacagcaccacc

SEQ ID NO: 42889 - DNA, 201 bp, Homo sapiens
cagagcccccaggaagcccaggagggcatccataccagctcgcacccccctgttctaagggggaggggaagtccctgggaggccccttctctccctgccaraggggaaggagggtacagctgggctggggaggacctgaccctactcccttgccctagatagtttattattattattattttggggtctcttttgtaaatt

SEQ ID NO: 42890 - DNA, 201 bp, Homo sapiens
cagttcctgagctggtgccaggcaggtgacacctcctgcagcccccagcatgcgggcaggcccaggccccaccgttacattggccctggtgctggcggtgkcatgggccatggagctcaagcccacagcaccacccatcttcactggccggccctttgtggtagcgtgggacgtgcccacacaggactgtggcccacgcct

SEQ ID NO: 42891 - DNA, 201 bp, Homo sapiens
catgctggagacactgcgttatgtcaaggcagtgcggccccggcacctctggggcttctacctctttcctgactgctacaatcatgattatgtgcagaackgggagagctacacaggccgctgccctgatgttgaggtggcccgcaatgaccagctggcctggctgtgggctgagagcacggccctcttcccgtctgtcta

SEQ ID NO: 42892 - DNA, 201 bp, Homo sapiens
tcaccagtctgctggctctggcagccctggcctttacctggaccttgtaggggtctcctgcctagctgcctagcaagctggcctctaccacaagggctctyttaggcatgtaggaccctgcagggggtggacaaactggagtctggagtgggcagagcccccaggaagcccaggagggcatccataccagctcgcaccccc

SEQ ID NO: 42893 - DNA, 201 bp, Homo sapiens
tgctggctctggcagccctggcctttacctggaccttgtaggggtctcctgcctagctgcctagcaagctggcctctaccacaagggctctcttaggcatktaggaccctgcagggggtggacaaactggagtctggagtgggcagagcccccaggaagcccaggagggcatccataccagctcgcacccccctgttctaa

SEQ ID NO: 42894 - DNA, 193 bp, Homo sapiens
ccataccagctcgcacccccctgttctaagggggaggggaagtccctgggaggccccttctctccctgccagaggggaaggagggtacagctgggctgggkaggacctgaccctactcccttgccctagatagtttattattattattattttggggtctcttttgtaaattaaacataaaacaattgcttct

SEQ ID NO: 42895 - DNA, 201 bp, Homo sapiens
ccttgtaggggtctcctgcctagctgcctagcaagctggcctctaccacaagggctctcttaggcatgtaggaccctgcagggggtggacaaactggagtytggagtgggcagagcccccaggaagcccaggagggcatccataccagctcgcacccccctgttctaagggggaggggaagtccctgggaggccccttctc

SEQ ID NO: 42896 - DNA, 201 bp, Homo sapiens
gcctagcaagctggcctctaccacaagggctctcttaggcatgtaggaccctgcagggggtggacaaactggagtctggagtgggcagagcccccaggaarcccaggagggcatccataccagctcgcacccccctgttctaagggggaggggaagtccctgggaggccccttctctccctgccagaggggaaggagggta

SEQ ID NO: 42897 - DNA, 201 bp, Homo sapiens
catgtaggaccctgcagggggtggacaaactggagtctggagtgggcagagcccccaggaagcccaggagggcatccataccagctcgcacccccctgttytaagggggaggggaagtccctgggaggccccttctctccctgccagaggggaaggagggtacagctgggctggggaggacctgaccctactcccttgccc

SEQ ID NO: 42898 - DNA, 201 bp, Homo sapiens
taccttcctgcatctcagcaccaacagtttccgcctagtgcctggccatgcacctggtgaaccccagctgcgacctgtgggggagctcagttgggccgacmttgaccacctgcagacacacttccgctgccagtgctacttgggctggagtggtgagcaatgccagtgggaccataggcaggcagctggaggtgccagcga

SEQ ID NO: 42899 - DNA, 201 bp, Homo sapiens
ccctgatgttgaggtggcccgcaatgaccagctggcctggctgtgggctgagagcacggccctcttcccgtctgtctacctggacgagacacttgcttcckcccgccatggccgcaactttgtgagcttccgtgttcaggaggcccttcgtgtggctcgcacccaccatgccaaccatgcactcccagtctacgtcttcac

SEQ ID NO: 42900 - DNA, 201 bp, Homo sapiens; identical to SEQ ID NO: 42887

SEQ ID NO: 42901 - DNA, 162 bp, Homo sapiens
cggtggagggaagggccgggcggccggcgccgccgtgggaggtccgctgcccctttgtcccyacggggcctcctccaagccgggagagtgtcagcgctcgagagaaagtccggagagcctcactcttctgccgggcgagtgttacacggatagaagcctccc

SEQ ID NO: 42902 - DNA, 201 bp, Homo sapiens
acgagctgttccctgctttacccaaatgctgtcgtttctctggatcaagggttcttcacggtgtacaggttcctgagctggtgccaggcaggtgacacctsctgcagcccccagcatgcgggcaggcccaggccccaccgttacattggccctggtgctggcggtggcatgggccatggagctcaagcccacagcaccacc

SEQ ID NO: 42903 - DNA, 201 bp, Homo sapiens; identical to SEQ ID NO: 42889

SEQ ID NO: 42904 - DNA, 201 bp, Homo sapiens
aggttcctgagctggtgccaggcaggtgacacctcctgcagcccccagcatgcgggcaggcccaggccccaccgttacattggccctggtgctggcggtgkcatgggccatggagctcaagcccacagcaccacccatcttcactggccggccctttgtggtagcgtgggacgtgcccacacaggactgtggcccacgcct

SEQ ID NO: 42905 - DNA, 201 bp, Homo sapiens; identical to SEQ ID NO: 42891

SEQ ID NO: 42906 - DNA, 201 bp, Homo sapiens; identical to SEQ ID NO: 42892

SEQ ID NO: 42907 - DNA, 201 bp, Homo sapiens; identical to SEQ ID NO: 42893

SEQ ID NO: 42908 - DNA, 193 bp, Homo sapiens; identical to SEQ ID NO: 42894

SEQ ID NO: 42909 - DNA, 201 bp, Homo sapiens; identical to SEQ ID NO: 42895

SEQ ID NO: 42910 - DNA, 201 bp, Homo sapiens; identical to SEQ ID NO: 42896

SEQ ID NO: 42911 - DNA, 201 bp, Homo sapiens; identical to SEQ ID NO: 42897

SEQ ID NO: 42912 - DNA, 201 bp, Homo sapiens; identical to SEQ ID NO: 42898

SEQ ID NO: 42913 - DNA, 201 bp, Homo sapiens; identical to SEQ ID NO: 42899

SEQ ID NO: 42914 - DNA, 201 bp, Homo sapiens; identical to SEQ ID NO: 42887

SEQ ID NO: 42915 - DNA, 201 bp, Homo sapiens
cggagcgggctgggctgggcccgggatggcggtggccctggcgccggtcccggtggcgccccgcgcgagttcctgagctggtgccaggcaggtgacacctsctgcagcccccagcatgcgggcaggcccaggccccaccgttacattggccctggtgctggcggtggcatgggccatggagctcaagcccacagcaccacc

SEQ ID NO: 42916 - DNA, 201 bp, Homo sapiens; identical to SEQ ID NO: 42889

SEQ ID NO: 42917 - DNA, 201 bp, Homo sapiens
gagttcctgagctggtgccaggcaggtgacacctcctgcagcccccagcatgcgggcaggcccaggccccaccgttacattggccctggtgctggcggtgkcatgggccatggagctcaagcccacagcaccacccatcttcactggccggccctttgtggtagcgtgggacgtgcccacacaggactgtggcccacgcct

SEQ ID NO: 42918 - DNA, 201 bp, Homo sapiens; identical to SEQ ID NO: 42891

SEQ ID NO: 42919 - DNA, 201 bp, Homo sapiens; identical to SEQ ID NO: 42892

SEQ ID NO: 42920 - DNA, 201 bp, Homo sapiens; identical to SEQ ID NO: 42893

SEQ ID NO: 42921 - DNA, 186 bp, Homo sapiens
ccataccagctcgcacccccctgttctaagggggaggggaagtccctgggaggccccttctctccctgccagaggggaaggagggtacagctgggctgggkaggacctgaccctactcccttgccctagatagtttattattattattattttggggtctcttttgtaaattaaacataaaacaat

SEQ ID NO: 42922 - DNA, 201 bp, Homo sapiens; identical to SEQ ID NO: 42895

SEQ ID NO: 42923 - DNA, 201 bp, Homo sapiens; identical to SEQ ID NO: 42896

SEQ ID NO: 42924 - DNA, 201 bp, Homo sapiens; identical to SEQ ID NO: 42897

SEQ ID NO: 42925 - DNA, 201 bp, Homo sapiens; identical to SEQ ID NO: 42898

SEQ ID NO: 42926 - DNA, 201 bp, Homo sapiens; identical to SEQ ID NO: 42899

SEQ ID NO: 42927 - DNA, 201 bp, Homo sapiens
gatccactgtagtgcaggcattgggcgctctggcaccttctctctggtagacacttgtcttgttttgatggaaaaaggagatgatattaacataaaacaartgttactgaacatgagaaaataccgaatgggtcttattcagaccccagatcaactgagattctcatacatggctataatagaaggagcaaaatgtataaa

SEQ ID NO: 42928 - DNA, 201 bp, Homo sapiens; identical to SEQ ID NO: 42927

SEQ ID NO: 42929 - DNA, 172 bp, Homo sapiens
cacccaccagcagaagactttgcagaacctttaattggatgtgttaagtgtttttaatgagtgtatgaaatgtagaaagatgtacaagaaataaattaggrgagattactttgtattgtactgccattcctactgtatttttatactttttggcagcattaaatatttttgt

SEQ ID NO: 42930 - DNA, 177 bp, Homo sapiens
gcacaaaggagttacatcttaacacaggcaatgtcttcttttctcttcccataccctgtggcaaaaccagaggccctggacagctcttctgtagctccccstgcctcgcatatatcttcagagagtacaccaagccctggatggtgtctggtcgtcttcaaggacctgagcgggtgc

SEQ ID NO: 42931 - DNA, 201 bp, Homo sapiens; identical to SEQ ID NO: 42927

SEQ ID NO: 42932 - DNA, 184 bp, Homo sapiens
cacccaccagcagaagactttgcagaacctttaattggatgtgttaagtgtttttaatgagtgtatgaaatgtagaaagatgtacaagaaataaattaggrgagattactttgtattgtactgccattcctactgtatttttatactttttggcagcattaaatatttttgttaaatagtcttt

SEQ ID NO: 42933 - DNA, 201 bp, Homo sapiens
gaagctcttgtcagaagatgtgaagtcgtattatacagtacatctactacaattagaaaatatcaattgagagaatctggctccttgaaccctgaccatgrgcctgcggtgatccactgtagtgcaggcattgggcgctctggcaccttctctctggtagacacttgtcttgttttgatggaaaaaggagatgatattaac

SEQ ID NO: 42934 - DNA, 201 bp, Homo sapiens
aagcaagacctgaagcccactccggaaactaaagtgaggctcgctaaccctctagattgcctcacagttgtttgtttacaaagtaaactttacatccaggrgatgaagagcacccaccagcagaagactttgcagaacctttaattggatgtgttaagtgtttttaatgagtgtatgaaatgtagaaagatgtacaagaaa

SEQ ID NO: 42935 - DNA, 201 bp, Homo sapiens; identical to SEQ ID NO: 42927

SEQ ID NO: 42936 - DNA, 201 bp, Homo sapiens; identical to SEQ ID NO: 42927

SEQ ID NO: 42937 - DNA, 184 bp, Homo sapiens; identical to SEQ ID NO: 42932

SEQ ID NO: 42938 - DNA, 201 bp, Homo sapiens; identical to SEQ ID NO: 42927

SEQ ID NO: 42939 - DNA, 200 bp, Homo sapiens
gaatatctgctttaatatagctatcatttcttttccaaaattacttctctctatctggaatttaattaatcgaaatgaatttatctgaatataggaagcayatgcctacttgtaatttctaactccttatgtttgaagagaaacctccggtgtgagatatacaaatatatttaattgtgtcatattaaacttctgatttc

SEQ ID NO: 42940 - DNA, 201 bp, Homo sapiens
ccccccgctgagggtgatgaccgcttctccgagagcatcctgacctatgtggcccacacgtctgcgctgacctaccctcccgggccccggacccagctccrcgaggacctcctgccgcggaccctcggccagctccagccagatgagctcagccctaaggtggacagtggtgtggacagacaccatctgatggcggccctc

SEQ ID NO: 42941 - DNA, 201 bp, Homo sapiens
aactcggagagggctgcgagcatttccctcccgggagagatcagggcgacctgcacgcactgcgtagagcctggaagggaagtgagaaaccagccgaccgkccctgcccctcttcccgggatcacttaatgaaccacgtgttttgacatcatgtaaacctaagcacgtagagatgattcggatttgacaaaataacatttg

SEQ ID NO: 42942 - DNA, 201 bp, Homo sapiens
tacggcgcaggacagaccccccgctgagggtgatgaccgcttctccgagagcatcctgacctatgtggcccacacgtctgcgctgacctaccctcccgggycccggacccagctccgcgaggacctcctgccgcggaccctcggccagctccagccagatgagctcagccctaaggtggacagtggtgtggacagacacca

SEQ ID NO: 42943 - DNA, 201 bp, Homo sapiens
cctcctgaaggacctgcagaggcagccggctgaggtgaggggcctgagtggcctggagctggacggcatggctgagctgatggctggcctgatgcaaggcrtggaccatggagtagctcgaggcagccctgggagagcggccctgggagagtctggagaacaggcggatggccccaaggccaccctccgtggagacagctt

SEQ ID NO: 42944 - DNA, 201 bp, Homo sapiens
gcacaggcgatggagcacggattcataccctcctgaaggacctgcagaggcagccggctgaggtgaggggcctgagtggcctggagctggacggcatggcygagctgatggctggcctgatgcaaggcgtggaccatggagtagctcgaggcagccctgggagagcggccctgggagagtctggagaacaggcggatggcc

SEQ ID NO: 42945 - DNA, 201 bp, Homo sapiens
ctgggagattccgaagacccctccagcacaggcgatggagcacggattcataccctcctgaaggacctgcagaggcagccggctgaggtgaggggcctgartggcctggagctggacggcatggctgagctgatggctggcctgatgcaaggcgtggaccatggagtagctcgaggcagccctgggagagcggccctggga

SEQ ID NO: 42946 - DNA, 201 bp, Homo sapiens
cccagaaataggacaattcacttcattgaccaggatgatcacatggaaggcggcgcagaggcagctgtgtgggctgcagatttcctgtgtggggttcagcrtagaaaacgcacctccatcccgcccttcccacagcattcctccatcttagatagatggtactctccaaaggccctaccagagggaacacggcctactgag

SEQ ID NO: 42947 - DNA, 201 bp, Homo sapiens
cccggacctgtggggccccagagaggggacatttccctcctgggagagaaggagatcagggcaactcggagagggctgcgagcatttccctcccgggagaratcagggcgacctgcacgcactgcgtagagcctggaagggaagtgagaaaccagccgaccggccctgcccctcttcccgggatcacttaatgaaccacgt

SEQ ID NO: 42948 - DNA, 201 bp, Homo sapiens
caggaacttgcagacctcccgaaaacctacctgaggcgtcctgaagcatccagcccagccaggccctcaaaacacagcgttggcagcgagaggaggtacastcgggagggcggtgctgccctggccaacgccctccgacgccacctgcccttcctggaggccctgtcccaggccccagcctcagacgtgctcgccaggacc

SEQ ID NO: 42949 - DNA, 201 bp, Homo sapiens
ggacagaatgatgccaaaatattgcttatgtctctacatggtattgtaatgaatatctgctttaatatagctatcatttcttttccaaaattacttctctytatctggaatttaattaatcgaaatgaatttatctgaatataggaagcatatgcctacttgtaatttctaactccttatgtttgaagagaaacctccggt

SEQ ID NO: 42950 - DNA, 201 bp, Homo sapiens
cagtttgagttcgcgctgacagccgtggctgaggaggtgaacgccatcctcaaggcccttccccagtgagcggcagcctcaggggcctcaggggagccccyaccccacggatgttgtcaggaatcatgatctgactttaattgtgtgtcttctattataactgcatagtaatagggcccttagctctcccgtagtcagcgc

SEQ ID NO: 42951 - DNA, 201 bp, Homo sapiens
aggcgcggggctacatcgtgacagacagagaccccctgcgccccgaggaaggaaggcggctggtggaggacgtcgcccgcctcctgcaggtgcccagcagygcgttcgctgacgtggaggttctcggaccagcagtgaccttcaaagtgagcgccaatgtccaaaacgtgaccactgaggatgtggagaaggccacagttg

SEQ ID NO: 42952 - DNA, 176 bp, Homo sapiens
catttcttttccaaaattacttctctctatctggaatttaattaatcgaaatgaatttatctgaatataggaagcatatgcctacttgtaatttctaactmcttatgtttgaagagaaacctccggtgtgagatatacaaatatatttaattgtgtcatattaaacttctgatttc

SEQ ID NO: 42953 - DNA, 201 bp, Homo sapiens
gcatggtccagacgaaggagcagtttgagttcgcgctgacagccgtggctgaggaggtgaacgccatcctcaaggcccttccccagtgagcggcagcctcrggggcctcaggggagcccccaccccacggatgttgtcaggaatcatgatctgactttaattgtgtgtcttctattataactgcatagtaatagggccctt

SEQ ID NO: 42954 - DNA, 201 bp, Homo sapiens
atgaccgcttctccgagagcatcctgacctatgtggcccacacgtctgcgctgacctaccctcccgggccccggacccagctccgcgaggacctcctgccrcggaccctcggccagctccagccagatgagctcagccctaaggtggacagtggtgtggacagacaccatctgatggcggccctcagtgcctatgctgccc

SEQ ID NO: 42955 - DNA, 201 bp, Homo sapiens
tttgacaaaataacatttgagtatccgattcgccatcaccccctaccccagaaataggacaattcacttcattgaccaggatgatcacatggaaggcggcrcagaggcagctgtgtgggctgcagatttcctgtgtggggttcagcgtagaaaacgcacctccatcccgcccttcccacagcattcctccatcttagatag

SEQ ID NO: 42956 - DNA, 201 bp, Homo sapiens
aagcacgtagagatgattcggatttgacaaaataacatttgagtatccgattcgccatcaccccctaccccagaaataggacaattcacttcattgaccargatgatcacatggaaggcggcgcagaggcagctgtgtgggctgcagatttcctgtgtggggttcagcgtagaaaacgcacctccatcccgcccttcccac

SEQ ID NO: 42957 - DNA, 201 bp, Homo sapiens
ggagtggccggggaagctggcagcactcagtgaggccgcccggcacacaaggcacgtttggcatttctctttgagagagtttatcattgggagaagccgcrgggacagaactgaacgtcctgcagcttcggggcaagtgagacaatcacagctcctcgctgcgtctccatcaacactgcgccgggtaccatggacggcccc

SEQ ID NO: 42958 - DNA, 201 bp, Homo sapiens; identical to SEQ ID NO: 42942

SEQ ID NO: 42959 - DNA, 201 bp, Homo sapiens; identical to SEQ ID NO: 42943

SEQ ID NO: 42960 - DNA, 201 bp, Homo sapiens; identical to SEQ ID NO: 42944

SEQ ID NO: 42961 - DNA, 201 bp, Homo sapiens; identical to SEQ ID NO: 42954

SEQ ID NO: 42962 - DNA, 201 bp, Homo sapiens; identical to SEQ ID NO: 42945

SEQ ID NO: 42963 - DNA, 201 bp, Homo sapiens; identical to SEQ ID NO: 42948

SEQ ID NO: 42964 - DNA, 201 bp, Homo sapiens; identical to SEQ ID NO: 42940

SEQ ID NO: 42965 - DNA, 200 bp, Homo sapiens; identical to SEQ ID NO: 42939

SEQ ID NO: 42966 - DNA, 201 bp, Homo sapiens; identical to SEQ ID NO: 42940

SEQ ID NO: 42967 - DNA, 201 bp, Homo sapiens; identical to SEQ ID NO: 42941

SEQ ID NO: 42968 - DNA, 201 bp, Homo sapiens; identical to SEQ ID NO: 42942

SEQ ID NO: 42969 - DNA, 201 bp, Homo sapiens; identical to SEQ ID NO: 42943

SEQ ID NO: 42970 - DNA, 201 bp, Homo sapiens; identical to SEQ ID NO: 42944

SEQ ID NO: 42971 - DNA, 201 bp, Homo sapiens; identical to SEQ ID NO: 42945

SEQ ID NO: 42972 - DNA, 201 bp, Homo sapiens; identical to SEQ ID NO: 42946

SEQ ID NO: 42973 - DNA, 201 bp, Homo sapiens; identical to SEQ ID NO: 42947

SEQ ID NO: 42974 - DNA, 201 bp, Homo sapiens; identical to SEQ ID NO: 42948

SEQ ID NO: 42975 - DNA, 201 bp, Homo sapiens; identical to SEQ ID NO: 42949

SEQ ID NO: 42976 - DNA, 201 bp, Homo sapiens; identical to SEQ ID NO: 42950

SEQ ID NO: 42977 - DNA, 176 bp, Homo sapiens; identical to SEQ ID NO: 42952

SEQ ID NO: 42978 - DNA, 201 bp, Homo sapiens; identical to SEQ ID NO: 42953

SEQ ID NO: 42979 - DNA, 201 bp, Homo sapiens; identical to SEQ ID NO: 42954

SEQ ID NO: 42980 - DNA, 201 bp, Homo sapiens; identical to SEQ ID NO: 42955

SEQ ID NO: 42981 - DNA, 201 bp, Homo sapiens; identical to SEQ ID NO: 42956

SEQ ID NO: 42982 - DNA, 201 bp, Homo sapiens; identical to SEQ ID NO: 42957

SEQ ID NO: 42983 - DNA, 201 bp, Homo sapiens
tcaggttcttccccaatccaggtctccggaggctgaagcaggccatagagaagagggatcacatcgtggagatgcagctgaggcagcacaaggagagcctsgtggcaggccagtggagggacatgatggactacatgctccaaggggtggcgcagccgagcatggaagagggctctggacagctcctggaagggcacgtgc

SEQ ID NO: 42984 - DNA, 201 bp, Homo sapiens
cacatcgtggagatgcagctgaggcagcacaaggagagcctcgtggcaggccagtggagggacatgatggactacatgctccaaggggtggcgcagccgascatggaagagggctctggacagctcctggaagggcacgtgcacatggctgcagtggacctcctgatcggtggcactgagaccacagcaaacaccctctcc

SEQ ID NO: 42985 - DNA, 201 bp, Homo sapiens
cctcgtggcaggccagtggagggacatgatggactacatgctccaaggggtggcgcagccgagcatggaagagggctctggacagctcctggaagggcacbtgcacatggctgcagtggacctcctgatcggtggcactgagaccacagcaaacaccctctcctgggccgtggtttttttgcttcaccaccctgagattca

SEQ ID NO: 42986 - DNA, 201 bp, Homo sapiens
caggccatagagaagagggatcacatcgtggagatgcagctgaggcagcacaaggagagcctcgtggcaggccagtggagggacatgatggactacatgcyccaaggggtggcgcagccgagcatggaagagggctctggacagctcctggaagggcacgtgcacatggctgcagtggacctcctgatcggtggcactgag

SEQ ID NO: 42987 - DNA, 201 bp, Homo sapiens
ctggatgagacggtctgggagaggccacatgagttctggcctgatcgcttcctggagccaggcaagaactccagagctctggccttcggctgcggtgcccrcgtgtgcctgggcgagccgctggcgcgcctggagctcttcgtggtgctgacccgactgctgcaggccttcacgctgctgccctccggggacgccctgccc

SEQ ID NO: 42988 - DNA, 109 bp, Homo sapiens
tgggaaggyacctgagggtggggtcaagggaggccccaaaacagtctacacagcaggagggatggctggggctcttgagctataagtggcacctcagggccctgacggg

SEQ ID NO: 42989 - DNA, 201 bp, Homo sapiens
cacgaactgggccctggtgcctccagctcccgggtcccctacaaggaccgtgcacggctgcccttgctcaatgccaccatcgccgaggtgctgcgcctgcvgcccgttgtgcccttagccttgccccaccgcaccacacggcccagcagcatctccggctacgacatccctgagggcacagtcatcattccgaacctccaa

SEQ ID NO: 42990 - DNA, 201 bp, Homo sapiens
ccacgaactgggccctggtgcctccagctcccgggtcccctacaaggaccgtgcacggctgcccttgctcaatgccaccatcgccgaggtgctgcgcctgyggcccgttgtgcccttagccttgccccaccgcaccacacggcccagcagcatctccggctacgacatccctgagggcacagtcatcattccgaacctcca

SEQ ID NO: 42991 - DNA, 201 bp, Homo sapiens
acatgagttctggcctgatcgcttcctggagccaggcaagaactccagagctctggccttcggctgcggtgcccgcgtgtgcctgggcgagccgctggcgygcctggagctcttcgtggtgctgacccgactgctgcaggccttcacgctgctgccctccggggacgccctgccctccctgcagcccctgccccactgcag

SEQ ID NO: 42992 - DNA, 201 bp, Homo sapiens
cggagacaagatcaaggacgacaacttaatgcctgcctattacaaatgtatccaggaggtgttaaaaacctggagccactggtccatccaaattgtggacvtgattccctttctcaggttcttccccaatccaggtctccggaggctgaagcaggccatagagaagagggatcacatcgtggagatgcagctgaggcagca

SEQ ID NO: 42993 - DNA, 201 bp, Homo sapiens
ctgcagtgtcatcctcaagatgcagcctttccaagtgcggctgcagccccgggggatgggggcccacagcccgggccagagccagtgatggggcaggaccratgccagccgggtacctcagtttctcctttattgctcccgtacgaacccctcccctcccccctgtaaacacagtgctgcgagatcgctggcagagaaggc

SEQ ID NO: 42994 - DNA, 201 bp, Homo sapiens
ctagaccacgaactgggccctggtgcctccagctcccgggtcccctacaaggaccgtgcacggctgcccttgctcaatgccaccatcgccgaggtgctgcrcctgcggcccgttgtgcccttagccttgccccaccgcaccacacggcccagcagcatctccggctacgacatccctgagggcacagtcatcattccgaac

SEQ ID NO: 42995 - DNA, 201 bp, Homo sapiens
gctagaccacgaactgggccctggtgcctccagctcccgggtcccctacaaggaccgtgcacggctgcccttgctcaatgccaccatcgccgaggtgctgygcctgcggcccgttgtgcccttagccttgccccaccgcaccacacggcccagcagcatctccggctacgacatccctgagggcacagtcatcattccgaa

SEQ ID NO: 42996 - DNA, 201 bp, Homo sapiens
tggcacctcagggccctgacgggcgtcttgccatgctgctcctgggcctgctgctgctgctgcccctgctggctggcgcccgcctgctgtggaactggtgraagctccggagcctccacctcccgcctcttgccccgggcttcttgcacctgctgcagcccgacctccccatctatctgcttggcctgactcagaaattcg

SEQ ID NO: 42997 - DNA, 201 bp, Homo sapiens
gatcacatcgtggagatgcagctgaggcagcacaaggagagcctcgtggcaggccagtggagggacatgatggactacatgctccaaggggtggcgcagcygagcatggaagagggctctggacagctcctggaagggcacgtgcacatggctgcagtggacctcctgatcggtggcactgagaccacagcaaacaccctc

SEQ ID NO: 42998 - DNA, 201 bp, Homo sapiens
gcttcaccaccctgagattcagcagcgactgcaggaggagctagaccacgaactgggccctggtgcctccagctcccgggtcccctacaaggaccgtgcayggctgcccttgctcaatgccaccatcgccgaggtgctgcgcctgcggcccgttgtgcccttagccttgccccaccgcaccacacggcccagcagcatctc

SEQ ID NO: 42999 - DNA, 201 bp, Homo sapiens
tttttgcttcaccaccctgagattcagcagcgactgcaggaggagctagaccacgaactgggccctggtgcctccagctcccgggtcccctacaaggaccrtgcacggctgcccttgctcaatgccaccatcgccgaggtgctgcgcctgcggcccgttgtgcccttagccttgccccaccgcaccacacggcccagcagc

SEQ ID NO: 43000 - DNA, 201 bp, Homo sapiens
cgtcttgccatgctgctcctgggcctgctgctgctgctgcccctgctggctggcgcccgcctgctgtggaactggtggaagctccggagcctccacctcchgcctcttgccccgggcttcttgcacctgctgcagcccgacctccccatctatctgcttggcctgactcagaaattcgggcccatctacaggctccacctt

SEQ ID NO: 43001 - DNA, 201 bp, Homo sapiens
tgtaaacacagtgctgcgagatcgctggcagagaaggcttcctccagcggctgggtggtgaaggaccctggctcttctctcggggcgacccctcagtgctyggcagtcatactggggtgcgagagaggtgggcagcagctcagcctccccccgctggggagcgaaagtttcttggtctcagcttcatttccgtgaagggca

SEQ ID NO: 43002 - DNA, 201 bp, Homo sapiens
ctgctgcagcccgacctccccatctatctgcttggcctgactcagaaattcgggcccatctacaggctccaccttgggctgcaagacaagctggtgtctargaactacccggacctgtccttgggagactactccctgctctggaaagcccacaagaagctcacccgctcagccctgctgctgggcatccgtgactccatg

SEQ ID NO: 43003 - DNA, 201 bp, Homo sapiens
gctgcagccccgggggatgggggcccacagcccgggccagagccagtgatggggcaggaccgatgccagccgggtacctcagtttctcctttattgctccygtacgaacccctcccctcccccctgtaaacacagtgctgcgagatcgctggcagagaaggcttcctccagcggctgggtggtgaaggaccctggctcttc

SEQ ID NO: 43004 - DNA, 201 bp, Homo sapiens
cggctacgacatccctgagggcacagtcatcattccgaacctccaaggcgcccacctggatgagacggtctgggagaggccacatgagttctggcctgatygcttcctggagccaggcaagaactccagagctctggccttcggctgcggtgcccgcgtgtgcctgggcgagccgctggcgcgcctggagctcttcgtggt

SEQ ID NO: 43005 - DNA, 201 bp, Homo sapiens
ggcaccgagaactcgaagcccttccagtggtaccagctcactccctgggaaaggggttgtcaagagagagtcaaagccggatgtcccatctgctcttcccrttccccttaaggaggtagctcccagcactcaaccaacctccccgcagagctcccttcctgaccctccgctgcagaggattgaggcttaattctgagctgg

SEQ ID NO: 43006 - DNA, 201 bp, Homo sapiens
agggtggggtcaagggaggccccaaaacagtctacacagcaggagggatggctggggctcttgagctataagtggcacctcagggccctgacgggcgtctygccatgctgctcctgggcctgctgctgctgctgcccctgctggctggcgcccgcctgctgtggaactggtggaagctccggagcctccacctcccgcctc

SEQ ID NO: 43007 - DNA, 201 bp, Homo sapiens
ccgacctccccatctatctgcttggcctgactcagaaattcgggcccatctacaggctccaccttgggctgcaagacaagctggtgtctaggaactacccsgacctgtccttgggagactactccctgctctggaaagcccacaagaagctcacccgctcagccctgctgctgggcatccgtgactccatggagccagtgg

SEQ ID NO: 43008 - DNA, 201 bp, Homo sapiens
tccccatctatctgcttggcctgactcagaaattcgggcccatctacaggctccaccttgggctgcaagacaagctggtgtctaggaactacccggacctktccttgggagactactccctgctctggaaagcccacaagaagctcacccgctcagccctgctgctgggcatccgtgactccatggagccagtggtggagc

SEQ ID NO: 43009 - DNA, 201 bp, Homo sapiens
ctgctcctgggcctgctgctgctgctgcccctgctggctggcgcccgcctgctgtggaactggtggaagctccggagcctccacctcccgcctcttgcccygggcttcttgcacctgctgcagcccgacctccccatctatctgcttggcctgactcagaaattcgggcccatctacaggctccaccttgggctgcaagac

SEQ ID NO: 43010 - DNA, 201 bp, Homo sapiens
tgaagggcaccgagaactcgaagcccttccagtggtaccagctcactccctgggaaaggggttgtcaagagagagtcaaagccggatgtcccatctgctcytcccgttccccttaaggaggtagctcccagcactcaaccaacctccccgcagagctcccttcctgaccctccgctgcagaggattgaggcttaattctga

SEQ ID NO: 43011 - DNA, 201 bp, Homo sapiens
ctcccgcctcttgccccgggcttcttgcacctgctgcagcccgacctccccatctatctgcttggcctgactcagaaattcgggcccatctacaggctccwccttgggctgcaagacaagctggtgtctaggaactacccggacctgtccttgggagactactccctgctctggaaagcccacaagaagctcacccgctca

SEQ ID NO: 43012 - DNA, 201 bp, Homo sapiens
atgtatccaggaggtgttaaaaacctggagccactggtccatccaaattgtggacgtgattccctttctcaggttcttccccaatccaggtctccggaggytgaagcaggccatagagaagagggatcacatcgtggagatgcagctgaggcagcacaaggagagcctcgtggcaggccagtggagggacatgatggacta

SEQ ID NO: 43013 - DNA, 201 bp, Homo sapiens
ggctggggctcttgagctataagtggcacctcagggccctgacgggcgtcttgccatgctgctcctgggcctgctgctgctgctgcccctgctggctggcrcccgcctgctgtggaactggtggaagctccggagcctccacctcccgcctcttgccccgggcttcttgcacctgctgcagcccgacctccccatctatct

SEQ ID NO: 43014 - DNA, 201 bp, Homo sapiens
gtggagcagctgacccaggagttctgtgagcgcatgagagcccagcccggcacccctgtggccattgaggaggaattctctctcctcacctgcagcatcawctgttacctcaccttcggagacaagatcaaggacgacaacttaatgcctgcctattacaaatgtatccaggaggtgttaaaaacctggagccactggtcc

SEQ ID NO: 43015 - DNA, 201 bp, Homo sapiens
ccctgccctccctgcagcccctgccccactgcagtgtcatcctcaagatgcagcctttccaagtgcggctgcagccccgggggatgggggcccacagcccrggccagagccagtgatggggcaggaccgatgccagccgggtacctcagtttctcctttattgctcccgtacgaacccctcccctcccccctgtaaacaca

SEQ ID NO: 43016 - DNA, 201 bp, Homo sapiens
tccctgcagcccctgccccactgcagtgtcatcctcaagatgcagcctttccaagtgcggctgcagccccgggggatgggggcccacagcccgggccagarccagtgatggggcaggaccgatgccagccgggtacctcagtttctcctttattgctcccgtacgaacccctcccctcccccctgtaaacacagtgctgcg

SEQ ID NO: 43017 - DNA, 201 bp, Homo sapiens
cctcttgccccgggcttcttgcacctgctgcagcccgacctccccatctatctgcttggcctgactcagaaattcgggcccatctacaggctccaccttgrgctgcaagacaagctggtgtctaggaactacccggacctgtccttgggagactactccctgctctggaaagcccacaagaagctcacccgctcagccctg

SEQ ID NO: 43018 - DNA, 201 bp, Homo sapiens
cgggcttcttgcacctgctgcagcccgacctccccatctatctgcttggcctgactcagaaattcgggcccatctacaggctccaccttgggctgcaagamaagctggtgtctaggaactacccggacctgtccttgggagactactccctgctctggaaagcccacaagaagctcacccgctcagccctgctgctgggca

SEQ ID NO: 43019 - DNA, 201 bp, Homo sapiens
ggagccactggtccatccaaattgtggacgtgattccctttctcaggttcttccccaatccaggtctccggaggctgaagcaggccatagagaagagggaycacatcgtggagatgcagctgaggcagcacaaggagagcctcgtggcaggccagtggagggacatgatggactacatgctccaaggggtggcgcagccga

SEQ ID NO: 43020 - DNA, 201 bp, Homo sapiens
gagttctgtgagcgcatgagagcccagcccggcacccctgtggccattgaggaggaattctctctcctcacctgcagcatcatctgttacctcaccttcgsagacaagatcaaggacgacaacttaatgcctgcctattacaaatgtatccaggaggtgttaaaaacctggagccactggtccatccaaattgtggacgtg

SEQ ID NO: 43021 - DNA, 201 bp, Homo sapiens
agctgaggcagcacaaggagagcctcgtggcaggccagtggagggacatgatggactacatgctccaaggggtggcgcagccgagcatggaagagggctcyggacagctcctggaagggcacgtgcacatggctgcagtggacctcctgatcggtggcactgagaccacagcaaacaccctctcctgggccgtggtttttt

SEQ ID NO: 43022 - DNA, 201 bp, Homo sapiens
catggctgcagtggacctcctgatcggtggcactgagaccacagcaaacaccctctcctgggccgtggtttttttgcttcaccaccctgagattcagcagygactgcaggaggagctagaccacgaactgggccctggtgcctccagctcccgggtcccctacaaggaccgtgcacggctgcccttgctcaatgccaccat

SEQ ID NO: 43023 - DNA, 201 bp, Homo sapiens
acgctgctgccctccggggacgccctgccctccctgcagcccctgccccactgcagtgtcatcctcaagatgcagcctttccaagtgcggctgcagccccsggggatgggggcccacagcccgggccagagccagtgatggggcaggaccgatgccagccgggtacctcagtttctcctttattgctcccgtacgaacccc

SEQ ID NO: 43024 - DNA, 201 bp, Homo sapiens
ggactacatgctccaaggggtggcgcagccgagcatggaagagggctctggacagctcctggaagggcacgtgcacatggctgcagtggacctcctgatcdgtggcactgagaccacagcaaacaccctctcctgggccgtggtttttttgcttcaccaccctgagattcagcagcgactgcaggaggagctagaccacga

SEQ ID NO: 43025 - DNA, 201 bp, Homo sapiens
ggctgcagtggacctcctgatcggtggcactgagaccacagcaaacaccctctcctgggccgtggtttttttgcttcaccaccctgagattcagcagcgamtgcaggaggagctagaccacgaactgggccctggtgcctccagctcccgggtcccctacaaggaccgtgcacggctgcccttgctcaatgccaccatcgc

SEQ ID NO: 43026 - DNA, 201 bp, Homo sapiens
ggccttcggctgcggtgcccgcgtgtgcctgggcgagccgctggcgcgcctggagctcttcgtggtgctgacccgactgctgcaggccttcacgctgctgycctccggggacgccctgccctccctgcagcccctgccccactgcagtgtcatcctcaagatgcagcctttccaagtgcggctgcagccccgggggatggg

SEQ ID NO: 43027 - DNA, 201 bp, Homo sapiens
ctcgtggcaggccagtggagggacatgatggactacatgctccaaggggtggcgcagccgagcatggaagagggctctggacagctcctggaagggcacgkgcacatggctgcagtggacctcctgatcggtggcactgagaccacagcaaacaccctctcctgggccgtggtttttttgcttcaccaccctgagattcag

SEQ ID NO: 43028 - DNA, 201 bp, Homo sapiens
tgcagtggacctcctgatcggtggcactgagaccacagcaaacaccctctcctgggccgtggtttttttgcttcaccaccctgagattcagcagcgactgyaggaggagctagaccacgaactgggccctggtgcctccagctcccgggtcccctacaaggaccgtgcacggctgcccttgctcaatgccaccatcgccga

SEQ ID NO: 43029 - DNA, 201 bp, Homo sapiens
cgcccacctggatgagacggtctgggagaggccacatgagttctggcctgatcgcttcctggagccaggcaagaactccagagctctggccttcggctgcrgtgcccgcgtgtgcctgggcgagccgctggcgcgcctggagctcttcgtggtgctgacccgactgctgcaggccttcacgctgctgccctccggggacgc

SEQ ID NO: 43030 - DNA, 201 bp, Homo sapiens
agcatctccggctacgacatccctgagggcacagtcatcattccgaacctccaaggcgcccacctggatgagacggtctgggagaggccacatgagttctrgcctgatcgcttcctggagccaggcaagaactccagagctctggccttcggctgcggtgcccgcgtgtgcctgggcgagccgctggcgcgcctggagctc

SEQ ID NO: 43031 - DNA, 201 bp, Homo sapiens
ggccatagagaagagggatcacatcgtggagatgcagctgaggcagcacaaggagagcctcgtggcaggccagtggagggacatgatggactacatgctcyaaggggtggcgcagccgagcatggaagagggctctggacagctcctggaagggcacgtgcacatggctgcagtggacctcctgatcggtggcactgagac

SEQ ID NO: 43032 - DNA, 201 bp, Homo sapiens
atccaaattgtggacgtgattccctttctcaggttcttccccaatccaggtctccggaggctgaagcaggccatagagaagagggatcacatcgtggagawgcagctgaggcagcacaaggagagcctcgtggcaggccagtggagggacatgatggactacatgctccaaggggtggcgcagccgagcatggaagagggc

SEQ ID NO: 43033 - DNA, 201 bp, Homo sapiens
tggtccatccaaattgtggacgtgattccctttctcaggttcttccccaatccaggtctccggaggctgaagcaggccatagagaagagggatcacatcgwggagatgcagctgaggcagcacaaggagagcctcgtggcaggccagtggagggacatgatggactacatgctccaaggggtggcgcagccgagcatggaa

SEQ ID NO: 43034 - DNA, 201 bp, Homo sapiens
gctgctgctgctgcccctgctggctggcgcccgcctgctgtggaactggtggaagctccggagcctccacctcccgcctcttgccccgggcttcttgcacytgctgcagcccgacctccccatctatctgcttggcctgactcagaaattcgggcccatctacaggctccaccttgggctgcaagacaagctggtgtctag

SEQ ID NO: 43035 - DNA, 201 bp, Homo sapiens
tgagagcccagcccggcacccctgtggccattgaggaggaattctctctcctcacctgcagcatcatctgttacctcaccttcggagacaagatcaaggasgacaacttaatgcctgcctattacaaatgtatccaggaggtgttaaaaacctggagccactggtccatccaaattgtggacgtgattccctttctcaggt

SEQ ID NO: 43036 - DNA, 135 bp, Homo sapiens
ttccccttaaggaggtagctcccagcactcaaccaacctccccgcagagctcccttcctgaccctccgctgcagaggattgaggcttaattctgagctggycctttccagccaataaatcaactccagctccctc

SEQ ID NO: 43037 - DNA, 201 bp, Homo sapiens
ggctgcccttgctcaatgccaccatcgccgaggtgctgcgcctgcggcccgttgtgcccttagccttgccccaccgcaccacacggcccagcagcatctcyggctacgacatccctgagggcacagtcatcattccgaacctccaaggcgcccacctggatgagacggtctgggagaggccacatgagttctggcctgatc

SEQ ID NO: 43038 - DNA, 201 bp, Homo sapiens
tggctggcgcccgcctgctgtggaactggtggaagctccggagcctccacctcccgcctcttgccccgggcttcttgcacctgctgcagcccgacctcccmatctatctgcttggcctgactcagaaattcgggcccatctacaggctccaccttgggctgcaagacaagctggtgtctaggaactacccggacctgtcct

SEQ ID NO: 43039 - DNA, 201 bp, Homo sapiens
actgcagtgtcatcctcaagatgcagcctttccaagtgcggctgcagccccgggggatgggggcccacagcccgggccagagccagtgatggggcaggacygatgccagccgggtacctcagtttctcctttattgctcccgtacgaacccctcccctcccccctgtaaacacagtgctgcgagatcgctggcagagaagg

SEQ ID NO: 43040 - DNA, 201 bp, Homo sapiens
gacggtctgggagaggccacatgagttctggcctgatcgcttcctggagccaggcaagaactccagagctctggccttcggctgcggtgcccgcgtgtgcytgggcgagccgctggcgcgcctggagctcttcgtggtgctgacccgactgctgcaggccttcacgctgctgccctccggggacgccctgccctccctgca

SEQ ID NO: 43041 - DNA, 201 bp, Homo sapiens; identical to SEQ ID NO: 42983

SEQ ID NO: 43042 - DNA, 201 bp, Homo sapiens; identical to SEQ ID NO: 42984

SEQ ID NO: 43043 - DNA, 201 bp, Homo sapiens; identical to SEQ ID NO: 42985

SEQ ID NO: 43044 - DNA, 201 bp, Homo sapiens; identical to SEQ ID NO: 42986

SEQ ID NO: 43045 - DNA, 201 bp, Homo sapiens; identical to SEQ ID NO: 42987

SEQ ID NO: 43046 - DNA, 109 bp, Homo sapiens; identical to SEQ ID NO: 42988

SEQ ID NO: 43047 - DNA, 201 bp, Homo sapiens; identical to SEQ ID NO: 42989

SEQ ID NO: 43048 - DNA, 201 bp, Homo sapiens; identical to SEQ ID NO: 42990

SEQ ID NO: 43049 - DNA, 201 bp, Homo sapiens; identical to SEQ ID NO: 42991

SEQ ID NO: 43050 - DNA, 201 bp, Homo sapiens; identical to SEQ ID NO: 42992

SEQ ID NO: 43051 - DNA, 201 bp, Homo sapiens; identical to SEQ ID NO: 42993

SEQ ID NO: 43052 - DNA, 201 bp, Homo sapiens; identical to SEQ ID NO: 42994

SEQ ID NO: 43053 - DNA, 201 bp, Homo sapiens; identical to SEQ ID NO: 42995

SEQ ID NO: 43054 - DNA, 201 bp, Homo sapiens; identical to SEQ ID NO: 42996

SEQ ID NO: 43055 - DNA, 201 bp, Homo sapiens; identical to SEQ ID NO: 42997

SEQ ID NO: 43056 - DNA, 201 bp, Homo sapiens; identical to SEQ ID NO: 42998

SEQ ID NO: 43057 - DNA, 201 bp, Homo sapiens; identical to SEQ ID NO: 42999

SEQ ID NO: 43058 - DNA, 201 bp, Homo sapiens; identical to SEQ ID NO: 43000

SEQ ID NO: 43059 - DNA, 201 bp, Homo sapiens; identical to SEQ ID NO: 43001

SEQ ID NO: 43060 - DNA, 201 bp, Homo sapiens
gtggtgctgaactccaagaggaccattgaggaagccatggtcaaaaagtgggcagactttgctggcagacctgagccacttacctacaagctggtgtctargaactacccggacctgtccttgggagactactccctgctctggaaagcccacaagaagctcacccgctcagccctgctgctgggcatccgtgactccatg

SEQ ID NO: 43061 - DNA, 201 bp, Homo sapiens; identical to SEQ ID NO: 43003

SEQ ID NO: 43062 - DNA, 201 bp, Homo sapiens; identical to SEQ ID NO: 43004

SEQ ID NO: 43063 - DNA, 201 bp, Homo sapiens; identical to SEQ ID NO: 43005

SEQ ID NO: 43064 - DNA, 201 bp, Homo sapiens; identical to SEQ ID NO: 43006

SEQ ID NO: 43065 - DNA, 201 bp, Homo sapiens
actccaagaggaccattgaggaagccatggtcaaaaagtgggcagactttgctggcagacctgagccacttacctacaagctggtgtctaggaactacccsgacctgtccttgggagactactccctgctctggaaagcccacaagaagctcacccgctcagccctgctgctgggcatccgtgactccatggagccagtgg

SEQ ID NO: 43066 - DNA, 201 bp, Homo sapiens
agaggaccattgaggaagccatggtcaaaaagtgggcagactttgctggcagacctgagccacttacctacaagctggtgtctaggaactacccggacctktccttgggagactactccctgctctggaaagcccacaagaagctcacccgctcagccctgctgctgggcatccgtgactccatggagccagtggtggagc

SEQ ID NO: 43067 - DNA, 201 bp, Homo sapiens
ctgctcctgggcctgctgctgctgctgcccctgctggctggcgcccgcctgctgtggaactggtggaagctccggagcctccacctcccgcctcttgcccygggcttcttgcacctgctgcagcccgacctccccatctatctgcttggcctgactcagaaattcgggcccatctacaggctccaccttgggctgcaagat

SEQ ID NO: 43068 - DNA, 201 bp, Homo sapiens; identical to SEQ ID NO: 43010

SEQ ID NO: 43069 - DNA, 201 bp, Homo sapiens
ctcccgcctcttgccccgggcttcttgcacctgctgcagcccgacctccccatctatctgcttggcctgactcagaaattcgggcccatctacaggctccwccttgggctgcaagatgtggtggtgctgaactccaagaggaccattgaggaagccatggtcaaaaagtgggcagactttgctggcagacctgagccactt

SEQ ID NO: 43070 - DNA, 201 bp, Homo sapiens; identical to SEQ ID NO: 43012

SEQ ID NO: 43071 - DNA, 201 bp, Homo sapiens; identical to SEQ ID NO: 43013

SEQ ID NO: 43072 - DNA, 201 bp, Homo sapiens; identical to SEQ ID NO: 43014

SEQ ID NO: 43073 - DNA, 201 bp, Homo sapiens; identical to SEQ ID NO: 43015

SEQ ID NO: 43074 - DNA, 201 bp, Homo sapiens; identical to SEQ ID NO: 43016

SEQ ID NO: 43075 - DNA, 201 bp, Homo sapiens
cctcttgccccgggcttcttgcacctgctgcagcccgacctccccatctatctgcttggcctgactcagaaattcgggcccatctacaggctccaccttgrgctgcaagatgtggtggtgctgaactccaagaggaccattgaggaagccatggtcaaaaagtgggcagactttgctggcagacctgagccacttacctac

SEQ ID NO: 43076 - DNA, 201 bp, Homo sapiens
gcagcccgacctccccatctatctgcttggcctgactcagaaattcgggcccatctacaggctccaccttgggctgcaagatgtggtggtgctgaactccwagaggaccattgaggaagccatggtcaaaaagtgggcagactttgctggcagacctgagccacttacctacaagctggtgtctaggaactacccggacct

SEQ ID NO: 43077 - DNA, 201 bp, Homo sapiens
ggctgcaagatgtggtggtgctgaactccaagaggaccattgaggaagccatggtcaaaaagtgggcagactttgctggcagacctgagccacttacctamaagctggtgtctaggaactacccggacctgtccttgggagactactccctgctctggaaagcccacaagaagctcacccgctcagccctgctgctgggca

SEQ ID NO: 43078 - DNA, 201 bp, Homo sapiens; identical to SEQ ID NO: 43019

SEQ ID NO: 43079 - DNA, 201 bp, Homo sapiens; identical to SEQ ID NO: 43020

SEQ ID NO: 43080 - DNA, 201 bp, Homo sapiens; identical to SEQ ID NO: 43021

SEQ ID NO: 43081 - DNA, 201 bp, Homo sapiens; identical to SEQ ID NO: 43022

SEQ ID NO: 43082 - DNA, 201 bp, Homo sapiens; identical to SEQ ID NO: 43023

SEQ ID NO: 43083 - DNA, 201 bp, Homo sapiens; identical to SEQ ID NO: 43024

SEQ ID NO: 43084 - DNA, 201 bp, Homo sapiens; identical to SEQ ID NO: 43025

SEQ ID NO: 43085 - DNA, 201 bp, Homo sapiens; identical to SEQ ID NO: 43026

SEQ ID NO: 43086 - DNA, 201 bp, Homo sapiens; identical to SEQ ID NO: 43027

SEQ ID NO: 43087 - DNA, 201 bp, Homo sapiens; identical to SEQ ID NO: 43028

SEQ ID NO: 43088 - DNA, 201 bp, Homo sapiens; identical to SEQ ID NO: 43029

SEQ ID NO: 43089 - DNA, 201 bp, Homo sapiens; identical to SEQ ID NO: 43030

SEQ ID NO: 43090 - DNA, 201 bp, Homo sapiens; identical to SEQ ID NO: 43031

SEQ ID NO: 43091 - DNA, 201 bp, Homo sapiens; identical to SEQ ID NO: 43032

SEQ ID NO: 43092 - DNA, 201 bp, Homo sapiens; identical to SEQ ID NO: 43033

SEQ ID NO: 43093 - DNA, 201 bp, Homo sapiens
gctgctgctgctgcccctgctggctggcgcccgcctgctgtggaactggtggaagctccggagcctccacctcccgcctcttgccccgggcttcttgcacytgctgcagcccgacctccccatctatctgcttggcctgactcagaaattcgggcccatctacaggctccaccttgggctgcaagatgtggtggtgctgaa

SEQ ID NO: 43094 - DNA, 201 bp, Homo sapiens; identical to SEQ ID NO: 43035

SEQ ID NO: 43095 - DNA, 135 bp, Homo sapiens; identical to SEQ ID NO: 43036

SEQ ID NO: 43096 - DNA, 201 bp, Homo sapiens; identical to SEQ ID NO: 43037

SEQ ID NO: 43097 - DNA, 201 bp, Homo sapiens
tggctggcgcccgcctgctgtggaactggtggaagctccggagcctccacctcccgcctcttgccccgggcttcttgcacctgctgcagcccgacctcccmatctatctgcttggcctgactcagaaattcgggcccatctacaggctccaccttgggctgcaagatgtggtggtgctgaactccaagaggaccattgagg

SEQ ID NO: 43098 - DNA, 201 bp, Homo sapiens; identical to SEQ ID NO: 43039

SEQ ID NO: 43099 - DNA, 201 bp, Homo sapiens; identical to SEQ ID NO: 43040

SEQ ID NO: 43100 - DNA, 201 bp, Homo sapiens
ttatcccccatttttagtagagacggggttttagtagagacttggcctcccagaacccccttcctctgctcctccatgaatgacaattccaggcctccccsacctcatgtcctctcatttgggggattgctccgtgctgtccctttctctcaaggccgaagttgggaagtgagaaaccatgtttttaacttgtggctgctt

SEQ ID NO: 43101 - DNA, 201 bp, Homo sapiens
atgctggggctctgggggcagcggctccccgcggcgtgggtcctgcttctgttgcctttcctgccgctgctgctgcttgcagcccccgcgccccaccgcgmgtcctacaagccggtcatcgtggtgcatgggctcttcgacagctcgtacagcttccgccacctgctggaatacatcaatgagacacaccccgggactgtg

SEQ ID NO: 43102 - DNA, 201 bp, Homo sapiens
gggaacgctcgcgcggttgccagagaaagccccggacgtgacggatttgcgcgaccccaagcagcccgcccttccccctcccatccgtcattcccctgcgytctctttcctcacccttccccccgccaccgtgggttccagacttgggataagtaaacagcgggtggagcgaggcctacggacccaggccaggtgggagtc

SEQ ID NO: 43103 - DNA, 201 bp, Homo sapiens
atgcattaggaagatcctggacctagagaacaagtcccccgaacgctgagttggaggcgggacttcgggtgcgcgttggcgggagcatgctggggctctgsgggcagcggctccccgcggcgtgggtcctgcttctgttgcctttcctgccgctgctgctgcttgcagcccccgcgccccaccgcgcgtcctacaagccgg

SEQ ID NO: 43104 - DNA, 201 bp, Homo sapiens
tctcatttgggggattgctccgtgctgtccctttctctcaaggccgaagttgggaagtgagaaaccatgtttttaacttgtggctgcttttgctgctgctrctcctccgtatctggctgtatgggtggagaacccaccccctgcccaccacaggggtctccttccaggccactcaggacatttttagcttctctcctcccc

SEQ ID NO: 43105 - DNA, 201 bp, Homo sapiens
atttttagcttctctcctccccatgttcccttttttctctaaagtcccctgacatcagccctcccaactcctaagagggactacccatgagagtggggtthtgaggctcccctatggggacagttccgttcttgaagtgtcagtgttggggaatatctgtggcctatgaggcccatctcaggtttggggatcccccagtcc

SEQ ID NO: 43106 - DNA, 201 bp, Homo sapiens
ccattgcccctcctgtcctgggtctgtgttgcggggaacgctcgcgcggttgccagagaaagccccggacgtgacggatttgcgcgaccccaagcagcccgcccttccccctcccatccgtcattcccctgcgctctctttcctcacccttccccccgccaccgtgggttccagacttgggataagtaaacagcgggtgga

SEQ ID NO: 43107 - DNA, 201 bp, Homo sapiens
tggagaacccaccccctgcccaccacaggggtctccttccaggccactcaggacatttttagcttctctcctccccatgttcccttttttctctaaagtcycctgacatcagccctcccaactcctaagagggactacccatgagagtggggttctgaggctcccctatggggacagttccgttcttgaagtgtcagtgtt

SEQ ID NO: 43108 - DNA, 201 bp, Homo sapiens; identical to SEQ ID NO: 43100

SEQ ID NO: 43109 - DNA, 201 bp, Homo sapiens
ccttccccccgccaccgtgggttccagacttgggataagtaaacagcgggtggagcgaggcctacggacccaggccaggcgggagcatgctggggctctgsgggcagcggctccccgcggcgtgggtcctgcttctgttgcctttcctgccgctgctgctgcttgcagcccccgcgccccaccgcgcgtcctacaagccgg

SEQ ID NO: 43110 - DNA, 201 bp, Homo sapiens; identical to SEQ ID NO: 43101

SEQ ID NO: 43111 - DNA, 201 bp, Homo sapiens; identical to SEQ ID NO: 43104

SEQ ID NO: 43112 - DNA, 201 bp, Homo sapiens; identical to SEQ ID NO: 43105

SEQ ID NO: 43113 - DNA, 124 bp, Homo sapiens
ctcccatccgtcattcccctgcgytctctttcctcacccttccccccgccaccgtgggttccagacttgggataagtaaacagcgggtggagcgaggcctacggacccaggccaggcgggagca

SEQ ID NO: 43114 - DNA, 201 bp, Homo sapiens; identical to SEQ ID NO: 43107

SEQ ID NO: 43115 - DNA, 201 bp, Homo sapiens
ccccatgacctagtgctaggcgtggacgggcgcacctgcatggaggggtccccagagcccccaaccagtgccagcatactcagcgtggccgttcgggaggmggaaaaagatgagcgcgctctgaagcaggagattcacgagctgcgagggcgcctggagcggctggagcagtgggccggtcaggctggggcctgggtcaga

SEQ ID NO: 43116 - DNA, 201 bp, Homo sapiens
gttgcctgggcaagaactgcttcttcaattccttaacaaatgcaaccaccaacacccagatctctctctctctttattttcagtttttttgctgttatccrgataattaataaaaaccaaccacgcaaaactgggtcccaccctctccttttgctcccagcctacctccccagttgtgggaacaggtctggagtgagaggc

SEQ ID NO: 43117 - DNA, 201 bp, Homo sapiens
ttgcctgggcaagaactgcttcttcaattccttaacaaatgcaaccaccaacacccagatctctctctctctttattttcagtttttttgctgttatccarataattaataaaaaccaaccacgcaaaactgggtcccaccctctccttttgctcccagcctacctccccagttgtgggaacaggtctggagtgagaggca

SEQ ID NO: 43118 - DNA, 201 bp, Homo sapiens
ggcaagggcaggcatgagacctctgaattagaagggtccagcccccactgacaggaggctacactgggagggaaggtgaaggtgctgaggaaagctcccakgatgagcctgggagtgcttcaggtatcagcttccagccagagggcgagaagtcctcctcacaaatggatgagtccattgaatccatggactttggagtgg

SEQ ID NO: 43119 - DNA, 201 bp, Homo sapiens
tacagccaaccagtgtacaagccctacctgaccttgtgcgctgggaggcgcatctgcagcacttacaggaccatgtaccgcgttatgtggcgggaggtgargcgggaggttcagcagacccatgcagtgtgctgccagggctggaagaagcggcacccgggggcgctcacctgtgaagccatctgcgccaagccttgcctg

SEQ ID NO: 43120 - DNA, 201 bp, Homo sapiens
cttgggagcgcgtgggtgggtgaagggagcgaggataggaagtctatggagatttacaccagtttttttttttttttaaacaaaaacacagccagataatyattattcttcccttacgtccccccagcccccacctggggcagtcgctctcccggctgcgtcccttttcgtccatgtcctagcagagactacagagcagta

SEQ ID NO: 43121 - DNA, 201 bp, Homo sapiens
atgctggggctctgggggcagcggctccccgcggcgtgggtcctgcttctgttgcctttcctgccgctgctgctgcttgcagcccccgcgccccaccgcgmgtcctacaagccggtcatcgtggtgcatgggctcttcgacagctcgtacagcttccgccacctgctggaatacatcaatgagggggccttgtgtgccggg

SEQ ID NO: 43122 - DNA, 201 bp, Homo sapiens
cccatgacctagtgctaggcgtggacgggcgcacctgcatggaggggtccccagagcccccaaccagtgccagcatactcagcgtggccgttcgggaggcrgaaaaagatgagcgcgctctgaagcaggagattcacgagctgcgagggcgcctggagcggctggagcagtgggccggtcaggctggggcctgggtcagag

SEQ ID NO: 43123 - DNA, 201 bp, Homo sapiens
ttttcagtttttttgctgttatccagataattaataaaaaccaaccacgcaaaactgggtcccaccctctccttttgctcccagcctacctccccagttgkgggaacaggtctggagtgagaggcagggagtggctaatgccaccaggaagaaatgaaaactggctcagagagggggaagcctcaacagaaaaagaaataa

SEQ ID NO: 43124 - DNA, 201 bp, Homo sapiens
ctcagagagggggaagcctcaacagaaaaagaaataaattaaaagccctcctatcccctccagccagggttcgttcctttccccaactccccagggggcaraagtgagtgcagcacctgatgtctgcttcttccccttgtgtctggtgagatggtgcagcagggctgcagggggctgggtggggtcatgtccactgaagaa

SEQ ID NO: 43125 - DNA, 201 bp, Homo sapiens
atggaatgttcccctcccttgtgtaggctgagtcactggagatgagggggaggcaactgtcccacagacaagacagtaggaggtgggggtcaagagtggaractgcaccgaggcaagagtccatggatggggccaagagggggcaggagtggcgctgtatccacattcacttcagaagttgaagattccaaagaggagaat

SEQ ID NO: 43126 - DNA, 201 bp, Homo sapiens
aaaactgggtcccaccctctccttttgctcccagcctacctccccagttgtgggaacaggtctggagtgagaggcagggagtggctaatgccaccaggaaraaatgaaaactggctcagagagggggaagcctcaacagaaaaagaaataaattaaaagccctcctatcccctccagccagggttcgttcctttccccaac

SEQ ID NO: 43127 - DNA, 201 bp, Homo sapiens
agagtggagactgcaccgaggcaagagtccatggatggggccaagagggggcaggagtggcgctgtatccacattcacttcagaagttgaagattccaaakaggagaataagtggggagaggggagacaaggaagagggtttggccctgcttcagggcccactgggtgggtaggtgtggggaggaagatggggacagatgg

SEQ ID NO: 43128 - DNA, 201 bp, Homo sapiens
gacccactaatcctctgggattggccgactgtgagctgcagataaggctatcagccaccaaagagcaatgaacaatggaaacttcagagagctgaagaaasggggaggcctgtgttcttggcctgcccctgagtcttctggctgggggcaggttgcctgggcaagaactgcttcttcaattccttaacaaatgcaaccacc

SEQ ID NO: 43129 - DNA, 201 bp, Homo sapiens; identical to SEQ ID NO: 43103

SEQ ID NO: 43130 - DNA, 201 bp, Homo sapiens
gggagcgcgtgggtgggtgaagggagcgaggataggaagtctatggagatttacaccagtttttttttttttttaaacaaaaacacagccagataatcatwattcttcccttacgtccccccagcccccacctggggcagtcgctctcccggctgcgtcccttttcgtccatgtcctagcagagactacagagcagtacag

SEQ ID NO: 43131 - DNA, 200 bp, Homo sapiens
gtacagcgttattagtctttttatttgcttattgcatcttgggagcgcgtgggtgggtgaagggagcgaggataggaagtctatggagatttacaccagtttttttttttttttaaacaaaaacacagccagataatcattattcttcccttacgtccccccagcccccacctggggcagtcgctctcccggctgcgtcc

SEQ ID NO: 43132 - DNA, 201 bp, Homo sapiens
gcctgaagagctgcagccagaacaggtggctgagctgtggggccggggtgaccggatcgaatctctcagcgaccaggtgctgctgctggaggagaggctakgtgcctgctcctgtgaggacaacagcctgggcctcggcgtcaatcatcgataagaagcctctacagcacccctgccccctaatttatacagaaaccggac

SEQ ID NO: 43133 - DNA, 201 bp, Homo sapiens; identical to SEQ ID NO: 43115

SEQ ID NO: 43134 - DNA, 201 bp, Homo sapiens; identical to SEQ ID NO: 43116

SEQ ID NO: 43135 - DNA, 201 bp, Homo sapiens; identical to SEQ ID NO: 43117

SEQ ID NO: 43136 - DNA, 201 bp, Homo sapiens; identical to SEQ ID NO: 43118

SEQ ID NO: 43137 - DNA, 201 bp, Homo sapiens; identical to SEQ ID NO: 43120

SEQ ID NO: 43138 - DNA, 201 bp, Homo sapiens; identical to SEQ ID NO: 43119

SEQ ID NO: 43139 - DNA, 201 bp, Homo sapiens; identical to SEQ ID NO: 43101

SEQ ID NO: 43140 - DNA, 201 bp, Homo sapiens; identical to SEQ ID NO: 43122

SEQ ID NO: 43141 - DNA, 201 bp, Homo sapiens; identical to SEQ ID NO: 43123

SEQ ID NO: 43142 - DNA, 201 bp, Homo sapiens; identical to SEQ ID NO: 43124

SEQ ID NO: 43143 - DNA, 201 bp, Homo sapiens; identical to SEQ ID NO: 43126

SEQ ID NO: 43144 - DNA, 201 bp, Homo sapiens; identical to SEQ ID NO: 43125

SEQ ID NO: 43145 - DNA, 201 bp, Homo sapiens; identical to SEQ ID NO: 43128

SEQ ID NO: 43146 - DNA, 201 bp, Homo sapiens; identical to SEQ ID NO: 43127

SEQ ID NO: 43147 - DNA, 201 bp, Homo sapiens
cacttagctcaaggggcctcgaggactctctgcgtctctggagacaagggcactacacgcacttcagaatgaagagttgcgggagcatgctggggctctgsgggcagcggctccccgcggcgtgggtcctgcttctgttgcctttcctgccgctgctgctgcttgcagcccccgcgccccaccgcgcgtcctacaagccgg

SEQ ID NO: 43148 - DNA, 201 bp, Homo sapiens; identical to SEQ ID NO: 43130

SEQ ID NO: 43149 - DNA, 200 bp, Homo sapiens; identical to SEQ ID NO: 43131

SEQ ID NO: 43150 - DNA, 201 bp, Homo sapiens; identical to SEQ ID NO: 43132

SEQ ID NO: 43151 - DNA, 201 bp, Homo sapiens; identical to SEQ ID NO: 43117

SEQ ID NO: 43152 - DNA, 201 bp, Homo sapiens; identical to SEQ ID NO: 43120

SEQ ID NO: 43153 - DNA, 201 bp, Homo sapiens; identical to SEQ ID NO: 43119

SEQ ID NO: 43154 - DNA, 201 bp, Homo sapiens; identical to SEQ ID NO: 43101

SEQ ID NO: 43155 - DNA, 201 bp, Homo sapiens; identical to SEQ ID NO: 43115

SEQ ID NO: 43156 - DNA, 201 bp, Homo sapiens; identical to SEQ ID NO: 43122

SEQ ID NO: 43157 - DNA, 201 bp, Homo sapiens; identical to SEQ ID NO: 43123

SEQ ID NO: 43158 - DNA, 201 bp, Homo sapiens
ctcagagagggggaagcctcaacagaaaaagaaataaattaaaagccctcctatcccctccagccagggttcgttcctttccccaactccccagggggcaraagtgagtgcagcacctgatgtctgcttcttcagatagtcaccaccaccccggccatcagtggagatttcccggaaaacagtgagcatggagtgccggac

SEQ ID NO: 43159 - DNA, 201 bp, Homo sapiens; identical to SEQ ID NO: 43126

SEQ ID NO: 43160 - DNA, 201 bp, Homo sapiens; identical to SEQ ID NO: 43128

SEQ ID NO: 43161 - DNA, 201 bp, Homo sapiens; identical to SEQ ID NO: 43116

SEQ ID NO: 43162 - DNA, 201 bp, Homo sapiens; identical to SEQ ID NO: 43103

SEQ ID NO: 43163 - DNA, 201 bp, Homo sapiens; identical to SEQ ID NO: 43130

SEQ ID NO: 43164 - DNA, 200 bp, Homo sapiens; identical to SEQ ID NO: 43131

SEQ ID NO: 43165 - DNA, 201 bp, Homo sapiens; identical to SEQ ID NO: 43132

SEQ ID NO: 43166 - DNA, 201 bp, Homo sapiens; identical to SEQ ID NO: 43100

SEQ ID NO: 43167 - DNA, 201 bp, Homo sapiens; identical to SEQ ID NO: 43120

SEQ ID NO: 43168 - DNA, 201 bp, Homo sapiens; identical to SEQ ID NO: 43101

SEQ ID NO: 43169 - DNA, 201 bp, Homo sapiens; identical to SEQ ID NO: 43147

SEQ ID NO: 43170 - DNA, 201 bp, Homo sapiens; identical to SEQ ID NO: 43104

SEQ ID NO: 43171 - DNA, 201 bp, Homo sapiens; identical to SEQ ID NO: 43105

SEQ ID NO: 43172 - DNA, 201 bp, Homo sapiens; identical to SEQ ID NO: 43130

SEQ ID NO: 43173 - DNA, 200 bp, Homo sapiens; identical to SEQ ID NO: 43131

SEQ ID NO: 43174 - DNA, 201 bp, Homo sapiens; identical to SEQ ID NO: 43107

SEQ ID NO: 43175 - DNA, 201 bp, Homo sapiens; identical to SEQ ID NO: 43117

SEQ ID NO: 43176 - DNA, 201 bp, Homo sapiens; identical to SEQ ID NO: 43118

SEQ ID NO: 43177 - DNA, 201 bp, Homo sapiens; identical to SEQ ID NO: 43119

SEQ ID NO: 43178 - DNA, 201 bp, Homo sapiens; identical to SEQ ID NO: 43115

SEQ ID NO: 43179 - DNA, 201 bp, Homo sapiens; identical to SEQ ID NO: 43122

SEQ ID NO: 43180 - DNA, 201 bp, Homo sapiens; identical to SEQ ID NO: 43123

SEQ ID NO: 43181 - DNA, 201 bp, Homo sapiens; identical to SEQ ID NO: 43124

SEQ ID NO: 43182 - DNA, 201 bp, Homo sapiens; identical to SEQ ID NO: 43125

SEQ ID NO: 43183 - DNA, 201 bp, Homo sapiens; identical to SEQ ID NO: 43126

SEQ ID NO: 43184 - DNA, 201 bp, Homo sapiens; identical to SEQ ID NO: 43127

SEQ ID NO: 43185 - DNA, 201 bp, Homo sapiens; identical to SEQ ID NO: 43116

SEQ ID NO: 43186 - DNA, 201 bp, Homo sapiens; identical to SEQ ID NO: 43128

SEQ ID NO: 43187 - DNA, 201 bp, Homo sapiens; identical to SEQ ID NO: 43132

SEQ ID NO: 43188 - DNA, 201 bp, Homo sapiens; identical to SEQ ID NO: 43100

SEQ ID NO: 43189 - DNA, 201 bp, Homo sapiens; identical to SEQ ID NO: 43120

SEQ ID NO: 43190 - DNA, 201 bp, Homo sapiens; identical to SEQ ID NO: 43101

SEQ ID NO: 43191 - DNA, 201 bp, Homo sapiens; identical to SEQ ID NO: 43102

SEQ ID NO: 43192 - DNA, 201 bp, Homo sapiens; identical to SEQ ID NO: 43103

SEQ ID NO: 43193 - DNA, 201 bp, Homo sapiens; identical to SEQ ID NO: 43104

SEQ ID NO: 43194 - DNA, 201 bp, Homo sapiens; identical to SEQ ID NO: 43105

SEQ ID NO: 43195 - DNA, 201 bp, Homo sapiens; identical to SEQ ID NO: 43130

SEQ ID NO: 43196 - DNA, 201 bp, Homo sapiens; identical to SEQ ID NO: 43106

SEQ ID NO: 43197 - DNA, 200 bp, Homo sapiens; identical to SEQ ID NO: 43131

SEQ ID NO: 43198 - DNA, 201 bp, Homo sapiens; identical to SEQ ID NO: 43107

SEQ ID NO: 43199 - DNA, 201 bp, Homo sapiens; identical to SEQ ID NO: 43115

SEQ ID NO: 43200 - DNA, 201 bp, Homo sapiens; identical to SEQ ID NO: 43116

SEQ ID NO: 43201 - DNA, 201 bp, Homo sapiens; identical to SEQ ID NO: 43117

SEQ ID NO: 43202 - DNA, 201 bp, Homo sapiens; identical to SEQ ID NO: 43118

SEQ ID NO: 43203 - DNA, 201 bp, Homo sapiens; identical to SEQ ID NO: 43119

SEQ ID NO: 43204 - DNA, 201 bp, Homo sapiens; identical to SEQ ID NO: 43120

SEQ ID NO: 43205 - DNA, 201 bp, Homo sapiens; identical to SEQ ID NO: 43121

SEQ ID NO: 43206 - DNA, 201 bp, Homo sapiens; identical to SEQ ID NO: 43122

SEQ ID NO: 43207 - DNA, 201 bp, Homo sapiens; identical to SEQ ID NO: 43123

SEQ ID NO: 43208 - DNA, 201 bp, Homo sapiens; identical to SEQ ID NO: 43124

SEQ ID NO: 43209 - DNA, 201 bp, Homo sapiens; identical to SEQ ID NO: 43125

SEQ ID NO: 43210 - DNA, 201 bp, Homo sapiens; identical to SEQ ID NO: 43126

SEQ ID NO: 43211 - DNA, 201 bp, Homo sapiens; identical to SEQ ID NO: 43127

SEQ ID NO: 43212 - DNA, 201 bp, Homo sapiens; identical to SEQ ID NO: 43128

SEQ ID NO: 43213 - DNA, 201 bp, Homo sapiens; identical to SEQ ID NO: 43103

SEQ ID NO: 43214 - DNA, 201 bp, Homo sapiens; identical to SEQ ID NO: 43130

SEQ ID NO: 43215 - DNA, 200 bp, Homo sapiens; identical to SEQ ID NO: 43131

SEQ ID NO: 43216 - DNA, 201 bp, Homo sapiens; identical to SEQ ID NO: 43132

SEQ ID NO: 43217 - DNA, 201 bp, Homo sapiens; identical to SEQ ID NO: 43117

SEQ ID NO: 43218 - DNA, 201 bp, Homo sapiens; identical to SEQ ID NO: 43118

SEQ ID NO: 43219 - DNA, 201 bp, Homo sapiens; identical to SEQ ID NO: 43119

SEQ ID NO: 43220 - DNA, 201 bp, Homo sapiens; identical to SEQ ID NO: 43115

SEQ ID NO: 43221 - DNA, 201 bp, Homo sapiens; identical to SEQ ID NO: 43122

SEQ ID NO: 43222 - DNA, 201 bp, Homo sapiens; identical to SEQ ID NO: 43123

SEQ ID NO: 43223 - DNA, 201 bp, Homo sapiens; identical to SEQ ID NO: 43124

SEQ ID NO: 43224 - DNA, 201 bp, Homo sapiens; identical to SEQ ID NO: 43125

SEQ ID NO: 43225 - DNA, 201 bp, Homo sapiens; identical to SEQ ID NO: 43126

SEQ ID NO: 43226 - DNA, 201 bp, Homo sapiens; identical to SEQ ID NO: 43127

SEQ ID NO: 43227 - DNA, 201 bp, Homo sapiens; identical to SEQ ID NO: 43116

SEQ ID NO: 43228 - DNA, 201 bp, Homo sapiens; identical to SEQ ID NO: 43128

SEQ ID NO: 43229 - DNA, 201 bp, Homo sapiens; identical to SEQ ID NO: 43132

SEQ ID NO: 43230 - DNA, 201 bp, Homo sapiens; identical to SEQ ID NO: 43100

SEQ ID NO: 43231 - DNA, 201 bp, Homo sapiens; identical to SEQ ID NO: 43120

SEQ ID NO: 43232 - DNA, 201 bp, Homo sapiens; identical to SEQ ID NO: 43101

SEQ ID NO: 43233 - DNA, 201 bp, Homo sapiens; identical to SEQ ID NO: 43103

SEQ ID NO: 43234 - DNA, 201 bp, Homo sapiens; identical to SEQ ID NO: 43104

SEQ ID NO: 43235 - DNA, 201 bp, Homo sapiens
atttttagcttctctcctccccatgttcccttttttctctaaagtcccctgacatcagccctcccaactcctaagagggactacccatgagagtggggtthtgaggctcccctatggggacagttccgttcttgaagtgtcagtgttggggaagcctagtttctttgaggccccaggccctcttttaactacctttgaata

SEQ ID NO: 43236 - DNA, 201 bp, Homo sapiens; identical to SEQ ID NO: 43130

SEQ ID NO: 43237 - DNA, 200 bp, Homo sapiens; identical to SEQ ID NO: 43131

SEQ ID NO: 43238 - DNA, 201 bp, Homo sapiens; identical to SEQ ID NO: 43107

SEQ ID NO: 43239 - DNA, 109 bp, Homo sapiens
attttccgkcaagttttagccaatgagttgatttggagccatacgctccaaagtccaatagcaatccggacattctctaaaagaggaagcgaaggaaagaaaggggctt

SEQ ID NO: 43240 - DNA, 201 bp, Homo sapiens
gggggaaggaggatggattgagagaatgtctttctcctctcctaagtctttgctttccctgatttcttgatttgatcttcaaaggtgggcaaagttccctytgactcttcccccactccccatcttactgatttaatttaatttttcactccccagagtctaatatggattctgactcttaagtgcttccgccccctcact

SEQ ID NO: 43241 - DNA, 180 bp, Homo sapiens
attttccgtcaagttttagccaatgagttgatttggagccatacgctccaaagtccaatagcaatccggacattctctaraagaggaagcgaaggaaagaaaggggcttatagtgggcgaggtctataggtagtcccgagcaaattgcttatggctttggttatgactgacaactactca

SEQ ID NO: 43242 - DNA, 172 bp, Homo sapiens
ttgatcttcaaaggtgggcaaagttccctctgactcttcccccactccccatcttactgatttaatttaatttttcactccccagagtctaatatggattytgactcttaagtgcttccgccccctcactacctcctttaatacaaattcaataaaaaaggtgaaatatatt

SEQ ID NO: 43243 - DNA, 166 bp, Homo sapiens
ttcaaaggtgggcaaagttccctctgactcttcccccactccccatcttactgatttaatttaatttttcactccccagagtctaatatggattctgactyttaagtgcttccgccccctcactacctcctttaatacaaattcaataaaaaaggtgaaatatatt

SEQ ID NO: 43244 - DNA, 201 bp, Homo sapiens
gcagagagaaggttgtcccgctttatgggcgagggagccagaagccccaggatcccagattaaaaactccaccccgcccccagggccagagaccagctccrgagagcagagggggattccagccatttggtgataccgggggcttccacttctcatttggtgttggtgcttttccctttggctttttcaccaccgtcttca

SEQ ID NO: 43245 - DNA, 201 bp, Homo sapiens
ctgtggtcagtgtgtgtggccacctgtactgttggccatgtcttcatcagtggctggagacacggccagaacggcaagagtgtccagtatgtaaagctggkatcagcagagagaaggttgtcccgctttatgggcgagggagccagaagccccaggatcccagattaaaaactccaccccgcccccagggccagagaccag

SEQ ID NO: 43246 - DNA, 201 bp, Homo sapiens
cagaacggcaagagtgtccagtatgtaaagctgggatcagcagagagaaggttgtcccgctttatgggcgagggagccagaagccccaggatcccagattraaaactccaccccgcccccagggccagagaccagctccggagagcagagggggattccagccatttggtgataccgggggcttccacttctcatttggtg

SEQ ID NO: 43247 - DNA, 201 bp, Homo sapiens
ctccagccagagaagaatcagtattgagggggaaggaggatggattgagagaatgtctttctcctctcctaagtctttgctttccctgatttcttgatttsatcttcaaaggtgggcaaagttccctctgactcttcccccactccccatcttactgatttaatttaatttttcactccccagagtctaatatggattctg

SEQ ID NO: 43248 - DNA, 201 bp, Homo sapiens
ttggtgttggtgcttttccctttggctttttcaccaccgtcttcaatgcccatgagcctttccgccggggtacaggtgtggatctgggacagggtcacccrgcctccagctggcaggattccctcttcctgtttctcgccatcttcttctttttttggctgctcagtatttgagctatgtctgcttcctgcccacctccag

SEQ ID NO: 43249 - DNA, 201 bp, Homo sapiens
gtgggcgaggtctataggtagtcccgagcaaattgcttatggctttggttatgactgacaactactcagacgaataaagccctccttggccaggcgacagsgtgtagcgagttattaccaatcccttggcattgcacattgacttagaccgtatcagccaatagccattgtgcgaaggcaggactgcactaaccttttccc

SEQ ID NO: 43250 - DNA, 201 bp, Homo sapiens
cttatagtgggcgaggtctataggtagtcccgagcaaattgcttatggctttggttatgactgacaactactcagacgaataaagccctccttggccaggsgacagcgtgtagcgagttattaccaatcccttggcattgcacattgacttagaccgtatcagccaatagccattgtgcgaaggcaggactgcactaacct

SEQ ID NO: 43251 - DNA, 201 bp, Homo sapiens
cacctccagccagagaagaatcagtattgagggtccctgctgacccttccgtactcctggacccccttgacccctctatttctgttggctaaggccagccytggacattgtccaggaaggcctggggaggaggagtgaagtctgtgcatagatgggagagccttctgctcagaggctcactcagtaacgttgtttaattct

SEQ ID NO: 43252 - DNA, 109 bp, Homo sapiens; identical to SEQ ID NO: 43239

SEQ ID NO: 43253 - DNA, 201 bp, Homo sapiens
tggggaaggaggatggattgagagaatgtctttctcctctcctaagtctttgctttccctgatttcttgatttgatcttcaaaggtgggcaaagttccctytgactcttcccccactccccatcttactgatttaatttaatttttcactccccagagtctaatatggattctgactcttaagtgcttccgccccctcact

SEQ ID NO: 43254 - DNA, 180 bp, Homo sapiens; identical to SEQ ID NO: 43241

SEQ ID NO: 43255 - DNA, 174 bp, Homo sapiens
ttgatcttcaaaggtgggcaaagttccctctgactcttcccccactccccatcttactgatttaatttaatttttcactccccagagtctaatatggattytgactcttaagtgcttccgccccctcactacctcctttaatacaaattcaataaaaaaggtgaaatatattga

SEQ ID NO: 43256 - DNA, 168 bp, Homo sapiens
ttcaaaggtgggcaaagttccctctgactcttcccccactccccatcttactgatttaatttaatttttcactccccagagtctaatatggattctgactyttaagtgcttccgccccctcactacctcctttaatacaaattcaataaaaaaggtgaaatatattga

SEQ ID NO: 43257 - DNA, 201 bp, Homo sapiens; identical to SEQ ID NO: 43244

SEQ ID NO: 43258 - DNA, 201 bp, Homo sapiens; identical to SEQ ID NO: 43245

SEQ ID NO: 43259 - DNA, 201 bp, Homo sapiens
tcagtaacgttgtttaattctctgccctggggaaggaggatggattgagagaatgtctttctcctctcctaagtctttgctttccctgatttcttgatttsatcttcaaaggtgggcaaagttccctctgactcttcccccactccccatcttactgatttaatttaatttttcactccccagagtctaatatggattctg

SEQ ID NO: 43260 - DNA, 201 bp, Homo sapiens; identical to SEQ ID NO: 43246

SEQ ID NO: 43261 - DNA, 201 bp, Homo sapiens; identical to SEQ ID NO: 43248

SEQ ID NO: 43262 - DNA, 201 bp, Homo sapiens; identical to SEQ ID NO: 43249

SEQ ID NO: 43263 - DNA, 201 bp, Homo sapiens; identical to SEQ ID NO: 43250

SEQ ID NO: 43264 - DNA, 201 bp, Homo sapiens
cttcttctttttttggctgctcagtatttgagctatgtctgcttcctgcccacctccagccagagaagaatcagtattgagggtccctgctgacccttccktactcctggacccccttgacccctctatttctgttggctaaggccagccctggacattgtccaggaaggcctggggaggaggagtgaagtctgtgcatag

SEQ ID NO: 43265 - DNA, 201 bp, Homo sapiens; identical to SEQ ID NO: 43251

SEQ ID NO: 43266 - DNA, 109 bp, Homo sapiens; identical to SEQ ID NO: 43239

SEQ ID NO: 43267 - DNA, 201 bp, Homo sapiens; identical to SEQ ID NO: 43253

SEQ ID NO: 43268 - DNA, 180 bp, Homo sapiens; identical to SEQ ID NO: 43241

SEQ ID NO: 43269 - DNA, 174 bp, Homo sapiens; identical to SEQ ID NO: 43255

SEQ ID NO: 43270 - DNA, 168 bp, Homo sapiens; identical to SEQ ID NO: 43256

SEQ ID NO: 43271 - DNA, 201 bp, Homo sapiens
ggaagctgtggtcagtgtgtgtggccacctgtactggtgagaatccccagtggctggagacacggccagaacggcaagagtgtccagtatgtaaagctggkatcagcagagagaaggttgtcccgctttatgggcgagggagccagaagccccaggatcccagattaaaaactccaccccgcccccagggccagagaccag

SEQ ID NO: 43272 - DNA, 201 bp, Homo sapiens; identical to SEQ ID NO: 43244

SEQ ID NO: 43273 - DNA, 201 bp, Homo sapiens; identical to SEQ ID NO: 43246

SEQ ID NO: 43274 - DNA, 201 bp, Homo sapiens; identical to SEQ ID NO: 43259

SEQ ID NO: 43275 - DNA, 201 bp, Homo sapiens; identical to SEQ ID NO: 43248

SEQ ID NO: 43276 - DNA, 201 bp, Homo sapiens; identical to SEQ ID NO: 43249

SEQ ID NO: 43277 - DNA, 201 bp, Homo sapiens; identical to SEQ ID NO: 43250

SEQ ID NO: 43278 - DNA, 201 bp, Homo sapiens; identical to SEQ ID NO: 43264

SEQ ID NO: 43279 - DNA, 201 bp, Homo sapiens
cagaagaggagctgaagacccacattagcaagggcacgctgggcaagttcactgtgcccatgttgaaagaggcctgccgggcttacgggctgaagagtggkctgaagaagcaggagctgctggaagccctcaccaagcacttccaggattgaccagaggccatgcgtccagctgcccttccacagtgaggccaggctgcct

SEQ ID NO: 43280 - DNA, 201 bp, Homo sapiens
gcagtggacctgacattgcccaaggttgaagcaataaatagaagactgggctccctggtggatgagtttaaggagcttgttcacccaccagattacaatcytgaagggaaagttaccaagagaaaacatgataatgaaggttctggaagcaaaaggcccaaggtggagtattcagaagaggagctgaagacccacattagc

SEQ ID NO: 43281 - DNA, 129 bp, Homo sapiens
atggtgaccggcgagcggcatgcgacgcmgcctctgtggcctgtggaggcccgcttggcggcgctgcttcccgacctactggtctttcggaagcctcggggatgggaacccgagctcgccacggcccag

SEQ ID NO: 43282 - DNA, 201 bp, Homo sapiens
taatggacaggttcaccctgacctacaagtcggaacgtgacatggacaaactggcccatatcttcagttattacattagtgacatcgtggagcggaacatrctcctggcactctggagagtagaacaaaatcaactgagtgacatcattaccttggtggcaaaatgcagtctggagatacaggagaaatttgggatctatc

SEQ ID NO: 43283 - DNA, 201 bp, Homo sapiens
agatgagcggcagcaatacctcttggtgattgggcagttagctcagcgtttggctcaggcgaatgaaattgtcctatcctggaactgctggatgctttgcragcagtatatgtttgaagtggcaatcatgagggaggatgaagctgtgaagttaagagatatgtggatcattgatccatttgattttgatgagcattttga

SEQ ID NO: 43284 - DNA, 201 bp, Homo sapiens
gccaccgtgcctggccgtaaggtattatttttaaaggttagctcacctaagacttccgcagctgagggcagtaacaagataggcatgatgcacagagccaygtggggattccagacccctcctgttgcatagtttcccagttgaatttgactcttctccatttatctcatttttttctggataggtctacctgcaagtcgg

SEQ ID NO: 43285 - DNA, 201 bp, Homo sapiens
tgtcctatcctggaactgctggatgctttgcaagcagtatatgtttgaagtggcaatcatgagggaggatgaagctgtgaaggtaggaggctagcttcctstactgccattctgaaaaggccttcctagtacacagcgcaatgctctggtagtgttcacatattgcctggccaaaccaatgaccattggaactcaatttag

SEQ ID NO: 43286 - DNA, 201 bp, Homo sapiens
ctagtacacagcgcaatgctctggtagtgttcacatattgcctggccaaaccaatgaccattggaactcaatttaggagggaggctgggaatattctcctrtgaagatagatgaggtagaacagtgaggctgaggagataaaaggcaaacaagggcaatagaatcctcagcctttcttgtgtgggggcacagaattaaaca

SEQ ID NO: 43287 - DNA, 201 bp, Homo sapiens
gtaacaagataggcatgatgcacagagccatgtggggattccagacccctcctgttgcatagtttcccagttgaatttgactcttctccatttatctcatytttttctggataggtctacctgcaagtcggatttcccaggttattgttggagatgagcggcagcaatacctcttggtgattgggcaggttgtagtgatgt

SEQ ID NO: 43288 - DNA, 201 bp, Homo sapiens
acctcttggtgattgggcaggttgtagtgatgtccagttagctcagcgtttggctcaggcgaatgaaattgtcctatcctggaactgctggatgctttgcragcagtatatgtttgaagtggcaatcatgagggaggatgaagctgtgaaggtaggaggctagcttcctgtactgccattctgaaaaggccttcctagtac

SEQ ID NO: 43289 - DNA, 201 bp, Homo sapiens
cttcagctttggggaagatggcctcaattccactcacgcttaagccctgccctgagaaaatccaaagtcttcctcaagttgtctgtgaattcctcaagagkgcggcggccactggaccctcgttttggctggggaaggaaaccctgaaggtgccactggcgctctttgccttgaaccggcagcgccggtgtgagcggctgc

SEQ ID NO: 43290 - DNA, 201 bp, Homo sapiens
cgtcaacacagacagcagcagcgtctgcagggaggcttccttcgagggcatcagcaagttcaaagtcaacaacaccattcttcacccagagatcgtttagwgccgagtgtttaagacggacatagagctggaggttctgcactacaccaataaaatctccagtgagacccactgtgagttctggaatataaaggagagaag

SEQ ID NO: 43291 - DNA, 201 bp, Homo sapiens
cggaagaaccctgctgtgcaggccggctcagagtccttctttcactgcgcattcggtgtcaccgagccaggctgctacggcttcatcgacgctgacactgkgaagtcggccctgtttgtgcccaggcttcctgccagccatgccacctggatgggaaagatccattccaaggagcacttcaaggagaagtatgccgtggac

SEQ ID NO: 43292 - DNA, 201 bp, Homo sapiens
ctcacgcttaagccctgccctgagaaaatccaaagtcttcctcaagttgtctgtgaattcctcaagagggcggcggccactggaccctcgttttggctggrgaaggaaaccctgaaggtgccactggcgctctttgccttgaaccggcagcgccggtgtgagcggctgcggaagaaccctgctgtgcaggccggctcagag

SEQ ID NO: 43293 - DNA, 201 bp, Homo sapiens
tttactgagtcccgcatcacccagggtccactgagatctccctgctcttcagctttggggaagatggcctcaattccactcacgcttaagccctgccctgwgaaaatccaaagtcttcctcaagttgtctgtgaattcctcaagagggcggcggccactggaccctcgttttggctggggaaggaaaccctgaaggtgcca

SEQ ID NO: 43294 - DNA, 201 bp, Homo sapiens
atgactgtcattgaagggtttactgagtcccgcatcacccagggtccactgagatctccctgctcttcagctttggggaagatggcctcaattccactcaygcttaagccctgccctgagaaaatccaaagtcttcctcaagttgtctgtgaattcctcaagagggcggcggccactggaccctcgttttggctggggaag

SEQ ID NO: 43295 - DNA, 201 bp, Homo sapiens
tgactcctgggtctgagggaggaggggctgggaggctggactcccgggtctgagggaggaggggctgggaggctggactcccgagtctgagggaggagggrctgggggcctggactcccgagtctgagggaggagggactgaggcttctggattcctgggtctgtgggaggagggactggggctcctggattcctgggtct

SEQ ID NO: 43296 - DNA, 201 bp, Homo sapiens
ggctgggaccctgactcctgggtctgagggaggaggggctgggaggctggactcccgggtctgagggaggaggggctgggaggctggactcccgagtctgwgggaggaggggctgggggcctggactcccgagtctgagggaggagggactgaggcttctggattcctgggtctgtgggaggagggactggggctcctgga

SEQ ID NO: 43297 - DNA, 201 bp, Homo sapiens
gggcattgaactgctcgtgacggggggtgcagagctggggtacgggtgcaaggccagtcggagcacccccgtggacgcccccgatatcccttcctgatttytctcatttctacttggggcccccttcctaggactctcccaccccaaactccaacctgtatcagatgcagcccccaagcccttagactctaagcccagtta

SEQ ID NO: 43298 - DNA, 201 bp, Homo sapiens
actgctcgtgacggggggtgcagagctggggtacgggtgcaaggccagtcggagcacccccgtggacgcccccgatatcccttcctgatttctctcatttytacttggggcccccttcctaggactctcccaccccaaactccaacctgtatcagatgcagcccccaagcccttagactctaagcccagttagcaaggtgc

SEQ ID NO: 43299 - DNA, 201 bp, Homo sapiens
aggagggactgggaggctggactcccgggtctgagggaggaggggctgggaccctgactcctgggtctgagggaggaggggctgggaggctggactcccgrgtctgagggaggaggggctgggaggctggactcccgagtctgagggaggaggggctgggggcctggactcccgagtctgagggaggagggactgaggctt

SEQ ID NO: 43300 - DNA, 169 bp, Homo sapiens
ccttcctgatttctctcatttctacttggggcccccttcctaggactctcccaccccaaactccaacctgtatcagatgcagcccccaagcccttagactytaagcccagttagcaaggtgccgggtcaccctgcaggttcccataaaaacgatttgcagccagaagga

SEQ ID NO: 43301 - DNA, 111 bp, Homo sapiens
caagggccggaagttcgagcgtgccagaggccgacgggccagccgaggctacaaaaactaaccctggatcctactctcttattaaaaagatttttgctgamagtgctctgt

SEQ ID NO: 43302 - DNA, 109 bp, Homo sapiens
agggccggaagttcgagcgtgccagaggccgacgggccagccgaggctacaaaaactaaccctggatcctactctcttattaaaaagatttttgctgacartgctctgt

SEQ ID NO: 43303 - DNA, 201 bp, Homo sapiens
gaccataactgatgatgtgcgggttcaggaggtacccaaactgaaggtatgtgcactgcgcgtgaccagccgggcccgcagccgcatcctcagggcagggkgcaagatcctcactttcgaccagctggccctggactcccctaagggctgtggcactgtcctgctctccggtcctcgcaagggccgagaggtgtaccggca

SEQ ID NO: 43304 - DNA, 201 bp, Homo sapiens
cggaaatttccagatgccccgactagccctgccagccccgcctcctcacctccaacactgggcccgccgggtcctccgggagccactgagaggccgtcggygtcgggccagagcgtcaccgcgcgacgcatcgtgctagctacacgcatctcgctcccagatccctttcttccggaaagctatcgagaacacggcctgggt

SEQ ID NO: 43305 - DNA, 201 bp, Homo sapiens
acggccgtggttgtggggaccataactgatgatgtgcgggttcaggaggtacccaaactgaaggtatgtgcactgcgcgtgaccagccgggcccgcagccrcatcctcagggcagggggcaagatcctcactttcgaccagctggccctggactcccctaagggctgtggcactgtcctgctctccggtcctcgcaagggc

SEQ ID NO: 43306 - DNA, 201 bp, Homo sapiens
aaggttcggcgcaaggagcccaagagccaggatatctacctgaggctgttggtcaagttatacaggtttctggccagaagaaccaactccacattcaaccwggttgtgttgaagaggttgtttatgagtcgcaccaaccggccgcctctgtccctttcccggatgatccggaagatgaagcttcctggccgggaaaacaag

SEQ ID NO: 43307 - DNA, 201 bp, Homo sapiens
aaacctaccagcagcccaagtgcagtgggaggacagccatctgcaaggaggtactgaacgacacctgggtctccttcccttcctggtctgaggactccacrttcgtcagctccaagaagacaccgtacgaggagcagcttcaccgctgtgaggacgagcgcttcgagttagacgttgtcctggagacgaacctggccacaa

SEQ ID NO: 43308 - DNA, 201 bp, Homo sapiens
gccaaacctttgggatcccatccagtattccctcagagccggcacgaccctgctgtggggcggcgggcccagtcgtgttcctgcagtgggcaccctaggcgtatgtgtatacacgcacagatatttattcctttcgcttttagtggttgttatttctgtagcagccaagtcctgcggctccctggggctgagatctccctt

SEQ ID NO: 43309 - DNA, 201 bp, Homo sapiens
ttctgtgccaagaatcccaagtgactggggctggggaccacttctccaggcctctctccccgaccatgagagcccctggccctggcccctgcacaccagtrggcccagaataaccgccacccttgccatcctgcaacagctggactcaagtttccaggaagtggagatgtgtttctagaagtttcctgtggaacctggagg

SEQ ID NO: 43310 - DNA, 201 bp, Homo sapiens
agcagcttcaccgctgtgaggacgagcgcttcgagttagacgttgtcctggagacgaacctggccacaatccgtgtgttggaaagtgtgcagaagaagctrtctcggatggcgccggaagaccaggagaagttccggctggacgactccctgggaggcacgtcggaggtgatccagcgccgtgccatttatcgcatctatg

SEQ ID NO: 43311 - DNA, 201 bp, Homo sapiens
gatcccatccagtattccctcagagccggcacgaccctgctgtggggcggcgggcccagtcgtgttcctgcagtgggcaccctaggcgtatgtgtatacaygcacagatatttattcctttcgcttttagtggttgttatttctgtagcagccaagtcctgcggctccctggggctgagatctccctttgtggaactccga

SEQ ID NO: 43312 - DNA, 201 bp, Homo sapiens
ctcttccacgagcaccctgacctcattgttggattcaacgcttttcttcccctcggatatagaatagacattcccaagaatggcaagttaaacatacagtygcctctgacaagccaggagaattcgcacaaccacggggacggtgcagaggacttcaagcagcaggtgccgtataaagaggacaaaccccaggtgcccctg

SEQ ID NO: 43313 - DNA, 201 bp, Homo sapiens
gtgaagtggagctggaggagtactacccggccttcctggacatggtgcggagcctgctggagggcagcatcgaccccacgcagtacgaggacaccctacgygagatgttcaccatccatgcctacgtgggcttcaccatggacaagctggtgcagaacattgcgcggcagctgcaccacctcgtgagcgatgacgtctgcc

SEQ ID NO: 43314 - DNA, 172 bp, Homo sapiens
aataaccgccacccttgccatcctgcaacagctggactcaagtttccaggaagtggagatgtgtttctagaagtttcctgtggaacctggaggctcctgaygcctttgactccagggcctgtaatcccagcactttaagaggccaaggcggatggatcacttgagcccagga

SEQ ID NO: 43315 - DNA, 201 bp, Homo sapiens
agcttcaccgctgtgaggacgagcgcttcgagttagacgttgtcctggagacgaacctggccacaatccgtgtgttggaaagtgtgcagaagaagctgtcycggatggcgccggaagaccaggagaagttccggctggacgactccctgggaggcacgtcggaggtgatccagcgccgtgccatttatcgcatctatggcg

SEQ ID NO: 43316 - DNA, 201 bp, Homo sapiens; identical to SEQ ID NO: 43312

SEQ ID NO: 43317 - DNA, 201 bp, Homo sapiens
ttctgttcctgtcaactccatctacttggtttttagttactgtttttgagcaatgattgtgcttttctaaaatcctgtttattaattgacgtgattgatawaattattgattcccatgcatttgtaaggagcaatacaccacctgggtaccctccagctggttcctttaccagtaacatctgtagtcagtatcctcaccag

SEQ ID NO: 43318 - DNA, 201 bp, Homo sapiens
cgctacggccacgcgctgaggctgaccgcagtggtgctggcctccgccgtggccttcttcgtgcccagcaacctgctgctgctgctgcattactcggaccygagccccagcgcctggggcaacctctatggtgcctacgtgcccagcctggcgctgagcaccctcaacagctgcgtggatcccttcatctactactacgtg

SEQ ID NO: 43319 - DNA, 172 bp, Homo sapiens
ctcccacgggctggctggcaagcggccctggtgggtctgcgggggcaggggcagccttcctggtttatctcyaccggcgcgatctgctcgtccgcctcggctccagaagctggggctcagggtccggcgaggcaggaagcctgaggccacagcccagagcagcctgagtgca

SEQ ID NO: 43320 - DNA, 201 bp, Homo sapiens
accactcctttttgtgtgtgtgcacgcatggctgagcatgtgtgggtgggagtcagcacattcacgatactgtgcaatcatcacctctgtctagttacagracggtttctttctcccccaaagaaaccccatcgccatcagcactcactccccactcccccagcccctggcaaccacaaatctttccaactctacggattt

SEQ ID NO: 43321 - DNA, 201 bp, Homo sapiens
gcggcagtggctccgcgcactcacccgggccccgggcaggggcgcgctccacttcgttgcacgcgggtccggcgcacagttcccgggcgagtgggctgtgsgtgctgacgttgtagaagcgagtggcctcgaaggctacgggacgagggtggcgggtgaccaagtgcaggcgcgacgggtcagggaccgggccgggccggg

SEQ ID NO: 43322 - DNA, 201 bp, Homo sapiens
ggtcctggtggtggggctgccggccaatgggctggcgctgtgggtgctggccacgcaggcacctcggctgccctccaccatgctgctgatgaacctcgcgrctgctgacctcctgctggccctggcgctgcccccgcggatcgcctaccacctgcgtggccagcgctggcccttcggggaggccgcctgccgcctggccac

SEQ ID NO: 43323 - DNA, 201 bp, Homo sapiens
ccctggtgggtctgcgggggcaggggcagccttcctggtttatctccaccggcgcgatctgctcgtccgcctcggctccagaagctggggctcagggtccrgcgaggcaggaagcctgaggccacagcccagagcagcctgagtgcagtcatgtgggggcgactgctcctgtggcccctggtgctggggttcagcctgtct

SEQ ID NO: 43324 - DNA, 140 bp, Homo sapiens
ctcccacgggctggctggcaagcggccctggtgggtctgygggggcaggggcagccttcctggtttatctccaccggcgcgatctgctcgtccgcctcggctccagaagctggggctcagggtccggcgaggcaggaagc

SEQ ID NO: 43325 - DNA, 201 bp, Homo sapiens
atcgcgtgctctgccatgacgcgctgcccctggacgcacaggcctcccactggcaaccggccttcacctgcctggcgctgttgggctgtttcctgcccctkctggccatgctgctgtgctacggggccaccctgcacacgctggcggccagcggccggcgctacggccacgcgctgaggctgaccgcagtggtgctggcct

SEQ ID NO: 43326 - DNA, 201 bp, Homo sapiens
ctgcgggcccgcgccctgcgtggccggcgcctggcccttggactctgcatggctgcttggctcatggcggccgccctggcactgcccctgacactgcagcrgcagaccttccggctggcgcgctccgatcgcgtgctctgccatgacgcgctgcccctggacgcacaggcctcccactggcaaccggccttcacctgcctg

SEQ ID NO: 43327 - DNA, 201 bp, Homo sapiens
gtactgggtcgaacagggtcccttcccccacttcacgtccttcctgggacctcagaatgtgaccttatttggaaatagggttgttacaactgtcactagcrgaggtcactttggagaagggtgggccttacatccagtgtgggtggtgtcctcataagataaggagaggccaggcctggtggctcacgcctgtaatcccag

SEQ ID NO: 43328 - DNA, 201 bp, Homo sapiens
cgctgagcaccctcaacagctgcgtggatcccttcatctactactacgtgtcggccgagttcagggacaaggtgcgggcagggctcttccaacggtcgccrggggacaccgtggcctccaaggcctctgcggaagggggcagccggggcatgggcacccactcctctttgctccagtgacacaaagtggggaaggctgtac

SEQ ID NO: 43329 - DNA, 201 bp, Homo sapiens
gtgctacggggccaccctgcacacgctggcggccagcggccggcgctacggccacgcgctgaggctgaccgcagtggtgctggcctccgccgtggccttcktcgtgcccagcaacctgctgctgctgctgcattactcggacccgagccccagcgcctggggcaacctctatggtgcctacgtgcccagcctggcgctgag

SEQ ID NO: 43330 - DNA, 201 bp, Homo sapiens
tgtcaccagggataaggtgggacaatggggggtgggggtggacagtgtgtgctggggggttcgggtgctgcagacctggaactcccttctgccaggatgtyggcagccggttgtaagccttgcacgggacagaccacacccaccgcaacctcatcccctcagcactaaccacatccactctcaaccccgtccccttcgcac

SEQ ID NO: 43331 - DNA, 201 bp, Homo sapiens
cctgggccctgccagcatctctggctcggctttctgggctggatgcagcccacgacgcactggtgtctgagatggggctggagctggggctggggctgcaktccctggagactcactgcaagttcctgcccaggaggctgagggcaccccatcctcagtgcccaatgctgtggccccaccaggcccagagcctggttggcc

SEQ ID NO: 43332 - DNA, 201 bp, Homo sapiens
tggcctccgccgtggccttcttcgtgcccagcaacctgctgctgctgctgcattactcggacccgagccccagcgcctggggcaacctctatggtgcctaygtgcccagcctggcgctgagcaccctcaacagctgcgtggatcccttcatctactactacgtgtcggccgagttcagggacaaggtgcgggcagggctct

SEQ ID NO: 43333 - DNA, 123 bp, Homo sapiens
ctcccacgggctggctggcaagyggccctggtgggtctgcgggggcaggggcagccttcctggtttatctccaccggcgcgatctgctcgtccgcctcggctccagaagctggggctcagggt

SEQ ID NO: 43334 - DNA, 201 bp, Homo sapiens
atggggggtgggggtggacagtgtgtgctggggggttcgggtgctgcagacctggaactcccttctgccaggatgttggcagccggttgtaagccttgcaygggacagaccacacccaccgcaacctcatcccctcagcactaaccacatccactctcaaccccgtccccttcgcactgaccacacccaccccgttcggcc

SEQ ID NO: 43335 - DNA, 201 bp, Homo sapiens
caacctcatcccctcagcactaaccacatccactctcaaccccgtccccttcgcactgaccacacccaccccgttcggccccgccccccgcactgaacacwcccgccctcaaccccgcaccctccgcactcacctccccctcgccgctcgaccccgccctcaccacactgaccaccctcaacccattgcgcccagtcccca

SEQ ID NO: 43336 - DNA, 115 bp, Homo sapiens
atcgccatcagcactcactccccactcccccagcccctggcaaccacaaatctttccaactctacggatttgcctgttctgggcatttcatgtcaatggawtcatgtactctgtg

SEQ ID NO: 43337 - DNA, 201 bp, Homo sapiens
tcttcgaccgtggcacggcgagttttccccaaaccatttactgtggcttcgaccccacggcagactcgcttcatgtgggtcatctacttgcgctgctgggyctgtttcatttgcagcgagcgggccacaacgtgatcgcgctggtgggaggcgccacggcgcgcctgggagacccgagcggccgtaccaaggaacgcgagg

SEQ ID NO: 43338 - DNA, 201 bp, Homo sapiens
atgtaccttaattactactgtatttgcaaattaagggaaatttaggtcatcatttgattttctgaaatctaaaaggaactgaccatcattaccaagtcttwctagataatcaagggtagatggctgtttttaatgtaggaattaatgtaggcattcctgctttcaggtttaagtatgaatcaaagcatattttaatttgct

SEQ ID NO: 43339 - DNA, 201 bp, Homo sapiens
cttttcactgatgggcgctcctggggcagcttcactgtgctggacaactcggcctggtaccagaagcagcacctggtggacttcctggcggcagtgggggktcacttccgcatggggacgctgctgagccggcagagcgtgcagctgcggctcaagagccccgagggcatgagcttggccgagttcttttaccaggtgctc

SEQ ID NO: 43340 - DNA, 201 bp, Homo sapiens
gaggactatggcagcagctttaagactactaacaaagattattacacaggtcatcttatccacaggcaaactgctttgcacaactagaacattaacagttstttttaagttaagttcagatgaaactgtcacaagacagacttgatgtattttatatatactgggaaactttagaaacagccatttattatttggattaaa

SEQ ID NO: 43341 - DNA, 201 bp, Homo sapiens
aaccggacgattcagtggaaaggtacctgaagctgttcactttcctgccccttccagagattgatcatatcatgcagctgcatgtcaaagagccagaaagrcggggtcctcagaaacgactggcagcagaagtaacaaagcttgttcatggacgagaaggattggattctgctaaaaggtgtacacaagccctttatcaca

SEQ ID NO: 43342 - DNA, 201 bp, Homo sapiens
atgtaggcattcctgctttcaggtttaagtatgaatcaaagcatattttaatttgctagtgcaaatggacccagaattggaagggctatgtaactacacartatgcacaccacagccatgtcagtgtcacagatcctcttgtgcattcagctttcttaaaaacacatcaaaggctgcaaagaagctcagaaaaaactaaat

SEQ ID NO: 43343 - DNA, 201 bp, Homo sapiens
caacctgcctagctagggtagttaaaagaggagtgaatgctctcaaaaacctgcaagttaaaggtgcacagatagaagccaaattctatgaggaagttcaygatcttgaaaggaagtatgctgttctctatcagcctctatttgataagcaatctgagattactaatacaatttatgaacctacagaggaagaatgtgaat

SEQ ID NO: 43344 - DNA, 201 bp, Homo sapiens; identical to SEQ ID NO: 43341

SEQ ID NO: 43345 - DNA, 201 bp, Homo sapiens; identical to SEQ ID NO: 43337

SEQ ID NO: 43346 - DNA, 201 bp, Homo sapiens
ctgagagtgttttaattgttggacaacatattctcaagaatggactttccttacttaaaataggaaaaagaaatttctacattataaaatggcttcagttrtgatgaaaagtccttctggttgtccaaataaacttacccatcattcattctcaagacctctgaagggttggctccagaacttagacctttgcttatgcaa

SEQ ID NO: 43347 - DNA, 201 bp, Homo sapiens
agatgagatttcagaggagttgaaagaaaaggccaagactgaagatgagaaaaacgatgaagaaaaagaagaccccaaaggaattcctgaattttggttayctgtttttaagaatgttgacttgctcagtgatatgcttcagaaacatgatgaacctattctgaagcatgtgaaagataccaaagtgaagttctcagatgc

SEQ ID NO: 43348 - DNA, 201 bp, Homo sapiens; identical to SEQ ID NO: 43339

SEQ ID NO: 43349 - DNA, 201 bp, Homo sapiens
ttgtcttagaatttcaatttgaacccagtaaatattttacaaatgaagtgctgacaaagacatataggatgagttcctgagagtggagatctggatgatgmtgctgaagctatccttgctgcagacttcaaaattggtcactttttacgtgagcatacaatcccaagatcagtgttatagtttactggagaagctactgaa

SEQ ID NO: 43350 - DNA, 201 bp, Homo sapiens
cctctatttgataagcaatctgagattactaatacaatttatgaacctacagaggaagaatgtgaatggaaaccagatgaagaagatgagatttcagaggmgttgaaagaaaaggccaagactgaagatgagaaaaacgatgaagaaaaagaagaccccaaaggaattcctgaattttggttacctgtttttaagaatgtt

SEQ ID NO: 43351 - DNA, 201 bp, Homo sapiens
accacaagtaccagtccaactctattcagatccagtggttctggagagcattgcgttctttcgatcaagctgaccgtgccaagttcctccagtttgtcacrggtacttccaaggtacccctgcaaggctttgctgccctcgaaggcatgaatggcattcagaagtttcagatccatcgagatgacaggtccacagatcgcc

SEQ ID NO: 43352 - DNA, 201 bp, Homo sapiens
atgctggtgggctcctgcgggagtggtatatgatcatctctcgagagatgtttaaccctatgtatgccttgttccgtacctcacctggtgatcgagtcacstacaccatcaatccatcttcccactgcaaccccaaccacctcagctacttcaagtttgtcggacgcattgtggccaaagctgtatatgacaaccgtcttc

SEQ ID NO: 43353 - DNA, 201 bp, Homo sapiens
ggtcctactttttgtggatgagccaaagctcaatactagccgtctacaccgagtactgagaaatctctgctaccatgcccagacccgccactgggtcatcygcagtctgctctccatcttgcagcgcagcagtgagagtgagctatgcattgaaacacccaaactcactacaatatccatggatgcagccctaggctgcag

SEQ ID NO: 43354 - DNA, 201 bp, Homo sapiens
cccaactccgtggggttttttttaccattgttggacctggggaggggggagttaaaaaaagaaccagaaagaaattgtcaaaaaccaataaatgaaatccmccaactcaccgtgtgtgtcccagctgccccatcttccccagcgcatacctgttcctcttctcattctctccccgccgcctgtttcctcaccttctctccc

SEQ ID NO: 43355 - DNA, 135 bp, Homo sapiens
ggaggctttcgactgagggctagcgaggggagcasggctggagcagggctggagcagggctggagcagggctggagcagggctgaagcagggccgcggaccccgcacgctcctgcgggccccgcggagccattgc

SEQ ID NO: 43356 - DNA, 201 bp, Homo sapiens
tcatgaaagtagacaggactaaactgaagaagacacctactgaggctcctgcagactgcagagccttaatagacaaactcaaagtttgtaatgatgagcarcttctcttggaactgcagcagatcaaaacatggaacattggaaagtgcgagttatatcactgggtggacctgttggaccgcttcgatggaatactggcag

SEQ ID NO: 43357 - DNA, 201 bp, Homo sapiens
tgtttgaagactcctatcgtgagctgcatcgcaaatcccccgaagaaatgaagaatcgattgtatatagtatttgaaggagaagaagggcaggatgctggygggctcctgcgggagtggtatatgatcatctctcgagagatgtttaaccctatgtatgccttgttccgtacctcacctggtgatcgagtcacctacacca

SEQ ID NO: 43358 - DNA, 201 bp, Homo sapiens
ccactgccacctcaaccacatctaccaccaccaccactgccgcctccaccacgcccacaccccctactgcacccacccctgtcacttctgctccagccctkgttgctgccacggctatttccaccattgtcgtagctgcttcgaccacagtgactacccccacgactgctaccactactgtttcaagctggggcttactcc

SEQ ID NO: 43359 - DNA, 172 bp, Homo sapiens
agcactcttcataactcacttttcacaatggagtttttttcaaacttaaaaaaaaaaacaaaaaactcttaagcacatgctaggcatctggagaaaagatkgattctccaggaaaccatccctgccctacccgcttgcccacctgcctccaccactggtgcaacttcctcct

SEQ ID NO: 43360 - DNA, 201 bp, Homo sapiens
ctgacattgcagctgaggctcaagccctgagacgagagcaagaagcccggcagcgacagctcatgcatgagcgtctgtttgggcacagtagcacctccgcrctctctgctattctccgaagcccggagcgagactccatctcaacaaaaagctggtgggggtggggggcttcattctctaagctgtacagcagccctgaaa

SEQ ID NO: 43361 - DNA, 201 bp, Homo sapiens
tcctagaccaagccttgtcctccttttcccggcaggtatttcccagccacttcacacagcagcggaccaaagaaacaaactgtgagagtgatcgggaaagrggcaataaggcctgtagcccatgctcctcacagtcctccagcagtggcatttgcacagacttctgggacttattggtaaaactggacaacatgaatgtca

SEQ ID NO: 43362 - DNA, 201 bp, Homo sapiens; identical to SEQ ID NO: 43351

SEQ ID NO: 43363 - DNA, 201 bp, Homo sapiens; identical to SEQ ID NO: 43352

SEQ ID NO: 43364 - DNA, 201 bp, Homo sapiens
ggtcctactttttgtggatgagccaaagctcaatactagccgtctacaccgagtactgagaaatctctgctaccatgcccagacccgccactgggtcatcygcagtctgctctccatcttgcagcgcagcagtgagagtgagctatgcattgaaacacccaaactcactacaagtgaggaaaagggcaaaaagtcgagcaa

SEQ ID NO: 43365 - DNA, 201 bp, Homo sapiens; identical to SEQ ID NO: 43354

SEQ ID NO: 43366 - DNA, 201 bp, Homo sapiens; identical to SEQ ID NO: 43357

SEQ ID NO: 43367 - DNA, 201 bp, Homo sapiens
ccactgccacctcaaccacatctaccaccaccaccactgccgcctccaccacgcccacaccccctactgcacccacccctgtcacttctgctccagccctkgttgctgccacggctatttccaccattgtcgtagctgcttcgaccacagtgactacccccacgactgctaccactactgtttcaatttctcccactacta

SEQ ID NO: 43368 - DNA, 186 bp, Homo sapiens
cagatgcaacgactgccatcatcaagttacttgaagaaatctgtaatcttggaagggaccccaaatacatctgtcagaagccatcratccagaaggcagatggcactgccactgctcctcccccaaggtctaatcatgccgcagaagaagcctctagtgaggatgaggaggaagaggaagtacagg

SEQ ID NO: 43369 - DNA, 172 bp, Homo sapiens; identical to SEQ ID NO: 43359

SEQ ID NO: 43370 - DNA, 201 bp, Homo sapiens
gtaccttagaggaggctgtgggtgacacttcagcagctggcagttctgagcagcccagagcaggcagctccactcctggggatgccccaccagctgtggcrgaagtgcaaggcaggagtgatgggtcaggggaatctgcccagccacctgaggacagctccccacctgcatcctctgagagctcttccaccagagattctg

SEQ ID NO: 43371 - DNA, 201 bp, Homo sapiens
ctgacattgcagctgaggctcaagccctgagacgagagcaagaagcccggcagcgacagctcatgcatgagcgtctgtttgggcacagtagcacctccgcrctctctgctattctccgaagcccggctttcaccagtcgcttaagtggcaaccgtggggtccagtatactcgccttgctgtgcagagaggtggcaccttcc

SEQ ID NO: 43372 - DNA, 201 bp, Homo sapiens
gacacgttttggatacactcattcaattggccaaggtatttcccagccacttcacacagcagcggaccaaagaaacaaactgtgagagtgatcgggaaagrggcaataaggcctgtagcccatgctcctcacagtcctccagcagtggcatttgcacagacttctgggacttattggtaaaactggacaacatgaatgtca

SEQ ID NO: 43373 - DNA, 201 bp, Homo sapiens; identical to SEQ ID NO: 43356

SEQ ID NO: 43374 - DNA, 135 bp, Homo sapiens; identical to SEQ ID NO: 43355

SEQ ID NO: 43375 - DNA, 201 bp, Homo sapiens; identical to SEQ ID NO: 43364

SEQ ID NO: 43376 - DNA, 201 bp, Homo sapiens
accacaagtaccagtccaactctattcagatccagtggttctggagagcattgcgttctttcgatcaagctgaccgtgccaagttcctccagtttgtcacrggtacttccaaggtacccctgcaaggctttgctgccctcgaaggcatgaatggcattcagaagtttcagatccatcgagatgacaggaccctacccaaga

SEQ ID NO: 43377 - DNA, 201 bp, Homo sapiens; identical to SEQ ID NO: 43352

SEQ ID NO: 43378 - DNA, 201 bp, Homo sapiens; identical to SEQ ID NO: 43367

SEQ ID NO: 43379 - DNA, 201 bp, Homo sapiens; identical to SEQ ID NO: 43357

SEQ ID NO: 43380 - DNA, 186 bp, Homo sapiens; identical to SEQ ID NO: 43368

SEQ ID NO: 43381 - DNA, 201 bp, Homo sapiens; identical to SEQ ID NO: 43370

SEQ ID NO: 43382 - DNA, 201 bp, Homo sapiens; identical to SEQ ID NO: 43371

SEQ ID NO: 43383 - DNA, 201 bp, Homo sapiens; identical to SEQ ID NO: 43372

SEQ ID NO: 43384 - DNA, 201 bp, Homo sapiens; identical to SEQ ID NO: 43356

SEQ ID NO: 43385 - DNA, 135 bp, Homo sapiens; identical to SEQ ID NO: 43355

SEQ ID NO: 43386 - DNA, 201 bp, Homo sapiens; identical to SEQ ID NO: 43351

SEQ ID NO: 43387 - DNA, 201 bp, Homo sapiens; identical to SEQ ID NO: 43352

SEQ ID NO: 43388 - DNA, 201 bp, Homo sapiens; identical to SEQ ID NO: 43364

SEQ ID NO: 43389 - DNA, 201 bp, Homo sapiens; identical to SEQ ID NO: 43357

SEQ ID NO: 43390 - DNA, 201 bp, Homo sapiens; identical to SEQ ID NO: 43367

SEQ ID NO: 43391 - DNA, 186 bp, Homo sapiens; identical to SEQ ID NO: 43368

SEQ ID NO: 43392 - DNA, 201 bp, Homo sapiens; identical to SEQ ID NO: 43371

SEQ ID NO: 43393 - DNA, 201 bp, Homo sapiens; identical to SEQ ID NO: 43370

SEQ ID NO: 43394 - DNA, 201 bp, Homo sapiens; identical to SEQ ID NO: 43372

SEQ ID NO: 43395 - DNA, 201 bp, Homo sapiens; identical to SEQ ID NO: 43351

SEQ ID NO: 43396 - DNA, 201 bp, Homo sapiens; identical to SEQ ID NO: 43352

SEQ ID NO: 43397 - DNA, 172 bp, Homo sapiens; identical to SEQ ID NO: 43359

SEQ ID NO: 43398 - DNA, 201 bp, Homo sapiens; identical to SEQ ID NO: 43354

SEQ ID NO: 43399 - DNA, 201 bp, Homo sapiens; identical to SEQ ID NO: 43357

SEQ ID NO: 43400 - DNA, 186 bp, Homo sapiens; identical to SEQ ID NO: 43368

SEQ ID NO: 43401 - DNA, 201 bp, Homo sapiens
tcttagagcagggtaaggccaagaatccttggcccaatgtagatgctcacagtggggtgctgctccagtattatggcatgacggagatgaattactacacrgtcctgtttggggtgtcacgagcattgggtgtactggcacagctcatctggagccgagccttaggcttccctctagaaaggcccaagtccatgagcacag

SEQ ID NO: 43402 - DNA, 201 bp, Homo sapiens
cggctcttgggaaccaagaatgcatcttgtcttgttcttgcagcccagcatgccagtgcttcctccatgaatttgaaagacatattggctgacctcatacytaaggagcaggccagaattaagaccttcaggcagcaacatggcaagaaggtggtgggccaaatcactgtggacatgatgtatggtggcatgagaggcatg

SEQ ID NO: 43403 - DNA, 201 bp, Homo sapiens
caaaagagtgggcaaagagggcagctctgccttcccatgtggtcaccatgctggacaactttcccaccaatctacaccccatgtctcagctcagtgcagcygttacagccctcaacagtgaaagtaactttgcccaagcatatgcacggggtatcagccgaaccaagtactgggagttgatttatgaagactctgtggatc

SEQ ID NO: 43404 - DNA, 201 bp, Homo sapiens
tcatcagttccctgagctcatgcacctgtacctcactatccacagtgaccatgagggcggcaatgtaagtgcccataccagccacttggtgggcagtggcytttcagacccttacctgtcctttgcagcagccatgaacgggctggcagggcctctccatggactggcaaatcaggaagtgcttgtctggctaacacagct

SEQ ID NO: 43405 - DNA, 201 bp, Homo sapiens
catgctggacaactttcccaccaatctacaccccatgtctcagctcagtgcagctgttacagccctcaacagtgaaagtaactttgcccaagcatatgcayggggtatcagccgaaccaagtactgggagttgatttatgaagactctgtggatctaatcacaaagctaccttgtgtcgcagcaaagatctaccgaaatct

SEQ ID NO: 43406 - DNA, 201 bp, Homo sapiens
tgtggtatgagtaggtttggccccctcactatctctagagtgagaatctggctcctgtttccatggctcaaagccggttgcagagaatctgcagtcacttyggagctttagcttcttctctgccaagccctcaataagccagcaaaccaggactctgccccttctgtttccataggaatcatgttggatagtcagctgtac

SEQ ID NO: 43407 - DNA, 201 bp, Homo sapiens
taactttgcccaagcatatgcacggggtatcagccgaaccaagtactgggagttgatttatgaagactctgtggatctaatcacaaagctaccttgtgtcrcagcaaagatctaccgaaatctctatggagaaggcagtggtattggggccattgactctaacctggactggtctcacagtttcaccaacatgttaggcta

SEQ ID NO: 43408 - DNA, 124 bp, Homo sapiens
tcctttcaaccttgtcaacctgtyggcgcggcctctggtgcagtggcggcggctcctgttcctgccgcagctctctccccttcttacctccccaccagatcccggagatcgcccgccatggctt

SEQ ID NO: 43409 - DNA, 201 bp, Homo sapiens
tgtttgaggttaaaatataaattaagactttaaaagatgaaaaatggtcccttcttccctaatcagctcctttcccctgcctggtatgagttgcccatcayaggcatggtcctggaggatgaccaggactaatgcatgtggtatgagtaggtttggccccctcactatctctagagtgagaatctggctcctgtttccatg

SEQ ID NO: 43410 - DNA, 201 bp, Homo sapiens
actaatgcatgtggtatgagtaggtttggccccctcactatctctagagtgagaatctggctcctgtttccatggctcaaagccggttgcagagaatctgyagtcacttcggagctttagcttcttctctgccaagccctcaataagccagcaaaccaggactctgccccttctgtttccataggaatcatgttggatagt

SEQ ID NO: 43411 - DNA, 201 bp, Homo sapiens
aagattgtgcccaatgtcctcttagagcagggtaaggccaagaatccttggcccaatgtagatgctcacagtggggtgctgctccagtattatggcatgayggagatgaattactacacagtcctgtttggggtgtcacgagcattgggtgtactggcacagctcatctggagccgagccttaggcttccctctagaaagg

SEQ ID NO: 43412 - DNA, 201 bp, Homo sapiens
gattaaattatatctgaggcactgataatatgtttgaggttaaaatataaattaagactttaaaagatgaaaaatggtcccttcttccctaatcagctccyttcccctgcctggtatgagttgcccatcacaggcatggtcctggaggatgaccaggactaatgcatgtggtatgagtaggtttggccccctcactatctc

SEQ ID NO: 43413 - DNA, 201 bp, Homo sapiens
ggcatggtcctggaggatgaccaggactaatgcatgtggtatgagtaggtttggccccctcactatctctagagtgagaatctggctcctgtttccatggstcaaagccggttgcagagaatctgcagtcacttcggagctttagcttcttctctgccaagccctcaataagccagcaaaccaggactctgccccttctgt

SEQ ID NO: 43414 - DNA, 201 bp, Homo sapiens
gctggcagggcctctccatggactggcaaatcaggaagtgcttgtctggctaacacagctgcagaaggaagttggcaaagatgtgtcagatgagaagttaygagactacatctggaacacactcaactcaggacgggctgttccaggctatggccatgcagtactaaggaagactgatccacgatatacctgtcagcgaga

SEQ ID NO: 43415 - DNA, 121 bp, Homo sapiens
aatcaaggcttgcccagctgggaggccccacacgaaagactcttaccattttattaaaaacgcaaggacctcagagacgttcttttctgtatggacccttyctgccatttgtattttgtcc

SEQ ID NO: 43416 - DNA, 201 bp, Homo sapiens
tgagatccgatgggagaagaacatcacgctgggggagccccctgggttcctgcactcctggtggtgcgtcttctgggacctgtactgcgcggcgcctgacmgaagagaggcctgcgagcactccggcgaggccaaggccttccaggactatagtgctgcagccgcccccagccccgttatggggagtatggccccaggtga

SEQ ID NO: 43417 - DNA, 201 bp, Homo sapiens
aatcaaggcttgcccagctgggaggccccacacgaaagactcttaccattttattaaaaacgcaaggacctcagagacgttcttttctgtatggacccttyctgccatttgtattttgtcccagagagaaaggctctttggggggcccctctccccaggacgtcagggggtggggcccataaataaatggaagctggtttt

SEQ ID NO: 43418 - DNA, 201 bp, Homo sapiens
tcttttctgtatggacccttcctgccatttgtattttgtcccagagagaaaggctctttggggggcccctctccccaggacgtcagggggtggggcccatmaataaatggaagctggttttggtttttggtagcttgtctcagattccctctttggccttctgccaccacactctccaccctgtggtcttgttccgtcccc

SEQ ID NO: 43419 - DNA, 201 bp, Homo sapiens; identical to SEQ ID NO: 43416

SEQ ID NO: 43420 - DNA, 194 bp, Homo sapiens
ccgcccccatctagccccacctttgagaactgggggcagagcgaggctccaggttctgggctctccctgggagttggggtgatgaccatgggcagaggggrtgggactgaagctgggcgctcaagagtcggggaagtagagggaggcagagtcaggtcacaggccccaagaaccccaggtggaaggagggctga

SEQ ID NO: 43421 - DNA, 201 bp, Homo sapiens; identical to SEQ ID NO: 43417

SEQ ID NO: 43422 - DNA, 201 bp, Homo sapiens; identical to SEQ ID NO: 43418

SEQ ID NO: 43423 - DNA, 201 bp, Homo sapiens; identical to SEQ ID NO: 43416

SEQ ID NO: 43424 - DNA, 194 bp, Homo sapiens; identical to SEQ ID NO: 43420

SEQ ID NO: 43425 - DNA, 201 bp, Homo sapiens; identical to SEQ ID NO: 43417

SEQ ID NO: 43426 - DNA, 201 bp, Homo sapiens; identical to SEQ ID NO: 43418

SEQ ID NO: 43427 - DNA, 201 bp, Homo sapiens; identical to SEQ ID NO: 43416

SEQ ID NO: 43428 - DNA, 194 bp, Homo sapiens; identical to SEQ ID NO: 43420

SEQ ID NO: 43429 - DNA, 201 bp, Homo sapiens
gactttcccaaactggcttgtctgtaatagaagtgactagctttgtgtcttccagatgggtaccacagatggctgatcacactgaagtaatgaaaggcatkcatcaatatccaggagttcgctatcctgtccttactcctaatcttcagggttttcaccatgctgttgctgctggagctactgagatatcagtttttggag

SEQ ID NO: 43430 - DNA, 124 bp, Homo sapiens
ctagtatttagagagacttctctaataataccgggtgatattatctttgagtaaatttgaatataaattgaaacataaaaatgagtattgtgaactttctmggaaatattcattaaaaccattg

SEQ ID NO: 43431 - DNA, 201 bp, Homo sapiens
actactcatttgccaagtcagttatgttatggaccaaaagccaaatctccatctgaccctacataattttagcaatagaacttttatatttcaagtatggytaacatctgttaactatttcagtgactttatctggttccaagaggctgtggccaatggcaagatgccatatcctggaaacatattacgacctcccatgtt

SEQ ID NO: 43432 - DNA, 201 bp, Homo sapiens
atgaagacagaagagggaaaactcctcctctcgcaactggattcccacccatcccattctgcagtggtgaactggacttcctatgccagcagtatagaagmgctctcatcaggaaacaaggaatttaaaggcactgtctttttcgatgaattcacttttgtgaagctcacaggagttgcaggaaattatacagtttgtcag

SEQ ID NO: 43433 - DNA, 195 bp, Homo sapiens
cactcattggacttcagcatgactactcagttgccagcttacgtggcaattttgcttttctatgtctcaagagccagctgccaggacactttcaytgcagctgtttatgagcatgcagcgatattgcccaatgccaccctaacaccagtgtctcgtgaggaggctttggcattaatgaatcggaatctggacatt

SEQ ID NO: 43434 - DNA, 201 bp, Homo sapiens
gatgaattcacttttgtgaagctcacaggagttgcaggaaattatacagtttgtcagaaagatctctgctgtcatttaagctacaaaatgtctgagaacayaccaaatgaagtgtacgctctaggggcatttgacggactgcacactgtggaagggcgctattatctacagatttgtaccctgttgaaatgtaaaacgact

SEQ ID NO: 43435 - DNA, 201 bp, Homo sapiens
aaatgacaggaagtggcatctatgcacccaattcttcaagagcatttcattatgatatgaagacagaagagggaaaactcctcctctcgcaactggattcycacccatcccattctgcagtggtgaactggacttcctatgccagcagtatagaagcgctctcatcaggaaacaaggaatttaaaggcactgtctttttcg

SEQ ID NO: 43436 - DNA, 201 bp, Homo sapiens
acttacaaggaggctgctcttgttaccacttttattatattacgtatcacttattcagctctgctgaaaatttccaatgactttgtttgtttgctcttttwgttttttacctaaacaatacattttgattctcttgtgggttgataatgtctccccaaaatttacatgttgaagcacctcagaatgtgactgtatttggag

SEQ ID NO: 43437 - DNA, 201 bp, Homo sapiens
taaactggatcccctgtaataatcgtaacagatttggccagaccccagtacaagaaagactcagctgcctggccaagaacaactctatctatgttgtggcwaatattggggacaagaagccatgcgataccagtgatcctcagtgtccccctgatggccgttaccaatacaacactgatgtggtatttgattctcaaggaa

SEQ ID NO: 43438 - DNA, 201 bp, Homo sapiens
cactactgttttctactgtaatctgaagcttcaacaaaaggcttacctggtaagaatattcagctggtctgggtcctcaagactccaatagacactcttaragaaggattgctgatggattgatagtgaaaccattagatcattgaattcctctggaattagaaaaccagagagtcccattttaagaaattagatatttaa

SEQ ID NO: 43439 - DNA, 201 bp, Homo sapiens
ctgaagtaaactggatcccctgtaataatcgtaacagatttggccagaccccagtacaagaaagactcagctgcctggccaagaacaactctatctatgtygtggcaaatattggggacaagaagccatgcgataccagtgatcctcagtgtccccctgatggccgttaccaatacaacactgatgtggtatttgattctc

SEQ ID NO: 43440 - DNA, 201 bp, Homo sapiens
aagaagccatgcgataccagtgatcctcagtgtccccctgatggccgttaccaatacaacactgatgtggtatttgattctcaaggaaaactggtggcacrctaccataagcaaaaccttttcatgggtgaaaatcaattcaatgtacccaaggagcctgagattgtgactttcaataccacctttggaagttttggcatt

SEQ ID NO: 43441 - DNA, 201 bp, Homo sapiens
gacatcccagaccctgaagtaaactggatcccctgtaataatcgtaacagatttggccagaccccagtacaagaaagactcagctgcctggccaagaacarctctatctatgttgtggcaaatattggggacaagaagccatgcgataccagtgatcctcagtgtccccctgatggccgttaccaatacaacactgatgtg

SEQ ID NO: 43442 - DNA, 201 bp, Homo sapiens
tgagaaggactgggcatcaaatgcttcatcaggcctcacagcacaagcaagaataataatgctaatagttatagcacctattgtatgctcattaagttggyagaatattgactttttctcttttttatttgggataatttaaaaaatgatggatgagaaaagaaagattggtccgggttaatattatcctctagtataagt

SEQ ID NO: 43443 - DNA, 201 bp, Homo sapiens
gggtcaggatctgggactggcttagtggagttgttctggatcagggcctttggaaagttgtagttaacttgtccccagggctgccatcatctcaaggctcrggtggggctggagaaaatctgcttctcagctcactcacggcggttgccaggcctccattctttaggatgctagaaaaactttcataaaatgtcatctggc

SEQ ID NO: 43444 - DNA, 201 bp, Homo sapiens; identical to SEQ ID NO: 43432

SEQ ID NO: 43445 - DNA, 201 bp, Homo sapiens
ctaaagcactcattggacttcagcatgactactcagttgccagcttacgtggcaattttgcttttctatgtctcaagagccagctgccaggacactttcaytgcagctgtttatgagcatgcagcgatattgcccaatgccaccctaacaccagtgtctcgtgaggaggctttggcattaatgaatcggaatctggacatt

SEQ ID NO: 43446 - DNA, 201 bp, Homo sapiens; identical to SEQ ID NO: 43434

SEQ ID NO: 43447 - DNA, 201 bp, Homo sapiens; identical to SEQ ID NO: 43435

SEQ ID NO: 43448 - DNA, 201 bp, Homo sapiens; identical to SEQ ID NO: 43436

SEQ ID NO: 43449 - DNA, 201 bp, Homo sapiens; identical to SEQ ID NO: 43437

SEQ ID NO: 43450 - DNA, 201 bp, Homo sapiens; identical to SEQ ID NO: 43438

SEQ ID NO: 43451 - DNA, 201 bp, Homo sapiens; identical to SEQ ID NO: 43439

SEQ ID NO: 43452 - DNA, 201 bp, Homo sapiens; identical to SEQ ID NO: 43440

SEQ ID NO: 43453 - DNA, 201 bp, Homo sapiens; identical to SEQ ID NO: 43441

SEQ ID NO: 43454 - DNA, 201 bp, Homo sapiens; identical to SEQ ID NO: 43442

SEQ ID NO: 43455 - DNA, 201 bp, Homo sapiens; identical to SEQ ID NO: 43443

SEQ ID NO: 43456 - DNA, 201 bp, Homo sapiens
atggtgcagagcaacccagtgctctatacgcccggcgaagagcctgaccactgcgtgcgtggggcgcgggcgcgggcgcggggttgcccggcgaggggtgscagggacccgggcaaactcctgctgcactccaggtggtcatcaagtatgtgccgtacgtgggtgacagcaagcgcgcgctggatgagtatacctcggagc

SEQ ID NO: 43457 - DNA, 201 bp, Homo sapiens
ggggacggaacaagaccacagggtggagagtgtggtggcagaaggccaaagagggaatctgagacaagctaccaaaaaccaaaaccagcttccatttattkatgggccccaccccctgacgtcctggggagaggggccccccaaagagcctttctctctgggacaaaatacaaatggcaggaagggtccatacagaaaaga

SEQ ID NO: 43458 - DNA, 201 bp, Homo sapiens
ctgccactcagccctccttccacctggggttcttggggcctgtgacctgactctgcctccctctacttccccgactcttgagcgcccagcttcagtcccaycccctctgcccatggtcatcaccccaactcccagggagagcccagaacctggagcctcgctctgcccccagttctcaaaggtggggctagatgggggcgg

SEQ ID NO: 43459 - DNA, 201 bp, Homo sapiens
ccggtacccgctgccaccaatggctgcaccggtgatgccaatgggcatctgcaagaggagcccccaatgcccaccacctgaggccccggtcacacagtttytcggctcttcctccccgctgccccccacgaccctaccttgaaggcccccacaaataaaggcgctgccactcagccctccttccacctggggttcttgggg

SEQ ID NO: 43460 - DNA, 201 bp, Homo sapiens
aaaaccagcttccatttatttatgggccccaccccctgacgtcctggggagaggggccccccaaagagcctttctctctgggacaaaatacaaatggcagraagggtccatacagaaaagaacgtctctgaggtccttgcgtttttaataaaatggtaagagtctttcgtgtggggcctcccagctgggcaagccttgatt

SEQ ID NO: 43461 - DNA, 201 bp, Homo sapiens
gcgagggtggcgttctcaagctggagcagatccgcagggacatccgagacttccggtctagcgcggggctggacaaagtcatagtgctgtggacggcgaayacggagcgcttctgtgaggtgattccaggcctcaacgacacagccgagaacctgctgcgcaccattgagctcggtctggaggtgtcgccctccacgctct

SEQ ID NO: 43462 - DNA, 201 bp, Homo sapiens
tacggccccgaggccatcgaggcgcaatacgagtaccggacgacgcgcgtcagccgcgagggtggcgttctcaagctggagcagatccgcagggacatccragacttccggtctagcgcggggctggacaaagtcatagtgctgtggacggcgaacacggagcgcttctgtgaggtgattccaggcctcaacgacacagcc

SEQ ID NO: 43463 - DNA, 201 bp, Homo sapiens
aacacaaaatggagcgcccagggcccagcctcaagcgagttggacccgtggctgccacctaccctatgttgaacaagaaaggaccggtacccgctgccacmaatggctgcaccggtgatgccaatgggcatctgcaagaggagcccccaatgcccaccacctgaggccccggtcacacagtttctcggctcttcctccccg

SEQ ID NO: 43464 - DNA, 201 bp, Homo sapiens
caagcgagttggacccgtggctgccacctaccctatgttgaacaagaaaggaccggtacccgctgccaccaatggctgcaccggtgatgccaatgggcatytgcaagaggagcccccaatgcccaccacctgaggccccggtcacacagtttctcggctcttcctccccgctgccccccacgaccctaccttgaaggcccc

SEQ ID NO: 43465 - DNA, 201 bp, Homo sapiens
aagtcaagtccgtgcttgtggacttcctcattggctccggcctcaagaccatgtccatcgtgagttacaaccacctgggcaacaacgatggggagaacctrtcggcgccattgcagttccgctctaaggaggtgtccaagagcaacgtggtggacgacatggtgcagagcaacccagtgctctatacgcccggcgaagagc

SEQ ID NO: 43466 - DNA, 201 bp, Homo sapiens
cacctaccctatgttgaacaagaaaggaccggtacccgctgccaccaatggctgcaccggtgatgccaatgggcatctgcaagaggagcccccaatgcccmccacctgaggccccggtcacacagtttctcggctcttcctccccgctgccccccacgaccctaccttgaaggcccccacaaataaaggcgctgccactca

SEQ ID NO: 43467 - DNA, 201 bp, Homo sapiens; identical to SEQ ID NO: 43457

SEQ ID NO: 43468 - DNA, 201 bp, Homo sapiens; identical to SEQ ID NO: 43458

SEQ ID NO: 43469 - DNA, 201 bp, Homo sapiens; identical to SEQ ID NO: 43459

SEQ ID NO: 43470 - DNA, 201 bp, Homo sapiens; identical to SEQ ID NO: 43460

SEQ ID NO: 43471 - DNA, 201 bp, Homo sapiens
caggctcgcgtgcgcagcagctggagcagatccgcagggacatccgagacttccggtctagcgcggggctggacaaagtcatagtgctgtggacggcgaayacggagcgcttctgtgaggtgattccaggcctcaacgacacagccgagaacctgctgcgcaccattgagctcggtctggaggtgtcgccctccacgctct

SEQ ID NO: 43472 - DNA, 201 bp, Homo sapiens
tacatccccgaattcatcgcggccaaccagagcgcgcgcgcggacaacctcatcccaggctcgcgtgcgcagcagctggagcagatccgcagggacatccragacttccggtctagcgcggggctggacaaagtcatagtgctgtggacggcgaacacggagcgcttctgtgaggtgattccaggcctcaacgacacagcc

SEQ ID NO: 43473 - DNA, 201 bp, Homo sapiens; identical to SEQ ID NO: 43463

SEQ ID NO: 43474 - DNA, 201 bp, Homo sapiens; identical to SEQ ID NO: 43465

SEQ ID NO: 43475 - DNA, 201 bp, Homo sapiens; identical to SEQ ID NO: 43464

SEQ ID NO: 43476 - DNA, 201 bp, Homo sapiens; identical to SEQ ID NO: 43466

SEQ ID NO: 43477 - DNA, 201 bp, Homo sapiens
tgatgtcgccaccacccttttcacagctgaatatcagacatccaatcggtttcattttaagatcactgactttaataacatacgctatgaagtttcccatraaaatattaacctggttgatgggattgctgatgcctccaatttgagctattacgtggaggttactgataaacctttcagcatcaaaataatgaggacaag

SEQ ID NO: 43478 - DNA, 201 bp, Homo sapiens
tgcaggaggtgacaggacagcgaggggtcatcatcacccgctccacatttccctcttctggacgctggggaggacaccggttgggaaacaacacagctgcrtgggaccagctggggaaatctatcattggcatgatggagttcagtctctttggaataccttatacaggagcagatatctgtgggttctttggagatgctg

SEQ ID NO: 43479 - DNA, 201 bp, Homo sapiens; identical to SEQ ID NO: 43477

SEQ ID NO: 43480 - DNA, 201 bp, Homo sapiens
gtttcagaaacctcatcatgcatctcccagagtgtggaagccaatgaaatcacaaagaatggcgctagagtcttgcccagagaattccaaaagtggcagakattggagaccctgcagtagtggatgcagagccagggaagtagtggtgcatcctggactcaacagtgttcaatggacaaggaagctgaagctcctcaggaa

SEQ ID NO: 43481 - DNA, 201 bp, Homo sapiens
gcagcacatcaacaggtcagaggaaaatcctgaaggctccccttgaccacatcaaccttcatgtcagaggaggctacatcctgccctggcaagagcctgcwatgaacactcactccagtcgacaaaattttatgggattgattgttgctttggatgacaatgggacagctgaaggccaggtgttctgggatgatggacaaa

SEQ ID NO: 43482 - DNA, 201 bp, Homo sapiens
aactcaacatttcccctcagatttggaatctagggacaagggcctgagcagcaagactctgtgcatggagagtcagcagatcctgccggacagctcccccrtggagcactacaacgtgcacaacctgtacgggtggtcccagaccagacccacatacgaagctgtgcaggaggtgacaggacagcgaggggtcatcatcac

SEQ ID NO: 43483 - DNA, 201 bp, Homo sapiens
ccagccatctcaagcccctggggtaacctcaaatctggcccagccatctcaagcctttggggtgtctccaagtccagactacccatctcagtctgttgggragtacccaatgctggctcagccatttcagcccactgaggtgtccccaagtccaacctacccatctcaggccattagggagtacccaaccctggcacagcc

SEQ ID NO: 43484 - DNA, 201 bp, Homo sapiens
tgcagtatccccaaggcaagcccaaccatctgtggcctccagtccaggcaagacaaattcatcctgtaccctagcctccagcctagccgagccagctatarcccccagcctattcccaccatctgtggcccacacggaagccctaagcctggctcagtcacccccggacactaggttggccccaagccgatcccagccatc

SEQ ID NO: 43485 - DNA, 201 bp, Homo sapiens
gctcaggctacctatctgtggccactgaggtgtccccaagcccaggctacccatctcagctcactgaggtgtccccaagctcaggctacctatctgtggcyactgaagtgtccccaagcccagactactcatctcagcctactgagatgtccccaagctcaggctacctatctatggccactgaggtgtccccaagcccag

SEQ ID NO: 43486 - DNA, 201 bp, Homo sapiens
ccaaggtcaccaatcaatggctaactgggggtcccaaaacctagcccagccatctatggacagtggggagccctcaagcctagcccagccatctcaagccyctggggtaacctcaaatctggcccagccatctcaagcctttggggtgtctccaagtccagactacccatctcagtctgttggggagtacccaatgctggc

SEQ ID NO: 43487 - DNA, 119 bp, Homo sapiens
atcacgcctctgttcaggggtgtggctgtaagccatccccaggagcctttggctgatgctatgttccccagtgggtctcaggggaccacatctcctggcckagctgggaatctcccctg

SEQ ID NO: 43488 - DNA, 201 bp, Homo sapiens
ctagcagagctcatgcatctatgacctgtatggtgtccccaagccaggttcatcgatctatgcccagtgaggtgtccccaagccttgcccagctatctcargccaccactgcagtgcccttaagaccagctcatcaacctatggcctgtggtgtatccccaagcctagcccagccgtctcaagccacagggatgtcttcaa

SEQ ID NO: 43489 - DNA, 201 bp, Homo sapiens
cactgaggtatctccaagcccagcccacccatatcagctcactgaggtgtccccaagtgcagcctactcatatcagcccactgaggtgtccccaaacccakgctacctatctatggccattgagatgtccccaagcccagaatacccatctgtggccactgaggtgtccccaagcccaacctacccatatcagcccactga

SEQ ID NO: 43490 - DNA, 201 bp, Homo sapiens
ttggggagtacccaatgctggctcagccatttcagcccactgaggtgtccccaagtccaacctacccatctcaggccattagggagtacccaaccctggcmcagccatttcagcccactgaggtatctccaagcccagcccacccatatcagctcactgaggtgtccccaagtgcagcctactcatatcagcccactgagg

SEQ ID NO: 43491 - DNA, 201 bp, Homo sapiens
tgcctctcactccagacctgttcccacaactggggaggtaggctgggagcaaaaggagagggtgggacccagttttgcgtggttggtttttattaattatytggataacagcaaaaaaactgaaaataaagagagagagagatctgggtgttggtggttgcatttgttaaggaattgaagaagcagttcttgcccaggcaa

SEQ ID NO: 43492 - DNA, 201 bp, Homo sapiens
ccactccaaagtccatggattcaatggactcatccatttgtgaggaggacttctcgccctctggctggaagctgatacctgaagcactcccaggctcatcmtgggagctttcctcagcaccttcaccttccctcccagtgtagcctcctgtcagtgggggctggacccttctaattcagaggtctcatgcctgcccttgcc

SEQ ID NO: 43493 - DNA, 201 bp, Homo sapiens
gggtgtttcctgagggaacgagaaaccacaatggctccatgctgcccttcaaacgtggcgccttccatcttgcagtgcaggcccaggttcccattgtcccyatagtcatgtcctcctaccaagacttctactgcaagaaggagcgtcgcttcacctcgggacaatgtcaggtgcgggtgctgcccccagtgcccacggaag

SEQ ID NO: 43494 - DNA, 201 bp, Homo sapiens
tgaggtggccagaatggatttgtggccaggggcatggatgctgctgctgctgctcttcctgctgctgctcttcctgctgcccaccctgtggttctgcagcyccagtgccaagtacttcttcaagatggccttctacaatggctggatcctcttcctggctgtgctcgccatccctgtgtgtgccgtgcgaggacgcaacgt

SEQ ID NO: 43495 - DNA, 201 bp, Homo sapiens
ttatttctttttctgttgaggcttccccctctctgagccagttttcatttcttcctggtggcattagccactccctgcctctcactccagacctgttcccmcaactggggaggtaggctgggagcaaaaggagagggtgggacccagttttgcgtggttggtttttattaattatctggataacagcaaaaaaactgaaaa

SEQ ID NO: 43496 - DNA, 201 bp, Homo sapiens
ttcttcagtggacatgaccccacccagccccctgcagccctgctgcaccatctcaccagacacaaggggaagaagcagacatcaggtgctgcactcacttytgccccctggggagttggggaaaggaacgaaccctggctggaggggataggagggcttttaatttatttctttttctgttgaggcttccccctctctgag

SEQ ID NO: 43497 - DNA, 201 bp, Homo sapiens
attctcctctttggaatcttcaacttctgaagtgaatgtggatacagcgccactcctgccccctcttggccccatccatggactcttgcctcggtgcagtytccactcttgacccccacctcctactgtcttgtctgtgggacagttgcctccccctcatctccagtgactcagcctacacaagggaggggaacattccat

SEQ ID NO: 43498 - DNA, 201 bp, Homo sapiens
gttggggaaaggaacgaaccctggctggaggggataggagggcttttaatttatttctttttctgttgaggcttccccctctctgagccagttttcatttyttcctggtggcattagccactccctgcctctcactccagacctgttcccacaactggggaggtaggctgggagcaaaaggagagggtgggacccagtttt

SEQ ID NO: 43499 - DNA, 201 bp, Homo sapiens
ccatctgtccccatcttcctccccacacctacccacccagtgggccctgaagcagggccaaaccctcttccttgtctcccctctccccacttattctcctmtttggaatcttcaacttctgaagtgaatgtggatacagcgccactcctgccccctcttggccccatccatggactcttgcctcggtgcagtctccactct

SEQ ID NO: 43500 - DNA, 201 bp, Homo sapiens
gcctctcactccagacctgttcccacaactggggaggtaggctgggagcaaaaggagagggtgggacccagttttgcgtggttggtttttattaattatcyggataacagcaaaaaaactgaaaataaagagagagagagatctgggtgttggtggttgcatttgttaaggaattgaagaagcagttcttgcccaggcaac

SEQ ID NO: 43501 - DNA, 201 bp, Homo sapiens
ggtggttgcatttgttaaggaattgaagaagcagttcttgcccaggcaacctgcccccagccagaagactcaggggcaggccaagaacacaggcctccccstttcttcagctctctgaagtttccattgttcattgctctttggtggctgatagccttatctgcagctcacagtcggccaatcccagaggattagtgggtc

SEQ ID NO: 43502 - DNA, 201 bp, Homo sapiens
ccgccgccccgcccccgccggcgccagcccagactgcccaggcccctggcttcgtggtgcccacgcacgcggggactgtgggcacgctgccgctggggggytacgtagcgcccggataccccctgcagctgcagccttgcactgcttacgtgccggtctacccggtgggcacgccatatgcaggcgggaccccggggggaa

SEQ ID NO: 43503 - DNA, 201 bp, Homo sapiens
agtgtgcccctggcttcctgggtgagacgtgccagtttcctgacccctgccagaacgcccagctctgccaaaatggaggcagctgccaagccctgcttccygctcccctagggctccccagctctccctctccattgacacccagcttcttgtgcacttgcctccctggcttcactggcgagagatgccaggccaagcttg

SEQ ID NO: 43504 - DNA, 201 bp, Homo sapiens
tccacaacgggcactgtgagaaaggctgcaacactgcagagtgtggctgggatggaggtgactgcaggcctgaagatggggacccagagtgggggccctcyctggccctgctggtggtactgagccccccagccctagaccagcagctgtttgccctggcccgggtgctgtccctgactctgagggtaggactctgggtaa

SEQ ID NO: 43505 - DNA, 201 bp, Homo sapiens
tttcccagaaccctgtgccaatggaggcacctgcctgagcctgtctctgggacaagggacctgccagtgtgcccctggcttcctgggtgagacgtgccagwttcctgacccctgccagaacgcccagctctgccaaaatggaggcagctgccaagccctgcttcccgctcccctagggctccccagctctccctctccatt

SEQ ID NO: 43506 - DNA, 201 bp, Homo sapiens
gaccccaggaagaagaggatggtgagcagggcccccctcaggatgaggaaggctggccccctccaaactccaccactcggccttggcgatctgctcctccrtcccctcctcctccagggacccgccacacagccctgggaccccgctcggcctccctgctctccctgcagactgaactccttctggacctggtggctgaag

SEQ ID NO: 43507 - DNA, 201 bp, Homo sapiens
gcccaccgggcttcgagggccatgcctgtgaacgtgatgtcaacgagtgcttccaggacccaggaccctgccccaaaggcacctcctgccataacaccctrggctccttccagtgcctctgccctgtggggcaggagggtccacgttgtgagctgcgggcaggaccctgccctcctaggggctgttcgaatgggggcacct

SEQ ID NO: 43508 - DNA, 201 bp, Homo sapiens
taggaggaactcgggaccccacctatcaggagagagcagcccctcaaacgcagcccctgggcaaggagaccgactccctcagtgctgggtttgtggtggtmatgggtgtggatttgtcccgctgtggccctgaccacccggcatcccgctgtccctgggaccctgggcttctactccgcttccttgctgcgatggctgcag

SEQ ID NO: 43509 - DNA, 201 bp, Homo sapiens
tgtctggccacatacccccagatccagtgccactgcccaccgggcttcgagggccatgcctgtgaacgtgatgtcaacgagtgcttccaggacccaggacyctgccccaaaggcacctcctgccataacaccctgggctccttccagtgcctctgccctgtggggcaggagggtccacgttgtgagctgcgggcaggaccc

SEQ ID NO: 43510 - DNA, 201 bp, Homo sapiens
agtgccagcttcgggacttctgttcagccaacccatgtgttaatggaggggtgtgtctggccacatacccccagatccagtgccactgcccaccgggcttygagggccatgcctgtgaacgtgatgtcaacgagtgcttccaggacccaggaccctgccccaaaggcacctcctgccataacaccctgggctccttccagt

SEQ ID NO: 43511 - DNA, 201 bp, Homo sapiens
cagggaccgcaccccctgccaaccagcttccctggcctgtgctgtgctccccagtggccggggtgattctcctggccctaggggctcttctcgtcctccarctcatccggcgtcgacgccgagagcatggagctctctggctgccccctggtttcactcgacggcctcggactcagtcagctccccaccgacgccggcccc

SEQ ID NO: 43512 - DNA, 123 bp, Homo sapiens
agacgtgaggcttgcagcaggcygaggaggaagaagaggggcagtgggagcagaggaggtggctcctgccccagtgagagctctgagggtccctgcctgaagagggacagggaccggggcttg

SEQ ID NO: 43513 - DNA, 201 bp, Homo sapiens
ttgatgaggatggagttgtgatgtgctcaggccctgaggagggagaggaggtgggccaggtgaaagggctggggcaagaatggtctggaggtgatggaagsgatgaaagggcaaatcaaccttcactgatccttgctgttacccaaaggctgaagaaacaggcccaccctccacgtgccagctctggtctctgagtggtgg

SEQ ID NO: 43514 - DNA, 201 bp, Homo sapiens
gggcagaagtggagatggggcctgcgatgctggctgcagtggcccgggaggaaactgggatggaggggactgctctctgggagtcccagacccctggaagsgctgcccctcccactctcggtgctggcttctcttccgggacgggcagtgccacccacagtgtgactctgaagagtgtctgtttgatggctacgactgtga

SEQ ID NO: 43515 - DNA, 201 bp, Homo sapiens
ggacgctgtcagccggagcaggccctcgtgggggcggagcttgtctgcaggctcggacttggtccgtagacttggctgcgcgggggggcggggcctattckcattgccggagcctctcgggagtaggagcaggaggaggcccgacccctcgcggccgtaggttttctgcaggcatgcgcgggcctcggcccaaccctgcga

SEQ ID NO: 43516 - DNA, 201 bp, Homo sapiens
tgaggatggagttgtgatgtgctcaggccctgaggagggagaggaggtgggccaggtgaaagggctggggcaagaatggtctggaggtgatggaagggatsaaagggcaaatcaaccttcactgatccttgctgttacccaaaggctgaagaaacaggcccaccctccacgtgccagctctggtctctgagtggtggctgt

SEQ ID NO: 43517 - DNA, 201 bp, Homo sapiens
gggccccggtgtcagaaacccggagccaaggggtgtgagggcagaagtggagatggggcctgcgatgctggctgcagtggcccgggaggaaactgggatgraggggactgctctctgggagtcccagacccctggaagggctgcccctcccactctcggtgctggcttctcttccgggacgggcagtgccacccacagtgt

SEQ ID NO: 43518 - DNA, 201 bp, Homo sapiens
aacccggagccaaggggtgtgagggcagaagtggagatggggcctgcgatgctggctgcagtggcccgggaggaaactgggatggaggggactgctctctrggagtcccagacccctggaagggctgcccctcccactctcggtgctggcttctcttccgggacgggcagtgccacccacagtgtgactctgaagagtgtc

SEQ ID NO: 43519 - DNA, 201 bp, Homo sapiens
  misc_feature (1)...(201): n = A,T,C or G
gcttcccgctcccctagggctccccagctctccctctccattgacacccagcttcttgtgcacttgcctccctggcttcactggcgagagatgccaggccnagcttgaagacccttgtcctccctccttctgttccaaaaggggccgctgccacatccaggcctcgggccgcccacagtgctcctgcatgcctggatggac

SEQ ID NO: 43520 - DNA, 201 bp, Homo sapiens
gggaaggagcggtggaagtagcccagctactgctggggctgggggcagcccgagagctgcgggaccaggctgggctagcgccggcggacgtcgctcaccarcgtaaccactgggatctgctgacgctgctggaaggggctgggccaccagaggcccgtcacaaagccacgccgggccgcgaggctgggcccttcccgcgcg

SEQ ID NO: 43521 - DNA, 201 bp, Homo sapiens
gtgattgggtggccctgggagcttgcggttctgcctccaacattccgatcccgcctccttgccttactccgtccccggagcggggatcacctcaacttgaytgtggtcccccagccctccaagaaatgcccataaaccaaggaggagagggtaaaaaatagaagaatacatggaattggggagaagaatgggaaaaaagat

SEQ ID NO: 43522 - DNA, 201 bp, Homo sapiens
gggctgggccaccagaggcccgtcacaaagccacgccgggccgcgaggctgggcccttcccgcgcgcacggacggtgtcagtaagcgtgcccccgcatggrggcggggctctgccgcgctgccggacgctgtcagccggagcaggccctcgtgggggcggagcttgtctgcaggctcggacttggtccgtagacttggctg

SEQ ID NO: 43523 - DNA, 201 bp, Homo sapiens
gcagctgccaagccctgcttcccgctcccctagggctccccagctctccctctccattgacacccagcttcttgtgcacttgcctccctggcttcactggygagagatgccaggccaagcttgaagacccttgtcctccctccttctgttccaaaaggggccgctgccacatccaggcctcgggccgcccacagtgctcct

SEQ ID NO: 43524 - DNA, 201 bp, Homo sapiens
gccctcctaggggctgttcgaatgggggcacctgccagctgatgccagagaaagactccacctttcacctctgcctctgtcccccaggtttcataggcccrggctgtgaggtgaatccagacaactgtgtcagccaccagtgtcagaatgggggcacttgccaggatgggctggacacctacacctgcctctgcccagaaa

SEQ ID NO: 43525 - DNA, 201 bp, Homo sapiens
attaagcagcggctggagacctccctaattatctcccccagcccccctcttcggttttaattaagtagaacagggaggggagtcattagaacaagaaataygaactgagctgccggtgaacccaggcattccagcggcctgagtccacatcgcttagatccctgattcaggacccaggtgacagacgcccccagccgccaa

SEQ ID NO: 43526 - DNA, 201 bp, Homo sapiens
agactattctcccagtcccactaccagcacccccgatccctgagactgaggggtttacgggctgtgaatggaccttcagccctgcccaccctccctccccmctgctgctgagtctgtctgatgttttggttgtgtgaataaatataattcccctctggactgcagactggtatctggggggcccaggcggggtgaaaggta

SEQ ID NO: 43527 - DNA, 201 bp, Homo sapiens
cctcctaggggctgttcgaatgggggcacctgccagctgatgccagagaaagactccacctttcacctctgcctctgtcccccaggtttcataggcccggrctgtgaggtgaatccagacaactgtgtcagccaccagtgtcagaatgggggcacttgccaggatgggctggacacctacacctgcctctgcccagaaacc

SEQ ID NO: 43528 - DNA, 201 bp, Homo sapiens
cacagtgctcctgcatgcctggatggacaggtgagcagtgccagcttcgggacttctgttcagccaacccatgtgttaatggaggggtgtgtctggccacrtacccccagatccagtgccactgcccaccgggcttcgagggccatgcctgtgaacgtgatgtcaacgagtgcttccaggacccaggaccctgccccaaag

SEQ ID NO: 43529 - DNA, 201 bp, Homo sapiens
tgatgccagagaaagactccacctttcacctctgcctctgtcccccaggtttcataggcccgggctgtgaggtgaatccagacaactgtgtcagccaccartgtcagaatgggggcacttgccaggatgggctggacacctacacctgcctctgcccagaaacctggacaggattctccggcacccgatgtgaggaggata

SEQ ID NO: 43530 - DNA, 201 bp, Homo sapiens
atggcagggacatggtgtacccctatcctggggcccgggctgaagaaaagctaggaggaactcgggaccccacctatcaggagagagcagcccctcaaacrcagcccctgggcaaggagaccgactccctcagtgctgggtttgtggtggtcatgggtgtggatttgtcccgctgtggccctgaccacccggcatcccgct

SEQ ID NO: 43531 - DNA, 201 bp, Homo sapiens
cagcaggccgaggaggaagaagaggggcagtgggagcagaggaggtggctcctgccccagtgagagctctgagggtccctgcctgaagagggacagggacyggggcttggagaaggggctgtggaatgcagcccccttcactgctgctgctgctgctgctgctgctgctgctatgtgtctcagtggtcagacccagagggc

SEQ ID NO: 43532 - DNA, 201 bp, Homo sapiens
gtctcccaggctacgatggacagaactgctcaaaggaactcgatgcttgtcagtcccaaccctgtcacaaccatggaacctgtactcccaaacctggaggmttccactgtgcctgccctccaggctttgtggggctacgctgtgagggagacgtggacgagtgtctggaccagccctgccaccccacaggcactgcagcct

SEQ ID NO: 43533 - DNA, 201 bp, Homo sapiens; identical to SEQ ID NO: 43504

SEQ ID NO: 43534 - DNA, 201 bp, Homo sapiens; identical to SEQ ID NO: 43507

SEQ ID NO: 43535 - DNA, 201 bp, Homo sapiens; identical to SEQ ID NO: 43508

SEQ ID NO: 43536 - DNA, 201 bp, Homo sapiens; identical to SEQ ID NO: 43509

SEQ ID NO: 43537 - DNA, 201 bp, Homo sapiens; identical to SEQ ID NO: 43510

SEQ ID NO: 43538 - DNA, 201 bp, Homo sapiens; identical to SEQ ID NO: 43511

SEQ ID NO: 43539 - DNA, 123 bp, Homo sapiens; identical to SEQ ID NO: 43512

SEQ ID NO: 43540 - DNA, 162 bp, Homo sapiens
gaaaagtggccaagggccacccccgctgatgactccttgcattccctcccctcacaacaaagaactccactgtggggatgaagcgcttcttctagccactsctatcgctatttaagaaccctaaatctgtcacccataataaagctgatttgaagtgttacc

SEQ ID NO: 43541 - DNA, 201 bp, Homo sapiens; identical to SEQ ID NO: 43515

SEQ ID NO: 43542 - DNA, 201 bp, Homo sapiens; identical to SEQ ID NO: 43514

SEQ ID NO: 43543 - DNA, 201 bp, Homo sapiens; identical to SEQ ID NO: 43517

SEQ ID NO: 43544 - DNA, 201 bp, Homo sapiens; identical to SEQ ID NO: 43518

SEQ ID NO: 43545 - DNA, 201 bp, Homo sapiens
gaatgggggcacttgccaggatgggctggacacctacacctgcctctgcccagaaacctggacaggctgggactgctccgaagatgtggatgagtgtgagrcccagggtccccctcactgcagaaacgggggcacctgccagaactctgctggtagctttcactgcgtgtgtgtgagtggctggggcggcacaagctgtga

SEQ ID NO: 43546 - DNA, 201 bp, Homo sapiens; identical to SEQ ID NO: 43520

SEQ ID NO: 43547 - DNA, 201 bp, Homo sapiens
caccccacaggcactgcagcctgccactctctggccaatgccttctactgccagtgtctgcctggacacacaggccagtggtgtgaggtggagatagaccyctgccacagccaaccctgctttcatggagggacctgtgaggccacagcaggatcacccctgggtttcatctgccactgccccaagggttttgaaggcccc

SEQ ID NO: 43548 - DNA, 201 bp, Homo sapiens
aagggcagctctgtgaggtggagaccaacgagtgtgcctcagctccctgcctgaaccacgcggattgccatgacctgctcaacggcttccagtgcatctgyctgcctggattctccggcacccgatgtgaggaggatatcgatgagtgcagaagctctccctgtgccaatggtgggcagtgccaggaccagcctggagcct

SEQ ID NO: 43549 - DNA, 201 bp, Homo sapiens
ctgcccgccaggcttagaagggcagctctgtgaggtggagaccaacgagtgtgcctcagctccctgcctgaaccacgcggattgccatgacctgctcaacrgcttccagtgcatctgcctgcctggattctccggcacccgatgtgaggaggatatcgatgagtgcagaagctctccctgtgccaatggtgggcagtgcca

SEQ ID NO: 43550 - DNA, 201 bp, Homo sapiens; identical to SEQ ID NO: 43523

SEQ ID NO: 43551 - DNA, 201 bp, Homo sapiens; identical to SEQ ID NO: 43528

SEQ ID NO: 43552 - DNA, 201 bp, Homo sapiens
tggatgagtgtgagacccagggtccccctcactgcagaaacgggggcacctgccagaactctgctggtagctttcactgcgtgtgtgtgagtggctggggsggcacaagctgtgaggagaacctggatgactgtattgctgccacctgtgccccgggatccacctgcattgaccgggtgggctctttctcctgcctctgcc

SEQ ID NO: 43553 - DNA, 201 bp, Homo sapiens
tacttgccaccttccactgcctctgcccgccaggcttagaagggcagctctgtgaggtggagaccaacgagtgtgcctcagctccctgcctgaaccacgcrgattgccatgacctgctcaacggcttccagtgcatctgcctgcctggattctccggcacccgatgtgaggaggatatcgatgagtgcagaagctctccct

SEQ ID NO: 43554 - DNA, 201 bp, Homo sapiens
agggcaacctgccaggacagccctcagggtccccgctgcctctgccccactggctacaccggaggcagctgccagactctgatggacttatgtgcccagargccctgcccacgcaattcccactgcctccagactgggccctccttccactgcttgtgcctccagggatggaccgggcctctctgcaaccttccactgtcc

SEQ ID NO: 43555 - DNA, 201 bp, Homo sapiens; identical to SEQ ID NO: 43530

SEQ ID NO: 43556 - DNA, 201 bp, Homo sapiens
tgcagacagcccctgtaggaatagggcaacctgccaggacagccctcagggtccccgctgcctctgccccactggctacaccggaggcagctgccagactytgatggacttatgtgcccagaagccctgcccacgcaattcccactgcctccagactgggccctccttccactgcttgtgcctccagggatggaccgggcc

SEQ ID NO: 43557 - DNA, 201 bp, Homo sapiens
aggtggatgagtgcctgagtgacccatgtcccgttggagccagctgccttgatcttccaggagccttcttttgcctctgcccctctggtttcacaggccarctctgtgaggttcccctgtgtgctcccaacctgtgccagcccaagcagatatgtaaggaccagaaagacaaggccaactgcctctgtcctgatggaagcc

SEQ ID NO: 43558 - DNA, 201 bp, Homo sapiens; identical to SEQ ID NO: 43503

SEQ ID NO: 43559 - DNA, 201 bp, Homo sapiens
ccaggaccagcctggagccttccactgcaagtgtctcccaggctttgaagggccacgctgtcaaacagaggtggatgagtgcctgagtgacccatgtcccsttggagccagctgccttgatcttccaggagccttcttttgcctctgcccctctggtttcacaggccagctctgtgaggttcccctgtgtgctcccaacct

SEQ ID NO: 43560 - DNA, 201 bp, Homo sapiens; identical to SEQ ID NO: 43505

SEQ ID NO: 43561 - DNA, 201 bp, Homo sapiens
tgcttcaatgggggtacctgtgtgaacaggcctggcaccttctcctgcctctgtgccatgggcttccagggcccgcgctgtgagggaaagctccgccccakctgtgcagacagcccctgtaggaatagggcaacctgccaggacagccctcagggtccccgctgcctctgccccactggctacaccggaggcagctgccag

SEQ ID NO: 43562 - DNA, 201 bp, Homo sapiens
cgacagcggcccctcctatttctgccactgcccccctggattccaaggcagcctgtgccaggatcacgtgaacccatgtgagtccaggccttgccagaacrgggccacctgcatggcccagcccagtgggtatctctgccagtgtgccccaggctacgatggacagaactgctcaaaggaactcgatgcttgtcagtccca

SEQ ID NO: 43563 - DNA, 201 bp, Homo sapiens; identical to SEQ ID NO: 43519
  misc_feature (1)...(201): n = A,T,C or G

SEQ ID NO: 43564 - DNA, 201 bp, Homo sapiens
tgtgagggaaagctccgccccagctgtgcagacagcccctgtaggaatagggcaacctgccaggacagccctcagggtccccgctgcctctgccccactgkctacaccggaggcagctgccagactctgatggacttatgtgcccagaagccctgcccacgcaattcccactgcctccagactgggccctccttccactgc

SEQ ID NO: 43565 - DNA, 201 bp, Homo sapiens
gacccacctgtagtgaggagatgacagcttgtcactcagggccatgtctcaatggcggctcctgcaaccctagccctggaggctactactgcacctgccckccaagccacacagggccccagtgccaaaccagcactgactactgtgtgtctgccccgtgcttcaatgggggtacctgtgtgaacaggcctggcaccttct

SEQ ID NO: 43566 - DNA, 201 bp, Homo sapiens
aggctggaaggccttcctggttttaagatggatcccccaaaatgaagggttgtgagtttagtttctctcctaaaatgaatgtatgcccaccagagcagacrtcttccacgtggagaagctgcagctctggaaagagggtttaagatgctaggatgaggcaggcccagtcctcctccagaaaataagacaggccacaggagg

SEQ ID NO: 43567 - DNA, 201 bp, Homo sapiens
gtgattgggtggccctgggagcttgcggttctgcctccaacattccgatcccgcctccttgccttactccgtccccggagcggggatcacctcaacttgaytgtggtcccccagccctccaagaaatgcccataaaccaaggaggagagggtaaaaaatagaagaatacatggtagggaggaattccaaaaatgattaccc

SEQ ID NO: 43568 - DNA, 201 bp, Homo sapiens; identical to SEQ ID NO: 43522

SEQ ID NO: 43569 - DNA, 201 bp, Homo sapiens; identical to SEQ ID NO: 43524

SEQ ID NO: 43570 - DNA, 201 bp, Homo sapiens; identical to SEQ ID NO: 43527

SEQ ID NO: 43571 - DNA, 201 bp, Homo sapiens
tgatgccagagaaagactccacctttcacctctgcctctgtcccccaggtttcataggcccgggctgtgaggtgaatccagacaactgtgtcagccaccartgtcagaatgggggcacttgccaggatgggctggacacctacacctgcctctgcccagaaacctggacaggctgggactgctccgaagatgtggatgagt

SEQ ID NO: 43572 - DNA, 201 bp, Homo sapiens; identical to SEQ ID NO: 43531

SEQ ID NO: 43573 - DNA, 201 bp, Homo sapiens
gtgccccaggctacgatggacagaactgctcaaaggaactcgatgcttgtcagtcccaaccctgtcacaaccatggaacctgtactcccaaacctggaggmttccactgtgcctgccctccaggctttgtggggctacgctgtgagggagacgtggacgagtgtctggaccagccctgccaccccacaggcactgcagcct

SEQ ID NO: 43574 - DNA, 201 bp, Homo sapiens
tgactgggctttggggttgaacttttttttttttaaagaaagaaaaagaaaccctgggatccatctgttttttttgttgttgttgttgtttttgttgttgktggtggtggtggtggtggtggttcttaatttttaatttagtttggggaagtagcttgtttttttttttataaatatgttgatttcttgtctttttttttt

SEQ ID NO: 43575 - DNA, 201 bp, Homo sapiens
ttattgactgggctttggggttgaacttttttttttttaaagaaagaaaaagaaaccctgggatccatctgttttttttgttgttgttgttgtttttgttkttgttggtggtggtggtggtggtggttcttaatttttaatttagtttggggaagtagcttgtttttttttttataaatatgttgatttcttgtctttttt

SEQ ID NO: 43576 - DNA, 201 bp, Homo sapiens
tttcttgtcttttttttttatttcttactttcccatattaggggtgatagccaaaggggttctggtaagagaaagggggacaaacagaactggtaaagagscccccctggctccaggcctgtccatcaggaagtaaattttacagggcaccaagctttgccccctaaaatcccttaggtgttctttgttcatgcaggcagg

SEQ ID NO: 43577 - DNA, 201 bp, Homo sapiens
ggaattattgactgggctttggggttgaacttttttttttttaaagaaagaaaaagaaaccctgggatccatctgttttttttgttgttgttgttgtttttgttgttgttggtggtggtggtggtggtggttcttaatttttaatttagtttggggaagtagcttgtttttttttttataaatatgttgatttcttgtctt

SEQ ID NO: 43578 - DNA, 201 bp, Homo sapiens
gtaacttcagcaaacaggccactgaggtcctaaatgagtatttctactcccacctgagtaacccatatcctagtgaggaggccaaggaggagcttgccaaraagtgtggcatcaccgtgtctcaggtctccaactggtttggcaacaagaggattcgctataagaaaaacatcggaaagttccaagaggaggcaaacatct

SEQ ID NO: 43579 - DNA, 201 bp, Homo sapiens
gggaattattgactgggctttggggttgaacttttttttttttaaagaaagaaaaagaaaccctgggatccatctgttttttttgttgttgttgttgtttttgttgttgttggtggtggtggtggtggtggttcttaatttttaatttagtttggggaagtagcttgtttttttttttataaatatgttgatttcttgtct

SEQ ID NO: 43580 - DNA, 201 bp, Homo sapiens
tttagggaattattgactgggctttggggttgaacttttttttttttaaagaaagaaaaagaaaccctgggatccatctgttttttttgttgttgttgttgtttttgttgttgttggtggtggtggtggtggtggttcttaatttttaatttagtttggggaagtagcttgtttttttttttataaatatgttgatttctt

SEQ ID NO: 43581 - DNA, 201 bp, Homo sapiens
gacgggcgggggttggggcggagggagcagcggccccagcgagtttggggggagaagtaaccaggcggggggaggggcggagcagggagggggcctcaggscccccccccagctatggacgaacggctactggggccgccccctccaggcgggggccgggggggcctgggattggtgagtggggagcctgggggccctggc

SEQ ID NO: 43582 - DNA, 201 bp, Homo sapiens
agtttctgctactttagggaattattgactgggctttggggttgaacttttttttttttaaagaaagaaaaagaaaccctgggatccatctgttttttttkttgttgttgttgtttttgttgttgttggtggtggtggtggtggtggttcttaatttttaatttagtttggggaagtagcttgtttttttttttataaata

SEQ ID NO: 43583 - DNA, 201 bp, Homo sapiens
cgggagccgggggcagacgggcgggggttggggcggagggagcagcggccccagcgagtttggggggagaagtaaccaggcggggggaggggcggagcagrgagggggcctcagggcccccccccagctatggacgaacggctactggggccgccccctccaggcgggggccgggggggcctgggattggtgagtggggag

SEQ ID NO: 43584 - DNA, 201 bp, Homo sapiens
ctgggctttggggttgaacttttttttttttaaagaaagaaaaagaaaccctgggatccatctgttttttttgttgttgttgttgtttttgttgttgttgktggtggtggtggtggtggttcttaatttttaatttagtttggggaagtagcttgtttttttttttataaatatgttgatttcttgtcttttttttttatt

SEQ ID NO: 43585 - DNA, 201 bp, Homo sapiens
gggggaggggcggagcagggagggggcctcagggcccccccccagctatggacgaacggctactggggccgccccctccaggcgggggccgggggggcctrggattggtgagtggggagcctgggggccctggcgagcctcccggtggcggagaccccggtgggggtagcgggggggtcccgggaggccgagggaagcaag

SEQ ID NO: 43586 - DNA, 201 bp, Homo sapiens; identical to SEQ ID NO: 43491

SEQ ID NO: 43587 - DNA, 177 bp, Homo sapiens
ctcttttagagaatgtccggattgctattggactttggagcgtatggctccaaatcaactcattggctaaaacttgmcggaaaatggtggttaggtggccagaatggatttgtggccaggggcatggatgctgctgctgctgctcttcctgctgctgctcttcctgctgcccaccct

SEQ ID NO: 43588 - DNA, 201 bp, Homo sapiens; identical to SEQ ID NO: 43492

SEQ ID NO: 43589 - DNA, 106 bp, Homo sapiens
ctcttytagagaatgtccggattgctattggactttggagcgtatggctccaaatcaactcattggctaaaacttgacggaaaatggtggttaggtggccagaatg

SEQ ID NO: 43590 - DNA, 201 bp, Homo sapiens; identical to SEQ ID NO: 43493

SEQ ID NO: 43591 - DNA, 201 bp, Homo sapiens
ttaggtggccagaatggatttgtggccaggggcatggatgctgctgctgctgctcttcctgctgctgctcttcctgctgcccaccctgtggttctgcagcyccagtgccaagtacttcttcaagatggccttctacaatggctggatcctcttcctggctgtgctcgccatccctgtgtgtgccgtgcgaggacgcaacgt

SEQ ID NO: 43592 - DNA, 201 bp, Homo sapiens; identical to SEQ ID NO: 43495

SEQ ID NO: 43593 - DNA, 201 bp, Homo sapiens; identical to SEQ ID NO: 43496

SEQ ID NO: 43594 - DNA, 201 bp, Homo sapiens; identical to SEQ ID NO: 43497

SEQ ID NO: 43595 - DNA, 201 bp, Homo sapiens; identical to SEQ ID NO: 43498

SEQ ID NO: 43596 - DNA, 201 bp, Homo sapiens; identical to SEQ ID NO: 43499

SEQ ID NO: 43597 - DNA, 201 bp, Homo sapiens; identical to SEQ ID NO: 43500

SEQ ID NO: 43598 - DNA, 201 bp, Homo sapiens; identical to SEQ ID NO: 43501

SEQ ID NO: 43599 - DNA, 201 bp, Homo sapiens; identical to SEQ ID NO: 43502

SEQ ID NO: 43600 - DNA, 201 bp, Homo sapiens; identical to SEQ ID NO: 43491

SEQ ID NO: 43601 - DNA, 201 bp, Homo sapiens; identical to SEQ ID NO: 43492

SEQ ID NO: 43602 - DNA, 201 bp, Homo sapiens
ccctgaagccaaatttccattggaagaaaagatgtacccatattgtatgttgtgagaaggggttgtctcagcttgggcaagtaaggagactgatacgaagraagtaggaaagaaaaggtacagaggtaaaagagcatggaaaaggaaagggtcagggataaggccaaagagatctcttctctttaaaggccagagaaggca

SEQ ID NO: 43603 - DNA, 201 bp, Homo sapiens; identical to SEQ ID NO: 43493

SEQ ID NO: 43604 - DNA, 201 bp, Homo sapiens
tatggtggccagaatggatttgtggccaggggcatggatgctgctgctgctgctcttcctgctgctgctcttcctgctgcccaccctgtggttctgcagcyccagtgccaagtacttcttcaagatggccttctacaatggctggatcctcttcctggctgtgctcgccatccctgtgtgtgccgtgcgaggacgcaacgt

SEQ ID NO: 43605 - DNA, 201 bp, Homo sapiens; identical to SEQ ID NO: 43495

SEQ ID NO: 43606 - DNA, 201 bp, Homo sapiens; identical to SEQ ID NO: 43496

SEQ ID NO: 43607 - DNA, 201 bp, Homo sapiens; identical to SEQ ID NO: 43497

SEQ ID NO: 43608 - DNA, 201 bp, Homo sapiens; identical to SEQ ID NO: 43498

SEQ ID NO: 43609 - DNA, 201 bp, Homo sapiens; identical to SEQ ID NO: 43499

SEQ ID NO: 43610 - DNA, 201 bp, Homo sapiens; identical to SEQ ID NO: 43500

SEQ ID NO: 43611 - DNA, 201 bp, Homo sapiens; identical to SEQ ID NO: 43501

SEQ ID NO: 43612 - DNA, 103 bp, Homo sapiens
ctatgctgtcaagaccgccgtgtcagtcacccaggggggccacagccgcaccagctccccgacacccccttcctctgcaggtggatcccactgtcaccccrgc

SEQ ID NO: 43613 - DNA, 201 bp, Homo sapiens; identical to SEQ ID NO: 43585

SEQ ID NO: 43614 - DNA, 201 bp, Homo sapiens; identical to SEQ ID NO: 43578

SEQ ID NO: 43615 - DNA, 201 bp, Homo sapiens; identical to SEQ ID NO: 43581

SEQ ID NO: 43616 - DNA, 201 bp, Homo sapiens; identical to SEQ ID NO: 43583

SEQ ID NO: 43617 - DNA, 201 bp, Homo sapiens
ctctgtgctgggggtgctaattacatggcaggaagaatggggcctctaaggggagtgtggggtctgtctctcccttttttccatctttttcctctctcgckttctttcttacacagaaacatacacataccgagaaacctatttctcagacccctttttctcctctgtctttctctctccctctcccacacctcacacaca

SEQ ID NO: 43618 - DNA, 201 bp, Homo sapiens
cgacttgaagaggacgcaggcttccagaggacaaaccccaatacaggagaagcacaagacagagaagggccaatggggtcatcccctccctaacgagactstctgtgctgggggtgctaattacatggcaggaagaatggggcctctaaggggagtgtggggtctgtctctcccttttttccatctttttcctctctcgct

SEQ ID NO: 43619 - DNA, 201 bp, Homo sapiens
tgtgaccccctcttcagtgacatccccaacggagggaccagggagtgttcactctgatacctccaactgatcttgcccctcagggtcacaggggtgggggstctcacaaggcgacttgaagaggacgcaggcttccagaggacaaaccccaatacaggagaagcacaagacagagaagggccaatggggtcatcccctccc

SEQ ID NO: 43620 - DNA, 201 bp, Homo sapiens; identical to SEQ ID NO: 43578

SEQ ID NO: 43621 - DNA, 201 bp, Homo sapiens
gaagaatggggcctctaaggggagtgtggggtctgtctctcccttttttccatctttttcctctctcgctttctttcttacacagaaacatacacataccsagaaacctatttctcagacccctttttctcctctgtctttctctctccctctcccacacctcacacacacatactcccacttgcaactattctgtttctc

SEQ ID NO: 43622 - DNA, 201 bp, Homo sapiens; identical to SEQ ID NO: 43581

SEQ ID NO: 43623 - DNA, 201 bp, Homo sapiens
cacaaggcgacttgaagaggacgcaggcttccagaggacaaaccccaatacaggagaagcacaagacagagaagggccaatggggtcatcccctccctaaygagactctctgtgctgggggtgctaattacatggcaggaagaatggggcctctaaggggagtgtggggtctgtctctcccttttttccatctttttcctc

SEQ ID NO: 43624 - DNA, 201 bp, Homo sapiens; identical to SEQ ID NO: 43583

SEQ ID NO: 43625 - DNA, 201 bp, Homo sapiens
acatggcaggaagaatggggcctctaaggggagtgtggggtctgtctctcccttttttccatctttttcctctctcgctttctttcttacacagaaacatrcacataccgagaaacctatttctcagacccctttttctcctctgtctttctctctccctctcccacacctcacacacacatactcccacttgcaactatt

SEQ ID NO: 43626 - DNA, 201 bp, Homo sapiens
ccctccctaacgagactctctgtgctgggggtgctaattacatggcaggaagaatggggcctctaaggggagtgtggggtctgtctctcccttttttccawctttttcctctctcgctttctttcttacacagaaacatacacataccgagaaacctatttctcagacccctttttctcctctgtctttctctctccctct

SEQ ID NO: 43627 - DNA, 201 bp, Homo sapiens
aggagaagcacaagacagagaagggccaatggggtcatcccctccctaacgagactctctgtgctgggggtgctaattacatggcaggaagaatggggccyctaaggggagtgtggggtctgtctctcccttttttccatctttttcctctctcgctttctttcttacacagaaacatacacataccgagaaacctatttc

SEQ ID NO: 43628 - DNA, 201 bp, Homo sapiens
aaaacatgagaaaccccagaaaaaaaatgattttctttcacgaagttccaaacaggtttctctcctgttccccagccttgccttcatgatgcaggcccaawtgcacccttgcagacaacagtctggcctgaaccctattgatgcaactttgcgcaatcaagatggggctccagtgggtcaccaggcagccctgatggactg

SEQ ID NO: 43629 - DNA, 147 bp, Homo sapiens
agatgggggctggagagagggtgcaggccccacctagggcggaggccacagcagggagaggggcagacagagccaggaccctggaaggaagcaggatggcwgccggaacagcagttggagcctgggtgctggtcctcagtctgtggg

SEQ ID NO: 43630 - DNA, 201 bp, Homo sapiens
gggggctctcacaaggcgacttgaagaggacgcaggcttccagaggacaaaccccaatacaggagaagcacaagacagagaagggccaatggggtcatccsctccctaacgagactctctgtgctgggggtgctaattacatggcaggaagaatggggcctctaaggggagtgtggggtctgtctctcccttttttccatc

SEQ ID NO: 43631 - DNA, 201 bp, Homo sapiens
gttttaaataaagaaatttcttttttccctgggtttagttgagaatttttttcaaaaaacatgagaaaccccagaaaaaaaatgattttctttcacgaagytccaaacaggtttctctcctgttccccagccttgccttcatgatgcaggcccaattgcacccttgcagacaacagtctggcctgaaccctattgatgcaa

SEQ ID NO: 43632 - DNA, 201 bp, Homo sapiens; identical to SEQ ID NO: 43585

SEQ ID NO: 43633 - DNA, 201 bp, Homo sapiens; identical to SEQ ID NO: 43617

SEQ ID NO: 43634 - DNA, 201 bp, Homo sapiens; identical to SEQ ID NO: 43618

SEQ ID NO: 43635 - DNA, 201 bp, Homo sapiens; identical to SEQ ID NO: 43574

SEQ ID NO: 43636 - DNA, 201 bp, Homo sapiens; identical to SEQ ID NO: 43575

SEQ ID NO: 43637 - DNA, 201 bp, Homo sapiens; identical to SEQ ID NO: 43619

SEQ ID NO: 43638 - DNA, 201 bp, Homo sapiens; identical to SEQ ID NO: 43576

SEQ ID NO: 43639 - DNA, 201 bp, Homo sapiens; identical to SEQ ID NO: 43577

SEQ ID NO: 43640 - DNA, 201 bp, Homo sapiens; identical to SEQ ID NO: 43578

SEQ ID NO: 43641 - DNA, 201 bp, Homo sapiens; identical to SEQ ID NO: 43579

SEQ ID NO: 43642 - DNA, 201 bp, Homo sapiens; identical to SEQ ID NO: 43580

SEQ ID NO: 43643 - DNA, 201 bp, Homo sapiens; identical to SEQ ID NO: 43621

SEQ ID NO: 43644 - DNA, 201 bp, Homo sapiens; identical to SEQ ID NO: 43581

SEQ ID NO: 43645 - DNA, 201 bp, Homo sapiens; identical to SEQ ID NO: 43582

SEQ ID NO: 43646 - DNA, 201 bp, Homo sapiens; identical to SEQ ID NO: 43623

SEQ ID NO: 43647 - DNA, 201 bp, Homo sapiens; identical to SEQ ID NO: 43583

SEQ ID NO: 43648 - DNA, 201 bp, Homo sapiens; identical to SEQ ID NO: 43625

SEQ ID NO: 43649 - DNA, 201 bp, Homo sapiens; identical to SEQ ID NO: 43626

SEQ ID NO: 43650 - DNA, 201 bp, Homo sapiens; identical to SEQ ID NO: 43627

SEQ ID NO: 43651 - DNA, 201 bp, Homo sapiens; identical to SEQ ID NO: 43628

SEQ ID NO: 43652 - DNA, 147 bp, Homo sapiens; identical to SEQ ID NO: 43629

SEQ ID NO: 43653 - DNA, 201 bp, Homo sapiens; identical to SEQ ID NO: 43630

SEQ ID NO: 43654 - DNA, 201 bp, Homo sapiens; identical to SEQ ID NO: 43631

SEQ ID NO: 43655 - DNA, 201 bp, Homo sapiens; identical to SEQ ID NO: 43584

SEQ ID NO: 43656 - DNA, 201 bp, Homo sapiens; identical to SEQ ID NO: 43585

SEQ ID NO: 43657 - DNA, 201 bp, Homo sapiens; identical to SEQ ID NO: 43491

SEQ ID NO: 43658 - DNA, 177 bp, Homo sapiens
ctcttttagagaatgtccggattgctattggactttggagcgtatggctccaaatcaactcattggctaaaacttgmcggaaaatggtgagggaaaacactagggtcgcagggttcaaaatggctccaacctcctttggtgacgtagagagcagaacttgggtctgcccctcccttt

SEQ ID NO: 43659 - DNA, 201 bp, Homo sapiens; identical to SEQ ID NO: 43492

SEQ ID NO: 43660 - DNA, 106 bp, Homo sapiens
ctcttytagagaatgtccggattgctattggactttggagcgtatggctccaaatcaactcattggctaaaacttgacggaaaatggtgagggaaaacactagggt

SEQ ID NO: 43661 - DNA, 201 bp, Homo sapiens; identical to SEQ ID NO: 43493

SEQ ID NO: 43662 - DNA, 201 bp, Homo sapiens; identical to SEQ ID NO: 43591

SEQ ID NO: 43663 - DNA, 201 bp, Homo sapiens; identical to SEQ ID NO: 43495

SEQ ID NO: 43664 - DNA, 201 bp, Homo sapiens; identical to SEQ ID NO: 43496

SEQ ID NO: 43665 - DNA, 201 bp, Homo sapiens; identical to SEQ ID NO: 43497

SEQ ID NO: 43666 - DNA, 201 bp, Homo sapiens; identical to SEQ ID NO: 43498

SEQ ID NO: 43667 - DNA, 201 bp, Homo sapiens; identical to SEQ ID NO: 43499

SEQ ID NO: 43668 - DNA, 201 bp, Homo sapiens; identical to SEQ ID NO: 43500

SEQ ID NO: 43669 - DNA, 201 bp, Homo sapiens; identical to SEQ ID NO: 43501

SEQ ID NO: 43670 - DNA, 201 bp, Homo sapiens; identical to SEQ ID NO: 43617

SEQ ID NO: 43671 - DNA, 201 bp, Homo sapiens; identical to SEQ ID NO: 43618

SEQ ID NO: 43672 - DNA, 201 bp, Homo sapiens; identical to SEQ ID NO: 43574

SEQ ID NO: 43673 - DNA, 201 bp, Homo sapiens; identical to SEQ ID NO: 43575

SEQ ID NO: 43674 - DNA, 201 bp, Homo sapiens; identical to SEQ ID NO: 43619

SEQ ID NO: 43675 - DNA, 201 bp, Homo sapiens; identical to SEQ ID NO: 43576

SEQ ID NO: 43676 - DNA, 201 bp, Homo sapiens; identical to SEQ ID NO: 43577

SEQ ID NO: 43677 - DNA, 201 bp, Homo sapiens; identical to SEQ ID NO: 43579

SEQ ID NO: 43678 - DNA, 201 bp, Homo sapiens; identical to SEQ ID NO: 43578

SEQ ID NO: 43679 - DNA, 201 bp, Homo sapiens; identical to SEQ ID NO: 43580

SEQ ID NO: 43680 - DNA, 201 bp, Homo sapiens; identical to SEQ ID NO: 43621

SEQ ID NO: 43681 - DNA, 201 bp, Homo sapiens; identical to SEQ ID NO: 43582

SEQ ID NO: 43682 - DNA, 201 bp, Homo sapiens; identical to SEQ ID NO: 43623

SEQ ID NO: 43683 - DNA, 201 bp, Homo sapiens; identical to SEQ ID NO: 43625

SEQ ID NO: 43684 - DNA, 201 bp, Homo sapiens; identical to SEQ ID NO: 43626

SEQ ID NO: 43685 - DNA, 201 bp, Homo sapiens; identical to SEQ ID NO: 43627

SEQ ID NO: 43686 - DNA, 201 bp, Homo sapiens; identical to SEQ ID NO: 43628

SEQ ID NO: 43687 - DNA, 201 bp, Homo sapiens
agatgggggctggagagagggtgcaggccccacctagggcggaggccacagcagggagaggggcagacagagccaggaccctggaaggaagcaggatggcwgccggaacagcagttggagcctgggtgctggtcctcagtctgtggggggcagtagtaggtgctcaaaacatcacagcccggattggcgagccactggtgc

SEQ ID NO: 43688 - DNA, 201 bp, Homo sapiens
gccggacagaagcttggaaggtcctgtctccccagggaggaggcccctgggacagtgtggctcgtgtccttcccaacggctccctcttccttccggctgtsgggatccaggatgaggggattttccggtgccaggcaatgaacaggaatggaaaggagaccaagtccaactaccgagtccgtgtctaccagattcctggga

SEQ ID NO: 43689 - DNA, 201 bp, Homo sapiens; identical to SEQ ID NO: 43630

SEQ ID NO: 43690 - DNA, 201 bp, Homo sapiens; identical to SEQ ID NO: 43631

SEQ ID NO: 43691 - DNA, 201 bp, Homo sapiens; identical to SEQ ID NO: 43584

SEQ ID NO: 43692 - DNA, 201 bp, Homo sapiens
agtctgtggggggcagtagtaggtgctcaaaacatcacagcccggattggcgagccactggtgctgaagtgtaagggggcccccaagaaaccaccccagcrgctggaatggaaactgaacacaggccggacagaagcttggaaggtcctgtctccccagggaggaggcccctgggacagtgtggctcgtgtccttcccaac

SEQ ID NO: 43693 - DNA, 201 bp, Homo sapiens
gctggaatggaaactgaacacaggccggacagaagcttggaaggtcctgtctccccagggaggaggcccctgggacagtgtggctcgtgtccttcccaacrgctccctcttccttccggctgtcgggatccaggatgaggggattttccggtgccaggcaatgaacaggaatggaaaggagaccaagtccaactaccgagt

SEQ ID NO: 43694 - DNA, 201 bp, Homo sapiens
ctcccttcagtgccggggtgaacccccgggggagccgggagccgggggcagacgggcgggggttggggcggagggagcagcggccccagcgggggggcctrggattggtgagtggggagcctgggggccctggcgagcctcccggtggcggagaccccggtgggggtagcgggggggtcccgggaggccgagggaagcaag

SEQ ID NO: 43695 - DNA, 201 bp, Homo sapiens
gggcagtagtaggtgctcaaaacatcacagcccggattggcgagccactggtgctgaagtgtaagggggcccccaagaaaccaccccagcggctggaatgraaactgaacacaggccggacagaagcttggaaggtcctgtctccccagggaggaggcccctgggacagtgtggctcgtgtccttcccaacggctccctct

SEQ ID NO: 43696 - DNA, 201 bp, Homo sapiens; identical to SEQ ID NO: 43617

SEQ ID NO: 43697 - DNA, 201 bp, Homo sapiens; identical to SEQ ID NO: 43618

SEQ ID NO: 43698 - DNA, 201 bp, Homo sapiens; identical to SEQ ID NO: 43574

SEQ ID NO: 43699 - DNA, 201 bp, Homo sapiens; identical to SEQ ID NO: 43575

SEQ ID NO: 43700 - DNA, 201 bp, Homo sapiens; identical to SEQ ID NO: 43619

SEQ ID NO: 43701 - DNA, 201 bp, Homo sapiens; identical to SEQ ID NO: 43576

SEQ ID NO: 43702 - DNA, 201 bp, Homo sapiens; identical to SEQ ID NO: 43577

SEQ ID NO: 43703 - DNA, 201 bp, Homo sapiens; identical to SEQ ID NO: 43578

SEQ ID NO: 43704 - DNA, 201 bp, Homo sapiens; identical to SEQ ID NO: 43579

SEQ ID NO: 43705 - DNA, 201 bp, Homo sapiens; identical to SEQ ID NO: 43580

SEQ ID NO: 43706 - DNA, 201 bp, Homo sapiens; identical to SEQ ID NO: 43621

SEQ ID NO: 43707 - DNA, 201 bp, Homo sapiens; identical to SEQ ID NO: 43582

SEQ ID NO: 43708 - DNA, 201 bp, Homo sapiens; identical to SEQ ID NO: 43623

SEQ ID NO: 43709 - DNA, 201 bp, Homo sapiens; identical to SEQ ID NO: 43625

SEQ ID NO: 43710 - DNA, 201 bp, Homo sapiens; identical to SEQ ID NO: 43626

SEQ ID NO: 43711 - DNA, 201 bp, Homo sapiens; identical to SEQ ID NO: 43627

SEQ ID NO: 43712 - DNA, 201 bp, Homo sapiens; identical to SEQ ID NO: 43628

SEQ ID NO: 43713 - DNA, 201 bp, Homo sapiens; identical to SEQ ID NO: 43687

SEQ ID NO: 43714 - DNA, 201 bp, Homo sapiens; identical to SEQ ID NO: 43630

SEQ ID NO: 43715 - DNA, 201 bp, Homo sapiens
ccaagaaaccaccccagcggctggaatggaaactgggaggaggcccctgggacagtgtggctcgtgtccttcccaacggctccctcttccttccggctgtsgggatccaggatgaggggattttccggtgccaggcaatgaacaggaatggaaaggagaccaagtccaactaccgagtccgtgtctaccagattcctggga

SEQ ID NO: 43716 - DNA, 201 bp, Homo sapiens; identical to SEQ ID NO: 43631

SEQ ID NO: 43717 - DNA, 201 bp, Homo sapiens; identical to SEQ ID NO: 43584

SEQ ID NO: 43718 - DNA, 201 bp, Homo sapiens
agtctgtggggggcagtagtaggtgctcaaaacatcacagcccggattggcgagccactggtgctgaagtgtaagggggcccccaagaaaccaccccagcrgctggaatggaaactgggaggaggcccctgggacagtgtggctcgtgtccttcccaacggctccctcttccttccggctgtcgggatccaggatgagggg

SEQ ID NO: 43719 - DNA, 201 bp, Homo sapiens
ggtgctgaagtgtaagggggcccccaagaaaccaccccagcggctggaatggaaactgggaggaggcccctgggacagtgtggctcgtgtccttcccaacrgctccctcttccttccggctgtcgggatccaggatgaggggattttccggtgccaggcaatgaacaggaatggaaaggagaccaagtccaactaccgagt

SEQ ID NO: 43720 - DNA, 201 bp, Homo sapiens; identical to SEQ ID NO: 43694

SEQ ID NO: 43721 - DNA, 201 bp, Homo sapiens
gggcagtagtaggtgctcaaaacatcacagcccggattggcgagccactggtgctgaagtgtaagggggcccccaagaaaccaccccagcggctggaatgraaactgggaggaggcccctgggacagtgtggctcgtgtccttcccaacggctccctcttccttccggctgtcgggatccaggatgaggggattttccggt

SEQ ID NO: 43722 - DNA, 201 bp, Homo sapiens; identical to SEQ ID NO: 43688

SEQ ID NO: 43723 - DNA, 201 bp, Homo sapiens; identical to SEQ ID NO: 43693

SEQ ID NO: 43724 - DNA, 201 bp, Homo sapiens; identical to SEQ ID NO: 43631

SEQ ID NO: 43725 - DNA, 201 bp, Homo sapiens; identical to SEQ ID NO: 43695

SEQ ID NO: 43726 - DNA, 201 bp, Homo sapiens; identical to SEQ ID NO: 43628

SEQ ID NO: 43727 - DNA, 201 bp, Homo sapiens; identical to SEQ ID NO: 43687

SEQ ID NO: 43728 - DNA, 201 bp, Homo sapiens; identical to SEQ ID NO: 43692

SEQ ID NO: 43729 - DNA, 201 bp, Homo sapiens; identical to SEQ ID NO: 43617

SEQ ID NO: 43730 - DNA, 201 bp, Homo sapiens; identical to SEQ ID NO: 43618

SEQ ID NO: 43731 - DNA, 201 bp, Homo sapiens; identical to SEQ ID NO: 43574

SEQ ID NO: 43732 - DNA, 201 bp, Homo sapiens; identical to SEQ ID NO: 43575

SEQ ID NO: 43733 - DNA, 201 bp, Homo sapiens; identical to SEQ ID NO: 43619

SEQ ID NO: 43734 - DNA, 201 bp, Homo sapiens; identical to SEQ ID NO: 43576

SEQ ID NO: 43735 - DNA, 201 bp, Homo sapiens; identical to SEQ ID NO: 43577

SEQ ID NO: 43736 - DNA, 201 bp, Homo sapiens; identical to SEQ ID NO: 43579

SEQ ID NO: 43737 - DNA, 201 bp, Homo sapiens; identical to SEQ ID NO: 43578

SEQ ID NO: 43738 - DNA, 201 bp, Homo sapiens; identical to SEQ ID NO: 43580

SEQ ID NO: 43739 - DNA, 201 bp, Homo sapiens; identical to SEQ ID NO: 43621

SEQ ID NO: 43740 - DNA, 201 bp, Homo sapiens; identical to SEQ ID NO: 43582

SEQ ID NO: 43741 - DNA, 201 bp, Homo sapiens; identical to SEQ ID NO: 43623

SEQ ID NO: 43742 - DNA, 201 bp, Homo sapiens; identical to SEQ ID NO: 43625

SEQ ID NO: 43743 - DNA, 201 bp, Homo sapiens; identical to SEQ ID NO: 43626

SEQ ID NO: 43744 - DNA, 201 bp, Homo sapiens; identical to SEQ ID NO: 43627

SEQ ID NO: 43745 - DNA, 201 bp, Homo sapiens; identical to SEQ ID NO: 43628

SEQ ID NO: 43746 - DNA, 201 bp, Homo sapiens; identical to SEQ ID NO: 43687

SEQ ID NO: 43747 - DNA, 201 bp, Homo sapiens; identical to SEQ ID NO: 43715

SEQ ID NO: 43748 - DNA, 201 bp, Homo sapiens; identical to SEQ ID NO: 43630

SEQ ID NO: 43749 - DNA, 201 bp, Homo sapiens; identical to SEQ ID NO: 43631

SEQ ID NO: 43750 - DNA, 201 bp, Homo sapiens; identical to SEQ ID NO: 43584

SEQ ID NO: 43751 - DNA, 201 bp, Homo sapiens; identical to SEQ ID NO: 43718

SEQ ID NO: 43752 - DNA, 201 bp, Homo sapiens; identical to SEQ ID NO: 43719

SEQ ID NO: 43753 - DNA, 201 bp, Homo sapiens; identical to SEQ ID NO: 43694

SEQ ID NO: 43754 - DNA, 201 bp, Homo sapiens; identical to SEQ ID NO: 43721

SEQ ID NO: 43755 - DNA, 201 bp, Homo sapiens; identical to SEQ ID NO: 43525

SEQ ID NO: 43756 - DNA, 201 bp, Homo sapiens; identical to SEQ ID NO: 43526

SEQ ID NO: 43757 - DNA, 201 bp, Homo sapiens; identical to SEQ ID NO: 43520

SEQ ID NO: 43758 - DNA, 201 bp, Homo sapiens; identical to SEQ ID NO: 43506

SEQ ID NO: 43759 - DNA, 201 bp, Homo sapiens; identical to SEQ ID NO: 43521

SEQ ID NO: 43760 - DNA, 201 bp, Homo sapiens; identical to SEQ ID NO: 43515

SEQ ID NO: 43761 - DNA, 201 bp, Homo sapiens; identical to SEQ ID NO: 43522

SEQ ID NO: 43762 - DNA, 201 bp, Homo sapiens; identical to SEQ ID NO: 43525

SEQ ID NO: 43763 - DNA, 201 bp, Homo sapiens; identical to SEQ ID NO: 43526

SEQ ID NO: 43764 - DNA, 201 bp, Homo sapiens
ccatgaacaacgcggagttctttaatacccgtgagcagcagcccaggccccttgaagagtgcagactcccacctggcctgggcgtctggctccgcagcagracacgaagtttgcattccccaaggggcggccagggggcggaccagggaaaggtagtcctctgcattttgccgtgtgctggtcccacccgcctcgcctggt

SEQ ID NO: 43765 - DNA, 201 bp, Homo sapiens
cctaatgcatcgcctcagccatgaacaacgcggagttctttaatacccgtgagcagcagcccaggccccttgaagagtgcagactcccacctggcctgggmgtctggctccgcagcagaacacgaagtttgcattccccaaggggcggccagggggcggaccagggaaaggtagtcctctgcattttgccgtgtgctggtc

SEQ ID NO: 43766 - DNA, 201 bp, Homo sapiens; identical to SEQ ID NO: 43502

SEQ ID NO: 43767 - DNA, 201 bp, Homo sapiens; identical to SEQ ID NO: 43504

SEQ ID NO: 43768 - DNA, 201 bp, Homo sapiens; identical to SEQ ID NO: 43507

SEQ ID NO: 43769 - DNA, 201 bp, Homo sapiens; identical to SEQ ID NO: 43509

SEQ ID NO: 43770 - DNA, 201 bp, Homo sapiens; identical to SEQ ID NO: 43508

SEQ ID NO: 43771 - DNA, 201 bp, Homo sapiens; identical to SEQ ID NO: 43510

SEQ ID NO: 43772 - DNA, 123 bp, Homo sapiens; identical to SEQ ID NO: 43512

SEQ ID NO: 43773 - DNA, 201 bp, Homo sapiens
gaccggtagcaccccctgccaaccagcttccctggcctgtgctgtgctccccagtggccggggtgattctcctggccctaggggctcttctcgtcctccarctcatccggcgtcgacgccgagagcatggagctctctggctgccccctggtttcactcgacggcctcggactcagtcagctccccaccgacgccggcccc

SEQ ID NO: 43774 - DNA, 201 bp, Homo sapiens; identical to SEQ ID NO: 43515

SEQ ID NO: 43775 - DNA, 201 bp, Homo sapiens; identical to SEQ ID NO: 43514

SEQ ID NO: 43776 - DNA, 201 bp, Homo sapiens; identical to SEQ ID NO: 43517

SEQ ID NO: 43777 - DNA, 201 bp, Homo sapiens; identical to SEQ ID NO: 43518

SEQ ID NO: 43778 - DNA, 201 bp, Homo sapiens; identical to SEQ ID NO: 43545

SEQ ID NO: 43779 - DNA, 201 bp, Homo sapiens; identical to SEQ ID NO: 43520

SEQ ID NO: 43780 - DNA, 201 bp, Homo sapiens
caccccacaggcactgcagcctgccactctctggccaatgccttctactgccagtgtctgcctggacacacaggccagtggtgtgaggtggagatagaccyctgccacagccaaccctgctttcatggagggacctgtgaggccacagcaggatcacccctgggtttcatctgccactgccccaaggcaaggttttgaagg

SEQ ID NO: 43781 - DNA, 201 bp, Homo sapiens; identical to SEQ ID NO: 43548

SEQ ID NO: 43782 - DNA, 201 bp, Homo sapiens; identical to SEQ ID NO: 43549

SEQ ID NO: 43783 - DNA, 201 bp, Homo sapiens; identical to SEQ ID NO: 43523

SEQ ID NO: 43784 - DNA, 201 bp, Homo sapiens; identical to SEQ ID NO: 43525

SEQ ID NO: 43785 - DNA, 201 bp, Homo sapiens; identical to SEQ ID NO: 43528

SEQ ID NO: 43786 - DNA, 201 bp, Homo sapiens; identical to SEQ ID NO: 43554

SEQ ID NO: 43787 - DNA, 201 bp, Homo sapiens; identical to SEQ ID NO: 43553

SEQ ID NO: 43788 - DNA, 201 bp, Homo sapiens; identical to SEQ ID NO: 43552

SEQ ID NO: 43789 - DNA, 201 bp, Homo sapiens; identical to SEQ ID NO: 43530

SEQ ID NO: 43790 - DNA, 201 bp, Homo sapiens; identical to SEQ ID NO: 43556

SEQ ID NO: 43791 - DNA, 201 bp, Homo sapiens; identical to SEQ ID NO: 43557

SEQ ID NO: 43792 - DNA, 201 bp, Homo sapiens; identical to SEQ ID NO: 43503

SEQ ID NO: 43793 - DNA, 201 bp, Homo sapiens; identical to SEQ ID NO: 43559

SEQ ID NO: 43794 - DNA, 201 bp, Homo sapiens; identical to SEQ ID NO: 43505

SEQ ID NO: 43795 - DNA, 201 bp, Homo sapiens; identical to SEQ ID NO: 43506

SEQ ID NO: 43796 - DNA, 201 bp, Homo sapiens; identical to SEQ ID NO: 43561

SEQ ID NO: 43797 - DNA, 201 bp, Homo sapiens; identical to SEQ ID NO: 43562

SEQ ID NO: 43798 - DNA, 201 bp, Homo sapiens; identical to SEQ ID NO: 43519
  misc_feature (1)...(201): n = A,T,C or G

SEQ ID NO: 43799 - DNA, 201 bp, Homo sapiens; identical to SEQ ID NO: 43564

SEQ ID NO: 43800 - DNA, 201 bp, Homo sapiens; identical to SEQ ID NO: 43565

SEQ ID NO: 43801 - DNA, 201 bp, Homo sapiens; identical to SEQ ID NO: 43521

SEQ ID NO: 43802 - DNA, 201 bp, Homo sapiens; identical to SEQ ID NO: 43522

SEQ ID NO: 43803 - DNA, 201 bp, Homo sapiens; identical to SEQ ID NO: 43526

SEQ ID NO: 43804 - DNA, 201 bp, Homo sapiens; identical to SEQ ID NO: 43524

SEQ ID NO: 43805 - DNA, 201 bp, Homo sapiens; identical to SEQ ID NO: 43527

SEQ ID NO: 43806 - DNA, 201 bp, Homo sapiens; identical to SEQ ID NO: 43571

SEQ ID NO: 43807 - DNA, 201 bp, Homo sapiens; identical to SEQ ID NO: 43531

SEQ ID NO: 43808 - DNA, 201 bp, Homo sapiens; identical to SEQ ID NO: 43573

SEQ ID NO: 43809 - DNA, 201 bp, Homo sapiens; identical to SEQ ID NO: 43491

SEQ ID NO: 43810 - DNA, 177 bp, Homo sapiens; identical to SEQ ID NO: 43587

SEQ ID NO: 43811 - DNA, 201 bp, Homo sapiens; identical to SEQ ID NO: 43492

SEQ ID NO: 43812 - DNA, 106 bp, Homo sapiens; identical to SEQ ID NO: 43589

SEQ ID NO: 43813 - DNA, 201 bp, Homo sapiens; identical to SEQ ID NO: 43493

SEQ ID NO: 43814 - DNA, 201 bp, Homo sapiens; identical to SEQ ID NO: 43591

SEQ ID NO: 43815 - DNA, 201 bp, Homo sapiens; identical to SEQ ID NO: 43495

SEQ ID NO: 43816 - DNA, 201 bp, Homo sapiens; identical to SEQ ID NO: 43496

SEQ ID NO: 43817 - DNA, 201 bp, Homo sapiens
ccctggctctttggaatcttcaacttctgaagtgaatgtggatacagcgccactcctgccccctcttggccccatccatggactcttgcctcggtgcagtytccactcttgacccccacctcctactgtcttgtctgtgggacagttgcctccccctcatctccagtgactcagcctacacaagggaggggaacattccat

SEQ ID NO: 43818 - DNA, 201 bp, Homo sapiens; identical to SEQ ID NO: 43498

SEQ ID NO: 43819 - DNA, 201 bp, Homo sapiens
ccggcactccatgctcactgttttccgggaaatctccactgatggccggggtggtggtgactatctgaagaagcctgggggcggtgggtgaaccctggctmtttggaatcttcaacttctgaagtgaatgtggatacagcgccactcctgccccctcttggccccatccatggactcttgcctcggtgcagtctccactct

SEQ ID NO: 43820 - DNA, 201 bp, Homo sapiens; identical to SEQ ID NO: 43500

SEQ ID NO: 43821 - DNA, 201 bp, Homo sapiens; identical to SEQ ID NO: 43501

SEQ ID NO: 43822 - DNA, 128 bp, Homo sapiens
tccggtttctgtataaattagggggcaggggtgctgtagaggcttcttatcgatgattgacgccgaggcccaggctgttgtcctcacaggagcctggcacmtagcctctcctccagcagcagcacctg

SEQ ID NO: 43823 - DNA, 201 bp, Homo sapiens; identical to SEQ ID NO: 43617

SEQ ID NO: 43824 - DNA, 201 bp, Homo sapiens; identical to SEQ ID NO: 43618

SEQ ID NO: 43825 - DNA, 201 bp, Homo sapiens; identical to SEQ ID NO: 43574

SEQ ID NO: 43826 - DNA, 201 bp, Homo sapiens; identical to SEQ ID NO: 43575

SEQ ID NO: 43827 - DNA, 201 bp, Homo sapiens; identical to SEQ ID NO: 43619

SEQ ID NO: 43828 - DNA, 201 bp, Homo sapiens; identical to SEQ ID NO: 43576

SEQ ID NO: 43829 - DNA, 201 bp, Homo sapiens; identical to SEQ ID NO: 43577

SEQ ID NO: 43830 - DNA, 201 bp, Homo sapiens; identical to SEQ ID NO: 43578

SEQ ID NO: 43831 - DNA, 201 bp, Homo sapiens; identical to SEQ ID NO: 43579

SEQ ID NO: 43832 - DNA, 201 bp, Homo sapiens; identical to SEQ ID NO: 43580

SEQ ID NO: 43833 - DNA, 201 bp, Homo sapiens; identical to SEQ ID NO: 43621

SEQ ID NO: 43834 - DNA, 201 bp, Homo sapiens; identical to SEQ ID NO: 43582

SEQ ID NO: 43835 - DNA, 201 bp, Homo sapiens; identical to SEQ ID NO: 43623

SEQ ID NO: 43836 - DNA, 201 bp, Homo sapiens; identical to SEQ ID NO: 43625

SEQ ID NO: 43837 - DNA, 201 bp, Homo sapiens; identical to SEQ ID NO: 43626

SEQ ID NO: 43838 - DNA, 201 bp, Homo sapiens; identical to SEQ ID NO: 43627

SEQ ID NO: 43839 - DNA, 201 bp, Homo sapiens; identical to SEQ ID NO: 43628

SEQ ID NO: 43840 - DNA, 201 bp, Homo sapiens; identical to SEQ ID NO: 43687

SEQ ID NO: 43841 - DNA, 201 bp, Homo sapiens; identical to SEQ ID NO: 43630

SEQ ID NO: 43842 - DNA, 201 bp, Homo sapiens; identical to SEQ ID NO: 43688

SEQ ID NO: 43843 - DNA, 201 bp, Homo sapiens; identical to SEQ ID NO: 43631

SEQ ID NO: 43844 - DNA, 201 bp, Homo sapiens; identical to SEQ ID NO: 43584

SEQ ID NO: 43845 - DNA, 201 bp, Homo sapiens; identical to SEQ ID NO: 43692

SEQ ID NO: 43846 - DNA, 201 bp, Homo sapiens; identical to SEQ ID NO: 43693

SEQ ID NO: 43847 - DNA, 201 bp, Homo sapiens; identical to SEQ ID NO: 43694

SEQ ID NO: 43848 - DNA, 201 bp, Homo sapiens; identical to SEQ ID NO: 43695

SEQ ID NO: 43849 - DNA, 201 bp, Homo sapiens; identical to SEQ ID NO: 43525

SEQ ID NO: 43850 - DNA, 201 bp, Homo sapiens; identical to SEQ ID NO: 43526

SEQ ID NO: 43851 - DNA, 201 bp, Homo sapiens; identical to SEQ ID NO: 43502

SEQ ID NO: 43852 - DNA, 201 bp, Homo sapiens; identical to SEQ ID NO: 43504

SEQ ID NO: 43853 - DNA, 201 bp, Homo sapiens; identical to SEQ ID NO: 43507

SEQ ID NO: 43854 - DNA, 201 bp, Homo sapiens; identical to SEQ ID NO: 43508

SEQ ID NO: 43855 - DNA, 201 bp, Homo sapiens; identical to SEQ ID NO: 43509

SEQ ID NO: 43856 - DNA, 201 bp, Homo sapiens; identical to SEQ ID NO: 43510

SEQ ID NO: 43857 - DNA, 201 bp, Homo sapiens; identical to SEQ ID NO: 43511

SEQ ID NO: 43858 - DNA, 123 bp, Homo sapiens; identical to SEQ ID NO: 43512

SEQ ID NO: 43859 - DNA, 201 bp, Homo sapiens; identical to SEQ ID NO: 43515

SEQ ID NO: 43860 - DNA, 201 bp, Homo sapiens; identical to SEQ ID NO: 43514

SEQ ID NO: 43861 - DNA, 201 bp, Homo sapiens; identical to SEQ ID NO: 43517

SEQ ID NO: 43862 - DNA, 201 bp, Homo sapiens; identical to SEQ ID NO: 43518

SEQ ID NO: 43863 - DNA, 201 bp, Homo sapiens; identical to SEQ ID NO: 43545

SEQ ID NO: 43864 - DNA, 201 bp, Homo sapiens; identical to SEQ ID NO: 43520

SEQ ID NO: 43865 - DNA, 201 bp, Homo sapiens; identical to SEQ ID NO: 43547

SEQ ID NO: 43866 - DNA, 201 bp, Homo sapiens; identical to SEQ ID NO: 43548

SEQ ID NO: 43867 - DNA, 201 bp, Homo sapiens; identical to SEQ ID NO: 43549

SEQ ID NO: 43868 - DNA, 201 bp, Homo sapiens; identical to SEQ ID NO: 43523

SEQ ID NO: 43869 - DNA, 201 bp, Homo sapiens; identical to SEQ ID NO: 43525

SEQ ID NO: 43870 - DNA, 201 bp, Homo sapiens; identical to SEQ ID NO: 43528

SEQ ID NO: 43871 - DNA, 201 bp, Homo sapiens; identical to SEQ ID NO: 43552

SEQ ID NO: 43872 - DNA, 201 bp, Homo sapiens; identical to SEQ ID NO: 43553

SEQ ID NO: 43873 - DNA, 201 bp, Homo sapiens; identical to SEQ ID NO: 43554

SEQ ID NO: 43874 - DNA, 201 bp, Homo sapiens; identical to SEQ ID NO: 43530

SEQ ID NO: 43875 - DNA, 201 bp, Homo sapiens; identical to SEQ ID NO: 43556

SEQ ID NO: 43876 - DNA, 201 bp, Homo sapiens; identical to SEQ ID NO: 43557

SEQ ID NO: 43877 - DNA, 201 bp, Homo sapiens; identical to SEQ ID NO: 43503

SEQ ID NO: 43878 - DNA, 201 bp, Homo sapiens; identical to SEQ ID NO: 43559

SEQ ID NO: 43879 - DNA, 201 bp, Homo sapiens; identical to SEQ ID NO: 43505

SEQ ID NO: 43880 - DNA, 201 bp, Homo sapiens; identical to SEQ ID NO: 43506

SEQ ID NO: 43881 - DNA, 201 bp, Homo sapiens; identical to SEQ ID NO: 43561

SEQ ID NO: 43882 - DNA, 201 bp, Homo sapiens; identical to SEQ ID NO: 43562

SEQ ID NO: 43883 - DNA, 201 bp, Homo sapiens; identical to SEQ ID NO: 43519
  misc_feature (1)...(201): n = A,T,C or G

SEQ ID NO: 43884 - DNA, 201 bp, Homo sapiens; identical to SEQ ID NO: 43564

SEQ ID NO: 43885 - DNA, 201 bp, Homo sapiens; identical to SEQ ID NO: 43565

SEQ ID NO: 43886 - DNA, 201 bp, Homo sapiens; identical to SEQ ID NO: 43521

SEQ ID NO: 43887 - DNA, 201 bp, Homo sapiens; identical to SEQ ID NO: 43522

SEQ ID NO: 43888 - DNA, 201 bp, Homo sapiens; identical to SEQ ID NO: 43524

SEQ ID NO: 43889 - DNA, 201 bp, Homo sapiens; identical to SEQ ID NO: 43526

SEQ ID NO: 43890 - DNA, 201 bp, Homo sapiens; identical to SEQ ID NO: 43527

SEQ ID NO: 43891 - DNA, 201 bp, Homo sapiens; identical to SEQ ID NO: 43571

SEQ ID NO: 43892 - DNA, 201 bp, Homo sapiens; identical to SEQ ID NO: 43531

SEQ ID NO: 43893 - DNA, 201 bp, Homo sapiens; identical to SEQ ID NO: 43573

SEQ ID NO: 43894 - DNA, 201 bp, Homo sapiens; identical to SEQ ID NO: 43506

SEQ ID NO: 43895 - DNA, 201 bp, Homo sapiens; identical to SEQ ID NO: 43525

SEQ ID NO: 43896 - DNA, 201 bp, Homo sapiens; identical to SEQ ID NO: 43526

SEQ ID NO: 43897 - DNA, 201 bp, Homo sapiens; identical to SEQ ID NO: 43504

SEQ ID NO: 43898 - DNA, 201 bp, Homo sapiens; identical to SEQ ID NO: 43507

SEQ ID NO: 43899 - DNA, 201 bp, Homo sapiens; identical to SEQ ID NO: 43509

SEQ ID NO: 43900 - DNA, 201 bp, Homo sapiens; identical to SEQ ID NO: 43508

SEQ ID NO: 43901 - DNA, 201 bp, Homo sapiens; identical to SEQ ID NO: 43510

SEQ ID NO: 43902 - DNA, 123 bp, Homo sapiens; identical to SEQ ID NO: 43512

SEQ ID NO: 43903 - DNA, 201 bp, Homo sapiens; identical to SEQ ID NO: 43511

SEQ ID NO: 43904 - DNA, 201 bp, Homo sapiens; identical to SEQ ID NO: 43515

SEQ ID NO: 43905 - DNA, 201 bp, Homo sapiens; identical to SEQ ID NO: 43514

SEQ ID NO: 43906 - DNA, 201 bp, Homo sapiens; identical to SEQ ID NO: 43517

SEQ ID NO: 43907 - DNA, 201 bp, Homo sapiens; identical to SEQ ID NO: 43518

SEQ ID NO: 43908 - DNA, 201 bp, Homo sapiens; identical to SEQ ID NO: 43545

SEQ ID NO: 43909 - DNA, 201 bp, Homo sapiens; identical to SEQ ID NO: 43520

SEQ ID NO: 43910 - DNA, 201 bp, Homo sapiens; identical to SEQ ID NO: 43780

SEQ ID NO: 43911 - DNA, 201 bp, Homo sapiens; identical to SEQ ID NO: 43548

SEQ ID NO: 43912 - DNA, 201 bp, Homo sapiens; identical to SEQ ID NO: 43549

SEQ ID NO: 43913 - DNA, 201 bp, Homo sapiens; identical to SEQ ID NO: 43523

SEQ ID NO: 43914 - DNA, 201 bp, Homo sapiens; identical to SEQ ID NO: 43525

SEQ ID NO: 43915 - DNA, 201 bp, Homo sapiens; identical to SEQ ID NO: 43528

SEQ ID NO: 43916 - DNA, 201 bp, Homo sapiens; identical to SEQ ID NO: 43554

SEQ ID NO: 43917 - DNA, 201 bp, Homo sapiens; identical to SEQ ID NO: 43553

SEQ ID NO: 43918 - DNA, 201 bp, Homo sapiens; identical to SEQ ID NO: 43552

SEQ ID NO: 43919 - DNA, 201 bp, Homo sapiens; identical to SEQ ID NO: 43530

SEQ ID NO: 43920 - DNA, 201 bp, Homo sapiens; identical to SEQ ID NO: 43556

SEQ ID NO: 43921 - DNA, 201 bp, Homo sapiens; identical to SEQ ID NO: 43557

SEQ ID NO: 43922 - DNA, 201 bp, Homo sapiens; identical to SEQ ID NO: 43503

SEQ ID NO: 43923 - DNA, 201 bp, Homo sapiens; identical to SEQ ID NO: 43559

SEQ ID NO: 43924 - DNA, 201 bp, Homo sapiens; identical to SEQ ID NO: 43505

SEQ ID NO: 43925 - DNA, 201 bp, Homo sapiens; identical to SEQ ID NO: 43506

SEQ ID NO: 43926 - DNA, 201 bp, Homo sapiens; identical to SEQ ID NO: 43561

SEQ ID NO: 43927 - DNA, 201 bp, Homo sapiens; identical to SEQ ID NO: 43562

SEQ ID NO: 43928 - DNA, 201 bp, Homo sapiens; identical to SEQ ID NO: 43519
  misc_feature (1)...(201): n = A,T,C or G

SEQ ID NO: 43929 - DNA, 201 bp, Homo sapiens; identical to SEQ ID NO: 43564

SEQ ID NO: 43930 - DNA, 201 bp, Homo sapiens; identical to SEQ ID NO: 43565

SEQ ID NO: 43931 - DNA, 201 bp, Homo sapiens; identical to SEQ ID NO: 43521

SEQ ID NO: 43932 - DNA, 201 bp, Homo sapiens; identical to SEQ ID NO: 43522

SEQ ID NO: 43933 - DNA, 201 bp, Homo sapiens; identical to SEQ ID NO: 43526

SEQ ID NO: 43934 - DNA, 201 bp, Homo sapiens; identical to SEQ ID NO: 43524

SEQ ID NO: 43935 - DNA, 201 bp, Homo sapiens; identical to SEQ ID NO: 43527

SEQ ID NO: 43936 - DNA, 201 bp, Homo sapiens; identical to SEQ ID NO: 43571

SEQ ID NO: 43937 - DNA, 201 bp, Homo sapiens; identical to SEQ ID NO: 43531

SEQ ID NO: 43938 - DNA, 201 bp, Homo sapiens; identical to SEQ ID NO: 43573

SEQ ID NO: 43939 - DNA, 201 bp, Homo sapiens; identical to SEQ ID NO: 43617

SEQ ID NO: 43940 - DNA, 201 bp, Homo sapiens; identical to SEQ ID NO: 43618

SEQ ID NO: 43941 - DNA, 201 bp, Homo sapiens; identical to SEQ ID NO: 43574

SEQ ID NO: 43942 - DNA, 201 bp, Homo sapiens; identical to SEQ ID NO: 43575

SEQ ID NO: 43943 - DNA, 201 bp, Homo sapiens; identical to SEQ ID NO: 43619

SEQ ID NO: 43944 - DNA, 201 bp, Homo sapiens; identical to SEQ ID NO: 43576

SEQ ID NO: 43945 - DNA, 201 bp, Homo sapiens; identical to SEQ ID NO: 43577

SEQ ID NO: 43946 - DNA, 201 bp, Homo sapiens; identical to SEQ ID NO: 43578

SEQ ID NO: 43947 - DNA, 201 bp, Homo sapiens; identical to SEQ ID NO: 43579

SEQ ID NO: 43948 - DNA, 201 bp, Homo sapiens
gggatccaggatgaggggattttccggtgccaggcaatgaacaggaatggaaaggagaccaagtccaactaccgaagtttgagaaccttcacaattacagsctctgactggatttttcctccttcagagattcctgggaagccagaaattgtagattctgcctctgaactcacggctggtgttcccaataaggtggggaca

SEQ ID NO: 43949 - DNA, 201 bp, Homo sapiens; identical to SEQ ID NO: 43580

SEQ ID NO: 43950 - DNA, 201 bp, Homo sapiens; identical to SEQ ID NO: 43621

SEQ ID NO: 43951 - DNA, 201 bp, Homo sapiens; identical to SEQ ID NO: 43581

SEQ ID NO: 43952 - DNA, 201 bp, Homo sapiens; identical to SEQ ID NO: 43582

SEQ ID NO: 43953 - DNA, 201 bp, Homo sapiens; identical to SEQ ID NO: 43623

SEQ ID NO: 43954 - DNA, 201 bp, Homo sapiens; identical to SEQ ID NO: 43583

SEQ ID NO: 43955 - DNA, 201 bp, Homo sapiens; identical to SEQ ID NO: 43625

SEQ ID NO: 43956 - DNA, 201 bp, Homo sapiens; identical to SEQ ID NO: 43626

SEQ ID NO: 43957 - DNA, 201 bp, Homo sapiens; identical to SEQ ID NO: 43627

SEQ ID NO: 43958 - DNA, 201 bp, Homo sapiens; identical to SEQ ID NO: 43628

SEQ ID NO: 43959 - DNA, 201 bp, Homo sapiens; identical to SEQ ID NO: 43687

SEQ ID NO: 43960 - DNA, 201 bp, Homo sapiens; identical to SEQ ID NO: 43630

SEQ ID NO: 43961 - DNA, 201 bp, Homo sapiens
gccggacagaagcttggaaggtcctgtctccccagggaggaggcccctgggacagtgtggctcgtgtccttcccaacggctccctcttccttccggctgtsgggatccaggatgaggggattttccggtgccaggcaatgaacaggaatggaaaggagaccaagtccaactaccgaagtttgagaaccttcacaattacag

SEQ ID NO: 43962 - DNA, 201 bp, Homo sapiens; identical to SEQ ID NO: 43631

SEQ ID NO: 43963 - DNA, 201 bp, Homo sapiens; identical to SEQ ID NO: 43584

SEQ ID NO: 43964 - DNA, 201 bp, Homo sapiens; identical to SEQ ID NO: 43692

SEQ ID NO: 43965 - DNA, 201 bp, Homo sapiens
gctggaatggaaactgaacacaggccggacagaagcttggaaggtcctgtctccccagggaggaggcccctgggacagtgtggctcgtgtccttcccaacrgctccctcttccttccggctgtcgggatccaggatgaggggattttccggtgccaggcaatgaacaggaatggaaaggagaccaagtccaactaccgaag

SEQ ID NO: 43966 - DNA, 201 bp, Homo sapiens; identical to SEQ ID NO: 43585

SEQ ID NO: 43967 - DNA, 201 bp, Homo sapiens; identical to SEQ ID NO: 43695

SEQ ID NO: 43968 - DNA, 201 bp, Homo sapiens; identical to SEQ ID NO: 43502

SEQ ID NO: 43969 - DNA, 201 bp, Homo sapiens; identical to SEQ ID NO: 43502

SEQ ID NO: 43970 - DNA, 201 bp, Homo sapiens; identical to SEQ ID NO: 43617

SEQ ID NO: 43971 - DNA, 201 bp, Homo sapiens; identical to SEQ ID NO: 43618

SEQ ID NO: 43972 - DNA, 201 bp, Homo sapiens; identical to SEQ ID NO: 43574

SEQ ID NO: 43973 - DNA, 201 bp, Homo sapiens; identical to SEQ ID NO: 43575

SEQ ID NO: 43974 - DNA, 201 bp, Homo sapiens; identical to SEQ ID NO: 43619

SEQ ID NO: 43975 - DNA, 201 bp, Homo sapiens; identical to SEQ ID NO: 43576

SEQ ID NO: 43976 - DNA, 201 bp, Homo sapiens; identical to SEQ ID NO: 43577

SEQ ID NO: 43977 - DNA, 201 bp, Homo sapiens; identical to SEQ ID NO: 43578

SEQ ID NO: 43978 - DNA, 201 bp, Homo sapiens; identical to SEQ ID NO: 43579

SEQ ID NO: 43979 - DNA, 201 bp, Homo sapiens; identical to SEQ ID NO: 43580

SEQ ID NO: 43980 - DNA, 201 bp, Homo sapiens; identical to SEQ ID NO: 43621

SEQ ID NO: 43981 - DNA, 201 bp, Homo sapiens; identical to SEQ ID NO: 43581

SEQ ID NO: 43982 - DNA, 201 bp, Homo sapiens; identical to SEQ ID NO: 43582

SEQ ID NO: 43983 - DNA, 201 bp, Homo sapiens; identical to SEQ ID NO: 43623

SEQ ID NO: 43984 - DNA, 201 bp, Homo sapiens; identical to SEQ ID NO: 43583

SEQ ID NO: 43985 - DNA, 201 bp, Homo sapiens; identical to SEQ ID NO: 43625

SEQ ID NO: 43986 - DNA, 201 bp, Homo sapiens; identical to SEQ ID NO: 43626

SEQ ID NO: 43987 - DNA, 201 bp, Homo sapiens; identical to SEQ ID NO: 43627

SEQ ID NO: 43988 - DNA, 201 bp, Homo sapiens; identical to SEQ ID NO: 43628

SEQ ID NO: 43989 - DNA, 201 bp, Homo sapiens; identical to SEQ ID NO: 43687

SEQ ID NO: 43990 - DNA, 201 bp, Homo sapiens; identical to SEQ ID NO: 43630

SEQ ID NO: 43991 - DNA, 201 bp, Homo sapiens; identical to SEQ ID NO: 43688

SEQ ID NO: 43992 - DNA, 201 bp, Homo sapiens; identical to SEQ ID NO: 43631

SEQ ID NO: 43993 - DNA, 201 bp, Homo sapiens; identical to SEQ ID NO: 43584

SEQ ID NO: 43994 - DNA, 201 bp, Homo sapiens; identical to SEQ ID NO: 43692

SEQ ID NO: 43995 - DNA, 201 bp, Homo sapiens; identical to SEQ ID NO: 43693

SEQ ID NO: 43996 - DNA, 201 bp, Homo sapiens; identical to SEQ ID NO: 43585

SEQ ID NO: 43997 - DNA, 201 bp, Homo sapiens; identical to SEQ ID NO: 43695

SEQ ID NO: 43998 - DNA, 201 bp, Homo sapiens
tgatcgggaccccaacagcttgctcatctcctgcgctgtctcctaccgaggggcctggtggtacaggaactgccactacgccaacctcaacgggctctacrggagcacagtggaccatcagggagtgagctggtaccactggaagggcttcgagttctcggtgcccttcacggaaatgaagctgagctgctgcccacctct

SEQ ID NO: 43999 - DNA, 201 bp, Homo sapiens
caggttcctcctctatggcctccatgaagggaagcgcctggggcccctctcagctgagggcaccacagggctggctcctgctggtcagacctcagaggagkcaaggccccgcctgtcccagctgtctgtgactgacgtgaccaccagttcactgaggctcaactgggaggccccaccgggggccttcgactccttcctgct

SEQ ID NO: 44000 - DNA, 201 bp, Homo sapiens
gcctgtgagcggagacctccgagcggtcgccgtctcggggctggacccggcccgcaagtacaagttcctgctctttggactccagaatgggaaacgccacrgcccagtccctgtggaggccaggaccgccccagacaccaaaccgtctccccgcctgggggagctgactgtgacagatgcgacccctgactccgtgggcct

SEQ ID NO: 44001 - DNA, 201 bp, Homo sapiens
agctgacagtgacaggatcctcccctgactcgctgagcctttcctggaccgtcccccagggccgctttgactccttcaccgtgcagtacaaggacagggaygggcggccccaggcggtgcgtgttgggggccaggagagcaaggtcactgtgaggggcctggagcctgggcgcaagtacaagatgcacctgtacggcctcc

SEQ ID NO: 44002 - DNA, 201 bp, Homo sapiens
cctttgactccttcctggtacagtacagggacgcgcaggggcagccccaggcagtgcctgtgagcggagacctccgagcggtcgccgtctcggggctggamccggcccgcaagtacaagttcctgctctttggactccagaatgggaaacgccacggcccagtccctgtggaggccaggaccgccccagacaccaaaccgt

SEQ ID NO: 44003 - DNA, 201 bp, Homo sapiens
ccctttgactccttcctggtacagtacagggacgcgcaggggcagccccaggcagtgcctgtgagcggagacctccgagcggtcgccgtctcggggctggwcccggcccgcaagtacaagttcctgctctttggactccagaatgggaaacgccacggcccagtccctgtggaggccaggaccgccccagacaccaaaccg

SEQ ID NO: 44004 - DNA, 201 bp, Homo sapiens
ggacggtggcccagggcccctttgactccttcctggtacagtacagggacgcgcaggggcagccccaggcagtgcctgtgagcggagacctccgagcggtmgccgtctcggggctggacccggcccgcaagtacaagttcctgctctttggactccagaatgggaaacgccacggcccagtccctgtggaggccaggaccg

SEQ ID NO: 44005 - DNA, 201 bp, Homo sapiens
ttgtctgtcccacaggagatcctgctcccaggagggatcacatctcaccagctccttggcctctttccctccacctcctacaatgcacggctccaggccaygtggggccagagcctcctgccgcccgtgtccacctctttcaccacgggtgggctgcggatccccttccccagggactgcggggaggagatgcagaacgga

SEQ ID NO: 44006 - DNA, 201 bp, Homo sapiens
tgggctgcggatccccttccccagggactgcggggaggagatgcagaacggagccggtgcctccaggaccagcaccatcttcctcaacggcaaccgcgagyggcccctgaacgtgttttgcgacatggagactgatgggggcggctggctggtgttccagcgccgcatggatggacagacagacttctggagggactggga

SEQ ID NO: 44007 - DNA, 201 bp, Homo sapiens
agtgagctggtaccactggaagggcttcgagttctcggtgcccttcacggaaatgaagctgagctgctgcccacctctctcgcaccccagtatgactgccragcactgaggggtcgccccgagagaagagccagggtccttcaccacccagccgctggaggaagccttctctgccagcgatctcgcagcactgtgtttaca

SEQ ID NO: 44008 - DNA, 201 bp, Homo sapiens
ctgtacggcttccacggtggccagcgcgtgggccccatctctgtcattggggtgacggaggaagagacccccagccccacggaactcagcactgaggcccsggagccccctgaggagccgctcctgggggagctgacagtgacaggatcctcccctgactcgctgagcctctcctggaccatcccccagggccacttcgac

SEQ ID NO: 44009 - DNA, 201 bp, Homo sapiens
ctgccatcggggtgacagctgcagaggaagagacccccagccccacagaacccagcatggaggccccggagccccctgaggagccgctcctgggggagctracagtgacaggatcctcccctgactcgctgagcctctcctggaccgtcccccagggccgcttcgactccttcaccgtgcagtacaaggacagggacgggc

SEQ ID NO: 44010 - DNA, 201 bp, Homo sapiens
cgggtgggctgcggatccccttccccagggactgcggggaggagatgcagaacggagccggtgcctccaggaccagcaccatcttcctcaacggcaaccgsgagcggcccctgaacgtgttttgcgacatggagactgatgggggcggctggctggtgttccagcgccgcatggatggacagacagacttctggagggact

SEQ ID NO: 44011 - DNA, 201 bp, Homo sapiens
ggctgcggagtactaccgcctccacttggagggctaccacggcaccgcaggggactccatgagctaccacagcggcagtgtcttctctgcccgtgatcggraccccaacagcttgctcatctcctgcgctgtctcctaccgaggggcctggtggtacaggaactgccactacgccaacctcaacgggctctacgggagcac

SEQ ID NO: 44012 - DNA, 201 bp, Homo sapiens
ccttcgactccttcctgctccgctttggggttccatcaccaagcactctggagccgcatccgcgtccactgctgcagcgcgagctgatggtgccggggacrcggcactcggccgtgctccgggacctgcgttccgggactctgtacagcctgacactgtatgggctgcgaggaccccacaaggccgacagcatccagggaa

SEQ ID NO: 44013 - DNA, 201 bp, Homo sapiens
ctccttcactgtgcagtacaaggacagggacgggcggccccaggtggtgcgtgtcaggggcgaggagagcgaggtcaccgtggggggcctggagcccgggygcaaatacaagatgcacctgtacggcctccacgaggggcagcgcgtgggcccagtgtccgctgtgggtgtgacagctccaaaggatgaagccgagaccac

SEQ ID NO: 44014 - DNA, 180 bp, Homo sapiens
gtgagagacatcacctccgactccctcagcctctcctggacagtccccgagggccagtttgaccatttcttggtccagtwtaagaatggggacgggcagcccaaggcggtgcgggtgccgggacacgaggatggggtcaccatctcgggcctggagccagaccacaagtacaagatgaac

SEQ ID NO: 44015 - DNA, 201 bp, Homo sapiens
cctgactccctcagcctgtcctggatggtccccgagggccagtttgaccacttcctggtccagtacaggaatggggatgggcagcccaaggtggtgcgggkgccggggcacgaggacggggtcaccatctcaggcctggagccagaccacaagtacaagatgaacctgtacggcttccacggtggccagcgcgtgggcccc

SEQ ID NO: 44016 - DNA, 201 bp, Homo sapiens
ccctgactccctcagcctgtcctggatggtccccgagggccagtttgaccacttcctggtccagtacaggaatggggatgggcagcccaaggtggtgcggktgccggggcacgaggacggggtcaccatctcaggcctggagccagaccacaagtacaagatgaacctgtacggcttccacggtggccagcgcgtgggccc

SEQ ID NO: 44017 - DNA, 201 bp, Homo sapiens
gatgcacctgtacggcctccacgaggggcggcgtgtgggcccggtgtccaccgtgggtgtgacagtgcccaccacaacccctgagccccccaacaagcctmgcctcggggagctgaccgtgacagatgccacccctgactccctcagcctgtcctggatggtccccgagggccagtttgaccacttcctggtccagtacag

SEQ ID NO: 44018 - DNA, 201 bp, Homo sapiens
caggcggtgcgtgttgggggccaggagagcaaggtcactgtgaggggcctggagcctgggcgcaagtacaagatgcacctgtacggcctccacgaggggcrgcgcctgggcccggtgtctgccgtgggcgtcacagaggatgaagccgagaccacccaagcagtgcctaccatgacccctgagccccccatcaagcctcgc

SEQ ID NO: 44019 - DNA, 201 bp, Homo sapiens
tgggcgcaaatacaagatgcacctgtacggcctccacgaggggcggcgcgtgggcccggtgtccaccgtgggcgtgactgccccacaagaggatgtggacragacccccagccctacagaaccaggcacagaggccccagagccccccgaggagcctctcctgggggagctgacagtgacaggatcctcccctgactcgct

SEQ ID NO: 44020 - DNA, 201 bp, Homo sapiens
tgcgtgttgggggccaggagagcaaggtcactgtgaggggcctggagcctgggcgcaagtacaagatgcacctgtacggcctccacgaggggcggcgcctrggcccggtgtctgccgtgggcgtcacagaggatgaagccgagaccacccaagcagtgcctaccatgacccctgagccccccatcaagcctcgcctggggg

SEQ ID NO: 44021 - DNA, 201 bp, Homo sapiens
tgcccaccacaacccctgagccccccaacaagcctcgcctcggggagctgaccgtgacagatgccacccctgactccctcagcctgtcctggatggtcccygagggccagtttgaccacttcctggtccagtacaggaatggggatgggcagcccaaggtggtgcgggtgccggggcacgaggacggggtcaccatctcag

SEQ ID NO: 44022 - DNA, 201 bp, Homo sapiens
gcggtgcgggtgccggggcacgaggacggggtcaccatctcaggcctggagccagaccataaatacaagatgaacctgtacggcttccacggtggccagcrcgtgggccccatctctgtcattggggtgacggaggaagagacccccagccccacggaactcagcactgaggccccggagccccctgaggagccgctcctg

SEQ ID NO: 44023 - DNA, 201 bp, Homo sapiens
gccaaggaagtgaccccccgcaccgccctgctcacttggactgagcccccagtccggcccgcaggctacctgctcagcttccacacccctggtggacagamccaggtgccccggccccactgacccaactcccctccctgggtgattccaggaggtgctgcctctggccctcccggagggtctccacctccctctcccctg

SEQ ID NO: 44024 - DNA, 201 bp, Homo sapiens
gtgcagtacaaggacagggacgggcggccccaggtggtgcgtgtcaggggcgaggagagcgaggtcaccgtggggggcctggagcccgggtgcaaatacargatgcacctgtacggcctccacgaggggcagcgcgtgggcccagtgtccgctgtgggtgtgacagctccaaaggatgaagccgagaccacccaagcagtg

SEQ ID NO: 44025 - DNA, 201 bp, Homo sapiens
gccgcttcgactccttcaccgtgcagtacaaggacagggacgggcagccccaggtggtgcgtgtcaggggcgaggagagcgaggtcaccgtggggggcctrgagcccgggcgcaaatacaagatgcatctgtacggcctccacgaggggcagcgcgtgggcccagtgtccaccgtgggcatcacggcgcccctgcccacac

SEQ ID NO: 44026 - DNA, 201 bp, Homo sapiens
ctcccctgactcgctgagcctctcctggaccgtcccccagggccgcttcgactccttcaccgtgcagtacaaggacagggacgggcagccccaggtggtgsgtgtcaggggcgaggagagcgaggtcaccgtggggggcctggagcccgggcgcaaatacaagatgcatctgtacggcctccacgaggggcagcgcgtggg

SEQ ID NO: 44027 - DNA, 201 bp, Homo sapiens
gagggcgaattcgactccttcgtggtccagtacaaggataaggatggtcggctccaggtggtgccggtggcagccaaccagcgggaggtcacagtccaggscctggagcccagtaggaaatacaggttcctgctctatggtctgtcaggcaggaaacgactgggccccatctctgctgacagcaccacagctcccctggag

SEQ ID NO: 44028 - DNA, 201 bp, Homo sapiens
acaaggacagggacgggcagccccaggtggtgcgtgtcaggggcgaggagagcgaggtcaccgtggggggcctggagcccgggcgcaaatacaagatgcayctgtacggcctccacgaggggcagcgcgtgggcccagtgtccaccgtgggcatcacggcgcccctgcccacaccactgccggtggagccccgcctggggg

SEQ ID NO: 44029 - DNA, 193 bp, Homo sapiens
gtgagagacatcacctccgactccctcagcctctcctggacagtccccgagggccagtttgaccatttcttggtccagtttaagaatggggaygggcagcccaaggcggtgcgggtgccgggacacgaggatggggtcaccatctcgggcctggagccagaccacaagtacaagatgaacctgtacggcttcc

SEQ ID NO: 44030 - DNA, 201 bp, Homo sapiens
cacgaggggcagcgcgtgggcccagtgtccaccgtgggcatcacggcgcccctgcccacaccactgccggtggagccccgcctgggggagctggcggtggmggccgtgacctcggactcagtgggcctctcatggacggtggcccagggcccctttgactccttcctggtacagtacagggacgcgcaggggcagccccag

SEQ ID NO: 44031 - DNA, 201 bp, Homo sapiens
gcagcccaaggtggtgcgggtgccggggcacgaggacggggtcaccatctcaggcctggagccagaccacaagtacaagatgaacctgtacggcttccacrgtggccagcgcgtgggccccatctctgtcattggggtgacagaggaagaaactcccgcccccacagaacccagcacggaggccccggagccccctgagga

SEQ ID NO: 44032 - DNA, 201 bp, Homo sapiens
actgggaggactatgcccatggttttgggaacatctctggagagttctggctgggcaatgaggccctgcacagcctgacacaggcaggtgactactccatscgcgtggacctgcgggctggggacgaggctgtgttcgcccagtacgactccttccacgtagactcggctgcggagtactaccgcctccacttggagggct

SEQ ID NO: 44033 - DNA, 201 bp, Homo sapiens
cgtgtgggccccgtgtctgccatcggggtgacagctgcagaggaagagacccccagccccacagaacccagcatggaggccccggagccccctgaggagcygctcctgggggagctaacagtgacaggatcctcccctgactcgctgagcctctcctggaccgtcccccagggccgcttcgactccttcaccgtgcagtac

SEQ ID NO: 44034 - DNA, 201 bp, Homo sapiens
ggagggctaccacggcaccgcaggggactccatgagctaccacagcggcagtgtcttctctgcccgtgatcgggaccccaacagcttgctcatctcctgcrctgtctcctaccgaggggcctggtggtacaggaactgccactacgccaacctcaacgggctctacgggagcacagtggaccatcagggagtgagctggta

SEQ ID NO: 44035 - DNA, 201 bp, Homo sapiens
ggttcctgacggtcccacacagttgcgtgcactgaacttgaccgagggattcgccgtgctgcactggaagcccccccagaatcctgtggacacctatgacrtccaggtcacagcccctggggccccgcctctgcaggcggagaccccaggcagcgcggtggactaccccctgcatgaccttgtcctccacaccaactacac

SEQ ID NO: 44036 - DNA, 201 bp, Homo sapiens
gagagaacgaggaggttcctgacggtcccacacagttgcgtgcactgaacttgaccgagggattcgccgtgctgcactggaagcccccccagaatcctgtrgacacctatgacgtccaggtcacagcccctggggccccgcctctgcaggcggagaccccaggcagcgcggtggactaccccctgcatgaccttgtcctcc

SEQ ID NO: 44037 - DNA, 201 bp, Homo sapiens
agaacccagcactgaggccccggaggcccctgaggagccgctcctgggggagttgacagtgacaggatcctcccctgactcgctgagcctctcctggaccrtcccccagggccgcttcgactccttcaccgtgcagtacaaggacagggacgggcagccccaggtggtgcgtgtcaggggcgaggagagcgaggtcaccgt

SEQ ID NO: 44038 - DNA, 201 bp, Homo sapiens
gggcggcgcgtgggcccggtgtccaccgtgggcgtgactgccccacaagaggatgtggacgagacccccagccctacagaaccaggcacagaggccccagrgccccccgaggagcctctcctgggggagctgacagtgacaggatcctcccctgactcgctgagcctttcctggaccgtcccccagggccgctttgactcc

SEQ ID NO: 44039 - DNA, 201 bp, Homo sapiens
ccagggactgcggggaggagatgcagaacggagccggtgcctccaggaccagcaccatcttcctcaacggcaaccgcgagcggcccctgaacgtgttttgsgacatggagactgatgggggcggctggctggtgttccagcgccgcatggatggacagacagacttctggagggactgggaggactatgcccatggttttg

SEQ ID NO: 44040 - DNA, 201 bp, Homo sapiens
tggtgcgtgttgggggcgaggagagcgaggtcaccgtggggggcctggagcctgggcgcaaatacaagatgcacctgtacggcctccacgaggggcggcgygtgggcccggtgtccaccgtgggcgtgactgccccacaagaggatgtggacgagacccccagccctacagaaccaggcacagaggccccagagccccccg

SEQ ID NO: 44041 - DNA, 201 bp, Homo sapiens
agttgacagtgacaggatcctcccctgactcgctgagcctctcctggaccgtcccccagggccgcttcgactccttcaccgtgcagtacaaggacagggaygggcagccccaggtggtgcgtgtcaggggcgaggagagcgaggtcaccgtggggggcctggagcccgggcgcaaatacaagatgcatctgtacggcctcc

SEQ ID NO: 44042 - DNA, 201 bp, Homo sapiens
cctgtacggcctccacgaggggcggcgtgtgggcccggtgtccaccgtgggtgtgacagtgcccaccacaacccctgagccccccaacaagcctcgcctcrgggagctgaccgtgacagatgccacccctgactccctcagcctgtcctggatggtccccgagggccagtttgaccacttcctggtccagtacaggaatgg

SEQ ID NO: 44043 - DNA, 132 bp, Homo sapiens
gaagagccagggtccttcaccacccagccgctggaggaagccttctctgccagcgatctcgcagcactgtgtttacaggggggaggggaggggttcgtacrggagcaataaaggagaaactgaggtacccgg

SEQ ID NO: 44044 - DNA, 201 bp, Homo sapiens
tcccccagggccgcttcgactccttcaccgtgcagtacaaggacagggacgggcagccccaggtggtgcgtgtcaggggcgaggagagcgaggtcaccgtrgggggcctggagcccgggcgcaaatacaagatgcatctgtacggcctccacgaggggcagcgcgtgggcccagtgtccaccgtgggcatcacggcgcccc

SEQ ID NO: 44045 - DNA, 201 bp, Homo sapiens
gctgagcctctcctggaccgtcccccagggccgcttcgactccttcaccgtgcagtacaaggacagggacgggcagccccaggtggtgcgtgtcaggggcraggagagcgaggtcaccgtggggggcctggagcccgggcgcaaatacaagatgcatctgtacggcctccacgaggggcagcgcgtgggcccagtgtccac

SEQ ID NO: 44046 - DNA, 201 bp, Homo sapiens
actgaggccccggaggcccctgaggagccgctcctgggggagttgacagtgacaggatcctcccctgactcgctgagcctctcctggaccgtcccccaggkccgcttcgactccttcaccgtgcagtacaaggacagggacgggcagccccaggtggtgcgtgtcaggggcgaggagagcgaggtcaccgtggggggcctg

SEQ ID NO: 44047 - DNA, 201 bp, Homo sapiens
ccgagggccagtttgaccatttcttggtccagtttaagaatggggacgggcagcccaaggcggtgcgggtgccgggacacgaggatggggtcaccatctcrggcctggagccagaccacaagtacaagatgaacctgtacggcttccacggtggccagcgcgtgggccccgtgtctgctgttggtttaactgccccaggaa

SEQ ID NO: 44048 - DNA, 201 bp, Homo sapiens
ggtcaccatctcaggcctggagccagaccataaatacaagatgaacctgtacggcttccacggtggccagcgcgtaggccctgtgtctgccattggggtgwcggaggaagagacccccagccccacagaacccagcactgaggccccggaggcccctgaggagccgctcctgggggagttgacagtgacaggatcctcccc

SEQ ID NO: 44049 - DNA, 201 bp, Homo sapiens
tcctggtccagtacaggaatggggatgggcagcccaaggcggtgcgggtgccggggcacgaggacggggtcaccatctcaggcctggagccagaccataartacaagatgaacctgtacggcttccacggtggccagcgcgtaggccctgtgtctgccattggggtgacggaggaagagacccccagccccacagaaccca

SEQ ID NO: 44050 - DNA, 201 bp, Homo sapiens
gagcgaggtcaccgtggggggcctggagcctgggcgcaaatacaagatgcacctgtacggcctccacgaggggcggcgcgtgggcccggtgtccaccgtgrgcgtgactgccccacaagaggatgtggacgagacccccagccctacagaaccaggcacagaggccccagagccccccgaggagcctctcctgggggagct

SEQ ID NO: 44051 - DNA, 201 bp, Homo sapiens
acttcctggtccagtacaggaatggggatgggcagcccaaggcggtgcgggtgccggggcacgaggacggggtcaccatctcaggcctggagccagaccayaaatacaagatgaacctgtacggcttccacggtggccagcgcgtaggccctgtgtctgccattggggtgacggaggaagagacccccagccccacagaac

SEQ ID NO: 44052 - DNA, 201 bp, Homo sapiens
ttcaaagtctcctaccagctggcggacggaggggagcctcagagtgtgcaggtggatggccaggcccggacccagaaactccaggtgggagccaagaaaayggcatgggtgggagttgagagagaacgaggaggttcctgacggtcccacacagttgcgtgcactgaacttgaccgagggattcgccgtgctgcactggaa

SEQ ID NO: 44053 - DNA, 201 bp, Homo sapiens
gcggacagcttcaaagtctcctaccagctggcggacggaggggagcctcagagtgtgcaggtggatggccaggcccggacccagaaactccaggtgggagycaagaaaacggcatgggtgggagttgagagagaacgaggaggttcctgacggtcccacacagttgcgtgcactgaacttgaccgagggattcgccgtgct

SEQ ID NO: 44054 - DNA, 201 bp, Homo sapiens
aaggtcaactggatgcccccaccatcccgggcggacagcttcaaagtctcctaccagctggcggacggaggggagcctcagagtgtgcaggtggatggccrggcccggacccagaaactccaggtgggagccaagaaaacggcatgggtgggagttgagagagaacgaggaggttcctgacggtcccacacagttgcgtgc

SEQ ID NO: 44055 - DNA, 201 bp, Homo sapiens
cagccaaggtcaactggatgcccccaccatcccgggcggacagcttcaaagtctcctaccagctggcggacggaggggagcctcagagtgtgcaggtggayggccaggcccggacccagaaactccaggtgggagccaagaaaacggcatgggtgggagttgagagagaacgaggaggttcctgacggtcccacacagttg

SEQ ID NO: 44056 - DNA, 201 bp, Homo sapiens
tgactgacgtgaccaccagttcactgaggctcaactgggaggccccaccgggggccttcgactccttcctgctccgctttggggttccatcaccaagcacwctggagccgcatccgcgtccactgctgcagcgcgagctgatggtgccggggacgcggcactcggccgtgctccgggacctgcgttccgggactctgtaca

SEQ ID NO: 44057 - DNA, 201 bp, Homo sapiens
ggccagcgcgtgggccccgtgtctgctgttggtttaactgccccaggaaaggatgaagaaatggccccagcctcgacagaacctcccacccctgaaccccmcatcaagcctcgcctggaggagctgaccgtgacagatgcgacccctgactccctcagcctgtcctggacggttcccgagggacagtttgaccacttcctg

SEQ ID NO: 44058 - DNA, 201 bp, Homo sapiens
acagggacgggcggccccaggtggtgcgtgttgggggcgaggagagcgaggtcaccgtggggggcctggagcctgggcgcaaatacaagatgcacctgtayggcctccacgaggggcggcgcgtgggcccggtgtccaccgtgggcgtgactgccccacaagaggatgtggacgagacccccagccctacagaaccaggca

SEQ ID NO: 44059 - DNA, 201 bp, Homo sapiens
cgctgagcctctcctggaccgtcccccagggccgcttcgactccttcaccgtgcagtacaaggacagggacgggcggccccaggtggtgcgtgttgggggygaggagagcgaggtcaccgtggggggcctggagcctgggcgcaaatacaagatgcacctgtacggcctccacgaggggcggcgcgtgggcccggtgtcca

SEQ ID NO: 44060 - DNA, 201 bp, Homo sapiens
tactaccgcctccacttggagggctaccacggcaccgcaggggactccatgagctaccacagcggcagtgtcttctctgcccgtgatcgggaccccaacarcttgctcatctcctgcgctgtctcctaccgaggggcctggtggtacaggaactgccactacgccaacctcaacgggctctacgggagcacagtggaccat

SEQ ID NO: 44061 - DNA, 201 bp, Homo sapiens
tggcctctttccctccacctcctacaatgcacggctccaggccatgtggggccagagcctcctgccgcccgtgtccacctctttcaccacgggtgggctgyggatccccttccccagggactgcggggaggagatgcagaacggagccggtgcctccaggaccagcaccatcttcctcaacggcaaccgcgagcggcccct

SEQ ID NO: 44062 - DNA, 201 bp, Homo sapiens
cccgactccctcagcctgtcctggatggttcccgagggccagtttgaccacttcctggtccagtacaggaatggggatgggcagcccaaggcggtgcgggkgccggggcacgaggacggggtcaccatctcaggcctggagccagaccataaatacaagatgaacctgtacggcttccacggtggccagcgcgtaggccct

SEQ ID NO: 44063 - DNA, 201 bp, Homo sapiens
ggcggccccaggtggtgcgtgtcaggggcgaggagagcgaggtcaccgtggggggcctggagcccgggtgcaaatacaagatgcacctgtacggcctccaygaggggcagcgcgtgggcccagtgtccgctgtgggtgtgacagctccaaaggatgaagccgagaccacccaagcagtgcctaccatgacccctgagcccc

SEQ ID NO: 44064 - DNA, 201 bp, Homo sapiens
tcgctgagcctctcctggaccgtcccccagggccgcttcgactccttcaccgtgcagtacaaggacagggacgggcagccccaggtggtgcgtgtcagggkcgaggagagcgaggtcaccgtggggggcctggagcccgggcgcaaatacaagatgcatctgtacggcctccacgaggggcagcgcgtgggcccagtgtcc

SEQ ID NO: 44065 - DNA, 201 bp, Homo sapiens
ccacctcggggagttgacagtggaggaggccacgtcacacaccctgcatctctcctggatggtgactgagggagaatttgactccttcgaaatccagtacrcagatagagacgggcaactccaaatggtccgcataggaggtgaccggaatgacatcaccctctctggcctggaatccgaccacagatacctggtgaccct

SEQ ID NO: 44066 - DNA, 201 bp, Homo sapiens; identical to SEQ ID NO: 43998

SEQ ID NO: 44067 - DNA, 201 bp, Homo sapiens; identical to SEQ ID NO: 43999

SEQ ID NO: 44068 - DNA, 201 bp, Homo sapiens
catggggtccctcctgggggcaagccctctgaccccatcatctaccaaggcattatggacaaggatgaggagaagcctgggaagtcctcaggcccaccacrcctgggtgagctgacggtgacagacaggacctccgactccttgctcctgcgctggacggtccccgagggcgagtttgactccttcgtgatccagtacaaa

SEQ ID NO: 44069 - DNA, 201 bp, Homo sapiens; identical to SEQ ID NO: 44000

SEQ ID NO: 44070 - DNA, 201 bp, Homo sapiens; identical to SEQ ID NO: 44001

SEQ ID NO: 44071 - DNA, 201 bp, Homo sapiens
gaccacggccccgacccctccagcgcctgagccccacctcggggagttgacagtggaggaggccacgtcacacaccctgcatctctcctggatggtgactragggagaatttgactccttcgaaatccagtacacagatagagacgggcaactccaaatggtccgcataggaggtgaccggaatgacatcaccctctctgg

SEQ ID NO: 44072 - DNA, 201 bp, Homo sapiens; identical to SEQ ID NO: 44002

SEQ ID NO: 44073 - DNA, 201 bp, Homo sapiens; identical to SEQ ID NO: 44003

SEQ ID NO: 44074 - DNA, 201 bp, Homo sapiens; identical to SEQ ID NO: 44004

SEQ ID NO: 44075 - DNA, 201 bp, Homo sapiens
ggtggacagaaccaggagatcctgctcccaggagggatcacatctcaccagctccttggcctctttccctccacctcctacaatgcacggctccaggccaygtggggccagagcctcctgccgcccgtgtccacctctttcaccacgggtgggctgcggatccccttccccagggactgcggggaggagatgcagaacgga

SEQ ID NO: 44076 - DNA, 201 bp, Homo sapiens; identical to SEQ ID NO: 44006

SEQ ID NO: 44077 - DNA, 201 bp, Homo sapiens; identical to SEQ ID NO: 44007

SEQ ID NO: 44078 - DNA, 201 bp, Homo sapiens; identical to SEQ ID NO: 44008

SEQ ID NO: 44079 - DNA, 201 bp, Homo sapiens
ccgtgtctgccatcggggtgacagaggaagagacccccagccccacagaacccagcatggaggccccggagccccctgaggagccgctcctgggggagctracagtgacaggatcctcccctgactcgctgagcctctcctggaccgtcccccagggccgcttcgactccttcaccgtgcagtacaaggacagggacgggc

SEQ ID NO: 44080 - DNA, 201 bp, Homo sapiens; identical to SEQ ID NO: 44010

SEQ ID NO: 44081 - DNA, 201 bp, Homo sapiens
atccagtacaaagacagggacgggcagccccaggtggtgcccgtggaaggaccccagcgctcggccgtcatcacctccctggatcctggccgcaagtacaratttgtcctgtatgggtttgttggcaagaagaggcatggtccgctggtggctgaagccaagatcttgcctcagagtgacccaagtccagggactccaccc

SEQ ID NO: 44082 - DNA, 201 bp, Homo sapiens; identical to SEQ ID NO: 44011

SEQ ID NO: 44083 - DNA, 201 bp, Homo sapiens
cgtgggcccggtgtccgccgtgggcgtgacagccccacaacaagaagagacccctccagccactgagtccccgctggagccacgcctaggagagctgacartgacagatgtgacccccaactctgtgggcctctcctggacagtccccgagggccagtttgactccttcatagtccagtacaaggacaaggacgggcagcc

SEQ ID NO: 44084 - DNA, 201 bp, Homo sapiens; identical to SEQ ID NO: 44012

SEQ ID NO: 44085 - DNA, 201 bp, Homo sapiens; identical to SEQ ID NO: 44013

SEQ ID NO: 44086 - DNA, 201 bp, Homo sapiens
ctgcgcctagggcagatgacagtgagagacatcacctccgactccctcagcctctcctggacagtccccgagggccagtttgaccatttcttggtccagtwtaagaatggggacgggcagcccaaggcggtgcgggtgccgggacacgaggatggggtcaccatctcgggcctggagccagaccacaagtacaagatgaac

SEQ ID NO: 44087 - DNA, 201 bp, Homo sapiens; identical to SEQ ID NO: 44015

SEQ ID NO: 44088 - DNA, 201 bp, Homo sapiens; identical to SEQ ID NO: 44016

SEQ ID NO: 44089 - DNA, 201 bp, Homo sapiens; identical to SEQ ID NO: 44017

SEQ ID NO: 44090 - DNA, 201 bp, Homo sapiens; identical to SEQ ID NO: 44018

SEQ ID NO: 44091 - DNA, 201 bp, Homo sapiens; identical to SEQ ID NO: 44019

SEQ ID NO: 44092 - DNA, 201 bp, Homo sapiens; identical to SEQ ID NO: 44020

SEQ ID NO: 44093 - DNA, 201 bp, Homo sapiens; identical to SEQ ID NO: 44021

SEQ ID NO: 44094 - DNA, 201 bp, Homo sapiens; identical to SEQ ID NO: 44022

SEQ ID NO: 44095 - DNA, 201 bp, Homo sapiens
acaggatcctcccctgattcgctgagcctcttctggaccgtcccccagggcagcttcgactctttcaccgtgcagtacaaggacagggatgggcggccccrggcggtgcgtgttgggggcaaggagagtgaggtcaccgtgggaggcctagagcccgggcacaagtacaagatgcacctgtacggcctccacgaggggcag

SEQ ID NO: 44096 - DNA, 201 bp, Homo sapiens
aagtcctcaggcccaccacgcctgggtgagctgacggtgacagacaggacctccgactccttgctcctgcgctggacggtccccgagggcgagtttgactmcttcgtgatccagtacaaagacagggacgggcagccccaggtggtgcccgtggaaggaccccagcgctcggccgtcatcacctccctggatcctggccgc

SEQ ID NO: 44097 - DNA, 201 bp, Homo sapiens
cagagtggaccccggctcctggccccgtggatgcctatgaaattcagttcatccccacgacagagggggcgagccccccattcacagcacgggttccaagmtctgcctcagcctatgaccagagaggactggcccctggacaggagtaccaggtcactgtccgagcccttcgagggaccagctggggccttcctgcctcca

SEQ ID NO: 44098 - DNA, 201 bp, Homo sapiens
tggtgaccctgtatggtttcagtgatgggaagcatgtaggtcctgtccatgtcgaggccctgacagtcccggaggaggagaagccttcagaacctcccacygcaacccccgagccccccatcaagcctcgcctgggggagctgaccgtgacagatgccacccctgactccctcagcctgtcctggacagttcccgagggac

SEQ ID NO: 44099 - DNA, 201 bp, Homo sapiens
tgaacctgtacggcttccacggtggccagcgcatgggccctgtgtctgtcgtcggggtgacagaacccagcatggaggccccggagcccgctgaggagccrctcctgggggagctaacagtgacaggatcctcccctgactcgctgagcctctcctggaccgtcccccagggccgcttcgactccttcaccgtgcagtaca

SEQ ID NO: 44100 - DNA, 201 bp, Homo sapiens
gccaaggaagtgaccccccgcaccgccctgctcacttggactgagcccccagtccggcccgcaggctacctgctcagcttccacacccctggtggacagamccaggagatcctgctcccaggagggatcacatctcaccagctccttggcctctttccctccacctcctacaatgcacggctccaggccatgtggggccag

SEQ ID NO: 44101 - DNA, 201 bp, Homo sapiens; identical to SEQ ID NO: 44024

SEQ ID NO: 44102 - DNA, 201 bp, Homo sapiens
cagaacctcccaccgcaacccccgagccccccatcaagcctcgcctgggggagctgaccgtgacagatgccacccctgactccctcagcctgtcctggacrgttcccgagggacagtttgaccacttcctggtccagtacaggaatggagatgggcagcccaaggcagtgagggtgccagggcacgaggaaggggtcacca

SEQ ID NO: 44103 - DNA, 201 bp, Homo sapiens; identical to SEQ ID NO: 44025

SEQ ID NO: 44104 - DNA, 201 bp, Homo sapiens
ccctgaagcagacgggacgctgctgactgacctgatgccaggcgtagaatatgtggtgactgtcacagcggagcggggccgggcagtcagctacccagctkctgtcagggccaacacagggtcctcacccttgggcctcttggggactaccgatgagcctcctccctcaggcccctcgacgacgcaaggggcccaggctcc

SEQ ID NO: 44105 - DNA, 201 bp, Homo sapiens; identical to SEQ ID NO: 44026

SEQ ID NO: 44106 - DNA, 201 bp, Homo sapiens; identical to SEQ ID NO: 44027

SEQ ID NO: 44107 - DNA, 201 bp, Homo sapiens
tttgtcctgtatgggtttgttggcaagaagaggcatggtccgctggtggctgaagccaagatcttgcctcagagtgacccaagtccagggactccaccccrcctgggaaacctgtgggtgacagaccctaccccagattcactgcacctctcctggactgtccctgagggccagtttgacaccttcatggtccagtacagg

SEQ ID NO: 44108 - DNA, 201 bp, Homo sapiens
cagaacccagcatggaggccccggagcccgctgaggagccgctcctgggggagctaacagtgacaggatcctcccctgactcgctgagcctctcctggacygtcccccagggccgcttcgactccttcaccgtgcagtacaaggacagggacgggcggccccaggtggtgcgtgttgggggcgaggagagtgaagtcaccg

SEQ ID NO: 44109 - DNA, 201 bp, Homo sapiens; identical to SEQ ID NO: 44028

SEQ ID NO: 44110 - DNA, 201 bp, Homo sapiens
agatgacagtgagagacatcacctccgactccctcagcctctcctggacagtccccgagggccagtttgaccatttcttggtccagtttaagaatggggaygggcagcccaaggcggtgcgggtgccgggacacgaggatggggtcaccatctcgggcctggagccagaccacaagtacaagatgaacctgtacggcttcc

SEQ ID NO: 44111 - DNA, 201 bp, Homo sapiens; identical to SEQ ID NO: 44030

SEQ ID NO: 44112 - DNA, 201 bp, Homo sapiens; identical to SEQ ID NO: 44031

SEQ ID NO: 44113 - DNA, 201 bp, Homo sapiens; identical to SEQ ID NO: 44032

SEQ ID NO: 44114 - DNA, 201 bp, Homo sapiens
ggcggccccgggcggtgcgtgttgggggcaaggagagtgaggtcaccgtgggaggcctagagcccgggcacaagtacaagatgcacctgtacggcctccaygaggggcagcgcgtgggcccggtgtccgccgtgggcgtgacagccccacaacaagaagagacccctccagccactgagtccccgctggagccacgcctag

SEQ ID NO: 44115 - DNA, 201 bp, Homo sapiens; identical to SEQ ID NO: 44034

SEQ ID NO: 44116 - DNA, 201 bp, Homo sapiens
ggccagcgtgtgggccccgtgtctgccatcggggtgacagaggaagagacccccagccccacagaacccagcatggaggccccggagccccctgaggagcygctcctgggggagctaacagtgacaggatcctcccctgactcgctgagcctctcctggaccgtcccccagggccgcttcgactccttcaccgtgcagtac

SEQ ID NO: 44117 - DNA, 201 bp, Homo sapiens
ctcccaccgcaacccccgagccccccatcaagcctcgcctgggggagctgaccgtgacagatgccacccctgactccctcagcctgtcctggacagttccygagggacagtttgaccacttcctggtccagtacaggaatggagatgggcagcccaaggcagtgagggtgccagggcacgaggaaggggtcaccatctcgg

SEQ ID NO: 44118 - DNA, 201 bp, Homo sapiens; identical to SEQ ID NO: 44035

SEQ ID NO: 44119 - DNA, 201 bp, Homo sapiens
gcttcctcaccacggttcctgacggtcccacacagttgcgtgcactgaacttgaccgagggattcgccgtgctgcactggaagcccccccagaatcctgtrgacacctatgacgtccaggtcacagcccctggggccccgcctctgcaggcggagaccccaggcagcgcggtggactaccccctgcatgaccttgtcctcc

SEQ ID NO: 44120 - DNA, 201 bp, Homo sapiens
tgaggagccgctcctgggggagctaacagtgacaggatcctcccctgactcgctgagcctctcctggaccgtcccccagggccgcttcgactccttcaccrtgcagtacaaggacagggacgggcggccccaggtggtgcgtgttgggggcgaggagagtgaagtcaccgtggggggcctggagcctgggcgcaagtacaa

SEQ ID NO: 44121 - DNA, 201 bp, Homo sapiens; identical to SEQ ID NO: 44037

SEQ ID NO: 44122 - DNA, 201 bp, Homo sapiens; identical to SEQ ID NO: 44039

SEQ ID NO: 44123 - DNA, 201 bp, Homo sapiens; identical to SEQ ID NO: 44038

SEQ ID NO: 44124 - DNA, 201 bp, Homo sapiens; identical to SEQ ID NO: 44040

SEQ ID NO: 44125 - DNA, 201 bp, Homo sapiens; identical to SEQ ID NO: 44041

SEQ ID NO: 44126 - DNA, 132 bp, Homo sapiens; identical to SEQ ID NO: 44043

SEQ ID NO: 44127 - DNA, 201 bp, Homo sapiens; identical to SEQ ID NO: 44042

SEQ ID NO: 44128 - DNA, 201 bp, Homo sapiens; identical to SEQ ID NO: 44044

SEQ ID NO: 44129 - DNA, 201 bp, Homo sapiens
aagtacagattcactctgtttggaattgcgaacaagaagcggtatggccccctcacggccgatggcaccactgctccagagaggaaagaggagcccccccrccctgagttcctggagcagcccctcctgggggaactgacagtgaccggcgtgaccccagactccttgcgtctctcatggacagtggcccagggccccttc

SEQ ID NO: 44130 - DNA, 201 bp, Homo sapiens; identical to SEQ ID NO: 44045

SEQ ID NO: 44131 - DNA, 201 bp, Homo sapiens
ttgggggcaaggagagtgaggtcaccgtgggaggcctagagcccgggcacaagtacaagatgcacctgtacggcctccacgaggggcagcgcgtgggcccrgtgtccgccgtgggcgtgacagccccacaacaagaagagacccctccagccactgagtccccgctggagccacgcctaggagagctgacagtgacagatg

SEQ ID NO: 44132 - DNA, 201 bp, Homo sapiens; identical to SEQ ID NO: 44046

SEQ ID NO: 44133 - DNA, 201 bp, Homo sapiens
ccgagggccagtttgaccatttcttggtccagtttaagaatggggacgggcagcccaaggcggtgcgggtgccgggacacgaggatggggtcaccatctcrggcctggagccagaccacaagtacaagatgaacctgtacggcttccacggtggccagcgcgtgggccccgtgtctgctgttggtttaactgcctcgacag

SEQ ID NO: 44134 - DNA, 201 bp, Homo sapiens; identical to SEQ ID NO: 44048

SEQ ID NO: 44135 - DNA, 201 bp, Homo sapiens; identical to SEQ ID NO: 44049

SEQ ID NO: 44136 - DNA, 201 bp, Homo sapiens; identical to SEQ ID NO: 44050

SEQ ID NO: 44137 - DNA, 201 bp, Homo sapiens; identical to SEQ ID NO: 44051

SEQ ID NO: 44138 - DNA, 201 bp, Homo sapiens
gcagtgcctgttgcgggggatgagaatgaggttactgtccccggcctggatcccgaccggaagtataagatgaacctctacgggcttcgtggcaggcagcrtgtggggcccgagtctgtggtggccaagactgctcctcaggaggatgtggacgagacccccagccccacagaactgggcacggaggccccggagtccccc

SEQ ID NO: 44139 - DNA, 201 bp, Homo sapiens
aaggtcaactggatgcccccaccatcccgggcggacagcttcaaagtctcctaccagctggcggacggaggggagcctcagagtgtgcaggtggatggccrggcccggacccagaaactccaggggctgatcccaggcgctcgctatgaggtgaccgtggtctcggtccgaggctttgaggagagtgagcctctcacaggc

SEQ ID NO: 44140 - DNA, 201 bp, Homo sapiens
cagccaaggtcaactggatgcccccaccatcccgggcggacagcttcaaagtctcctaccagctggcggacggaggggagcctcagagtgtgcaggtggayggccaggcccggacccagaaactccaggggctgatcccaggcgctcgctatgaggtgaccgtggtctcggtccgaggctttgaggagagtgagcctctca

SEQ ID NO: 44141 - DNA, 201 bp, Homo sapiens; identical to SEQ ID NO: 44056

SEQ ID NO: 44142 - DNA, 201 bp, Homo sapiens
tacaagatgaacctgtacggcttccacggtggccagcgcgtgggccccgtgtctgctgttggtttaactgcctcgacagaacctcccacccctgaaccccmcatcaagcctcgcctggaggagctgaccgtgacagatgcgacccctgactccctcagcctgtcctggacggttcccgagggacagtttgaccacttcctg

SEQ ID NO: 44143 - DNA, 201 bp, Homo sapiens; identical to SEQ ID NO: 44058

SEQ ID NO: 44144 - DNA, 201 bp, Homo sapiens; identical to SEQ ID NO: 44059

SEQ ID NO: 44145 - DNA, 201 bp, Homo sapiens; identical to SEQ ID NO: 44060

SEQ ID NO: 44146 - DNA, 201 bp, Homo sapiens; identical to SEQ ID NO: 44061

SEQ ID NO: 44147 - DNA, 201 bp, Homo sapiens
tatgaaattcagttcatccccacgacagagggggcgagccccccattcacagcacgggttccaagctctgcctcagcctatgaccagagaggactggcccmtggacaggagtaccaggtcactgtccgagcccttcgagggaccagctggggccttcctgcctccaagaccatcaccaccatgatcgatgggccccaggac

SEQ ID NO: 44148 - DNA, 201 bp, Homo sapiens
tcacagcacgggttccaagctctgcctcagcctatgaccagagaggactggcccctggacaggagtaccaggtcactgtccgagcccttcgagggaccagmtggggccttcctgcctccaagaccatcaccaccatgatcgatgggccccaggacctccgagtggtggctgtgacaccgacaacactggagcttggctggc

SEQ ID NO: 44149 - DNA, 201 bp, Homo sapiens; identical to SEQ ID NO: 44063

SEQ ID NO: 44150 - DNA, 201 bp, Homo sapiens; identical to SEQ ID NO: 44062

SEQ ID NO: 44151 - DNA, 201 bp, Homo sapiens; identical to SEQ ID NO: 44064

SEQ ID NO: 44152 - DNA, 201 bp, Homo sapiens; identical to SEQ ID NO: 44065

SEQ ID NO: 44153 - DNA, 201 bp, Homo sapiens; identical to SEQ ID NO: 43998

SEQ ID NO: 44154 - DNA, 201 bp, Homo sapiens; identical to SEQ ID NO: 43999

SEQ ID NO: 44155 - DNA, 201 bp, Homo sapiens; identical to SEQ ID NO: 44068

SEQ ID NO: 44156 - DNA, 201 bp, Homo sapiens; identical to SEQ ID NO: 44000

SEQ ID NO: 44157 - DNA, 201 bp, Homo sapiens; identical to SEQ ID NO: 44001

SEQ ID NO: 44158 - DNA, 201 bp, Homo sapiens; identical to SEQ ID NO: 44071

SEQ ID NO: 44159 - DNA, 201 bp, Homo sapiens; identical to SEQ ID NO: 44002

SEQ ID NO: 44160 - DNA, 201 bp, Homo sapiens; identical to SEQ ID NO: 44003

SEQ ID NO: 44161 - DNA, 201 bp, Homo sapiens; identical to SEQ ID NO: 44004

SEQ ID NO: 44162 - DNA, 201 bp, Homo sapiens; identical to SEQ ID NO: 44005

SEQ ID NO: 44163 - DNA, 201 bp, Homo sapiens; identical to SEQ ID NO: 44006

SEQ ID NO: 44164 - DNA, 201 bp, Homo sapiens; identical to SEQ ID NO: 44007

SEQ ID NO: 44165 - DNA, 201 bp, Homo sapiens; identical to SEQ ID NO: 44008

SEQ ID NO: 44166 - DNA, 201 bp, Homo sapiens; identical to SEQ ID NO: 44079

SEQ ID NO: 44167 - DNA, 201 bp, Homo sapiens; identical to SEQ ID NO: 44010

SEQ ID NO: 44168 - DNA, 201 bp, Homo sapiens
ctactctggcgaggattgcggtgtgaggcagtgcccgaatgactgcagccagcacggcgtgtgccaggacggtgtgtgcatctgttgggaaggctacgtgrgtgaggactgcagcatccgcacctgcccctccaactgccacgggaggggccgctgtgaggaagggcgctgcctgtgcgacccaggctacaccggccctac

SEQ ID NO: 44169 - DNA, 201 bp, Homo sapiens; identical to SEQ ID NO: 44081

SEQ ID NO: 44170 - DNA, 201 bp, Homo sapiens; identical to SEQ ID NO: 44011

SEQ ID NO: 44171 - DNA, 201 bp, Homo sapiens; identical to SEQ ID NO: 44083

SEQ ID NO: 44172 - DNA, 201 bp, Homo sapiens; identical to SEQ ID NO: 44012

SEQ ID NO: 44173 - DNA, 201 bp, Homo sapiens; identical to SEQ ID NO: 44013

SEQ ID NO: 44174 - DNA, 201 bp, Homo sapiens; identical to SEQ ID NO: 44086

SEQ ID NO: 44175 - DNA, 201 bp, Homo sapiens; identical to SEQ ID NO: 44015

SEQ ID NO: 44176 - DNA, 201 bp, Homo sapiens; identical to SEQ ID NO: 44016

SEQ ID NO: 44177 - DNA, 201 bp, Homo sapiens; identical to SEQ ID NO: 44017

SEQ ID NO: 44178 - DNA, 201 bp, Homo sapiens; identical to SEQ ID NO: 44018

SEQ ID NO: 44179 - DNA, 201 bp, Homo sapiens; identical to SEQ ID NO: 44019

SEQ ID NO: 44180 - DNA, 201 bp, Homo sapiens
aggctacactggtgacgactgtggcatgaggagctgccctcgcggttgcagtcagagggggcgctgtgagaatgggcgctgcgtgtgtaaccccggctacrctggcgaggactgtggggtgaggagctgccctcggggctgcagccagcggggacgctgcaaggacgggcgctgcgtgtgtgaccccggctacactggcga

SEQ ID NO: 44181 - DNA, 201 bp, Homo sapiens; identical to SEQ ID NO: 44020

SEQ ID NO: 44182 - DNA, 201 bp, Homo sapiens; identical to SEQ ID NO: 44021

SEQ ID NO: 44183 - DNA, 201 bp, Homo sapiens; identical to SEQ ID NO: 44022

SEQ ID NO: 44184 - DNA, 201 bp, Homo sapiens
gtgacgcaggctactcaggggaagactgcagcacgcgcagctgccccgggggctgccgaggccgcggccagtgcctagatgggcggtgtgtgtgcgaggayggctactctggcgaggattgcggtgtgaggcagtgcccgaatgactgcagccagcacggcgtgtgccaggacggtgtgtgcatctgttgggaaggctacg

SEQ ID NO: 44185 - DNA, 201 bp, Homo sapiens; identical to SEQ ID NO: 44095

SEQ ID NO: 44186 - DNA, 201 bp, Homo sapiens; identical to SEQ ID NO: 44096

SEQ ID NO: 44187 - DNA, 201 bp, Homo sapiens
gcccaggggactgccgtggccgaggagagtgtcacgatggcagctgtgtctgcaaagatgggtatgctggcgaagactgcggagaagcacgggttccaagmtctgcctcagcctatgaccagagaggactggcccctggacaggagtaccaggtcactgtccgagcccttcgagggaccagctggggccttcctgcctcca

SEQ ID NO: 44188 - DNA, 201 bp, Homo sapiens; identical to SEQ ID NO: 44098

SEQ ID NO: 44189 - DNA, 201 bp, Homo sapiens
gcatgggccctgtgtctgtcgtcggggtgacagctgcagaggaagagacccccagccccacagaacccagcatggaggccccggagcccgctgaggagccrctcctgggggagctaacagtgacaggatcctcccctgactcgctgagcctctcctggaccgtcccccagggccgcttcgactccttcaccgtgcagtaca

SEQ ID NO: 44190 - DNA, 201 bp, Homo sapiens
ccccacagatgctgagatccctccctcttccccaccctcagcctcggggtcctgcccagatgactgcaatgatcagggtcgctgtgtccgtggtcgttgcrtgtgctttcccggctacactggccccagctgtggctggccatcctgtcccggggactgccaaggccgtgggcgctgcgtgcagggcgtgtgtgtgtgccg

SEQ ID NO: 44191 - DNA, 201 bp, Homo sapiens; identical to SEQ ID NO: 44023

SEQ ID NO: 44192 - DNA, 201 bp, Homo sapiens
agtggccgctgcatgtgttggccggggtacacaggccgggactgcggcacgcgcgcctgtcctggcgactgtcgcgggcgcgggcgctgcgtggatggccrctgcgtgtgcaacccgggcttcaccggtgaggactgtgggagccgtcgctgtcccggggactgccgtgggcacggcctttgcgaggatggcgtgtgcgtg

SEQ ID NO: 44193 - DNA, 201 bp, Homo sapiens; identical to SEQ ID NO: 44024

SEQ ID NO: 44194 - DNA, 201 bp, Homo sapiens
agcatccgcacctgcccctccaactgccacgggaggggccgctgtgaggaagggcgctgcctgtgcgacccaggctacaccggccctacctgtgccacccrcatgtgcccggctgactgccggggacgtgggcggtgtgtgcaaggagtgtgcctgtgccacgtgggctatggcggtgaggactgcgggcaggaagagcct

SEQ ID NO: 44195 - DNA, 201 bp, Homo sapiens; identical to SEQ ID NO: 44102

SEQ ID NO: 44196 - DNA, 201 bp, Homo sapiens; identical to SEQ ID NO: 44025

SEQ ID NO: 44197 - DNA, 201 bp, Homo sapiens
ccctgaagcagacgggacgctgctgactgacctgatgccaggcgtagaatatgtggtgactgtcacagcggagcggggccgggcagtcagctacccagctkctgtcagggccaacacagaggaaagggaggaggagtccccgcccaggccaagcctgtcccagcccccacggcggccttggggcaacctgacggccgagct

SEQ ID NO: 44198 - DNA, 201 bp, Homo sapiens; identical to SEQ ID NO: 44026

SEQ ID NO: 44199 - DNA, 201 bp, Homo sapiens; identical to SEQ ID NO: 44027

SEQ ID NO: 44200 - DNA, 201 bp, Homo sapiens; identical to SEQ ID NO: 44107

SEQ ID NO: 44201 - DNA, 201 bp, Homo sapiens; identical to SEQ ID NO: 44108

SEQ ID NO: 44202 - DNA, 201 bp, Homo sapiens; identical to SEQ ID NO: 44028

SEQ ID NO: 44203 - DNA, 201 bp, Homo sapiens; identical to SEQ ID NO: 44110

SEQ ID NO: 44204 - DNA, 201 bp, Homo sapiens; identical to SEQ ID NO: 44030

SEQ ID NO: 44205 - DNA, 201 bp, Homo sapiens; identical to SEQ ID NO: 44031

SEQ ID NO: 44206 - DNA, 201 bp, Homo sapiens; identical to SEQ ID NO: 44032

SEQ ID NO: 44207 - DNA, 201 bp, Homo sapiens; identical to SEQ ID NO: 44114

SEQ ID NO: 44208 - DNA, 201 bp, Homo sapiens; identical to SEQ ID NO: 44034

SEQ ID NO: 44209 - DNA, 201 bp, Homo sapiens; identical to SEQ ID NO: 44116

SEQ ID NO: 44210 - DNA, 201 bp, Homo sapiens; identical to SEQ ID NO: 44117

SEQ ID NO: 44211 - DNA, 201 bp, Homo sapiens; identical to SEQ ID NO: 44035

SEQ ID NO: 44212 - DNA, 201 bp, Homo sapiens; identical to SEQ ID NO: 44119

SEQ ID NO: 44213 - DNA, 201 bp, Homo sapiens; identical to SEQ ID NO: 44120

SEQ ID NO: 44214 - DNA, 201 bp, Homo sapiens; identical to SEQ ID NO: 44037

SEQ ID NO: 44215 - DNA, 201 bp, Homo sapiens; identical to SEQ ID NO: 44038

SEQ ID NO: 44216 - DNA, 201 bp, Homo sapiens; identical to SEQ ID NO: 44039

SEQ ID NO: 44217 - DNA, 201 bp, Homo sapiens; identical to SEQ ID NO: 44040

SEQ ID NO: 44218 - DNA, 201 bp, Homo sapiens; identical to SEQ ID NO: 44041

SEQ ID NO: 44219 - DNA, 201 bp, Homo sapiens; identical to SEQ ID NO: 44042

SEQ ID NO: 44220 - DNA, 132 bp, Homo sapiens; identical to SEQ ID NO: 44043

SEQ ID NO: 44221 - DNA, 201 bp, Homo sapiens; identical to SEQ ID NO: 44044

SEQ ID NO: 44222 - DNA, 201 bp, Homo sapiens; identical to SEQ ID NO: 44129

SEQ ID NO: 44223 - DNA, 201 bp, Homo sapiens; identical to SEQ ID NO: 44045

SEQ ID NO: 44224 - DNA, 201 bp, Homo sapiens; identical to SEQ ID NO: 44131

SEQ ID NO: 44225 - DNA, 201 bp, Homo sapiens; identical to SEQ ID NO: 44046

SEQ ID NO: 44226 - DNA, 201 bp, Homo sapiens
gcggaccctctgcagtctccatggtgtgtttgatctgagccgctgcacctgttcctgtgagccaggctggggtgggcccacctgctcagaccccacagatrctgagatccctccctcttccccaccctcagcctcggggtcctgcccagatgactgcaatgatcagggtcgctgtgtccgtggtcgttgcgtgtgctttcc

SEQ ID NO: 44227 - DNA, 201 bp, Homo sapiens; identical to SEQ ID NO: 44133

SEQ ID NO: 44228 - DNA, 201 bp, Homo sapiens; identical to SEQ ID NO: 44048

SEQ ID NO: 44229 - DNA, 201 bp, Homo sapiens; identical to SEQ ID NO: 44049

SEQ ID NO: 44230 - DNA, 201 bp, Homo sapiens; identical to SEQ ID NO: 44050

SEQ ID NO: 44231 - DNA, 201 bp, Homo sapiens; identical to SEQ ID NO: 44051

SEQ ID NO: 44232 - DNA, 201 bp, Homo sapiens; identical to SEQ ID NO: 44138

SEQ ID NO: 44233 - DNA, 201 bp, Homo sapiens; identical to SEQ ID NO: 44139

SEQ ID NO: 44234 - DNA, 201 bp, Homo sapiens; identical to SEQ ID NO: 44140

SEQ ID NO: 44235 - DNA, 201 bp, Homo sapiens; identical to SEQ ID NO: 44056

SEQ ID NO: 44236 - DNA, 201 bp, Homo sapiens; identical to SEQ ID NO: 44142

SEQ ID NO: 44237 - DNA, 201 bp, Homo sapiens; identical to SEQ ID NO: 44058

SEQ ID NO: 44238 - DNA, 201 bp, Homo sapiens; identical to SEQ ID NO: 44059

SEQ ID NO: 44239 - DNA, 201 bp, Homo sapiens; identical to SEQ ID NO: 44060

SEQ ID NO: 44240 - DNA, 201 bp, Homo sapiens; identical to SEQ ID NO: 44061

SEQ ID NO: 44241 - DNA, 201 bp, Homo sapiens
gatggcagctgtgtctgcaaagatgggtatgctggcgaagactgcggagaagcacgggttccaagctctgcctcagcctatgaccagagaggactggcccmtggacaggagtaccaggtcactgtccgagcccttcgagggaccagctggggccttcctgcctccaagaccatcaccaccatgatcgatgggccccaggac

SEQ ID NO: 44242 - DNA, 201 bp, Homo sapiens
gagaagcacgggttccaagctctgcctcagcctatgaccagagaggactggcccctggacaggagtaccaggtcactgtccgagcccttcgagggaccagmtggggccttcctgcctccaagaccatcaccaccatgatcgatgggccccaggacctccgagtggtggctgtgacaccgacaacactggagcttggctggc

SEQ ID NO: 44243 - DNA, 201 bp, Homo sapiens; identical to SEQ ID NO: 44063

SEQ ID NO: 44244 - DNA, 201 bp, Homo sapiens; identical to SEQ ID NO: 44062

SEQ ID NO: 44245 - DNA, 201 bp, Homo sapiens; identical to SEQ ID NO: 44064

SEQ ID NO: 44246 - DNA, 201 bp, Homo sapiens; identical to SEQ ID NO: 44012

SEQ ID NO: 44247 - DNA, 201 bp, Homo sapiens
cagacagcgcgggagctcgcaggagtcacgaggccacagcgacttcattgtctgactgggcctggacctataaacttcccacctcagccttgggccaagcmtggaagataaaaatggagcaccccatggcgcccctcactcagattctcccctgggcttctcccacgcagccccagaagaggacacaccagccccagagtt

SEQ ID NO: 44248 - DNA, 201 bp, Homo sapiens
tgatcgggaccccaacagcttgctcatctcctgcgctgtctcctaccgaggggcctggtggtacaggaactgccactacgccaacctcaacgggctctacrggagcacagtggaccatcagggagtgagctggtaccactggaagggcttcgagttctcggtgcccttcacggaaatgaagctgagaccaagaaactttcg

SEQ ID NO: 44249 - DNA, 201 bp, Homo sapiens; identical to SEQ ID NO: 43999

SEQ ID NO: 44250 - DNA, 201 bp, Homo sapiens; identical to SEQ ID NO: 44032

SEQ ID NO: 44251 - DNA, 201 bp, Homo sapiens; identical to SEQ ID NO: 44052

SEQ ID NO: 44252 - DNA, 201 bp, Homo sapiens
tctaatctcccagccccgactctgccccgtcactgccactgctcctcattactcgctggggctgctgtcgcctccccgaagggtggccttgtccagatagyggcaaacctccctgccgtggatgagtcaggagcattttcttaagaggaacatcactggaaaacaaaatgagcggggacacagaaaccaacagcagtggct

SEQ ID NO: 44253 - DNA, 201 bp, Homo sapiens
tccatcaaggagtccagagcaggagccaggccaggcgggagggaaaggccctgggaggggctctctaatctcccagccccgactctgccccgtcactgccrctgctcctcattactcgctggggctgctgtcgcctccccgaagggtggccttgtccagatagcggcaaacctccctgccgtggatgagtcaggagcattt

SEQ ID NO: 44254 - DNA, 201 bp, Homo sapiens; identical to SEQ ID NO: 44053

SEQ ID NO: 44255 - DNA, 173 bp, Homo sapiens
ccttgtgcatttgggctgaagacaaagatgactgcaggagtgggcaggccggagtggggcgccctggcctgtscccaggaaggaggaggagtctgcagccctgtgggcttcaacatccatcaaggagtccagagcaggagccaggccaggcgggagggaaaggccctgggagg

SEQ ID NO: 44256 - DNA, 201 bp, Homo sapiens; identical to SEQ ID NO: 44054

SEQ ID NO: 44257 - DNA, 201 bp, Homo sapiens; identical to SEQ ID NO: 44034

SEQ ID NO: 44258 - DNA, 201 bp, Homo sapiens; identical to SEQ ID NO: 44055

SEQ ID NO: 44259 - DNA, 201 bp, Homo sapiens; identical to SEQ ID NO: 44035

SEQ ID NO: 44260 - DNA, 201 bp, Homo sapiens; identical to SEQ ID NO: 44036

SEQ ID NO: 44261 - DNA, 201 bp, Homo sapiens; identical to SEQ ID NO: 44056

SEQ ID NO: 44262 - DNA, 201 bp, Homo sapiens
caggagcattttcttaagaggaacatcactggaaaacaaaatgagcggggacacagaaaccaacagcagtggctgcatttgtggtacaggctcctcttccrgagctcgctgatgcccacctcagacaggcctgaccacggcacggctggtgggatttgccagtcacctcaaccagccagttccaccctcagcttctctcag

SEQ ID NO: 44263 - DNA, 201 bp, Homo sapiens; identical to SEQ ID NO: 44039

SEQ ID NO: 44264 - DNA, 201 bp, Homo sapiens; identical to SEQ ID NO: 44075

SEQ ID NO: 44265 - DNA, 201 bp, Homo sapiens; identical to SEQ ID NO: 44006

SEQ ID NO: 44266 - DNA, 201 bp, Homo sapiens; identical to SEQ ID NO: 44100

SEQ ID NO: 44267 - DNA, 201 bp, Homo sapiens
tgcccttcacggaaatgaagctgagaccaagaaactttcgctccccagcggggggaggctgagctgctgcccacctctctcgcaccccagtatgactgccragcactgaggggtcgccccgagagaagagccagggtccttcaccacccagccgctggaggaagccttctctgccagcgatctcgcagcactgtgtttaca

SEQ ID NO: 44268 - DNA, 201 bp, Homo sapiens; identical to SEQ ID NO: 44060

SEQ ID NO: 44269 - DNA, 134 bp, Homo sapiens
gaagagccagggtccttcaccacccagccgctggaggaagccttctctgccagcgatctcgcagcactgtgtttacaggggggaggggaggggttcgtacrggagcaataaaggagaaactgaggtacccggct

SEQ ID NO: 44270 - DNA, 201 bp, Homo sapiens; identical to SEQ ID NO: 44061

SEQ ID NO: 44271 - DNA, 201 bp, Homo sapiens; identical to SEQ ID NO: 44010

SEQ ID NO: 44272 - DNA, 201 bp, Homo sapiens; identical to SEQ ID NO: 44011

SEQ ID NO: 44273 - DNA, 201 bp, Homo sapiens; identical to SEQ ID NO: 44065

SEQ ID NO: 44274 - DNA, 201 bp, Homo sapiens; identical to SEQ ID NO: 44248

SEQ ID NO: 44275 - DNA, 201 bp, Homo sapiens; identical to SEQ ID NO: 43999

SEQ ID NO: 44276 - DNA, 201 bp, Homo sapiens; identical to SEQ ID NO: 44068

SEQ ID NO: 44277 - DNA, 201 bp, Homo sapiens; identical to SEQ ID NO: 44000

SEQ ID NO: 44278 - DNA, 201 bp, Homo sapiens; identical to SEQ ID NO: 44001

SEQ ID NO: 44279 - DNA, 201 bp, Homo sapiens; identical to SEQ ID NO: 44071

SEQ ID NO: 44280 - DNA, 201 bp, Homo sapiens; identical to SEQ ID NO: 44002

SEQ ID NO: 44281 - DNA, 201 bp, Homo sapiens; identical to SEQ ID NO: 44003

SEQ ID NO: 44282 - DNA, 201 bp, Homo sapiens; identical to SEQ ID NO: 44004

SEQ ID NO: 44283 - DNA, 201 bp, Homo sapiens; identical to SEQ ID NO: 44075

SEQ ID NO: 44284 - DNA, 201 bp, Homo sapiens; identical to SEQ ID NO: 44006

SEQ ID NO: 44285 - DNA, 201 bp, Homo sapiens; identical to SEQ ID NO: 44267

SEQ ID NO: 44286 - DNA, 201 bp, Homo sapiens; identical to SEQ ID NO: 44008

SEQ ID NO: 44287 - DNA, 201 bp, Homo sapiens; identical to SEQ ID NO: 44079

SEQ ID NO: 44288 - DNA, 201 bp, Homo sapiens; identical to SEQ ID NO: 44010

SEQ ID NO: 44289 - DNA, 201 bp, Homo sapiens; identical to SEQ ID NO: 44168

SEQ ID NO: 44290 - DNA, 201 bp, Homo sapiens; identical to SEQ ID NO: 44081

SEQ ID NO: 44291 - DNA, 201 bp, Homo sapiens; identical to SEQ ID NO: 44011

SEQ ID NO: 44292 - DNA, 201 bp, Homo sapiens; identical to SEQ ID NO: 44083

SEQ ID NO: 44293 - DNA, 201 bp, Homo sapiens; identical to SEQ ID NO: 44012

SEQ ID NO: 44294 - DNA, 201 bp, Homo sapiens; identical to SEQ ID NO: 44013

SEQ ID NO: 44295 - DNA, 201 bp, Homo sapiens; identical to SEQ ID NO: 44086

SEQ ID NO: 44296 - DNA, 201 bp, Homo sapiens; identical to SEQ ID NO: 44015

SEQ ID NO: 44297 - DNA, 201 bp, Homo sapiens; identical to SEQ ID NO: 44016

SEQ ID NO: 44298 - DNA, 201 bp, Homo sapiens; identical to SEQ ID NO: 44017

SEQ ID NO: 44299 - DNA, 201 bp, Homo sapiens; identical to SEQ ID NO: 44018

SEQ ID NO: 44300 - DNA, 201 bp, Homo sapiens; identical to SEQ ID NO: 44019

SEQ ID NO: 44301 - DNA, 201 bp, Homo sapiens; identical to SEQ ID NO: 44180

SEQ ID NO: 44302 - DNA, 201 bp, Homo sapiens; identical to SEQ ID NO: 44020

SEQ ID NO: 44303 - DNA, 201 bp, Homo sapiens; identical to SEQ ID NO: 44021

SEQ ID NO: 44304 - DNA, 201 bp, Homo sapiens; identical to SEQ ID NO: 44022

SEQ ID NO: 44305 - DNA, 201 bp, Homo sapiens; identical to SEQ ID NO: 44184

SEQ ID NO: 44306 - DNA, 201 bp, Homo sapiens; identical to SEQ ID NO: 44095

SEQ ID NO: 44307 - DNA, 201 bp, Homo sapiens; identical to SEQ ID NO: 44096

SEQ ID NO: 44308 - DNA, 201 bp, Homo sapiens; identical to SEQ ID NO: 44187

SEQ ID NO: 44309 - DNA, 201 bp, Homo sapiens; identical to SEQ ID NO: 44098

SEQ ID NO: 44310 - DNA, 201 bp, Homo sapiens; identical to SEQ ID NO: 44099

SEQ ID NO: 44311 - DNA, 201 bp, Homo sapiens; identical to SEQ ID NO: 44190

SEQ ID NO: 44312 - DNA, 201 bp, Homo sapiens; identical to SEQ ID NO: 44100

SEQ ID NO: 44313 - DNA, 201 bp, Homo sapiens; identical to SEQ ID NO: 44192

SEQ ID NO: 44314 - DNA, 201 bp, Homo sapiens; identical to SEQ ID NO: 44024

SEQ ID NO: 44315 - DNA, 201 bp, Homo sapiens; identical to SEQ ID NO: 44194

SEQ ID NO: 44316 - DNA, 201 bp, Homo sapiens; identical to SEQ ID NO: 44102

SEQ ID NO: 44317 - DNA, 201 bp, Homo sapiens; identical to SEQ ID NO: 44025

SEQ ID NO: 44318 - DNA, 201 bp, Homo sapiens; identical to SEQ ID NO: 44197

SEQ ID NO: 44319 - DNA, 201 bp, Homo sapiens; identical to SEQ ID NO: 44026

SEQ ID NO: 44320 - DNA, 201 bp, Homo sapiens; identical to SEQ ID NO: 44027

SEQ ID NO: 44321 - DNA, 201 bp, Homo sapiens; identical to SEQ ID NO: 44107

SEQ ID NO: 44322 - DNA, 201 bp, Homo sapiens; identical to SEQ ID NO: 44108

SEQ ID NO: 44323 - DNA, 201 bp, Homo sapiens; identical to SEQ ID NO: 44028

SEQ ID NO: 44324 - DNA, 201 bp, Homo sapiens; identical to SEQ ID NO: 44110

SEQ ID NO: 44325 - DNA, 201 bp, Homo sapiens; identical to SEQ ID NO: 44031

SEQ ID NO: 44326 - DNA, 201 bp, Homo sapiens; identical to SEQ ID NO: 44030

SEQ ID NO: 44327 - DNA, 201 bp, Homo sapiens; identical to SEQ ID NO: 44032

SEQ ID NO: 44328 - DNA, 201 bp, Homo sapiens; identical to SEQ ID NO: 44114

SEQ ID NO: 44329 - DNA, 201 bp, Homo sapiens; identical to SEQ ID NO: 44034

SEQ ID NO: 44330 - DNA, 201 bp, Homo sapiens; identical to SEQ ID NO: 44116

SEQ ID NO: 44331 - DNA, 201 bp, Homo sapiens; identical to SEQ ID NO: 44117

SEQ ID NO: 44332 - DNA, 201 bp, Homo sapiens; identical to SEQ ID NO: 44035

SEQ ID NO: 44333 - DNA, 201 bp, Homo sapiens; identical to SEQ ID NO: 44119

SEQ ID NO: 44334 - DNA, 201 bp, Homo sapiens; identical to SEQ ID NO: 44120

SEQ ID NO: 44335 - DNA, 201 bp, Homo sapiens; identical to SEQ ID NO: 44037

SEQ ID NO: 44336 - DNA, 201 bp, Homo sapiens; identical to SEQ ID NO: 44038

SEQ ID NO: 44337 - DNA, 201 bp, Homo sapiens; identical to SEQ ID NO: 44039

SEQ ID NO: 44338 - DNA, 201 bp, Homo sapiens; identical to SEQ ID NO: 44040

SEQ ID NO: 44339 - DNA, 201 bp, Homo sapiens; identical to SEQ ID NO: 44041

SEQ ID NO: 44340 - DNA, 201 bp, Homo sapiens; identical to SEQ ID NO: 44042

SEQ ID NO: 44341 - DNA, 134 bp, Homo sapiens; identical to SEQ ID NO: 44269

SEQ ID NO: 44342 - DNA, 201 bp, Homo sapiens; identical to SEQ ID NO: 44044

SEQ ID NO: 44343 - DNA, 201 bp, Homo sapiens; identical to SEQ ID NO: 44129

SEQ ID NO: 44344 - DNA, 201 bp, Homo sapiens; identical to SEQ ID NO: 44045

SEQ ID NO: 44345 - DNA, 201 bp, Homo sapiens; identical to SEQ ID NO: 44131

SEQ ID NO: 44346 - DNA, 201 bp, Homo sapiens; identical to SEQ ID NO: 44046

SEQ ID NO: 44347 - DNA, 201 bp, Homo sapiens; identical to SEQ ID NO: 44226

SEQ ID NO: 44348 - DNA, 201 bp, Homo sapiens; identical to SEQ ID NO: 44133

SEQ ID NO: 44349 - DNA, 201 bp, Homo sapiens; identical to SEQ ID NO: 44048

SEQ ID NO: 44350 - DNA, 201 bp, Homo sapiens; identical to SEQ ID NO: 44049

SEQ ID NO: 44351 - DNA, 201 bp, Homo sapiens; identical to SEQ ID NO: 44050

SEQ ID NO: 44352 - DNA, 201 bp, Homo sapiens; identical to SEQ ID NO: 44051

SEQ ID NO: 44353 - DNA, 201 bp, Homo sapiens; identical to SEQ ID NO: 44138

SEQ ID NO: 44354 - DNA, 201 bp, Homo sapiens; identical to SEQ ID NO: 44139

SEQ ID NO: 44355 - DNA, 201 bp, Homo sapiens; identical to SEQ ID NO: 44140

SEQ ID NO: 44356 - DNA, 201 bp, Homo sapiens; identical to SEQ ID NO: 44056

SEQ ID NO: 44357 - DNA, 201 bp, Homo sapiens; identical to SEQ ID NO: 44142

SEQ ID NO: 44358 - DNA, 201 bp, Homo sapiens; identical to SEQ ID NO: 44058

SEQ ID NO: 44359 - DNA, 201 bp, Homo sapiens; identical to SEQ ID NO: 44059

SEQ ID NO: 44360 - DNA, 201 bp, Homo sapiens; identical to SEQ ID NO: 44060

SEQ ID NO: 44361 - DNA, 201 bp, Homo sapiens; identical to SEQ ID NO: 44061

SEQ ID NO: 44362 - DNA, 201 bp, Homo sapiens; identical to SEQ ID NO: 44241

SEQ ID NO: 44363 - DNA, 201 bp, Homo sapiens; identical to SEQ ID NO: 44242

SEQ ID NO: 44364 - DNA, 201 bp, Homo sapiens; identical to SEQ ID NO: 44063

SEQ ID NO: 44365 - DNA, 201 bp, Homo sapiens; identical to SEQ ID NO: 44062

SEQ ID NO: 44366 - DNA, 201 bp, Homo sapiens; identical to SEQ ID NO: 44064

SEQ ID NO: 44367 - DNA, 201 bp, Homo sapiens; identical to SEQ ID NO: 44012

SEQ ID NO: 44368 - DNA, 201 bp, Homo sapiens; identical to SEQ ID NO: 44247

SEQ ID NO: 44369 - DNA, 201 bp, Homo sapiens; identical to SEQ ID NO: 44248

SEQ ID NO: 44370 - DNA, 201 bp, Homo sapiens; identical to SEQ ID NO: 43999

SEQ ID NO: 44371 - DNA, 201 bp, Homo sapiens; identical to SEQ ID NO: 44032

SEQ ID NO: 44372 - DNA, 201 bp, Homo sapiens; identical to SEQ ID NO: 44252

SEQ ID NO: 44373 - DNA, 201 bp, Homo sapiens; identical to SEQ ID NO: 44253

SEQ ID NO: 44374 - DNA, 173 bp, Homo sapiens; identical to SEQ ID NO: 44255

SEQ ID NO: 44375 - DNA, 201 bp, Homo sapiens; identical to SEQ ID NO: 44139

SEQ ID NO: 44376 - DNA, 201 bp, Homo sapiens; identical to SEQ ID NO: 44034

SEQ ID NO: 44377 - DNA, 201 bp, Homo sapiens; identical to SEQ ID NO: 44035

SEQ ID NO: 44378 - DNA, 201 bp, Homo sapiens; identical to SEQ ID NO: 44140

SEQ ID NO: 44379 - DNA, 201 bp, Homo sapiens; identical to SEQ ID NO: 44119

SEQ ID NO: 44380 - DNA, 201 bp, Homo sapiens; identical to SEQ ID NO: 44056

SEQ ID NO: 44381 - DNA, 201 bp, Homo sapiens; identical to SEQ ID NO: 44262

SEQ ID NO: 44382 - DNA, 201 bp, Homo sapiens; identical to SEQ ID NO: 44039

SEQ ID NO: 44383 - DNA, 201 bp, Homo sapiens; identical to SEQ ID NO: 44006

SEQ ID NO: 44384 - DNA, 201 bp, Homo sapiens; identical to SEQ ID NO: 44075

SEQ ID NO: 44385 - DNA, 201 bp, Homo sapiens; identical to SEQ ID NO: 44100

SEQ ID NO: 44386 - DNA, 201 bp, Homo sapiens; identical to SEQ ID NO: 44267

SEQ ID NO: 44387 - DNA, 201 bp, Homo sapiens; identical to SEQ ID NO: 44060

SEQ ID NO: 44388 - DNA, 134 bp, Homo sapiens; identical to SEQ ID NO: 44269

SEQ ID NO: 44389 - DNA, 201 bp, Homo sapiens; identical to SEQ ID NO: 44010

SEQ ID NO: 44390 - DNA, 201 bp, Homo sapiens; identical to SEQ ID NO: 44061

SEQ ID NO: 44391 - DNA, 201 bp, Homo sapiens; identical to SEQ ID NO: 44011

SEQ ID NO: 44392 - DNA, 201 bp, Homo sapiens; identical to SEQ ID NO: 44065

SEQ ID NO: 44393 - DNA, 201 bp, Homo sapiens; identical to SEQ ID NO: 44248

SEQ ID NO: 44394 - DNA, 201 bp, Homo sapiens; identical to SEQ ID NO: 43999

SEQ ID NO: 44395 - DNA, 201 bp, Homo sapiens; identical to SEQ ID NO: 44000

SEQ ID NO: 44396 - DNA, 201 bp, Homo sapiens; identical to SEQ ID NO: 44001

SEQ ID NO: 44397 - DNA, 201 bp, Homo sapiens
catctcggccgtcgccattactgcgcctgagccccacctcggggagttgacagtggaggaggccacgtcacacaccctgcatctctcctggatggtgactragggagaatttgactccttcgaaatccagtacacagatagagacgggcaactccaaatggtccgcataggaggtgaccggaatgacatcaccctctctgg

SEQ ID NO: 44398 - DNA, 201 bp, Homo sapiens; identical to SEQ ID NO: 44002

SEQ ID NO: 44399 - DNA, 201 bp, Homo sapiens; identical to SEQ ID NO: 44003

SEQ ID NO: 44400 - DNA, 201 bp, Homo sapiens; identical to SEQ ID NO: 44004

SEQ ID NO: 44401 - DNA, 201 bp, Homo sapiens; identical to SEQ ID NO: 44075

SEQ ID NO: 44402 - DNA, 201 bp, Homo sapiens; identical to SEQ ID NO: 44006

SEQ ID NO: 44403 - DNA, 201 bp, Homo sapiens; identical to SEQ ID NO: 44267

SEQ ID NO: 44404 - DNA, 201 bp, Homo sapiens; identical to SEQ ID NO: 44008

SEQ ID NO: 44405 - DNA, 201 bp, Homo sapiens
cgggacacgaggatggggctgcagaggaagagacccccagccccacagaacccagcatggaggccccggagccccctgaggagccgctcctgggggagctracagtgacaggatcctcccctgactcgctgagcctctcctggaccgtcccccagggccgcttcgactccttcaccgtgcagtacaaggacagggacgggc

SEQ ID NO: 44406 - DNA, 201 bp, Homo sapiens; identical to SEQ ID NO: 44010

SEQ ID NO: 44407 - DNA, 201 bp, Homo sapiens; identical to SEQ ID NO: 44168

SEQ ID NO: 44408 - DNA, 201 bp, Homo sapiens; identical to SEQ ID NO: 44011

SEQ ID NO: 44409 - DNA, 201 bp, Homo sapiens
gagcggggccgggcagtcagctacccagctgctgtcagggccaacacaggaccccagcgctcggccgtcatcacctccctggatcctggccgcaagtacaratttgtcctgtatgggtttgttggcaagaagaggcatggtccgctggtggctgaagccaagatcttgcctcagagtgacccaagtccagggactccaccc

SEQ ID NO: 44410 - DNA, 201 bp, Homo sapiens; identical to SEQ ID NO: 44012

SEQ ID NO: 44411 - DNA, 201 bp, Homo sapiens; identical to SEQ ID NO: 44013

SEQ ID NO: 44412 - DNA, 201 bp, Homo sapiens
ctgcgcctagggcagatgacagtgagagacatcacctccgactccctcagcctctcctggacagtccccgagggccagtttgaccatttcttggtccagtwtaagaatggggacgggcagcccaaggcggtgcgggtgccgggacacgaggatggggctgcagaggaagagacccccagccccacagaacccagcatggag

SEQ ID NO: 44413 - DNA, 201 bp, Homo sapiens; identical to SEQ ID NO: 44015

SEQ ID NO: 44414 - DNA, 201 bp, Homo sapiens; identical to SEQ ID NO: 44016

SEQ ID NO: 44415 - DNA, 201 bp, Homo sapiens
tgtgggcccggtgtccaccgtgggtgtgacagctccagaggatgaagcagagaccacccaagcagtgcccaccacaacccctgagccccccaacaagcctmgcctcggggagctgaccgtgacagatgccacccctgactccctcagcctgtcctggatggtccccgagggccagtttgaccacttcctggtccagtacag

SEQ ID NO: 44416 - DNA, 201 bp, Homo sapiens; identical to SEQ ID NO: 44018

SEQ ID NO: 44417 - DNA, 201 bp, Homo sapiens; identical to SEQ ID NO: 44180

SEQ ID NO: 44418 - DNA, 201 bp, Homo sapiens; identical to SEQ ID NO: 44022

SEQ ID NO: 44419 - DNA, 201 bp, Homo sapiens; identical to SEQ ID NO: 44020

SEQ ID NO: 44420 - DNA, 201 bp, Homo sapiens; identical to SEQ ID NO: 44021

SEQ ID NO: 44421 - DNA, 201 bp, Homo sapiens; identical to SEQ ID NO: 44184

SEQ ID NO: 44422 - DNA, 201 bp, Homo sapiens; identical to SEQ ID NO: 44095

SEQ ID NO: 44423 - DNA, 201 bp, Homo sapiens
gcctggaatccgaccacagatacctggtgaccctgtatggtttcagtgatgggaagcatgtaggtcctgtccatgtcgaggccctgacagaacctcccacygcaacccccgagccccccatcaagcctcgcctgggggagctgaccgtgacagatgccacccctgactccctcagcctgtcctggacagttcccgagggac

SEQ ID NO: 44424 - DNA, 201 bp, Homo sapiens; identical to SEQ ID NO: 44189

SEQ ID NO: 44425 - DNA, 201 bp, Homo sapiens; identical to SEQ ID NO: 44100

SEQ ID NO: 44426 - DNA, 201 bp, Homo sapiens; identical to SEQ ID NO: 44190

SEQ ID NO: 44427 - DNA, 201 bp, Homo sapiens
cgggctacagcggcgaggactgcggtgtgcgcagctgtcctggggactgtcgtggccggggccgctgtgagagtggccgctgcatgtgttggccggggtacacaggccgggactgcggcacgcgcgcctgtcctggcgactgtcgcgggcgcgggcgctgcgtggatggccgctgcgtgtgcaacccgggcttcaccggtg

SEQ ID NO: 44428 - DNA, 201 bp, Homo sapiens; identical to SEQ ID NO: 44024

SEQ ID NO: 44429 - DNA, 201 bp, Homo sapiens; identical to SEQ ID NO: 44192

SEQ ID NO: 44430 - DNA, 201 bp, Homo sapiens; identical to SEQ ID NO: 44194

SEQ ID NO: 44431 - DNA, 201 bp, Homo sapiens; identical to SEQ ID NO: 44102

SEQ ID NO: 44432 - DNA, 201 bp, Homo sapiens; identical to SEQ ID NO: 44025

SEQ ID NO: 44433 - DNA, 201 bp, Homo sapiens
ccctgaagcagacgggacgctgctgactgacctgatgccaggcgtagaatatgtggtgactgtcacagcggagcggggccgggcagtcagctacccagctkctgtcagggccaacacaggaccccagcgctcggccgtcatcacctccctggatcctggccgcaagtacaaatttgtcctgtatgggtttgttggcaagaa

SEQ ID NO: 44434 - DNA, 201 bp, Homo sapiens; identical to SEQ ID NO: 44026

SEQ ID NO: 44435 - DNA, 201 bp, Homo sapiens; identical to SEQ ID NO: 44027

SEQ ID NO: 44436 - DNA, 201 bp, Homo sapiens; identical to SEQ ID NO: 44107

SEQ ID NO: 44437 - DNA, 201 bp, Homo sapiens
cagaacccagcatggaggccccggagcccgctgaggagccgctcctgggggagctaacagtgacaggatcctcccctgactcgctgagcctctcctggacygtcccccagggccgcttcgactccttcaccgtgcagtacaaggacagggacgggcggccccaggtggtgcgtgttgggggcgaggagacccccgaagagg

SEQ ID NO: 44438 - DNA, 201 bp, Homo sapiens; identical to SEQ ID NO: 44028

SEQ ID NO: 44439 - DNA, 201 bp, Homo sapiens
agatgacagtgagagacatcacctccgactccctcagcctctcctggacagtccccgagggccagtttgaccatttcttggtccagtttaagaatggggaygggcagcccaaggcggtgcgggtgccgggacacgaggatggggctgcagaggaagagacccccagccccacagaacccagcatggaggccccggagcccc

SEQ ID NO: 44440 - DNA, 201 bp, Homo sapiens; identical to SEQ ID NO: 44030

SEQ ID NO: 44441 - DNA, 201 bp, Homo sapiens
gcagcccaaggtggtgcgggtgccggggcacgaggacggggtcaccatctcaggcctggagccagaccacaagtacaagatgaacctgtacggcttccacrgtggccagcgcgtgggccccatctctgtcattggggtgacagctgcagaggaagaaactcccgcccccacagaacccagcacggaggccccggagccccc

SEQ ID NO: 44442 - DNA, 201 bp, Homo sapiens; identical to SEQ ID NO: 44032

SEQ ID NO: 44443 - DNA, 201 bp, Homo sapiens
ggcggccccgggcggtgcgtgttgggggcaaggagagtgaggtcaccgtgggaggcctagagcccgggcacaagtacaagatgcacctgtacggcctccaygaggggcagcgcgtgggcccggtgtccgccgtgggcgtgacagaggcctccaagcctcccctggagccacgcctaggggagctgacagtgacggatataa

SEQ ID NO: 44444 - DNA, 201 bp, Homo sapiens
aaggcggtgcgggtgccgggacacgaggatggggctgcagaggaagagacccccagccccacagaacccagcatggaggccccggagccccctgaggagcygctcctgggggagctaacagtgacaggatcctcccctgactcgctgagcctctcctggaccgtcccccagggccgcttcgactccttcaccgtgcagtac

SEQ ID NO: 44445 - DNA, 201 bp, Homo sapiens; identical to SEQ ID NO: 44034

SEQ ID NO: 44446 - DNA, 201 bp, Homo sapiens; identical to SEQ ID NO: 44117

SEQ ID NO: 44447 - DNA, 201 bp, Homo sapiens; identical to SEQ ID NO: 44035

SEQ ID NO: 44448 - DNA, 201 bp, Homo sapiens; identical to SEQ ID NO: 44119

SEQ ID NO: 44449 - DNA, 201 bp, Homo sapiens
tgaggagccgctcctgggggagctaacagtgacaggatcctcccctgactcgctgagcctctcctggaccgtcccccagggccgcttcgactccttcaccrtgcagtacaaggacagggacgggcggccccaggtggtgcgtgttgggggcgaggagacccccgaagaggagtcccctgatgctcctcttgcaaagctgcg

SEQ ID NO: 44450 - DNA, 201 bp, Homo sapiens; identical to SEQ ID NO: 44037

SEQ ID NO: 44451 - DNA, 201 bp, Homo sapiens
gggcgcaaatacaagatgcacctgtacggcctccacgaggggcggcgcgtgggcccggtgtccaccgtgggcgtgactgaaccaggcacagaggccccagrgccccccgaggagcctctcctgggggagctgacagtgacaggatcctcccctgactcgctgagcctttcctggaccgtcccccagggccgctttgactcc

SEQ ID NO: 44452 - DNA, 201 bp, Homo sapiens; identical to SEQ ID NO: 44039

SEQ ID NO: 44453 - DNA, 201 bp, Homo sapiens
tggtgcgtgttgggggcgaggagagcgaggtcaccgtggggggcctggagcctgggcgcaaatacaagatgcacctgtacggcctccacgaggggcggcgygtgggcccggtgtccaccgtgggcgtgactgaaccaggcacagaggccccagagccccccgaggagcctctcctgggggagctgacagtgacaggatcct

SEQ ID NO: 44454 - DNA, 201 bp, Homo sapiens; identical to SEQ ID NO: 44041

SEQ ID NO: 44455 - DNA, 134 bp, Homo sapiens; identical to SEQ ID NO: 44269

SEQ ID NO: 44456 - DNA, 201 bp, Homo sapiens
cccggtgtccaccgtgggtgtgacagctccagaggatgaagcagagaccacccaagcagtgcccaccacaacccctgagccccccaacaagcctcgcctcrgggagctgaccgtgacagatgccacccctgactccctcagcctgtcctggatggtccccgagggccagtttgaccacttcctggtccagtacaggaatgg

SEQ ID NO: 44457 - DNA, 201 bp, Homo sapiens; identical to SEQ ID NO: 44044

SEQ ID NO: 44458 - DNA, 201 bp, Homo sapiens; identical to SEQ ID NO: 44129

SEQ ID NO: 44459 - DNA, 201 bp, Homo sapiens; identical to SEQ ID NO: 44045

SEQ ID NO: 44460 - DNA, 201 bp, Homo sapiens
ttgggggcaaggagagtgaggtcaccgtgggaggcctagagcccgggcacaagtacaagatgcacctgtacggcctccacgaggggcagcgcgtgggcccrgtgtccgccgtgggcgtgacagaggcctccaagcctcccctggagccacgcctaggggagctgacagtgacggatataacccctgactctgtgggcctct

SEQ ID NO: 44461 - DNA, 201 bp, Homo sapiens; identical to SEQ ID NO: 44046

SEQ ID NO: 44462 - DNA, 201 bp, Homo sapiens; identical to SEQ ID NO: 44226

SEQ ID NO: 44463 - DNA, 201 bp, Homo sapiens; identical to SEQ ID NO: 44048

SEQ ID NO: 44464 - DNA, 201 bp, Homo sapiens; identical to SEQ ID NO: 44049

SEQ ID NO: 44465 - DNA, 201 bp, Homo sapiens
gagcgaggtcaccgtggggggcctggagcctgggcgcaaatacaagatgcacctgtacggcctccacgaggggcggcgcgtgggcccggtgtccaccgtgrgcgtgactgaaccaggcacagaggccccagagccccccgaggagcctctcctgggggagctgacagtgacaggatcctcccctgactcgctgagcctttc

SEQ ID NO: 44466 - DNA, 201 bp, Homo sapiens; identical to SEQ ID NO: 44051

SEQ ID NO: 44467 - DNA, 201 bp, Homo sapiens
gcagtgcctgttgcgggggatgagaatgaggttactgtccccggcctggatcccgaccggaagtataagatgaacctctacgggcttcgtggcaggcagcrtgtggggcccgagtctgtggtggccaagactggaggatgtggacgagacccccagccccacagaactgggcacggaggccccggagtcccccgaggagcc

SEQ ID NO: 44468 - DNA, 201 bp, Homo sapiens; identical to SEQ ID NO: 44139

SEQ ID NO: 44469 - DNA, 201 bp, Homo sapiens; identical to SEQ ID NO: 44140

SEQ ID NO: 44470 - DNA, 201 bp, Homo sapiens; identical to SEQ ID NO: 44056

SEQ ID NO: 44471 - DNA, 201 bp, Homo sapiens
acagggacgggcggccccaggtggtgcgtgttgggggcgaggagagcgaggtcaccgtggggggcctggagcctgggcgcaaatacaagatgcacctgtayggcctccacgaggggcggcgcgtgggcccggtgtccaccgtgggcgtgactgaaccaggcacagaggccccagagccccccgaggagcctctcctggggg

SEQ ID NO: 44472 - DNA, 201 bp, Homo sapiens; identical to SEQ ID NO: 44059

SEQ ID NO: 44473 - DNA, 201 bp, Homo sapiens; identical to SEQ ID NO: 44060

SEQ ID NO: 44474 - DNA, 201 bp, Homo sapiens; identical to SEQ ID NO: 44061

SEQ ID NO: 44475 - DNA, 201 bp, Homo sapiens; identical to SEQ ID NO: 44063

SEQ ID NO: 44476 - DNA, 201 bp, Homo sapiens; identical to SEQ ID NO: 44062

SEQ ID NO: 44477 - DNA, 201 bp, Homo sapiens; identical to SEQ ID NO: 44064

SEQ ID NO: 44478 - DNA, 201 bp, Homo sapiens; identical to SEQ ID NO: 44012

SEQ ID NO: 44479 - DNA, 201 bp, Homo sapiens; identical to SEQ ID NO: 44247

SEQ ID NO: 44480 - DNA, 201 bp, Homo sapiens; identical to SEQ ID NO: 43998

SEQ ID NO: 44481 - DNA, 201 bp, Homo sapiens; identical to SEQ ID NO: 43999

SEQ ID NO: 44482 - DNA, 201 bp, Homo sapiens; identical to SEQ ID NO: 44032

SEQ ID NO: 44483 - DNA, 201 bp, Homo sapiens; identical to SEQ ID NO: 44252

SEQ ID NO: 44484 - DNA, 201 bp, Homo sapiens; identical to SEQ ID NO: 44253

SEQ ID NO: 44485 - DNA, 201 bp, Homo sapiens; identical to SEQ ID NO: 44034

SEQ ID NO: 44486 - DNA, 173 bp, Homo sapiens; identical to SEQ ID NO: 44255

SEQ ID NO: 44487 - DNA, 201 bp, Homo sapiens; identical to SEQ ID NO: 44139

SEQ ID NO: 44488 - DNA, 201 bp, Homo sapiens; identical to SEQ ID NO: 44035

SEQ ID NO: 44489 - DNA, 201 bp, Homo sapiens; identical to SEQ ID NO: 44140

SEQ ID NO: 44490 - DNA, 201 bp, Homo sapiens; identical to SEQ ID NO: 44119

SEQ ID NO: 44491 - DNA, 201 bp, Homo sapiens; identical to SEQ ID NO: 44056

SEQ ID NO: 44492 - DNA, 201 bp, Homo sapiens; identical to SEQ ID NO: 44262

SEQ ID NO: 44493 - DNA, 201 bp, Homo sapiens; identical to SEQ ID NO: 44039

SEQ ID NO: 44494 - DNA, 201 bp, Homo sapiens; identical to SEQ ID NO: 44005

SEQ ID NO: 44495 - DNA, 201 bp, Homo sapiens; identical to SEQ ID NO: 44006

SEQ ID NO: 44496 - DNA, 201 bp, Homo sapiens; identical to SEQ ID NO: 44023

SEQ ID NO: 44497 - DNA, 201 bp, Homo sapiens; identical to SEQ ID NO: 44007

SEQ ID NO: 44498 - DNA, 132 bp, Homo sapiens; identical to SEQ ID NO: 44043

SEQ ID NO: 44499 - DNA, 201 bp, Homo sapiens; identical to SEQ ID NO: 44060

SEQ ID NO: 44500 - DNA, 201 bp, Homo sapiens; identical to SEQ ID NO: 44010

SEQ ID NO: 44501 - DNA, 201 bp, Homo sapiens; identical to SEQ ID NO: 44061

SEQ ID NO: 44502 - DNA, 201 bp, Homo sapiens; identical to SEQ ID NO: 44011

SEQ ID NO: 44503 - DNA, 147 bp, Homo sapiens
gccctgcgcccctcctccgccgccggctcccgggtgtggtggtcgcwccagctctctgctctcccagcgcagcgccgccgcccggcccctccagcttcccggaccatggccaacctggagcgcaccttcatcgccatcaagccggac

SEQ ID NO: 44504 - DNA, 201 bp, Homo sapiens
aaatcagcctatggtttaagcctgaagaactggttgactacaagtcttgtgctcatgactgggtctatgaataagaggtggacacaacagcagtctccttyagcacggcgtggtgtgtccctggacacagctcttcattccattgacttagaggcaacaggattgatcattcttttatagagcatatttgccaataaagct

SEQ ID NO: 44505 - DNA, 201 bp, Homo sapiens
agcctatggtttaagcctgaagaactggttgactacaagtcttgtgctcatgactgggtctatgaataagaggtggacacaacagcagtctccttcagcayggcgtggtgtgtccctggacacagctcttcattccattgacttagaggcaacaggattgatcattcttttatagagcatatttgccaataaagcttttgg

SEQ ID NO: 44506 - DNA, 201 bp, Homo sapiens
tgaagtacatgaactcagggccggttgtggccatggtctgggaggggctgaacgtggtgaagacaggccgagtgatgcttggggagaccaatccagcagaytcaaagccaggcaccattcgtggggacttctgcattcaggttggcaggaacatcattcatggcagtgattcagtaaaaagtgctgaaaaagaaatcagcc

SEQ ID NO: 44507 - DNA, 201 bp, Homo sapiens
tgattcagtaaaaagtgctgaaaaagaaatcagcctatggtttaagcctgaagaactggttgactacaagtcttgtgctcatgactgggtctatgaataaraggtggacacaacagcagtctccttcagcacggcgtggtgtgtccctggacacagctcttcattccattgacttagaggcaacaggattgatcattcttt

SEQ ID NO: 44508 - DNA, 142 bp, Homo sapiens
ggtggacacaacagcagtctccttcagcacggcgtggtgtgtccctggacacagctcttcattccattgacttagaggcaacaggattgatcattcttttrtagagcatatttgccaataaagcttttggaagccggacact

SEQ ID NO: 44509 - DNA, 201 bp, Homo sapiens; identical to SEQ ID NO: 44505

SEQ ID NO: 44510 - DNA, 201 bp, Homo sapiens; identical to SEQ ID NO: 44507

SEQ ID NO: 44511 - DNA, 142 bp, Homo sapiens; identical to SEQ ID NO: 44508

SEQ ID NO: 44512 - DNA, 201 bp, Homo sapiens
ggtgtgcaggggaggcagacacacaaacagaaaattggactacagtgctaagatgctgtaagaagaggttaactaaaggacaggaagatggggccaagagstggtgctactgtctactttagggatcgtctttcaaggcgaggggcctcctatctcaagctgtgatacaggaaccatggccaactgtgagcgtaccttcat

SEQ ID NO: 44513 - DNA, 201 bp, Homo sapiens
gtcccgggcgcgtttcgggtgctggcggctgcagccggagttcaaacctaagcagctggaagggccctgtggctaggtaccatagagtctctacacaggastaagtcagcctggtgtgcaggggaggcagacacacaaacagaaaattggactacagtgctaagatgctgtaagaagaggttaactaaaggacaggaagat

SEQ ID NO: 44514 - DNA, 201 bp, Homo sapiens; identical to SEQ ID NO: 44504

SEQ ID NO: 44515 - DNA, 201 bp, Homo sapiens
cgggcgcgtttcgggtgctggcggctgcagccggagttcaaacctaagcagctggaagggccctgtggctaggtaccatagagtctctacacaggactaartcagcctggtgtgcaggggaggcagacacacaaacagaaaattggactacagtgctaagatgctgtaagaagaggttaactaaaggacaggaagatgggg

SEQ ID NO: 44516 - DNA, 201 bp, Homo sapiens; identical to SEQ ID NO: 44506

SEQ ID NO: 44517 - DNA, 201 bp, Homo sapiens
tcaaacctaagcagctggaagggccctgtggctaggtaccatagagtctctacacaggactaagtcagcctggtgtgcaggggaggcagacacacaaacasaaaattggactacagtgctaagatgctgtaagaagaggttaactaaaggacaggaagatggggccaagagatggtgctactgtctactttagggatcgtc

SEQ ID NO: 44518 - DNA, 147 bp, Homo sapiens; identical to SEQ ID NO: 44503

SEQ ID NO: 44519 - DNA, 201 bp, Homo sapiens; identical to SEQ ID NO: 44504

SEQ ID NO: 44520 - DNA, 201 bp, Homo sapiens; identical to SEQ ID NO: 44505

SEQ ID NO: 44521 - DNA, 201 bp, Homo sapiens
tgaagtacatgaactcagggccggttgtggccatggtctgggaggggctgaacgtggtgaagacaggccgagtgatgcttggggagaccaatccagcagaytcaaagccaggcaccattcgtggggacttctgcattcaggttggcaggtaagtccggggacaggagggtggatgacttttatgcaacaccatttaaagca

SEQ ID NO: 44522 - DNA, 201 bp, Homo sapiens; identical to SEQ ID NO: 44507

SEQ ID NO: 44523 - DNA, 137 bp, Homo sapiens
ggtggacacaacagcagtctccttcagcacggcgtggtgtgtccctggacacagctcttcattccattgacttagaggcaacaggattgatcattcttttrtagagcatatttgccaataaagcttttggaagccgg

SEQ ID NO: 44524 - DNA, 201 bp, Homo sapiens; identical to SEQ ID NO: 44504

SEQ ID NO: 44525 - DNA, 201 bp, Homo sapiens; identical to SEQ ID NO: 44505

SEQ ID NO: 44526 - DNA, 201 bp, Homo sapiens; identical to SEQ ID NO: 44506

SEQ ID NO: 44527 - DNA, 201 bp, Homo sapiens; identical to SEQ ID NO: 44507

SEQ ID NO: 44528 - DNA, 142 bp, Homo sapiens; identical to SEQ ID NO: 44508

SEQ ID NO: 44529 - DNA, 147 bp, Homo sapiens; identical to SEQ ID NO: 44503

SEQ ID NO: 44530 - DNA, 201 bp, Homo sapiens; identical to SEQ ID NO: 44504

SEQ ID NO: 44531 - DNA, 201 bp, Homo sapiens; identical to SEQ ID NO: 44505

SEQ ID NO: 44532 - DNA, 201 bp, Homo sapiens; identical to SEQ ID NO: 44507

SEQ ID NO: 44533 - DNA, 142 bp, Homo sapiens; identical to SEQ ID NO: 44508

SEQ ID NO: 44534 - DNA, 201 bp, Homo sapiens
gggccgagtcatgctcggggagaccaaccctgcagactccaagcctgggaccatccgtggagacttctgcatacaagttggcaggaacattatacatggcrgtgattctgtggagagtgcagagaaggagatcggcttgtggtttcaccctgaggaactggtagattacacgagctgtgctcagaactggatctatgaatg

SEQ ID NO: 44535 - DNA, 201 bp, Homo sapiens
cttcatattgttgcattgcttttttttccttcttttcatgtacactgaataacctgacctaatagagagtgtaaatactataaaaatgatttattttgagrtctcacatacacacaggcattctttgcctgcccttcttaacccccgcatcccttccactcttggcactgagctattcaacaggcatctatggagcatgtg

SEQ ID NO: 44536 - DNA, 201 bp, Homo sapiens
gctgtgagttctccctgtacagtgttaccatccccgaccatctgattaaaatgcttcctcccagcataggattcattgagttggttacttcatattgttgyattgcttttttttccttcttttcatgtacactgaataacctgacctaatagagagtgtaaatactataaaaatgatttattttgaggtctcacatacaca

SEQ ID NO: 44537 - DNA, 118 bp, Homo sapiens
cagaaatgaaagaaaacatgagggctgggtgtgctggcttgtgcttgtgataccagctacttgggaggctgagatgggagaccagcctgggtaacatagcragaccctgtctcactaa

SEQ ID NO: 44538 - DNA, 125 bp, Homo sapiens
gattcatcagaaatgaaagaaaacatgagggctgggtgtgctggcttgtgcttgtgataccagctacttgggaggctgagatgggagaccagcctgggtarcatagcaagaccctgtctcactaa

SEQ ID NO: 44539 - DNA, 201 bp, Homo sapiens
gagcacagagccgggataagcagatagaagaaaggatgctgtctcacaggcaagatgacaacaacaggcatgcaaccaggcaccaggcaccaacggagagrcagcttcgatataaggaaaaagtggctgaactcaggaagaaaagaaattctggactgagcaaagaacagaaagagaaatatatggaacacagacagacct

SEQ ID NO: 44540 - DNA, 201 bp, Homo sapiens
tagctgtgtagatttatgtgagggcttgtaaaactctggtcttgtaaactagtcttaagcgcttttaatatggagacagatgagagcccctctccgctccygtgtgggcccgcaggagaagcggtgatggagagccgagctcgccccttccaagcgctgccccgtgagcagtctccaccacctcccctgcaaacgtccagt

SEQ ID NO: 44541 - DNA, 201 bp, Homo sapiens
ttttttacaaagattttttgcagtcgagtccatatgtccacccattgatttttaaagcttttgtgatattttagcattttgaaagactttcacagtgagartagaaggtagatttggaatcatgcattttagcaagtggacttgttgaaacaggaagcaagggccttcagtgtagcccattcttgatccagagctgttgcc

SEQ ID NO: 44542 - DNA, 201 bp, Homo sapiens
atgaagaaggagcaggcgggttcacggctaaagcaatcgttcagagagacagagtggatgaagaggccttgaatttcccctacgaggatgactttgacaaygatgtggatgctctgctggaagaaggcctttgtgcccccaaaaagaggcgaacagaggaaaaatatggcggagacagcgaccatccgtccgatggagaga

SEQ ID NO: 44543 - DNA, 201 bp, Homo sapiens
tctggaactgcaagcagcaaaaaacttgcgaagaataaagctgcccgagctacactggaaatcctcatccctgactttgttaaacagacctctgaagagargcccaaagacagtgaagaactcgagtattttaaccacatcagcatcgaggactcgcgggtctacgagctgaccagcaaggctgggctgttgtctccatat

SEQ ID NO: 44544 - DNA, 201 bp, Homo sapiens
gagggaggtggcacgggccagggcgcgggggccgccagccgcacttctgaggagaccagcagtcatgcatcgtgcaccacagtgtcaggcctccaacccaygctccttccctgtggccaacctgtgggcccggccttagggtggaggctttagtgtacagggacagccatggccacacagcacacatgtggagcagcggct

SEQ ID NO: 44545 - DNA, 201 bp, Homo sapiens
tcagcggacttgtgcatgttagctgtgtagatttatgtgagggcttgtaaaactctggtcttgtaaactagtcttaagcgcttttaatatggagacagatkagagcccctctccgctcccgtgtgggcccgcaggagaagcggtgatggagagccgagctcgccccttccaagcgctgccccgtgagcagtctccaccacc

SEQ ID NO: 44546 - DNA, 170 bp, Homo sapiens
cccccccccccccccacccgtctgccaagcatgggtatgaatcgtgcacacagccatgcttcaaggccggggcaggggagcctgtgctgatgccatccagrgcactgggctgtgcctggaaggcgagccttgattgtctgaacacataaagcaaactgtccagaagggaa

SEQ ID NO: 44547 - DNA, 201 bp, Homo sapiens
aggaaaagagagtggagtatgcagtgctcgatgagttagaagattttactgacaatttggagctagatgaagaaggagcaggcgggttcacggctaaagcratcgttcagagagacagagtggatgaagaggccttgaatttcccctacgaggatgactttgacaacgatgtggatgctctgctggaagaaggcctttgtg

SEQ ID NO: 44548 - DNA, 201 bp, Homo sapiens
tcgagtccatatgtccacccattgatttttaaagcttttgtgatattttagcattttgaaagactttcacagtgagagtagaaggtagatttggaatcatrcattttagcaagtggacttgttgaaacaggaagcaagggccttcagtgtagcccattcttgatccagagctgttgcctgtgacagcggtttctctggatg

SEQ ID NO: 44549 - DNA, 201 bp, Homo sapiens
ttttctgtcaggaaaacaatgttggcctgtgggccgcccacaacatatccttccctcactacctgtgtgaccaaggttggcttctgttgacctttaaaaawgaaaccctcaactcaaattgctataattagacacttgcttctgtcttgcctcctgtctgcagctgtgaatagtcatttgactgtgactgttgcccttagc

SEQ ID NO: 44550 - DNA, 201 bp, Homo sapiens
tgagccgatctgcagagctggagtttcccctggatgagcctgactctatgggtgctgacccggggcccccggacgagaaagacccactaggggctgaggcmgcccctggggccctggggcaggtgaaggccaaagtcgaggtgtgcaaagatgaatccgttgatctcgaggaatttcgaagctacctggagaagcgttttg

SEQ ID NO: 44551 - DNA, 201 bp, Homo sapiens
gcttgtggtgcgccatctgaagcaagagtccagcgttctgccgtgtctgtcccccaccatgccccctacaggcggtactgatggcgcttttttttttttttctgtcaggaaaacaatgttggcctgtgggccgcccacaacatatccttccctcactacctgtgtgaccaaggttggcttctgttgacctttaaaaaagaa

SEQ ID NO: 44552 - DNA, 201 bp, Homo sapiens
agagcgcgacgtgcgggcggagtgcggtctgctccttagccctgtcagtggggacgtgcatgcttgtccctttggcgggagtgttggtgacggggtaggcrtagggggtgagagtgctgataagaaggatgaggagaatgagctggatcaggaaaagagagtggagtatgcagtgctcgatgagttagaagattttactga

SEQ ID NO: 44553 - DNA, 201 bp, Homo sapiens
cctaaaggttggggagcctcgctgtgtcttgctgttcccaggcaccaccacagcaggtgctgccatactcttgtggtctctgtgcgccccccccccccccmacccgtctgccaagcatgggtatgaatcgtgcacacagccatgcttcaaggccggggcaggggagcctgtgctgatgccatccagggcactgggctgtgc

SEQ ID NO: 44554 - DNA, 201 bp, Homo sapiens
tgtgatattttagcattttgaaagactttcacagtgagagtagaaggtagatttggaatcatgcattttagcaagtggacttgttgaaacaggaagcaagrgccttcagtgtagcccattcttgatccagagctgttgcctgtgacagcggtttctctggatgtcaaaggcagctgcctggtgcccagcttgcttctcgac

SEQ ID NO: 44555 - DNA, 201 bp, Homo sapiens
cctgtgcagagtgccgtgtgcttgtggtgcgccatctgaagcaagagtccagcgttctgccgtgtctgtcccccaccatgccccctacaggcggtactgayggcgcttttttttttttttctgtcaggaaaacaatgttggcctgtgggccgcccacaacatatccttccctcactacctgtgtgaccaaggttggcttct

SEQ ID NO: 44556 - DNA, 201 bp, Homo sapiens
ccctctccagtctggacacgatgccagcaaggatgacgtcctgccacctcctggagttaccctggcctcctagggtccctttttctgatgaagtcttaatkccctaaaagcgcctctttggacactgaggccctctctgcctttcctggcctccggcaacagttttttacaaagattttttgcagtcgagtccatatgtcc

SEQ ID NO: 44557 - DNA, 201 bp, Homo sapiens
ccctaaaggttggggagcctcgctgtgtcttgctgttcccaggcaccaccacagcaggtgctgccatactcttgtggtctctgtgcgcccccccccccccccacccgtctgccaagcatgggtatgaatcgtgcacacagccatgcttcaaggccggggcaggggagcctgtgctgatgccatccagggcactgggctgtg

SEQ ID NO: 44558 - DNA, 201 bp, Homo sapiens
cattcttgatccagagctgttgcctgtgacagcggtttctctggatgtcaaaggcagctgcctggtgcccagcttgcttctcgactggtggcccctatgggtgggtgtgcgatggaaatgtgttcctgccggagtctgaggcaccagggtgtgctcaaaggctggccctggtggtggactggcacctgtgcagagtgccgt

SEQ ID NO: 44559 - DNA, 201 bp, Homo sapiens; identical to SEQ ID NO: 44540

SEQ ID NO: 44560 - DNA, 201 bp, Homo sapiens; identical to SEQ ID NO: 44541

SEQ ID NO: 44561 - DNA, 201 bp, Homo sapiens; identical to SEQ ID NO: 44542

SEQ ID NO: 44562 - DNA, 201 bp, Homo sapiens; identical to SEQ ID NO: 44543

SEQ ID NO: 44563 - DNA, 201 bp, Homo sapiens; identical to SEQ ID NO: 44544

SEQ ID NO: 44564 - DNA, 201 bp, Homo sapiens; identical to SEQ ID NO: 44545

SEQ ID NO: 44565 - DNA, 170 bp, Homo sapiens; identical to SEQ ID NO: 44546

SEQ ID NO: 44566 - DNA, 201 bp, Homo sapiens; identical to SEQ ID NO: 44547

SEQ ID NO: 44567 - DNA, 201 bp, Homo sapiens; identical to SEQ ID NO: 44548

SEQ ID NO: 44568 - DNA, 201 bp, Homo sapiens; identical to SEQ ID NO: 44549

SEQ ID NO: 44569 - DNA, 201 bp, Homo sapiens; identical to SEQ ID NO: 44550

SEQ ID NO: 44570 - DNA, 201 bp, Homo sapiens; identical to SEQ ID NO: 44551

SEQ ID NO: 44571 - DNA, 201 bp, Homo sapiens; identical to SEQ ID NO: 44552

SEQ ID NO: 44572 - DNA, 201 bp, Homo sapiens; identical to SEQ ID NO: 44553

SEQ ID NO: 44573 - DNA, 201 bp, Homo sapiens; identical to SEQ ID NO: 44554

SEQ ID NO: 44574 - DNA, 201 bp, Homo sapiens; identical to SEQ ID NO: 44555

SEQ ID NO: 44575 - DNA, 201 bp, Homo sapiens; identical to SEQ ID NO: 44556

SEQ ID NO: 44576 - DNA, 201 bp, Homo sapiens; identical to SEQ ID NO: 44557

SEQ ID NO: 44577 - DNA, 201 bp, Homo sapiens; identical to SEQ ID NO: 44558

SEQ ID NO: 44578 - DNA, 201 bp, Homo sapiens; identical to SEQ ID NO: 44541

SEQ ID NO: 44579 - DNA, 201 bp, Homo sapiens
gtctgttctcaggaatgctgttgagctctcctgttgcaggagcatgagcgccaggggctctggtgtctgaacagcgtgttttgcaggatgactttgacaaygatgtggatgctctgctggaagaaggcctttgtgcccccaaaaagaggcgaacagaggaaaaatatggcggagacagcgaccatccgtccgatggagaga

SEQ ID NO: 44580 - DNA, 201 bp, Homo sapiens; identical to SEQ ID NO: 44543

SEQ ID NO: 44581 - DNA, 201 bp, Homo sapiens; identical to SEQ ID NO: 44551

SEQ ID NO: 44582 - DNA, 201 bp, Homo sapiens; identical to SEQ ID NO: 44544

SEQ ID NO: 44583 - DNA, 170 bp, Homo sapiens; identical to SEQ ID NO: 44546

SEQ ID NO: 44584 - DNA, 201 bp, Homo sapiens; identical to SEQ ID NO: 44553

SEQ ID NO: 44585 - DNA, 201 bp, Homo sapiens; identical to SEQ ID NO: 44554

SEQ ID NO: 44586 - DNA, 201 bp, Homo sapiens; identical to SEQ ID NO: 44555

SEQ ID NO: 44587 - DNA, 201 bp, Homo sapiens; identical to SEQ ID NO: 44556

SEQ ID NO: 44588 - DNA, 201 bp, Homo sapiens; identical to SEQ ID NO: 44549

SEQ ID NO: 44589 - DNA, 201 bp, Homo sapiens; identical to SEQ ID NO: 44548

SEQ ID NO: 44590 - DNA, 117 bp, Homo sapiens
aagggcacatctaggcyccctgagagcacctcctttctgtgtctgttctcaggaatgctgttgagctctcctgttgcaggagcatgagcgccaggggctctggtgtctgaacagcgt

SEQ ID NO: 44591 - DNA, 201 bp, Homo sapiens; identical to SEQ ID NO: 44557

SEQ ID NO: 44592 - DNA, 201 bp, Homo sapiens; identical to SEQ ID NO: 44558

SEQ ID NO: 44593 - DNA, 201 bp, Homo sapiens; identical to SEQ ID NO: 44550

SEQ ID NO: 44594 - DNA, 201 bp, Homo sapiens
caacaccatgtaccacaggtgcctggactacgtgctggaggagctgaagcacaacgccaaggccaaggtgatggtggcctcccacaatgaggacacagtgygcttcgcactgcgcaggatggaggagctgcgcttgcatcctactgtactttggacagctgctaggcatgtgtgaccagatcagcttcccgctggggccct

SEQ ID NO: 44595 - DNA, 116 bp, Homo sapiens
cgaggatgctacagcrgatggatgtcctgcccaaggcgagctgtcccgctcgggcagagggctggggccttggggacccgggactcatgcagaagagggcacctgcctcacttgag

SEQ ID NO: 44596 - DNA, 201 bp, Homo sapiens
caatgtgaccctggacatggagctggctcaccgtgagggctggtgttttggggccaagccggtgcggggcgcatacctggcccaggagcgagcctgtgcakcagagatcggatatgaggaccccatcaaccccatgtacgaggccaccaacaccatgtaccacaggtgcctggactacgtgctggaggagctgaagcacaa

SEQ ID NO: 44597 - DNA, 201 bp, Homo sapiens
acaatgtgaccctggacatggagctggctcaccgtgagggctggtgttttggggccaagccggtgcggggcgcatacctggcccaggagcgagcctgtgcrtcagagatcggatatgaggaccccatcaaccccatgtacgaggccaccaacaccatgtaccacaggtgcctggactacgtgctggaggagctgaagcaca

SEQ ID NO: 44598 - DNA, 201 bp, Homo sapiens
gacgctggagatgcagcggaagttcaatgtggagaagctgctcatcttcaacacataccagtgctacctcaaggatgcctatgacaatgtgaccctggacrtggagctggctcaccgtgagggctggtgttttggggccaagccggtgcggggcgcatacctggcccaggagcgagcctgtgcatcagagatcggatatga

SEQ ID NO: 44599 - DNA, 201 bp, Homo sapiens
aagcacctggtagtccccaatggacagacaggacagctggagcccctgctgtcccggtttgctgaggaggaggagctacagatgacgaggatgctacagcrgatggatgtcctgcccaagaaagccacagagatgggcgtgcggctgatggtggatgccgagcagacctacttccagccggccatcagtcgcctgacgctg

SEQ ID NO: 44600 - DNA, 201 bp, Homo sapiens; identical to SEQ ID NO: 44594

SEQ ID NO: 44601 - DNA, 201 bp, Homo sapiens; identical to SEQ ID NO: 44596

SEQ ID NO: 44602 - DNA, 201 bp, Homo sapiens; identical to SEQ ID NO: 44597

SEQ ID NO: 44603 - DNA, 201 bp, Homo sapiens; identical to SEQ ID NO: 44598

SEQ ID NO: 44604 - DNA, 201 bp, Homo sapiens
tgcggccgctggtgcccgccgtggacttcggcaacgcgtaggaggcgtactgcagctggcgaacctgggagctggcgcgcagcctgctggtgctgcgcttstgcgcctggcccgcgctgctggcgcgccacgagcaggaaagtgtcgcaaagatgggcatcgcatccagggctgagattgaggactggttcacggcagaga

SEQ ID NO: 44605 - DNA, 132 bp, Homo sapiens
gtccggccagccgctggagtcgttaggtgcckccttgcttctgacgagccacacgtttgcttcttccctgtgttcccagctggagggacatgagtgtccctgggccgtcgtctccggacggggccctgacac

SEQ ID NO: 44606 - DNA, 191 bp, Homo sapiens
acactgcgtccggggccagacgacgatatcagcgcggggtccccacaacgccatggggcagagccaactctcgagcgcgtgatcgaagccygcagttttttcgcccccgtcacttccgggtgcgacaatctcttctgtccggccagccgctggagtcgttaggtgccgccttgcttctgacgagccacacg

SEQ ID NO: 44607 - DNA, 201 bp, Homo sapiens
ctctcgagcgcgtgatcgaagcccgcagttttttcgcccccgtcacttccgggtgcgacaatctcttctgtccggccagccgctggagtcgttaggtgcckccttgcttctgacgagccacacgtttgcttcttccctgtgttcccagctggagggacatgagtgtccctgggccgtcgtctccggacggggccctgacac

SEQ ID NO: 44608 - DNA, 201 bp, Homo sapiens
gcgtccggggccagacgacgatatcagcgcggggtccccacaacgccatggggcagagccaactctcgagcgcgtgatcgaagcccgcagttttttcgccyccgtcacttccgggtgcgacaatctcttctgtccggccagccgctggagtcgttaggtgccgccttgcttctgacgagccacacgtttgcttcttccctg

SEQ ID NO: 44609 - DNA, 191 bp, Homo sapiens; identical to SEQ ID NO: 44606

SEQ ID NO: 44610 - DNA, 201 bp, Homo sapiens; identical to SEQ ID NO: 44607

SEQ ID NO: 44611 - DNA, 201 bp, Homo sapiens; identical to SEQ ID NO: 44608

SEQ ID NO: 44612 - DNA, 122 bp, Homo sapiens
gggcgcgcaaggggcgagtctktccagccggcagcaccccaggccggatggacgcttgttcctggttctgtgccccgtgagcgctcaacgccctgcctgatcctgcctgaagatggtgccac

SEQ ID NO: 44613 - DNA, 201 bp, Homo sapiens
tatgcttcctttctggggacagagatgagcagggcggacagtgctaattcactgattgcaagaattccattttatctctattgtaatcccttttttatctyggaatttttattacatgtgtacaaaattagttaactggaagtttataaaatataaaagaggagaaaatcactcatgatccaattgctttaataaagctgc

SEQ ID NO: 44614 - DNA, 201 bp, Homo sapiens
caatttctgtaattatgaagaatcaaacaccaacaaagaagtatgatggctacacatcatgtccactggtgaccggctacaaccgtgtgattcttgctgartttgactacaaagcagagccgctagaaaccttcccctttgatcaaagcaaagagcgcctttccatgtatctcatgaaagctgacctgatgcctttcctgt

SEQ ID NO: 44615 - DNA, 201 bp, Homo sapiens
actggggaggaccagcgtttctgcgcaagttgtttcatctaggtatgagttaaggatggctcagcacttgctcatcttggatggcttctgggccaaaactkcagtcactgaatgaccaagagcagcacgaaggacttggaacctatccttgtaaagagttccttgatgggtaatggtgaccaaatgcctcccttttcagta

SEQ ID NO: 44616 - DNA, 201 bp, Homo sapiens
acttctcttggagccattttcggggttaagaagtatgcagatgccctgcaggagatcatccaggagcggaacctcactgttaactacaagaaaaacctcaytgaagtccgagccgataaacaagaggctgtatttgagaacctggacaaaccaggagagacccaagtgatttcatatgaaatgcttcatgtcacacctcca

SEQ ID NO: 44617 - DNA, 201 bp, Homo sapiens
atgctaaggggttactggggaggaccagcgtttctgcgcaagttgtttcatctaggtatgagttaaggatggctcagcacttgctcatcttggatggcttytgggccaaaactgcagtcactgaatgaccaagagcagcacgaaggacttggaacctatccttgtaaagagttccttgatgggtaatggtgaccaaatgcc

SEQ ID NO: 44618 - DNA, 201 bp, Homo sapiens
atcaaacaccaacaaagaagtatgatggctacacatcatgtccactggtgaccggctacaaccgtgtgattcttgctgagtttgactacaaagcagagccrctagaaaccttcccctttgatcaaagcaaagagcgcctttccatgtatctcatgaaagctgacctgatgcctttcctgtattggaatatgatgctaaggg

SEQ ID NO: 44619 - DNA, 155 bp, Homo sapiens
gggagcgaaggtttttgctgcgccaacgcagtgaccgaaggctccgctcacgccyggcctgatcctgcctgaagatggtgccactggtggctgtggtatcagggccccgtgcccagctctttgcctgcctgctcaggctgggcactcagcaggtc

SEQ ID NO: 44620 - DNA, 201 bp, Homo sapiens; identical to SEQ ID NO: 44614

SEQ ID NO: 44621 - DNA, 201 bp, Homo sapiens; identical to SEQ ID NO: 44616

SEQ ID NO: 44622 - DNA, 201 bp, Homo sapiens
atcaaacaccaacaaagaagtatgatggctacacatcatgtccactggtgaccggctacaaccgtgtgattcttgctgagtttgactacaaagcagagccrctagaaaccttcccctttgatcaaagcaaagagcgcctttccatgtatctcatgaaagctgacctgatgcctttcctgtattggaatatgatgctaaggt

SEQ ID NO: 44623 - DNA, 146 bp, Homo sapiens
ggtttttgctgcgccaacgcagtgaccgaaggctccgctcacgccyggtagaggcgggtttcaccatgttgcccagctggtctcgaactcctggcctcaaatgatccgcacacttcggccttccaaagtgctgggattacacgagt

SEQ ID NO: 44624 - DNA, 201 bp, Homo sapiens; identical to SEQ ID NO: 44614

SEQ ID NO: 44625 - DNA, 201 bp, Homo sapiens; identical to SEQ ID NO: 44615

SEQ ID NO: 44626 - DNA, 201 bp, Homo sapiens; identical to SEQ ID NO: 44616

SEQ ID NO: 44627 - DNA, 201 bp, Homo sapiens; identical to SEQ ID NO: 44617

SEQ ID NO: 44628 - DNA, 125 bp, Homo sapiens
accaaatgcctcccttttcagtacctttgaacagcaaccatgtgggctactcatgatgggcttgattctttgggaataataaaatgaaataatacttttaytttctgaataaaagtttgtcactg

SEQ ID NO: 44629 - DNA, 201 bp, Homo sapiens; identical to SEQ ID NO: 44618

SEQ ID NO: 44630 - DNA, 140 bp, Homo sapiens
ctgcggggccgcccttcagggcgcgcaaggggcgagtctktccagccggcagcaccccaggccggatggacgcttgttcctggttctgtgccccgtgagcgctcaacgccctgcctgatcctgcctgaagatggtgccac

SEQ ID NO: 44631 - DNA, 201 bp, Homo sapiens; identical to SEQ ID NO: 44614

SEQ ID NO: 44632 - DNA, 201 bp, Homo sapiens; identical to SEQ ID NO: 44615

SEQ ID NO: 44633 - DNA, 201 bp, Homo sapiens; identical to SEQ ID NO: 44616

SEQ ID NO: 44634 - DNA, 201 bp, Homo sapiens; identical to SEQ ID NO: 44617

SEQ ID NO: 44635 - DNA, 136 bp, Homo sapiens
accaaatgcctcccttttcagtacctttgaacagcaaccatgtgggctactcatgatgggcttgattctttgggaataataaaatgaaataatacttttaytttctgaataaaagtttgtcactgattgtgttcta

SEQ ID NO: 44636 - DNA, 201 bp, Homo sapiens; identical to SEQ ID NO: 44618

SEQ ID NO: 44637 - DNA, 201 bp, Homo sapiens; identical to SEQ ID NO: 44614

SEQ ID NO: 44638 - DNA, 201 bp, Homo sapiens; identical to SEQ ID NO: 44615

SEQ ID NO: 44639 - DNA, 201 bp, Homo sapiens; identical to SEQ ID NO: 44616

SEQ ID NO: 44640 - DNA, 201 bp, Homo sapiens; identical to SEQ ID NO: 44617

SEQ ID NO: 44641 - DNA, 201 bp, Homo sapiens; identical to SEQ ID NO: 44618

SEQ ID NO: 44642 - DNA, 191 bp, Homo sapiens
cgggcggggccccagtccaggccttgagacccagaagggagcgaaggtttttgctgcgccaacgcagtgaccgaaggctccgctcacgccyggcctgatcctgcctgaagatggtgccactggtggctgtggtatcagggccccgtgcccagctctttgcctgcctgctcaggctgggcactcagcaggtc

SEQ ID NO: 44643 - DNA, 201 bp, Homo sapiens; identical to SEQ ID NO: 44614

SEQ ID NO: 44644 - DNA, 201 bp, Homo sapiens; identical to SEQ ID NO: 44615

SEQ ID NO: 44645 - DNA, 201 bp, Homo sapiens; identical to SEQ ID NO: 44616

SEQ ID NO: 44646 - DNA, 201 bp, Homo sapiens; identical to SEQ ID NO: 44617

SEQ ID NO: 44647 - DNA, 136 bp, Homo sapiens; identical to SEQ ID NO: 44635

SEQ ID NO: 44648 - DNA, 201 bp, Homo sapiens; identical to SEQ ID NO: 44618

SEQ ID NO: 44649 - DNA, 191 bp, Homo sapiens; identical to SEQ ID NO: 44606

SEQ ID NO: 44650 - DNA, 201 bp, Homo sapiens; identical to SEQ ID NO: 44607

SEQ ID NO: 44651 - DNA, 201 bp, Homo sapiens; identical to SEQ ID NO: 44608

SEQ ID NO: 44652 - DNA, 191 bp, Homo sapiens; identical to SEQ ID NO: 44606

SEQ ID NO: 44653 - DNA, 201 bp, Homo sapiens; identical to SEQ ID NO: 44607

SEQ ID NO: 44654 - DNA, 201 bp, Homo sapiens; identical to SEQ ID NO: 44608

SEQ ID NO: 44655 - DNA, 201 bp, Homo sapiens; identical to SEQ ID NO: 44615

SEQ ID NO: 44656 - DNA, 201 bp, Homo sapiens; identical to SEQ ID NO: 44617

SEQ ID NO: 44657 - DNA, 191 bp, Homo sapiens; identical to SEQ ID NO: 44606

SEQ ID NO: 44658 - DNA, 201 bp, Homo sapiens; identical to SEQ ID NO: 44614

SEQ ID NO: 44659 - DNA, 201 bp, Homo sapiens; identical to SEQ ID NO: 44616

SEQ ID NO: 44660 - DNA, 136 bp, Homo sapiens; identical to SEQ ID NO: 44635

SEQ ID NO: 44661 - DNA, 201 bp, Homo sapiens; identical to SEQ ID NO: 44607

SEQ ID NO: 44662 - DNA, 201 bp, Homo sapiens; identical to SEQ ID NO: 44618

SEQ ID NO: 44663 - DNA, 201 bp, Homo sapiens; identical to SEQ ID NO: 44608

SEQ ID NO: 44664 - DNA, 137 bp, Homo sapiens
gcctccgctaggggaccccctccatggcttcccaccrggttgttccaggcctcagcttcgccgaaaggcctcaccacctccgacctccgcctgccctggggatgctcccagccctgctgcggcagaacgcgacatgc

SEQ ID NO: 44665 - DNA, 101 bp, Homo sapiens
tccaggaaatgtgtcagtgactccttgctagggctcgggtggcttgagcccagcacaccctgggctaggtgatctgtccagcctaggggcttccccaaccr

SEQ ID NO: 44666 - DNA, 197 bp, Homo sapiens
gcctccgctaggggaccccctccatggcttcccaccgggttgttccaggcctcagcttcgccgaaaggcctcaccacctccgacctccgcctgcccyggggatgctcccagccctgctgcggcagaacgcgacatgctaaccggaatccctaggccgcctgtctcctacccatacttagaggccccgctcagacggt

SEQ ID NO: 44667 - DNA, 201 bp, Homo sapiens
accgggttgttccaggcctcagcttcgccgaaaggcctcaccacctccgacctccgcctgccctggggatgctcccagccctgctgcggcagaacgcgacrtgctaaccggaatccctaggccgcctgtctcctacccatacttagaggccccgctcagacggtccttaaaacgtctgaaaggccgttcctgccagagtcc

SEQ ID NO: 44668 - DNA, 201 bp, Homo sapiens
gggtgagacgggaggaaggtagtcacgggctcaaggctggaggctggcgggctagggctgagtggagcgcctgcttagagaccttcgggagaacttctgcyggaaccccgacggctcagaggcgccctggtgcttcacactgcggcccggcatgcgcgcggccttttgctaccagatccggcgttgtacagacgacgtgcg

SEQ ID NO: 44669 - DNA, 201 bp, Homo sapiens
gaggccccgctcagacggtccttaaaacgtctgaaaggccgttcctgccagagtccctgctacctgttacctccacccctatttagtcctagtggacagcytcgctcaccttccctgggatgacacttctggcggctgagatgagcgagcctctctgggctctgccgccgggtgtgggctgacctgcctacagctggggcc

SEQ ID NO: 44670 - DNA, 201 bp, Homo sapiens
ggcctgtgagggtgactacgggggcccacttgcctgctttacccacaactgctgggtcctggaaggaattataatccccaaccgagtatgcgcaaggtccygctggccagctgtcttcacgcgtgtctctgtgtttgtggactggattcacaaggtcatgagactgggttaggcccagccttgatgccatatgccttgggg

SEQ ID NO: 44671 - DNA, 201 bp, Homo sapiens
agtatgcgcaaggtcccgctggccagctgtcttcacgcgtgtctctgtgtttgtggactggattcacaaggtcatgagactgggttaggcccagccttgaygccatatgccttggggaggacaaaacttcttgtcagacataaagccatgtttcctctttatgcctgtacagatgcttcttagcctttgcttccaggaaat

SEQ ID NO: 44672 - DNA, 201 bp, Homo sapiens
gctacagcacctgctacatgcggtggtgcccgggccttggcaggaggatgtggcagatgctgaagagtgtgctggtcgctgtgggcccttaatggactgcygggccttccactacaacgtgagcagccatggttgccaactgctgccatggactcaacactcgccccacacgaggctgcggcgttctgggcgctgtgacct

SEQ ID NO: 44673 - DNA, 201 bp, Homo sapiens
tggggggggggggcgggcgttgggacgtgctgctgcgggtgagacgggaggaaggtagtcacgggctcaaggctggaggctggcgggctagggctgagtgsagcgcctgcttagagaccttcgggagaacttctgccggaaccccgacggctcagaggcgccctggtgcttcacactgcggcccggcatgcgcgcggcctt

SEQ ID NO: 44674 - DNA, 201 bp, Homo sapiens
gactgccgggccttccactacaacgtgagcagccatggttgccaactgctgccatggactcaacactcgccccacacgaggctgcggcgttctgggcgctrtgacctcttccagaagaaaggtacacgcccactctccggaatggcctggaagagaacttctgccgtaaccctgatggcgaccccggaggtccttggtgct

SEQ ID NO: 44675 - DNA, 201 bp, Homo sapiens
aagagtgtgctggtcgctgtgggcccttaatggactgccgggccttccactacaacgtgagcagccatggttgccaactgctgccatggactcaacactcrccccacacgaggctgcggcgttctgggcgctgtgacctcttccagaagaaaggtacacgcccactctccggaatggcctggaagagaacttctgccgtaa

SEQ ID NO: 44676 - DNA, 201 bp, Homo sapiens
ccttcgggagaacttctgccggaaccccgacggctcagaggcgccctggtgcttcacactgcggcccggcatgcgcgcggccttttgctaccagatccggygttgtacagacgacgtgcggccccagggtgaggcccaagcttgggggctacagagccgggctggaagcctggaaccggagggccggggcgaggtctcggc

SEQ ID NO: 44677 - DNA, 201 bp, Homo sapiens
aggggaggcagtgttgaagctggggcaacgctcgccattgaatgacttccaagtgctccggggcacagagctacagcacctgctacatgcggtggtgcccrggccttggcaggaggatgtggcagatgctgaagagtgtgctggtcgctgtgggcccttaatggactgccgggccttccactacaacgtgagcagccatgg

SEQ ID NO: 44678 - DNA, 201 bp, Homo sapiens
acgggaggaaggtagtcacgggctcaaggctggaggctggcgggctagggctgagtggagcgcctgcttagagaccttcgggagaacttctgccggaaccycgacggctcagaggcgccctggtgcttcacactgcggcccggcatgcgcgcggccttttgctaccagatccggcgttgtacagacgacgtgcggccccag

SEQ ID NO: 44679 - DNA, 201 bp, Homo sapiens
agcacctgctacatgcggtggtgcccgggccttggcaggaggatgtggcagatgctgaagagtgtgctggtcgctgtgggcccttaatggactgccgggcsttccactacaacgtgagcagccatggttgccaactgctgccatggactcaacactcgccccacacgaggctgcggcgttctgggcgctgtgacctcttcc

SEQ ID NO: 44680 - DNA, 201 bp, Homo sapiens
ccggaatggcctggaagagaacttctgccgtaaccctgatggcgaccccggaggtccttggtgctacacaacagaccctgctgtgcgcttccagagctgcrgcatcaaatcctgccgggaggccgcgtgtgtctggtgcaatggcgaggaataccgcggcgcggtagaccgcacggagtcagggcgcgagtgccagcgctg

SEQ ID NO: 44681 - DNA, 201 bp, Homo sapiens
gactgctaccacggcgcaggggagcagtaccgcggcacggtcagcaagacccgcaagggtgtccagtgccagcgctggtccgctgagacgccgcacaagcygcagtgagagaacttctgccggaacccagatggggatagccatgggccctggtgctacacgatggacccaaggaccccattcgactactgtgccctgcga

SEQ ID NO: 44682 - DNA, 201 bp, Homo sapiens
tgtcatctccaaccaggagtgtaacatcaagcaccgaggacgtgtgcgggagagtgagatgtgcactgagggactgttggcccctgtgggggcctgtgagrgtgactacgggggcccacttgcctgctttacccacaactgctgggtcctggaaggaattataatccccaaccgagtatgcgcaaggtcccgctggccagc

SEQ ID NO: 44683 - DNA, 201 bp, Homo sapiens
gatgctcccagccctgctgcggcagaacgcgacatgctaaccggaatccctaggccgcctgtctcctacccatacttagaggccccgctcagacggtcctkaaaacgtctgaaaggccgttcctgccagagtccctgctacctgttacctccacccctatttagtcctagtggacagcctcgctcaccttccctgggatga

SEQ ID NO: 44684 - DNA, 201 bp, Homo sapiens
ctcgccccacacgaggctgcggcgttctgggcgctgtgacctcttccagaagaaaggtacacgcccactctccggaatggcctggaagagaacttctgccrtaaccctgatggcgaccccggaggtccttggtgctacacaacagaccctgctgtgcgcttccagagctgcggcatcaaatcctgccgggaggccgcgtgt

SEQ ID NO: 44685 - DNA, 201 bp, Homo sapiens
ttacgccagaaaaatacgcgtgcaagtgaggtggggggggggggcgggcgttgggacgtgctgctgcgggtgagacgggaggaaggtagtcacgggctcarggctggaggctggcgggctagggctgagtggagcgcctgcttagagaccttcgggagaacttctgccggaaccccgacggctcagaggcgccctggtgct

SEQ ID NO: 44686 - DNA, 201 bp, Homo sapiens
cccctgtgggggcctgtgagggtgactacgggggcccacttgcctgctttacccacaactgctgggtcctggaaggaattataatccccaaccgagtatgygcaaggtcccgctggccagctgtcttcacgcgtgtctctgtgtttgtggactggattcacaaggtcatgagactgggttaggcccagccttgatgccata

SEQ ID NO: 44687 - DNA, 201 bp, Homo sapiens
tgcggcagaacgcgacatgctaaccggaatccctaggccgcctgtctcctacccatacttagaggccccgctcagacggtccttaaaacgtctgaaaggcsgttcctgccagagtccctgctacctgttacctccacccctatttagtcctagtggacagcctcgctcaccttccctgggatgacacttctggcggctgag

SEQ ID NO: 44688 - DNA, 201 bp, Homo sapiens
cagccgccatcaatcctggaccccccagaccaggtgcagtttgagaagtgtggcaagagggtggatcggctggatcagcggcgttccaagctgcgcgtggytgggggccatccgggcaactcaccctggacagtcagcttgcggaatcggcagggccagcatttctgcggggggtctctagtgaaggagcagtggatactg

SEQ ID NO: 44689 - DNA, 201 bp, Homo sapiens
atttacgccagaaaaatacgcgtgcaagtgaggtggggggggggggcgggcgttgggacgtgctgctgcgggtgagacgggaggaaggtagtcacgggctyaaggctggaggctggcgggctagggctgagtggagcgcctgcttagagaccttcgggagaacttctgccggaaccccgacggctcagaggcgccctggtg

SEQ ID NO: 44690 - DNA, 201 bp, Homo sapiens
ccctgtgggggcctgtgagggtgactacgggggcccacttgcctgctttacccacaactgctgggtcctggaaggaattataatccccaaccgagtatgcrcaaggtcccgctggccagctgtcttcacgcgtgtctctgtgtttgtggactggattcacaaggtcatgagactgggttaggcccagccttgatgccatat

SEQ ID NO: 44691 - DNA, 201 bp, Homo sapiens
tgagacgccgcacaagccgcagtgagagaacttctgccggaacccagatggggatagccatgggccctggtgctacacgatggacccaaggaccccattckactactgtgccctgcgacgctgcgctgatgaccagccgccatcaatcctggaccccccagaccaggtgcagtttgagaagtgtggcaagagggtggatcg

SEQ ID NO: 44692 - DNA, 201 bp, Homo sapiens
ggggcgggcgttgggacgtgctgctgcgggtgagacgggaggaaggtagtcacgggctcaaggctggaggctggcgggctagggctgagtggagcgcctgyttagagaccttcgggagaacttctgccggaaccccgacggctcagaggcgccctggtgcttcacactgcggcccggcatgcgcgcggccttttgctacca

SEQ ID NO: 44693 - DNA, 201 bp, Homo sapiens
ctgcgggtgagacgggaggaaggtagtcacgggctcaaggctggaggctggcgggctagggctgagtggagcgcctgcttagagaccttcgggagaacttytgccggaaccccgacggctcagaggcgccctggtgcttcacactgcggcccggcatgcgcgcggccttttgctaccagatccggcgttgtacagacgacg

SEQ ID NO: 44694 - DNA, 201 bp, Homo sapiens
ctgatggctgcccgcacccgccacagactgctaccacggcgcaggggagcagtaccgcggcacggtcagcaagacccgcaagggtgtccagtgccagcgckggtccgctgagacgccgcacaagccgcagtgagagaacttctgccggaacccagatggggatagccatgggccctggtgctacacgatggacccaaggac

SEQ ID NO: 44695 - DNA, 109 bp, Homo sapiens
gcctccgckaggggaccccctccatggcttcccaccgggttgttccaggcctcagcttcgccgaaaggcctcaccacctccgacctccgcctgccctggggatgctccc

SEQ ID NO: 44696 - DNA, 195 bp, Homo sapiens
gcctccgctaggggaccccctccatggcttcccaccgggttgttccaggcctcagcttcgccgaaaggcctcaccacctccgacctccgcctgcyctggggatgctcccagccctgctgcggcagaacgcgacatgctaaccggaatccctaggccgcctgtctcctacccatacttagaggccccgctcagacg

SEQ ID NO: 44697 - DNA, 201 bp, Homo sapiens
gagtgagatgtgcactgagggactgttggcccctgtgggggcctgtgagggtgactacgggggcccacttgcctgctttacccacaactgctgggtcctgraaggaattataatccccaaccgagtatgcgcaaggtcccgctggccagctgtcttcacgcgtgtctctgtgtttgtggactggattcacaaggtcatgag

SEQ ID NO: 44698 - DNA, 201 bp, Homo sapiens
tgaccagccgccatcaatcctggaccccccagaccaggtgcagtttgagaagtgtggcaagagggtggatcggctggatcagcggcgttccaagctgcgcktggttgggggccatccgggcaactcaccctggacagtcagcttgcggaatcggcagggccagcatttctgcggggggtctctagtgaaggagcagtggat

SEQ ID NO: 44699 - DNA, 201 bp, Homo sapiens
gtggagcgcctgcttagagaccttcgggagaacttctgccggaaccccgacggctcagaggcgccctggtgcttcacactgcggcccggcatgcgcgcggscttttgctaccagatccggcgttgtacagacgacgtgcggccccagggtgaggcccaagcttgggggctacagagccgggctggaagcctggaaccggag

SEQ ID NO: 44700 - DNA, 201 bp, Homo sapiens
gtgagaccaaaggtacgggtaatgacacagtcctaaatgtggccttgctgaatgtcatctccaaccaggagtgtaacatcaagcaccgaggacgtgtgcgkgagagtgagatgtgcactgagggactgttggcccctgtgggggcctgtgagggtgactacgggggcccacttgcctgctttacccacaactgctgggtcc

SEQ ID NO: 44701 - DNA, 201 bp, Homo sapiens
tggtgtgtgggccctcaggctcccagcttgtcctgctcaagctggagagatctgtgaccctgaaccagcgtgtggccctgatctgcctgccccctgaatgrtatgtggtgcctccagggaccaagtgtgagattgcaggctggggtgagaccaaaggtacgggtaatgacacagtcctaaatgtggccttgctgaatgtca

SEQ ID NO: 44702 - DNA, 201 bp, Homo sapiens
cccgcatcagcaccgatttacgccagaaaaatacgcgtgcaagtgaggtggggggggggggcgggcgttgggacgtgctgctgcgggtgagacgggaggarggtagtcacgggctcaaggctggaggctggcgggctagggctgagtggagcgcctgcttagagaccttcgggagaacttctgccggaaccccgacggctc

SEQ ID NO: 44703 - DNA, 201 bp, Homo sapiens
aatggtatgtggtgcctccagggaccaagtgtgagattgcaggctggggtgagaccaaaggtacgggtaatgacacagtcctaaatgtggccttgctgaaygtcatctccaaccaggagtgtaacatcaagcaccgaggacgtgtgcgggagagtgagatgtgcactgagggactgttggcccctgtgggggcctgtgagg

SEQ ID NO: 44704 - DNA, 201 bp, Homo sapiens
ctgtgggcccttaatggactgccgggccttccactacaacgtgagcagccatggttgccaactgctgccatggactcaacactcgccccacacgaggctgyggcgttctgggcgctgtgacctcttccagaagaaaggtacacgcccactctccggaatggcctggaagagaacttctgccgtaaccctgatggcgacccc

SEQ ID NO: 44705 - DNA, 201 bp, Homo sapiens
gctggagagatctgtgaccctgaaccagcgtgtggccctgatctgcctgccccctgaatggtatgtggtgcctccagggaccaagtgtgagattgcaggcyggggtgagaccaaaggtacgggtaatgacacagtcctaaatgtggccttgctgaatgtcatctccaaccaggagtgtaacatcaagcaccgaggacgtgt

SEQ ID NO: 44706 - DNA, 201 bp, Homo sapiens
ccatatgcctctcacgggctatgaggtatggttgggcaccctgttccagaacccacagcatggagagccaagcctacagcgggtcccagtagccaagatgstgtgtgggccctcaggctcccagcttgtcctgctcaagctggagagatctgtgaccctgaaccagcgtgtggccctgatctgcctgccccctgaatggta

SEQ ID NO: 44707 - DNA, 201 bp, Homo sapiens
ctggatcagcggcgttccaagctgcgcgtggttgggggccatccgggcaactcaccctggacagtcagcttgcggaatcggcagggccagcatttctgcgsggggtctctagtgaaggagcagtggatactgactgcccggcagtgcttctcctcctgagcttctctcccagccatatgcctctcacgggctatgaggtat

SEQ ID NO: 44708 - DNA, 201 bp, Homo sapiens
gttccaagctgcgcgtggttgggggccatccgggcaactcaccctggacagtcagcttgcggaatcggcagggccagcatttctgcggggggtctctagtraaggagcagtggatactgactgcccggcagtgcttctcctcctgagcttctctcccagccatatgcctctcacgggctatgaggtatggttgggcaccct

SEQ ID NO: 44709 - DNA, 201 bp, Homo sapiens
gtgtggcaagagggtggatcggctggatcagcggcgttccaagctgcgcgtggttgggggccatccgggcaactcaccctggacagtcagcttgcggaatyggcagggccagcatttctgcggggggtctctagtgaaggagcagtggatactgactgcccggcagtgcttctcctcctgagcttctctcccagccatatg

SEQ ID NO: 44710 - DNA, 201 bp, Homo sapiens
cttgctgaatgtcatctccaaccaggagtgtaacatcaagcaccgaggacgtgtgcgggagagtgagatgtgcactgagggactgttggcccctgtggggscctgtgagggtgactacgggggcccacttgcctgctttacccacaactgctgggtcctggaaggaattataatccccaaccgagtatgcgcaaggtcccg

SEQ ID NO: 44711 - DNA, 201 bp, Homo sapiens
actgttggcccctgtgggggcctgtgagggtgactacgggggcccacttgcctgctttacccacaactgctgggtcctggaaggaattataatccccaacygagtatgcgcaaggtcccgctggccagctgtcttcacgcgtgtctctgtgtttgtggactggattcacaaggtcatgagactgggttaggcccagccttg

SEQ ID NO: 44712 - DNA, 201 bp, Homo sapiens
cagatccggcgttgtacagacgacgtgcggccccagggtgaggcccaagcttgggggctacagagccgggctggaagcctggaaccggagggccggggcgrggtctcggcctgatggctgcccgcacccgccacagactgctaccacggcgcaggggagcagtaccgcggcacggtcagcaagacccgcaagggtgtccag

SEQ ID NO: 44713 - DNA, 201 bp, Homo sapiens
caactgtcagctgcttccgcgggaagggtgagggctaccggggcacagccaataccaccactgcgggcgtaccttgccagcgttgggacgcgcaaatcccdcatcagcaccgatttacgccagaaaaatacgcgtgcaagtgaggtggggggggggggcgggcgttgggacgtgctgctgcgggtgagacgggaggaaggt

SEQ ID NO: 44714 - DNA, 201 bp, Homo sapiens
ctggtcgctgtgggcccttaatggactgccgggccttccactacaacgtgagcagccatggttgccaactgctgccatggactcaacactcgccccacacraggctgcggcgttctgggcgctgtgacctcttccagaagaaaggtacacgcccactctccggaatggcctggaagagaacttctgccgtaaccctgatgg

SEQ ID NO: 44715 - DNA, 201 bp, Homo sapiens
tgagaagtgtggcaagagggtggatcggctggatcagcggcgttccaagctgcgcgtggttgggggccatccgggcaactcaccctggacagtcagcttgsggaatcggcagggccagcatttctgcggggggtctctagtgaaggagcagtggatactgactgcccggcagtgcttctcctcctgagcttctctcccagc

SEQ ID NO: 44716 - DNA, 201 bp, Homo sapiens
gcgacgctgcgctgatgaccagccgccatcaatcctggaccccccagaccaggtgcagtttgagaagtgtggcaagagggtggatcggctggatcagcggygttccaagctgcgcgtggttgggggccatccgggcaactcaccctggacagtcagcttgcggaatcggcagggccagcatttctgcggggggtctctagt

SEQ ID NO: 44717 - DNA, 201 bp, Homo sapiens
cagcaagacccgcaagggtgtccagtgccagcgctggtccgctgagacgccgcacaagccgcagtgagagaacttctgccggaacccagatggggatagcyatgggccctggtgctacacgatggacccaaggaccccattcgactactgtgccctgcgacgctgcgctgatgaccagccgccatcaatcctggacccccc

SEQ ID NO: 44718 - DNA, 201 bp, Homo sapiens
cggcacggtcagcaagacccgcaagggtgtccagtgccagcgctggtccgctgagacgccgcacaagccgcagtgagagaacttctgccggaacccagatrgggatagccatgggccctggtgctacacgatggacccaaggaccccattcgactactgtgccctgcgacgctgcgctgatgaccagccgccatcaatcct

SEQ ID NO: 44719 - DNA, 201 bp, Homo sapiens
gagcagtaccgcggcacggtcagcaagacccgcaagggtgtccagtgccagcgctggtccgctgagacgccgcacaagccgcagtgagagaacttctgccrgaacccagatggggatagccatgggccctggtgctacacgatggacccaaggaccccattcgactactgtgccctgcgacgctgcgctgatgaccagccg

SEQ ID NO: 44720 - DNA, 201 bp, Homo sapiens
gagaccttcgggagaacttctgccggaaccccgacggctcagaggcgccctggtgcttcacactgcggcccggcatgcgcgcggccttttgctaccagatmcggcgttgtacagacgacgtgcggccccagggtgaggcccaagcttgggggctacagagccgggctggaagcctggaaccggagggccggggcgaggtct

SEQ ID NO: 44721 - DNA, 201 bp, Homo sapiens
gagtgtaacatcaagcaccgaggacgtgtgcgggagagtgagatgtgcactgagggactgttggcccctgtgggggcctgtgagggtgactacgggggccyacttgcctgctttacccacaactgctgggtcctggaaggaattataatccccaaccgagtatgcgcaaggtcccgctggccagctgtcttcacgcgtgtc

SEQ ID NO: 44722 - DNA, 201 bp, Homo sapiens
ccactacaacgtgagcagccatggttgccaactgctgccatggactcaacactcgccccacacgaggctgcggcgttctgggcgctgtgacctcttccagragaaaggtacacgcccactctccggaatggcctggaagagaacttctgccgtaaccctgatggcgaccccggaggtccttggtgctacacaacagaccct

SEQ ID NO: 44723 - DNA, 201 bp, Homo sapiens
tgcgacgctgcgctgatgaccagccgccatcaatcctggaccccccagaccaggtgcagtttgagaagtgtggcaagagggtggatcggctggatcagcgkcgttccaagctgcgcgtggttgggggccatccgggcaactcaccctggacagtcagcttgcggaatcggcagggccagcatttctgcggggggtctctag

SEQ ID NO: 44724 - DNA, 201 bp, Homo sapiens
tagggctgagtggagcgcctgcttagagaccttcgggagaacttctgccggaaccccgacggctcagaggcgccctggtgcttcacactgcggcccggcaygcgcgcggccttttgctaccagatccggcgttgtacagacgacgtgcggccccagggtgaggcccaagcttgggggctacagagccgggctggaagcctg

SEQ ID NO: 44725 - DNA, 201 bp, Homo sapiens
ggaggctggcgggctagggctgagtggagcgcctgcttagagaccttcgggagaacttctgccggaaccccgacggctcagaggcgccctggtgcttcacmctgcggcccggcatgcgcgcggccttttgctaccagatccggcgttgtacagacgacgtgcggccccagggtgaggcccaagcttgggggctacagagcc

SEQ ID NO: 44726 - DNA, 201 bp, Homo sapiens
tgatggctgcccgcacccgccacagactgctaccacggcgcaggggagcagtaccgcggcacggtcagcaagacccgcaagggtgtccagtgccagcgctsgtccgctgagacgccgcacaagccgcagtgagagaacttctgccggaacccagatggggatagccatgggccctggtgctacacgatggacccaaggacc

SEQ ID NO: 44727 - DNA, 201 bp, Homo sapiens
caccgatttacgccagaaaaatacgcgtgcaagtgaggtggggggggggggcgggcgttgggacgtgctgctgcgggtgagacgggaggaaggtagtcacrggctcaaggctggaggctggcgggctagggctgagtggagcgcctgcttagagaccttcgggagaacttctgccggaaccccgacggctcagaggcgccc

SEQ ID NO: 44728 - DNA, 201 bp, Homo sapiens
ccgggttcctcgaccaaggtctggacgacaactattgccggaatcctgacggctccgagcggccatggtgctacactacggatccgcagatcgagcgagarttctgtgacctcccccgctgcgggtccgaggcacagccccgccaagaggccacaactgtcagctgcttccgcgggaagggtgagggctaccggggcacag

SEQ ID NO: 44729 - DNA, 201 bp, Homo sapiens
gatcttcagcacccgcaccagcaccccttcgagccgggttcctcgaccaaggtctggacgacaactattgccggaatcctgacggctccgagcggccatgrtgctacactacggatccgcagatcgagcgagagttctgtgacctcccccgctgcgggtccgaggcacagccccgccaagaggccacaactgtcagctgct

SEQ ID NO: 44730 - DNA, 201 bp, Homo sapiens
atgaggtatggttgggcaccctgttccagaacccacagcatggagagccaagcctacagcgggtcccagtagccaagatggtgtgtgggccctcaggctcycagcttgtcctgctcaagctggagagatctgtgaccctgaaccagcgtgtggccctgatctgcctgccccctgaatggtatgtggtgcctccagggacca

SEQ ID NO: 44731 - DNA, 124 bp, Homo sapiens
gcctccgctaggggaccccctccrtggcttcccaccgggttgttccaggcctcagcttcgccgaaaggcctcaccacctccgacctccgcctgccctggggatgctcccagccctgctgcggca

SEQ ID NO: 44732 - DNA, 201 bp, Homo sapiens
gccagcgctgggatcttcagcacccgcaccagcaccccttcgagccgggttcctcgaccaaggtctggacgacaactattgccggaatcctgacggctccsagcggccatggtgctacactacggatccgcagatcgagcgagagttctgtgacctcccccgctgcgggtccgaggcacagccccgccaagaggccacaac

SEQ ID NO: 44733 - DNA, 201 bp, Homo sapiens
gtcagggcgcgagtgccagcgctgggatcttcagcacccgcaccagcaccccttcgagccgggttcctcgaccaaggtctggacgacaactattgccggartcctgacggctccgagcggccatggtgctacactacggatccgcagatcgagcgagagttctgtgacctcccccgctgcgggtccgaggcacagccccgc

SEQ ID NO: 44734 - DNA, 201 bp, Homo sapiens
ggcccacttgcctgctttacccacaactgctgggtcctggaaggaattataatccccaaccgagtatgcgcaaggtcccgctggccagctgtcttcacgcktgtctctgtgtttgtggactggattcacaaggtcatgagactgggttaggcccagccttgatgccatatgccttggggaggacaaaacttcttgtcagac

SEQ ID NO: 44735 - DNA, 201 bp, Homo sapiens
ggggcccacttgcctgctttacccacaactgctgggtcctggaaggaattataatccccaaccgagtatgcgcaaggtcccgctggccagctgtcttcacrcgtgtctctgtgtttgtggactggattcacaaggtcatgagactgggttaggcccagccttgatgccatatgccttggggaggacaaaacttcttgtcag

SEQ ID NO: 44736 - DNA, 201 bp, Homo sapiens
tgcactgagggactgttggcccctgtgggggcctgtgagggtgactacgggggcccacttgcctgctttacccacaactgctgggtcctggaaggaattakaatccccaaccgagtatgcgcaaggtcccgctggccagctgtcttcacgcgtgtctctgtgtttgtggactggattcacaaggtcatgagactgggttag

SEQ ID NO: 44737 - DNA, 178 bp, Homo sapiens
cgctgagcctccagccgcgcacgcgcactggcccgcgcccagcctccgctaggggaccccctccatggcttcccaccrggttgttccaggcctcagcttcgccgaaaggcctcaccacctccgacctccgcctgccctggggatgctcccagccctgctgcggcagaacgcgacatgc

SEQ ID NO: 44738 - DNA, 201 bp, Homo sapiens
ccacggcgcaggggagcagtaccgcggcacggtcagcaagacccgcaagggtgtccagtgccagcgctggtccgctgagacgccgcacaagccgcagtgartccctggtgctcccggccccgccagggccctaaccctggggcggcatgctttggtgtctgggaccagagcctggaaatggttgagactaccctgccacga

SEQ ID NO: 44739 - DNA, 201 bp, Homo sapiens
cccagcctccgctaggggaccccctccatggcttcccaccgggttgttccaggcctcagcttcgccgaaaggcctcaccacctccgacctccgcctgcccyggggatgctcccagccctgctgcggcagaacgcgacatgctaaccggaatccctaggccgcctgtctcctacccatacttagaggccccgctcagacggt

SEQ ID NO: 44740 - DNA, 201 bp, Homo sapiens; identical to SEQ ID NO: 44667

SEQ ID NO: 44741 - DNA, 201 bp, Homo sapiens
tgcgggcgtaccttgccagcgttgggacgcgcaaatcccgcatcagcaccgatttacgccagaaaaatacgcgtgcaaagaccttcgggagaacttctgcyggaaccccgacggctcagaggcgccctggtgcttcacactgcggcccggcatgcgcgcggccttttgctaccagatccggcgttgtacagacgacgtgcg

SEQ ID NO: 44742 - DNA, 201 bp, Homo sapiens; identical to SEQ ID NO: 44669

SEQ ID NO: 44743 - DNA, 201 bp, Homo sapiens
ggcccctcatggctcctgtcaccaggtctcaggtcagggtccagcaggccctgagctgacgtgtggagccagagccacccaatcccgtagggacaggtttyacaacttcccggatggggctgtggtgggtcacagtgcagcctccagccagaaggatggggtggctcccactcctgctgcttctgactcaatgcttagggg

SEQ ID NO: 44744 - DNA, 201 bp, Homo sapiens; identical to SEQ ID NO: 44670

SEQ ID NO: 44745 - DNA, 201 bp, Homo sapiens; identical to SEQ ID NO: 44671

SEQ ID NO: 44746 - DNA, 201 bp, Homo sapiens; identical to SEQ ID NO: 44672

SEQ ID NO: 44747 - DNA, 201 bp, Homo sapiens
gactgccgggccttccactacaacgtgagcagccatggttgccaactgctgccatggactcaacactcgccccacacgaggctgcggcgttctgggcgctrtgacctcttccagaagaaaggcaagtgggggtacacgcccactctccggaatggcctggaagagaacttctgccgtaaccctgatggcgaccccggaggt

SEQ ID NO: 44748 - DNA, 201 bp, Homo sapiens
aagagtgtgctggtcgctgtgggcccttaatggactgccgggccttccactacaacgtgagcagccatggttgccaactgctgccatggactcaacactcrccccacacgaggctgcggcgttctgggcgctgtgacctcttccagaagaaaggcaagtgggggtacacgcccactctccggaatggcctggaagagaact

SEQ ID NO: 44749 - DNA, 201 bp, Homo sapiens; identical to SEQ ID NO: 44676

SEQ ID NO: 44750 - DNA, 201 bp, Homo sapiens
gggtggctcccactcctgctgcttctgactcaatgcttaggggtccctggtaatgctccggggcacagagctacagcacctgctacatgcggtggtgcccrggccttggcaggaggatgtggcagatgctgaagagtgtgctggtcgctgtgggcccttaatggactgccgggccttccactacaacgtgagcagccatgg

SEQ ID NO: 44751 - DNA, 201 bp, Homo sapiens
gtaccttgccagcgttgggacgcgcaaatcccgcatcagcaccgatttacgccagaaaaatacgcgtgcaaagaccttcgggagaacttctgccggaaccycgacggctcagaggcgccctggtgcttcacactgcggcccggcatgcgcgcggccttttgctaccagatccggcgttgtacagacgacgtgcggccccag

SEQ ID NO: 44752 - DNA, 201 bp, Homo sapiens; identical to SEQ ID NO: 44679

SEQ ID NO: 44753 - DNA, 201 bp, Homo sapiens; identical to SEQ ID NO: 44682

SEQ ID NO: 44754 - DNA, 201 bp, Homo sapiens
gactgctaccacggcgcaggggagcagtaccgcggcacggtcagcaagacccgcaagggtgtccagtgccagcgctggtccgctgagacgccgcacaagcygcagtgagtccctggtgctcccggccccgccagggccctaaccctggggcggcatgctttggtgtctgggaccagagcctggaaatggttgagactaccc

SEQ ID NO: 44755 - DNA, 129 bp, Homo sapiens
cgctgagcctccagccgcgcacgcgcacyggcccgcgcccagcctccgctaggggaccccctccatggcttcccaccgggttgttccaggcctcagcttcgccgaaaggcctcaccacctccgacctcc

SEQ ID NO: 44756 - DNA, 201 bp, Homo sapiens; identical to SEQ ID NO: 44680

SEQ ID NO: 44757 - DNA, 201 bp, Homo sapiens; identical to SEQ ID NO: 44686

SEQ ID NO: 44758 - DNA, 201 bp, Homo sapiens; identical to SEQ ID NO: 44683

SEQ ID NO: 44759 - DNA, 201 bp, Homo sapiens
acgaggctgcggcgttctgggcgctgtgacctcttccagaagaaaggcaagtgggggtacacgcccactctccggaatggcctggaagagaacttctgccrtaaccctgatggcgaccccggaggtccttggtgctacacaacagaccctgctgtgcgcttccagagctgcggcatcaaatcctgccgggaggccgcgtgt

SEQ ID NO: 44760 - DNA, 201 bp, Homo sapiens; identical to SEQ ID NO: 44687

SEQ ID NO: 44761 - DNA, 201 bp, Homo sapiens
ggaccccccagcccaccccatcctacagaccaggtgcagtttgagaagtgtggcaagagggtggatcggctggatcagcggcgttccaagctgcgcgtggytgggggccatccgggcaactcaccctggacagtcagcttgcggaatcggcagggccagcatttctgcggggggtctctagtgaaggagcagtggatactg

SEQ ID NO: 44762 - DNA, 201 bp, Homo sapiens; identical to SEQ ID NO: 44690

SEQ ID NO: 44763 - DNA, 201 bp, Homo sapiens
ctccgaaccgcatgcacaactggaggagaacttctgccggaacccagatggggatagccatgggccctggtgctacacgatggacccaaggaccccattckactactgtgccctgcgacgctgcgctgatgaccagccgccatcaatcctggaccccccagcccaccccatcctacagaccaggtgcagtttgagaagtgt

SEQ ID NO: 44764 - DNA, 201 bp, Homo sapiens
gcccctcatggctcctgtcaccaggtctcaggtcagggtccagcaggccctgagctgacgtgtggagccagagccacccaatcccgtagggacaggtttcrcaacttcccggatggggctgtggtgggtcacagtgcagcctccagccagaaggatggggtggctcccactcctgctgcttctgactcaatgcttaggggt

SEQ ID NO: 44765 - DNA, 201 bp, Homo sapiens
ccactgcgggcgtaccttgccagcgttgggacgcgcaaatcccgcatcagcaccgatttacgccagaaaaatacgcgtgcaaagaccttcgggagaacttytgccggaaccccgacggctcagaggcgccctggtgcttcacactgcggcccggcatgcgcgcggccttttgctaccagatccggcgttgtacagacgacg

SEQ ID NO: 44766 - DNA, 201 bp, Homo sapiens
gccagagccacccaatcccgtagggacaggtttcacaacttcccggatggggctgtggtgggtcacagtgcagcctccagccagaaggatggggtggctcycactcctgctgcttctgactcaatgcttaggggtccctggtaatgctccggggcacagagctacagcacctgctacatgcggtggtgcccgggccttggc

SEQ ID NO: 44767 - DNA, 150 bp, Homo sapiens
cgctgagcctccagccgcgcacgcgcactggcccgcgcccagcctccgckaggggaccccctccatggcttcccaccgggttgttccaggcctcagcttcgccgaaaggcctcaccacctccgacctccgcctgccctggggatgctccc

SEQ ID NO: 44768 - DNA, 201 bp, Homo sapiens
ctgatggctgcccgcacccgccacagactgctaccacggcgcaggggagcagtaccgcggcacggtcagcaagacccgcaagggtgtccagtgccagcgckggtccgctgagacgccgcacaagccgcagtgagtccctggtgctcccggccccgccagggccctaaccctggggcggcatgctttggtgtctgggaccag

SEQ ID NO: 44769 - DNA, 201 bp, Homo sapiens
gccagggccctaaccctggggcggcatgctttggtgtctgggaccagagcctggaaatggttgagactaccctgccacgattttgctcccgcttccgcctmggttcacgtttacctccgaaccgcatgcacaactggaggagaacttctgccggaacccagatggggatagccatgggccctggtgctacacgatggaccc

SEQ ID NO: 44770 - DNA, 201 bp, Homo sapiens
cgcccagcctccgctaggggaccccctccatggcttcccaccgggttgttccaggcctcagcttcgccgaaaggcctcaccacctccgacctccgcctgcyctggggatgctcccagccctgctgcggcagaacgcgacatgctaaccggaatccctaggccgcctgtctcctacccatacttagaggccccgctcagacg

SEQ ID NO: 44771 - DNA, 201 bp, Homo sapiens; identical to SEQ ID NO: 44697

SEQ ID NO: 44772 - DNA, 201 bp, Homo sapiens
gaaaaatacgcgtgcaaagaccttcgggagaacttctgccggaaccccgacggctcagaggcgccctggtgcttcacactgcggcccggcatgcgcgcggscttttgctaccagatccggcgttgtacagacgacgtgcggccccagggtgaggcccaagcttgggggctacagagccgggctggaagcctggaaccggag

SEQ ID NO: 44773 - DNA, 201 bp, Homo sapiens
tcctggaccccccagcccaccccatcctacagaccaggtgcagtttgagaagtgtggcaagagggtggatcggctggatcagcggcgttccaagctgcgcktggttgggggccatccgggcaactcaccctggacagtcagcttgcggaatcggcagggccagcatttctgcggggggtctctagtgaaggagcagtggat

SEQ ID NO: 44774 - DNA, 201 bp, Homo sapiens; identical to SEQ ID NO: 44700

SEQ ID NO: 44775 - DNA, 201 bp, Homo sapiens; identical to SEQ ID NO: 44701

SEQ ID NO: 44776 - DNA, 201 bp, Homo sapiens
ctgtgggcccttaatggactgccgggccttccactacaacgtgagcagccatggttgccaactgctgccatggactcaacactcgccccacacgaggctgyggcgttctgggcgctgtgacctcttccagaagaaaggcaagtgggggtacacgcccactctccggaatggcctggaagagaacttctgccgtaaccctga

SEQ ID NO: 44777 - DNA, 201 bp, Homo sapiens; identical to SEQ ID NO: 44703

SEQ ID NO: 44778 - DNA, 201 bp, Homo sapiens; identical to SEQ ID NO: 44705

SEQ ID NO: 44779 - DNA, 201 bp, Homo sapiens; identical to SEQ ID NO: 44706

SEQ ID NO: 44780 - DNA, 201 bp, Homo sapiens
ctggatcagcggcgttccaagctgcgcgtggttgggggccatccgggcaactcaccctggacagtcagcttgcggaatcggcagggccagcatttctgcgsggggtctctagtgaaggagcagtggatactgactgcccggcagtgcttctcctcctgccatatgcctctcacgggctatgaggtatggttgggcaccctg

SEQ ID NO: 44781 - DNA, 201 bp, Homo sapiens
gttccaagctgcgcgtggttgggggccatccgggcaactcaccctggacagtcagcttgcggaatcggcagggccagcatttctgcggggggtctctagtraaggagcagtggatactgactgcccggcagtgcttctcctcctgccatatgcctctcacgggctatgaggtatggttgggcaccctgttccagaacccac

SEQ ID NO: 44782 - DNA, 201 bp, Homo sapiens
gtgtggcaagagggtggatcggctggatcagcggcgttccaagctgcgcgtggttgggggccatccgggcaactcaccctggacagtcagcttgcggaatyggcagggccagcatttctgcggggggtctctagtgaaggagcagtggatactgactgcccggcagtgcttctcctcctgccatatgcctctcacgggcta

SEQ ID NO: 44783 - DNA, 201 bp, Homo sapiens; identical to SEQ ID NO: 44710

SEQ ID NO: 44784 - DNA, 201 bp, Homo sapiens; identical to SEQ ID NO: 44711

SEQ ID NO: 44785 - DNA, 201 bp, Homo sapiens; identical to SEQ ID NO: 44712

SEQ ID NO: 44786 - DNA, 201 bp, Homo sapiens
caactgtcagctgcttccgcgggaagggtgagggctaccggggcacagccaataccaccactgcgggcgtaccttgccagcgttgggacgcgcaaatcccdcatcagcaccgatttacgccagaaaaatacgcgtgcaaagaccttcgggagaacttctgccggaaccccgacggctcagaggcgccctggtgcttcacac

SEQ ID NO: 44787 - DNA, 201 bp, Homo sapiens
ctggtcgctgtgggcccttaatggactgccgggccttccactacaacgtgagcagccatggttgccaactgctgccatggactcaacactcgccccacacraggctgcggcgttctgggcgctgtgacctcttccagaagaaaggcaagtgggggtacacgcccactctccggaatggcctggaagagaacttctgccgta

SEQ ID NO: 44788 - DNA, 201 bp, Homo sapiens
ccagtgccagcgctggtccgctgagacgccgcacaagccgcagtgagtccctggtgctcccggccccgccagggccctaaccctggggcggcatgctttgrtgtctgggaccagagcctggaaatggttgagactaccctgccacgattttgctcccgcttccgcctaggttcacgtttacctccgaaccgcatgcacaac

SEQ ID NO: 44789 - DNA, 201 bp, Homo sapiens
tgagaagtgtggcaagagggtggatcggctggatcagcggcgttccaagctgcgcgtggttgggggccatccgggcaactcaccctggacagtcagcttgsggaatcggcagggccagcatttctgcggggggtctctagtgaaggagcagtggatactgactgcccggcagtgcttctcctcctgccatatgcctctcac

SEQ ID NO: 44790 - DNA, 201 bp, Homo sapiens
accagccgccatcaatcctggaccccccagcccaccccatcctacagaccaggtgcagtttgagaagtgtggcaagagggtggatcggctggatcagcggygttccaagctgcgcgtggttgggggccatccgggcaactcaccctggacagtcagcttgcggaatcggcagggccagcatttctgcggggggtctctagt

SEQ ID NO: 44791 - DNA, 201 bp, Homo sapiens
tgccacgattttgctcccgcttccgcctaggttcacgtttacctccgaaccgcatgcacaactggaggagaacttctgccggaacccagatggggatagcyatgggccctggtgctacacgatggacccaaggaccccattcgactactgtgccctgcgacgctgcgctgatgaccagccgccatcaatcctggacccccc

SEQ ID NO: 44792 - DNA, 201 bp, Homo sapiens
agactaccctgccacgattttgctcccgcttccgcctaggttcacgtttacctccgaaccgcatgcacaactggaggagaacttctgccggaacccagatrgggatagccatgggccctggtgctacacgatggacccaaggaccccattcgactactgtgccctgcgacgctgcgctgatgaccagccgccatcaatcct

SEQ ID NO: 44793 - DNA, 201 bp, Homo sapiens
ggaaatggttgagactaccctgccacgattttgctcccgcttccgcctaggttcacgtttacctccgaaccgcatgcacaactggaggagaacttctgccrgaacccagatggggatagccatgggccctggtgctacacgatggacccaaggaccccattcgactactgtgccctgcgacgctgcgctgatgaccagccg

SEQ ID NO: 44794 - DNA, 201 bp, Homo sapiens
gcatgctttggtgtctgggaccagagcctggaaatggttgagactaccctgccacgattttgctcccgcttccgcctaggttcacgtttacctccgaaccrcatgcacaactggaggagaacttctgccggaacccagatggggatagccatgggccctggtgctacacgatggacccaaggaccccattcgactactgtg

SEQ ID NO: 44795 - DNA, 201 bp, Homo sapiens
cctaaccctggggcggcatgctttggtgtctgggaccagagcctggaaatggttgagactaccctgccacgattttgctcccgcttccgcctaggttcacrtttacctccgaaccgcatgcacaactggaggagaacttctgccggaacccagatggggatagccatgggccctggtgctacacgatggacccaaggaccc

SEQ ID NO: 44796 - DNA, 201 bp, Homo sapiens
tccctggtgctcccggccccgccagggccctaaccctggggcggcatgctttggtgtctgggaccagagcctggaaatggttgagactaccctgccacgaytttgctcccgcttccgcctaggttcacgtttacctccgaaccgcatgcacaactggaggagaacttctgccggaacccagatggggatagccatgggccc

SEQ ID NO: 44797 - DNA, 201 bp, Homo sapiens
agcagtaccgcggcacggtcagcaagacccgcaagggtgtccagtgccagcgctggtccgctgagacgccgcacaagccgcagtgagtccctggtgctccyggccccgccagggccctaaccctggggcggcatgctttggtgtctgggaccagagcctggaaatggttgagactaccctgccacgattttgctcccgctt

SEQ ID NO: 44798 - DNA, 201 bp, Homo sapiens
aagaccttcgggagaacttctgccggaaccccgacggctcagaggcgccctggtgcttcacactgcggcccggcatgcgcgcggccttttgctaccagatmcggcgttgtacagacgacgtgcggccccagggtgaggcccaagcttgggggctacagagccgggctggaagcctggaaccggagggccggggcgaggtct

SEQ ID NO: 44799 - DNA, 201 bp, Homo sapiens
ccactacaacgtgagcagccatggttgccaactgctgccatggactcaacactcgccccacacgaggctgcggcgttctgggcgctgtgacctcttccagragaaaggcaagtgggggtacacgcccactctccggaatggcctggaagagaacttctgccgtaaccctgatggcgaccccggaggtccttggtgctacac

SEQ ID NO: 44800 - DNA, 201 bp, Homo sapiens; identical to SEQ ID NO: 44721

SEQ ID NO: 44801 - DNA, 201 bp, Homo sapiens
gaccagccgccatcaatcctggaccccccagcccaccccatcctacagaccaggtgcagtttgagaagtgtggcaagagggtggatcggctggatcagcgkcgttccaagctgcgcgtggttgggggccatccgggcaactcaccctggacagtcagcttgcggaatcggcagggccagcatttctgcggggggtctctag

SEQ ID NO: 44802 - DNA, 201 bp, Homo sapiens
tttacgccagaaaaatacgcgtgcaaagaccttcgggagaacttctgccggaaccccgacggctcagaggcgccctggtgcttcacactgcggcccggcaygcgcgcggccttttgctaccagatccggcgttgtacagacgacgtgcggccccagggtgaggcccaagcttgggggctacagagccgggctggaagcctg

SEQ ID NO: 44803 - DNA, 201 bp, Homo sapiens
cgcatcagcaccgatttacgccagaaaaatacgcgtgcaaagaccttcgggagaacttctgccggaaccccgacggctcagaggcgccctggtgcttcacmctgcggcccggcatgcgcgcggccttttgctaccagatccggcgttgtacagacgacgtgcggccccagggtgaggcccaagcttgggggctacagagcc

SEQ ID NO: 44804 - DNA, 201 bp, Homo sapiens
cggccccgccagggccctaaccctggggcggcatgctttggtgtctgggaccagagcctggaaatggttgagactaccctgccacgattttgctcccgctyccgcctaggttcacgtttacctccgaaccgcatgcacaactggaggagaacttctgccggaacccagatggggatagccatgggccctggtgctacacga

SEQ ID NO: 44805 - DNA, 201 bp, Homo sapiens
tgatggctgcccgcacccgccacagactgctaccacggcgcaggggagcagtaccgcggcacggtcagcaagacccgcaagggtgtccagtgccagcgctsgtccgctgagacgccgcacaagccgcagtgagtccctggtgctcccggccccgccagggccctaaccctggggcggcatgctttggtgtctgggaccaga

SEQ ID NO: 44806 - DNA, 201 bp, Homo sapiens
gcaagttcctcgaccaaggtctggacgacaactattgccggaatcctgacggctccgagcggccatggtgctacactacggatccgcagatcgagcgagarttctgtgacctcccccgctgcgggtccgaggcacagccccgccaagaggccacaactgtcagctgcttccgcgggaagggtgagggctaccggggcacag

SEQ ID NO: 44807 - DNA, 201 bp, Homo sapiens; identical to SEQ ID NO: 44730

SEQ ID NO: 44808 - DNA, 201 bp, Homo sapiens
ttcagcacccgcaccagcaccccttcgagccgggcaagttcctcgaccaaggtctggacgacaactattgccggaatcctgacggctccgagcggccatgrtgctacactacggatccgcagatcgagcgagagttctgtgacctcccccgctgcgggtccgaggcacagccccgccaagaggccacaactgtcagctgct

SEQ ID NO: 44809 - DNA, 165 bp, Homo sapiens
cgctgagcctccagccgcgcacgcgcactggcccgcgcccagcctccgctaggggaccccctccrtggcttcccaccgggttgttccaggcctcagcttcgccgaaaggcctcaccacctccgacctccgcctgccctggggatgctcccagccctgctgcggca

SEQ ID NO: 44810 - DNA, 201 bp, Homo sapiens
gcgctgggatcttcagcacccgcaccagcaccccttcgagccgggcaagttcctcgaccaaggtctggacgacaactattgccggaatcctgacggctccsagcggccatggtgctacactacggatccgcagatcgagcgagagttctgtgacctcccccgctgcgggtccgaggcacagccccgccaagaggccacaac

SEQ ID NO: 44811 - DNA, 201 bp, Homo sapiens
gggcgcgagtgccagcgctgggatcttcagcacccgcaccagcaccccttcgagccgggcaagttcctcgaccaaggtctggacgacaactattgccggartcctgacggctccgagcggccatggtgctacactacggatccgcagatcgagcgagagttctgtgacctcccccgctgcgggtccgaggcacagccccgc

SEQ ID NO: 44812 - DNA, 201 bp, Homo sapiens; identical to SEQ ID NO: 44734

SEQ ID NO: 44813 - DNA, 201 bp, Homo sapiens; identical to SEQ ID NO: 44736

SEQ ID NO: 44814 - DNA, 201 bp, Homo sapiens; identical to SEQ ID NO: 44735

SEQ ID NO: 44815 - DNA, 178 bp, Homo sapiens; identical to SEQ ID NO: 44737

SEQ ID NO: 44816 - DNA, 201 bp, Homo sapiens; identical to SEQ ID NO: 44739

SEQ ID NO: 44817 - DNA, 201 bp, Homo sapiens; identical to SEQ ID NO: 44667

SEQ ID NO: 44818 - DNA, 201 bp, Homo sapiens; identical to SEQ ID NO: 44741

SEQ ID NO: 44819 - DNA, 201 bp, Homo sapiens; identical to SEQ ID NO: 44669

SEQ ID NO: 44820 - DNA, 201 bp, Homo sapiens; identical to SEQ ID NO: 44670

SEQ ID NO: 44821 - DNA, 201 bp, Homo sapiens; identical to SEQ ID NO: 44743

SEQ ID NO: 44822 - DNA, 201 bp, Homo sapiens; identical to SEQ ID NO: 44671

SEQ ID NO: 44823 - DNA, 201 bp, Homo sapiens; identical to SEQ ID NO: 44672

SEQ ID NO: 44824 - DNA, 201 bp, Homo sapiens
ctgcatcatgaacaatggggttgggtaccggggcaccatggccacgaccgtgggtggcctgccctgccaggcttggagccacaagttcccgaatgatcacmagtacacgcccactctccggaatggcctggaagagaacttctgccgtaaccctgatggcgaccccggaggtccttggtgctacacaacagaccctgctgt

SEQ ID NO: 44825 - DNA, 201 bp, Homo sapiens
gactgccgggccttccactacaacgtgagcagccatggttgccaactgctgccatggactcaacactcgccccacacgaggctgcggcgttctgggcgctrtgacctcttccagaagaaagactacgtacggacctgcatcatgaacaatggggttgggtaccggggcaccatggccacgaccgtgggtggcctgccctgc

SEQ ID NO: 44826 - DNA, 201 bp, Homo sapiens
aagagtgtgctggtcgctgtgggcccttaatggactgccgggccttccactacaacgtgagcagccatggttgccaactgctgccatggactcaacactcrccccacacgaggctgcggcgttctgggcgctgtgacctcttccagaagaaagactacgtacggacctgcatcatgaacaatggggttgggtaccggggca

SEQ ID NO: 44827 - DNA, 201 bp, Homo sapiens
ccttcgggagaacttctgccggaaccccgacggctcagaggcgccctggtgcttcacactgcggcccggcatgcgcgcggccttttgctaccagatccggygttgtacagacgacgtgcggccccaggactgctaccacggcgcaggggagcagtaccgcggcacggtcagcaagacccgcaagggtgtccagtgccagcg

SEQ ID NO: 44828 - DNA, 201 bp, Homo sapiens
gactcaatgcttaggggtccctgggcagcgctcgccattgaatgacttccaagtgctccggggcacagagctacagcacctgctacatgcggtggtgcccrggccttggcaggaggatgtggcagatgctgaagagtgtgctggtcgctgtgggcccttaatggactgccgggccttccactacaacgtgagcagccatgg

SEQ ID NO: 44829 - DNA, 201 bp, Homo sapiens; identical to SEQ ID NO: 44751

SEQ ID NO: 44830 - DNA, 201 bp, Homo sapiens
acgtacggacctgcatcatgaacaatggggttgggtaccggggcaccatggccacgaccgtgggtggcctgccctgccaggcttggagccacaagttcccraatgatcacaagtacacgcccactctccggaatggcctggaagagaacttctgccgtaaccctgatggcgaccccggaggtccttggtgctacacaacag

SEQ ID NO: 44831 - DNA, 201 bp, Homo sapiens; identical to SEQ ID NO: 44679

SEQ ID NO: 44832 - DNA, 129 bp, Homo sapiens; identical to SEQ ID NO: 44755

SEQ ID NO: 44833 - DNA, 201 bp, Homo sapiens; identical to SEQ ID NO: 44682

SEQ ID NO: 44834 - DNA, 201 bp, Homo sapiens; identical to SEQ ID NO: 44680

SEQ ID NO: 44835 - DNA, 201 bp, Homo sapiens
gactgctaccacggcgcaggggagcagtaccgcggcacggtcagcaagacccgcaagggtgtccagtgccagcgctggtccgctgagacgccgcacaagcygcagttcacgtttacctccgaaccgcatgcacaactggaggagaacttctgccggaacccagatggggatagccatgggccctggtgctacacgatggac

SEQ ID NO: 44836 - DNA, 201 bp, Homo sapiens; identical to SEQ ID NO: 44683

SEQ ID NO: 44837 - DNA, 201 bp, Homo sapiens
accgtgggtggcctgccctgccaggcttggagccacaagttcccgaatgatcacaagtacacgcccactctccggaatggcctggaagagaacttctgccrtaaccctgatggcgaccccggaggtccttggtgctacacaacagaccctgctgtgcgcttccagagctgcggcatcaaatcctgccgggaggccgcgtgt

SEQ ID NO: 44838 - DNA, 201 bp, Homo sapiens; identical to SEQ ID NO: 44686

SEQ ID NO: 44839 - DNA, 201 bp, Homo sapiens; identical to SEQ ID NO: 44687

SEQ ID NO: 44840 - DNA, 201 bp, Homo sapiens; identical to SEQ ID NO: 44688

SEQ ID NO: 44841 - DNA, 201 bp, Homo sapiens; identical to SEQ ID NO: 44690

SEQ ID NO: 44842 - DNA, 201 bp, Homo sapiens
ctccgaaccgcatgcacaactggaggagaacttctgccggaacccagatggggatagccatgggccctggtgctacacgatggacccaaggaccccattckactactgtgccctgcgacgctgcgctgatgaccagccgccatcaatcctggaccccccagaccaggtgcagtttgagaagtgtggcaagagggtggatcg

SEQ ID NO: 44843 - DNA, 201 bp, Homo sapiens; identical to SEQ ID NO: 44764

SEQ ID NO: 44844 - DNA, 201 bp, Homo sapiens; identical to SEQ ID NO: 44765

SEQ ID NO: 44845 - DNA, 201 bp, Homo sapiens
gccagagccacccaatcccgtagggacaggtttcacaacttcccggatggggctgtggtgggtcacagtgcagcctccagccagaaggatggggtggctcycactcctgctgcttctgactcaatgcttaggggtccctgggcagcgctcgccattgaatgacttccaagtgctccggggcacagagctacagcacctgct

SEQ ID NO: 44846 - DNA, 201 bp, Homo sapiens
ttgtacagacgacgtgcggccccaggactgctaccacggcgcaggggagcagtaccgcggcacggtcagcaagacccgcaagggtgtccagtgccagcgckggtccgctgagacgccgcacaagccgcagttcacgtttacctccgaaccgcatgcacaactggaggagaacttctgccggaacccagatggggatagcca

SEQ ID NO: 44847 - DNA, 150 bp, Homo sapiens; identical to SEQ ID NO: 44767

SEQ ID NO: 44848 - DNA, 201 bp, Homo sapiens
gctaccacggcgcaggggagcagtaccgcggcacggtcagcaagacccgcaagggtgtccagtgccagcgctggtccgctgagacgccgcacaagccgcamttcacgtttacctccgaaccgcatgcacaactggaggagaacttctgccggaacccagatggggatagccatgggccctggtgctacacgatggacccaa

SEQ ID NO: 44849 - DNA, 201 bp, Homo sapiens; identical to SEQ ID NO: 44770

SEQ ID NO: 44850 - DNA, 201 bp, Homo sapiens
gagcagccatggttgccaactgctgccatggactcaacactcgccccacacgaggctgcggcgttctgggcgctgtgacctcttccagaagaaagactacrtacggacctgcatcatgaacaatggggttgggtaccggggcaccatggccacgaccgtgggtggcctgccctgccaggcttggagccacaagttcccgaa

SEQ ID NO: 44851 - DNA, 201 bp, Homo sapiens; identical to SEQ ID NO: 44697

SEQ ID NO: 44852 - DNA, 201 bp, Homo sapiens; identical to SEQ ID NO: 44698

SEQ ID NO: 44853 - DNA, 201 bp, Homo sapiens
gaaaaatacgcgtgcaaagaccttcgggagaacttctgccggaaccccgacggctcagaggcgccctggtgcttcacactgcggcccggcatgcgcgcggscttttgctaccagatccggcgttgtacagacgacgtgcggccccaggactgctaccacggcgcaggggagcagtaccgcggcacggtcagcaagacccgc

SEQ ID NO: 44854 - DNA, 201 bp, Homo sapiens; identical to SEQ ID NO: 44700

SEQ ID NO: 44855 - DNA, 201 bp, Homo sapiens; identical to SEQ ID NO: 44701

SEQ ID NO: 44856 - DNA, 201 bp, Homo sapiens; identical to SEQ ID NO: 44703

SEQ ID NO: 44857 - DNA, 201 bp, Homo sapiens
ctgtgggcccttaatggactgccgggccttccactacaacgtgagcagccatggttgccaactgctgccatggactcaacactcgccccacacgaggctgyggcgttctgggcgctgtgacctcttccagaagaaagactacgtacggacctgcatcatgaacaatggggttgggtaccggggcaccatggccacgaccgt

SEQ ID NO: 44858 - DNA, 201 bp, Homo sapiens; identical to SEQ ID NO: 44705

SEQ ID NO: 44859 - DNA, 201 bp, Homo sapiens; identical to SEQ ID NO: 44780

SEQ ID NO: 44860 - DNA, 201 bp, Homo sapiens; identical to SEQ ID NO: 44706

SEQ ID NO: 44861 - DNA, 201 bp, Homo sapiens; identical to SEQ ID NO: 44781

SEQ ID NO: 44862 - DNA, 201 bp, Homo sapiens; identical to SEQ ID NO: 44782

SEQ ID NO: 44863 - DNA, 201 bp, Homo sapiens; identical to SEQ ID NO: 44710

SEQ ID NO: 44864 - DNA, 201 bp, Homo sapiens; identical to SEQ ID NO: 44711

SEQ ID NO: 44865 - DNA, 201 bp, Homo sapiens
tacggacctgcatcatgaacaatggggttgggtaccggggcaccatggccacgaccgtgggtggcctgccctgccaggcttggagccacaagttcccgaaygatcacaagtacacgcccactctccggaatggcctggaagagaacttctgccgtaaccctgatggcgaccccggaggtccttggtgctacacaacagacc

SEQ ID NO: 44866 - DNA, 201 bp, Homo sapiens; identical to SEQ ID NO: 44786

SEQ ID NO: 44867 - DNA, 201 bp, Homo sapiens
ctggtcgctgtgggcccttaatggactgccgggccttccactacaacgtgagcagccatggttgccaactgctgccatggactcaacactcgccccacacraggctgcggcgttctgggcgctgtgacctcttccagaagaaagactacgtacggacctgcatcatgaacaatggggttgggtaccggggcaccatggcca

SEQ ID NO: 44868 - DNA, 201 bp, Homo sapiens; identical to SEQ ID NO: 44789

SEQ ID NO: 44869 - DNA, 201 bp, Homo sapiens; identical to SEQ ID NO: 44716

SEQ ID NO: 44870 - DNA, 201 bp, Homo sapiens
ctggtccgctgagacgccgcacaagccgcagttcacgtttacctccgaaccgcatgcacaactggaggagaacttctgccggaacccagatggggatagcyatgggccctggtgctacacgatggacccaaggaccccattcgactactgtgccctgcgacgctgcgctgatgaccagccgccatcaatcctggacccccc

SEQ ID NO: 44871 - DNA, 201 bp, Homo sapiens
gtgccagcgctggtccgctgagacgccgcacaagccgcagttcacgtttacctccgaaccgcatgcacaactggaggagaacttctgccggaacccagatrgggatagccatgggccctggtgctacacgatggacccaaggaccccattcgactactgtgccctgcgacgctgcgctgatgaccagccgccatcaatcct

SEQ ID NO: 44872 - DNA, 201 bp, Homo sapiens
aagggtgtccagtgccagcgctggtccgctgagacgccgcacaagccgcagttcacgtttacctccgaaccgcatgcacaactggaggagaacttctgccrgaacccagatggggatagccatgggccctggtgctacacgatggacccaaggaccccattcgactactgtgccctgcgacgctgcgctgatgaccagccg

SEQ ID NO: 44873 - DNA, 201 bp, Homo sapiens
agtaccgcggcacggtcagcaagacccgcaagggtgtccagtgccagcgctggtccgctgagacgccgcacaagccgcagttcacgtttacctccgaaccrcatgcacaactggaggagaacttctgccggaacccagatggggatagccatgggccctggtgctacacgatggacccaaggaccccattcgactactgtg

SEQ ID NO: 44874 - DNA, 201 bp, Homo sapiens
acggcgcaggggagcagtaccgcggcacggtcagcaagacccgcaagggtgtccagtgccagcgctggtccgctgagacgccgcacaagccgcagttcacrtttacctccgaaccgcatgcacaactggaggagaacttctgccggaacccagatggggatagccatgggccctggtgctacacgatggacccaaggaccc

SEQ ID NO: 44875 - DNA, 201 bp, Homo sapiens
aagaccttcgggagaacttctgccggaaccccgacggctcagaggcgccctggtgcttcacactgcggcccggcatgcgcgcggccttttgctaccagatmcggcgttgtacagacgacgtgcggccccaggactgctaccacggcgcaggggagcagtaccgcggcacggtcagcaagacccgcaagggtgtccagtgcc

SEQ ID NO: 44876 - DNA, 201 bp, Homo sapiens; identical to SEQ ID NO: 44721

SEQ ID NO: 44877 - DNA, 201 bp, Homo sapiens
ccactacaacgtgagcagccatggttgccaactgctgccatggactcaacactcgccccacacgaggctgcggcgttctgggcgctgtgacctcttccagragaaagactacgtacggacctgcatcatgaacaatggggttgggtaccggggcaccatggccacgaccgtgggtggcctgccctgccaggcttggagcca

SEQ ID NO: 44878 - DNA, 201 bp, Homo sapiens; identical to SEQ ID NO: 44723

SEQ ID NO: 44879 - DNA, 201 bp, Homo sapiens
tttacgccagaaaaatacgcgtgcaaagaccttcgggagaacttctgccggaaccccgacggctcagaggcgccctggtgcttcacactgcggcccggcaygcgcgcggccttttgctaccagatccggcgttgtacagacgacgtgcggccccaggactgctaccacggcgcaggggagcagtaccgcggcacggtcagc

SEQ ID NO: 44880 - DNA, 201 bp, Homo sapiens
cgcatcagcaccgatttacgccagaaaaatacgcgtgcaaagaccttcgggagaacttctgccggaaccccgacggctcagaggcgccctggtgcttcacmctgcggcccggcatgcgcgcggccttttgctaccagatccggcgttgtacagacgacgtgcggccccaggactgctaccacggcgcaggggagcagtacc

SEQ ID NO: 44881 - DNA, 201 bp, Homo sapiens
tgtacagacgacgtgcggccccaggactgctaccacggcgcaggggagcagtaccgcggcacggtcagcaagacccgcaagggtgtccagtgccagcgctsgtccgctgagacgccgcacaagccgcagttcacgtttacctccgaaccgcatgcacaactggaggagaacttctgccggaacccagatggggatagccat

SEQ ID NO: 44882 - DNA, 201 bp, Homo sapiens; identical to SEQ ID NO: 44806

SEQ ID NO: 44883 - DNA, 201 bp, Homo sapiens; identical to SEQ ID NO: 44808

SEQ ID NO: 44884 - DNA, 201 bp, Homo sapiens; identical to SEQ ID NO: 44730

SEQ ID NO: 44885 - DNA, 201 bp, Homo sapiens; identical to SEQ ID NO: 44810

SEQ ID NO: 44886 - DNA, 165 bp, Homo sapiens; identical to SEQ ID NO: 44809

SEQ ID NO: 44887 - DNA, 201 bp, Homo sapiens; identical to SEQ ID NO: 44811

SEQ ID NO: 44888 - DNA, 201 bp, Homo sapiens; identical to SEQ ID NO: 44734

SEQ ID NO: 44889 - DNA, 201 bp, Homo sapiens; identical to SEQ ID NO: 44735

SEQ ID NO: 44890 - DNA, 201 bp, Homo sapiens; identical to SEQ ID NO: 44736

SEQ ID NO: 44891 - DNA, 178 bp, Homo sapiens; identical to SEQ ID NO: 44737

SEQ ID NO: 44892 - DNA, 201 bp, Homo sapiens; identical to SEQ ID NO: 44739

SEQ ID NO: 44893 - DNA, 201 bp, Homo sapiens; identical to SEQ ID NO: 44667

SEQ ID NO: 44894 - DNA, 201 bp, Homo sapiens; identical to SEQ ID NO: 44741

SEQ ID NO: 44895 - DNA, 201 bp, Homo sapiens; identical to SEQ ID NO: 44669

SEQ ID NO: 44896 - DNA, 201 bp, Homo sapiens; identical to SEQ ID NO: 44670

SEQ ID NO: 44897 - DNA, 201 bp, Homo sapiens; identical to SEQ ID NO: 44743

SEQ ID NO: 44898 - DNA, 201 bp, Homo sapiens; identical to SEQ ID NO: 44671

SEQ ID NO: 44899 - DNA, 201 bp, Homo sapiens; identical to SEQ ID NO: 44672

SEQ ID NO: 44900 - DNA, 201 bp, Homo sapiens; identical to SEQ ID NO: 44747

SEQ ID NO: 44901 - DNA, 201 bp, Homo sapiens; identical to SEQ ID NO: 44748

SEQ ID NO: 44902 - DNA, 201 bp, Homo sapiens; identical to SEQ ID NO: 44827

SEQ ID NO: 44903 - DNA, 201 bp, Homo sapiens; identical to SEQ ID NO: 44750

SEQ ID NO: 44904 - DNA, 201 bp, Homo sapiens; identical to SEQ ID NO: 44751

SEQ ID NO: 44905 - DNA, 201 bp, Homo sapiens; identical to SEQ ID NO: 44679

SEQ ID NO: 44906 - DNA, 129 bp, Homo sapiens; identical to SEQ ID NO: 44755

SEQ ID NO: 44907 - DNA, 201 bp, Homo sapiens; identical to SEQ ID NO: 44682

SEQ ID NO: 44908 - DNA, 201 bp, Homo sapiens; identical to SEQ ID NO: 44680

SEQ ID NO: 44909 - DNA, 201 bp, Homo sapiens; identical to SEQ ID NO: 44835

SEQ ID NO: 44910 - DNA, 201 bp, Homo sapiens; identical to SEQ ID NO: 44683

SEQ ID NO: 44911 - DNA, 201 bp, Homo sapiens; identical to SEQ ID NO: 44759

SEQ ID NO: 44912 - DNA, 201 bp, Homo sapiens; identical to SEQ ID NO: 44686

SEQ ID NO: 44913 - DNA, 201 bp, Homo sapiens
ttcgactactgtgccctgcgacgctgcgaccaggtgcagtttgagaagtgtggcaagagggtggatcggctggatcagcggcgttccaagctgcgcgtggytgggggccatccgggcaactcaccctggacagtcagcttgcggaatcggcagggccagcatttctgcggggggtctctagtgaaggagcagtggatactg

SEQ ID NO: 44914 - DNA, 201 bp, Homo sapiens; identical to SEQ ID NO: 44687

SEQ ID NO: 44915 - DNA, 201 bp, Homo sapiens; identical to SEQ ID NO: 44690

SEQ ID NO: 44916 - DNA, 201 bp, Homo sapiens
ctccgaaccgcatgcacaactggaggagaacttctgccggaacccagatggggatagccatgggccctggtgctacacgatggacccaaggaccccattckactactgtgccctgcgacgctgcgaccaggtgcagtttgagaagtgtggcaagagggtggatcggctggatcagcggcgttccaagctgcgcgtggttgg

SEQ ID NO: 44917 - DNA, 201 bp, Homo sapiens; identical to SEQ ID NO: 44764

SEQ ID NO: 44918 - DNA, 201 bp, Homo sapiens; identical to SEQ ID NO: 44765

SEQ ID NO: 44919 - DNA, 201 bp, Homo sapiens; identical to SEQ ID NO: 44766

SEQ ID NO: 44920 - DNA, 201 bp, Homo sapiens; identical to SEQ ID NO: 44846

SEQ ID NO: 44921 - DNA, 150 bp, Homo sapiens; identical to SEQ ID NO: 44767

SEQ ID NO: 44922 - DNA, 201 bp, Homo sapiens; identical to SEQ ID NO: 44848

SEQ ID NO: 44923 - DNA, 201 bp, Homo sapiens; identical to SEQ ID NO: 44770

SEQ ID NO: 44924 - DNA, 201 bp, Homo sapiens; identical to SEQ ID NO: 44697

SEQ ID NO: 44925 - DNA, 201 bp, Homo sapiens
cccattcgactactgtgccctgcgacgctgcgaccaggtgcagtttgagaagtgtggcaagagggtggatcggctggatcagcggcgttccaagctgcgcktggttgggggccatccgggcaactcaccctggacagtcagcttgcggaatcggcagggccagcatttctgcggggggtctctagtgaaggagcagtggat

SEQ ID NO: 44926 - DNA, 201 bp, Homo sapiens; identical to SEQ ID NO: 44853

SEQ ID NO: 44927 - DNA, 201 bp, Homo sapiens; identical to SEQ ID NO: 44700

SEQ ID NO: 44928 - DNA, 201 bp, Homo sapiens; identical to SEQ ID NO: 44701

SEQ ID NO: 44929 - DNA, 201 bp, Homo sapiens; identical to SEQ ID NO: 44703

SEQ ID NO: 44930 - DNA, 201 bp, Homo sapiens; identical to SEQ ID NO: 44776

SEQ ID NO: 44931 - DNA, 201 bp, Homo sapiens; identical to SEQ ID NO: 44705

SEQ ID NO: 44932 - DNA, 201 bp, Homo sapiens; identical to SEQ ID NO: 44780

SEQ ID NO: 44933 - DNA, 201 bp, Homo sapiens; identical to SEQ ID NO: 44706

SEQ ID NO: 44934 - DNA, 201 bp, Homo sapiens; identical to SEQ ID NO: 44781

SEQ ID NO: 44935 - DNA, 201 bp, Homo sapiens; identical to SEQ ID NO: 44782

SEQ ID NO: 44936 - DNA, 201 bp, Homo sapiens; identical to SEQ ID NO: 44710

SEQ ID NO: 44937 - DNA, 201 bp, Homo sapiens; identical to SEQ ID NO: 44711

SEQ ID NO: 44938 - DNA, 201 bp, Homo sapiens; identical to SEQ ID NO: 44786

SEQ ID NO: 44939 - DNA, 201 bp, Homo sapiens; identical to SEQ ID NO: 44787

SEQ ID NO: 44940 - DNA, 201 bp, Homo sapiens; identical to SEQ ID NO: 44789

SEQ ID NO: 44941 - DNA, 201 bp, Homo sapiens
gatggacccaaggaccccattcgactactgtgccctgcgacgctgcgaccaggtgcagtttgagaagtgtggcaagagggtggatcggctggatcagcggygttccaagctgcgcgtggttgggggccatccgggcaactcaccctggacagtcagcttgcggaatcggcagggccagcatttctgcggggggtctctagt

SEQ ID NO: 44942 - DNA, 201 bp, Homo sapiens
ctggtccgctgagacgccgcacaagccgcagttcacgtttacctccgaaccgcatgcacaactggaggagaacttctgccggaacccagatggggatagcyatgggccctggtgctacacgatggacccaaggaccccattcgactactgtgccctgcgacgctgcgaccaggtgcagtttgagaagtgtggcaagagggt

SEQ ID NO: 44943 - DNA, 201 bp, Homo sapiens
gtgccagcgctggtccgctgagacgccgcacaagccgcagttcacgtttacctccgaaccgcatgcacaactggaggagaacttctgccggaacccagatrgggatagccatgggccctggtgctacacgatggacccaaggaccccattcgactactgtgccctgcgacgctgcgaccaggtgcagtttgagaagtgtgg

SEQ ID NO: 44944 - DNA, 201 bp, Homo sapiens
aagggtgtccagtgccagcgctggtccgctgagacgccgcacaagccgcagttcacgtttacctccgaaccgcatgcacaactggaggagaacttctgccrgaacccagatggggatagccatgggccctggtgctacacgatggacccaaggaccccattcgactactgtgccctgcgacgctgcgaccaggtgcagttt

SEQ ID NO: 44945 - DNA, 201 bp, Homo sapiens; identical to SEQ ID NO: 44873

SEQ ID NO: 44946 - DNA, 201 bp, Homo sapiens; identical to SEQ ID NO: 44874

SEQ ID NO: 44947 - DNA, 201 bp, Homo sapiens; identical to SEQ ID NO: 44875

SEQ ID NO: 44948 - DNA, 201 bp, Homo sapiens; identical to SEQ ID NO: 44721

SEQ ID NO: 44949 - DNA, 201 bp, Homo sapiens; identical to SEQ ID NO: 44799

SEQ ID NO: 44950 - DNA, 201 bp, Homo sapiens
cgatggacccaaggaccccattcgactactgtgccctgcgacgctgcgaccaggtgcagtttgagaagtgtggcaagagggtggatcggctggatcagcgkcgttccaagctgcgcgtggttgggggccatccgggcaactcaccctggacagtcagcttgcggaatcggcagggccagcatttctgcggggggtctctag

SEQ ID NO: 44951 - DNA, 201 bp, Homo sapiens; identical to SEQ ID NO: 44879

SEQ ID NO: 44952 - DNA, 201 bp, Homo sapiens; identical to SEQ ID NO: 44880

SEQ ID NO: 44953 - DNA, 201 bp, Homo sapiens; identical to SEQ ID NO: 44881

SEQ ID NO: 44954 - DNA, 201 bp, Homo sapiens; identical to SEQ ID NO: 44806

SEQ ID NO: 44955 - DNA, 201 bp, Homo sapiens; identical to SEQ ID NO: 44808

SEQ ID NO: 44956 - DNA, 201 bp, Homo sapiens; identical to SEQ ID NO: 44730

SEQ ID NO: 44957 - DNA, 165 bp, Homo sapiens; identical to SEQ ID NO: 44809

SEQ ID NO: 44958 - DNA, 201 bp, Homo sapiens; identical to SEQ ID NO: 44810

SEQ ID NO: 44959 - DNA, 201 bp, Homo sapiens; identical to SEQ ID NO: 44811

SEQ ID NO: 44960 - DNA, 201 bp, Homo sapiens; identical to SEQ ID NO: 44734

SEQ ID NO: 44961 - DNA, 201 bp, Homo sapiens; identical to SEQ ID NO: 44735

SEQ ID NO: 44962 - DNA, 201 bp, Homo sapiens; identical to SEQ ID NO: 44736

SEQ ID NO: 44963 - DNA, 201 bp, Homo sapiens
tcagggcacaatggctggacatgggtgggctctgatgcagaactttctcttttgaatgttaagaataactaatacaattcattgtgaacagaagtccttamgcagaggaattggtgtgccttaaagatacaatctgggatagtttgggggaacttgtagccagaatgccctgttcatgctgagcaaagttcagcaagtaga

SEQ ID NO: 44964 - DNA, 179 bp, Homo sapiens
cacgctagcgccgcccaggctggcacaaaggaggaagcctagtcccgcccctgcgtgcggcgcttctcccaggccccamcttccatccagtgccctggaccctcggctgggtagcgccaccagagcgaccaaacgtcccgcgccttccaggccgcactccagagccaaaagagctccat

SEQ ID NO: 44965 - DNA, 201 bp, Homo sapiens
aggagggtttggttagctcacaggacttcccccaccccagaagattagcatcccatactagactcatactcaactcaactaggctcatactcaattgatgrttattagacaattccatttctttctggttattataaacagaaaatctttcctcttctcattaccagtaaaggctcttggtatctttctgttggaatgatt

SEQ ID NO: 44966 - DNA, 201 bp, Homo sapiens
gcagaactttctcttttgaatgttaagaataactaatacaattcattgtgaacagaagtccttaagcagaggaattggtgtgccttaaagatacaatctgsgatagtttgggggaacttgtagccagaatgccctgttcatgctgagcaaagttcagcaagtagagcagagtttggcaggcaggtgccaggaactcccctt

SEQ ID NO: 44967 - DNA, 201 bp, Homo sapiens
ctcatactcaactcaactaggctcatactcaattgatggttattagacaattccatttctttctggttattataaacagaaaatctttcctcttctcattrccagtaaaggctcttggtatctttctgttggaatgatttctatgaacttgtcttattttaatggtgggttttttttctggtaagatttggacctaaatcg

SEQ ID NO: 44968 - DNA, 201 bp, Homo sapiens
tactcagcactgtttgaagattgcctcttctacagcttctgagaattgtgttatttcacttgccaagtgaaggaccccctccccaacatgccccagcccayccctaagcatggtcccttgtcaccaggcaaccaggaaactgctacttgtggacctcaccagagaccaggagggtttggttagctcacaggacttccccca

SEQ ID NO: 44969 - DNA, 201 bp, Homo sapiens
ctcttctcattaccagtaaaggctcttggtatctttctgttggaatgatttctatgaacttgtcttattttaatggtgggttttttttctggtaagatttrgacctaaatcgcatcatgccaacttgtgactttgagactattcatcaagaatgaggatatagtagccatgacatagcttgagctatagcctttaattcct

SEQ ID NO: 44970 - DNA, 201 bp, Homo sapiens
actgtttgaagattgcctcttctacagcttctgagaattgtgttatttcacttgccaagtgaaggaccccctccccaacatgccccagcccacccctaagyatggtcccttgtcaccaggcaaccaggaaactgctacttgtggacctcaccagagaccaggagggtttggttagctcacaggacttcccccaccccagaa

SEQ ID NO: 44971 - DNA, 201 bp, Homo sapiens
aaaggctcttggtatctttctgttggaatgatttctatgaacttgtcttattttaatggtgggttttttttctggtaagatttggacctaaatcgcatcaygccaacttgtgactttgagactattcatcaagaatgaggatatagtagccatgacatagcttgagctatagcctttaattccttactttggctatgggtg

SEQ ID NO: 44972 - DNA, 201 bp, Homo sapiens
tgtttgaagattgcctcttctacagcttctgagaattgtgttatttcacttgccaagtgaaggaccccctccccaacatgccccagcccacccctaagcayggtcccttgtcaccaggcaaccaggaaactgctacttgtggacctcaccagagaccaggagggtttggttagctcacaggacttcccccaccccagaaga

SEQ ID NO: 44973 - DNA, 201 bp, Homo sapiens
cataggtttcctctggagaaagctctggaggcctttgaaacatttaaaaagggattggggttgaaaatcatgctcaagtgtgaccccagtgaccagaatcyctgatgttaatgggctctgccctcatccccacagtctcgggatctcagggcacaatggctggacatgggtgggctctgatgcagaactttctcttttgaa

SEQ ID NO: 44974 - DNA, 194 bp, Homo sapiens
tgagactattcatcaagaatgaggatatagtagccatgacatagcttgagctatagcctttaattccttactttggctatgggtggagggtgagtttgaaraggttctgattttcttgtaacctgggaaagccatgaccttgtgcccgattctttcagattgctttgggtaataaatattggtggtggtatctg

SEQ ID NO: 44975 - DNA, 164 bp, Homo sapiens
tagccatgacatagcttgagctatagcctttaattccttactttggctatgggtggagggtgagtttgaagaggttctgattttcttgtaacctgggaaarccatgaccttgtgcccgattctttcagattgctttgggtaataaatattggtggtggtatctg

SEQ ID NO: 44976 - DNA, 201 bp, Homo sapiens
tgtcaccaggcaaccaggaaactgctacttgtggacctcaccagagaccaggagggtttggttagctcacaggacttcccccaccccagaagattagcatsccatactagactcatactcaactcaactaggctcatactcaattgatggttattagacaattccatttctttctggttattataaacagaaaatctttcc

SEQ ID NO: 44977 - DNA, 201 bp, Homo sapiens
atcatgctcaagtgtgaccccagtgaccagaatccctgatgttaatgggctctgccctcatccccacagtctcgggatctcagggcacaatggctggacabgggtgggctctgatgcagaactttctcttttgaatgttaagaataactaatacaattcattgtgaacagaagtccttaagcagaggaattggtgtgcctt

SEQ ID NO: 44978 - DNA, 201 bp, Homo sapiens
tttggcaggcaggtgccaggaactccccttcttcctggagtgccttcattgaggaaggaaatctggcccttgggtttcctggttccactgctactgacccrgaggggaatgagggctgagttatgaaaagataacttcatgaagacttaactggcccagaagctgattttcatgaaaatctgccactcagggtctgggatg

SEQ ID NO: 44979 - DNA, 201 bp, Homo sapiens
aacatttaaaaagggattggggttgaaaatcatgctcaagtgtgaccccagtgaccagaatccctgatgttaatgggctctgccctcatccccacagtctygggatctcagggcacaatggctggacatgggtgggctctgatgcagaactttctcttttgaatgttaagaataactaatacaattcattgtgaacagaag

SEQ ID NO: 44980 - DNA, 201 bp, Homo sapiens
ctactgacccagaggggaatgagggctgagttatgaaaagataacttcatgaagacttaactggcccagaagctgattttcatgaaaatctgccactcagsgtctgggatgaaggcttgtcagcacttccagtttagaacgcaatgtttctagagacatattggctgtttgttttgatgataaaaggagaataagaaaagg

SEQ ID NO: 44981 - DNA, 201 bp, Homo sapiens
gtcagcacttccagtttagaacgcaatgtttctagagacatattggctgtttgttttgatgataaaaggagaataagaaaaggcatcactttcctggatcmaggataatttttaaaccaatcaaatgaaaaaaacaaacaaacaaaaaaggaaatgtcatgtgaggttaaaccagtttgcattcccctaatgtggaaaaag

SEQ ID NO: 44982 - DNA, 201 bp, Homo sapiens
agtttagaacgcaatgtttctagagacatattggctgtttgttttgatgataaaaggagaataagaaaaggcatcactttcctggatccaggataattttwaaaccaatcaaatgaaaaaaacaaacaaacaaaaaaggaaatgtcatgtgaggttaaaccagtttgcattcccctaatgtggaaaaagtaagaggactac

SEQ ID NO: 44983 - DNA, 201 bp, Homo sapiens
aggactactcagcactgtttgaagattgcctcttctacagcttctgagaattgtgttatttcacttgccaagtgaaggaccccctccccaacatgccccascccacccctaagcatggtcccttgtcaccaggcaaccaggaaactgctacttgtggacctcaccagagaccaggagggtttggttagctcacaggacttc

SEQ ID NO: 44984 - DNA, 201 bp, Homo sapiens
caaccaggaaactgctacttgtggacctcaccagagaccaggagggtttggttagctcacaggacttcccccaccccagaagattagcatcccatactagrctcatactcaactcaactaggctcatactcaattgatggttattagacaattccatttctttctggttattataaacagaaaatctttcctcttctcatt

SEQ ID NO: 44985 - DNA, 201 bp, Homo sapiens
gctccccgagaaaatgatgaattctgcaagatgggccgatacaatctgtcaccttccatcttcttctgtgccacgccccccgatgacgggaacctctgccrgttctataagcacaatgcagccttttgttacaagcttcctgacaatgtcacctttgaggaaggcgccctgatcgagccactttctgtggggatccatgcc

SEQ ID NO: 44986 - DNA, 201 bp, Homo sapiens
gtagaaggtcagctggggtgcaagccggaagtcaccatcgagtgcacgggggcagaggcctccatccaggcgggcatctacgccactcgctctggtgggamcctcgtgcttgtggggctgggctctgagatgaccaccgtacccctactgcatgcagccatccgggaggtggatatcaagggcgtgtttcgatactgcaac

SEQ ID NO: 44987 - DNA, 110 bp, Homo sapiens
cacgctagcrccgcccaggctggcacaaaggaggaagcctagtcccgcccctgcgtgcggcgcttctcccaggccccaccttccatccagtgccctggaccctcggctgg

SEQ ID NO: 44988 - DNA, 136 bp, Homo sapiens
tttaattccttactttggctatgggtggagggtgagtttgaagaggttctgattttcttgtaacctgggaaagccatgaccttgtgcccgattctttcagwttgctttgggtaataaatattggtggtggtatctg

SEQ ID NO: 44989 - DNA, 201 bp, Homo sapiens
tctgctacccgattgtccaaagccaaggagattggggctgatttagtcctccagatctccaaggagagccctcaggaaatcgccaggaaagtagaaggtcwgctggggtgcaagccggaagtcaccatcgagtgcacgggggcagaggcctccatccaggcgggcatctacgccactcgctctggtgggaccctcgtgctt

SEQ ID NO: 44990 - DNA, 102 bp, Homo sapiens
crcgctagcgccgcccaggctggcacaaaggaggaagcctagtcccgcccctgcgtgcggcgcttctcccaggccccaccttccatccagtgccctggaccc

SEQ ID NO: 44991 - DNA, 201 bp, Homo sapiens
ggggttgaaaatcatgctcaagtgtgaccccagtgaccagaatccctgatgttaatgggctctgccctcatccccacagtctcgggatctcagggcacaayggctggacatgggtgggctctgatgcagaactttctcttttgaatgttaagaataactaatacaattcattgtgaacagaagtccttaagcagaggaatt

SEQ ID NO: 44992 - DNA, 201 bp, Homo sapiens
gttgaaaatcatgctcaagtgtgaccccagtgaccagaatccctgatgttaatgggctctgccctcatccccacagtctcgggatctcagggcacaatggmtggacatgggtgggctctgatgcagaactttctcttttgaatgttaagaataactaatacaattcattgtgaacagaagtccttaagcagaggaattggt

SEQ ID NO: 44993 - DNA, 201 bp, Homo sapiens
gagaccaggagggtttggttagctcacaggacttcccccaccccagaagattagcatcccatactagactcatactcaactcaactaggctcatactcaaytgatggttattagacaattccatttctttctggttattataaacagaaaatctttcctcttctcattaccagtaaaggctcttggtatctttctgttgga

SEQ ID NO: 44994 - DNA, 201 bp, Homo sapiens
catgctcaagtgtgaccccagtgaccagaatccctgatgttaatgggctctgccctcatccccacagtctcgggatctcagggcacaatggctggacatgrgtgggctctgatgcagaactttctcttttgaatgttaagaataactaatacaattcattgtgaacagaagtccttaagcagaggaattggtgtgccttaa

SEQ ID NO: 44995 - DNA, 201 bp, Homo sapiens; identical to SEQ ID NO: 44963

SEQ ID NO: 44996 - DNA, 201 bp, Homo sapiens; identical to SEQ ID NO: 44965

SEQ ID NO: 44997 - DNA, 201 bp, Homo sapiens; identical to SEQ ID NO: 44966

SEQ ID NO: 44998 - DNA, 201 bp, Homo sapiens; identical to SEQ ID NO: 44967

SEQ ID NO: 44999 - DNA, 201 bp, Homo sapiens; identical to SEQ ID NO: 44968

SEQ ID NO: 45000 - DNA, 201 bp, Homo sapiens; identical to SEQ ID NO: 44969

SEQ ID NO: 45001 - DNA, 201 bp, Homo sapiens; identical to SEQ ID NO: 44970

SEQ ID NO: 45002 - DNA, 201 bp, Homo sapiens; identical to SEQ ID NO: 44971

SEQ ID NO: 45003 - DNA, 201 bp, Homo sapiens; identical to SEQ ID NO: 44973

SEQ ID NO: 45004 - DNA, 201 bp, Homo sapiens; identical to SEQ ID NO: 44972

SEQ ID NO: 45005 - DNA, 194 bp, Homo sapiens; identical to SEQ ID NO: 44974

SEQ ID NO: 45006 - DNA, 164 bp, Homo sapiens; identical to SEQ ID NO: 44975

SEQ ID NO: 45007 - DNA, 201 bp, Homo sapiens; identical to SEQ ID NO: 44977

SEQ ID NO: 45008 - DNA, 201 bp, Homo sapiens; identical to SEQ ID NO: 44976

SEQ ID NO: 45009 - DNA, 201 bp, Homo sapiens; identical to SEQ ID NO: 44979

SEQ ID NO: 45010 - DNA, 201 bp, Homo sapiens; identical to SEQ ID NO: 44978

SEQ ID NO: 45011 - DNA, 201 bp, Homo sapiens; identical to SEQ ID NO: 44980

SEQ ID NO: 45012 - DNA, 201 bp, Homo sapiens; identical to SEQ ID NO: 44981

SEQ ID NO: 45013 - DNA, 201 bp, Homo sapiens; identical to SEQ ID NO: 44982

SEQ ID NO: 45014 - DNA, 201 bp, Homo sapiens; identical to SEQ ID NO: 44983

SEQ ID NO: 45015 - DNA, 201 bp, Homo sapiens; identical to SEQ ID NO: 44984

SEQ ID NO: 45016 - DNA, 201 bp, Homo sapiens; identical to SEQ ID NO: 44985

SEQ ID NO: 45017 - DNA, 201 bp, Homo sapiens; identical to SEQ ID NO: 44986

SEQ ID NO: 45018 - DNA, 201 bp, Homo sapiens; identical to SEQ ID NO: 44989

SEQ ID NO: 45019 - DNA, 136 bp, Homo sapiens; identical to SEQ ID NO: 44988

SEQ ID NO: 45020 - DNA, 201 bp, Homo sapiens; identical to SEQ ID NO: 44991

SEQ ID NO: 45021 - DNA, 201 bp, Homo sapiens; identical to SEQ ID NO: 44992

SEQ ID NO: 45022 - DNA, 201 bp, Homo sapiens; identical to SEQ ID NO: 44994

SEQ ID NO: 45023 - DNA, 201 bp, Homo sapiens; identical to SEQ ID NO: 44993

SEQ ID NO: 45024 - DNA, 201 bp, Homo sapiens
tgagtgccctctgccccttctggcaacatgcacattcctgtgatctgcctgccttggccttccaaagtgctgggattacaggcatgagccaccgcgcccgscctgcccctttccaagagatatgctcagcataatgagagatcaaccgtggtggggagtgggtccaagtaagggttctcattgttgccttttaagaggcct

SEQ ID NO: 45025 - DNA, 201 bp, Homo sapiens
cctggcaacagctattctgaaaaacccagaggtgaagctggcagggctggcagccagggacagcctgcgcctggaggcaggcctctgcctgtatgggaatsacattgatgaacacactacacctgtggagggcagcctcagttggacactggggaagcgccgccgagctgctatggacttccctggagccaaggtcattgt

SEQ ID NO: 45026 - DNA, 201 bp, Homo sapiens
aagttggtctagtgtgctgcccagtagcaaaccatggcagactcaccacctattctgagttccagggctgctgtagggcagggtgggcttcctcccagacytgccttaccctgggctgatctttgcccctggtatgcattaatggactccactgaatcctgaaaaaaaaattaaacttccttcttacttgccagtctctag

SEQ ID NO: 45027 - DNA, 201 bp, Homo sapiens
agggcagcctcagttggacactggggaagcgccgccgagctgctatggacttccctggagccaaggtcattgttccccagctgaagggcagggtgcagcgraggcgtgtggggttgatgtgtgagggggcccccatgcgggcacacagtcccatcctgaacatggagggtaccaagattggtactgtgactagtggctgcc

SEQ ID NO: 45028 - DNA, 201 bp, Homo sapiens
ccggtagcgggggcagttcacctggcaacagctattctgaaaaacccagaggtgaagctggcagggctggcagccagggacagcctgcgcctggaggcagrcctctgcctgtatgggaatgacattgatgaacacactacacctgtggagggcagcctcagttggacactggggaagcgccgccgagctgctatggacttc

SEQ ID NO: 45029 - DNA, 201 bp, Homo sapiens
gcttcattcgtggctgtgtccccatctgagggcctggtatgcagtaagatcaataaatacttgtggaatgcatgactgctggctgcctgtgtctgcctggygggagagctgtggaactaggggtccacatgaggacagactactgtggtgctgcctacctgccaggctggcccaccttccccacccccacttgaccttact

SEQ ID NO: 45030 - DNA, 201 bp, Homo sapiens
agcagtagtcctcagtgtgtgtgtaagtgaagaggaccttgtggtagcagggaccatgcttcattcgtggctgtgtccccatctgagggcctggtatgcartaagatcaataaatacttgtggaatgcatgactgctggctgcctgtgtctgcctggcgggagagctgtggaactaggggtccacatgaggacagactact

SEQ ID NO: 45031 - DNA, 201 bp, Homo sapiens
gcccgtctgggctttcgcctgcaggcattccccccggccttgtgtcgtccacttagttgcgcacaggacaccgctctatgacttccacctggcccacggcrggaaaatggtggcgtttgcgggttggagtctgccagtgcagtaccgggacagtcacactgactcgcacctgcacacacgccagcactgctcgctctttga

SEQ ID NO: 45032 - DNA, 201 bp, Homo sapiens
gagcaacctgcactcctccgtgagggtctcccagaccccagcagggtatcctccgaggtgcagcagatgtgggcactgacagagatgatccgggccagtcrcacctccgcaaggatcggccgctttgatgtggatggctgttatgacctgaacttgctctcctacacttgaatggttgctcctagccaagatgttggcctt

SEQ ID NO: 45033 - DNA, 201 bp, Homo sapiens
agcctcagttggacactggggaagcgccgccgagctgctatggacttccctggagccaaggtcattgttccccagctgaagggcagggtgcagcgaaggcrtgtggggttgatgtgtgagggggcccccatgcgggcacacagtcccatcctgaacatggagggtaccaagattggtactgtgactagtggctgcccctcc

SEQ ID NO: 45034 - DNA, 201 bp, Homo sapiens
ttcgcctgcaggcattccccccggccttgtgtcgtccacttagttgcgcacaggacaccgctctatgacttccacctggcccacggcgggaaaatggtggygtttgcgggttggagtctgccagtgcagtaccgggacagtcacactgactcgcacctgcacacacgccagcactgctcgctctttgacgtgtctcatatg

SEQ ID NO: 45035 - DNA, 201 bp, Homo sapiens
tgctggagggtaatgagaagctttggttctgccatctctcccactctgccaggtgctggctgtggagcaaaggctcacctttgtggagaggataaaacctrcccaacctacctcaccatggtttttcacattgcaaagggtaataacatgggcagtgcggacttaggctaccccctccagtttgctttccgtaaatgcaaa

SEQ ID NO: 45036 - DNA, 201 bp, Homo sapiens
tgccctgctagctctgcaaggccccactgcagcccaggtactacaggccggcgtggcagatgacctgaggaaactgcccttcatgaccagtgctgtgatgraggtgtttggcgtgtctggctgccgcgtgacccgctgtggctacacaggagaggatggtgtggagatctcggtgccggtagcgggggcagttcacctggc

SEQ ID NO: 45037 - DNA, 201 bp, Homo sapiens
gcaaaccatggcagactcaccacctattctgagttccagggctgctgtagggcagggtgggcttcctcccagacttgccttaccctgggctgatctttgcycctggtatgcattaatggactccactgaatcctgaaaaaaaaattaaacttccttcttacttgccagtctctagcttcattgttctctgttcacagggtt

SEQ ID NO: 45038 - DNA, 201 bp, Homo sapiens; identical to SEQ ID NO: 45029

SEQ ID NO: 45039 - DNA, 201 bp, Homo sapiens; identical to SEQ ID NO: 45030

SEQ ID NO: 45040 - DNA, 201 bp, Homo sapiens; identical to SEQ ID NO: 45032

SEQ ID NO: 45041 - DNA, 201 bp, Homo sapiens; identical to SEQ ID NO: 45024

SEQ ID NO: 45042 - DNA, 162 bp, Homo sapiens
gtgatctgcctgccttggccttccaaagtgctgggattacaggcatgagccaccgcgcccgscctgcccctttccaagagatatgctcagcataatgagagatcaaccgtggtggggagtgggtccaagtaagggttctcattgttgccttttaagaggcct

SEQ ID NO: 45043 - DNA, 201 bp, Homo sapiens; identical to SEQ ID NO: 45025

SEQ ID NO: 45044 - DNA, 201 bp, Homo sapiens; identical to SEQ ID NO: 45026

SEQ ID NO: 45045 - DNA, 201 bp, Homo sapiens; identical to SEQ ID NO: 45027

SEQ ID NO: 45046 - DNA, 201 bp, Homo sapiens; identical to SEQ ID NO: 45028

SEQ ID NO: 45047 - DNA, 201 bp, Homo sapiens
tcgcctgcaggcattccccccggccttgtgtcgtccacttagttgcgcacaggaggtgctccgcaggacaccgctctatgacttccacctggcccacggcrggaaaatggtggcgtttgcgggttggagtctgccagtgcagtaccgggacagtcacactgactcgcacctgcacacacgccagcactgctcgctctttga

SEQ ID NO: 45048 - DNA, 201 bp, Homo sapiens; identical to SEQ ID NO: 45029

SEQ ID NO: 45049 - DNA, 201 bp, Homo sapiens; identical to SEQ ID NO: 45030

SEQ ID NO: 45050 - DNA, 201 bp, Homo sapiens; identical to SEQ ID NO: 45033

SEQ ID NO: 45051 - DNA, 201 bp, Homo sapiens
ttccccccggccttgtgtcgtccacttagttgcgcacaggaggtgctccgcaggacaccgctctatgacttccacctggcccacggcgggaaaatggtggygtttgcgggttggagtctgccagtgcagtaccgggacagtcacactgactcgcacctgcacacacgccagcactgctcgctctttgacgtgtctcatatg

SEQ ID NO: 45052 - DNA, 201 bp, Homo sapiens; identical to SEQ ID NO: 45035

SEQ ID NO: 45053 - DNA, 201 bp, Homo sapiens; identical to SEQ ID NO: 45036

SEQ ID NO: 45054 - DNA, 201 bp, Homo sapiens; identical to SEQ ID NO: 45037

SEQ ID NO: 45055 - DNA, 201 bp, Homo sapiens; identical to SEQ ID NO: 45032

SEQ ID NO: 45056 - DNA, 201 bp, Homo sapiens; identical to SEQ ID NO: 45024

SEQ ID NO: 45057 - DNA, 201 bp, Homo sapiens; identical to SEQ ID NO: 45025

SEQ ID NO: 45058 - DNA, 201 bp, Homo sapiens; identical to SEQ ID NO: 45026

SEQ ID NO: 45059 - DNA, 201 bp, Homo sapiens; identical to SEQ ID NO: 45027

SEQ ID NO: 45060 - DNA, 201 bp, Homo sapiens; identical to SEQ ID NO: 45028

SEQ ID NO: 45061 - DNA, 201 bp, Homo sapiens; identical to SEQ ID NO: 45047

SEQ ID NO: 45062 - DNA, 201 bp, Homo sapiens; identical to SEQ ID NO: 45029

SEQ ID NO: 45063 - DNA, 201 bp, Homo sapiens; identical to SEQ ID NO: 45030

SEQ ID NO: 45064 - DNA, 201 bp, Homo sapiens; identical to SEQ ID NO: 45032

SEQ ID NO: 45065 - DNA, 201 bp, Homo sapiens; identical to SEQ ID NO: 45033

SEQ ID NO: 45066 - DNA, 201 bp, Homo sapiens; identical to SEQ ID NO: 45051

SEQ ID NO: 45067 - DNA, 201 bp, Homo sapiens; identical to SEQ ID NO: 45035

SEQ ID NO: 45068 - DNA, 201 bp, Homo sapiens; identical to SEQ ID NO: 45036

SEQ ID NO: 45069 - DNA, 201 bp, Homo sapiens; identical to SEQ ID NO: 45037

SEQ ID NO: 45070 - DNA, 201 bp, Homo sapiens; identical to SEQ ID NO: 45024

SEQ ID NO: 45071 - DNA, 201 bp, Homo sapiens; identical to SEQ ID NO: 45025

SEQ ID NO: 45072 - DNA, 201 bp, Homo sapiens; identical to SEQ ID NO: 45026

SEQ ID NO: 45073 - DNA, 201 bp, Homo sapiens; identical to SEQ ID NO: 45027

SEQ ID NO: 45074 - DNA, 201 bp, Homo sapiens; identical to SEQ ID NO: 45028

SEQ ID NO: 45075 - DNA, 201 bp, Homo sapiens; identical to SEQ ID NO: 45047

SEQ ID NO: 45076 - DNA, 201 bp, Homo sapiens; identical to SEQ ID NO: 45029

SEQ ID NO: 45077 - DNA, 201 bp, Homo sapiens; identical to SEQ ID NO: 45030

SEQ ID NO: 45078 - DNA, 201 bp, Homo sapiens
caacctgcactcctccgtgagcagggtctcccagaccccagcagggtatcctccgaggtgcagcagatgtgggcactgacagagatgatccgggccagtcrcacctccgcaaggatcggccgctttgatgtggatggctgttatgacctgaacttgctctcctacacttgaatggttgctcctagccaagatgttggcctt

SEQ ID NO: 45079 - DNA, 201 bp, Homo sapiens; identical to SEQ ID NO: 45033

SEQ ID NO: 45080 - DNA, 201 bp, Homo sapiens; identical to SEQ ID NO: 45051

SEQ ID NO: 45081 - DNA, 201 bp, Homo sapiens; identical to SEQ ID NO: 45035

SEQ ID NO: 45082 - DNA, 201 bp, Homo sapiens; identical to SEQ ID NO: 45036

SEQ ID NO: 45083 - DNA, 201 bp, Homo sapiens; identical to SEQ ID NO: 45037

SEQ ID NO: 45084 - DNA, 201 bp, Homo sapiens
caacacacatatatattccctaacttgaatctctctcggccaggcacattggctcacgtctgtaatcccagcactttgggaggcaggtggatcacttgagrtcaggagttcgagaccatcctggccaacatggtgaaccctttctctactaaaaatacaaaaattagctgggcgtggtgatgcatacctctagtcccagct

SEQ ID NO: 45085 - DNA, 201 bp, Homo sapiens
agtgatgcctgatctttcaacagacaggtggggctctgtagctgccactaccacagatgcacacaaaaacagcaccctcatttccagggggagcctcaggscccgagataaatgtgctccatggacctggaagcgggtagttccaggtccaaaaagttcctcctgaggctgctcacaaaacagctgactatagctatagct

SEQ ID NO: 45086 - DNA, 201 bp, Homo sapiens
aagtgatgcctgatctttcaacagacaggtggggctctgtagctgccactaccacagatgcacacaaaaacagcaccctcatttccagggggagcctcagsccccgagataaatgtgctccatggacctggaagcgggtagttccaggtccaaaaagttcctcctgaggctgctcacaaaacagctgactatagctatagc

SEQ ID NO: 45087 - DNA, 201 bp, Homo sapiens
gaggccttaaaacctgaggctcctgtgcctgatggaattcttgtaacatacacttgtgtatcatataaagataccactctgtttctcttatgtattcttamtctagttgtttattaagaatgacaagcacgtcttttcaacatgttagtgaacaacgtctctttattttggggaggagcccggcgggacagtagaagtaaa

SEQ ID NO: 45088 - DNA, 201 bp, Homo sapiens
agaagcggcttttctgaaaagggatccagcacacctcctcggtttttttttcaataaaagtttagaaagaaaaaagtgatgcctgatctttcaacagacakgtggggctctgtagctgccactaccacagatgcacacaaaaacagcaccctcatttccagggggagcctcaggccccgagataaatgtgctccatggacc

SEQ ID NO: 45089 - DNA, 201 bp, Homo sapiens
actcatgccaggacattggtgccaagagcttgacccaaagccatgatgtactctggggagcttaagtttgagaagagaacgtcctcagcccaggtggaaggtggcgtccatagcctccattcgtatgagaagcggcttttctgaaaagggatccagcacacctcctcggtttttttttcaataaaagtttagaaagaaaaa

SEQ ID NO: 45090 - DNA, 201 bp, Homo sapiens
ggggagtgtggggtgggacgtgaagtggcagctcctcagtgacaaggccactatgtgctatacgcatgcgctgtttcttcagcgccagctccgcccccgcygcagcgaggcgggtaggttccgcccgcgcgcactacgccctgacgtcagcgtcgcgcgcagcgcagtgacgaaatcggctggtttatattggcgcggccc

SEQ ID NO: 45091 - DNA, 201 bp, Homo sapiens
atctggtactcagtccagcctatcagcagagagcagatgggacaaatgctgacgcggatcctggtgataagagaaattcaggaggccatcgcagtggccartgcaagcactatgcactgagatgccttggccatggcacaagagaaaccagccaggaaaaaccagacagactttcacactaaagaagaggcctccattttt

SEQ ID NO: 45092 - DNA, 201 bp, Homo sapiens
acactcatgccaggacattggtgccaagagcttgacccaaagccatgatgtactctggggagcttaagtttgagaagagaacgtcctcagcccaggtggaaggtggcgtccatagcctccattcgtatgagaagcggcttttctgaaaagggatccagcacacctcctcggtttttttttcaataaaagtttagaaagaaa

SEQ ID NO: 45093 - DNA, 201 bp, Homo sapiens
aacactcatgccaggacattggtgccaagagcttgacccaaagccatgatgtactctggggagcttaagtttgagaagagaacgtcctcagcccaggtggaaggtggcgtccatagcctccattcgtatgagaagcggcttttctgaaaagggatccagcacacctcctcggtttttttttcaataaaagtttagaaagaa

SEQ ID NO: 45094 - DNA, 201 bp, Homo sapiens
gaaaaaagtgatgcctgatctttcaacagacaggtggggctctgtagctgccactaccacagatgcacacaaaaacagcaccctcatttccagggggagcytcaggccccgagataaatgtgctccatggacctggaagcgggtagttccaggtccaaaaagttcctcctgaggctgctcacaaaacagctgactatagct

SEQ ID NO: 45095 - DNA, 201 bp, Homo sapiens; identical to SEQ ID NO: 45084

SEQ ID NO: 45096 - DNA, 201 bp, Homo sapiens; identical to SEQ ID NO: 45085

SEQ ID NO: 45097 - DNA, 201 bp, Homo sapiens; identical to SEQ ID NO: 45086

SEQ ID NO: 45098 - DNA, 201 bp, Homo sapiens; identical to SEQ ID NO: 45087

SEQ ID NO: 45099 - DNA, 201 bp, Homo sapiens
cactccccctccaccttgctgaccaccctcatgttctttaataccaagtaagtgttctagaggctccactgctggcatctgtccagtgaagagtgtggaarctatccaagaggccttctgaattcctctgacatatatttgagaaactgggctactgaaagccctaaccccacttggctgcattttatttggtaaccagtg

SEQ ID NO: 45100 - DNA, 201 bp, Homo sapiens
tgccaggacattggtgccaagagcttgacccaagtccgagccatgatgtactctggggagcttaagtttgagaagagaacgtcctcagcccaggtggaaggtggcgtccatagcctccattcgtatgagaagcggcttttctgaaaagggatccagcacacctcctcggtttttttttcaataaaagtttagaaagaaaaa

SEQ ID NO: 45101 - DNA, 201 bp, Homo sapiens; identical to SEQ ID NO: 45088

SEQ ID NO: 45102 - DNA, 201 bp, Homo sapiens; identical to SEQ ID NO: 45091

SEQ ID NO: 45103 - DNA, 201 bp, Homo sapiens; identical to SEQ ID NO: 45090

SEQ ID NO: 45104 - DNA, 201 bp, Homo sapiens
catgccaggacattggtgccaagagcttgacccaagtccgagccatgatgtactctggggagcttaagtttgagaagagaacgtcctcagcccaggtggaaggtggcgtccatagcctccattcgtatgagaagcggcttttctgaaaagggatccagcacacctcctcggtttttttttcaataaaagtttagaaagaaa

SEQ ID NO: 45105 - DNA, 201 bp, Homo sapiens
tcatgccaggacattggtgccaagagcttgacccaagtccgagccatgatgtactctggggagcttaagtttgagaagagaacgtcctcagcccaggtggaaggtggcgtccatagcctccattcgtatgagaagcggcttttctgaaaagggatccagcacacctcctcggtttttttttcaataaaagtttagaaagaa

SEQ ID NO: 45106 - DNA, 201 bp, Homo sapiens; identical to SEQ ID NO: 45094

SEQ ID NO: 45107 - DNA, 201 bp, Homo sapiens; identical to SEQ ID NO: 45084

SEQ ID NO: 45108 - DNA, 201 bp, Homo sapiens; identical to SEQ ID NO: 45085

SEQ ID NO: 45109 - DNA, 201 bp, Homo sapiens; identical to SEQ ID NO: 45086

SEQ ID NO: 45110 - DNA, 201 bp, Homo sapiens; identical to SEQ ID NO: 45087

SEQ ID NO: 45111 - DNA, 201 bp, Homo sapiens; identical to SEQ ID NO: 45088

SEQ ID NO: 45112 - DNA, 201 bp, Homo sapiens; identical to SEQ ID NO: 45100

SEQ ID NO: 45113 - DNA, 201 bp, Homo sapiens; identical to SEQ ID NO: 45090

SEQ ID NO: 45114 - DNA, 201 bp, Homo sapiens; identical to SEQ ID NO: 45091

SEQ ID NO: 45115 - DNA, 201 bp, Homo sapiens; identical to SEQ ID NO: 45104

SEQ ID NO: 45116 - DNA, 201 bp, Homo sapiens; identical to SEQ ID NO: 45105

SEQ ID NO: 45117 - DNA, 201 bp, Homo sapiens; identical to SEQ ID NO: 45094

SEQ ID NO: 45118 - DNA, 201 bp, Homo sapiens; identical to SEQ ID NO: 45084

SEQ ID NO: 45119 - DNA, 201 bp, Homo sapiens; identical to SEQ ID NO: 45085

SEQ ID NO: 45120 - DNA, 201 bp, Homo sapiens; identical to SEQ ID NO: 45086

SEQ ID NO: 45121 - DNA, 201 bp, Homo sapiens; identical to SEQ ID NO: 45087

SEQ ID NO: 45122 - DNA, 201 bp, Homo sapiens; identical to SEQ ID NO: 45088

SEQ ID NO: 45123 - DNA, 201 bp, Homo sapiens; identical to SEQ ID NO: 45090

SEQ ID NO: 45124 - DNA, 201 bp, Homo sapiens; identical to SEQ ID NO: 45091

SEQ ID NO: 45125 - DNA, 201 bp, Homo sapiens; identical to SEQ ID NO: 45094

SEQ ID NO: 45126 - DNA, 201 bp, Homo sapiens; identical to SEQ ID NO: 45091

SEQ ID NO: 45127 - DNA, 201 bp, Homo sapiens; identical to SEQ ID NO: 45090

SEQ ID NO: 45128 - DNA, 201 bp, Homo sapiens; identical to SEQ ID NO: 45087

SEQ ID NO: 45129 - DNA, 153 bp, Homo sapiens
actctctgctcacatgcgttacgggttgattggtacatggggatggagtctcatgctgccctaagctgagagctttactcccaattcactcccttccctcrcagtgactttctcattctccctgggtacatcgacttcactgcagaccaggtg

SEQ ID NO: 45130 - DNA, 201 bp, Homo sapiens; identical to SEQ ID NO: 45084

SEQ ID NO: 45131 - DNA, 201 bp, Homo sapiens; identical to SEQ ID NO: 45085

SEQ ID NO: 45132 - DNA, 201 bp, Homo sapiens; identical to SEQ ID NO: 45086

SEQ ID NO: 45133 - DNA, 201 bp, Homo sapiens; identical to SEQ ID NO: 45087

SEQ ID NO: 45134 - DNA, 201 bp, Homo sapiens; identical to SEQ ID NO: 45088

SEQ ID NO: 45135 - DNA, 201 bp, Homo sapiens; identical to SEQ ID NO: 45100

SEQ ID NO: 45136 - DNA, 201 bp, Homo sapiens; identical to SEQ ID NO: 45090

SEQ ID NO: 45137 - DNA, 201 bp, Homo sapiens; identical to SEQ ID NO: 45091

SEQ ID NO: 45138 - DNA, 201 bp, Homo sapiens; identical to SEQ ID NO: 45104

SEQ ID NO: 45139 - DNA, 201 bp, Homo sapiens; identical to SEQ ID NO: 45105

SEQ ID NO: 45140 - DNA, 201 bp, Homo sapiens; identical to SEQ ID NO: 45094

SEQ ID NO: 45141 - DNA, 201 bp, Homo sapiens; identical to SEQ ID NO: 45084

SEQ ID NO: 45142 - DNA, 201 bp, Homo sapiens; identical to SEQ ID NO: 45085

SEQ ID NO: 45143 - DNA, 201 bp, Homo sapiens; identical to SEQ ID NO: 45086

SEQ ID NO: 45144 - DNA, 201 bp, Homo sapiens; identical to SEQ ID NO: 45087

SEQ ID NO: 45145 - DNA, 201 bp, Homo sapiens; identical to SEQ ID NO: 45088

SEQ ID NO: 45146 - DNA, 201 bp, Homo sapiens; identical to SEQ ID NO: 45090

SEQ ID NO: 45147 - DNA, 201 bp, Homo sapiens; identical to SEQ ID NO: 45091

SEQ ID NO: 45148 - DNA, 201 bp, Homo sapiens; identical to SEQ ID NO: 45094

SEQ ID NO: 45149 - DNA, 201 bp, Homo sapiens; identical to SEQ ID NO: 45091

SEQ ID NO: 45150 - DNA, 201 bp, Homo sapiens; identical to SEQ ID NO: 45090

SEQ ID NO: 45151 - DNA, 201 bp, Homo sapiens; identical to SEQ ID NO: 45087

SEQ ID NO: 45152 - DNA, 153 bp, Homo sapiens; identical to SEQ ID NO: 45129

SEQ ID NO: 45153 - DNA, 201 bp, Homo sapiens
ctccccagcagtgagggtctctctcttcctcttgtgctcttgctggggctggtggtccaggggtcttactccttggaggccatgtgggccatgaggtccaycaccctgttgctgtagccaaattcgttgtcatacctagaaatgagcttgacaaagtggtcgttgagggcaatgccagccccagcgtcaaaggtggaggag

SEQ ID NO: 45154 - DNA, 200 bp, Homo sapiens
ggggagattcagtgtggtgggggactgagtgtggcagggactccccagcagtgagggtctctctcttcctcttgtgctcttgctggggctggtggtccargggtcttactccttggaggccatgtgggccatgaggtccaccaccctgttgctgtagccaaattcgttgtcatacctagaaatgagcttgacaaagtggt

SEQ ID NO: 45155 - DNA, 201 bp, Homo sapiens
gaggtccaccaccctgttgctgtagccaaattcgttgtcatacctagaaatgagcttgacaaagtggtcgttgagggcaatgccagccccagcgtcaaagrtggaggagtgggtcaggtccaccactgacacgttggcagtggggacacggaaggccatgccagtgagcttcccgttcagctcagggatgaccttgcccac

SEQ ID NO: 45156 - DNA, 201 bp, Homo sapiens
tgtggcagggactccccagcagtgagggtctctctcttcctcttgtgctcttgctggggctggtggtccaggggtcttactccttggaggccatgtgggcmatgaggtccaccaccctgttgctgtagccaaattcgttgtcatacctagaaatgagcttgacaaagtggtcgttgagggcaatgccagccccagcgtcaa

SEQ ID NO: 45157 - DNA, 201 bp, Homo sapiens
ccatgaggtccaccaccctgttgctgtagccaaattcgttgtcatacctagaaatgagcttgacaaagtggtcgttgagggcaatgccagccccagcgtcraaggtggaggagtgggtcaggtccaccactgacacgttggcagtggggacacggaaggccatgccagtgagcttcccgttcagctcagggatgaccttgc

SEQ ID NO: 45158 - DNA, 201 bp, Homo sapiens
tgaccttgcccacagccttggcagcgccagtagaggcagggatgatgttctggctgttgtcatacttctcatggttcacacccatgacgaacatgggggcrtcagcagagggggcagagatgatgacccttttggctcccccttgcctccccaaagcacatttcttccattctgtcttccactcactcctggaagatggtg

SEQ ID NO: 45159 - DNA, 201 bp, Homo sapiens
tatggcgagaatctttaggacataccagctttctccctttgtctcataaccatgtccaccaatgagaatgctaatacacaagctgcccatcttcacagatytaagaacaagggaaaggacagtacagaaacgaggcgtcacagaatagaggtcaatgtggagctgaggaaagctaagaaggatgaccagatgctgaagagg

SEQ ID NO: 45160 - DNA, 201 bp, Homo sapiens
aagatcaaaacgttgtgccagaaactacctctgaaggctacactttccaagttcaggatggggctcctgggacctttaacttttagatcatgtagctgagrcataaatttgttgtgtactatgtttggtattttgtcttattgtttctctactaagaactctttcttaaatgtggtttgttattgtagcactttttacact

SEQ ID NO: 45161 - DNA, 201 bp, Homo sapiens
aaactacctctgaaggctacactttccaagttcaggatggggctcctgggacctttaacttttagatcatgtagctgaggcataaatttgttgtgtactaygtttggtattttgtcttattgtttctctactaagaactctttcttaaatgtggtttgttattgtagcactttttacactgaaactatacttgaacagttc

SEQ ID NO: 45162 - DNA, 201 bp, Homo sapiens
tcccctctgagtttgacaccacagtcaggtgtgccaagtgcaagaccgtcttccaccagagctgccaggctgtggtgaagaagggctgcccccgctgtgcycgctgacgcaagtaccagcaacagaacgttttcgcctgatgcccctctgctgatcccactctgaaggccgggggcgcgggcctggcccagaggcgacagg

SEQ ID NO: 45163 - DNA, 201 bp, Homo sapiens
aaggatgaccagatgctgaagaggagaaatgtaagctcatttcctgatgatgctacttctccgctgcaggaaaactgcaacaaccagggactcctgccctragagccatagggaatatcgtcactggtacagatgaacagactcaggttgtgattgatgcaggagcactcgccgtctttcccagcctgctcaccaacccca

SEQ ID NO: 45164 - DNA, 201 bp, Homo sapiens
ctctgagtttgacaccacagtcaggtgtgccaagtgcaagaccgtcttccaccagagctgccaggctgtggtgaagaagggctgcccccgctgtgctcgcygacgcaagtaccagcaacagaacgttttcgcctgatgcccctctgctgatcccactctgaaggccgggggcgcgggcctggcccagaggcgacaggaagc

SEQ ID NO: 45165 - DNA, 201 bp, Homo sapiens
gtgtgccaagtgcaagaccgtcttccaccagagctgccaggctgtggtgaagaagggctgcccccgctgtgctcgctgacgcaagtaccagcaacagaacrttttcgcctgatgcccctctgctgatcccactctgaaggccgggggcgcgggcctggcccagaggcgacaggaagccaggacgccggggattgtctctcg

SEQ ID NO: 45166 - DNA, 201 bp, Homo sapiens
accagagctgccaggctgtggtgaagaagggctgcccccgctgtgctcgctgacgcaagtaccagcaacagaacgttttcgcctgatgcccctctgctgaycccactctgaaggccgggggcgcgggcctggcccagaggcgacaggaagccaggacgccggggattgtctctcgcaaccgcagcccagccccagtccggg

SEQ ID NO: 45167 - DNA, 201 bp, Homo sapiens
attttgagacacaaaaggaagctgtatgggccgtggaacagttgaacagattgtgtaccttgttcactgtggcataatagaaccgttgatgaacctcttamctgcaaaagataccaagattattctggttatcctggatgccatttcaaatatctttcaggctgctgagaaactaggtgaaactgagaaacttagtataat

SEQ ID NO: 45168 - DNA, 201 bp, Homo sapiens
gagctgccaggctgtggtgaagaagggctgcccccgctgtgctcgctgacgcaagtaccagcaacagaacgttttcgcctgatgcccctctgctgatcccrctctgaaggccgggggcgcgggcctggcccagaggcgacaggaagccaggacgccggggattgtctctcgcaaccgcagcccagccccagtccgggagga

SEQ ID NO: 45169 - DNA, 201 bp, Homo sapiens
cctccggcagatcgcagatgaggtatatgaaggattcctcaaggccctgattgaatttgcctcccagcatgtctaccactgcgacctgtgcacccagcgcrgcttcatctgccagatctgccagcaccacgacatcatcttcccctctgagtttgacaccacagtcaggtgtgccaagtgcaagaccgtcttccaccagag

SEQ ID NO: 45170 - DNA, 201 bp, Homo sapiens
cacagtcaggtgtgccaagtgcaagaccgtcttccaccagagctgccaggctgtggtgaagaagggctgcccccgctgtgctcgctgacgcaagtaccagsaacagaacgttttcgcctgatgcccctctgctgatcccactctgaaggccgggggcgcgggcctggcccagaggcgacaggaagccaggacgccggggat

SEQ ID NO: 45171 - DNA, 201 bp, Homo sapiens
ttcagaaggaagctacgtggacaatgtcaaacatcacagccagccgccaggaccagatacagcaagttgtgaatcatggattagtcccattccttgtcagygatctctctaaggcagattttgagacacaaaaggaagctgtatgggccgtggaacagttgaacagattgtgtaccttgttcactgtggcataatagaacc

SEQ ID NO: 45172 - DNA, 201 bp, Homo sapiens
gggccagcccacagtgacgggcgctttgagctggtcttctctggcaagaagctggccctgcgcgcctcctcccaggacgaagctgaggactggctggacckggtgcgggaggccctgcagaaggtccggcctcagcaggaggatgagtgggtgaacgtgcagtactcagaccagcctgaggaaccccccgaggcgccccag

SEQ ID NO: 45173 - DNA, 201 bp, Homo sapiens
tctaccacaatcaatactccactaattcatttgctttgaataagcaccagcacagagaagaccatgataagagaaggcatcttgcacataagttctgtctractccagcaggagagttcaaatggaacggttctgtccatgggtccaaagttcttaccatatctactctgagactgactatcacccaattagaaaacaaca

SEQ ID NO: 45174 - DNA, 201 bp, Homo sapiens
taatgttgctagtgaaaggtaacccgtccaaactgatgggattaaccagaggtagtcctggctgcagtttttacagaagaatgaataaaattttccagaarccctcagccagtgtctccttaagtctccttggccagggagatgcgctaaacactgtaaatttaatcataaatctctcctggagctacaagtggaattcat

SEQ ID NO: 45175 - DNA, 201 bp, Homo sapiens
ctgagtttgacaccacagtcaggtgtgccaagtgcaagaccgtcttccaccagagctgccaggctgtggtgaagaagggctgcccccgctgtgctcgctgrcgcaagtaccagcaacagaacgttttcgcctgatgcccctctgctgatcccactctgaaggccgggggcgcgggcctggcccagaggcgacaggaagcca

SEQ ID NO: 45176 - DNA, 201 bp, Homo sapiens
ccgtcttccaccagagctgccaggctgtggtgaagaagggctgcccccgctgtgctcgctgacgcaagtaccagcaacagaacgttttcgcctgatgcccmtctgctgatcccactctgaaggccgggggcgcgggcctggcccagaggcgacaggaagccaggacgccggggattgtctctcgcaaccgcagcccagccc

SEQ ID NO: 45177 - DNA, 201 bp, Homo sapiens
aggctgtggtgaagaagggctgcccccgctgtgctcgctgacgcaagtaccagcaacagaacgttttcgcctgatgcccctctgctgatcccactctgaargccgggggcgcgggcctggcccagaggcgacaggaagccaggacgccggggattgtctctcgcaaccgcagcccagccccagtccgggaggaagttctgc

SEQ ID NO: 45178 - DNA, 201 bp, Homo sapiens
ctctcaaggagaaatttcacggttgagcaccgaaaagaaagtggtcatgaaaggaagtatcaacaattatcttaaattgggtcaagaagggaagtatcgcrtctaccacaatcaatactccactaattcatttgctttgaataagcaccagcacagagaagaccatgataagagaaggcatcttgcacataagttctgtct

SEQ ID NO: 45179 - DNA, 201 bp, Homo sapiens
agtttctgacgcagatccgggcccagcccctcatcaacctgcagatggtgaacgcgtctctgtacgagcatgtggagcggatgcacctcattgggaggagmcgggagcagctgaagctcctgggggattacctgggcctgtgccggagtggcgccctgaaggagctcagcaagaggctcaaccaccggaattatctcttgg

SEQ ID NO: 45180 - DNA, 201 bp, Homo sapiens
ctcctcccaggacgaagctgaggactggctggacctggtgcgggaggccctgcagaaggtccggcctcagcaggaggatgagtgggtgaacgtgcagtacycagaccagcctgaggaaccccccgaggcgccccagggctgcctctctccctcagacctgctctcggagcccgcggccctccagggcacacagtctgactg

SEQ ID NO: 45181 - DNA, 201 bp, Homo sapiens
cagtactcagaccagcctgaggaaccccccgaggcgccccagggctgcctctctccctcagacctgctctcggagcccgcggccctccagggcacacagtytgactggtcgtccgcccaggttccagagctagatgccatcaaggagtccctgctgtacttgtacatggacaggacctggatgccctatatattttctctg

SEQ ID NO: 45182 - DNA, 201 bp, Homo sapiens
gaggcgccccagggctgcctctctccctcagacctgctctcggagcccgcggccctccagggcacacagtctgactggtcgtccgcccaggttccagagcyagatgccatcaaggagtccctgctgtacttgtacatggacaggacctggatgccctatatattttctctgcccttggaggctctgaaatgtttccgcatc

SEQ ID NO: 45183 - DNA, 201 bp, Homo sapiens
gattgatgcaggagcactcgccgtctttcccagcctgctcaccaaccccaaaactaacattcagaaggaagctacgtggacaatgtcaaacatcacagccrgccgccaggaccagatacagcaagttgtgaatcatggattagtcccattccttgtcagcgatctctctaaggcagattttgagacacaaaaggaagctgt

SEQ ID NO: 45184 - DNA, 201 bp, Homo sapiens
tgactggtcgtccgcccaggttccagagctagatgccatcaaggagtccctgctgtacttgtacatggacaggacctggatgccctatatattttctctgyccttggaggctctgaaatgtttccgcatcaggaacaatgagaagatgctgagtgacagccacggcgtggagaccatccgggacatcctgccagacaccag

SEQ ID NO: 45185 - DNA, 201 bp, Homo sapiens
ttagatcatgtagctgaggcataaatttgttgtgtactatgtttggtattttgtcttattgtttctctactaagaactctttcttaaatgtggtttgttaytgtagcactttttacactgaaactatacttgaacagttccaactgtacatactgtatgaagcttgtcctctgactaggtttctaatttctatgtggaatt

SEQ ID NO: 45186 - DNA, 201 bp, Homo sapiens
cagaaggaagctacgtggacaatgtcaaacatcacagccagccgccaggaccagatacagcaagttgtgaatcatggattagtcccattccttgtcagcgwtctctctaaggcagattttgagacacaaaaggaagctgtatgggccgtggaacagttgaacagattgtgtaccttgttcactgtggcataatagaaccgt

SEQ ID NO: 45187 - DNA, 201 bp, Homo sapiens; identical to SEQ ID NO: 45185

SEQ ID NO: 45188 - DNA, 201 bp, Homo sapiens; identical to SEQ ID NO: 45174

SEQ ID NO: 45189 - DNA, 201 bp, Homo sapiens; identical to SEQ ID NO: 45160

SEQ ID NO: 45190 - DNA, 201 bp, Homo sapiens; identical to SEQ ID NO: 45161

SEQ ID NO: 45191 - DNA, 173 bp, Homo sapiens
ctttctccctttgtctcataaccatgtccaccaatgagaatgctaatacacaagctgcccatcttcacagatytaagaacaagggaaaggacagtacagaaacgaggcgtcacagaatagaggtcaatgtggagctgaggaaagctaagaaggatgaccagatgctgaagagg

SEQ ID NO: 45192 - DNA, 201 bp, Homo sapiens; identical to SEQ ID NO: 45171

SEQ ID NO: 45193 - DNA, 201 bp, Homo sapiens; identical to SEQ ID NO: 45174

SEQ ID NO: 45194 - DNA, 201 bp, Homo sapiens; identical to SEQ ID NO: 45160

SEQ ID NO: 45195 - DNA, 201 bp, Homo sapiens; identical to SEQ ID NO: 45161

SEQ ID NO: 45196 - DNA, 201 bp, Homo sapiens; identical to SEQ ID NO: 45163

SEQ ID NO: 45197 - DNA, 201 bp, Homo sapiens; identical to SEQ ID NO: 45183

SEQ ID NO: 45198 - DNA, 201 bp, Homo sapiens; identical to SEQ ID NO: 45185

SEQ ID NO: 45199 - DNA, 201 bp, Homo sapiens; identical to SEQ ID NO: 45167

SEQ ID NO: 45200 - DNA, 201 bp, Homo sapiens; identical to SEQ ID NO: 45186

SEQ ID NO: 45201 - DNA, 196 bp, Homo sapiens
atgtagtaaacatatgtaggtaaggttgtttttttggagatgttgcagctcaaatttcagtccacatatgaatcatcagtgtattttccataaagtgattygggcatatttgtgtgaaaacctcagttctgtcacttcttacctctataaacttggacgataatgtgccttctctgagactcagtttcttcctctg

SEQ ID NO: 45202 - DNA, 201 bp, Homo sapiens
actttcattaatcacgtcttcatctgggggagcattgccatttatttctccattttatttacaatgcacagtaatggcatctttggcatcttcccaaaccwgtttccatttgttggtaatgcacgacattccctgacccagaagtgcatctggcttgtaattctcttaacaacagtggcttcagttatgccagtggtggca

SEQ ID NO: 45203 - DNA, 201 bp, Homo sapiens
ggggccttttacaacgtggctggagaagatgggcaacatattgctgactaccagtcctttgcagttaccatggccacatctttggtcattgtggtcagtgwgcagatagccttggataccagttactggactttcattaatcacgtcttcatctgggggagcattgccatttatttctccattttatttacaatgcacagt

SEQ ID NO: 45204 - DNA, 201 bp, Homo sapiens
ttgctcaccaagaaggctatggagagcttatcacatctggaaaaaatatgcgagctaaaaatccacccccaacatcagggctggaaaagacacattataawagcactagctggattgaaaatttatgtaagaaaaccacagacaccgtgagcagctttagccaggataaaacagtgaaactgtgagtcaatatgaatttaa

SEQ ID NO: 45205 - DNA, 201 bp, Homo sapiens
caggagtgtgcgctatggaaaaccaggccagagggtcactgtctagtttgtgatttggtggacaaaactctcgctgttacaagtacagattttttttttttaaatcaacctagataccaattgacctgaactttagaatcttatttatggagaaaaacttgtaaagctgcatattcactgaatggatcctcaggcggataa

SEQ ID NO: 45206 - DNA, 201 bp, Homo sapiens
tctgcggcagacaactgccagtgcccatcaaacaggagtgtgcgctatggaaaaccaggccagagggtcactgtctagtttgtgatttggtggacaaaacwctcgctgttacaagtacagattttttttttttaaatcaacctagataccaattgacctgaactttagaatcttatttatggagaaaaacttgtaaagctg

SEQ ID NO: 45207 - DNA, 201 bp, Homo sapiens
tcactgtctagtttgtgatttggtggacaaaactctcgctgttacaagtacagattttttttttttaaatcaacctagataccaattgacctgaactttaraatcttatttatggagaaaaacttgtaaagctgcatattcactgaatggatcctcaggcggataaaagggtgcattttaaaggtatatatccaagctgaa

SEQ ID NO: 45208 - DNA, 201 bp, Homo sapiens
gcttttctaacaacctcagtagtaatttgctgagcatcatccagaccattaatagaatcagcaaagcactggaatttcacactttaatgataatattccayatagtctatgggcaaatattttcaacatttccaatttttaaagcttcagaattgaagccaaacaaattaataaataattgttttaattactatttaaaaa

SEQ ID NO: 45209 - DNA, 201 bp, Homo sapiens
tccacatagtctatgggcaaatattttcaacatttccaatttttaaagcttcagaattgaagccaaacaaattaataaataattgttttaattactatttwaaaactcaggtttagattgtttaaaattagttgcttttgatactcagctgtcatgtttataattcaaacatgtagtaaacatatgtaggtaaggttgttt

SEQ ID NO: 45210 - DNA, 201 bp, Homo sapiens
accacgtagttatcttttcacttcaggtggagctgaaattctgctggctccagagtttgagatttgaggcaagaggtggggcaggcagattgcctcacttwacttaaatctgcggcagacaactgccagtgcccatcaaacaggagtgtgcgctatggaaaaccaggccagagggtcactgtctagtttgtgatttggtgg

SEQ ID NO: 45211 - DNA, 196 bp, Homo sapiens; identical to SEQ ID NO: 45201

SEQ ID NO: 45212 - DNA, 201 bp, Homo sapiens; identical to SEQ ID NO: 45202

SEQ ID NO: 45213 - DNA, 201 bp, Homo sapiens; identical to SEQ ID NO: 45203

SEQ ID NO: 45214 - DNA, 201 bp, Homo sapiens; identical to SEQ ID NO: 45204

SEQ ID NO: 45215 - DNA, 201 bp, Homo sapiens; identical to SEQ ID NO: 45205

SEQ ID NO: 45216 - DNA, 201 bp, Homo sapiens; identical to SEQ ID NO: 45206

SEQ ID NO: 45217 - DNA, 201 bp, Homo sapiens; identical to SEQ ID NO: 45207

SEQ ID NO: 45218 - DNA, 201 bp, Homo sapiens; identical to SEQ ID NO: 45208

SEQ ID NO: 45219 - DNA, 201 bp, Homo sapiens; identical to SEQ ID NO: 45209

SEQ ID NO: 45220 - DNA, 201 bp, Homo sapiens; identical to SEQ ID NO: 45210

SEQ ID NO: 45221 - DNA, 201 bp, Homo sapiens
gaggattaagtctgggttgaggtaggccacctgttgagacctggtgaaagatcaggtataataatgttctgcagtgaaaagaaattgcgtgaagtggaacrgatagtgaaagccaatgaccgtgaatataatgaaaagttccagtatgcggataatcgtatccacacatcgaaatataatattctcaccttcttgccaatt

SEQ ID NO: 45222 - DNA, 164 bp, Homo sapiens
gcttttctccttggcatggtcacggaatggatacctgtttgatcttcctgcactgctgagaaawcttccttttgggggagaggattaagtctgggttgaggtaggccacctgttgagacctggtgaaagatcaggtataataatgttctgcagtgaaaagaaat

SEQ ID NO: 45223 - DNA, 196 bp, Homo sapiens; identical to SEQ ID NO: 45201

SEQ ID NO: 45224 - DNA, 201 bp, Homo sapiens; identical to SEQ ID NO: 45202

SEQ ID NO: 45225 - DNA, 201 bp, Homo sapiens
tgatgacctggatcagaagacagaaataactcaggaaaaagagcctgtggatttctcagtcaaatctcaagcggatagagaatttcagttctttgaccacmatctgatggaatccattaaaatgggtgatcccaaagttcatgaattccttaggttacttgctctctgccacactgtaatgtcagaagagaatagcgcagg

SEQ ID NO: 45226 - DNA, 201 bp, Homo sapiens; identical to SEQ ID NO: 45203

SEQ ID NO: 45227 - DNA, 201 bp, Homo sapiens; identical to SEQ ID NO: 45204

SEQ ID NO: 45228 - DNA, 201 bp, Homo sapiens; identical to SEQ ID NO: 45205

SEQ ID NO: 45229 - DNA, 201 bp, Homo sapiens; identical to SEQ ID NO: 45206

SEQ ID NO: 45230 - DNA, 201 bp, Homo sapiens; identical to SEQ ID NO: 45207

SEQ ID NO: 45231 - DNA, 201 bp, Homo sapiens; identical to SEQ ID NO: 45208

SEQ ID NO: 45232 - DNA, 201 bp, Homo sapiens; identical to SEQ ID NO: 45209

SEQ ID NO: 45233 - DNA, 201 bp, Homo sapiens; identical to SEQ ID NO: 45210

SEQ ID NO: 45234 - DNA, 196 bp, Homo sapiens; identical to SEQ ID NO: 45201

SEQ ID NO: 45235 - DNA, 201 bp, Homo sapiens; identical to SEQ ID NO: 45202

SEQ ID NO: 45236 - DNA, 201 bp, Homo sapiens; identical to SEQ ID NO: 45203

SEQ ID NO: 45237 - DNA, 201 bp, Homo sapiens
tttggttatttttgttgttgttgttctcctacaggaaaaagagcctgtggatttctcagtcaaatctcaagcggatagagaatttcagttctttgaccacmatctgatggaatccattaaaatgggtgatcccaaagttcatgaattccttaggttacttgctctctgccacactgtaatgtcagaagagaatagcgcagg

SEQ ID NO: 45238 - DNA, 201 bp, Homo sapiens; identical to SEQ ID NO: 45204

SEQ ID NO: 45239 - DNA, 201 bp, Homo sapiens; identical to SEQ ID NO: 45221

SEQ ID NO: 45240 - DNA, 201 bp, Homo sapiens; identical to SEQ ID NO: 45205

SEQ ID NO: 45241 - DNA, 201 bp, Homo sapiens; identical to SEQ ID NO: 45206

SEQ ID NO: 45242 - DNA, 201 bp, Homo sapiens; identical to SEQ ID NO: 45207

SEQ ID NO: 45243 - DNA, 164 bp, Homo sapiens; identical to SEQ ID NO: 45222

SEQ ID NO: 45244 - DNA, 201 bp, Homo sapiens; identical to SEQ ID NO: 45208

SEQ ID NO: 45245 - DNA, 201 bp, Homo sapiens; identical to SEQ ID NO: 45209

SEQ ID NO: 45246 - DNA, 201 bp, Homo sapiens; identical to SEQ ID NO: 45210

SEQ ID NO: 45247 - DNA, 201 bp, Homo sapiens
gcttctccggtgctaagcttccatcactcctctggtaataagctttgtgcacatttgctagaaagctgggcagcttgtccgcaggtaccattgatactgtrcagcctccccatcctgctccagtaagtcgtgacccttgagccccaaacttcctaaaacagtgaggaaaaaaatattagaacctataaatgaaaatacaag

SEQ ID NO: 45248 - DNA, 201 bp, Homo sapiens
ttgcagtgagttgtgaagaaatgttgatcccagagaaaagtttgcattttgcccacctcaaagatattttgatttttggtcgcccaactcacattgaagcytaagacccagctgatttctcttcatttctgcaaagttactgtaccatggcaggccaacgaacatgtcaaaggaggagcagcagagctggccccgggaaaa

SEQ ID NO: 45249 - DNA, 201 bp, Homo sapiens
tttactgtggcacagaaagtcctgccaattcctaagtgccctaagtagtttctctcagactttttacattttttcaggcctcaagcaaaaccaaagccccrcctccaggtttggtagcaaacaaactttgcttctccggtgctaagcttccatcactcctctggtaataagctttgtgcacatttgctagaaagctgggca

SEQ ID NO: 45250 - DNA, 201 bp, Homo sapiens; identical to SEQ ID NO: 45247

SEQ ID NO: 45251 - DNA, 201 bp, Homo sapiens
tttcctcccgattcttgctgggacaacaaaattgggaagcggttctcgaaacatactgtcaaggcgtagttgcatttggtcgcccaactcacattgaagcytaagacccagctgatttctcttcatttctgcaaagttactgtaccatggcaggccaacgaacatgtcaaaggaggagcagcagagctggccccgggaaaa

SEQ ID NO: 45252 - DNA, 201 bp, Homo sapiens; identical to SEQ ID NO: 45249

SEQ ID NO: 45253 - DNA, 201 bp, Homo sapiens
cgccgtcagcggcacctcccgccagcacgtggccaacgactacgcgcgccagcttgcggcaggctgggggccttgcgaggttcttctgagcaacgcgctgkcgcggctcagaggcttcaaagatcacttcaccttttgccaacagctaaacatcagcatctgcccgctcagccagacggcggcgcgcttccaggtcatcgt

SEQ ID NO: 45254 - DNA, 201 bp, Homo sapiens
cttttgttgctggcggctgccggtgctcgggccgggggatacgagacatgccccacagtgcagccgaacatgctgaacgtgcacctgctgcctcacacacwtgatgacgtgggctggctcaaaaccgtggaccagtacttttatggaatcaagaatgacatccagcacgccggtgtgcagtacatcctggactcggtcatc

SEQ ID NO: 45255 - DNA, 201 bp, Homo sapiens
ggtcagcgaaggcgttttcgttgtgaaggaccccaatggcaggacagtgcccagcgatgtggtaatatttcccagctcagacagccaggcgcaccctccgkagctgctgttctcagcctcactgcccgccctgggcttcagcacctattcagtagcccaggtgcctcgctggaagccccaggcccgcgcaccacagcccat

SEQ ID NO: 45256 - DNA, 201 bp, Homo sapiens
cctgaagcccccgaccgcggacctcttcactggtgtgcttcccaatggttacaacccgccaaggaatctgtgctgggatgtgctgtgtgtcgatcagccgstggtggaggaccctcgcagccccgagtacaacgccaaggagctggtcgattacttcctaaatgtggccactgcccagggccggtattaccgcaccaacca

SEQ ID NO: 45257 - DNA, 201 bp, Homo sapiens
ggccggtattaccgcaccaaccacactgtgatgaccatgggctcggacttccaatatgagaatgccaacatgtggttcaagaaccttgacaagctcatccrgctggtaaatgcgcaggcaaaaggaagcagtgtccatgttctctactccacccccgcttgttacctctgggagctgaacaaggccaacctcacctggtca

SEQ ID NO: 45258 - DNA, 201 bp, Homo sapiens
gtggaggaccctcgcagccccgagtacaacgccaaggagctggtcgattacttcctaaatgtggccactgcccagggccggtattaccgcaccaaccacaytgtgatgaccatgggctcggacttccaatatgagaatgccaacatgtggttcaagaaccttgacaagctcatccggctggtaaatgcgcaggcaaaagga

SEQ ID NO: 45259 - DNA, 201 bp, Homo sapiens
cttctttgggcgccttgattatcaagataagtgggtacggatgcagaagctggagatggagcaggtgtggcgggccagcaccagcctgaagcccccgacckcggacctcttcactggtgtgcttcccaatggttacaacccgccaaggaatctgtgctgggatgtgctgtgtgtcgatcagccgctggtggaggaccctcg

SEQ ID NO: 45260 - DNA, 201 bp, Homo sapiens
aaccatcgaaaatgagcacatccgggcaacgtttgatcctgacacagggctgttgatggagattatgaacatgaatcagcaactcctgctgcctgttcgcyagaccttcttctggtacaacgccagtataggtgacaacgaaagtgaccaggcctcaggtgcctacatcttcagacccaaccaacagaaaccgctgcctgt

SEQ ID NO: 45261 - DNA, 201 bp, Homo sapiens
tggagacaaagggacgcttctacacagacagcaatggccgggagatcctggagaggaggcgggattatcgacccacctggaaactgaaccagacggagccygtggcaggaaactactatccagtcaacacccggatttacatcacggatggaaacatgcagctgactgtgctgactgaccgctcccaggggggcagcagcc

SEQ ID NO: 45262 - DNA, 201 bp, Homo sapiens
tccgggcaacgtttgatcctgacacagggctgttgatggagattatgaacatgaatcagcaactcctgctgcctgttcgccagaccttcttctggtacaaygccagtataggtgacaacgaaagtgaccaggcctcaggtgcctacatcttcagacccaaccaacagaaaccgctgcctgtgagccgctgggctcagatcc

SEQ ID NO: 45263 - DNA, 201 bp, Homo sapiens
ggggccgatacctgtgggcgacacctgggggaaggaggtcatcagccgttttgacacaccgctggagacaaagggacgcttctacacagacagcaatggcygggagatcctggagaggaggcgggattatcgacccacctggaaactgaaccagacggagcccgtggcaggaaactactatccagtcaacacccggattta

SEQ ID NO: 45264 - DNA, 201 bp, Homo sapiens
atggacgcggagtatcggagccactaatggagaacgggtcgggggcgtgggtgcgagggcgccacctggtgctgctggacacagcccaggctgcagccgcsggacaccggctcctggcggagcaggaggtcctggcccctcaggtggtgctggccccgggtggcggcgccgcctacaatctcggggctcctccgcgcacgc

SEQ ID NO: 45265 - DNA, 105 bp, Homo sapiens
gctgggatgggccctccaagcccaagcctcctgctccgggggcagaccagactctgactctcctcttggggctgctgccattaaaacgctactactaagastcag

SEQ ID NO: 45266 - DNA, 201 bp, Homo sapiens
gaaggaggtcatcagccgttttgacacaccgctggagacaaagggacgcttctacacagacagcaatggccgggagatcctggagaggaggcgggattatygacccacctggaaactgaaccagacggagcccgtggcaggaaactactatccagtcaacacccggatttacatcacggatggaaacatgcagctgactgt

SEQ ID NO: 45267 - DNA, 201 bp, Homo sapiens
tatccagtcaacacccggatttacatcacggatggaaacatgcagctgactgtgctgactgaccgctcccaggggggcagcagcctgagagatggctcgcyggagctcatggtgcaccgaaggctgctgaaggacgatggacgcggagtatcggagccactaatggagaacgggtcgggggcgtgggtgcgagggcgccac

SEQ ID NO: 45268 - DNA, 201 bp, Homo sapiens
atgaggcagccacccactacggtgccatcgtggaccagatgacacttgggctgcgctttctggaggacacatttggcaatgatgggcgaccccgtgtggcytggcacattgaccccttcggccactctcgggagcaggcctcgctgtttgcgcagatgggcttcgacggcttcttctttgggcgccttgattatcaagata

SEQ ID NO: 45269 - DNA, 201 bp, Homo sapiens
tcgcttcatttacgtggagattgccttcttctcccgttggtggcaccagcagacaaatgccacacaggaagtcgtgcgagaccttgtgcgccaggggcgcytggagttcgccaatggtggctgggtgatgaacgatgaggcagccacccactacggtgccatcgtggaccagatgacacttgggctgcgctttctggagga

SEQ ID NO: 45270 - DNA, 201 bp, Homo sapiens
gtggagattgccttcttctcccgttggtggcaccagcagacaaatgccacacaggaagtcgtgcgagaccttgtgcgccaggggcgcctggagttcgccartggtggctgggtgatgaacgatgaggcagccacccactacggtgccatcgtggaccagatgacacttgggctgcgctttctggaggacacatttggcaat

SEQ ID NO: 45271 - DNA, 201 bp, Homo sapiens
gcttcttctttgggcgccttgattatcaagataagtgggtacggatgcagaagctggagatggagcaggtgtggcgggccagcaccagcctgaagcccccraccgcggacctcttcactggtgtgcttcccaatggttacaacccgccaaggaatctgtgctgggatgtgctgtgtgtcgatcagccgctggtggaggacc

SEQ ID NO: 45272 - DNA, 201 bp, Homo sapiens
tacgcggatggcccccaccagttctggaccggttacttttccagtcggccggccctcaaacgctacgagcgcctcagctacaacttcctgcaggtgtgcarccagctggaggcgctggtgggcctggcggccaacgtgggaccctatggctccggagacagtgcacccctcaatgaggcgatggctgtgctccagcatcac

SEQ ID NO: 45273 - DNA, 201 bp, Homo sapiens
tcgatcagccgctggtggaggaccctcgcagccccgagtacaacgccaaggagctggtcgattacttcctaaatgtggccactgcccagggccggtattaycgcaccaaccacactgtgatgaccatgggctcggacttccaatatgagaatgccaacatgtggttcaagaaccttgacaagctcatccggctggtaaatg

SEQ ID NO: 45274 - DNA, 201 bp, Homo sapiens
tcttctttgggcgccttgattatcaagataagtgggtacggatgcagaagctggagatggagcaggtgtggcgggccagcaccagcctgaagcccccgacygcggacctcttcactggtgtgcttcccaatggttacaacccgccaaggaatctgtgctgggatgtgctgtgtgtcgatcagccgctggtggaggaccctc

SEQ ID NO: 45275 - DNA, 201 bp, Homo sapiens; identical to SEQ ID NO: 45253

SEQ ID NO: 45276 - DNA, 201 bp, Homo sapiens; identical to SEQ ID NO: 45254

SEQ ID NO: 45277 - DNA, 201 bp, Homo sapiens
tgcatgtatagctttccatgggtactcttgactcagtttccctcctcctttatccgaggtggtaatatttcccagctcagacagccaggcgcaccctccgkagctgctgttctcagcctcactgcccgccctgggcttcagcacctattcagtagcccaggtgcctcgctggaagccccaggcccgcgcaccacagcccat

SEQ ID NO: 45278 - DNA, 201 bp, Homo sapiens
ttaatatcagtctccccttgggaacatatgcctcctgtgagtggtcctcccttttttttttttttttgagacggagtctcgctctgtcacccaggctggaktgcagtggcgcgatcttggctcacttcaaactccgcctgctggattataggcatgagccaccgtgcctggctggtcctccattttaataccccgcttccc

SEQ ID NO: 45279 - DNA, 201 bp, Homo sapiens; identical to SEQ ID NO: 45256

SEQ ID NO: 45280 - DNA, 201 bp, Homo sapiens
ggccggtattaccgcaccaaccacactgtgatgaccatgggctcggacttccaatatgagaatgccaacatgtggttcaagaaccttgacaagctcatccrgctggtaaatgcgcaggtcagtgaaacatgacgacttcttcccttacgcggatggcccccaccagttctggaccggttacttttccagtcggccggccct

SEQ ID NO: 45281 - DNA, 201 bp, Homo sapiens
gtggaggaccctcgcagccccgagtacaacgccaaggagctggtcgattacttcctaaatgtggccactgcccagggccggtattaccgcaccaaccacaytgtgatgaccatgggctcggacttccaatatgagaatgccaacatgtggttcaagaaccttgacaagctcatccggctggtaaatgcgcaggtcagtgaa

SEQ ID NO: 45282 - DNA, 201 bp, Homo sapiens; identical to SEQ ID NO: 45259

SEQ ID NO: 45283 - DNA, 201 bp, Homo sapiens; identical to SEQ ID NO: 45260

SEQ ID NO: 45284 - DNA, 201 bp, Homo sapiens; identical to SEQ ID NO: 45262

SEQ ID NO: 45285 - DNA, 201 bp, Homo sapiens; identical to SEQ ID NO: 45261

SEQ ID NO: 45286 - DNA, 201 bp, Homo sapiens; identical to SEQ ID NO: 45263

SEQ ID NO: 45287 - DNA, 201 bp, Homo sapiens; identical to SEQ ID NO: 45264

SEQ ID NO: 45288 - DNA, 201 bp, Homo sapiens; identical to SEQ ID NO: 45266

SEQ ID NO: 45289 - DNA, 105 bp, Homo sapiens; identical to SEQ ID NO: 45265

SEQ ID NO: 45290 - DNA, 201 bp, Homo sapiens; identical to SEQ ID NO: 45267

SEQ ID NO: 45291 - DNA, 201 bp, Homo sapiens; identical to SEQ ID NO: 45268

SEQ ID NO: 45292 - DNA, 201 bp, Homo sapiens; identical to SEQ ID NO: 45269

SEQ ID NO: 45293 - DNA, 201 bp, Homo sapiens; identical to SEQ ID NO: 45270

SEQ ID NO: 45294 - DNA, 201 bp, Homo sapiens; identical to SEQ ID NO: 45271

SEQ ID NO: 45295 - DNA, 201 bp, Homo sapiens; identical to SEQ ID NO: 45273

SEQ ID NO: 45296 - DNA, 201 bp, Homo sapiens; identical to SEQ ID NO: 45274

SEQ ID NO: 45297 - DNA, 201 bp, Homo sapiens; identical to SEQ ID NO: 45272

SEQ ID NO: 45298 - DNA, 201 bp, Homo sapiens; identical to SEQ ID NO: 45253

SEQ ID NO: 45299 - DNA, 201 bp, Homo sapiens; identical to SEQ ID NO: 45254

SEQ ID NO: 45300 - DNA, 201 bp, Homo sapiens; identical to SEQ ID NO: 45255

SEQ ID NO: 45301 - DNA, 201 bp, Homo sapiens; identical to SEQ ID NO: 45256

SEQ ID NO: 45302 - DNA, 201 bp, Homo sapiens
ggccggtattaccgcaccaaccacactgtgatgaccatgggctcggacttccaatatgagaatgccaacatgtggttcaagaaccttgacaagctcatccrgctggtaaatgcgcagcaggcaaaaggaagcagtgtccatgttctctactccacccccgcttgttacctctgggagctgaacaaggccaacctcacctgg

SEQ ID NO: 45303 - DNA, 201 bp, Homo sapiens
gtggaggaccctcgcagccccgagtacaacgccaaggagctggtcgattacttcctaaatgtggccactgcccagggccggtattaccgcaccaaccacaytgtgatgaccatgggctcggacttccaatatgagaatgccaacatgtggttcaagaaccttgacaagctcatccggctggtaaatgcgcagcaggcaaaa

SEQ ID NO: 45304 - DNA, 201 bp, Homo sapiens; identical to SEQ ID NO: 45259

SEQ ID NO: 45305 - DNA, 201 bp, Homo sapiens; identical to SEQ ID NO: 45260

SEQ ID NO: 45306 - DNA, 201 bp, Homo sapiens; identical to SEQ ID NO: 45261

SEQ ID NO: 45307 - DNA, 201 bp, Homo sapiens; identical to SEQ ID NO: 45262

SEQ ID NO: 45308 - DNA, 201 bp, Homo sapiens; identical to SEQ ID NO: 45263

SEQ ID NO: 45309 - DNA, 201 bp, Homo sapiens; identical to SEQ ID NO: 45264

SEQ ID NO: 45310 - DNA, 105 bp, Homo sapiens; identical to SEQ ID NO: 45265

SEQ ID NO: 45311 - DNA, 201 bp, Homo sapiens; identical to SEQ ID NO: 45266

SEQ ID NO: 45312 - DNA, 201 bp, Homo sapiens; identical to SEQ ID NO: 45267

SEQ ID NO: 45313 - DNA, 201 bp, Homo sapiens; identical to SEQ ID NO: 45268

SEQ ID NO: 45314 - DNA, 201 bp, Homo sapiens; identical to SEQ ID NO: 45269

SEQ ID NO: 45315 - DNA, 201 bp, Homo sapiens; identical to SEQ ID NO: 45270

SEQ ID NO: 45316 - DNA, 201 bp, Homo sapiens; identical to SEQ ID NO: 45271

SEQ ID NO: 45317 - DNA, 201 bp, Homo sapiens; identical to SEQ ID NO: 45272

SEQ ID NO: 45318 - DNA, 201 bp, Homo sapiens; identical to SEQ ID NO: 45273

SEQ ID NO: 45319 - DNA, 201 bp, Homo sapiens; identical to SEQ ID NO: 45274

SEQ ID NO: 45320 - DNA, 123 bp, Homo sapiens
catagtacacaacaaatttatgyctcagctacatgatctaaaagttaaaggtcccaggagccccatcctgaacttggaaagtgtagccttcagaggtagtttctggcacaacgttttgatctt

SEQ ID NO: 45321 - DNA, 102 bp, Homo sapiens
crtagtacacaacaaatttatgcctcagctacatgatctaaaagttaaaggtcccaggagccccatcctgaacttggaaagtgtagccttcagaggtagttt

SEQ ID NO: 45322 - DNA, 201 bp, Homo sapiens
cctcttgggaggaacaggcagagaggtggcttcagatggctcttggctgccactctaggcctcggggcttatacaatgagcagtgggctctaccttccaayaggaagtgcaaactaattcgaagtcacacttcaccaggagggagagatggtcttggctgaaggcactttaatcagggagcaaacccagtgccggagtttg

SEQ ID NO: 45323 - DNA, 201 bp, Homo sapiens
tctcgttactctgataaatctagacaccactctgttggagaaccagcactgccggcagctggggttagtgcactgactgagcgaggcatgaggcctgctcrctggtagaacttcttgttagggctgttagcatggtcagctagcagctggcatggggtgaactgttttccataggcagcttcatatttcttgagccggtcc

SEQ ID NO: 45324 - DNA, 201 bp, Homo sapiens
cacccctggccaccctggcctcttgggaggaacaggcagagaggtggcttcagatggctcttggctgccactctaggcctcggggcttatacaatgagcaktgggctctaccttccaataggaagtgcaaactaattcgaagtcacacttcaccaggagggagagatggtcttggctgaaggcactttaatcagggagcaa

SEQ ID NO: 45325 - DNA, 201 bp, Homo sapiens
tgcaaactaattcgaagtcacacttcaccaggagggagagatggtcttggctgaaggcactttaatcagggagcaaacccagtgccggagtttgtcttctmgttactctgataaatctagacaccactctgttggagaaccagcactgccggcagctggggttagtgcactgactgagcgaggcatgaggcctgctcactg

SEQ ID NO: 45326 - DNA, 201 bp, Homo sapiens
atgctgacacagagtttggtttttattgttatgtgtttggctgggtgcagaactgccctcaccacccctggccaccctggcctcttgggaggaacaggcaragaggtggcttcagatggctcttggctgccactctaggcctcggggcttatacaatgagcagtgggctctaccttccaataggaagtgcaaactaattcg

SEQ ID NO: 45327 - DNA, 201 bp, Homo sapiens
ctttcttccagattgctttttgaaggaggcgtttaaaccagaagggcaaagatgctgacacagagtttggtttttattgttatgtgtttggctgggtgcaraactgccctcaccacccctggccaccctggcctcttgggaggaacaggcagagaggtggcttcagatggctcttggctgccactctaggcctcggggctt

SEQ ID NO: 45328 - DNA, 201 bp, Homo sapiens
agggctttcttccagattgctttttgaaggaggcgtttaaaccagaagggcaaagatgctgacacagagtttggtttttattgttatgtgtttggctgggkgcagaactgccctcaccacccctggccaccctggcctcttgggaggaacaggcagagaggtggcttcagatggctcttggctgccactctaggcctcggg

SEQ ID NO: 45329 - DNA, 201 bp, Homo sapiens
tttaaaccagaagggcaaagatgctgacacagagtttggtttttattgttatgtgtttggctgggtgcagaactgccctcaccacccctggccaccctggyctcttgggaggaacaggcagagaggtggcttcagatggctcttggctgccactctaggcctcggggcttatacaatgagcagtgggctctaccttccaat

SEQ ID NO: 45330 - DNA, 201 bp, Homo sapiens
aaaccagaagggcaaagatgctgacacagagtttggtttttattgttatgtgtttggctgggtgcagaactgccctcaccacccctggccaccctggcctyttgggaggaacaggcagagaggtggcttcagatggctcttggctgccactctaggcctcggggcttatacaatgagcagtgggctctaccttccaatagg

SEQ ID NO: 45331 - DNA, 201 bp, Homo sapiens
aaatccttcctcttcacaccctcctgatagatgtaaaagcccttcccagatttacgacctaggaagcccttggacaccatctgtgtcagcagttctgggtytccacctccaaaccgctccccaaagactttgcccagatcttccgccacatgtttcgctacatccacaccaacttcatccaccagtgtggcggcacccaca

SEQ ID NO: 45332 - DNA, 201 bp, Homo sapiens
acccctggccaccctggcctcttgggaggaacaggcagagaggtggcttcagatggctcttggctgccactctaggcctcggggcttatacaatgagcagkgggctctaccttccaataggaagtgcaaactaattcgaagtcacacttcaccaggagggagagatggtcttggctgaaggcactttaatcagggagcaaa

SEQ ID NO: 45333 - DNA, 201 bp, Homo sapiens
tcctattcgctgacttagttaaaattgatttgttttcattaggatctgatgtgaattcagatttccaatcttctcctagccaaccattttcctggaattamaaattcagtaaaaaaggaaactatagattatgtggtttgtttgacttttccaagaattgtcccgtaacatacaatttgtcatacaatctattaaaatgtc

SEQ ID NO: 45334 - DNA, 201 bp, Homo sapiens
agttgtcgagccaggacggtgacagcgtttaacaaagcttagagaaacctccaggagactgctatcatggcagagaagcccaagctccactacttcaatgyacggggcagaatggagtccacccggtggctcctggctgcagctggagtagagtttgaagagaaatttataaaatctgcagaagatttggacaagttaaga

SEQ ID NO: 45335 - DNA, 201 bp, Homo sapiens
gaattcagttgtcgagccaggacggtgacagcgtttaacaaagcttagagaaacctccaggagactgctatcatggcagagaagcccaagctccactactycaatgcacggggcagaatggagtccacccggtggctcctggctgcagctggagtagagtttgaagagaaatttataaaatctgcagaagatttggacaag

SEQ ID NO: 45336 - DNA, 201 bp, Homo sapiens
taatacaactcctattcgctgacttagttaaaattgatttgttttcattaggatctgatgtgaattcagatttccaatcttctcctagccaaccattttcytggaattaaaaattcagtaaaaaaggaaactatagattatgtggtttgtttgacttttccaagaattgtcccgtaacatacaatttgtcatacaatctat

SEQ ID NO: 45337 - DNA, 201 bp, Homo sapiens
aattaaataatacaactcctattcgctgacttagttaaaattgatttgttttcattaggatctgatgtgaattcagatttccaatcttctcctagccaacmattttcctggaattaaaaattcagtaaaaaaggaaactatagattatgtggtttgtttgacttttccaagaattgtcccgtaacatacaatttgtcatac

SEQ ID NO: 45338 - DNA, 201 bp, Homo sapiens
caaattatatgctaattaaataatacaactcctattcgctgacttagttaaaattgatttgttttcattaggatctgatgtgaattcagatttccaatctyctcctagccaaccattttcctggaattaaaaattcagtaaaaaaggaaactatagattatgtggtttgtttgacttttccaagaattgtcccgtaacata

SEQ ID NO: 45339 - DNA, 201 bp, Homo sapiens
atgaactctttcaaattatatgctaattaaataatacaactcctattcgctgacttagttaaaattgatttgttttcattaggatctgatgtgaattcagwtttccaatcttctcctagccaaccattttcctggaattaaaaattcagtaaaaaaggaaactatagattatgtggtttgtttgacttttccaagaattgt

SEQ ID NO: 45340 - DNA, 201 bp, Homo sapiens
tgttgattgtgcctgttgtgaagctaatgaactctttcaaattatatgctaattaaataatacaactcctattcgctgacttagttaaaattgatttgttytcattaggatctgatgtgaattcagatttccaatcttctcctagccaaccattttcctggaattaaaaattcagtaaaaaaggaaactatagattatgtg

SEQ ID NO: 45341 - DNA, 201 bp, Homo sapiens
cagttgtcgagccaggacggtgacagcgtttaacaaagcttagagaaacctccaggagactgctatcatggcagagaagcccaagctccactacttcaatrcacggggcagaatggagtccacccggtggctcctggctgcagctggagtagagtttgaagagaaatttataaaatctgcagaagatttggacaagttaag

SEQ ID NO: 45342 - DNA, 201 bp, Homo sapiens
gaagagaaatttataaaatctgcagaagatttggacaagttaagaaatgatggatatttgatgttccagcaagtgccaatggttgagattgatgggatgawgctggtgcagaccagagccattctcaactacattgccagcaaatacaacctctatgggaaagacataaaggagagagccctgattgatatgtatatagaa

SEQ ID NO: 45343 - DNA, 201 bp, Homo sapiens
agtttctacagcctggcagcccaaggaagcctcccatggatgagaaatctttagaagaagcaaggaagattttcaggttttaataacgcagtcatggaggycaagaacttgcaataccaatgttctaaagttttgcaacaataaagtactttacctaagtgttgattgtgcctgttgtgaagctaatgaactctttcaaat

SEQ ID NO: 45344 - DNA, 201 bp, Homo sapiens
gaagaagtttctacagcctggcagcccaaggaagcctcccatggatgagaaatctttagaagaagcaaggaagattttcaggttttaataacgcagtcatrgaggccaagaacttgcaataccaatgttctaaagttttgcaacaataaagtactttacctaagtgttgattgtgcctgttgtgaagctaatgaactcttt

SEQ ID NO: 45345 - DNA, 201 bp, Homo sapiens
cagtgaagaagtttctacagcctggcagcccaaggaagcctcccatggatgagaaatctttagaagaagcaaggaagattttcaggttttaataacgcagycatggaggccaagaacttgcaataccaatgttctaaagttttgcaacaataaagtactttacctaagtgttgattgtgcctgttgtgaagctaatgaact

SEQ ID NO: 45346 - DNA, 201 bp, Homo sapiens
ggccctgaaaaccagaatcagcaacctgcccacagtgaagaagtttctacagcctggcagcccaaggaagcctcccatggatgagaaatctttagaagaakcaaggaagattttcaggttttaataacgcagtcatggaggccaagaacttgcaataccaatgttctaaagttttgcaacaataaagtactttacctaagt

SEQ ID NO: 45347 - DNA, 201 bp, Homo sapiens
agcttccctctgctgaaggccctgaaaaccagaatcagcaacctgcccacagtgaagaagtttctacagcctggcagcccaaggaagcctcccatggatgmgaaatctttagaagaagcaaggaagattttcaggttttaataacgcagtcatggaggccaagaacttgcaataccaatgttctaaagttttgcaacaata

SEQ ID NO: 45348 - DNA, 108 bp, Homo sapiens
gtgggagrgaactattgagaggaacaaagagcttataaatacattaggacctggaattcagttgtcgagccaggacggtgacagcgtttaacaaagcttagagaaacc

SEQ ID NO: 45349 - DNA, 201 bp, Homo sapiens
ttgatatgtatatagaaggtatagcagatttgggtgaaatgatcctccttctgcccgtatgtccacctgaggaaaaagatgccaagcttgccttgatcaargagaaaataaaaaatcgctacttccctgcctttgaaaaagtcttaaagagccatggacaagactaccttgttggcaacaagctgagccgggctgacattc

SEQ ID NO: 45350 - DNA, 201 bp, Homo sapiens
cctttgaaaaagtcttaaagagccatggacaagactaccttgttggcaacaagctgagccgggctgacattcatctggtggaacttctctactacgtcgargagcttgactccagtcttatctccagcttccctctgctgaaggccctgaaaaccagaatcagcaacctgcccacagtgaagaagtttctacagcctggca

SEQ ID NO: 45351 - DNA, 201 bp, Homo sapiens
gattgatatgtatatagaaggtatagcagatttgggtgaaatgatcctccttctgcccgtatgtccacctgaggaaaaagatgccaagcttgccttgatcmaagagaaaataaaaaatcgctacttccctgcctttgaaaaagtcttaaagagccatggacaagactaccttgttggcaacaagctgagccgggctgacat

SEQ ID NO: 45352 - DNA, 201 bp, Homo sapiens
gaaagacataaaggagagagccctgattgatatgtatatagaaggtatagcagatttgggtgaaatgatcctccttctgcccgtatgtccacctgaggaamaagatgccaagcttgccttgatcaaagagaaaataaaaaatcgctacttccctgcctttgaaaaagtcttaaagagccatggacaagactaccttgttgg

SEQ ID NO: 45353 - DNA, 201 bp, Homo sapiens
aacctctatgggaaagacataaaggagagagccctgattgatatgtatatagaaggtatagcagatttgggtgaaatgatcctccttctgcccgtatgtcmacctgaggaaaaagatgccaagcttgccttgatcaaagagaaaataaaaaatcgctacttccctgcctttgaaaaagtcttaaagagccatggacaagac

SEQ ID NO: 45354 - DNA, 201 bp, Homo sapiens
aagtgttgattgtgcctgttgtgaagctaatgaactctttcaaattatatgctaattaaataatacaactcctattcgctgacttagttaaaattgatttsttttcattaggatctgatgtgaattcagatttccaatcttctcctagccaaccattttcctggaattaaaaattcagtaaaaaaggaaactatagattat

SEQ ID NO: 45355 - DNA, 201 bp, Homo sapiens
aacaataaagtactttacctaagtgttgattgtgcctgttgtgaagctaatgaactctttcaaattatatgctaattaaataatacaactcctattcgctsacttagttaaaattgatttgttttcattaggatctgatgtgaattcagatttccaatcttctcctagccaaccattttcctggaattaaaaattcagtaa

SEQ ID NO: 45356 - DNA, 201 bp, Homo sapiens
caacaataaagtactttacctaagtgttgattgtgcctgttgtgaagctaatgaactctttcaaattatatgctaattaaataatacaactcctattcgcygacttagttaaaattgatttgttttcattaggatctgatgtgaattcagatttccaatcttctcctagccaaccattttcctggaattaaaaattcagta

SEQ ID NO: 45357 - DNA, 201 bp, Homo sapiens
tgcaacaataaagtactttacctaagtgttgattgtgcctgttgtgaagctaatgaactctttcaaattatatgctaattaaataatacaactcctattcrctgacttagttaaaattgatttgttttcattaggatctgatgtgaattcagatttccaatcttctcctagccaaccattttcctggaattaaaaattcag

SEQ ID NO: 45358 - DNA, 201 bp, Homo sapiens
tctttagaagaagcaaggaagattttcaggttttaataacgcagtcatggaggccaagaacttgcaataccaatgttctaaagttttgcaacaataaagtrctttacctaagtgttgattgtgcctgttgtgaagctaatgaactctttcaaattatatgctaattaaataatacaactcctattcgctgacttagttaaa

SEQ ID NO: 45359 - DNA, 201 bp, Homo sapiens
agaaatctttagaagaagcaaggaagattttcaggttttaataacgcagtcatggaggccaagaacttgcaataccaatgttctaaagttttgcaacaatwaagtactttacctaagtgttgattgtgcctgttgtgaagctaatgaactctttcaaattatatgctaattaaataatacaactcctattcgctgacttag

SEQ ID NO: 45360 - DNA, 201 bp, Homo sapiens
caaggaagcctcccatggatgagaaatctttagaagaagcaaggaagattttcaggttttaataacgcagtcatggaggccaagaacttgcaataccaatrttctaaagttttgcaacaataaagtactttacctaagtgttgattgtgcctgttgtgaagctaatgaactctttcaaattatatgctaattaaataatac

SEQ ID NO: 45361 - DNA, 201 bp, Homo sapiens
cccaaggaagcctcccatggatgagaaatctttagaagaagcaaggaagattttcaggttttaataacgcagtcatggaggccaagaacttgcaataccartgttctaaagttttgcaacaataaagtactttacctaagtgttgattgtgcctgttgtgaagctaatgaactctttcaaattatatgctaattaaataat

SEQ ID NO: 45362 - DNA, 201 bp, Homo sapiens
ggcagcccaaggaagcctcccatggatgagaaatctttagaagaagcaaggaagattttcaggttttaataacgcagtcatggaggccaagaacttgcaakaccaatgttctaaagttttgcaacaataaagtactttacctaagtgttgattgtgcctgttgtgaagctaatgaactctttcaaattatatgctaattaa

SEQ ID NO: 45363 - DNA, 201 bp, Homo sapiens
tacaacctctatgggaaagacataaaggagagagccctgattgatatgtatatagaaggtatagcagatttgggtgaaatgatcctccttctgcccgtatstccacctgaggaaaaagatgccaagcttgccttgatcaaagagaaaataaaaaatcgctacttccctgcctttgaaaaagtcttaaagagccatggacaa

SEQ ID NO: 45364 - DNA, 201 bp, Homo sapiens
ctgcctttgaaaaagtcttaaagagccatggacaagactaccttgttggcaacaagctgagccgggctgacattcatctggtggaacttctctactacgtsgaggagcttgactccagtcttatctccagcttccctctgctgaaggccctgaaaaccagaatcagcaacctgcccacagtgaagaagtttctacagcctg

SEQ ID NO: 45365 - DNA, 201 bp, Homo sapiens
cagcctggcagcccaaggaagcctcccatggatgagaaatctttagaagaagcaaggaagattttcaggttttaataacgcagtcatggaggccaagaacwtgcaataccaatgttctaaagttttgcaacaataaagtactttacctaagtgttgattgtgcctgttgtgaagctaatgaactctttcaaattatatgct

SEQ ID NO: 45366 - DNA, 201 bp, Homo sapiens
caaatacaacctctatgggaaagacataaaggagagagccctgattgatatgtatatagaaggtatagcagatttgggtgaaatgatcctccttctgcccktatgtccacctgaggaaaaagatgccaagcttgccttgatcaaagagaaaataaaaaatcgctacttccctgcctttgaaaaagtcttaaagagccatgg

SEQ ID NO: 45367 - DNA, 201 bp, Homo sapiens
agaaaataaaaaatcgctacttccctgcctttgaaaaagtcttaaagagccatggacaagactaccttgttggcaacaagctgagccgggctgacattcayctggtggaacttctctactacgtcgaggagcttgactccagtcttatctccagcttccctctgctgaaggccctgaaaaccagaatcagcaacctgccca

SEQ ID NO: 45368 - DNA, 201 bp, Homo sapiens
acattgccagcaaatacaacctctatgggaaagacataaaggagagagccctgattgatatgtatatagaaggtatagcagatttgggtgaaatgatcctycttctgcccgtatgtccacctgaggaaaaagatgccaagcttgccttgatcaaagagaaaataaaaaatcgctacttccctgcctttgaaaaagtcttaa

SEQ ID NO: 45369 - DNA, 153 bp, Homo sapiens
ggcgcggaggggccgctcaccccgcagcccggcctcggcctccgccgcttgtygtcgcgccccgcccgcgagcccgccccgcacgtcccccgccggcggccaccatgagcacaggcctgcggtacaagagcaagctggcgaccccaggtgagc

SEQ ID NO: 45370 - DNA, 201 bp, Homo sapiens
aaccggtgcgtcctgaggagagaaccggcgctgggcaacacgggcctgcaaactcgacaggaccctgcccgaggggccctcgcgccaacctggaccggtcyccgcctcctccgctgcccaatctctcagacccaccccacctgcaggcccagaccacgtgggacagaactcctgcccaccctaccccgagggaggcgaacc

SEQ ID NO: 45371 - DNA, 201 bp, Homo sapiens
ctcctgctgctggccccgccgagccgcccggccgcaggttgcccggcgccctgtagctgcgcggggacgctcgtggactgcgggcgccgcgggctgacttrggcctcgctgccgaccgccttccctgtcgacacaaccgagctggtgctgaccggcaacaacctgacggcgctgccgccggggctgctggacgcgctgccc

SEQ ID NO: 45372 - DNA, 201 bp, Homo sapiens
agctgactgtcttgtccccagtgagatccggaagctgaaggagcggatccgggaggagattgacaagtttgggatccatgtataccagttccctgagtgtractcggacgaggatgaggacttcaagcagcaggaccgggaactgaaggagagcgcgcccttcgccgttataggcagcaacacggtggtggaggccaaggg

SEQ ID NO: 45373 - DNA, 201 bp, Homo sapiens
gcgctgcgcaccgcacacctgggcgccaacccctggcgctgcgactgccgccttgtgccgctgcgcgcctggctggccggccgccccgagcgtgcgccctrccgcgacctgcgttgcgtggcgcccccagcgctgcgcggccgcctgctgccctatctggccgaggacgagctgcgcgccgcttgcgctcccggcccgctc

SEQ ID NO: 45374 - DNA, 201 bp, Homo sapiens
atccccagacgcctagcgggcagggttgggctgaatcaaatgggagccctccagacataaggaggccagaggctgcaaggagcggggtcgtgaccgcttamaccccttctccacagcccggcccgacctggagggcccccggggcactgggcggtgagccacctcctggcaactctcggtgccgtcccctgccctcgctcg

SEQ ID NO: 45375 - DNA, 201 bp, Homo sapiens
gctgcgcgcctggctggccggccgccccgagcgtgcgccctaccgcgacctgcgttgcgtggcgcccccagcgctgcgcggccgcctgctgccctatctgsccgaggacgagctgcgcgccgcttgcgctcccggcccgctctgctggggggcgctggcggcgcagcttgcgctgctgggccttgggctgctgcacgcgtt

SEQ ID NO: 45376 - DNA, 201 bp, Homo sapiens
aacctgacggcgctgccgccggggctgctggacgcgctgcccgcgctgcgcaccgcacacctgggcgccaacccctggcgctgcgactgccgccttgtgcsgctgcgcgcctggctggccggccgccccgagcgtgcgccctaccgcgacctgcgttgcgtggcgcccccagcgctgcgcggccgcctgctgccctatctg

SEQ ID NO: 45377 - DNA, 201 bp, Homo sapiens
gacctgcgttgcgtggcgcccccagcgctgcgcggccgcctgctgccctatctggccgaggacgagctgcgcgccgcttgcgctcccggcccgctctgctrgggggcgctggcggcgcagcttgcgctgctgggccttgggctgctgcacgcgttgctgctggtgctgctgctgtgccgcctgcggaggctgcgggcccgg

SEQ ID NO: 45378 - DNA, 201 bp, Homo sapiens
tgttccctgccccagtgctgcagaacggacttgggagccctcctttgcctgctcccgcgggtcacccagcgagtgctgagaccccattttctgtcgaggcsggccgagtcttcccttatccccagacgcctagcgggcagggttgggctgaatcaaatgggagccctccagacataaggaggccagaggctgcaaggagcg

SEQ ID NO: 45379 - DNA, 201 bp, Homo sapiens
cgcccggccgcaggttgcccggcgccctgtagctgcgcggggacgctcgtggactgcgggcgccgcgggctgacttgggcctcgctgccgaccgccttccytgtcgacacaaccgagctggtgctgaccggcaacaacctgacggcgctgccgccggggctgctggacgcgctgcccgcgctgcgcaccgcacacctgggc

SEQ ID NO: 45380 - DNA, 201 bp, Homo sapiens
gctgagcttactgctcctgctgctggccccgccgagccgcccggccgcaggttgcccggcgccctgtagctgcgcggggacgctcgtggactgcgggcgcygcgggctgacttgggcctcgctgccgaccgccttccctgtcgacacaaccgagctggtgctgaccggcaacaacctgacggcgctgccgccggggctgct

SEQ ID NO: 45381 - DNA, 172 bp, Homo sapiens
tcgccatgggctccggtgagtctggagtccggtcgggcccccggctgctccctaggccgacccgggttgagaggagctctggtcgtttggctgcagctggragagacttgggtcagacttagaggggacttccagccggcgtgcggggtggtcagggtggagaggctggcgg

SEQ ID NO: 45382 - DNA, 188 bp, Homo sapiens
ccgggctgccgtcttctcgccatgggctccggtgagtctggagtccggtcgggcccccggctgctccctaggccgacccgggttgagaggagctctggtcstttggctgcagctgggagagacttgggtcagacttagaggggacttccagccggcgtgcggggtggtcagggtggagaggctggcgg

SEQ ID NO: 45383 - DNA, 201 bp, Homo sapiens; identical to SEQ ID NO: 45372

SEQ ID NO: 45384 - DNA, 201 bp, Homo sapiens
atccccagacgcctagcgggcagggttgggctgaatcaaatgggagccctccagacataaggaggccagaggctgcaaggagcggggtcgtgaccgcttamaccccttctccacagtgagcctaggcctcccgatgttcccacccgcatgatcccttcccgccacacgatgctccgttttcttccgttgtgaatgccgcgt

SEQ ID NO: 45385 - DNA, 201 bp, Homo sapiens
ctctggcaggcaggcaaagctaggcagaagaggattcccaggatcctgggtctgttccctgccccagtgctgcagaacggacttgggagcctgtcgaggcsggccgagtcttcccttatccccagacgcctagcgggcagggttgggctgaatcaaatgggagccctccagacataaggaggccagaggctgcaaggagcg

SEQ ID NO: 45386 - DNA, 172 bp, Homo sapiens; identical to SEQ ID NO: 45381

SEQ ID NO: 45387 - DNA, 188 bp, Homo sapiens; identical to SEQ ID NO: 45382

SEQ ID NO: 45388 - DNA, 201 bp, Homo sapiens; identical to SEQ ID NO: 45372

SEQ ID NO: 45389 - DNA, 201 bp, Homo sapiens; identical to SEQ ID NO: 45384

SEQ ID NO: 45390 - DNA, 201 bp, Homo sapiens; identical to SEQ ID NO: 45385

SEQ ID NO: 45391 - DNA, 172 bp, Homo sapiens; identical to SEQ ID NO: 45381

SEQ ID NO: 45392 - DNA, 188 bp, Homo sapiens; identical to SEQ ID NO: 45382

SEQ ID NO: 45393 - DNA, 201 bp, Homo sapiens; identical to SEQ ID NO: 45372

SEQ ID NO: 45394 - DNA, 201 bp, Homo sapiens; identical to SEQ ID NO: 45384

SEQ ID NO: 45395 - DNA, 201 bp, Homo sapiens; identical to SEQ ID NO: 45385

SEQ ID NO: 45396 - DNA, 172 bp, Homo sapiens; identical to SEQ ID NO: 45381

SEQ ID NO: 45397 - DNA, 188 bp, Homo sapiens; identical to SEQ ID NO: 45382

SEQ ID NO: 45398 - DNA, 201 bp, Homo sapiens; identical to SEQ ID NO: 45372

SEQ ID NO: 45399 - DNA, 201 bp, Homo sapiens; identical to SEQ ID NO: 45384

SEQ ID NO: 45400 - DNA, 201 bp, Homo sapiens; identical to SEQ ID NO: 45385

SEQ ID NO: 45401 - DNA, 136 bp, Homo sapiens
caccccgcagcccggcctcggcctccgccgcttgtygtcgcgccccgcccgcgagcccgccccgcacgtcccccgccggcggccaccatgagcacaggcctgcggtacaagagcaagctggcgaccccaggtgagc

SEQ ID NO: 45402 - DNA, 201 bp, Homo sapiens
tcgccatgggctccggtgagtctggagtccggtcgggcccccggctgctccctaggccgacccgggttgagaggagctctggtcgtttggctgcagctggragagacttgggtcagacttagaggggacttccagccggcgtgcggggtggtcagggtggagaggctggcgggctaccgggacgccgggcatcaggggctg

SEQ ID NO: 45403 - DNA, 201 bp, Homo sapiens; identical to SEQ ID NO: 45371

SEQ ID NO: 45404 - DNA, 201 bp, Homo sapiens; identical to SEQ ID NO: 45372

SEQ ID NO: 45405 - DNA, 201 bp, Homo sapiens; identical to SEQ ID NO: 45373

SEQ ID NO: 45406 - DNA, 201 bp, Homo sapiens; identical to SEQ ID NO: 45374

SEQ ID NO: 45407 - DNA, 201 bp, Homo sapiens; identical to SEQ ID NO: 45375

SEQ ID NO: 45408 - DNA, 201 bp, Homo sapiens; identical to SEQ ID NO: 45376

SEQ ID NO: 45409 - DNA, 201 bp, Homo sapiens; identical to SEQ ID NO: 45377

SEQ ID NO: 45410 - DNA, 201 bp, Homo sapiens
ccgggctgccgtcttctcgccatgggctccggtgagtctggagtccggtcgggcccccggctgctccctaggccgacccgggttgagaggagctctggtcstttggctgcagctgggagagacttgggtcagacttagaggggacttccagccggcgtgcggggtggtcagggtggagaggctggcgggctaccgggacgc

SEQ ID NO: 45411 - DNA, 201 bp, Homo sapiens; identical to SEQ ID NO: 45378

SEQ ID NO: 45412 - DNA, 201 bp, Homo sapiens; identical to SEQ ID NO: 45379

SEQ ID NO: 45413 - DNA, 201 bp, Homo sapiens; identical to SEQ ID NO: 45380

SEQ ID NO: 45414 - DNA, 201 bp, Homo sapiens
tgcagttctgggcaccccacctggtggggcctcacttgggcctggagacagggaatggtagagggattatcaacctcaatgcctttgaccccacactcccraagacaatgacgcagttcctagagcagggagaggccaccctctcagtggcaagaagagccttggctgcccagttgccagtcctaccatggtcggaggtaa

SEQ ID NO: 45415 - DNA, 201 bp, Homo sapiens; identical to SEQ ID NO: 45414

SEQ ID NO: 45416 - DNA, 201 bp, Homo sapiens; identical to SEQ ID NO: 45414

SEQ ID NO: 45417 - DNA, 201 bp, Homo sapiens
ctttcaaatcaaagaatgctaatgcttagcacttgctgttgagcatgctctaacttttaaagccctggcctcctgtctccttagctgcttagctacgcggsctagcagatcatcacccatcagtaatcctgtggctagatccaggggaaaattgcttatgtccaggccccacccctgtcactcataaataccccttgtggg

SEQ ID NO: 45418 - DNA, 201 bp, Homo sapiens
tgggggaacccaaacagcctgtcctgcaagtgacatcactcacccacacgaaggagggggactgcaccttagaagcctgctctgcatccatttaccccccyccaagggctttgtttcactgtttatgttcacgtgatctcaacagggaaattgtcattttcattaattttttaaaaaattcgtctttcaaatgtagaacta

SEQ ID NO: 45419 - DNA, 201 bp, Homo sapiens
tttttgcccctgaggagtgggcagaagaaggaggtagtgtaatacgcagaggccttttcttcccggtatactatagcatttgccttccgttctgaagctawgtggcttgccaagtccttcacgaaatgagccacgctgatgggtaatttgtggagaaatatcttaattttgatttccttaaggaaaagcgaaaagcagagt

SEQ ID NO: 45420 - DNA, 201 bp, Homo sapiens
tgagagctgcagctggcagggacctccctctgctgctcctccagcaagccacagagcataccctcacgtgacaagagtgtggtaggttttctccccacttytcacacacgcctggtggttgtggttccatctgccttgttggcttgcccggggggattcaacacttgactttcaaatcaaagaatgctaatgcttagcact

SEQ ID NO: 45421 - DNA, 201 bp, Homo sapiens
cggcctagcagatcatcacccatcagtaatcctgtggctagatccaggggaaaattgcttatgtccaggccccacccctgtcactcataaataccccttgkgggggtggaattttagtgttttcagctaagaaaaccacattttctctttccttgcctctgctaggactgtgagcatctcatagtccactccctaaacact

SEQ ID NO: 45422 - DNA, 201 bp, Homo sapiens
tcaccagtgtcattgtggctgcgggaaggagatctgaacctaacttttcttactccctgaggagtttcttgttggacccaatggggtccatgaagacactratggggatggaagcagacccatggcatcaactgcagtgtttctgctgtgttcatcttctcagaaaactctgtgacccagttctttgggagcttttgtcag

SEQ ID NO: 45423 - DNA, 201 bp, Homo sapiens
gtcagtctctttcgtgccatctaccttcgaaggaaggaacacttttagagttacaatgatgaggagaggagcgggacaatactcaatcctataccaagtcrattgagattagtttcctactgggagtaagtgcctggccctgctactcctatttgaatgctattaatattacctagccttttacaaaggatactttgtaaa

SEQ ID NO: 45424 - DNA, 201 bp, Homo sapiens
tgaaacatatgctgaaagaggggaagggccggatgctgcaggccatcagcccgaagcagagccccagcagcagccctactcgcgagcgctccccctccccstctttccgatggcccttctccggcaagacttccccaccttgctccccagcaaatctctccaggcacaaggctgcagcctatgatatcagtgaggatgaag

SEQ ID NO: 45425 - DNA, 201 bp, Homo sapiens
tccggaaggagcactgaaacatatgctgaaagaggggaagggccggatgctgcaggccatcagcccgaagcagagccccagcagcagccctactcgcgagsgctccccctccccctctttccgatggcccttctccggcaagacttccccaccttgctccccagcaaatctctccaggcacaaggctgcagcctatgatat

SEQ ID NO: 45426 - DNA, 201 bp, Homo sapiens
ccccaccttgctccccagcaaatctctccaggcacaaggctgcagcctatgatatcagtgaggatgaagaagactaatgtttcctccctcctttcctgtcytccctttctgtcccattaccttcagaagctctctgttgaattccaaattgtgaccccaacactaaacctaaggacagctacaaaggaaagacaactgggg

SEQ ID NO: 45427 - DNA, 116 bp, Homo sapiens
cagctaagaaaaccacattttctctttccttgcctctgctaggactgtgagcatctcatagtccactccctaaacactttctggtaacacctagttttccrcctgagggtcagagg

SEQ ID NO: 45428 - DNA, 201 bp, Homo sapiens
tccaggcacaaggctgcagcctatgatatcagtgaggatgaagaagactaatgtttcctccctcctttcctgtcctccctttctgtcccattaccttcagragctctctgttgaattccaaattgtgaccccaacactaaacctaaggacagctacaaaggaaagacaactggggaaagaagacctaggactgggggaacc

SEQ ID NO: 45429 - DNA, 169 bp, Homo sapiens
tggctttgcagttggctttgatgatcactcccaaaagttcagtgaatgaattaccactatgttaactgttcacaaaaagaatgaaacagacagtttctgcygttacggtctggtaccaacacattcgtataaagccatacagccaactaaataaatgagtaatttatat

SEQ ID NO: 45430 - DNA, 201 bp, Homo sapiens; identical to SEQ ID NO: 45417

SEQ ID NO: 45431 - DNA, 201 bp, Homo sapiens; identical to SEQ ID NO: 45418

SEQ ID NO: 45432 - DNA, 201 bp, Homo sapiens; identical to SEQ ID NO: 45419

SEQ ID NO: 45433 - DNA, 201 bp, Homo sapiens; identical to SEQ ID NO: 45420

SEQ ID NO: 45434 - DNA, 201 bp, Homo sapiens; identical to SEQ ID NO: 45421

SEQ ID NO: 45435 - DNA, 201 bp, Homo sapiens; identical to SEQ ID NO: 45422

SEQ ID NO: 45436 - DNA, 201 bp, Homo sapiens; identical to SEQ ID NO: 45423

SEQ ID NO: 45437 - DNA, 201 bp, Homo sapiens; identical to SEQ ID NO: 45424

SEQ ID NO: 45438 - DNA, 201 bp, Homo sapiens; identical to SEQ ID NO: 45425

SEQ ID NO: 45439 - DNA, 201 bp, Homo sapiens; identical to SEQ ID NO: 45426

SEQ ID NO: 45440 - DNA, 116 bp, Homo sapiens; identical to SEQ ID NO: 45427

SEQ ID NO: 45441 - DNA, 201 bp, Homo sapiens; identical to SEQ ID NO: 45428

SEQ ID NO: 45442 - DNA, 153 bp, Homo sapiens
ttgctccccagcaaatctctccaggcacaaggctgcagcctatgatatcaaatagactgccatcggataaagagtggtccctagcttctatttttccaagyaaataagtagaacatgttcttgggattataccattaaatgttaattttcttg

SEQ ID NO: 45443 - DNA, 201 bp, Homo sapiens; identical to SEQ ID NO: 45425

SEQ ID NO: 45444 - DNA, 201 bp, Homo sapiens
tgaaacatatgctgaaagaggggaagggccggatgctgcaggccatcagcccgaagcagagccccagcagcagccctactcgcgagcgctccccctccccstctttccgatggcccttctccggcaagacttccccaccttgctccccagcaaatctctccaggcacaaggctgcagcctatgatatcaaatagactgcca

SEQ ID NO: 45445 - DNA, 169 bp, Homo sapiens; identical to SEQ ID NO: 45429

SEQ ID NO: 45446 - DNA, 201 bp, Homo sapiens
agtggagccccactctgaagacgcagcctttctccaggttctgtctctcccattctgattcttgacaccagatgcaggatggtgtcctctccctgcacgcmggcaagctcacggacttgctcccgtatcctgggactgagccttgggactgcagccctgtttgctgctggggccaacgtggcactcctccttcctaactgg

SEQ ID NO: 45447 - DNA, 201 bp, Homo sapiens
tgtttcatccttcaatcagacacaagcttggaaatatggttacccattcaaagacctgcatagtaggaattatctgtatgaccgttcgctctggaactccrtctgcctggagccctctgcagctgttgtctggcacgtgtccctcttctccgcccttctgtgcatcagcctgctccagcttctcctggtggtcgttcatgt

SEQ ID NO: 45448 - DNA, 201 bp, Homo sapiens
tgaaagatggtcctttttgcatgtttgatgtttcatccttcaatcagacacaagcttggaaatatggttacccattcaaagacctgcatagtaggaattayctgtatgaccgttcgctctggaactccgtctgcctggagccctctgcagctgttgtctggcacgtgtccctcttctccgcccttctgtgcatcagcctgc

SEQ ID NO: 45449 - DNA, 115 bp, Homo sapiens
tcagaatcttcctcaagtggggttcagtctgtaattttcctgtctgttcttagtttgttctgagttattttggattttgttctttagccaaataaaggcartgtggttttacctg

SEQ ID NO: 45450 - DNA, 156 bp, Homo sapiens
gaatttgttcagaaggtggaggaaaaaagcattgacctcattcagaatcttcctcaagtggggttcagtctgtaattttcctgtctgttcttagtttgttytgagttattttggattttgttctttagccaaataaaggcagtgtggttttacctg

SEQ ID NO: 45451 - DNA, 148 bp, Homo sapiens
tcagaaggtggaggaaaaaagcattgacctcattcagaatcttcctcaagtggggttcagtctgtaattttcctgtctgttcttagtttgttctgagttaytttggattttgttctttagccaaataaaggcagtgtggttttacctg

SEQ ID NO: 45452 - DNA, 201 bp, Homo sapiens
gtggtcattggaaagaaaggcaagcacatcaaggccacagatgctatggcccacgtggccggcttcactgtggctcatgacgtgagtgctcgtgactggcwaatgagacgtaatgggaaacaatggctgctgggaaaaaccttcgacaccttctgccctctgggccctgccttggtgaccaaggacagtgtagcagatcca

SEQ ID NO: 45453 - DNA, 201 bp, Homo sapiens
gtcattggaaagaaaggcaagcacatcaaggccacagatgctatggcccacgtggccggcttcactgtggctcatgacgtgagtgctcgtgactggcaaaygagacgtaatgggaaacaatggctgctgggaaaaaccttcgacaccttctgccctctgggccctgccttggtgaccaaggacagtgtagcagatccacac

SEQ ID NO: 45454 - DNA, 201 bp, Homo sapiens
tcattggaaagaaaggcaagcacatcaaggccacagatgctatggcccacgtggccggcttcactgtggctcatgacgtgagtgctcgtgactggcaaatragacgtaatgggaaacaatggctgctgggaaaaaccttcgacaccttctgccctctgggccctgccttggtgaccaaggacagtgtagcagatccacaca

SEQ ID NO: 45455 - DNA, 201 bp, Homo sapiens
gaaagaaaggcaagcacatcaaggccacagatgctatggcccacgtggccggcttcactgtggctcatgacgtgagtgctcgtgactggcaaatgagacgyaatgggaaacaatggctgctgggaaaaaccttcgacaccttctgccctctgggccctgccttggtgaccaaggacagtgtagcagatccacacaacttaa

SEQ ID NO: 45456 - DNA, 201 bp, Homo sapiens
agcacatcaaggccacagatgctatggcccacgtggccggcttcactgtggctcatgacgtgagtgctcgtgactggcaaatgagacgtaatgggaaacartggctgctgggaaaaaccttcgacaccttctgccctctgggccctgccttggtgaccaaggacagtgtagcagatccacacaacttaaagatctgctgcc

SEQ ID NO: 45457 - DNA, 163 bp, Homo sapiens
ttagcagctgctgcatttccccggctggctgcggtcactggtggcagtgctcaggcgcccgcygcccttgaccttcggccccgcgagccagcagagccaagcacagtgggaactttcagaaagcactggttgaaggaacgctggaatccctgggacttactgc

SEQ ID NO: 45458 - DNA, 177 bp, Homo sapiens
ttagcagctgctgcatttccccggctggctgcggtcactggtggcagtgctcaggcgcccgccgcccttgaccttcsgccccgcgagccagcagagccaagcacagtgggaactttcagaaagcactggttgaaggaacgctggaatccctgggacttactgcgtagcatgtagtag

SEQ ID NO: 45459 - DNA, 201 bp, Homo sapiens
cctcctgtatggccaaatcccctgcccccataggccacagatgctatggcccacgtggccggcttcactgtggctcatgacgtgagtgctcgtgactggcwaatgagacgtaatgggaaacaatggctgctgggaaaaaccttcgacaccttctgccctctgggccctgccttggtgaccaaggacagtgtagcagatcca

SEQ ID NO: 45460 - DNA, 201 bp, Homo sapiens
cctgtatggccaaatcccctgcccccataggccacagatgctatggcccacgtggccggcttcactgtggctcatgacgtgagtgctcgtgactggcaaaygagacgtaatgggaaacaatggctgctgggaaaaaccttcgacaccttctgccctctgggccctgccttggtgaccaaggacagtgtagcagatccacac

SEQ ID NO: 45461 - DNA, 201 bp, Homo sapiens
ctgtatggccaaatcccctgcccccataggccacagatgctatggcccacgtggccggcttcactgtggctcatgacgtgagtgctcgtgactggcaaatragacgtaatgggaaacaatggctgctgggaaaaaccttcgacaccttctgccctctgggccctgccttggtgaccaaggacagtgtagcagatccacaca

SEQ ID NO: 45462 - DNA, 201 bp, Homo sapiens
ggccaaatcccctgcccccataggccacagatgctatggcccacgtggccggcttcactgtggctcatgacgtgagtgctcgtgactggcaaatgagacgyaatgggaaacaatggctgctgggaaaaaccttcgacaccttctgccctctgggccctgccttggtgaccaaggacagtgtagcagatccacacaacttaa

SEQ ID NO: 45463 - DNA, 201 bp, Homo sapiens
tgcccccataggccacagatgctatggcccacgtggccggcttcactgtggctcatgacgtgagtgctcgtgactggcaaatgagacgtaatgggaaacartggctgctgggaaaaaccttcgacaccttctgccctctgggccctgccttggtgaccaaggacagtgtagcagatccacacaacttaaagatctgctgcc

SEQ ID NO: 45464 - DNA, 201 bp, Homo sapiens
ctatgatgaggtggtcctcccaccacagagccaggaggtagattgggaagtggagctggccgtggtcattggaaagaaaggcaagcacatcaaggtgaggkggaaagggtgggctcccagtccagagtgcagcagaggccccagctcctgcctctcctagttctgacctcactcaccaacacacggtgccagctgtccctg

SEQ ID NO: 45465 - DNA, 201 bp, Homo sapiens
caccacagagccaggaggtagattgggaagtggagctggccgtggtcattggaaagaaaggcaagcacatcaaggtgaggtggaaagggtgggctcccagkccagagtgcagcagaggccccagctcctgcctctcctagttctgacctcactcaccaacacacggtgccagctgtccctgacactaggaagcagtcagcc

SEQ ID NO: 45466 - DNA, 201 bp, Homo sapiens
ccctgacactgcctttcccttcacccacctttggctggctctggctactaacatgggataacagcttagagatcccttgccataggtgttggtgtcacccrtgatctaacctcctgtatggccaaatcccctgcccccataggccacagatgctatggcccacgtggccggcttcactgtggctcatgacgtgagtgctcg

SEQ ID NO: 45467 - DNA, 201 bp, Homo sapiens
ccctgacactaggaagcagtcagcctccttgctccctgacactgcctttcccttcacccacctttggctggctctggctactaacatgggataacagcttwgagatcccttgccataggtgttggtgtcacccatgatctaacctcctgtatggccaaatcccctgcccccataggccacagatgctatggcccacgtggc

SEQ ID NO: 45468 - DNA, 201 bp, Homo sapiens
cgcttttctctcgggtgatccggccgagtggccctgggttagcagctgctgcatttccccggctggctgcggtcactggtggcagtgctcaggcgcccgcygcccttgaccttcggccccgcgagctctaaccctacagcgcaggaagatcggccgccgcggccaggctctgatgctggtgtctggtagaagaaggttact

SEQ ID NO: 45469 - DNA, 201 bp, Homo sapiens
gcagtcagcctccttgctccctgacactgcctttcccttcacccacctttggctggctctggctactaacatgggataacagcttagagatcccttgccayaggtgttggtgtcacccatgatctaacctcctgtatggccaaatcccctgcccccataggccacagatgctatggcccacgtggccggcttcactgtggc

SEQ ID NO: 45470 - DNA, 201 bp, Homo sapiens
gtgatccggccgagtggccctgggttagcagctgctgcatttccccggctggctgcggtcactggtggcagtgctcaggcgcccgccgcccttgaccttcsgccccgcgagctctaaccctacagcgcaggaagatcggccgccgcggccaggctctgatgctggtgtctggtagaagaaggttactcacagttctgctgc

SEQ ID NO: 45471 - DNA, 201 bp, Homo sapiens
ttggaaagaaaggcaagcacatcaaggtgaggtggaaagggtgggctcccagtccagagtgcagcagaggccccagctcctgcctctcctagttctgaccycactcaccaacacacggtgccagctgtccctgacactaggaagcagtcagcctccttgctccctgacactgcctttcccttcacccacctttggctggct

SEQ ID NO: 45472 - DNA, 201 bp, Homo sapiens; identical to SEQ ID NO: 45452

SEQ ID NO: 45473 - DNA, 201 bp, Homo sapiens; identical to SEQ ID NO: 45453

SEQ ID NO: 45474 - DNA, 201 bp, Homo sapiens; identical to SEQ ID NO: 45454

SEQ ID NO: 45475 - DNA, 201 bp, Homo sapiens; identical to SEQ ID NO: 45455

SEQ ID NO: 45476 - DNA, 201 bp, Homo sapiens; identical to SEQ ID NO: 45456

SEQ ID NO: 45477 - DNA, 201 bp, Homo sapiens
cgcttttctctcgggtgatccggccgagtggccctgggttagcagctgctgcatttccccggctggctgcggtcactggtggcagtgctcaggcgcccgcygcccttgaccttcggccccgcgagctctaaccctacagcgcaggaagatcggccgccgcggccagctacagcagagccaagcacagtgggaactttcaga

SEQ ID NO: 45478 - DNA, 201 bp, Homo sapiens
gtgatccggccgagtggccctgggttagcagctgctgcatttccccggctggctgcggtcactggtggcagtgctcaggcgcccgccgcccttgaccttcsgccccgcgagctctaaccctacagcgcaggaagatcggccgccgcggccagctacagcagagccaagcacagtgggaactttcagaaagcactggttgaa

SEQ ID NO: 45479 - DNA, 201 bp, Homo sapiens; identical to SEQ ID NO: 45452

SEQ ID NO: 45480 - DNA, 201 bp, Homo sapiens; identical to SEQ ID NO: 45453

SEQ ID NO: 45481 - DNA, 201 bp, Homo sapiens; identical to SEQ ID NO: 45454

SEQ ID NO: 45482 - DNA, 201 bp, Homo sapiens; identical to SEQ ID NO: 45455

SEQ ID NO: 45483 - DNA, 201 bp, Homo sapiens; identical to SEQ ID NO: 45456

SEQ ID NO: 45484 - DNA, 201 bp, Homo sapiens
cgcttttctctcgggtgatccggccgagtggccctgggttagcagctgctgcatttccccggctggctgcggtcactggtggcagtgctcaggcgcccgcygcccttgaccttcggccccgcgagctctaaccctacagcgcaggaagatcggccgccgcggccagcagagccaagcacagtgggaactttcagaaagcac

SEQ ID NO: 45485 - DNA, 201 bp, Homo sapiens
gtgatccggccgagtggccctgggttagcagctgctgcatttccccggctggctgcggtcactggtggcagtgctcaggcgcccgccgcccttgaccttcsgccccgcgagctctaaccctacagcgcaggaagatcggccgccgcggccagcagagccaagcacagtgggaactttcagaaagcactggttgaaggaacg

SEQ ID NO: 45486 - DNA, 201 bp, Homo sapiens; identical to SEQ ID NO: 45452

SEQ ID NO: 45487 - DNA, 201 bp, Homo sapiens; identical to SEQ ID NO: 45453

SEQ ID NO: 45488 - DNA, 201 bp, Homo sapiens; identical to SEQ ID NO: 45454

SEQ ID NO: 45489 - DNA, 201 bp, Homo sapiens; identical to SEQ ID NO: 45455

SEQ ID NO: 45490 - DNA, 201 bp, Homo sapiens; identical to SEQ ID NO: 45456

SEQ ID NO: 45491 - DNA, 201 bp, Homo sapiens; identical to SEQ ID NO: 45468

SEQ ID NO: 45492 - DNA, 201 bp, Homo sapiens; identical to SEQ ID NO: 45470

SEQ ID NO: 45493 - DNA, 201 bp, Homo sapiens
cccgccacctttacatcagcagcagcaaccccgacctcatcacgcggcgcgtgcaccactcggtgcaaacgttccaggaggacagcctgcccgtggcgcaytcgctgcaggaggtcagcgagcccctcaccgccgcgcgccacgcgcagctgcacaaacggaacagcatcgaggtggccgggctcagccacggcctggagg

SEQ ID NO: 45494 - DNA, 201 bp, Homo sapiens
agcccctcaccgccgcgcgccacgcgcagctgcacaaacggaacagcatcgaggtggccgggctcagccacggcctggagggcctgcggctcaaggagcgsaccctatccgcgtcggcggcagaggtggcgccgcgagccgtctcggtgggctcccagcccagcgttttcaccgagaggacacagcgagaagggccggagg

SEQ ID NO: 45495 - DNA, 201 bp, Homo sapiens
catcctggagcccaaggcccacgtcccagacgcggagaagaggatgatggacagcagccccgtccgcacgaccgcagaggcccagcggccctggagagacsggctgctgatgccctccatgtcggagtccgacctcaccacgtcaggccgctaccgagcccggagggactctctgaagaaaaggccggtgtcggaccttct

SEQ ID NO: 45496 - DNA, 201 bp, Homo sapiens
aagctccaggctcatctaagctcccacaatttcttacggggccagtcatgtgaagcgtttacagcttaaaaaaaaagcgcttgcctaactcatactttccygttgacacttgatccacgcagcgtggcactgggacgtaagtggcgcagtctgaatggcggcacgctgaaggaaacgtgcgaagcacaggctgaagagggg

SEQ ID NO: 45497 - DNA, 201 bp, Homo sapiens
atagcacaagtgatccccaaagccccaaccctccgttgttggtccactgcagtgctggggtaggaaggactggcgtggtgattttgtcggagatcatgatygcctgcctggaacacaatgaggtgctggacatcccgagagtgctggacatgctgaggcaacagagaatgatgctggtgcagactctctgccagtacacat

SEQ ID NO: 45498 - DNA, 196 bp, Homo sapiens
gccccatgagcgcgccgcggcccgggctggcgtgcgggtgcggctgcggcggccgcgcggcggggccccgggaggcgggtcgctgagcggggcgckcggccccgaggatgcgggagcgggagcgggagcagcgctggcgtcaatgctcccttcctcgggccattggagactccgttgctttttaatggcggcagcg

SEQ ID NO: 45499 - DNA, 201 bp, Homo sapiens
cctgaacatggctgtccagaagacctcaagggatttttatcatatcttgaagagatccagtctgttcgacgccatacaaatagcacaagtgatccccaaarccccaaccctccgttgttggtccactgcagtgctggggtaggaaggactggcgtggtgattttgtcggagatcatgatcgcctgcctggaacacaatgag

SEQ ID NO: 45500 - DNA, 201 bp, Homo sapiens
atggaaggcatcctgtggtatttaggtggcatgacattgccaacatgtcccacaacaagtccttttttgcattagagctggcaaataaagaggagaccatycaatttcaaactgaagacatggaaacagcaaaatacatttggagactctgtgttgcgcgacacaagttttacagactaaaccagtgtaacctgcaaactc

SEQ ID NO: 45501 - DNA, 201 bp, Homo sapiens
acggccataagaagtccctgtcggacgccaccatgctaatccacagcagcgaggaggaggaggacgaggacttcgaggaggagagcggggcccgggcgccycctgcacgtgcgcgcgagcctcggcccggcctggcccaggacccacctggctgccctcgcgtcctgctcgccgggcccctgcacatcctggagcccaagg

SEQ ID NO: 45502 - DNA, 201 bp, Homo sapiens
acaacactgtcacctatggaaggtttaagatcacgacccggttccgcacagactctggctgctatgccaccacaggcctgaagatgaagcacctccttacygggcaagagaggaccgtctggcacctccaatacacagactggcctgaacatggctgtccagaagacctcaagggatttttatcatatcttgaagagatcc

SEQ ID NO: 45503 - DNA, 201 bp, Homo sapiens
tacagaaccatatgcttcttcccaagataacctctttgtgcccaaccagaacggatactactgtcactctcagacaagcttggatagagcccagattgacytcaacggtcggatccgtaatggcagtgtctacagtgcacacagcaccaactccttaaataatcctcagccctacttgcagccctcgccgatgtcgtccaa

SEQ ID NO: 45504 - DNA, 201 bp, Homo sapiens
ccctacccgccccccaggcccgccaacagcacgccagacctgtcccgccacctttacatcagcagcagcaaccccgacctcatcacgcggcgcgtgcaccwctcggtgcaaacgttccaggaggacagcctgcccgtggcgcactcgctgcaggaggtcagcgagcccctcaccgccgcgcgccacgcgcagctgcacaaa

SEQ ID NO: 45505 - DNA, 201 bp, Homo sapiens
tcaatgctcccttcctcgggccattggagactccgttgctttttaatggcggcagcggctgctgggtgagcagctggaggccggacagtgttcgtcccatmcggagaggatcgctttctcctggcgtcaccagcgctgggttggtgggggtagcttttccctctttgctcctccattcttgaagaaagaagaagatgccac

SEQ ID NO: 45506 - DNA, 201 bp, Homo sapiens
gtacagtccaaatttgtgcacagagattgctgtggtattcaagaggtacttgcattttagctccttaattccctggccagtgttagctgtttagtgccccctcacccatcccatttaggcacatcccaatagacagagccaggctgagttacagggggagagtgtcatctctggccccgattaagatggccttgtcacagt

SEQ ID NO: 45507 - DNA, 201 bp, Homo sapiens
ctgaaaatgcagaaagaaatcgattccaagatgttcttccttatgatgatgtgagagtggagttggtcccaactaaagaaaacaacactggttacatcaaygcatcacatattaaggtctctgtcagtggaatcgaatgggattatattgccacacagggaccattacagaatacctgtcaagatttttggcagatggtat

SEQ ID NO: 45508 - DNA, 201 bp, Homo sapiens
aggagagcggggcccgggcgcctcctgcacgtgcgcgcgagcctcggcccggcctggcccaggacccacctggctgccctcgcgtcctgctcgccgggccyctgcacatcctggagcccaaggcccacgtcccagacgcggagaagaggatgatggacagcagccccgtccgcacgaccgcagaggcccagcggccctgga

SEQ ID NO: 45509 - DNA, 201 bp, Homo sapiens
ctttacaaaaatgcagtattatctatactcagactgaggtgctgggatggcgagcaggggaccccacagcactgtccccagggaattcaagtcctgtgacygccagtgacttactccgtttccttggggcttttcccacctcaacctgtattgtttctttttcataaataaattcagcattatagtatcattaaaagaagc

SEQ ID NO: 45510 - DNA, 201 bp, Homo sapiens
attcttaagaaacggctagttgatggggagtgctcaacagcacgactccctgaaaatgcagaaagaaatcgattccaagatgttcttccttatgatgatgygagagtggagttggtcccaactaaagaaaacaacactggttacatcaacgcatcacatattaaggtctctgtcagtggaatcgaatgggattatattgcc

SEQ ID NO: 45511 - DNA, 201 bp, Homo sapiens; identical to SEQ ID NO: 45493

SEQ ID NO: 45512 - DNA, 201 bp, Homo sapiens; identical to SEQ ID NO: 45501

SEQ ID NO: 45513 - DNA, 201 bp, Homo sapiens; identical to SEQ ID NO: 45500

SEQ ID NO: 45514 - DNA, 201 bp, Homo sapiens; identical to SEQ ID NO: 45504

SEQ ID NO: 45515 - DNA, 201 bp, Homo sapiens; identical to SEQ ID NO: 45503

SEQ ID NO: 45516 - DNA, 201 bp, Homo sapiens; identical to SEQ ID NO: 45505

SEQ ID NO: 45517 - DNA, 201 bp, Homo sapiens; identical to SEQ ID NO: 45494

SEQ ID NO: 45518 - DNA, 201 bp, Homo sapiens; identical to SEQ ID NO: 45495

SEQ ID NO: 45519 - DNA, 201 bp, Homo sapiens; identical to SEQ ID NO: 45508

SEQ ID NO: 45520 - DNA, 196 bp, Homo sapiens; identical to SEQ ID NO: 45498

SEQ ID NO: 45521 - DNA, 201 bp, Homo sapiens; identical to SEQ ID NO: 45494

SEQ ID NO: 45522 - DNA, 201 bp, Homo sapiens; identical to SEQ ID NO: 45495

SEQ ID NO: 45523 - DNA, 201 bp, Homo sapiens; identical to SEQ ID NO: 45493

SEQ ID NO: 45524 - DNA, 201 bp, Homo sapiens; identical to SEQ ID NO: 45508

SEQ ID NO: 45525 - DNA, 201 bp, Homo sapiens; identical to SEQ ID NO: 45501

SEQ ID NO: 45526 - DNA, 201 bp, Homo sapiens; identical to SEQ ID NO: 45500

SEQ ID NO: 45527 - DNA, 201 bp, Homo sapiens; identical to SEQ ID NO: 45504

SEQ ID NO: 45528 - DNA, 201 bp, Homo sapiens; identical to SEQ ID NO: 45503

SEQ ID NO: 45529 - DNA, 201 bp, Homo sapiens; identical to SEQ ID NO: 45505

SEQ ID NO: 45530 - DNA, 201 bp, Homo sapiens
aagcgaggaatgcagctggaagatctcaaacagcagctccagcaggccgaggaggccctggtggccaaacaggaggtgatcgataagctgaaggaggaggscgagcagcacaagattgtgatggagaccgttccggtgctgaaggcccaggcggatatctacaaggcggacttccaggctgagaggcaggcccgggagaag

SEQ ID NO: 45531 - DNA, 201 bp, Homo sapiens
ggggaagtcaagaatggggcctggggctctcagggagaactgcttcccctggcagagctgggtggcagctcttcctcccaccggacaccgacccgcccgcygctgtgccctgggagtgctgccctcttaccatgcacacgggtgctctccttttgggctgcatgctattccattttgcagccagaccgatgtgtatttaac

SEQ ID NO: 45532 - DNA, 201 bp, Homo sapiens
aggaatgcagctggaagatctcaaacagcagctccagcaggccgaggaggccctggtggccaaacaggaggtgatcgataagctgaaggaggaggccgagyagcacaagattgtgatggagaccgttccggtgctgaaggcccaggcggatatctacaaggcggacttccaggctgagaggcaggcccgggagaagctggc

SEQ ID NO: 45533 - DNA, 201 bp, Homo sapiens
gcctacctctcctctcccctggccctgcccagccagaggaggagcccccccgaggagccacctgacttctgctgtcccaagtgccagtatcaggcccctgwtatggacaccctgcagatacatgtcatggagtgcattgagtagggccggccagtgcaaggccactgcctgccgaggacgtgcccgggaccgtgcagtctg

SEQ ID NO: 45534 - DNA, 201 bp, Homo sapiens
aaagcccaggtgacgtccttgctcggggagctgcaggagagccagagtcgcttggaggctgccactaaggaatgccaggctctggagggtcggaggaagcyggcccagttgcaggtggcctatcaccagctcttccaagaatacgacaaccacatcaagagcagcgtggtgggcagtgagcggaagcgaggaatgcagctg

SEQ ID NO: 45535 - DNA, 201 bp, Homo sapiens
acaggaggtgatcgataagctgaaggaggaggccgagcagcacaagattgtgatggagaccgttccggtgctgaaggcccaggcggatatctacaaggcgracttccaggctgagaggcaggcccgggagaagctggccgagaagaaggagctcctgcaggagcagctggagcagctgcagagggagtacagcaaactgaa

SEQ ID NO: 45536 - DNA, 201 bp, Homo sapiens
ctacctctcctctcccctggccctgcccagccagaggaggagcccccccgaggagccacctgacttctgctgtcccaagtgccagtatcaggcccctgatrtggacaccctgcagatacatgtcatggagtgcattgagtagggccggccagtgcaaggccactgcctgccgaggacgtgcccgggaccgtgcagtctgcg

SEQ ID NO: 45537 - DNA, 201 bp, Homo sapiens
gaagcggcatgtcgaggtctcccaggcccccttgccccccgcccctgcctacctctcctctcccctggccctgcccagccagaggaggagcccccccgagkagccacctgacttctgctgtcccaagtgccagtatcaggcccctgatatggacaccctgcagatacatgtcatggagtgcattgagtagggccggccagt

SEQ ID NO: 45538 - DNA, 201 bp, Homo sapiens
ccagaggaggagcccccccgaggagccacctgacttctgctgtcccaagtgccagtatcaggcccctgatatggacaccctgcagatacatgtcatggagygcattgagtagggccggccagtgcaaggccactgcctgccgaggacgtgcccgggaccgtgcagtctgcgctttcctctcccgcctgcctagcccaggat

SEQ ID NO: 45539 - DNA, 201 bp, Homo sapiens
agcttccgcgggcctgcagagcctggcggactcagacttctctccggagcgggatgcggccctaccgcggcctcacacttctcgccggcttcccgagttcycgggggcggggcttgtgtttttacttccggatcccacagctatgacaccggaagccggaagcgtggtagggaagggcgaccgcgaaactgggactttctc

SEQ ID NO: 45540 - DNA, 201 bp, Homo sapiens
agagtcgcttggaggctgccactaaggaatgccaggctctggagggtcggaggaagctggcccagttgcaggtggcctatcaccagctcttccaagaatasgacaaccacatcaagagcagcgtggtgggcagtgagcggaagcgaggaatgcagctggaagatctcaaacagcagctccagcaggccgaggaggccctgg

SEQ ID NO: 45541 - DNA, 201 bp, Homo sapiens
cagaggaggagcccccccgaggagccacctgacttctgctgtcccaagtgccagtatcaggcccctgatatggacaccctgcagatacatgtcatggagtkcattgagtagggccggccagtgcaaggccactgcctgccgaggacgtgcccgggaccgtgcagtctgcgctttcctctcccgcctgcctagcccaggatg

SEQ ID NO: 45542 - DNA, 201 bp, Homo sapiens
tcaggacgtactgggcgaagagtctcctctggggaagccagccatgctgcacctgccttcagaacagggcgctcctgagaccctccagcgctgcctggagragaatcaagagctccgagatgccatccggcagagcaaccagattctgcgggagcgctgcgaggagcttctgcatttccaagccagccagagggaggagaa

SEQ ID NO: 45543 - DNA, 201 bp, Homo sapiens
agcccccccgaggagccacctgacttctgctgtcccaagtgccagtatcaggcccctgatatggacaccctgcagatacatgtcatggagtgcattgagtrgggccggccagtgcaaggccactgcctgccgaggacgtgcccgggaccgtgcagtctgcgctttcctctcccgcctgcctagcccaggatgaagggctgg

SEQ ID NO: 45544 - DNA, 201 bp, Homo sapiens
cgaagagtctcctctggggaagccagccatgctgcacctgccttcagaacagggcgctcctgagaccctccagcgctgcctggaggagaatcaagagctcygagatgccatccggcagagcaaccagattctgcgggagcgctgcgaggagcttctgcatttccaagccagccagagggaggagaaggagttcctcatgtg

SEQ ID NO: 45545 - DNA, 201 bp, Homo sapiens
gcagagttaccccaaaggaatggaggaatcagtaatcatcccagctggtgtaataatgaattgtttaaaaaacagctcataattgatgccaaattaaagcmctgtgtacccattaagatatggcattattgaagaaataaagtacatttgaaaccttcattgtaggttttgtttctttgtaaatgaaactaagcttgatca

SEQ ID NO: 45546 - DNA, 201 bp, Homo sapiens
aattggcaccaaagcagcagctgtattgccgcagttctagcttcaccttcacgatgtttcccttggtcaaaagcgcactaaatcgtctccaagttcgaagmattcagcaaacaatggcaaggcagagccaccagaaacgtacacctgattttcatgacaaatacggtaatgctgtattagctagtggagccactttctgta

SEQ ID NO: 45547 - DNA, 201 bp, Homo sapiens
gcgccagattcttccaggattgtctgttatgaatttgctgtcctttttattgtgtgtacctgtacaggcaagtgaattgttagcaaatatattttttttcrgaggctggtacttctacattcaggcttataaagcactgaagcataagacagcaaatatggacgtactgattgtgctggcaaccaccattgcatttgccta

SEQ ID NO: 45548 - DNA, 201 bp, Homo sapiens
cttgaactttcattagcttcaaagagaagctgtatttacaggagaaagaggtgattatggagggaatcaaaaatactgctttcagttagtagctagctttwagtcaggagttagtaatgagaaattttataaatgtgtatttctgtgtattcacatacatatatatatacacacatatatatgtacatacacatacataca

SEQ ID NO: 45549 - DNA, 201 bp, Homo sapiens
atagctcagccttcatcggaaatgccgcttttgacttcaactaatgaattttatactaaagggatgacaccagttcaagacaaggaggaaggaaagaattmatctaagtgttacatacaggtcactggcatgacttgcgcttcctgtgtagcaaacattgaacggaatttaaggcgggaagaaggaatatattctatactt

SEQ ID NO: 45550 - DNA, 201 bp, Homo sapiens
tggcatgacttgcgcttcctgtgtagcaaacattgaacggaatttaaggcgggaagaaggaatatattctatacttgtggccctgatggctggcaaggcakaagtaaggtataatcctgctgttatacaacccccaatgatagcagagttcatccgagaacttggatttggagccactgtgatagaaaatgctgatgaagg

SEQ ID NO: 45551 - DNA, 201 bp, Homo sapiens
tgctattggcacaggcacagatgtagccattgaagcagctgatgtggttttgataaggaatgatcttctggatgtagtggcaagtattgacttatcaagaragacagtcaagaggattcggataaattttgtctttgctctaatttataatctggttggaattcccatagctgctggagtttttatgcccattggtttggt

SEQ ID NO: 45552 - DNA, 201 bp, Homo sapiens
tcaggcttataaagcactgaagcataagacagcaaatatggacgtactgattgtgctggcaaccaccattgcatttgcctactctttgattattcttctasttgcaatgtatgagagagccaaagtgaaccctattactttctttgacacaccccctatgctgtttgtgtttattgcactaggccgatggctggaacatat

SEQ ID NO: 45553 - DNA, 201 bp, Homo sapiens
tatatgatggttatggaccaccactttgcaactcttcaccataatcaaaacatgagtaaagaagaaatgatcaaccttcattcttctatgttcctggagcrccagattcttccaggattgtctgttatgaatttgctgtcctttttattgtgtgtacctgtacaggcaagtgaattgttagcaaatatattttttttcgga

SEQ ID NO: 45554 - DNA, 201 bp, Homo sapiens
cggtcagcaagtcacttagatcataaacgagaaataagacaatggagacggtcttttcttgtgagtctgtttttctgtattcctgtaatggggctgatgayatatatgatggttatggaccaccactttgcaactcttcaccataatcaaaacatgagtaaagaagaaatgatcaaccttcattcttctatgttcctggag

SEQ ID NO: 45555 - DNA, 201 bp, Homo sapiens
aagtggatgtggaacttgtacaacgtggagatatcattaaagtagttccaggaggcaaatttccagtggatggtcgtgttattgaaggacattctatggtrgatgagtccctcatcacaggggaggcaatgcctgtggctaagaaacctggcagcacagtgattgctggttccattaaccagaacgggtcactgcttatct

SEQ ID NO: 45556 - DNA, 201 bp, Homo sapiens
gttgagaggagcaatagaagacatgggatttgatgctaccttgtcagacacgaatgagccgttggtagtaatagctcagccttcatcggaaatgccgcttytgacttcaactaatgaattttatactaaagggatgacaccagttcaagacaaggaggaaggaaagaattcatctaagtgttacatacaggtcactggcat

SEQ ID NO: 45557 - DNA, 201 bp, Homo sapiens
ataatcctgaccctctccctgttttaactgacaccttgtttctgactgttacggcgtcactgactttgccatgggaccatatccaaagcacattgctgaaraccaagggtgtgacagacattaaaatttaccctcagaaaagaactgtagcagtgacaataatcccttctatagtgaatgccaatcagataaaagagctgg

SEQ ID NO: 45558 - DNA, 201 bp, Homo sapiens
tggagacaacagtaaaacagctagatctattgcttctcaggttggcattactaaggtgtttgctgaagttctaccttctcacaaggttgctaaagtgaagyaacttcaagaggaggggaaacgggtagcaatggtgggagatggaatcaatgactccccagctctggcaatggctaatgtgggaattgctattggcacagg

SEQ ID NO: 45559 - DNA, 201 bp, Homo sapiens
tggcattactaaggtgtttgctgaagttctaccttctcacaaggttgctaaagtgaagcaacttcaagaggaggggaaacgggtagcaatggtgggagatrgaatcaatgactccccagctctggcaatggctaatgtgggaattgctattggcacaggcacagatgtagccattgaagcagctgatgtggttttgataag

SEQ ID NO: 45560 - DNA, 201 bp, Homo sapiens
gaacttgtacaacgtggagatatcattaaagtagttccaggaggcaaatttccagtggatggtcgtgttattgaaggacattctatggtagatgagtccckcatcacaggggaggcaatgcctgtggctaagaaacctggcagcacagtgattgctggttccattaaccagaacgggtcactgcttatctgcgcaacacat

SEQ ID NO: 45561 - DNA, 201 bp, Homo sapiens
tgctggttccattaaccagaacgggtcactgcttatctgcgcaacacatgttggagcagacacaaccctttctcaaattgtcaaacttgtggaagaggcayaaacatcaaaggctcctatccagcagtttgcagacaaactcagtggctattttgttccttttattgtttttgtttccattgccaccctcttggtatggat

SEQ ID NO: 45562 - DNA, 201 bp, Homo sapiens
aaaagagcttctttcacagtgttgataacaaatgccttttgtagccaaaaccaggcgtctcaaccttacgtttttagttaaagaaatgtttagctaaacgytgttgaacattgattgtttggtaccgaaaacagcagtggacgatgttgtgcaatatccatctactgtagttaagatattcagtagtttgtttttcataag

SEQ ID NO: 45563 - DNA, 201 bp, Homo sapiens
gaagaccaagggtgtgacagacattaaaatttaccctcagaaaagaactgtagcagtgacaataatcccttctatagtgaatgccaatcagataaaagagstggttccagaactcagtttagatactgggacactggagaaaaagtcaggagcttgtgaagatcatagtatggctcaagctggtgaagtcgtgctgaagat

SEQ ID NO: 45564 - DNA, 201 bp, Homo sapiens
gttatggaccaccactttgcaactcttcaccataatcaaaacatgagtaaagaagaaatgatcaaccttcattcttctatgttcctggagcgccagattcktccaggattgtctgttatgaatttgctgtcctttttattgtgtgtacctgtacaggcaagtgaattgttagcaaatatattttttttcggaggctggtac

SEQ ID NO: 45565 - DNA, 201 bp, Homo sapiens
agtgaatgccaatcagataaaagagctggttccagaactcagtttagatactgggacactggagaaaaagtcaggagcttgtgaagatcatagtatggctyaagctggtgaagtcgtgctgaagatgaaagtggaagggatgacctgccattcatgtactagcactattgaaggaaaaattgggaaactgcaaggtgttca

SEQ ID NO: 45566 - DNA, 201 bp, Homo sapiens
gaacaccctctaggaacagccataaccaaatattgcaaacaggagctggacactgaaaccttgggtacctgcatagatttccaggttgtgccaggctgtgrtattagctgtaaagtcaccaatattgaaggcttgctacataagaataactggaatatagaggacaataatattaaaaatgcatccctggttcaaattgat

SEQ ID NO: 45567 - DNA, 201 bp, Homo sapiens
tccttcagaaatcagcgttcatgttggaatagatgatacctcaaggaattctcctaaactgggtttgctggaccggattgttaattatagcagagcctctrtaaactcactactgtctgataaacgctccctaaacagtgttgttaccagtgaacctgacaagcactcactcctggtgggagacttcagggaagatgatga

SEQ ID NO: 45568 - DNA, 201 bp, Homo sapiens
aaccattactcacggaaccccagtggtgaatcaagtaaaggttctaactgaaagtaacagaatatcacaccataaaatcttggccattgtgggaactgctkaaagtaacagtgaacaccctctaggaacagccataaccaaatattgcaaacaggagctggacactgaaaccttgggtacctgcatagatttccaggttgt

SEQ ID NO: 45569 - DNA, 201 bp, Homo sapiens
cgatttgctttccaagcctctatcacagttctgtgtattgcatgtccctgttcactgggactggccactccaactgctgtgatggtgggtacaggagtagrtgctcaaaatggcatactaataaaaggtggagagccattggagatggctcataaggtaaaggtagtggtatttgataagactggaaccattactcacgga

SEQ ID NO: 45570 - DNA, 201 bp, Homo sapiens
acctgacaagcactcactcctggtgggagacttcagggaagatgatgacactgcattataaaaggccatggagagtgctgccagtttaacttgtcatgcastgacacagcattcatgatgttaccttcacttttcaaaatattgtagaaggatttttctcatgctcttatattagggattctatttgagttgcgtttatct

SEQ ID NO: 45571 - DNA, 201 bp, Homo sapiens
ggctacaatagaagtatctcccgaacagaaacgataatacgatttgctttccaagcctctatcacagttctgtgtattgcatgtccctgttcactgggacyggccactccaactgctgtgatggtgggtacaggagtaggtgctcaaaatggcatactaataaaaggtggagagccattggagatggctcataaggtaaag

SEQ ID NO: 45572 - DNA, 201 bp, Homo sapiens
gcacaaacatcaaaggctcctatccagcagtttgcagacaaactcagtggctattttgttccttttattgtttttgtttccattgccaccctcttggtatrgattgtaattggatttctgaattttgaaattgtggaaacctactttcctggctacaatagaagtatctcccgaacagaaacgataatacgatttgctttc

SEQ ID NO: 45573 - DNA, 201 bp, Homo sapiens
tgtgcctcctgcgtacataaaatagagtctagtctcacaaaacacagagggatcctatactgctccgtggccctggcaaccaacaaagcacatattaaatrtgacccagaaattattggtcctagagatattatccatacaattgaaagcttaggttttgaagcttctttggtcaagaaggatcggtcagcaagtcactta

SEQ ID NO: 45574 - DNA, 201 bp, Homo sapiens
tattgaaggacattctatggtagatgagtccctcatcacaggggaggcaatgcctgtggctaagaaacctggcagcacagtgattgctggttccattaacyagaacgggtcactgcttatctgcgcaacacatgttggagcagacacaaccctttctcaaattgtcaaacttgtggaagaggcacaaacatcaaaggctcc

SEQ ID NO: 45575 - DNA, 201 bp, Homo sapiens
aggactcataagtaaattcctaacattttgttcccattaccagaagcaaagctgctgctaacccaacatctggcacataggatttgtactcggtaaatgtyagttcttttctccccttgaggtcagtaataaatacaaaaaaatcatttttctagagcagagtcttaaaatcaggtgggggtaggggatggagttcttcct

SEQ ID NO: 45576 - DNA, 201 bp, Homo sapiens
gtaaatgttagttcttttctccccttgaggtcagtaataaatacaaaaaaatcatttttctagagcagagtcttaaaatcaggtgggggtaggggatggasttcttcctttcctaccccttttctcttttatcctttcatatatacacatgcaaagtttacaaccttattccatgctgtctttcagatttagaaaagatct

SEQ ID NO: 45577 - DNA, 201 bp, Homo sapiens
gagtctgtttttctgtattcctgtaatggggctgatgatatatatgatggttatggaccaccactttgcaactcttcaccataatcaaaacatgagtaaakaagaaatgatcaaccttcattcttctatgttcctggagcgccagattcttccaggattgtctgttatgaatttgctgtcctttttattgtgtgtacctgt

SEQ ID NO: 45578 - DNA, 201 bp, Homo sapiens
aatcatttttctagagcagagtcttaaaatcaggtgggggtaggggatggagttcttcctttcctaccccttttctcttttatcctttcatatatacacaygcaaagtttacaaccttattccatgctgtctttcagatttagaaaagatctaatttctgtctcagctgtcttaaagagagaactgaagcttttgatgaag

SEQ ID NO: 45579 - DNA, 201 bp, Homo sapiens
tttcagctcttacaacaagaacagaaaacatgctaattagaaaaagtcctgctttaagtaatatgtagccacatttgaatcctctaccacaagtctttttkgcaatcttgaactttcattagcttcaaagagaagctgtatttacaggagaaagaggtgattatggagggaatcaaaaatactgctttcagttagtagcta

SEQ ID NO: 45580 - DNA, 201 bp, Homo sapiens
gaaaaagtcctgctttaagtaatatgtagccacatttgaatcctctaccacaagtcttttttgcaatcttgaactttcattagcttcaaagagaagctgtmtttacaggagaaagaggtgattatggagggaatcaaaaatactgctttcagttagtagctagctttaagtcaggagttagtaatgagaaattttataaat

SEQ ID NO: 45581 - DNA, 201 bp, Homo sapiens
ctccgtggccctggcaaccaacaaagcacatattaaatatgacccagaaattattggtcctagagatattatccatacaattgaaagcttaggttttgaascttctttggtcaagaaggatcggtcagcaagtcacttagatcataaacgagaaataagacaatggagacggtcttttcttgtgagtctgtttttctgtat

SEQ ID NO: 45582 - DNA, 201 bp, Homo sapiens
aattattggtcctagagatattatccatacaattgaaagcttaggttttgaagcttctttggtcaagaaggatcggtcagcaagtcacttagatcataaaygagaaataagacaatggagacggtcttttcttgtgagtctgtttttctgtattcctgtaatggggctgatgatatatatgatggttatggaccaccactt

SEQ ID NO: 45583 - DNA, 201 bp, Homo sapiens
gacacaagaaactgtgataaacattgatggcatgacttgtaattcctgtgtgcagtctattgagggtgtcatatcaaaaaagccaggtgtaaaatccataygagtctcccttgcaaatagcaatgggactgttgagtatgatcctctactaacctctccagaaacgttgagaggagcaatagaagacatgggatttgatgc

SEQ ID NO: 45584 - DNA, 201 bp, Homo sapiens
atcctctaccacaagtcttttttgcaatcttgaactttcattagcttcaaagagaagctgtatttacaggagaaagaggtgattatggagggaatcaaaawtactgctttcagttagtagctagctttaagtcaggagttagtaatgagaaattttataaatgtgtatttctgtgtattcacatacatatatatatacaca

SEQ ID NO: 45585 - DNA, 201 bp, Homo sapiens
tattggtcctagagatattatccatacaattgaaagcttaggttttgaagcttctttggtcaagaaggatcggtcagcaagtcacttagatcataaacgakaaataagacaatggagacggtcttttcttgtgagtctgtttttctgtattcctgtaatggggctgatgatatatatgatggttatggaccaccactttgc

SEQ ID NO: 45586 - DNA, 201 bp, Homo sapiens
agtcttttttgcaatcttgaactttcattagcttcaaagagaagctgtatttacaggagaaagaggtgattatggagggaatcaaaaatactgctttcagytagtagctagctttaagtcaggagttagtaatgagaaattttataaatgtgtatttctgtgtattcacatacatatatatatacacacatatatatgtac

SEQ ID NO: 45587 - DNA, 201 bp, Homo sapiens
caaaacatgagtaaagaagaaatgatcaaccttcattcttctatgttcctggagcgccagattcttccaggattgtctgttatgaatttgctgtccttttwattgtgtgtacctgtacaggcaagtgaattgttagcaaatatattttttttcggaggctggtacttctacattcaggcttataaagcactgaagcataag

SEQ ID NO: 45588 - DNA, 201 bp, Homo sapiens
caaccttcattcttctatgttcctggagcgccagattcttccaggattgtctgttatgaatttgctgtcctttttattgtgtgtacctgtacagtttttcrgaggctggtacttctacattcaggcttataaagcactgaagcataagacagcaaatatggacgtactgattgtgctggcaaccaccattgcatttgccta

SEQ ID NO: 45589 - DNA, 201 bp, Homo sapiens; identical to SEQ ID NO: 45548

SEQ ID NO: 45590 - DNA, 201 bp, Homo sapiens; identical to SEQ ID NO: 45549

SEQ ID NO: 45591 - DNA, 201 bp, Homo sapiens; identical to SEQ ID NO: 45550

SEQ ID NO: 45592 - DNA, 201 bp, Homo sapiens; identical to SEQ ID NO: 45551

SEQ ID NO: 45593 - DNA, 201 bp, Homo sapiens; identical to SEQ ID NO: 45552

SEQ ID NO: 45594 - DNA, 201 bp, Homo sapiens
tatatgatggttatggaccaccactttgcaactcttcaccataatcaaaacatgagtaaagaagaaatgatcaaccttcattcttctatgttcctggagcrccagattcttccaggattgtctgttatgaatttgctgtcctttttattgtgtgtacctgtacagtttttcggaggctggtacttctacattcaggcttat

SEQ ID NO: 45595 - DNA, 201 bp, Homo sapiens; identical to SEQ ID NO: 45554

SEQ ID NO: 45596 - DNA, 201 bp, Homo sapiens; identical to SEQ ID NO: 45555

SEQ ID NO: 45597 - DNA, 201 bp, Homo sapiens; identical to SEQ ID NO: 45556

SEQ ID NO: 45598 - DNA, 201 bp, Homo sapiens; identical to SEQ ID NO: 45557

SEQ ID NO: 45599 - DNA, 201 bp, Homo sapiens; identical to SEQ ID NO: 45558

SEQ ID NO: 45600 - DNA, 201 bp, Homo sapiens; identical to SEQ ID NO: 45559

SEQ ID NO: 45601 - DNA, 201 bp, Homo sapiens; identical to SEQ ID NO: 45560

SEQ ID NO: 45602 - DNA, 201 bp, Homo sapiens; identical to SEQ ID NO: 45561

SEQ ID NO: 45603 - DNA, 201 bp, Homo sapiens; identical to SEQ ID NO: 45562

SEQ ID NO: 45604 - DNA, 201 bp, Homo sapiens; identical to SEQ ID NO: 45563

SEQ ID NO: 45605 - DNA, 201 bp, Homo sapiens
gttatggaccaccactttgcaactcttcaccataatcaaaacatgagtaaagaagaaatgatcaaccttcattcttctatgttcctggagcgccagattcktccaggattgtctgttatgaatttgctgtcctttttattgtgtgtacctgtacagtttttcggaggctggtacttctacattcaggcttataaagcactg

SEQ ID NO: 45606 - DNA, 201 bp, Homo sapiens; identical to SEQ ID NO: 45565

SEQ ID NO: 45607 - DNA, 201 bp, Homo sapiens; identical to SEQ ID NO: 45566

SEQ ID NO: 45608 - DNA, 201 bp, Homo sapiens; identical to SEQ ID NO: 45567

SEQ ID NO: 45609 - DNA, 201 bp, Homo sapiens; identical to SEQ ID NO: 45568

SEQ ID NO: 45610 - DNA, 201 bp, Homo sapiens; identical to SEQ ID NO: 45569

SEQ ID NO: 45611 - DNA, 201 bp, Homo sapiens; identical to SEQ ID NO: 45570

SEQ ID NO: 45612 - DNA, 201 bp, Homo sapiens; identical to SEQ ID NO: 45571

SEQ ID NO: 45613 - DNA, 201 bp, Homo sapiens; identical to SEQ ID NO: 45572

SEQ ID NO: 45614 - DNA, 201 bp, Homo sapiens; identical to SEQ ID NO: 45573

SEQ ID NO: 45615 - DNA, 201 bp, Homo sapiens; identical to SEQ ID NO: 45574

SEQ ID NO: 45616 - DNA, 201 bp, Homo sapiens; identical to SEQ ID NO: 45575

SEQ ID NO: 45617 - DNA, 201 bp, Homo sapiens; identical to SEQ ID NO: 45576

SEQ ID NO: 45618 - DNA, 201 bp, Homo sapiens; identical to SEQ ID NO: 45577

SEQ ID NO: 45619 - DNA, 201 bp, Homo sapiens; identical to SEQ ID NO: 45578

SEQ ID NO: 45620 - DNA, 201 bp, Homo sapiens; identical to SEQ ID NO: 45579

SEQ ID NO: 45621 - DNA, 201 bp, Homo sapiens; identical to SEQ ID NO: 45580

SEQ ID NO: 45622 - DNA, 201 bp, Homo sapiens; identical to SEQ ID NO: 45581

SEQ ID NO: 45623 - DNA, 201 bp, Homo sapiens; identical to SEQ ID NO: 45582

SEQ ID NO: 45624 - DNA, 201 bp, Homo sapiens; identical to SEQ ID NO: 45583

SEQ ID NO: 45625 - DNA, 201 bp, Homo sapiens; identical to SEQ ID NO: 45584

SEQ ID NO: 45626 - DNA, 201 bp, Homo sapiens; identical to SEQ ID NO: 45585

SEQ ID NO: 45627 - DNA, 201 bp, Homo sapiens; identical to SEQ ID NO: 45586

SEQ ID NO: 45628 - DNA, 201 bp, Homo sapiens
caaaacatgagtaaagaagaaatgatcaaccttcattcttctatgttcctggagcgccagattcttccaggattgtctgttatgaatttgctgtccttttwattgtgtgtacctgtacagtttttcggaggctggtacttctacattcaggcttataaagcactgaagcataagacagcaaatatggacgtactgattgtg

SEQ ID NO: 45629 - DNA, 201 bp, Homo sapiens
gtaaggatctgcagacctggcttggtgatcgggcctcagcagcagtttttggtgatgaagcaaacaagcctctggctggaaggggactattttcgtcagargttaaaggggcaggagaatggacaacacagagcagccttctccaaacttctctctggtgttgatgacatttccataaatggggtcgagaatcaagaccag

SEQ ID NO: 45630 - DNA, 201 bp, Homo sapiens
tggacaacacagagcagccttctccaaacttctctctggtgttgatgacatttccataaatggggtcgagaatcaagaccagcaagaacccaaaccttacrgtgatgacgacgaaatcaatggagtgacacaaggtgatagaagtcgggccctgaaaaggcgaagacaatcaaaaacaaacgatattcttctcccatctcc

SEQ ID NO: 45631 - DNA, 201 bp, Homo sapiens
actctgataagtacccaagctgcttgtcttctaccaaagagtgctttattaacaagaatctgtgaaaaccacattttaaacactgttgcatgttgtaataycaggtgataccttggtaacctaaaacttgcaagagaatattagtggtagctttagaagactcaggaggagaaactgacttcagagctggaagatgttgca

SEQ ID NO: 45632 - DNA, 201 bp, Homo sapiens
ttattttctgttcagcttgtgaccctgtgtcaaaatttgtaaagatacaaaaggcattactgaaatggtactttctgtaatttgatactatttggctttaycatcttcacttgactgtttgtaatactgtagtaatattaactctgataagtacccaagctgcttgtcttctaccaaagagtgctttattaacaagaatct

SEQ ID NO: 45633 - DNA, 201 bp, Homo sapiens
acaatttgaaaacagtgtaaatacccaagccctctggtactcagggagctggctggtctgtggtgcatgtgtgtccttgtgatggcaagcattgtagttgmtggccttcagaagaattgaggatctgatggaggttttttaatgtatttattttctgttcagcttgtgaccctgtgtcaaaatttgtaaagatacaaaagg

SEQ ID NO: 45634 - DNA, 201 bp, Homo sapiens
aaaaacacactattggtttttcgccttggaaacagcaatcccaaataatgtcggctttaaaaaaaaaaagttaccgcttttttagagtccttctctgtaayattggatttttttttccttatgagatcagcctaaggccattgataaggcctgtgatctcagtaacaatgatctgcttctgaatctcactgttgcctttgg

SEQ ID NO: 45635 - DNA, 201 bp, Homo sapiens
atgtgtgtccttgtgatggcaagcattgtagttgatggccttcagaagaattgaggatctgatggaggttttttaatgtatttattttctgttcagcttgygaccctgtgtcaaaatttgtaaagatacaaaaggcattactgaaatggtactttctgtaatttgatactatttggctttaccatcttcacttgactgttt

SEQ ID NO: 45636 - DNA, 201 bp, Homo sapiens
aaacctgtgaccagaactgaaggaagactctaggaactgaaaactgcaacagaaattagcacaatttgaaaacagtgtaaatacccaagccctctggtacycagggagctggctggtctgtggtgcatgtgtgtccttgtgatggcaagcattgtagttgatggccttcagaagaattgaggatctgatggaggtttttta

SEQ ID NO: 45637 - DNA, 133 bp, Homo sapiens
tctctgtaatattggatttttttttccttatgagatcagcctaaggccattgataaggcctgtgatctcagtaacaatgatctgcttctgaatctcactgytgcctttggctagggaacacaactagtaactc

SEQ ID NO: 45638 - DNA, 201 bp, Homo sapiens
ggggtcgagaatcaagaccagcaagaacccaaaccttacggtgatgacgacgaaatcaatggagtgacacaaggtgatagaagtcgggccctgaaaaggcraagacaatcaaaaacaaacgatattcttctcccatctcccctggctgtgctgacctttacactgtgtagtgttgtcatctggtggattgtttgtgactac

SEQ ID NO: 45639 - DNA, 201 bp, Homo sapiens
ttctcccatctcccctggctgtgctgacctttacactgtgtagtgttgtcatctggtggattgtttgtgactacattcttcccatcctgctatctaaaackgttttgcattaagtaaaaacctgtgaccagaactgaaggaagactctaggaactgaaaactgcaacagaaattagcacaatttgaaaacagtgtaaatac

SEQ ID NO: 45640 - DNA, 201 bp, Homo sapiens
cttctcccatctcccctggctgtgctgacctttacactgtgtagtgttgtcatctggtggattgtttgtgactacattcttcccatcctgctatctaaaaytgttttgcattaagtaaaaacctgtgaccagaactgaaggaagactctaggaactgaaaactgcaacagaaattagcacaatttgaaaacagtgtaaata

SEQ ID NO: 45641 - DNA, 201 bp, Homo sapiens
ccagacttgaaagtggttaccaccaacattctcccgagacttatattcaatattttaagaatcacaatgttactaccattattcgtctgaataaaaggatrtatgatgccaaacgctttacggatgctggcttcgatcaccatgatcttttctttgcagatggcagcacccctactgatgccattgtcaaaagatttctgg

SEQ ID NO: 45642 - DNA, 201 bp, Homo sapiens
actctgatagcctgctacatcatgaagcattacaggatgacagcagccgagaccattgcgtgggtaaggatctgcagacctggcttggtgatcgggcctcmgcagcagtttttggtgatgaagcaaacaagcctctggctggaaggggactattttcgtcagaagttaaaggggcaggagaatggacaacacagagcagcc

SEQ ID NO: 45643 - DNA, 201 bp, Homo sapiens
ttgcccattgtttggttgccagtcatacaaattaaaatcatatttccttccatgcatggaaaaaacacactattggtttttcgccttggaaacagcaatcycaaataatgtcggctttaaaaaaaaaaagttaccgcttttttagagtccttctctgtaatattggatttttttttccttatgagatcagcctaaggccat

SEQ ID NO: 45644 - DNA, 201 bp, Homo sapiens
agaatcacaatgttactaccattattcgtctgaataaaaggatatatgatgccaaacgctttacggatgctggcttcgatcaccatgatcttttctttgcrgatggcagcacccctactgatgccattgtcaaaagatttctggatatctgtgaaaatgctgagggtgccattgcagtacattgtaaagctggccttggtc

SEQ ID NO: 45645 - DNA, 201 bp, Homo sapiens
gatattcttctcccatctcccctggctgtgctgacctttacactgtgtagtgttgtcatctggtggattgtttgtgactacattcttcccatcctgctatytaaaactgttttgcattaagtaaaaacctgtgaccagaactgaaggaagactctaggaactgaaaactgcaacagaaattagcacaatttgaaaacagtg

SEQ ID NO: 45646 - DNA, 201 bp, Homo sapiens
acagagcagccttctccaaacttctctctggtgttgatgacatttccataaatggggtcgagaatcaagaccagcaagaacccaaaccttacggtgatgaygacgaaatcaatggagtgacacaaggtgatagaagtcgggccctgaaaaggcgaagacaatcaaaaacaaacgatattcttctcccatctcccctggctg

SEQ ID NO: 45647 - DNA, 201 bp, Homo sapiens
ggatcagaggctatcctggccaacccccagtctgcttttctaacatgtaacattagcagagaccatcatttatccggatctgtgaagcctcccagaagagmctgcaaggtgaacagcagccaaaaatcagtgctgtggaaaaatgtgagcttctacctcacatgcctcctttcctgtttcccgcagtgttcagagatggct

SEQ ID NO: 45648 - DNA, 196 bp, Homo sapiens
atgactgcagctcatgcaaaagctctcatctcttacctggaattagaagaggcacccaagctcctgctgggatcagaggctatcctggccaacccscagtctgcttttctaacatgtaacattagcagagaccatcatttatccggatctgtgaagcctcccagaagagactgcaaggtgaacagcagccaaaaat

SEQ ID NO: 45649 - DNA, 188 bp, Homo sapiens
aatcccaaataatgtcggctttaaaaaaaaaaagttaccgcttttttagagtccttctctgtaatattggatttttttttccttatgagatcagcctaagkccattgataaggcctgtgatctcagtaacaatgatctgcttctgaatctcactgttgcctttggctagggaacacaactagtaactc

SEQ ID NO: 45650 - DNA, 201 bp, Homo sapiens
gtgaagcctcccagaagagactgcaaggtgaacagcagccaaaaatcagtgctgtggaaaaatgtgagcttctacctcacatgcctcctttcctgtttccygcagtgttcagagatggctactcaaggtcatggttaccctcacacacagattctgaaggctactcttggctacaattcaggtaatgtccaacagggcaaa

SEQ ID NO: 45651 - DNA, 201 bp, Homo sapiens
aaattaaaatcatatttccttccatgcatggaaaaaacacactattggtttttcgccttggaaacagcaatcccaaataatgtcggctttaaaaaaaaaawgttaccgcttttttagagtccttctctgtaatattggatttttttttccttatgagatcagcctaaggccattgataaggcctgtgatctcagtaacaat

SEQ ID NO: 45652 - DNA, 201 bp, Homo sapiens
tgcatgttgtaataccaggtgataccttggtaacctaaaacttgcaagagaatattagtggtagctttagaagactcaggaggagaaactgacttcagagytggaagatgttgcaagtcattcctttttctgtcctttagggactgaagaactgggaggttgcccattgtttggttgccagtcatacaaattaaaatcata

SEQ ID NO: 45653 - DNA, 201 bp, Homo sapiens
ctttattaacaagaatctgtgaaaaccacattttaaacactgttgcatgttgtaataccaggtgataccttggtaacctaaaacttgcaagagaatattartggtagctttagaagactcaggaggagaaactgacttcagagctggaagatgttgcaagtcattcctttttctgtcctttagggactgaagaactgggag

SEQ ID NO: 45654 - DNA, 154 bp, Homo sapiens
ctcagtaacaatgatctgcttctgaatctcactgttgcctttggctagggaacacaactagtaactctgcagagtgccttctcccgcaaccctactggaamacagcagagtctgtgccatgaagaaattagagaaacagaattgtttcgctgct

SEQ ID NO: 45655 - DNA, 201 bp, Homo sapiens
ctctaggaactgaaaactgcaacagaaattagcacaatttgaaaacaaaacaaaattgcaaaagacttagttgctttccacctaagaagctaatcaatggrgaaaatgtccactggggtttcagtaatgaacttttgagtttgggtgcaagcaaatgtaccaagactcaaagaaaggcccagctctcaagctgaatgacaa

SEQ ID NO: 45656 - DNA, 201 bp, Homo sapiens; identical to SEQ ID NO: 45629

SEQ ID NO: 45657 - DNA, 201 bp, Homo sapiens
tggacaacacagagcagccttctccaaacttctctctggtgttgatgacatttccataaatggggtcgagaatcaagaccagcaagaacccaaaccttacrgtgatgacgacgaaatcaatggagtgacacaaggtgatagaagtcgggccctgaaaaggcgaagacaatcaaaaacaaacgatattagatagctgcttct

SEQ ID NO: 45658 - DNA, 201 bp, Homo sapiens; identical to SEQ ID NO: 45631

SEQ ID NO: 45659 - DNA, 201 bp, Homo sapiens; identical to SEQ ID NO: 45632

SEQ ID NO: 45660 - DNA, 201 bp, Homo sapiens
aaatttagtctcaggtgtaaatacccaagccctctggtactcagggagctggctggtctgtggtgcatgtgtgtccttgtgatggcaagcattgtagttgmtggccttcagaagaattgaggatctgatggaggttttttaatgtatttattttctgttcagcttgtgaccctgtgtcaaaatttgtaaagatacaaaagg

SEQ ID NO: 45661 - DNA, 201 bp, Homo sapiens; identical to SEQ ID NO: 45634

SEQ ID NO: 45662 - DNA, 201 bp, Homo sapiens; identical to SEQ ID NO: 45635

SEQ ID NO: 45663 - DNA, 201 bp, Homo sapiens
aatgtaccaagactcaaagaaaggcccagctctcaagctgaatgacaaaaatgctgttgtaaatttagtctcaggtgtaaatacccaagccctctggtacycagggagctggctggtctgtggtgcatgtgtgtccttgtgatggcaagcattgtagttgatggccttcagaagaattgaggatctgatggaggtttttta

SEQ ID NO: 45664 - DNA, 201 bp, Homo sapiens
tctctgtaatattggatttttttttccttatgagatcagcctaaggccattgataaggcctgtgatctcagtaacaatgatctgcttctgaatctcactgytgcctttggctagggaacacaactagtaactctgcagagtgccttctcccgcaaccctactggaacacagcagagtctgtgccatgaagaaattagagaa

SEQ ID NO: 45665 - DNA, 107 bp, Homo sapiens
gggaacacaactagtaactctgcagagtgccttctcccgcaaccctactggaacacagcagagtctgtgccatgaagaaattagagaaacagaattgtttygctgct

SEQ ID NO: 45666 - DNA, 201 bp, Homo sapiens
ggggtcgagaatcaagaccagcaagaacccaaaccttacggtgatgacgacgaaatcaatggagtgacacaaggtgatagaagtcgggccctgaaaaggcraagacaatcaaaaacaaacgatattagatagctgcttctctccatttcaaggactaaaactgttttgcattaagtaaaaacctgtgaccagaactgaagg

SEQ ID NO: 45667 - DNA, 201 bp, Homo sapiens
gagtgacacaaggtgatagaagtcgggccctgaaaaggcgaagacaatcaaaaacaaacgatattagatagctgcttctctccatttcaaggactaaaackgttttgcattaagtaaaaacctgtgaccagaactgaaggaagactctaggaactgaaaactgcaacagaaattagcacaatttgaaaacaaaacaaaatt

SEQ ID NO: 45668 - DNA, 201 bp, Homo sapiens; identical to SEQ ID NO: 45641

SEQ ID NO: 45669 - DNA, 201 bp, Homo sapiens
ggagtgacacaaggtgatagaagtcgggccctgaaaaggcgaagacaatcaaaaacaaacgatattagatagctgcttctctccatttcaaggactaaaaytgttttgcattaagtaaaaacctgtgaccagaactgaaggaagactctaggaactgaaaactgcaacagaaattagcacaatttgaaaacaaaacaaaat

SEQ ID NO: 45670 - DNA, 201 bp, Homo sapiens; identical to SEQ ID NO: 45642

SEQ ID NO: 45671 - DNA, 201 bp, Homo sapiens; identical to SEQ ID NO: 45643

SEQ ID NO: 45672 - DNA, 201 bp, Homo sapiens; identical to SEQ ID NO: 45644

SEQ ID NO: 45673 - DNA, 201 bp, Homo sapiens
acagagcagccttctccaaacttctctctggtgttgatgacatttccataaatggggtcgagaatcaagaccagcaagaacccaaaccttacggtgatgaygacgaaatcaatggagtgacacaaggtgatagaagtcgggccctgaaaaggcgaagacaatcaaaaacaaacgatattagatagctgcttctctccattt

SEQ ID NO: 45674 - DNA, 201 bp, Homo sapiens
aatcccaaataatgtcggctttaaaaaaaaaaagttaccgcttttttagagtccttctctgtaatattggatttttttttccttatgagatcagcctaagkccattgataaggcctgtgatctcagtaacaatgatctgcttctgaatctcactgttgcctttggctagggaacacaactagtaactctgcagagtgcctt

SEQ ID NO: 45675 - DNA, 201 bp, Homo sapiens; identical to SEQ ID NO: 45651

SEQ ID NO: 45676 - DNA, 201 bp, Homo sapiens; identical to SEQ ID NO: 45652

SEQ ID NO: 45677 - DNA, 201 bp, Homo sapiens; identical to SEQ ID NO: 45653

SEQ ID NO: 45678 - DNA, 201 bp, Homo sapiens
ctcagtaacaatgatctgcttctgaatctcactgttgcctttggctagggaacacaactagtaactctgcagagtgccttctcccgcaaccctactggaamacagcagagtctgtgccatgaagaaattagagaaacagaattgtttcgctgctaaaaaaaaaaagggggggcccaaaataaaagaatatttagtactcac

SEQ ID NO: 45679 - DNA, 201 bp, Homo sapiens
ctctaggaactgaaaactgcaacagaaattagcacaatttgaaaacaaaacaaaattgcaaaagacttagttgctttccacctaagaagctaatcaatggrgaaaatgtccactggggtttcagtaatgaacttttgagtttgggtgcaagcaaataatgactcaaagaaaggcccagctctcaagctgaatgacaaaaat

SEQ ID NO: 45680 - DNA, 201 bp, Homo sapiens
tctcccatctcccctggctgtgctgacctttacactgtgtagtgttgtcatctggtggattgtttgtgactacattcttcccatcctgctatcctgactcraagatttcagaacatagactaaaactgttttgcattaagtaaaaacctgtgaccagaactgaaggaagactctaggaactgaaaactgcaacagaaatta

SEQ ID NO: 45681 - DNA, 201 bp, Homo sapiens; identical to SEQ ID NO: 45629

SEQ ID NO: 45682 - DNA, 201 bp, Homo sapiens
gtactttcttggaagaaagtacgaaattgaccggcatcatgagagacggaagatgccgtattctcagccaaacaagtgactctttccctgccaagcactayggggtggggtcaggctagcttttaaacactggggactggatcacagaaaaacagtggttttctgtccctggaaatgaataggcacaaagacccacttggc

SEQ ID NO: 45683 - DNA, 201 bp, Homo sapiens
aataaacaagttaaagtctttaatgcaaaaagtaattgaaaggcagtgcctccattttggtgtactttcttggaagaaagtacgaaattgaccggcatcakgagagacggaagatgccgtattctcagccaaacaagtgactctttccctgccaagcactatggggtggggtcaggctagcttttaaacactggggactgg

SEQ ID NO: 45684 - DNA, 201 bp, Homo sapiens; identical to SEQ ID NO: 45630

SEQ ID NO: 45685 - DNA, 201 bp, Homo sapiens; identical to SEQ ID NO: 45631

SEQ ID NO: 45686 - DNA, 201 bp, Homo sapiens; identical to SEQ ID NO: 45632

SEQ ID NO: 45687 - DNA, 201 bp, Homo sapiens; identical to SEQ ID NO: 45660

SEQ ID NO: 45688 - DNA, 201 bp, Homo sapiens; identical to SEQ ID NO: 45634

SEQ ID NO: 45689 - DNA, 201 bp, Homo sapiens; identical to SEQ ID NO: 45635

SEQ ID NO: 45690 - DNA, 201 bp, Homo sapiens
agcaaataatgactcaaagaaaggcccagctctcaagctgaatgacaaaaatgctgttgtaaatttagtctcaggtgtaaatacccaagccctctggtacycagggagctggctggtctgtggtgcatgtgtgtccttgtgatggcaagcattgtagttgatggccttcagaagaattgaggatctgatggaggtttttta

SEQ ID NO: 45691 - DNA, 201 bp, Homo sapiens; identical to SEQ ID NO: 45664

SEQ ID NO: 45692 - DNA, 201 bp, Homo sapiens; identical to SEQ ID NO: 45638

SEQ ID NO: 45693 - DNA, 201 bp, Homo sapiens
gggaacacaactagtaactctgcagagtgccttctcccgcaaccctactggaacacagcagagtctgtgccatgaagaaattagagaaacagaattgtttygctgctaaaaaaaaaaagggggggcccaaaataaaagaatatttagtactcacctcagttccttccataagaagtgggtggtttaatgattgttaaccca

SEQ ID NO: 45694 - DNA, 201 bp, Homo sapiens
cctttacactgtgtagtgttgtcatctggtggattgtttgtgactacattcttcccatcctgctatcctgactcgaagatttcagaacatagactaaaackgttttgcattaagtaaaaacctgtgaccagaactgaaggaagactctaggaactgaaaactgcaacagaaattagcacaatttgaaaacaaaacaaaatt

SEQ ID NO: 45695 - DNA, 201 bp, Homo sapiens; identical to SEQ ID NO: 45641

SEQ ID NO: 45696 - DNA, 201 bp, Homo sapiens
acctttacactgtgtagtgttgtcatctggtggattgtttgtgactacattcttcccatcctgctatcctgactcgaagatttcagaacatagactaaaaytgttttgcattaagtaaaaacctgtgaccagaactgaaggaagactctaggaactgaaaactgcaacagaaattagcacaatttgaaaacaaaacaaaat

SEQ ID NO: 45697 - DNA, 201 bp, Homo sapiens; identical to SEQ ID NO: 45642

SEQ ID NO: 45698 - DNA, 201 bp, Homo sapiens; identical to SEQ ID NO: 45643

SEQ ID NO: 45699 - DNA, 201 bp, Homo sapiens; identical to SEQ ID NO: 45644

SEQ ID NO: 45700 - DNA, 201 bp, Homo sapiens
gatattcttctcccatctcccctggctgtgctgacctttacactgtgtagtgttgtcatctggtggattgtttgtgactacattcttcccatcctgctatyctgactcgaagatttcagaacatagactaaaactgttttgcattaagtaaaaacctgtgaccagaactgaaggaagactctaggaactgaaaactgcaac

SEQ ID NO: 45701 - DNA, 201 bp, Homo sapiens; identical to SEQ ID NO: 45646

SEQ ID NO: 45702 - DNA, 201 bp, Homo sapiens; identical to SEQ ID NO: 45647

SEQ ID NO: 45703 - DNA, 196 bp, Homo sapiens; identical to SEQ ID NO: 45648

SEQ ID NO: 45704 - DNA, 201 bp, Homo sapiens; identical to SEQ ID NO: 45650

SEQ ID NO: 45705 - DNA, 201 bp, Homo sapiens; identical to SEQ ID NO: 45674

SEQ ID NO: 45706 - DNA, 201 bp, Homo sapiens; identical to SEQ ID NO: 45651

SEQ ID NO: 45707 - DNA, 201 bp, Homo sapiens; identical to SEQ ID NO: 45652

SEQ ID NO: 45708 - DNA, 201 bp, Homo sapiens; identical to SEQ ID NO: 45653

SEQ ID NO: 45709 - DNA, 154 bp, Homo sapiens
aaggcctgtgatctcagtaacaatgatctgcttctgaatctcactgttgcctttggctagggaacacaactaagtgccttctcccgcaaccctactggaamacagcagagtctgtgccatgaagaaattagagaaacagaattgtttcgctgct

SEQ ID NO: 45710 - DNA, 201 bp, Homo sapiens; identical to SEQ ID NO: 45679

SEQ ID NO: 45711 - DNA, 201 bp, Homo sapiens; identical to SEQ ID NO: 45629

SEQ ID NO: 45712 - DNA, 201 bp, Homo sapiens
tggacaacacagagcagccttctccaaacttctctctggtgttgatgacatttccataaatggggtcgagaatcaagaccagcaagaacccaaaccttacrgtgatgacgacgaaatcaatggagtgacacaaggtgatagaagtcgggccctgaaaaggcgaagacaatcaaaaacaaacgatattcttctcccctgctt

SEQ ID NO: 45713 - DNA, 201 bp, Homo sapiens; identical to SEQ ID NO: 45631

SEQ ID NO: 45714 - DNA, 201 bp, Homo sapiens; identical to SEQ ID NO: 45632

SEQ ID NO: 45715 - DNA, 201 bp, Homo sapiens; identical to SEQ ID NO: 45660

SEQ ID NO: 45716 - DNA, 201 bp, Homo sapiens; identical to SEQ ID NO: 45634

SEQ ID NO: 45717 - DNA, 201 bp, Homo sapiens; identical to SEQ ID NO: 45635

SEQ ID NO: 45718 - DNA, 201 bp, Homo sapiens; identical to SEQ ID NO: 45690

SEQ ID NO: 45719 - DNA, 201 bp, Homo sapiens
tctctgtaatattggatttttttttccttatgagatcagcctaaggccattgataaggcctgtgatctcagtaacaatgatctgcttctgaatctcactgytgcctttggctagggaacacaactaagtgccttctcccgcaaccctactggaacacagcagagtctgtgccatgaagaaattagagaaacagaattgttt

SEQ ID NO: 45720 - DNA, 201 bp, Homo sapiens
ggggtcgagaatcaagaccagcaagaacccaaaccttacggtgatgacgacgaaatcaatggagtgacacaaggtgatagaagtcgggccctgaaaaggcraagacaatcaaaaacaaacgatattcttctcccctgcttctctccatttcaaggactaaaactgttttgcattaagtaaaaacctgtgaccagaactgaa

SEQ ID NO: 45721 - DNA, 201 bp, Homo sapiens
gtgacacaaggtgatagaagtcgggccctgaaaaggcgaagacaatcaaaaacaaacgatattcttctcccctgcttctctccatttcaaggactaaaackgttttgcattaagtaaaaacctgtgaccagaactgaaggaagactctaggaactgaaaactgcaacagaaattagcacaatttgaaaacaaaacaaaatt

SEQ ID NO: 45722 - DNA, 107 bp, Homo sapiens
tgcctttggctagggaacacaactaagtgccttctcccgcaaccctactggaacacagcagagtctgtgccatgaagaaattagagaaacagaattgtttygctgct

SEQ ID NO: 45723 - DNA, 201 bp, Homo sapiens
agtgacacaaggtgatagaagtcgggccctgaaaaggcgaagacaatcaaaaacaaacgatattcttctcccctgcttctctccatttcaaggactaaaaytgttttgcattaagtaaaaacctgtgaccagaactgaaggaagactctaggaactgaaaactgcaacagaaattagcacaatttgaaaacaaaacaaaat

SEQ ID NO: 45724 - DNA, 201 bp, Homo sapiens; identical to SEQ ID NO: 45641

SEQ ID NO: 45725 - DNA, 201 bp, Homo sapiens; identical to SEQ ID NO: 45642

SEQ ID NO: 45726 - DNA, 201 bp, Homo sapiens; identical to SEQ ID NO: 45643

SEQ ID NO: 45727 - DNA, 201 bp, Homo sapiens; identical to SEQ ID NO: 45644

SEQ ID NO: 45728 - DNA, 201 bp, Homo sapiens
acagagcagccttctccaaacttctctctggtgttgatgacatttccataaatggggtcgagaatcaagaccagcaagaacccaaaccttacggtgatgaygacgaaatcaatggagtgacacaaggtgatagaagtcgggccctgaaaaggcgaagacaatcaaaaacaaacgatattcttctcccctgcttctctccat

SEQ ID NO: 45729 - DNA, 201 bp, Homo sapiens
aatcccaaataatgtcggctttaaaaaaaaaaagttaccgcttttttagagtccttctctgtaatattggatttttttttccttatgagatcagcctaagkccattgataaggcctgtgatctcagtaacaatgatctgcttctgaatctcactgttgcctttggctagggaacacaactaagtgccttctcccgcaaccc

SEQ ID NO: 45730 - DNA, 201 bp, Homo sapiens; identical to SEQ ID NO: 45651

SEQ ID NO: 45731 - DNA, 201 bp, Homo sapiens; identical to SEQ ID NO: 45652

SEQ ID NO: 45732 - DNA, 201 bp, Homo sapiens; identical to SEQ ID NO: 45653

SEQ ID NO: 45733 - DNA, 171 bp, Homo sapiens
cagcggccgggaaggggcggtgcgggaggcggggtgtggggcggtagtgtgggccctgttcctgcccgcgsggtgttccgcattctgcaagcctccggagcgcacgtcggcagtcggctccctcgttgaccgaatcaccgacctctctccccagctgtatttccaaaatgt

SEQ ID NO: 45734 - DNA, 103 bp, Homo sapiens
ccaaagaagatagtagataacttgtgtgcatataagctagaacagtataaggggccgggcatggtggcttacgcctgtaatcccaggactttgggaggccrag

SEQ ID NO: 45735 - DNA, 201 bp, Homo sapiens
ccactccccagaggtgaccactttcaactcttgagtttttcaggtatatacctccatgtttctaagtaatatgcttatattgttcacttcttttttttttwttttttaaagaaatctatttcataccatggaggaaggctctgttccacatatatttccacttcttcattctctcggtatagttttgtcacaattatagat

SEQ ID NO: 45736 - DNA, 125 bp, Homo sapiens
tctgaaggaatttttaacctaaccaaagaagatagtagataacttgtgtgcatataagctagaacagtataaggggccgggcatggtggcttacgcctgtratcccaggactttgggaggccaag

SEQ ID NO: 45737 - DNA, 201 bp, Homo sapiens
catgtggaggaagaagggaagggaaaagatgcttctgggaacaaggttaaagccgagccagccaaaatagaagctttccgagcttcactttccaagctagkggatgtctatgtcaatgatgcttttggcactgctcacagagcccacagctccatggtaggagtcaatctgccacagaaggctggtgggtttttgatgaag

SEQ ID NO: 45738 - DNA, 201 bp, Homo sapiens
accttcctatttctttcctgtccttttaatggagttttgggagagagcagaggtaaacatgatttgaaaaagccatgtctgaccagaaattctgtgctggmaagatatgtatttcacctttagggacaaagaaataaacttttggacaggaccacagagctagtaagtaacagcagggattcaagtccaggtttgtctggt

SEQ ID NO: 45739 - DNA, 201 bp, Homo sapiens
gcttctagactctatccctgacatgatgcttctagactattttgtttaaccctggatagaatagcaaaagaaaattttggtggttgctctaaacaaaacasaaatttgaaagctcaagttttttcttcatttgtattttagttaatactgtacccatatttgtagttaattttaaattgtaccatgtttctgcatacctct

SEQ ID NO: 45740 - DNA, 171 bp, Homo sapiens; identical to SEQ ID NO: 45733

SEQ ID NO: 45741 - DNA, 103 bp, Homo sapiens; identical to SEQ ID NO: 45734

SEQ ID NO: 45742 - DNA, 201 bp, Homo sapiens; identical to SEQ ID NO: 45735

SEQ ID NO: 45743 - DNA, 125 bp, Homo sapiens; identical to SEQ ID NO: 45736

SEQ ID NO: 45744 - DNA, 201 bp, Homo sapiens; identical to SEQ ID NO: 45737

SEQ ID NO: 45745 - DNA, 201 bp, Homo sapiens; identical to SEQ ID NO: 45738

SEQ ID NO: 45746 - DNA, 201 bp, Homo sapiens; identical to SEQ ID NO: 45739

SEQ ID NO: 45747 - DNA, 171 bp, Homo sapiens; identical to SEQ ID NO: 45733

SEQ ID NO: 45748 - DNA, 201 bp, Homo sapiens; identical to SEQ ID NO: 45735

SEQ ID NO: 45749 - DNA, 201 bp, Homo sapiens; identical to SEQ ID NO: 45737

SEQ ID NO: 45750 - DNA, 171 bp, Homo sapiens; identical to SEQ ID NO: 45733

SEQ ID NO: 45751 - DNA, 201 bp, Homo sapiens
ccaaagaagatagtagataacttgtgtgcatataagctagaacagtataaggggccgggcatggtggcttacgcctgtaatcccaggactttgggaggccraggctggtctcgaactcctggcctcaagtgatcctcccgcctcggtctcccaaagtgctgggattacaggtgtgagccattgtaccctgccaataattgt

SEQ ID NO: 45752 - DNA, 201 bp, Homo sapiens; identical to SEQ ID NO: 45735

SEQ ID NO: 45753 - DNA, 201 bp, Homo sapiens
tctgaaggaatttttaacctaaccaaagaagatagtagataacttgtgtgcatataagctagaacagtataaggggccgggcatggtggcttacgcctgtratcccaggactttgggaggccaaggctggtctcgaactcctggcctcaagtgatcctcccgcctcggtctcccaaagtgctgggattacaggtgtgagcc

SEQ ID NO: 45754 - DNA, 201 bp, Homo sapiens; identical to SEQ ID NO: 45737

SEQ ID NO: 45755 - DNA, 201 bp, Homo sapiens; identical to SEQ ID NO: 45738

SEQ ID NO: 45756 - DNA, 201 bp, Homo sapiens; identical to SEQ ID NO: 45739

SEQ ID NO: 45757 - DNA, 201 bp, Homo sapiens
acaaccctcatgacgaagcaacatgaattagggggcctcttggccttggtccaaaattgtcaatcagaaatgaacataaaggactccagagcagtgggachgtctgtcaaaagactctgtatatcttttgtggatgagttttgtgagagaacagagagaccattgtacctggcacaagggctgttcatgaaaagggagact

SEQ ID NO: 45758 - DNA, 201 bp, Homo sapiens
cccctcagttcctgtgcctcagcccacaggccactgtgataatggtctgtttagcacttctgtatttattgtaagaatgattataatgaagatacacactrtaactacaagaaattataaatgtttttcacatcaggctgttctttttttttttttggaggcgaggttaaagcattactatttgcaaagcactctgtagct

SEQ ID NO: 45759 - DNA, 201 bp, Homo sapiens
acacactgtaactacaagaaattataaatgtttttcacatcaggctgttctttttttttttttggaggcgaggttaaagcattactatttgcaaagcactstgtagctccctgttatggggataggtaactaatcagaataataatgtcactcgcatccacttcttagaacctggctccaaaggaaaataagctgatagac

SEQ ID NO: 45760 - DNA, 201 bp, Homo sapiens
cctctgctgggtgcctccttgccttgggaccatggccaccccagagccatccgatcgatggatgggatgcactctcagaccaagcagcaggaattcaaagytgcttgctgtaactgtgtgagattgtgaagtggtctgaattctggaatcacaaaccaagccatgctggtgggccattaatggttggaaaacactttcatc

SEQ ID NO: 45761 - DNA, 201 bp, Homo sapiens
agaaccaacactatcaatgtctttgcaaatcctcacaggattcctgtgggtccagctttggaactgggaaacctttcttcggatccgcactcattccactratgccagctgcccctgaaggatgccagtactgtggtgtgtgagtctcagcagccgcccacacgctcctaactctgctgcatggcagatgcctaggtggaa

SEQ ID NO: 45762 - DNA, 201 bp, Homo sapiens
actccagagcagtgggactgtctgtcaaaagactctgtatatcttttgtggatgagttttgtgagagaacagagagaccattgtacctggcacaagggctsttcatgaaaagggagacttactgggaggtgcaagacagtggcatttctcctctcctcttgctgctcagcacagccctggattgcagccccgaggctgaga

SEQ ID NO: 45763 - DNA, 201 bp, Homo sapiens
tctctgtgtgtttgtgtgtgtgtgtgcactcaagacctctaacagcctcgaagcctggggtggcatcccggccttgccattagcatgcctcatgcatcatyagatgacaaggacaaccctcatgacgaagcaacatgaattagggggcctcttggccttggtccaaaattgtcaatcagaaatgaacataaaggactccag

SEQ ID NO: 45764 - DNA, 201 bp, Homo sapiens
aacgatggcaagccttatgtcttgggagcctgttttgctaggcaaagttacaagtgacctaatgggagctcaaatgtgtgtgtgtctctctgtgtgtttgkgtgtgtgtgtgcactcaagacctctaacagcctcgaagcctggggtggcatcccggccttgccattagcatgcctcatgcatcatcagatgacaaggaca

SEQ ID NO: 45765 - DNA, 201 bp, Homo sapiens
ggcaagtaataatggaatgctactaagatactccatattcttccccgaatcacacagacagtttctgacaggcgcaactcctccattttcctcccgcaggygagaaccctgtggagatgagtcagtgccatgactgagaaggaaccgacccctagttgagagcaccttgcagttccccgagaactttctgattcacagtct

SEQ ID NO: 45766 - DNA, 201 bp, Homo sapiens
atggcaggttcaagttccacttcttggtggggatgagaagggagagagagctagagggacaaagagaatgagaagacatggatgatctgggagagtctcastttggaatcagaattggaatcacattctgtttatcaagccataatgtaaggacagaataatacaatattaagtccaaatccaacctcctgtcagtggagc

SEQ ID NO: 45767 - DNA, 140 bp, Homo sapiens
ttgcactccggcctgggcaacagagcgagactccgtctcaaacaaacaaacaaaggaacgaaaacctccggtctccggcacggcaagctctgcgtgaattactttctccattgcaactcccctgtcttgataaatgggct

SEQ ID NO: 45768 - DNA, 142 bp, Homo sapiens
ttgcactccggcctgggcaacagagcgagactccgtctcaaacaaacaaacaaaggaacgaaaacctccggtctccggcacggcaagctctgcgtgaattactttctccattgcaactcccctgtcttgataaatgggctct

SEQ ID NO: 45769 - DNA, 201 bp, Homo sapiens
ttcaatccgtcctatgacaagatcttcagtcaccttcaacatgtaaagtacaaaggccaggaagcattcgtcccgggattcaacattgaagagctgcttcyggagaggaccgctgaatattaccgctaccgggggtccctgaccacacccccttgcaaccccactgtgctctggacagttttccgaaaccccgtgcaaatt

SEQ ID NO: 45770 - DNA, 139 bp, Homo sapiens
ttgcactccggcctgggcaacagagcgagactccgtctcaaacaaacaaacaaaggaacgaaaacctccggtctccggcacggcaagctctgcgtgaattactttctccattgcaactcccctgtcttgataaatgggc

SEQ ID NO: 45771 - DNA, 141 bp, Homo sapiens
ttgcactccggcctgggcaacagagcgagactccgtctcaaacaaacaaacaaaggaacgaaaacctccggtctccggcacggcaagctctgcgtgaattactttctccattgcaactcccctgtcttgataaatgggctc

SEQ ID NO: 45772 - DNA, 201 bp, Homo sapiens
aaaagctgcccggggaagccaggagagcgaagggcggacgtactcgccacggcacccaggctgcgcgcacgcggtcccggtgtgcagctggagagcgagcrgccaccgggagcccccggcacagcccgcgcccgccccgcaggagcccgcgaagatgccccggcgcagcctgcacgcggcggccgtgctcctgctggtgat

SEQ ID NO: 45773 - DNA, 201 bp, Homo sapiens
ctgaatattaccgctaccgggggtccctgaccacacccccttgcaaccccactgtgctctggacagttttccgaaaccccgtgcaaatttcccaggagcawctgctggctttggagacagccctgtactgcacacacatggacgacccttcccccagagaaatgatcaacaacttccggcaggtccagaagttcgatgaga

SEQ ID NO: 45774 - DNA, 201 bp, Homo sapiens
tgtctaaatccagacttcacattctgactggggcaaaaagaggcagtccagtaaaggttataaaataggtaccatcattgtttgccttatttagaaaagcwtccaattttcactataatcaccctaagcctgagagaggtgaactgttcaagggtactttggctccagtgggtgacagtacctggcccagctttggaattg

SEQ ID NO: 45775 - DNA, 201 bp, Homo sapiens
ccctaagcctgagagaggtgaactgttcaagggtactttggctccagtgggtgacagtacctggcccagctttggaattgaaacatttctgatggtctgtrctctgctagaacacaggatgcttctgctctccctgctctggcatcctgccaggtgtcatggccacgcacaggcatgaagacagccgggaagccagagttc

SEQ ID NO: 45776 - DNA, 201 bp, Homo sapiens
ccagcagctcctcggagaactgtgttcctgggtcagccctggcccagaggagcgccggggacccgcagagtgctgctgaagtcaaggctacaactcacctrggatctggggcgccagccctccggtgggcagggcgttctcctcccccaccccctccccgcacgatgacatcaagtgtttggcgttgagttgctccataaa

SEQ ID NO: 45777 - DNA, 201 bp, Homo sapiens
ttctggaatcacaaaccaagccatgctggtgggccattaatggttggaaaacactttcatccggggctttgccagagcgtgctttcaagtgtcctggaaaktctgctgcttctccaagctttcagacaagaatgtgcactctctgcttaggttttgcttgggaaactcaacttctttcctctggagacggggcatctccct

SEQ ID NO: 45778 - DNA, 201 bp, Homo sapiens
gtgctttcaagtgtcctggaaattctgctgcttctccaagctttcagacaagaatgtgcactctctgcttaggttttgcttgggaaactcaacttctttcytctggagacggggcatctccctctgatttccttctgctatgacaaaacctttaatctgcaccttacaactcggggacaaatggggacaggaaggatcaag

SEQ ID NO: 45779 - DNA, 201 bp, Homo sapiens; identical to SEQ ID NO: 45757

SEQ ID NO: 45780 - DNA, 201 bp, Homo sapiens; identical to SEQ ID NO: 45758

SEQ ID NO: 45781 - DNA, 201 bp, Homo sapiens; identical to SEQ ID NO: 45759

SEQ ID NO: 45782 - DNA, 201 bp, Homo sapiens; identical to SEQ ID NO: 45760

SEQ ID NO: 45783 - DNA, 201 bp, Homo sapiens; identical to SEQ ID NO: 45761

SEQ ID NO: 45784 - DNA, 201 bp, Homo sapiens; identical to SEQ ID NO: 45762

SEQ ID NO: 45785 - DNA, 201 bp, Homo sapiens; identical to SEQ ID NO: 45763

SEQ ID NO: 45786 - DNA, 201 bp, Homo sapiens; identical to SEQ ID NO: 45764

SEQ ID NO: 45787 - DNA, 201 bp, Homo sapiens; identical to SEQ ID NO: 45765

SEQ ID NO: 45788 - DNA, 201 bp, Homo sapiens; identical to SEQ ID NO: 45766

SEQ ID NO: 45789 - DNA, 201 bp, Homo sapiens; identical to SEQ ID NO: 45769

SEQ ID NO: 45790 - DNA, 201 bp, Homo sapiens; identical to SEQ ID NO: 45772

SEQ ID NO: 45791 - DNA, 201 bp, Homo sapiens; identical to SEQ ID NO: 45773

SEQ ID NO: 45792 - DNA, 201 bp, Homo sapiens; identical to SEQ ID NO: 45774

SEQ ID NO: 45793 - DNA, 201 bp, Homo sapiens; identical to SEQ ID NO: 45775

SEQ ID NO: 45794 - DNA, 201 bp, Homo sapiens; identical to SEQ ID NO: 45777

SEQ ID NO: 45795 - DNA, 201 bp, Homo sapiens; identical to SEQ ID NO: 45776

SEQ ID NO: 45796 - DNA, 201 bp, Homo sapiens; identical to SEQ ID NO: 45778

SEQ ID NO: 45797 - DNA, 201 bp, Homo sapiens; identical to SEQ ID NO: 45772

SEQ ID NO: 45798 - DNA, 201 bp, Homo sapiens; identical to SEQ ID NO: 45760

SEQ ID NO: 45799 - DNA, 201 bp, Homo sapiens; identical to SEQ ID NO: 45773

SEQ ID NO: 45800 - DNA, 201 bp, Homo sapiens; identical to SEQ ID NO: 45765

SEQ ID NO: 45801 - DNA, 201 bp, Homo sapiens; identical to SEQ ID NO: 45766

SEQ ID NO: 45802 - DNA, 201 bp, Homo sapiens; identical to SEQ ID NO: 45769

SEQ ID NO: 45803 - DNA, 201 bp, Homo sapiens; identical to SEQ ID NO: 45776

SEQ ID NO: 45804 - DNA, 201 bp, Homo sapiens; identical to SEQ ID NO: 45777

SEQ ID NO: 45805 - DNA, 201 bp, Homo sapiens; identical to SEQ ID NO: 45778

SEQ ID NO: 45806 - DNA, 201 bp, Homo sapiens; identical to SEQ ID NO: 45757

SEQ ID NO: 45807 - DNA, 201 bp, Homo sapiens; identical to SEQ ID NO: 45758

SEQ ID NO: 45808 - DNA, 201 bp, Homo sapiens; identical to SEQ ID NO: 45759

SEQ ID NO: 45809 - DNA, 201 bp, Homo sapiens; identical to SEQ ID NO: 45760

SEQ ID NO: 45810 - DNA, 201 bp, Homo sapiens; identical to SEQ ID NO: 45761

SEQ ID NO: 45811 - DNA, 201 bp, Homo sapiens; identical to SEQ ID NO: 45762

SEQ ID NO: 45812 - DNA, 201 bp, Homo sapiens; identical to SEQ ID NO: 45763

SEQ ID NO: 45813 - DNA, 201 bp, Homo sapiens; identical to SEQ ID NO: 45764

SEQ ID NO: 45814 - DNA, 201 bp, Homo sapiens; identical to SEQ ID NO: 45765

SEQ ID NO: 45815 - DNA, 201 bp, Homo sapiens; identical to SEQ ID NO: 45766

SEQ ID NO: 45816 - DNA, 140 bp, Homo sapiens; identical to SEQ ID NO: 45767

SEQ ID NO: 45817 - DNA, 142 bp, Homo sapiens; identical to SEQ ID NO: 45768

SEQ ID NO: 45818 - DNA, 201 bp, Homo sapiens; identical to SEQ ID NO: 45769

SEQ ID NO: 45819 - DNA, 139 bp, Homo sapiens; identical to SEQ ID NO: 45770

SEQ ID NO: 45820 - DNA, 141 bp, Homo sapiens; identical to SEQ ID NO: 45771

SEQ ID NO: 45821 - DNA, 201 bp, Homo sapiens; identical to SEQ ID NO: 45772

SEQ ID NO: 45822 - DNA, 201 bp, Homo sapiens; identical to SEQ ID NO: 45773

SEQ ID NO: 45823 - DNA, 201 bp, Homo sapiens; identical to SEQ ID NO: 45774

SEQ ID NO: 45824 - DNA, 201 bp, Homo sapiens; identical to SEQ ID NO: 45775

SEQ ID NO: 45825 - DNA, 201 bp, Homo sapiens; identical to SEQ ID NO: 45776

SEQ ID NO: 45826 - DNA, 201 bp, Homo sapiens; identical to SEQ ID NO: 45777

SEQ ID NO: 45827 - DNA, 201 bp, Homo sapiens; identical to SEQ ID NO: 45778

SEQ ID NO: 45828 - DNA, 201 bp, Homo sapiens; identical to SEQ ID NO: 45772

SEQ ID NO: 45829 - DNA, 201 bp, Homo sapiens; identical to SEQ ID NO: 45760

SEQ ID NO: 45830 - DNA, 201 bp, Homo sapiens; identical to SEQ ID NO: 45773

SEQ ID NO: 45831 - DNA, 201 bp, Homo sapiens; identical to SEQ ID NO: 45765

SEQ ID NO: 45832 - DNA, 201 bp, Homo sapiens; identical to SEQ ID NO: 45766

SEQ ID NO: 45833 - DNA, 201 bp, Homo sapiens; identical to SEQ ID NO: 45769

SEQ ID NO: 45834 - DNA, 201 bp, Homo sapiens; identical to SEQ ID NO: 45776

SEQ ID NO: 45835 - DNA, 201 bp, Homo sapiens; identical to SEQ ID NO: 45777

SEQ ID NO: 45836 - DNA, 201 bp, Homo sapiens; identical to SEQ ID NO: 45778

SEQ ID NO: 45837 - DNA, 181 bp, Homo sapiens
gatggagatggagatggagcaggtgtttgagatgaaggtcaaagaaaaagttcaaaaactgaaggactctgaagctgaggccttcaggaagtgtcgagtcygggacgcccagcgcgggcccgagcagggggaagggaagcgcagctcggtccgcgtgggtggaggggacgtgaagccgccc

SEQ ID NO: 45838 - DNA, 151 bp, Homo sapiens
cttggcctcccaaagtgctgggattacaggtgaatctggactgggaaagtygacattaatcaactcattattcctcacagatttgtattctccagagtatccaggtccttctcagagaattaaaaagactgtacaggtggaacaatccaaa

SEQ ID NO: 45839 - DNA, 201 bp, Homo sapiens
tcaaagaaggtggtattcagttgctgcttacaatagttgataccccaggatttggagatgcagtggataatagtaattgctggcagcctgttatcaattayattgatagtaaatttgaggactacctaaatgcagaatcgcaagtgaacagatgtcagatgcctggtaacagggtgcactgttgtttatacttcattgctc

SEQ ID NO: 45840 - DNA, 151 bp, Homo sapiens; identical to SEQ ID NO: 45838

SEQ ID NO: 45841 - DNA, 201 bp, Homo sapiens; identical to SEQ ID NO: 45839

SEQ ID NO: 45842 - DNA, 186 bp, Homo sapiens
gttgaatatttaaggttgggtaaagtgggtgagtttaacagatattttcccttatttcttttaggtgaatctggactgggaaagtygacattaatcaactcattattcctcacagatttgtattctccagagtatccaggtccttctcagagaattaaaaagactgtacaggtggaacaatccaaa

SEQ ID NO: 45843 - DNA, 119 bp, Homo sapiens
gttgaatatttaaggttgrgtaaagtgggtgagtttaacagatattttcccttatttcttttaggtgaatctggactgggaaagttgacattaatcaactcattattcctcacagattt

SEQ ID NO: 45844 - DNA, 201 bp, Homo sapiens; identical to SEQ ID NO: 45839

SEQ ID NO: 45845 - DNA, 201 bp, Homo sapiens
aatgaagttcgaatcacaatcattgccactgtggtttgccacaccgacacctataccctgagtggagctgatcctaagggttgttttccagtgatcttggracatgaagttgcttggaattgtggaaagcgttggcgaggaagttactaagctgaaggtgagtgacactgtcattccactttacatcccacagtgtggaga

SEQ ID NO: 45846 - DNA, 122 bp, Homo sapiens
aggaagttactaagctgaaggtgagtgacactgtcattccactttacatcccacagtgtggagaatgcaaatttggtctaaatcctaaaactaacctttgscagaagataagagtcacgaag

SEQ ID NO: 45847 - DNA, 201 bp, Homo sapiens
tttagaagcagaagtaaaatgaaaactgaaaatctcaaaaaacgcggagaagatgggcttcatgggattgtgagctgcactgcttgtggacaacaggtcartcattttcaaaaagattccatttatagacacccttcattgcaagttcttatttgtaagaattgctttaagtattacatgagtgatgatattagccgtgac

SEQ ID NO: 45848 - DNA, 201 bp, Homo sapiens
aggatatttcaaagtcagaagctaaactttcaagaaaacaggtagatagtgagcacatgcatcagaatgttccaacagaggaacaaagaacaaataaaagyaccggtggtgaacataagaaatctgatagaaaagaagaacctcaatatgaacctgccaacacttctgaagatttagacatggatattgtgtctgttcctt

SEQ ID NO: 45849 - DNA, 201 bp, Homo sapiens
aaacgtattgctgagagggagcgtgagcgagaaaaattgagagaggtgatagaaattgaagatgcttcacccaccaagtgtccaataacaaccaagttggktttagatgaagatgaagaaaccaaagaacctttagtgcaggttcatagaaatatggttatcaaattgaaaccccatcaagtagatggtgttcagtttatg

SEQ ID NO: 45850 - DNA, 201 bp, Homo sapiens
tgatagaaattgaagatgcttcacccaccaagtgtccaataacaaccaagttggttttagatgaagatgaagaaaccaaagaacctttagtgcaggttcayagaaatatggttatcaaattgaaaccccatcaagtagatggtgttcagtttatgtgggattgctgctgtgagtctgtgaaaaaaacaaagaaatctccag

SEQ ID NO: 45851 - DNA, 201 bp, Homo sapiens
tgcttggaaagagttcaaggaagagacaagattgttcatcatctgatactgagaaatattccatgaaagaagatggttgtaactcttctgataagagactraaaagaatagaattgagggaaagaagaaatttaagttcaaagagaaatactaaggaaatacaaagtggctcatcatcatctgatgctgaggaaagttctg

SEQ ID NO: 45852 - DNA, 201 bp, Homo sapiens
agcaagtgcttccactgatggtgtcgataagctttctgggaaagagcagagttttacttctttggaagttagaaaagttgctgaaactaaagaaaagagcwagcatctcaaaaccaaaacatgtaaaaaagtacaggatggcttatctgatattgcagagaaattcctaaagaaagaccagagcgatgaaacttctgaaga

SEQ ID NO: 45853 - DNA, 201 bp, Homo sapiens
agcaagctgacattacatcctcatcttcttctgatatagaagatgatgatcagaattctataggtgagggaagcagcgatgaacagaaaattaagcctgtsactgaaaatttagtgctgtcttcacatactggattttgccaatcttcaggagatgaagccttatctaaatcagtgcctgtcacagtggatgatgatgatg

SEQ ID NO: 45854 - DNA, 201 bp, Homo sapiens
tgataaagacacgaccatcatggaattaagagatcgacttcctaagaagcagcaagcaagtgcttccactgatggtgtcgataagctttctgggaaagagsagagttttacttctttggaagttagaaaagttgctgaaactaaagaaaagagcaagcatctcaaaaccaaaacatgtaaaaaagtacaggatggcttatc

SEQ ID NO: 45855 - DNA, 201 bp, Homo sapiens
caatgagaagcaaaaatccaggaccttcccaagggaaatcaatgtgattttgcactaaaagcttaatggattgttaaaatcatagaaagatcttttatttytttaggaatcaatgacttaacagaactcaactgtataaatagtttggtccccttaaatgccaatcttccatattagttttactttttttttttttaaata

SEQ ID NO: 45856 - DNA, 201 bp, Homo sapiens
ttaatcaaggaagagaaaaagttgtagaagcaacaaacagtgtgacagcagtgaggattcaacctcttgaggatataatttcagctgtatggaaggagaayatgaatctctcagaggcccaagtacaggcgttagcattaagtagacaagccagccaggagcttgatgttaaacgaagagaagcaatctacaatgatgtat

SEQ ID NO: 45857 - DNA, 201 bp, Homo sapiens
gccaatcttccatattagttttactttttttttttttaaatagggcataccatttcttcctgacatttgtcagtgatgttgcctagaatcttcttacacaygctgagtacagaagatatttcaaattgttttcagtgaaaacaagtccttccataatagtaacaactccacagatttcctctctaaatttttatgcctgct

SEQ ID NO: 45858 - DNA, 201 bp, Homo sapiens
gtgactcttcagaggataaaaagagtaagaatggagcatatggtagagagaagaaaaggtgcaagttgcttggaaagagttcaaggaagagacaagattgytcatcatctgatactgagaaatattccatgaaagaagatggttgtaactcttctgataagagactgaaaagaatagaattgagggaaagaagaaatttaa

SEQ ID NO: 45859 - DNA, 201 bp, Homo sapiens
agaggtgatagaaattgaagatgcttcacccaccaagtgtccaataacaaccaagttggttttagatgaagatgaagaaaccaaagaacctttagtgcagkttcatagaaatatggttatcaaattgaaaccccatcaagtagatggtgttcagtttatgtgggattgctgctgtgagtctgtgaaaaaaacaaagaaatc

SEQ ID NO: 45860 - DNA, 201 bp, Homo sapiens
tcaggatgcattcttgcccactgtatgggccttggtaagactttacaggtggtaagttttcttcatacagttcttttgtgtgacaaactggatttcagcayggcgttagtggtttgtcctcttaatactgctttgaattggatgaatgaatttgagaagtggcaagagggattaaaagatgatgagaagcttgaggtttct

SEQ ID NO: 45861 - DNA, 201 bp, Homo sapiens
gctatagataatcctaagcctaataaattgccaaaatctaagcaatcagagactgtggatcaaaattcagattctgatgaaatgctagcaatcctcaaagrggtgagcaggatgagtcacagttcttcttcagatactgatattaatgaaattcatacaaaccataagactttgtatgatttaaagactcaggcggggaaa

SEQ ID NO: 45862 - DNA, 201 bp, Homo sapiens
accccaagttagagaaatgtggacttggacaggaaaacagtgataatgagcatttggttgaaaatgaagtttcattacttttagaggaatctgatcttcgragatccccacgtgtaaagactacacccttgaggcgaccgacagaaactaaccctgtaacatctaattcagatgaagaatgtaatgaaacagttaaggaga

SEQ ID NO: 45863 - DNA, 201 bp, Homo sapiens
cagcagctacagtgacgactaagactccagtgcatttctatcgtaaccgggcgcgggggagcgcagatcggcgcccagcaatcacagaagccgacaaggcrttcaagcgaaaacatgaccgctgagcccatgagtgaaagcaagttgaatacattggtgcagaagcttcatgacttccttgcacactcatcagaagaatct

SEQ ID NO: 45864 - DNA, 201 bp, Homo sapiens
attaaatatttcttcaaaagacaacagaggaggtattaaatcaaaaactacagctaaagtaacaaaagaattatatgttaaactcactcctgtttcccttyctaattccccaattaaaggtgctgattgtcaggaagttccacaagataaagatggctataaaagttgtggtctgaaccccaagttagagaaatgtggact

SEQ ID NO: 45865 - DNA, 201 bp, Homo sapiens; identical to SEQ ID NO: 45847

SEQ ID NO: 45866 - DNA, 201 bp, Homo sapiens; identical to SEQ ID NO: 45848

SEQ ID NO: 45867 - DNA, 201 bp, Homo sapiens; identical to SEQ ID NO: 45849

SEQ ID NO: 45868 - DNA, 201 bp, Homo sapiens; identical to SEQ ID NO: 45850

SEQ ID NO: 45869 - DNA, 201 bp, Homo sapiens; identical to SEQ ID NO: 45851

SEQ ID NO: 45870 - DNA, 201 bp, Homo sapiens; identical to SEQ ID NO: 45852

SEQ ID NO: 45871 - DNA, 201 bp, Homo sapiens; identical to SEQ ID NO: 45853

SEQ ID NO: 45872 - DNA, 201 bp, Homo sapiens; identical to SEQ ID NO: 45854

SEQ ID NO: 45873 - DNA, 201 bp, Homo sapiens; identical to SEQ ID NO: 45855

SEQ ID NO: 45874 - DNA, 201 bp, Homo sapiens; identical to SEQ ID NO: 45856

SEQ ID NO: 45875 - DNA, 201 bp, Homo sapiens; identical to SEQ ID NO: 45857

SEQ ID NO: 45876 - DNA, 201 bp, Homo sapiens; identical to SEQ ID NO: 45858

SEQ ID NO: 45877 - DNA, 201 bp, Homo sapiens; identical to SEQ ID NO: 45859

SEQ ID NO: 45878 - DNA, 201 bp, Homo sapiens; identical to SEQ ID NO: 45860

SEQ ID NO: 45879 - DNA, 201 bp, Homo sapiens; identical to SEQ ID NO: 45861

SEQ ID NO: 45880 - DNA, 201 bp, Homo sapiens; identical to SEQ ID NO: 45862

SEQ ID NO: 45881 - DNA, 201 bp, Homo sapiens; identical to SEQ ID NO: 45863

SEQ ID NO: 45882 - DNA, 201 bp, Homo sapiens; identical to SEQ ID NO: 45864

SEQ ID NO: 45883 - DNA, 201 bp, Homo sapiens
tctaatgaaaattcagaaaatgatattactatgcagagcttgccaaaagaagatgggcttcatgggattgtgagctgcactgcttgtggacaacaggtcartcattttcaaaaagattccatttatagacacccttcattgcaagttcttatttgtaagaattgctttaagtattacatgagtgatgatattagccgtgac

SEQ ID NO: 45884 - DNA, 201 bp, Homo sapiens; identical to SEQ ID NO: 45848

SEQ ID NO: 45885 - DNA, 201 bp, Homo sapiens; identical to SEQ ID NO: 45849

SEQ ID NO: 45886 - DNA, 201 bp, Homo sapiens; identical to SEQ ID NO: 45850

SEQ ID NO: 45887 - DNA, 201 bp, Homo sapiens; identical to SEQ ID NO: 45851

SEQ ID NO: 45888 - DNA, 201 bp, Homo sapiens; identical to SEQ ID NO: 45852

SEQ ID NO: 45889 - DNA, 201 bp, Homo sapiens; identical to SEQ ID NO: 45853

SEQ ID NO: 45890 - DNA, 201 bp, Homo sapiens; identical to SEQ ID NO: 45854

SEQ ID NO: 45891 - DNA, 201 bp, Homo sapiens; identical to SEQ ID NO: 45855

SEQ ID NO: 45892 - DNA, 201 bp, Homo sapiens; identical to SEQ ID NO: 45856

SEQ ID NO: 45893 - DNA, 201 bp, Homo sapiens; identical to SEQ ID NO: 45857

SEQ ID NO: 45894 - DNA, 201 bp, Homo sapiens; identical to SEQ ID NO: 45858

SEQ ID NO: 45895 - DNA, 201 bp, Homo sapiens; identical to SEQ ID NO: 45859

SEQ ID NO: 45896 - DNA, 201 bp, Homo sapiens; identical to SEQ ID NO: 45860

SEQ ID NO: 45897 - DNA, 201 bp, Homo sapiens; identical to SEQ ID NO: 45861

SEQ ID NO: 45898 - DNA, 201 bp, Homo sapiens; identical to SEQ ID NO: 45862

SEQ ID NO: 45899 - DNA, 201 bp, Homo sapiens; identical to SEQ ID NO: 45863

SEQ ID NO: 45900 - DNA, 201 bp, Homo sapiens; identical to SEQ ID NO: 45864

SEQ ID NO: 45901 - DNA, 201 bp, Homo sapiens; identical to SEQ ID NO: 45847

SEQ ID NO: 45902 - DNA, 201 bp, Homo sapiens; identical to SEQ ID NO: 45848

SEQ ID NO: 45903 - DNA, 201 bp, Homo sapiens; identical to SEQ ID NO: 45849

SEQ ID NO: 45904 - DNA, 201 bp, Homo sapiens; identical to SEQ ID NO: 45850

SEQ ID NO: 45905 - DNA, 201 bp, Homo sapiens; identical to SEQ ID NO: 45851

SEQ ID NO: 45906 - DNA, 201 bp, Homo sapiens; identical to SEQ ID NO: 45852

SEQ ID NO: 45907 - DNA, 201 bp, Homo sapiens; identical to SEQ ID NO: 45853

SEQ ID NO: 45908 - DNA, 201 bp, Homo sapiens; identical to SEQ ID NO: 45854

SEQ ID NO: 45909 - DNA, 201 bp, Homo sapiens; identical to SEQ ID NO: 45855

SEQ ID NO: 45910 - DNA, 201 bp, Homo sapiens; identical to SEQ ID NO: 45856

SEQ ID NO: 45911 - DNA, 201 bp, Homo sapiens; identical to SEQ ID NO: 45857

SEQ ID NO: 45912 - DNA, 201 bp, Homo sapiens; identical to SEQ ID NO: 45858

SEQ ID NO: 45913 - DNA, 201 bp, Homo sapiens; identical to SEQ ID NO: 45859

SEQ ID NO: 45914 - DNA, 201 bp, Homo sapiens; identical to SEQ ID NO: 45860

SEQ ID NO: 45915 - DNA, 201 bp, Homo sapiens; identical to SEQ ID NO: 45861

SEQ ID NO: 45916 - DNA, 201 bp, Homo sapiens; identical to SEQ ID NO: 45862

SEQ ID NO: 45917 - DNA, 201 bp, Homo sapiens; identical to SEQ ID NO: 45863

SEQ ID NO: 45918 - DNA, 201 bp, Homo sapiens; identical to SEQ ID NO: 45864

SEQ ID NO: 45919 - DNA, 201 bp, Homo sapiens; identical to SEQ ID NO: 45847

SEQ ID NO: 45920 - DNA, 201 bp, Homo sapiens; identical to SEQ ID NO: 45848

SEQ ID NO: 45921 - DNA, 201 bp, Homo sapiens; identical to SEQ ID NO: 45849

SEQ ID NO: 45922 - DNA, 201 bp, Homo sapiens; identical to SEQ ID NO: 45850

SEQ ID NO: 45923 - DNA, 201 bp, Homo sapiens; identical to SEQ ID NO: 45851

SEQ ID NO: 45924 - DNA, 201 bp, Homo sapiens; identical to SEQ ID NO: 45852

SEQ ID NO: 45925 - DNA, 201 bp, Homo sapiens; identical to SEQ ID NO: 45853

SEQ ID NO: 45926 - DNA, 201 bp, Homo sapiens; identical to SEQ ID NO: 45854

SEQ ID NO: 45927 - DNA, 201 bp, Homo sapiens; identical to SEQ ID NO: 45855

SEQ ID NO: 45928 - DNA, 201 bp, Homo sapiens; identical to SEQ ID NO: 45856

SEQ ID NO: 45929 - DNA, 201 bp, Homo sapiens; identical to SEQ ID NO: 45857

SEQ ID NO: 45930 - DNA, 201 bp, Homo sapiens; identical to SEQ ID NO: 45858

SEQ ID NO: 45931 - DNA, 201 bp, Homo sapiens; identical to SEQ ID NO: 45859

SEQ ID NO: 45932 - DNA, 201 bp, Homo sapiens; identical to SEQ ID NO: 45860

SEQ ID NO: 45933 - DNA, 201 bp, Homo sapiens; identical to SEQ ID NO: 45861

SEQ ID NO: 45934 - DNA, 201 bp, Homo sapiens; identical to SEQ ID NO: 45862

SEQ ID NO: 45935 - DNA, 201 bp, Homo sapiens; identical to SEQ ID NO: 45864

SEQ ID NO: 45936 - DNA, 201 bp, Homo sapiens; identical to SEQ ID NO: 45847

SEQ ID NO: 45937 - DNA, 201 bp, Homo sapiens; identical to SEQ ID NO: 45848

SEQ ID NO: 45938 - DNA, 201 bp, Homo sapiens; identical to SEQ ID NO: 45849

SEQ ID NO: 45939 - DNA, 201 bp, Homo sapiens; identical to SEQ ID NO: 45850

SEQ ID NO: 45940 - DNA, 201 bp, Homo sapiens; identical to SEQ ID NO: 45851

SEQ ID NO: 45941 - DNA, 201 bp, Homo sapiens; identical to SEQ ID NO: 45852

SEQ ID NO: 45942 - DNA, 201 bp, Homo sapiens; identical to SEQ ID NO: 45853

SEQ ID NO: 45943 - DNA, 201 bp, Homo sapiens; identical to SEQ ID NO: 45854

SEQ ID NO: 45944 - DNA, 201 bp, Homo sapiens; identical to SEQ ID NO: 45855

SEQ ID NO: 45945 - DNA, 201 bp, Homo sapiens; identical to SEQ ID NO: 45856

SEQ ID NO: 45946 - DNA, 201 bp, Homo sapiens; identical to SEQ ID NO: 45857

SEQ ID NO: 45947 - DNA, 201 bp, Homo sapiens; identical to SEQ ID NO: 45858

SEQ ID NO: 45948 - DNA, 201 bp, Homo sapiens; identical to SEQ ID NO: 45859

SEQ ID NO: 45949 - DNA, 201 bp, Homo sapiens; identical to SEQ ID NO: 45860

SEQ ID NO: 45950 - DNA, 201 bp, Homo sapiens; identical to SEQ ID NO: 45861

SEQ ID NO: 45951 - DNA, 201 bp, Homo sapiens; identical to SEQ ID NO: 45862

SEQ ID NO: 45952 - DNA, 201 bp, Homo sapiens; identical to SEQ ID NO: 45863

SEQ ID NO: 45953 - DNA, 201 bp, Homo sapiens; identical to SEQ ID NO: 45864

SEQ ID NO: 45954 - DNA, 201 bp, Homo sapiens
agattttatgtatttctcataggcttcttcactcataagttcatctagttctgaagggttactttggaaagtgtgaaagctgctagtgaactctattctcytttatcagaagtaaccgaaattaatgaagctcttgcagaaaatccaagacttgtaaacaaatcttgttatgaagatggttggctgatcaagatgacactg

SEQ ID NO: 45955 - DNA, 201 bp, Homo sapiens
tagtttccccccgccgccccccatcggtaatgctaaaagttgctattctaagtcttctgtccaccattaatttaagacaactctgctgggttgcgttatttcatactagtttatttaggagttccattttcactcctcaatagattttatgtatttctcataggcttcttcactcataagttcatctagttctgaagggtt

SEQ ID NO: 45956 - DNA, 201 bp, Homo sapiens
caacgttatctttgaattatgtaatttttataaactagtttttaccatggataatttcatgaattctgaacactatagcctagtctaaaaatcataggatwttgtgaaaaagatgcgttattatatttatctataatcattagaaagttaaagggcattttctttcattagcaatgttaacagtagtttccccccgccgcc

SEQ ID NO: 45957 - DNA, 201 bp, Homo sapiens
ttcctcatctgacactgtacaagcaacaaaaacctcttaacttccagttatttccagtggaaagatcattaagtatttcatcccaaatccagtatggatayatgcaagttacaatattacataaggcttaagaataacaacgttatctttgaattatgtaatttttataaactagtttttaccatggataatttcatgaat

SEQ ID NO: 45958 - DNA, 201 bp, Homo sapiens
gtagaaggtaatttactacacttataaaatagtgtgacttttgtgaaaattttgaattagctttcatatgaagtgccttaagtagactcttcatttacttytctggtaatggtttaaatatcatttgttatgcatttttaagatacagttcagaatgacacattgtagtggcaaagataaccaaatgtctggctgtttgct

SEQ ID NO: 45959 - DNA, 201 bp, Homo sapiens
caaattatgctggtccccttatgttgggattgcttttggctgttattggtggacttgtgtatcttcgaagaagtaatatggaatttctctttaataaaacwggatgggcttttgcagctttgtgttttgtgcttgctatgacatctggtcaaatgtggaaccatataagaggaccaccatatgcccataagaatccccaca

SEQ ID NO: 45960 - DNA, 201 bp, Homo sapiens; identical to SEQ ID NO: 45958

SEQ ID NO: 45961 - DNA, 201 bp, Homo sapiens; identical to SEQ ID NO: 45959

SEQ ID NO: 45962 - DNA, 201 bp, Homo sapiens
ccccacactcccaaagacgatgacgcagttcctagagcagggagaggccaccctctcagtggcaagaagagccttggctgcccagttgccagtcctaccayggtcggaggtaaccttcctggctccagtcacatggccagataaggtggtgtgtgtgggcatgaattatgtggaccactgcaaagaacagaacgtgcccgt

SEQ ID NO: 45963 - DNA, 201 bp, Homo sapiens
gtggtcattggaaagaaaggcaagcacatcaaggccacagatgccatggcccacgtggccggcttcactgtggctcatgacgtgagtgctcgtgactggcwaacaagacgcaatgggaaacagtggctgctgggaaaaaccttcgacaccttctgccctctgggccctgccttggtgaccaaggacagtgtagcagatcca

SEQ ID NO: 45964 - DNA, 201 bp, Homo sapiens
cttggcttgtgctgtttgtcttcttttgggctttgtttcatggaacaagttggggcattttgtgggactggggaagaagagagcaaatacacacacatacrccaaaaagatgctgctgggctggggaaaagacaactcgtctcgtccccttgtttatcacatcaaaggagggaaaaagcaagagatggcaagggacaatca

SEQ ID NO: 45965 - DNA, 201 bp, Homo sapiens
gaaagaaaggcaagcacatcaaggccacagatgccatggcccacgtggccggcttcactgtggctcatgacgtgagtgctcgtgactggctaacaagacgyaatgggaaacagtggctgctgggaaaaaccttcgacaccttctgccctctgggccctgccttggtgaccaaggacagtgtagcagatccacacaacttaa

SEQ ID NO: 45966 - DNA, 201 bp, Homo sapiens
ctggggaagaagagagcaaatacacacacatacgccaaaaagatgctgctgggctggggaaaagacaactcgtctcgtccccttgtttatcacatcaaagragggaaaaagcaagagatggcaagggacaatcaagcctcaatgattatatttatagagcagctaagggtttgcagcctcctctccatcttctggctctag

SEQ ID NO: 45967 - DNA, 201 bp, Homo sapiens
tcattggaaagaaaggcaagcacatcaaggccacagatgccatggcccacgtggccggcttcactgtggctcatgacgtgagtgctcgtgactggctaacragacgcaatgggaaacagtggctgctgggaaaaaccttcgacaccttctgccctctgggccctgccttggtgaccaaggacagtgtagcagatccacaca

SEQ ID NO: 45968 - DNA, 201 bp, Homo sapiens
agcacatcaaggccacagatgccatggcccacgtggccggcttcactgtggctcatgacgtgagtgctcgtgactggctaacaagacgcaatgggaaacartggctgctgggaaaaaccttcgacaccttctgccctctgggccctgccttggtgaccaaggacagtgtagcagatccacacaacttaaagatctgctgcc

SEQ ID NO: 45969 - DNA, 201 bp, Homo sapiens
gtcattggaaagaaaggcaagcacatcaaggccacagatgccatggcccacgtggccggcttcactgtggctcatgacgtgagtgctcgtgactggctaayaagacgcaatgggaaacagtggctgctgggaaaaaccttcgacaccttctgccctctgggccctgccttggtgaccaaggacagtgtagcagatccacac

SEQ ID NO: 45970 - DNA, 201 bp, Homo sapiens
ccttcgacaccttctgccctctgggccctgccttggtgaccaaggacagtgtagcagatccacacaacttaaagatctgctgccgagtgaatggggaagtsgtccagagcagcaacaccaaccagatggtattcaagacagaggacctgatagcctgggtctcccagtttgttaccttttacccaggggatgtcatcctaa

SEQ ID NO: 45971 - DNA, 201 bp, Homo sapiens
cttctgccctctgggccctgccttggtgaccaaggacagtgtagcagatccacacaacttaaagatctgctgccgagtgaatggggaagtcgtccagagcrgcaacaccaaccagatggtattcaagacagaggacctgatagcctgggtctcccagtttgttaccttttacccaggggatgtcatcctaactgggacccc

SEQ ID NO: 45972 - DNA, 201 bp, Homo sapiens
agagcagggagaggccaccctctcagtggcaagaagagccttggctgcccagttgccagtcctaccatggtcggaggtaaccttcctggctccagtcacayggccagataaggtggtgtgtgtgggcatgaattatgtggaccactgcaaagaacagaacgtgcccgtgcccaaggagcccatcatcttcagcaagtttgc

SEQ ID NO: 45973 - DNA, 201 bp, Homo sapiens
ctgtgttctggggctgagaagtctcagcacaggctcctcctcacagttctagctacaaatgaactgccggatgaactgttctagtttttcctgattgtccwggctggcaaaagtaggggataggtggagcctggggcctgcagggctcggcgtctgctgcagaacctgggccatggaagatgcgccatgagtgcgctcacc

SEQ ID NO: 45974 - DNA, 201 bp, Homo sapiens
agcagggagaggccaccctctcagtggcaagaagagccttggctgcccagttgccagtcctaccatggtcggaggtaaccttcctggctccagtcacatgrccagataaggtggtgtgtgtgggcatgaattatgtggaccactgcaaagaacagaacgtgcccgtgcccaaggagcccatcatcttcagcaagtttgcca

SEQ ID NO: 45975 - DNA, 196 bp, Homo sapiens
gtggagcctggggcctgcagggctcggcgtctgctgcagaacctgggccatggaagatgcgccatgagtgcgctcaccacagggactgtgtctgcatggcycaggggccaggcctgtcccccagaaacctgccttgagacctctggccccttagacctcagtgtttgcatgcaaatgctgccgcaaagcagcccca

SEQ ID NO: 45976 - DNA, 201 bp, Homo sapiens
gtctcagcacaggctcctcctcacagttctagctacaaatgaactgccggatgaactgttctagtttttcctgattgtcctggctggcaaaagtaggggayaggtggagcctggggcctgcagggctcggcgtctgctgcagaacctgggccatggaagatgcgccatgagtgcgctcaccacagggactgtgtctgcatg

SEQ ID NO: 45977 - DNA, 201 bp, Homo sapiens
caacaaggtggtgtgatggctcctgcacaggcccgacataggatgagggcatctgctcccactcagcctagcccagggaaaggcccagtggcaggtgtggrcaggtgccagccctgcaagccgcctcttctcggtagaagggagaaggacagagctctcttcaataaatgcgtcgggtcaaagcagcagcttggcttgtgc

SEQ ID NO: 45978 - DNA, 201 bp, Homo sapiens
gtgtcatcatcaacaaggtggtgtgatggctcctgcacaggcccgacataggatgagggcatctgctcccactcagcctagcccagggaaaggcccagtgrcaggtgtgggcaggtgccagccctgcaagccgcctcttctcggtagaagggagaaggacagagctctcttcaataaatgcgtcgggtcaaagcagcagct

SEQ ID NO: 45979 - DNA, 201 bp, Homo sapiens; identical to SEQ ID NO: 45962

SEQ ID NO: 45980 - DNA, 201 bp, Homo sapiens; identical to SEQ ID NO: 45963

SEQ ID NO: 45981 - DNA, 201 bp, Homo sapiens; identical to SEQ ID NO: 45964

SEQ ID NO: 45982 - DNA, 201 bp, Homo sapiens; identical to SEQ ID NO: 45965

SEQ ID NO: 45983 - DNA, 201 bp, Homo sapiens; identical to SEQ ID NO: 45966

SEQ ID NO: 45984 - DNA, 201 bp, Homo sapiens; identical to SEQ ID NO: 45967

SEQ ID NO: 45985 - DNA, 201 bp, Homo sapiens; identical to SEQ ID NO: 45968

SEQ ID NO: 45986 - DNA, 201 bp, Homo sapiens; identical to SEQ ID NO: 45969

SEQ ID NO: 45987 - DNA, 201 bp, Homo sapiens; identical to SEQ ID NO: 45970

SEQ ID NO: 45988 - DNA, 201 bp, Homo sapiens; identical to SEQ ID NO: 45971

SEQ ID NO: 45989 - DNA, 201 bp, Homo sapiens; identical to SEQ ID NO: 45972

SEQ ID NO: 45990 - DNA, 201 bp, Homo sapiens; identical to SEQ ID NO: 45973

SEQ ID NO: 45991 - DNA, 201 bp, Homo sapiens; identical to SEQ ID NO: 45974

SEQ ID NO: 45992 - DNA, 196 bp, Homo sapiens; identical to SEQ ID NO: 45975

SEQ ID NO: 45993 - DNA, 201 bp, Homo sapiens; identical to SEQ ID NO: 45976

SEQ ID NO: 45994 - DNA, 201 bp, Homo sapiens; identical to SEQ ID NO: 45977

SEQ ID NO: 45995 - DNA, 201 bp, Homo sapiens; identical to SEQ ID NO: 45978

SEQ ID NO: 45996 - DNA, 201 bp, Homo sapiens; identical to SEQ ID NO: 45962

SEQ ID NO: 45997 - DNA, 201 bp, Homo sapiens; identical to SEQ ID NO: 45963

SEQ ID NO: 45998 - DNA, 201 bp, Homo sapiens; identical to SEQ ID NO: 45964

SEQ ID NO: 45999 - DNA, 201 bp, Homo sapiens; identical to SEQ ID NO: 45965

SEQ ID NO: 46000 - DNA, 201 bp, Homo sapiens; identical to SEQ ID NO: 45966

SEQ ID NO: 46001 - DNA, 201 bp, Homo sapiens; identical to SEQ ID NO: 45967

SEQ ID NO: 46002 - DNA, 201 bp, Homo sapiens; identical to SEQ ID NO: 45968

SEQ ID NO: 46003 - DNA, 201 bp, Homo sapiens; identical to SEQ ID NO: 45969

SEQ ID NO: 46004 - DNA, 201 bp, Homo sapiens; identical to SEQ ID NO: 45970

SEQ ID NO: 46005 - DNA, 201 bp, Homo sapiens; identical to SEQ ID NO: 45971

SEQ ID NO: 46006 - DNA, 201 bp, Homo sapiens; identical to SEQ ID NO: 45972

SEQ ID NO: 46007 - DNA, 201 bp, Homo sapiens; identical to SEQ ID NO: 45973

SEQ ID NO: 46008 - DNA, 201 bp, Homo sapiens; identical to SEQ ID NO: 45974

SEQ ID NO: 46009 - DNA, 196 bp, Homo sapiens; identical to SEQ ID NO: 45975

SEQ ID NO: 46010 - DNA, 201 bp, Homo sapiens; identical to SEQ ID NO: 45976

SEQ ID NO: 46011 - DNA, 201 bp, Homo sapiens; identical to SEQ ID NO: 45977

SEQ ID NO: 46012 - DNA, 201 bp, Homo sapiens; identical to SEQ ID NO: 45978

SEQ ID NO: 46013 - DNA, 201 bp, Homo sapiens; identical to SEQ ID NO: 45962

SEQ ID NO: 46014 - DNA, 201 bp, Homo sapiens; identical to SEQ ID NO: 45963

SEQ ID NO: 46015 - DNA, 201 bp, Homo sapiens; identical to SEQ ID NO: 45964

SEQ ID NO: 46016 - DNA, 201 bp, Homo sapiens; identical to SEQ ID NO: 45965

SEQ ID NO: 46017 - DNA, 201 bp, Homo sapiens; identical to SEQ ID NO: 45966

SEQ ID NO: 46018 - DNA, 201 bp, Homo sapiens; identical to SEQ ID NO: 45967

SEQ ID NO: 46019 - DNA, 201 bp, Homo sapiens; identical to SEQ ID NO: 45968

SEQ ID NO: 46020 - DNA, 201 bp, Homo sapiens; identical to SEQ ID NO: 45969

SEQ ID NO: 46021 - DNA, 201 bp, Homo sapiens; identical to SEQ ID NO: 45970

SEQ ID NO: 46022 - DNA, 201 bp, Homo sapiens; identical to SEQ ID NO: 45971

SEQ ID NO: 46023 - DNA, 201 bp, Homo sapiens; identical to SEQ ID NO: 45972

SEQ ID NO: 46024 - DNA, 201 bp, Homo sapiens; identical to SEQ ID NO: 45973

SEQ ID NO: 46025 - DNA, 201 bp, Homo sapiens; identical to SEQ ID NO: 45974

SEQ ID NO: 46026 - DNA, 196 bp, Homo sapiens; identical to SEQ ID NO: 45975

SEQ ID NO: 46027 - DNA, 201 bp, Homo sapiens; identical to SEQ ID NO: 45976

SEQ ID NO: 46028 - DNA, 201 bp, Homo sapiens; identical to SEQ ID NO: 45977

SEQ ID NO: 46029 - DNA, 201 bp, Homo sapiens; identical to SEQ ID NO: 45978

SEQ ID NO: 46030 - DNA, 201 bp, Homo sapiens
gacttccggcagcagctgctggcctgtgctggggtggaagctgagcgcgtggtggagttttcctgtggtcacgtgatccctccagacaacatctgcccctygtcatctgcagcgggatctccaaccagccgctggaattcacgttccagaaaagagacctgcctcagatgatggacgaggtgggtcgcatcctctgtaacc

SEQ ID NO: 46031 - DNA, 201 bp, Homo sapiens
accagcttccccactgatgcacatcgaaggcttcctggcagctctcactacggccaaccaggacggcagggtcatcctgagccgccaaggcagcctcagtsagagcaccctgaagtttttgctcctgaatccagctgtgcactttgcccaagtggtgaaggaatgccgggcagtggtcattgcggggggtaccatgcagcc

SEQ ID NO: 46032 - DNA, 201 bp, Homo sapiens
ttcagcaattcctgcagagcctgcagcccaggacgactgaagctcttgcagcccctgcagacgagagtcaggccagcgtcccgcaaccagcttccccactratgcacatcgaaggcttcctggcagctctcactacggccaaccaggacggcagggtcatcctgagccgccaaggcagcctcagtgagagcaccctgaagt

SEQ ID NO: 46033 - DNA, 201 bp, Homo sapiens
gcagagctgcaggagaagatggcctacttggatcaaaccctcgcagggccatcaggcaccagaaggattttgccagcatagtgctcctggaccagcgataygcccggccccctgtcctggccaagctgccggcctggatccgagcccgcgtggaggtcaaagctacctttggccccgccattgctgctgtgcagaagtttc

SEQ ID NO: 46034 - DNA, 201 bp, Homo sapiens
ggccatcaggcaccagaaggattttgccagcatagtgctcctggaccagcgatacgcccggccccctgtcctggccaagctgccggcctggatccgagccmgcgtggaggtcaaagctacctttggccccgccattgctgctgtgcagaagtttcaccgggagaagtcggcctcttcctgatgggcaaccacaccaccgcc

SEQ ID NO: 46035 - DNA, 201 bp, Homo sapiens
tcccgtggccacagggctcctgcccaggggcttgtcaccttcccctcctccttcctgagtcactccttcagtagaaggccctgctctctatcctgccccayagccctgcctggatttgtatccttggcttcgtgccagttcctccaagtctatggcacctccctccctctcaaccacttgagcaaactccaagacaccttc

SEQ ID NO: 46036 - DNA, 201 bp, Homo sapiens
gttccagggcagctcccctcctggaatagaatctttctttccatcctgcatggctgagagccaggcttcctgcttggagtccgcaggaggctgtggcagcwgtggcatccactgtggcatctccgtcctgcccaccttaagaggtgagatggagcaggtccatctgcctctgccctttctagccaaggttatagctgccct

SEQ ID NO: 46037 - DNA, 201 bp, Homo sapiens
cagtgtttgtcgtgggcgtggtctgcagggatcctgttacaaaggtgaaacccaggaggagagtgtggagtccagagcgctgccaggacccaggcacaggygttagctcccgtaggagaaaatgcgggaatcctgaatgaacagtgggtcctggctgtccttggggcgttccagggcagctcccctcctggaatagaatct

SEQ ID NO: 46038 - DNA, 201 bp, Homo sapiens
aggtgaagaagagcccctttggcaaggatgttcggctggtctccctcggctcccagcagagaagaagaaaggagctgaggaggagaagccaaagaggaggmggcaggagaagcaggcagcctgccccttctacaaccacgagcagatgggccttctccgggatgaggccctggcagaggtgaaggacatggagcagctgct

SEQ ID NO: 46039 - DNA, 201 bp, Homo sapiens
gatctccaaccagccgctggaattcacgttccagaaaagagacctgcctcagatgatggacgaggtgggtcgcatcctctgtaacctgtgcggtgtggttyctggaggggtggtctgtttcttcccctcctacgagtacctgcgccaggtccatgcccactgggagaagggtggcctgctgggccgtctggctgccaggaa

SEQ ID NO: 46040 - DNA, 201 bp, Homo sapiens
tcctgccctctggagacagtgtttgtcgtgggcgtggtctgcagggatcctgttacaaaggtgaaacccaggaggagagtgtggagtccagagcgctgccrggacccaggcacaggcgttagctcccgtaggagaaaatgcgggaatcctgaatgaacagtgggtcctggctgtccttggggcgttccagggcagctcccc

SEQ ID NO: 46041 - DNA, 201 bp, Homo sapiens
gagcgcgtggtggagttttcctgtggtcacgtgatccctccagacaacatctgccccttgtcatctgcagcgggatctccaaccagccgctggaattcacsttccagaaaagagacctgcctcagatgatggacgaggtgggtcgcatcctctgtaacctgtgcggtgtggtttctggaggggtggtctgtttcttcccct

SEQ ID NO: 46042 - DNA, 201 bp, Homo sapiens
ggtttcagcaattcctgcagagcctgcagcccaggacgactgaagctcttgcagcccctgcagacgagagtcaggccagcgtcccgcaaccagcttccccrctgatgcacatcgaaggcttcctggcagctctcactacggccaaccaggacggcagggtcatcctgagccgccaaggcagcctcagtgagagcaccctga

SEQ ID NO: 46043 - DNA, 201 bp, Homo sapiens
tcactgaacggtacggagcagtgttctcatcccgggagcagcccaaactggctgggtttcagcaattcctgcagagcctgcagcccaggacgactgaagcwcttgcagcccctgcagacgagagtcaggccagcgtcccgcaaccagcttccccactgatgcacatcgaaggcttcctggcagctctcactacggccaacc

SEQ ID NO: 46044 - DNA, 201 bp, Homo sapiens
ctgccccttctacaaccacgagcagatgggccttctccgggatgaggccctggcagaggtgaaggacatggagcagctgctggcccttgggaaggaggccmgggcctgtccctattacaggagccgccttgccatccctgcagcccagctggtggtgctgccctatcagatgctgctgcatgcggccactcggcaggctgc

SEQ ID NO: 46045 - DNA, 201 bp, Homo sapiens
tgccctttctagccaaggttatagctgccctggactgctcactctctggtctcaatttaaaatgatcccgtggccacagggctcctgcccaggggcttgtyaccttcccctcctccttcctgagtcactccttcagtagaaggccctgctctctatcctgccccacagccctgcctggatttgtatccttggcttcgtgcc

SEQ ID NO: 46046 - DNA, 201 bp, Homo sapiens
atctgccccttgtcatctgcagcgggatctccaaccagccgctggaattcacgttccagaaaagagacctgcctcagatgatggacgaggtgggtcgcatyctctgtaacctgtgcggtgtggtttctggaggggtggtctgtttcttcccctcctacgagtacctgcgccaggtccatgcccactgggagaagggtggcc

SEQ ID NO: 46047 - DNA, 201 bp, Homo sapiens
tggagcagctgctggcccttgggaaggaggcccgggcctgtccctattacaggagccgccttgccatccctgcagcccagctggtggtgctgccctatcaratgctgctgcatgcggccactcggcaggctgcgggcatccggctgcaggaccaggtggtgatcatcgacgaggcgcacaacctgatcgacaccatcacgg

SEQ ID NO: 46048 - DNA, 201 bp, Homo sapiens
caggccaggaggaagcagcgagaagaacgcctgcagcagctgcagcacagggtgcagctcaagtatgcagccaagcgcctgaggcaggaagaagaagaaasagagaatctcctccgcctcagcagggagatgctagagacaggcccggaggctgagcggctggagcagctggagtctggggaggaggagctggtcctcgcc

SEQ ID NO: 46049 - DNA, 201 bp, Homo sapiens
gaaggggctgcaggcaccccgaggcctgctggagaaccggcctgggttactcagtttgtgcagaagaaagaagagagggacctggtgaaccgactgaaggyggagcaggccaggaggaagcagcgagaagaacgcctgcagcagctgcagcacagggtgcagctcaagtatgcagccaagcgcctgaggcaggaagaagaa

SEQ ID NO: 46050 - DNA, 201 bp, Homo sapiens
caggcctgtggccaggagagaggccaggtgacagaggccctgctcctctctgtggttggaggaaagatgagtgaagggatcaacttctctgacaacctaggccggtgtgtggtgatggtgggcatgcccttccccaacatcaggtctgcagagctgcaggagaagatggcctacttggatcaaaccctcgcagggccatca

SEQ ID NO: 46051 - DNA, 201 bp, Homo sapiens
ctaagagcgcacaccaggtggagcaggtgctgctggcgtattccaggtgcatccaggcctgtggccaggagagaggccaggtgacagaggccctgctcctytctgtggttggaggaaagatgagtgaagggatcaacttctctgacaacctaggccggtgtgtggtgatggtgggcatgcccttccccaacatcaggtctg

SEQ ID NO: 46052 - DNA, 201 bp, Homo sapiens
ggccctggcagaggtgaaggacatggagcagctgctggcccttgggaaggaggcccgggcctgtccctattacaggagccgccttgccatccctgcagccmagctggtggtgctgccctatcagatgctgctgcatgcggccactcggcaggctgcgggcatccggctgcaggaccaggtggtgatcatcgacgaggcgca

SEQ ID NO: 46053 - DNA, 201 bp, Homo sapiens
cgagcagatgggccttctccgggatgaggccctggcagaggtgaaggacatggagcagctgctggcccttgggaaggaggcccgggcctgtccctattacrggagccgccttgccatccctgcagcccagctggtggtgctgccctatcagatgctgctgcatgcggccactcggcaggctgcgggcatccggctgcagga

SEQ ID NO: 46054 - DNA, 201 bp, Homo sapiens
ccttgggaaggaggcccgggcctgtccctattacaggagccgccttgccatccctgcagcccagctggtggtgctgccctatcagatgctgctgcatgcgrccactcggcaggctgcgggcatccggctgcaggaccaggtggtgatcatcgacgaggcgcacaacctgatcgacaccatcacgggcatgcacagcgtgga

SEQ ID NO: 46055 - DNA, 201 bp, Homo sapiens
atgcggccactcggcaggctgcgggcatccggctgcaggaccaggtggtgatcatcgacgaggcgcacaacctgatcgacaccatcacgggcatgcacagmgtggaggtcagcggctcccagctctgccaggcccattcccagctgctgcagtacatggagcgatacgggaagcgtttgaaggccaagaacctgatgtacc

SEQ ID NO: 46056 - DNA, 110 bp, Homo sapiens
atcttctgccaccatcagggacaaaccgggggcaggaggaaagtcactgatgcccagctgtttgcatcctgcacagctacaggtccttaattaaaagtgtrctgttggtt

SEQ ID NO: 46057 - DNA, 201 bp, Homo sapiens
aagagcccctttggcaaggatgttcggctggtctccctcggctcccagcagagaagaagaaaggagctgaggaggagaagccaaagaggaggaggcaggaraagcaggcagcctgccccttctacaaccacgagcagatgggccttctccgggatgaggccctggcagaggtgaaggacatggagcagctgctggcccttg

SEQ ID NO: 46058 - DNA, 201 bp, Homo sapiens
agcaattcctgcagagcctgcagcccaggacgactgaagctcttgcagcccctgcagacgagagtcaggccagcgtcccgcaaccagcttccccactgatkcacatcgaaggcttcctggcagctctcactacggccaaccaggacggcagggtcatcctgagccgccaaggcagcctcagtgagagcaccctgaagtttt

SEQ ID NO: 46059 - DNA, 201 bp, Homo sapiens
cctgcagagcctgcagcccaggacgactgaagctcttgcagcccctgcagacgagagtcaggccagcgtcccgcaaccagcttccccactgatgcacatcsaaggcttcctggcagctctcactacggccaaccaggacggcagggtcatcctgagccgccaaggcagcctcagtgagagcaccctgaagtttttgctcct

SEQ ID NO: 46060 - DNA, 201 bp, Homo sapiens
cctgcatggctgagagccaggcttcctgcttggagtccgcaggaggctgtggcagcagtggcatccactgtggcatctccgtcctgcccaccttaagaggygagatggagcaggtccatctgcctctgccctttctagccaaggttatagctgccctggactgctcactctctggtctcaatttaaaatgatcccgtggcc

SEQ ID NO: 46061 - DNA, 201 bp, Homo sapiens
tattactgtagtcggacacactcccagctggcccagtttgtgcatgaggtgaagaagagcccctttggcaaggatgttcggctggtctccctcggctcccrgcagagaagaagaaaggagctgaggaggagaagccaaagaggaggaggcaggagaagcaggcagcctgccccttctacaaccacgagcagatgggccttc

SEQ ID NO: 46062 - DNA, 201 bp, Homo sapiens
gaaggacatggagcagctgctggcccttgggaaggaggcccgggcctgtccctattacaggagccgccttgccatccctgcagcccagctggtggtgctgycctatcagatgctgctgcatgcggccactcggcaggctgcgggcatccggctgcaggaccaggtggtgatcatcgacgaggcgcacaacctgatcgacac

SEQ ID NO: 46063 - DNA, 201 bp, Homo sapiens
agaggtgagatggagcaggtccatctgcctctgccctttctagccaaggttatagctgccctggactgctcactctctggtctcaatttaaaatgatcccrtggccacagggctcctgcccaggggcttgtcaccttcccctcctccttcctgagtcactccttcagtagaaggccctgctctctatcctgccccacagcc

SEQ ID NO: 46064 - DNA, 201 bp, Homo sapiens
gcagcctcagtgagagcaccctgaagtttttgctcctgaatccagctgtgcactttgcccaagtggtgaaggaatgccgggcagtggtcattgcggggggkaccatgcagccggtgtctgacttccggcagcagctgctggcctgtgctggggtggaagctgagcgcgtggtggagttttcctgtggtcacgtgatccctc

SEQ ID NO: 46065 - DNA, 201 bp, Homo sapiens
cctgcgaaggggctgcaggcaccccgaggcctgctggagaaccggcctgggttactcagtttgtgcagaagaaagaagagagggacctggtgaaccgactraaggcggagcaggccaggaggaagcagcgagaagaacgcctgcagcagctgcagcacagggtgcagctcaagtatgcagccaagcgcctgaggcaggaag

SEQ ID NO: 46066 - DNA, 201 bp, Homo sapiens
gggcctgtccctattacaggagccgccttgccatccctgcagcccagctggtggtgctgccctatcagatgctgctgcatgcggccactcggcaggctgcvggcatccggctgcaggaccaggtggtgatcatcgacgaggcgcacaacctgatcgacaccatcacgggcatgcacagcgtggaggtcagcggctcccagc

SEQ ID NO: 46067 - DNA, 201 bp, Homo sapiens
agccaggcttcctgcttggagtccgcaggaggctgtggcagcagtggcatccactgtggcatctccgtcctgcccaccttaagaggtgagatggagcaggyccatctgcctctgccctttctagccaaggttatagctgccctggactgctcactctctggtctcaatttaaaatgatcccgtggccacagggctcctgcc

SEQ ID NO: 46068 - DNA, 201 bp, Homo sapiens
atggagacctttgttcctgtgggaaaataaccctcccacctgcaacagctgcccctgctgactgcgcctgtcttctccctctgaccccagagaaaggggcygtggtcagctgggatcttctgccaccatcagggacaaaccgggggcaggaggaaagtcactgatgcccagctgtttgcatcctgcacagctacaggtcct

SEQ ID NO: 46069 - DNA, 201 bp, Homo sapiens
cccgggcctgtccctattacaggagccgccttgccatccctgcagcccagctggtggtgctgccctatcagatgctgctgcatgcggccactcggcaggcygcgggcatccggctgcaggaccaggtggtgatcatcgacgaggcgcacaacctgatcgacaccatcacgggcatgcacagcgtggaggtcagcggctccc

SEQ ID NO: 46070 - DNA, 201 bp, Homo sapiens
caattatgccaagggccattaggctctcaacatgactatagagaccccgtatcatcatggagacctttgttcctgtgggaaaataaccctcccacctgcarcagctgcccctgctgactgcgcctgtcttctccctctgaccccagagaaaggggccgtggtcagctgggatcttctgccaccatcagggacaaaccgggg

SEQ ID NO: 46071 - DNA, 201 bp, Homo sapiens
tcctgtatttgctggagaaattcgtggctgtgctaggggggaacattaagcaaaatcccaatacacagagtctgtcacagacagggacggagctgaagacyatcaacgactttctcttccagagccagatcgacaacatcaacctgttcaaggtgcagcgatactgtgagaagagcatgatcagcagaaagctctttggct

SEQ ID NO: 46072 - DNA, 201 bp, Homo sapiens
ctaccccgacaccagcaattatgccaagggccattaggctctcaacatgactatagagaccccgtatcatcatggagacctttgttcctgtgggaaaatawccctcccacctgcaacagctgcccctgctgactgcgcctgtcttctccctctgaccccagagaaaggggccgtggtcagctgggatcttctgccaccatc

SEQ ID NO: 46073 - DNA, 201 bp, Homo sapiens
cctggctgtccttggggcgttccagggcagctcccctcctggaatagaatctttctttccatcctgcatggctgagagccaggcttcctgcttggagtccrcaggaggctgtggcagcagtggcatccactgtggcatctccgtcctgcccaccttaagaggtgagatggagcaggtccatctgcctctgccctttctagc

SEQ ID NO: 46074 - DNA, 201 bp, Homo sapiens
tgggtcctggctgtccttggggcgttccagggcagctcccctcctggaatagaatctttctttccatcctgcatggctgagagccaggcttcctgcttggwgtccgcaggaggctgtggcagcagtggcatccactgtggcatctccgtcctgcccaccttaagaggtgagatggagcaggtccatctgcctctgcccttt

SEQ ID NO: 46075 - DNA, 201 bp, Homo sapiens
tatcagatgctgctgcatgcggccactcggcaggctgcgggcatccggctgcaggaccaggtggtgatcatcgacgaggcgcacaacctgatcgacaccaycacgggcatgcacagcgtggaggtcagcggctcccagctctgccaggcccattcccagctgctgcagtacatggagcgatacgggaagcgtttgaaggcc

SEQ ID NO: 46076 - DNA, 201 bp, Homo sapiens
gaacagtgggtcctggctgtccttggggcgttccagggcagctcccctcctggaatagaatctttctttccatcctgcatggctgagagccaggcttcctkcttggagtccgcaggaggctgtggcagcagtggcatccactgtggcatctccgtcctgcccaccttaagaggtgagatggagcaggtccatctgcctctg

SEQ ID NO: 46077 - DNA, 201 bp, Homo sapiens
gatgctgctgcatgcggccactcggcaggctgcgggcatccggctgcaggaccaggtggtgatcatcgacgaggcgcacaacctgatcgacaccatcacgrgcatgcacagcgtggaggtcagcggctcccagctctgccaggcccattcccagctgctgcagtacatggagcgatacgggaagcgtttgaaggccaagaa

SEQ ID NO: 46078 - DNA, 201 bp, Homo sapiens
gccaaggcagcctcagtgagagcaccctgaagtttttgctcctgaatccagctgtgcactttgcccaagtggtgaaggaatgccgggcagtggtcattgcsgggggtaccatgcagccggtgtctgacttccggcagcagctgctggcctgtgctggggtggaagctgagcgcgtggtggagttttcctgtggtcacgtga

SEQ ID NO: 46079 - DNA, 201 bp, Homo sapiens
tgaatgaacagtgggtcctggctgtccttggggcgttccagggcagctcccctcctggaatagaatctttctttccatcctgcatggctgagagccaggcytcctgcttggagtccgcaggaggctgtggcagcagtggcatccactgtggcatctccgtcctgcccaccttaagaggtgagatggagcaggtccatctgc

SEQ ID NO: 46080 - DNA, 201 bp, Homo sapiens
cacgggcatgcacagcgtggaggtcagcggctcccagctctgccaggcccattcccagctgctgcagtacatggagcgatacgggaagcgtttgaaggccragaacctgatgtacctgaagcagatcctgtatttgctggagaaattcgtggctgtgctaggggggaacattaagcaaaatcccaatacacagagtctgtc

SEQ ID NO: 46081 - DNA, 201 bp, Homo sapiens
cactacggccaaccaggacggcagggtcatcctgagccgccaaggcagcctcagtgagagcaccctgaagtttttgctcctgaatccagctgtgcactttscccaagtggtgaaggaatgccgggcagtggtcattgcggggggtaccatgcagccggtgtctgacttccggcagcagctgctggcctgtgctggggtgga

SEQ ID NO: 46082 - DNA, 201 bp, Homo sapiens
gcagggatcctgttacaaaggtgaaacccaggaggagagtgtggagtccagagcgctgccaggacccaggcacaggcgttagctcccgtaggagaaaatgsgggaatcctgaatgaacagtgggtcctggctgtccttggggcgttccagggcagctcccctcctggaatagaatctttctttccatcctgcatggctgag

SEQ ID NO: 46083 - DNA, 201 bp, Homo sapiens
ctttgtgtaaatgaagacgtgagaagcctaggttctgtgcagcttatcaacgaccgctgcgtggacatgcagagaagcaggcacggtagccaccaggaccrtggtgtagccgcaggtggtctggagagagtgaggcaggggtggcagtgactgaagaccattcagtgtctttcatagaaagaatggcagaggagaccccag

SEQ ID NO: 46084 - DNA, 201 bp, Homo sapiens
cagaacctttgtgtaaatgaagacgtgagaagcctaggttctgtgcagcttatcaacgaccgctgcgtggacatgcagagaagcaggcacggtagccaccrggaccatggtgtagccgcaggtggtctggagagagtgaggcaggggtggcagtgactgaagaccattcagtgtctttcatagaaagaatggcagaggaga

SEQ ID NO: 46085 - DNA, 201 bp, Homo sapiens
ctggcctggccggcccatcactggaaggcaaaggagaggtggcgggggcaggtccacgtgtgttggtaggatgtcatttagctggcaccatctctttgccyctttctttctcctttgttgcagaacctttgtgtaaatgaagacgtgagaagcctaggttctgtgcagcttatcaacgaccgctgcgtggacatgcagaga

SEQ ID NO: 46086 - DNA, 201 bp, Homo sapiens
agtcccctctccttgggaaaaagtgttcctactctctgggtgagcgtctggtccgaatcgttggcttggagatgattttacgggctctttctggagaacaraagtaaaacgttacagtgttccgatgagacacagtaggcagtacttgggagggtcttatagaccccaccctgtggaagtgggtctcaacattacacaacc

SEQ ID NO: 46087 - DNA, 201 bp, Homo sapiens
tattactgtagtcggacacactcccagctggcccagtttgtgcatgaggtgaagaagagcccctttggcaaggatgttcggctggtctccctcggctcccrgcaggtaaacagtagccagtatttccaccaggggccatcctgctcctttccccacaactttgtcctgctcgtccaggcctgggagacgctgggtctgtga

SEQ ID NO: 46088 - DNA, 201 bp, Homo sapiens
ggacatgcagagaagcaggcacggtagccaccaggaccatggtgtagccgcaggtggtctggagagagtgaggcaggggtggcagtgactgaagaccattmagtgtctttcatagaaagaatggcagaggagaccccagttcctccctgagtcccctctccttgggaaaaagtgttcctactctctgggtgagcgtctggt

SEQ ID NO: 46089 - DNA, 201 bp, Homo sapiens
ggcccgtggacagttgctgtcctctctgttttctctctttgtgcctgtgccaccctcagagaagaagaaaggagctgaggaggagaagccaaagaggaggmggcaggagaagcaggcagcctgccccttctacaaccacgagcagatgggccttctccgggatgaggccctggcagaggtgaaggacatggagcagctgct

SEQ ID NO: 46090 - DNA, 201 bp, Homo sapiens
aagaagagcccctttggcaaggatgttcggctggtctccctcggctcccagcaggtaaacagtagccagtatttccaccaggggccatcctgctcctttcsccacaactttgtcctgctcgtccaggcctgggagacgctgggtctgtgacaggctgaaccgtgtgaggagcagccccctccctggcctggccggcccatc

SEQ ID NO: 46091 - DNA, 201 bp, Homo sapiens; identical to SEQ ID NO: 46065

SEQ ID NO: 46092 - DNA, 148 bp, Homo sapiens
ctgccccttctacaaccacgagcagatgggccttctccgggatgaggccctggcagaggtgaaggacatggagcagctgctggcccttgggaaggaggccmgggcctgtccctattacaggagccgccttgccatccctgcagcccag

SEQ ID NO: 46093 - DNA, 201 bp, Homo sapiens
ttagctggcaccatctctttgcctctttctttctcctttgttgcagaacctttgtgtaaatgaagacgtgagaagcctaggttctgtgcagcttatcaacraccgctgcgtggacatgcagagaagcaggcacggtagccaccaggaccatggtgtagccgcaggtggtctggagagagtgaggcaggggtggcagtgact

SEQ ID NO: 46094 - DNA, 201 bp, Homo sapiens; identical to SEQ ID NO: 46048

SEQ ID NO: 46095 - DNA, 201 bp, Homo sapiens
ggggcaggtccacgtgtgttggtaggatgtcatttagctggcaccatctctttgcctctttctttctcctttgttgcagaacctttgtgtaaatgaagacrtgagaagcctaggttctgtgcagcttatcaacgaccgctgcgtggacatgcagagaagcaggcacggtagccaccaggaccatggtgtagccgcaggtgg

SEQ ID NO: 46096 - DNA, 201 bp, Homo sapiens; identical to SEQ ID NO: 46049

SEQ ID NO: 46097 - DNA, 201 bp, Homo sapiens
cacagtaggcagtacttgggagggtcttatagaccccaccctgtggaagtgggtctcaacattacacaaccccctctcgggcccgtggacagttgctgtcytctctgttttctctctttgtgcctgtgccaccctcagagaagaagaaaggagctgaggaggagaagccaaagaggaggaggcaggagaagcaggcagcct

SEQ ID NO: 46098 - DNA, 103 bp, Homo sapiens
ggccctggcagaggtgaaggacatggagcagctgctggcccttgggaaggaggcccgggcctgtccctattacaggagccgccttgccatccctgcagccmag

SEQ ID NO: 46099 - DNA, 130 bp, Homo sapiens
cgagcagatgggccttctccgggatgaggccctggcagaggtgaaggacatggagcagctgctggcccttgggaaggaggcccgggcctgtccctattacrggagccgccttgccatccctgcagcccag

SEQ ID NO: 46100 - DNA, 201 bp, Homo sapiens
agaccccaccctgtggaagtgggtctcaacattacacaaccccctctcgggcccgtggacagttgctgtcctctctgttttctctctttgtgcctgtgccmccctcagagaagaagaaaggagctgaggaggagaagccaaagaggaggaggcaggagaagcaggcagcctgccccttctacaaccacgagcagatgggcc

SEQ ID NO: 46101 - DNA, 201 bp, Homo sapiens
catcctgctcctttccccacaactttgtcctgctcgtccaggcctgggagacgctgggtctgtgacaggctgaaccgtgtgaggagcagccccctccctgrcctggccggcccatcactggaaggcaaaggagaggtggcgggggcaggtccacgtgtgttggtaggatgtcatttagctggcaccatctctttgcctctt

SEQ ID NO: 46102 - DNA, 201 bp, Homo sapiens
ccccacaactttgtcctgctcgtccaggcctgggagacgctgggtctgtgacaggctgaaccgtgtgaggagcagccccctccctggcctggccggcccakcactggaaggcaaaggagaggtggcgggggcaggtccacgtgtgttggtaggatgtcatttagctggcaccatctctttgcctctttctttctcctttgt

SEQ ID NO: 46103 - DNA, 201 bp, Homo sapiens
aacgttacagtgttccgatgagacacagtaggcagtacttgggagggtcttatagaccccaccctgtggaagtgggtctcaacattacacaaccccctctygggcccgtggacagttgctgtcctctctgttttctctctttgtgcctgtgccaccctcagagaagaagaaaggagctgaggaggagaagccaaagaggag

SEQ ID NO: 46104 - DNA, 201 bp, Homo sapiens
gattttacgggctctttctggagaacaaaagtaaaacgttacagtgttccgatgagacacagtaggcagtacttgggagggtcttatagaccccaccctgyggaagtgggtctcaacattacacaaccccctctcgggcccgtggacagttgctgtcctctctgttttctctctttgtgcctgtgccaccctcagagaaga

SEQ ID NO: 46105 - DNA, 201 bp, Homo sapiens
tgattttacgggctctttctggagaacaaaagtaaaacgttacagtgttccgatgagacacagtaggcagtacttgggagggtcttatagaccccaccctrtggaagtgggtctcaacattacacaaccccctctcgggcccgtggacagttgctgtcctctctgttttctctctttgtgcctgtgccaccctcagagaag

SEQ ID NO: 46106 - DNA, 201 bp, Homo sapiens
tcactggaaggcaaaggagaggtggcgggggcaggtccacgtgtgttggtaggatgtcatttagctggcaccatctctttgcctctttctttctcctttgytgcagaacctttgtgtaaatgaagacgtgagaagcctaggttctgtgcagcttatcaacgaccgctgcgtggacatgcagagaagcaggcacggtagcca

SEQ ID NO: 46107 - DNA, 201 bp, Homo sapiens
ccttgggaaaaagtgttcctactctctgggtgagcgtctggtccgaatcgttggcttggagatgattttacgggctctttctggagaacaaaagtaaaacsttacagtgttccgatgagacacagtaggcagtacttgggagggtcttatagaccccaccctgtggaagtgggtctcaacattacacaaccccctctcggg

SEQ ID NO: 46108 - DNA, 201 bp, Homo sapiens
tggagatgattttacgggctctttctggagaacaaaagtaaaacgttacagtgttccgatgagacacagtaggcagtacttgggagggtcttatagacccyaccctgtggaagtgggtctcaacattacacaaccccctctcgggcccgtggacagttgctgtcctctctgttttctctctttgtgcctgtgccaccctca

SEQ ID NO: 46109 - DNA, 201 bp, Homo sapiens
gtagccagtatttccaccaggggccatcctgctcctttccccacaactttgtcctgctcgtccaggcctgggagacgctgggtctgtgacaggctgaaccrtgtgaggagcagccccctccctggcctggccggcccatcactggaaggcaaaggagaggtggcgggggcaggtccacgtgtgttggtaggatgtcattta

SEQ ID NO: 46110 - DNA, 201 bp, Homo sapiens
gacagttgctgtcctctctgttttctctctttgtgcctgtgccaccctcagagaagaagaaaggagctgaggaggagaagccaaagaggaggaggcaggaraagcaggcagcctgccccttctacaaccacgagcagatgggccttctccgggatgaggccctggcagaggtgaaggacatggagcagctgctggcccttg

SEQ ID NO: 46111 - DNA, 201 bp, Homo sapiens
tagccgcaggtggtctggagagagtgaggcaggggtggcagtgactgaagaccattcagtgtctttcatagaaagaatggcagaggagaccccagttcctycctgagtcccctctccttgggaaaaagtgttcctactctctgggtgagcgtctggtccgaatcgttggcttggagatgattttacgggctctttctggag

SEQ ID NO: 46112 - DNA, 201 bp, Homo sapiens; identical to SEQ ID NO: 46030

SEQ ID NO: 46113 - DNA, 201 bp, Homo sapiens; identical to SEQ ID NO: 46031

SEQ ID NO: 46114 - DNA, 201 bp, Homo sapiens; identical to SEQ ID NO: 46032

SEQ ID NO: 46115 - DNA, 201 bp, Homo sapiens
tggtggagaacctgtgcatgaaggccgtcaaccagtccataggcagggccatcaggcaccagaaggattttgccagcatagtgctcctggaccagcgataygcccggccccctgtcctggccaagctgccggcctggatccgagcccgcgtggaggtcaaagctacctttggccccgccattgctgctgtgcagaagtttc

SEQ ID NO: 46116 - DNA, 201 bp, Homo sapiens; identical to SEQ ID NO: 46034

SEQ ID NO: 46117 - DNA, 201 bp, Homo sapiens; identical to SEQ ID NO: 46035

SEQ ID NO: 46118 - DNA, 201 bp, Homo sapiens; identical to SEQ ID NO: 46036

SEQ ID NO: 46119 - DNA, 201 bp, Homo sapiens; identical to SEQ ID NO: 46037

SEQ ID NO: 46120 - DNA, 201 bp, Homo sapiens
cctaggttctgtgcagcttatcaacgaccgctgcgtggacatgcagagaagcaggcacgagaagaagaaaggagctgaggaggagaagccaaagaggaggmggcaggagaagcaggcagcctgccccttctacaaccacgagcagatgggccttctccgggatgaggccctggcagaggtgaaggacatggagcagctgct

SEQ ID NO: 46121 - DNA, 201 bp, Homo sapiens; identical to SEQ ID NO: 46039

SEQ ID NO: 46122 - DNA, 201 bp, Homo sapiens; identical to SEQ ID NO: 46040

SEQ ID NO: 46123 - DNA, 201 bp, Homo sapiens; identical to SEQ ID NO: 46041

SEQ ID NO: 46124 - DNA, 201 bp, Homo sapiens; identical to SEQ ID NO: 46042

SEQ ID NO: 46125 - DNA, 201 bp, Homo sapiens; identical to SEQ ID NO: 46043

SEQ ID NO: 46126 - DNA, 201 bp, Homo sapiens; identical to SEQ ID NO: 46044

SEQ ID NO: 46127 - DNA, 201 bp, Homo sapiens; identical to SEQ ID NO: 46045

SEQ ID NO: 46128 - DNA, 201 bp, Homo sapiens
cccctttggcaaggatgttcggctggtctccctcggctcccagcagaacctttgtgtaaatgaagacgtgagaagcctaggttctgtgcagcttatcaacraccgctgcgtggacatgcagagaagcaggcacgagaagaagaaaggagctgaggaggagaagccaaagaggaggaggcaggagaagcaggcagcctgccc

SEQ ID NO: 46129 - DNA, 201 bp, Homo sapiens; identical to SEQ ID NO: 46046

SEQ ID NO: 46130 - DNA, 201 bp, Homo sapiens; identical to SEQ ID NO: 46047

SEQ ID NO: 46131 - DNA, 201 bp, Homo sapiens; identical to SEQ ID NO: 46048

SEQ ID NO: 46132 - DNA, 201 bp, Homo sapiens; identical to SEQ ID NO: 46049

SEQ ID NO: 46133 - DNA, 201 bp, Homo sapiens
caggcctgtggccaggagagaggccaggtgacagaggccctgctcctctctgtggttggaggaaagatgagtgaagggatcaacttctctgacaacctaggccggtgtgtggtgatggtgggcatgcccttccccaacatcaggtctgcagagctgcaggagaagatggcctacttggatcaaaccctccccagagccccc

SEQ ID NO: 46134 - DNA, 201 bp, Homo sapiens; identical to SEQ ID NO: 46051

SEQ ID NO: 46135 - DNA, 201 bp, Homo sapiens; identical to SEQ ID NO: 46052

SEQ ID NO: 46136 - DNA, 201 bp, Homo sapiens; identical to SEQ ID NO: 46053

SEQ ID NO: 46137 - DNA, 201 bp, Homo sapiens; identical to SEQ ID NO: 46054

SEQ ID NO: 46138 - DNA, 201 bp, Homo sapiens; identical to SEQ ID NO: 46055

SEQ ID NO: 46139 - DNA, 110 bp, Homo sapiens; identical to SEQ ID NO: 46056

SEQ ID NO: 46140 - DNA, 201 bp, Homo sapiens
ctgtgcagcttatcaacgaccgctgcgtggacatgcagagaagcaggcacgagaagaagaaaggagctgaggaggagaagccaaagaggaggaggcaggaraagcaggcagcctgccccttctacaaccacgagcagatgggccttctccgggatgaggccctggcagaggtgaaggacatggagcagctgctggcccttg

SEQ ID NO: 46141 - DNA, 201 bp, Homo sapiens; identical to SEQ ID NO: 46058

SEQ ID NO: 46142 - DNA, 201 bp, Homo sapiens; identical to SEQ ID NO: 46060

SEQ ID NO: 46143 - DNA, 201 bp, Homo sapiens; identical to SEQ ID NO: 46059

SEQ ID NO: 46144 - DNA, 201 bp, Homo sapiens
tattactgtagtcggacacactcccagctggcccagtttgtgcatgaggtgaagaagagcccctttggcaaggatgttcggctggtctccctcggctcccrgcagaacctttgtgtaaatgaagacgtgagaagcctaggttctgtgcagcttatcaacgaccgctgcgtggacatgcagagaagcaggcacgagaagaag

SEQ ID NO: 46145 - DNA, 201 bp, Homo sapiens; identical to SEQ ID NO: 46063

SEQ ID NO: 46146 - DNA, 201 bp, Homo sapiens; identical to SEQ ID NO: 46062

SEQ ID NO: 46147 - DNA, 201 bp, Homo sapiens; identical to SEQ ID NO: 46064

SEQ ID NO: 46148 - DNA, 201 bp, Homo sapiens
gtgatggtgggcatgcccttccccaacatcaggtctgcagagctgcaggagaagatggcctacttggatcaaaccctccccagagcccccggccaggcacmcccagggaaggctctggtggagaacctgtgcatgaaggccgtcaaccagtccataggcagggccatcaggcaccagaaggattttgccagcatagtgctc

SEQ ID NO: 46149 - DNA, 201 bp, Homo sapiens; identical to SEQ ID NO: 46065

SEQ ID NO: 46150 - DNA, 201 bp, Homo sapiens; identical to SEQ ID NO: 46066

SEQ ID NO: 46151 - DNA, 201 bp, Homo sapiens
ccaacatcaggtctgcagagctgcaggagaagatggcctacttggatcaaaccctccccagagcccccggccaggcacccccagggaaggctctggtggasaacctgtgcatgaaggccgtcaaccagtccataggcagggccatcaggcaccagaaggattttgccagcatagtgctcctggaccagcgatacgcccggc

SEQ ID NO: 46152 - DNA, 201 bp, Homo sapiens; identical to SEQ ID NO: 46067

SEQ ID NO: 46153 - DNA, 201 bp, Homo sapiens; identical to SEQ ID NO: 46069

SEQ ID NO: 46154 - DNA, 201 bp, Homo sapiens; identical to SEQ ID NO: 46068

SEQ ID NO: 46155 - DNA, 201 bp, Homo sapiens; identical to SEQ ID NO: 46071

SEQ ID NO: 46156 - DNA, 201 bp, Homo sapiens; identical to SEQ ID NO: 46070

SEQ ID NO: 46157 - DNA, 201 bp, Homo sapiens; identical to SEQ ID NO: 46072

SEQ ID NO: 46158 - DNA, 201 bp, Homo sapiens
gctggcccagtttgtgcatgaggtgaagaagagcccctttggcaaggatgttcggctggtctccctcggctcccagcagaacctttgtgtaaatgaagacrtgagaagcctaggttctgtgcagcttatcaacgaccgctgcgtggacatgcagagaagcaggcacgagaagaagaaaggagctgaggaggagaagccaaa

SEQ ID NO: 46159 - DNA, 201 bp, Homo sapiens; identical to SEQ ID NO: 46073

SEQ ID NO: 46160 - DNA, 201 bp, Homo sapiens; identical to SEQ ID NO: 46074

SEQ ID NO: 46161 - DNA, 201 bp, Homo sapiens; identical to SEQ ID NO: 46075

SEQ ID NO: 46162 - DNA, 201 bp, Homo sapiens; identical to SEQ ID NO: 46076

SEQ ID NO: 46163 - DNA, 201 bp, Homo sapiens; identical to SEQ ID NO: 46077

SEQ ID NO: 46164 - DNA, 201 bp, Homo sapiens; identical to SEQ ID NO: 46078

SEQ ID NO: 46165 - DNA, 201 bp, Homo sapiens; identical to SEQ ID NO: 46079

SEQ ID NO: 46166 - DNA, 201 bp, Homo sapiens; identical to SEQ ID NO: 46080

SEQ ID NO: 46167 - DNA, 201 bp, Homo sapiens; identical to SEQ ID NO: 46081

SEQ ID NO: 46168 - DNA, 201 bp, Homo sapiens; identical to SEQ ID NO: 46082

SEQ ID NO: 46169 - DNA, 201 bp, Homo sapiens
gtgccccaggtgttgggatgagatggggacttgggagagatgcattatcagtcctgttctctcctggggccccaagccagaaaggacaacatctgcccctygtcatctgcagcgggatctccaaccagccgctggaattcacgttccagaaaagagacctgcctcagatgatggacgaggtgggtcgcatcctctgtaacc

SEQ ID NO: 46170 - DNA, 201 bp, Homo sapiens; identical to SEQ ID NO: 46031

SEQ ID NO: 46171 - DNA, 201 bp, Homo sapiens; identical to SEQ ID NO: 46032

SEQ ID NO: 46172 - DNA, 201 bp, Homo sapiens; identical to SEQ ID NO: 46115

SEQ ID NO: 46173 - DNA, 201 bp, Homo sapiens; identical to SEQ ID NO: 46034

SEQ ID NO: 46174 - DNA, 201 bp, Homo sapiens; identical to SEQ ID NO: 46035

SEQ ID NO: 46175 - DNA, 201 bp, Homo sapiens; identical to SEQ ID NO: 46036

SEQ ID NO: 46176 - DNA, 201 bp, Homo sapiens
tgaaggaatgccgggcagtggtcattgcggggggtaccatgcagccggtaaggacacctttcccagcccctcgtgccccaggtgttgggatgagatggggrcttgggagagatgcattatcagtcctgttctctcctggggccccaagccagaaaggacaacatctgccccttgtcatctgcagcgggatctccaaccagc

SEQ ID NO: 46177 - DNA, 201 bp, Homo sapiens; identical to SEQ ID NO: 46037

SEQ ID NO: 46178 - DNA, 201 bp, Homo sapiens; identical to SEQ ID NO: 46039

SEQ ID NO: 46179 - DNA, 201 bp, Homo sapiens; identical to SEQ ID NO: 46040

SEQ ID NO: 46180 - DNA, 201 bp, Homo sapiens
cattatcagtcctgttctctcctggggccccaagccagaaaggacaacatctgccccttgtcatctgcagcgggatctccaaccagccgctggaattcacsttccagaaaagagacctgcctcagatgatggacgaggtgggtcgcatcctctgtaacctgtgcggtgtggtttctggaggggtggtctgtttcttcccct

SEQ ID NO: 46181 - DNA, 201 bp, Homo sapiens; identical to SEQ ID NO: 46042

SEQ ID NO: 46182 - DNA, 201 bp, Homo sapiens; identical to SEQ ID NO: 46043

SEQ ID NO: 46183 - DNA, 201 bp, Homo sapiens; identical to SEQ ID NO: 46044

SEQ ID NO: 46184 - DNA, 201 bp, Homo sapiens; identical to SEQ ID NO: 46045

SEQ ID NO: 46185 - DNA, 201 bp, Homo sapiens
cccctttggcaaggatgttcggctggtctccctcggctcccagcagaacctttgtgtaaatgaagacgtgagaagcctaggttctgtgcagcttatcaacraccgctgcgtggacatgcagagaagcaggcacgcctgccccttctacaaccacgagcagatgggccttctccgggatgaggccctggcagaggtgaagga

SEQ ID NO: 46186 - DNA, 201 bp, Homo sapiens; identical to SEQ ID NO: 46046

SEQ ID NO: 46187 - DNA, 201 bp, Homo sapiens; identical to SEQ ID NO: 46047

SEQ ID NO: 46188 - DNA, 201 bp, Homo sapiens; identical to SEQ ID NO: 46048

SEQ ID NO: 46189 - DNA, 201 bp, Homo sapiens; identical to SEQ ID NO: 46049

SEQ ID NO: 46190 - DNA, 201 bp, Homo sapiens; identical to SEQ ID NO: 46051

SEQ ID NO: 46191 - DNA, 201 bp, Homo sapiens; identical to SEQ ID NO: 46052

SEQ ID NO: 46192 - DNA, 201 bp, Homo sapiens; identical to SEQ ID NO: 46053

SEQ ID NO: 46193 - DNA, 201 bp, Homo sapiens; identical to SEQ ID NO: 46054

SEQ ID NO: 46194 - DNA, 201 bp, Homo sapiens; identical to SEQ ID NO: 46055

SEQ ID NO: 46195 - DNA, 110 bp, Homo sapiens; identical to SEQ ID NO: 46056

SEQ ID NO: 46196 - DNA, 201 bp, Homo sapiens
cagtggtcattgcggggggtaccatgcagccggtaaggacacctttcccagcccctcgtgccccaggtgttgggatgagatggggacttgggagagatgcrttatcagtcctgttctctcctggggccccaagccagaaaggacaacatctgccccttgtcatctgcagcgggatctccaaccagccgctggaattcacgt

SEQ ID NO: 46197 - DNA, 201 bp, Homo sapiens; identical to SEQ ID NO: 46058

SEQ ID NO: 46198 - DNA, 201 bp, Homo sapiens; identical to SEQ ID NO: 46060

SEQ ID NO: 46199 - DNA, 201 bp, Homo sapiens; identical to SEQ ID NO: 46059

SEQ ID NO: 46200 - DNA, 201 bp, Homo sapiens
tattactgtagtcggacacactcccagctggcccagtttgtgcatgaggtgaagaagagcccctttggcaaggatgttcggctggtctccctcggctcccrgcagaacctttgtgtaaatgaagacgtgagaagcctaggttctgtgcagcttatcaacgaccgctgcgtggacatgcagagaagcaggcacgcctgcccc

SEQ ID NO: 46201 - DNA, 201 bp, Homo sapiens; identical to SEQ ID NO: 46063

SEQ ID NO: 46202 - DNA, 201 bp, Homo sapiens; identical to SEQ ID NO: 46062

SEQ ID NO: 46203 - DNA, 201 bp, Homo sapiens
gcagcctcagtgagagcaccctgaagtttttgctcctgaatccagctgtgcactttgcccaagtggtgaaggaatgccgggcagtggtcattgcggggggkaccatgcagccggtaaggacacctttcccagcccctcgtgccccaggtgttgggatgagatggggacttgggagagatgcattatcagtcctgttctctc

SEQ ID NO: 46204 - DNA, 201 bp, Homo sapiens; identical to SEQ ID NO: 46065

SEQ ID NO: 46205 - DNA, 201 bp, Homo sapiens; identical to SEQ ID NO: 46148

SEQ ID NO: 46206 - DNA, 201 bp, Homo sapiens; identical to SEQ ID NO: 46066

SEQ ID NO: 46207 - DNA, 201 bp, Homo sapiens; identical to SEQ ID NO: 46151

SEQ ID NO: 46208 - DNA, 201 bp, Homo sapiens; identical to SEQ ID NO: 46067

SEQ ID NO: 46209 - DNA, 201 bp, Homo sapiens; identical to SEQ ID NO: 46069

SEQ ID NO: 46210 - DNA, 201 bp, Homo sapiens; identical to SEQ ID NO: 46068

SEQ ID NO: 46211 - DNA, 201 bp, Homo sapiens; identical to SEQ ID NO: 46071

SEQ ID NO: 46212 - DNA, 201 bp, Homo sapiens; identical to SEQ ID NO: 46070

SEQ ID NO: 46213 - DNA, 201 bp, Homo sapiens; identical to SEQ ID NO: 46072

SEQ ID NO: 46214 - DNA, 201 bp, Homo sapiens
gctggcccagtttgtgcatgaggtgaagaagagcccctttggcaaggatgttcggctggtctccctcggctcccagcagaacctttgtgtaaatgaagacrtgagaagcctaggttctgtgcagcttatcaacgaccgctgcgtggacatgcagagaagcaggcacgcctgccccttctacaaccacgagcagatgggcct

SEQ ID NO: 46215 - DNA, 201 bp, Homo sapiens; identical to SEQ ID NO: 46073

SEQ ID NO: 46216 - DNA, 201 bp, Homo sapiens; identical to SEQ ID NO: 46074

SEQ ID NO: 46217 - DNA, 201 bp, Homo sapiens; identical to SEQ ID NO: 46075

SEQ ID NO: 46218 - DNA, 201 bp, Homo sapiens; identical to SEQ ID NO: 46076

SEQ ID NO: 46219 - DNA, 201 bp, Homo sapiens; identical to SEQ ID NO: 46077

SEQ ID NO: 46220 - DNA, 201 bp, Homo sapiens
gccaaggcagcctcagtgagagcaccctgaagtttttgctcctgaatccagctgtgcactttgcccaagtggtgaaggaatgccgggcagtggtcattgcsgggggtaccatgcagccggtaaggacacctttcccagcccctcgtgccccaggtgttgggatgagatggggacttgggagagatgcattatcagtcctgt

SEQ ID NO: 46221 - DNA, 201 bp, Homo sapiens; identical to SEQ ID NO: 46079

SEQ ID NO: 46222 - DNA, 201 bp, Homo sapiens
cactacggccaaccaggacggcagggtcatcctgagccgccaaggcagcctcagtgagagcaccctgaagtttttgctcctgaatccagctgtgcactttscccaagtggtgaaggaatgccgggcagtggtcattgcggggggtaccatgcagccggtaaggacacctttcccagcccctcgtgccccaggtgttgggat

SEQ ID NO: 46223 - DNA, 201 bp, Homo sapiens; identical to SEQ ID NO: 46080

SEQ ID NO: 46224 - DNA, 201 bp, Homo sapiens; identical to SEQ ID NO: 46082

SEQ ID NO: 46225 - DNA, 201 bp, Homo sapiens
gccggtaaggacacctttcccagcccctcgtgccccaggtgttgggatgagatggggacttgggagagatgcattatcagtcctgttctctcctggggccscaagccagaaaggacaacatctgccccttgtcatctgcagcgggatctccaaccagccgctggaattcacgttccagaaaagagacctgcctcagatgat

SEQ ID NO: 46226 - DNA, 201 bp, Homo sapiens; identical to SEQ ID NO: 46030

SEQ ID NO: 46227 - DNA, 201 bp, Homo sapiens; identical to SEQ ID NO: 46031

SEQ ID NO: 46228 - DNA, 201 bp, Homo sapiens; identical to SEQ ID NO: 46032

SEQ ID NO: 46229 - DNA, 201 bp, Homo sapiens; identical to SEQ ID NO: 46115

SEQ ID NO: 46230 - DNA, 201 bp, Homo sapiens; identical to SEQ ID NO: 46034

SEQ ID NO: 46231 - DNA, 201 bp, Homo sapiens; identical to SEQ ID NO: 46035

SEQ ID NO: 46232 - DNA, 201 bp, Homo sapiens; identical to SEQ ID NO: 46036

SEQ ID NO: 46233 - DNA, 201 bp, Homo sapiens; identical to SEQ ID NO: 46037

SEQ ID NO: 46234 - DNA, 201 bp, Homo sapiens
agcctaggttctgtgcagcttatcaacgaccgctgcgtggacatgcagagaagcaggcacgaagaagaaaggagctgaggaggagaagccaaagaggaggmggcaggagaagcaggcagcctgccccttctacaaccacgagcagatgggccttctccgggatgaggccctggcagaggtgaaggacatggagcagctgct

SEQ ID NO: 46235 - DNA, 201 bp, Homo sapiens; identical to SEQ ID NO: 46039

SEQ ID NO: 46236 - DNA, 201 bp, Homo sapiens; identical to SEQ ID NO: 46040

SEQ ID NO: 46237 - DNA, 201 bp, Homo sapiens; identical to SEQ ID NO: 46041

SEQ ID NO: 46238 - DNA, 201 bp, Homo sapiens; identical to SEQ ID NO: 46042

SEQ ID NO: 46239 - DNA, 201 bp, Homo sapiens; identical to SEQ ID NO: 46043

SEQ ID NO: 46240 - DNA, 201 bp, Homo sapiens; identical to SEQ ID NO: 46044

SEQ ID NO: 46241 - DNA, 201 bp, Homo sapiens; identical to SEQ ID NO: 46045

SEQ ID NO: 46242 - DNA, 201 bp, Homo sapiens
cccctttggcaaggatgttcggctggtctccctcggctcccagcagaacctttgtgtaaatgaagacgtgagaagcctaggttctgtgcagcttatcaacraccgctgcgtggacatgcagagaagcaggcacgaagaagaaaggagctgaggaggagaagccaaagaggaggaggcaggagaagcaggcagcctgcccct

SEQ ID NO: 46243 - DNA, 201 bp, Homo sapiens; identical to SEQ ID NO: 46046

SEQ ID NO: 46244 - DNA, 201 bp, Homo sapiens; identical to SEQ ID NO: 46047

SEQ ID NO: 46245 - DNA, 201 bp, Homo sapiens; identical to SEQ ID NO: 46048

SEQ ID NO: 46246 - DNA, 201 bp, Homo sapiens; identical to SEQ ID NO: 46049

SEQ ID NO: 46247 - DNA, 201 bp, Homo sapiens
caggcctgtggccaggagagaggccaggtgacagaggccctgctcctctctgtggttggaggaaagatgagtgaagggatcaacttctctgacaacctaggccggtgtgtggtgatggtgggcatgcccttccccaacatcaggtctgcagagctgcaggagaagatggcctacttggatcaaaccctcgtgagtgacccc

SEQ ID NO: 46248 - DNA, 201 bp, Homo sapiens; identical to SEQ ID NO: 46051

SEQ ID NO: 46249 - DNA, 201 bp, Homo sapiens; identical to SEQ ID NO: 46052

SEQ ID NO: 46250 - DNA, 201 bp, Homo sapiens; identical to SEQ ID NO: 46053

SEQ ID NO: 46251 - DNA, 201 bp, Homo sapiens; identical to SEQ ID NO: 46054

SEQ ID NO: 46252 - DNA, 201 bp, Homo sapiens; identical to SEQ ID NO: 46055

SEQ ID NO: 46253 - DNA, 110 bp, Homo sapiens; identical to SEQ ID NO: 46056

SEQ ID NO: 46254 - DNA, 201 bp, Homo sapiens
ttctgtgcagcttatcaacgaccgctgcgtggacatgcagagaagcaggcacgaagaagaaaggagctgaggaggagaagccaaagaggaggaggcaggaraagcaggcagcctgccccttctacaaccacgagcagatgggccttctccgggatgaggccctggcagaggtgaaggacatggagcagctgctggcccttg

SEQ ID NO: 46255 - DNA, 201 bp, Homo sapiens; identical to SEQ ID NO: 46058

SEQ ID NO: 46256 - DNA, 201 bp, Homo sapiens; identical to SEQ ID NO: 46060

SEQ ID NO: 46257 - DNA, 201 bp, Homo sapiens; identical to SEQ ID NO: 46059

SEQ ID NO: 46258 - DNA, 201 bp, Homo sapiens
tattactgtagtcggacacactcccagctggcccagtttgtgcatgaggtgaagaagagcccctttggcaaggatgttcggctggtctccctcggctcccrgcagaacctttgtgtaaatgaagacgtgagaagcctaggttctgtgcagcttatcaacgaccgctgcgtggacatgcagagaagcaggcacgaagaagaa

SEQ ID NO: 46259 - DNA, 201 bp, Homo sapiens; identical to SEQ ID NO: 46063

SEQ ID NO: 46260 - DNA, 201 bp, Homo sapiens; identical to SEQ ID NO: 46062

SEQ ID NO: 46261 - DNA, 201 bp, Homo sapiens; identical to SEQ ID NO: 46064

SEQ ID NO: 46262 - DNA, 201 bp, Homo sapiens; identical to SEQ ID NO: 46065

SEQ ID NO: 46263 - DNA, 201 bp, Homo sapiens; identical to SEQ ID NO: 46066

SEQ ID NO: 46264 - DNA, 201 bp, Homo sapiens
gtctgcagagctgcaggagaagatggcctacttggatcaaaccctcgtgagtgaccccatgggtgggagtggcatcacccccagggaaggctctggtggasaacctgtgcatgaaggccgtcaaccagtccataggcagggccatcaggcaccagaaggattttgccagcatagtgctcctggaccagcgatacgcccggc

SEQ ID NO: 46265 - DNA, 201 bp, Homo sapiens; identical to SEQ ID NO: 46067

SEQ ID NO: 46266 - DNA, 201 bp, Homo sapiens; identical to SEQ ID NO: 46069

SEQ ID NO: 46267 - DNA, 201 bp, Homo sapiens; identical to SEQ ID NO: 46068

SEQ ID NO: 46268 - DNA, 201 bp, Homo sapiens; identical to SEQ ID NO: 46071

SEQ ID NO: 46269 - DNA, 201 bp, Homo sapiens; identical to SEQ ID NO: 46070

SEQ ID NO: 46270 - DNA, 201 bp, Homo sapiens; identical to SEQ ID NO: 46072

SEQ ID NO: 46271 - DNA, 201 bp, Homo sapiens
gctggcccagtttgtgcatgaggtgaagaagagcccctttggcaaggatgttcggctggtctccctcggctcccagcagaacctttgtgtaaatgaagacrtgagaagcctaggttctgtgcagcttatcaacgaccgctgcgtggacatgcagagaagcaggcacgaagaagaaaggagctgaggaggagaagccaaaga

SEQ ID NO: 46272 - DNA, 201 bp, Homo sapiens; identical to SEQ ID NO: 46073

SEQ ID NO: 46273 - DNA, 201 bp, Homo sapiens; identical to SEQ ID NO: 46074

SEQ ID NO: 46274 - DNA, 201 bp, Homo sapiens; identical to SEQ ID NO: 46075

SEQ ID NO: 46275 - DNA, 201 bp, Homo sapiens; identical to SEQ ID NO: 46076

SEQ ID NO: 46276 - DNA, 201 bp, Homo sapiens; identical to SEQ ID NO: 46077

SEQ ID NO: 46277 - DNA, 201 bp, Homo sapiens; identical to SEQ ID NO: 46078

SEQ ID NO: 46278 - DNA, 201 bp, Homo sapiens; identical to SEQ ID NO: 46079

SEQ ID NO: 46279 - DNA, 201 bp, Homo sapiens; identical to SEQ ID NO: 46080

SEQ ID NO: 46280 - DNA, 201 bp, Homo sapiens; identical to SEQ ID NO: 46081

SEQ ID NO: 46281 - DNA, 201 bp, Homo sapiens; identical to SEQ ID NO: 46082

SEQ ID NO: 46282 - DNA, 201 bp, Homo sapiens; identical to SEQ ID NO: 46083

SEQ ID NO: 46283 - DNA, 201 bp, Homo sapiens; identical to SEQ ID NO: 46084

SEQ ID NO: 46284 - DNA, 201 bp, Homo sapiens; identical to SEQ ID NO: 46086

SEQ ID NO: 46285 - DNA, 201 bp, Homo sapiens
tattactgtagtcggacacactcccagctggcccagtttgtgcatgaggtgaagaagagcccctttggcaaggatgttcggctggtctccctcggctcccrgcagaacctttgtgtaaatgaagacgtgagaagcctaggttctgtgcagcttatcaacgaccgctgcgtggacatgcagagaagcaggcacggtagccac

SEQ ID NO: 46286 - DNA, 201 bp, Homo sapiens; identical to SEQ ID NO: 46062

SEQ ID NO: 46287 - DNA, 201 bp, Homo sapiens
cccagcgatactaactttagcaaggatacagctgggatcctaaacttggcgatcagagcccagagccgataaagttagctgcgtgagtctagcttcccccrgggcgggaatcgaggcggagcagggtacagtacggaggccagggatgagtgcagttgaccagattgttgacggaagtccatggctaatgaaacacagaag

SEQ ID NO: 46288 - DNA, 201 bp, Homo sapiens; identical to SEQ ID NO: 46088

SEQ ID NO: 46289 - DNA, 201 bp, Homo sapiens; identical to SEQ ID NO: 46089

SEQ ID NO: 46290 - DNA, 201 bp, Homo sapiens; identical to SEQ ID NO: 46065

SEQ ID NO: 46291 - DNA, 201 bp, Homo sapiens; identical to SEQ ID NO: 46066

SEQ ID NO: 46292 - DNA, 201 bp, Homo sapiens; identical to SEQ ID NO: 46044

SEQ ID NO: 46293 - DNA, 201 bp, Homo sapiens; identical to SEQ ID NO: 46069

SEQ ID NO: 46294 - DNA, 201 bp, Homo sapiens
cccctttggcaaggatgttcggctggtctccctcggctcccagcagaacctttgtgtaaatgaagacgtgagaagcctaggttctgtgcagcttatcaacraccgctgcgtggacatgcagagaagcaggcacggtagccaccaggaccatggtgtagccgcaggtggtctggagagagtgaggcaggggtggcagtgact

SEQ ID NO: 46295 - DNA, 201 bp, Homo sapiens; identical to SEQ ID NO: 46047

SEQ ID NO: 46296 - DNA, 201 bp, Homo sapiens; identical to SEQ ID NO: 46048

SEQ ID NO: 46297 - DNA, 201 bp, Homo sapiens; identical to SEQ ID NO: 46097

SEQ ID NO: 46298 - DNA, 201 bp, Homo sapiens
gctggcccagtttgtgcatgaggtgaagaagagcccctttggcaaggatgttcggctggtctccctcggctcccagcagaacctttgtgtaaatgaagacrtgagaagcctaggttctgtgcagcttatcaacgaccgctgcgtggacatgcagagaagcaggcacggtagccaccaggaccatggtgtagccgcaggtgg

SEQ ID NO: 46299 - DNA, 201 bp, Homo sapiens; identical to SEQ ID NO: 46049

SEQ ID NO: 46300 - DNA, 101 bp, Homo sapiens
sggcattaacagcagccgcgtgtctgggtcttagatttggcctagctgtgttgagcttttcatggattatgttacgtagataagacactgcaacagtgagt

SEQ ID NO: 46301 - DNA, 201 bp, Homo sapiens; identical to SEQ ID NO: 46075

SEQ ID NO: 46302 - DNA, 201 bp, Homo sapiens; identical to SEQ ID NO: 46052

SEQ ID NO: 46303 - DNA, 201 bp, Homo sapiens; identical to SEQ ID NO: 46077

SEQ ID NO: 46304 - DNA, 201 bp, Homo sapiens; identical to SEQ ID NO: 46100

SEQ ID NO: 46305 - DNA, 201 bp, Homo sapiens; identical to SEQ ID NO: 46053

SEQ ID NO: 46306 - DNA, 201 bp, Homo sapiens; identical to SEQ ID NO: 46103

SEQ ID NO: 46307 - DNA, 201 bp, Homo sapiens
cacgggcatgcacagcgtggaggtcagcggctcccagctctgccaggcccattcccagctgctgcagtacatggagcgatacgggaagcgtttgaaggccragaacctgatgtacctgaagcagatcctgtatttgctggagaaattcgtggctgtgctagggggtgagagcctcgccccccggctaacccccggcctgca

SEQ ID NO: 46308 - DNA, 201 bp, Homo sapiens; identical to SEQ ID NO: 46054

SEQ ID NO: 46309 - DNA, 201 bp, Homo sapiens; identical to SEQ ID NO: 46104

SEQ ID NO: 46310 - DNA, 201 bp, Homo sapiens; identical to SEQ ID NO: 46055

SEQ ID NO: 46311 - DNA, 201 bp, Homo sapiens; identical to SEQ ID NO: 46105

SEQ ID NO: 46312 - DNA, 201 bp, Homo sapiens; identical to SEQ ID NO: 46108

SEQ ID NO: 46313 - DNA, 201 bp, Homo sapiens; identical to SEQ ID NO: 46107

SEQ ID NO: 46314 - DNA, 201 bp, Homo sapiens; identical to SEQ ID NO: 46110

SEQ ID NO: 46315 - DNA, 201 bp, Homo sapiens; identical to SEQ ID NO: 46111

SEQ ID NO: 46316 - DNA, 201 bp, Homo sapiens
gacttccggcagcagctgctggcctgtgctggggtggaagctgagcgcgtggtggagttttcctgtggtcacgtgatccctccagacaacatctgcccctygtcatctgcagcgggatctccaaccagccgctggaattcacgttccagaaaagagacctgcctcagatgatattccaggaacctaagagcgcacaccagg

SEQ ID NO: 46317 - DNA, 201 bp, Homo sapiens; identical to SEQ ID NO: 46031

SEQ ID NO: 46318 - DNA, 201 bp, Homo sapiens; identical to SEQ ID NO: 46032

SEQ ID NO: 46319 - DNA, 201 bp, Homo sapiens; identical to SEQ ID NO: 46115

SEQ ID NO: 46320 - DNA, 201 bp, Homo sapiens; identical to SEQ ID NO: 46034

SEQ ID NO: 46321 - DNA, 201 bp, Homo sapiens; identical to SEQ ID NO: 46035

SEQ ID NO: 46322 - DNA, 201 bp, Homo sapiens; identical to SEQ ID NO: 46036

SEQ ID NO: 46323 - DNA, 201 bp, Homo sapiens; identical to SEQ ID NO: 46037

SEQ ID NO: 46324 - DNA, 201 bp, Homo sapiens; identical to SEQ ID NO: 46120

SEQ ID NO: 46325 - DNA, 201 bp, Homo sapiens; identical to SEQ ID NO: 46040

SEQ ID NO: 46326 - DNA, 201 bp, Homo sapiens
gagcgcgtggtggagttttcctgtggtcacgtgatccctccagacaacatctgccccttgtcatctgcagcgggatctccaaccagccgctggaattcacsttccagaaaagagacctgcctcagatgatattccaggaacctaagagcgcacaccaggtggagcaggtgctgctggcgtattccaggtgcatccaggcct

SEQ ID NO: 46327 - DNA, 201 bp, Homo sapiens; identical to SEQ ID NO: 46042

SEQ ID NO: 46328 - DNA, 201 bp, Homo sapiens; identical to SEQ ID NO: 46043

SEQ ID NO: 46329 - DNA, 201 bp, Homo sapiens; identical to SEQ ID NO: 46044

SEQ ID NO: 46330 - DNA, 201 bp, Homo sapiens; identical to SEQ ID NO: 46045

SEQ ID NO: 46331 - DNA, 201 bp, Homo sapiens; identical to SEQ ID NO: 46128

SEQ ID NO: 46332 - DNA, 201 bp, Homo sapiens; identical to SEQ ID NO: 46047

SEQ ID NO: 46333 - DNA, 201 bp, Homo sapiens; identical to SEQ ID NO: 46048

SEQ ID NO: 46334 - DNA, 201 bp, Homo sapiens; identical to SEQ ID NO: 46049

SEQ ID NO: 46335 - DNA, 201 bp, Homo sapiens; identical to SEQ ID NO: 46133

SEQ ID NO: 46336 - DNA, 201 bp, Homo sapiens; identical to SEQ ID NO: 46051

SEQ ID NO: 46337 - DNA, 201 bp, Homo sapiens; identical to SEQ ID NO: 46052

SEQ ID NO: 46338 - DNA, 201 bp, Homo sapiens; identical to SEQ ID NO: 46053

SEQ ID NO: 46339 - DNA, 201 bp, Homo sapiens; identical to SEQ ID NO: 46054

SEQ ID NO: 46340 - DNA, 201 bp, Homo sapiens; identical to SEQ ID NO: 46055

SEQ ID NO: 46341 - DNA, 110 bp, Homo sapiens; identical to SEQ ID NO: 46056

SEQ ID NO: 46342 - DNA, 201 bp, Homo sapiens; identical to SEQ ID NO: 46140

SEQ ID NO: 46343 - DNA, 201 bp, Homo sapiens; identical to SEQ ID NO: 46058

SEQ ID NO: 46344 - DNA, 201 bp, Homo sapiens; identical to SEQ ID NO: 46060

SEQ ID NO: 46345 - DNA, 201 bp, Homo sapiens; identical to SEQ ID NO: 46059

SEQ ID NO: 46346 - DNA, 201 bp, Homo sapiens; identical to SEQ ID NO: 46144

SEQ ID NO: 46347 - DNA, 201 bp, Homo sapiens; identical to SEQ ID NO: 46063

SEQ ID NO: 46348 - DNA, 201 bp, Homo sapiens; identical to SEQ ID NO: 46062

SEQ ID NO: 46349 - DNA, 201 bp, Homo sapiens; identical to SEQ ID NO: 46064

SEQ ID NO: 46350 - DNA, 201 bp, Homo sapiens; identical to SEQ ID NO: 46148

SEQ ID NO: 46351 - DNA, 201 bp, Homo sapiens; identical to SEQ ID NO: 46065

SEQ ID NO: 46352 - DNA, 201 bp, Homo sapiens; identical to SEQ ID NO: 46066

SEQ ID NO: 46353 - DNA, 201 bp, Homo sapiens; identical to SEQ ID NO: 46151

SEQ ID NO: 46354 - DNA, 201 bp, Homo sapiens; identical to SEQ ID NO: 46067

SEQ ID NO: 46355 - DNA, 201 bp, Homo sapiens; identical to SEQ ID NO: 46069

SEQ ID NO: 46356 - DNA, 201 bp, Homo sapiens; identical to SEQ ID NO: 46068

SEQ ID NO: 46357 - DNA, 201 bp, Homo sapiens; identical to SEQ ID NO: 46071

SEQ ID NO: 46358 - DNA, 201 bp, Homo sapiens; identical to SEQ ID NO: 46070

SEQ ID NO: 46359 - DNA, 201 bp, Homo sapiens; identical to SEQ ID NO: 46072

SEQ ID NO: 46360 - DNA, 201 bp, Homo sapiens; identical to SEQ ID NO: 46158

SEQ ID NO: 46361 - DNA, 201 bp, Homo sapiens; identical to SEQ ID NO: 46073

SEQ ID NO: 46362 - DNA, 201 bp, Homo sapiens; identical to SEQ ID NO: 46074

SEQ ID NO: 46363 - DNA, 201 bp, Homo sapiens; identical to SEQ ID NO: 46075

SEQ ID NO: 46364 - DNA, 201 bp, Homo sapiens; identical to SEQ ID NO: 46076

SEQ ID NO: 46365 - DNA, 201 bp, Homo sapiens; identical to SEQ ID NO: 46077

SEQ ID NO: 46366 - DNA, 201 bp, Homo sapiens; identical to SEQ ID NO: 46078

SEQ ID NO: 46367 - DNA, 201 bp, Homo sapiens; identical to SEQ ID NO: 46079

SEQ ID NO: 46368 - DNA, 201 bp, Homo sapiens; identical to SEQ ID NO: 46080

SEQ ID NO: 46369 - DNA, 201 bp, Homo sapiens; identical to SEQ ID NO: 46081

SEQ ID NO: 46370 - DNA, 201 bp, Homo sapiens; identical to SEQ ID NO: 46082

SEQ ID NO: 46371 - DNA, 201 bp, Homo sapiens; identical to SEQ ID NO: 46030

SEQ ID NO: 46372 - DNA, 201 bp, Homo sapiens; identical to SEQ ID NO: 46031

SEQ ID NO: 46373 - DNA, 201 bp, Homo sapiens; identical to SEQ ID NO: 46032

SEQ ID NO: 46374 - DNA, 201 bp, Homo sapiens; identical to SEQ ID NO: 46115

SEQ ID NO: 46375 - DNA, 201 bp, Homo sapiens; identical to SEQ ID NO: 46034

SEQ ID NO: 46376 - DNA, 201 bp, Homo sapiens; identical to SEQ ID NO: 46035

SEQ ID NO: 46377 - DNA, 201 bp, Homo sapiens; identical to SEQ ID NO: 46036

SEQ ID NO: 46378 - DNA, 201 bp, Homo sapiens; identical to SEQ ID NO: 46037

SEQ ID NO: 46379 - DNA, 201 bp, Homo sapiens; identical to SEQ ID NO: 46120

SEQ ID NO: 46380 - DNA, 201 bp, Homo sapiens; identical to SEQ ID NO: 46039

SEQ ID NO: 46381 - DNA, 201 bp, Homo sapiens; identical to SEQ ID NO: 46040

SEQ ID NO: 46382 - DNA, 201 bp, Homo sapiens; identical to SEQ ID NO: 46041

SEQ ID NO: 46383 - DNA, 201 bp, Homo sapiens; identical to SEQ ID NO: 46042

SEQ ID NO: 46384 - DNA, 201 bp, Homo sapiens; identical to SEQ ID NO: 46043

SEQ ID NO: 46385 - DNA, 201 bp, Homo sapiens; identical to SEQ ID NO: 46044

SEQ ID NO: 46386 - DNA, 201 bp, Homo sapiens; identical to SEQ ID NO: 46045

SEQ ID NO: 46387 - DNA, 201 bp, Homo sapiens; identical to SEQ ID NO: 46128

SEQ ID NO: 46388 - DNA, 201 bp, Homo sapiens; identical to SEQ ID NO: 46046

SEQ ID NO: 46389 - DNA, 201 bp, Homo sapiens; identical to SEQ ID NO: 46047

SEQ ID NO: 46390 - DNA, 201 bp, Homo sapiens; identical to SEQ ID NO: 46048

SEQ ID NO: 46391 - DNA, 201 bp, Homo sapiens; identical to SEQ ID NO: 46049

SEQ ID NO: 46392 - DNA, 201 bp, Homo sapiens
caggcctgtggccaggagagaggccaggtgacagaggccctgctcctctctgtggttggaggaaagatgagtgaagggatcaacttctctgacaacctaggccggtgtgtggtgatggtgggcatgcccttccccaacatcaggtctgcagagctgcaggagaagatggcctacttggatcaaaccctcagcccccggcca

SEQ ID NO: 46393 - DNA, 201 bp, Homo sapiens; identical to SEQ ID NO: 46051

SEQ ID NO: 46394 - DNA, 201 bp, Homo sapiens; identical to SEQ ID NO: 46052

SEQ ID NO: 46395 - DNA, 201 bp, Homo sapiens; identical to SEQ ID NO: 46053

SEQ ID NO: 46396 - DNA, 201 bp, Homo sapiens; identical to SEQ ID NO: 46054

SEQ ID NO: 46397 - DNA, 201 bp, Homo sapiens; identical to SEQ ID NO: 46055

SEQ ID NO: 46398 - DNA, 110 bp, Homo sapiens; identical to SEQ ID NO: 46056

SEQ ID NO: 46399 - DNA, 201 bp, Homo sapiens; identical to SEQ ID NO: 46140

SEQ ID NO: 46400 - DNA, 201 bp, Homo sapiens; identical to SEQ ID NO: 46058

SEQ ID NO: 46401 - DNA, 201 bp, Homo sapiens; identical to SEQ ID NO: 46060

SEQ ID NO: 46402 - DNA, 201 bp, Homo sapiens; identical to SEQ ID NO: 46059

SEQ ID NO: 46403 - DNA, 201 bp, Homo sapiens; identical to SEQ ID NO: 46144

SEQ ID NO: 46404 - DNA, 201 bp, Homo sapiens; identical to SEQ ID NO: 46063

SEQ ID NO: 46405 - DNA, 201 bp, Homo sapiens; identical to SEQ ID NO: 46062

SEQ ID NO: 46406 - DNA, 201 bp, Homo sapiens; identical to SEQ ID NO: 46064

SEQ ID NO: 46407 - DNA, 201 bp, Homo sapiens
gtgtggtgatggtgggcatgcccttccccaacatcaggtctgcagagctgcaggagaagatggcctacttggatcaaaccctcagcccccggccaggcacmcccagggaaggctctggtggagaacctgtgcatgaaggccgtcaaccagtccataggcagggccatcaggcaccagaaggattttgccagcatagtgctc

SEQ ID NO: 46408 - DNA, 201 bp, Homo sapiens; identical to SEQ ID NO: 46065

SEQ ID NO: 46409 - DNA, 201 bp, Homo sapiens; identical to SEQ ID NO: 46066

SEQ ID NO: 46410 - DNA, 201 bp, Homo sapiens
cttccccaacatcaggtctgcagagctgcaggagaagatggcctacttggatcaaaccctcagcccccggccaggcacccccagggaaggctctggtggasaacctgtgcatgaaggccgtcaaccagtccataggcagggccatcaggcaccagaaggattttgccagcatagtgctcctggaccagcgatacgcccggc

SEQ ID NO: 46411 - DNA, 201 bp, Homo sapiens; identical to SEQ ID NO: 46067

SEQ ID NO: 46412 - DNA, 201 bp, Homo sapiens; identical to SEQ ID NO: 46069

SEQ ID NO: 46413 - DNA, 201 bp, Homo sapiens; identical to SEQ ID NO: 46068

SEQ ID NO: 46414 - DNA, 201 bp, Homo sapiens; identical to SEQ ID NO: 46071

SEQ ID NO: 46415 - DNA, 201 bp, Homo sapiens; identical to SEQ ID NO: 46070

SEQ ID NO: 46416 - DNA, 201 bp, Homo sapiens; identical to SEQ ID NO: 46072

SEQ ID NO: 46417 - DNA, 201 bp, Homo sapiens; identical to SEQ ID NO: 46158

SEQ ID NO: 46418 - DNA, 201 bp, Homo sapiens; identical to SEQ ID NO: 46073

SEQ ID NO: 46419 - DNA, 201 bp, Homo sapiens; identical to SEQ ID NO: 46074

SEQ ID NO: 46420 - DNA, 201 bp, Homo sapiens; identical to SEQ ID NO: 46075

SEQ ID NO: 46421 - DNA, 201 bp, Homo sapiens; identical to SEQ ID NO: 46076

SEQ ID NO: 46422 - DNA, 201 bp, Homo sapiens; identical to SEQ ID NO: 46077

SEQ ID NO: 46423 - DNA, 201 bp, Homo sapiens; identical to SEQ ID NO: 46078

SEQ ID NO: 46424 - DNA, 201 bp, Homo sapiens; identical to SEQ ID NO: 46079

SEQ ID NO: 46425 - DNA, 201 bp, Homo sapiens; identical to SEQ ID NO: 46080

SEQ ID NO: 46426 - DNA, 201 bp, Homo sapiens; identical to SEQ ID NO: 46081

SEQ ID NO: 46427 - DNA, 201 bp, Homo sapiens; identical to SEQ ID NO: 46082

SEQ ID NO: 46428 - DNA, 201 bp, Homo sapiens
gctggggtggaagctgagcgcgtggtggagttttcctgtgttttcggcccctccctgatcttaccaggtcacgtgatccctccagacaacatctgcccctygtcatctgcagcgggatctccaaccagccgctggaattcacgttccagaaaagagacctgcctcagatgatggacgaggtgggtcgcatcctctgtaacc

SEQ ID NO: 46429 - DNA, 201 bp, Homo sapiens; identical to SEQ ID NO: 46031

SEQ ID NO: 46430 - DNA, 201 bp, Homo sapiens; identical to SEQ ID NO: 46032

SEQ ID NO: 46431 - DNA, 201 bp, Homo sapiens
tggtggagaacctgtgcatgaaggccgtcaaccagtccataggcagggccatcaggcaccagaaggattttgccagcatagtgctcctggaccagcgataygcccggccccctgtcctggccaagctgccggcctggatccgagcccgcgtggaggtcaaagctacctttggccccgccattgctgctgtgcagaaggtca

SEQ ID NO: 46432 - DNA, 201 bp, Homo sapiens
ggccatcaggcaccagaaggattttgccagcatagtgctcctggaccagcgatacgcccggccccctgtcctggccaagctgccggcctggatccgagccmgcgtggaggtcaaagctacctttggccccgccattgctgctgtgcagaaggtcagtcctacctttttctttctgagagcctcccaaccccgagatcacat

SEQ ID NO: 46433 - DNA, 201 bp, Homo sapiens; identical to SEQ ID NO: 46035

SEQ ID NO: 46434 - DNA, 201 bp, Homo sapiens; identical to SEQ ID NO: 46036

SEQ ID NO: 46435 - DNA, 201 bp, Homo sapiens; identical to SEQ ID NO: 46037

SEQ ID NO: 46436 - DNA, 201 bp, Homo sapiens; identical to SEQ ID NO: 46234

SEQ ID NO: 46437 - DNA, 201 bp, Homo sapiens; identical to SEQ ID NO: 46039

SEQ ID NO: 46438 - DNA, 201 bp, Homo sapiens; identical to SEQ ID NO: 46040

SEQ ID NO: 46439 - DNA, 201 bp, Homo sapiens
ttcggcccctccctgatcttaccaggtcacgtgatccctccagacaacatctgccccttgtcatctgcagcgggatctccaaccagccgctggaattcacsttccagaaaagagacctgcctcagatgatggacgaggtgggtcgcatcctctgtaacctgtgcggtgtggtttctggaggggtggtctgtttcttcccct

SEQ ID NO: 46440 - DNA, 201 bp, Homo sapiens; identical to SEQ ID NO: 46042

SEQ ID NO: 46441 - DNA, 201 bp, Homo sapiens; identical to SEQ ID NO: 46043

SEQ ID NO: 46442 - DNA, 201 bp, Homo sapiens; identical to SEQ ID NO: 46044

SEQ ID NO: 46443 - DNA, 201 bp, Homo sapiens; identical to SEQ ID NO: 46045

SEQ ID NO: 46444 - DNA, 201 bp, Homo sapiens; identical to SEQ ID NO: 46242

SEQ ID NO: 46445 - DNA, 201 bp, Homo sapiens; identical to SEQ ID NO: 46046

SEQ ID NO: 46446 - DNA, 201 bp, Homo sapiens; identical to SEQ ID NO: 46047

SEQ ID NO: 46447 - DNA, 201 bp, Homo sapiens; identical to SEQ ID NO: 46048

SEQ ID NO: 46448 - DNA, 201 bp, Homo sapiens; identical to SEQ ID NO: 46049

SEQ ID NO: 46449 - DNA, 201 bp, Homo sapiens; identical to SEQ ID NO: 46133

SEQ ID NO: 46450 - DNA, 201 bp, Homo sapiens; identical to SEQ ID NO: 46051

SEQ ID NO: 46451 - DNA, 201 bp, Homo sapiens; identical to SEQ ID NO: 46052

SEQ ID NO: 46452 - DNA, 201 bp, Homo sapiens; identical to SEQ ID NO: 46053

SEQ ID NO: 46453 - DNA, 201 bp, Homo sapiens; identical to SEQ ID NO: 46054

SEQ ID NO: 46454 - DNA, 201 bp, Homo sapiens; identical to SEQ ID NO: 46055

SEQ ID NO: 46455 - DNA, 110 bp, Homo sapiens; identical to SEQ ID NO: 46056

SEQ ID NO: 46456 - DNA, 201 bp, Homo sapiens; identical to SEQ ID NO: 46254

SEQ ID NO: 46457 - DNA, 201 bp, Homo sapiens; identical to SEQ ID NO: 46058

SEQ ID NO: 46458 - DNA, 201 bp, Homo sapiens; identical to SEQ ID NO: 46060

SEQ ID NO: 46459 - DNA, 201 bp, Homo sapiens; identical to SEQ ID NO: 46059

SEQ ID NO: 46460 - DNA, 201 bp, Homo sapiens; identical to SEQ ID NO: 46258

SEQ ID NO: 46461 - DNA, 201 bp, Homo sapiens; identical to SEQ ID NO: 46063

SEQ ID NO: 46462 - DNA, 201 bp, Homo sapiens; identical to SEQ ID NO: 46062

SEQ ID NO: 46463 - DNA, 201 bp, Homo sapiens
gcagcctcagtgagagcaccctgaagtttttgctcctgaatccagctgtgcactttgcccaagtggtgaaggaatgccgggcagtggtcattgcggggggkaccatgcagccggtgtctgacttccggcagcagctgctggcctgtgctggggtggaagctgagcgcgtggtggagttttcctgtgttttcggcccctccc

SEQ ID NO: 46464 - DNA, 201 bp, Homo sapiens; identical to SEQ ID NO: 46148

SEQ ID NO: 46465 - DNA, 201 bp, Homo sapiens; identical to SEQ ID NO: 46065

SEQ ID NO: 46466 - DNA, 201 bp, Homo sapiens; identical to SEQ ID NO: 46066

SEQ ID NO: 46467 - DNA, 201 bp, Homo sapiens; identical to SEQ ID NO: 46151

SEQ ID NO: 46468 - DNA, 201 bp, Homo sapiens; identical to SEQ ID NO: 46067

SEQ ID NO: 46469 - DNA, 201 bp, Homo sapiens; identical to SEQ ID NO: 46069

SEQ ID NO: 46470 - DNA, 201 bp, Homo sapiens; identical to SEQ ID NO: 46068

SEQ ID NO: 46471 - DNA, 201 bp, Homo sapiens
gcctggatccgagcccgcgtggaggtcaaagctacctttggccccgccattgctgctgtgcagaaggtcagtcctacctttttctttctgagagcctcccmaccccgagatcacatttctcactgccttctgtctgcccagtttcaccgggagaagtcggcctcttcctgatgggcaaccacaccaccgcccggcgccgtg

SEQ ID NO: 46472 - DNA, 201 bp, Homo sapiens; identical to SEQ ID NO: 46071

SEQ ID NO: 46473 - DNA, 201 bp, Homo sapiens; identical to SEQ ID NO: 46070

SEQ ID NO: 46474 - DNA, 201 bp, Homo sapiens; identical to SEQ ID NO: 46072

SEQ ID NO: 46475 - DNA, 201 bp, Homo sapiens; identical to SEQ ID NO: 46271

SEQ ID NO: 46476 - DNA, 201 bp, Homo sapiens; identical to SEQ ID NO: 46073

SEQ ID NO: 46477 - DNA, 201 bp, Homo sapiens; identical to SEQ ID NO: 46074

SEQ ID NO: 46478 - DNA, 201 bp, Homo sapiens; identical to SEQ ID NO: 46075

SEQ ID NO: 46479 - DNA, 201 bp, Homo sapiens; identical to SEQ ID NO: 46076

SEQ ID NO: 46480 - DNA, 201 bp, Homo sapiens; identical to SEQ ID NO: 46077

SEQ ID NO: 46481 - DNA, 201 bp, Homo sapiens
gccaaggcagcctcagtgagagcaccctgaagtttttgctcctgaatccagctgtgcactttgcccaagtggtgaaggaatgccgggcagtggtcattgcsgggggtaccatgcagccggtgtctgacttccggcagcagctgctggcctgtgctggggtggaagctgagcgcgtggtggagttttcctgtgttttcggcc

SEQ ID NO: 46482 - DNA, 201 bp, Homo sapiens; identical to SEQ ID NO: 46079

SEQ ID NO: 46483 - DNA, 201 bp, Homo sapiens; identical to SEQ ID NO: 46080

SEQ ID NO: 46484 - DNA, 201 bp, Homo sapiens; identical to SEQ ID NO: 46081

SEQ ID NO: 46485 - DNA, 201 bp, Homo sapiens; identical to SEQ ID NO: 46082

SEQ ID NO: 46486 - DNA, 122 bp, Homo sapiens
cctgttccggaggcgcgggcgktgccactgtcttggtacctgcggtagtagcctggctttgctctgacggcgatctcgcggcccgagagccttttatagacagctccttcagtgtctctgtt

SEQ ID NO: 46487 - DNA, 201 bp, Homo sapiens
ccccaagtagggagaagaagagagctcgttgggaggaagaaaaagaccgttggagtgacaaccagagttctggcaaagacaagaactatacctcaatcaargaaaaagagcccgaggagaccatgcctgacaagaatgaggaggaagaagaagaacttcttaagcctgtgtggattcgatgcactcattcagaaaactact

SEQ ID NO: 46488 - DNA, 201 bp, Homo sapiens
aacctccaagtgccccttccaccactttctcaaactctccagcccccaattttctccctccacgaccagactttgtacccttccccccacccatgcctccrtcagcgcaaggccctcttcccccctgcccaatcaggccgcctttccccaaccaccagatgaggcaccccttcccagttcctccttgttttcctcccatgc

SEQ ID NO: 46489 - DNA, 201 bp, Homo sapiens
ttaatgatccggacctgcgcgaagtctggctcaattatcctctccacccactccaactacaagagccaaatactgatcgacaacttattgaaacttctccrgttctacaaaaacttactgagtttgaagaagcaattggagtaatttttactcatgttcgacttctggcaagggcattcacattgagaactgtgggattta

SEQ ID NO: 46490 - DNA, 201 bp, Homo sapiens
tcagctttcatccggtggctgttcatcaagttatcagctgcaaatattgaacttacctctctctaagcagtgagtgttttgtagaaggaatccgtttaacrattaattggctaatgggagaaggggaaagactgatattcaagtcatacagattctttgaatcattagaataggagagaaatcatgattctaagccaggcc

SEQ ID NO: 46491 - DNA, 201 bp, Homo sapiens
ctttaggccccaaaatctgaggctgcttcaccctcagcagcctcctgtgcaatatcaatatgaacctccaagtgccccttccaccactttctcaaactctmcagcccccaattttctccctccacgaccagactttgtacccttccccccacccatgcctccgtcagcgcaaggccctcttcccccctgcccaatcaggcc

SEQ ID NO: 46492 - DNA, 201 bp, Homo sapiens
aggtctgaagccctccaaaaaatacggcagaagaatacaatgagacgagaagtaacggtggagctaagtagccaaggattctggaaaactggcatccgttytgatgtctgtcagcatgcaatgatgctacctgttctgacccatcatatccgctaccaccaatgcctaatgcatttggacaagttgataggatatactttc

SEQ ID NO: 46493 - DNA, 201 bp, Homo sapiens
aagaaataaaggagggcatgcaagtgtggagtatttacttgctcagtaactgtgactgttgtctattgagacctagcctagttttcctgcagacaatgaaygaagtgtgctcattgaaataaaatacagagtcaaatcgctattgttgttttaatgatctgtttttagctggatggtctttattacaaagtattagatttt

SEQ ID NO: 46494 - DNA, 201 bp, Homo sapiens
aatcatttattgcagcgctgtacattgataaggatttggaatatgttcatactttcatgaatgtctgcttctttccacgattgaaagagttcattttgaaycaggattggaatgaccccaaatcccagcttcagcagtgttgcttgacacttaggacagaaggaaaagagccagacattcctctgtacaagactctgcaga

SEQ ID NO: 46495 - DNA, 201 bp, Homo sapiens
aaaggctgaaacactatgatgaccacaggcaccgagatcacagtcatgggcgaggtgagaggcatcggtccctggatcggcgggagcgaggccgcagtccygacaggagaagacaagacagccggtacagatctgattatgaccgagggagaacaccatctcgccaccgcagctacgaacggagcagagagcgagaacggg

SEQ ID NO: 46496 - DNA, 122 bp, Homo sapiens; identical to SEQ ID NO: 46486

SEQ ID NO: 46497 - DNA, 201 bp, Homo sapiens; identical to SEQ ID NO: 46487

SEQ ID NO: 46498 - DNA, 201 bp, Homo sapiens; identical to SEQ ID NO: 46489

SEQ ID NO: 46499 - DNA, 201 bp, Homo sapiens; identical to SEQ ID NO: 46488

SEQ ID NO: 46500 - DNA, 201 bp, Homo sapiens; identical to SEQ ID NO: 46490

SEQ ID NO: 46501 - DNA, 201 bp, Homo sapiens; identical to SEQ ID NO: 46491

SEQ ID NO: 46502 - DNA, 201 bp, Homo sapiens
agggaggaagccctccaaaaaatacggcagaagaatacaatgagacgagaagtaacggtggagctaagtagccaaggattctggaaaactggcatccgttytgatgtctgtcagcatgcaatgatgctacctgttctgacccatcatatccgctaccaccaatgcctaatgcatttggacaagttgataggatatactttc

SEQ ID NO: 46503 - DNA, 201 bp, Homo sapiens; identical to SEQ ID NO: 46493

SEQ ID NO: 46504 - DNA, 201 bp, Homo sapiens; identical to SEQ ID NO: 46495

SEQ ID NO: 46505 - DNA, 201 bp, Homo sapiens; identical to SEQ ID NO: 46494

SEQ ID NO: 46506 - DNA, 201 bp, Homo sapiens; identical to SEQ ID NO: 46490

SEQ ID NO: 46507 - DNA, 201 bp, Homo sapiens; identical to SEQ ID NO: 46487

SEQ ID NO: 46508 - DNA, 201 bp, Homo sapiens; identical to SEQ ID NO: 46502

SEQ ID NO: 46509 - DNA, 201 bp, Homo sapiens; identical to SEQ ID NO: 46489

SEQ ID NO: 46510 - DNA, 201 bp, Homo sapiens; identical to SEQ ID NO: 46493

SEQ ID NO: 46511 - DNA, 201 bp, Homo sapiens; identical to SEQ ID NO: 46494

SEQ ID NO: 46512 - DNA, 201 bp, Homo sapiens
aaaggctgaaacactatgatgaccacaggcaccgagatcacagtcatgggcgaggtgagaggcatcggtccctggatcggcgggagcgaggccgcagtccygacaggagaagacaagacagccggtacagatctgattatgaccgagggagaacaccatctcgccaccgcagctacgaacggagcagtcgctccccaagta

SEQ ID NO: 46513 - DNA, 108 bp, Homo sapiens
gcgggcgktgccactgtcttggtacctgcggtagtagcctggctttgctctgacggcgatctcgcggcccgagagccttttataggttgcttttcccggggatgtgaa

SEQ ID NO: 46514 - DNA, 201 bp, Homo sapiens; identical to SEQ ID NO: 46487

SEQ ID NO: 46515 - DNA, 201 bp, Homo sapiens; identical to SEQ ID NO: 46489

SEQ ID NO: 46516 - DNA, 201 bp, Homo sapiens; identical to SEQ ID NO: 46488

SEQ ID NO: 46517 - DNA, 201 bp, Homo sapiens; identical to SEQ ID NO: 46490

SEQ ID NO: 46518 - DNA, 201 bp, Homo sapiens; identical to SEQ ID NO: 46491

SEQ ID NO: 46519 - DNA, 201 bp, Homo sapiens; identical to SEQ ID NO: 46502

SEQ ID NO: 46520 - DNA, 201 bp, Homo sapiens; identical to SEQ ID NO: 46493

SEQ ID NO: 46521 - DNA, 201 bp, Homo sapiens; identical to SEQ ID NO: 46495

SEQ ID NO: 46522 - DNA, 201 bp, Homo sapiens; identical to SEQ ID NO: 46494

SEQ ID NO: 46523 - DNA, 122 bp, Homo sapiens; identical to SEQ ID NO: 46486

SEQ ID NO: 46524 - DNA, 201 bp, Homo sapiens; identical to SEQ ID NO: 46487

SEQ ID NO: 46525 - DNA, 201 bp, Homo sapiens; identical to SEQ ID NO: 46489

SEQ ID NO: 46526 - DNA, 201 bp, Homo sapiens; identical to SEQ ID NO: 46488

SEQ ID NO: 46527 - DNA, 201 bp, Homo sapiens; identical to SEQ ID NO: 46490

SEQ ID NO: 46528 - DNA, 201 bp, Homo sapiens; identical to SEQ ID NO: 46491

SEQ ID NO: 46529 - DNA, 201 bp, Homo sapiens; identical to SEQ ID NO: 46502

SEQ ID NO: 46530 - DNA, 201 bp, Homo sapiens; identical to SEQ ID NO: 46493

SEQ ID NO: 46531 - DNA, 201 bp, Homo sapiens; identical to SEQ ID NO: 46495

SEQ ID NO: 46532 - DNA, 201 bp, Homo sapiens; identical to SEQ ID NO: 46494

SEQ ID NO: 46533 - DNA, 201 bp, Homo sapiens
cctctcactgatgctgccgcggtgtctggagctgagcgggaaacagccgcgggcacagctgggctgacgccctctccaccgtccggctccctcacgtcaaktccatctgtccccatgtgcctaggatccctgtgactctcaacatgaagatggtgacaccttcctgatttgacctgatggggctgagtccagatgccccag

SEQ ID NO: 46534 - DNA, 201 bp, Homo sapiens
atggtgacaccttcctgatttgacctgatggggctgagtccagatgccccagaggacgaggctggcatcaagaaggcagcagagaacatcaaggccttgaytgagcatgaaatgaagaacgggatccctgccaatcgaatcgtcctgggaggcttttcacagggcggggccctgtccctctacacggccctcacctgcccc

SEQ ID NO: 46535 - DNA, 201 bp, Homo sapiens
ctgagcgggaaacagccgcggttagttttttatatggacttggagacacagggcacagctgggctgacgccctctccaccgtccggctccctcacgtcaaktccatctgtccccatgtgcctaggatccctgtgactctcaacatgaagatggtgacaccttcctgatttgacctgatggggctgagtccagatgccccag

SEQ ID NO: 46536 - DNA, 201 bp, Homo sapiens; identical to SEQ ID NO: 46535

SEQ ID NO: 46537 - DNA, 201 bp, Homo sapiens; identical to SEQ ID NO: 46534

SEQ ID NO: 46538 - DNA, 201 bp, Homo sapiens
cccaccgcctgggcctcccctacaagcggtccctgcggaacctcatggccgactacctcagacagatcatccaggacaatgtggatgggcacagctccagygaggacgccggcgcctgcatgcacctggtgatctggaaggttcgagaagacgccaagaccaagcgatgacgcctgcccgcctcccacccgcctctcctgc

SEQ ID NO: 46539 - DNA, 201 bp, Homo sapiens
ccgcagccccagcaagaacatctacctgaatgtggccgtgaacaccctcaagaagctcaggggcctggcccccagcgctgtgcccggcctcagcaaaaccrgtggccgcagggttgtgtcccacgaggtggtgttggggggcaggttggccgccaagaccagcttctcgctcagccgtccaagcagcccccgggtggagga

SEQ ID NO: 46540 - DNA, 201 bp, Homo sapiens
tgtacagccgcctcagggagtacctgctcacccaggaccagctcaaggagaacggctaccccttcccgcacccagagcggcccgggggcgcaatcatcttyacagctgaggagaagaggcccaaggactcttcctgcaggacctgctgccgctgtggcaccgagtacctcgtgtcctcttcaggccgctgcatccgggacg

SEQ ID NO: 46541 - DNA, 201 bp, Homo sapiens
ggcggccgagccccacaagcggggactcccgaccggcggccggcagaggcccaccccgccccctccagctgcccgacaggaagagcaccaaggccccgtcsgggaagctagtggagcggaaagcccgctcactagacgagggcgcctcccaggacgcccccaagctgaagaagcgggccctgagccacgccgacctctttg

SEQ ID NO: 46542 - DNA, 201 bp, Homo sapiens
gaaaacacgcacattgtcggggatggcgtccaagactaccaccaccatcatccctaagcgaatcgcccacagtccatccttacagagtttaaagaaacccrttatccccaaagagtttgggggcaaagtccccaccgtcatccgccagcgctatctcaacctgttcatcgaggagtgtctcaagttctgtacctccaacca

SEQ ID NO: 46543 - DNA, 201 bp, Homo sapiens
atccgccagcgctatctcaacctgttcatcgaggagtgtctcaagttctgtacctccaaccaggaggccatagagaaggcactgaacgaggagaaggtggyctatgaccgcagccccagcaagaacatctacctgaatgtggccgtgaacaccctcaagaagctcaggggcctggcccccagcgctgtgcccggcctcagc

SEQ ID NO: 46544 - DNA, 201 bp, Homo sapiens
agggcctggaggccgaggggggcggcctgcgggagaccaaggagacggccgtgcagtgcgacgtgggggacctccagccgcccccagccaagcccgcctcsccagcccaggtccagtcctcacaggatgggggctgccccaaggagggaaaacccaagaagaaaaaaaccggggccccacctgcccccagctgcaaagacg

SEQ ID NO: 46545 - DNA, 201 bp, Homo sapiens
aaacccaagaagaaaaaaaccggggccccacctgcccccagctgcaaagacggggcccaggggaaggacaagaccaaggacaagggccgagggcggcctgyggagaagccccgtgcggacaagaagggcccgcaggccagcagcccccggcgcaaggcagagtggccggaagggaccaagaagaagccatcttcggccact

SEQ ID NO: 46546 - DNA, 201 bp, Homo sapiens
cgcccctggcgagaagaggaggatcgcccacatccccaacccccgcctggctgcagcccccacaggtgccaagaggacccttgcggccagcggcagccagycctccaacggccctgagccaggtggccagcagctgaaaacacgcacattgtcggggatggcgtccaagactaccaccaccatcatccctaagcgaatcgc

SEQ ID NO: 46547 - DNA, 178 bp, Homo sapiens
ctgagaacccagctggcccctcgttagccccagggtctgccgtctagagggagcccaccggcctccggacactgtcttcccgctagagccccgtcctcctytgcggggctctccggacccccttccccctcacctccaggcagggacagaataaatgtttgtatggattttagatttt

SEQ ID NO: 46548 - DNA, 201 bp, Homo sapiens
gcagcccggaacttcggctacgtgttcctgtcccgcacccaggacaccgtcacgatcatggagctgggggaggaacgggtctaccaggtcctggccataakggacttcaacagcacgcgcaaacggatgtcggtgctggttcgaaagccagagggcgccatctgcctgtacaccaagggcgccgacacggtcatcttcgaa

SEQ ID NO: 46549 - DNA, 201 bp, Homo sapiens
agaagtaccaccaggtggtgaccctggccatcggggacggtgccaacgacatcaacatgatcaagaccgcggacgtgggcgtggggctggcgggccaggarggcatgcaggcagttcagaacagcgacttcgtgctcggccagttctgcttcctgcagcgcctcctgctggtgcacggccgctggtcctacgtgcggatct

SEQ ID NO: 46550 - DNA, 201 bp, Homo sapiens
ggcaggagctcggccagtccaggagggatttcctctacgccaggcgcctgtccctgctgtgccggaggttcgggctcccgctggctgcaccgccagcccargactccagagcccgccgtagctccgaggtgctgcaggagcgcgccttcgtggacctggcgtccaagtgccaggcggtcatctgctgccgcgtgacgccca

SEQ ID NO: 46551 - DNA, 201 bp, Homo sapiens
tgaccagctgttgtaccaggcggcctcccccgacgagggggcgctggtcaccgcagcccggaacttcggctacgtgttcctgtcccgcacccaggacaccrtcacgatcatggagctgggggaggaacgggtctaccaggtcctggccataatggacttcaacagcacgcgcaaacggatgtcggtgctggttcgaaagcc

SEQ ID NO: 46552 - DNA, 201 bp, Homo sapiens
agggcctggaggccgaggggggcggcctgcgggagaccaaggagacggccgtgcagtgcgacgtgggggacctccagccgcccccagccaagcccgcctcsccagcccaggggccgcccaagcggctcaaggcctccccgcccccctcccccgccccatcctcctcctcctcctcctcctcctccacctccagcgcggggg

SEQ ID NO: 46553 - DNA, 201 bp, Homo sapiens
aggagaaggtgatcctgtgctggcaaaggaagaaatacaagaccaatgtcatccgcacggccaagtacaacttctactcgttcctgccgctgaacctgtaygagcagttccaccgcgtgtccaacctgttcttcctcatcatcatcatcctgcagagcattcccgacatctccacgctgccctggttctcgctcagtaccc

SEQ ID NO: 46554 - DNA, 201 bp, Homo sapiens
ccgatgtccatgttcatcctgtgagtctccgccggctgcgtccccggtgcaaacgcggaacggggaggcatggggatggcacacagcaggcggggctgacygtgaccctgagtgcctctgcaggtccgagttcatctacctggggaacagcgtcttcatcgactgggacgtgcagatgtactacaagccgcaggacgtgcc

SEQ ID NO: 46555 - DNA, 201 bp, Homo sapiens
tcagtagaagcttgattaatgctggctccaggcttttacattactgagcaggtgctcagtaaatgctggtctgaggccttgcattcagcaggtgctcagtwaatgctggcctgaggccttgcattcagcaggtgctcagtaaatgctggtctgaggccttgcattcagcaggtgctcagtaactgctggctcagtagatgc

SEQ ID NO: 46556 - DNA, 201 bp, Homo sapiens
atgctggtcacagctccgtgagtctttgcactcagtagaagcttgattaatgctggctccaggcttttacattactgagcaggtgctcagtaaatgctggyctgaggccttgcattcagcaggtgctcagtaaatgctggcctgaggccttgcattcagcaggtgctcagtaaatgctggtctgaggccttgcattcagca

SEQ ID NO: 46557 - DNA, 201 bp, Homo sapiens
ctgacctcaagtgatccacccaccttgacctcccgaaatgctgggattacaggggtgagccaccatgtctggccgatatttttattttcatctcgaggacygaaccgcccgtcctaaccaaatcactggtttggcacaagagttctgtgtgtctcatttgccctgtcccagtgcacgtgagggtcagttaatacccaacct

SEQ ID NO: 46558 - DNA, 201 bp, Homo sapiens
atggcacccctctgccaggcagcccgcggctctcgttccagaccaatgtcatccgcacggccaagtacaacttctactcgttcctgccgctgaacctgtaygagcagttccaccgcgtgtccaacctgttcttcctcatcatcatcatcctgcagagcattcccgacatctccacgctgccctggttctcgctcagtaccc

SEQ ID NO: 46559 - DNA, 201 bp, Homo sapiens
cagaacaaagagaggtggaaagagttagctgcacaagaagcaagaaccagttcacagaagtgtgagtttattcatcagtaaacacctttaagtaaaacctygtgcatggtggcagctctaatttgaccaaaagacttggagattttgattatgcttgctggaaatctaccctgtcctgtgtgagacaggaaatctattttt

SEQ ID NO: 46560 - DNA, 201 bp, Homo sapiens
gtgaagcagctggaaagaggtgatgttaacgtcgtcgacttaaagaagaatattgaatatgcggcatctgtgctggaagcagtttatatcgatgaaacaakaagacttctggatactgaagatgagctcagtgacattcagactgactcagtcccatctgaagtccgggactggttggcttctacctttacacggaaaatg

SEQ ID NO: 46561 - DNA, 201 bp, Homo sapiens; identical to SEQ ID NO: 46560

SEQ ID NO: 46562 - DNA, 201 bp, Homo sapiens
gtttttaatttttcttgctttgaaccctgtcataatgactgtgcaatacatgtgcagaagatgaggtattttaaaatttacttccttgcactgtcttacamagagtgctataactataaatttttcaaggtcttaaataaaaggaagcaaaaacaaaattattgaaaaattttttttgttgtgctggggaatatactattt

SEQ ID NO: 46563 - DNA, 201 bp, Homo sapiens
gtttttatcagagtttttggccagtgcttctgccatttttttccctccacaatttggccttcttcaatcaagccagataaatttttgagacaaaagtcagmcagtttttaatttttcttgctttgaaccctgtcataatgactgtgcaatacatgtgcagaagatgaggtattttaaaatttacttccttgcactgtctta

SEQ ID NO: 46564 - DNA, 201 bp, Homo sapiens
agcaaaaacaaaattattgaaaaattttttttgttgtgctggggaatatactatttagattgtccttcttattttaaatgcatgggaacagaatgacaggkgggatgctgaggagctggttgaagcatcagagcaatgctacagtccaacaatggagcattagatccccagctaggtgacctgatgaacacctttgtaaac

SEQ ID NO: 46565 - DNA, 201 bp, Homo sapiens; identical to SEQ ID NO: 46560

SEQ ID NO: 46566 - DNA, 201 bp, Homo sapiens
tcaagtttttatcagagtttttggccagtgcttctgccatttttttccctccacaatttggccttcttcaatcaagccagataaatttttgagacaaaagycagacagtttttaatttttcttgctttgaaccctgtcataatgactgtgcaatacatgtgcagaagatgaggtattttaaaatttacttccttgcactgt

SEQ ID NO: 46567 - DNA, 201 bp, Homo sapiens; identical to SEQ ID NO: 46562

SEQ ID NO: 46568 - DNA, 201 bp, Homo sapiens; identical to SEQ ID NO: 46563

SEQ ID NO: 46569 - DNA, 201 bp, Homo sapiens; identical to SEQ ID NO: 46564

SEQ ID NO: 46570 - DNA, 201 bp, Homo sapiens; identical to SEQ ID NO: 46560

SEQ ID NO: 46571 - DNA, 201 bp, Homo sapiens; identical to SEQ ID NO: 46566

SEQ ID NO: 46572 - DNA, 201 bp, Homo sapiens; identical to SEQ ID NO: 46562

SEQ ID NO: 46573 - DNA, 201 bp, Homo sapiens; identical to SEQ ID NO: 46563

SEQ ID NO: 46574 - DNA, 201 bp, Homo sapiens; identical to SEQ ID NO: 46564

SEQ ID NO: 46575 - DNA, 201 bp, Homo sapiens; identical to SEQ ID NO: 46560

SEQ ID NO: 46576 - DNA, 201 bp, Homo sapiens
aaaaatgatgagtcgtctccacacttcagccagcatgaatacaagcaagattgtaaaataattataatctgaagcagagccagccatgcaacccgagcctrtctttcttcattaatttgtatacagttcttattttaagagaacaaactttcagagggtactcacatggggctgctgaaccagctgtacaacttttatttt

SEQ ID NO: 46577 - DNA, 201 bp, Homo sapiens
gctctggtcagcttcgcatgggcttctatcagttgatatggcatcttcaacttcagccaagaggaggttattagattataagtgctaaaaatgatgagtcrtctccacacttcagccagcatgaatacaagcaagattgtaaaataattataatctgaagcagagccagccatgcaacccgagcctatctttcttcattaa

SEQ ID NO: 46578 - DNA, 201 bp, Homo sapiens; identical to SEQ ID NO: 46566

SEQ ID NO: 46579 - DNA, 201 bp, Homo sapiens; identical to SEQ ID NO: 46559

SEQ ID NO: 46580 - DNA, 201 bp, Homo sapiens; identical to SEQ ID NO: 46560

SEQ ID NO: 46581 - DNA, 201 bp, Homo sapiens; identical to SEQ ID NO: 46576

SEQ ID NO: 46582 - DNA, 201 bp, Homo sapiens; identical to SEQ ID NO: 46577

SEQ ID NO: 46583 - DNA, 201 bp, Homo sapiens; identical to SEQ ID NO: 46562

SEQ ID NO: 46584 - DNA, 201 bp, Homo sapiens; identical to SEQ ID NO: 46563

SEQ ID NO: 46585 - DNA, 201 bp, Homo sapiens; identical to SEQ ID NO: 46564

SEQ ID NO: 46586 - DNA, 113 bp, Homo sapiens
tgttctacctacmctgtatctgatcactgcataagagatagtagaaatggcattatctttaaagtagtgatattttcaagccatgaagtttagtgacttgctgaaatgggcta

SEQ ID NO: 46587 - DNA, 201 bp, Homo sapiens; identical to SEQ ID NO: 46566

SEQ ID NO: 46588 - DNA, 201 bp, Homo sapiens; identical to SEQ ID NO: 46560

SEQ ID NO: 46589 - DNA, 143 bp, Homo sapiens
taatcccctgaaccaaaggatatgttacttcatttgaaagggagaattaaaggagcagatggagttaaaattgctaatcagctgactttaaaatagggagmgtatcctgtattacccaggtgagcctaatgtaatcacaaaga

SEQ ID NO: 46590 - DNA, 201 bp, Homo sapiens
tgtggcagcgcctgaaaggaataaaagatgacagtctcagaagacaccagaaaaggatctacaatggttctccttaaaactcaattcccaggcttggggtrggcagacttatcaccctccagaaatgtccacgtcttaatcccctgaaccaaaggatatgttacttcatttgaaagggagaattaaaggagcagatggagt

SEQ ID NO: 46591 - DNA, 113 bp, Homo sapiens; identical to SEQ ID NO: 46586

SEQ ID NO: 46592 - DNA, 201 bp, Homo sapiens; identical to SEQ ID NO: 46559

SEQ ID NO: 46593 - DNA, 113 bp, Homo sapiens; identical to SEQ ID NO: 46586

SEQ ID NO: 46594 - DNA, 201 bp, Homo sapiens
aatatatgtggttcagatatgcagaaaggtaactaagaaagccatttgccgggatactgccacaaataaaatttccctcaggaaaaggctaaagccaagasactgtgactggagctgcctttgtcagcaaggagaaagaagatccaatgggcttgtactaatgtcaggggcacgtgtccctctgccggccacgtgcacctt

SEQ ID NO: 46595 - DNA, 201 bp, Homo sapiens
aagacggccggatccgtgagggagaccgcatcatccagattaacggtgtagacgtccagaaccgggaagaggcggtggccatcctgagccaggaagagaayaccaacatctccctgctggtggcccgacctgagagtcagctggcgaaaaggtggaaggacagcgaccgggatgacttcctggatgactttggctctgaga

SEQ ID NO: 46596 - DNA, 201 bp, Homo sapiens
ggacttggtggcgatccgcaacctggaccccagtgagaggcggtgggctgactgggaaggagaggcccccaacctcctcaggatttgcacgtgtgaactasgctgcctgtggggtgccccttaggcttggagagccccagattggaggcagacagactgcaccaccccttccccccctgcatctcaagaataaagcaagct

SEQ ID NO: 46597 - DNA, 201 bp, Homo sapiens
cttcagcttctttctttggcccgaccggaagaagggcctttcatccaggcctggtggctcatgaccgcgtgagcgctgcctcattctgctaatcttagccygggctgcggggagccccccaatcagccatgagtattatgacccggcggagtttatggagggcggcccgcaggaggcagaccgcttggatgagctggagta

SEQ ID NO: 46598 - DNA, 201 bp, Homo sapiens
cgggcgggtacacggcccaggcccagggaaccccctggggccccggccctcactctcctatagagattgtgtgtgtgtgtgtgtgcgcgcgcgcgtgctckctgtgcgcacgcacacatctcgtctgggtgtgcgcacagggctttgttagcagagagaagcccctgaggagaagggacgcttttcttccttctgcccaag

SEQ ID NO: 46599 - DNA, 201 bp, Homo sapiens; identical to SEQ ID NO: 46595

SEQ ID NO: 46600 - DNA, 201 bp, Homo sapiens; identical to SEQ ID NO: 46596

SEQ ID NO: 46601 - DNA, 201 bp, Homo sapiens; identical to SEQ ID NO: 46598

SEQ ID NO: 46602 - DNA, 201 bp, Homo sapiens; identical to SEQ ID NO: 46595

SEQ ID NO: 46603 - DNA, 201 bp, Homo sapiens; identical to SEQ ID NO: 46596

SEQ ID NO: 46604 - DNA, 201 bp, Homo sapiens; identical to SEQ ID NO: 46598

SEQ ID NO: 46605 - DNA, 201 bp, Homo sapiens; identical to SEQ ID NO: 46595

SEQ ID NO: 46606 - DNA, 201 bp, Homo sapiens; identical to SEQ ID NO: 46595

SEQ ID NO: 46607 - DNA, 201 bp, Homo sapiens; identical to SEQ ID NO: 46596

SEQ ID NO: 46608 - DNA, 201 bp, Homo sapiens; identical to SEQ ID NO: 46598

SEQ ID NO: 46609 - DNA, 201 bp, Homo sapiens; identical to SEQ ID NO: 46595

SEQ ID NO: 46610 - DNA, 201 bp, Homo sapiens; identical to SEQ ID NO: 46595

SEQ ID NO: 46611 - DNA, 201 bp, Homo sapiens; identical to SEQ ID NO: 46595

SEQ ID NO: 46612 - DNA, 201 bp, Homo sapiens; identical to SEQ ID NO: 46596

SEQ ID NO: 46613 - DNA, 201 bp, Homo sapiens; identical to SEQ ID NO: 46598

SEQ ID NO: 46614 - DNA, 201 bp, Homo sapiens; identical to SEQ ID NO: 46595

SEQ ID NO: 46615 - DNA, 201 bp, Homo sapiens; identical to SEQ ID NO: 46596

SEQ ID NO: 46616 - DNA, 201 bp, Homo sapiens; identical to SEQ ID NO: 46598

SEQ ID NO: 46617 - DNA, 201 bp, Homo sapiens; identical to SEQ ID NO: 46595

SEQ ID NO: 46618 - DNA, 201 bp, Homo sapiens; identical to SEQ ID NO: 46596

SEQ ID NO: 46619 - DNA, 201 bp, Homo sapiens; identical to SEQ ID NO: 46598

SEQ ID NO: 46620 - DNA, 201 bp, Homo sapiens
ggggaagactccagccgccagggggagcgcgtgccgttcttgcctctctggcctgcgcctcctgagccgagtagatatcccggagttccgcgcggcgccarcccttccgccacggccgtctctggagagcagcagccatggccctacgctaccctatggccgtgggcctcaacaagggccacaaagtgaccaagaacgtga

SEQ ID NO: 46621 - DNA, 201 bp, Homo sapiens
cttgcctctctggcctgcgcctcctgagccgagtagatatcccggagttccgcgcggcgccagcccttccgccacggccgtctctggagagcagcagccakggccctacgctaccctatggccgtgggcctcaacaagggccacaaagtgaccaagaacgtgagcaagcccaggcacagccgacgccgcgggcgtctgacc

SEQ ID NO: 46622 - DNA, 201 bp, Homo sapiens
ccagccgccagggggagcgcgtgccgttcttgcctctctggcctgcgcctcctgagccgagtagatatcccggagttccgcgcggcgccagcccttccgcsacggccgtctctggagagcagcagccatggccctacgctaccctatggccgtgggcctcaacaagggccacaaagtgaccaagaacgtgagcaagcccag

SEQ ID NO: 46623 - DNA, 201 bp, Homo sapiens; identical to SEQ ID NO: 46620

SEQ ID NO: 46624 - DNA, 201 bp, Homo sapiens; identical to SEQ ID NO: 46621

SEQ ID NO: 46625 - DNA, 201 bp, Homo sapiens; identical to SEQ ID NO: 46622

SEQ ID NO: 46626 - DNA, 201 bp, Homo sapiens
gcaaaaccgagaaaaacgacgggcacctggaaccagtcacggcttgggaggtgcaggtgccccgtgttaggcgcctttgtcggggacttgcaaggcctcayctgtttggccatgattgatgacgtgactgcttccattttgcagatgaggaaactaaggctcagagaggccacgccacccttgagccacccatggacccct

SEQ ID NO: 46627 - DNA, 201 bp, Homo sapiens
tggcgagcgaggctgaaggagccgggacgcggggctctgggcctcgggaactgagccggtactcacctccgccccttctccccgtcgctgtccgcagccakggccctacgctaccctatggccgtgggcctcaacaagggccacaaagtgaccaagaacgtgagcaagcccaggcacagccgacgccgcgggcgtctgacc

SEQ ID NO: 46628 - DNA, 201 bp, Homo sapiens
tgtgcaggttggaggatggttggttgtggcgagcgaggctgaaggagccgggacgcggggctctgggcctcgggaactgagccggtactcacctccgcccyttctccccgtcgctgtccgcagccatggccctacgctaccctatggccgtgggcctcaacaagggccacaaagtgaccaagaacgtgagcaagcccaggc

SEQ ID NO: 46629 - DNA, 186 bp, Homo sapiens
agcagcaggtaagtggtttcccgcactgccggtatccgccgccatccggactcccgggtcctctgtgcaggttggaggatggttgrttgtggcgagcgaggctgaaggagccgggacgcggggctctgggcctcgggaactgagccggtactcacctccgccccttctccccgtcgctgtccgcag

SEQ ID NO: 46630 - DNA, 133 bp, Homo sapiens
ctcacagagacacccctgagagggtggccacagcccaagatgaagtcatcaagacagtgccccgtgttaggcgcctttgtcggggacttgcaaggcctcayctgtttggccatgattgatgacgtgactgctt

SEQ ID NO: 46631 - DNA, 201 bp, Homo sapiens
acactaaaggacctgagatccgaactgggctcatcaagggcagcggcactgcagaggtggagctgaagaagggagccactctcaaaatcacgctggataaygcctacatggaaaagtgtgacgagaacatcctgtggctggactacaagaacatctgcaaggtggtggaagtgggcagcaagatctacgtggatgatgggc

SEQ ID NO: 46632 - DNA, 201 bp, Homo sapiens
agctgcacgcgccgtggctccggatctcttcgtctttgcagcgtagcccgagtcggtcagcgccggaggtgagcgccatgtcgaagccccatagtgaagcygggactgccttcattcagacccagcagctgcacgcagccatggctgacacattcctggagcacatgtgccgcctggacattgattcaccacccatcacag

SEQ ID NO: 46633 - DNA, 201 bp, Homo sapiens
gggctcatcaagggcagcggcactgcagaggtggagctgaagaagggagccactctcaaaatcacgctggataacgcctacatggaaaagtgtgacgagarcatcctgtggctggactacaagaacatctgcaaggtggtggaagtgggcagcaagatctacgtggatgatgggcttatttctctccaggtgaagcagaaa

SEQ ID NO: 46634 - DNA, 201 bp, Homo sapiens
ccttgctcagaagatgatgattggacggtgcaaccgagctgggaagcctgtcatctgtgctactcaggcatatgctggagagcatgatcaagaagccccgscccactcgggctgaaggcagtgatgtggccaatgcagtcctggatggagccgactgcatcatgctgtctggagaaacagccaaaggggactatcctctgg

SEQ ID NO: 46635 - DNA, 201 bp, Homo sapiens
ccacggaaagctttgcttctgaccccatcctctaccggcccgttgctgtggctctagacactaaaggacctgagatccgaactgggctcatcaagggcagyggcactgcagaggtggagctgaagaagggagccactctcaaaatcacgctggataacgcctacatggaaaagtgtgacgagaacatcctgtggctggact

SEQ ID NO: 46636 - DNA, 201 bp, Homo sapiens
tccttgctcagaagatgatgattggacggtgcaaccgagctgggaagcctgtcatctgtgctactcaggcatatgctggagagcatgatcaagaagccccsccccactcgggctgaaggcagtgatgtggccaatgcagtcctggatggagccgactgcatcatgctgtctggagaaacagccaaaggggactatcctctg

SEQ ID NO: 46637 - DNA, 197 bp, Homo sapiens
gatggcaagagggtgacagcttcctttcctgtgtgtactctgtccagttcctttagaaaaaccgactctggccctggcccttacttgcttctctagctctytaggcctctccagtttgcacctgtccccaccctccactcagctgtcctgcagcaaacactccaccctccaccttccattttcccccactactgcag

SEQ ID NO: 46638 - DNA, 201 bp, Homo sapiens
agtgggcagcaagatctacgtggatgatgggcttatttctctccaggtgaagcagaaaggtgccgacttcctggtgacggaggtggaaaatggtggctccytgggcagcaagaagggtgtgaaccttcctggggctgctgtggacttgcctgctgtgtcggagaaggacatccaggatctgaagtttggggtcgagcagga

SEQ ID NO: 46639 - DNA, 199 bp, Homo sapiens
cagatggcaagagggtgacagcttcctttcctgtgtgtactctgtccagttcctttagaaaaaccgactctggccctggcccttacttgcttctctagctytctaggcctctccagtttgcacctgtccccaccctccactcagctgtcctgcagcaaacactccaccctccaccttccattttcccccactactgcag

SEQ ID NO: 46640 - DNA, 135 bp, Homo sapiens
ccaccgaaagggcaacctgcccgcgcgttccgccrccgccgccgcgcttcctcctgaaggtgactgcgcccgcggggacgcagggggcggggcccgggtcgcccggagccgggattgggcagagggcggggcggc

SEQ ID NO: 46641 - DNA, 201 bp, Homo sapiens; identical to SEQ ID NO: 46631

SEQ ID NO: 46642 - DNA, 201 bp, Homo sapiens
gcacgcgccgtggctccggatctcttcgtctttgcagcgtagcccgagtcggtcagcgccggaggacctcagcagccatgtcgaagccccatagtgaagcygggactgccttcattcagacccagcagctgcacgcagccatggctgacacattcctggagcacatgtgccgcctggacattgattcaccacccatcacag

SEQ ID NO: 46643 - DNA, 201 bp, Homo sapiens; identical to SEQ ID NO: 46633

SEQ ID NO: 46644 - DNA, 201 bp, Homo sapiens
tcttccttgctcagaagatgatgattggacggtgcaaccgagctgggaagcctgtcatctgtgctactcagatgctggagagcatgatcaagaagccccgscccactcgggctgaaggcagtgatgtggccaatgcagtcctggatggagccgactgcatcatgctgtctggagaaacagccaaaggggactatcctctgg

SEQ ID NO: 46645 - DNA, 201 bp, Homo sapiens; identical to SEQ ID NO: 46635

SEQ ID NO: 46646 - DNA, 201 bp, Homo sapiens
gtcttccttgctcagaagatgatgattggacggtgcaaccgagctgggaagcctgtcatctgtgctactcagatgctggagagcatgatcaagaagccccsccccactcgggctgaaggcagtgatgtggccaatgcagtcctggatggagccgactgcatcatgctgtctggagaaacagccaaaggggactatcctctg

SEQ ID NO: 46647 - DNA, 201 bp, Homo sapiens
gtcaagaaacagccagcaagagttaggggccttagggcactgggctgttgttccattgaagccgactctggccctggcccttacttgcttctctagctctytaggcctctccagtttgcacctgtccccaccctccactcagctgtcctgcagcaaacactccaccctccaccttccattttcccccactactgcagcacc

SEQ ID NO: 46648 - DNA, 201 bp, Homo sapiens; identical to SEQ ID NO: 46638

SEQ ID NO: 46649 - DNA, 201 bp, Homo sapiens
gggtcaagaaacagccagcaagagttaggggccttagggcactgggctgttgttccattgaagccgactctggccctggcccttacttgcttctctagctytctaggcctctccagtttgcacctgtccccaccctccactcagctgtcctgcagcaaacactccaccctccaccttccattttcccccactactgcagca

SEQ ID NO: 46650 - DNA, 201 bp, Homo sapiens; identical to SEQ ID NO: 46631

SEQ ID NO: 46651 - DNA, 201 bp, Homo sapiens
ggctcctcacgcctggggcctgctcttcagaagtccccagcgccgttccttccagatcaggcgggacctcagcagccatgtcgaagccccatagtgaagcygggactgccttcattcagacccagcagctgcacgcagccatggctgacacattcctggagcacatgtgccgcctggacattgattcaccacccatcacag

SEQ ID NO: 46652 - DNA, 201 bp, Homo sapiens; identical to SEQ ID NO: 46633

SEQ ID NO: 46653 - DNA, 201 bp, Homo sapiens; identical to SEQ ID NO: 46644

SEQ ID NO: 46654 - DNA, 201 bp, Homo sapiens
gctacgccatcagtccccaccaagggccagtcgcccggctagtgcggaatcccggcgcgccggccggccccgggcacgcaggcagggcggcgcaggatccrgggcgtctgggatgcagtggagctcagagagaggagaacggctcctcacgcctggggcctgctcttcagaagtccccagcgccgttccttccagatcagg

SEQ ID NO: 46655 - DNA, 201 bp, Homo sapiens; identical to SEQ ID NO: 46635

SEQ ID NO: 46656 - DNA, 201 bp, Homo sapiens; identical to SEQ ID NO: 46646

SEQ ID NO: 46657 - DNA, 201 bp, Homo sapiens; identical to SEQ ID NO: 46647

SEQ ID NO: 46658 - DNA, 201 bp, Homo sapiens; identical to SEQ ID NO: 46638

SEQ ID NO: 46659 - DNA, 201 bp, Homo sapiens; identical to SEQ ID NO: 46649

SEQ ID NO: 46660 - DNA, 201 bp, Homo sapiens
tctctcatggaactcatgagtaccatgcggagaccatcaagaatgtgcgcacagccacggaaagctttgcttctgaccccatcctctaccggcccgttgcygtggctctagacactaaaggacctgagatccgaactgggctcatcaagggcagcggcactgcagaggtggagctgaagaagggagccactctcaaaatca

SEQ ID NO: 46661 - DNA, 187 bp, Homo sapiens
agcgggataaccttgaggctgaggcagtggctccttgcacagcagctgcacgcgccgtggctccggatctcttcgtctttgcagcgyagcccgagtcggtcagcgccggagatgactcaacctttcaattattctgcttttgagagaattatcttcgctgggacctcagcagccatgtcgaagcccc

SEQ ID NO: 46662 - DNA, 201 bp, Homo sapiens
gcggagaccatcaagaatgtgcgcacagccacggaaagctttgcttctgaccccatcctctaccggcccgttgctgtggctctagacactaaaggacctgrgatccgaactgggctcatcaagggcagcggcactgcagaggtggagctgaagaagggagccactctcaaaatcacgctggataacgcctacatggaaaag

SEQ ID NO: 46663 - DNA, 201 bp, Homo sapiens
cagtggagacgttgaaggagatgattaagtctggaatgaatgtggctcgtctgaacttctctcatggaactcatgagtaccatgcggagaccatcaagaaygtgcgcacagccacggaaagctttgcttctgaccccatcctctaccggcccgttgctgtggctctagacactaaaggacctgagatccgaactgggctca

SEQ ID NO: 46664 - DNA, 201 bp, Homo sapiens
ggaggcccctggagccagatggcaagagggtgacagcttcctttcctgtgtgtactctgtccagttcctttagaaaaaatggatgcccagaggactcccayccctggcttggggtcaagaaacagccagcaagagttaggggccttagggcactgggctgttgttccattgaagccgactctggccctggcccttacttgc

SEQ ID NO: 46665 - DNA, 201 bp, Homo sapiens
agcaaaatcgagaatcatgagggggttcggaggtttgatgaaatcctggaggccagtgatgggatcatggtggctcgtggtgatctaggcattgagattcstgcagagaaggtcttccttgctcagaagatgatgattggacggtgcaaccgagctgggaagcctgtcatctgtgctactcagatgctggagagcatgatc

SEQ ID NO: 46666 - DNA, 201 bp, Homo sapiens
aggcccctggagccagatggcaagagggtgacagcttcctttcctgtgtgtactctgtccagttcctttagaaaaaatggatgcccagaggactcccaacyctggcttggggtcaagaaacagccagcaagagttaggggccttagggcactgggctgttgttccattgaagccgactctggccctggcccttacttgctt

SEQ ID NO: 46667 - DNA, 135 bp, Homo sapiens; identical to SEQ ID NO: 46640

SEQ ID NO: 46668 - DNA, 201 bp, Homo sapiens; identical to SEQ ID NO: 46631

SEQ ID NO: 46669 - DNA, 201 bp, Homo sapiens; identical to SEQ ID NO: 46642

SEQ ID NO: 46670 - DNA, 201 bp, Homo sapiens; identical to SEQ ID NO: 46633

SEQ ID NO: 46671 - DNA, 201 bp, Homo sapiens; identical to SEQ ID NO: 46644

SEQ ID NO: 46672 - DNA, 201 bp, Homo sapiens; identical to SEQ ID NO: 46635

SEQ ID NO: 46673 - DNA, 201 bp, Homo sapiens; identical to SEQ ID NO: 46646

SEQ ID NO: 46674 - DNA, 201 bp, Homo sapiens; identical to SEQ ID NO: 46647

SEQ ID NO: 46675 - DNA, 201 bp, Homo sapiens; identical to SEQ ID NO: 46638

SEQ ID NO: 46676 - DNA, 201 bp, Homo sapiens; identical to SEQ ID NO: 46649

SEQ ID NO: 46677 - DNA, 201 bp, Homo sapiens; identical to SEQ ID NO: 46631

SEQ ID NO: 46678 - DNA, 201 bp, Homo sapiens; identical to SEQ ID NO: 46632

SEQ ID NO: 46679 - DNA, 201 bp, Homo sapiens; identical to SEQ ID NO: 46633

SEQ ID NO: 46680 - DNA, 201 bp, Homo sapiens; identical to SEQ ID NO: 46634

SEQ ID NO: 46681 - DNA, 201 bp, Homo sapiens; identical to SEQ ID NO: 46635

SEQ ID NO: 46682 - DNA, 201 bp, Homo sapiens; identical to SEQ ID NO: 46636

SEQ ID NO: 46683 - DNA, 197 bp, Homo sapiens; identical to SEQ ID NO: 46637

SEQ ID NO: 46684 - DNA, 201 bp, Homo sapiens; identical to SEQ ID NO: 46638

SEQ ID NO: 46685 - DNA, 199 bp, Homo sapiens; identical to SEQ ID NO: 46639

SEQ ID NO: 46686 - DNA, 201 bp, Homo sapiens
tcctccacccgggggctgcttggacggctgagcgagaagctggtcttggcggccaacctgccccccaacaccacctcgtgggacacaaccctgcggccacyggtttctggaaggaagggagggaggggaggagggtgtgaagtagctggctcagacccctgccccgcctgctctcccacccaccctgccctcctcagacct

SEQ ID NO: 46687 - DNA, 175 bp, Homo sapiens
atggcccacggggcggtagacaccaccgggaaaggcggctgggccggcaggggcccacgaagcaccgtgtggcasagcaggggctgggccggcagaggcccacgaagcaccgtgtggcagagcaggggcagggccttacctttcaggtcctccacccgggggctgcttggacggc

SEQ ID NO: 46688 - DNA, 201 bp, Homo sapiens
tcaacaagccagatatagatgcctgggaattgcgtaaagggataaacacacttgttacctatgatatggttccagagcccaaaatcattgatgctgctttkcgggcatgcagacggttaaatgattttgctagtacagttcgtatcctagaggttgttaaggacaaagcaggacctcataaggaaatctacccctatgtca

SEQ ID NO: 46689 - DNA, 201 bp, Homo sapiens
atgatatggttccagagcccaaaatcattgatgctgctttgcgggcatgcagacggttaaatgattttgctagtacagttcgtatcctagaggttgttaakgacaaagcaggacctcataaggaaatctacccctatgtcatccaggaacttagaccaactttaaatgaactgggaatctccactccggaggaactgggcc

SEQ ID NO: 46690 - DNA, 201 bp, Homo sapiens
tagcttgtaaattagctgaaggctagaagtcatttatatagaattttcttgttgacaccctaggcttaggggactggttgtctgtggggatagatcaaatygtgtacctttccaaaacaggttttaatgatgtttaaaagtggtcactgagatagtcttgaggatgtgctatgcagtagccaagccctcttacggtgtgtt

SEQ ID NO: 46691 - DNA, 160 bp, Homo sapiens
tttaaaagtggtcactgagatagtcttgaggatgtgctatgcagtagccaagccctcttacggtgtgttcctctcttagtgcccctttcctttcctacctrttcttcccttgcagtggtgtattagccttggacattaaaacatttgctttgtaaatttg

SEQ ID NO: 46692 - DNA, 201 bp, Homo sapiens
caaccacccgggccgaccctcgaggcctcctgcactccgcccggacccccggccccgccgtggctatccagtcagttcgctgctattcccatgggtcacargagacagatgaggagtttgatgctcgctgggtaacatacttcaacaagccagatatagatgcctgggaattgcgtaaagggataaacacacttgttacct

SEQ ID NO: 46693 - DNA, 201 bp, Homo sapiens
ccccgcccgctccggagcaacccgcgagcttacaccggcttctctctgtcctcagcccgcgcgccgccatcgccgtcatgctgggcgccgctctccgccgmtgcgctgtggccgcaaccacccgggccgaccctcgaggcctcctgcactccgcccggacccccggccccgccgtggctatccagtcagttcgctgctatt

SEQ ID NO: 46694 - DNA, 201 bp, Homo sapiens
acagttcgtatcctagaggttgttaaggacaaagcaggacctcataaggaaatctacccctatgtcatccaggaacttagaccaactttaaatgaactggraatctccactccggaggaactgggccttgacaaagtgtaaaccgcatggatgggcttccccaaggatttattgacattgctacttgagtgtgaacagtta

SEQ ID NO: 46695 - DNA, 201 bp, Homo sapiens
ccaggtgcctggcagtggcatggcagcactgggtggatgcccaaggggcagagcagctggtgcggaccctgccagccttccagaagtctgtgccacagccrcgcaccgtggagctttccctgcttgccagccccggggccccttcgttttcaggggaggggggaacggggcagcatcaggcctccacagccaggcaaaagg

SEQ ID NO: 46696 - DNA, 201 bp, Homo sapiens
ctaggaggtggaagggtacagcactttgccacatctcttctacgatgccaccagtgcctgatgcccttgcgtgttttgcctgtactgcacgggctccaagkgtaagttcactgggagtcccaggctggctctggaggctgccttggttcgagggcttagttggcaacaaccactctcctcgccttctcaggaggtgccacc

SEQ ID NO: 46697 - DNA, 201 bp, Homo sapiens
tcaagtggtgaagaacgtggagccgccaaggcttccaggcctggagcctttggtctccagcacccagttcccccacatcccttccctgggcttctttcccrccattcccatcagggacccctgcggccatgctgggctgtacccagtgccccttgggaatctgcgggccagcccagtgcgtgacagagaagcccagcaaat

SEQ ID NO: 46698 - DNA, 201 bp, Homo sapiens
cgccaaggcttccaggcctggagcctttggtctccagcacccagttcccccacatcccttccctgggcttctttcccgccattcccatcagggacccctgyggccatgctgggctgtacccagtgccccttgggaatctgcgggccagcccagtgcgtgacagagaagcccagcaaatgtttgaccaaaatcagaccagga

SEQ ID NO: 46699 - DNA, 201 bp, Homo sapiens
aggaaggtgtgtcccgcggcattgggatcgtgttggagaaaggttttgcttcctgcacatgggtcccgtccccacgctgtgactgccaggtgtggacacaygctcgtcaagtggtgaagaacgtggagccgccaaggcttccaggcctggagcctttggtctccagcacccagttcccccacatcccttccctgggcttct

SEQ ID NO: 46700 - DNA, 201 bp, Homo sapiens
ggtccaccgttggggagtggggccgtccgcctgctctctactgtgcagacctcctaactgagtttacacacgcttgtgtttgcaacactaggtctggatgrgaggtgaggggtgtgcgtatggctgccatgccagtgtctgtgcacatccctgtctgttggtctccatggccactgtggaccgggacccttgggggaagcc

SEQ ID NO: 46701 - DNA, 201 bp, Homo sapiens
gcaacactaggtctggatgggaggtgaggggtgtgcgtatggctgccatgccagtgtctgtgcacatccctgtctgttggtctccatggccactgtggacygggacccttgggggaagcctgcccatgtcgggctgtgggaggctgatcggtgcatgtgagagtggcttcccttctgcctgactccccactccctgacctg

SEQ ID NO: 46702 - DNA, 201 bp, Homo sapiens
tagcagtttactttgaaaaagtgaaaaaggcttccgggctgtcctctgcccagtgagatggaggacgctagagaaagtgctgagtgtcccgagagaggccmccgagccagtgcatggaggtccttcggcctggctcagctgggctgcaggatgcccactttgaggagggaggcacagggcttgggcgaggggcagaggcca

SEQ ID NO: 46703 - DNA, 201 bp, Homo sapiens
gactccccactccctgacctgccccttccttgtttttcctcctactggtctccaccaaggctttgttagcccccaccctgcctggtgtgcagctaacccckgtctgggctgtgctccctcactaaagggaaggaaaggaagctgggcgtcctctgggccccccaacacacgtcccatttagccctgcacagcggtctcctt

SEQ ID NO: 46704 - DNA, 201 bp, Homo sapiens
ctctctactgtgcagacctcctaactgagtttacacacgcttgtgtttgcaacactaggtctggatgggaggtgaggggtgtgcgtatggctgccatgccrgtgtctgtgcacatccctgtctgttggtctccatggccactgtggaccgggacccttgggggaagcctgcccatgtcgggctgtgggaggctgatcggtg

SEQ ID NO: 46705 - DNA, 201 bp, Homo sapiens
cgcagagcacacccgctgggccagcagctcccaacggcgatgctactactaagaatccccagtgatctgattcttctgttttttaatttttaacctgattytctgatgtcatgatctaaatgaggggtagtgggggatggaagagagtaccaggtggtccaccgttggggagtggggccgtccgcctgctctctactgtgc

SEQ ID NO: 46706 - DNA, 201 bp, Homo sapiens
gccagtgtctgtgcacatccctgtctgttggtctccatggccactgtggaccgggacccttgggggaagcctgcccatgtcgggctgtgggaggctgatcrgtgcatgtgagagtggcttcccttctgcctgactccccactccctgacctgccccttccttgtttttcctcctactggtctccaccaaggctttgttagc

SEQ ID NO: 46707 - DNA, 201 bp, Homo sapiens
tgtctgtgcacatccctgtctgttggtctccatggccactgtggaccgggacccttgggggaagcctgcccatgtcgggctgtgggaggctgatcggtgcrtgtgagagtggcttcccttctgcctgactccccactccctgacctgccccttccttgtttttcctcctactggtctccaccaaggctttgttagccccca

SEQ ID NO: 46708 - DNA, 201 bp, Homo sapiens
cacgtcccatttagccctgcacagcggtctccttcccctaagccagcactgctgctccctggagcccgggaaggaggctgcctggctggaggcccgagccratggcgcctgtgctgaggatttgtgctgtgatttgggcaaatcattccaggtctttgggcctccacccccttgtctctagtggacatttgagatcagaga

SEQ ID NO: 46709 - DNA, 201 bp, Homo sapiens
agatggctatcgtgttcaaccaggagggcctgaacgccatccagccaccctgcgtggtccagaatttcatcaaccacaacgccgtcctgtacaaggtgttygtggttggcgagtcctacaccgtggtccagaggccctcactcaagaacttctccgcaggcacatcagaccgtgagtccatcttcttcaacagccacaacg

SEQ ID NO: 46710 - DNA, 201 bp, Homo sapiens
cggagctggacaagatcgagggcgtgttcgagcggccgagcgacgaggtcatccgggagctctcccgggccctgcggcaggcactgggcgtgtcactcttyggcatcgacatcatcatcaacaaccagacagggcagcacgccgtcattgacatcaatgccttcccaggctacgagggcgtgagcgagttcttcacagacc

SEQ ID NO: 46711 - DNA, 201 bp, Homo sapiens
ggaggctgcctggctggaggcccgagccgatggcgcctgtgctgaggatttgtgctgtgatttgggcaaatcattccaggtctttgggcctccaccccctygtctctagtggacatttgagatcagagagcaccacagggctggctttgtgccctaacccctgggatgcagcctgcctttccataaagtcacctaggtgag

SEQ ID NO: 46712 - DNA, 201 bp, Homo sapiens
cagaggccatcagaactgcccggcttttttggaaactgaggacccaacaactaaccacgtttacacgacttgagttttgaaccccgattaatgtctgtacrtcacctttcctagttctgaccctgagccctggggaacaggaaagcgtggctggcctcttgcactgctttgtctccaaaataaactactgaaatcaaaccg

SEQ ID NO: 46713 - DNA, 201 bp, Homo sapiens
cacctgctgggtccctcctcacccagcaggcctggtccacctctcattgcaagccccaagcactgagccagcaggtgccagggagccacccgccccccatmgcttctgcacacctcagactcaccccatcaccttggcagcaaagcactggctctgccgtctgacccctgatccaggcagccccctctgcagagaaaaggg

SEQ ID NO: 46714 - DNA, 201 bp, Homo sapiens
accaaggctttgttagcccccaccctgcctggtgtgcagctaacccctgtctgggctgtgctccctcactaaagggaaggaaaggaagctgggcgtcctcygggccccccaacacacgtcccatttagccctgcacagcggtctccttcccctaagccagcactgctgctccctggagcccgggaaggaggctgcctggct

SEQ ID NO: 46715 - DNA, 201 bp, Homo sapiens
acccgccccccatcgcttctgcacacctcagactcaccccatcaccttggcagcaaagcactggctctgccgtctgacccctgatccaggcagccccctcygcagagaaaagggttggggagaagcctctgcagtcctggaagatgtggggtgctgggtgagaggcatcagcccccacaagtatgtttttgtgtcttaaga

SEQ ID NO: 46716 - DNA, 201 bp, Homo sapiens
cggagctggacaagatcgagggcgtgttcgagcggccgagcgacgaggtcatccgggagctctcccgggccctgcggcaggcactgggcgtgtcactcttyggcatcgacatcatcatcaacaaccagacagggcagcacgccgtcattgacatcaatgccttcccaggggactgccaagtgtgctttatagaaggctgga

SEQ ID NO: 46717 - DNA, 201 bp, Homo sapiens; identical to SEQ ID NO: 46709

SEQ ID NO: 46718 - DNA, 201 bp, Homo sapiens; identical to SEQ ID NO: 46700

SEQ ID NO: 46719 - DNA, 201 bp, Homo sapiens; identical to SEQ ID NO: 46701

SEQ ID NO: 46720 - DNA, 201 bp, Homo sapiens; identical to SEQ ID NO: 46702

SEQ ID NO: 46721 - DNA, 201 bp, Homo sapiens
ccaaggctttgttagcccccaccctgcctggtgtgcagctaacccctccctccccacagccagaggaggccacagacccctcaggggagttccgcgctggkgtctgggctgtgctccctcactaaagggaaggaaaggaagctgggcgtcctctgggccccccaacacacgtcccatttagccctgcacagcggtctcctt

SEQ ID NO: 46722 - DNA, 201 bp, Homo sapiens; identical to SEQ ID NO: 46704

SEQ ID NO: 46723 - DNA, 201 bp, Homo sapiens; identical to SEQ ID NO: 46705

SEQ ID NO: 46724 - DNA, 201 bp, Homo sapiens; identical to SEQ ID NO: 46706

SEQ ID NO: 46725 - DNA, 201 bp, Homo sapiens; identical to SEQ ID NO: 46707

SEQ ID NO: 46726 - DNA, 201 bp, Homo sapiens; identical to SEQ ID NO: 46708

SEQ ID NO: 46727 - DNA, 201 bp, Homo sapiens; identical to SEQ ID NO: 46709

SEQ ID NO: 46728 - DNA, 201 bp, Homo sapiens; identical to SEQ ID NO: 46710

SEQ ID NO: 46729 - DNA, 201 bp, Homo sapiens; identical to SEQ ID NO: 46711

SEQ ID NO: 46730 - DNA, 201 bp, Homo sapiens; identical to SEQ ID NO: 46712

SEQ ID NO: 46731 - DNA, 201 bp, Homo sapiens; identical to SEQ ID NO: 46713

SEQ ID NO: 46732 - DNA, 201 bp, Homo sapiens
ccacagccagaggaggccacagacccctcaggggagttccgcgctggtgtctgggctgtgctccctcactaaagggaaggaaaggaagctgggcgtcctcygggccccccaacacacgtcccatttagccctgcacagcggtctccttcccctaagccagcactgctgctccctggagcccgggaaggaggctgcctggct

SEQ ID NO: 46733 - DNA, 201 bp, Homo sapiens; identical to SEQ ID NO: 46715

SEQ ID NO: 46734 - DNA, 201 bp, Homo sapiens; identical to SEQ ID NO: 46700

SEQ ID NO: 46735 - DNA, 201 bp, Homo sapiens; identical to SEQ ID NO: 46701

SEQ ID NO: 46736 - DNA, 201 bp, Homo sapiens; identical to SEQ ID NO: 46702

SEQ ID NO: 46737 - DNA, 201 bp, Homo sapiens; identical to SEQ ID NO: 46703

SEQ ID NO: 46738 - DNA, 201 bp, Homo sapiens; identical to SEQ ID NO: 46704

SEQ ID NO: 46739 - DNA, 201 bp, Homo sapiens; identical to SEQ ID NO: 46705

SEQ ID NO: 46740 - DNA, 201 bp, Homo sapiens; identical to SEQ ID NO: 46706

SEQ ID NO: 46741 - DNA, 201 bp, Homo sapiens; identical to SEQ ID NO: 46707

SEQ ID NO: 46742 - DNA, 201 bp, Homo sapiens; identical to SEQ ID NO: 46708

SEQ ID NO: 46743 - DNA, 201 bp, Homo sapiens; identical to SEQ ID NO: 46709

SEQ ID NO: 46744 - DNA, 201 bp, Homo sapiens; identical to SEQ ID NO: 46710

SEQ ID NO: 46745 - DNA, 201 bp, Homo sapiens; identical to SEQ ID NO: 46711

SEQ ID NO: 46746 - DNA, 201 bp, Homo sapiens; identical to SEQ ID NO: 46712

SEQ ID NO: 46747 - DNA, 201 bp, Homo sapiens; identical to SEQ ID NO: 46713

SEQ ID NO: 46748 - DNA, 201 bp, Homo sapiens; identical to SEQ ID NO: 46714

SEQ ID NO: 46749 - DNA, 201 bp, Homo sapiens; identical to SEQ ID NO: 46715

SEQ ID NO: 46750 - DNA, 201 bp, Homo sapiens
agcaagtggcaaaggccctcaaataagcccctcctgggactccctcaaccccctccattttctccacaaaggccctggtggtttccacattgctacccaawggacacactccaaaatggccagtgggcagggaatcctggagcacttgttccgggatggtgtggtggaagaggggatgagggaaagaaatggggggcctgg

SEQ ID NO: 46751 - DNA, 195 bp, Homo sapiens
ctacccaatggacacactccaaaatggccagtgggcagggaatcctggagcacttgttccgggatggtgtggtggaagaggggatgagggaaagaaatggrgggcctgggtcagatttttattgtggggtgggatgagtaggacaacatatttcagtaataaaatacagaataaaaatcaagtgtttttacgcaa

SEQ ID NO: 46752 - DNA, 148 bp, Homo sapiens
gttcagggcggggccggtcggtgagtcagcggctctctgatccagccmgggagaggaccgagctggaggagctgggtgtggggtgcgttgggctggtggggaggcctagtttgggtgcaagtaggtctgattgagcttgtgttgtgct

SEQ ID NO: 46753 - DNA, 201 bp, Homo sapiens
tggatgtcctgtgccaggccaagtcgggcatgggaaagacagcagtgtttgtcttggccacactgcaacagctggagccagttactgggcaggtgtctgtrctggtgatgtgtcacactcgggagttggcttttcagatcagcaaggaatatgagcgcttctctaaatacatgcccaatgtcaaggttgctgttttttttg

SEQ ID NO: 46754 - DNA, 201 bp, Homo sapiens
atcctcaatgatgtgcaggatcgctttgaggtcaatattagtgagctgcctgatgagatagacatctcctcctacattgaacagacacggtagaagactckcccattttggaatgtgaccgtctgtccttcaggagaggacaccagggtgggggtgaaggagacactactgcccccacccctgacagcccccaccccatgg

SEQ ID NO: 46755 - DNA, 201 bp, Homo sapiens
ttcctataaggcctgggtgccctgcctgctgtgagatcaaaggggaatgggactaagactgcagagccctggctcccccactgcctgccaattgcctgcgstttgtggtctcttccactttctctggcctgggaagacgctggggtgtttatgatcccaaggctcctggtgggtggtgcgtgtattttcagtgccggaggg

SEQ ID NO: 46756 - DNA, 201 bp, Homo sapiens
ccagggtgggggtgaaggagacactactgcccccacccctgacagcccccaccccatggcttccatcttttgcatcaccaccactcctgaacccccatttytgatttgtcagaatttttttttaacaaaactaaaaatgaaacacatgtgtctgtggtatctataagtgcttcgtccctttattgtatttggggtgaggtt

SEQ ID NO: 46757 - DNA, 201 bp, Homo sapiens
agaagtgctggagaggaggaccagtcatcaataggaggatgagattgggagagacactcggtgcaggaggctgagtgagcaggggagcactaagacccagrggtagtggaggactgcagcaacgagctggaggaggagaagtaagcggtggggggtgggagccatctggtactttgacagcattcaaaacagcatcggcca

SEQ ID NO: 46758 - DNA, 201 bp, Homo sapiens
tgggaagacgctggggtgtttatgatcccaaggctcctggtgggtggtgcgtgtattttcagtgccggagggtgctgtgggcactgggggaaacttaggcrcctcctccaaggctctcttggtgcctcctcatctgttccttcagcttctggatcttgagcaccagggcttgggcctcccaggctccctcctgcccttcaa

SEQ ID NO: 46759 - DNA, 201 bp, Homo sapiens
ttgcctgcggtttgtggtctcttccactttctctggcctgggaagacgctggggtgtttatgatcccaaggctcctggtgggtggtgcgtgtattttcagygccggagggtgctgtgggcactgggggaaacttaggcacctcctccaaggctctcttggtgcctcctcatctgttccttcagcttctggatcttgagcac

SEQ ID NO: 46760 - DNA, 201 bp, Homo sapiens
ccgcggaaggccctgtttccggtcccttgcgcctgcgctcttgcagccaagaaggcgggaggctggagtagagggaagcctgcaaccggaagtgaaggcasatttccctccttcgtcgctgttgctgccgccatacgcgctctccctgtttagctcttctgttagaaatagtatctttgttttcctttgctgttcctcaat

SEQ ID NO: 46761 - DNA, 201 bp, Homo sapiens
gctgctcccaggcggcccctttgggtactgcctgagcaagaagtgctggagaggaggaccagtcatcaataggaggatgagattgggagagacactcggtrcaggaggctgagtgagcaggggagcactaagacccaggggtagtggaggactgcagcaacgagctggaggaggagaagtaagcggtggggggtgggagcc

SEQ ID NO: 46762 - DNA, 201 bp, Homo sapiens
tgtaagcccgcagctttgggcctggtctctgctgctcccaggcggcccctttgggtactgcctgagcaagaagtgctggagaggaggaccagtcatcaatrggaggatgagattgggagagacactcggtgcaggaggctgagtgagcaggggagcactaagacccaggggtagtggaggactgcagcaacgagctggagg

SEQ ID NO: 46763 - DNA, 201 bp, Homo sapiens
tggtagcctcgatgtcctcctctgtgaaactgggatgataataatgcctaccttgtgagggttgcttcaatgattaggaatcattctgtaaagtctagcasagttccttgcatgttgtagcagtgattcagtaagtagcaaccctgtgatactattaccaccacctgctcactggtcaaaacctacacagctgtttcctca

SEQ ID NO: 46764 - DNA, 201 bp, Homo sapiens
agaagtgctggagaggaggaccagtcatcaataggaggatgagattgggagagacactcggtgcaggaggctgagtgagcaggggagcactaagacccagrggtagtggaggactgcagcaacgagctggaggaggagaaggaaggcccggcgactgaagcaggcaaaggaggaggcacagatggaggtggagcaataccg

SEQ ID NO: 46765 - DNA, 201 bp, Homo sapiens
gctgctcccaggcggcccctttgggtactgcctgagcaagaagtgctggagaggaggaccagtcatcaataggaggatgagattgggagagacactcggtrcaggaggctgagtgagcaggggagcactaagacccaggggtagtggaggactgcagcaacgagctggaggaggagaaggaaggcccggcgactgaagcag

SEQ ID NO: 46766 - DNA, 201 bp, Homo sapiens; identical to SEQ ID NO: 46762

SEQ ID NO: 46767 - DNA, 201 bp, Homo sapiens
cttcagtgtctggccgatgtgggtccctctcttgaccctgtcacttgctggctgtgaaaccaggacaagctacttaacttggtagcctcgatgtcctcctytgtgaaactgggatgataataatgcctaccttgtgagggttgcttcaatgattaggaatcattctgtaaagtctagcacagttccttgcatgttgtagca

SEQ ID NO: 46768 - DNA, 201 bp, Homo sapiens; identical to SEQ ID NO: 46753

SEQ ID NO: 46769 - DNA, 201 bp, Homo sapiens
tcccttcgggggagggcaggatttttctgccctaccacccacccatccatcgtctcttacatgcaccctacagccacgcaccctcaaggtggcatcgagcrtacagctggagccttctgctcaccaaaactcctacttcccggtggcaggagagcaagagagggacagacagatggcagggcatgtccaaaagaagagcat

SEQ ID NO: 46770 - DNA, 118 bp, Homo sapiens
ctccagcctgggtgatagagtgagaccctgtatcaaaacaaaacaaaaaacaaaacctgccttctgggattgggcttctggtttttttcccatgacacacrcatcctttcctattttg

SEQ ID NO: 46771 - DNA, 201 bp, Homo sapiens
cctaaacgaagagatgaggggcatggagaggagtaggataagagaataaagataacagtgggggggagacgttagtttcctttatatcttttgttactggmggtagcagtgaagttagaaacggttttaaaacaaatttcagacaggcattttccaaaggcaagcctggagcgcacggatctgtataaccgcggaaggccc

SEQ ID NO: 46772 - DNA, 201 bp, Homo sapiens; identical to SEQ ID NO: 46760

SEQ ID NO: 46773 - DNA, 201 bp, Homo sapiens
aggggtgcctacagagaagacctgcgtggcaaaaacctaaacgaagagatgaggggcatggagaggagtaggataagagaataaagataacagtggggggsagacgttagtttcctttatatcttttgttactggaggtagcagtgaagttagaaacggttttaaaacaaatttcagacaggcattttccaaaggcaagcc

SEQ ID NO: 46774 - DNA, 201 bp, Homo sapiens
ggtgccagggaaactccggaagacttggtcgggttaatgtgagagcgggtagtgttcgactttttcataaatcacaacatttttgaacctcttctcccttygggggagggcaggatttttctgccctaccacccacccatccatcgtctcttacatgcaccctacagccacgcaccctcaaggtggcatcgagcatacagc

SEQ ID NO: 46775 - DNA, 201 bp, Homo sapiens
tcctagtgcgtgcccagcagtcctcaggtcaccttcactaccgggccaaggaccccgtgggaactcgcagccttcgccacactcgttcctcgcgcatccayggaggggtgcctacagagaagacctgcgtggcaaaaacctaaacgaagagatgaggggcatggagaggagtaggataagagaataaagataacagtgggg

SEQ ID NO: 46776 - DNA, 201 bp, Homo sapiens; identical to SEQ ID NO: 46757

SEQ ID NO: 46777 - DNA, 176 bp, Homo sapiens
agtataacatctatgtggagtatgattaacatttgtggtggagggtagagttttatggtcatggatggtgaggtggtggggatattacggtctgttttagkatgaagttgcatgttaggtctaaggggaaaggggactgtgttgatctctttggtgttgggatatttctgtgggat

SEQ ID NO: 46778 - DNA, 201 bp, Homo sapiens
ggcaaaggaggaggcacagatggaggtggagcaataccgcagagagcgagagcacgaattccagagcaagcagcaggcggtgagttgaggcagagtcgggwtgagaccccactgcaagttggtgggtgcatctagtgaggtgtgtaagggtgactcaacaagaaaatatggtggcagagggctgaggctgaggggaccctg

SEQ ID NO: 46779 - DNA, 201 bp, Homo sapiens; identical to SEQ ID NO: 46761

SEQ ID NO: 46780 - DNA, 201 bp, Homo sapiens; identical to SEQ ID NO: 46762

SEQ ID NO: 46781 - DNA, 201 bp, Homo sapiens; identical to SEQ ID NO: 46753

SEQ ID NO: 46782 - DNA, 201 bp, Homo sapiens; identical to SEQ ID NO: 46754

SEQ ID NO: 46783 - DNA, 201 bp, Homo sapiens; identical to SEQ ID NO: 46755

SEQ ID NO: 46784 - DNA, 201 bp, Homo sapiens; identical to SEQ ID NO: 46756

SEQ ID NO: 46785 - DNA, 137 bp, Homo sapiens
ggagacgttagtttcctttatatcttttgttactggmggtagcagtgaagttagaaacggttttaaaacaaatttcagacaggcattttccaaaggcaagcctggagcgcacggatctgtataaccgcggaaggccc

SEQ ID NO: 46786 - DNA, 201 bp, Homo sapiens; identical to SEQ ID NO: 46758

SEQ ID NO: 46787 - DNA, 201 bp, Homo sapiens; identical to SEQ ID NO: 46759

SEQ ID NO: 46788 - DNA, 201 bp, Homo sapiens
ccgcggaaggccctgtttccggtcccttgcgcctgcgctcttgcagccaagaaggcgggaggctggagtagagggaagcctgcaaccggaagtgaaggcasatttccctccttcgtcgctgttgctgccgccatacgcgctctccctgtttaggtaagctttggccttcgctacaatccgtttccatctgcgcttctccgc

SEQ ID NO: 46789 - DNA, 102 bp, Homo sapiens
gsagacgttagtttcctttatatcttttgttactggaggtagcagtgaagttagaaacggttttaaaacaaatttcagacaggcattttccaaaggcaagcc

SEQ ID NO: 46790 - DNA, 201 bp, Homo sapiens
ccaatccaagatggtgtcctcggcgccattgtgttcgttttgctcccttcttccaatgggttcttctcatattggaggcctcagcatcaatgagaggcggygctcggcgtcccttggtcttgctcttctgttagaaatagtatctttgttttcctttgctgttcctcaatcccctactcttcaccccttgttttcacctat

SEQ ID NO: 46791 - DNA, 201 bp, Homo sapiens; identical to SEQ ID NO: 46753

SEQ ID NO: 46792 - DNA, 201 bp, Homo sapiens; identical to SEQ ID NO: 46754

SEQ ID NO: 46793 - DNA, 201 bp, Homo sapiens; identical to SEQ ID NO: 46755

SEQ ID NO: 46794 - DNA, 201 bp, Homo sapiens; identical to SEQ ID NO: 46756

SEQ ID NO: 46795 - DNA, 201 bp, Homo sapiens; identical to SEQ ID NO: 46758

SEQ ID NO: 46796 - DNA, 201 bp, Homo sapiens; identical to SEQ ID NO: 46759

SEQ ID NO: 46797 - DNA, 201 bp, Homo sapiens; identical to SEQ ID NO: 46760

SEQ ID NO: 46798 - DNA, 201 bp, Homo sapiens; identical to SEQ ID NO: 46753

SEQ ID NO: 46799 - DNA, 201 bp, Homo sapiens; identical to SEQ ID NO: 46754

SEQ ID NO: 46800 - DNA, 201 bp, Homo sapiens; identical to SEQ ID NO: 46755

SEQ ID NO: 46801 - DNA, 201 bp, Homo sapiens; identical to SEQ ID NO: 46756

SEQ ID NO: 46802 - DNA, 201 bp, Homo sapiens; identical to SEQ ID NO: 46771

SEQ ID NO: 46803 - DNA, 201 bp, Homo sapiens; identical to SEQ ID NO: 46758

SEQ ID NO: 46804 - DNA, 201 bp, Homo sapiens; identical to SEQ ID NO: 46759

SEQ ID NO: 46805 - DNA, 201 bp, Homo sapiens
ccgcggaaggccctgtttccggtcccttgcgcctgcgctcttgcagccaagaaggcgggaggctggagtagagggaagcctgcaaccggaagtgaaggcasatttccctccttcgtcgctgttgctgccgccatacgcgctctccctgtttagttatggcagagaacgatgtggacaatgagctcttggactatgaagatg

SEQ ID NO: 46806 - DNA, 201 bp, Homo sapiens; identical to SEQ ID NO: 46773

SEQ ID NO: 46807 - DNA, 201 bp, Homo sapiens; identical to SEQ ID NO: 46775

SEQ ID NO: 46808 - DNA, 201 bp, Homo sapiens; identical to SEQ ID NO: 46753

SEQ ID NO: 46809 - DNA, 201 bp, Homo sapiens; identical to SEQ ID NO: 46754

SEQ ID NO: 46810 - DNA, 201 bp, Homo sapiens; identical to SEQ ID NO: 46755

SEQ ID NO: 46811 - DNA, 201 bp, Homo sapiens; identical to SEQ ID NO: 46756

SEQ ID NO: 46812 - DNA, 201 bp, Homo sapiens; identical to SEQ ID NO: 46771

SEQ ID NO: 46813 - DNA, 201 bp, Homo sapiens; identical to SEQ ID NO: 46758

SEQ ID NO: 46814 - DNA, 201 bp, Homo sapiens; identical to SEQ ID NO: 46759

SEQ ID NO: 46815 - DNA, 201 bp, Homo sapiens; identical to SEQ ID NO: 46760

SEQ ID NO: 46816 - DNA, 201 bp, Homo sapiens; identical to SEQ ID NO: 46773

SEQ ID NO: 46817 - DNA, 201 bp, Homo sapiens; identical to SEQ ID NO: 46775

SEQ ID NO: 46818 - DNA, 201 bp, Homo sapiens; identical to SEQ ID NO: 46774

SEQ ID NO: 46819 - DNA, 201 bp, Homo sapiens; identical to SEQ ID NO: 46769

SEQ ID NO: 46820 - DNA, 118 bp, Homo sapiens; identical to SEQ ID NO: 46770

SEQ ID NO: 46821 - DNA, 201 bp, Homo sapiens; identical to SEQ ID NO: 46771

SEQ ID NO: 46822 - DNA, 201 bp, Homo sapiens; identical to SEQ ID NO: 46760

SEQ ID NO: 46823 - DNA, 201 bp, Homo sapiens; identical to SEQ ID NO: 46773

SEQ ID NO: 46824 - DNA, 201 bp, Homo sapiens; identical to SEQ ID NO: 46775

SEQ ID NO: 46825 - DNA, 201 bp, Homo sapiens; identical to SEQ ID NO: 46753

SEQ ID NO: 46826 - DNA, 201 bp, Homo sapiens
atattagtgagctgcctgatgagatagacatctcctcctacagtgagtactgatctcatgaaaccctttaggtcctccctgttccttagtgtgtttgtcckaaatcccatcacataggtcatgggcatctgatgcataatggacacttgactggttcatgccccctggtctttgatgctgtgttgggatgtttttctgacc

SEQ ID NO: 46827 - DNA, 201 bp, Homo sapiens; identical to SEQ ID NO: 46757

SEQ ID NO: 46828 - DNA, 201 bp, Homo sapiens; identical to SEQ ID NO: 46760

SEQ ID NO: 46829 - DNA, 201 bp, Homo sapiens; identical to SEQ ID NO: 46761

SEQ ID NO: 46830 - DNA, 201 bp, Homo sapiens; identical to SEQ ID NO: 46762

SEQ ID NO: 46831 - DNA, 201 bp, Homo sapiens; identical to SEQ ID NO: 46753

SEQ ID NO: 46832 - DNA, 201 bp, Homo sapiens; identical to SEQ ID NO: 46754

SEQ ID NO: 46833 - DNA, 201 bp, Homo sapiens; identical to SEQ ID NO: 46755

SEQ ID NO: 46834 - DNA, 201 bp, Homo sapiens; identical to SEQ ID NO: 46756

SEQ ID NO: 46835 - DNA, 201 bp, Homo sapiens; identical to SEQ ID NO: 46758

SEQ ID NO: 46836 - DNA, 201 bp, Homo sapiens; identical to SEQ ID NO: 46759

SEQ ID NO: 46837 - DNA, 201 bp, Homo sapiens; identical to SEQ ID NO: 46753

SEQ ID NO: 46838 - DNA, 201 bp, Homo sapiens; identical to SEQ ID NO: 46769

SEQ ID NO: 46839 - DNA, 118 bp, Homo sapiens; identical to SEQ ID NO: 46770

SEQ ID NO: 46840 - DNA, 201 bp, Homo sapiens; identical to SEQ ID NO: 46771

SEQ ID NO: 46841 - DNA, 201 bp, Homo sapiens; identical to SEQ ID NO: 46805

SEQ ID NO: 46842 - DNA, 201 bp, Homo sapiens; identical to SEQ ID NO: 46773

SEQ ID NO: 46843 - DNA, 201 bp, Homo sapiens; identical to SEQ ID NO: 46774

SEQ ID NO: 46844 - DNA, 201 bp, Homo sapiens; identical to SEQ ID NO: 46775

SEQ ID NO: 46845 - DNA, 201 bp, Homo sapiens; identical to SEQ ID NO: 46763

SEQ ID NO: 46846 - DNA, 201 bp, Homo sapiens; identical to SEQ ID NO: 46757

SEQ ID NO: 46847 - DNA, 201 bp, Homo sapiens; identical to SEQ ID NO: 46761

SEQ ID NO: 46848 - DNA, 201 bp, Homo sapiens; identical to SEQ ID NO: 46762

SEQ ID NO: 46849 - DNA, 201 bp, Homo sapiens; identical to SEQ ID NO: 46767

SEQ ID NO: 46850 - DNA, 201 bp, Homo sapiens; identical to SEQ ID NO: 46790

SEQ ID NO: 46851 - DNA, 201 bp, Homo sapiens; identical to SEQ ID NO: 46753

SEQ ID NO: 46852 - DNA, 201 bp, Homo sapiens; identical to SEQ ID NO: 46774

SEQ ID NO: 46853 - DNA, 201 bp, Homo sapiens; identical to SEQ ID NO: 46769

SEQ ID NO: 46854 - DNA, 118 bp, Homo sapiens; identical to SEQ ID NO: 46770

SEQ ID NO: 46855 - DNA, 137 bp, Homo sapiens; identical to SEQ ID NO: 46785

SEQ ID NO: 46856 - DNA, 201 bp, Homo sapiens; identical to SEQ ID NO: 46788

SEQ ID NO: 46857 - DNA, 102 bp, Homo sapiens; identical to SEQ ID NO: 46789

SEQ ID NO: 46858 - DNA, 201 bp, Homo sapiens
ttctataaattgagcccgcagcctcccgcttcgctctctgctcctcctgttcgacagtcagccgcatcttcttttgcgtcgccagccgagccacatcgctsagacaccatggggaaggtgaaggtcggagtcaacggatttggtcgtattgggcgcctggtcaccagggctgcttttaactctggtaaagtggatattgtt

SEQ ID NO: 46859 - DNA, 201 bp, Homo sapiens
ctcctccacctttgacgctggggctggcattgccctcaacgaccactttgtcaagctcatttcctggtatgacaacgaatttggctacagcaacagggtgrtggacctcatggcccacatggcctccaaggagtaagacccctggaccaccagccccagcaagagcacaagaggaagagagagaccctcactgctggggag

SEQ ID NO: 46860 - DNA, 201 bp, Homo sapiens
gcaaggtcatccctgagctgaacgggaagctcactggcatggccttccgtgtccccactgccaacgtgtcagtggtggacctgacctgccgtctagaaaamcctgccaaatatgatgacatcaagaaggtggtgaagcaggcgtcggagggccccctcaagggcatcctgggctacactgagcaccaggtggtctcctctg

SEQ ID NO: 46861 - DNA, 201 bp, Homo sapiens
accactttgtcaagctcatttcctggtatgacaacgaatttggctacagcaacagggtggtggacctcatggcccacatggcctccaaggagtaagacccytggaccaccagccccagcaagagcacaagaggaagagagagaccctcactgctggggagtccctgccacactcagtcccccaccacactgaatctcccct

SEQ ID NO: 46862 - DNA, 201 bp, Homo sapiens
gtcagtggtggacctgacctgccgtctagaaaaacctgccaaatatgatgacatcaagaaggtggtgaagcaggcgtcggagggccccctcaagggcatcytgggctacactgagcaccaggtggtctcctctgacttcaacagcgacacccactcctccacctttgacgctggggctggcattgccctcaacgaccactt

SEQ ID NO: 46863 - DNA, 170 bp, Homo sapiens
aggaagagagagaccctcactgctggggagtccctgccacactcagtcccccaccacactgaatctcccctcctcacagttgccatgtagaccccttgaaraggggaggggcctagggagccgcaccttgtcatgtaccatcaataaagtaccctgtgctcaaccagtta

SEQ ID NO: 46864 - DNA, 201 bp, Homo sapiens
gtggtgaagcaggcgtcggagggccccctcaagggcatcctgggctacactgagcaccaggtggtctcctctgacttcaacagcgacacccactcctccayctttgacgctggggctggcattgccctcaacgaccactttgtcaagctcatttcctggtatgacaacgaatttggctacagcaacagggtggtggacctc

SEQ ID NO: 46865 - DNA, 201 bp, Homo sapiens
ttgacgctggggctggcattgccctcaacgaccactttgtcaagctcatttcctggtatgacaacgaatttggctacagcaacagggtggtggacctcatkgcccacatggcctccaaggagtaagacccctggaccaccagccccagcaagagcacaagaggaagagagagaccctcactgctggggagtccctgccaca

SEQ ID NO: 46866 - DNA, 201 bp, Homo sapiens
tgaagcaggcgtcggagggccccctcaagggcatcctgggctacactgagcaccaggtggtctcctctgacttcaacagcgacacccactcctccaccttygacgctggggctggcattgccctcaacgaccactttgtcaagctcatttcctggtatgacaacgaatttggctacagcaacagggtggtggacctcatgg

SEQ ID NO: 46867 - DNA, 201 bp, Homo sapiens
acgtcgtggagtccactggcgtcttcaccaccatggagaaggctggggctcatttgcaggggggagccaaaagggtcatcatctctgccccctctgctgaygcccccatgttcgtcatgggtgtgaaccatgagaagtatgacaacagcctcaagatcatcagcaatgcctcctgcaccaccaactgcttagcacccctgg

SEQ ID NO: 46868 - DNA, 146 bp, Homo sapiens
ggggagtccctgccacactcagtcccccaccacactgaatctcccctcctcacagttgccatgtagaccccttgaagaggggaggggcctagggagccgcmccttgtcatgtaccatcaataaagtaccctgtgctcaaccagtta

SEQ ID NO: 46869 - DNA, 189 bp, Homo sapiens
gccccagcaagagcacaagaggaagagagagaccctcactgctggggagtccctgccacactcagtcccccaccacactgaatctcccctcctcacagttkccatgtagaccccttgaagaggggaggggcctagggagccgcaccttgtcatgtaccatcaataaagtaccctgtgctcaaccagtta

SEQ ID NO: 46870 - DNA, 201 bp, Homo sapiens
cgtgtcagtggtggacctgacctgccgtctagaaaaacctgccaaatatgatgacatcaagaaggtggtgaagcaggcgtcggagggccccctcaagggcrtcctgggctacactgagcaccaggtggtctcctctgacttcaacagcgacacccactcctccacctttgacgctggggctggcattgccctcaacgacca

SEQ ID NO: 46871 - DNA, 201 bp, Homo sapiens
cactgccaacgtgtcagtggtggacctgacctgccgtctagaaaaacctgccaaatatgatgacatcaagaaggtggtgaagcaggcgtcggagggccccytcaagggcatcctgggctacactgagcaccaggtggtctcctctgacttcaacagcgacacccactcctccacctttgacgctggggctggcattgccct

SEQ ID NO: 46872 - DNA, 201 bp, Homo sapiens
acctgccaaatatgatgacatcaagaaggtggtgaagcaggcgtcggagggccccctcaagggcatcctgggctacactgagcaccaggtggtctcctctkacttcaacagcgacacccactcctccacctttgacgctggggctggcattgccctcaacgaccactttgtcaagctcatttcctggtatgacaacgaatt

SEQ ID NO: 46873 - DNA, 145 bp, Homo sapiens
gttcgacagtcagccgcatcttcttttgcccgagccacatcgctsagacaccatggggaaggtgaaggtcggagtcaacggatttggtcgtattgggcgcctggtcaccagggctgcttttaactctggtaaagtggatattgtt

SEQ ID NO: 46874 - DNA, 201 bp, Homo sapiens; identical to SEQ ID NO: 46859

SEQ ID NO: 46875 - DNA, 201 bp, Homo sapiens; identical to SEQ ID NO: 46861

SEQ ID NO: 46876 - DNA, 201 bp, Homo sapiens; identical to SEQ ID NO: 46860

SEQ ID NO: 46877 - DNA, 170 bp, Homo sapiens; identical to SEQ ID NO: 46863

SEQ ID NO: 46878 - DNA, 201 bp, Homo sapiens; identical to SEQ ID NO: 46862

SEQ ID NO: 46879 - DNA, 201 bp, Homo sapiens; identical to SEQ ID NO: 46864

SEQ ID NO: 46880 - DNA, 201 bp, Homo sapiens; identical to SEQ ID NO: 46865

SEQ ID NO: 46881 - DNA, 201 bp, Homo sapiens; identical to SEQ ID NO: 46867

SEQ ID NO: 46882 - DNA, 201 bp, Homo sapiens; identical to SEQ ID NO: 46866

SEQ ID NO: 46883 - DNA, 146 bp, Homo sapiens; identical to SEQ ID NO: 46868

SEQ ID NO: 46884 - DNA, 189 bp, Homo sapiens; identical to SEQ ID NO: 46869

SEQ ID NO: 46885 - DNA, 201 bp, Homo sapiens; identical to SEQ ID NO: 46870

SEQ ID NO: 46886 - DNA, 201 bp, Homo sapiens; identical to SEQ ID NO: 46871

SEQ ID NO: 46887 - DNA, 201 bp, Homo sapiens; identical to SEQ ID NO: 46872

SEQ ID NO: 46888 - DNA, 145 bp, Homo sapiens; identical to SEQ ID NO: 46873

SEQ ID NO: 46889 - DNA, 201 bp, Homo sapiens
ctcctccacctttgacgctggggctggcattgccctcaacgaccactttgtcaagctcatttcctggtatgacaacgaatttggctacagcaacagggtgrtggacctcatggcccacatggcctccaaggagtaagacccctggaccaccagccccagcaagagcactcccccaccacactgaatctcccctcctcacag

SEQ ID NO: 46890 - DNA, 201 bp, Homo sapiens; identical to SEQ ID NO: 46860

SEQ ID NO: 46891 - DNA, 193 bp, Homo sapiens
accactttgtcaagctcatttcctggtatgacaacgaatttggctacagcaacagggtggtggacctcatggcccacatggcctccaaggagtaagacccytggaccaccagccccagcaagagcactcccccaccacactgaatctcccctcctcacagttgccatgtagaccccttgaagaggggaggggc

SEQ ID NO: 46892 - DNA, 201 bp, Homo sapiens; identical to SEQ ID NO: 46862

SEQ ID NO: 46893 - DNA, 112 bp, Homo sapiens
cctccaaggagtaagacccctggaccaccagccccagcaagagcactcccccaccacactgaatctcccctcctcacagttgccatgtagaccccttgaaraggggaggggc

SEQ ID NO: 46894 - DNA, 201 bp, Homo sapiens; identical to SEQ ID NO: 46864

SEQ ID NO: 46895 - DNA, 201 bp, Homo sapiens
ttgacgctggggctggcattgccctcaacgaccactttgtcaagctcatttcctggtatgacaacgaatttggctacagcaacagggtggtggacctcatkgcccacatggcctccaaggagtaagacccctggaccaccagccccagcaagagcactcccccaccacactgaatctcccctcctcacagttgccatgtag

SEQ ID NO: 46896 - DNA, 201 bp, Homo sapiens; identical to SEQ ID NO: 46866

SEQ ID NO: 46897 - DNA, 201 bp, Homo sapiens; identical to SEQ ID NO: 46867

SEQ ID NO: 46898 - DNA, 131 bp, Homo sapiens
gacctcatggcccacatggcctccaaggagtaagacccctggaccaccagccccagcaagagcactcccccaccacactgaatctcccctcctcacagttkccatgtagaccccttgaagaggggaggggc

SEQ ID NO: 46899 - DNA, 201 bp, Homo sapiens; identical to SEQ ID NO: 46870

SEQ ID NO: 46900 - DNA, 201 bp, Homo sapiens; identical to SEQ ID NO: 46871

SEQ ID NO: 46901 - DNA, 201 bp, Homo sapiens; identical to SEQ ID NO: 46872

SEQ ID NO: 46902 - DNA, 201 bp, Homo sapiens
gctgcagtataaaagagcaaagagctttgggaaatacctaagaagcaccttaagattagggtggcattgcttttatagattcttgattttaaagcaacagkcctttctcaggtgttgcattttttggagcaaaaactatgggttgtaatttgaataaagtgtcactaagcagttataacgtttgatggctggggggtagga

SEQ ID NO: 46903 - DNA, 201 bp, Homo sapiens
gttttttaaaagacaaaaacaaagggaagaatatttaattactgagcagaagtaaatactgttggtattttgtacataatctaatttttatatgcatgtthatgctttttaatttttttatcaaaaattaagtcatctacctactacttgtaaccagcttgtttcataacatgttattttcctgtgtcattaaataattac

SEQ ID NO: 46904 - DNA, 201 bp, Homo sapiens
atcatgtttttctgattttttttttcagaaataatgttttttaaaagacaaaaacaaagggaagaatatttaattactgagcagaagtaaatactgttggyattttgtacataatctaatttttatatgcatgtttatgctttttaatttttttatcaaaaattaagtcatctacctactacttgtaaccagcttgtttca

SEQ ID NO: 46905 - DNA, 144 bp, Homo sapiens
tttgtacataatctaatttttatatgcatgtttatgctttttaatttttttatcaaaaattaagtcatctacctactacttgtaaccagcttgtttcatarcatgttattttcctgtgtcattaaataattacttcaatgttgt

SEQ ID NO: 46906 - DNA, 201 bp, Homo sapiens
tcttgtgatgataatattttaattttaaatatccctccctcatacaagtgtatgttaccattttaatataattctttttgtacctttccttcttgttttgygaagatttttgtggcatggattgctgtgctcactgctgtaaaaggtgacctagtgtactgggcagctggtggcggtgcagaaaagagtctcaggttattt

SEQ ID NO: 46907 - DNA, 201 bp, Homo sapiens
caaggaatatctggtgtttcttgtgatgataatattttaattttaaatatccctccctcatacaagtgtatgttaccattttaatataattctttttgtayctttccttcttgttttgtgaagatttttgtggcatggattgctgtgctcactgctgtaaaaggtgacctagtgtactgggcagctggtggcggtgcagaa

SEQ ID NO: 46908 - DNA, 201 bp, Homo sapiens
aaactatgggttgtaatttgaataaagtgtcactaagcagttataacgtttgatggctggggggtaggaagaggatggaattgagatgtttgagcctcatktacatcaatagaggtgtaatgtactgcatttcttcatttggtaacataacaaagactttcatacaaagaacgatgatgctcctcattaagatttgtttaa

SEQ ID NO: 46909 - DNA, 158 bp, Homo sapiens
aatactgttggtattttgtacataatctaatttttatatgcatgtttatgctttttaatttttttatcaaaaattaagtcatctacctactacttgtaacyagcttgtttcataacatgttattttcctgtgtcattaaataattacttcaatgttgt

SEQ ID NO: 46910 - DNA, 201 bp, Homo sapiens
aacagggatatgttgtttgtccttctgaaaagagattccttctgctctttacattccttaagaagaaccgaaagaagaagcttatggtcttcttttcatcytgtatgtctgtgaaataccactatgagttgctgaactacattgatttgcccgtcttggccattcatggaaagcaaaagcaaaataagcgtacaaccacat

SEQ ID NO: 46911 - DNA, 201 bp, Homo sapiens
aaagcaaaataagcgtacaaccacattcttccagttctgcaaaatgaaggcaagcagaaaaagcgaggaggtggtggtggatttggctaccagaaaaccargaaagttgagaaatccaaaatctttaaacacattagcaagaaatcatctgacagcaggcagttctctcactgaacacatgccttcctttcatcttgaata

SEQ ID NO: 46912 - DNA, 201 bp, Homo sapiens
attaaataagtgtgctaacatcgaatatagagaaaactggtaaagaacattccagtaggaaaagaaaagaacaatcttccatttctgggcttggccaccaycaccctggtcggacctgtcctggacttccaaccttgactgctgagctcctggcttagcttcttgggttcctaattcctggtgtttaataattctctccac

SEQ ID NO: 46913 - DNA, 201 bp, Homo sapiens
atgaatgtgggcttatcagaaactcaaaatggaggcatgtctcaagaagcagtgggaaatataaaagttacaaagtctccccagaaatccactgtattaascaatggagaagcagcaatgcagtcttccaattcagaatcaaaaaagaaaaagaagaaaaagagaaaaatggtgaatgatgctgagcctgatacgaaaaaa

SEQ ID NO: 46914 - DNA, 201 bp, Homo sapiens
ctttttgtacctttccttcttgttttgtgaagatttttgtggcatggattgctgtgctcactgctgtaaaaggtgacctagtgtactgggcagctggtggyggtgcagaaaagagtctcaggttattttttgtttttagttatttcttggaccttgacagtatctaatgactcctcctgaaaatgctgcagtataaaagag

SEQ ID NO: 46915 - DNA, 201 bp, Homo sapiens; identical to SEQ ID NO: 46906

SEQ ID NO: 46916 - DNA, 201 bp, Homo sapiens; identical to SEQ ID NO: 46907

SEQ ID NO: 46917 - DNA, 201 bp, Homo sapiens; identical to SEQ ID NO: 46908

SEQ ID NO: 46918 - DNA, 201 bp, Homo sapiens; identical to SEQ ID NO: 46910

SEQ ID NO: 46919 - DNA, 201 bp, Homo sapiens
ggtttcaaggtgcctcccttcgttgatctgaacgtcaacagtaatgaaggcaagcagaaaaagcgaggaggtggtggtggatttggctaccagaaaaccargaaagttgagaaatccaaaatctttaaacacattagcaagaaatcatctgacagcaggcagttctctcactgaacacatgccttcctttcatcttgaata

SEQ ID NO: 46920 - DNA, 201 bp, Homo sapiens; identical to SEQ ID NO: 46912

SEQ ID NO: 46921 - DNA, 201 bp, Homo sapiens
tacgagcctatgattcccattctctgaaacagatctttaatgttaataacctaaatttgcctcaggttgctctgtcatttggtttcaaggtgcctcccttygttgatctgaacgtcaacagtaatgaaggcaagcagaaaaagcgaggaggtggtggtggatttggctaccagaaaaccaagaaagttgagaaatccaaaa

SEQ ID NO: 46922 - DNA, 201 bp, Homo sapiens; identical to SEQ ID NO: 46913

SEQ ID NO: 46923 - DNA, 201 bp, Homo sapiens
attgggttttcttcgctacttgaaacaatccaaggttccattaagtgaatttgacttttcctggtctaaaatttctgacattcagtctcagcttgagaaaytgattgaaaagaattactttcttcataagtcagcccaggaagcatataagtcatacatacgagcctatgattcccattctctgaaacagatctttaatgt

SEQ ID NO: 46924 - DNA, 201 bp, Homo sapiens
atttgcccgtcttggccattcatggaaagcaaaagcaaaataagcgtacaaccacattcttccagttctgcaatgcagattcgggaacactattgtgtacrgatgtggcagcgagaggactagacattcctgaagtcgactggattgttcagtatgaccctccggatgaccctaaggaatatattcatcgtgtgggtagaa

SEQ ID NO: 46925 - DNA, 201 bp, Homo sapiens; identical to SEQ ID NO: 46914

SEQ ID NO: 46926 - DNA, 105 bp, Homo sapiens
tttttttatcaaaaattaagtcatctacctactacttgtaaccagcttgtttcataacatgttattttcctgtgtcattaaataattacttcaatgttgtwtttc

SEQ ID NO: 46927 - DNA, 201 bp, Homo sapiens; identical to SEQ ID NO: 46902

SEQ ID NO: 46928 - DNA, 201 bp, Homo sapiens; identical to SEQ ID NO: 46903

SEQ ID NO: 46929 - DNA, 201 bp, Homo sapiens; identical to SEQ ID NO: 46904

SEQ ID NO: 46930 - DNA, 149 bp, Homo sapiens
tttgtacataatctaatttttatatgcatgtttatgctttttaatttttttatcaaaaattaagtcatctacctactacttgtaaccagcttgtttcatarcatgttattttcctgtgtcattaaataattacttcaatgttgtatttc

SEQ ID NO: 46931 - DNA, 163 bp, Homo sapiens
aatactgttggtattttgtacataatctaatttttatatgcatgtttatgctttttaatttttttatcaaaaattaagtcatctacctactacttgtaacyagcttgtttcataacatgttattttcctgtgtcattaaataattacttcaatgttgtatttc

SEQ ID NO: 46932 - DNA, 201 bp, Homo sapiens
ctaaggaatatattcatcgtgtgggtagaacagccagaggcctaaatgggagagggcatgccttgctcattttgcgcccagaagaattgggttttcttcgytacttgaaacaatccaaggttccattaagtgaatttgacttttcctggtctaaaatttctgacattcagtctcagcttgagaaattgattgaaaagaatt

SEQ ID NO: 46933 - DNA, 201 bp, Homo sapiens
cgctgatcggattggccgtcatgggccagaacttaattctgaacatgaatgaccacggctttgtggtctgtgcttttaataggactgtctccaaagttgaygatttcttggccaatgaggcaaagggaaccaaagtggtgggtgcccagtccctgaaagagatggtctccaagctgaagaagccccggcggatcatcctcc

SEQ ID NO: 46934 - DNA, 201 bp, Homo sapiens
agcgggattacttcggggctcacacctatgaactcttggccaaaccagggcagtttatccacaccaactggacaggccatggtggcaccgtgtcatcctcrtcatacaatgcctgatcatgctgctcctgtcaccctccacgattccacagaccaggacattccatgtgcctcatggcactgccacctggccctttgccct

SEQ ID NO: 46935 - DNA, 201 bp, Homo sapiens
agacagagctagactcattcctgattgaaatcacagccaatattctcaagttccaagacaccgatggcaaacacctgctgccaaagatcagggacagcgcrgggcagaagggcacagggaagtggaccgccatctccgccctggaatacggcgtacccgtcaccctcattggagaagctgtctttgctcggtgcttatcat

SEQ ID NO: 46936 - DNA, 201 bp, Homo sapiens
ccattggcagaaagatttttctttaaaaaaaaagactagaataacacaagaaaccacatttaggattatgcttcactcagaggaggcaggcagggaggacmcaccaggggctttaatacactgggcatgttttctttctccaattgggcaatgggtacatggacgttcactgtaacgtgctttttctttcgtctttttttt

SEQ ID NO: 46937 - DNA, 201 bp, Homo sapiens
ttttctttaaaaaaaaagactagaataacacaagaaaccacatttaggattatgcttcactcagaggaggcaggcagggaggacacaccaggggctttaawacactgggcatgttttctttctccaattgggcaatgggtacatggacgttcactgtaacgtgctttttctttcgtctttttttttttttttttttttttg

SEQ ID NO: 46938 - DNA, 201 bp, Homo sapiens
gcaggacgagatggcccaggcctttgaggattggaataagacagagctagactcattcctgattgaaatcacagccaatattctcaagttccaagacaccratggcaaacacctgctgccaaagatcagggacagcgcggggcagaagggcacagggaagtggaccgccatctccgccctggaatacggcgtacccgtcac

SEQ ID NO: 46939 - DNA, 201 bp, Homo sapiens
tctttaaaaaaaaagactagaataacacaagaaaccacatttaggattatgcttcactcagaggaggcaggcagggaggacacaccaggggctttaatacmctgggcatgttttctttctccaattgggcaatgggtacatggacgttcactgtaacgtgctttttctttcgtctttttttttttttttttttttttgctc

SEQ ID NO: 46940 - DNA, 201 bp, Homo sapiens
acatttaggattatgcttcactcagaggaggcaggcagggaggacacaccaggggctttaatacactgggcatgttttctttctccaattgggcaatgggkacatggacgttcactgtaacgtgctttttctttcgtctttttttttttttttttttttttgctcctggcaagctgtgcgtgacattctttatggcttttt

SEQ ID NO: 46941 - DNA, 201 bp, Homo sapiens
tgcttcactcagaggaggcaggcagggaggacacaccaggggctttaatacactgggcatgttttctttctccaattgggcaatgggtacatggacgttcmctgtaacgtgctttttctttcgtctttttttttttttttttttttttgctcctggcaagctgtgcgtgacattctttatggctttttgtatgtcaaatac

SEQ ID NO: 46942 - DNA, 201 bp, Homo sapiens
cagaggaggcaggcagggaggacacaccaggggctttaatacactgggcatgttttctttctccaattgggcaatgggtacatggacgttcactgtaacgkgctttttctttcgtctttttttttttttttttttttttgctcctggcaagctgtgcgtgacattctttatggctttttgtatgtcaaatacttcatacta

SEQ ID NO: 46943 - DNA, 201 bp, Homo sapiens
ttttcctttactcaataaaagctacatcagactgatgctctttctccagattcttagtctcacctcggccacatggagccattatccccattggcagaaaratttttctttaaaaaaaaagactagaataacacaagaaaccacatttaggattatgcttcactcagaggaggcaggcagggaggacacaccaggggcttt

SEQ ID NO: 46944 - DNA, 187 bp, Homo sapiens
tgttttctttctccaattgggcaatgggtacatggacgttcactgtaacgtgctttttctttcgtctttttttttttttttttttttttgctcctggcaarctgtgcgtgacattctttatggctttttgtatgtcaaatacttcatactaaactttctagagaattaaactttaatgatgggctca

SEQ ID NO: 46945 - DNA, 201 bp, Homo sapiens
tctccagattcttagtctcacctcggccacatggagccattatccccattggcagaaagatttttctttaaaaaaaaagactagaataacacaagaaaccmcatttaggattatgcttcactcagaggaggcaggcagggaggacacaccaggggctttaatacactgggcatgttttctttctccaattgggcaatgggt

SEQ ID NO: 46946 - DNA, 148 bp, Homo sapiens
tcactgtaacgtgctttttctttcgtctttttttttttttttttttttttgctcctggcaagctgtgcgtgacattctttatggctttttgtatgtcaaawacttcatactaaactttctagagaattaaactttaatgatgggctca

SEQ ID NO: 46947 - DNA, 201 bp, Homo sapiens
acctcggccacatggagccattatccccattggcagaaagatttttctttaaaaaaaaagactagaataacacaagaaaccacatttaggattatgcttcmctcagaggaggcaggcagggaggacacaccaggggctttaatacactgggcatgttttctttctccaattgggcaatgggtacatggacgttcactgtaa

SEQ ID NO: 46948 - DNA, 201 bp, Homo sapiens
tggcgcaggacgagatggcccaggcctttgaggattggaataagacagagctagactcattcctgattgaaatcacagccaatattctcaagttccaagayaccgatggcaaacacctgctgccaaagatcagggacagcgcggggcagaagggcacagggaagtggaccgccatctccgccctggaatacggcgtacccg

SEQ ID NO: 46949 - DNA, 201 bp, Homo sapiens
gaacgagcacgcccggtccctgctccggagcggaggacacgacgcggacccgcacggtgcaccgcagtgacctgaggaaggagcgacgggcgctcgcgccmaaggcgtccgagtgcctggtaaactgtaaagcgcggtcctgcagctgacatcgcgctgatcggattggccgtcatgggccagaacttaattctgaacatg

SEQ ID NO: 46950 - DNA, 201 bp, Homo sapiens
agcgggattacttcggggctcacacctatgaactcttggccaaaccagggcagtttatccacaccaactggacaggccatggtggcaccgtgtcatcctcrtcatacaatgcctttgccctattttctgttcagttttttaaaagtgttgtaagagactcctgaggaagacacacagtttatttgtaaagtagctctgtga

SEQ ID NO: 46951 - DNA, 201 bp, Homo sapiens; identical to SEQ ID NO: 46933

SEQ ID NO: 46952 - DNA, 201 bp, Homo sapiens; identical to SEQ ID NO: 46935

SEQ ID NO: 46953 - DNA, 201 bp, Homo sapiens; identical to SEQ ID NO: 46936

SEQ ID NO: 46954 - DNA, 201 bp, Homo sapiens; identical to SEQ ID NO: 46937

SEQ ID NO: 46955 - DNA, 201 bp, Homo sapiens; identical to SEQ ID NO: 46938

SEQ ID NO: 46956 - DNA, 201 bp, Homo sapiens; identical to SEQ ID NO: 46939

SEQ ID NO: 46957 - DNA, 201 bp, Homo sapiens; identical to SEQ ID NO: 46940

SEQ ID NO: 46958 - DNA, 201 bp, Homo sapiens; identical to SEQ ID NO: 46941

SEQ ID NO: 46959 - DNA, 201 bp, Homo sapiens; identical to SEQ ID NO: 46942

SEQ ID NO: 46960 - DNA, 201 bp, Homo sapiens; identical to SEQ ID NO: 46943

SEQ ID NO: 46961 - DNA, 187 bp, Homo sapiens; identical to SEQ ID NO: 46944

SEQ ID NO: 46962 - DNA, 201 bp, Homo sapiens; identical to SEQ ID NO: 46945

SEQ ID NO: 46963 - DNA, 148 bp, Homo sapiens; identical to SEQ ID NO: 46946

SEQ ID NO: 46964 - DNA, 201 bp, Homo sapiens; identical to SEQ ID NO: 46947

SEQ ID NO: 46965 - DNA, 201 bp, Homo sapiens; identical to SEQ ID NO: 46948

SEQ ID NO: 46966 - DNA, 201 bp, Homo sapiens; identical to SEQ ID NO: 46949

SEQ ID NO: 46967 - DNA, 201 bp, Homo sapiens; identical to SEQ ID NO: 46933

SEQ ID NO: 46968 - DNA, 201 bp, Homo sapiens; identical to SEQ ID NO: 46934

SEQ ID NO: 46969 - DNA, 201 bp, Homo sapiens; identical to SEQ ID NO: 46935

SEQ ID NO: 46970 - DNA, 201 bp, Homo sapiens; identical to SEQ ID NO: 46936

SEQ ID NO: 46971 - DNA, 201 bp, Homo sapiens; identical to SEQ ID NO: 46937

SEQ ID NO: 46972 - DNA, 201 bp, Homo sapiens; identical to SEQ ID NO: 46938

SEQ ID NO: 46973 - DNA, 201 bp, Homo sapiens; identical to SEQ ID NO: 46939

SEQ ID NO: 46974 - DNA, 201 bp, Homo sapiens; identical to SEQ ID NO: 46940

SEQ ID NO: 46975 - DNA, 201 bp, Homo sapiens; identical to SEQ ID NO: 46941

SEQ ID NO: 46976 - DNA, 201 bp, Homo sapiens; identical to SEQ ID NO: 46942

SEQ ID NO: 46977 - DNA, 201 bp, Homo sapiens; identical to SEQ ID NO: 46943

SEQ ID NO: 46978 - DNA, 187 bp, Homo sapiens; identical to SEQ ID NO: 46944

SEQ ID NO: 46979 - DNA, 201 bp, Homo sapiens; identical to SEQ ID NO: 46945

SEQ ID NO: 46980 - DNA, 148 bp, Homo sapiens; identical to SEQ ID NO: 46946

SEQ ID NO: 46981 - DNA, 201 bp, Homo sapiens; identical to SEQ ID NO: 46947

SEQ ID NO: 46982 - DNA, 201 bp, Homo sapiens; identical to SEQ ID NO: 46948

SEQ ID NO: 46983 - DNA, 201 bp, Homo sapiens; identical to SEQ ID NO: 46933

SEQ ID NO: 46984 - DNA, 201 bp, Homo sapiens; identical to SEQ ID NO: 46934

SEQ ID NO: 46985 - DNA, 201 bp, Homo sapiens; identical to SEQ ID NO: 46935

SEQ ID NO: 46986 - DNA, 201 bp, Homo sapiens; identical to SEQ ID NO: 46936

SEQ ID NO: 46987 - DNA, 201 bp, Homo sapiens; identical to SEQ ID NO: 46937

SEQ ID NO: 46988 - DNA, 201 bp, Homo sapiens; identical to SEQ ID NO: 46938

SEQ ID NO: 46989 - DNA, 201 bp, Homo sapiens; identical to SEQ ID NO: 46939

SEQ ID NO: 46990 - DNA, 201 bp, Homo sapiens; identical to SEQ ID NO: 46940

SEQ ID NO: 46991 - DNA, 201 bp, Homo sapiens; identical to SEQ ID NO: 46941

SEQ ID NO: 46992 - DNA, 201 bp, Homo sapiens; identical to SEQ ID NO: 46942

SEQ ID NO: 46993 - DNA, 201 bp, Homo sapiens; identical to SEQ ID NO: 46943

SEQ ID NO: 46994 - DNA, 187 bp, Homo sapiens; identical to SEQ ID NO: 46944

SEQ ID NO: 46995 - DNA, 201 bp, Homo sapiens; identical to SEQ ID NO: 46945

SEQ ID NO: 46996 - DNA, 148 bp, Homo sapiens; identical to SEQ ID NO: 46946

SEQ ID NO: 46997 - DNA, 201 bp, Homo sapiens; identical to SEQ ID NO: 46947

SEQ ID NO: 46998 - DNA, 201 bp, Homo sapiens; identical to SEQ ID NO: 46948

SEQ ID NO: 46999 - DNA, 201 bp, Homo sapiens
ccttattgcctctgacatatttttaactgcagagaaagctggtattattttggagaaaggcaaagagataaaacccacagcaaaaaaatttcagggagtaraaactccttctcagaatagatatgtcggatattttgcacaagtgaaacatctctacaactggaatctctctccaagacggatactctttataaaaagatt

SEQ ID NO: 47000 - DNA, 164 bp, Homo sapiens
aattgttcatttttcttctggtgccacacatcttttattcagaataacagctttatctaccaagaaatgaattggataatccacataaacaaaaagcttgracaatttatccaccagaatttgccgtggagatactttttggcaagaaatgacttccaatgaca

SEQ ID NO: 47001 - DNA, 201 bp, Homo sapiens
cctacaaatttttttaatcatagcattcacagccacagaactaattatattttatattctctttgaagccacacttattcctaccctaattatcattaccygctgaggtaaccaatcagaacgactcaatgcaagctcatatttcttattttacacactagtagggtcccttcccctacttgttacacttgtccatactca

SEQ ID NO: 47002 - DNA, 201 bp, Homo sapiens
agagagaggaaatattctacaccatcaagctttgggctactttctttcgggcagaattggttcacccggccctagaaaggtcactgaagaaacttggaccrgactatgtagatctcttcattattcatgtaccatttgctatgaagcctgggaaagaattactgccaaaggatgccagtggagagattattttagaaactg

SEQ ID NO: 47003 - DNA, 201 bp, Homo sapiens
gaagcaaagccattcagtgaggctgaatgatggacccttcatgccagtgctgggatttggcacttatgctcctgatcatactcccaaaagccaggctgccraggccaccaaagtggctattgacgtaggcttccgccatattgattcagcatacttataccaaaatgaggaggaggttggacaggccatttgggagaagat

SEQ ID NO: 47004 - DNA, 152 bp, Homo sapiens
ctcaggagagaatcaaagagaacttccagatttttgactttgagttgactccagaggacatgaaagccattgatggcctcaacagaaatctccgatatgayaagttacaatttgctgctaatcacccttattttccattttctgaagaatat

SEQ ID NO: 47005 - DNA, 201 bp, Homo sapiens
ctggaactcatcctcaacaagccagggctcaagtacaagcccacctgcaaccaggtggaatgtcacccttacctcaaccagagcaaactcctggagttctkcaagtccaaggacattgttctagttgcctacagtgccctgggatcccaaagagacccacagtgggtggatcccgactgcccacatctcttggaggagccg

SEQ ID NO: 47006 - DNA, 201 bp, Homo sapiens
cccttcatgccagtgctgggatttggcacttatgctcctgatcatactcccaaaagccaggctgccgaggccaccaaagtggctattgacgtaggcttccrccatattgattcagcatacttataccaaaatgaggaggaggttggacaggccatttgggagaagatcgctgatggtaccgtcaagagagaggaaatattc

SEQ ID NO: 47007 - DNA, 201 bp, Homo sapiens
aagagagaggaaatattctacaccatcaagctttgggctactttctttcgggcagaattggttcacccggccctagaaaggtcactgaagaaacttggacyggactatgtagatctcttcattattcatgtaccatttgctatgaagcctgggaaagaattactgccaaaggatgccagtggagagattattttagaaact

SEQ ID NO: 47008 - DNA, 201 bp, Homo sapiens
cagtgccctgggatcccaaagagacccacagtgggtggatcccgactgcccacatctcttggaggagccgatcttgaaatccattgccaagaaacacagtsgaagcccaggccaggtcgccctgcgctaccagctgcagcggggagtggtggtgctggccaagagcttctctcaggagagaatcaaagagaacttccagat

SEQ ID NO: 47009 - DNA, 201 bp, Homo sapiens
acccggccctagaaaggtcactgaagaaacttggaccggactatgtagatctcttcattattcatgtaccatttgctatgaagcctgggaaagaattactkccaaaggatgccagtggagagattattttagaaactgtggagctttgtgacacttgggaggccctggagaagtgcaaagaagcaggtttaaccaggtcca

SEQ ID NO: 47010 - DNA, 201 bp, Homo sapiens
gcctacagggccctggcatctcacagagacccaaactggatggacccagatagcccatatctcttagaggagccaaccttgaaatccattgccaagaaatrcaatagaagcccaggccaggttgccctgtgctatgagctgcagcggggggtggtggtcctggccaagagcttctctgagaagagaatcaaagagaacttc

SEQ ID NO: 47011 - DNA, 201 bp, Homo sapiens
gaagattgctgacggccctgtgaagagagaggacattttctacaccactgagctttggacaactttctttagaccagaattagttcgcccagccctggaarggtcactgaagaaacttcaactggactatgtcgatctcttcattatccacaatccattggctatgaagcctggggaggaattgctgcctaaggatgccag

SEQ ID NO: 47012 - DNA, 201 bp, Homo sapiens
caaactggatggacccagatagcccatatctcttagaggagccaaccttgaaatccattgccaagaaatacaatagaagcccaggccaggttgccctgtgytatgagctgcagcggggggtggtggtcctggccaagagcttctctgagaagagaatcaaagagaacttccaggtttttgactttgagttgactccagagg

SEQ ID NO: 47013 - DNA, 201 bp, Homo sapiens
ccgaagtggctattgatgcaggcttccgtcacattgatgcggcgttcttctaccaaaacgaggaggaggtcggaaaggccattcgagagaagattgctgayggccctgtgaagagagaggacattttctacaccactgagctttggacaactttctttagaccagaattagttcgcccagccctggaagggtcactgaaga

SEQ ID NO: 47014 - DNA, 201 bp, Homo sapiens
cgatctcttcattatccacaatccattggctatgaagcctggggaggaattgctgcctaaggatgccagtggaaacattatttttgatactgtggatcttygtgacacatgggaggccctggagaagtgcaaagaagcaggtttaaccaagtccatcggggtgtccaatttcaatcacaaactgctggaactcatcctcaa

SEQ ID NO: 47015 - DNA, 201 bp, Homo sapiens
gacctctatcttcttcatttcccaatggctctcaagccaggtgagacgccactaccaaaagatgaaaatggaaaagtaatattcgacacagtggatctctstgccacatgggaggtcatggagaagtgtaaggatgcaggattggccaagtccatcggggtgtcaaacttcaactgcaggcagctggagatgatcctcaac

SEQ ID NO: 47016 - DNA, 199 bp, Homo sapiens
gatgaatattagcatagagggtgttgcacgacatctagcagaaggccctgtgtgtggatggtgatgcagaggatgtctctatgctggtgactggacacacrgcctctggttaaatccctcccctcctgcttggcaacttcagctagctagatatatccatggtccagaaagcaaacataataaatttttatcttgaagt

SEQ ID NO: 47017 - DNA, 201 bp, Homo sapiens
atcccaaatatcagcgtgtagagctaaatgatggtcacttcatgcccgtattgggatttggcacctatgcacctccagaggttccgaggaacagagctgtrgaggtcaccaaattagcaatagaagctggcttccgccatattgattctgcttatttatacaataatgaggagcaggttggactggccatccgaagcaaga

SEQ ID NO: 47018 - DNA, 201 bp, Homo sapiens
tcagacaacaacagatattggattaccacatcatcaggaccacaccttcatcaggaatgaatattcctactacaattaaagaagaaacaaaattaatttgytggtgaaaaacatgttgctgaaggaaacaggatctgcttagtgaaagaagtggcaagcaatggatcccaaatatcagcgtgtagagctaaatgatggtca

SEQ ID NO: 47019 - DNA, 201 bp, Homo sapiens
cagatattggattaccacatcatcaggaccacaccttcatcaggaatgaatattcctactacaattaaagaagaaacaaaattaatttgttggtgaaaaayatgttgctgaaggaaacaggatctgcttagtgaaagaagtggcaagcaatggatcccaaatatcagcgtgtagagctaaatgatggtcacttcatgcccg

SEQ ID NO: 47020 - DNA, 201 bp, Homo sapiens
gagcaggttggactggccatccgaagcaagattgcagatggcagtgtgaagagagaagacatattctacacttcaaagctttggtgcactttctttcaacyacagatggtccaaccagccttggaaagctcactgaaaaaacttcaactggactatgttgacctctatcttcttcatttcccaatggctctcaagccaggt

SEQ ID NO: 47021 - DNA, 201 bp, Homo sapiens
agtgctctgggaacccaacgacataaactatgggtggacccaaactccccagttcttttggaggacccagttctttgtgccttagcaaagaaacacaaacraaccccagccctgattgccctgcgctaccagctgcagcgtggggttgtggtcctggccaagagctacaatgagcagcggatcagagagaacatccaggtt

SEQ ID NO: 47022 - DNA, 201 bp, Homo sapiens; identical to SEQ ID NO: 47015

SEQ ID NO: 47023 - DNA, 199 bp, Homo sapiens; identical to SEQ ID NO: 47016

SEQ ID NO: 47024 - DNA, 201 bp, Homo sapiens; identical to SEQ ID NO: 47017

SEQ ID NO: 47025 - DNA, 201 bp, Homo sapiens; identical to SEQ ID NO: 47020

SEQ ID NO: 47026 - DNA, 201 bp, Homo sapiens; identical to SEQ ID NO: 47021

SEQ ID NO: 47027 - DNA, 174 bp, Homo sapiens
atgtcatttctggagataaaattaatggcaactgcacaggcattaaaatctacgtttctgatgatggcaaagctcatttttctattagtaactctgctgargatccatttattgcaattcatgctgaatctaaattgtaaaatttaaaattaaatgcaaatccgcaaagcaata

SEQ ID NO: 47028 - DNA, 201 bp, Homo sapiens
acactacttgtggcaatgactgggtctgtgaacatcgatggcgccaaataaggaacatggttaatttccgcaatgtagtggatggccagccttttacaaaytggtatgataatgggagcaaccaagtggcttttgggagaggaaacagaggattcattgttttcaacaatgatgactggacattttctttaactttgcaaa

SEQ ID NO: 47029 - DNA, 201 bp, Homo sapiens
gataatggagtaactaaagaagttactattaatccagacactacttgtggcaatgactgggtctgtgaacatcgatggcgccaaataaggaacatggttawtttccgcaatgtagtggatggccagccttttacaaactggtatgataatgggagcaaccaagtggcttttgggagaggaaacagaggattcattgttttc

SEQ ID NO: 47030 - DNA, 197 bp, Homo sapiens
aattaaggatgttaatgattgggttgggccaccaaatgataatggagtaactaaagaagttactattaatccagacactacttgtggcaatgactgsgtctgtgaacatcgatggcgccaaataaggaacatggttaatttccgcaatgtagtggatggccagccttttacaaactggtatgataatgggagcaacc

SEQ ID NO: 47031 - DNA, 138 bp, Homo sapiens
caggcattaaaatctacgtttctgatgatggcaaagctcatttttctattagtaactctgctgaagatccatttattgcaattcatgctgaatctaaattrtaaaatttaaaattaaatgcaaatccgcaaagcaata

SEQ ID NO: 47032 - DNA, 138 bp, Homo sapiens
aattaaggatgttaatgattgggttgggccaccaaatrataatggagtaactaaagaagttactattaatccagacactacttgtggcaatgactgggtctgtgaacatcgatggcgccaaataaggaacatggttaa

SEQ ID NO: 47033 - DNA, 151 bp, Homo sapiens
aattaaggatgttaatgattgggttgggccaccaaatgataatggagtaaytaaagaagttactattaatccagacactacttgtggcaatgactgggtctgtgaacatcgatggcgccaaataaggaacatggttaatttccgcaatgta

SEQ ID NO: 47034 - DNA, 201 bp, Homo sapiens
aagctttgagtgcccctattacagcagtaccgaagatgttagttaatagatattttagtggataatctgtcatctgacatccagtataagttacagccttygcattttgctcattttagatatcttggactgagcagtggggcctttactgtatttttcctgataaatacacatactggccactccttatctctttttctt

SEQ ID NO: 47035 - DNA, 201 bp, Homo sapiens
atacatgagaaaaatggctggtacacccctccaaaggaagatggctaaatatgttgactgttgtatgtttggactaatgttgctttaaagaaaatctttcyaacatgcagacaaaagctttgagtgcccctattacagcagtaccgaagatgttagttaatagatattttagtggataatctgtcatctgacatccagtat

SEQ ID NO: 47036 - DNA, 201 bp, Homo sapiens
atcaatataatctagcaagagcccaacaatcctataattccattgtacagatacatgagaaaaatggctggtacacccctccaaaggaagatggctaaatrtgttgactgttgtatgtttggactaatgttgctttaaagaaaatctttccaacatgcagacaaaagctttgagtgcccctattacagcagtaccgaagat

SEQ ID NO: 47037 - DNA, 201 bp, Homo sapiens; identical to SEQ ID NO: 47034

SEQ ID NO: 47038 - DNA, 201 bp, Homo sapiens
ctgttctctcaggagggctggtacacccctccaaaggaagatggctaaatatgttgactgttgtatgtttggactaatgttgctttaaagaaaatctttcyaacatgcagacaaaagctttgagtgcccctattacagcagtaccgaagatgttagttaatagatattttagtggataatctgtcatctgacatccagtat

SEQ ID NO: 47039 - DNA, 201 bp, Homo sapiens
ttttaaggataactttccatttgatcctccatttgttcgagtggtgttacctgttctctcaggagggctggtacacccctccaaaggaagatggctaaatrtgttgactgttgtatgtttggactaatgttgctttaaagaaaatctttccaacatgcagacaaaagctttgagtgcccctattacagcagtaccgaagat

SEQ ID NO: 47040 - DNA, 137 bp, Homo sapiens
accctgtctcaaaaaataaacaaaaacaaaatgcttctgtcagttaacaatctttattagagggtttttagtctttctttctcagctgtatgttaagttgrttgacaaatgcaaataaacgtctttattatcctttc

SEQ ID NO: 47041 - DNA, 201 bp, Homo sapiens
tgcggcacggccatggcgtatactactacatcaataatgacacctacactggagagtggtttgctcatcaaaggcatgggcaaggcacctatttatacgcrgagacgggcagtaagtatgttggcacctgggtgaacggacagcaggagggcacggccgagctcattcacctgaaccacaggtaccagggcaagttcttga

SEQ ID NO: 47042 - DNA, 201 bp, Homo sapiens
attaattctgaagaagaagaaactagacagtcagacctccaggactaagatgaagtgagccgagaggagatcgtatcataagaatgcttctgtcgttagcygggtgcagtgctgtgtgtatctagttccagctacttgagaggctgaggcaggaggattgcttgagtccagaaagtggcagttgcagtgagtggagatcgc

SEQ ID NO: 47043 - DNA, 201 bp, Homo sapiens
agctacttgagaggctgaggcaggaggattgcttgagtccagaaagtggcagttgcagtgagtggagatcgcgccactgctctccagcctgggtggcagarcgagaccctgtctcaaaaaataaacaaaaacaaaatgcttctgtcagttaacaatctttattagagggtttttagtctttctttctcagctgtatgttaa

SEQ ID NO: 47044 - DNA, 201 bp, Homo sapiens
cgggtgcagtgctgtgtgtatctagttccagctacttgagaggctgaggcaggaggattgcttgagtccagaaagtggcagttgcagtgagtggagatcgygccactgctctccagcctgggtggcagagcgagaccctgtctcaaaaaataaacaaaaacaaaatgcttctgtcagttaacaatctttattagagggttt

SEQ ID NO: 47045 - DNA, 145 bp, Homo sapiens
accctgtctcaaaaaataaacaaaaacaaaatgcttctgtcagttaacaatctttattagagggtttttagtctttctttctcagctgtatgttaagttgrttgacaaatgcaaataaacgtctttattatcctttctttctgaa

SEQ ID NO: 47046 - DNA, 201 bp, Homo sapiens; identical to SEQ ID NO: 47041

SEQ ID NO: 47047 - DNA, 201 bp, Homo sapiens
gcctgtccccgctccccatcttccgggctgggagggaggcgggaccggccgcgtctccatggcgacgcgggacgcggcggtggaggcggttgctacccacytgctagaggcgctgcggctgtgatccaggctggggcgagaccatgtcggacctgggctcggaggagttggaggaggagggagagaatgatattggggaat

SEQ ID NO: 47048 - DNA, 201 bp, Homo sapiens; identical to SEQ ID NO: 47042

SEQ ID NO: 47049 - DNA, 201 bp, Homo sapiens; identical to SEQ ID NO: 47043

SEQ ID NO: 47050 - DNA, 201 bp, Homo sapiens; identical to SEQ ID NO: 47044

SEQ ID NO: 47051 - DNA, 201 bp, Homo sapiens
gtctggcctgctcatttattcctctgtgcggaagattagtaccattttgggaacagagatggaaagacttactaatgttaaaattctggaaatcagtctgstggaggagatatttggagtttgggtgcaggcagaggatggaaaagtggggctggcaccaaatcaggaagaaggtggtgacagagtctcaatatcaaatga

SEQ ID NO: 47052 - DNA, 201 bp, Homo sapiens
gatccatatgtcacccatcttccagtcacccaaaatactttggatttggaggcagcccaaatatttttggaagtgtgtccccaggagaaagaagcttgacyactatgccatcatcaattttccttgaccatagagttggccatgaagaagaaggacaacaacaacacacttgtgtttattgtggatgtcaaggccaacaag

SEQ ID NO: 47053 - DNA, 201 bp, Homo sapiens
aaaggcaaagaagcccctgctcttcccaaagccaaagccaaaccaaaggttttgagagccaagaaggcagtactgaaaggtgtctatagacacagatccayatgtcacccatcttccagtcacccaaaatactttggatttggaggcagcccaaatatttttggaagtgtgtccccaggagaaagaagcttgactactatg

SEQ ID NO: 47054 - DNA, 201 bp, Homo sapiens
ctatctatacctttgaagctctgggatggatctgaagccagacgtacggccaagtgcaggccgatgcccgaggaacagccggtgatgagcaccacggtgcrggccatggtgagactgtggggagaggctggggctctgggcttgatatcacctgcttcgccccgccccgcctgcgggcccccaccccttgttgtgtctccc

SEQ ID NO: 47055 - DNA, 201 bp, Homo sapiens
ggcccgggccgcctcccacagccggccctgtgttttcaggtccctcaacgtggcatacactggaggttttgggagaggaggaagatctgacttcccttctrgcctccaagggctcctcccttctctccctccctgtccctgcctatctatacctttgaagctctgggatggatctgaagccagacgtacggccaagtgcag

SEQ ID NO: 47056 - DNA, 201 bp, Homo sapiens
ccccagcaggcccaggcctgcgttacacactgcggagacaagaggcccgaccagcccgcctcagcatcaccctcagcacggcctgtcccctcgtgctccckgggcctgggaacatgttggtttcaacgcagggcggagaaggctcctaggagcccatatgcttccaggaggctcacccagcacgtccacgcggccctcagt

SEQ ID NO: 47057 - DNA, 201 bp, Homo sapiens
ctcacccagcacgtccacgcggccctcagtcacgcgttcccgggcagcggccacggattttgagtcccttacgtccagctgcaacgtctccagggatccckgagggcatgccagggcccgggccgcctcccacagccggccctgtgttttcaggtccctcaacgtggcatacactggaggttttgggagaggaggaagatc

SEQ ID NO: 47058 - DNA, 201 bp, Homo sapiens
tatgcttccaggaggctcacccagcacgtccacgcggccctcagtcacgcgttcccgggcagcggccacggattttgagtcccttacgtccagctgcaacstctccagggatcccggagggcatgccagggcccgggccgcctcccacagccggccctgtgttttcaggtccctcaacgtggcatacactggaggttttgg

SEQ ID NO: 47059 - DNA, 201 bp, Homo sapiens
ggtatgcctctgtgccacaggagcgattatagtgaccgcagtttgctgcagaggctgtgaaagtaaaggcgttgggaggtgggagatgattgtatatgtgytggtttcgtccagggttcctagctcataactcacatgaccatggttacagtcttacgttgtcatgttggggtgcctcaggcctcaaaaaacagcctttcg

SEQ ID NO: 47060 - DNA, 201 bp, Homo sapiens
ccttcctgcgggtccctggcccgctctccccaccctgttctgagccaaaacagacatgagcccactgcttggaacaacaaactgtcctggttgctggtcaragggaggggaggctttacaagcaggtgtgggttcccacgtgggcacagagtggccccctgggcagattcccctgggtatgcctctgtgccacaggagcga

SEQ ID NO: 47061 - DNA, 201 bp, Homo sapiens
cccacagccggccctgtgttttcaggtccctcaacgtggcatacactggaggttttgggagaggaggaagatctgacttcccttctagcctccaagggctyctcccttctctccctccctgtccctgcctatctatacctttgaagctctgggatggatctgaagccagacgtacggccaagtgcaggccgatgcccgagg

SEQ ID NO: 47062 - DNA, 201 bp, Homo sapiens
gaggggaggctttacaagcaggtgtgggttcccacgtgggcacagagtggccccctgggcagattcccctgggtatgcctctgtgccacaggagcgattayagtgaccgcagtttgctgcagaggctgtgaaagtaaaggcgttgggaggtgggagatgattgtatatgtgttggtttcgtccagggttcctagctcataa

SEQ ID NO: 47063 - DNA, 201 bp, Homo sapiens
catcaaggtgcccaagagccgctacctgggctacatcaaggactacgagggagcgacgctgatggagtgtgagctgaatccccgcatcccctacacggagytgtcccacatcatcaagaagcagaaagaggtgatcatcaagaagctgattgagcgcaaacaggcccagatccgcaaggtctacccggggctcagctgctt

SEQ ID NO: 47064 - DNA, 201 bp, Homo sapiens
gatccgcaaggtctacccggggctcagctgcttcaaggagggcgtgaggcagatccctgtggagagcgttcctggcattcgagagacaggctggaagccaytggggaaggagaaggggaaggagctgaaggaccccgaccagctctacacaaccctcaaaaacctgctggcccaaatcaagtctcaccccagtgcctggcc

SEQ ID NO: 47065 - DNA, 201 bp, Homo sapiens
gttccccggccagcttcagtcagtgcagcggttgttcccagcacccccatcttcagccccagcatgggtgggggcagcaacagctccctgagtctggattstgcaggggccgagcctatgccaggcgagaagaggacgctcccagagaacctgaccctggaggatgccaagcggctccgtgtgatgggtgacatccccatg

SEQ ID NO: 47066 - DNA, 201 bp, Homo sapiens
attctgatctgatccttagggggtgccctggccccacggacccgactcagcttgagacactccagccaagggtcctccggacccgatcctgcagctctttytggaccttcaggcacccccaagcgtgcagctctgtcccagccttcactgtgtgtgagaggtctcctgggttggggcccagcccctctagagtagctggtg

SEQ ID NO: 47067 - DNA, 201 bp, Homo sapiens
cagccaagggtcctccggacccgatcctgcagctctttctggaccttcaggcacccccaagcgtgcagctctgtcccagccttcactgtgtgtgagaggtytcctgggttggggcccagcccctctagagtagctggtggccagggatgaaccttgcccagccgtggtggcccccaggcctggtccccaagagctttggag

SEQ ID NO: 47068 - DNA, 201 bp, Homo sapiens
catcaaggtgcccaagagccgctacctgggctacatcaaggactacgagggagcgacgctgatggagtgtgagctgaatccccgcatcccctacacggagytgtcccacatcatcaagaagcagaaagagatcatcaagaagctgattgagcgcaaacaggcccagatccgcaaggtctacccggggctcagctgcttcaa

SEQ ID NO: 47069 - DNA, 201 bp, Homo sapiens; identical to SEQ ID NO: 47064

SEQ ID NO: 47070 - DNA, 201 bp, Homo sapiens; identical to SEQ ID NO: 47065

SEQ ID NO: 47071 - DNA, 201 bp, Homo sapiens; identical to SEQ ID NO: 47066

SEQ ID NO: 47072 - DNA, 201 bp, Homo sapiens; identical to SEQ ID NO: 47067

SEQ ID NO: 47073 - DNA, 201 bp, Homo sapiens
acagcaaaagagaggttctctcccctcactaccaatctgatcaatttgcttgctgaaaatggtcgattaagcaatacccaaggagtcgtttctgccttttytaccatgatgagtgtccatcgcggagaggtaccttgcacagtgacctctgcatctcctttagaagaagccacactctctgaattaaaaactgtcctcaag

SEQ ID NO: 47074 - DNA, 201 bp, Homo sapiens
agtgtccatcgcggagaggtaccttgcacagtgacctctgcatctcctttagaagaagccacactctctgaattaaaaactgtcctcaagagcttcctaartcaaggccaagtattgaaattggaggctaagactgatccgtcaatcttgggtggaatgattgtgcgcattggcgagaaatatgttgacatgtctgtcaag

SEQ ID NO: 47075 - DNA, 201 bp, Homo sapiens
cggagaggtaccttgcacagtgacctctgcatctcctttagaagaagccacactctctgaattaaaaactgtcctcaagagcttcctaagtcaaggccaaktattgaaattggaggctaagactgatccgtcaatcttgggtggaatgattgtgcgcattggcgagaaatatgttgacatgtctgtcaagaccaagattca

SEQ ID NO: 47076 - DNA, 201 bp, Homo sapiens
tggctgcttctgttttgaatccctatgtgaagcgttccattaaagtgaaaagcctaaatgacatcacagcaaaagagaggttctctcccctcactaccaayctgatcaatttgcttgctgaaaatggtcgattaagcaatacccaaggagtcgtttctgccttttctaccatgatgagtgtccatcgcggagaggtacctt

SEQ ID NO: 47077 - DNA, 201 bp, Homo sapiens
gtagcacaaatcctgaaggaacccaaagtggctgcttctgttttgaatccctatgtgaagcgttccattaaagtgaaaagcctaaatgacatcacagcaaragagaggttctctcccctcactaccaatctgatcaatttgcttgctgaaaatggtcgattaagcaatacccaaggagtcgtttctgccttttctaccatg

SEQ ID NO: 47078 - DNA, 201 bp, Homo sapiens
acagcaaaagagaggttctctcccctcactaccaatctgatcaatttgcttgctgaaaatggtcgattaagcaatacccaaggagtcgtttctgccttttytaccatgatgagtgtccatcgcggagaggtaccttgcacagtgacctctgcatctgtaagtaacgggttgttgctgctgtgtttgccttgatattacatg

SEQ ID NO: 47079 - DNA, 201 bp, Homo sapiens; identical to SEQ ID NO: 47076

SEQ ID NO: 47080 - DNA, 201 bp, Homo sapiens; identical to SEQ ID NO: 47077

SEQ ID NO: 47081 - DNA, 201 bp, Homo sapiens; identical to SEQ ID NO: 47073

SEQ ID NO: 47082 - DNA, 201 bp, Homo sapiens; identical to SEQ ID NO: 47074

SEQ ID NO: 47083 - DNA, 201 bp, Homo sapiens; identical to SEQ ID NO: 47075

SEQ ID NO: 47084 - DNA, 201 bp, Homo sapiens; identical to SEQ ID NO: 47076

SEQ ID NO: 47085 - DNA, 201 bp, Homo sapiens; identical to SEQ ID NO: 47077

SEQ ID NO: 47086 - DNA, 201 bp, Homo sapiens
gaataagctggagcaagtagaaaaggagttgttgagagtagcaatttgcttgctgaaaatggtcgattaagcaatacccaaggagtcgtttctgccttttytaccatgatgagtgtccatcgcggagaggtaccttgcacagtgacctctgcatctcctttagaagaagccacactctctgaattaaaaactgtcctcaag

SEQ ID NO: 47087 - DNA, 201 bp, Homo sapiens; identical to SEQ ID NO: 47074

SEQ ID NO: 47088 - DNA, 201 bp, Homo sapiens; identical to SEQ ID NO: 47075

SEQ ID NO: 47089 - DNA, 201 bp, Homo sapiens
cggaggctcacgagaatcagcatgattcttcagaggctcttcaggttctcctctgtcattcggtcagccgtctcagtccatttgcggaggaacattggtgytacagcagtggcatttaataaggaacttgatcctatacagaaactctttgtggacaagattagagaatacaaatctaagcgacagacatctggaggacct

SEQ ID NO: 47090 - DNA, 199 bp, Homo sapiens
agggagctttttaagctcaagcaaatgtttggtaatgcagacatgaatacatttcccaccttcaaatttgaagatcccaaatttgaagtcatcgaaaaacmccaggcctgaagaaataaatttcagaataaacatgcatttcataactgtcaaatgttcttttaattctgagtccaaataaattatttggtgatgttga

SEQ ID NO: 47091 - DNA, 201 bp, Homo sapiens
ataatgcattgcgatggcggcatgattcttcagaggctcttcaggttctcctctgtcattcggtcagccgtctcagtccatttgcggaggaacattggtgytacagcagtggcatttaataaggaacttgatcctatacagaaactctttgtggacaagattagagaatacaaatctaagcgacagacatctggaggacct

SEQ ID NO: 47092 - DNA, 201 bp, Homo sapiens
agggagctttttaagctcaagcaaatgtttggtaatgcagacatgaatacatttcccaccttcaaatttgaagatcccaaatttgaagtcatcgaaaaacmccaggcctgaagaaataaagtaaaattaatctggtaatttgtcacggattagttgtacaactagttagaagtttcagaataaacatgcatttcataactg

SEQ ID NO: 47093 - DNA, 201 bp, Homo sapiens
acgcttcctgtccgaatcagcatgattcttcagaggctcttcaggttctcctctgtcattcggtcagccgtctcagtccatttgcggaggaacattggtgytacagcagtggcatttaataaggaacttgatcctatacagaaactctttgtggacaagattagagaatacaaatctaagcgacagacatctggaggacct

SEQ ID NO: 47094 - DNA, 201 bp, Homo sapiens; identical to SEQ ID NO: 47092

SEQ ID NO: 47095 - DNA, 201 bp, Homo sapiens
cggaggctcacgagaatcagcatgattcttcagaggctcttcaggttctcctctgtcattcggtcagccgtctcagtccatttgcggaggaacattggtgytacagcagtggcatttaataaggaacttgatcctatacagaaactcagtatcagcaagagctggagagggagctttttaagctcaagcaaatgtttggta

SEQ ID NO: 47096 - DNA, 199 bp, Homo sapiens; identical to SEQ ID NO: 47090

SEQ ID NO: 47097 - DNA, 201 bp, Homo sapiens
attatccgttagattttcaccccagtttttttgttggtttttttttttgagatggagtctcgctctgtcgccaggctggagtgcagtggcgtgatctcgastcactgcagcctgtgtctcctgggttcaagcgattctcctgcctcagcctcccaagtagctgggactacaggtgtgtgccactaagctcagctaattttt

SEQ ID NO: 47098 - DNA, 201 bp, Homo sapiens
tctggtggtggagcaggtccgggtggtggatctggaagggagcctgaaggtggtgtacccgtccaaggccgacctggccactgcccctccccacgtgactrtcgtgcgctgacgccagggccgcctgtccgcgtttgtttggccggttttgcggaggtttctatgcggcaatgctgaattatccgttagattttcacccca

SEQ ID NO: 47099 - DNA, 201 bp, Homo sapiens
ctgtccgcgtttgtttggccggttttgcggaggtttctatgcggcaatgctgaattatccgttagattttcaccccagtttttttgttggtttttttttttgagatggagtctcgctctgtcgccaggctggagtgcagtggcgtgatctcgagtcactgcagcctgtgtctcctgggttcaagcgattctcctgcctcag

SEQ ID NO: 47100 - DNA, 201 bp, Homo sapiens
gagctgtgcctggcccaccccagcattttttaagatgtatgtattcgttgttctgtttttccagatgattctgtcgtaaagtgatgctatgttgtcgttamaacatcaaagtgattttacggtttttgatgggattattcaagtgtcagaattaactgttcaaaatgttctgaatcatgtagatacatggcaggtaactgt

SEQ ID NO: 47101 - DNA, 201 bp, Homo sapiens
ccagtttttttgttggtttttttttttgagatggagtctcgctctgtcgccaggctggagtgcagtggcgtgatctcgagtcactgcagcctgtgtctccygggttcaagcgattctcctgcctcagcctcccaagtagctgggactacaggtgtgtgccactaagctcagctaatttttgtatttttagtagagacgggg

SEQ ID NO: 47102 - DNA, 201 bp, Homo sapiens
gtgccacgtaacagcgtctgggtcagtgacggacacttacctgacagcggatccacaatattctcgtgcagtgtgtttggaatcctggtctgggctctcgkcgttggccttgtagatcaagtaggggaagtgagtgatgttcagtcatgctgctgggacacttggttttccagatgaaaacacataaataaaactacatgc

SEQ ID NO: 47103 - DNA, 201 bp, Homo sapiens
gtgatggggaggagcaggacgtgggagatgccggccggctgctgctcagggtcctgcacgtctctgaaaaccccgtacctctgacagtcagagtgagcccygaggtccgggatgtgcggccctacattgtgggggccgtggtgcgaggcatggacctgcagccagggaatgcactcaagcgcttcctcacctcgcagacca

SEQ ID NO: 47104 - DNA, 201 bp, Homo sapiens
agctccacgaagatctctgtgagaagaggacggctgccacccttgccacccacgagctccgtgccgtcaaagggcccctgctgtactgcgcccggcccccrcaggacctcaagattgtccccttggggcggaaagaagccaaggccaaggagctggtgcggcagctgcagctggaggccgaggagcagaggaagcagaaga

SEQ ID NO: 47105 - DNA, 201 bp, Homo sapiens
caacgaatcccagtgctggaaaggacgggccctcccttctggtggtggagcaggtccgggtggtggatctggaagggagcctgaaggtggtgtacccgtcyaaggccgacctggccactgcccctccccacgtgactgtcgtgcgctgacgccagggccgcctgtccgcgtttgtttggccggttttgcggaggtttctat

SEQ ID NO: 47106 - DNA, 201 bp, Homo sapiens
acatcaaagtgattttacggtttttgatgggattattcaagtgtcagaattaactgttcaaaatgttctgaatcatgtagatacatggcaggtaactgttyatgggagaaaagtacagtgctgttacgtggcactgtacagtcatgtgccacgtaacagcgtctgggtcagtgacggacacttacctgacagcggatccac

SEQ ID NO: 47107 - DNA, 201 bp, Homo sapiens
tcaaggagatcaatttccgtgggaacaagctgagggacaagcgcctggagaagatggtcagcggctgccagaccagatccatcctggagtacctgcgcgtyggaggccgtggtggcgggaagggcaagggccgtgccgagggctcggagaaggaagagagccggaggaagaggagggagaggaagcagaggcgggaaggtg

SEQ ID NO: 47108 - DNA, 201 bp, Homo sapiens
tggagcaggtccgggtggtggatctggaagggagcctgaaggtggtgtacccgtccaaggccgacctggccactgcccctccccacgtgactgtcgtgcgstgacgccagggccgcctgtccgcgtttgtttggccggttttgcggaggtttctatgcggcaatgctgaattatccgttagattttcaccccagttttttt

SEQ ID NO: 47109 - DNA, 201 bp, Homo sapiens; identical to SEQ ID NO: 47098

SEQ ID NO: 47110 - DNA, 201 bp, Homo sapiens
ctgtccgcgtttgtttggccggttttgcggaggtttctatgcggcaatgctgaattatccgttagattttcaccccagtttttttgttggtttttttttttgagatggagtctcgctctgtcgccaggctggagtgcagtggcgtgatctcgaaatcacttgaacccaggaggcggaggttgcagtgagctgagatcacac

SEQ ID NO: 47111 - DNA, 201 bp, Homo sapiens; identical to SEQ ID NO: 47103

SEQ ID NO: 47112 - DNA, 201 bp, Homo sapiens; identical to SEQ ID NO: 47104

SEQ ID NO: 47113 - DNA, 201 bp, Homo sapiens; identical to SEQ ID NO: 47105

SEQ ID NO: 47114 - DNA, 201 bp, Homo sapiens; identical to SEQ ID NO: 47107

SEQ ID NO: 47115 - DNA, 201 bp, Homo sapiens
attttttttttaccttggggtgatggttccaaaccataaatgtgattatagttaacacatgacccttctagcgtcccagccagtgtttttcctgacctctsttctttggagaggaggatggaagggaggggtccggcatgctgctggcattttgctgtgtcctgcagcccctttccgggacacctgggttcacacagcttt

SEQ ID NO: 47116 - DNA, 201 bp, Homo sapiens
aatgtgattatagttaacacatgacccttctagcgtcccagccagtgtttttcctgacctctcttctttggagaggaggatggaagggaggggtccggcaygctgctggcattttgctgtgtcctgcagcccctttccgggacacctgggttcacacagctttttagcttacataactggtgcagattttctgtgtggaga

SEQ ID NO: 47117 - DNA, 201 bp, Homo sapiens
aagaagtggggcttcaccaagttcaatgctgatgaatttgaagacatggtggctgaaaagcggctcatcccagatggctgtggggtcaagtacatccccartcgtggccctctggacaagtggcgggccctgcactcatgagggcttccaatgtgctgcccccctcttaatactcaccaataaattctacttcctgtccac

SEQ ID NO: 47118 - DNA, 201 bp, Homo sapiens
aggaggtgcgagtgtggctgctcagcggttataacaggcctgactgcattgttcaccggattataatgagccaaaatgtttcccggtgtttgctggtttcrgggaaggagtttgatatagcagattaaccaccctccttgtagctattggggcttaatggtttcctggtgattcttaccaatccacaataaacatggccca

SEQ ID NO: 47119 - DNA, 201 bp, Homo sapiens
ggaccaagaggggcttgtgggctagaggctgaccagcagcgtttatttagcaagggtaggtgtgcatcacattgggcttgttctcacccatctggtttggycattcctccttggtgggaatcatccaggtactgctgaggtcacctgcgatttgccccatttcctatctctagcaacctcctgggccccatgcccccaccc

SEQ ID NO: 47120 - DNA, 123 bp, Homo sapiens
gcctctttcccttcggtgtggtragtaagcgcagttgtcgtctcttgcggtgccgttgctggttctcacaccttttaggtctgttctcgtcttccgttccgactctctctttttcgttgcagc

SEQ ID NO: 47121 - DNA, 201 bp, Homo sapiens; identical to SEQ ID NO: 47115

SEQ ID NO: 47122 - DNA, 201 bp, Homo sapiens; identical to SEQ ID NO: 47116

SEQ ID NO: 47123 - DNA, 201 bp, Homo sapiens; identical to SEQ ID NO: 47117

SEQ ID NO: 47124 - DNA, 201 bp, Homo sapiens; identical to SEQ ID NO: 47118

SEQ ID NO: 47125 - DNA, 201 bp, Homo sapiens; identical to SEQ ID NO: 47119

SEQ ID NO: 47126 - DNA, 201 bp, Homo sapiens
acgcccgggcgcaaggccaagagcggctgcgtctatggtcatgacgtctgacagagcgtccacccgtcttcgacaggactctatggttcttacgcgcgcaracagaccgcctatataagccatgcgcaggcggaggagcgcctctttcccttcggtgtgccactgaagatcctggtgtcgccatgggccgccgccccgccc

SEQ ID NO: 47127 - DNA, 201 bp, Homo sapiens; identical to SEQ ID NO: 47117

SEQ ID NO: 47128 - DNA, 201 bp, Homo sapiens
aagagcggctgcgtctatggtcatgacgtctgacagagcgtccacccgtcttcgacaggactctatggttcttacgcgcgcagacagaccgcctatataarccatgcgcaggcggaggagcgcctctttcccttcggtgtgccactgaagatcctggtgtcgccatgggccgccgccccgcccgttgttaccggtattgta

SEQ ID NO: 47129 - DNA, 201 bp, Homo sapiens
aaagcctagggcaagagttctacgcccaagatggccagccggaagcgggcttctcgcgaccatgtggcgaagccccattcgtcagctggccgcccgcggcyctggtacccggtcacctctctgatctgcgcatgtgctgggctacgcccgggcgcaaggccaagagcggctgcgtctatggtcatgacgtctgacagagcg

SEQ ID NO: 47130 - DNA, 143 bp, Homo sapiens
ctctcagaaatatacgtctgtcacagttaacggcaaagcctarggcaagagttctacgcccaagatggccagccggaagcgggcttctcgcgaccatgtggcgaagccccattcgtcagctggccgcccgcggccctggtacc

SEQ ID NO: 47131 - DNA, 201 bp, Homo sapiens
cctctctgatctgcgcatgtgctgggctacgcccgggcgcaaggccaagagcggctgcgtctatggtcatgacgtctgacagagcgtccacccgtcttcgmcaggactctatggttcttacgcgcgcagacagaccgcctatataagccatgcgcaggcggaggagcgcctctttcccttcggtgtgccactgaagatcct

SEQ ID NO: 47132 - DNA, 201 bp, Homo sapiens; identical to SEQ ID NO: 47119

SEQ ID NO: 47133 - DNA, 201 bp, Homo sapiens; identical to SEQ ID NO: 47115

SEQ ID NO: 47134 - DNA, 201 bp, Homo sapiens; identical to SEQ ID NO: 47116

SEQ ID NO: 47135 - DNA, 201 bp, Homo sapiens; identical to SEQ ID NO: 47118

SEQ ID NO: 47136 - DNA, 201 bp, Homo sapiens; identical to SEQ ID NO: 47126

SEQ ID NO: 47137 - DNA, 201 bp, Homo sapiens; identical to SEQ ID NO: 47117

SEQ ID NO: 47138 - DNA, 201 bp, Homo sapiens; identical to SEQ ID NO: 47128

SEQ ID NO: 47139 - DNA, 201 bp, Homo sapiens
gctttgtggccacatggtgtcagatgaatatgagcagctgtcctctgaaggtaaggcaggattctttgttcgtcaccccccagtccttcctccgtgctccmtcaaccccacccacatacactgcactggaattgggagttgatgaaacatgagccttacaaaactcagccaacacagttcccctgagctggagatagtcgt

SEQ ID NO: 47140 - DNA, 201 bp, Homo sapiens; identical to SEQ ID NO: 47129

SEQ ID NO: 47141 - DNA, 143 bp, Homo sapiens; identical to SEQ ID NO: 47130

SEQ ID NO: 47142 - DNA, 201 bp, Homo sapiens; identical to SEQ ID NO: 47131

SEQ ID NO: 47143 - DNA, 201 bp, Homo sapiens; identical to SEQ ID NO: 47119

SEQ ID NO: 47144 - DNA, 201 bp, Homo sapiens; identical to SEQ ID NO: 47115

SEQ ID NO: 47145 - DNA, 201 bp, Homo sapiens; identical to SEQ ID NO: 47116

SEQ ID NO: 47146 - DNA, 201 bp, Homo sapiens; identical to SEQ ID NO: 47118

SEQ ID NO: 47147 - DNA, 201 bp, Homo sapiens; identical to SEQ ID NO: 47126

SEQ ID NO: 47148 - DNA, 201 bp, Homo sapiens; identical to SEQ ID NO: 47117

SEQ ID NO: 47149 - DNA, 201 bp, Homo sapiens; identical to SEQ ID NO: 47128

SEQ ID NO: 47150 - DNA, 201 bp, Homo sapiens; identical to SEQ ID NO: 47129

SEQ ID NO: 47151 - DNA, 143 bp, Homo sapiens; identical to SEQ ID NO: 47130

SEQ ID NO: 47152 - DNA, 201 bp, Homo sapiens; identical to SEQ ID NO: 47131

SEQ ID NO: 47153 - DNA, 201 bp, Homo sapiens; identical to SEQ ID NO: 47119

SEQ ID NO: 47154 - DNA, 201 bp, Homo sapiens; identical to SEQ ID NO: 47115

SEQ ID NO: 47155 - DNA, 201 bp, Homo sapiens; identical to SEQ ID NO: 47116

SEQ ID NO: 47156 - DNA, 201 bp, Homo sapiens; identical to SEQ ID NO: 47118

SEQ ID NO: 47157 - DNA, 165 bp, Homo sapiens
ttcgttgcagccactgaagatcctggtgtcgccatgggccgccgccccgcccgttggtgagtctwgaatccgtgtactttcactgctgggaaacgggcggggaaagaagtgcctatggccgctgaaaacaattgtggggtggagcctcccccgtgcggcggccct

SEQ ID NO: 47158 - DNA, 201 bp, Homo sapiens
aatattactgtctgttccttcgttcccgtgtcggtgtggaagcgacggttccctcgtatctctgcctgtgtcctgcaagctcaccgcattttcgggcgctmgatacgctcttggggcctttgtgtgcgttctctgtcttatttccgggcgacgtgccgcgtgcgttgtcggacgtgaagggcagtccgggaaaaacgggtg

SEQ ID NO: 47159 - DNA, 201 bp, Homo sapiens
gagagaatttttaactaggaaagtttgttgcaaagtgtttataggaagcgtaagacaaagtaacggaagatggtgtctgttgtttctagtcttgggtgttstctgtgttgcagcagccaactgttgctttgtagtttatttccccgaatggaaacggtttagaagtggacgtgcattccccacccttttcccgtccctcgt

SEQ ID NO: 47160 - DNA, 201 bp, Homo sapiens; identical to SEQ ID NO: 47117

SEQ ID NO: 47161 - DNA, 201 bp, Homo sapiens
attgaggccctgcgcagggccaagttcaagtttcctggccgccagaaggtatgtagtgctgcagcccccttctcccacctttgccccaggcctcctgactsagttctttccattgctccttagatccacatctcaaagaagtggggcttcaccaagttcaatgctgatgaatttgaagacatggtggctgaaaagcggctc

SEQ ID NO: 47162 - DNA, 201 bp, Homo sapiens; identical to SEQ ID NO: 47139

SEQ ID NO: 47163 - DNA, 201 bp, Homo sapiens
gtgccgcgtgcgttgtcggacgtgaagggcagtccgggaaaaacgggtgcggccgcctcctgtgtcctacagggggcgccagacgcatttccactcggctyggaggtggatttagtgccacgtgcccgaaagtcttaaattgggtgacctgagctgtgcaatgataatgcggcgattttgtagtacgcagtgtcttgaaga

SEQ ID NO: 47164 - DNA, 201 bp, Homo sapiens; identical to SEQ ID NO: 47119

SEQ ID NO: 47165 - DNA, 174 bp, Homo sapiens
aacaataagaagtacacgggtttatttctgtggcctgagaaggaagggacctccacgacaggtgggctgggtgcgatcgccggctgtttggcatgttcccmccgggagtgccgggcaggagcatggggtgcttggttgtttccttcctaataaaataaacgcgggtcgccatgc

SEQ ID NO: 47166 - DNA, 201 bp, Homo sapiens
gtgtgaccctgtgccagtgggggggttgagggtgggacggtgtccgtgttgttgctttcccaccctgcagcgcactggactgaagagcttccctcttcctrctgcagcatgaactgcaagctcccctcagcccatcttgctccctcttcagcccgctgaggagctttcttgggctgcccccatctctcccaacaaggtgta

SEQ ID NO: 47167 - DNA, 201 bp, Homo sapiens
tcttgggctgcccccatctctcccaacaaggtgtacatattctgcgtagatgctagaccaaccagcttcccagggttcgtcgctgtgaggcgtaagggacrtgaattctagggtctcctttctccttatttattcttgtggctacatcatccctggctgtggatagtgcttttgtgtagcaaatgctccctccttaaggtt

SEQ ID NO: 47168 - DNA, 201 bp, Homo sapiens
tcatccctggctgtggatagtgcttttgtgtagcaaatgctccctccttaaggttatagggctccctgagtttgggagtgtggaagtactacttaactgtmtgtcctgcttggctgtcgttatcgttttctggtgatgttgtgctaacaataagaagtacacgggtttatttctgtggcctgagaaggaagggacctccac

SEQ ID NO: 47169 - DNA, 201 bp, Homo sapiens
tatagggctccctgagtttgggagtgtggaagtactacttaactgtctgtcctgcttggctgtcgttatcgttttctggtgatgttgtgctaacaataagmagtacacgggtttatttctgtggcctgagaaggaagggacctccacgacaggtgggctgggtgcgatcgccggctgtttggcatgttcccaccgggagtg

SEQ ID NO: 47170 - DNA, 201 bp, Homo sapiens
agtactacttaactgtctgtcctgcttggctgtcgttatcgttttctggtgatgttgtgctaacaataagaagtacacgggtttatttctgtggcctgagwaggaagggacctccacgacaggtgggctgggtgcgatcgccggctgtttggcatgttcccaccgggagtgccgggcaggagcatggggtgcttggttgtt

SEQ ID NO: 47171 - DNA, 200 bp, Homo sapiens
aacggtcacctgatctgcggctgtcgaggccgctgaggcagtggaggctgaggctatgatggcggccatggcgacggctcgagtgcggatggggccgcgrtgcgcccaggcgctctggcgcatgccgtggctgccggtgtttttgtcgttggcggcggcggcggcggcggcagcggcggagcagcaggtcccgctggtgc

SEQ ID NO: 47172 - DNA, 184 bp, Homo sapiens
atgttgtgctaacaataagaagtacacgggtttatttctgtggcctgagaaggaagggacctccacgacaggtgggctgggtgcgatcgccggctgtttgrcatgttcccaccgggagtgccgggcaggagcatggggtgcttggttgtttccttcctaataaaataaacgcgggtcgccatgc

SEQ ID NO: 47173 - DNA, 201 bp, Homo sapiens
tcgctttgatgaccacaagggccccactatttctttgacccagattgtgtgaccctgtgccagtgggggggttgagggtgggacggtgtccgtgttgttgmtttcccaccctgcagcgcactggactgaagagcttccctcttcctactgcagcatgaactgcaagctcccctcagcccatcttgctccctcttcagcccg

SEQ ID NO: 47174 - DNA, 174 bp, Homo sapiens; identical to SEQ ID NO: 47165

SEQ ID NO: 47175 - DNA, 201 bp, Homo sapiens; identical to SEQ ID NO: 47166

SEQ ID NO: 47176 - DNA, 201 bp, Homo sapiens; identical to SEQ ID NO: 47167

SEQ ID NO: 47177 - DNA, 201 bp, Homo sapiens; identical to SEQ ID NO: 47168

SEQ ID NO: 47178 - DNA, 201 bp, Homo sapiens; identical to SEQ ID NO: 47169

SEQ ID NO: 47179 - DNA, 201 bp, Homo sapiens; identical to SEQ ID NO: 47170

SEQ ID NO: 47180 - DNA, 200 bp, Homo sapiens; identical to SEQ ID NO: 47171

SEQ ID NO: 47181 - DNA, 184 bp, Homo sapiens; identical to SEQ ID NO: 47172

SEQ ID NO: 47182 - DNA, 201 bp, Homo sapiens; identical to SEQ ID NO: 47173

SEQ ID NO: 47183 - DNA, 201 bp, Homo sapiens
ccatctctgctatgaacaaggttgcagaagttttacaagtacctccaataagagtatatgaagtagcaactttttatacaatgtataatcgaaagccagtyggaaagtatcacattcaggcctgcactactacaccctgcatgcttccaaactctgacagcatactggaggccattcagaaaaagcttggaataaagcttg

SEQ ID NO: 47184 - DNA, 201 bp, Homo sapiens
atctctgctatgaacaaggttgcagaagttttacaagtacctccaataagagtatatgaagtagcaactttttatacaatgtataatcgaaagccagtcgraaagtatcacattcaggcctgcactactacaccctgcatgcttccaaactctgacagcatactggaggccattcagaaaaagcttggaataaagcttggg

SEQ ID NO: 47185 - DNA, 201 bp, Homo sapiens
gttgcagaagttttacaagtacctccaataagagtatatgaagtagcaactttttatacaatgtataatcgaaagccagtcggaaagtatcacattcaggyctgcactactacaccctgcatgcttccaaactctgacagcatactggaggccattcagaaaaagcttggaataaagcttggggagactacacctgacaaa

SEQ ID NO: 47186 - DNA, 201 bp, Homo sapiens
tatcacattcaggcctgcactactacaccctgcatgcttccaaactctgacagcatactggaggccattcagaaaaagcttggaataaagcttggggagastacacctgacaaacttttcactcttgtagaagtggaatgtttaggggcctgtgtgaacgcaccaatggttcaaataaatgacaattactatgaggatttg

SEQ ID NO: 47187 - DNA, 201 bp, Homo sapiens
gggagactacacctgacaaacttttcactcttgtagaagtggaatgtttaggggcctgtgtgaacgcaccaatggttcaaataaatgacaattactatgargatttgacagctaaggatattgaagaaattattgatgagctcaaggctggcaaaatcccaaaacctgggccaaggagtggacgcttctcttgtgagccag

SEQ ID NO: 47188 - DNA, 201 bp, Homo sapiens; identical to SEQ ID NO: 40106

SEQ ID NO: 47189 - DNA, 127 bp, Homo sapiens
ttctccgcggcgctccgggcccgggcsgctggccttaccgcccactggccccaccggaagacatgtgaggaattgcataagacagctatgcaaaatggagctggaggagctttatttgtgcacagag

SEQ ID NO: 47190 - DNA, 164 bp, Homo sapiens
ttctccgcggcgctccgggcccgggccgctggccttaccgcccactggccccaccggaagacatgtgaggaattgcataagacagctatgcaaaatggagctggaggagctttatttgtgcacagagatactcctgagaataaccctgatactccatttgattt

SEQ ID NO: 47191 - DNA, 201 bp, Homo sapiens
gctaaggatattgaagaaattattgatgagctcaaggctggcaaaatcccaaaacctgggccaaggagtggacgcttctcttgtgagccagctggaggtcytacccctttgactgaaccacccaagggacctggatttggcatacaagcaggcctttaatttatattgaactgtaaatatgtcactagagaaataaaatat

SEQ ID NO: 47192 - DNA, 201 bp, Homo sapiens
acaattactatgaggatttgacagctaaggatattgaagaaattattgatgagctcaaggctggcaaaatcccaaaacctgggccaaggagtggacgcttytcttgtgagccagctggaggtcctacccctttgactgaaccacccaagggacctggatttggcatacaagcaggcctttaatttatattgaactgtaaat

SEQ ID NO: 47193 - DNA, 163 bp, Homo sapiens
ttctccgcggcgctccgggcccgggccgctggccttaccgcccactggccccaccggaagacatgtgaggaattgcataagacagctatgcaaaatggagctggaggagctttatttgtgcacagagatactcctgagaataaccctgatactccatttgatt

SEQ ID NO: 47194 - DNA, 136 bp, Homo sapiens
ttctccgcggcgctccgggcccgggccgctggcctyaccgcccactggccccaccggaagacatgtgaggaattgcataagacagctatgcaaaatggagctggaggagctttatttgtgcacagagatactcctg

SEQ ID NO: 47195 - DNA, 201 bp, Homo sapiens
gacaaacttttcactcttgtagaagtggaatgtttaggggcctgtgtgaacgcaccaatggttcaaataaatgacaattactatgaggatttgacagctarggatattgaagaaattattgatgagctcaaggctggcaaaatcccaaaacctgggccaaggagtggacgcttctcttgtgagccagctggaggtcctacc

SEQ ID NO: 47196 - DNA, 201 bp, Homo sapiens
cagctgttcttccagtcctggatttagcccaaaggcagaatgggtggttgcccatctctgctatgaacaaggttgcagaagttttacaagtacctccaatragagtatatgaagtagcaactttttatacaatgtataatcgaaagccagtcggaaagtatcacattcaggcctgcactactacaccctgcatgcttccaa

SEQ ID NO: 47197 - DNA, 201 bp, Homo sapiens; identical to SEQ ID NO: 47183

SEQ ID NO: 47198 - DNA, 201 bp, Homo sapiens; identical to SEQ ID NO: 47184

SEQ ID NO: 47199 - DNA, 201 bp, Homo sapiens; identical to SEQ ID NO: 47185

SEQ ID NO: 47200 - DNA, 201 bp, Homo sapiens; identical to SEQ ID NO: 47186

SEQ ID NO: 47201 - DNA, 201 bp, Homo sapiens; identical to SEQ ID NO: 47187

SEQ ID NO: 47202 - DNA, 201 bp, Homo sapiens; identical to SEQ ID NO: 40106

SEQ ID NO: 47203 - DNA, 113 bp, Homo sapiens
ccgggcccgggcsgctggccttaccgcccactgggtaaggaggctcaagctgagcccggcgctgccgccgcccttctcttgctctccgtgtctcccttagttttgggcgcagg

SEQ ID NO: 47204 - DNA, 201 bp, Homo sapiens
cgcaggagagccctgggctctacacgggcctgcaggcggcggcaaggacactacggccttagccctcttagggaggccgctgcagccccaccggaagacatgtgaggaattgcataagacagctatgcaaaatggagctggaggagctttatttgtgcacagagatactcctgagaataaccctgatactccatttgattt

SEQ ID NO: 47205 - DNA, 201 bp, Homo sapiens; identical to SEQ ID NO: 47191

SEQ ID NO: 47206 - DNA, 201 bp, Homo sapiens; identical to SEQ ID NO: 47192

SEQ ID NO: 47207 - DNA, 201 bp, Homo sapiens
gcgcaggagagccctgggctctacacgggcctgcaggcggcggcaaggacactacggccttagccctcttagggaggccgctgcagccccaccggaagacatgtgaggaattgcataagacagctatgcaaaatggagctggaggagctttatttgtgcacagagatactcctgagaataaccctgatactccatttgatt

SEQ ID NO: 47208 - DNA, 122 bp, Homo sapiens
ccgggcccgggccgctggcctyaccgcccactgggtaaggaggctcaagctgagcccggcgctgccgccgcccttctcttgctctccgtgtctcccttagttttgggcgcaggagagccctg

SEQ ID NO: 47209 - DNA, 201 bp, Homo sapiens; identical to SEQ ID NO: 47195

SEQ ID NO: 47210 - DNA, 201 bp, Homo sapiens; identical to SEQ ID NO: 47196

SEQ ID NO: 47211 - DNA, 201 bp, Homo sapiens
aattacttgaaatagccaaagctaatgcagctgccatgtgtgctaaggctggtgtccctttaccaccaaacctaaagcctgcacctccacctactatagawgagaaagttgctaaaaagtcaggaggagctactatagaagaactaactgagaaatgtaaacagatcgcacagagtaaagaagatgatgatgtaatagtga

SEQ ID NO: 47212 - DNA, 201 bp, Homo sapiens
caattacttgaaatagccaaagctaatgcagctgccatgtgtgctaaggctggtgtccctttaccaccaaacctaaagcctgcacctccacctactatagwagagaaagttgctaaaaagtcaggaggagctactatagaagaactaactgagaaatgtaaacagatcgcacagagtaaagaagatgatgatgtaatagtg

SEQ ID NO: 47213 - DNA, 201 bp, Homo sapiens
tcctcttcgcctttaatctcaggcacttagcaagcctgttaaggctcccaaacactgctggggactgacaacttatgcggacacggtcgcctcaagagagrcggctcctgtaatggcgcctgcgtcagacactaacatggcggacatagtcgtgcgcggcgcaaacgtcagcacctctaccccagccgctcagaaacagca

SEQ ID NO: 47214 - DNA, 201 bp, Homo sapiens
tcttaagagcagccccggtaactggaggaatgggagccgttttgatgagaaaaatgggctggagagaaggagaaggattaggaaaaaacaaagaaggcaayaaggaacccatcctagttgattttaagacagaccgaaaaggtcttgttgcagtaggagaaagagcacaaaagaggtctgggaacttctctgctgcaatga

SEQ ID NO: 47215 - DNA, 201 bp, Homo sapiens
ggagagcagggccgtgctcactgattggtccctcggtggagcgggccggaccgggcattccctttggagccaatcaggaaggcgagagaccgaattggccsgtgcgcctcctcccgaggcatgctgggagcctggaggactagcgaggaggagttgagagaacggagcggacgccatggcgaccaacatcgagcagatttt

SEQ ID NO: 47216 - DNA, 201 bp, Homo sapiens
caactccaccaaaaagccaggtaacattaacaaaagaattccctgtatcatctggatctcaacatcggaaaaaagaagcggatagtgtttatggagaatgrgttcctgtggagaaaaatggtgaagaaaacaaagatgatgataatgttttcagcagcaatttgccctcagagcctgtggacatctctacagcaatgagtg

SEQ ID NO: 47217 - DNA, 201 bp, Homo sapiens
gagagcagggccgtgctcactgattggtccctcggtggagcgggccggaccgggcattccctttggagccaatcaggaaggcgagagaccgaattggcccstgcgcctcctcccgaggcatgctgggagcctggaggactagcgaggaggagttgagagaacggagcggacgccatggcgaccaacatcgagcagattttt

SEQ ID NO: 47218 - DNA, 201 bp, Homo sapiens
agatgttagcatctggcactatggactctcaaatgttagcttctggcaccatggatgctcagatgttagcgtctggtaccatggatgcccagatgttagcrtctagtacccaagattctgctatgttgggttcaaaatctcctgatccctataggttagctcaggatccttacaggttagctcaggatccctataggttgg

SEQ ID NO: 47219 - DNA, 201 bp, Homo sapiens
gcactatggactctcaaatgttagcttctggcaccatggatgctcagatgttagcgtctggtaccatggatgcccagatgttagcgtctagtacccaagaytctgctatgttgggttcaaaatctcctgatccctataggttagctcaggatccttacaggttagctcaggatccctataggttgggccatgacccctata

SEQ ID NO: 47220 - DNA, 201 bp, Homo sapiens; identical to SEQ ID NO: 47211

SEQ ID NO: 47221 - DNA, 201 bp, Homo sapiens; identical to SEQ ID NO: 47212

SEQ ID NO: 47222 - DNA, 201 bp, Homo sapiens
ccacaccaatgatactggaatctagtatcatgtcatcacatgttatgaaaggaattaatctatcctctggtgatcaaaatcttgctccagagattggcatrcaggagattgcattgcattcaggtgaagaaccacatgctgaggaacacctgaaaggtgacttttacgaaagtgaacatggtataaatatagaccttaata

SEQ ID NO: 47223 - DNA, 201 bp, Homo sapiens
ttctgtccaggaatcgactgtgacagtttcagagcctgctgtcacagtctcagagcagactcaagtaataccaactgaggtggctatagagtccacaccartgatactggaatctagtatcatgtcatcacatgttatgaaaggaattaatctatcctctggtgatcaaaatcttgctccagagattggcatgcaggagat

SEQ ID NO: 47224 - DNA, 201 bp, Homo sapiens
gctaccccggtgccagagttgccagggcccctttctaccccagtgcctgagttgccagggccccctgcgacagcagtgcctgagttgccagggccctctgkgacaccagtgccacagttgtcgcaggaattgccagggcttccagcaccatccatggggttggagccaccacaggaggtaccagagccatctgtgatggca

SEQ ID NO: 47225 - DNA, 201 bp, Homo sapiens; identical to SEQ ID NO: 47215

SEQ ID NO: 47226 - DNA, 201 bp, Homo sapiens
tcagagcagactcaagtaataccaactgaggtggctatagagtccacaccaatgatactggaatctagtatcatgtcatcacatgttatgaaaggaattartctatcctctggtgatcaaaatcttgctccagagattggcatgcaggagattgcattgcattcaggtgaagaaccacatgctgaggaacacctgaaaggt

SEQ ID NO: 47227 - DNA, 201 bp, Homo sapiens
aaggaattaatctatcctctggtgatcaaaatcttgctccagagattggcatgcaggagattgcattgcattcaggtgaagaaccacatgctgaggaacayctgaaaggtgacttttacgaaagtgaacatggtataaatatagaccttaatataaataatcatttaattgctaaagagatggaacataatacagtgtgtg

SEQ ID NO: 47228 - DNA, 201 bp, Homo sapiens; identical to SEQ ID NO: 47213

SEQ ID NO: 47229 - DNA, 201 bp, Homo sapiens
ccccagagtcttcagctatggctgtcctggagtcttcggctgtgaccgtcctggagtcttcgactgtgactgtcctggagtcttcgactgtaactgtcctrgagccttcggttgtgactgtcccggagcctcctgttgtggctgagccagactatgttaccattcctgtgccagttgtttctgcgctggagccttctgtgc

SEQ ID NO: 47230 - DNA, 201 bp, Homo sapiens
tgctaaagagatggaacataatacagtgtgtgctgctggtactagtcctgttggggaaattggtgaagagaaaattttgcccaccagtgagactaaacagygcacagtattggatacctaccctggtgttagtgaagctgatgcaggagaaactctatcttctactggtccttttgctctggaacctgatgcaacaggaac

SEQ ID NO: 47231 - DNA, 201 bp, Homo sapiens
caactccaccaaaaagccaggtaacattaacaaaagaattccctgtatcatctggatctcaacatcggaaaaaagaagcggatagtgtttatggagaatgrgttcctgtggagaaaaatggtgaagaaaacaaagatgatgataatgttttcagcagcaatttgccctcagagggccgggttaaacggcagggccgggtta

SEQ ID NO: 47232 - DNA, 201 bp, Homo sapiens; identical to SEQ ID NO: 47217

SEQ ID NO: 47233 - DNA, 201 bp, Homo sapiens
acaaatacttagatactattatttctttacccaatgcttttgatttttaagcacttttattttaaaaatgtgaattatacagtccccccctacacacacayacacacacacacacacacacacacacacacacacacacacacacacacacacacacacacacacacacacacacacacacacacacacccctataagcac

SEQ ID NO: 47234 - DNA, 201 bp, Homo sapiens
gtgaacaaatacttagatactattatttctttacccaatgcttttgatttttaagcacttttattttaaaaatgtgaattatacagtccccccctacacayacacacacacacacacacacacacacacacacacacacacacacacacacacacacacacacacacacacacacacacacacacacacacacccctataa

SEQ ID NO: 47235 - DNA, 201 bp, Homo sapiens; identical to SEQ ID NO: 47218

SEQ ID NO: 47236 - DNA, 201 bp, Homo sapiens; identical to SEQ ID NO: 47219

SEQ ID NO: 47237 - DNA, 201 bp, Homo sapiens; identical to SEQ ID NO: 47211

SEQ ID NO: 47238 - DNA, 201 bp, Homo sapiens
tctgatagaatatttcatgtgtattacagtggtattcatatgctatgtctctaaactttattttcaaaagcttaaggcccaaatacaaacttctctggaawaaacgtggtgttttattttctgggttataaagtgaacaaatacttagatactattatttctttacccaatgcttttgatttttaagcacttttattttaa

SEQ ID NO: 47239 - DNA, 201 bp, Homo sapiens; identical to SEQ ID NO: 47212

SEQ ID NO: 47240 - DNA, 201 bp, Homo sapiens; identical to SEQ ID NO: 47222

SEQ ID NO: 47241 - DNA, 201 bp, Homo sapiens; identical to SEQ ID NO: 47223

SEQ ID NO: 47242 - DNA, 201 bp, Homo sapiens; identical to SEQ ID NO: 47224

SEQ ID NO: 47243 - DNA, 139 bp, Homo sapiens
agtcacaatgccatggggtaactgctatgtgatttcccatttgcaaggaagcatattaattcagtttctgctcaatatacaattaggttgtagggatataratatctcatttgagttatctgagtttttcatctttata

SEQ ID NO: 47244 - DNA, 201 bp, Homo sapiens; identical to SEQ ID NO: 47215

SEQ ID NO: 47245 - DNA, 201 bp, Homo sapiens
atgggttctgctggacagataatgggccagtgttattgaggtgatcaagatctgttccacagggctaatgccaccatctcccctcaaaattttgtagaggytctaaaaagaaagtggtatgttgtgtgatgatcagcactaagtcctgcattcctgttaaagccacttgggtcataagaagggagtaaaaaatgaagtctg

SEQ ID NO: 47246 - DNA, 201 bp, Homo sapiens; identical to SEQ ID NO: 47229

SEQ ID NO: 47247 - DNA, 201 bp, Homo sapiens; identical to SEQ ID NO: 47214

SEQ ID NO: 47248 - DNA, 201 bp, Homo sapiens; identical to SEQ ID NO: 47230

SEQ ID NO: 47249 - DNA, 201 bp, Homo sapiens; identical to SEQ ID NO: 47226

SEQ ID NO: 47250 - DNA, 201 bp, Homo sapiens; identical to SEQ ID NO: 47227

SEQ ID NO: 47251 - DNA, 201 bp, Homo sapiens; identical to SEQ ID NO: 47213

SEQ ID NO: 47252 - DNA, 201 bp, Homo sapiens; identical to SEQ ID NO: 47217

SEQ ID NO: 47253 - DNA, 201 bp, Homo sapiens; identical to SEQ ID NO: 47216

SEQ ID NO: 47254 - DNA, 201 bp, Homo sapiens
acttagatactattatttctttacccaatgcttttgatttttaagcacttttattttaaaaatgtgaattatacagtccccccctacacacacacacacayacacacacacacacacacacacacacacacacacacacacacacacacacacacacacacacacacacacacacacacacacccctataagcacattaaa

SEQ ID NO: 47255 - DNA, 201 bp, Homo sapiens; identical to SEQ ID NO: 47233

SEQ ID NO: 47256 - DNA, 201 bp, Homo sapiens; identical to SEQ ID NO: 47234

SEQ ID NO: 47257 - DNA, 201 bp, Homo sapiens; identical to SEQ ID NO: 47211

SEQ ID NO: 47258 - DNA, 201 bp, Homo sapiens; identical to SEQ ID NO: 47238

SEQ ID NO: 47259 - DNA, 201 bp, Homo sapiens; identical to SEQ ID NO: 47212

SEQ ID NO: 47260 - DNA, 201 bp, Homo sapiens; identical to SEQ ID NO: 47222

SEQ ID NO: 47261 - DNA, 201 bp, Homo sapiens; identical to SEQ ID NO: 47223

SEQ ID NO: 47262 - DNA, 201 bp, Homo sapiens; identical to SEQ ID NO: 47224

SEQ ID NO: 47263 - DNA, 139 bp, Homo sapiens; identical to SEQ ID NO: 47243

SEQ ID NO: 47264 - DNA, 201 bp, Homo sapiens; identical to SEQ ID NO: 47215

SEQ ID NO: 47265 - DNA, 201 bp, Homo sapiens; identical to SEQ ID NO: 47245

SEQ ID NO: 47266 - DNA, 201 bp, Homo sapiens; identical to SEQ ID NO: 47229

SEQ ID NO: 47267 - DNA, 201 bp, Homo sapiens; identical to SEQ ID NO: 47214

SEQ ID NO: 47268 - DNA, 201 bp, Homo sapiens; identical to SEQ ID NO: 47230

SEQ ID NO: 47269 - DNA, 201 bp, Homo sapiens; identical to SEQ ID NO: 47226

SEQ ID NO: 47270 - DNA, 201 bp, Homo sapiens; identical to SEQ ID NO: 47227

SEQ ID NO: 47271 - DNA, 201 bp, Homo sapiens; identical to SEQ ID NO: 47213

SEQ ID NO: 47272 - DNA, 201 bp, Homo sapiens; identical to SEQ ID NO: 47216

SEQ ID NO: 47273 - DNA, 201 bp, Homo sapiens; identical to SEQ ID NO: 47217

SEQ ID NO: 47274 - DNA, 201 bp, Homo sapiens; identical to SEQ ID NO: 47254

SEQ ID NO: 47275 - DNA, 201 bp, Homo sapiens; identical to SEQ ID NO: 47233

SEQ ID NO: 47276 - DNA, 201 bp, Homo sapiens; identical to SEQ ID NO: 47234

SEQ ID NO: 47277 - DNA, 201 bp, Homo sapiens; identical to SEQ ID NO: 47218

SEQ ID NO: 47278 - DNA, 201 bp, Homo sapiens; identical to SEQ ID NO: 47219

SEQ ID NO: 47279 - DNA, 201 bp, Homo sapiens; identical to SEQ ID NO: 47211

SEQ ID NO: 47280 - DNA, 201 bp, Homo sapiens; identical to SEQ ID NO: 47238

SEQ ID NO: 47281 - DNA, 201 bp, Homo sapiens; identical to SEQ ID NO: 47212

SEQ ID NO: 47282 - DNA, 201 bp, Homo sapiens; identical to SEQ ID NO: 47222

SEQ ID NO: 47283 - DNA, 201 bp, Homo sapiens; identical to SEQ ID NO: 47223

SEQ ID NO: 47284 - DNA, 201 bp, Homo sapiens; identical to SEQ ID NO: 47224

SEQ ID NO: 47285 - DNA, 139 bp, Homo sapiens; identical to SEQ ID NO: 47243

SEQ ID NO: 47286 - DNA, 201 bp, Homo sapiens; identical to SEQ ID NO: 47215

SEQ ID NO: 47287 - DNA, 201 bp, Homo sapiens; identical to SEQ ID NO: 47245

SEQ ID NO: 47288 - DNA, 201 bp, Homo sapiens; identical to SEQ ID NO: 47229

SEQ ID NO: 47289 - DNA, 201 bp, Homo sapiens; identical to SEQ ID NO: 47214

SEQ ID NO: 47290 - DNA, 201 bp, Homo sapiens; identical to SEQ ID NO: 47230

SEQ ID NO: 47291 - DNA, 201 bp, Homo sapiens; identical to SEQ ID NO: 47226

SEQ ID NO: 47292 - DNA, 201 bp, Homo sapiens; identical to SEQ ID NO: 47227

SEQ ID NO: 47293 - DNA, 201 bp, Homo sapiens; identical to SEQ ID NO: 47213

SEQ ID NO: 47294 - DNA, 201 bp, Homo sapiens; identical to SEQ ID NO: 47217

SEQ ID NO: 47295 - DNA, 201 bp, Homo sapiens; identical to SEQ ID NO: 47216

SEQ ID NO: 47296 - DNA, 201 bp, Homo sapiens; identical to SEQ ID NO: 47254

SEQ ID NO: 47297 - DNA, 201 bp, Homo sapiens; identical to SEQ ID NO: 47233

SEQ ID NO: 47298 - DNA, 201 bp, Homo sapiens; identical to SEQ ID NO: 47234

SEQ ID NO: 47299 - DNA, 201 bp, Homo sapiens; identical to SEQ ID NO: 47218

SEQ ID NO: 47300 - DNA, 201 bp, Homo sapiens; identical to SEQ ID NO: 47219

SEQ ID NO: 47301 - DNA, 201 bp, Homo sapiens
aattacttgaaatagccaaagctaatgcagctgccatgtgtgctaaggctggtgtccctttaccaccaaacctaaagcctgcacctccacctactatagawgagaaagttgctaaaaagtcaggaggagctactatagaagaactaactgagttttagaagccaaactgactgaggagtgggacggttcgtttgaatggag

SEQ ID NO: 47302 - DNA, 201 bp, Homo sapiens; identical to SEQ ID NO: 47238

SEQ ID NO: 47303 - DNA, 201 bp, Homo sapiens
caattacttgaaatagccaaagctaatgcagctgccatgtgtgctaaggctggtgtccctttaccaccaaacctaaagcctgcacctccacctactatagwagagaaagttgctaaaaagtcaggaggagctactatagaagaactaactgagttttagaagccaaactgactgaggagtgggacggttcgtttgaatgga

SEQ ID NO: 47304 - DNA, 201 bp, Homo sapiens; identical to SEQ ID NO: 47222

SEQ ID NO: 47305 - DNA, 201 bp, Homo sapiens; identical to SEQ ID NO: 47223

SEQ ID NO: 47306 - DNA, 201 bp, Homo sapiens; identical to SEQ ID NO: 47224

SEQ ID NO: 47307 - DNA, 139 bp, Homo sapiens; identical to SEQ ID NO: 47243

SEQ ID NO: 47308 - DNA, 201 bp, Homo sapiens; identical to SEQ ID NO: 47215

SEQ ID NO: 47309 - DNA, 201 bp, Homo sapiens; identical to SEQ ID NO: 47245

SEQ ID NO: 47310 - DNA, 201 bp, Homo sapiens; identical to SEQ ID NO: 47229

SEQ ID NO: 47311 - DNA, 201 bp, Homo sapiens; identical to SEQ ID NO: 47214

SEQ ID NO: 47312 - DNA, 201 bp, Homo sapiens; identical to SEQ ID NO: 47230

SEQ ID NO: 47313 - DNA, 201 bp, Homo sapiens; identical to SEQ ID NO: 47226

SEQ ID NO: 47314 - DNA, 201 bp, Homo sapiens; identical to SEQ ID NO: 47227

SEQ ID NO: 47315 - DNA, 201 bp, Homo sapiens; identical to SEQ ID NO: 47213

SEQ ID NO: 47316 - DNA, 201 bp, Homo sapiens; identical to SEQ ID NO: 47217

SEQ ID NO: 47317 - DNA, 201 bp, Homo sapiens; identical to SEQ ID NO: 47216

SEQ ID NO: 47318 - DNA, 201 bp, Homo sapiens; identical to SEQ ID NO: 47254

SEQ ID NO: 47319 - DNA, 201 bp, Homo sapiens; identical to SEQ ID NO: 47233

SEQ ID NO: 47320 - DNA, 201 bp, Homo sapiens; identical to SEQ ID NO: 47234

SEQ ID NO: 47321 - DNA, 201 bp, Homo sapiens; identical to SEQ ID NO: 47218

SEQ ID NO: 47322 - DNA, 201 bp, Homo sapiens; identical to SEQ ID NO: 47219

SEQ ID NO: 47323 - DNA, 201 bp, Homo sapiens; identical to SEQ ID NO: 47211

SEQ ID NO: 47324 - DNA, 201 bp, Homo sapiens; identical to SEQ ID NO: 47238

SEQ ID NO: 47325 - DNA, 201 bp, Homo sapiens; identical to SEQ ID NO: 47212

SEQ ID NO: 47326 - DNA, 201 bp, Homo sapiens; identical to SEQ ID NO: 47222

SEQ ID NO: 47327 - DNA, 201 bp, Homo sapiens; identical to SEQ ID NO: 47223

SEQ ID NO: 47328 - DNA, 201 bp, Homo sapiens; identical to SEQ ID NO: 47224

SEQ ID NO: 47329 - DNA, 139 bp, Homo sapiens; identical to SEQ ID NO: 47243

SEQ ID NO: 47330 - DNA, 201 bp, Homo sapiens; identical to SEQ ID NO: 47215

SEQ ID NO: 47331 - DNA, 201 bp, Homo sapiens; identical to SEQ ID NO: 47245

SEQ ID NO: 47332 - DNA, 201 bp, Homo sapiens; identical to SEQ ID NO: 47229

SEQ ID NO: 47333 - DNA, 201 bp, Homo sapiens; identical to SEQ ID NO: 47214

SEQ ID NO: 47334 - DNA, 201 bp, Homo sapiens; identical to SEQ ID NO: 47230

SEQ ID NO: 47335 - DNA, 201 bp, Homo sapiens; identical to SEQ ID NO: 47226

SEQ ID NO: 47336 - DNA, 201 bp, Homo sapiens; identical to SEQ ID NO: 47227

SEQ ID NO: 47337 - DNA, 201 bp, Homo sapiens; identical to SEQ ID NO: 47213

SEQ ID NO: 47338 - DNA, 201 bp, Homo sapiens; identical to SEQ ID NO: 47217

SEQ ID NO: 47339 - DNA, 201 bp, Homo sapiens; identical to SEQ ID NO: 47216

SEQ ID NO: 47340 - DNA, 201 bp, Homo sapiens; identical to SEQ ID NO: 47254

SEQ ID NO: 47341 - DNA, 201 bp, Homo sapiens; identical to SEQ ID NO: 47218

SEQ ID NO: 47342 - DNA, 201 bp, Homo sapiens; identical to SEQ ID NO: 47219

SEQ ID NO: 47343 - DNA, 201 bp, Homo sapiens; identical to SEQ ID NO: 47211

SEQ ID NO: 47344 - DNA, 201 bp, Homo sapiens; identical to SEQ ID NO: 47212

SEQ ID NO: 47345 - DNA, 201 bp, Homo sapiens; identical to SEQ ID NO: 47222

SEQ ID NO: 47346 - DNA, 201 bp, Homo sapiens; identical to SEQ ID NO: 47223

SEQ ID NO: 47347 - DNA, 201 bp, Homo sapiens; identical to SEQ ID NO: 47224

SEQ ID NO: 47348 - DNA, 201 bp, Homo sapiens; identical to SEQ ID NO: 47215

SEQ ID NO: 47349 - DNA, 201 bp, Homo sapiens; identical to SEQ ID NO: 47226

SEQ ID NO: 47350 - DNA, 201 bp, Homo sapiens; identical to SEQ ID NO: 47227

SEQ ID NO: 47351 - DNA, 201 bp, Homo sapiens; identical to SEQ ID NO: 47213

SEQ ID NO: 47352 - DNA, 201 bp, Homo sapiens; identical to SEQ ID NO: 47229

SEQ ID NO: 47353 - DNA, 201 bp, Homo sapiens; identical to SEQ ID NO: 47230

SEQ ID NO: 47354 - DNA, 201 bp, Homo sapiens; identical to SEQ ID NO: 47216

SEQ ID NO: 47355 - DNA, 201 bp, Homo sapiens; identical to SEQ ID NO: 47217

SEQ ID NO: 47356 - DNA, 201 bp, Homo sapiens; identical to SEQ ID NO: 47218

SEQ ID NO: 47357 - DNA, 201 bp, Homo sapiens; identical to SEQ ID NO: 47219

SEQ ID NO: 47358 - DNA, 201 bp, Homo sapiens; identical to SEQ ID NO: 47222

SEQ ID NO: 47359 - DNA, 201 bp, Homo sapiens; identical to SEQ ID NO: 47223

SEQ ID NO: 47360 - DNA, 201 bp, Homo sapiens; identical to SEQ ID NO: 47224

SEQ ID NO: 47361 - DNA, 201 bp, Homo sapiens; identical to SEQ ID NO: 47215

SEQ ID NO: 47362 - DNA, 201 bp, Homo sapiens; identical to SEQ ID NO: 47226

SEQ ID NO: 47363 - DNA, 201 bp, Homo sapiens; identical to SEQ ID NO: 47227

SEQ ID NO: 47364 - DNA, 201 bp, Homo sapiens; identical to SEQ ID NO: 47213

SEQ ID NO: 47365 - DNA, 201 bp, Homo sapiens; identical to SEQ ID NO: 47229

SEQ ID NO: 47366 - DNA, 201 bp, Homo sapiens; identical to SEQ ID NO: 47230

SEQ ID NO: 47367 - DNA, 201 bp, Homo sapiens; identical to SEQ ID NO: 47217

SEQ ID NO: 47368 - DNA, 201 bp, Homo sapiens; identical to SEQ ID NO: 47233

SEQ ID NO: 47369 - DNA, 201 bp, Homo sapiens; identical to SEQ ID NO: 47234

SEQ ID NO: 47370 - DNA, 201 bp, Homo sapiens; identical to SEQ ID NO: 47218

SEQ ID NO: 47371 - DNA, 201 bp, Homo sapiens; identical to SEQ ID NO: 47219

SEQ ID NO: 47372 - DNA, 201 bp, Homo sapiens; identical to SEQ ID NO: 47211

SEQ ID NO: 47373 - DNA, 201 bp, Homo sapiens; identical to SEQ ID NO: 47238

SEQ ID NO: 47374 - DNA, 201 bp, Homo sapiens; identical to SEQ ID NO: 47212

SEQ ID NO: 47375 - DNA, 201 bp, Homo sapiens; identical to SEQ ID NO: 47222

SEQ ID NO: 47376 - DNA, 201 bp, Homo sapiens; identical to SEQ ID NO: 47223

SEQ ID NO: 47377 - DNA, 201 bp, Homo sapiens; identical to SEQ ID NO: 47224

SEQ ID NO: 47378 - DNA, 139 bp, Homo sapiens; identical to SEQ ID NO: 47243

SEQ ID NO: 47379 - DNA, 201 bp, Homo sapiens; identical to SEQ ID NO: 47215

SEQ ID NO: 47380 - DNA, 201 bp, Homo sapiens; identical to SEQ ID NO: 47245

SEQ ID NO: 47381 - DNA, 201 bp, Homo sapiens; identical to SEQ ID NO: 47229

SEQ ID NO: 47382 - DNA, 201 bp, Homo sapiens; identical to SEQ ID NO: 47214

SEQ ID NO: 47383 - DNA, 201 bp, Homo sapiens; identical to SEQ ID NO: 47230

SEQ ID NO: 47384 - DNA, 201 bp, Homo sapiens; identical to SEQ ID NO: 47226

SEQ ID NO: 47385 - DNA, 201 bp, Homo sapiens; identical to SEQ ID NO: 47227

SEQ ID NO: 47386 - DNA, 201 bp, Homo sapiens; identical to SEQ ID NO: 47213

SEQ ID NO: 47387 - DNA, 201 bp, Homo sapiens; identical to SEQ ID NO: 47217

SEQ ID NO: 47388 - DNA, 201 bp, Homo sapiens; identical to SEQ ID NO: 47216

SEQ ID NO: 47389 - DNA, 201 bp, Homo sapiens; identical to SEQ ID NO: 47254

SEQ ID NO: 47390 - DNA, 201 bp, Homo sapiens; identical to SEQ ID NO: 47218

SEQ ID NO: 47391 - DNA, 201 bp, Homo sapiens; identical to SEQ ID NO: 47219

SEQ ID NO: 47392 - DNA, 201 bp, Homo sapiens; identical to SEQ ID NO: 47211

SEQ ID NO: 47393 - DNA, 201 bp, Homo sapiens; identical to SEQ ID NO: 47212

SEQ ID NO: 47394 - DNA, 201 bp, Homo sapiens; identical to SEQ ID NO: 47222

SEQ ID NO: 47395 - DNA, 201 bp, Homo sapiens; identical to SEQ ID NO: 47223

SEQ ID NO: 47396 - DNA, 201 bp, Homo sapiens; identical to SEQ ID NO: 47224

SEQ ID NO: 47397 - DNA, 201 bp, Homo sapiens; identical to SEQ ID NO: 47215

SEQ ID NO: 47398 - DNA, 201 bp, Homo sapiens; identical to SEQ ID NO: 47229

SEQ ID NO: 47399 - DNA, 201 bp, Homo sapiens; identical to SEQ ID NO: 47214

SEQ ID NO: 47400 - DNA, 201 bp, Homo sapiens; identical to SEQ ID NO: 47230

SEQ ID NO: 47401 - DNA, 201 bp, Homo sapiens; identical to SEQ ID NO: 47226

SEQ ID NO: 47402 - DNA, 201 bp, Homo sapiens; identical to SEQ ID NO: 47227

SEQ ID NO: 47403 - DNA, 201 bp, Homo sapiens; identical to SEQ ID NO: 47213

SEQ ID NO: 47404 - DNA, 201 bp, Homo sapiens; identical to SEQ ID NO: 47217

SEQ ID NO: 47405 - DNA, 201 bp, Homo sapiens; identical to SEQ ID NO: 47216

SEQ ID NO: 47406 - DNA, 201 bp, Homo sapiens
gcaacgtctgcctcaacatcctcagagaggactggaagccagtccttacgataaactccataatttatggcctgcagtatctcttcttggagcccaacccygaggacccactgaacaaggaggccgcagaggtcctgcagaacaaccggcggctgtttgagcagaacgtgcagcgctccatgcggggtggctacatcggct

SEQ ID NO: 47407 - DNA, 201 bp, Homo sapiens
ggctgcgcaggcgcacaacgcaggccgggcgggaagagccaaagcgggcaggcggcggaaatatccgaagcggcggggcgcccgaggccgttgccgacctycgcgctaaagccgctgctgccgcggaagacgatcctccagtacccgcccgccgtcaccgcagctgccgtgtcctcctcccacccctagccgcaccccctc

SEQ ID NO: 47408 - DNA, 201 bp, Homo sapiens; identical to SEQ ID NO: 47406

SEQ ID NO: 47409 - DNA, 119 bp, Homo sapiens
aaagctggggtggtggaaggtgtggtcacaggtggcattggagcaccctacaacaggctgcccagtgcctggggcagctctaaagttggtggggataccakgactgtgcctggggttgg

SEQ ID NO: 47410 - DNA, 201 bp, Homo sapiens
gatgcttattctccaccctgttccacatctggcattttttgtgcatcttccaacttaagtacacagcagcaagtgctctacatctttgggtagctacacaraaccccactgtggctcactgtggacacaccattgaaaaccttgtatgtaggtcacttagtacaaggaggaacacaactgttgaagaagtacctaaaaatt

SEQ ID NO: 47411 - DNA, 201 bp, Homo sapiens
gaggagcggccgttcgtgtgcggcgactgtggccagggcttcgtgcgcagcgcgcgcctggaagagcatcggagagtgcacacgggcgaacagcctttccsttgcgctgagtgcggccagagcttccggcagcgctccaatctgctgcagcaccagcgcatccacggcgatcccccgggccctggcgctaagcccccggcc

SEQ ID NO: 47412 - DNA, 201 bp, Homo sapiens
tgaggcaccagaagatccacacgggtgagcgaccattcgtgtgcagcgagtgcggccgcagcttcagccgcagctcgcacctgctgcgccaccagcttacrcacaccgaggagcggccgttcgtgtgcggcgactgtggccagggcttcgtgcgcagcgcgcgcctggaagagcatcggagagtgcacacgggcgaacagc

SEQ ID NO: 47413 - DNA, 201 bp, Homo sapiens
cttaggaggttaattagccttttgcctgtggagagttttttggtttgccatttgtccttttttaattttttttgttttttggccatttgtcttttgactcygatgtggtttttgctgatttcctttgatgtattctagtttatctgacttttctttggcgacttatggactttctctcaccactaaaagccctcactgctc

SEQ ID NO: 47414 - DNA, 201 bp, Homo sapiens
gacccacccacttccctgcatttgctgagaccatcattttccacctagacaatgcccccacgcttgccctacagcccttccaaaaacgattttttccaacytaaatcagacctagaaagctttttcacatagcccagtcttcctccttgtgctgggttctgtctcattatcacctcatcagggaagtctgtacagatagaa

SEQ ID NO: 47415 - DNA, 201 bp, Homo sapiens
cgaaggtggctttgcgcatgcgcttctgctccccagcgatctgaggagtgaacaggaccccacggacgaggatccctgccggggtgtgggccctgctctgrtcaccacccgctggcgctcccccaggggccggagccggggccgccccagcactgggggcggggtggttaggggcggccgttgcgatgtatgtggcaaggt

SEQ ID NO: 47416 - DNA, 201 bp, Homo sapiens
cgcggcgcgccgtgctgctggagcaccaggcggtacacacgggcgacaagtcctttggctgcgtcgagtgcggcgagcgcttcggccgccgctcagtgctrctgcagcaccggcgcgtgcacagtggcgagcggcccttcgcctgtgccgagtgcggccagagcttccggcagcgctccaacctgacgcagcaccggcgca

SEQ ID NO: 47417 - DNA, 201 bp, Homo sapiens
agatccaatcaccctcccgcgaaggtggctttgcgcatgcgcttctgctccccagcgatctgaggagtgaacaggaccccacggacgaggatccctgccgsggtgtgggccctgctctgatcaccacccgctggcgctcccccaggggccggagccggggccgccccagcactgggggcggggtggttaggggcggccgtt

SEQ ID NO: 47418 - DNA, 201 bp, Homo sapiens
gttcacactgtgtccccagggatgaagtgggtcccggcacggtgggcattctgtcatgaatgaatggtccccttgtgtatgcagggttcgcgctgcagctrggcagcatctccgcaggtccaggtagtgtaagccctcacctccacgtcccctgggacctcggcatggctggcctttctggccagatccaatcaccctccc

SEQ ID NO: 47419 - DNA, 201 bp, Homo sapiens
gccgcagcttcagccgcagctcgcacctgctgcgccaccagcttacgcacaccgaggagcggccgttcgtgtgcggcgactgtggccagggcttcgtgcgmagcgcgcgcctggaagagcatcggagagtgcacacgggcgaacagcctttccgttgcgctgagtgcggccagagcttccggcagcgctccaatctgctgc

SEQ ID NO: 47420 - DNA, 201 bp, Homo sapiens; identical to SEQ ID NO: 47406

SEQ ID NO: 47421 - DNA, 201 bp, Homo sapiens; identical to SEQ ID NO: 47407

SEQ ID NO: 47422 - DNA, 119 bp, Homo sapiens; identical to SEQ ID NO: 47409

SEQ ID NO: 47423 - DNA, 201 bp, Homo sapiens
cgccagtggctgcgtccagaggtacgctccaaggagcagatgctggagctgttggtgctggagcagttcctgggcgcactgccccctgagatccaggcccrtgtgcaggggcagcggccaggcagccccgaggaggctgctgccctagtagatgggctgcgccgggagccgggcggaccccggagatgggtcacagtccag

SEQ ID NO: 47424 - DNA, 201 bp, Homo sapiens; identical to SEQ ID NO: 47411

SEQ ID NO: 47425 - DNA, 201 bp, Homo sapiens; identical to SEQ ID NO: 47412

SEQ ID NO: 47426 - DNA, 201 bp, Homo sapiens
ccccctgagatccaggcccgtgtgcaggggcagcggccaggcagccccgaggaggctgctgccctagtagatgggctgcgccgggagccgggcggaccccrgagatgggtcacagtccaggtgcagggccaggaggtcctatcagagaagatggagccctccagtttccagcccctacctgaaactgagcctccaactcca

SEQ ID NO: 47427 - DNA, 201 bp, Homo sapiens; identical to SEQ ID NO: 47416

SEQ ID NO: 47428 - DNA, 201 bp, Homo sapiens; identical to SEQ ID NO: 47415

SEQ ID NO: 47429 - DNA, 201 bp, Homo sapiens
gtgaaagaggagtcagaggttacagaggactcagatttcctggagtctgggcctctagctgccacccaggagtctgtacccaccctcctgcctgaggaggmccagagatgtgggaccgtgctggaccagatctttccccacagcaagactgggcctgagggtccctcatggagggagcaccccagggccctgtggcatgag

SEQ ID NO: 47430 - DNA, 201 bp, Homo sapiens; identical to SEQ ID NO: 47417

SEQ ID NO: 47431 - DNA, 201 bp, Homo sapiens
gcaagactgggcctgagggtccctcatggagggagcaccccagggccctgtggcatgaggaagctgggggcatcttctccccagggttcgcgctgcagctrggcagcatctccgcaggtccaggtagtgtaagccctcacctccacgtcccctgggacctcggcatggctggcctttctggccagatccaatcaccctccc

SEQ ID NO: 47432 - DNA, 201 bp, Homo sapiens; identical to SEQ ID NO: 47419

SEQ ID NO: 47433 - DNA, 201 bp, Homo sapiens
gggcctgtcatggtgaagctagaggactctgaggaggagggtgaggctgccttatgggacccaggccctgaagctgcacgcctgcgtttccggtgcttccrctatgaggaggccacagggccccaagaggccctggcccagctccgagagctgtgtcgccagtggctgcgtccagaggtacgctccaaggagcagatgctg

SEQ ID NO: 47434 - DNA, 201 bp, Homo sapiens
agggccaggaggtcctatcagagaagatggagccctccagtttccagcccctacctgaaactgagcctccaactccagagcctgggcccaagacacctccyaggactatgcaggaatcaccactgggcctgcaggtgaaagaggagtcagaggttacagaggactcagatttcctggagtctgggcctctagctgccaccc

SEQ ID NO: 47435 - DNA, 201 bp, Homo sapiens
gtgaaagaggagtcagaggttacagaggactcagatttcctggagtctgggcctctagctgccacccaggagtctgtacccaccctcctgcctgaggaggmccagtgaccactgtgatttcagagatgtgggaccgtgctggaccagatctttccccacagcaagactgggcctgagggtccctcatggagggagcacccc

SEQ ID NO: 47436 - DNA, 115 bp, Homo sapiens
tgtgggtgttctggtgtggaagataaaattctgacatgtcccatatctgaaacacattgtctagccctcaacattagattgaagtttggctggaagaattytttttattagtaca

SEQ ID NO: 47437 - DNA, 201 bp, Homo sapiens
gggcctgtcatggtgaagctagaggactctgaggaggagggtgaggctgccttatgggacccaggccctgaagctgcacgcctgcgtttccggtgcttccrctatgaggaggccacagggccccaagaggccctggcccagctccgagagctgtgtcgccagtggctgcgtccagaggtcacagtccaggtgcagggccag

SEQ ID NO: 47438 - DNA, 201 bp, Homo sapiens; identical to SEQ ID NO: 47434

SEQ ID NO: 47439 - DNA, 201 bp, Homo sapiens; identical to SEQ ID NO: 47423

SEQ ID NO: 47440 - DNA, 201 bp, Homo sapiens; identical to SEQ ID NO: 47406

SEQ ID NO: 47441 - DNA, 201 bp, Homo sapiens; identical to SEQ ID NO: 47411

SEQ ID NO: 47442 - DNA, 119 bp, Homo sapiens; identical to SEQ ID NO: 47409

SEQ ID NO: 47443 - DNA, 201 bp, Homo sapiens; identical to SEQ ID NO: 47412

SEQ ID NO: 47444 - DNA, 201 bp, Homo sapiens; identical to SEQ ID NO: 47426

SEQ ID NO: 47445 - DNA, 201 bp, Homo sapiens; identical to SEQ ID NO: 47415

SEQ ID NO: 47446 - DNA, 201 bp, Homo sapiens; identical to SEQ ID NO: 47416

SEQ ID NO: 47447 - DNA, 201 bp, Homo sapiens; identical to SEQ ID NO: 47429

SEQ ID NO: 47448 - DNA, 201 bp, Homo sapiens; identical to SEQ ID NO: 47417

SEQ ID NO: 47449 - DNA, 201 bp, Homo sapiens; identical to SEQ ID NO: 47433

SEQ ID NO: 47450 - DNA, 201 bp, Homo sapiens; identical to SEQ ID NO: 47419

SEQ ID NO: 47451 - DNA, 201 bp, Homo sapiens; identical to SEQ ID NO: 47431

SEQ ID NO: 47452 - DNA, 201 bp, Homo sapiens; identical to SEQ ID NO: 47434

SEQ ID NO: 47453 - DNA, 201 bp, Homo sapiens; identical to SEQ ID NO: 47423

SEQ ID NO: 47454 - DNA, 201 bp, Homo sapiens; identical to SEQ ID NO: 47406

SEQ ID NO: 47455 - DNA, 201 bp, Homo sapiens; identical to SEQ ID NO: 47411

SEQ ID NO: 47456 - DNA, 201 bp, Homo sapiens; identical to SEQ ID NO: 47412

SEQ ID NO: 47457 - DNA, 201 bp, Homo sapiens; identical to SEQ ID NO: 47426

SEQ ID NO: 47458 - DNA, 201 bp, Homo sapiens; identical to SEQ ID NO: 47415

SEQ ID NO: 47459 - DNA, 201 bp, Homo sapiens; identical to SEQ ID NO: 47416

SEQ ID NO: 47460 - DNA, 201 bp, Homo sapiens; identical to SEQ ID NO: 47429

SEQ ID NO: 47461 - DNA, 201 bp, Homo sapiens; identical to SEQ ID NO: 47417

SEQ ID NO: 47462 - DNA, 201 bp, Homo sapiens; identical to SEQ ID NO: 47433

SEQ ID NO: 47463 - DNA, 201 bp, Homo sapiens; identical to SEQ ID NO: 47419

SEQ ID NO: 47464 - DNA, 201 bp, Homo sapiens; identical to SEQ ID NO: 47431

SEQ ID NO: 47465 - DNA, 201 bp, Homo sapiens; identical to SEQ ID NO: 47434

SEQ ID NO: 47466 - DNA, 201 bp, Homo sapiens
tcgggggcagaaagactgaagcccaaaaaaaaaaaaaaaaaaaaaagaaaagaaaagaaaaaagaaaagttaatttatttttaaagcataatttttttaaraattagactgaagtgcaacggaaacataaagagaatattagtgaaattattttttaaagtggggaagaatcaaacatttaagactcccctatccttttta

SEQ ID NO: 47467 - DNA, 201 bp, Homo sapiens
tccacaggcttttttttttttttttttttttttaagacgaaaaagagattttctgttatcgggggcagaaagactgaagcccaaaaaaaaaaaaaaaaaaraaagaaaagaaaagaaaaaagaaaagttaatttatttttaaagcataatttttttaagaattagactgaagtgcaacggaaacataaagagaatattagt

SEQ ID NO: 47468 - DNA, 201 bp, Homo sapiens
ttccacaggcttttttttttttttttttttttttaagacgaaaaagagattttctgttatcgggggcagaaagactgaagcccaaaaaaaaaaaaaaaaaraaaagaaaagaaaagaaaaaagaaaagttaatttatttttaaagcataatttttttaagaattagactgaagtgcaacggaaacataaagagaatattag

SEQ ID NO: 47469 - DNA, 201 bp, Homo sapiens
gagacttgaaacagccccagccaaagacttttctcccaattctgcgcttcctgggttctgctgagtcttccacaggcttttttttttttttttttttttttaagacgaaaaagagattttctgttatcgggggcagaaagactgaagcccaaaaaaaaaaaaaaaaaaaaaagaaaagaaaagaaaaaagaaaagttaatt

SEQ ID NO: 47470 - DNA, 201 bp, Homo sapiens
agagacttgaaacagccccagccaaagacttttctcccaattctgcgcttcctgggttctgctgagtcttccacaggcttttttttttttttttttttttttaagacgaaaaagagattttctgttatcgggggcagaaagactgaagcccaaaaaaaaaaaaaaaaaaaaaagaaaagaaaagaaaaaagaaaagttaat

SEQ ID NO: 47471 - DNA, 201 bp, Homo sapiens
cagagacttgaaacagccccagccaaagacttttctcccaattctgcgcttcctgggttctgctgagtcttccacaggcttttttttttttttttttttttttaagacgaaaaagagattttctgttatcgggggcagaaagactgaagcccaaaaaaaaaaaaaaaaaaaaaagaaaagaaaagaaaaaagaaaagttaa

SEQ ID NO: 47472 - DNA, 201 bp, Homo sapiens
aggattttctttttaactttaccaaatgaaatgccaaaggaagttttaaaggccgttggctgtgctgtattttgatataattgtactgtgtttttaaattktgtatgccaatcttaaagacaaattttgcatattctctattttacttttctgccaaaataaacctgttcttccttttttaaaataaaataagttcttaaa

SEQ ID NO: 47473 - DNA, 201 bp, Homo sapiens
aagaagaaactcagatttaacctgttatttctatgaaaatgggatgaattctttgtttatgcactttttccttactgtgcatccgcctgaaagtgttttgscctatatacctcactagccatgctttatgtgggttatcatggaagaaaaggattttggaaactcaaggaaaagttctttcaacctatacaacctaactta

SEQ ID NO: 47474 - DNA, 201 bp, Homo sapiens
ttttctgttatcgggggcagaaagactgaagcccaaaaaaaaaaaaaaaaaaaaaagaaaagaaaagaaaaaagaaaagttaatttatttttaaagcatawtttttttaagaattagactgaagtgcaacggaaacataaagagaatattagtgaaattattttttaaagtggggaagaatcaaacatttaagactcccct

SEQ ID NO: 47475 - DNA, 201 bp, Homo sapiens
gctttggtgatgacaggcatctcacgaaccgggtgctgagcctgggctatgcaacaaaatacacagctcgatctaagtgccttactgaaacacctatagartatctcagatggctaaaccagcagacccgttggagcaagtcctacttccgagaatggctgtacaatgcaatgtggtttcacaaacatcacttgtggatga

SEQ ID NO: 47476 - DNA, 201 bp, Homo sapiens
gattttctgttatcgggggcagaaagactgaagcccaaaaaaaaaaaaaaaaaaaaaagaaaagaaaagaaaaaagaaaagttaatttatttttaaagcawaatttttttaagaattagactgaagtgcaacggaaacataaagagaatattagtgaaattattttttaaagtggggaagaatcaaacatttaagactccc

SEQ ID NO: 47477 - DNA, 201 bp, Homo sapiens
ggctaaaccagcagacccgttggagcaagtcctacttccgagaatggctgtacaatgcaatgtggtttcacaaacatcacttgtggatgacctacgaagcrattatcactggattctttcctttctttctcattgccacagtaatccagctcttctaccggggtaaaatttggaacattctcctcttcttgttaactgtcc

SEQ ID NO: 47478 - DNA, 201 bp, Homo sapiens
taagaattagactgaagtgcaacggaaacataaagagaatattagtgaaattattttttaaagtggggaagaatcaaacatttaagactcccctatccttyttaaatgttgtttttaaatttcttattttttttggccggtcgtctcaaattcatctgatctcttattacctcaattttggaaactgcccgccaccgaccc

SEQ ID NO: 47479 - DNA, 201 bp, Homo sapiens
aggccccctgcagccgcggagcagtgggcgtccaaagcccagtgcagcagccaggacccgcccgacgcgcagcagaagcacggcgcccaggcgcttaggcrtctcttggagagcaaaggctgcgccaaaacgctgagcctagaatcaaccaaggagcctgagcccaggaaggggctgcgtggctcacagcgctgcggctcc

SEQ ID NO: 47480 - DNA, 201 bp, Homo sapiens
gcccgcgcgtgcctctgcctacaagacctggggcgtcctggccagatctggatggcaggtccctccgccacccccggcccggttccgggggcgtggcttgrcgcgggggcgggtttaagtcaccgcgggtgtctgaccactctgacaggtctccaaatttctcccagtcgcctggcgcccgcggtgcgtttcagagctcca

SEQ ID NO: 47481 - DNA, 201 bp, Homo sapiens
caaagaacgaaataaaggggatgagaactgtgtgctgcgacccttcgaaagcacagctgaaagcgttgacctcgtcttatagctcaggctgggaccctggrgcgagagtccccacaccccctccgggagggatgcttctggccagagccagcgctgcgctgtcagtccttgctcccgaactaggaaagagcctaggaggga

SEQ ID NO: 47482 - DNA, 161 bp, Homo sapiens
actttgttgtcacccagcggcacagagcctggagcccaggctgaaggcaccgacaaatctgatttgccataaaagcattttctttctgttttttttttttttgtatttcttttatatataaaataaatatactaataaaaaggtttaattttttttagaac

SEQ ID NO: 47483 - DNA, 162 bp, Homo sapiens
gactttgttgtcacccagcggcacagagcctggagcccaggctgaaggcaccgacaaatctgatttgccataaaagcattttctttctgttttttttttttttgtatttcttttatatataaaataaatatactaataaaaaggtttaattttttttagaac

SEQ ID NO: 47484 - DNA, 201 bp, Homo sapiens
gatcctcctagctccgagccaaatggactccaaagaacgaaataaaggggatgagaactgtgtgctgcgacccttcgaaagcacagctgaaagcgttgacstcgtcttatagctcaggctgggaccctggggcgagagtccccacaccccctccgggagggatgcttctggccagagccagcgctgcgctgtcagtccttg

SEQ ID NO: 47485 - DNA, 201 bp, Homo sapiens
ttgggatgtggatattgcaaacaaactcgaatctggaggaatccctgggaggattcacatttccaaagccacgctggactgtctcaacggtgactataacrtggaagagggccatggtaaagagaggaatgaattcctgaggaagcataatatcgaaacttacttaattaagcagcctgaggacagtctgctgtccttgcc

SEQ ID NO: 47486 - DNA, 201 bp, Homo sapiens
ggagcagcgcttcattcacgggcaccggggaggcagcggcagcgggagtggaggctcgggcaaagcctcggaccctgcgggcggcggccccaaccaccacrcgccgcagctgtcaggcgactcggcgctgcccctctactcgctgggcccgggagagcgagcgcacagcacctgcggcaccaaagtcttcccggaacgcag

SEQ ID NO: 47487 - DNA, 201 bp, Homo sapiens
tggcccgccatttcctagagaaggaccgagacaatgaggagctgtattctcaatcctatgatgctgttggggtgatgtttgcctccatcccaggatttgcrgacttttactctcagactgaaatgaataaccagggagtggaatgcctgcgcttgctcaatgagatcattgctgacttcgatgagttgcttggtgaagacc

SEQ ID NO: 47488 - DNA, 201 bp, Homo sapiens
gctcggtgctgtgcggtgttttgggactaaggaagtggcagtttgatgtctggtcttgggatgtggatattgcaaacaaactcgaatctggaggaatcccygggaggattcacatttccaaagccacgctggactgtctcaacggtgactataacgtggaagagggccatggtaaagagaggaatgaattcctgaggaagc

SEQ ID NO: 47489 - DNA, 201 bp, Homo sapiens
tgccctttgcccctgggcacagtatgacccgacctacagggagccctagcgcagggctcctgcaacggggcagcctaggataaaaaggatccttgccaagctcctaccaggccgcctttgagtctttaggaacccctcctccggctgcctccccaaggttctgggcctccttccctgcggcccagagccatggagctctcc

SEQ ID NO: 47490 - DNA, 201 bp, Homo sapiens
gatcaaaaccatcaggtatgtgcggtcaaggacaaaacacgatgttgacatgaggattggaatccactccggctcggtgctgtgcggtgttttgggactamggaagtggcagtttgatgtctggtcttgggatgtggatattgcaaacaaactcgaatctggaggaatccctgggaggattcacatttccaaagccacgct

SEQ ID NO: 47491 - DNA, 201 bp, Homo sapiens
cctggccggcctgggcacctcgctgctgcaggtcatcctccaagtggtcataccccggctggcggtcatttccatcaaccaggttgtggcccaggcagtgytattcatgtgtatgaacacagctggaatcttcatcagttacctgtcagaccgggcccagcgccaagctttcctggagactcggaggtgtgtggaggccag

SEQ ID NO: 47492 - DNA, 201 bp, Homo sapiens
tctatgattgcggcctcttgggggattttgcgtttagcccgaaagttggctttgccaaaagacgcacgggtaggaagggcgaaaaggaaaccctgtattcygtcgcgctgggctctccgagtccgtgcgcaaagcggcctacgagtcctggctccgcacctgcagaggacaagagccaatgcctaaaaaagaacagcggag

SEQ ID NO: 47493 - DNA, 201 bp, Homo sapiens
caaccaaggagcctgagcccaggaaggggctgcgtggctcacagcgctgcggctcctgaggacaaatagccactgccgctgcgtacccaagctgcgccggytggcgggagagcagcacgcaaggacgccgaggtccgccgcgatcttccaggtgccctttgcccctgggcacagtatgacccgacctacagggagccctag

SEQ ID NO: 47494 - DNA, 201 bp, Homo sapiens
ctctatgattgcggcctcttgggggattttgcgtttagcccgaaagttggctttgccaaaagacgcacgggtaggaagggcgaaaaggaaaccctgtattycgtcgcgctgggctctccgagtccgtgcgcaaagcggcctacgagtcctggctccgcacctgcagaggacaagagccaatgcctaaaaaagaacagcgga

SEQ ID NO: 47495 - DNA, 201 bp, Homo sapiens
ccattggcagcacctacatggccgtgtcaggcctgtcacctgaaaaacagcaatgtgaagacaagtggggacatttgtgtgctctggctgacttctcactygccctgacagaaagcatacaggagatcaacaagcattcattcaacaattttgaactccggattggcatcagccacggctcagtggtagctggcgttatcg

SEQ ID NO: 47496 - DNA, 201 bp, Homo sapiens
ccttcctaaaaatagtttattgtatctgacaagaaacttacttaaccattgtgtccttcccatcttttttgtcatctttgttttcttcaaatgccctcctmccatctgccttgagattcccttgtcttcacttaaaagccagagtgcaagtcatgatttgcgggagggctcttgaaccacttctggctgcaccacaattct

SEQ ID NO: 47497 - DNA, 201 bp, Homo sapiens
gtgaagaaattcaggaatctagaaagaaaagaggttgtagctcctccaaatatgccccgtcttactaccatgtgatgccaaagcaaaattccactcttgtkggtgataaaagatcagacccagagcagaatgaaaagctaaagacaccgagtactcctgtggcttgcagcactcctgctcagttgaagaggaaaattcgca

SEQ ID NO: 47498 - DNA, 201 bp, Homo sapiens
aggtagctatgcaaaagatgataccagcctcccaaagagctgtgacatcacctgggcaggcactgtccaccgttgtgaaaccactcctgcaaaacactgtkgacaagattttagaagccctgcagagagtatttccacatgcagaattcagaacaaataaaacattagactcagatatttcttgtcctctgctagaaagtg

SEQ ID NO: 47499 - DNA, 201 bp, Homo sapiens
gttgaccctgatgaggttcctgattatgtcactgtaataaagcaaccaatggacctttcatctgtaatcagtaaaattgatctacacaagtatctgactgygaaagactatttgagagatattgatctaatctgtagtaatgccttagaatacaatccagatagagatcctggagatcgtcttattaggcatagagcctgt

SEQ ID NO: 47500 - DNA, 124 bp, Homo sapiens
agccagagctgcgagcgcctggarctggatctctctccggtcgcgcacgccgaggccagtagggagagaagatggtggttctccgcagcagcttggagctgcacaaccactccgcggcctcggc

SEQ ID NO: 47501 - DNA, 201 bp, Homo sapiens
tatctgacaagaaacttacttaaccattgtgtccttcccatcttttttgtcatctttgttttcttcaaatgccctcctcccatctgccttgagattccctygtcttcacttaaaagccagagtgcaagtcatgatttgcgggagggctcttgaaccacttctggctgcaccacaattctgtacttgagtatcacagtcatt

SEQ ID NO: 47502 - DNA, 201 bp, Homo sapiens
aatatagagaatgagcttgaagactctaggaagactacagcatgtacagaattgagagacaagattgcttgtaatggagatgcttctagctctcagataayacatatttctgatgaaaatgaaggaaaagaaatgtgtgttctgcgaatgactcgagctagacgttcccaggtagaacagcagcagctcatcactgttgaa

SEQ ID NO: 47503 - DNA, 201 bp, Homo sapiens; identical to SEQ ID NO: 47496

SEQ ID NO: 47504 - DNA, 201 bp, Homo sapiens; identical to SEQ ID NO: 47497

SEQ ID NO: 47505 - DNA, 201 bp, Homo sapiens; identical to SEQ ID NO: 47499

SEQ ID NO: 47506 - DNA, 201 bp, Homo sapiens; identical to SEQ ID NO: 47501

SEQ ID NO: 47507 - DNA, 201 bp, Homo sapiens; identical to SEQ ID NO: 47502

SEQ ID NO: 47508 - DNA, 201 bp, Homo sapiens; identical to SEQ ID NO: 47497

SEQ ID NO: 47509 - DNA, 201 bp, Homo sapiens; identical to SEQ ID NO: 47498

SEQ ID NO: 47510 - DNA, 201 bp, Homo sapiens; identical to SEQ ID NO: 47499

SEQ ID NO: 47511 - DNA, 124 bp, Homo sapiens; identical to SEQ ID NO: 47500

SEQ ID NO: 47512 - DNA, 201 bp, Homo sapiens; identical to SEQ ID NO: 47502

SEQ ID NO: 47513 - DNA, 124 bp, Homo sapiens; identical to SEQ ID NO: 47500

SEQ ID NO: 47514 - DNA, 201 bp, Homo sapiens; identical to SEQ ID NO: 47498

SEQ ID NO: 47515 - DNA, 124 bp, Homo sapiens; identical to SEQ ID NO: 47500

SEQ ID NO: 47516 - DNA, 201 bp, Homo sapiens
caagcaatctgaatttgtttttgtgattatttgactggaatgcttcttaagtggaataactatactccgttatccacccgatttcctaatgtaattgaaasattttctattttgccacacacttggagacaataagggtttttagttttatctactcttctattgaagttaaagaaagaaaaaaagatttttttatttgta

SEQ ID NO: 47517 - DNA, 201 bp, Homo sapiens
acattacaatcattgtagttcagttcaattctcatgttgtaggggcgtatcaaaaccaagaatagtgagtggctctttcactggcaattctcaaatgatayacatttaaagggcagattttttaaaaagatactactataataaacatttccagttggtcattctaagcatttacccttttgatactctagctagtcaggt

SEQ ID NO: 47518 - DNA, 201 bp, Homo sapiens; identical to SEQ ID NO: 47516

SEQ ID NO: 47519 - DNA, 201 bp, Homo sapiens; identical to SEQ ID NO: 47517

SEQ ID NO: 47520 - DNA, 201 bp, Homo sapiens
gcacgcgctcccgtgtagggccggccgggcgctcaggagcgcgcggggcagcggcggcgcggcggagccatccgcgctcgtgcccgcgcgggtgcgttgcygtcctggccgcgcccctgtcccgccgcctcccgctcctcgcctggcggatgtaggttgttggcctgaggggagctacgtagccgaggtttgcgctgccgc

SEQ ID NO: 47521 - DNA, 201 bp, Homo sapiens
accgttttgctggtgatgctcccacaccacactcttattaggtggagctgttctatcatctacatgaatttcccaacagaaatgatagccattttttcctytaatgaatagaattatgattcaataagattttgttcaacttttcctcaaaaccatatgtttatagaaaataattattatttcttagggataaatatatca

SEQ ID NO: 47522 - DNA, 201 bp, Homo sapiens
gagagaaagctagtagtcaacaggctggccaggactcaagagaaatcagatgccgttttgcctgcctctcttcttgttaatgagaggggcactgagaaccrttttgctggtgatgctcccacaccacactcttattaggtggagctgttctatcatctacatgaatttcccaacagaaatgatagccattttttcctctaa

SEQ ID NO: 47523 - DNA, 201 bp, Homo sapiens
agctggagctgtcggaaggtgacatcactcaaaaaggatatgaaaagaaaagggcaaagctgcttgcacgttatataccgcttattcaaggaatagacccrtctctgcaagcagagaatagaattcctgggccctcacaaaccacggccgctgcacccaagcagcagaagtctcggcccaccgcctcgagggatgagcgct

SEQ ID NO: 47524 - DNA, 201 bp, Homo sapiens
cctggagacagagtggcgctcgtgtttccgaatagtgaccctgtgatgttcatggttgcattttatgggtgtctcctggcagagctggttcctgtccccayagaagtgccattaacaagaaaggtagcaaacccatggctcaggtcccgtgtggttcgcttctgaacttgataccagcagtatcttacttccttttcactc

SEQ ID NO: 47525 - DNA, 201 bp, Homo sapiens
ttgcagcgctggggcacaacacagcccaaatccccctgtctgactgccttggatacaactgggaaagccgtctacactctcacctatggtaaactttggartcggagtttaaaactagcttatactctacttaataaactgacaagtaagaatgaacctctacttaaacctggagacagagtggcgctcgtgtttccgaat

SEQ ID NO: 47526 - DNA, 201 bp, Homo sapiens
ccagagccattccagcgtcgagccctggctcgaccgggtcattcagggctcgtccacctcatcctctgcatcctccacctcatctcacccgggagggagasccaccactgctcccagtgctgcagccacgccgggggccgccgctaccactgcactcgcaggcctcgaggcccacacccacatagatctgcattctgcccc

SEQ ID NO: 47527 - DNA, 201 bp, Homo sapiens; identical to SEQ ID NO: 47520

SEQ ID NO: 47528 - DNA, 201 bp, Homo sapiens; identical to SEQ ID NO: 47523

SEQ ID NO: 47529 - DNA, 185 bp, Homo sapiens
ccagagccattccagcgtcgagccctggctcgaccgggtcattcagggctcgtccacctcatcctctgcatcctccacctcatctcacccgggagggagasccaccactgctcccagtgctgcagccacgccgggggccgccgctaccactgcactcgcaggcctcgaggcccacacccacatag

SEQ ID NO: 47530 - DNA, 201 bp, Homo sapiens
tcgcccacctggaggacagcgaccaggcacggaagttcctgttcctggctgacgtgctgcagtggcgtgcccacaccactcctgaccacccgctgttcttrctgctgaacgccaagggcaccgtcacaagcactgcaacctgtgtccagctgcacaaaagggctgagagagtggccgcggctctgatggagaagggaagac

SEQ ID NO: 47531 - DNA, 201 bp, Homo sapiens
cagaggtcatctgtccttgtgcaagttctcctgaggcgctgactgtcgccatccgcaggccacctgatctgggaggaccacctccaagaaaagcagtcctrtcgatgaacggtctaagttatggtgttatcagagtggatactgaagaaaagttgtcagtccttactgttcaggacgttggtcaggtgatgcctggagcta

SEQ ID NO: 47532 - DNA, 201 bp, Homo sapiens
tccccggcgtgaaggtcatcatcgcacacaccgagaccaaaggacccttgggagactcacacctgggagagatctgggtaagcagcccccacaatgccacygggtactacaccgtttacggggaggaggcgcttcatgccgaccacttcagtgcccggctgagttttggagacacacagaccatctgggcaaggaccggct

SEQ ID NO: 47533 - DNA, 201 bp, Homo sapiens
caccaggggtggacctcattgccgcgttctatggctgcttgtactgtggctgcgtgcctgtcaccgtgcggcccccgcaccctcagaacctcggcaccacrctgcccaccgtcaagatgatcgtggaggtcagcaagtctgcatgcgtcctcaccacgcaggctgtcacacggctgctcaggtccaaggaggctgctgctg

SEQ ID NO: 47534 - DNA, 201 bp, Homo sapiens
actctcggggtgagaagcagcgcatgcacctgcgggacggcttcctggctgaccagctggaccccatctatgtcgcctacaacatgtgagcgcagcacacyggcccaggtgccggagatgaatgagccccagcagtccaaggtgtgatgtgggaagacaccgcagagctcactcaccgggactcgcccttcctgtgctctt

SEQ ID NO: 47535 - DNA, 201 bp, Homo sapiens
agttcctgatttttaaaattcagttatttattcccacttcaaatgacaagttcatatatagaatttacgggagaaacttgagaccatttacggggagaaayttgattctgggaagatagcagagtacaaaccagctgcctcacttctgtttcacagggaggctgatggaaaaaggaagcaagctggacccatcctccctgc

SEQ ID NO: 47536 - DNA, 201 bp, Homo sapiens
cctggagacagagtggcgctcgtgtttccgaatagtgaccctgtgatgttcatggttgcattttatgggtgtctcctggcagagctggttcctgtccccayagaagtgccattaacaagaaaggatgcaggcagccagcaggttgggtttctgctgggcagctgtggagtcttcttggccctgaccacagacgcttgtcag

SEQ ID NO: 47537 - DNA, 201 bp, Homo sapiens; identical to SEQ ID NO: 47523

SEQ ID NO: 47538 - DNA, 201 bp, Homo sapiens
tggtggtggtggagctggatgggctagagcaggatgccctggacctggtggccctggtgaccaacgtggtgctggaggagcactacctggtcgtgggagtrgtggtcatcgtggacccaggggtgatccctatcaactctcggggtgagaagcagcgcatgcacctgcgggacggcttcctggctgaccagctggacccca

SEQ ID NO: 47539 - DNA, 201 bp, Homo sapiens
gttctctgtgaccgtgctgcacgacgaccggattgtcctggtggctgagcagcggccggatgcctcggaggaggacagcttccagtggatgagccgtgtgytgcaggccattgatagcatccaccaggtgggcgtgtactgtctggccctggttcctgccaacaccttgcccaaggctcctctcggagggattcacatttc

SEQ ID NO: 47540 - DNA, 201 bp, Homo sapiens; identical to SEQ ID NO: 47520

SEQ ID NO: 47541 - DNA, 201 bp, Homo sapiens
ggaccagcctcaatgatcgtggggaacctggttgctgggaagagaatcgctcaggcttccgggagagagctcgcccacctggaggacagcgaccaggcacrgaagttcctgttcctggctgacgtgctgcagtggcgtgcccacaccactcctgaccacccgctgttcttgctgctgaacgccaagggcaccgtcacaagc

SEQ ID NO: 47542 - DNA, 201 bp, Homo sapiens
aaggacccttgggagactcacacctgggagagatctgggtaagcagcccccacaatgccaccgggtactacaccgtttacggggaggaggcgcttcatgcygaccacttcagtgcccggctgagttttggagacacacagaccatctgggcaaggaccggctaccttggcttccttcggcgaacagagctcactgatgcca

SEQ ID NO: 47543 - DNA, 201 bp, Homo sapiens
tctactaaaaatacaaaaaattagccgggtgtggtggtgggcgcctgtagtcccagctacttgggaggctgaggcaggagaatggtatgaaccagggaggyggagcttgcagtgagccgagatcacgctactgcactccagcctgggtgacagcacgagatgccgtcttaaaaaaacaaaaaagaggtgtgctgcttgtca

SEQ ID NO: 47544 - DNA, 201 bp, Homo sapiens
cgctggggcacaacacagcccaaatccccctgtctgactgccttggatacaactgggaaagccgtctacactctcacctatggcaagtgtaaactttggartcggagtttaaaactagcttatactctacttaataaactgacaagtaagaatgaacctctacttaaacctggagacagagtggcgctcgtgtttccgaat

SEQ ID NO: 47545 - DNA, 201 bp, Homo sapiens; identical to SEQ ID NO: 47526

SEQ ID NO: 47546 - DNA, 201 bp, Homo sapiens
caactggcacagcgtactatggattgcttggaatcacgaagaatgtgtttgaggtttttccggtcaccacaggaggagcacccatctttgacaggccattyaccaggacaggcctgctgggcttcatcgggcctgacaacctggtcttcatcgtgggcaaactggacgggctgatggtcactggagttcgcagacacaatg

SEQ ID NO: 47547 - DNA, 201 bp, Homo sapiens
gcgtgtactgtctggccctggttcctgccaacaccttgcccaaggctcctctcggagggattcacatttctgaaaccaaacagcgctttctggaagggacrctgcacccgtgtaatgtgctgatgtgccctcacacctgtgttaccaacctccccaaacctcgtcagaaacaaccagaggttggaccagcctcaatgatcg

SEQ ID NO: 47548 - DNA, 201 bp, Homo sapiens
ttggaatcacgaagaatgtgtttgaggtttttccggtcaccacaggaggagcacccatctttgacaggccattcaccaggacaggcctgctgggcttcatygggcctgacaacctggtcttcatcgtgggcaaactggacgggctgatggtcactggagttcgcagacacaatgcagatgacgttgtggccaccgcactgg

SEQ ID NO: 47549 - DNA, 152 bp, Homo sapiens
tcgcccacctggaggacagcgaccaggcacggaagttcctgttcctggctgacgtgctgcagtggcgtgcccacaccactcctgaccacccgctgttcttrctgctgaacgccaagggcaccgtcacaagcactgcaacctgtgtccagctg

SEQ ID NO: 47550 - DNA, 201 bp, Homo sapiens; identical to SEQ ID NO: 47539

SEQ ID NO: 47551 - DNA, 201 bp, Homo sapiens; identical to SEQ ID NO: 47520

SEQ ID NO: 47552 - DNA, 201 bp, Homo sapiens; identical to SEQ ID NO: 47541

SEQ ID NO: 47553 - DNA, 201 bp, Homo sapiens; identical to SEQ ID NO: 47531

SEQ ID NO: 47554 - DNA, 201 bp, Homo sapiens; identical to SEQ ID NO: 47525

SEQ ID NO: 47555 - DNA, 201 bp, Homo sapiens
caactggcacagcgtactatggattgcttggaatcacgaagaatgtgtttgaggcagttccggtcaccacaggaggagcacccatctttgacaggccattyaccaggacaggcctgctgggcttcatcgggcctgacaacctggtcttcatcgtgggcaaactggacgggctgatggtcactggagttcgcagacacaatg

SEQ ID NO: 47556 - DNA, 201 bp, Homo sapiens; identical to SEQ ID NO: 47547

SEQ ID NO: 47557 - DNA, 201 bp, Homo sapiens
ttggaatcacgaagaatgtgtttgaggcagttccggtcaccacaggaggagcacccatctttgacaggccattcaccaggacaggcctgctgggcttcatygggcctgacaacctggtcttcatcgtgggcaaactggacgggctgatggtcactggagttcgcagacacaatgcagatgacgttgtggccaccgcactgg

SEQ ID NO: 47558 - DNA, 201 bp, Homo sapiens; identical to SEQ ID NO: 47523

SEQ ID NO: 47559 - DNA, 201 bp, Homo sapiens; identical to SEQ ID NO: 47536

SEQ ID NO: 47560 - DNA, 201 bp, Homo sapiens
gctgcggttctcgaaagctggctgttggcagcatggagacccagtttcccagttgttaatgtgccgttttgtagccgcctgatctatttctccttctctgrgcctttgatatctcatttccatgtaacattttagcttcaagggttttatttttaaagatgttctattctagttggagaaaggcttatttggaaaaaaaac

SEQ ID NO: 47561 - DNA, 152 bp, Homo sapiens; identical to SEQ ID NO: 47549

SEQ ID NO: 47562 - DNA, 201 bp, Homo sapiens; identical to SEQ ID NO: 47539

SEQ ID NO: 47563 - DNA, 201 bp, Homo sapiens; identical to SEQ ID NO: 47520

SEQ ID NO: 47564 - DNA, 201 bp, Homo sapiens; identical to SEQ ID NO: 47541

SEQ ID NO: 47565 - DNA, 201 bp, Homo sapiens; identical to SEQ ID NO: 47531

SEQ ID NO: 47566 - DNA, 201 bp, Homo sapiens; identical to SEQ ID NO: 47544

SEQ ID NO: 47567 - DNA, 201 bp, Homo sapiens; identical to SEQ ID NO: 47526

SEQ ID NO: 47568 - DNA, 201 bp, Homo sapiens; identical to SEQ ID NO: 47546

SEQ ID NO: 47569 - DNA, 201 bp, Homo sapiens; identical to SEQ ID NO: 47547

SEQ ID NO: 47570 - DNA, 201 bp, Homo sapiens; identical to SEQ ID NO: 47548

SEQ ID NO: 47571 - DNA, 201 bp, Homo sapiens; identical to SEQ ID NO: 47523

SEQ ID NO: 47572 - DNA, 201 bp, Homo sapiens; identical to SEQ ID NO: 47536

SEQ ID NO: 47573 - DNA, 201 bp, Homo sapiens
tctcgcattcttctcaggttgccaggaaatgtttctctaaccctttcaaaagtgtttgtaaaccaagttcaaaggaaaatagacagaatgatttccaaaaytgcaaaccacgccatgacccatatacgccaaattccctcgttatgccacgaccagataagaatcaccagtgggtattcaataagaactgtttccctcttg

SEQ ID NO: 47574 - DNA, 201 bp, Homo sapiens
tattcctttatgaatgtgtaatgggaatgagaatgaatggcagatgtggagctattcttgctgatgaaatgggtttagggaagacattgcaatgtatttcrctcatctggaccctgcagtgtcagggaccctatggaggcaagccagtaataaagaagacactaattgtcacacctggaagcttggtgaataattggaaga

SEQ ID NO: 47575 - DNA, 201 bp, Homo sapiens
cagtttaaatctgcctagtgaagaaagtactagagaaatcaataacagagataattgcagtggaaaatattgttttgaagcacctacactggcaacattasatccacctcatacagtgcaaacttggatgaggaggcacaggctggtaccagttcactacagttcattcggctcctaaagaagtagcagtgtccaaggaac

SEQ ID NO: 47576 - DNA, 201 bp, Homo sapiens
aaaaactgtgcaatcacccctgccttttgttcaactctataaaggaaaaggaatgtagctcaacttgtgataaaaatgaagaaaagagtctatacaaaggyttgctaagtgtgtttcctgctgactacaaccctctcctgtttactgaaaaggagtcaggaaaactacaggtgttgtccaagctcttagcggttatccacg

SEQ ID NO: 47577 - DNA, 201 bp, Homo sapiens
tcaagtctatattttattctgttcttattatcagttatgaaatgttacttcgttccctggatcaaattaagaatataaaatttgatcttctaatctgtgaygaggggcatcgtttgaagaacagtgccattaagacaactacagccctcattagcctttcttgtgagaaaagaataattctaactggtactccaattcaga

SEQ ID NO: 47578 - DNA, 201 bp, Homo sapiens
taataacacctttctcccgtcacaaaatgatcttagaatatgcagtttaaatctgcctagtgaagaaagtactagagaaatcaataacagagataattgcrgtggaaaatattgttttgaagcacctacactggcaacattagatccacctcatacagtgcaaacttggatgaggaggcacaggctggtaccagttcacta

SEQ ID NO: 47579 - DNA, 201 bp, Homo sapiens
acacaaaccttgaacattttacaagaagtatgtaagcgtcatggatatgcttatacaagacttgatggacaaacaccaatctctcaaaggcagcagattgytgatggctttaacagtcaacactcttctttttttatttttttgttaagttcaaaagctggtggtgtaggacttaacctcattggaggatctcacttaatt

SEQ ID NO: 47580 - DNA, 201 bp, Homo sapiens
ggtgttgtccaagctcttagcggttatccacgaacttcgacctactgaaaaggtggtgttggtatccaactatacacaaaccttgaacattttacaagaastatgtaagcgtcatggatatgcttatacaagacttgatggacaaacaccaatctctcaaaggcagcagattgttgatggctttaacagtcaacactcttc

SEQ ID NO: 47581 - DNA, 201 bp, Homo sapiens; identical to SEQ ID NO: 47573

SEQ ID NO: 47582 - DNA, 201 bp, Homo sapiens; identical to SEQ ID NO: 47574

SEQ ID NO: 47583 - DNA, 201 bp, Homo sapiens; identical to SEQ ID NO: 47575

SEQ ID NO: 47584 - DNA, 201 bp, Homo sapiens; identical to SEQ ID NO: 47576

SEQ ID NO: 47585 - DNA, 201 bp, Homo sapiens
aagtgaaaggatcaagatatttactgttgatcagttatgaaatgttacttcgttccctggatcaaattaagaatataaaatttgatcttctaatctgtgaygaggggcatcgtttgaagaacagtgccattaagacaactacagccctcattagcctttcttgtgagaaaagaataattctaactggtactccaattcaga

SEQ ID NO: 47586 - DNA, 201 bp, Homo sapiens; identical to SEQ ID NO: 47578

SEQ ID NO: 47587 - DNA, 201 bp, Homo sapiens; identical to SEQ ID NO: 47579

SEQ ID NO: 47588 - DNA, 201 bp, Homo sapiens; identical to SEQ ID NO: 47580

SEQ ID NO: 47589 - DNA, 120 bp, Homo sapiens
ggtttcagaaactgcctacytaatttgaaaagaacaatggtaggaaaggctagatcttccaattttaccttatccgaaaagcttgatttgctaaagcttgtgaagccatatgtgaaaatt

SEQ ID NO: 47590 - DNA, 201 bp, Homo sapiens
gaaactgcctacttaatttgaaaagaacaatggtaggaaaggctagatcttccaattttaccttatccgaaaagcttgatttgctaaagcttgtgaagccrtatgtgaaaattctcgaagaacacactaataaacattcagtaatagtagaaaagaatagatgttgggatatcatagcagttaactataatgcaattggag

SEQ ID NO: 47591 - DNA, 201 bp, Homo sapiens; identical to SEQ ID NO: 47573

SEQ ID NO: 47592 - DNA, 201 bp, Homo sapiens; identical to SEQ ID NO: 47574

SEQ ID NO: 47593 - DNA, 201 bp, Homo sapiens
cagtttaaatctgcctagtgaagaaagtactagagaaatcaataacagagataattgcagtggaaaatattgttttgaagcacctacactggcaacattasatccacctcatacagttcattcggctcctaaagaagtagcagtgtccaaggaacaagaagagaaatctgatagcctagttaaatatttcagtgttgtttg

SEQ ID NO: 47594 - DNA, 201 bp, Homo sapiens; identical to SEQ ID NO: 47576

SEQ ID NO: 47595 - DNA, 201 bp, Homo sapiens; identical to SEQ ID NO: 47577

SEQ ID NO: 47596 - DNA, 201 bp, Homo sapiens
taataacacctttctcccgtcacaaaatgatcttagaatatgcagtttaaatctgcctagtgaagaaagtactagagaaatcaataacagagataattgcrgtggaaaatattgttttgaagcacctacactggcaacattagatccacctcatacagttcattcggctcctaaagaagtagcagtgtccaaggaacaaga

SEQ ID NO: 47597 - DNA, 201 bp, Homo sapiens; identical to SEQ ID NO: 47579

SEQ ID NO: 47598 - DNA, 201 bp, Homo sapiens; identical to SEQ ID NO: 47580

SEQ ID NO: 47599 - DNA, 201 bp, Homo sapiens
ttcaagcgagataacggagcccggccgcgcccggtgcattgtgggaacggcccgcggcccgttttcgggaggaggcggagggcgcgaagcgagctggtggatccgtaaagaacccagccaacccccagagggaggggaggggctgagctgtgaggagagcggggcacaagaaccatgtgtacgcgggagtccttttaaccc

SEQ ID NO: 47600 - DNA, 201 bp, Homo sapiens
tcagttaaacagggcaagtgcttcactgcatggaaaacactttgaagagacaaaaaagaaatcttatttcttttttgtagcctttctgatatttacaatartaccactaactgttttctttatcgatagcaaagaacgatactttttgcaatgtaattagatgttctatagtgctacaaggaaatgccttccaaaaggagg

SEQ ID NO: 47601 - DNA, 201 bp, Homo sapiens
tgtacagtgatttcaggccttttgttttcttgaaatcagcagatatttagcctaattcttagcattattttgtcctttgcaccagtacttttttgtgcacrctttttgtgatctgtgttaaaaacctgcatggccaacattgcagctccaacttaaacttgttattcaaataaatatttaattttttaaattgctcttgta

SEQ ID NO: 47602 - DNA, 201 bp, Homo sapiens
tcttatttcttttttgtagcctttctgatatttacaataataccactaactgttttctttatcgatagcaaagaacgatactttttgcaatgtaattagaygttctatagtgctacaaggaaatgccttccaaaaggaggctcatgtataatactcatttacaaaatatataattacgcaaataaattttaaatataatca

SEQ ID NO: 47603 - DNA, 201 bp, Homo sapiens
tattcaagcgagataacggagcccggccgcgcccggtgcattgtgggaacggcccgcggcccgttttcgggaggaggcggagggcgcgaagcgagctggtggatccgtaaagaacccagccaacccccagagggaggggaggggctgagctgtgaggagagcggggcacaagaaccatgtgtacgcgggagtccttttaac

SEQ ID NO: 47604 - DNA, 201 bp, Homo sapiens; identical to SEQ ID NO: 47599

SEQ ID NO: 47605 - DNA, 201 bp, Homo sapiens; identical to SEQ ID NO: 47603

SEQ ID NO: 47606 - DNA, 201 bp, Homo sapiens
agcgacacttacaggaagggaaagaacaatgacaacacccgcccagccccacccccaaaaagctgctgttgtgaattaaggcttcaaaagaggacccacaytgtagctgataaaactcaagccaggaggatgtttgaaagccaatctgcactatcacttgttccagtgacctcctatgttcagctgccaggaccgattcca

SEQ ID NO: 47607 - DNA, 201 bp, Homo sapiens
ggatgtttataagaaaccatcaggaaaatgctttttccagggagaccacggatttgataacaaggtcaacagcatgcagactgtttttgtaggttatggcycaacatttaagtacaagactaaagtgcctccatttgaaaacattgaactttacaatgttatgtgtgatctcctgggattgaagccagctcctaataatgg

SEQ ID NO: 47608 - DNA, 201 bp, Homo sapiens
ttaagtacaagactaaagtgcctccatttgaaaacattgaactttacaatgttatgtgtgatctcctgggattgaagccagctcctaataatgggacccayggaagtttgaatcatctcctgcgcactaataccttcaggccaaccatgccagaggaagttaccagacccaattatccagggattatgtaccttcagtctg

SEQ ID NO: 47609 - DNA, 201 bp, Homo sapiens
aacaaacggcttcatacaaaagggtctacagaagagagacacctcctctatgggcgacctgcagtgctttatcggactagatatgatatcttatatcacastgactttgaaagtggttatagtgaaatattcctaatgccactctggacatcatatactgtttccaaacaggctgaggtttccagcgttcctgaccatctg

SEQ ID NO: 47610 - DNA, 201 bp, Homo sapiens
aaatatgatgcattccttgtaaccaatatggttccaatgtatcctgctttcaaacgggtctggaattatttccaaagggtattggtgaagaaatatgcttyggaaagaaatggagttaacgtgataagtggaccaatcttcgactatgactatgatggcttacatgacacagaagacaaaataaaacagtacgtggaaggc

SEQ ID NO: 47611 - DNA, 201 bp, Homo sapiens
ctccttcatcctgcctcaccggcctgacaacgaggagagctgcaatagctcagaggacgaatcaaaatgggtagaagaactcatgaagatgcacacagctmgggtgcgtgacattgaacatctcaccagcctggacttcttccgaaagaccagccgcagctacccagaaatcctgacactcaagacatacctgcatacata

SEQ ID NO: 47612 - DNA, 201 bp, Homo sapiens
atgccagaggaagttaccagacccaattatccagggattatgtaccttcagtctgattttgacctgggctgcacttgtgatgataaggtagagccaaagarcaagttggatgaactcaacaaacggcttcatacaaaagggtctacagaagagagacacctcctctatgggcgacctgcagtgctttatcggactagatat

SEQ ID NO: 47613 - DNA, 201 bp, Homo sapiens
tgagagcgagatttaactttctgagcatctgcagtacagtcttatcaactggttgtatatttttatattgtttttgtatttattaatttgaaaccaggacrttaaaaattccactgtttttctctaatgcttgatttaggtagccttgtgttctgagtagagcttgtaataaatactgcagcttgagtttttagtggaagc

SEQ ID NO: 47614 - DNA, 201 bp, Homo sapiens
cctggacttcttccgaaagaccagccgcagctacccagaaatcctgacactcaagacatacctgcatacatatgagagcgagatttaactttctgagcatmtgcagtacagtcttatcaactggttgtatatttttatattgtttttgtatttattaatttgaaaccaggacattaaaaattccactgtttttctctaatg

SEQ ID NO: 47615 - DNA, 201 bp, Homo sapiens
agttccattcctgttccaactcactactacagcatcatcaccagctgtctggatttcactcagcctgccgacaagtgtgacggccctctctctgtgtcctycttcatcctgcctcaccggcctgacaacgaggagagctgcaatagctcagaggacgaatcaaaatgggtagaagaactcatgaagatgcacacagctagg

SEQ ID NO: 47616 - DNA, 201 bp, Homo sapiens
ggacgaatcaaaatgggtagaagaactcatgaagatgcacacagctagggtgcgtgacattgaacatctcaccagcctggacttcttccgaaagaccagcygcagctacccagaaatcctgacactcaagacatacctgcatacatatgagagcgagatttaactttctgagcatctgcagtacagtcttatcaactggtt

SEQ ID NO: 47617 - DNA, 201 bp, Homo sapiens
acagcatcatcaccagctgtctggatttcactcagcctgccgacaagtgtgacggccctctctctgtgtcctccttcatcctgcctcaccggcctgacaaygaggagagctgcaatagctcagaggacgaatcaaaatgggtagaagaactcatgaagatgcacacagctagggtgcgtgacattgaacatctcaccagcc

SEQ ID NO: 47618 - DNA, 201 bp, Homo sapiens
gcttacatgacacagaagacaaaataaaacagtacgtggaaggcagttccattcctgttccaactcactactacagcatcatcaccagctgtctggatttyactcagcctgccgacaagtgtgacggccctctctctgtgtcctccttcatcctgcctcaccggcctgacaacgaggagagctgcaatagctcagaggacg

SEQ ID NO: 47619 - DNA, 201 bp, Homo sapiens
aaagccattattgccaatctcacgtgtaaaaaaccagatcagcactttaagccttacttgaaacagcaccttcccaaacgtttgcactatgccaacaacaraagaattgaggatatccatttattggtggaacgcagatggcatgttgcaaggaaacctttggatgtttataagaaaccatcaggaaaatgctttttccag

SEQ ID NO: 47620 - DNA, 201 bp, Homo sapiens; identical to SEQ ID NO: 47607

SEQ ID NO: 47621 - DNA, 201 bp, Homo sapiens; identical to SEQ ID NO: 47608

SEQ ID NO: 47622 - DNA, 201 bp, Homo sapiens; identical to SEQ ID NO: 47609

SEQ ID NO: 47623 - DNA, 201 bp, Homo sapiens; identical to SEQ ID NO: 47610

SEQ ID NO: 47624 - DNA, 201 bp, Homo sapiens; identical to SEQ ID NO: 47611

SEQ ID NO: 47625 - DNA, 201 bp, Homo sapiens; identical to SEQ ID NO: 47612

SEQ ID NO: 47626 - DNA, 201 bp, Homo sapiens
tgagagcgagatttaactttctgagcatctgcagtacagtcttatcaactggttgtatatttttatattgtttttgtatttattaatttgaaaccaggacrttaaaaatgttagtattttaatcctgtaccaaatctgacatattatgcctgaatgactccactgtttttctctaatgcttgatttaggtagccttgtgtt

SEQ ID NO: 47627 - DNA, 201 bp, Homo sapiens
cctggacttcttccgaaagaccagccgcagctacccagaaatcctgacactcaagacatacctgcatacatatgagagcgagatttaactttctgagcatmtgcagtacagtcttatcaactggttgtatatttttatattgtttttgtatttattaatttgaaaccaggacattaaaaatgttagtattttaatcctgta

SEQ ID NO: 47628 - DNA, 201 bp, Homo sapiens; identical to SEQ ID NO: 47615

SEQ ID NO: 47629 - DNA, 201 bp, Homo sapiens; identical to SEQ ID NO: 47616

SEQ ID NO: 47630 - DNA, 201 bp, Homo sapiens; identical to SEQ ID NO: 47617

SEQ ID NO: 47631 - DNA, 201 bp, Homo sapiens; identical to SEQ ID NO: 47618

SEQ ID NO: 47632 - DNA, 201 bp, Homo sapiens; identical to SEQ ID NO: 47619

SEQ ID NO: 47633 - DNA, 201 bp, Homo sapiens; identical to SEQ ID NO: 47607

SEQ ID NO: 47634 - DNA, 201 bp, Homo sapiens; identical to SEQ ID NO: 47608

SEQ ID NO: 47635 - DNA, 201 bp, Homo sapiens; identical to SEQ ID NO: 47609

SEQ ID NO: 47636 - DNA, 201 bp, Homo sapiens; identical to SEQ ID NO: 47610

SEQ ID NO: 47637 - DNA, 201 bp, Homo sapiens; identical to SEQ ID NO: 47611

SEQ ID NO: 47638 - DNA, 201 bp, Homo sapiens; identical to SEQ ID NO: 47612

SEQ ID NO: 47639 - DNA, 201 bp, Homo sapiens; identical to SEQ ID NO: 47626

SEQ ID NO: 47640 - DNA, 201 bp, Homo sapiens; identical to SEQ ID NO: 47627

SEQ ID NO: 47641 - DNA, 201 bp, Homo sapiens; identical to SEQ ID NO: 47615

SEQ ID NO: 47642 - DNA, 201 bp, Homo sapiens; identical to SEQ ID NO: 47616

SEQ ID NO: 47643 - DNA, 201 bp, Homo sapiens; identical to SEQ ID NO: 47617

SEQ ID NO: 47644 - DNA, 201 bp, Homo sapiens; identical to SEQ ID NO: 47618

SEQ ID NO: 47645 - DNA, 201 bp, Homo sapiens; identical to SEQ ID NO: 47619

SEQ ID NO: 47646 - DNA, 201 bp, Homo sapiens; identical to SEQ ID NO: 47607

SEQ ID NO: 47647 - DNA, 201 bp, Homo sapiens; identical to SEQ ID NO: 47608

SEQ ID NO: 47648 - DNA, 201 bp, Homo sapiens; identical to SEQ ID NO: 47609

SEQ ID NO: 47649 - DNA, 201 bp, Homo sapiens; identical to SEQ ID NO: 47610

SEQ ID NO: 47650 - DNA, 201 bp, Homo sapiens; identical to SEQ ID NO: 47611

SEQ ID NO: 47651 - DNA, 201 bp, Homo sapiens; identical to SEQ ID NO: 47612

SEQ ID NO: 47652 - DNA, 201 bp, Homo sapiens; identical to SEQ ID NO: 47613

SEQ ID NO: 47653 - DNA, 201 bp, Homo sapiens; identical to SEQ ID NO: 47614

SEQ ID NO: 47654 - DNA, 201 bp, Homo sapiens; identical to SEQ ID NO: 47615

SEQ ID NO: 47655 - DNA, 201 bp, Homo sapiens; identical to SEQ ID NO: 47616

SEQ ID NO: 47656 - DNA, 201 bp, Homo sapiens; identical to SEQ ID NO: 47617

SEQ ID NO: 47657 - DNA, 201 bp, Homo sapiens; identical to SEQ ID NO: 47618

SEQ ID NO: 47658 - DNA, 201 bp, Homo sapiens; identical to SEQ ID NO: 47619

SEQ ID NO: 47659 - DNA, 201 bp, Homo sapiens; identical to SEQ ID NO: 47607

SEQ ID NO: 47660 - DNA, 201 bp, Homo sapiens; identical to SEQ ID NO: 47608

SEQ ID NO: 47661 - DNA, 201 bp, Homo sapiens; identical to SEQ ID NO: 47609

SEQ ID NO: 47662 - DNA, 201 bp, Homo sapiens; identical to SEQ ID NO: 47610

SEQ ID NO: 47663 - DNA, 201 bp, Homo sapiens; identical to SEQ ID NO: 47611

SEQ ID NO: 47664 - DNA, 201 bp, Homo sapiens; identical to SEQ ID NO: 47612

SEQ ID NO: 47665 - DNA, 201 bp, Homo sapiens; identical to SEQ ID NO: 47626

SEQ ID NO: 47666 - DNA, 201 bp, Homo sapiens; identical to SEQ ID NO: 47627

SEQ ID NO: 47667 - DNA, 201 bp, Homo sapiens; identical to SEQ ID NO: 47615

SEQ ID NO: 47668 - DNA, 201 bp, Homo sapiens; identical to SEQ ID NO: 47616

SEQ ID NO: 47669 - DNA, 201 bp, Homo sapiens; identical to SEQ ID NO: 47617

SEQ ID NO: 47670 - DNA, 201 bp, Homo sapiens; identical to SEQ ID NO: 47618

SEQ ID NO: 47671 - DNA, 201 bp, Homo sapiens; identical to SEQ ID NO: 47619

SEQ ID NO: 47672 - DNA, 201 bp, Homo sapiens
agattattgcacactttctaatacagcagtatcttaaagaagactacagttttacagcttatgctaccatttcgtatttgaaaataggacctaaagctaaycttctgaacaatgaggcacatgctattactatgcaagtgacaaagtccacgcagaactctttcagggctgaatcgtctcaaacttgtcattctgaacaag

SEQ ID NO: 47673 - DNA, 201 bp, Homo sapiens
tgcagcaaaactgagagtagcaggtgttgtggctcccacacttcctcgtgaagatctggagaagattattgcacactttctaatacagcagtatcttaaaraagactacagttttacagcttatgctaccatttcgtatttgaaaataggacctaaagctaatcttctgaacaatgaggcacatgctattactatgcaagt

SEQ ID NO: 47674 - DNA, 201 bp, Homo sapiens
ttacagcttatgctaccatttcgtatttgaaaataggacctaaagctaatcttctgaacaatgaggcacatgctattactatgcaagtgacaaagtccacrcagaactctttcagggctgaatcgtctcaaacttgtcattctgaacaaggtgataaaaagatggaggaaaaaaattcaggcaacttccagaagaaggctg

SEQ ID NO: 47675 - DNA, 201 bp, Homo sapiens
ccacacttcctcgtgaagatctggagaagattattgcacactttctaatacagcagtatcttaaagaagactacagttttacagcttatgctaccatttcktatttgaaaataggacctaaagctaatcttctgaacaatgaggcacatgctattactatgcaagtgacaaagtccacgcagaactctttcagggctgaat

SEQ ID NO: 47676 - DNA, 167 bp, Homo sapiens
actcccgagtagcggaaagatctgctcgaggcctgggtgctttggtgtcggagatccgagagtcggmgatcggagagtcggacacaggacagtcggacaccggacagtcaaacaccggagagttagactgggcttctcggtggggagaggctctgggataactactg

SEQ ID NO: 47677 - DNA, 201 bp, Homo sapiens
ttttgatgaagtatggaactcagaagcatgtaacaaaatgtgcgataactgctgtaaagacagtgcatttgaaagaaagaacataacagagtactgcagasatctaatcaagatcctgaagcaggcagaggaactgaatgaaaaactcactccattgaaactgattgattcttggatgggaaagggtgcagcaaaactgag

SEQ ID NO: 47678 - DNA, 201 bp, Homo sapiens
aggcctgggtgctttggtgtcggagatccgagagtcggagatcggagagtcggacacaggacagtcggacaccggacagtcaaacaccggagagttagacygggcttctcggtggggagaggctctgggataactactgttacagctttgaagggtcaagggaggattggccaccaaagcctgtttattagcagctgccat

SEQ ID NO: 47679 - DNA, 201 bp, Homo sapiens
cgtcgtgtgttgatggctcaacattttgatgaagtatggaactcagaagcatgtaacaaaatgtgcgataactgctgtaaagacagtgcatttgaaagaamgaacataacagagtactgcagagatctaatcaagatcctgaagcaggcagaggaactgaatgaaaaactcactccattgaaactgattgattcttggatg

SEQ ID NO: 47680 - DNA, 201 bp, Homo sapiens
gaataaagaagattttccatggtctggtaaagttaaagatattctgcaaaatgtctttaaactggaaaagttcagaccacttcagcttgaaactattaacrtaacaatggctggaaaggaggtatttcttgttatgcctacaggaggtggaaagagcttatgttaccagttaccagcattatgttcagatggttttacact

SEQ ID NO: 47681 - DNA, 201 bp, Homo sapiens; identical to SEQ ID NO: 47672

SEQ ID NO: 47682 - DNA, 201 bp, Homo sapiens; identical to SEQ ID NO: 47673

SEQ ID NO: 47683 - DNA, 201 bp, Homo sapiens; identical to SEQ ID NO: 47674

SEQ ID NO: 47684 - DNA, 201 bp, Homo sapiens; identical to SEQ ID NO: 47675

SEQ ID NO: 47685 - DNA, 167 bp, Homo sapiens; identical to SEQ ID NO: 47676

SEQ ID NO: 47686 - DNA, 201 bp, Homo sapiens; identical to SEQ ID NO: 47677

SEQ ID NO: 47687 - DNA, 201 bp, Homo sapiens; identical to SEQ ID NO: 47678

SEQ ID NO: 47688 - DNA, 201 bp, Homo sapiens; identical to SEQ ID NO: 47679

SEQ ID NO: 47689 - DNA, 201 bp, Homo sapiens; identical to SEQ ID NO: 47680

SEQ ID NO: 47690 - DNA, 201 bp, Homo sapiens; identical to SEQ ID NO: 47672

SEQ ID NO: 47691 - DNA, 201 bp, Homo sapiens; identical to SEQ ID NO: 47673

SEQ ID NO: 47692 - DNA, 201 bp, Homo sapiens; identical to SEQ ID NO: 47674

SEQ ID NO: 47693 - DNA, 201 bp, Homo sapiens; identical to SEQ ID NO: 47675

SEQ ID NO: 47694 - DNA, 161 bp, Homo sapiens
gagtagcggaaagatctgctcgaggcctgggtgctttggtgtcggagatccgagagtcggmgatcggagagtcggacacaggacagtcggacaccggacagtcaaacaccggagagttagactgggcttctcggtggggagaggctctgggataactactg

SEQ ID NO: 47695 - DNA, 201 bp, Homo sapiens; identical to SEQ ID NO: 47677

SEQ ID NO: 47696 - DNA, 201 bp, Homo sapiens
aggcctgggtgctttggtgtcggagatccgagagtcggagatcggagagtcggacacaggacagtcggacaccggacagtcaaacaccggagagttagacygggcttctcggtggggagaggctctgggataactactgttacagctttgaagggtcaagggtgtgcgctttttgtttcatccttccctttcctgctgcag

SEQ ID NO: 47697 - DNA, 201 bp, Homo sapiens; identical to SEQ ID NO: 47679

SEQ ID NO: 47698 - DNA, 201 bp, Homo sapiens; identical to SEQ ID NO: 47680

SEQ ID NO: 47699 - DNA, 201 bp, Homo sapiens; identical to SEQ ID NO: 47672

SEQ ID NO: 47700 - DNA, 201 bp, Homo sapiens; identical to SEQ ID NO: 47673

SEQ ID NO: 47701 - DNA, 201 bp, Homo sapiens; identical to SEQ ID NO: 47674

SEQ ID NO: 47702 - DNA, 201 bp, Homo sapiens; identical to SEQ ID NO: 47675

SEQ ID NO: 47703 - DNA, 152 bp, Homo sapiens
aaagatctgctcgaggcctgggtgctttggtgtcggagatccgagagtcggmgatcggagagtcggacacaggacagtcggacaccggacagtcaaacaccggagagttagactgggcttctcgggcgaggccggtctgtagcggatcactt

SEQ ID NO: 47704 - DNA, 201 bp, Homo sapiens; identical to SEQ ID NO: 47677

SEQ ID NO: 47705 - DNA, 201 bp, Homo sapiens
aggcctgggtgctttggtgtcggagatccgagagtcggagatcggagagtcggacacaggacagtcggacaccggacagtcaaacaccggagagttagacygggcttctcgggcgaggccggtctgtagcggatcacttcctttcgcccacacattggcggaggagaaaccggaaagttaatcactgccctgctctgagaa

SEQ ID NO: 47706 - DNA, 201 bp, Homo sapiens; identical to SEQ ID NO: 47679

SEQ ID NO: 47707 - DNA, 201 bp, Homo sapiens; identical to SEQ ID NO: 47680

SEQ ID NO: 47708 - DNA, 201 bp, Homo sapiens
agacgcagacgcttaggcaaggtgttcctctgcctgggcagtatggaggcagcatcccggcatcttccagccaccctcatgttactttagagggaaagccwcccaacagcagccaccaggctctcctgcagcatttattattgaaagaacaaatgcgacagcaaaagcttcttgtagctggtggagttcccttacatcctc

SEQ ID NO: 47709 - DNA, 161 bp, Homo sapiens
ggggaagagaggcacagacacagataggagaagggcaccggctggagccacttgcaggacwgagggtttttgcaacaaaaccctagcagcctgaagaactctaagccagatggggtggctggacgagagcagctcttggctcagcaaagaatgcacagtat

SEQ ID NO: 47710 - DNA, 201 bp, Homo sapiens
gccaagctccgctggctgcggttggcatggatggattagagaaacaccgtctcgtctccaggactcactcttcccctgctgcctctgttttacctcacccrgcaatggaccgccccctccagcctggctctgcaactggaattgcctatgaccccttgatgctgaaacaccagtgccgaattcaaggtcgaaaagccagcc

SEQ ID NO: 47711 - DNA, 201 bp, Homo sapiens
tcgcagagaacagcagcttcctcctctcagaggcaaagatagaggacgagaaagggcagtggcaagtacagaagtaaagcagaagcttcaagagttcctaytgagtaaatcagcaacgaaagacactccaactaatggaaaaaatcattccgtgagccgccatcccaagctctggtacacggctgcccaccacacatcatt

SEQ ID NO: 47712 - DNA, 186 bp, Homo sapiens
ggggaagagaggcacagacacagataggagaagggcaccggctggagccacttgcaggactgagggtttttgcaacaaaaccctascagcctgaagaactctaagccagatggggtggctggacgagagcagctcttggctcagcaaagaatgcacagtatgatcagctcagtggatgtgaagtca

SEQ ID NO: 47713 - DNA, 201 bp, Homo sapiens
atttgatgacactgtctatcaaaaaagagcaaatgaagcagatgcaaatgttagtgagaagtaatgtgcagcattatggtccaatcagatacaatattgtrtctacaattgcaaaaaacacagtaacaggatgaatattatctgatatcaagtcaaaatcagtttgaaaagaaggtgtatcatattttatattgtcactag

SEQ ID NO: 47714 - DNA, 201 bp, Homo sapiens; identical to SEQ ID NO: 47708

SEQ ID NO: 47715 - DNA, 201 bp, Homo sapiens
ttaaaaatgttactgctaaagatacattatccttttttaaaaagtctccattcaaattaaattaacataactagaagttagaaagtttaaaagttttccayataatgaaagtccttctgataatttgacaaatagctataataggaacactccctatcaccaacatattttggttagtatattccttcatattaaaatgac

SEQ ID NO: 47716 - DNA, 201 bp, Homo sapiens
agcaaccaggcagtcaccttgaggaagcagaggaagagcttcagggggaccaggcgatgcaggaagacagagcgccctctagtggcaacagcactaggagygacagcagtgcttgtgtggatgacacactgggacaagttggggctgtgaaggtcaaggaggaaccagtggacagtgatgaagatgctcagatccaggaaa

SEQ ID NO: 47717 - DNA, 201 bp, Homo sapiens; identical to SEQ ID NO: 47711

SEQ ID NO: 47718 - DNA, 201 bp, Homo sapiens
ggaatctggggagcaggctgcttttatgcaacaggtaataggcaaagatttagctccaggatttgtaattaaagtcattatctgaacatgaaatgcattgyaggtttggtaaatggatatgatttcctatcagtttatatttctctatgatttgagttcagtgtttaaggattctacctaatgcagatatatgtatatatc

SEQ ID NO: 47719 - DNA, 201 bp, Homo sapiens; identical to SEQ ID NO: 47713

SEQ ID NO: 47720 - DNA, 201 bp, Homo sapiens; identical to SEQ ID NO: 47708

SEQ ID NO: 47721 - DNA, 201 bp, Homo sapiens; identical to SEQ ID NO: 47715

SEQ ID NO: 47722 - DNA, 201 bp, Homo sapiens
accaggggaagactgtcagctacgattttctctagcctcaagaagactgagaccgagccaaactcctggccaacgtgctttgtggattcacagtgtagctygagaaaaatgtggatgtgaagtcagaagttcctgtgggcctggagcccatctcacctttagacctaaggacagacctcaggatgatgatgcccgtggtgg

SEQ ID NO: 47723 - DNA, 201 bp, Homo sapiens; identical to SEQ ID NO: 47716

SEQ ID NO: 47724 - DNA, 201 bp, Homo sapiens; identical to SEQ ID NO: 47711

SEQ ID NO: 47725 - DNA, 201 bp, Homo sapiens; identical to SEQ ID NO: 47718

SEQ ID NO: 47726 - DNA, 201 bp, Homo sapiens; identical to SEQ ID NO: 47713

SEQ ID NO: 47727 - DNA, 201 bp, Homo sapiens; identical to SEQ ID NO: 47708

SEQ ID NO: 47728 - DNA, 201 bp, Homo sapiens; identical to SEQ ID NO: 47715

SEQ ID NO: 47729 - DNA, 161 bp, Homo sapiens; identical to SEQ ID NO: 47709

SEQ ID NO: 47730 - DNA, 201 bp, Homo sapiens; identical to SEQ ID NO: 47716

SEQ ID NO: 47731 - DNA, 201 bp, Homo sapiens; identical to SEQ ID NO: 47711

SEQ ID NO: 47732 - DNA, 186 bp, Homo sapiens
ggggaagagaggcacagacacagataggagaagggcaccggctggagccacttgcaggactgagggtttttgcaacaaaaccctascagcctgaagaactctaagccagatggggtggctggacgagagcagctcttggctcagcaaagaatgcacagtatgatcagctcagttgaactatgggtg

SEQ ID NO: 47733 - DNA, 201 bp, Homo sapiens; identical to SEQ ID NO: 47718

SEQ ID NO: 47734 - DNA, 201 bp, Homo sapiens; identical to SEQ ID NO: 47713

SEQ ID NO: 47735 - DNA, 201 bp, Homo sapiens; identical to SEQ ID NO: 47708

SEQ ID NO: 47736 - DNA, 201 bp, Homo sapiens; identical to SEQ ID NO: 47715

SEQ ID NO: 47737 - DNA, 161 bp, Homo sapiens; identical to SEQ ID NO: 47709

SEQ ID NO: 47738 - DNA, 201 bp, Homo sapiens; identical to SEQ ID NO: 47716

SEQ ID NO: 47739 - DNA, 201 bp, Homo sapiens; identical to SEQ ID NO: 47711

SEQ ID NO: 47740 - DNA, 186 bp, Homo sapiens; identical to SEQ ID NO: 47712

SEQ ID NO: 47741 - DNA, 201 bp, Homo sapiens; identical to SEQ ID NO: 47718

SEQ ID NO: 47742 - DNA, 170 bp, Homo sapiens
tggagccacttgcagaagatattctccaccaaagcccgaatatgaatgctgttatttctttacagaagatcattgaaattcaaagtatgtctttaaagttytcttaaaaattctaagcaggtaaaactaactaaaattatattgaaaattatagtacaaagaaacattta

SEQ ID NO: 47743 - DNA, 201 bp, Homo sapiens; identical to SEQ ID NO: 47708

SEQ ID NO: 47744 - DNA, 161 bp, Homo sapiens; identical to SEQ ID NO: 47709

SEQ ID NO: 47745 - DNA, 201 bp, Homo sapiens
tgaagcctgtggccaaagagtttgatccagacatggtcttagtatctgctggatttgatgcattggaaggccacacccctcctctaggagggtacaaagtkacggcaaaatgttttggtcatttgacgaagcaattgatgacattggctgatggacgtgtggtgttggctctagaaggaggacatgatctcacagccatct

SEQ ID NO: 47746 - DNA, 201 bp, Homo sapiens; identical to SEQ ID NO: 47716

SEQ ID NO: 47747 - DNA, 186 bp, Homo sapiens; identical to SEQ ID NO: 47712

SEQ ID NO: 47748 - DNA, 201 bp, Homo sapiens
gccaagctccgctggctgcggttggcatggatggattagagaaacaccgtctcgtctccaggactcactcttcccctgctgcctctgttttacctcacccrgcaatggaccgccccctccagcctggctctgcaactggaattgcctatgaccccttgatgctgaaacaccagtgcgtttgtggcaattccaccacccacc

SEQ ID NO: 47749 - DNA, 201 bp, Homo sapiens; identical to SEQ ID NO: 47711

SEQ ID NO: 47750 - DNA, 201 bp, Homo sapiens; identical to SEQ ID NO: 47713

SEQ ID NO: 47751 - DNA, 201 bp, Homo sapiens; identical to SEQ ID NO: 47708

SEQ ID NO: 47752 - DNA, 201 bp, Homo sapiens; identical to SEQ ID NO: 47715

SEQ ID NO: 47753 - DNA, 161 bp, Homo sapiens; identical to SEQ ID NO: 47709

SEQ ID NO: 47754 - DNA, 201 bp, Homo sapiens; identical to SEQ ID NO: 47716

SEQ ID NO: 47755 - DNA, 201 bp, Homo sapiens; identical to SEQ ID NO: 47711

SEQ ID NO: 47756 - DNA, 186 bp, Homo sapiens; identical to SEQ ID NO: 47712

SEQ ID NO: 47757 - DNA, 201 bp, Homo sapiens; identical to SEQ ID NO: 47718

SEQ ID NO: 47758 - DNA, 170 bp, Homo sapiens; identical to SEQ ID NO: 47742

SEQ ID NO: 47759 - DNA, 201 bp, Homo sapiens; identical to SEQ ID NO: 47708

SEQ ID NO: 47760 - DNA, 201 bp, Homo sapiens; identical to SEQ ID NO: 47745

SEQ ID NO: 47761 - DNA, 201 bp, Homo sapiens; identical to SEQ ID NO: 47748

SEQ ID NO: 47762 - DNA, 201 bp, Homo sapiens; identical to SEQ ID NO: 47711

SEQ ID NO: 47763 - DNA, 170 bp, Homo sapiens; identical to SEQ ID NO: 47742

SEQ ID NO: 47764 - DNA, 201 bp, Homo sapiens; identical to SEQ ID NO: 47708

SEQ ID NO: 47765 - DNA, 201 bp, Homo sapiens; identical to SEQ ID NO: 47745

SEQ ID NO: 47766 - DNA, 201 bp, Homo sapiens; identical to SEQ ID NO: 47716

SEQ ID NO: 47767 - DNA, 201 bp, Homo sapiens; identical to SEQ ID NO: 47748

SEQ ID NO: 47768 - DNA, 201 bp, Homo sapiens; identical to SEQ ID NO: 47711

SEQ ID NO: 47769 - DNA, 192 bp, Homo sapiens
ctggagccacttgcagaagatattctccaccaaagcccgaatatgaatgctgttatttctttacagaagatcattgaaattcaaaaactgckggtgagcctatggaagaggagccagccttgtgaagtgccaagtccccctctgatatttcctgtgtgtgacatcattgtgtatccccccaccccagtaccc

SEQ ID NO: 47770 - DNA, 201 bp, Homo sapiens
ctgcggtaatcgcagcagctcggatgggatgagagctgggtgcagactgtgctccctttggttatggacacataactcctgggccagaggctaaaaccccrggacccctgctgtccttcccgcagcttcttctcggagtctcagggcaaaccctttcgagcagcgcctcccagtggccagaaggtgaaatgatggcagtgg

SEQ ID NO: 47771 - DNA, 198 bp, Homo sapiens
tggacacataactcctgggccagaggctaaaaccccgggacccctgctgtccttcccgcagcttcttctcggagtctcagggcaaaccctttcgagcagcrcctcccagtggccagaaggtgaaatgatggcagtggtgccgcctggtgaatgaattggttctgtgacccgggaagctgtgcttggctctgatttctt

SEQ ID NO: 47772 - DNA, 201 bp, Homo sapiens
accagaagcatttccagcacatccaggagggctgggcctggggttggggcactgttgcccaggtgtgggagggcagtggctttgggaggtacagggacgakgtgtcaaacagcgtcgcttctcccagtgagatggttctcctttgcctccgtctctttccccgattgatttttccaaatggggagtcgtggcttggtcctg

SEQ ID NO: 47773 - DNA, 201 bp, Homo sapiens
tcatgaagctgggcggcatgcactctccgttcagggcccgtttagaacctgaggaaccagccacggagccgtcggccttcatggagcgggatgctgggagygggctggtgatgtgtctctgcgagtggccagccctgctggtcagcagcacaggctggacagaggacgaagacttctccatcctgctggcagctttagaaa

SEQ ID NO: 47774 - DNA, 201 bp, Homo sapiens; identical to SEQ ID NO: 47770

SEQ ID NO: 47775 - DNA, 198 bp, Homo sapiens; identical to SEQ ID NO: 47771

SEQ ID NO: 47776 - DNA, 201 bp, Homo sapiens
tcatgaagctgggcggcatgcactctccgttcagggcccgtttagaacctgaggaaccagccacggagccgtcggccttcatggagcgggatgctgggagygggctggtgatgtgtctctgcgagtggccagccctgctggtcagcagcacaggctggacaggtctgcacgacccctggaacacttgggcttgaggacgaa

SEQ ID NO: 47777 - DNA, 201 bp, Homo sapiens
acacaaccttccttctctcgtctgtataacaggcaaagggcctctgacggagtattacagctgcctcatccaccagaagcatttccagcacatccaggtcwgcaccccttggctggaggccgaggactagcccctgcttctagggtcggtggacctgggtgtctgtctgcacacgttctccagtggcctggacctgcccat

SEQ ID NO: 47778 - DNA, 201 bp, Homo sapiens
cgggtgtagcggctctctgcgcaggccgagtgggcccagagaagcgaggaactccgcagctcgtcgacacgtctcgtctcctgtcccaattcagggcttgktgaggtgactcgcggtcgcgggtgactcgccggcaggacactgcctggaacgcctggagcgcctcccactgcagacgtctgtccgcctccagccgctctc

SEQ ID NO: 47779 - DNA, 106 bp, Homo sapiens
tcgaartgaatgagtcacttcccctcctcgggcgagctcctggctttgccccagcaagcgggaactcccaggatcaggaaggtcccagagaaactccccagggggg

SEQ ID NO: 47780 - DNA, 201 bp, Homo sapiens
caattcagggcttggtgaggtgactcgcggtcgcgggtgactcgccggcaggacactgcctggaacgcctggagcgcctcccactgcagacgtctgtccgyctccagccgctctcctctgacgggtcctgcctcagttggcggaatggcggccacgggagccaatgcagagaaagctgaaagtcacaatgattgccccgtc

SEQ ID NO: 47781 - DNA, 201 bp, Homo sapiens
ccggcaggacactgcctggaacgcctggagcgcctcccactgcagacgtctgtccgcctccagccgctctcctctgacgggtcctgcctcagttggcggartggcggccacgggagccaatgcagagaaagctgaaagtcacaatgattgccccgtcagacttttaaatccaaacatagcaaaaatgaaagaagatattct

SEQ ID NO: 47782 - DNA, 201 bp, Homo sapiens
gaccttgggttagtcctagagccgcttctagcccggtttcctccgccccagtggttccctcattcgagtgctccggcgcacagacccgcgccccgccgtcygcgagcctcccgagagccgtcccttcgtccggccctggagcattgcgtttgtcgccggtgtcgcagtgcgaggatggcgccgcgggtgtagcggctctct

SEQ ID NO: 47783 - DNA, 201 bp, Homo sapiens
actgcctggaacgcctggagcgcctcccactgcagacgtctgtccgcctccagccgctctcctctgacgggtcctgcctcagttggcggaatggcggccaygggagccaatgcagagaaagctgaaagtcacaatgattgccccgtcagacttttaaatccaaacatagcaaaaatgaaagaagatattctctatcatttc

SEQ ID NO: 47784 - DNA, 201 bp, Homo sapiens; identical to SEQ ID NO: 47778

SEQ ID NO: 47785 - DNA, 201 bp, Homo sapiens; identical to SEQ ID NO: 47780

SEQ ID NO: 47786 - DNA, 133 bp, Homo sapiens
tgctccggcgcacagacccgcgccccgccgtcygcgagcctcccgagagccgtcccttcgtccggccctggagcattgcgtttgtcgccggtgtcgcagtgcgaggatggcgccgcgggtgtagcggctctct

SEQ ID NO: 47787 - DNA, 201 bp, Homo sapiens; identical to SEQ ID NO: 47783

SEQ ID NO: 47788 - DNA, 201 bp, Homo sapiens; identical to SEQ ID NO: 47778

SEQ ID NO: 47789 - DNA, 201 bp, Homo sapiens; identical to SEQ ID NO: 47780

SEQ ID NO: 47790 - DNA, 201 bp, Homo sapiens
agctgagttcgccggcccagggcaggcggggcccgagcctagcggtaacccccgggcagggcggggccgctcgcagactccatatgagattcacctcgcargtggttccctcattcgagtgctccggcgcacagacccgcgccccgccgtccgcgagcctcccgagagccgtcccttcgtccggccctggagcattgcgtt

SEQ ID NO: 47791 - DNA, 201 bp, Homo sapiens
ccgggcagggcggggccgctcgcagactccatatgagattcacctcgcaagtggttccctcattcgagtgctccggcgcacagacccgcgccccgccgtcygcgagcctcccgagagccgtcccttcgtccggccctggagcattgcgtttgtcgccggtgtcgcagtgcgaggatggcgccgcgggtgtagcggctctct

SEQ ID NO: 47792 - DNA, 201 bp, Homo sapiens; identical to SEQ ID NO: 47783

SEQ ID NO: 47793 - DNA, 201 bp, Homo sapiens; identical to SEQ ID NO: 47778

SEQ ID NO: 47794 - DNA, 201 bp, Homo sapiens; identical to SEQ ID NO: 47780

SEQ ID NO: 47795 - DNA, 201 bp, Homo sapiens
atcctgcctggcggcgtgaccttgggttagtcctagagccgcttctagcccggtttcctccgccccagtgctccggcgcacagacccgcgccccgccgtcygcgagcctcccgagagccgtcccttcgtccggccctggagcattgcgtttgtcgccggtgtcgcagtgcgaggatggcgccgcgggtgtagcggctctct

SEQ ID NO: 47796 - DNA, 201 bp, Homo sapiens; identical to SEQ ID NO: 47783

SEQ ID NO: 47797 - DNA, 201 bp, Homo sapiens
cccttcgtccggccctggagcattgcgtttgtcgccggtgtcgcagtgcgaggatggcgccgcgggtgtagcggctctctgcgcaggccgagtgggcttgktgaggtgactcgcggtcgcgggtgactcgccggcaggacactgcctggaacgcctggagcgcctcccactgcagacgtctgtccgcctccagccgctctc

SEQ ID NO: 47798 - DNA, 201 bp, Homo sapiens
gccgagtgggcttggtgaggtgactcgcggtcgcgggtgactcgccggcaggacactgcctggaacgcctggagcgcctcccactgcagacgtctgtccgyctccagccgctctcctctgacgggtcctgcctcagttggcggaatggcggccacgggagccaatgcagagaaagctgaaagtcacaatgattgccccgtc

SEQ ID NO: 47799 - DNA, 201 bp, Homo sapiens
ggttagtcctagagccgcttctagcccggtttcctccgccccaggttaggaccacgtggggcggggccgctcgcagactccatatgagattcacctcgcargtggttccctcattcgagtgctccggcgcacagacccgcgccccgccgtccgcgagcctcccgagagccgtcccttcgtccggccctggagcattgcgtt

SEQ ID NO: 47800 - DNA, 201 bp, Homo sapiens
ccacgtggggcggggccgctcgcagactccatatgagattcacctcgcaagtggttccctcattcgagtgctccggcgcacagacccgcgccccgccgtcygcgagcctcccgagagccgtcccttcgtccggccctggagcattgcgtttgtcgccggtgtcgcagtgcgaggatggcgccgcgggtgtagcggctctct

SEQ ID NO: 47801 - DNA, 201 bp, Homo sapiens; identical to SEQ ID NO: 47783

SEQ ID NO: 47802 - DNA, 201 bp, Homo sapiens; identical to SEQ ID NO: 47778

SEQ ID NO: 47803 - DNA, 201 bp, Homo sapiens
caattcagggcttggtgaggtgactcgcggtcgcgggtgactcgccggcaggacactgcctggaacgcctggagcgcctcccactgcagacgtctgtccgyctccagccgctctcctctgacgtgattgccccgtcagacttttaaatccaaacatagcaaaaatgaaagaagatattctctatcatttcaatctcaccac

SEQ ID NO: 47804 - DNA, 201 bp, Homo sapiens; identical to SEQ ID NO: 47795

SEQ ID NO: 47805 - DNA, 201 bp, Homo sapiens
attctggactaatgagaaagacctgaagtgaaggctagagagttgatttttttttttttttggcatcctggaaatgatacaggaaacatattaagatagayacagaaatgtgttcaaccttccatcttggctagttgtggcgtttagtttgttttttgagacatggtcacgctgtgtcgccaaggctggagtgcagtggtg

SEQ ID NO: 47806 - DNA, 201 bp, Homo sapiens
caagtggctagtggctactgtattgacattctgggtctaggactagaaccagtggtctgtaacaaaagtactttctctttactctattaaatctagaattrgccgggcatggtcgctcatgcctgtaatcccagcactttgggaggccaaggcaggcagatcacttgaggtcaggcgtttgagaccagcctggtcaacatg

SEQ ID NO: 47807 - DNA, 201 bp, Homo sapiens
cattctgggtctaggactagaaccagtggtctgtaacaaaagtactttctctttactctattaaatctagaattagccgggcatggtcgctcatgcctgtratcccagcactttgggaggccaaggcaggcagatcacttgaggtcaggcgtttgagaccagcctggtcaacatggcgaaaccctgtctctacaaaaaaca

SEQ ID NO: 47808 - DNA, 201 bp, Homo sapiens
tgtattgacattctgggtctaggactagaaccagtggtctgtaacaaaagtactttctctttactctattaaatctagaattagccgggcatggtcgctcrtgcctgtaatcccagcactttgggaggccaaggcaggcagatcacttgaggtcaggcgtttgagaccagcctggtcaacatggcgaaaccctgtctctac

SEQ ID NO: 47809 - DNA, 201 bp, Homo sapiens
ttacaaggggacaattctggactaatgagaaagacctgaagtgaaggctagagagttgatttttttttttttttggcatcctggaaatgatacaggaaacmtattaagatagatacagaaatgtgttcaaccttccatcttggctagttgtggcgtttagtttgttttttgagacatggtcacgctgtgtcgccaaggctg

SEQ ID NO: 47810 - DNA, 201 bp, Homo sapiens
gtattcagggacagtgtagcaagtagcttacaaggggacaattctggactaatgagaaagacctgaagtgaaggctagagagttgatttttttttttttttggcatcctggaaatgatacaggaaacatattaagatagatacagaaatgtgttcaaccttccatcttggctagttgtggcgtttagtttgttttttgaga

SEQ ID NO: 47811 - DNA, 201 bp, Homo sapiens
atgaatgactgacagaatattttgttgggcagtcctgatttaaaactaagactggcttgtggttaaatgaatatgttcagtttttgaattttaatagtaaytccaattcagtaaatggtatcactgtttaccccttttaaagatatgattagacttcgttagtaatgttcaacttttcacaaagatggtgagtgccatctt

SEQ ID NO: 47812 - DNA, 201 bp, Homo sapiens
attctgggtctaggactagaaccagtggtctgtaacaaaagtactttctctttactctattaaatctagaattagccgggcatggtcgctcatgcctgtartcccagcactttgggaggccaaggcaggcagatcacttgaggtcaggcgtttgagaccagcctggtcaacatggcgaaaccctgtctctacaaaaaacat

SEQ ID NO: 47813 - DNA, 201 bp, Homo sapiens
tcttccgtcagtcgttctgacatcctagaaggagtttcatcaatcaccttgaaaccgacctggacgggtgacctcgtggtcgccccaggagatcacagaaktaaatatgggtgatgttgagaaaggcaagaagatttttattatgaagtgttcccagtgccacaccgttgaaaagggaggcaagcacaagactgggccaaa

SEQ ID NO: 47814 - DNA, 201 bp, Homo sapiens
atattttgttgggcagtcctgatttaaaactaagactggcttgtggttaaatgaatatgttcagtttttgaattttaatagtaactccaattcagtaaatrgtatcactgtttaccccttttaaagatatgattagacttcgttagtaatgttcaacttttcacaaagatggtgagtgccatcttaaaacttactggagat

SEQ ID NO: 47815 - DNA, 201 bp, Homo sapiens
catcctggaaatcctttaaagatttcagactttgaaaggccttgtagcagaggacttggtgactgtataaagttagtggtattcagggacagtgtagcaaytagcttacaaggggacaattctggactaatgagaaagacctgaagtgaaggctagagagttgatttttttttttttttggcatcctggaaatgatacagg

SEQ ID NO: 47816 - DNA, 201 bp, Homo sapiens
ggatattttgtagacttttgctgtccagtgtggtagccactaaccacatgtggctgttaagcccttgaaatatagctagtgtgactagaaagtattttatrttaaatttacataggcacaagtggctagtggctactgtattgacattctgggtctaggactagaaccagtggtctgtaacaaaagtactttctctttact

SEQ ID NO: 47817 - DNA, 201 bp, Homo sapiens
agtgtggtagccactaaccacatgtggctgttaagcccttgaaatatagctagtgtgactagaaagtattttattttaaatttacataggcacaagtggcragtggctactgtattgacattctgggtctaggactagaaccagtggtctgtaacaaaagtactttctctttactctattaaatctagaattagccgggca

SEQ ID NO: 47818 - DNA, 201 bp, Homo sapiens
tgctgtccagtgtggtagccactaaccacatgtggctgttaagcccttgaaatatagctagtgtgactagaaagtattttattttaaatttacataggcaraagtggctagtggctactgtattgacattctgggtctaggactagaaccagtggtctgtaacaaaagtactttctctttactctattaaatctagaatta

SEQ ID NO: 47819 - DNA, 201 bp, Homo sapiens
gaatttaaaaatgcatcctggaaatcctttaaagatttcagactttgaaaggccttgtagcagaggacttggtgactgtataaagttagtggtattcaggmacagtgtagcaagtagcttacaaggggacaattctggactaatgagaaagacctgaagtgaaggctagagagttgatttttttttttttttggcatcctg

SEQ ID NO: 47820 - DNA, 201 bp, Homo sapiens
tgaagtcctagtctgagttctggtggggaatttaaaaatgcatcctggaaatcctttaaagatttcagactttgaaaggccttgtagcagaggacttggttactgtataaagttagtggtattcagggacagtgtagcaagtagcttacaaggggacaattctggactaatgagaaagacctgaagtgaaggctagagagt

SEQ ID NO: 47821 - DNA, 201 bp, Homo sapiens
aaaaagctactaatgagtaataattggccactgccttatttattacaaaacagaaatgtctcatgacttttttatgtgtaccatcctttaatagatctcayacaccagaattcagatcatgaatgactgacagaatattttgttgggcagtcctgatttaaaactaagactggcttgtggttaaatgaatatgttcagttt

SEQ ID NO: 47822 - DNA, 201 bp, Homo sapiens
gtgtggtagccactaaccacatgtggctgttaagcccttgaaatatagctagtgtgactagaaagtattttattttaaatttacataggcacaagtggctrgtggctactgtattgacattctgggtctaggactagaaccagtggtctgtaacaaaagtactttctctttactctattaaatctagaattagccgggcat

SEQ ID NO: 47823 - DNA, 201 bp, Homo sapiens
gtaataattggccactgccttatttattacaaaacagaaatgtctcatgacttttttatgtgtaccatcctttaatagatctcatacaccagaattcagarcatgaatgactgacagaatattttgttgggcagtcctgatttaaaactaagactggcttgtggttaaatgaatatgttcagtttttgaattttaatagta

SEQ ID NO: 47824 - DNA, 201 bp, Homo sapiens; identical to SEQ ID NO: 47805

SEQ ID NO: 47825 - DNA, 201 bp, Homo sapiens; identical to SEQ ID NO: 47806

SEQ ID NO: 47826 - DNA, 201 bp, Homo sapiens; identical to SEQ ID NO: 47807

SEQ ID NO: 47827 - DNA, 201 bp, Homo sapiens; identical to SEQ ID NO: 47808

SEQ ID NO: 47828 - DNA, 201 bp, Homo sapiens; identical to SEQ ID NO: 47809

SEQ ID NO: 47829 - DNA, 201 bp, Homo sapiens; identical to SEQ ID NO: 47810

SEQ ID NO: 47830 - DNA, 201 bp, Homo sapiens; identical to SEQ ID NO: 47811

SEQ ID NO: 47831 - DNA, 201 bp, Homo sapiens; identical to SEQ ID NO: 47812

SEQ ID NO: 47832 - DNA, 172 bp, Homo sapiens
cacgtcagggcgcgggagcgcggagcgagtttggttgcacttacaccggtacttaagcgcggaccggcgtgyccttggacttagagagtggggacgtccggcttcggagcgggagtgttcgttgtgccagcgactaaaaagagaattaaatatgggtgatgttgagaaaggc

SEQ ID NO: 47833 - DNA, 201 bp, Homo sapiens
ccggtacttaagcgcggaccggcgtgtccttggacttagagagtggggacgtccggcttcggagcgggagtgttcgttgtgccagcgactaaaaagagaaktaaatatgggtgatgttgagaaaggcaagaagatttttattatgaagtgttcccagtgccacaccgttgaaaagggaggcaagcacaagactgggccaaa

SEQ ID NO: 47834 - DNA, 201 bp, Homo sapiens; identical to SEQ ID NO: 47814

SEQ ID NO: 47835 - DNA, 201 bp, Homo sapiens
ccactgccatcatttcaccttctggccactgggaggcgctgctcgaaagggtttgccctgagactccgagaagaagctgcgggaaggacagcaggggtccyggggttttagcctctggcccaggagttatgtgtccataaccaaagggagcacagtctgcacccagctctcatcccatccgagctgctgcgattaccgcag

SEQ ID NO: 47836 - DNA, 201 bp, Homo sapiens
gaatgttaatttccaaatcaggaaccacaaactgccctctaataagacatcagctatctaagcgtgtgggtgctccctttctgccagcagttctggttctkaagaaaatcgccatcaatcagacatgaaaactctggctccaaaaacagcattttctttgtgcaaataaaaagtgtgtatcaagtatgatgttcccccaac

SEQ ID NO: 47837 - DNA, 201 bp, Homo sapiens
gaaaagaaatcagagccaagcacagcttcccgggtcacagaaccaattcattcaccaggcggcaccactgccatcatttcaccttctggccactgggaggygctgctcgaaagggtttgccctgagactccgagaagaagctgcgggaaggacagcaggggtcccggggttttagcctctggcccaggagttatgtgtcca

SEQ ID NO: 47838 - DNA, 201 bp, Homo sapiens
ctaagcgtgtgggtgctccctttctgccagcagttctggttctgaagaaaatcgccatcaatcagacatgaaaactctggctccaaaaacagcattttctytgtgcaaataaaaagtgtgtatcaagtatgatgttcccccaactggacacactcggttcttcacaaagccaagcccgctgcagctgccacatccctgggc

SEQ ID NO: 47839 - DNA, 201 bp, Homo sapiens; identical to SEQ ID NO: 47835

SEQ ID NO: 47840 - DNA, 201 bp, Homo sapiens
gaatgttaatttccaaatcaggaaccacaaactgccctctaataagacatcagctatctaagcgtgtgggtgctccctttctgccagcagttctggttctkaagaaaatcgccatcaatcagacatgaaaactctggctccaaaaacagcattttctttgtgcaaataaaaagtgtgtatcaagtatgatgacacactcgg

SEQ ID NO: 47841 - DNA, 201 bp, Homo sapiens; identical to SEQ ID NO: 47837

SEQ ID NO: 47842 - DNA, 201 bp, Homo sapiens
ctaagcgtgtgggtgctccctttctgccagcagttctggttctgaagaaaatcgccatcaatcagacatgaaaactctggctccaaaaacagcattttctytgtgcaaataaaaagtgtgtatcaagtatgatgacacactcggttcctcacaaagccaagcccgctgcagctgccacatccgtggacacactcggttctt

SEQ ID NO: 47843 - DNA, 201 bp, Homo sapiens
tgttgtcactgcagcagacgtgccgtattgcccagaagccactgtgtcgctggtcggggtcctgcggaggctggctgcctaccgggagcaccaacgggctyctcaagtctatgtggcccttaccgtccgcaaccaagagacgtgccagctgttcaccaccgagctagctgagccaggatcagatgggaagtggaacctcgt

SEQ ID NO: 47844 - DNA, 201 bp, Homo sapiens
tcagccatgtggtggatggctacttgtcttctaagccacttgccttctgatcgctggactgactctctcgccctctcttggtgcagccctcgggaggctcrgtcacactctctgagagcacagccatcatctcccacggcatcacaggcctggtcacatgagatgctgccctctaccttgcagaatgggccattgagaacc

SEQ ID NO: 47845 - DNA, 201 bp, Homo sapiens
gtggcccagctggactgggatgtcgcgacagtccgtcagctctctgccatccagccagatgttgtcactgcagcagacgtgccgtattgcccagaagccaytgtgtcgctggtcggggtcctgcggaggctggctgcctaccgggagcaccaacgggctcctcaagtctatgtggcccttaccgtccgcaaccaagagacg

SEQ ID NO: 47846 - DNA, 178 bp, Homo sapiens
gatacaggatggattttattttttacttatttatttttttgagacagagtctcactgtgttgcccaggctggattacygtggcacacctggggaacagagctcaaaaaaaataagataaaacatagatacagaaaaccacaaaggaaaaacatagcatattgaatcatcacaaggcag

SEQ ID NO: 47847 - DNA, 201 bp, Homo sapiens
aagaaaatcgccatcaatcagacatgaaaactctggctccaaaaacagcattttctttgtgcaaataaaaagtgtgtatcaagtatgattggacacactckgttccccacaaagccaagcccgctgcagctgccacatccctggacacactcggttcctcacaaagccaagcccgctgcagctgccacatccgtggacaca

SEQ ID NO: 47848 - DNA, 201 bp, Homo sapiens
gcccaggctggattactgtggcacacctggggaacagagctcaaaaaaaataagataaaacatagatacagaaaaccacaaaggaaaaacatagcatattraatcatcacaaggcagccaccccttcatagccacacccggcccctggccaccactgacctgtgctctatcaccagaattccgttgtctcaggaatgttca

SEQ ID NO: 47849 - DNA, 201 bp, Homo sapiens
gaatgttaatttccaaatcaggaaccacaaactgccctctaataagacatcagctatctaagcgtgtgggtgctccctttctgccagcagttctggttctkaagaaaatcgccatcaatcagacatgaaaactctggctccaaaaacagcattttctttgtgcaaataaaaagtgtgtatcaagtatgattggacacactc

SEQ ID NO: 47850 - DNA, 201 bp, Homo sapiens; identical to SEQ ID NO: 47835

SEQ ID NO: 47851 - DNA, 201 bp, Homo sapiens; identical to SEQ ID NO: 47837

SEQ ID NO: 47852 - DNA, 201 bp, Homo sapiens
ctaagcgtgtgggtgctccctttctgccagcagttctggttctgaagaaaatcgccatcaatcagacatgaaaactctggctccaaaaacagcattttctytgtgcaaataaaaagtgtgtatcaagtatgattggacacactctgttccccacaaagccaagcccgctgcagctgccacatccctggacacactcggttc

SEQ ID NO: 47853 - DNA, 201 bp, Homo sapiens
catctcccacggcatcacaggcctggtcacatgagatgctgccctctaccttgcagaatgggccattgagaacccggcagccttctctcataggtgacctyggggtgcatggcagggcaccgaggcaggcttaccctggtgcagtcgcagacatggtcccctttcctcccgccaggactgtcctagagcttggcagtggcg

SEQ ID NO: 47854 - DNA, 201 bp, Homo sapiens
cagaactcatcaaaaagacgtgccgtattgcccagaagccactgtgtcgctggtcggggtcctgcggaggctggctgcctaccgggagcaccaacgggctyctcaagtctatgtggcccttaccgtccgcaaccaagagacgtgccagctgttcaccaccgagctagcaggccaggatcagatgggaagtggaacctcgtc

SEQ ID NO: 47855 - DNA, 201 bp, Homo sapiens
gaagcatcctgtgtgtgtgaagcaccggccgtcagtcaagtatgcccggtgctttctctcagaactcatcaaaaagacgtgccgtattgcccagaagccaytgtgtcgctggtcggggtcctgcggaggctggctgcctaccgggagcaccaacgggctcctcaagtctatgtggcccttaccgtccgcaaccaagagacg

SEQ ID NO: 47856 - DNA, 166 bp, Homo sapiens
tttgcggtagactgtgaagcatcctgtgtgtgtgaagcaccggccgtcagtcaagtatgcccggtkctttctctcagaactcatcaaaaagacgtgccgtattgcccagaagccactgtgtcgctggtcggggtcctgcggaggctggctgcctaccgggagcacc

SEQ ID NO: 47857 - DNA, 201 bp, Homo sapiens; identical to SEQ ID NO: 47847

SEQ ID NO: 47858 - DNA, 201 bp, Homo sapiens; identical to SEQ ID NO: 47835

SEQ ID NO: 47859 - DNA, 201 bp, Homo sapiens; identical to SEQ ID NO: 47849

SEQ ID NO: 47860 - DNA, 201 bp, Homo sapiens; identical to SEQ ID NO: 47837

SEQ ID NO: 47861 - DNA, 201 bp, Homo sapiens; identical to SEQ ID NO: 47852

SEQ ID NO: 47862 - DNA, 201 bp, Homo sapiens
tttttctctgttacatcagtaatattgttaaagtaatggatagaaccataacttacacatgaaagtcatatactagatccaatactatttagtttattatygaaattggaaggattcattgagcagcatagaagtttgtttacatgttactttgagatgctaggtatttgtggaattaaaaagaatcaggctcttttgtac

SEQ ID NO: 47863 - DNA, 201 bp, Homo sapiens
taaactctgccacttttttgtgttcaaaattttggtttttatgaagccagatggattgaagagttacataagcatttgaatgctctaatataaggctaatrattttctgttagtgtttgaatatcttcattcctctcaaattcataacagttctatttaactgaattaaataaccatatgaaaaatcttttgggtctcccc

SEQ ID NO: 47864 - DNA, 201 bp, Homo sapiens; identical to SEQ ID NO: 47862

SEQ ID NO: 47865 - DNA, 201 bp, Homo sapiens; identical to SEQ ID NO: 47863

SEQ ID NO: 47866 - DNA, 201 bp, Homo sapiens; identical to SEQ ID NO: 47862

SEQ ID NO: 47867 - DNA, 136 bp, Homo sapiens
tttaattcataataaattgatgcaatttcatacttaggaacatacaaaaggtaatgtaaactctgccacttttttttgaatgctctaatataaggctaatrattttctgttagtgtttgaatatcttcattcctct

SEQ ID NO: 47868 - DNA, 201 bp, Homo sapiens; identical to SEQ ID NO: 47862

SEQ ID NO: 47869 - DNA, 201 bp, Homo sapiens; identical to SEQ ID NO: 47863

SEQ ID NO: 47870 - DNA, 201 bp, Homo sapiens; identical to SEQ ID NO: 47862

SEQ ID NO: 47871 - DNA, 201 bp, Homo sapiens; identical to SEQ ID NO: 47863

SEQ ID NO: 47872 - DNA, 201 bp, Homo sapiens
cctcgacccccagaggagatcctagctgatgaattgccacagctggatagcccagaagtcttggtgaagacatccttcaggtttggtggattgcaactcartgtgttccttcttatttgcttgtggagttgtttcaatccagttagatgcatagtcagtgtggccagcaaattacttcatttctttgcactgaataaatta

SEQ ID NO: 47873 - DNA, 138 bp, Homo sapiens
caactcaatgtgttccttcttatttgcttgtggagttgtttcaatccagttagatgcatagtcagtgtggccagcaaattacttcatttctttgcactgartaaattaaaattgatgaaggagggttggaatcaatgc

SEQ ID NO: 47874 - DNA, 201 bp, Homo sapiens
gatcctagctgatgaattgccacagctggatagcccagaagtcttggtgaagacatccttcaggtttggtggattgcaactcaatgtgttccttcttattygcttgtggagttgtttcaatccagttagatgcatagtcagtgtggccagcaaattacttcatttctttgcactgaataaattaaaattgatgaaggaggg

SEQ ID NO: 47875 - DNA, 201 bp, Homo sapiens
gctcacagggaatgtcaaggagaagccaaggccaacaattgtccatgaccctcgacccccagaggagatcctagctgatgaattgccacagctggatagcycagaagtcttggtgaagacatccttcaggtttggtggattgcaactcaatgtgttccttcttatttgcttgtggagttgtttcaatccagttagatgcat

SEQ ID NO: 47876 - DNA, 201 bp, Homo sapiens
agatgagatcaccccattaaattcacctggcattatttatcctcccctgcagcctgagcttcctttgttaaaggaagctgcaaactgctgcatgcaagacracacaagcagtttggatggacaccccaagggagggtctaagtcacagaactgtctgtggaactccctcatcgatgggctcacagggaatgtcaaggagaa

SEQ ID NO: 47877 - DNA, 201 bp, Homo sapiens
cacagaactgtctgtggaactccctcatcgatgggctcacagggaatgtcaaggagaagccaaggccaacaattgtccatgaccctcgacccccagaggaratcctagctgatgaattgccacagctggatagcccagaagtcttggtgaagacatccttcaggtttggtggattgcaactcaatgtgttccttcttattt

SEQ ID NO: 47878 - DNA, 201 bp, Homo sapiens
ctggcaaagctgagaaaaagacgtctggagaaactaagaatcaagtcaatggaacacgggcaaacaaaagtgacaaccctcgtgggaaaaattccaaagcygagaagtcatcaggagaacagcaacagaatggtgacttcaaagatggcaaaaataagacagacaagaaggatcactctaacatcggaaatgattcaaaga

SEQ ID NO: 47879 - DNA, 201 bp, Homo sapiens
atggaacacgggcaaacaaaagtgacaaccctcgtgggaaaaattccaaagccgagaagtcatcaggagaacagcaacagaatggtgacttcaaagatggyaaaaataagacagacaagaaggatcactctaacatcggaaatgattcaaagaaaacagatgattcacaagagtaaaaaagacctcatagacaataaaaga

SEQ ID NO: 47880 - DNA, 201 bp, Homo sapiens
tcagccgtttcaagatccccatttctgcacttgtctcatttgtggaggccctggaagtgggatacagcaagcacaaaaatccttaccataacttaatgcaygctgccgatgttacacagacagtgcattacctcctctataagacaggagtggcgaactggctgacggagctggagatctttgctataatcttctcagctg

SEQ ID NO: 47881 - DNA, 201 bp, Homo sapiens
tagcatcagctcgtcagatgccaagcgatcaggtgtcaagacctctggttcagagggaagtgccccgatcaacaattctgtcatctccgttgactataagrgctttaaagctacttggacggaagtggtgcacatcaatcgggagagatggagggccaaggtacccaaagaggagaaggccaagaaggaagcagaggaaaa

SEQ ID NO: 47882 - DNA, 201 bp, Homo sapiens
gttttctccaatttcctttcagacttaaaattgttcttatgctttttttcccacttctgtaatacagaattctgtttgttttctaaaaaagattattctayaggaatctttatttgatggctaatttattttctctgtgcattcattagtataaacctgaatgttcagctggtgactgtactgttgagtgggaacccattg

SEQ ID NO: 47883 - DNA, 201 bp, Homo sapiens
gactcctggatacagaggatgagctcagtgacattcagtcagatgctgtgccttctgaggtccgagactggctggcctccaccttcacgcggcagatgggkatgatgctcaggaggagcgacgagaagccccggttcaagagcatcgttcacgcagtgcaggctgggatatttgtggagagaatgtatagacggacatcaa

SEQ ID NO: 47884 - DNA, 201 bp, Homo sapiens
tgttttctccaatttcctttcagacttaaaattgttcttatgctttttttcccacttctgtaatacagaattctgtttgttttctaaaaaagattattctrtaggaatctttatttgatggctaatttattttctctgtgcattcattagtataaacctgaatgttcagctggtgactgtactgttgagtgggaacccatt

SEQ ID NO: 47885 - DNA, 201 bp, Homo sapiens
tggctaatttattttctctgtgcattcattagtataaacctgaatgttcagctggtgactgtactgttgagtgggaacccattgtttccactggtagcatygataactaagtggttactgaaatttttaccactggctggacatcttcttttggatatctgtggttttatttcatcactcttctttttattcagtaaagtg

SEQ ID NO: 47886 - DNA, 201 bp, Homo sapiens
tataagaaaacgtcccagagagattacggtctttggtcaaacaattagagagaggggaagcttcagtggtagatcttaagaagaatttggaatatgcagcyacagtgcttgaatctgtgtatattgatgaaacaaggagactcctggatacagaggatgagctcagtgacattcagtcagatgctgtgccttctgaggtcc

SEQ ID NO: 47887 - DNA, 201 bp, Homo sapiens
cgcagaggagcagcaaaaggaaatggaagccaaaagccaggctgaagaaggcgcatctggcaaagctgagaaaaagacgtctggagaaactaagaatcaastcaatggaacacgggcaaacaaaagtgacaaccctcgtgggaaaaattccaaagccgagaagtcatcaggagaacagcaacagaatggtgacttcaaaga

SEQ ID NO: 47888 - DNA, 201 bp, Homo sapiens
agatccccatttctgcacttgtctcatttgtggaggccctggaagtgggatacagcaagcacaaaaatccttaccataacttaatgcacgctgccgatgtyacacagacagtgcattacctcctctataagacaggagtggcgaactggctgacggagctggagatctttgctataatcttctcagctgccatccatgact

SEQ ID NO: 47889 - DNA, 201 bp, Homo sapiens
aaggcgcatctggcaaagctgagaaaaagacgtctggagaaactaagaatcaagtcaatggaacacgggcaaacaaaagtgacaaccctcgtgggaaaaaytccaaagccgagaagtcatcaggagaacagcaacagaatggtgacttcaaagatggcaaaaataagacagacaagaaggatcactctaacatcggaaatg

SEQ ID NO: 47890 - DNA, 201 bp, Homo sapiens; identical to SEQ ID NO: 47878

SEQ ID NO: 47891 - DNA, 201 bp, Homo sapiens
atggaacacgggcaaacaaaagtgacaaccctcgtgggaaaaattccaaagccgagaagtcatcaggagaacagcaacagaatggtgacttcaaagatggyaaaaataagacagacaagaaggatcactctaacatcggaaatgattcaaagaaaacagatggcacaaaacagcgttctcacggctcaccagccccaagca

SEQ ID NO: 47892 - DNA, 201 bp, Homo sapiens; identical to SEQ ID NO: 47880

SEQ ID NO: 47893 - DNA, 201 bp, Homo sapiens; identical to SEQ ID NO: 47881

SEQ ID NO: 47894 - DNA, 201 bp, Homo sapiens
gctgttggagcaggtactatcctggttgactccaccaaggtgaaatgaaagttgtatgtgattttcctctttgttgttcttgtatagacttttcaattgctgtatgtgggatcagcccagacgccagcaacaaactagcaagaggggtgtttttatggtataagtctctaaaagtctaaattggaccaaaattaaaatgac

SEQ ID NO: 47895 - DNA, 201 bp, Homo sapiens
gctcacagggaatgtcaaggagaagccaaggccaacaattgtccatgaccctcgacccccagaggagatcctagctgatgaattgccacagctggatagcycagaagtcttggtgaagacatccttcagattacggtctttggtcaaacaattagagagaggggaagcttcagtggtagatcttaagaagaatttggaata

SEQ ID NO: 47896 - DNA, 201 bp, Homo sapiens; identical to SEQ ID NO: 47883

SEQ ID NO: 47897 - DNA, 101 bp, Homo sapiens
ttttgcactgcttataaaatgcctaccatgttttttgcataatggattgtatagaaatgcagattatattcttacagcaaataaaaagatgcttttaacar

SEQ ID NO: 47898 - DNA, 201 bp, Homo sapiens; identical to SEQ ID NO: 47887

SEQ ID NO: 47899 - DNA, 201 bp, Homo sapiens
tcttggtgaagacatccttcagattacggtctttggtcaaacaattagagagaggggaagcttcagtggtagatcttaagaagaatttggaatatgcagcyacagtgcttgaatctgtgtatattgatgaaacaaggagactcctggatacagaggatgagctcagtgacattcagtcagatgctgtgccttctgaggtcc

SEQ ID NO: 47900 - DNA, 201 bp, Homo sapiens; identical to SEQ ID NO: 47888

SEQ ID NO: 47901 - DNA, 201 bp, Homo sapiens; identical to SEQ ID NO: 47889

SEQ ID NO: 47902 - DNA, 201 bp, Homo sapiens
cacagaactgtctgtggaactccctcatcgatgggctcacagggaatgtcaaggagaagccaaggccaacaattgtccatgaccctcgacccccagaggaratcctagctgatgaattgccacagctggatagcccagaagtcttggtgaagacatccttcagattacggtctttggtcaaacaattagagagaggggaag

SEQ ID NO: 47903 - DNA, 151 bp, Homo sapiens
ttgcaaatgaagctggagacaagaatgccagaccactggcccgcttctctrggtctaagtcacagaactgtctgtggaactccctcatcgatgggctcacagggaatgtcaaggagaagccaaggccaacaattgtccatgaccctcgacc

SEQ ID NO: 47904 - DNA, 129 bp, Homo sapiens
gctcacagggaatgtcaaggagaagccaaggccaacaattgtccatgaccctcgacccccagaggagatcctagctgatgaattgccacagctggatagcycagaagtcttggtgaagacatccttcag

SEQ ID NO: 47905 - DNA, 163 bp, Homo sapiens
cacagaactgtctgtggaactccctcatcgatgggctcacagggaatgtcaaggagaagccaaggccaacaattgtccatgaccctcgacccccagaggaratcctagctgatgaattgccacagctggatagcccagaagtcttggtgaagacatccttcag

SEQ ID NO: 47906 - DNA, 201 bp, Homo sapiens; identical to SEQ ID NO: 47878

SEQ ID NO: 47907 - DNA, 201 bp, Homo sapiens; identical to SEQ ID NO: 47891

SEQ ID NO: 47908 - DNA, 201 bp, Homo sapiens; identical to SEQ ID NO: 47880

SEQ ID NO: 47909 - DNA, 201 bp, Homo sapiens; identical to SEQ ID NO: 47881

SEQ ID NO: 47910 - DNA, 201 bp, Homo sapiens; identical to SEQ ID NO: 47894

SEQ ID NO: 47911 - DNA, 201 bp, Homo sapiens; identical to SEQ ID NO: 47883

SEQ ID NO: 47912 - DNA, 201 bp, Homo sapiens; identical to SEQ ID NO: 47887

SEQ ID NO: 47913 - DNA, 201 bp, Homo sapiens; identical to SEQ ID NO: 47886

SEQ ID NO: 47914 - DNA, 201 bp, Homo sapiens; identical to SEQ ID NO: 47888

SEQ ID NO: 47915 - DNA, 201 bp, Homo sapiens; identical to SEQ ID NO: 47889

SEQ ID NO: 47916 - DNA, 165 bp, Homo sapiens
ggtgcatccggaccctcacccaggagaagccgatgcagccaatggccccgcacagcatgtccgcaagcatggccgggtacgagctggcagtggggaagtargcgaagaagtaggggctgtgccagtgcgtcacctgcatgggaggacagagcagctgctgaggag

SEQ ID NO: 47917 - DNA, 138 bp, Homo sapiens
agccgatgcagccaatggccccgcacagcatgtccgcaagcatggccgggtacgagctggcagtggggaagtaggcgaagaagtaggggctgtgccagtgygtcacctgcatgggaggacagagcagctgctgaggag

SEQ ID NO: 47918 - DNA, 201 bp, Homo sapiens
tttttttttgttcttgatggagattaagatgccttgaattgtctagggtgttctgtacttagaaagtaagagctctaagtacctttcctacattttctttwtttattaaacagatatcttcagtttaatgcaagagaacattttactgttgtacaatcatgttctggtggtttgattgtttacaggatattccaaaataaa

SEQ ID NO: 47919 - DNA, 201 bp, Homo sapiens
atagactgcctgctgaactggttaagtactactgcttctgggaaatactatttcaaaattctatgtattataataataaatttgtaagacattcattattstaccatcctaatgaaaactttcagaagtctttctttatccatggcatgcccagggttttacctgaatctgatacaggatctatataactttactaggact

SEQ ID NO: 47920 - DNA, 201 bp, Homo sapiens
cagcctcccaaagttctgggattacaggcatgagccgtcatgcctggcctctgagaacagtttctgactcattcagattaggtatactctcaagtccctgraaactgaaattttttttaactgtaaagagggtagtgtcatttcttttcttaaggtcaagtgacatagattttaatgtaatgcataatttaggtaagaaat

SEQ ID NO: 47921 - DNA, 201 bp, Homo sapiens
ctgatacaggatctatataactttactaggacttttgattgttgactccaggcttaggtatatcagaaggttctttttgccatttggcctgtggatgtctragaagatcattcacaatacatgtaaaattcaggtaggcctaaggaaaggccagcctgtagaaagcaaaatggcagtgtctgttctccactgttggaggca

SEQ ID NO: 47922 - DNA, 201 bp, Homo sapiens
ttttggattctttaaatatatattattctcatttagtgccctctttagccagaatctcattactgcttcatttttgtaataacatttaatttagatatttyccatatattggcactgctaaaatagaatatagcatctttcatatggtaggaaccaacaaggaaactttcctttaactccctttttacactttatggtaag

SEQ ID NO: 47923 - DNA, 201 bp, Homo sapiens
tctcatttgtatgcttatttttctgagaacattttttttttcccccagacagggtcttgcttcattgcccaggctggagtgcggtggcacaaacacgactygactgcagcctcaaccctctgggctcaagcagtcctcctgcctcagccccctgagtatctgggattgcaggcgtgcaccaccacgcctggctaatttttg

SEQ ID NO: 47924 - DNA, 201 bp, Homo sapiens
agtttatttctgtgtagctcaggctgtaatcttgaaagctgaggagatacccatgcctctcagactcattagctgggtgtcacattaccacctgcacattytgacccaccgcatcttaatatgttttgtcctcttggagaaactaggagtagaagtcaggatatggtaggtaagggggaaaaaggaaagacggcttgatag

SEQ ID NO: 47925 - DNA, 201 bp, Homo sapiens; identical to SEQ ID NO: 47918

SEQ ID NO: 47926 - DNA, 201 bp, Homo sapiens; identical to SEQ ID NO: 47919

SEQ ID NO: 47927 - DNA, 201 bp, Homo sapiens; identical to SEQ ID NO: 47920

SEQ ID NO: 47928 - DNA, 201 bp, Homo sapiens; identical to SEQ ID NO: 47921

SEQ ID NO: 47929 - DNA, 201 bp, Homo sapiens; identical to SEQ ID NO: 47922

SEQ ID NO: 47930 - DNA, 201 bp, Homo sapiens; identical to SEQ ID NO: 47923

SEQ ID NO: 47931 - DNA, 201 bp, Homo sapiens; identical to SEQ ID NO: 47924

SEQ ID NO: 47932 - DNA, 201 bp, Homo sapiens
agttcaaaaactgaaggactctgaagctgagctccagcggcgccatgagcaaatgaaaaagaatttggaagcacagcacaaagaattggaggaaaaacgtmgtcagtttgaggatgagaaagcaaactgggaagctcaacaacgtattttagaacaacagaactcttcaagaaccttggaaaagaacaagaagaaagggca

SEQ ID NO: 47933 - DNA, 201 bp, Homo sapiens; identical to SEQ ID NO: 47918

SEQ ID NO: 47934 - DNA, 201 bp, Homo sapiens; identical to SEQ ID NO: 47919

SEQ ID NO: 47935 - DNA, 201 bp, Homo sapiens; identical to SEQ ID NO: 47920

SEQ ID NO: 47936 - DNA, 201 bp, Homo sapiens; identical to SEQ ID NO: 47921

SEQ ID NO: 47937 - DNA, 201 bp, Homo sapiens; identical to SEQ ID NO: 47922

SEQ ID NO: 47938 - DNA, 201 bp, Homo sapiens; identical to SEQ ID NO: 47923

SEQ ID NO: 47939 - DNA, 201 bp, Homo sapiens; identical to SEQ ID NO: 47924

SEQ ID NO: 47940 - DNA, 201 bp, Homo sapiens
ctgttgcctcggctgtttctggtctgatgcacatcacagggcctgagaatggagatccagttcgcccaggagtagctatgactgatcttgccactggcctrtatgcatatggagctattatggctggattgatacaaaaatacaaaactgggaaaggactgttcattgattgtaacctactgtcatcccaggtggcgtgtt

SEQ ID NO: 47941 - DNA, 201 bp, Homo sapiens
tcgttatggagatggagcatccaactgtggggaagatttccgtcccaggcccagctgtgagatacagtaagttcaagatgtcagaggccaggccgcccccsctgctcgggcagcacacaacgcacatcctgaaggaggtcctgagatacgatgacagggccatcggggagctgctcagcgctggagtggtggaccaacatg

SEQ ID NO: 47942 - DNA, 201 bp, Homo sapiens
gcccagctgtgagatacagtaagttcaagatgtcagaggccaggccgcccccgctgctcgggcagcacacaacgcacatcctgaaggaggtcctgagataygatgacagggccatcggggagctgctcagcgctggagtggtggaccaacatgaaactcactgacaaaggaaaagggctcttcctcataacctcgatccga

SEQ ID NO: 47943 - DNA, 201 bp, Homo sapiens
caactgtggggaagatttccgtcccaggcccagctgtgagatacagtaagttcaagatgtcagaggccaggccgcccccgctgctcgggcagcacacaacrcacatcctgaaggaggtcctgagatacgatgacagggccatcggggagctgctcagcgctggagtggtggaccaacatgaaactcactgacaaaggaaaa

SEQ ID NO: 47944 - DNA, 201 bp, Homo sapiens
ctgacaaaggaaaagggctcttcctcataacctcgatccgaatacactggcaaaggcaacactttgcttggacccttctccccagttctgataccactaaraagaagatttagagtaactccagatttcttacatggcatctccagaatggctctggtattaatgaatctagtgccttttaaatgtatcccacgttttgtt

SEQ ID NO: 47945 - DNA, 201 bp, Homo sapiens
gcaacactttgcttggacccttctccccagttctgataccactaaaaagaagatttagagtaactccagatttcttacatggcatctccagaatggctctrgtattaatgaatctagtgccttttaaatgtatcccacgttttgttccctaccatcttttttttcagatgatgatttcattatggatttgtgggattttta

SEQ ID NO: 47946 - DNA, 118 bp, Homo sapiens
aatctagtgccttttaaatgtatcccacgttttgttccctaccatcttttttttcagatgatgatttcattatggatttgtgggatttttaaaaataaagwtttaatttttttcctgg

SEQ ID NO: 47947 - DNA, 201 bp, Homo sapiens
tgactgatcttgccactggcctgtatgcatatggagctattatggctggattgatacaaaaatacaaaactgggaaaggactgttcattgattgtaacctrctgtcatcccaggtggcgtgtttgtctcacatagctgcaaattatcttattggtcaaaaggaagcaaaacgttggggtacagctcatggcagtatcgttc

SEQ ID NO: 47948 - DNA, 201 bp, Homo sapiens
aggaaccagggcaaatcaacactggaaccagccagttgctcctctctggcccagctgtgagatacagtaagttcaagatgtcagaggccaggccgcccccsctgctcgggcagcacacaacgcacatcctgaaggaggtcctgagatacgatgacagggccatcggggagctgctcagcgctggagtggtggaccaacatg

SEQ ID NO: 47949 - DNA, 201 bp, Homo sapiens; identical to SEQ ID NO: 47942

SEQ ID NO: 47950 - DNA, 114 bp, Homo sapiens
atggggaaatactrtgggagttggcagctagaaacacaagttaggaaaggaaagagtgggaaattcagagaaagtgaagaatcacctaagctctgcaatgacagtggtcaagct

SEQ ID NO: 47951 - DNA, 201 bp, Homo sapiens
tacctgcatttctttagagcttaaatccaaacattgcctgttcggtgaaggctctgaaataaaaataaaagagcactttcaccttctcctcattgcttacrcctgctgtggcctcagaggagcaatagccttcatgggccacccagaagttggatataagaaaacagctctaaacccatcacgggaaggggagtactcagg

SEQ ID NO: 47952 - DNA, 201 bp, Homo sapiens
gattcttatgtggaatgtgccctctgtctacctgcatttctttagagcttaaatccaaacattgcctgttcggtgaaggctctgaaataaaaataaaagakcactttcaccttctcctcattgcttacgcctgctgtggcctcagaggagcaatagccttcatgggccacccagaagttggatataagaaaacagctctaa

SEQ ID NO: 47953 - DNA, 201 bp, Homo sapiens
ctggaaccagccagttgctcctctctggcccagctgtgagatacagtaagttcaagatgtcagaggccaggccgcccccgctgctcgggcagcacacaacrcacatcctgaaggaggtcctgagatacgatgacagggccatcggggagctgctcagcgctggagtggtggaccaacatgaaactcactgacaaaggaaaa

SEQ ID NO: 47954 - DNA, 201 bp, Homo sapiens; identical to SEQ ID NO: 47944

SEQ ID NO: 47955 - DNA, 201 bp, Homo sapiens; identical to SEQ ID NO: 47945

SEQ ID NO: 47956 - DNA, 118 bp, Homo sapiens; identical to SEQ ID NO: 47946

SEQ ID NO: 47957 - DNA, 201 bp, Homo sapiens; identical to SEQ ID NO: 47940

SEQ ID NO: 47958 - DNA, 201 bp, Homo sapiens
ttacttccctgaggaaacacagcctgtaagcggatgagttggaatcggatgcaagtttggaaggaagtatcctctccccaaatgtggggcagagagacgcytgggctgacctaattgttaaagcctcagtcagtgttatgctgaatttgtcgcttacatgtctgcacattactttcaattgaaagtagaaaaatgaaatag

SEQ ID NO: 47959 - DNA, 201 bp, Homo sapiens; identical to SEQ ID NO: 47947

SEQ ID NO: 47960 - DNA, 201 bp, Homo sapiens
gccgactggcattaaggctgtggatagcttggtgccaattggtcgtggtcagcatgagctcattattggtgaccgaaggactgggaaaacctcaattgctrttgacacaatcattaaccagaaacatttcaatgatagatctgaagaaaagaagaagctgtactgtatctatgttgctattggtcgaaagagatccactgt

SEQ ID NO: 47961 - DNA, 201 bp, Homo sapiens
agagtattttagagacgatggcaaatatactttggtcatctatgacgacttatccaaacaggctgtcgcttactgtcagatgtctctgttgctccaccgamccccctggtcgactatgaagcaggcggcaggtaccatgaagctggaattggctcaggatcgtgaggttgctgcttttgcccagtttggttctgacctcaa

SEQ ID NO: 47962 - DNA, 201 bp, Homo sapiens
gtcagctatggcctcagatgctgccctacttcagtacctggctccttactctgactgttccatgggagagtattttagagacgatggcaaatatactttgrtcatctatgacgacttatccaaacaggctgtcgcttactgtcagatgtctctgttgctccaccgaaccccctggtcgactatgaagcaggcggcaggtac

SEQ ID NO: 47963 - DNA, 201 bp, Homo sapiens
caccactgtggtgtcagctatggcctcagatgctgccctacttcagtacctggctccttactctgactgttccatgggagagtattttagagacgatggcmaatatactttggtcatctatgacgacttatccaaacaggctgtcgcttactgtcagatgtctctgttgctccaccgaaccccctggtcgactatgaagca

SEQ ID NO: 47964 - DNA, 201 bp, Homo sapiens
tgtgcgtctaactgagttgctgaagcaaggacagtatcctcccatggttactgaacaacaagtggctgttatctgtgcgggtggagagaatatagaggacrttccaaaggaagtgctgacagactgcgcccaccttgtgaaggccaatagcactcaaggctgcaagaacaacgttaatgtggtaaatactccacggtctaa

SEQ ID NO: 47965 - DNA, 201 bp, Homo sapiens
gcaatactagtgctccacggcgcgatgtgcttctagcccttgcactgcacctaggctcagggttcaaacggccagcccgaaaagcctgcctgccttctttytggaaacagcacgtccccggccgtgtgcctgcccctttctctactgagctagtccccaaaccaaaggcaagccccctcgggcctcgggggatggggccgg

SEQ ID NO: 47966 - DNA, 201 bp, Homo sapiens
gggcattgctggcctgtagctcctgttacccacccagagccaggcgccacactggaggctcccaggcgggagggcccaggcccacccacgggcgtctggcmggtcaagctcccagcctgggccgtggtctcctggggacgccgctggcctcccagcttaggcccaggtgccaggtgtcatggggtctcctgcccatcttcc

SEQ ID NO: 47967 - DNA, 201 bp, Homo sapiens
ggtttccttcccatctcacagcttagcttgtgcttctcaacaccaagtctttaagagcaataaaaactacaccatgaatgtttgaattttttttttttggsggggggagggtggattttgcttttcatccagaaggaaaaggggaggagagctcctttacattttttaaattaaattcataaatcccagaacagtcttttt

SEQ ID NO: 47968 - DNA, 201 bp, Homo sapiens
cagaaggcctgtcaggtgaagtcttcagcctcccacagcgcagggtcccagcatctccacgcgcgcccgtgggaggtgggtccggccggagaggcctcccrcggacgccgtctctccagaactccgcttccaagagggagcctttggctgctttctctccttaaacttagatcaaattttttggtttttaatcagttatct

SEQ ID NO: 47969 - DNA, 201 bp, Homo sapiens
ggagggagaacagggcagcctgtgggactctaggatgcttcagaagaagcgacggcaccgtcaaccctctgttttttaaaggtggttggagactgttaacrctgagctcattgacttctagagattttatttttactggttgatctcttggtggttttcaacttcctgctggaaactagaggtggggcaccccccaccccc

SEQ ID NO: 47970 - DNA, 201 bp, Homo sapiens
aactctgtagcccacagtccgtgctggccactgtcggggtgaggcacattctaggcctggcatcgctgatgccctctgcacccagtccttgagccaggccraggacaggaagggcattgctggcctgtagctcctgttacccacccagagccaggcgccacactggaggctcccaggcgggagggcccaggcccacccacg

SEQ ID NO: 47971 - DNA, 201 bp, Homo sapiens
ctgaagcaactctgtagcccacagtccgtgctggccactgtcggggtgaggcacattctaggcctggcatcgctgatgccctctgcacccagtccttgagycaggccgaggacaggaagggcattgctggcctgtagctcctgttacccacccagagccaggcgccacactggaggctcccaggcgggagggcccaggccc

SEQ ID NO: 47972 - DNA, 201 bp, Homo sapiens
agtgctcaggctgaagcaactctgtagcccacagtccgtgctggccactgtcggggtgaggcacattctaggcctggcatcgctgatgccctctgcacccrgtccttgagccaggccgaggacaggaagggcattgctggcctgtagctcctgttacccacccagagccaggcgccacactggaggctcccaggcgggagg

SEQ ID NO: 47973 - DNA, 201 bp, Homo sapiens
ctgtgtgtttcactcacgtgcaattgagtagctgttgccaggctgtccatgcctgttgtgactaccggttggggtcagatttggggtgaagaatgagtaastttctgcatgctttgtctctacctgagacacttctacaacaagccaagtataatctctccagccctgcagattttcacctgacttgttcagccccatgcg

SEQ ID NO: 47974 - DNA, 201 bp, Homo sapiens
gacaccatgcgagacacgcttgcagacactgttgttttggaaatgtgcttccctccatctgaaatctcatccctccacccgcccactcgggcagctgtgcygtgggcagggcatgcgctcccctggctgagcaccccagagattctcctgcaccttcctcatgccgcacgctgctcatccgtctccatgtgtgtttagatc

SEQ ID NO: 47975 - DNA, 201 bp, Homo sapiens
gacggccgggtcccgtcccccgggagcatcgctcggctcagcaccttggctcccagtgggggccccgtggagggcgcccgtagtgataagcacaccggcaygaacgtcaggtccattcctcgaagtcggagccctcactctgccctgtcctggggctggctgagggcgaacgccccacctcactttctagagccctgtctg

SEQ ID NO: 47976 - DNA, 201 bp, Homo sapiens
cactaacacctgcaaaatctttaaggaaaaaagctgaagggtacgaccatgcacatatgtgacctggaaaatgcaaatttagatcttttatgatttaattrttattgtttcccatagaagttccctccctttgaaattaatatataatgtataaattctgcactgagccatggcggagctgggcagcccctaggttagagt

SEQ ID NO: 47977 - DNA, 201 bp, Homo sapiens
ccgggtcccgtcccccgggagcatcgctcggctcagcaccttggctcccagtgggggccccgtggagggcgcccgtagtgataagcacaccggcacgaacrtcaggtccattcctcgaagtcggagccctcactctgccctgtcctggggctggctgagggcgaacgccccacctcactttctagagccctgtctgtccta

SEQ ID NO: 47978 - DNA, 201 bp, Homo sapiens
cccacgggcgtctggccggtcaagctcccagcctgggccgtggtctcctggggacgccgctggcctcccagcttaggcccaggtgccaggtgtcatggggwctcctgcccatcttcccaaggatgccattgctgtcttcatcgtcttcccccgtgtgagacactggttgtctggtactcggcgacagtgtaccagacgcgc

SEQ ID NO: 47979 - DNA, 201 bp, Homo sapiens
actaaattgtattacattaaactggagttacttgatacaatgaagaaatgcatctgatctacttgtatttattgtctcagaattgtacgttgtgacaatcraatgttacttgcctaaatgccaggaaattcaactggccttttaatcagcaagatcgccagcaagtactgtaactgtaaaggaaaatctctctctctggag

SEQ ID NO: 47980 - DNA, 201 bp, Homo sapiens
cttaacctggcccctcacctcttctgcaccccccgcccccgaaactgtctcgtaatgaatttctgctgtcctcctgggagtggacggccgggtcccgtccyccgggagcatcgctcggctcagcaccttggctcccagtgggggccccgtggagggcgcccgtagtgataagcacaccggcacgaacgtcaggtccattcc

SEQ ID NO: 47981 - DNA, 201 bp, Homo sapiens
ttttgttgcacaagtatttggacagaagtcgaactgtgaatgagatactgaaatgcactaaattgtattacattaaactggagttacttgatacaatgaaraaatgcatctgatctacttgtatttattgtctcagaattgtacgttgtgacaatcaaatgttacttgcctaaatgccaggaaattcaactggccttttaa

SEQ ID NO: 47982 - DNA, 201 bp, Homo sapiens
tattatacggatgtttccttttgtacacttcatttttacaagttttgctactcacaagctttatgtagtggaggatagaggtatttttggtctttagaagmttgtcggggtgagggctgctaacttacacttcagaggcctgtgtcccaaaggcctggctgcgtttgccgtgctgtgcgaggacctgtgtacacaggcagg

SEQ ID NO: 47983 - DNA, 201 bp, Homo sapiens
tcggggccaggatgcaaaaacaatttttgcgtaaaagatgtcacactgatctgctggagtggggtggacacatgaattcagttttatcatgaacactcgcsactggctgcttgttaattcagggataatggtggcattcttacaaactgctcgggaaatagaatgacgggaacacttttagggagcccaggaagttaccag

SEQ ID NO: 47984 - DNA, 201 bp, Homo sapiens
acaccgtggtcgaagggctgaggcgcctgtcggactaccccgagtacatgtggtttctcctgtactgcgaggggacgcgcttcacggagaccaagcaccgygttagcatggaggtggcggctgctaaggggcttcctgtcctcaagtaccacctgctgccgcggaccaagggcttcaccaccgcagtcaagtgcctccggg

SEQ ID NO: 47985 - DNA, 201 bp, Homo sapiens
agcgcggcggccagagcggggccgcggaggcgacgccggggacgcccgcgcgacgagcaggtggcggcggctgcaggctttgcaggacggctgtcctcagygaggggccgtgcacccgctcctgagcagcgccatgggcctgctggccttcctgaagacccagttcgtgctgcacctgctggtcggctttgtcttcgtggt

SEQ ID NO: 47986 - DNA, 201 bp, Homo sapiens
gcaggacggctgtcctcagcgaggggccgtgcacccgctcctgagcagcgccatgggcctgctggccttcctgaagacccagttcgtgctgcacctgctgrtcggctttgtcttcgtggtgagtggtctggtcatcaacttcgtccagctgtgcacgctggcgctctggccggtcagcaagcagctctaccgccgcctcaa

SEQ ID NO: 47987 - DNA, 201 bp, Homo sapiens
accacaacttcgagatcgacttcctctgtgggtggaccatgtgtgagcgcttcggagtgctggggagctccaaggtcctcgctaagaaggagctgctctaygtgcccctcatcggctggacgtggtactttctggagattgtgttctgcaagcggaagtgggaggaggaccgggacaccgtggtcgaagggctgaggcgcc

SEQ ID NO: 47988 - DNA, 201 bp, Homo sapiens
agaaggagctgctctacgtgcccctcatcggctggacgtggtactttctggagattgtgttctgcaagcggaagtgggaggaggaccgggacaccgtggtmgaagggctgaggcgcctgtcggactaccccgagtacatgtggtttctcctgtactgcgaggggacgcgcttcacggagaccaagcaccgcgttagcatgg

SEQ ID NO: 47989 - DNA, 201 bp, Homo sapiens; identical to SEQ ID NO: 47965

SEQ ID NO: 47990 - DNA, 201 bp, Homo sapiens; identical to SEQ ID NO: 47966

SEQ ID NO: 47991 - DNA, 201 bp, Homo sapiens; identical to SEQ ID NO: 47967

SEQ ID NO: 47992 - DNA, 201 bp, Homo sapiens; identical to SEQ ID NO: 47968

SEQ ID NO: 47993 - DNA, 201 bp, Homo sapiens; identical to SEQ ID NO: 47969

SEQ ID NO: 47994 - DNA, 201 bp, Homo sapiens; identical to SEQ ID NO: 47970

SEQ ID NO: 47995 - DNA, 201 bp, Homo sapiens; identical to SEQ ID NO: 47971

SEQ ID NO: 47996 - DNA, 201 bp, Homo sapiens; identical to SEQ ID NO: 47972

SEQ ID NO: 47997 - DNA, 201 bp, Homo sapiens; identical to SEQ ID NO: 47974

SEQ ID NO: 47998 - DNA, 201 bp, Homo sapiens; identical to SEQ ID NO: 47975

SEQ ID NO: 47999 - DNA, 201 bp, Homo sapiens; identical to SEQ ID NO: 47973

SEQ ID NO: 48000 - DNA, 201 bp, Homo sapiens; identical to SEQ ID NO: 47976

SEQ ID NO: 48001 - DNA, 201 bp, Homo sapiens; identical to SEQ ID NO: 47977

SEQ ID NO: 48002 - DNA, 201 bp, Homo sapiens; identical to SEQ ID NO: 47978

SEQ ID NO: 48003 - DNA, 201 bp, Homo sapiens; identical to SEQ ID NO: 47979

SEQ ID NO: 48004 - DNA, 201 bp, Homo sapiens; identical to SEQ ID NO: 47980

SEQ ID NO: 48005 - DNA, 201 bp, Homo sapiens; identical to SEQ ID NO: 47981

SEQ ID NO: 48006 - DNA, 201 bp, Homo sapiens; identical to SEQ ID NO: 47982

SEQ ID NO: 48007 - DNA, 201 bp, Homo sapiens; identical to SEQ ID NO: 47983

SEQ ID NO: 48008 - DNA, 201 bp, Homo sapiens; identical to SEQ ID NO: 47968

SEQ ID NO: 48009 - DNA, 201 bp, Homo sapiens; identical to SEQ ID NO: 47969

SEQ ID NO: 48010 - DNA, 201 bp, Homo sapiens; identical to SEQ ID NO: 47984

SEQ ID NO: 48011 - DNA, 201 bp, Homo sapiens; identical to SEQ ID NO: 47985

SEQ ID NO: 48012 - DNA, 201 bp, Homo sapiens; identical to SEQ ID NO: 47986

SEQ ID NO: 48013 - DNA, 201 bp, Homo sapiens; identical to SEQ ID NO: 47975

SEQ ID NO: 48014 - DNA, 201 bp, Homo sapiens; identical to SEQ ID NO: 47987

SEQ ID NO: 48015 - DNA, 201 bp, Homo sapiens; identical to SEQ ID NO: 47977

SEQ ID NO: 48016 - DNA, 201 bp, Homo sapiens; identical to SEQ ID NO: 47988

SEQ ID NO: 48017 - DNA, 201 bp, Homo sapiens; identical to SEQ ID NO: 47980

SEQ ID NO: 48018 - DNA, 201 bp, Homo sapiens; identical to SEQ ID NO: 47965

SEQ ID NO: 48019 - DNA, 201 bp, Homo sapiens; identical to SEQ ID NO: 47966

SEQ ID NO: 48020 - DNA, 201 bp, Homo sapiens; identical to SEQ ID NO: 47967

SEQ ID NO: 48021 - DNA, 201 bp, Homo sapiens; identical to SEQ ID NO: 47968

SEQ ID NO: 48022 - DNA, 201 bp, Homo sapiens; identical to SEQ ID NO: 47969

SEQ ID NO: 48023 - DNA, 201 bp, Homo sapiens; identical to SEQ ID NO: 47970

SEQ ID NO: 48024 - DNA, 201 bp, Homo sapiens; identical to SEQ ID NO: 47971

SEQ ID NO: 48025 - DNA, 201 bp, Homo sapiens; identical to SEQ ID NO: 47972

SEQ ID NO: 48026 - DNA, 201 bp, Homo sapiens; identical to SEQ ID NO: 47973

SEQ ID NO: 48027 - DNA, 201 bp, Homo sapiens; identical to SEQ ID NO: 47974

SEQ ID NO: 48028 - DNA, 201 bp, Homo sapiens; identical to SEQ ID NO: 47975

SEQ ID NO: 48029 - DNA, 201 bp, Homo sapiens; identical to SEQ ID NO: 47976

SEQ ID NO: 48030 - DNA, 201 bp, Homo sapiens; identical to SEQ ID NO: 47977

SEQ ID NO: 48031 - DNA, 201 bp, Homo sapiens; identical to SEQ ID NO: 47978

SEQ ID NO: 48032 - DNA, 201 bp, Homo sapiens; identical to SEQ ID NO: 47979

SEQ ID NO: 48033 - DNA, 201 bp, Homo sapiens; identical to SEQ ID NO: 47980

SEQ ID NO: 48034 - DNA, 201 bp, Homo sapiens; identical to SEQ ID NO: 47981

SEQ ID NO: 48035 - DNA, 201 bp, Homo sapiens; identical to SEQ ID NO: 47982

SEQ ID NO: 48036 - DNA, 201 bp, Homo sapiens; identical to SEQ ID NO: 47983

SEQ ID NO: 48037 - DNA, 201 bp, Homo sapiens; identical to SEQ ID NO: 47984

SEQ ID NO: 48038 - DNA, 201 bp, Homo sapiens
gagcccggagggcaggtgtctggcttgtccagccggaagccctgagggcagctgttcccactggctctgctgaccttgtgccttggacggctgtcctcagygaggggccgtgcacccgctcctgagcagcgccatgggcctgctggccttcctgaagacccagttcgtgctgcacctgctggtcggctttgtcttcgtggt

SEQ ID NO: 48039 - DNA, 201 bp, Homo sapiens
cttggacggctgtcctcagcgaggggccgtgcacccgctcctgagcagcgccatgggcctgctggccttcctgaagacccagttcgtgctgcacctgctgrtcggctttgtcttcgtggtgagtggtctggtcatcaacttcgtccagctgtgcacgctggcgctctggccggtcagcaagcagctctaccgccgcctcaa

SEQ ID NO: 48040 - DNA, 201 bp, Homo sapiens; identical to SEQ ID NO: 47987

SEQ ID NO: 48041 - DNA, 201 bp, Homo sapiens; identical to SEQ ID NO: 47988

SEQ ID NO: 48042 - DNA, 136 bp, Homo sapiens
cctgccctgttcactctggtgccatgaggcaggttcagtgattgattggtcttgcctgctgcagagtctgtatcattaatcagtgtcatcagtgtcctcasaagacactagcagagtccagggtgatgcgttcagc

SEQ ID NO: 48043 - DNA, 201 bp, Homo sapiens
ataggtcttggttcatgtggcaccagcaggcagcagcacgtcaccaggagcaggagtggcaaacagtggcctgtgcccaccaccgccacgggcggctcaaraaagctttctgcctctggagggaaagtgcccaagggctcagaacagagaggacgggcagggtgcgggcagcagaattccacatggcccagctcctgcgtt

SEQ ID NO: 48044 - DNA, 201 bp, Homo sapiens
ggggagcggagcggcagaagctgatgcgagcagacctgcaccaccagcacagcgtgctgcacagggcgctgcaggcatgggtgacttaccagggcagggtrcgaagcatcctccgggaggtggcagccagggagagccagcacaacaggcagctgctgcgcggggcattacgtcgctggaaagagaacaccatggcccgag

SEQ ID NO: 48045 - DNA, 201 bp, Homo sapiens
aacagaacacagttttaagtttgattttttttatttcaaaatgctttgcaattaaatgaattactgttcagaagtctcccacttttcatacaaaaatactrtgctactgatacagttgaaaaaattcaatgatgtctctcctgcaggagaaattcacagcatccccagggtcaacatgaaatctggccctgtccccgccac

SEQ ID NO: 48046 - DNA, 201 bp, Homo sapiens
gctgtgtcagtgcagatgtattaccgacagcaggaggactgtgccatctgggaggcccagaaggtgctggacaggggctgtctgcggacctggtttcagcrctggtgggactgcagccggaggtcagcccagcagagactgcagctggagagggcagtgcaacaccaccaccggcagctgctgctggaggggctggcccgg

SEQ ID NO: 48047 - DNA, 201 bp, Homo sapiens
atttctaaaggcctggcttgaatacctgcaagtccgcagagtgaagagacagcagaatgagatggctgagcgattccatcatgtcactgtgctccagatayacttctgtgactggcagcaggcctgggagcggagggagagcttgtacgctcaccatgcccaggtggagaaactggccaggaagatggccctgcggcgcgc

SEQ ID NO: 48048 - DNA, 201 bp, Homo sapiens
agcaactactgcactaccagaccaccaagcagaacctctggtcctgtcggcggcaagcgagcagcctgcgcaggtggctggagctgaacagagaggagccrgggcctgaggaccaggaagtagagcagcaggtgcagaaagagctggaacaggtggaaatgcagatccagctgctggcagaggagctccaggctcagcgcc

SEQ ID NO: 48049 - DNA, 201 bp, Homo sapiens
cacagcatccccagggtcaacatgaaatctggccctgtccccgccactgggggctccccaggcctgcgttcctgataaactgggacaggttttccaggcaytgaccaactatccaccaagggtcctctgcctccaagacagaccctgaatcaatagcagcaactttcccatatttcatgtagggatatgtggagggggaca

SEQ ID NO: 48050 - DNA, 201 bp, Homo sapiens
tgcgttgggcctggagccagtggagggagtgcctggccctgcggggagcggagcggcagaagctgatgcgagcagacctgcaccaccagcacagcgtgctscacagggcgctgcaggcatgggtgacttaccagggcagggtgcgaagcatcctccgggaggtggcagccagggagagccagcacaacaggcagctgctgc

SEQ ID NO: 48051 - DNA, 201 bp, Homo sapiens
tgtggcaccagcaggcagcagcacgtcaccaggagcaggagtggcaaacagtggcctgtgcccaccaccgccacgggcggctcaagaaagctttctgcctytggagggaaagtgcccaagggctcagaacagagaggacgggcagggtgcgggcagcagaattccacatggcccagctcctgcgttgggcctggagccagt

SEQ ID NO: 48052 - DNA, 201 bp, Homo sapiens
ggtgcgaagcatcctccgggaggtggcagccagggagagccagcacaacaggcagctgctgcgcggggcattacgtcgctggaaagagaacaccatggccsgagtggatgaagccaaaaaaacctttcaagcaagtactcattacagaaggaccatatgttccaaggtcctggtccagtggcgggaagctgtgtcagtgca

SEQ ID NO: 48053 - DNA, 201 bp, Homo sapiens
cctgcaagtccgcagagtgaagagacagcagaatgagatggctgagcgattccatcatgtcactgtgctccagatacacttctgtgactggcagcaggccygggagcggagggagagcttgtacgctcaccatgcccaggtggagaaactggccaggaagatggccctgcggcgcgcctttactcactggaaacactacat

SEQ ID NO: 48054 - DNA, 201 bp, Homo sapiens
tgacgcggcccttcctggcagaggccccgacagcactggtcccacacagccccctgcctggggccctgtcaagcgcccctggcccgaagcagcccccgacrgcaagcacaggcccggagctgctgctgctgcctctttcctccttcatgccctgcggggcggctgcaccagccagggtgtcagcacagcgggctactccta

SEQ ID NO: 48055 - DNA, 201 bp, Homo sapiens
acgagtggaaactctgtgttcgagctgactgtcactacaggtattacctgtacaacctgatgttccagacgtggaagacctatgtgcgtcagcagcaggaratgaggaacaagtacattagagccgaggttcatgatgcaaagcaaaagatgcgacaggcctggaagtcctggttgatctacgtggttgttcgtaggacca

SEQ ID NO: 48056 - DNA, 154 bp, Homo sapiens
agctgggcctactacctgcctgccctgttcactctggtgccatgaggcaggttcagtgattgattggtcttgcctgctgcagagtctgtatcattaatcartgtcatcagtgtcctcagaagacactagcagagtccagggtgatgcgttcagc

SEQ ID NO: 48057 - DNA, 201 bp, Homo sapiens
gcacagggcgctgcaggcatgggtgacttaccagggcagggtgcgaagcatcctccgggaggtggcagccagggagagccagcacaacaggcagctgctgygcggggcattacgtcgctggaaagagaacaccatggcccgagtggatgaagccaaaaaaacctttcaagcaagtactcattacagaaggaccatatgttc

SEQ ID NO: 48058 - DNA, 201 bp, Homo sapiens
gagacattagagaagcaagtattttctctctggaggcagaagatgtttcagcatcgagaaaaccgcctggcagagagaatggccatccttcacgcagagcracagcttctgtataggtcttggttcatgtggcaccagcaggcagcagcacgtcaccaggagcaggagtggcaaacagtggcctgtgcccaccaccgccac

SEQ ID NO: 48059 - DNA, 201 bp, Homo sapiens
ggcacagccagctgtatttttgctttagagccctaaaagacaatgtgacccacgctcatctccagcaaataagaaggaatcttgctcaccagcagcatggkgtcacgctgctgcacaggttctggaacctctggcggtctcagattgagcagaaaaaggaaagagagctgctccccttactgcatgctgcctgggaccact

SEQ ID NO: 48060 - DNA, 201 bp, Homo sapiens
tgcagccggaggtcagcccagcagagactgcagctggagagggcagtgcaacaccaccaccggcagctgctgctggaggggctggcccggtggaagacgcwccatctgcagtgtgtcaggaagaggctcctgcacaggcagagcacccaactgctggcacagagactcagccggacctgcttccgccagtggagacaacag

SEQ ID NO: 48061 - DNA, 201 bp, Homo sapiens
ctggtcccacacagccccctgcctggggccctgtcaagcgcccctggcccgaagcagcccccgacggcaagcacaggcccggagctgctgctgctgcctcyttcctccttcatgccctgcggggcggctgcaccagccagggtgtcagcacagcgggctactcctagggataagcccccggtcccctcatccctggccagt

SEQ ID NO: 48062 - DNA, 201 bp, Homo sapiens
gtcgctggaaagagaacaccatggcccgagtggatgaagccaaaaaaacctttcaagcaagtactcattacagaaggaccatatgttccaaggtcctggtscagtggcgggaagctgtgtcagtgcagatgtattaccgacagcaggaggactgtgccatctgggaggcccagaaggtgctggacaggggctgtctgcgga

SEQ ID NO: 48063 - DNA, 201 bp, Homo sapiens
ttggtcttgcctgctgcagaggacctggccagctccagaagggtcactcatcaggtcctgcaaaggtctgtatcattaatcagtgtcatcagtgtcctcasaagacactagcagagtccagggtgatgcgttcagccacaagcacaaagactgctttttctaaagagcaggatgaggtgaatgtgggaacggaaagcagtt

SEQ ID NO: 48064 - DNA, 201 bp, Homo sapiens; identical to SEQ ID NO: 48043

SEQ ID NO: 48065 - DNA, 201 bp, Homo sapiens; identical to SEQ ID NO: 48044

SEQ ID NO: 48066 - DNA, 201 bp, Homo sapiens; identical to SEQ ID NO: 48045

SEQ ID NO: 48067 - DNA, 201 bp, Homo sapiens; identical to SEQ ID NO: 48046

SEQ ID NO: 48068 - DNA, 201 bp, Homo sapiens; identical to SEQ ID NO: 48047

SEQ ID NO: 48069 - DNA, 189 bp, Homo sapiens
catcaggtcctgcaaaggtctgtatcattaatcagtgtcatcagtgtcctcagaagacactagcagagtccagggtgatgcgttcagccacaagcacaaaractgctttttctaaagagcaggatgaggtgaatgtgggaacggaaagcagttgtcacgaaggctgtgtggctctgctgggggagaggc

SEQ ID NO: 48070 - DNA, 201 bp, Homo sapiens; identical to SEQ ID NO: 48048

SEQ ID NO: 48071 - DNA, 201 bp, Homo sapiens; identical to SEQ ID NO: 48049

SEQ ID NO: 48072 - DNA, 201 bp, Homo sapiens; identical to SEQ ID NO: 48050

SEQ ID NO: 48073 - DNA, 201 bp, Homo sapiens; identical to SEQ ID NO: 48051

SEQ ID NO: 48074 - DNA, 201 bp, Homo sapiens; identical to SEQ ID NO: 48052

SEQ ID NO: 48075 - DNA, 201 bp, Homo sapiens; identical to SEQ ID NO: 48053

SEQ ID NO: 48076 - DNA, 201 bp, Homo sapiens; identical to SEQ ID NO: 48054

SEQ ID NO: 48077 - DNA, 201 bp, Homo sapiens; identical to SEQ ID NO: 48055

SEQ ID NO: 48078 - DNA, 201 bp, Homo sapiens
ggcaggttcagtgattgattggtcttgcctgctgcagaggacctggccagctccagaagggtcactcatcaggtcctgcaaaggtctgtatcattaatcartgtcatcagtgtcctcagaagacactagcagagtccagggtgatgcgttcagccacaagcacaaagactgctttttctaaagagcaggatgaggtgaatg

SEQ ID NO: 48079 - DNA, 201 bp, Homo sapiens; identical to SEQ ID NO: 48058

SEQ ID NO: 48080 - DNA, 201 bp, Homo sapiens; identical to SEQ ID NO: 48057

SEQ ID NO: 48081 - DNA, 201 bp, Homo sapiens; identical to SEQ ID NO: 48060

SEQ ID NO: 48082 - DNA, 201 bp, Homo sapiens; identical to SEQ ID NO: 48061

SEQ ID NO: 48083 - DNA, 201 bp, Homo sapiens; identical to SEQ ID NO: 48062

SEQ ID NO: 48084 - DNA, 136 bp, Homo sapiens; identical to SEQ ID NO: 48042

SEQ ID NO: 48085 - DNA, 201 bp, Homo sapiens; identical to SEQ ID NO: 48043

SEQ ID NO: 48086 - DNA, 201 bp, Homo sapiens; identical to SEQ ID NO: 48044

SEQ ID NO: 48087 - DNA, 201 bp, Homo sapiens; identical to SEQ ID NO: 48045

SEQ ID NO: 48088 - DNA, 201 bp, Homo sapiens; identical to SEQ ID NO: 48046

SEQ ID NO: 48089 - DNA, 201 bp, Homo sapiens; identical to SEQ ID NO: 48047

SEQ ID NO: 48090 - DNA, 201 bp, Homo sapiens; identical to SEQ ID NO: 48048

SEQ ID NO: 48091 - DNA, 201 bp, Homo sapiens; identical to SEQ ID NO: 48049

SEQ ID NO: 48092 - DNA, 201 bp, Homo sapiens; identical to SEQ ID NO: 48050

SEQ ID NO: 48093 - DNA, 201 bp, Homo sapiens; identical to SEQ ID NO: 48051

SEQ ID NO: 48094 - DNA, 201 bp, Homo sapiens; identical to SEQ ID NO: 48052

SEQ ID NO: 48095 - DNA, 201 bp, Homo sapiens; identical to SEQ ID NO: 48053

SEQ ID NO: 48096 - DNA, 201 bp, Homo sapiens; identical to SEQ ID NO: 48054

SEQ ID NO: 48097 - DNA, 201 bp, Homo sapiens; identical to SEQ ID NO: 48055

SEQ ID NO: 48098 - DNA, 154 bp, Homo sapiens; identical to SEQ ID NO: 48056

SEQ ID NO: 48099 - DNA, 201 bp, Homo sapiens; identical to SEQ ID NO: 48058

SEQ ID NO: 48100 - DNA, 201 bp, Homo sapiens; identical to SEQ ID NO: 48057

SEQ ID NO: 48101 - DNA, 201 bp, Homo sapiens; identical to SEQ ID NO: 48060

SEQ ID NO: 48102 - DNA, 201 bp, Homo sapiens; identical to SEQ ID NO: 48061

SEQ ID NO: 48103 - DNA, 201 bp, Homo sapiens; identical to SEQ ID NO: 48062

SEQ ID NO: 48104 - DNA, 201 bp, Homo sapiens
aactgctttccgttcccacattcacctcatcctgctctttagaaaaagcagtctttgtgcttgtggctgaacgcatcaccctggactctgctagtgtcttstgaggacactgatgacactgattaatgatacagacctttgcaggacctgatgagtgacccttctggagctggccaggtcctctgcagcaggcaagaccaa

SEQ ID NO: 48105 - DNA, 189 bp, Homo sapiens
gtggcggggacagggccagatttcatgttgaccctggggatgctgtgaatttctcctgcaggagagacatcattgaattttttcaactgtatcagtagcayagtatttttgtatgaaaagtgggagacttctgaacagtaattcatttaattgcaaagcattttgaaataaaaaaaatcaaacttaaaa

SEQ ID NO: 48106 - DNA, 201 bp, Homo sapiens
tgagggtcttttcaagagggaggcccatgaggccatccaggtaagggcctgcctcagcgtggttgggagtctgaccaggtaggacttgaatgattcggctmccacctgttccagaggtgcagacaagaggtggcgagagcccccatcatgcccctcaacctatcccgttccttctgcctacaaataaaaagtgcaggctgg

SEQ ID NO: 48107 - DNA, 201 bp, Homo sapiens
cagactgtggatgcctctcccccagcagagccacacagccttcgtgacaactgctttccgttcccacattcacctcatcctgctctttagaaaaagcagtytttgtgcttgtggctgaacgcatcaccctggactctgctagtgtcttctgaggacactgatgacactgattaatgatacagacctttgcaggacctgatg

SEQ ID NO: 48108 - DNA, 201 bp, Homo sapiens
ccctccctgcgccggcccatgatgtgtcagtcagaggcgcggcaaggaccagagctccgcgcggcgaaatggttgcacttcccccagctggccctgaggcrgaggctggggcagctgagctgcatgtccagacccgctctgaaactgcgctcctggcccttgaccgtcctctactacctcctgcccttcggcgccctcaga

SEQ ID NO: 48109 - DNA, 201 bp, Homo sapiens
tgtcgttttttcttgctgctcctccccccatcacctgagctgttttctgttggccccttttgttttttggccttaacgctcctgctgcacagggtgaggtrcctccttggcacagactgtggatgcctctcccccagcagagccacacagccttcgtgacaactgctttccgttcccacattcacctcatcctgctcttta

SEQ ID NO: 48110 - DNA, 201 bp, Homo sapiens
gggggccaccaacgtgggctccattcgcatctactttgaccgggacctgcacacaaacagcccaaggcacagcaagggctcctacaatgacttcagcttcstgacgcacaccaatagagagggcgtccccatgcgtaagggcgagcacctgggcgagttcaacctgggctccaccatcgtgctcatcttcgaggcccccaa

SEQ ID NO: 48111 - DNA, 201 bp, Homo sapiens
cattcacctcatcctgctctttagaaaaagcagtctttgtgcttgtggctgaacgcatcaccctggactctgctagtgtcttctgaggacactgatgacaytgattaatgatacagacctttgcaggacctgatgagtgacccttctggagctggccaggtcctctgcagcaggcaagaccaatcaatcactgaacctgcc

SEQ ID NO: 48112 - DNA, 201 bp, Homo sapiens
tcccaccggcgccacttcccaggctccctgatgtcagtgaaccctggcatggctcgctggatcaaagagctcttctgccataacgagcgggtggtcctgaygggggactggaaacatggcttcttctcactgacagctgtgggggccaccaacgtgggctccattcgcatctactttgaccgggacctgcacacaaacagc

SEQ ID NO: 48113 - DNA, 201 bp, Homo sapiens
tgggggccaccaacgtgggctccattcgcatctactttgaccgggacctgcacacaaacagcccaaggcacagcaagggctcctacaatgacttcagcttygtgacgcacaccaatagagagggcgtccccatgcgtaagggcgagcacctgggcgagttcaacctgggctccaccatcgtgctcatcttcgaggccccca

SEQ ID NO: 48114 - DNA, 201 bp, Homo sapiens
tcaatttccagctgaaaacaggacagaaaatccgctttggggaagccctgggctcgctctagagtctctttcctgattatggctgctaagggatcttttcyaaacagagtgagggtcttttcaagagggaggcccatgaggccatccaggtaagggcctgcctcagcgtggttgggagtctgaccaggtaggacttgaatg

SEQ ID NO: 48115 - DNA, 201 bp, Homo sapiens
tgtccccctccacatatccctacatgaaatatgggaaagttgctgctattgattcagggtctgtcttggaggcagaggacccttggtggatagttggtcartgcctggaaaacctgtcccagtttatcaggaacgcaggcctggggagcccccagtggcggggacagggccagatttcatgttgaccctggggatgctgtg

SEQ ID NO: 48116 - DNA, 201 bp, Homo sapiens
caaccagcctcgcagaggcagaggccctggagcagtgacagcacaggagatctgctggctcgggggaaggggaggaaagaggaaaacaaagggagtgatcragtgagcctcgccccgccctccctgcgccggcccatgatgtgtcagtcagaggcgcggcaaggaccagagctccgcgcggcgaaatggttgcacttcccc

SEQ ID NO: 48117 - DNA, 201 bp, Homo sapiens
gggcctgcctcagcgtggttgggagtctgaccaggtaggacttgaatgattcggctaccacctgttccagaggtgcagacaagaggtggcgagagcccccrtcatgcccctcaacctatcccgttccttctgcctacaaataaaaagtgcaggctggaatgatctcagtcacatttggatctttttaaacactgtatagac

SEQ ID NO: 48118 - DNA, 201 bp, Homo sapiens
acagatgccagaaaaatccacactgcccctgcccgaaccatgttcctgctgcgtcccctgcccattctgttggtgacaggcggcgggtatgcagggtaccrgcagtatgagaagtacagggagcgagagctggagaagctgggattggagattccacccaaacttgctggtcactgggaggtggctttgtacaagtcagtg

SEQ ID NO: 48119 - DNA, 201 bp, Homo sapiens; identical to SEQ ID NO: 48104

SEQ ID NO: 48120 - DNA, 189 bp, Homo sapiens; identical to SEQ ID NO: 48105

SEQ ID NO: 48121 - DNA, 201 bp, Homo sapiens; identical to SEQ ID NO: 48106

SEQ ID NO: 48122 - DNA, 201 bp, Homo sapiens; identical to SEQ ID NO: 48107

SEQ ID NO: 48123 - DNA, 201 bp, Homo sapiens; identical to SEQ ID NO: 48109

SEQ ID NO: 48124 - DNA, 201 bp, Homo sapiens; identical to SEQ ID NO: 48110

SEQ ID NO: 48125 - DNA, 201 bp, Homo sapiens; identical to SEQ ID NO: 48111

SEQ ID NO: 48126 - DNA, 201 bp, Homo sapiens; identical to SEQ ID NO: 48112

SEQ ID NO: 48127 - DNA, 201 bp, Homo sapiens; identical to SEQ ID NO: 48113

SEQ ID NO: 48128 - DNA, 201 bp, Homo sapiens; identical to SEQ ID NO: 48114

SEQ ID NO: 48129 - DNA, 201 bp, Homo sapiens; identical to SEQ ID NO: 48115

SEQ ID NO: 48130 - DNA, 201 bp, Homo sapiens; identical to SEQ ID NO: 48117

SEQ ID NO: 48131 - DNA, 201 bp, Homo sapiens; identical to SEQ ID NO: 48104

SEQ ID NO: 48132 - DNA, 189 bp, Homo sapiens; identical to SEQ ID NO: 48105

SEQ ID NO: 48133 - DNA, 201 bp, Homo sapiens; identical to SEQ ID NO: 48106

SEQ ID NO: 48134 - DNA, 113 bp, Homo sapiens
caagctcctcatycagggcctgaggctcccacctcgtgtcacctcaagacagccagagaggatgaaatctttggcttgggcttccagggctgtcataggcagagggcaagcca

SEQ ID NO: 48135 - DNA, 201 bp, Homo sapiens; identical to SEQ ID NO: 48107

SEQ ID NO: 48136 - DNA, 201 bp, Homo sapiens; identical to SEQ ID NO: 48108

SEQ ID NO: 48137 - DNA, 201 bp, Homo sapiens; identical to SEQ ID NO: 48110

SEQ ID NO: 48138 - DNA, 201 bp, Homo sapiens; identical to SEQ ID NO: 48111

SEQ ID NO: 48139 - DNA, 201 bp, Homo sapiens; identical to SEQ ID NO: 48109

SEQ ID NO: 48140 - DNA, 201 bp, Homo sapiens; identical to SEQ ID NO: 48112

SEQ ID NO: 48141 - DNA, 201 bp, Homo sapiens; identical to SEQ ID NO: 48113

SEQ ID NO: 48142 - DNA, 201 bp, Homo sapiens; identical to SEQ ID NO: 48114

SEQ ID NO: 48143 - DNA, 201 bp, Homo sapiens; identical to SEQ ID NO: 48117

SEQ ID NO: 48144 - DNA, 201 bp, Homo sapiens; identical to SEQ ID NO: 48115

SEQ ID NO: 48145 - DNA, 201 bp, Homo sapiens; identical to SEQ ID NO: 48116

SEQ ID NO: 48146 - DNA, 201 bp, Homo sapiens
acagatgccagaaaaatccacactgcccctgcccgaaccatgttcctgctgcgtcccctgcccattctgttggtgacaggcggcgggtatgcagggtaccrgcagtatgagaagtacagggagcgagagctggagaagctgggattggagattccacccaaacttgctggtcactgggagccctgaccctctattctgcac

SEQ ID NO: 48147 - DNA, 201 bp, Homo sapiens; identical to SEQ ID NO: 48104

SEQ ID NO: 48148 - DNA, 189 bp, Homo sapiens; identical to SEQ ID NO: 48105

SEQ ID NO: 48149 - DNA, 201 bp, Homo sapiens; identical to SEQ ID NO: 48106

SEQ ID NO: 48150 - DNA, 201 bp, Homo sapiens; identical to SEQ ID NO: 48107

SEQ ID NO: 48151 - DNA, 201 bp, Homo sapiens; identical to SEQ ID NO: 48108

SEQ ID NO: 48152 - DNA, 201 bp, Homo sapiens; identical to SEQ ID NO: 48109

SEQ ID NO: 48153 - DNA, 201 bp, Homo sapiens; identical to SEQ ID NO: 48110

SEQ ID NO: 48154 - DNA, 201 bp, Homo sapiens; identical to SEQ ID NO: 48111

SEQ ID NO: 48155 - DNA, 201 bp, Homo sapiens; identical to SEQ ID NO: 48112

SEQ ID NO: 48156 - DNA, 201 bp, Homo sapiens; identical to SEQ ID NO: 48113

SEQ ID NO: 48157 - DNA, 201 bp, Homo sapiens; identical to SEQ ID NO: 48114

SEQ ID NO: 48158 - DNA, 201 bp, Homo sapiens; identical to SEQ ID NO: 48115

SEQ ID NO: 48159 - DNA, 201 bp, Homo sapiens; identical to SEQ ID NO: 48116

SEQ ID NO: 48160 - DNA, 201 bp, Homo sapiens; identical to SEQ ID NO: 48117

SEQ ID NO: 48161 - DNA, 201 bp, Homo sapiens; identical to SEQ ID NO: 48104

SEQ ID NO: 48162 - DNA, 189 bp, Homo sapiens; identical to SEQ ID NO: 48105

SEQ ID NO: 48163 - DNA, 201 bp, Homo sapiens; identical to SEQ ID NO: 48106

SEQ ID NO: 48164 - DNA, 201 bp, Homo sapiens; identical to SEQ ID NO: 48107

SEQ ID NO: 48165 - DNA, 201 bp, Homo sapiens; identical to SEQ ID NO: 48108

SEQ ID NO: 48166 - DNA, 201 bp, Homo sapiens; identical to SEQ ID NO: 48109

SEQ ID NO: 48167 - DNA, 201 bp, Homo sapiens; identical to SEQ ID NO: 48110

SEQ ID NO: 48168 - DNA, 201 bp, Homo sapiens; identical to SEQ ID NO: 48111

SEQ ID NO: 48169 - DNA, 201 bp, Homo sapiens; identical to SEQ ID NO: 48112

SEQ ID NO: 48170 - DNA, 201 bp, Homo sapiens; identical to SEQ ID NO: 48113

SEQ ID NO: 48171 - DNA, 201 bp, Homo sapiens; identical to SEQ ID NO: 48114

SEQ ID NO: 48172 - DNA, 201 bp, Homo sapiens; identical to SEQ ID NO: 48115

SEQ ID NO: 48173 - DNA, 201 bp, Homo sapiens; identical to SEQ ID NO: 48116

SEQ ID NO: 48174 - DNA, 201 bp, Homo sapiens; identical to SEQ ID NO: 48117

SEQ ID NO: 48175 - DNA, 201 bp, Homo sapiens; identical to SEQ ID NO: 48104

SEQ ID NO: 48176 - DNA, 201 bp, Homo sapiens; identical to SEQ ID NO: 48106

SEQ ID NO: 48177 - DNA, 201 bp, Homo sapiens; identical to SEQ ID NO: 48107

SEQ ID NO: 48178 - DNA, 201 bp, Homo sapiens; identical to SEQ ID NO: 48108

SEQ ID NO: 48179 - DNA, 201 bp, Homo sapiens; identical to SEQ ID NO: 48111

SEQ ID NO: 48180 - DNA, 201 bp, Homo sapiens; identical to SEQ ID NO: 48109

SEQ ID NO: 48181 - DNA, 201 bp, Homo sapiens; identical to SEQ ID NO: 48112

SEQ ID NO: 48182 - DNA, 201 bp, Homo sapiens; identical to SEQ ID NO: 48114

SEQ ID NO: 48183 - DNA, 201 bp, Homo sapiens; identical to SEQ ID NO: 48117

SEQ ID NO: 48184 - DNA, 130 bp, Homo sapiens
tgtccccctccacatatccctacatgaaatatgggaaagttgctgctattgattcagggtctgtcttggaggcagaggacccttggtggatagttggtcartgcctggaaaacctgtcccagtttatcag

SEQ ID NO: 48185 - DNA, 201 bp, Homo sapiens; identical to SEQ ID NO: 48116

SEQ ID NO: 48186 - DNA, 201 bp, Homo sapiens; identical to SEQ ID NO: 48104

SEQ ID NO: 48187 - DNA, 189 bp, Homo sapiens; identical to SEQ ID NO: 48105

SEQ ID NO: 48188 - DNA, 201 bp, Homo sapiens; identical to SEQ ID NO: 48106

SEQ ID NO: 48189 - DNA, 201 bp, Homo sapiens; identical to SEQ ID NO: 48107

SEQ ID NO: 48190 - DNA, 201 bp, Homo sapiens; identical to SEQ ID NO: 48108

SEQ ID NO: 48191 - DNA, 201 bp, Homo sapiens; identical to SEQ ID NO: 48109

SEQ ID NO: 48192 - DNA, 201 bp, Homo sapiens; identical to SEQ ID NO: 48110

SEQ ID NO: 48193 - DNA, 201 bp, Homo sapiens; identical to SEQ ID NO: 48111

SEQ ID NO: 48194 - DNA, 201 bp, Homo sapiens; identical to SEQ ID NO: 48112

SEQ ID NO: 48195 - DNA, 201 bp, Homo sapiens; identical to SEQ ID NO: 48113

SEQ ID NO: 48196 - DNA, 201 bp, Homo sapiens; identical to SEQ ID NO: 48114

SEQ ID NO: 48197 - DNA, 201 bp, Homo sapiens; identical to SEQ ID NO: 48115

SEQ ID NO: 48198 - DNA, 201 bp, Homo sapiens; identical to SEQ ID NO: 48116

SEQ ID NO: 48199 - DNA, 201 bp, Homo sapiens; identical to SEQ ID NO: 48117

SEQ ID NO: 48200 - DNA, 201 bp, Homo sapiens
tgtcgtcgcagaggacggcagtgctgtgtccgccaccagcaccatcaacctctactttggctccaaggtccgctccccggtcagcgggatcctgttcaatratgaaatggacgacttcagctctcccagcatcaccaacgagtttggggtacccccctcacctgccaatttcatccagccagggaagcagccgctctcgtc

SEQ ID NO: 48201 - DNA, 201 bp, Homo sapiens
tccgctttctgattttgcctgacatgctgaagaacgcacccatgttaaagagcatgaaaaataaaaaccaaggctcaggggctggccgaggaaaagctgcyattctcaaggcccaagtggccgcaagaggaagaggacgtggaatgggacgtggaaacatctttcaaaagcgaagataattttctaagttgaacagaactt

SEQ ID NO: 48202 - DNA, 201 bp, Homo sapiens
aggacggcagtgctgtgtccgccaccagcaccatcaacctctactttggctccaaggtccgctccccggtcagcgggatcctgttcaataatgaaatggaygacttcagctctcccagcatcaccaacgagtttggggtacccccctcacctgccaatttcatccagccagggaagcagccgctctcgtccatgtgcccga

SEQ ID NO: 48203 - DNA, 201 bp, Homo sapiens
cccggcaccatcacacccagatcgcgtccaccttcatcgctgtggtgcaagccatcgtccgcacggctggtggctgggcagctgcctcggactccaggaarggcggggagcctgccggctactgagtgctccaggaggacaaggctgacaagcaatccagggacaagatactcaccaggaccaggaaggggactctggggg

SEQ ID NO: 48204 - DNA, 201 bp, Homo sapiens
cccagatcgcgtccaccttcatcgctgtggtgcaagccatcgtccgcacggctggtggctgggcagctgcctcggactccaggaaaggcggggagcctgcyggctactgagtgctccaggaggacaaggctgacaagcaatccagggacaagatactcaccaggaccaggaaggggactctgggggactggcttcccctgt

SEQ ID NO: 48205 - DNA, 201 bp, Homo sapiens
ggccgaggaaaagctgccattctcaaggcccaagtggccgcaagaggaagaggacgtggaatgggacgtggaaacatctttcaaaagcgaagataattttytaagttgaacagaactttgtccttttttctttcaggctctggctccgctactgcatcgtgtgcttctgtccaagaggcagagagactgaaactatctgct

SEQ ID NO: 48206 - DNA, 201 bp, Homo sapiens
catccccgaggccccaagcaactctcctccaactgtctttagggataaccctgagcgggcagccgctctactctatacctaactttatccgtaccagatayctagcctcactcagggccccccttacctggcggtgccgggatcaacaaatgaaattgtgacgggaagtcctggcccttggcccaacctcctgctgtcccc

SEQ ID NO: 48207 - DNA, 201 bp, Homo sapiens
ttctgtccaagaggcagagagactgaaactatctgctgccgcctggattctcccagagattgcctggaacaccagctcgggtcctcgcacaccatcctgcrggtgcagcccagaactgtcttctgaggaagaggtgctctcctgggcccccactgtccccaggcctcagcaaggcaagtgaggtgctgccgtcatccaggc

SEQ ID NO: 48208 - DNA, 201 bp, Homo sapiens
ggcagagagactgaaactatctgctgccgcctggattctcccagagattgcctggaacaccagctcgggtcctcgcacaccatcctgcgggtgcagcccaraactgtcttctgaggaagaggtgctctcctgggcccccactgtccccaggcctcagcaaggcaagtgaggtgctgccgtcatccaggctggacagttcag

SEQ ID NO: 48209 - DNA, 201 bp, Homo sapiens
cattgtcggcctctgtctctggctgccctcagcctccaaggaacctgacaaccatgtgtacaccagggctgccgtggccgcggatgccaagcagtgctcgragattgggagggatgcactgcgggacggtggctctgcggtggatgcagccattgcagccctgttgtgtgtggggctcatgaatgcccacagcatgggcat

SEQ ID NO: 48210 - DNA, 188 bp, Homo sapiens
cggggagcctgccggctactgagtgctccaggaggacaaggctgacaagcaatccagggacaagatactcaccaggaccaggaaggggactctgggggacyggcttcccctgtgagcagcagagcagcacaataaatgaggccactgtgccaggctccaggtggcctccctgccctgtctccccactc

SEQ ID NO: 48211 - DNA, 201 bp, Homo sapiens
tgggagggatgcactgcgggacggtggctctgcggtggatgcagccattgcagccctgttgtgtgtggggctcatgaatgcccacagcatgggcatcgggkgaaaagctgaggtcatcaacgcccgcgaggtggcccccaggctggcctttgccaccatgttcaacagctcggagcagggggctgtcggtggcggtgcctg

SEQ ID NO: 48212 - DNA, 201 bp, Homo sapiens
gcacaccagcggcatgggcggctgccctgggctcgcctcttccagcccagcatccagctggcccgccagggcttccccgtgggcaagggcttggcggcagycctggaaaacaagcggaccgtcatcgagcagcagcctgtcttgtgtgaggtgttctgccgggatagaaaggtgcttcgggagggggagagactgaccctg

SEQ ID NO: 48213 - DNA, 201 bp, Homo sapiens
gggcctgctggccgtggtcctggtgctggtcattgtcggcctctgtctctggctgccctcagcctccaaggaacctgacaaccatgtgtacaccagggctrccgtggccgcggatgccaagcagtgctcgaagattgggagggatgcactgcgggacggtggctctgcggtggatgcagccattgcagccctgttgtgtgt

SEQ ID NO: 48214 - DNA, 201 bp, Homo sapiens
ggctgccctgggctcgcctcttccagcccagcatccagctggcccgccagggcttccccgtgggcaagggcttggcggcagccctggaaaacaagcggacygtcatcgagcagcagcctgtcttgtgtgaggtgttctgccgggatagaaaggtgcttcgggagggggagagactgaccctgccgcagctggctgacacct

SEQ ID NO: 48215 - DNA, 201 bp, Homo sapiens
gtcattgtcggcctctgtctctggctgccctcagcctccaaggaacctgacaaccatgtgtacaccagggctgccgtggccgcggatgccaagcagtgctygaagattgggagggatgcactgcgggacggtggctctgcggtggatgcagccattgcagccctgttgtgtgtggggctcatgaatgcccacagcatgggc

SEQ ID NO: 48216 - DNA, 201 bp, Homo sapiens
gctcagcgggcccgtgctggccctcatcctcaacatcctcaaagggtacaacttctcccgggagagcgtggagacccccgagcagaagggcctgacgtacyaccgcatcgtagaggctttccggtttgcctacgccaagaggaccctgcttggggaccccaagtttgtggatgtgactgaggtggtccgcaacatgacctc

SEQ ID NO: 48217 - DNA, 201 bp, Homo sapiens; identical to SEQ ID NO: 48200

SEQ ID NO: 48218 - DNA, 201 bp, Homo sapiens; identical to SEQ ID NO: 48202

SEQ ID NO: 48219 - DNA, 201 bp, Homo sapiens; identical to SEQ ID NO: 48203

SEQ ID NO: 48220 - DNA, 201 bp, Homo sapiens; identical to SEQ ID NO: 48204

SEQ ID NO: 48221 - DNA, 201 bp, Homo sapiens
ggcgtcgggtgagcccagaagtgagagcagttggctgtgccccagtgctgtgtgacccagaggcgccgctcaccctctctgagctggtggacatcatagcrggtgcagcccagaactgtcttctgaggaagaggtgctctcctgggcccccactgtccccaggcctcagatgctgcatattgctggcccagctcctgaggc

SEQ ID NO: 48222 - DNA, 201 bp, Homo sapiens
gcccagaagtgagagcagttggctgtgccccagtgctgtgtgacccagaggcgccgctcaccctctctgagctggtggacatcatagcgggtgcagcccaraactgtcttctgaggaagaggtgctctcctgggcccccactgtccccaggcctcagatgctgcatattgctggcccagctcctgaggctctttggacctc

SEQ ID NO: 48223 - DNA, 201 bp, Homo sapiens; identical to SEQ ID NO: 48209

SEQ ID NO: 48224 - DNA, 201 bp, Homo sapiens
gcctcagatgctgcatattgctggcccagctcctgaggctctttggacctccaggaatcggtgtctctatcaggaacccttaaccctgacccggactcccrgctgggacccggggtgtcggagtggcaagagcactgtcaggcctggtgaagggtgtgagctgtccaacggggcagggaggaggcagggcctgttctgcag

SEQ ID NO: 48225 - DNA, 201 bp, Homo sapiens
tgcatattgctggcccagctcctgaggctctttggacctccaggaatcggtgtctctatcaggaacccttaaccctgacccggactcccagctgggacccrgggtgtcggagtggcaagagcactgtcaggcctggtgaagggtgtgagctgtccaacggggcagggaggaggcagggcctgttctgcagttggacagaca

SEQ ID NO: 48226 - DNA, 188 bp, Homo sapiens; identical to SEQ ID NO: 48210

SEQ ID NO: 48227 - DNA, 201 bp, Homo sapiens
tcaggaacccttaaccctgacccggactcccagctgggacccggggtgtcggagtggcaagagcactgtcaggcctggtgaagggtgtgagctgtccaacrgggcagggaggaggcagggcctgttctgcagttggacagacagagccctctagctgctttctggaagactgaagggcaggtgatcaaggcaagtgaggtg

SEQ ID NO: 48228 - DNA, 201 bp, Homo sapiens
gggagggatgcactgcgggacggtggctctgcggtggatgcagccattgcagccctgttgtgtgtggggctcatgaatgcccacagcatgggcatcggggktggcctcttcctcaccatctacaacagcaccacacgaaaagctgaggtcatcaacgcccgcgaggtggcccccaggctggcctttgccaccatgttcaac

SEQ ID NO: 48229 - DNA, 201 bp, Homo sapiens
tggatgcagccattgcagccctgttgtgtgtggggctcatgaatgcccacagcatgggcatcgggggtggcctcttcctcaccatctacaacagcaccacwcgaaaagctgaggtcatcaacgcccgcgaggtggcccccaggctggcctttgccaccatgttcaacagctcggagcagtcccagaagggggggctgtcgg

SEQ ID NO: 48230 - DNA, 201 bp, Homo sapiens
ggatgcagccattgcagccctgttgtgtgtggggctcatgaatgcccacagcatgggcatcgggggtggcctcttcctcaccatctacaacagcaccacargaaaagctgaggtcatcaacgcccgcgaggtggcccccaggctggcctttgccaccatgttcaacagctcggagcagtcccagaagggggggctgtcggt

SEQ ID NO: 48231 - DNA, 201 bp, Homo sapiens; identical to SEQ ID NO: 48213

SEQ ID NO: 48232 - DNA, 201 bp, Homo sapiens
gcacaccagcggcatgggcggctgccctgggctcgcctcttccagcccagcatccagctggcccgccagggcttccccgtgggcaagggcttggcggcagycctggaaaacaagcggaccgtcatcgagcagcagcctgtctttgaggtgttctgccgggatagaaaggtgcttcgggagggggagagactgaccctgccg

SEQ ID NO: 48233 - DNA, 201 bp, Homo sapiens
ggctgccctgggctcgcctcttccagcccagcatccagctggcccgccagggcttccccgtgggcaagggcttggcggcagccctggaaaacaagcggacygtcatcgagcagcagcctgtctttgaggtgttctgccgggatagaaaggtgcttcgggagggggagagactgaccctgccgcagctggctgacacctacg

SEQ ID NO: 48234 - DNA, 201 bp, Homo sapiens; identical to SEQ ID NO: 48215

SEQ ID NO: 48235 - DNA, 201 bp, Homo sapiens; identical to SEQ ID NO: 48216

SEQ ID NO: 48236 - DNA, 201 bp, Homo sapiens; identical to SEQ ID NO: 48200

SEQ ID NO: 48237 - DNA, 201 bp, Homo sapiens; identical to SEQ ID NO: 48202

SEQ ID NO: 48238 - DNA, 201 bp, Homo sapiens; identical to SEQ ID NO: 48203

SEQ ID NO: 48239 - DNA, 201 bp, Homo sapiens; identical to SEQ ID NO: 48204

SEQ ID NO: 48240 - DNA, 201 bp, Homo sapiens; identical to SEQ ID NO: 48221

SEQ ID NO: 48241 - DNA, 201 bp, Homo sapiens; identical to SEQ ID NO: 48222

SEQ ID NO: 48242 - DNA, 201 bp, Homo sapiens; identical to SEQ ID NO: 48209

SEQ ID NO: 48243 - DNA, 201 bp, Homo sapiens; identical to SEQ ID NO: 48224

SEQ ID NO: 48244 - DNA, 201 bp, Homo sapiens; identical to SEQ ID NO: 48225

SEQ ID NO: 48245 - DNA, 188 bp, Homo sapiens; identical to SEQ ID NO: 48210

SEQ ID NO: 48246 - DNA, 201 bp, Homo sapiens
tcaggaacccttaaccctgacccggactcccagctgggacccggggtgtcggagtggcaagagcactgtcaggcctggtgaagggtgtgagctgtccaacrgggcagggaggaggcagggcctgttctgcagttggacagacagagccctctagctgctttctggaagactgaagggcagcaaggcaagtgaggtgctgcc

SEQ ID NO: 48247 - DNA, 201 bp, Homo sapiens; identical to SEQ ID NO: 48228

SEQ ID NO: 48248 - DNA, 201 bp, Homo sapiens; identical to SEQ ID NO: 48229

SEQ ID NO: 48249 - DNA, 201 bp, Homo sapiens; identical to SEQ ID NO: 48230

SEQ ID NO: 48250 - DNA, 201 bp, Homo sapiens; identical to SEQ ID NO: 48213

SEQ ID NO: 48251 - DNA, 201 bp, Homo sapiens; identical to SEQ ID NO: 48212

SEQ ID NO: 48252 - DNA, 201 bp, Homo sapiens; identical to SEQ ID NO: 48214

SEQ ID NO: 48253 - DNA, 201 bp, Homo sapiens; identical to SEQ ID NO: 48215

SEQ ID NO: 48254 - DNA, 201 bp, Homo sapiens; identical to SEQ ID NO: 48216

SEQ ID NO: 48255 - DNA, 201 bp, Homo sapiens; identical to SEQ ID NO: 48200

SEQ ID NO: 48256 - DNA, 201 bp, Homo sapiens; identical to SEQ ID NO: 48202

SEQ ID NO: 48257 - DNA, 201 bp, Homo sapiens; identical to SEQ ID NO: 48203

SEQ ID NO: 48258 - DNA, 201 bp, Homo sapiens; identical to SEQ ID NO: 48204

SEQ ID NO: 48259 - DNA, 201 bp, Homo sapiens; identical to SEQ ID NO: 48207

SEQ ID NO: 48260 - DNA, 201 bp, Homo sapiens; identical to SEQ ID NO: 48208

SEQ ID NO: 48261 - DNA, 201 bp, Homo sapiens; identical to SEQ ID NO: 48209

SEQ ID NO: 48262 - DNA, 188 bp, Homo sapiens; identical to SEQ ID NO: 48210

SEQ ID NO: 48263 - DNA, 201 bp, Homo sapiens; identical to SEQ ID NO: 48228

SEQ ID NO: 48264 - DNA, 201 bp, Homo sapiens; identical to SEQ ID NO: 48229

SEQ ID NO: 48265 - DNA, 201 bp, Homo sapiens; identical to SEQ ID NO: 48230

SEQ ID NO: 48266 - DNA, 201 bp, Homo sapiens; identical to SEQ ID NO: 48213

SEQ ID NO: 48267 - DNA, 201 bp, Homo sapiens; identical to SEQ ID NO: 48212

SEQ ID NO: 48268 - DNA, 201 bp, Homo sapiens; identical to SEQ ID NO: 48215

SEQ ID NO: 48269 - DNA, 201 bp, Homo sapiens; identical to SEQ ID NO: 48214

SEQ ID NO: 48270 - DNA, 201 bp, Homo sapiens; identical to SEQ ID NO: 48216

SEQ ID NO: 48271 - DNA, 201 bp, Homo sapiens; identical to SEQ ID NO: 48201

SEQ ID NO: 48272 - DNA, 201 bp, Homo sapiens; identical to SEQ ID NO: 48200

SEQ ID NO: 48273 - DNA, 201 bp, Homo sapiens; identical to SEQ ID NO: 48202

SEQ ID NO: 48274 - DNA, 201 bp, Homo sapiens; identical to SEQ ID NO: 48203

SEQ ID NO: 48275 - DNA, 201 bp, Homo sapiens; identical to SEQ ID NO: 48204

SEQ ID NO: 48276 - DNA, 201 bp, Homo sapiens; identical to SEQ ID NO: 48205

SEQ ID NO: 48277 - DNA, 201 bp, Homo sapiens; identical to SEQ ID NO: 48206

SEQ ID NO: 48278 - DNA, 201 bp, Homo sapiens; identical to SEQ ID NO: 48207

SEQ ID NO: 48279 - DNA, 201 bp, Homo sapiens; identical to SEQ ID NO: 48208

SEQ ID NO: 48280 - DNA, 201 bp, Homo sapiens; identical to SEQ ID NO: 48209

SEQ ID NO: 48281 - DNA, 186 bp, Homo sapiens
cggggagcctgccggctactgagtgctccaggaggacaaggctgacaagcaatccagggacaagatactcaccaggaccaggaaggggactctgggggacyggcttcccctgtgagcagcagagcagcacaataaatgaggccactgtgccaggctccagcagtccccccatctcagtctcccaaa

SEQ ID NO: 48282 - DNA, 201 bp, Homo sapiens; identical to SEQ ID NO: 48228

SEQ ID NO: 48283 - DNA, 201 bp, Homo sapiens; identical to SEQ ID NO: 48229

SEQ ID NO: 48284 - DNA, 201 bp, Homo sapiens; identical to SEQ ID NO: 48230

SEQ ID NO: 48285 - DNA, 201 bp, Homo sapiens; identical to SEQ ID NO: 48212

SEQ ID NO: 48286 - DNA, 201 bp, Homo sapiens; identical to SEQ ID NO: 48213

SEQ ID NO: 48287 - DNA, 201 bp, Homo sapiens; identical to SEQ ID NO: 48215

SEQ ID NO: 48288 - DNA, 201 bp, Homo sapiens; identical to SEQ ID NO: 48214

SEQ ID NO: 48289 - DNA, 201 bp, Homo sapiens
gctcagcgggcccgtgctggccctcatcctcaacatcctcaaagggtacaacttctcccgggagagcgtggagacccccgagcagaagggcctgacgtacyaccgcatcgtagaggctttccggtttgcctacgccaagaggaccctgcttggggaccccaagtttgtggatgtgactgaggccagctctggggtctcggc

SEQ ID NO: 48290 - DNA, 201 bp, Homo sapiens; identical to SEQ ID NO: 48200

SEQ ID NO: 48291 - DNA, 201 bp, Homo sapiens; identical to SEQ ID NO: 48201

SEQ ID NO: 48292 - DNA, 201 bp, Homo sapiens; identical to SEQ ID NO: 48208

SEQ ID NO: 48293 - DNA, 201 bp, Homo sapiens; identical to SEQ ID NO: 48202

SEQ ID NO: 48294 - DNA, 201 bp, Homo sapiens; identical to SEQ ID NO: 48203

SEQ ID NO: 48295 - DNA, 201 bp, Homo sapiens; identical to SEQ ID NO: 48204

SEQ ID NO: 48296 - DNA, 201 bp, Homo sapiens
cattgtcggcctctgtctctggctgccctcagcctccaaggaacctgacaaccatgtgtacaccagggctgccgtggccgcggatgccaagcagtgctcgragattgggaggggggctgtcggtggcggtgcctggggagatccgaggctatgagctggcacaccagcggcatgggcggctgccctgggctcgcctcttcc

SEQ ID NO: 48297 - DNA, 201 bp, Homo sapiens; identical to SEQ ID NO: 48205

SEQ ID NO: 48298 - DNA, 186 bp, Homo sapiens; identical to SEQ ID NO: 48281

SEQ ID NO: 48299 - DNA, 201 bp, Homo sapiens; identical to SEQ ID NO: 48212

SEQ ID NO: 48300 - DNA, 201 bp, Homo sapiens
gggcctgctggccgtggtcctggtgctggtcattgtcggcctctgtctctggctgccctcagcctccaaggaacctgacaaccatgtgtacaccagggctrccgtggccgcggatgccaagcagtgctcgaagattgggaggggggctgtcggtggcggtgcctggggagatccgaggctatgagctggcacaccagcggc

SEQ ID NO: 48301 - DNA, 201 bp, Homo sapiens; identical to SEQ ID NO: 48206

SEQ ID NO: 48302 - DNA, 201 bp, Homo sapiens; identical to SEQ ID NO: 48214

SEQ ID NO: 48303 - DNA, 201 bp, Homo sapiens
gtcattgtcggcctctgtctctggctgccctcagcctccaaggaacctgacaaccatgtgtacaccagggctgccgtggccgcggatgccaagcagtgctygaagattgggaggggggctgtcggtggcggtgcctggggagatccgaggctatgagctggcacaccagcggcatgggcggctgccctgggctcgcctctt

SEQ ID NO: 48304 - DNA, 201 bp, Homo sapiens; identical to SEQ ID NO: 48207

SEQ ID NO: 48305 - DNA, 201 bp, Homo sapiens; identical to SEQ ID NO: 48289

SEQ ID NO: 48306 - DNA, 201 bp, Homo sapiens; identical to SEQ ID NO: 48200

SEQ ID NO: 48307 - DNA, 201 bp, Homo sapiens; identical to SEQ ID NO: 48201

SEQ ID NO: 48308 - DNA, 201 bp, Homo sapiens; identical to SEQ ID NO: 48202

SEQ ID NO: 48309 - DNA, 201 bp, Homo sapiens; identical to SEQ ID NO: 48203

SEQ ID NO: 48310 - DNA, 201 bp, Homo sapiens; identical to SEQ ID NO: 48204

SEQ ID NO: 48311 - DNA, 201 bp, Homo sapiens; identical to SEQ ID NO: 48205

SEQ ID NO: 48312 - DNA, 201 bp, Homo sapiens; identical to SEQ ID NO: 48206

SEQ ID NO: 48313 - DNA, 201 bp, Homo sapiens; identical to SEQ ID NO: 48207

SEQ ID NO: 48314 - DNA, 201 bp, Homo sapiens; identical to SEQ ID NO: 48208

SEQ ID NO: 48315 - DNA, 201 bp, Homo sapiens; identical to SEQ ID NO: 48209

SEQ ID NO: 48316 - DNA, 188 bp, Homo sapiens; identical to SEQ ID NO: 48210

SEQ ID NO: 48317 - DNA, 201 bp, Homo sapiens
gggagggatgcactgcgggacggtggctctgcggtggatgcagccattgcagccctgttgtgtgtggggctcatgaatgcccacagcatgggcatcggggktggcctcttcctcaccatctacaacagcaccacacgggggctgtcggtggcggtgcctggggagatccgaggctatgagctggcacaccagcggcatggg

SEQ ID NO: 48318 - DNA, 201 bp, Homo sapiens
tggatgcagccattgcagccctgttgtgtgtggggctcatgaatgcccacagcatgggcatcgggggtggcctcttcctcaccatctacaacagcaccacwcgggggctgtcggtggcggtgcctggggagatccgaggctatgagctggcacaccagcggcatgggcggctgccctgggctcgcctcttccagcccagca

SEQ ID NO: 48319 - DNA, 201 bp, Homo sapiens
ggatgcagccattgcagccctgttgtgtgtggggctcatgaatgcccacagcatgggcatcgggggtggcctcttcctcaccatctacaacagcaccacargggggctgtcggtggcggtgcctggggagatccgaggctatgagctggcacaccagcggcatgggcggctgccctgggctcgcctcttccagcccagcat

SEQ ID NO: 48320 - DNA, 201 bp, Homo sapiens; identical to SEQ ID NO: 48213

SEQ ID NO: 48321 - DNA, 201 bp, Homo sapiens; identical to SEQ ID NO: 48212

SEQ ID NO: 48322 - DNA, 201 bp, Homo sapiens; identical to SEQ ID NO: 48215

SEQ ID NO: 48323 - DNA, 201 bp, Homo sapiens; identical to SEQ ID NO: 48214

SEQ ID NO: 48324 - DNA, 201 bp, Homo sapiens
gctcagcgggcccgtgctggccctcatcctcaacatcctcaaagggtacaacttctcccgggagagcgtggagacccccgagcagaagggcctgacgtacyaccgcatcgtagaggctttccggtttgcctacgccaagaggaccctgcttggggaccccaagccagctctggggtctcggcaggtggtccgcaacatgac

SEQ ID NO: 48325 - DNA, 201 bp, Homo sapiens; identical to SEQ ID NO: 48200

SEQ ID NO: 48326 - DNA, 201 bp, Homo sapiens; identical to SEQ ID NO: 48201

SEQ ID NO: 48327 - DNA, 201 bp, Homo sapiens; identical to SEQ ID NO: 48202

SEQ ID NO: 48328 - DNA, 201 bp, Homo sapiens; identical to SEQ ID NO: 48203

SEQ ID NO: 48329 - DNA, 201 bp, Homo sapiens; identical to SEQ ID NO: 48204

SEQ ID NO: 48330 - DNA, 201 bp, Homo sapiens; identical to SEQ ID NO: 48205

SEQ ID NO: 48331 - DNA, 201 bp, Homo sapiens; identical to SEQ ID NO: 48206

SEQ ID NO: 48332 - DNA, 201 bp, Homo sapiens; identical to SEQ ID NO: 48207

SEQ ID NO: 48333 - DNA, 201 bp, Homo sapiens; identical to SEQ ID NO: 48208

SEQ ID NO: 48334 - DNA, 201 bp, Homo sapiens; identical to SEQ ID NO: 48209

SEQ ID NO: 48335 - DNA, 188 bp, Homo sapiens; identical to SEQ ID NO: 48210

SEQ ID NO: 48336 - DNA, 201 bp, Homo sapiens; identical to SEQ ID NO: 48228

SEQ ID NO: 48337 - DNA, 201 bp, Homo sapiens; identical to SEQ ID NO: 48229

SEQ ID NO: 48338 - DNA, 201 bp, Homo sapiens; identical to SEQ ID NO: 48230

SEQ ID NO: 48339 - DNA, 201 bp, Homo sapiens; identical to SEQ ID NO: 48213

SEQ ID NO: 48340 - DNA, 201 bp, Homo sapiens
gcacaccagcggcatgggcggctgccctgggctcgcctcttccagcccagcatccagctggcccgccagggcttccccgtgggcaagggcttggcggcagycctggaaaacaagcggaccgtcatcgagcagcagcctgtcttgtggtatgtgttctgccgggatagaaaggtgcttcgggagggggagagactgaccctg

SEQ ID NO: 48341 - DNA, 201 bp, Homo sapiens; identical to SEQ ID NO: 48215

SEQ ID NO: 48342 - DNA, 201 bp, Homo sapiens
ggctgccctgggctcgcctcttccagcccagcatccagctggcccgccagggcttccccgtgggcaagggcttggcggcagccctggaaaacaagcggacygtcatcgagcagcagcctgtcttgtggtatgtgttctgccgggatagaaaggtgcttcgggagggggagagactgaccctgccgcagctggctgacacct

SEQ ID NO: 48343 - DNA, 201 bp, Homo sapiens; identical to SEQ ID NO: 48216

SEQ ID NO: 48344 - DNA, 201 bp, Homo sapiens; identical to SEQ ID NO: 48200

SEQ ID NO: 48345 - DNA, 201 bp, Homo sapiens; identical to SEQ ID NO: 48202

SEQ ID NO: 48346 - DNA, 201 bp, Homo sapiens; identical to SEQ ID NO: 48203

SEQ ID NO: 48347 - DNA, 201 bp, Homo sapiens; identical to SEQ ID NO: 48204

SEQ ID NO: 48348 - DNA, 201 bp, Homo sapiens; identical to SEQ ID NO: 48221

SEQ ID NO: 48349 - DNA, 201 bp, Homo sapiens; identical to SEQ ID NO: 48222

SEQ ID NO: 48350 - DNA, 201 bp, Homo sapiens; identical to SEQ ID NO: 48209

SEQ ID NO: 48351 - DNA, 201 bp, Homo sapiens; identical to SEQ ID NO: 48224

SEQ ID NO: 48352 - DNA, 201 bp, Homo sapiens; identical to SEQ ID NO: 48225

SEQ ID NO: 48353 - DNA, 201 bp, Homo sapiens; identical to SEQ ID NO: 48246

SEQ ID NO: 48354 - DNA, 188 bp, Homo sapiens; identical to SEQ ID NO: 48210

SEQ ID NO: 48355 - DNA, 201 bp, Homo sapiens
tgggagggatgcactgcgggacggtggctctgcggtggatgcagccattgcagccctgttgtgtgtggggctcatgaatgcccacagcatgggcatcgggkgaaaagctgaggtcatcaacgcccgcgaggtggcccccaggctggcctttgccaccatgttcaacagctcggagcagtcccagaagggggggctgtcggt

SEQ ID NO: 48356 - DNA, 201 bp, Homo sapiens; identical to SEQ ID NO: 48212

SEQ ID NO: 48357 - DNA, 201 bp, Homo sapiens; identical to SEQ ID NO: 48213

SEQ ID NO: 48358 - DNA, 201 bp, Homo sapiens; identical to SEQ ID NO: 48215

SEQ ID NO: 48359 - DNA, 201 bp, Homo sapiens; identical to SEQ ID NO: 48214

SEQ ID NO: 48360 - DNA, 201 bp, Homo sapiens; identical to SEQ ID NO: 48216

SEQ ID NO: 48361 - DNA, 201 bp, Homo sapiens; identical to SEQ ID NO: 48200

SEQ ID NO: 48362 - DNA, 153 bp, Homo sapiens
tcccagccaggctggacctccgtgagaggcctgcctgtcctgcaccctgtgcrgatgcctcccactgtccgccggggctgctgggcacgccctggctggtctcttggactagcgggtgcagcccagaactgtcttctgaggaagaggtgctct

SEQ ID NO: 48363 - DNA, 201 bp, Homo sapiens; identical to SEQ ID NO: 48202

SEQ ID NO: 48364 - DNA, 171 bp, Homo sapiens
tcccagccaggctggacctccgtgagaggcctgcctgtcctgcaccctgtgcagatgcctcccactgtccrccggggctgctgggcacgccctggctggtctcttggactagcgggtgcagcccagaactgtcttctgaggaagaggtgctctcctgggcccccactgtcc

SEQ ID NO: 48365 - DNA, 201 bp, Homo sapiens; identical to SEQ ID NO: 48203

SEQ ID NO: 48366 - DNA, 174 bp, Homo sapiens
tcccagccaggctggacctccgtgagaggcctgcctgtcctgcaccctgtgcagatgcctcccactgtccgccrgggctgctgggcacgccctggctggtctcttggactagcgggtgcagcccagaactgtcttctgaggaagaggtgctctcctgggcccccactgtcccca

SEQ ID NO: 48367 - DNA, 201 bp, Homo sapiens; identical to SEQ ID NO: 48204

SEQ ID NO: 48368 - DNA, 201 bp, Homo sapiens
ggacctccgtgagaggcctgcctgtcctgcaccctgtgcagatgcctcccactgtccgccggggctgctgggcacgccctggctggtctcttggactagcrggtgcagcccagaactgtcttctgaggaagaggtgctctcctgggcccccactgtccccaggcctcagcaaggcaagtgaggtgctgccgtcatccaggc

SEQ ID NO: 48369 - DNA, 189 bp, Homo sapiens
tcccagccaggctggacctccgtgagaggcctgcctgtcctgcaccctgtgcagatgcctcccactgtccgccggggctgctgggcacsccctggctggtctcttggactagcgggtgcagcccagaactgtcttctgaggaagaggtgctctcctgggcccccactgtccccaggcctcagcaaggca

SEQ ID NO: 48370 - DNA, 201 bp, Homo sapiens
gaggcctgcctgtcctgcaccctgtgcagatgcctcccactgtccgccggggctgctgggcacgccctggctggtctcttggactagcgggtgcagcccaraactgtcttctgaggaagaggtgctctcctgggcccccactgtccccaggcctcagcaaggcaagtgaggtgctgccgtcatccaggctggacagttcag

SEQ ID NO: 48371 - DNA, 201 bp, Homo sapiens; identical to SEQ ID NO: 48209

SEQ ID NO: 48372 - DNA, 188 bp, Homo sapiens; identical to SEQ ID NO: 48210

SEQ ID NO: 48373 - DNA, 201 bp, Homo sapiens; identical to SEQ ID NO: 48228

SEQ ID NO: 48374 - DNA, 201 bp, Homo sapiens; identical to SEQ ID NO: 48229

SEQ ID NO: 48375 - DNA, 201 bp, Homo sapiens; identical to SEQ ID NO: 48230

SEQ ID NO: 48376 - DNA, 201 bp, Homo sapiens; identical to SEQ ID NO: 48212

SEQ ID NO: 48377 - DNA, 201 bp, Homo sapiens; identical to SEQ ID NO: 48213

SEQ ID NO: 48378 - DNA, 201 bp, Homo sapiens; identical to SEQ ID NO: 48214

SEQ ID NO: 48379 - DNA, 201 bp, Homo sapiens; identical to SEQ ID NO: 48215

SEQ ID NO: 48380 - DNA, 201 bp, Homo sapiens; identical to SEQ ID NO: 48216

SEQ ID NO: 48381 - DNA, 117 bp, Homo sapiens
tcccagccaggctggayctccgtgagaggcctgcctgtcctgcaccctgtgcagatgcctcccactgtccgccggggctgctgggcacgccctggctggtctcttggactagcgggt

SEQ ID NO: 48382 - DNA, 121 bp, Homo sapiens
tcccagccaggctggacctcygtgagaggcctgcctgtcctgcaccctgtgcagatgcctcccactgtccgccggggctgctgggcacgccctggctggtctcttggactagcgggtgcag

SEQ ID NO: 48383 - DNA, 201 bp, Homo sapiens; identical to SEQ ID NO: 48201

SEQ ID NO: 48384 - DNA, 201 bp, Homo sapiens; identical to SEQ ID NO: 48200

SEQ ID NO: 48385 - DNA, 201 bp, Homo sapiens; identical to SEQ ID NO: 48202

SEQ ID NO: 48386 - DNA, 201 bp, Homo sapiens; identical to SEQ ID NO: 48203

SEQ ID NO: 48387 - DNA, 201 bp, Homo sapiens; identical to SEQ ID NO: 48204

SEQ ID NO: 48388 - DNA, 201 bp, Homo sapiens; identical to SEQ ID NO: 48205

SEQ ID NO: 48389 - DNA, 201 bp, Homo sapiens; identical to SEQ ID NO: 48206

SEQ ID NO: 48390 - DNA, 201 bp, Homo sapiens; identical to SEQ ID NO: 48207

SEQ ID NO: 48391 - DNA, 201 bp, Homo sapiens; identical to SEQ ID NO: 48208

SEQ ID NO: 48392 - DNA, 201 bp, Homo sapiens; identical to SEQ ID NO: 48209

SEQ ID NO: 48393 - DNA, 186 bp, Homo sapiens; identical to SEQ ID NO: 48281

SEQ ID NO: 48394 - DNA, 201 bp, Homo sapiens; identical to SEQ ID NO: 48355

SEQ ID NO: 48395 - DNA, 201 bp, Homo sapiens; identical to SEQ ID NO: 48212

SEQ ID NO: 48396 - DNA, 201 bp, Homo sapiens; identical to SEQ ID NO: 48213

SEQ ID NO: 48397 - DNA, 201 bp, Homo sapiens; identical to SEQ ID NO: 48215

SEQ ID NO: 48398 - DNA, 201 bp, Homo sapiens; identical to SEQ ID NO: 48214

SEQ ID NO: 48399 - DNA, 201 bp, Homo sapiens; identical to SEQ ID NO: 48289

SEQ ID NO: 48400 - DNA, 201 bp, Homo sapiens; identical to SEQ ID NO: 48200

SEQ ID NO: 48401 - DNA, 201 bp, Homo sapiens; identical to SEQ ID NO: 48201

SEQ ID NO: 48402 - DNA, 201 bp, Homo sapiens; identical to SEQ ID NO: 48202

SEQ ID NO: 48403 - DNA, 201 bp, Homo sapiens; identical to SEQ ID NO: 48203

SEQ ID NO: 48404 - DNA, 201 bp, Homo sapiens; identical to SEQ ID NO: 48204

SEQ ID NO: 48405 - DNA, 201 bp, Homo sapiens; identical to SEQ ID NO: 48205

SEQ ID NO: 48406 - DNA, 201 bp, Homo sapiens; identical to SEQ ID NO: 48206

SEQ ID NO: 48407 - DNA, 201 bp, Homo sapiens; identical to SEQ ID NO: 48207

SEQ ID NO: 48408 - DNA, 201 bp, Homo sapiens; identical to SEQ ID NO: 48208

SEQ ID NO: 48409 - DNA, 201 bp, Homo sapiens; identical to SEQ ID NO: 48209

SEQ ID NO: 48410 - DNA, 186 bp, Homo sapiens; identical to SEQ ID NO: 48281

SEQ ID NO: 48411 - DNA, 201 bp, Homo sapiens; identical to SEQ ID NO: 48228

SEQ ID NO: 48412 - DNA, 201 bp, Homo sapiens; identical to SEQ ID NO: 48229

SEQ ID NO: 48413 - DNA, 201 bp, Homo sapiens; identical to SEQ ID NO: 48230

SEQ ID NO: 48414 - DNA, 201 bp, Homo sapiens; identical to SEQ ID NO: 48213

SEQ ID NO: 48415 - DNA, 201 bp, Homo sapiens; identical to SEQ ID NO: 48212

SEQ ID NO: 48416 - DNA, 201 bp, Homo sapiens; identical to SEQ ID NO: 48215

SEQ ID NO: 48417 - DNA, 201 bp, Homo sapiens; identical to SEQ ID NO: 48214

SEQ ID NO: 48418 - DNA, 201 bp, Homo sapiens; identical to SEQ ID NO: 48216

SEQ ID NO: 48419 - DNA, 201 bp, Homo sapiens; identical to SEQ ID NO: 48200

SEQ ID NO: 48420 - DNA, 201 bp, Homo sapiens; identical to SEQ ID NO: 48202

SEQ ID NO: 48421 - DNA, 201 bp, Homo sapiens; identical to SEQ ID NO: 48203

SEQ ID NO: 48422 - DNA, 201 bp, Homo sapiens; identical to SEQ ID NO: 48204

SEQ ID NO: 48423 - DNA, 188 bp, Homo sapiens; identical to SEQ ID NO: 48210

SEQ ID NO: 48424 - DNA, 201 bp, Homo sapiens; identical to SEQ ID NO: 48200

SEQ ID NO: 48425 - DNA, 201 bp, Homo sapiens; identical to SEQ ID NO: 48202

SEQ ID NO: 48426 - DNA, 201 bp, Homo sapiens; identical to SEQ ID NO: 48203

SEQ ID NO: 48427 - DNA, 201 bp, Homo sapiens; identical to SEQ ID NO: 48204

SEQ ID NO: 48428 - DNA, 201 bp, Homo sapiens; identical to SEQ ID NO: 48209

SEQ ID NO: 48429 - DNA, 138 bp, Homo sapiens
caggcccaccaagcctggggaggtggccacccttccaygatggcatttggatgttccctgtgtgtggggagggcacagggactccattcgtagaccacctctgggacagtgtgtctgcctctgaggtcagacgctctg

SEQ ID NO: 48430 - DNA, 190 bp, Homo sapiens
caggcccaccaagcctggggaggtggccacccttccatgatggcatttggatgttccctgtgtgtggggagggcacagggactccattcrtagaccacctctgggacagtgtgtctgcctctgaggtcagacgctctgcactgggacagggtggagtggagggaaatccagcttggggctcattggaggg

SEQ ID NO: 48431 - DNA, 201 bp, Homo sapiens
cttccatgatggcatttggatgttccctgtgtgtggggagggcacagggactccattcgtagaccacctctgggacagtgtgtctgcctctgaggtcagaygctctgcactgggacagggtggagtggagggaaatccagcttggggctcattggaggggcttgctggcagacaccgccctttgtgggaaactgactgtgg

SEQ ID NO: 48432 - DNA, 188 bp, Homo sapiens; identical to SEQ ID NO: 48210

SEQ ID NO: 48433 - DNA, 201 bp, Homo sapiens; identical to SEQ ID NO: 48355

SEQ ID NO: 48434 - DNA, 201 bp, Homo sapiens; identical to SEQ ID NO: 48212

SEQ ID NO: 48435 - DNA, 201 bp, Homo sapiens; identical to SEQ ID NO: 48213

SEQ ID NO: 48436 - DNA, 201 bp, Homo sapiens; identical to SEQ ID NO: 48215

SEQ ID NO: 48437 - DNA, 201 bp, Homo sapiens; identical to SEQ ID NO: 48214

SEQ ID NO: 48438 - DNA, 201 bp, Homo sapiens; identical to SEQ ID NO: 48216

SEQ ID NO: 48439 - DNA, 201 bp, Homo sapiens; identical to SEQ ID NO: 48200

SEQ ID NO: 48440 - DNA, 201 bp, Homo sapiens; identical to SEQ ID NO: 48202

SEQ ID NO: 48441 - DNA, 201 bp, Homo sapiens; identical to SEQ ID NO: 48203

SEQ ID NO: 48442 - DNA, 201 bp, Homo sapiens; identical to SEQ ID NO: 48204

SEQ ID NO: 48443 - DNA, 201 bp, Homo sapiens; identical to SEQ ID NO: 48209

SEQ ID NO: 48444 - DNA, 188 bp, Homo sapiens; identical to SEQ ID NO: 48210

SEQ ID NO: 48445 - DNA, 201 bp, Homo sapiens; identical to SEQ ID NO: 48228

SEQ ID NO: 48446 - DNA, 201 bp, Homo sapiens; identical to SEQ ID NO: 48229

SEQ ID NO: 48447 - DNA, 201 bp, Homo sapiens; identical to SEQ ID NO: 48230

SEQ ID NO: 48448 - DNA, 201 bp, Homo sapiens; identical to SEQ ID NO: 48213

SEQ ID NO: 48449 - DNA, 201 bp, Homo sapiens; identical to SEQ ID NO: 48212

SEQ ID NO: 48450 - DNA, 201 bp, Homo sapiens; identical to SEQ ID NO: 48215

SEQ ID NO: 48451 - DNA, 201 bp, Homo sapiens; identical to SEQ ID NO: 48214

SEQ ID NO: 48452 - DNA, 201 bp, Homo sapiens; identical to SEQ ID NO: 48216

SEQ ID NO: 48453 - DNA, 201 bp, Homo sapiens; identical to SEQ ID NO: 48201

SEQ ID NO: 48454 - DNA, 129 bp, Homo sapiens
agggtgaccagcagctcagcacagtggcttgcttccagcactctgggaggctgaggtagaggattgtttgagaggagttcaaaaccagcccgcgagacatrgtgagaccctgtctctacaaaaaatttt

SEQ ID NO: 48455 - DNA, 201 bp, Homo sapiens; identical to SEQ ID NO: 48206

SEQ ID NO: 48456 - DNA, 201 bp, Homo sapiens
ggccgaggaaaagctgccattctcaaggcccaagtggccgcaagaggaagaggacgtggaatgggacgtggaaacatctttcaaaagcgaagataattttytaagttgaacagaactttgtccttttttctttcaggttatctgagttcattggagtgggtgcttgtgcatatatgctaggtatcttttgccatctttctc

SEQ ID NO: 48457 - DNA, 201 bp, Homo sapiens
gtcatcagctcagctttaacaacacaggtgactctttcccttgataaagtcataggtaattcaggggctgggtgcggcggctcacgcatgtaatcccagcrctttgggaggccaaggcgggcggatcacgaggtcaggagttcgagaccagcctggccaatatggtgaaacctcgtgtgtactaaaaataaaaaaattagc

SEQ ID NO: 48458 - DNA, 201 bp, Homo sapiens
gataaagtcataggtaattcaggggctgggtgcggcggctcacgcatgtaatcccagcactttgggaggccaaggcgggcggatcacgaggtcaggagttygagaccagcctggccaatatggtgaaacctcgtgtgtactaaaaataaaaaaattagccgggtgcggtggcatgtacctgtagtcccagctactcgggag

SEQ ID NO: 48459 - DNA, 201 bp, Homo sapiens; identical to SEQ ID NO: 48200

SEQ ID NO: 48460 - DNA, 201 bp, Homo sapiens; identical to SEQ ID NO: 48202

SEQ ID NO: 48461 - DNA, 201 bp, Homo sapiens; identical to SEQ ID NO: 48203

SEQ ID NO: 48462 - DNA, 201 bp, Homo sapiens; identical to SEQ ID NO: 48204

SEQ ID NO: 48463 - DNA, 188 bp, Homo sapiens; identical to SEQ ID NO: 48210

SEQ ID NO: 48464 - DNA, 201 bp, Homo sapiens; identical to SEQ ID NO: 48200

SEQ ID NO: 48465 - DNA, 201 bp, Homo sapiens; identical to SEQ ID NO: 48201

SEQ ID NO: 48466 - DNA, 201 bp, Homo sapiens; identical to SEQ ID NO: 48202

SEQ ID NO: 48467 - DNA, 201 bp, Homo sapiens; identical to SEQ ID NO: 48203

SEQ ID NO: 48468 - DNA, 201 bp, Homo sapiens; identical to SEQ ID NO: 48204

SEQ ID NO: 48469 - DNA, 201 bp, Homo sapiens; identical to SEQ ID NO: 48205

SEQ ID NO: 48470 - DNA, 201 bp, Homo sapiens; identical to SEQ ID NO: 48206

SEQ ID NO: 48471 - DNA, 201 bp, Homo sapiens; identical to SEQ ID NO: 48207

SEQ ID NO: 48472 - DNA, 201 bp, Homo sapiens; identical to SEQ ID NO: 48208

SEQ ID NO: 48473 - DNA, 201 bp, Homo sapiens; identical to SEQ ID NO: 48209

SEQ ID NO: 48474 - DNA, 188 bp, Homo sapiens; identical to SEQ ID NO: 48210

SEQ ID NO: 48475 - DNA, 201 bp, Homo sapiens; identical to SEQ ID NO: 48317

SEQ ID NO: 48476 - DNA, 201 bp, Homo sapiens; identical to SEQ ID NO: 48318

SEQ ID NO: 48477 - DNA, 201 bp, Homo sapiens; identical to SEQ ID NO: 48319

SEQ ID NO: 48478 - DNA, 201 bp, Homo sapiens; identical to SEQ ID NO: 48213

SEQ ID NO: 48479 - DNA, 201 bp, Homo sapiens; identical to SEQ ID NO: 48212

SEQ ID NO: 48480 - DNA, 201 bp, Homo sapiens; identical to SEQ ID NO: 48215

SEQ ID NO: 48481 - DNA, 201 bp, Homo sapiens; identical to SEQ ID NO: 48214

SEQ ID NO: 48482 - DNA, 201 bp, Homo sapiens; identical to SEQ ID NO: 48324

SEQ ID NO: 48483 - DNA, 201 bp, Homo sapiens; identical to SEQ ID NO: 48200

SEQ ID NO: 48484 - DNA, 201 bp, Homo sapiens; identical to SEQ ID NO: 48201

SEQ ID NO: 48485 - DNA, 201 bp, Homo sapiens; identical to SEQ ID NO: 48202

SEQ ID NO: 48486 - DNA, 201 bp, Homo sapiens; identical to SEQ ID NO: 48203

SEQ ID NO: 48487 - DNA, 201 bp, Homo sapiens; identical to SEQ ID NO: 48204

SEQ ID NO: 48488 - DNA, 201 bp, Homo sapiens; identical to SEQ ID NO: 48205

SEQ ID NO: 48489 - DNA, 201 bp, Homo sapiens; identical to SEQ ID NO: 48206

SEQ ID NO: 48490 - DNA, 201 bp, Homo sapiens; identical to SEQ ID NO: 48207

SEQ ID NO: 48491 - DNA, 201 bp, Homo sapiens; identical to SEQ ID NO: 48208

SEQ ID NO: 48492 - DNA, 201 bp, Homo sapiens; identical to SEQ ID NO: 48209

SEQ ID NO: 48493 - DNA, 188 bp, Homo sapiens; identical to SEQ ID NO: 48210

SEQ ID NO: 48494 - DNA, 201 bp, Homo sapiens; identical to SEQ ID NO: 48228

SEQ ID NO: 48495 - DNA, 201 bp, Homo sapiens; identical to SEQ ID NO: 48229

SEQ ID NO: 48496 - DNA, 201 bp, Homo sapiens; identical to SEQ ID NO: 48230

SEQ ID NO: 48497 - DNA, 201 bp, Homo sapiens; identical to SEQ ID NO: 48213

SEQ ID NO: 48498 - DNA, 201 bp, Homo sapiens; identical to SEQ ID NO: 48212

SEQ ID NO: 48499 - DNA, 201 bp, Homo sapiens; identical to SEQ ID NO: 48215

SEQ ID NO: 48500 - DNA, 201 bp, Homo sapiens; identical to SEQ ID NO: 48214

SEQ ID NO: 48501 - DNA, 201 bp, Homo sapiens; identical to SEQ ID NO: 48216

SEQ ID NO: 48502 - DNA, 201 bp, Homo sapiens; identical to SEQ ID NO: 48200

SEQ ID NO: 48503 - DNA, 201 bp, Homo sapiens; identical to SEQ ID NO: 48202

SEQ ID NO: 48504 - DNA, 201 bp, Homo sapiens; identical to SEQ ID NO: 48203

SEQ ID NO: 48505 - DNA, 201 bp, Homo sapiens; identical to SEQ ID NO: 48204

SEQ ID NO: 48506 - DNA, 186 bp, Homo sapiens; identical to SEQ ID NO: 48281

SEQ ID NO: 48507 - DNA, 201 bp, Homo sapiens; identical to SEQ ID NO: 48200

SEQ ID NO: 48508 - DNA, 201 bp, Homo sapiens; identical to SEQ ID NO: 48202

SEQ ID NO: 48509 - DNA, 201 bp, Homo sapiens; identical to SEQ ID NO: 48203

SEQ ID NO: 48510 - DNA, 201 bp, Homo sapiens; identical to SEQ ID NO: 48204

SEQ ID NO: 48511 - DNA, 201 bp, Homo sapiens; identical to SEQ ID NO: 48209

SEQ ID NO: 48512 - DNA, 138 bp, Homo sapiens; identical to SEQ ID NO: 48429

SEQ ID NO: 48513 - DNA, 190 bp, Homo sapiens; identical to SEQ ID NO: 48430

SEQ ID NO: 48514 - DNA, 201 bp, Homo sapiens; identical to SEQ ID NO: 48431

SEQ ID NO: 48515 - DNA, 188 bp, Homo sapiens; identical to SEQ ID NO: 48210

SEQ ID NO: 48516 - DNA, 201 bp, Homo sapiens; identical to SEQ ID NO: 48228

SEQ ID NO: 48517 - DNA, 201 bp, Homo sapiens; identical to SEQ ID NO: 48229

SEQ ID NO: 48518 - DNA, 201 bp, Homo sapiens; identical to SEQ ID NO: 48230

SEQ ID NO: 48519 - DNA, 201 bp, Homo sapiens; identical to SEQ ID NO: 48213

SEQ ID NO: 48520 - DNA, 201 bp, Homo sapiens; identical to SEQ ID NO: 48212

SEQ ID NO: 48521 - DNA, 201 bp, Homo sapiens; identical to SEQ ID NO: 48215

SEQ ID NO: 48522 - DNA, 201 bp, Homo sapiens; identical to SEQ ID NO: 48214

SEQ ID NO: 48523 - DNA, 201 bp, Homo sapiens; identical to SEQ ID NO: 48216

SEQ ID NO: 48524 - DNA, 201 bp, Homo sapiens
aatgcaacaggaatgtgtctggagaccagcaagaacatcaatagagagcactgatcccaagcaaaagccactaaccttttagatgagaagtccacacaacraattgttagggaggattggggagaagcagcccattgcttaatacattggaaccctttccctaagttgagtttcaaccatgaatgcaataactagcataaa

SEQ ID NO: 48525 - DNA, 201 bp, Homo sapiens
tgacagacatggaggcagaagagttaaactctgctagatttcagctgtgctcaggccataatagtttttgaggtttggaatttactgttattttatgattrcaatgtcccaggtggaaaaagggaagcaagcaatccaaataaccacttgcttgcccagagacctttccctcaaacagatgctttcaagagctgcgagaga

SEQ ID NO: 48526 - DNA, 201 bp, Homo sapiens
tacctacaaaaagaaaacaagatgatggtatcaaaaggacaatttacaaactaagaatagtaacatagctttcagcatcctgtgcctgaacatcacacatytacaagtctttcaagtcttaatgcaacaggaatgtgtctggagaccagcaagaacatcaatagagagcactgatcccaagcaaaagccactaacctttta

SEQ ID NO: 48527 - DNA, 201 bp, Homo sapiens
acaaaagggcctaataccttactcttttagatgaaaaatagctcaaatatcttcaacatgcaagaagttgggggaagaaattaatctcttccagtcagctatatatatatatatatatattttttttttacaaaatgttattccagactggatcattttggtgggcagaagaaacctggcagtgaattctaactaatctgc

SEQ ID NO: 48528 - DNA, 201 bp, Homo sapiens
tattccagactggatcattttggtgggcagaagaaacctggcagtgaattctaactaatctgcatgaaaagacaaatcacgatggttggggggaaaaattaaaaaaaaaaaaaagaaaaaaggaaaaaaaaagaaaaggcgaagaggaaaaaaaaaggaaagacagtgttccttaaaatgtaattaagtctgctggagtca

SEQ ID NO: 48529 - DNA, 201 bp, Homo sapiens
gtgtggatttcagcaaaacctgatcatcccacccagaagaccttctcatcaatagatcgcccttaaagacccattgtaaggtcataaaaaacctcggccamctgcacaaagatggtgcctcactgcaacaagaaaccttaaggtgtcttaccgacgaaataaaaaacataaatgattgttctccaaggcctgagggcaaga

SEQ ID NO: 48530 - DNA, 201 bp, Homo sapiens
aagaaaacaagatgatggtatcaaaaggacaatttacaaactaagaatagtaacatagctttcagcatcctgtgcctgaacatcacacatctacaagtctytcaagtcttaatgcaacaggaatgtgtctggagaccagcaagaacatcaatagagagcactgatcccaagcaaaagccactaaccttttagatgagaagt

SEQ ID NO: 48531 - DNA, 201 bp, Homo sapiens
gagacctttccctcaaacagatgctttcaagagctgcgagagagtagggcatcccttgtggtggtacctctatgtttaaagaaagaagaaaaaaacccagaatttggttgtagaaaacaatgcccacaacagactggccagtgcttagacaaatttggggttggggggaacactttggtttgaaagcacagagcagtttgc

SEQ ID NO: 48532 - DNA, 201 bp, Homo sapiens
atttggggttggggggaacactttggtttgaaagcacagagcagtttgccatgtttcttctgtgcctaccattctcccttggcctcaacttctgtaagatgggggggggacaaaaagagaagtaaagttaagaagaaagtggaaaattaaaaaaaaagatgtcaaagtttttacatgcatatatttcagcttatgctgaag

SEQ ID NO: 48533 - DNA, 201 bp, Homo sapiens
tctggggctgtctgatgtccctatcctgttgtagtgaacacaatagcagaaaattctttctgggtccatctgctataaagtcttggtaaaacagcattacyatgaagaggatgaactcacctaccttcagatggaggaaaagtgaaaaggacttaggctttagtcctccatgacttttcttaagcactacctacctgtaat

SEQ ID NO: 48534 - DNA, 201 bp, Homo sapiens
ctggttagtaaatttccagcgagcatttatgttcatttgctcacagcagctgtctggatggaaaattaatttcacagatggtccccagttaaactgggaaraaatataggcagcttccacccagatgctgagatgctacagtttaaccactacaataaacacttgtggtttttaatttaaaggatacacaaaactcagcaa

SEQ ID NO: 48535 - DNA, 201 bp, Homo sapiens
atgtcccaactaaagaccagttaaaatattagggtacgttcttgtgaatttccactttccaggtagatgaccaaatttaggtggtcaagatataaaggtgwcagctagttttaagtgtgaaacttatttcactttcacactgccttcaggccagaagcaaaccaaatttaccaggtttggctggaggagttttgtgactca

SEQ ID NO: 48536 - DNA, 201 bp, Homo sapiens
cacaaaagggcctaataccttactcttttagatgaaaaatagctcaaatatcttcaacatgcaagaagttgggggaagaaattaatctcttccagtcagctatatatatatatatatatattttttttttacaaaatgttattccagactggatcattttggtgggcagaagaaacctggcagtgaattctaactaatctg

SEQ ID NO: 48537 - DNA, 201 bp, Homo sapiens
taactatcaaatgcactccagcaatcagtcaaaacaggcccgaggaaacctgttccaacttaagaaacatttaaaagcacaaaagaaaatgtgcagggcamtccctctttgttttctaacccagtaatgagaaatttaaagcacagatgccatcttcctctgcaaaacaattcagccctccccctccctccctccccacca

SEQ ID NO: 48538 - DNA, 201 bp, Homo sapiens
ttactcttttagatgaaaaatagctcaaatatcttcaacatgcaagaagttgggggaagaaattaatctcttccagtcagctatatatatatatatatatwttttttttttacaaaatgttattccagactggatcattttggtgggcagaagaaacctggcagtgaattctaactaatctgcatgaaaagacaaatcacg

SEQ ID NO: 48539 - DNA, 201 bp, Homo sapiens
tggatcaggcggtaccagactgagaatttctatgaccaaattgcagtcgtgtctggagtagtacaaaccatcttctactgtgacttcttctacttgtatgkgaccaaagtccttaagggaaagaagttaagtcttccaatgccaatctgaggaccttcagagacagtctacgccttaacaagcacatgaaggaaactattt

SEQ ID NO: 48540 - DNA, 201 bp, Homo sapiens; identical to SEQ ID NO: 48524

SEQ ID NO: 48541 - DNA, 201 bp, Homo sapiens; identical to SEQ ID NO: 48525

SEQ ID NO: 48542 - DNA, 150 bp, Homo sapiens
aaaaaaaggaaagacagtgttccttaaaatgtaattaagtctgctggagtcactaccacttgagtggtttcatttacgtgaaggaggaggagggggagatyaaaaaaaaaaaattagctgttgttacagggcttgtgaagaaggggcatt

SEQ ID NO: 48543 - DNA, 201 bp, Homo sapiens; identical to SEQ ID NO: 48526

SEQ ID NO: 48544 - DNA, 201 bp, Homo sapiens; identical to SEQ ID NO: 48527

SEQ ID NO: 48545 - DNA, 201 bp, Homo sapiens; identical to SEQ ID NO: 48528

SEQ ID NO: 48546 - DNA, 201 bp, Homo sapiens; identical to SEQ ID NO: 48529

SEQ ID NO: 48547 - DNA, 201 bp, Homo sapiens; identical to SEQ ID NO: 48530

SEQ ID NO: 48548 - DNA, 201 bp, Homo sapiens; identical to SEQ ID NO: 48531

SEQ ID NO: 48549 - DNA, 201 bp, Homo sapiens
atttggggttggggggaacactttggtttgaaagcacagagcagtttgccatgtttcttctgtgcctaccattctcccttggcctcaacttctgtaagatgggggggggacaaaaagagaatttttacatgcatatatttcagcttatgctgaagacctacctgtatgttgcacattgaatcatactttcagaacccctca

SEQ ID NO: 48550 - DNA, 201 bp, Homo sapiens; identical to SEQ ID NO: 48533

SEQ ID NO: 48551 - DNA, 201 bp, Homo sapiens; identical to SEQ ID NO: 48534

SEQ ID NO: 48552 - DNA, 201 bp, Homo sapiens; identical to SEQ ID NO: 48535

SEQ ID NO: 48553 - DNA, 201 bp, Homo sapiens; identical to SEQ ID NO: 48536

SEQ ID NO: 48554 - DNA, 201 bp, Homo sapiens; identical to SEQ ID NO: 48537

SEQ ID NO: 48555 - DNA, 201 bp, Homo sapiens; identical to SEQ ID NO: 48538

SEQ ID NO: 48556 - DNA, 201 bp, Homo sapiens; identical to SEQ ID NO: 48539

SEQ ID NO: 48557 - DNA, 201 bp, Homo sapiens; identical to SEQ ID NO: 48524

SEQ ID NO: 48558 - DNA, 201 bp, Homo sapiens
cgattcttctgctcatgttctgaagccaacagcagaacctgaattataagtgacagacatggagtttttgaggtttggaatttactgttattttatgattrcaatgtcccaggtggaaaaagggaagcaagcaatccaaataaccacttgcttgcccagagacctttccctcaaacagatgctttcaagagctgcgagaga

SEQ ID NO: 48559 - DNA, 150 bp, Homo sapiens; identical to SEQ ID NO: 48542

SEQ ID NO: 48560 - DNA, 201 bp, Homo sapiens; identical to SEQ ID NO: 48526

SEQ ID NO: 48561 - DNA, 201 bp, Homo sapiens; identical to SEQ ID NO: 48527

SEQ ID NO: 48562 - DNA, 201 bp, Homo sapiens; identical to SEQ ID NO: 48528

SEQ ID NO: 48563 - DNA, 201 bp, Homo sapiens; identical to SEQ ID NO: 48529

SEQ ID NO: 48564 - DNA, 201 bp, Homo sapiens; identical to SEQ ID NO: 48530

SEQ ID NO: 48565 - DNA, 201 bp, Homo sapiens; identical to SEQ ID NO: 48531

SEQ ID NO: 48566 - DNA, 201 bp, Homo sapiens; identical to SEQ ID NO: 48549

SEQ ID NO: 48567 - DNA, 201 bp, Homo sapiens; identical to SEQ ID NO: 48533

SEQ ID NO: 48568 - DNA, 201 bp, Homo sapiens; identical to SEQ ID NO: 48534

SEQ ID NO: 48569 - DNA, 201 bp, Homo sapiens; identical to SEQ ID NO: 48535

SEQ ID NO: 48570 - DNA, 201 bp, Homo sapiens; identical to SEQ ID NO: 48536

SEQ ID NO: 48571 - DNA, 201 bp, Homo sapiens; identical to SEQ ID NO: 48537

SEQ ID NO: 48572 - DNA, 201 bp, Homo sapiens; identical to SEQ ID NO: 48538

SEQ ID NO: 48573 - DNA, 201 bp, Homo sapiens; identical to SEQ ID NO: 48539

SEQ ID NO: 48574 - DNA, 101 bp, Homo sapiens
mtgactgggggcagcagcctgagcagtgccgaccacagcgcacacgcagaaccaggagccatggagccccaccgtgtgccccaccgtgcagcctcctcggc

SEQ ID NO: 48575 - DNA, 201 bp, Homo sapiens
cagaggggtgtctctctgtcagcaaggccagtacctggggacccaggtccccacgtgggaccagctcccagatctgggcttcaggcctccgtaggccaggkcagtgacacctcctggctgggttgaaagagcaggtgcattaacaccacacatggccaggaacacgtgcctctgacgcacagggctgctgccctgccgtgc

SEQ ID NO: 48576 - DNA, 201 bp, Homo sapiens
ccacaagcaggaaagaaaaggccaagcagaggcccctggccctgaacactgtggagatgctgcgtgtggccagctcttctctgggcatggggccgcagcaygccatgcagacggctgagcggctctacacgcaaggctacatcagctacccacggacagagaccacccactaccctgagaactttgacctgaagggctctc

SEQ ID NO: 48577 - DNA, 201 bp, Homo sapiens
caggagtcagcattggtaatagtgctgtgctgcggaagagtggagtctaaactttttcattgccagtgccccgaaactggagtgtgaaggaccgagacaaratgaagactgtgctcatggttgctgaaaagccgtccttggcacagtcaattgccaaaatcctctctagagggagcctgtcctcacacaaagggctgaacg

SEQ ID NO: 48578 - DNA, 201 bp, Homo sapiens
ggtgagatctgctgtaccagtctcacaggagtcagcattggtaatagtgctgtgctgcggaagagtggagtctaaactttttcattgccagtgccccgaamctggagtgtgaaggaccgagacaagatgaagactgtgctcatggttgctgaaaagccgtccttggcacagtcaattgccaaaatcctctctagagggagc

SEQ ID NO: 48579 - DNA, 201 bp, Homo sapiens
aacacgtgcctctgacgcacagggctgctgccctgccgtgctgccaggacagtagaaaccaccgcctatagggaccctttcacactcagacccttgaccaygtgttgcggagccttttgctggggactgggagggagatgactcctgcactctgcttgcccgcaggcatggatgagttgatggaggtgtctttctcgcccc

SEQ ID NO: 48580 - DNA, 201 bp, Homo sapiens
ccgcagaactgttcagccaagctcccacggagaagaaagaagctaaccccaagctgaacatggtgaagttcctgcaggtggagggcagaggctgcgactayatcgtgctgtggctggactgcgacaaggagggggagaacatctgctttgaggttaacactgacaaagacagatctctccttttggactgggaccgagtaa

SEQ ID NO: 48581 - DNA, 201 bp, Homo sapiens
tgctggtagagtctgcctctggcctgcccctcaccagaggggtgtctctctgtcagcaaggccagtacctggggacccaggtccccacgtgggaccagctyccagatctgggcttcaggcctccgtaggccaggtcagtgacacctcctggctgggttgaaagagcaggtgcattaacaccacacatggccaggaacacgt

SEQ ID NO: 48582 - DNA, 201 bp, Homo sapiens
agtctgccacagaggccgaattagggggtgacgcgtggcggctctatgagtacatcaccagacacttcatcgccacggtcagccatgactgcaagtacctkcagagcaccatctccttcagaattgggcccgagctcttcacctgctccgggaagaccgtcctctcaccaggtcacaccacgggcccagccttcctcctct

SEQ ID NO: 48583 - DNA, 201 bp, Homo sapiens
aggctacatcagctacccacggacagagaccacccactaccctgagaactttgacctgaagggctctctgcggcagcaggccaaccacccctactgggccracacggtgaagcggttgttagcagaaggtatcaaccgcccgcggaaaggccatgacgccggcgaccatccccccatcacccccatgaagtctgccacaga

SEQ ID NO: 48584 - DNA, 201 bp, Homo sapiens
ccgcagaactgttcagccaagctcccacggagaagaaagaagctaaccccaagctgaacatggtgaagttcctgcaggtggagggcagaggctgcgactayatcgtgctgtggctggactgcgacaaggagggggagaacatctgctttgaggttcttgatgctgttctgcccgtcatgaacaaggcccatggtggcgaga

SEQ ID NO: 48585 - DNA, 201 bp, Homo sapiens
agaaggaagcccaggtggaggccacaagcaggaaagaaaaggccaagcagaggcccctggccctgaacactgtggagatgctgcgcatggggccgcagcaygccatgcagacggctgagcggctctacacgcaaggctacatcagctacccacggacagagaccacccactaccctgagaactttgacctgaagggctctc

SEQ ID NO: 48586 - DNA, 201 bp, Homo sapiens; identical to SEQ ID NO: 48577

SEQ ID NO: 48587 - DNA, 201 bp, Homo sapiens; identical to SEQ ID NO: 48578

SEQ ID NO: 48588 - DNA, 201 bp, Homo sapiens
taggtaccgctctcatcccatacccggtgtgcttccagggagggaagggcgagctgcgacaacacttcatcgccacggtcagccatgactgcaagtacctkcagagcaccatctccttcagaattgggcccgagctcttcacctgctccgggaagaccgtcctctcaccaggtcacaccacgggcccagccttcctcctct

SEQ ID NO: 48589 - DNA, 201 bp, Homo sapiens; identical to SEQ ID NO: 48583

SEQ ID NO: 48590 - DNA, 201 bp, Homo sapiens; identical to SEQ ID NO: 48584

SEQ ID NO: 48591 - DNA, 201 bp, Homo sapiens; identical to SEQ ID NO: 48576

SEQ ID NO: 48592 - DNA, 201 bp, Homo sapiens
tgggagtcagcattggtaatagtgctgtgctgcggaagagtggagtctaaactttttcattgccagtgccccgaaactggagtgtgaaggaccgagacaaratgaagactgtgctcatggttgctgaaaagccgtccttggcacagtcaattgccaaaatcctctctagagggagcctgtcctcacacaaagggctgaacg

SEQ ID NO: 48593 - DNA, 201 bp, Homo sapiens
cggagctggatccgcggtgcggctgtgggagtcagcattggtaatagtgctgtgctgcggaagagtggagtctaaactttttcattgccagtgccccgaamctggagtgtgaaggaccgagacaagatgaagactgtgctcatggttgctgaaaagccgtccttggcacagtcaattgccaaaatcctctctagagggagc

SEQ ID NO: 48594 - DNA, 201 bp, Homo sapiens
agtctgccacagaggccgaattagggggtgacgcgtggcggctctatgagtacatcaccagacacttcatcgccacggtcagccatgactgcaagtacctkcagagcaccatctccttcagaattgggcccgagctcttcacctgctccgggaagaccgtcctctcaccaggcttcacggaggtcatgccctggcagagcg

SEQ ID NO: 48595 - DNA, 201 bp, Homo sapiens; identical to SEQ ID NO: 48583

SEQ ID NO: 48596 - DNA, 201 bp, Homo sapiens; identical to SEQ ID NO: 48584

SEQ ID NO: 48597 - DNA, 201 bp, Homo sapiens; identical to SEQ ID NO: 48576

SEQ ID NO: 48598 - DNA, 201 bp, Homo sapiens; identical to SEQ ID NO: 48577

SEQ ID NO: 48599 - DNA, 201 bp, Homo sapiens; identical to SEQ ID NO: 48578

SEQ ID NO: 48600 - DNA, 201 bp, Homo sapiens; identical to SEQ ID NO: 48594

SEQ ID NO: 48601 - DNA, 201 bp, Homo sapiens; identical to SEQ ID NO: 48583

SEQ ID NO: 48602 - DNA, 201 bp, Homo sapiens
acagtttgcatccctagaacatggcattgtgccagttaccagtgattgccagtacctcttccctgccaaggttgtctctcgcctggtgaaatgggtgacarttgcccatgaggattacatggagctgcacttcaccaaagacattgtggatgcgggactggctggggacaccaatctctactacatggcgctcatcgaaag

SEQ ID NO: 48603 - DNA, 201 bp, Homo sapiens
gctctgttgtccaggctggagtgcagtggcacgaacacagctcactgccgcctcaacctctcctgggttcaagtgatcctcctgcctcagcctcccaagtrgctgggaccacaggtgtgtgccaccatttctggctaatttttaaattttttgtagaggcgggatcccactatttttcccaggctggtctcaaactcctgg

SEQ ID NO: 48604 - DNA, 201 bp, Homo sapiens
accaggctcacaagcagtatgagacagccagacacctgccgcctcccctctatgtcctctttgttcaggccactgcgtatgggcaggcctgtgataagacrttatctgtggcaatcgaaggcagtgtggatgaagccaaggctctgttcaaacctccagaggactcccaagatgacgagagtgactcagatgccgaggagg

SEQ ID NO: 48605 - DNA, 201 bp, Homo sapiens
gtcttgctctgttgtccaggctggagtgcagtggcacgaacacagctcactgccgcctcaacctctcctgggttcaagtgatcctcctgcctcagcctccsaagtagctgggaccacaggtgtgtgccaccatttctggctaatttttaaattttttgtagaggcgggatcccactatttttcccaggctggtctcaaact

SEQ ID NO: 48606 - DNA, 201 bp, Homo sapiens
ccacaaacagtttgcatccctagaacatggcattgtgccagttaccagtgattgccagtacctcttccctgccaaggttgtctctcgcctggtgaaatggrtgacagttgcccatgaggattacatggagctgcacttcaccaaagacattgtggatgcgggactggctggggacaccaatctctactacatggcgctcat

SEQ ID NO: 48607 - DNA, 201 bp, Homo sapiens
ttaaaatgttcataaaattacatcctttgtaatactcctgcaagtcaaagtaaaggatggcatagactattcttggacagttttgtcaaaaagtgtatctkgaccccaccatcagtactccattcttcattttaaaaaataagatgggctgggcacagtggcttacgcctttaatatcagtactttgggaggctggtgggc

SEQ ID NO: 48608 - DNA, 201 bp, Homo sapiens
catcgctgatctcccgcgcagaccgttgtttcccccaaggcctcaccctgagcactgggcttctgctttctgctctggcccacatgtgactcttgatattytccaaagacaccagccaattaaaaagcgtcacctgaccagtggcctttgtctgtggttcctggcaaggtggctttgcagtctggaagggcaggtgggagc

SEQ ID NO: 48609 - DNA, 201 bp, Homo sapiens
tgggcggatcacctgagatcaggagttcaagaccagcctggccaacatggtgaaaccccgtctctactaaaaatacaaaaattagctgggcatggtggtgygcgcctgtaatcccagccactcgggaggctgaggcaggagaattgcttgaatccccgaggcggaggttgcactgagccgagatggtgccactgcaccatc

SEQ ID NO: 48610 - DNA, 201 bp, Homo sapiens
tggggacaccaatctctactacatggcgctcatcgaaaggggcacagccaaactgcaggccgctgtggtgttgaaccctggctactcctccatcccacctrttttccagctctgtttgaactggaaaggggagaaaaccaacagcaacgatgacaacattcgggccatggagggcgaagtcaatgtgtgctacaaggagct

SEQ ID NO: 48611 - DNA, 201 bp, Homo sapiens; identical to SEQ ID NO: 48602

SEQ ID NO: 48612 - DNA, 201 bp, Homo sapiens
caaagtgatccgaagcgatggagccccagctgaaggaaagcggaatcgatctgacaccgagcaggaaggtaaatactacagtgaggaggccgaggtggatstgcgggaccctggcagagactatgagttatacaagtacacctgccaggagctacagaggctgatggctgagatccaagacctgaagagcaggggtggcaa

SEQ ID NO: 48613 - DNA, 201 bp, Homo sapiens
tcatggactgcatgaacaagctcaaaaacaataaggagtacctggagttccgaagggagcggagccagatgctgctgtccaggagaaaccagctgctcctygagttcagcttctggaatgagccacagcccagaatgggtcccaacatctatgagctgaggacatacaagctcaagccaggaaccatgatcgagtggggga

SEQ ID NO: 48614 - DNA, 201 bp, Homo sapiens; identical to SEQ ID NO: 48603

SEQ ID NO: 48615 - DNA, 201 bp, Homo sapiens; identical to SEQ ID NO: 48604

SEQ ID NO: 48616 - DNA, 201 bp, Homo sapiens; identical to SEQ ID NO: 48605

SEQ ID NO: 48617 - DNA, 201 bp, Homo sapiens; identical to SEQ ID NO: 48607

SEQ ID NO: 48618 - DNA, 201 bp, Homo sapiens; identical to SEQ ID NO: 48606

SEQ ID NO: 48619 - DNA, 201 bp, Homo sapiens; identical to SEQ ID NO: 48608

SEQ ID NO: 48620 - DNA, 201 bp, Homo sapiens; identical to SEQ ID NO: 48609

SEQ ID NO: 48621 - DNA, 201 bp, Homo sapiens
tgaagagaggttcctaatactagacagatggagagtggcttggctgtttccccctgcatattggggttgaaaacttaaatgtgtagttccagtccttctawgcagagtctctcctgccctccctccttcctgcagtctcaccacgccaccacctccctcgggggcctccgcgctgagcttccggcctctacgcctcgcttc

SEQ ID NO: 48622 - DNA, 201 bp, Homo sapiens; identical to SEQ ID NO: 48610

SEQ ID NO: 48623 - DNA, 201 bp, Homo sapiens
tgcccaggccctttctactttccctgcctgcctccctccccctgctagaagtagtttctgatttccctgaatgaaagatagtgatcttttaggccttcatwtatcttctaaaattcctcatctcaaggccaccagtccccagttatcacccttggaaatcctctgtttagcttagttgcacaaaaggtagtatgtccagtg

SEQ ID NO: 48624 - DNA, 201 bp, Homo sapiens; identical to SEQ ID NO: 48602

SEQ ID NO: 48625 - DNA, 201 bp, Homo sapiens; identical to SEQ ID NO: 48612

SEQ ID NO: 48626 - DNA, 201 bp, Homo sapiens; identical to SEQ ID NO: 48613

SEQ ID NO: 48627 - DNA, 201 bp, Homo sapiens; identical to SEQ ID NO: 48603

SEQ ID NO: 48628 - DNA, 201 bp, Homo sapiens; identical to SEQ ID NO: 48604

SEQ ID NO: 48629 - DNA, 201 bp, Homo sapiens; identical to SEQ ID NO: 48605

SEQ ID NO: 48630 - DNA, 201 bp, Homo sapiens; identical to SEQ ID NO: 48607

SEQ ID NO: 48631 - DNA, 201 bp, Homo sapiens; identical to SEQ ID NO: 48606

SEQ ID NO: 48632 - DNA, 201 bp, Homo sapiens; identical to SEQ ID NO: 48608

SEQ ID NO: 48633 - DNA, 201 bp, Homo sapiens; identical to SEQ ID NO: 48609

SEQ ID NO: 48634 - DNA, 201 bp, Homo sapiens; identical to SEQ ID NO: 48621

SEQ ID NO: 48635 - DNA, 201 bp, Homo sapiens; identical to SEQ ID NO: 48610

SEQ ID NO: 48636 - DNA, 201 bp, Homo sapiens; identical to SEQ ID NO: 48623

SEQ ID NO: 48637 - DNA, 200 bp, Homo sapiens
ttccacgctcccattttaccgaggtggatcctgaggcccagagtgggcaaagggcttgccaaggtcgcagagcgcgcagaggattagaaccctgacttcygtccagcacctgcggagttggagacgcccacaggaaacgcccacctgaccgggtgagtgagggggcgggcgagccggaggggtggagtttattcgcgccc

SEQ ID NO: 48638 - DNA, 201 bp, Homo sapiens; identical to SEQ ID NO: 48613

SEQ ID NO: 48639 - DNA, 201 bp, Homo sapiens
tgaagagaggttcctaatactagacagatggagagtggcttggctgtttccccctgcatattggggttgaaaacttaaatgtgtagttccagtccttctawgcagagtctctcctgccctccctccttcctgcaggcaaatatacaagctagaccctgttccctcaccctgtatcctgtctcccctaattgacattctatc

SEQ ID NO: 48640 - DNA, 201 bp, Homo sapiens; identical to SEQ ID NO: 48623

SEQ ID NO: 48641 - DNA, 201 bp, Homo sapiens; identical to SEQ ID NO: 48602

SEQ ID NO: 48642 - DNA, 200 bp, Homo sapiens; identical to SEQ ID NO: 48637

SEQ ID NO: 48643 - DNA, 201 bp, Homo sapiens; identical to SEQ ID NO: 48612

SEQ ID NO: 48644 - DNA, 201 bp, Homo sapiens; identical to SEQ ID NO: 48613

SEQ ID NO: 48645 - DNA, 201 bp, Homo sapiens; identical to SEQ ID NO: 48603

SEQ ID NO: 48646 - DNA, 201 bp, Homo sapiens
acctgccgcctcccctctatgtcctctttgttcaggccactgcgtatgggcaggcctgtgctcatatgaaatcctcccagccccctagacaggataagacrttatctgtggcaatcgaaggcagtgtggatgaagccaaggctctgttcaaacctccagaggactcccaagatgacgagagtgactcagatgccgaggagg

SEQ ID NO: 48647 - DNA, 201 bp, Homo sapiens; identical to SEQ ID NO: 48605

SEQ ID NO: 48648 - DNA, 201 bp, Homo sapiens; identical to SEQ ID NO: 48606

SEQ ID NO: 48649 - DNA, 201 bp, Homo sapiens; identical to SEQ ID NO: 48607

SEQ ID NO: 48650 - DNA, 201 bp, Homo sapiens; identical to SEQ ID NO: 48608

SEQ ID NO: 48651 - DNA, 201 bp, Homo sapiens; identical to SEQ ID NO: 48609

SEQ ID NO: 48652 - DNA, 201 bp, Homo sapiens; identical to SEQ ID NO: 48621

SEQ ID NO: 48653 - DNA, 201 bp, Homo sapiens; identical to SEQ ID NO: 48610

SEQ ID NO: 48654 - DNA, 201 bp, Homo sapiens; identical to SEQ ID NO: 48623

SEQ ID NO: 48655 - DNA, 201 bp, Homo sapiens; identical to SEQ ID NO: 48602

SEQ ID NO: 48656 - DNA, 201 bp, Homo sapiens; identical to SEQ ID NO: 48612

SEQ ID NO: 48657 - DNA, 201 bp, Homo sapiens; identical to SEQ ID NO: 48603

SEQ ID NO: 48658 - DNA, 201 bp, Homo sapiens; identical to SEQ ID NO: 48604

SEQ ID NO: 48659 - DNA, 201 bp, Homo sapiens; identical to SEQ ID NO: 48605

SEQ ID NO: 48660 - DNA, 201 bp, Homo sapiens; identical to SEQ ID NO: 48606

SEQ ID NO: 48661 - DNA, 201 bp, Homo sapiens; identical to SEQ ID NO: 48607

SEQ ID NO: 48662 - DNA, 201 bp, Homo sapiens; identical to SEQ ID NO: 48608

SEQ ID NO: 48663 - DNA, 201 bp, Homo sapiens; identical to SEQ ID NO: 48609

SEQ ID NO: 48664 - DNA, 195 bp, Homo sapiens
ggactgaggtgctgatcgcccaaagggcgcccctgggctggggtctgacccggcttctcctccctcactacccgcggtccccggcctctcggcgytgcgctgttacctcatccgaaaagtgttcgctgcagcatcctcaggcttcacgttggagcctcttgattgtgcatgtcatcagaatcgagcaaaaaacgg

SEQ ID NO: 48665 - DNA, 201 bp, Homo sapiens; identical to SEQ ID NO: 48610

SEQ ID NO: 48666 - DNA, 201 bp, Homo sapiens; identical to SEQ ID NO: 48602

SEQ ID NO: 48667 - DNA, 201 bp, Homo sapiens; identical to SEQ ID NO: 48612

SEQ ID NO: 48668 - DNA, 201 bp, Homo sapiens; identical to SEQ ID NO: 48603

SEQ ID NO: 48669 - DNA, 201 bp, Homo sapiens; identical to SEQ ID NO: 48604

SEQ ID NO: 48670 - DNA, 201 bp, Homo sapiens; identical to SEQ ID NO: 48605

SEQ ID NO: 48671 - DNA, 201 bp, Homo sapiens; identical to SEQ ID NO: 48606

SEQ ID NO: 48672 - DNA, 201 bp, Homo sapiens; identical to SEQ ID NO: 48607

SEQ ID NO: 48673 - DNA, 201 bp, Homo sapiens; identical to SEQ ID NO: 48608

SEQ ID NO: 48674 - DNA, 201 bp, Homo sapiens; identical to SEQ ID NO: 48609

SEQ ID NO: 48675 - DNA, 201 bp, Homo sapiens; identical to SEQ ID NO: 48610

SEQ ID NO: 48676 - DNA, 201 bp, Homo sapiens
ctttgggaaagatcagagagggcagaggtggcacaggacagtaaaggagatgctgtgctggccttcagcctggacagggtctctgctgactgccaggggcrggggctctgcatagccaggatgacggctttcatgtcccagagacctgttgtgctgtgtattttgatttcctgtgtatgcaaatgtgtgtatttaccattg

SEQ ID NO: 48677 - DNA, 201 bp, Homo sapiens
ctcctgtagcccacacccttcttaaagcggcggcgggaagatgaggcttcgggagccgctcctgagcggcagcgccgcgatgccaggcgcgtccctacagygggcctgccgcctgctcgtggccgtctgcgctctgcaccttggcgtcaccctcgtttactacctggctggccgcgacctgagccgcctgccccaactggt

SEQ ID NO: 48678 - DNA, 201 bp, Homo sapiens
gcgctctgcaccttggcgtcaccctcgtttactacctggctggccgcgacctgagccgcctgccccaactggtcggagtctccacaccgctgcagggcggstcgaacagtgccgccgccatcgggcagtcctccggggagctccggaccggaggggcccggccgccgcctcctctaggcgcctcctcccagccgcgcccgg

SEQ ID NO: 48679 - DNA, 201 bp, Homo sapiens
tgcgggtttcttgatgtgttcgcagtgtcacccaagagtcagaactgtacacatcccaaaatttggtggccgtggaacacattcccggtgatagaattgcyaaattgtcgtgaaataggttagaatttttctttaaattatggttttcttattcgtgaaaattcggagagtgctgctaaaattggattggtgtgatctttt

SEQ ID NO: 48680 - DNA, 201 bp, Homo sapiens
attagccagggacctctgctgtgtgtctctgccaatctgctgggctggtccctctcatttttaccagtctgagtgacaggtccccttcgctcatcattcaratggctttccagatgaccaggacgagtgggatattttgcccccaacttggctcggcatgtgaattcttagctctgcaaggtgtttatgcctttgcgggtt

SEQ ID NO: 48681 - DNA, 201 bp, Homo sapiens
cttttccaaagtgccttaaaagaaatcagacaaatgccctgagtggtaacttctgtgttattttactcttaaaaccaaactctaccttttcttgttgtttktttttttttttggttaccttctcattcatgtcaagtatgtggttcattcttagaaccaagggaaatactgctccccccatttgctgacgtagtgctctca

SEQ ID NO: 48682 - DNA, 201 bp, Homo sapiens
cgtgctaagctcctcaatgttggctttcaagaagccttgaaggactatgactacacctgctttgtgtttagtgacgtggacctcattccaatgaatgaccrtaatgcgtacaggtgtttttcacagccacggcacatttccgttgcaatggataagtttggattcagcctaccttatgttcagtattttggaggtgtctct

SEQ ID NO: 48683 - DNA, 201 bp, Homo sapiens
agggagcatttccttttcctgggagttatgaccgcgaagttgtcatgtgccgtgcccttttctgtttctgtgtatcctattgctggtgactctgtgtgaamtggcctttgggaaagatcagagagggcagaggtggcacaggacagtaaaggagatgctgtgctggccttcagcctggacagggtctctgctgactgccag

SEQ ID NO: 48684 - DNA, 201 bp, Homo sapiens
gctatgcccccagggactgcgtctctcctcacaaggtggccatcatcattccattccgcaaccggcaggagcacctcaagtactggctatattatttgcayccagtcctgcagcgccagcagctggactatggcatctatgttatcaaccaggcgggagacactatattcaatcgtgctaagctcctcaatgttggctttc

SEQ ID NO: 48685 - DNA, 201 bp, Homo sapiens
atcgtgctaagctcctcaatgttggctttcaagaagccttgaaggactatgactacacctgctttgtgtttagtgacgtggacctcattccaatgaatgaycataatgcgtacaggtgtttttcacagccacggcacatttccgttgcaatggataagtttggattcagcctaccttatgttcagtattttggaggtgtct

SEQ ID NO: 48686 - DNA, 201 bp, Homo sapiens
tgccttaaaagaaatcagacaaatgccctgagtggtaacttctgtgttattttactcttaaaaccaaactctaccttttcttgttgttttttttttttttkggttaccttctcattcatgtcaagtatgtggttcattcttagaaccaagggaaatactgctccccccatttgctgacgtagtgctctcatgggctcacct

SEQ ID NO: 48687 - DNA, 201 bp, Homo sapiens
acactatattcaatcgtgctaagctcctcaatgttggctttcaagaagccttgaaggactatgactacacctgctttgtgtttagtgacgtggacctcatyccaatgaatgaccataatgcgtacaggtgtttttcacagccacggcacatttccgttgcaatggataagtttggattcagcctaccttatgttcagtatt

SEQ ID NO: 48688 - DNA, 201 bp, Homo sapiens
agtttaacatgcctgtggacctggagctcgtggcaaagcagaacccaaatgtgaagatgggcggccgctatgcccccagggactgcgtctctcctcacaargtggccatcatcattccattccgcaaccggcaggagcacctcaagtactggctatattatttgcacccagtcctgcagcgccagcagctggactatggca

SEQ ID NO: 48689 - DNA, 201 bp, Homo sapiens
cttaaaagaaatcagacaaatgccctgagtggtaacttctgtgttattttactcttaaaaccaaactctaccttttcttgttgtttttttttttttttggktaccttctcattcatgtcaagtatgtggttcattcttagaaccaagggaaatactgctccccccatttgctgacgtagtgctctcatgggctcacctggg

SEQ ID NO: 48690 - DNA, 201 bp, Homo sapiens
tcttgatgtgttcgcagtgtcacccaagagtcagaactgtacacatcccaaaatttggtggccgtggaacacattcccggtgatagaattgctaaattgtygtgaaataggttagaatttttctttaaattatggttttcttattcgtgaaaattcggagagtgctgctaaaattggattggtgtgatctttttggtagtt

SEQ ID NO: 48691 - DNA, 201 bp, Homo sapiens
tttccattgcagaagcagctggactatgcaaaaagtatttctctgtcagttccccactctataccaaggatattattaaaactagaaatgactgcattgakagggagttgtgggaaataagaagaatgaaagcctctctttctgtccgcagatcctgacttttccaaagtgccttaaaagaaatcagacaaatgccctgag

SEQ ID NO: 48692 - DNA, 152 bp, Homo sapiens
tgttgtgctgtgtattttgatttcctgtgtatgcaaatgtgtgtatttaccattgtgtagggggctgtgtctgatcttggtgttcaaaacagaactgtatktttgcctttaaaattaaataatataacgtgaataaatgaccctatctttgt

SEQ ID NO: 48693 - DNA, 201 bp, Homo sapiens; identical to SEQ ID NO: 48676

SEQ ID NO: 48694 - DNA, 201 bp, Homo sapiens; identical to SEQ ID NO: 48677

SEQ ID NO: 48695 - DNA, 201 bp, Homo sapiens; identical to SEQ ID NO: 48678

SEQ ID NO: 48696 - DNA, 201 bp, Homo sapiens; identical to SEQ ID NO: 48679

SEQ ID NO: 48697 - DNA, 201 bp, Homo sapiens; identical to SEQ ID NO: 48680

SEQ ID NO: 48698 - DNA, 201 bp, Homo sapiens
cttttccaaagtgccttaaaagaaatcagacaaatgccctgagtggtaacttctgtgttattttactcttaaaaccaaactctaccttttcttgttgtttktttttgttttttttttttttttttggttaccttctcattcatgtcaagtatgtggttcattcttagaaccaagggaaatactgctccccccatttgctga

SEQ ID NO: 48699 - DNA, 201 bp, Homo sapiens; identical to SEQ ID NO: 48682

SEQ ID NO: 48700 - DNA, 201 bp, Homo sapiens; identical to SEQ ID NO: 48683

SEQ ID NO: 48701 - DNA, 201 bp, Homo sapiens; identical to SEQ ID NO: 48684

SEQ ID NO: 48702 - DNA, 201 bp, Homo sapiens; identical to SEQ ID NO: 48685

SEQ ID NO: 48703 - DNA, 201 bp, Homo sapiens
atcagacaaatgccctgagtggtaacttctgtgttattttactcttaaaaccaaactctaccttttcttgttgtttttttttgtttttttttttttttttkggttaccttctcattcatgtcaagtatgtggttcattcttagaaccaagggaaatactgctccccccatttgctgacgtagtgctctcatgggctcacct

SEQ ID NO: 48704 - DNA, 201 bp, Homo sapiens; identical to SEQ ID NO: 48687

SEQ ID NO: 48705 - DNA, 201 bp, Homo sapiens; identical to SEQ ID NO: 48688

SEQ ID NO: 48706 - DNA, 201 bp, Homo sapiens
agacaaatgccctgagtggtaacttctgtgttattttactcttaaaaccaaactctaccttttcttgttgtttttttttgttttttttttttttttttggktaccttctcattcatgtcaagtatgtggttcattcttagaaccaagggaaatactgctccccccatttgctgacgtagtgctctcatgggctcacctggg

SEQ ID NO: 48707 - DNA, 201 bp, Homo sapiens; identical to SEQ ID NO: 48690

SEQ ID NO: 48708 - DNA, 201 bp, Homo sapiens; identical to SEQ ID NO: 48691

SEQ ID NO: 48709 - DNA, 156 bp, Homo sapiens
tgttgtgctgtgtattttgatttcctgtgtatgcaaatgtgtgtatttaccattgtgtagggggctgtgtctgatcttggtgttcaaaacagaactgtatktttgcctttaaaattaaataatataacgtgaataaatgaccctatctttgtaact

SEQ ID NO: 48710 - DNA, 201 bp, Homo sapiens; identical to SEQ ID NO: 48676

SEQ ID NO: 48711 - DNA, 201 bp, Homo sapiens; identical to SEQ ID NO: 48677

SEQ ID NO: 48712 - DNA, 201 bp, Homo sapiens; identical to SEQ ID NO: 48678

SEQ ID NO: 48713 - DNA, 201 bp, Homo sapiens; identical to SEQ ID NO: 48679

SEQ ID NO: 48714 - DNA, 201 bp, Homo sapiens; identical to SEQ ID NO: 48680

SEQ ID NO: 48715 - DNA, 201 bp, Homo sapiens; identical to SEQ ID NO: 48698

SEQ ID NO: 48716 - DNA, 201 bp, Homo sapiens; identical to SEQ ID NO: 48682

SEQ ID NO: 48717 - DNA, 201 bp, Homo sapiens; identical to SEQ ID NO: 48683

SEQ ID NO: 48718 - DNA, 201 bp, Homo sapiens; identical to SEQ ID NO: 48684

SEQ ID NO: 48719 - DNA, 201 bp, Homo sapiens; identical to SEQ ID NO: 48685

SEQ ID NO: 48720 - DNA, 201 bp, Homo sapiens; identical to SEQ ID NO: 48703

SEQ ID NO: 48721 - DNA, 201 bp, Homo sapiens; identical to SEQ ID NO: 48687

SEQ ID NO: 48722 - DNA, 201 bp, Homo sapiens; identical to SEQ ID NO: 48688

SEQ ID NO: 48723 - DNA, 201 bp, Homo sapiens; identical to SEQ ID NO: 48706

SEQ ID NO: 48724 - DNA, 201 bp, Homo sapiens; identical to SEQ ID NO: 48690

SEQ ID NO: 48725 - DNA, 201 bp, Homo sapiens; identical to SEQ ID NO: 48691

SEQ ID NO: 48726 - DNA, 156 bp, Homo sapiens; identical to SEQ ID NO: 48709

SEQ ID NO: 48727 - DNA, 201 bp, Homo sapiens
ttggcatgggctattataactgctcagtgccacagacgattttgcggaacttactggagaactcaggatggatcacccagtatactccataccagcctgargtgtctcaggggaggctggagagtttactcaactaccagaccatggtgtgtgacatcacaggcctggacatggccaatgcatccctgctggatgagggga

SEQ ID NO: 48728 - DNA, 181 bp, Homo sapiens
catctgtgggaaatcccagggcaaatgtttacattttgtataccctgaagaactctttttcctctaatatgcctaatctgtaatcacatttctgagtgttytcctctttttctgtgtgaggtttttttttttttaatctgcatttattagtattctaataaaagcatcttgatcggaagaa

SEQ ID NO: 48729 - DNA, 201 bp, Homo sapiens
atgcatccctgctggatgaggggactgcagccgcagaggcactgcagctgtgctacagacacaacaagaggaggaaatttctcgttgatccccgttgccayccacagacaatagctgttgtccagactcgagccaaatatactggagtcctcactgagctgaagttaccctgtgaaatggacttcagtggaaaagatgtca

SEQ ID NO: 48730 - DNA, 201 bp, Homo sapiens
tggacatggccaatgcatccctgctggatgaggggactgcagccgcagaggcactgcagctgtgctacagacacaacaagaggaggaaatttctcgttgayccccgttgccacccacagacaatagctgttgtccagactcgagccaaatatactggagtcctcactgagctgaagttaccctgtgaaatggacttcagtg

SEQ ID NO: 48731 - DNA, 201 bp, Homo sapiens
tgacatatatggagatcagcacctggtttgtacctgcccacccatggaagtttatgagtctccattttctgaacaaaagagggcgtcttcttagtcctctstccctaagtttaaaggactgatttgatgcctctccccagagcatttgataagcaagaaagatttcatctcccaccccagcctcaagtaggagttttatat

SEQ ID NO: 48732 - DNA, 201 bp, Homo sapiens
caggcctggacatggccaatgcatccctgctggatgaggggactgcagccgcagaggcactgcagctgtgctacagacacaacaagaggaggaaatttctygttgatccccgttgccacccacagacaatagctgttgtccagactcgagccaaatatactggagtcctcactgagctgaagttaccctgtgaaatggact

SEQ ID NO: 48733 - DNA, 201 bp, Homo sapiens
aaaatgaaatccttgcaactctgcatgccatttcaagcaaaaaccagatctggagatcgtatattggcatgggctattataactgctcagtgccacagacrattttgcggaacttactggagaactcaggatggatcacccagtatactccataccagcctgaggtgtctcaggggaggctggagagtttactcaactacc

SEQ ID NO: 48734 - DNA, 201 bp, Homo sapiens
ccttttagctttgtgcatcttgaggccacctggagaatttggggtagacatcgccctgggcagctcccagagatttggagtgccactgggctatgggggamcccatgcagcattttttgctgtccgagaaagcttggtgagaatgatgcctggaagaatggtgggggtaacaagagatgccactgggaaagaagtgtatcg

SEQ ID NO: 48735 - DNA, 114 bp, Homo sapiens
tatgcctaatctgtaatcacatttctgagtgttctcctctttttctgtgtgaggtttttttttttttaatctgcatttattagtattctaataaaagcatyttgatcggaagaa

SEQ ID NO: 48736 - DNA, 201 bp, Homo sapiens; identical to SEQ ID NO: 48727

SEQ ID NO: 48737 - DNA, 181 bp, Homo sapiens; identical to SEQ ID NO: 48728

SEQ ID NO: 48738 - DNA, 201 bp, Homo sapiens; identical to SEQ ID NO: 48729

SEQ ID NO: 48739 - DNA, 201 bp, Homo sapiens; identical to SEQ ID NO: 48730

SEQ ID NO: 48740 - DNA, 201 bp, Homo sapiens; identical to SEQ ID NO: 48731

SEQ ID NO: 48741 - DNA, 201 bp, Homo sapiens; identical to SEQ ID NO: 48732

SEQ ID NO: 48742 - DNA, 201 bp, Homo sapiens; identical to SEQ ID NO: 48733

SEQ ID NO: 48743 - DNA, 201 bp, Homo sapiens; identical to SEQ ID NO: 48734

SEQ ID NO: 48744 - DNA, 114 bp, Homo sapiens; identical to SEQ ID NO: 48735

SEQ ID NO: 48745 - DNA, 143 bp, Homo sapiens
acacactcttttacgttatttataaaagagtctcactcaatgraagctggatttcctctcctgtaaaatgagaaattggcgtgttagccaaggctttcattgaccaagggaaactcatcccagatgatgtcatgactcggctg

SEQ ID NO: 48746 - DNA, 201 bp, Homo sapiens
ggttcttatgtgttttggggggaaaattttatttcccttttcttctgatatttaaaaaattcatcgatctttcaagatgaaccaaggttttttaaaagaawtataggaaacacttcattctttataaaactttctataatgccttatttgaatgttaatcttatgtgctttctaaaaaatgttgtgaaataccaaacttat

SEQ ID NO: 48747 - DNA, 201 bp, Homo sapiens
tcaatttgctataaagatgtatcaattagcatatagaaaaatattactttaagatgacttgtttcctttgaaaatacctgtgtactgagggttatgatttktgtcaaaaattgacataagtgcttttacaagcaccaaagttgaatgaattttcaacaaaatgtaattaaagtctatgttttcagttatgactcaggttaa

SEQ ID NO: 48748 - DNA, 201 bp, Homo sapiens
tatcaagcatatattagtctttatcagaataaaatgaaatttcataactgtggctattactttgttcttggtccttcacagggcctgctccatcccacctkcctttctgctgcctgatgtctcaatggcttctgaatgactgttctaataaatgatcttaaaacagtccataggctggtttcagtttatgcaatacttcat

SEQ ID NO: 48749 - DNA, 201 bp, Homo sapiens
gcatatattagtctttatcagaataaaatgaaatttcataactgtggctattactttgttcttggtccttcacagggcctgctccatcccaccttcctttytgctgcctgatgtctcaatggcttctgaatgactgttctaataaatgatcttaaaacagtccataggctggtttcagtttatgcaatacttcatctcctg

SEQ ID NO: 48750 - DNA, 201 bp, Homo sapiens
gccaaatcaaatgaaacaagccgtcttacaagtcgttattgcctttaaaaatctgttccgtttttttcccaggtacttaaaatacaagtgccagtaagtgrttcttatgtgttttggggggaaaattttatttcccttttcttctgatatttaaaaaattcatcgatctttcaagatgaaccaaggttttttaaaagaaat

SEQ ID NO: 48751 - DNA, 201 bp, Homo sapiens
ccatgaggagaaatgtgtgtaactattaatagtaagatgggcaaacctcctagtccttgcatttagaagctgcttttcctaagacttctagtatgtatgamttctttgaaaattatattacttttatttctactgattttattttggatactaaggatgtgccaaatgattcggatactaagatgcatcgtttgaaatcat

SEQ ID NO: 48752 - DNA, 201 bp, Homo sapiens
attagcatatagaaaaatattactttaagatgacttgtttcctttgaaaatacctgtgtactgagggttatgatttgtgtcaaaaattgacataagtgctyttacaagcaccaaagttgaatgaattttcaacaaaatgtaattaaagtctatgttttcagttatgactcaggttaagaaatgtgttttaggatctacttg

SEQ ID NO: 48753 - DNA, 201 bp, Homo sapiens
cactgccaccatattttaaggagaaagaactctattggtgtcgtctgagcagccatttaaaaattggaatctaaaggatggttgctgatgtactgtgtggyctggtagaagtggggaaatatgagagatggaggaaaaacttgattatgtcttccatggcatatttactcttactttacttcgtgccaaatcaaatgaaac

SEQ ID NO: 48754 - DNA, 201 bp, Homo sapiens
aaacccgtggcactatgtaaataaagtaagcatactttgttgttagtaaatagatgaggcatgcctgggaaatgctcccttggcataaatagcaatcaatyataattagtaaacaggtgtaccaataaaaagaatttacatgataggttaacaaggaccaggaaagtgagtttcctgaaggagttctttgttcctgatcaa

SEQ ID NO: 48755 - DNA, 201 bp, Homo sapiens
aagatgaaccaaggttttttaaaagaaatataggaaacacttcattctttataaaactttctataatgccttatttgaatgttaatcttatgtgctttctraaaaatgttgtgaaataccaaacttatggattatcactaggttatcaagcatatattagtctttatcagaataaaatgaaatttcataactgtggctatt

SEQ ID NO: 48756 - DNA, 113 bp, Homo sapiens
tctggacatcacatcaaaatatggcagaagctaaagcaggaagacagagaaggaggcaaaacagctttattcacttgtggctctcatatgaagaataaagmtatttctcgaaa

SEQ ID NO: 48757 - DNA, 201 bp, Homo sapiens
tcagttactccatgaggagaaatacagggcctcactctgttgcccagactagagtgcagtggcataattgggtcactgtaacgttgaactcctgggctcaygcaattcttctacctcagcctcccaagtagctgaaactacaggcttcttacatcatggttgcaggatggctgctacagctctggacatcacatcaaaata

SEQ ID NO: 48758 - DNA, 201 bp, Homo sapiens
cctcactctgttgcccagactagagtgcagtggcataattgggtcactgtaacgttgaactcctgggctcacgcaattcttctacctcagcctcccaagtrgctgaaactacaggcttcttacatcatggttgcaggatggctgctacagctctggacatcacatcaaaatatggcagaagctaaagcaggaagacagaga

SEQ ID NO: 48759 - DNA, 201 bp, Homo sapiens
actagagtgcagtggcataattgggtcactgtaacgttgaactcctgggctcacgcaattcttctacctcagcctcccaagtagctgaaactacaggcttsttacatcatggttgcaggatggctgctacagctctggacatcacatcaaaatatggcagaagctaaagcaggaagacagagaaggaggcaaaacagcttt

SEQ ID NO: 48760 - DNA, 201 bp, Homo sapiens; identical to SEQ ID NO: 48746

SEQ ID NO: 48761 - DNA, 201 bp, Homo sapiens; identical to SEQ ID NO: 48747

SEQ ID NO: 48762 - DNA, 201 bp, Homo sapiens; identical to SEQ ID NO: 48748

SEQ ID NO: 48763 - DNA, 201 bp, Homo sapiens; identical to SEQ ID NO: 48749

SEQ ID NO: 48764 - DNA, 201 bp, Homo sapiens; identical to SEQ ID NO: 48750

SEQ ID NO: 48765 - DNA, 201 bp, Homo sapiens; identical to SEQ ID NO: 48751

SEQ ID NO: 48766 - DNA, 201 bp, Homo sapiens; identical to SEQ ID NO: 48752

SEQ ID NO: 48767 - DNA, 201 bp, Homo sapiens; identical to SEQ ID NO: 48753

SEQ ID NO: 48768 - DNA, 201 bp, Homo sapiens; identical to SEQ ID NO: 48754

SEQ ID NO: 48769 - DNA, 201 bp, Homo sapiens; identical to SEQ ID NO: 48755

SEQ ID NO: 48770 - DNA, 201 bp, Homo sapiens
actttggcgtccctgtgggcggcctttggtgtgagacgcgtggtattctgggaacgtcggagacggaagttacttcgtctttagctcctggcgctgctggyttctgggcggtttttgtcttttgatttcaagagttaggagctcgagaaccgtttggcaatatgtacgacgcggatgaggatatgcaatatgatgaggatg

SEQ ID NO: 48771 - DNA, 201 bp, Homo sapiens
atattctggaggtttatagctcggcaccttcacctgtttaaaaaaaaaaaaagataaaaattagttacatatggggatgtggttgacttttgaattggcakgtagttgagtgtttccaaataaatgaagatgttaaaatatggggataaaggatatatgagtaattgtataaatgatatgctggagtgctctgtggaactc

SEQ ID NO: 48772 - DNA, 201 bp, Homo sapiens
gattcagagaggttaaagacctttcctttgtagtccggatctccttcaaaaggtaaagtggaggaataattagtagcagagctgagactcaaacgcatggyttgactcttagctactgttctgtttcattgcctgacattacacattatggctgaagagaatctgaccaaatacttctttacttaatatttcttttcatat

SEQ ID NO: 48773 - DNA, 118 bp, Homo sapiens
gtgtcgttatttgtgcamcaacattgaaaaacaagcagaaataaaacattgacggaacggatacgaccgcagattgcgggagctgtcctctcaatcagcccggcagcggcggcccaca

SEQ ID NO: 48774 - DNA, 201 bp, Homo sapiens
acgtcggagacggaagttacttcgtctttagctcctggcgctgctggcttctgggcggtttttgtcttttgatttcaagagttaggagctcgagaaccgtktggcaatatgtacgacgcggatgaggatatgcaatatgatgaggatgatgatgaaatcaccccggatttgtggcaagaagcatgctggattgtaatcagt

SEQ ID NO: 48775 - DNA, 201 bp, Homo sapiens
ttatgaacaccctaaggaaattgagacgtcagatggacatcattgtgtctgaagtttctatgatcagagatattcgagagagggagattcggatctatacrgatgcaggccgtatttgtagaccacttctgattgtggaaaaacaaaagctacttttgaagaagaggcatattgaccaattgaaagagagagaatataaca

SEQ ID NO: 48776 - DNA, 201 bp, Homo sapiens
aaccaagacagttgcataatacgttgtggggaatggtgtgtcctgccgagaccccagagggccatgctgtaggacttgtgaagaatttagccttgatggcrtatatttcagttggatctcaaccatctccaattctggaatttttagaagaatggagtatggaaaatttagaagaaatttctcctgcagctattgctgatg

SEQ ID NO: 48777 - DNA, 201 bp, Homo sapiens
acaatgagattcagagaggttaaagacctttcctttgtagtccggatctccttcaaaaggtaaagtggaggaataattagtagcagagctgagactcaaaygcatggcttgactcttagctactgttctgtttcattgcctgacattacacattatggctgaagagaatctgaccaaatacttctttacttaatatttctt

SEQ ID NO: 48778 - DNA, 197 bp, Homo sapiens
gtgtcgttatttgtgcaacaacattgaaaaacaagcagaaataaaacattgacggaacggatacgaccgcagattgcgggagctgtcctctcaatcrgcccggcagcggcggcccacaatttacgcgtgtgcaaccctaaccccggcccaagcttgacctacaatttgcgcaggcgcagatcctaactttggcgtcc

SEQ ID NO: 48779 - DNA, 201 bp, Homo sapiens
ttctcctgcagctattgctgatgcaaccaagatttttgttaatggctgctgggttggaatacataaagatcccgaacaacttatgaacaccctaaggaaaytgagacgtcagatggacatcattgtgtctgaagtttctatgatcagagatattcgagagagggagattcggatctatacggatgcaggccgtatttgtag

SEQ ID NO: 48780 - DNA, 201 bp, Homo sapiens
  misc_feature (1)...(201): n = A,T,C or G
ttataggcaaaacagtcaccttgcctgaaaatgaagatgaattggagagcaccaatagacgctataccaagagagactgtagcacttttctcagaactagngagacgggcattgtggatcaggttatggtaactctcaatcaggaaggatataaattttgtaaaataagggtacgctctgttaggattccacagattggag

SEQ ID NO: 48781 - DNA, 201 bp, Homo sapiens
gagagctgccagcaggcatcaactcaattgtggccattgcatcatacactggatataatcaggaagactctgttatcatgaatcgttcagctgtagaccgyggcttcttcaggtctgttttctatcgctcatacaaagaacaggagtctaaaaaaggatttgatcaagaagaagtttttgagaagcctacacgtgaaacat

SEQ ID NO: 48782 - DNA, 201 bp, Homo sapiens
tgccaacaccaggacccatacatatgaatgcaggggctgccgcaataaaacccagatttctttggtgcgaatgccttacgcatgcaaactattgtttcagraacttatgtctatgagtattgcaccgcgaatgatgagtgtttagctattttacaggagtcaacaagataattaaatatcttggtgtcttgtttctattgt

SEQ ID NO: 48783 - DNA, 201 bp, Homo sapiens; identical to SEQ ID NO: 48770

SEQ ID NO: 48784 - DNA, 201 bp, Homo sapiens; identical to SEQ ID NO: 48771

SEQ ID NO: 48785 - DNA, 201 bp, Homo sapiens; identical to SEQ ID NO: 48772

SEQ ID NO: 48786 - DNA, 191 bp, Homo sapiens
tctgagactgagaacctacttaaagctatggcaaaggcactggaggattgagctaggtgggcagaaaagagcagtgtcgttatttgtgcamcaacattgaaaaacaagcagaaataaaacattgacggaacggatacgaccgcagattgcgggagctgtcctctcaatcagcccggcagcggcggcccaca

SEQ ID NO: 48787 - DNA, 201 bp, Homo sapiens; identical to SEQ ID NO: 48774

SEQ ID NO: 48788 - DNA, 201 bp, Homo sapiens; identical to SEQ ID NO: 48775

SEQ ID NO: 48789 - DNA, 201 bp, Homo sapiens; identical to SEQ ID NO: 48776

SEQ ID NO: 48790 - DNA, 201 bp, Homo sapiens; identical to SEQ ID NO: 48777

SEQ ID NO: 48791 - DNA, 201 bp, Homo sapiens
agcagtgtcgttatttgtgcaacaacattgaaaaacaagcagaaataaaacattgacggaacggatacgaccgcagattgcgggagctgtcctctcaatcrgcccggcagcggcggcccacaatttacgcgtgtgcaaccctaaccccggcccaagcttgacctacaatttgcgcaggcgcagatcctaactttggcgtcc

SEQ ID NO: 48792 - DNA, 201 bp, Homo sapiens; identical to SEQ ID NO: 48779

SEQ ID NO: 48793 - DNA, 201 bp, Homo sapiens; identical to SEQ ID NO: 48780
  misc_feature (1)...(201): n = A,T,C or G

SEQ ID NO: 48794 - DNA, 201 bp, Homo sapiens; identical to SEQ ID NO: 48781

SEQ ID NO: 48795 - DNA, 201 bp, Homo sapiens; identical to SEQ ID NO: 48782

SEQ ID NO: 48796 - DNA, 201 bp, Homo sapiens
aagggagacttgttggagaggcgggactctgagttatctaatgtcagacatctagtggggcagctctcttcctcatgttataacatggatccacttgtttkatttaaaccttttaatataattttggtcagtctccttcagaaatataatctccatattgataggaaagcaataattgccatgaggtaacgatttttttcc

SEQ ID NO: 48797 - DNA, 201 bp, Homo sapiens
ggagttcctagatcacatttggcaatttacacattattttattgacctatccagtgctccaaaatgtgttccaaaatattttggcattttatttgtactayataggaatctttaggggagtccctgaaatttgttttcctcttaggtcaaaggactgataattaactttggttcttaaggagtatgccctttagcaataag

SEQ ID NO: 48798 - DNA, 201 bp, Homo sapiens
atactatacatgctaattgccaagatttgaatgagtcaaatttagtagcttgctgcttttattttttaaatggcttcttttacgtattggcgggggcgggkggggggggcagggtatgaggcttcttttccctcagctttcattgaaagtgaagctgtacaataaccacattgaccactgtagaatgatgaaagagaatat

SEQ ID NO: 48799 - DNA, 201 bp, Homo sapiens
cccacatcctgtgcatcaaggacatggccgggctgctgaagcccacggcctgcaccatgctggtcagctccctccgggaccgcttccccgacctcccactscacatccacacccacgacacgtcaggggcaggcgtggcagccatgctggcctgtgcccaggctggagctgatgtggtggatgtggcagctgattccatgt

SEQ ID NO: 48800 - DNA, 201 bp, Homo sapiens
actgctggccactcgtgtgcgcacccacgatctcaaaaagatcgccccctatgttgcccacaacttcagcaagctcttcagcatggagaactggggaggarccacgtttgacgtcgccatgcgcttcctgtatgagtgcccctggcggcggctgcaggagctccgggagctcatccccaacatccctttccagatgctgct

SEQ ID NO: 48801 - DNA, 201 bp, Homo sapiens
ccatggagcgcgtgtttgactacagtgagtactgggagggggctcggggactgtacgcggccttcgactgcacggccaccatgaagtctggcaactcggaygtgtatgaaaatgagatcccagggggccagtacaccaacctgcacttccaggcccacagcatggggcttggctccaagttcaaggaggtcaagaaggcct

SEQ ID NO: 48802 - DNA, 201 bp, Homo sapiens
tggccgaccccagccgcaccaagtactcactgcagtactacatgggcttggccgaagagctggtgcgagctggcacccacatcctgtgcatcaaggacatkgccgggctgctgaagcccacggcctgcaccatgctggtcagctccctccgggaccgcttccccgacctcccactgcacatccacacccacgacacgtcag

SEQ ID NO: 48803 - DNA, 201 bp, Homo sapiens
tcactgccacctttggccccctggatagcctgaatactcgcctcttcctgcagggacccaagatcgcagaggagtttgaggtggagctggagcggggcaaracgctgcacatcaaagccctggccgtgagcgacctgaaccgggccggccagaggcaggtcttctttgagctcaatgggcagctgcggtccatcttggtca

SEQ ID NO: 48804 - DNA, 201 bp, Homo sapiens
agcctgaatactcgcctcttcctgcagggacccaagatcgcagaggagtttgaggtggagctggagcggggcaagacgctgcacatcaaagccctggccgkgagcgacctgaaccgggccggccagaggcaggtcttctttgagctcaatgggcagctgcggtccatcttggtcaaggacacccaggccatgaaggagatg

SEQ ID NO: 48805 - DNA, 201 bp, Homo sapiens
gcgcctggagtataagcccatcaagaaagtcatggtggccaacagaggtgagattgccatccgtgtgttccgggcctgcacggagctgggcatccgcaccrtagccatctactctgagcaggacacgggccagatgcaccggcagaaagcagatgaagcctatctcatcggccgcggcctggcccccgtgcaggcctacct

SEQ ID NO: 48806 - DNA, 201 bp, Homo sapiens
gggctcggggactgtacgcggccttcgactgcacggccaccatgaagtctggcaactcggacgtgtatgaaaatgagatcccagggggccagtacaccaayctgcacttccaggcccacagcatggggcttggctccaagttcaaggaggtcaagaaggcctatgtggaggccaaccagatgctgggcgatctcatcaagg

SEQ ID NO: 48807 - DNA, 201 bp, Homo sapiens
agctggtgcgagctggcacccacatcctgtgcatcaaggacatggccgggctgctgaagcccacggcctgcaccatgctggtcagctccctccgggaccgsttccccgacctcccactgcacatccacacccacgacacgtcaggggcaggcgtggcagccatgctggcctgtgcccaggctggagctgatgtggtggatg

SEQ ID NO: 48808 - DNA, 201 bp, Homo sapiens
ggcggcaggaagtgccggaggcgtggtggaggctgccatctcatacacgggcgacgtggccgaccccagccgcaccaagtactcactgcagtactacatgsgcttggccgaagagctggtgcgagctggcacccacatcctgtgcatcaaggacatggccgggctgctgaagcccacggcctgcaccatgctggtcagctc

SEQ ID NO: 48809 - DNA, 201 bp, Homo sapiens
caaagagaatggcatggatgtcttccgtgtgtttgactccctcaactacttgcccaacatgctgctgggcatggaggcggcaggaagtgccggaggcgtgktggaggctgccatctcatacacgggcgacgtggccgaccccagccgcaccaagtactcactgcagtactacatgggcttggccgaagagctggtgcgagc

SEQ ID NO: 48810 - DNA, 201 bp, Homo sapiens
aggcactggagaaggagctggtagaccggcatggggaggaggtgacgccggaagatgtgctctcagcagctatgtaccccgatgtgtttgcccacttcaakgacttcactgccacctttggccccctggatagcctgaatactcgcctcttcctgcagggacccaagatcgcagaggagtttgaggtggagctggagcggg

SEQ ID NO: 48811 - DNA, 201 bp, Homo sapiens
ggcagctgattccatgtctgggatgacttcacagcccagcatgggggccctggtggcctgtaccagagggactcccctggacacagaggtgcccatggagygcgtgtttgactacagtgagtactgggagggggctcggggactgtacgcggccttcgactgcacggccaccatgaagtctggcaactcggacgtgtatga

SEQ ID NO: 48812 - DNA, 201 bp, Homo sapiens; identical to SEQ ID NO: 48799

SEQ ID NO: 48813 - DNA, 201 bp, Homo sapiens; identical to SEQ ID NO: 48800

SEQ ID NO: 48814 - DNA, 201 bp, Homo sapiens; identical to SEQ ID NO: 48801

SEQ ID NO: 48815 - DNA, 201 bp, Homo sapiens; identical to SEQ ID NO: 48802

SEQ ID NO: 48816 - DNA, 201 bp, Homo sapiens; identical to SEQ ID NO: 48803

SEQ ID NO: 48817 - DNA, 201 bp, Homo sapiens; identical to SEQ ID NO: 48804

SEQ ID NO: 48818 - DNA, 201 bp, Homo sapiens; identical to SEQ ID NO: 48805

SEQ ID NO: 48819 - DNA, 201 bp, Homo sapiens; identical to SEQ ID NO: 48806

SEQ ID NO: 48820 - DNA, 201 bp, Homo sapiens; identical to SEQ ID NO: 48807

SEQ ID NO: 48821 - DNA, 201 bp, Homo sapiens; identical to SEQ ID NO: 48799

SEQ ID NO: 48822 - DNA, 201 bp, Homo sapiens; identical to SEQ ID NO: 48800

SEQ ID NO: 48823 - DNA, 201 bp, Homo sapiens; identical to SEQ ID NO: 48801

SEQ ID NO: 48824 - DNA, 201 bp, Homo sapiens; identical to SEQ ID NO: 48802

SEQ ID NO: 48825 - DNA, 201 bp, Homo sapiens; identical to SEQ ID NO: 48803

SEQ ID NO: 48826 - DNA, 201 bp, Homo sapiens; identical to SEQ ID NO: 48804

SEQ ID NO: 48827 - DNA, 201 bp, Homo sapiens; identical to SEQ ID NO: 48805

SEQ ID NO: 48828 - DNA, 201 bp, Homo sapiens; identical to SEQ ID NO: 48806

SEQ ID NO: 48829 - DNA, 201 bp, Homo sapiens; identical to SEQ ID NO: 48807

SEQ ID NO: 48830 - DNA, 201 bp, Homo sapiens
actacatgggcttggccgaagagctggtgcgagctggcacccacatcctgtgcatcaaggacatggccgggctgctgaagcccacggcctgcaccatgctsgtcagctccctccgggaccgcttccccgacctcccactgcacatccacacccacgacacgtcaggggcaggcgtggcagccatgctggcctgtgcccagg

SEQ ID NO: 48831 - DNA, 201 bp, Homo sapiens
gctgctgatggacacgaccttcagggacgcccaccagtcactgctggccactcgtgtgcgcacccacgatctcaaaaagatcgccccctatgttgcccacracttcagcaagctcttcagcatggagaactggggaggagccacgtttgacgtcgccatgcgcttcctgtatgagtgcccctggcggcggctgcaggagct

SEQ ID NO: 48832 - DNA, 201 bp, Homo sapiens
tggcctgtaccagagggactcccctggacacagaggtgcccatggagcgcgtgtttgactacagtgagtactgggagggggctcggggactgtacgcggcyttcgactgcacggccaccatgaagtctggcaactcggacgtgtatgaaaatgagatcccagggggccagtacaccaacctgcacttccaggcccacagca

SEQ ID NO: 48833 - DNA, 201 bp, Homo sapiens
gaggcgtggtggaggctgccatctcatacacgggcgacgtggccgaccccagccgcaccaagtactcactgcagtactacatgggcttggccgaagagctkgtgcgagctggcacccacatcctgtgcatcaaggacatggccgggctgctgaagcccacggcctgcaccatgctggtcagctccctccgggaccgcttcc

SEQ ID NO: 48834 - DNA, 201 bp, Homo sapiens
cagctatgtaccccgatgtgtttgcccacttcaaggacttcactgccacctttggccccctggatagcctgaatactcgcctcttcctgcagggacccaaratcgcagaggagtttgaggtggagctggagcggggcaagacgctgcacatcaaagccctggccgtgagcgacctgaaccgggccggccagaggcaggtct

SEQ ID NO: 48835 - DNA, 201 bp, Homo sapiens
cacttcaaggacttcactgccacctttggccccctggatagcctgaatactcgcctcttcctgcagggacccaagatcgcagaggagtttgaggtggagckggagcggggcaagacgctgcacatcaaagccctggccgtgagcgacctgaaccgggccggccagaggcaggtcttctttgagctcaatgggcagctgcgg

SEQ ID NO: 48836 - DNA, 201 bp, Homo sapiens; identical to SEQ ID NO: 48801

SEQ ID NO: 48837 - DNA, 201 bp, Homo sapiens
ccaagtactcactgcagtactacatgggcttggccgaagagctggtgcgagctggcacccacatcctgtgcatcaaggacatggccgggctgctgaagccsacggcctgcaccatgctggtcagctccctccgggaccgcttccccgacctcccactgcacatccacacccacgacacgtcaggggcaggcgtggcagcca

SEQ ID NO: 48838 - DNA, 201 bp, Homo sapiens; identical to SEQ ID NO: 48830

SEQ ID NO: 48839 - DNA, 201 bp, Homo sapiens; identical to SEQ ID NO: 48831

SEQ ID NO: 48840 - DNA, 201 bp, Homo sapiens; identical to SEQ ID NO: 48832

SEQ ID NO: 48841 - DNA, 201 bp, Homo sapiens; identical to SEQ ID NO: 48833

SEQ ID NO: 48842 - DNA, 201 bp, Homo sapiens; identical to SEQ ID NO: 48834

SEQ ID NO: 48843 - DNA, 201 bp, Homo sapiens; identical to SEQ ID NO: 48835

SEQ ID NO: 48844 - DNA, 201 bp, Homo sapiens; identical to SEQ ID NO: 48801

SEQ ID NO: 48845 - DNA, 201 bp, Homo sapiens; identical to SEQ ID NO: 48837

SEQ ID NO: 48846 - DNA, 201 bp, Homo sapiens
cgtgtggtcaccctacggctgcctggcctagagagcgtggaccactatcccattctggtggcagtgacgggcatcctggtgcagctcctggtgcgtggccyagcctcagagagagagcaagccacatcagtgctcctggcagatccctgcttccagctacgctcaatatgctatctcctgggacagccagagcccccagca

SEQ ID NO: 48847 - DNA, 201 bp, Homo sapiens
ctctgccctgcgctactattgggatgaatacaaggcttccaatcctcatgcttccttcagtgaggaggcctacatcccgccccaggtcttctataatggcraggtggactactttgacctgcagcgcctggggggcctcctctcgcacctgcggaagaccctcaaagatgaccttgcttccaaagccaacattgtgatcga

SEQ ID NO: 48848 - DNA, 201 bp, Homo sapiens
ctaggtatatcttcctgaccaagtttcgcaagtttctgcaggagaacgccagtggccgggggaacatgcccatgctctgcccccctgagtacatggtctgyttcttacaccggctgatctctgccctgcgctactattgggatgaatacaaggcttccaatcctcatgcttccttcagtgaggaggcctacatcccgcccc

SEQ ID NO: 48849 - DNA, 201 bp, Homo sapiens
tataatggcaaggtggactactttgacctgcagcgcctggggggcctcctctcgcacctgcggaagaccctcaaagatgaccttgcttccaaagccaacaytgtgatcgacccactggagctccagtcaaccgccatggatgacctagatgaggatgaggagccagccccagctatggcccagcgccccatgcaggccctg

SEQ ID NO: 48850 - DNA, 201 bp, Homo sapiens
taaattattattccatacagccctggccctggcccttcttgagggagtggggtttgtggggtgtgcccagcagggatcctgccagatgatgtccacatgaraaggcaggtgtccaacagcttcagcttcacccagtgccccccagacaaataatgacaagtccagggtcttctgatgtgtcaggccagcactccccttgct

SEQ ID NO: 48851 - DNA, 201 bp, Homo sapiens
gggcccagaccaactggatcctggtgcggctctggaggggctgtggcttcgggtaccgctatacacggctgccacatctgctgaaaaccaaacttgaggaygccaatttgcccagcctccagaagccctgcccttccaccctgctgcagcagcacatggcggacctcctacagcagggtcctgatgtggcacccagcttcc

SEQ ID NO: 48852 - DNA, 201 bp, Homo sapiens
aacagatgctggcgcacctgacctctgcatctgcccaggcagcagctgcctccctgcccaccagtgaggaggacctctgccccatctgctatgcccacccyatctctgctgtgttccagccctgtggccacaagtcctgcaaagcctgtatcaaccagcacctgatgaacaacaaggactgcttcttctgcaaaaccaccc

SEQ ID NO: 48853 - DNA, 201 bp, Homo sapiens
caactttgggccgagccaaccgcttcctcagcacagcggctgtgagcctcatgaccccacggcggcctctgagcacctcggagaaagtgaaggtccgcacrctgagcgtggagcagaggacccgtgaggacattgaaggcagccactggaatgagggcttgctgctggggcggccccccgaggagcctgagcagcccctca

SEQ ID NO: 48854 - DNA, 201 bp, Homo sapiens
cgtcttgcctgggtccatgccactgtctactcccaggagaagatgctggacatctactggctgctgcgcgtctgcctgcggaccattgagcacggtgatcrcacagggtctctctttgccttcatgcccgagttctacctgagcgtggccatcaacagctacagtgctctcaagaattactttggtcccgtgcacagcatg

SEQ ID NO: 48855 - DNA, 201 bp, Homo sapiens; identical to SEQ ID NO: 48846

SEQ ID NO: 48856 - DNA, 201 bp, Homo sapiens; identical to SEQ ID NO: 48847

SEQ ID NO: 48857 - DNA, 201 bp, Homo sapiens; identical to SEQ ID NO: 48848

SEQ ID NO: 48858 - DNA, 201 bp, Homo sapiens
gcacagtccgtggtgcaccaggtcctggacctcttgtggctcttcatggaggactacgaggtacaagattgcctcaagcagttgatgatgtctctgcttcrgctgtaccgattctcacccattgtcccagacctgggcctacagatccattacctgcggctcactatcgccatcctgaggcatgagaagtcccgcaagttt

SEQ ID NO: 48859 - DNA, 201 bp, Homo sapiens; identical to SEQ ID NO: 48849

SEQ ID NO: 48860 - DNA, 201 bp, Homo sapiens; identical to SEQ ID NO: 48850

SEQ ID NO: 48861 - DNA, 201 bp, Homo sapiens
gcggctgttggacaaggagagctccaagtggcggttgcggggccagcccaccgtcctcctcacactggcccacatcttccatcactttgcaccgcttctgygcaaggtgtatctggtggaggctgtgctcatgagcttcttgctgggcatcgtggagaagggcacacccacacaggcacagtccgtggtgcaccaggtcct

SEQ ID NO: 48862 - DNA, 201 bp, Homo sapiens
tacagatccattacctgcggctcactatcgccatcctgaggcatgagaagtcccgcaagtttctgcttagcaatgtcctcttcgacgtgctccgctccgtygtcttcttttacatcaagagccccctgcgtgtggaggaggccggcctgcaggagctcattcccaccacctggtggccccactgctccagtagggagggca

SEQ ID NO: 48863 - DNA, 201 bp, Homo sapiens
aacagatgctggcgcacctgacctctgcatctgcccaggcagcagctgcctccctgcccaccagtgaggaggacctctgccccatctgctatgcccacccyatctctgctgtgttccagccctgtggccacaagtcctgcaaagcctgtatcaaccagcacctgatgaacaacaaggactgcttcttctgcaaaaccacca

SEQ ID NO: 48864 - DNA, 201 bp, Homo sapiens; identical to SEQ ID NO: 48851

SEQ ID NO: 48865 - DNA, 170 bp, Homo sapiens
gagtgaggggcggcagggctctgagcctggcgggttccggctattcccttcgcggtccgggctagtccastgcgagggcacctgcagcgcagggatctgggtgcgaaactccgagcggaagctggtctggcagcccccaggaccactggctgcccatgagagatgaagga

SEQ ID NO: 48866 - DNA, 201 bp, Homo sapiens; identical to SEQ ID NO: 48853

SEQ ID NO: 48867 - DNA, 201 bp, Homo sapiens
acctcagatgctgagaaatccagggtcacaggcattgtgcaggagaagctgctgaatgactacctgaaccgcatcttttcctcttctgaacatgcaccccsagcagccaccagcaggaaacccctgaacttccagaacctgccagaacatttggaccagttgctacaggtggacaatgaggaggaggaaagccagggacag

SEQ ID NO: 48868 - DNA, 200 bp, Homo sapiens
gagtgaggggcggcagggctctgagcctggcgggttccggctattcccttcgcggtccgggctagtccagtgcgagggcacctgcagcgcagggatctgrgtgcgaaactccgagcggaagctggtctggcagcccccaggaccactggctgcccatgagagatgaaggatggcatccaagggggccggcatgtctttct

SEQ ID NO: 48869 - DNA, 201 bp, Homo sapiens; identical to SEQ ID NO: 48854

SEQ ID NO: 48870 - DNA, 107 bp, Homo sapiens
gagtgasgggcggcagggctctgagcctggcgggttccggctattcccttcgcggtccgggctagtccagtgcgagggcacctgcagcgcagggatctgggtgcgaa

SEQ ID NO: 48871 - DNA, 201 bp, Homo sapiens; identical to SEQ ID NO: 48846

SEQ ID NO: 48872 - DNA, 201 bp, Homo sapiens
tgcaaaaccaccatcgtgtctgtagaggactgggagaagggagccaatacgagtactacctcctcagctgcctagccctcacagcctgtgccatcctggarcctccacctttgaacccagaccatggccctaattgtgcctgagcttgactttcagtcagggccacagtgagcattaaattattattccatacagccctgg

SEQ ID NO: 48873 - DNA, 201 bp, Homo sapiens; identical to SEQ ID NO: 48850

SEQ ID NO: 48874 - DNA, 201 bp, Homo sapiens; identical to SEQ ID NO: 48851

SEQ ID NO: 48875 - DNA, 201 bp, Homo sapiens; identical to SEQ ID NO: 48863

SEQ ID NO: 48876 - DNA, 201 bp, Homo sapiens
ctctgcatctgcccaggcagcagctgcctccctggtgagtgggaacacggtgcacaggtccatgccacttgaatatgtgtgcactcctacacaggcacaayggacatccacatagccaggcatccaactccagcccacccttcactctcctccctgcagcccaccagtgaggaggacctctgccccatctgctatgcccac

SEQ ID NO: 48877 - DNA, 201 bp, Homo sapiens
agtctggaagaatgtctccaagctgctgttagtgtttatttgaagtgactttgaaggactgataatattatggggcaggcagactctcactatcttaaggkggttcgcctgagccttcttaaagtggtaccccaggccgggcgcggtggctcacgcctgtaatcccagcactttgggaagccaaggcaggtggatcacctg

SEQ ID NO: 48878 - DNA, 201 bp, Homo sapiens
tgcaaaaccaccatcgtgtctgtagaggactgggagaagggagccaatacgagtactacctcctcagctgcctagccctcacagcctgtgccatcctggarcctccacctttgaacccagagccaggctgggccctatttatgagctccctttgcccttctcctgtatcccacaccaccacatccaacctccttgcctgcc

SEQ ID NO: 48879 - DNA, 201 bp, Homo sapiens; identical to SEQ ID NO: 48850

SEQ ID NO: 48880 - DNA, 201 bp, Homo sapiens
acatccacatagccaggcatccaactccagcccacccttcactctcctccctgcagcccaccagtgaggaggacctctgccccatctgctatgcccacccyatctctgctgtgttccagccctgtggccacaagtcctgcaagtaagtgggccccacagcttggtggtggggagagcagtaggtacatgcagggcagtcct

SEQ ID NO: 48881 - DNA, 201 bp, Homo sapiens; identical to SEQ ID NO: 48846

SEQ ID NO: 48882 - DNA, 201 bp, Homo sapiens; identical to SEQ ID NO: 48847

SEQ ID NO: 48883 - DNA, 201 bp, Homo sapiens; identical to SEQ ID NO: 48862

SEQ ID NO: 48884 - DNA, 201 bp, Homo sapiens; identical to SEQ ID NO: 48848

SEQ ID NO: 48885 - DNA, 201 bp, Homo sapiens; identical to SEQ ID NO: 48858

SEQ ID NO: 48886 - DNA, 201 bp, Homo sapiens; identical to SEQ ID NO: 48849

SEQ ID NO: 48887 - DNA, 201 bp, Homo sapiens; identical to SEQ ID NO: 48850

SEQ ID NO: 48888 - DNA, 201 bp, Homo sapiens; identical to SEQ ID NO: 48851

SEQ ID NO: 48889 - DNA, 201 bp, Homo sapiens; identical to SEQ ID NO: 48852

SEQ ID NO: 48890 - DNA, 201 bp, Homo sapiens; identical to SEQ ID NO: 48867

SEQ ID NO: 48891 - DNA, 201 bp, Homo sapiens; identical to SEQ ID NO: 48853

SEQ ID NO: 48892 - DNA, 201 bp, Homo sapiens; identical to SEQ ID NO: 48861

SEQ ID NO: 48893 - DNA, 201 bp, Homo sapiens; identical to SEQ ID NO: 48854

SEQ ID NO: 48894 - DNA, 201 bp, Homo sapiens; identical to SEQ ID NO: 48846

SEQ ID NO: 48895 - DNA, 201 bp, Homo sapiens; identical to SEQ ID NO: 48847

SEQ ID NO: 48896 - DNA, 201 bp, Homo sapiens; identical to SEQ ID NO: 48862

SEQ ID NO: 48897 - DNA, 201 bp, Homo sapiens; identical to SEQ ID NO: 48848

SEQ ID NO: 48898 - DNA, 201 bp, Homo sapiens; identical to SEQ ID NO: 48858

SEQ ID NO: 48899 - DNA, 201 bp, Homo sapiens; identical to SEQ ID NO: 48849

SEQ ID NO: 48900 - DNA, 201 bp, Homo sapiens; identical to SEQ ID NO: 48850

SEQ ID NO: 48901 - DNA, 201 bp, Homo sapiens; identical to SEQ ID NO: 48851

SEQ ID NO: 48902 - DNA, 201 bp, Homo sapiens; identical to SEQ ID NO: 48863

SEQ ID NO: 48903 - DNA, 201 bp, Homo sapiens; identical to SEQ ID NO: 48867

SEQ ID NO: 48904 - DNA, 201 bp, Homo sapiens; identical to SEQ ID NO: 48853

SEQ ID NO: 48905 - DNA, 201 bp, Homo sapiens; identical to SEQ ID NO: 48861

SEQ ID NO: 48906 - DNA, 201 bp, Homo sapiens; identical to SEQ ID NO: 48854

SEQ ID NO: 48907 - DNA, 201 bp, Homo sapiens; identical to SEQ ID NO: 48872

SEQ ID NO: 48908 - DNA, 201 bp, Homo sapiens; identical to SEQ ID NO: 48846

SEQ ID NO: 48909 - DNA, 201 bp, Homo sapiens; identical to SEQ ID NO: 48847

SEQ ID NO: 48910 - DNA, 201 bp, Homo sapiens; identical to SEQ ID NO: 48862

SEQ ID NO: 48911 - DNA, 201 bp, Homo sapiens; identical to SEQ ID NO: 48848

SEQ ID NO: 48912 - DNA, 201 bp, Homo sapiens; identical to SEQ ID NO: 48858

SEQ ID NO: 48913 - DNA, 201 bp, Homo sapiens; identical to SEQ ID NO: 48849

SEQ ID NO: 48914 - DNA, 201 bp, Homo sapiens; identical to SEQ ID NO: 48850

SEQ ID NO: 48915 - DNA, 201 bp, Homo sapiens; identical to SEQ ID NO: 48851

SEQ ID NO: 48916 - DNA, 201 bp, Homo sapiens; identical to SEQ ID NO: 48863

SEQ ID NO: 48917 - DNA, 201 bp, Homo sapiens; identical to SEQ ID NO: 48867

SEQ ID NO: 48918 - DNA, 201 bp, Homo sapiens; identical to SEQ ID NO: 48853

SEQ ID NO: 48919 - DNA, 201 bp, Homo sapiens; identical to SEQ ID NO: 48861

SEQ ID NO: 48920 - DNA, 201 bp, Homo sapiens; identical to SEQ ID NO: 48854

SEQ ID NO: 48921 - DNA, 201 bp, Homo sapiens; identical to SEQ ID NO: 48846

SEQ ID NO: 48922 - DNA, 201 bp, Homo sapiens; identical to SEQ ID NO: 48847

SEQ ID NO: 48923 - DNA, 201 bp, Homo sapiens; identical to SEQ ID NO: 48862

SEQ ID NO: 48924 - DNA, 201 bp, Homo sapiens; identical to SEQ ID NO: 48848

SEQ ID NO: 48925 - DNA, 201 bp, Homo sapiens; identical to SEQ ID NO: 48858

SEQ ID NO: 48926 - DNA, 201 bp, Homo sapiens; identical to SEQ ID NO: 48849

SEQ ID NO: 48927 - DNA, 201 bp, Homo sapiens; identical to SEQ ID NO: 48850

SEQ ID NO: 48928 - DNA, 201 bp, Homo sapiens; identical to SEQ ID NO: 48851

SEQ ID NO: 48929 - DNA, 201 bp, Homo sapiens; identical to SEQ ID NO: 48863

SEQ ID NO: 48930 - DNA, 201 bp, Homo sapiens; identical to SEQ ID NO: 48867

SEQ ID NO: 48931 - DNA, 201 bp, Homo sapiens; identical to SEQ ID NO: 48853

SEQ ID NO: 48932 - DNA, 201 bp, Homo sapiens; identical to SEQ ID NO: 48861

SEQ ID NO: 48933 - DNA, 201 bp, Homo sapiens; identical to SEQ ID NO: 48854

SEQ ID NO: 48934 - DNA, 201 bp, Homo sapiens
atatgatgccaaaggttcactggttgaggacccagttcccatctttggatatagaggtcgatggtggagtaggtcctgacactgtccataaatgtgcagargcaggagctaacatgattgtgtctggcagtgctattatgaggagtgaagaccccagatctgtgatcaatctattaagaaatgtttgctcagaagctgctc

SEQ ID NO: 48935 - DNA, 183 bp, Homo sapiens
cggggactcgtgggtaacttgcttttgggagccagcggtatggcgtcgggctgcaagattggcccgtccatcctcaacagcgrcctggccaatttaggggccgagtgcctccggatgctagactctggggccgattatctgcacctggacgtaatggacgggcattttgttcccaacatcacc

SEQ ID NO: 48936 - DNA, 201 bp, Homo sapiens
aagtgccaaactcacactgaaataaagggcatggcctaccagctgacaaggagtgtctggtttcaagatggcaaatgaccctaaacatgatagacaaataygttttacataggtacatgcacagataggcacatataaatccacatttgcaagcaaaaagtggaacctgtaaagcagaatttctgaggaatctctaaaaga

SEQ ID NO: 48937 - DNA, 201 bp, Homo sapiens
atatgatgccaaaggttcactggttgaggacccagttcccatctttggatatagaggtcgatggtggagtaggtcctgacactgtccataaatgtgcagargagctaacatgattgtgtctggcagtgctattatgaggagtgaagaccccagatctgtgatcaatctattaagaaatgtttgctcagaagctgctcagaa

SEQ ID NO: 48938 - DNA, 201 bp, Homo sapiens
tatggtttttttctatttcatgttattgtgatttgtttataagtttgggtggggtgcataccatattcttggttcttaaaatctatcacttttcaccttayacttgatgtgtgaaaactataaaaacaatgtgtgaaacccaggggttctaaaatacaagcatagattttatcagggtgttttgtcaaagcaggttattca

SEQ ID NO: 48939 - DNA, 183 bp, Homo sapiens; identical to SEQ ID NO: 48935

SEQ ID NO: 48940 - DNA, 201 bp, Homo sapiens; identical to SEQ ID NO: 48934

SEQ ID NO: 48941 - DNA, 181 bp, Homo sapiens
gggactcgtgggtaacttgcttttgggagccagcggtatggcgtcgggctgcaagattggcccgtccatcctcaacagcgrcctggccaatttaggggccgagtgcctccggatgctagactctggggccgattatctgcacctggacgtaatggacgggcaccctgctcttcagggaggt

SEQ ID NO: 48942 - DNA, 201 bp, Homo sapiens; identical to SEQ ID NO: 48936

SEQ ID NO: 48943 - DNA, 201 bp, Homo sapiens
ggataaaggctccagtgtataaacgggtaatgcctgatggaaaaatccagaaattgattatcacagaagagacagctaagatacgtccttttgcggtagcrgcagttctccgtaatataaagtttactaaagatcgatatgacagcttcattgaacttcaggagaaattacatcagaatatttgcaggaaaagagcactgg

SEQ ID NO: 48944 - DNA, 201 bp, Homo sapiens
ctgctggacagaattatgcagttgctcgatgtgcctcctggtgaagacaaggggggatatgtgatcaaagcatcagaagggcctgctttcttccccgggcratgtgcagagatctttgccaggggtcaaagcgtcgggaagcttggggtccttcatcctgacgttatcaccaaatttgagctgaccatgccctgctcctcc

SEQ ID NO: 48945 - DNA, 201 bp, Homo sapiens
gtgtgggtagagaccatcctttccctgcatattaggccagcttgtgccatataccaatgtggtgtctgtgtgtgaagctgcattgttgggtaaaagccccrtggagtgctggagaaatgcactagcagagtgcaggatctgttctgaaaggcagacgtgctcctcagacatcagaacatcacattggaacggattactcct

SEQ ID NO: 48946 - DNA, 201 bp, Homo sapiens
ctttgccaggggtcaaagcgtcgggaagcttggggtccttcatcctgacgttatcaccaaatttgagctgaccatgccctgctcctccctagaaatcaatrttggaccctttttgtgaagattggtctctgtggtgtgattctcttcccaggtgtccctttctcctcccctagtgtccttaagtcctcctccacagggaac

SEQ ID NO: 48947 - DNA, 201 bp, Homo sapiens
ttgtcaccatgttcagtgaatattgtgagaatcaatttacggtcgaagctgctgaagtggtttttcctaatggaaaatcacatacctttccagaattagcytaccgaaaggagatggtgagagctgacctaattaacaaaaaagttggaatcagagaaactccagaaaatcttgccaaacttctgaccaggatgtatttaa

SEQ ID NO: 48948 - DNA, 201 bp, Homo sapiens
atggcgatattcaagacaacacgcacaagaagaggcgggtcctacgcgcttcgctagggaagcccgggtcagctcgctgcgcaggcgcagtgagttcgacmcaccatgccgactgtcagcgtgaagcgtgatctgctcttccaagccctgggccgcacctacactgacgaagaatttgatgaactatgttttgaatttggt

SEQ ID NO: 48949 - DNA, 201 bp, Homo sapiens
cgggaagcttggggtccttcatcctgacgttatcaccaaatttgagctgaccatgccctgctcctccctagaaatcaatattggaccctttttgtgaagaytggtctctgtggtgtgattctcttcccaggtgtccctttctcctcccctagtgtccttaagtcctcctccacagggaacatctatttgggctttgatgtt

SEQ ID NO: 48950 - DNA, 201 bp, Homo sapiens
taagtcctcctccacagggaacatctatttgggctttgatgtttaataaagtagaaagcactgtctggctgtgtgggtagagaccatcctttccctgcatrttaggccagcttgtgccatataccaatgtggtgtctgtgtgtgaagctgcattgttgggtaaaagccccgtggagtgctggagaaatgcactagcagagt

SEQ ID NO: 48951 - DNA, 201 bp, Homo sapiens
atttgggctttgatgtttaataaagtagaaagcactgtctggctgtgtgggtagagaccatcctttccctgcatattaggccagcttgtgccatataccartgtggtgtctgtgtgtgaagctgcattgttgggtaaaagccccgtggagtgctggagaaatgcactagcagagtgcaggatctgttctgaaaggcagacg

SEQ ID NO: 48952 - DNA, 200 bp, Homo sapiens
atccgggacttcagggtcagtacattacaatgcctgacaaatcctagccagttctatcaaattatatctttcttacaggcttttaagctattagtctcayaaagatacatttaatcagcgaggtaatggcatgatgagtgtttttaggttaaaaagagaacaggaactgttggcagcagaatggcgatattcaagacaac

SEQ ID NO: 48953 - DNA, 201 bp, Homo sapiens
ttacaggcttttaagctattagtctcacaaagatacatttaatcagcgaggtaatggcatgatgagtgtttttaggttaaaaagagaacaggaactgttgscagcagaatggcgatattcaagacaacacgcacaagaagaggcgggtcctacgcgcttcgctagggaagcccgggtcagctcgctgcgcaggcgcagtga

SEQ ID NO: 48954 - DNA, 201 bp, Homo sapiens
gctgacacaggccgcattcaccggttcgtggagaagccacaggtgtttgtgtccaataagatcaacgcaggcatgtacatcctgagccctgcagtgctgcrgcgcatccagctgcagcctacgtccattgagaaggaggtcttccccattatggccaaggaggggcagctatatgccatggagttacagggcttctggatg

SEQ ID NO: 48955 - DNA, 201 bp, Homo sapiens
ggcccgtgacctactctctgagactgcagaccctttcttcgtcctcaacagtgacgtgatctgcgatttccccttccaagccatggtgcagttccaccggsaccatggccaggagggctccatcctggtgaccaaggtggaggaaccctccaagtacggtgtggtggtgtgtgaggctgacacaggccgcattcaccggtt

SEQ ID NO: 48956 - DNA, 201 bp, Homo sapiens
agcaaggggagtgctggcctgacacatcagaagaccctggacttgtcattatttgtctggggggcactgggtgaagctgaagctgttggacacctgccttytcatgtggacatcatctggcaggatccctgctgggcacaccccacaaaccccactccctcaagaagggccagggccagggctgtatggaataataattta

SEQ ID NO: 48957 - DNA, 201 bp, Homo sapiens; identical to SEQ ID NO: 48954

SEQ ID NO: 48958 - DNA, 201 bp, Homo sapiens; identical to SEQ ID NO: 48955

SEQ ID NO: 48959 - DNA, 201 bp, Homo sapiens; identical to SEQ ID NO: 48956

SEQ ID NO: 48960 - DNA, 201 bp, Homo sapiens; identical to SEQ ID NO: 48954

SEQ ID NO: 48961 - DNA, 201 bp, Homo sapiens; identical to SEQ ID NO: 48955

SEQ ID NO: 48962 - DNA, 201 bp, Homo sapiens; identical to SEQ ID NO: 48956

SEQ ID NO: 48963 - DNA, 201 bp, Homo sapiens; identical to SEQ ID NO: 48954

SEQ ID NO: 48964 - DNA, 201 bp, Homo sapiens; identical to SEQ ID NO: 48955

SEQ ID NO: 48965 - DNA, 201 bp, Homo sapiens; identical to SEQ ID NO: 48956

SEQ ID NO: 48966 - DNA, 201 bp, Homo sapiens
agtcttgcagtgtgctgagagctggtggccagtgggactgagtgagctgtgtgccgtgtattgacccgcttcctagtcctgaattcctttcagaagctccrgcagggaggatgatacagtcagacaaaggagcagatccaccagacaagaaggacatgaagctttctacagccaccaatccacagaatggcctctcccaga

SEQ ID NO: 48967 - DNA, 201 bp, Homo sapiens
taaagagctttcctaaataaaataagcaatagttaactttagaaactgtactctatgaaacgtgttttatgaaaacatcttttacaaaaagtgcttacttractaactcagcaagaaaggtttaatgtacacatttcacatctaaaatcaaaacctacaagaaactgcactgccttcactatttacaaatcggcctacaag

SEQ ID NO: 48968 - DNA, 201 bp, Homo sapiens
ggatattcaaggggttcgaacccatgaactgaagccctatgtcatatttataaagccatcgaatatgaggtgtatgaaacaatctcggaaaaatgccaagrttattactgactactatgtggacatgaagttcaaggatgaagacctacaagagatggaaaatttagcccaaagaatggaaactcagtttggccaattttt

SEQ ID NO: 48969 - DNA, 201 bp, Homo sapiens
ggagttttaacactgtacccttgatacagcgatccatagttgcaatctaaaacaacagtatttgacccattttaatgtgtacaactttaaaagtgcagcartttattaattaatcttatttgaaaaaaatttttattgtatggttatgtggttacctattttaacttaattttttttcctttacctcatatgcagctgtgg

SEQ ID NO: 48970 - DNA, 201 bp, Homo sapiens
atttgacccattttaatgtgtacaactttaaaagtgcagcaatttattaattaatcttatttgaaaaaaatttttattgtatggttatgtggttacctatyttaacttaattttttttcctttacctcatatgcagctgtggtagaaatatgaataatgttaagtcactgagtatgagaacctttcgcagatttcacatga

SEQ ID NO: 48971 - DNA, 201 bp, Homo sapiens
accagacaagaaggacatgaagctttctacagccaccaatccacagaatggcctctcccagatcctgaggcttgtgctgcaagagctgagtctgttctacrgcagagatgtgaatggagtgtgtctcttgtacgatctcctccactcgccgtggcttcaggctctgctaaagatttatgactgcctccaggaatttaaaga

SEQ ID NO: 48972 - DNA, 201 bp, Homo sapiens
atgaataatgttaagtcactgagtatgagaacctttcgcagatttcacatgatctttttaagatttaaataaagagctttcctaaataaaataagcaatakttaactttagaaactgtactctatgaaacgtgttttatgaaaacatcttttacaaaaagtgcttacttgactaactcagcaagaaaggtttaatgtacac

SEQ ID NO: 48973 - DNA, 201 bp, Homo sapiens; identical to SEQ ID NO: 48966

SEQ ID NO: 48974 - DNA, 201 bp, Homo sapiens
ggatattcaaggggttcgaacccatgaactgaagccctatgtcatatttataaagccatcgaatatgaggtgtatgaaacaatctcggaaaaatgccaagrttattactgactactatgtggacatgaagttcaagttttagtctgtgtgctaccaaagcaagcacaggatgaagacctacaagagatggaaaatttagcc

SEQ ID NO: 48975 - DNA, 201 bp, Homo sapiens; identical to SEQ ID NO: 48971

SEQ ID NO: 48976 - DNA, 201 bp, Homo sapiens; identical to SEQ ID NO: 48966

SEQ ID NO: 48977 - DNA, 201 bp, Homo sapiens; identical to SEQ ID NO: 48967

SEQ ID NO: 48978 - DNA, 201 bp, Homo sapiens; identical to SEQ ID NO: 48968

SEQ ID NO: 48979 - DNA, 201 bp, Homo sapiens; identical to SEQ ID NO: 48969

SEQ ID NO: 48980 - DNA, 201 bp, Homo sapiens; identical to SEQ ID NO: 48970

SEQ ID NO: 48981 - DNA, 201 bp, Homo sapiens; identical to SEQ ID NO: 48971

SEQ ID NO: 48982 - DNA, 201 bp, Homo sapiens; identical to SEQ ID NO: 48972

SEQ ID NO: 48983 - DNA, 201 bp, Homo sapiens; identical to SEQ ID NO: 48966

SEQ ID NO: 48984 - DNA, 201 bp, Homo sapiens; identical to SEQ ID NO: 48967

SEQ ID NO: 48985 - DNA, 201 bp, Homo sapiens; identical to SEQ ID NO: 48968

SEQ ID NO: 48986 - DNA, 201 bp, Homo sapiens; identical to SEQ ID NO: 48969

SEQ ID NO: 48987 - DNA, 201 bp, Homo sapiens; identical to SEQ ID NO: 48970

SEQ ID NO: 48988 - DNA, 201 bp, Homo sapiens; identical to SEQ ID NO: 48971

SEQ ID NO: 48989 - DNA, 201 bp, Homo sapiens; identical to SEQ ID NO: 48972

SEQ ID NO: 48990 - DNA, 201 bp, Homo sapiens
agtgctgcatcgaaggccatgtctacgtgccccacgtcatctgcaacgggcaggtcctcccagagtcgtcaggaatcgacatgattgactcgtcccccagygtcaacgggagggagcgcgaggagctgtttttccgggccctctgtctctgccacaccgtccaggtgaaagacgatgacagcgtagacggccccaggaaat

SEQ ID NO: 48991 - DNA, 201 bp, Homo sapiens
gctcgtgcagtacttcttctataagaacgtctgcttcatcttccctcagtttttataccagttcttctgtgggttttcacaacagactttgtacgacaccrcgtatctgaccctctacaacatcagcttcacctccctccccatcctcctgtacagcctcatggagcagcatgttggcattgacgtgctcaagagagaccc

SEQ ID NO: 48992 - DNA, 129 bp, Homo sapiens
aacaagcctgtagagcgtggatcacaaggcctcctccctcacgcacccacttctgtgcccattctgcagctggaaagactgagggcagctaggataacacrgtttgctcaggacccatgcacatttcag

SEQ ID NO: 48993 - DNA, 201 bp, Homo sapiens
tgttcacagttacactaaagcttgcattggacacacactactggacttggatcaaccattttgtcatctgggggtcgctgctgttctacgttgtcttttcrcttctctggggaggagtgatctggccgttcctcaactaccagaggatgtactacgtgttcatccagatgctgtccagcgggcccgcctggctggccatcg

SEQ ID NO: 48994 - DNA, 201 bp, Homo sapiens
aggccctgcagaaggccgggatcaaagtctgggttctcacgggagacaagatggagacggccgcggccacgtgctacgcctgcaagctcttccgcaggaayacgcagctgctggagctgaccaccaagaggatcgaggagcagagcctgcacgacgtcctgttcgagctgagcaagacggtcctgcgccacagcgggagcc

SEQ ID NO: 48995 - DNA, 201 bp, Homo sapiens
tgaccaccaagaggatcgaggagcagagcctgcacgacgtcctgttcgagctgagcaagacggtcctgcgccacagcgggagcctgaccagagacaacctstccggactttcagcagatatgcaggactacggtttaattatcgacggagctgcactgtctctgataatgaagcctcgagaagacgggagttccggcaact

SEQ ID NO: 48996 - DNA, 201 bp, Homo sapiens
tcgacggagctgcactgtctctgataatgaagcctcgagaagacgggagttccggcaactacagggagctcttcctggaaatctgccggagctgcagcgcrgtgctctgctgccgcatggcgcccttgcagaaggctcagattgttaaattaatcaaattttcaaaagagcacccaatcacgttagcaattggcgatggtg

SEQ ID NO: 48997 - DNA, 201 bp, Homo sapiens
ttctcacgggagacaagatggagacggccgcggccacgtgctacgcctgcaagctcttccgcaggaacacgcagctgctggagctgaccaccaagaggatygaggagcagagcctgcacgacgtcctgttcgagctgagcaagacggtcctgcgccacagcgggagcctgaccagagacaacctctccggactttcagcag

SEQ ID NO: 48998 - DNA, 201 bp, Homo sapiens
atcgagagaaaaagttagcagaagcctatgagcaaatagagaaagatcttactctgcttggtgctacagctgttgaggaccggctgcaggagaaagctgcrgacaccatcgaggccctgcagaaggccgggatcaaagtctgggttctcacgggagacaagatggagacggccgcggccacgtgctacgcctgcaagctct

SEQ ID NO: 48999 - DNA, 201 bp, Homo sapiens
caactaccagaggatgtactacgtgttcatccagatgctgtccagcgggcccgcctggctggccatcgtgctgctggtgaccatcagcctccttcccgacrtcctcaagaaagtcctgtgccggcagctgtggccaacagcaacagagagagtccagactaagagccagtgcctttctgtcgagcagtcaaccatctttat

SEQ ID NO: 49000 - DNA, 201 bp, Homo sapiens
tcagaattcacccctcttgcctctctgcagagcccaggctaccagagcacctgtccctcggccgcctggtacagctcccactctcagcaggtgacactcgyggcctggaaggagaaggtgtccacggagcccccacccatcctcggcggttcccatcaccactgcagttccatcccaagtcacagctgccctaggtcccgt

SEQ ID NO: 49001 - DNA, 201 bp, Homo sapiens
tggccatcgtgctgctggtgaccatcagcctccttcccgacgtcctcaagaaagtcctgtgccggcagctgtggccaacagcaacagagagagtccagaaygggtgcgcacagcctcgggaccgcgactcagaattcacccctcttgcctctctgcagagcccaggctaccagagcacctgtccctcggccgcctggtaca

SEQ ID NO: 49002 - DNA, 201 bp, Homo sapiens
cgtcacctcgtccccacatccccttgccccgtcacctcgtcctcatgtccccttgtcctgtcacctcgtccccacgtcccctcgtctcatccccacgtccyctcgtccccttgtcccgtccccacataccctcgtccccatgtccccacgcagggctctccttcgtcttaggatctgtccagcgctgctctgggtgggtta

SEQ ID NO: 49003 - DNA, 201 bp, Homo sapiens
atgtgtgacctacagacatgcagaacatgcacgtgtacacataccacagacacgcgtgtgcatgctcctacacaatacatatgcacatatcatgaacagcrtaagttcctacacacggacgtgtgatacatgcatgtacaggtaagcacacatgtacaagctcctacaggcttgctctcacacacgtgtatgcacagcaga

SEQ ID NO: 49004 - DNA, 201 bp, Homo sapiens
tgggcattcggctcaacgcaggagggacattctgctggcccaccctgcgcgctgtcatgcagaggccattcccccaggcctgtgtcttcacccacctgccrtcattggcctttgctgtcactgggagagaagagccgtccagggacccatggtggcccacatgtggatgccacatgctgctgtttcctgcttgcccggcca

SEQ ID NO: 49005 - DNA, 201 bp, Homo sapiens
atcccgtcacctcgtccccacatccccttgccccgtcacctcgtcctcatgtccccttgtcctgtcacctcgtccccacgtcccctcgtctcatccccacrtcctctcgtccccttgtcccgtccccacataccctcgtccccatgtccccacgcagggctctccttcgtcttaggatctgtccagcgctgctctgggtgg

SEQ ID NO: 49006 - DNA, 201 bp, Homo sapiens
gagctcctacacgcatacacacacacacgtgtacatgcaccaaagcatgtgtgacctacagacatgcagaacatgcacgtgtacacataccacagacacgygtgtgcatgctcctacacaatacatatgcacatatcatgaacagcgtaagttcctacacacggacgtgtgatacatgcatgtacaggtaagcacacatgt

SEQ ID NO: 49007 - DNA, 201 bp, Homo sapiens
tcctacaggcttgctctcacacacgtgtatgcacagcagagagacgtatgagcttctactgcacacatgcacacacacacgcacacgtacattcactacamacgtgcagcctcctgcacacgtgcacattcatgtgtacaccacaaatgagttcccagacgtgtaaacacacgtgcacacatcgtacacatgtgagctccc

SEQ ID NO: 49008 - DNA, 201 bp, Homo sapiens
cttcacccacctgccgtcattggcctttgctgtcactgggagagaagagccgtccagggacccatggtggcccacatgtggatgccacatgctgctgtttyctgcttgcccggccaccacccatgccctccatagggtgaggtggagccatggtggtgcgtcctttactcaacaaccctccaatccggatgctgtgggaag

SEQ ID NO: 49009 - DNA, 201 bp, Homo sapiens
cggatgcaccgccgtaccctgctcatctgggagtggtttccctgcggttacgtccaagcccgcctgccctgtgtgttggggctggctgagtttcggtctcyccatcaccggccgcctcgtggagaaggcagtgccacgtgggaggacaaggccacgccggcagcttccagccctgccgcagaagtgccaggatgtccatca

SEQ ID NO: 49010 - DNA, 201 bp, Homo sapiens
tacacacagatgcacatggacacaccccaaacacgcacaggctcctacacacatgcacacacgtgtacaccacaaacgagctcccagacatgtaaacacaygtctcccacacgtgagctcccacacatgtacacatgcacatgtacgcaccacaaacacatgcgcaggctcctgcaggcgtgaatacacacatgcacacac

SEQ ID NO: 49011 - DNA, 201 bp, Homo sapiens
gtgagctcccacacatgtacacatgcacatgtacgcaccacaaacacatgcgcaggctcctgcaggcgtgaatacacacatgcacacacatatacacacaygtgccacaaacaagtgcacactgtcctggtgtcctgcactgcatcctgcctccttgctgaggggcccctgtgagaggcctctggatgggcatgggaagat

SEQ ID NO: 49012 - DNA, 201 bp, Homo sapiens
agggaggaggccagatgcggccagcgtctccaacagggtgaccatccgctcggcttgctgagcgtttaaacaaatgtttagacaggctgtggggactcccctgagttgagccttggccaggggtccggtgctgtcgcgggaaacctccagccttgttcttcaaaccactcagctcatgtgttttgcactgactagtactga

SEQ ID NO: 49013 - DNA, 201 bp, Homo sapiens
agcgctgctctgggtgggttagcaaccccagggctgctgtgataggaagtccctgttgttctccgtactggcatttctatttctagaaataatatttgacrtagccttaatggtccttaaagaagacatttcagtgtgagattcagacttcagacgctgaaactgctgcctttcaggaaagcaccaccaacgctggaggag

SEQ ID NO: 49014 - DNA, 201 bp, Homo sapiens
acctcccctcggctcagccctataccaggcggccacagcaggactggccacacccacgccgcacctcatccgtgcacgcgtcggagcacggccagccttcygccacgagccagctgggaagggccgcggccgcctaaagccccagtcaacccagcctgtgtctgagcagacagggcgaacaagcaggccacaccgtctcga

SEQ ID NO: 49015 - DNA, 201 bp, Homo sapiens
caactaccagaggatgtactacgtgttcatccagatgctgtccagcgggcccgcctggctggccatcgtgctgctggtgaccatcagcctccttcccgacrtcctcaagaaagtcctgtgccggcagctgtggccaacagcaacagagagagtccagaatgggtgcgcacagcctcgggaccgcgactcagaattcacccc

SEQ ID NO: 49016 - DNA, 201 bp, Homo sapiens
cctggcttggcagccctgcccacgctgcccccgcaaacaatggtgtgtgcgtttttacagccctttttaggaacccaatatgggcataaatgtaacacctrtagcgggggcagattctctgtatgttcagttaacaaattatttgtaatgtatttttttagaaatcttaaaattgcctttgcactgaagtattttcatagc

SEQ ID NO: 49017 - DNA, 201 bp, Homo sapiens
ttgttctccgtactggcatttctatttctagaaataatatttgacatagccttaatggtccttaaagaagacatttcagtgtgagattcagacttcagacrctgaaactgctgcctttcaggaaagcaccaccaacgctggaggaggagccggccctcacgcccgccccgcgccacgctgtggaacggggctccggcaagt

SEQ ID NO: 49018 - DNA, 201 bp, Homo sapiens
ctgacgggggtggcacacaggacacgggtggatcccaacaggcagcaccgcacctccgcccgcctcccgcactgcagctccgcccgccgggctctgcgtcyccacgtcccctcgtcccatccccacgtcccctcatcccgtcacctcgtccccacatccccttgccccgtcacctcgtcctcatgtccccttgtcctgtca

SEQ ID NO: 49019 - DNA, 201 bp, Homo sapiens
atgctcgtgtgatggatggtcctaagcctgtggagactgtgcacgtgcctcttcctggcccccagcaggcaaggaggggggtcacaggccttgccctcgarcatggcaccctggccgcctggacccagcactgtggttgttgagccacaccagtggcctctgggcattcggctcaacgcaggagggacattctgctggccc

SEQ ID NO: 49020 - DNA, 201 bp, Homo sapiens; identical to SEQ ID NO: 48993

SEQ ID NO: 49021 - DNA, 201 bp, Homo sapiens
ggccacagcaggactggccacacccacgccgcacctcatccgtgcacgcgtcggagcacggccagccttccgccacgagccagctgggaagggccgcggcygcctaaagccccagtcaacccagcctgtgtctgagcagacagggcgaacaagcaggccacaccgtctcgagggaggaggccagatgcggccagcgtctcc

SEQ ID NO: 49022 - DNA, 201 bp, Homo sapiens
gggaggaggccagatgcggccagcgtctccaacagggtgaccatccgctcggcttgctgagcgtttaaacaaatgtttagacaggctgtggggactcccctgagttgagccttggccaggggtccggtgctgtcgcgggaaacctccagccttgttcttcaaaccactcagctcatgtgttttgcactgactagtactgaa

SEQ ID NO: 49023 - DNA, 201 bp, Homo sapiens
gggaactctgagctaagcagtggaggtttctctggatctggagagaagagtgaccttggagccaataatgagccatcctgactacagaatgaacctccggyccctggggacccccagaggtgtgtctgctgtggctggtccacatgacattggtgcttcgccaggtgacaaaaagtcaaagaacaggtccacacgagggaa

SEQ ID NO: 49024 - DNA, 201 bp, Homo sapiens
agcattggaaggtagttaaaccagagagcaatgacaaagaaacagaagctgcgtatgaatcagatatccccgaggagctctgtggacaccatctcccgcarcagtccctgaaaagctataatgacagtcctgatgtcattgtagaggctcagtttgatggcagcgactcagaagatggacatggcatcacacaaaatgtgc

SEQ ID NO: 49025 - DNA, 201 bp, Homo sapiens
acatggcgcccgataccctgcagaaacaggcggaccactgtaacgaccgccgcatggcgtccaagcgcgtgcaggagctcagtaccagtctcttctttgcygttctggtcaaggagagtggccccctggagtcagaagccatggtgatgggcatcctgaagcaagccttcgacgtgctggtgctgcgctacggcgtgcaga

SEQ ID NO: 49026 - DNA, 201 bp, Homo sapiens
catggcgcccgataccctgcagaaacaggcggaccactgtaacgaccgccgcatggcgtccaagcgcgtgcaggagctcagtaccagtctcttctttgctrttctggtcaaggagagtggccccctggagtcagaagccatggtgatgggcatcctgaagcaagccttcgacgtgctggtgctgcgctacggcgtgcagaa

SEQ ID NO: 49027 - DNA, 201 bp, Homo sapiens
cagccctcaagtacagcgccatcctgaagcggccaggcacccagggccacctgggccctgagaaggaggaggaggagtctgacggtgagcccgaggactcragcaccagctgagctccaccagccgcctgccccgcctgccccgcctgcctgtcccgccacactggctttaggacctgttgacacggaggggggtttttaa

SEQ ID NO: 49028 - DNA, 201 bp, Homo sapiens; identical to SEQ ID NO: 49023

SEQ ID NO: 49029 - DNA, 201 bp, Homo sapiens; identical to SEQ ID NO: 49024

SEQ ID NO: 49030 - DNA, 201 bp, Homo sapiens
ccgcatggcgtccaagcgcgtgcaggagctcagtaccagtctcttctttgctgttctggtcaaggtgagccctccagcctggtgcccctcacctccctctrgctcccgaccctcctgggcacctgctcaccaggaggcctcgaggagcccagggcagtgccaggaggtgccatggctgcagcactgtccctgcaggagagt

SEQ ID NO: 49031 - DNA, 201 bp, Homo sapiens
acatggcgcccgataccctgcagaaacaggcggaccactgtaacgaccgccgcatggcgtccaagcgcgtgcaggagctcagtaccagtctcttctttgcygttctggtcaaggtgagccctccagcctggtgcccctcacctccctctggctcccgaccctcctgggcacctgctcaccaggaggcctcgaggagcccag

SEQ ID NO: 49032 - DNA, 201 bp, Homo sapiens
catggcgcccgataccctgcagaaacaggcggaccactgtaacgaccgccgcatggcgtccaagcgcgtgcaggagctcagtaccagtctcttctttgctrttctggtcaaggtgagccctccagcctggtgcccctcacctccctctggctcccgaccctcctgggcacctgctcaccaggaggcctcgaggagcccagg

SEQ ID NO: 49033 - DNA, 201 bp, Homo sapiens; identical to SEQ ID NO: 49027

SEQ ID NO: 49034 - DNA, 103 bp, Homo sapiens
agrgggcgttgattgggaccgagtacagggcccgcgcatgcgtggattgtcgtcttctgtccaagttggtcgcttccctgcgccaaagtgagcagtagccaac

SEQ ID NO: 49035 - DNA, 201 bp, Homo sapiens
cagaagaggagctgaagacccacatcagcaagggtacgctgggcaagttcactgtgcccatgctgaaagaggcctgccgggcttacgggctgaagagtggkctgaagaagcaggagctgctggaagccctcaccaagcacttccaggactgaccagaggccgcgcgtccagctgcccttccgcagtgtggccaggctgcct

SEQ ID NO: 49036 - DNA, 201 bp, Homo sapiens
ttctggaagcaaaaggcccaaggtggagtattcagaagaggagctgaagacccacatcagcaagggtacgctgggcaagttcactgtgcccatgctgaaaraggcctgccgggcttacgggctgaagagtggtctgaagaagcaggagctgctggaagccctcaccaagcacttccaggactgaccagaggccgcgcgtcc

SEQ ID NO: 49037 - DNA, 201 bp, Homo sapiens
cttcgctcggtcggtctcgcgcgcccccatagccttgctagagggttagcgttagccttaagtgtgcgaatccgaggagcagcgacagactcgagaccacrctccttcctcgggaaggaggcggcacctcgcgtttgaggcccgcctgcgtttgaggcccgcctgcgcttgcggcccgcctgcgcttgaggcctgtctgcg

SEQ ID NO: 49038 - DNA, 201 bp, Homo sapiens
gaaacgtgagggatagctgagatgaggcagctactgggatggcccccatgcgcatttacatgcagtccgactgccgagctttcgaggcagcaggatttacygtccacattcctcactactaaccaagcttttagaacagatctcacaagaacctagaggtcggtattttttcgatttaaatttgcctgttactgacgttaa

SEQ ID NO: 49039 - DNA, 201 bp, Homo sapiens
gcctgcgcttgcggcccgcctgcgcttgaggcctgtctgcgtttgagatctcattgggcgtgattgaggaatttggggaggtttttgggcggtattgaggrcgagggggtccgttagtcagcatagaatcctggagcgggaatccctcaccgtctaaatggcgtcgggggcgggacctccgggatctggcttccgcgggcc

SEQ ID NO: 49040 - DNA, 201 bp, Homo sapiens; identical to SEQ ID NO: 49035

SEQ ID NO: 49041 - DNA, 201 bp, Homo sapiens; identical to SEQ ID NO: 49036

SEQ ID NO: 49042 - DNA, 201 bp, Homo sapiens
gcgtttgaggcccgcctgcgcttgcggcccgcctgcgcttgaggcctgtctgcgtttgagatctcattgggcgtgattgaggaatttggggaggtttttgrgcggtattgaggacgagggggtccgttagtcagcatagaatcctggagcgggaatccctcaccgtctaaatggcgtcgggggcgggacctccgggatctg

SEQ ID NO: 49043 - DNA, 201 bp, Homo sapiens
cggaactggcccccgcggctccgcggctcggcttcgtctccgtcctctccattcagcaccacgggtcccggaaaaagctcagccgcggtcccaaccgcacmctagcttcgttacctgcgcctccagcggccctgcgtcctctgcgctctcatccttacaggggccctagacggccagaactgagcgacgcggcctcgcctc

SEQ ID NO: 49044 - DNA, 110 bp, Homo sapiens
ccgcagcgtmaggttgtccgcctcgggctgggggaccgccgggaccagggaagccgccgacacgttggagaccctgcggatgcccacagccacagaggggtggtccccac

SEQ ID NO: 49045 - DNA, 201 bp, Homo sapiens
ggcgcccctcctaccccggctgcttggcagttgcagtgctgctgtctcgggggggttttcatctatgagggtgtttcctctaaacctacgagggaggaacmcctgatcttacagaaaataccacctcgagatgggtgctggtcctgttgatcccagtctctgccagaccaaggcgagtttccccactaataaagtgccggg

SEQ ID NO: 49046 - DNA, 152 bp, Homo sapiens
ttcatctatgagggtgtttcctctaaacctacgagggaggaacacctgatcttacagaaaataccacctcgagatgggtgctggtcctgttgatcccagtytctgccagaccaaggcgagtttccccactaataaagtgccgggtgtcagca

SEQ ID NO: 49047 - DNA, 187 bp, Homo sapiens
cttggcagttgcagtgctgctgtctcgggggggttttcatctatgagggtgtttcctctaaacctacgagggaggaacacctgatcttacagaaaataccmcctcgagatgggtgctggtcctgttgatcccagtctctgccagaccaaggcgagtttccccactaataaagtgccgggtgtcagca

SEQ ID NO: 49048 - DNA, 150 bp, Homo sapiens
catctatgagggtgtttcctctaaacctacgagggaggaacacctgatcttacagaaaataccacctcgagatgggtgctggtcctgttgatcccagtctytgccagaccaaggcgagtttccccactaataaagtgccgggtgtcagca

SEQ ID NO: 49049 - DNA, 186 bp, Homo sapiens
ttggcagttgcagtgctgctgtctcgggggggttttcatctatgagggtgtttcctctaaacctacgagggaggaacacctgatcttacagaaaataccayctcgagatgggtgctggtcctgttgatcccagtctctgccagaccaaggcgagtttccccactaataaagtgccgggtgtcagca

SEQ ID NO: 49050 - DNA, 201 bp, Homo sapiens
gggggccggatgaggcgggaccctcaggcccggaaaactgcctgtgccacgtgacccgccgccggccagttaaaaggaggcgcctgctggcctccccttayagtgcttgttcggggcgctccgctggcttcttggacaattgcgccatgtgtgctgctcggctagcggcggcggcggcggcccagtcggtgtatgccttct

SEQ ID NO: 49051 - DNA, 201 bp, Homo sapiens
ttcctggtgggccctgacggtgtgcccctacgcaggtacagccgccgcttccagaccattgacatcgagcctgacatcgaagccctgctgtctcaagggcycagctgtgcctagggcgcccctcctaccccggctgcttggcagttgcagtgctgctgtctcgggggggttttcatctatgagggtgtttcctctaaacct

SEQ ID NO: 49052 - DNA, 201 bp, Homo sapiens; identical to SEQ ID NO: 49045

SEQ ID NO: 49053 - DNA, 155 bp, Homo sapiens
ttcatctatgagggtgtttcctctaaacctacgagggaggaacacctgatcttacagaaaataccacctcgagatgggtgctggtcctgttgatcccagtytctgccagaccaaggcgagtttccccactaataaagtgccgggtgtcagcagaa

SEQ ID NO: 49054 - DNA, 190 bp, Homo sapiens
cttggcagttgcagtgctgctgtctcgggggggttttcatctatgagggtgtttcctctaaacctacgagggaggaacacctgatcttacagaaaataccmcctcgagatgggtgctggtcctgttgatcccagtctctgccagaccaaggcgagtttccccactaataaagtgccgggtgtcagcagaa

SEQ ID NO: 49055 - DNA, 153 bp, Homo sapiens
catctatgagggtgtttcctctaaacctacgagggaggaacacctgatcttacagaaaataccacctcgagatgggtgctggtcctgttgatcccagtctytgccagaccaaggcgagtttccccactaataaagtgccgggtgtcagcagaa

SEQ ID NO: 49056 - DNA, 189 bp, Homo sapiens
ttggcagttgcagtgctgctgtctcgggggggttttcatctatgagggtgtttcctctaaacctacgagggaggaacacctgatcttacagaaaataccayctcgagatgggtgctggtcctgttgatcccagtctctgccagaccaaggcgagtttccccactaataaagtgccgggtgtcagcagaa

SEQ ID NO: 49057 - DNA, 201 bp, Homo sapiens; identical to SEQ ID NO: 49050

SEQ ID NO: 49058 - DNA, 201 bp, Homo sapiens; identical to SEQ ID NO: 49051

SEQ ID NO: 49059 - DNA, 201 bp, Homo sapiens
gttttgaataaagaatagggggtctggttaatatatacatctaaacacaaaagtcagaaagaataaaagtagtgatgttacacgagccagctgtcagtgcytaacttttccctttggcctaatgcatttggaaggtcctgaaattgtattttctttttacattgcctatgtatgtgtaagtcttcttcaggtcagttcacg

SEQ ID NO: 49060 - DNA, 201 bp, Homo sapiens
tgggtaagtaattgtttatcgtggagaaatgctttactacatgggtttgtaagttttacccaaactgtgtattttaatataagaattaagataatttgagrgagaagagttttgtatgtattttttttaaataagtgacaattctaaaattaattttagacttaagcccttagatgtggcgtttatgaaggcaatacacaa

SEQ ID NO: 49061 - DNA, 201 bp, Homo sapiens
ggcatgtatacttaatactgaatttctttgatttaactgacttaacaactgactaaccattgatgagcactcctgatttttatctagaacattcagatttrccataatgttccttagtggtagaggtgtgtgcctagtgatgtagaaagatacactgacttggtgcaaggccatctgcttaccacatcacaccacttggag

SEQ ID NO: 49062 - DNA, 201 bp, Homo sapiens
tcccagtcatttagtctagttttgaataaagaatagggggtctggttaatatatacatctaaacacaaaagtcagaaagaataaaagtagtgatgttacaygagccagctgtcagtgcttaacttttccctttggcctaatgcatttggaaggtcctgaaattgtattttctttttacattgcctatgtatgtgtaagtct

SEQ ID NO: 49063 - DNA, 201 bp, Homo sapiens
gattgtttatataggcaaaatggaggtgccaaacagaattataacattttcggaactaaggctcatttaaagatacaaatttgattggctactattgattrcacttgaagggatttgtttaacttccttttgtaaagaagtaacagtcataaggatctctcatctcccagtcatttagtctagttttgaataaagaatagg

SEQ ID NO: 49064 - DNA, 201 bp, Homo sapiens
aagaattaagataatttgagagagaagagttttgtatgtattttttttaaataagtgacaattctaaaattaattttagacttaagcccttagatgtggcrtttatgaaggcaatacacaacaaggtgaatattgtgcctgtcattgcaaaagctgacactctcaccctgaaggaacgggagcggctgaagaaaagggtga

SEQ ID NO: 49065 - DNA, 201 bp, Homo sapiens
tggtcttgaactcctgacctcaagtggtctgcctacctcggcctcccaaagtgctggaattacaggcgtgagcatcacgtctggcctaatttttttaatcraatttatttttgtaatgatagatgcttgtcttattcctagggaaatatttgaagtaattgagatgctgtcacctaaaataatcaaaaggctcctgattca

SEQ ID NO: 49066 - DNA, 201 bp, Homo sapiens
gctacaccaaagaatggtgattagcgctcccagggtggggaaaaatgaggattgtttatataggcaaaatggaggtgccaaacagaattataacattttcrgaactaaggctcatttaaagatacaaatttgattggctactattgattacacttgaagggatttgtttaacttccttttgtaaagaagtaacagtcataa

SEQ ID NO: 49067 - DNA, 201 bp, Homo sapiens; identical to SEQ ID NO: 49060

SEQ ID NO: 49068 - DNA, 201 bp, Homo sapiens
caaacctttttatattttatactgcactttagtgtattttctgtcactgtaggtatagaagatctgcctcccctgtggaaattggggtctgttggtgggcktgcccctgaagcctggcttgggttgaaaagtgttcccgccctaaggccttggtgccctgaacctctgatgcctaccgggttctcctgatttgagtttcct

SEQ ID NO: 49069 - DNA, 201 bp, Homo sapiens; identical to SEQ ID NO: 49061

SEQ ID NO: 49070 - DNA, 201 bp, Homo sapiens
actaatttggtttttactcaaccaaattaaaaatttttttaaggaaaattagcagttggtctattcagaatcaaacctttttatattttatactgcacttyagtgtattttctgtcactgtaggtatagaagatctgcctcccctgtggaaattggggtctgttggtgggcgtgcccctgaagcctggcttgggttgaaaa

SEQ ID NO: 49071 - DNA, 201 bp, Homo sapiens
aagaattaagataatttgagagagaagagttttgtatgtattttttttaaataagtgacaattctaaaattaattttagacttaagcccttagatgtggcrtttatgaaggcaatacacaacaaggtgaatattgtgcctgtcattgcaaaagctgacactctcaccctgaaggaacgggagcggctgaagaaaaggataa

SEQ ID NO: 49072 - DNA, 201 bp, Homo sapiens; identical to SEQ ID NO: 49059

SEQ ID NO: 49073 - DNA, 201 bp, Homo sapiens
actaagccccgcatatgtgagtgaaagtacttcaggcacgctgcctcctggtaacagctatgcagggagggaggacccacactgctacacttctgatcccmtttggttttactacccaaatctaaatagatacttttgataatagataactgctcttttactaagacatagtctctacctatagaaatgtattttgaaaac

SEQ ID NO: 49074 - DNA, 201 bp, Homo sapiens
aaaacaagtttgctagtgactaagccccgcatatgtgagtgaaagtacttcaggcacgctgcctcctggtaacagctatgcagggagggaggacccacacygctacacttctgatcccctttggttttactacccaaatctaaatagatacttttgataatagataactgctcttttactaagacatagtctctacctata

SEQ ID NO: 49075 - DNA, 201 bp, Homo sapiens
ttgtgaacagccaaaagctatatgttatggcttattgtgtgaaggtaactaagaagtggtgttccatgacttcagagtacatccatgcggagtccattatwtgagtttgacatttaataactttgctggaaaatctgtaaaaaagaaaaacaagtttgctagtgactaagccccgcatatgtgagtgaaagtacttcaggc

SEQ ID NO: 49076 - DNA, 201 bp, Homo sapiens
ataataatagttaatgaaggtgtgctacagaaaataatctggtgttcttgctaactttgcccttcactgttgcttaattgtgaacagccaaaagctatatkttatggcttattgtgtgaaggtaactaagaagtggtgttccatgacttcagagtacatccatgcggagtccattatttgagtttgacatttaataacttt

SEQ ID NO: 49077 - DNA, 201 bp, Homo sapiens; identical to SEQ ID NO: 49062

SEQ ID NO: 49078 - DNA, 201 bp, Homo sapiens
ttgccttttttatcatttctactgaagttgggaaattcaaccccagaaattgacagatgaaaggagacaatggttgtgtagggagatggagaaaatgcttratctgaggatgagacagggttttttcatttttgtgggggctagaaaaaacataaaatgaggcagttaaataataatagttaatgaaggtgtgctacagaa

SEQ ID NO: 49079 - DNA, 201 bp, Homo sapiens; identical to SEQ ID NO: 49063

SEQ ID NO: 49080 - DNA, 174 bp, Homo sapiens
tggttttactacccaaatctaaatagatacttttgataatagataactgctcttttactaagacatagtctctacctatagaaatgtattttgaaaacacktattttacacagcaattttgtatccatttaaactaaccttttatcaataaagcactattgtttagatattaaa

SEQ ID NO: 49081 - DNA, 201 bp, Homo sapiens
caggcacgctgcctcctggtaacagctatgcagggagggaggacccacactgctacacttctgatcccctttggttttactacccaaatctaaatagatasttttgataatagataactgctcttttactaagacatagtctctacctatagaaatgtattttgaaaacacttattttacacagcaattttgtatccattt

SEQ ID NO: 49082 - DNA, 201 bp, Homo sapiens
ttaaataataatagttaatgaaggtgtgctacagaaaataatctggtgttcttgctaactttgcccttcactgttgcttaattgtgaacagccaaaagctrtatgttatggcttattgtgtgaaggtaactaagaagtggtgttccatgacttcagagtacatccatgcggagtccattatttgagtttgacatttaataa

SEQ ID NO: 49083 - DNA, 201 bp, Homo sapiens
tgacatttaataactttgctggaaaatctgtaaaaaagaaaaacaagtttgctagtgactaagccccgcatatgtgagtgaaagtacttcaggcacgctgmctcctggtaacagctatgcagggagggaggacccacactgctacacttctgatcccctttggttttactacccaaatctaaatagatacttttgataata

SEQ ID NO: 49084 - DNA, 201 bp, Homo sapiens; identical to SEQ ID NO: 49068

SEQ ID NO: 49085 - DNA, 201 bp, Homo sapiens; identical to SEQ ID NO: 49070

SEQ ID NO: 49086 - DNA, 201 bp, Homo sapiens
agagcggcttgaacaggcggcacatcattgataatagggtgcattgttgcttttactttatttcaccttttggacatggacttaagcccttagatgtggcrtttatgaaggcaatacacaacaaggtgaatattgtgcctgtcattgcaaaagctgacactctcaccctgaaggaacgggagcggctgaagaaaaggataa

SEQ ID NO: 49087 - DNA, 201 bp, Homo sapiens; identical to SEQ ID NO: 49061

SEQ ID NO: 49088 - DNA, 201 bp, Homo sapiens; identical to SEQ ID NO: 49065

SEQ ID NO: 49089 - DNA, 201 bp, Homo sapiens; identical to SEQ ID NO: 49066

SEQ ID NO: 49090 - DNA, 201 bp, Homo sapiens; identical to SEQ ID NO: 49063

SEQ ID NO: 49091 - DNA, 201 bp, Homo sapiens; identical to SEQ ID NO: 49059

SEQ ID NO: 49092 - DNA, 201 bp, Homo sapiens; identical to SEQ ID NO: 49061

SEQ ID NO: 49093 - DNA, 201 bp, Homo sapiens
agagcggcttgaacaggcggcacatcattgataatagggtgcattgttgcttttactttatttcaccttttggacatggacttaagcccttagatgtggcrtttatgaaggcaatacacaacaaggtgaatattgtgcctgtcattgcaaaagctgacactctcaccctgaaggaacgggagcggctgaagaaaagggtga

SEQ ID NO: 49094 - DNA, 201 bp, Homo sapiens; identical to SEQ ID NO: 49065

SEQ ID NO: 49095 - DNA, 201 bp, Homo sapiens; identical to SEQ ID NO: 49062

SEQ ID NO: 49096 - DNA, 201 bp, Homo sapiens; identical to SEQ ID NO: 49066

SEQ ID NO: 49097 - DNA, 201 bp, Homo sapiens; identical to SEQ ID NO: 49059

SEQ ID NO: 49098 - DNA, 201 bp, Homo sapiens; identical to SEQ ID NO: 49073

SEQ ID NO: 49099 - DNA, 201 bp, Homo sapiens; identical to SEQ ID NO: 49074

SEQ ID NO: 49100 - DNA, 201 bp, Homo sapiens; identical to SEQ ID NO: 49075

SEQ ID NO: 49101 - DNA, 201 bp, Homo sapiens; identical to SEQ ID NO: 49076

SEQ ID NO: 49102 - DNA, 201 bp, Homo sapiens; identical to SEQ ID NO: 49062

SEQ ID NO: 49103 - DNA, 201 bp, Homo sapiens; identical to SEQ ID NO: 49078

SEQ ID NO: 49104 - DNA, 201 bp, Homo sapiens; identical to SEQ ID NO: 49063

SEQ ID NO: 49105 - DNA, 174 bp, Homo sapiens; identical to SEQ ID NO: 49080

SEQ ID NO: 49106 - DNA, 201 bp, Homo sapiens; identical to SEQ ID NO: 49081

SEQ ID NO: 49107 - DNA, 201 bp, Homo sapiens; identical to SEQ ID NO: 49082

SEQ ID NO: 49108 - DNA, 201 bp, Homo sapiens; identical to SEQ ID NO: 49083

SEQ ID NO: 49109 - DNA, 201 bp, Homo sapiens; identical to SEQ ID NO: 49068

SEQ ID NO: 49110 - DNA, 201 bp, Homo sapiens; identical to SEQ ID NO: 49070

SEQ ID NO: 49111 - DNA, 201 bp, Homo sapiens; identical to SEQ ID NO: 49086

SEQ ID NO: 49112 - DNA, 201 bp, Homo sapiens; identical to SEQ ID NO: 49061

SEQ ID NO: 49113 - DNA, 201 bp, Homo sapiens; identical to SEQ ID NO: 49065

SEQ ID NO: 49114 - DNA, 201 bp, Homo sapiens; identical to SEQ ID NO: 49066

SEQ ID NO: 49115 - DNA, 201 bp, Homo sapiens
agcgagcaaagctgcacccacttacattcagtattttcctggcactacaaagagtgggaaggcctgggatttgctgctgctcccttagagcagggcccctyttttcagcactttggacacctggagacccagccctgttatttaatggtagtgggcaagtgtgtgtgcatactgtctgccactgctttctccctgccccat

SEQ ID NO: 49116 - DNA, 201 bp, Homo sapiens
tggtggctctggcccagacagtatttgcagttcttgtgctatgggtgggagtcttcttcctcaagtttcggcagctgtgctgctgctggatgggctgctcytcccagggctcaagggctgtggtccgctcagggtctcatttccccaggccaagttcaaggcagcagccctttgtgaggcgctcttggccctgggcctgga

SEQ ID NO: 49117 - DNA, 201 bp, Homo sapiens
ccctgtccctgccaggcccagccttcttagccccaacttgggaacaaagtgcaacatgggatcatgggttggggtgctcaggtgagccctctctatagtgmttccctgggccaagctgacaccagcccctgagggtggggtgggacgggtggtgcttaaaagaggaaggggaccagtgtagcaacttgccagggaccccac

SEQ ID NO: 49118 - DNA, 201 bp, Homo sapiens
tgcagttcttgtgctatgggtgggagtcttcttcctcaagtttcggcagctgtgctgctgctggatgggctgctcctcccagggctcaagggctgtggtcygctcagggtctcatttccccaggccaagttcaaggcagcagccctttgtgaggcgctcttggccctgggcctggagggagaactttaagcttttttgctc

SEQ ID NO: 49119 - DNA, 201 bp, Homo sapiens
ggctctggcccagacagtatttgcagttcttgtgctatgggtgggagtcttcttcctcaagtttcggcagctgtgctgctgctggatgggctgctcctccsagggctcaagggctgtggtccgctcagggtctcatttccccaggccaagttcaaggcagcagccctttgtgaggcgctcttggccctgggcctggaggga

SEQ ID NO: 49120 - DNA, 201 bp, Homo sapiens
tctacagtatcctcgttgcccctccttcaggagtgtctactgggtccataggtcagttcctcctgcttgagaacgtggtgcaccacttcaagtacccctgygtgttggacctgaagatgggcacgcggcagcatggcgatgacgcgtcagctgagaaggcagcccggcagatgcggaaatgcgagcagagcacatcagcca

SEQ ID NO: 49121 - DNA, 201 bp, Homo sapiens
gtaagacatagggtctggaactgtttgggaccttttggggatgtcctgtgcctcccagattcctcgattctgggaggagaggctgccgcattctgctgctyctcacagcgagcaaagctgcacccacttacattcagtattttcctggcactacaaagagtgggaaggcctgggatttgctgctgctcccttagagcaggg

SEQ ID NO: 49122 - DNA, 201 bp, Homo sapiens
ttttgtggcccatgtgctgcatcctctgccctcagtgtgcaactggcccccaacgcaatgtgtgtttgtcaaaccatggaagtggggcagtatggcaagartgcaagtcgggctggagaccggggagtcctcctggagcccttcatccaccaagtaggcggacacagcagcatgatgcgttacgacgatcacactgtgtgc

SEQ ID NO: 49123 - DNA, 201 bp, Homo sapiens
gatccttcccctggggtgtagccttgttcattagtatatactcattccttcatgctttcctcagcagaacacttccacttctgaggtgagcttttgccccrtgcccttcctccacaggtgttgcctttttataaagacctgatagcagaataaattggtgtttccctgttgacccagcaccatttctgtgggcctagaata

SEQ ID NO: 49124 - DNA, 201 bp, Homo sapiens
ctctggcccagacagtatttgcagttcttgtgctatgggtgggagtcttcttcctcaagtttcggcagctgtgctgctgctggatgggctgctcctcccasggctcaagggctgtggtccgctcagggtctcatttccccaggccaagttcaaggcagcagccctttgtgaggcgctcttggccctgggcctggagggaga

SEQ ID NO: 49125 - DNA, 201 bp, Homo sapiens
acccttagagtggggcagtgagggcttgaggagtgacccttcctttctcatggttttagtcattttggctgccagcccttaatggcacagatctgctgctyctaacagatggccaggaggtgacaccgatttcagccattgccaaggttagcaccctctcctttgagcctagggccacactgttcattgtcactttaggca

SEQ ID NO: 49126 - DNA, 201 bp, Homo sapiens
acctgaagatgggcacgcggcagcatggcgatgacgcgtcagctgagaaggcagcccggcagatgcggaaatgcgagcagagcacatcagccacgctgggygtcagggtctgcggcatgcaggtgtaccagctggacacagggcattacctctgcaggaacaagtactatggccgtgggctctccattgaaggcttccgca

SEQ ID NO: 49127 - DNA, 201 bp, Homo sapiens; identical to SEQ ID NO: 49115

SEQ ID NO: 49128 - DNA, 201 bp, Homo sapiens; identical to SEQ ID NO: 49116

SEQ ID NO: 49129 - DNA, 201 bp, Homo sapiens; identical to SEQ ID NO: 49117

SEQ ID NO: 49130 - DNA, 201 bp, Homo sapiens; identical to SEQ ID NO: 49118

SEQ ID NO: 49131 - DNA, 201 bp, Homo sapiens; identical to SEQ ID NO: 49119

SEQ ID NO: 49132 - DNA, 201 bp, Homo sapiens
acaagcagcagctgagccgcatgcgctccgagtccaaggaccgaaagctctacaagttcctcctgcttgagaacgtggtgcaccacttcaagtacccctgygtgttggacctgaagatgggcacgcggcagcatggcgatgacgcgtcagctgagaaggcagcccggcagatgcggaaatgcgagcagagcacatcagcca

SEQ ID NO: 49133 - DNA, 201 bp, Homo sapiens; identical to SEQ ID NO: 49121

SEQ ID NO: 49134 - DNA, 201 bp, Homo sapiens; identical to SEQ ID NO: 49122

SEQ ID NO: 49135 - DNA, 201 bp, Homo sapiens; identical to SEQ ID NO: 49123

SEQ ID NO: 49136 - DNA, 201 bp, Homo sapiens; identical to SEQ ID NO: 49124

SEQ ID NO: 49137 - DNA, 201 bp, Homo sapiens; identical to SEQ ID NO: 49125

SEQ ID NO: 49138 - DNA, 201 bp, Homo sapiens; identical to SEQ ID NO: 49126

SEQ ID NO: 49139 - DNA, 201 bp, Homo sapiens; identical to SEQ ID NO: 49115

SEQ ID NO: 49140 - DNA, 201 bp, Homo sapiens; identical to SEQ ID NO: 49116

SEQ ID NO: 49141 - DNA, 201 bp, Homo sapiens; identical to SEQ ID NO: 49117

SEQ ID NO: 49142 - DNA, 201 bp, Homo sapiens; identical to SEQ ID NO: 49118

SEQ ID NO: 49143 - DNA, 201 bp, Homo sapiens; identical to SEQ ID NO: 49119

SEQ ID NO: 49144 - DNA, 201 bp, Homo sapiens; identical to SEQ ID NO: 49132

SEQ ID NO: 49145 - DNA, 201 bp, Homo sapiens; identical to SEQ ID NO: 49121

SEQ ID NO: 49146 - DNA, 201 bp, Homo sapiens; identical to SEQ ID NO: 49122

SEQ ID NO: 49147 - DNA, 201 bp, Homo sapiens; identical to SEQ ID NO: 49123

SEQ ID NO: 49148 - DNA, 201 bp, Homo sapiens; identical to SEQ ID NO: 49124

SEQ ID NO: 49149 - DNA, 201 bp, Homo sapiens; identical to SEQ ID NO: 49125

SEQ ID NO: 49150 - DNA, 201 bp, Homo sapiens; identical to SEQ ID NO: 49126

SEQ ID NO: 49151 - DNA, 201 bp, Homo sapiens
cagtgcctgctgacctgcgtgctgggatcacatggagaagccctgccctcttcatctatacctcggggaccactggcctcccgaagccagccatcctcacrcatgagcgggtactgcagatgagcaagatgctgtccttatctggggccacagctgatgatgtggtttacacggtcctgcctctgtaccacgtgatgggac

SEQ ID NO: 49152 - DNA, 201 bp, Homo sapiens
cctggggcagccagtgtggccagtcgctgtggccttgaccctgcgctggctcctgggggatcccacatgttgcgtgctacttgggctggccatgttagcayggccctggctcggcccctgggtgccccatgggctgagcctggcagctgcggccctggcactaaccctcctgccagcacggctgcccccaggactacgctg

SEQ ID NO: 49153 - DNA, 101 bp, Homo sapiens
aaatgacagtgggccctgtagcagtggcagaataaactcagatgtgttcacagaagtctgtatgtctgcgtggatgaaggagcaatggaggagtgcagggg

SEQ ID NO: 49154 - DNA, 201 bp, Homo sapiens
ctctggggcctggggcagccagtgtggccagtcgctgtggccttgaccctgcgctggctcctgggggatcccacatgttgcgtgctacttgggctggccaygttagcacggccctggctcggcccctgggtgccccatgggctgagcctggcagctgcggccctggcactaaccctcctgccagcacggctgcccccagga

SEQ ID NO: 49155 - DNA, 201 bp, Homo sapiens
ctacagatactttgaagtagaagaagctgatggcaacaagcagtggtggtttggtggtggatgtgacctcactccaacatacttgaatcaagaagacgctrtccattttcacagaactctgaaggaggcttgtgaccagcatggtccagatctctaccccaaatttaaaaaatggtgtgatgattacttctttatagccca

SEQ ID NO: 49156 - DNA, 201 bp, Homo sapiens
ggtagacgggggcgccaacttttctgtggaccggtgggagaggaaggaaggaggtggcggcatcagctgtgtacttcaagatgggtgtgttttcgaaaagrctggggtgagcatttctgttgttcatggaaatctttcagaggaagctgcaaaacaaatgagaagcagaggaaaagttctgaagactaaagatggtaaatt

SEQ ID NO: 49157 - DNA, 201 bp, Homo sapiens
acagaactctgaaggaggcttgtgaccagcatggtccagatctctaccccaaatttaaaaaatggtgtgatgattacttctttatagcccatcgtggagarcggcggggcattggtggtatcttttttgatgatcttgactctccgtccaaggaggaggtgtttcgctttgtacagagctgtgccagggctgtagttcctt

SEQ ID NO: 49158 - DNA, 201 bp, Homo sapiens
ttgtgctatgggcgtgagctctgttatccaccccaagaatcctcatgctcctactatccatttcaactacagatactttgaagtagaagaagctgatggcmacaagcagtggtggtttggtggtggatgtgacctcactccaacatacttgaatcaagaagacgctgtccattttcacagaactctgaaggaggcttgtga

SEQ ID NO: 49159 - DNA, 201 bp, Homo sapiens
cagatactttgaagtagaagaagctgatggcaacaagcagtggtggtttggtggtggatgtgacctcactccaacatacttgaatcaagaagacgctgtcsattttcacagaactctgaaggaggcttgtgaccagcatggtccagatctctaccccaaatttaaaaaatggtgtgatgattacttctttatagcccatcg

SEQ ID NO: 49160 - DNA, 201 bp, Homo sapiens
gggactgggtgcgttgatgcaggcagaatggctgtgcaggggtttggagggcacacgatgtgtgctccccatgccactggtcggcactttgccactgtgtsgcagttacccgtgccttagtcttctccactctgcaccctacctcgtgggcagatgataacatgttttggatgctgtcagtgatgaatggtgagatggcag

SEQ ID NO: 49161 - DNA, 201 bp, Homo sapiens
cctcatgctcctactatccatttcaactacagatactttgaagtagaagaagctgatggcaacaagcagtggtggtttggtggtggatgtgacctcactcyaacatacttgaatcaagaagacgctgtccattttcacagaactctgaaggaggcttgtgaccagcatggtccagatctctaccccaaatttaaaaaatgg

SEQ ID NO: 49162 - DNA, 201 bp, Homo sapiens
cctgggcgagctgcgaaggaggccgggcgacatgaagaccaagatggagctgctgattctggagacccaggcccaggtgtgccaggctctggcacaggtaracgggggcgccaacttttctgtggaccggtgggagaggaaggaaggaggtggcggcatcagctgtgtacttcaagatgggtgtgttttcgaaaaggctgg

SEQ ID NO: 49163 - DNA, 201 bp, Homo sapiens
gtgtgatgattacttctttatagcccatcgtggagagcggcggggcattggtggtatcttttttgatgatcttgactctccgtccaaggaggaggtgtttygctttgtacagagctgtgccagggctgtagttccttcttacattccccttgtgaaaaagcactgtgatgactcattcaccccccaggagaagctgtggca

SEQ ID NO: 49164 - DNA, 201 bp, Homo sapiens
gtgatagtgcgggaacatggccttgcagctgggcaggctgagctcgggcccctgctggctcgtggcgcggggcggctgcggagggccccgcgcctggtccyagtgcggcggcggagggctccgagcctggtcccagcgcagcgcagccggacgcgtctgccggccccctggcccggctggcacggagcagagccgcgggct

SEQ ID NO: 49165 - DNA, 201 bp, Homo sapiens
agcttcatggccccgcctgtgaccgacctgggcgagctgcgaaggaggccgggcgacatgaagaccaagatggagctgctgattctggagacccaggcccmggtgtgccaggctctggcacaggtagacgggggcgccaacttttctgtggaccggtgggagaggaaggaaggaggtggcggcatcagctgtgtacttcaa

SEQ ID NO: 49166 - DNA, 201 bp, Homo sapiens
gattctggagacccaggcccaggtgtgccaggctctggcacaggtagacgggggcgccaacttttctgtggaccggtgggagaggaaggaaggaggtggcrgcatcagctgtgtacttcaagatgggtgtgttttcgaaaaggctggggtgagcatttctgttgttcatggaaatctttcagaggaagctgcaaaacaaat

SEQ ID NO: 49167 - DNA, 201 bp, Homo sapiens
tcgctttgtacagagctgtgccagggctgtagttccttcttacattccccttgtgaaaaagcactgtgatgactcattcaccccccaggagaagctgtggyagcagctcagaagaggacggtatgtagaatttaatctgctgtatgatcggggcacaaagtttggcctcttcactccaggatccagaattgaaagtatctt

SEQ ID NO: 49168 - DNA, 201 bp, Homo sapiens
tgccagggctgtagttccttcttacattccccttgtgaaaaagcactgtgatgactcattcaccccccaggagaagctgtggcagcagctcagaagaggayggtatgtagaatttaatctgctgtatgatcggggcacaaagtttggcctcttcactccaggatccagaattgaaagtatcttgatgtctttacctctaac

SEQ ID NO: 49169 - DNA, 201 bp, Homo sapiens
ggtcggcactttgccactgtgtggcagttacccgtgccttagtcttctccactctgcaccctacctcgtgggcagatgataacatgttttggatgctgtcmgtgatgaatggtgagatggcagattgtcagagtcaattgattaaacctcatttatacttctagtgtcattttatatgactagtttacaaaataggacatt

SEQ ID NO: 49170 - DNA, 201 bp, Homo sapiens
tgtagaatttaatctgctgtatgatcggggcacaaagtttggcctcttcactccaggatccagaattgaaagtatcttgatgtctttacctctaactgccygatgggagtacatgcattcaccctcagagaattccaaagaagctgaaattctggaagttctacgccatccaagggactgggtgcgttgatgcaggcagaa

SEQ ID NO: 49171 - DNA, 201 bp, Homo sapiens
agaatttaatctgctgtatgatcggggcacaaagtttggcctcttcactccaggatccagaattgaaagtatcttgatgtctttacctctaactgcccgaygggagtacatgcattcaccctcagagaattccaaagaagctgaaattctggaagttctacgccatccaagggactgggtgcgttgatgcaggcagaatgg

SEQ ID NO: 49172 - DNA, 201 bp, Homo sapiens
caactacagatactttgaagtagaagaagctgatggcaacaagcagtggtggtttggtggtggatgtgacctcactccaacatacttgaatcaagaagacrctgtccattttcacagaactctgaaggaggcttgtgaccagcatggtccagatctctaccccaaatttaaaaaatggtgtgatgattacttctttatagc

SEQ ID NO: 49173 - DNA, 201 bp, Homo sapiens
tggtaaattgccattttgtgctatgggcgtgagctctgttatccaccccaagaatcctcatgctcctactatccatttcaactacagatactttgaagtaraagaagctgatggcaacaagcagtggtggtttggtggtggatgtgacctcactccaacatacttgaatcaagaagacgctgtccattttcacagaactct

SEQ ID NO: 49174 - DNA, 201 bp, Homo sapiens
aattgaaagtatcttgatgtctttacctctaactgcccgatgggagtacatgcattcaccctcagagaattccaaagaagctgaaattctggaagttctaygccatccaagggactgggtgcgttgatgcaggcagaatggctgtgcaggggtttggagggcacacgatgtgtgctccccatgccactggtcggcactttg

SEQ ID NO: 49175 - DNA, 201 bp, Homo sapiens
cgttgatgcaggcagaatggctgtgcaggggtttggagggcacacgatgtgtgctccccatgccactggtcggcactttgccactgtgtggcagttacccrtgccttagtcttctccactctgcaccctacctcgtgggcagatgataacatgttttggatgctgtcagtgatgaatggtgagatggcagattgtcagagt

SEQ ID NO: 49176 - DNA, 201 bp, Homo sapiens
ggcacacgatgtgtgctccccatgccactggtcggcactttgccactgtgtggcagttacccgtgccttagtcttctccactctgcaccctacctcgtggscagatgataacatgttttggatgctgtcagtgatgaatggtgagatggcagattgtcagagtcaattgattaaacctcatttatacttctagtgtcattt

SEQ ID NO: 49177 - DNA, 201 bp, Homo sapiens
ttaggcaatgtttctcatttggaaaatgaaatgagaaataatttccttctttaaagcaagtatatatagtatgagaaacttggaggcatttcatacacacrtttcttaggaaaatggacacattgaaaatgtcctcttttttatattagagattctgcagctctttgctcttaagagcaaatcacaacaggattcttaatg

SEQ ID NO: 49178 - DNA, 201 bp, Homo sapiens
aatttaatctgctgtatgatcggggcacaaagtttggcctcttcactccaggatccagaattgaaagtatcttgatgtctttacctctaactgcccgatgrgagtacatgcattcaccctcagagaattccaaagaagctgaaattctggaagttctacgccatccaagggactgggtgcgttgatgcaggcagaatggct

SEQ ID NO: 49179 - DNA, 201 bp, Homo sapiens
ggcacaggtagacgggggcgccaacttttctgtggaccggtgggagaggaaggaaggaggtggcggcatcagctgtgtacttcaagatgggtgtgttttcraaaaggctggggtgagcatttctgttgttcatggaaatctttcagaggaagctgcaaaacaaatgagaagcagaggaaaagttctgaagactaaagatgg

SEQ ID NO: 49180 - DNA, 201 bp, Homo sapiens
agaggaagctgcaaaacaaatgagaagcagaggaaaagttctgaagactaaagatggtaaattgccattttgtgctatgggcgtgagctctgttatccacyccaagaatcctcatgctcctactatccatttcaactacagatactttgaagtagaagaagctgatggcaacaagcagtggtggtttggtggtggatgtga

SEQ ID NO: 49181 - DNA, 201 bp, Homo sapiens
ctcgaggactccgcttccttccctcccctcccctgcgctccggcctggggtctcggcgcggggagcggagggaagggacgaaggaggagtaggtgaaagcrgggtgaggggcggaagggtcccggcgcggggtgaggcgagggctgcctcttgttctcccgccgctgccgccgtctcctggtcgggtgccgcggccagagg

SEQ ID NO: 49182 - DNA, 201 bp, Homo sapiens
agctgggattttctgacttgtaatgagcagggggattgctttttcactttgtgacactctttagagctttaatgcttcacagtatatggcctggtctcatycttgcgtgttccacttgaggccctttggtgtcttgccccattcttgtgtttataaaatgtttgagtatttctgatgagtgatgcttgccttagtctcatg

SEQ ID NO: 49183 - DNA, 201 bp, Homo sapiens
attagctaacaatgtaaaaccatcttttaaagccttcagactgtcaagacgacatgagcagctcaccatatgataaaaatacataaatttgacattccctyttccataaacctttgtttgtagatttaatgttgaacagtacttttccataaagttctagtcacttctgttggcctgagccaccagattatgatgttgcca

SEQ ID NO: 49184 - DNA, 201 bp, Homo sapiens
aaatactaccgtaactccaaatgtaaccaaagatgtagcgctggctgcagttcttgtccctgtgctggtcatggtcctcactactctcattctcatattartgtgtgcttggcactggagaaacagaaagaaaaaaactgaaggcacctatgacttaccttactgggaccgggcaggttggtggaaaggaatgaagcagtt

SEQ ID NO: 49185 - DNA, 201 bp, Homo sapiens
tattgccactgtgctatccttgaactaccaataatttttataaaatatctagtttttactacttttatataaactttactttccagatgaagagctgagcstgattcaaatggtttttctgctttatacttctttttagttcattggtttttatagtagaggttttctattttttttttttttttttactacatttatatg

SEQ ID NO: 49186 - DNA, 201 bp, Homo sapiens
tcagttttccataaactgttacacaaaatataaacctaacgtgtatttttcaggactgcgtgatcgtgcactttgtgtggtaagaggtttgagtagtcctrtatgtcacctagggaacagacattatagcttcctagcaaatgaatattcatgccttgtttttgatacctcctggcagcttccatgtcaccacttgttcat

SEQ ID NO: 49187 - DNA, 201 bp, Homo sapiens
taaactttactttccagatgaagagctgagcctgattcaaatggtttttctgctttatacttctttttagttcattggtttttatagtagaggttttctattttttttttttttttttactacatttatatgtctgatacatatacggctttggagacaatcaagtaacaactgaaaatgtgaaagtaaccatatctgaca

SEQ ID NO: 49188 - DNA, 201 bp, Homo sapiens
aacctaacgtgtatttttcaggactgcgtgatcgtgcactttgtgtggtaagaggtttgagtagtcctatatgtcacctagggaacagacattatagcttmctagcaaatgaatattcatgccttgtttttgatacctcctggcagcttccatgtcaccacttgttcatacctgcccagagctagttttagacatggcaaa

SEQ ID NO: 49189 - DNA, 201 bp, Homo sapiens
ggcgcgggaggcacgttccttagctccgccgcggccgtcctccgcggctcgaggactccgcttccttccctcccctcccctgcgctccggcctggggtctyggcgcggggagcggagggaagggacgaaggaggagtaggtgaaagcggggtgaggggcggaagggtcccggcgcggggtgaggcgagggctgcctcttgt

SEQ ID NO: 49190 - DNA, 201 bp, Homo sapiens
aagagttgggtggttattaaaatgcttttaaagtcaactgtggcaccaattctaatgtaatccaacttgtgactgtttttttttgttttgttttgtttttktgtgtgtgtgtgtggcactgggaaaagtggaaacaaacatgtattgaaatacatattggaaataaaaatggtttgagcgtcagtgatattctcccagaat

SEQ ID NO: 49191 - DNA, 201 bp, Homo sapiens
aaacatcatgtcacatgaaacgattctctgctttttggttctgaacttgaagtccctaaactgcaaaatctaagagttgggtggttattaaaatgcttttaaagtcaactgtggcaccaattctaatgtaatccaacttgtgactgtttttttttgttttgttttgtttttgtgtgtgtgtgtgtggcactgggaaaagtg

SEQ ID NO: 49192 - DNA, 201 bp, Homo sapiens
taccttactgggaccgggcaggttggtggaaaggaatgaagcagtttcttcctgcaaaagcagtggaccatgaggaaaccccagttcgctatagcagcagygaagttaatcacctgagtccaagagaagtcaccacagtgctgcaggctgactctgcagagtatgctcagccactggtaggaggaattgttggtacacttc

SEQ ID NO: 49193 - DNA, 201 bp, Homo sapiens
ttcgcatcaaatttggtgactttgacattgaagattctgattcttgtcactttaattacttgagaatttataatggaattggagtcagcagaactgaaatrggcaaatactgtggtctggggttgcaaatgaaccattcaattgaatcaaaaggcaatgaaatcacattgctgttcatgagtggaatccatgtttctggac

SEQ ID NO: 49194 - DNA, 201 bp, Homo sapiens
cacttcagagaaattaaaaatcacagagtatttattaccaatgctgcaggtacattaatgaactcgagatggctctgtaagcctgactggcaataacgcayggtactgttcttgaaatacctaatggcttgaaattctagtctgtttgtgaaagatgggtactatcatgatttcctcttctattcctatattcttttctgg

SEQ ID NO: 49195 - DNA, 201 bp, Homo sapiens
ctcgcagtagcaatgaatttcctgcacagacagaacaaacaactgccagtcctgatatcagaaatactaccgtaactccaaatgtaaccaaagatgtagcrctggctgcagttcttgtccctgtgctggtcatggtcctcactactctcattctcatattagtgtgtgcttggcactggagaaacagaaagaaaaaaactg

SEQ ID NO: 49196 - DNA, 201 bp, Homo sapiens
acacaaaatataaacctaacgtgtatttttcaggactgcgtgatcgtgcactttgtgtggtaagaggtttgagtagtcctatatgtcacctagggaacagwcattatagcttcctagcaaatgaatattcatgccttgtttttgatacctcctggcagcttccatgtcaccacttgttcatacctgcccagagctagtttt

SEQ ID NO: 49197 - DNA, 201 bp, Homo sapiens
tcatgtcacatgaaacgattctctgctttttggttctgaacttgaagtccctaaactgcaaaatctaagagttgggtggttattaaaatgcttttaaagtyaactgtggcaccaattctaatgtaatccaacttgtgactgtttttttttgttttgttttgtttttgtgtgtgtgtgtgtggcactgggaaaagtggaaac

SEQ ID NO: 49198 - DNA, 201 bp, Homo sapiens
gatatagagattcctcgccattgtgcatggctggtgtgcatgcaggagtagtgtcaaacacgttgggcggccaaatcagtgttgtaattagtaaaggtatyccctattatgaaagttctttggctaacaacgtcacatctgtggtgggacacttatctacaagtctttttacatttaagacaagtggatgttatggaacac

SEQ ID NO: 49199 - DNA, 201 bp, Homo sapiens
acaggtttcataaaattacactgacttggctgttacttgatcttaggaaacagcacagtttaagatattgtgaattctgacttatactttattaaatgctrtaaatctaaatagatcctgttggatgtgatgggtctagtccagtttatttaagttcatgtttcactgtttgcactttgcattgaacaatgggtttattcg

SEQ ID NO: 49200 - DNA, 201 bp, Homo sapiens; identical to SEQ ID NO: 49181

SEQ ID NO: 49201 - DNA, 201 bp, Homo sapiens; identical to SEQ ID NO: 49182

SEQ ID NO: 49202 - DNA, 201 bp, Homo sapiens; identical to SEQ ID NO: 49183

SEQ ID NO: 49203 - DNA, 201 bp, Homo sapiens; identical to SEQ ID NO: 49184

SEQ ID NO: 49204 - DNA, 201 bp, Homo sapiens; identical to SEQ ID NO: 49185

SEQ ID NO: 49205 - DNA, 201 bp, Homo sapiens; identical to SEQ ID NO: 49186

SEQ ID NO: 49206 - DNA, 201 bp, Homo sapiens; identical to SEQ ID NO: 49187

SEQ ID NO: 49207 - DNA, 201 bp, Homo sapiens; identical to SEQ ID NO: 49188

SEQ ID NO: 49208 - DNA, 201 bp, Homo sapiens; identical to SEQ ID NO: 49189

SEQ ID NO: 49209 - DNA, 175 bp, Homo sapiens
atagaaacatcatgtcacatgaaacgattctcgtcaactgtggcaccaattctaatgtaatccaacttgtgactgtttttttttgttttgttttgtttttktgtgtgtgtgtgtggcactgggaaaagtggaaacaaacatgtattgaaatacatattggaaataaaaatggttt

SEQ ID NO: 49210 - DNA, 201 bp, Homo sapiens; identical to SEQ ID NO: 49192

SEQ ID NO: 49211 - DNA, 201 bp, Homo sapiens; identical to SEQ ID NO: 49193

SEQ ID NO: 49212 - DNA, 201 bp, Homo sapiens; identical to SEQ ID NO: 49194

SEQ ID NO: 49213 - DNA, 201 bp, Homo sapiens; identical to SEQ ID NO: 49195

SEQ ID NO: 49214 - DNA, 201 bp, Homo sapiens; identical to SEQ ID NO: 49196

SEQ ID NO: 49215 - DNA, 201 bp, Homo sapiens
ggaaggtgacaaagcttaaacacctttgccctggctctgcattgtcacctagagagcaagaggtctatagaaacatcatgtcacatgaaacgattctcgtyaactgtggcaccaattctaatgtaatccaacttgtgactgtttttttttgttttgttttgtttttgtgtgtgtgtgtgtggcactgggaaaagtggaaac

SEQ ID NO: 49216 - DNA, 201 bp, Homo sapiens; identical to SEQ ID NO: 49198

SEQ ID NO: 49217 - DNA, 201 bp, Homo sapiens; identical to SEQ ID NO: 49199

SEQ ID NO: 49218 - DNA, 201 bp, Homo sapiens
aacgggcgggaccgcctcctggcacgatgggagatgtagttcgttctgcccccacttttcgctagcccgggctcgccagggactctcagaatcgcagagtygtcatctctgctgttgctaaactggatgcctcattccaatttacgacgtcactgaaccgaaacgcgggagcaaccctgagcctttccggaacccagtggg

SEQ ID NO: 49219 - DNA, 201 bp, Homo sapiens
tggctctgagaggaggaggtggtcttaggcagtgatggaccctccattttacctctttaccctgtcgctcataatgaggcatcatatatcctctcactctytgggacaccatagccactgccccctcccctggatgcccagtaatgtatgtctactggtgggagactgtgaggatcccaggattcagtattcctggcccag

SEQ ID NO: 49220 - DNA, 193 bp, Homo sapiens
ccctcccctggatgcccagtaatgtatgtctactggtgggagactgtgaggatcccaggattcagtattcctggcccagagggcccttgctggctactggrtgttagtttgcagtcctgtgtgcttccctctcttatgactgtgtccctggttgtcaataaaatatttcctggcctcctggaatctttcttct

SEQ ID NO: 49221 - DNA, 201 bp, Homo sapiens
ggaccgcctcctggcacgatgggagatgtagttcgttctgcccccacttttcgctagcccgggctcgccagggactctcagaatcgcagagtcgtcatctstgctgttgctaaactggatgcctcattccaatttacgacgtcactgaaccgaaacgcgggagcaaccctgagcctttccggaacccagtggggggggggg

SEQ ID NO: 49222 - DNA, 201 bp, Homo sapiens
ggaggtggtcttaggcagtgatggaccctccattttacctctttaccctgtcgctcataatgaggcatcatatatcctctcactctctgggacaccatagmcactgccccctcccctggatgcccagtaatgtatgtctactggtgggagactgtgaggatcccaggattcagtattcctggcccagagggcccttgctgg

SEQ ID NO: 49223 - DNA, 176 bp, Homo sapiens
catgctgcgctgcctcaccaccgatgagtacgacggacacagcacctacccctcccaccagtaccagtagcactctgtccccatctgggagggtggcattytgggacatgaggagcaaaggaagggggcaataaatgttgagccaagagcttcaaattactctagagaaaccgact

SEQ ID NO: 49224 - DNA, 201 bp, Homo sapiens
gcccggaacattgtggcagccatgaaggctcatggtgtggacaaggtcgtggcctgcacctcggctttcctgctctgggaccctaccaaggtgcccccacractgcaggctgtgactgatgaccacatccggatgcacaaggtgctgcgggaatcaggcctgaagtacgtggctgtgatgccgccacacataggagaccag

SEQ ID NO: 49225 - DNA, 199 bp, Homo sapiens
tgagccgcgggcggagagtctgaggcgtggcccttcgagccagctccgccccgttgttcctggcttgagtagggcagagagcaccgcccagcagccagygggttcccgcgcgtgccgagactctgaggccttgcacccccacgatcccgtacgatggccgtcaagaagatcgcgatcttcggcgccactggccagaccg

SEQ ID NO: 49226 - DNA, 201 bp, Homo sapiens
gccatcagaggggccccggccggcccacgtggtagtgggagatgttctgcaggcagccgatgtggacaagaccgtggctgggcaggacgctgtcatcgtgytgctgggcacccgcaatgacctcagtcccacgacagtgatgtccgagggcgcccggaacattgtggcagccatgaaggctcatggtgtggacaaggtcgt

SEQ ID NO: 49227 - DNA, 201 bp, Homo sapiens
ctcctccaggctgccatcagaggggccccggccggcccacgtggtagtgggagatgttctgcaggcagccgatgtggacaagaccgtggctgggcaggacrctgtcatcgtgctgctgggcacccgcaatgacctcagtcccacgacagtgatgtccgagggcgcccggaacattgtggcagccatgaaggctcatggtgt

SEQ ID NO: 49228 - DNA, 201 bp, Homo sapiens
gacaaggtcgtggcctgcacctcggctttcctgctctgggaccctaccaaggtgcccccacgactgcaggctgtgactgatgaccacatccggatgcacamggtgctgcgggaatcaggcctgaagtacgtggctgtgatgccgccacacataggagaccagccactaactggggcgtacacagtgaccctggatggacga

SEQ ID NO: 49229 - DNA, 182 bp, Homo sapiens
ccatttcatgctgcgctgcctcaccaccgatgagtacgacggacacagcacctacccctcccaccagtaccagtagcactctgtccccatctgggagggtrgcattctgggacatgaggagcaaaggaagggggcaataaatgttgagccaagagcttcaaattactctagagaaaccgact

SEQ ID NO: 49230 - DNA, 176 bp, Homo sapiens; identical to SEQ ID NO: 49223

SEQ ID NO: 49231 - DNA, 201 bp, Homo sapiens; identical to SEQ ID NO: 49224

SEQ ID NO: 49232 - DNA, 201 bp, Homo sapiens; identical to SEQ ID NO: 49226

SEQ ID NO: 49233 - DNA, 201 bp, Homo sapiens; identical to SEQ ID NO: 49227

SEQ ID NO: 49234 - DNA, 201 bp, Homo sapiens; identical to SEQ ID NO: 49228

SEQ ID NO: 49235 - DNA, 182 bp, Homo sapiens; identical to SEQ ID NO: 49229

SEQ ID NO: 49236 - DNA, 201 bp, Homo sapiens
tccttgctgtaaaagctgatctgcctgtagctgccacagcctccagcggtggctacagttgaaaccctcacaccacgcaggaagaggtcatcatcatgtcrgacgatttcttatggtttgaaggcatagctttccctactatgggtttcagatccgaaaccttaagaaaagtacgtgatgagttcgtgataagggatgaag

SEQ ID NO: 49237 - DNA, 201 bp, Homo sapiens
aggtcatcatcatgtcggacgatttcttatggtttgaaggcatagctttccctactatgggtttcagatccgaaaccttaagaaaagtacgtgatgagttygtgataagggatgaagatgtaataatattgacttaccccaaatcaggaacaaactggttggctgagattctctgcctgatgcactccaagggggatgcca

SEQ ID NO: 49238 - DNA, 201 bp, Homo sapiens
catgatgaaaccctatctctactaaaaatacaaaaattagccgggcatggtggtgcacgcctatagtcccagctactcgggaggctgaggtaggagaatcrtttgaactcaggaggcagaggttgcaatgagccaagatcgcgccactgcactccagcctgggtgacagagcgagaccgtctcaaaaagaaagaagtgact

SEQ ID NO: 49239 - DNA, 201 bp, Homo sapiens
gcctatagtcccagctactcgggaggctgaggtaggagaatcgtttgaactcaggaggcagaggttgcaatgagccaagatcgcgccactgcactccagcstgggtgacagagcgagaccgtctcaaaaagaaagaagtgactagggttcagagaaccagggttcaaagcccagggatgcaaaggttgcagtgagttgagt

SEQ ID NO: 49240 - DNA, 201 bp, Homo sapiens
gtcattgtgtaagacttattattttatcctgaaaccttaaatatcaaacctctgcatctctgatcccttccttgttaaaagttaccacggttggccaggcrcggtggttcatgcctgtaatcccagcactatgggaggccgagacgggcggatcacgaggtcaggagactgagaccatcctggctaacacggtgaaacccc

SEQ ID NO: 49241 - DNA, 201 bp, Homo sapiens
cagcactatgggaggccgagacgggcggatcacgaggtcaggagactgagaccatcctggctaacacggtgaaaccccatctctactaaaaatacaaaaamcaaaaaaaattagccaggcgcattggctcatgtctgtaatcccagcactttgggaggtcgggggggtgggggaggatcacggggtcaggagatcgagacc

SEQ ID NO: 49242 - DNA, 201 bp, Homo sapiens
tcgagaccatcctggccaacatgatgaaaccctatctctactaaaaatacaaaaattagccgggcatggtggtgcacgcctatagtcccagctactcgggrggctgaggtaggagaatcgtttgaactcaggaggcagaggttgcaatgagccaagatcgcgccactgcactccagcctgggtgacagagcgagaccgtct

SEQ ID NO: 49243 - DNA, 201 bp, Homo sapiens
gatgtccaattattccctcctgagtgttgattatgtagtggacaaagcacaacttctgagaaaaggtgtatctggggactggaaaaatcacttcacagtgrcccaagctgaagactttgataaattgttccaagagaagatggcagatcttcctcgagagctgttcccatgggaataacgtccaaaacactctggatctta

SEQ ID NO: 49244 - DNA, 201 bp, Homo sapiens
gtacctgactggggtcattgtgtaagacttattattttatcctgaaaccttaaatatcaaacctctgcatctctgatcccttccttgttaaaagttaccasggttggccaggcgcggtggttcatgcctgtaatcccagcactatgggaggccgagacgggcggatcacgaggtcaggagactgagaccatcctggctaac

SEQ ID NO: 49245 - DNA, 201 bp, Homo sapiens
gttcgtgataagggatgaagatgtaataatattgacttaccccaaatcaggaacaaactggttggctgagattctctgcctgatgcactccaagggggatsccaagtggatccaatctgtgcccatctgggagcgatcaccctgggtagagagtgagattgggtatacagcactcagtgaaacggagagtccacgtttatt

SEQ ID NO: 49246 - DNA, 201 bp, Homo sapiens
cagatcttcctcgagagctgttcccatgggaataacgtccaaaacactctggatcttatatggagaatgacattgattctcctgtccttgtacatgtaccygactggggtcattgtgtaagacttattattttatcctgaaaccttaaatatcaaacctctgcatctctgatcccttccttgttaaaagttaccacggttg

SEQ ID NO: 49247 - DNA, 201 bp, Homo sapiens; identical to SEQ ID NO: 49236

SEQ ID NO: 49248 - DNA, 201 bp, Homo sapiens; identical to SEQ ID NO: 49237

SEQ ID NO: 49249 - DNA, 201 bp, Homo sapiens; identical to SEQ ID NO: 49238

SEQ ID NO: 49250 - DNA, 201 bp, Homo sapiens; identical to SEQ ID NO: 49239

SEQ ID NO: 49251 - DNA, 201 bp, Homo sapiens; identical to SEQ ID NO: 49240

SEQ ID NO: 49252 - DNA, 201 bp, Homo sapiens; identical to SEQ ID NO: 49241

SEQ ID NO: 49253 - DNA, 201 bp, Homo sapiens; identical to SEQ ID NO: 49242

SEQ ID NO: 49254 - DNA, 201 bp, Homo sapiens; identical to SEQ ID NO: 49243

SEQ ID NO: 49255 - DNA, 201 bp, Homo sapiens; identical to SEQ ID NO: 49244

SEQ ID NO: 49256 - DNA, 201 bp, Homo sapiens; identical to SEQ ID NO: 49245

SEQ ID NO: 49257 - DNA, 201 bp, Homo sapiens; identical to SEQ ID NO: 49246

SEQ ID NO: 49258 - DNA, 201 bp, Homo sapiens
aatggctttgcccaggacgatctgcagggccctgaggggctgctcctgccctcggaggctgcgtttgggaatagctggcaggtgcaagagggccgcgggtrtcccccagggctggagctgccccctgtactgctgcagatggagtggagccggcgggcccaggagcagctcctgtgggacttggaactgctgactggtgtg

SEQ ID NO: 49259 - DNA, 111 bp, Homo sapiens
ttactcatctcaagggcagggtctgggtctttatcgtgtatgtatgtgtgtaactatgacacatagttaacaagtaacacacgtttgttcagttaaaggamtgcaaaagtt

SEQ ID NO: 49260 - DNA, 201 bp, Homo sapiens
gctcccctatgccgcccagcaggaaaccagtcaccgtgtcctcgtctccgatcactgcgatgagcttacccctccccgccatccctgcagccgggcagagmtcaccctagagcaccagaagccactgaaaccccgcctccgccgtacggcgccccgtcggcctcaacccccacccttcgagcatgcgcagtcctcccagcc

SEQ ID NO: 49261 - DNA, 201 bp, Homo sapiens
ttgggaggccgaggcaggtggattgcttgaacccaggagtttgagaccagaatgggccacatagaaattgggatggcggttcttgttaagctcccctatgmcgcccagcaggaaaccagtcaccgtgtcctcgtctccgatcactgcgatgagcttacccctccccgccatccctgcagccgggcagagctcaccctagag

SEQ ID NO: 49262 - DNA, 201 bp, Homo sapiens
agaatgggccacatagaaattgggatggcggttcttgttaagctcccctatgccgcccagcaggaaaccagtcaccgtgtcctcgtctccgatcactgcgrtgagcttacccctccccgccatccctgcagccgggcagagctcaccctagagcaccagaagccactgaaaccccgcctccgccgtacggcgccccgtcgg

SEQ ID NO: 49263 - DNA, 201 bp, Homo sapiens
cacttattctgggtctggagatccgggtgaaggtctcagactatgtacaagaccggattcgggccctacgcgcagctcctgcaggtggcttccagaacatygcctgtctccgtagcaatgccatgaagcaccttcctaacttcttctacaagggccagctgacaaagatgttcttcctcttccccgacccacatttcaagc

SEQ ID NO: 49264 - DNA, 201 bp, Homo sapiens
aagaatacaagatcccgtcctccaggcagtgacctcccaaaccagcctgcctggtcactgactgcttactctaccttagctggacctcgtctcccagggaytagagaaaagagcaggagtcctgggtcttcccagttgagactgctggagctgagacacagtactctcttaaagaaggtggggagctgcccagggcagaac

SEQ ID NO: 49265 - DNA, 201 bp, Homo sapiens
ggtctctagacccctctcacctgtggggtgcacaggtgcctgcaaccaggatggtaacccagaccaggcagaagcaagctaagagaaaacgttgggtccckgggcctggcctcgccctcccagttggaggctaacggtgcggaggttccctccagcactcgctccttacagccctccccacctagcccagcccagcccagc

SEQ ID NO: 49266 - DNA, 201 bp, Homo sapiens
gcccagcccagcccagcccagctgaatttgctcttgggtctttaaggggcgggaactgccaccaacgcgcatggctgcgtcattaacttgcgcctctggcytgcgcctccacgtggatttggtagagaaaccccggactgggatcatggcagccgagactcggaacgtggccggagcagaggccccaccgccccagaagcg

SEQ ID NO: 49267 - DNA, 201 bp, Homo sapiens; identical to SEQ ID NO: 49263

SEQ ID NO: 49268 - DNA, 201 bp, Homo sapiens; identical to SEQ ID NO: 49264

SEQ ID NO: 49269 - DNA, 104 bp, Homo sapiens
ggcytgcgcctccacgtggatttggtagagaaaccccggactgggatcatggcagccgagactcggaacgtggccggagcagaggccccaccgccccagaagcg

SEQ ID NO: 49270 - DNA, 201 bp, Homo sapiens; identical to SEQ ID NO: 49264

SEQ ID NO: 49271 - DNA, 201 bp, Homo sapiens; identical to SEQ ID NO: 49265

SEQ ID NO: 49272 - DNA, 201 bp, Homo sapiens; identical to SEQ ID NO: 49266

SEQ ID NO: 49273 - DNA, 201 bp, Homo sapiens
gcactcgtcgaggagctgctgcgacaggagggaccccggcccgagcgctgcagcttctcgccctggacggagcaccgccgctgccgccagcgggcttgcgractgctcactgcggaaggcgaagaatggcaaaggctccgcagtctcctggccccgctcctcctccggcctcaagcggccgcccgctacgccggaaccctg

SEQ ID NO: 49274 - DNA, 201 bp, Homo sapiens
gagtctggggcgcacctgacccacttcctgttccgggaagagttgcctgcccagtccatcctgggaaatgtgacagagttgctattggcgggagtggacasggtgtccaacacgctctcttgggctctgtatgagctctcccggcaccccgaagtccagacagcactccactcagagatcacagctgccctgagccctggc

SEQ ID NO: 49275 - DNA, 201 bp, Homo sapiens
agctgccctgagccctggctccagtgcctacccctcagccactgttctgtcccagctgcccctgctgaaggcggtggtcaaggaagtgctaagactgtacyctgtggtacctggaaattctcgtgtcccagacaaagacattcatgtgggtgactatattatccccaaaaatacgctggtcactctgtgtcactatgccac

SEQ ID NO: 49276 - DNA, 201 bp, Homo sapiens
ttgcctgcccagtccatcctgggaaatgtgacagagttgctattggcgggagtggacacggtgtccaacacgctctcttgggctctgtatgagctctcccsgcaccccgaagtccagacagcactccactcagagatcacagctgccctgagccctggctccagtgcctacccctcagccactgttctgtcccagctgccc

SEQ ID NO: 49277 - DNA, 201 bp, Homo sapiens
gaagtgctaagactgtaccctgtggtacctggaaattctcgtgtcccagacaaagacattcatgtgggtgactatattatccccaaaaatacgctggtcaytctgtgtcactatgccacttcaagggaccctgcccagttcccagagccaaattcttttcgtccagctcgctggctgggggagggtcccaccccccaccca

SEQ ID NO: 49278 - DNA, 201 bp, Homo sapiens
gaattgcaaatggctttggcccagatcctaacacattttgaggtgcagcctgagccaggtgcggccccagttagacccaagacccggactgtcctggtacstgaaaggagcatcaacctacagtttttggacagatagtcccatggaaagagactgtcatcatcaccctttcattcatcatagggataagattttttgtag

SEQ ID NO: 49279 - DNA, 201 bp, Homo sapiens
ccggtgtggctagccagctttgggacagtgcgcaccgtgtacgtggctgcccctgcactcgtcgaggagctgctgcgacaggagggaccccggcccgagcrctgcagcttctcgccctggacggagcaccgccgctgccgccagcgggcttgcggactgctcactgcggaaggcgaagaatggcaaaggctccgcagtctc

SEQ ID NO: 49280 - DNA, 201 bp, Homo sapiens; identical to SEQ ID NO: 49266

SEQ ID NO: 49281 - DNA, 201 bp, Homo sapiens
ttctcgccctggacggagcaccgccgctgccgccagcgggcttgcggactgctcactgcggaaggcgaagaatggcaaaggctccgcagtctcctggcccygctcctcctccggcctcaagcggccgcccgctacgccggaaccctgaacaacgtagtctgcgaccttgtgcggcgtctgaggcgccagcggggacgtggc

SEQ ID NO: 49282 - DNA, 201 bp, Homo sapiens
tttttgggctttcatagtgttcattgatgctgctggctaagcatttatcaaagcataagctcagtaactgtgcatctggtctgtacctggttggtccttcrtctttgcatgtaagctctttgagaggaagggtgaagccttatttgttttttatgtcccctgccagggcctgtctctgactaggtgtcaccatacacattc

SEQ ID NO: 49283 - DNA, 201 bp, Homo sapiens
aagaatacaagatcccgtcctccaggcagtgacctcccaaaccagcctgcctggtcactgactgcttactctaccttagctggacctcgtctcccagggaytagagaaaagagcaggagtcctgggtcttcccagttgagactgctggagctgagacacagtactctcttaaagaaggtgcagggcgccgcgcacttcggg

SEQ ID NO: 49284 - DNA, 201 bp, Homo sapiens; identical to SEQ ID NO: 49265

SEQ ID NO: 49285 - DNA, 201 bp, Homo sapiens
tgcccagttcccagagccaaattcttttcgtccagctcgctggctgggggagggtcccaccccccacccatttgcatctcttccctttggctttggcaagygcagctgtatggggagacgcctggcagagcttgaattgcaaatggctttggcccagatcctaacacattttgaggtgcagcctgagccaggtgcggcccc

SEQ ID NO: 49286 - DNA, 201 bp, Homo sapiens
ggaaccctgaacaacgtagtctgcgaccttgtgcggcgtctgaggcgccagcggggacgtggcacggggccgcccgccctggttcgggacgtggcgggggrattttacaagttcggactggaaggcatcgccgcggttctgctcggctcgcgcttgggctgcctggaggctcaagtgccacccgacacggagaccttcatc

SEQ ID NO: 49287 - DNA, 201 bp, Homo sapiens
ggggcgcacctgacccacttcctgttccgggaagagttgcctgcccagtccatcctgggaaatgtgacagagttgctattggcgggagtggacacggtgtmcaacacgctctcttgggctctgtatgagctctcccggcaccccgaagtccagacagcactccactcagagatcacagctgccctgagccctggctccagt

SEQ ID NO: 49288 - DNA, 201 bp, Homo sapiens
gacagcccgagaaggacctggagtctggggcgcacctgacccacttcctgttccgggaagagttgcctgcccagtccatcctgggaaatgtgacagagttrctattggcgggagtggacacggtgtccaacacgctctcttgggctctgtatgagctctcccggcaccccgaagtccagacagcactccactcagagatca

SEQ ID NO: 49289 - DNA, 201 bp, Homo sapiens
catgtgggtgactatattatccccaaaaatacgctggtcactctgtgtcactatgccacttcaagggaccctgcccagttcccagagccaaattcttttcstccagctcgctggctgggggagggtcccaccccccacccatttgcatctcttccctttggctttggcaagcgcagctgtatggggagacgcctggcagag

SEQ ID NO: 49290 - DNA, 201 bp, Homo sapiens
aaatgtgacagagttgctattggcgggagtggacacggtgtccaacacgctctcttgggctctgtatgagctctcccggcaccccgaagtccagacagcaytccactcagagatcacagctgccctgagccctggctccagtgcctacccctcagccactgttctgtcccagctgcccctgctgaaggcggtggtcaagga

SEQ ID NO: 49291 - DNA, 201 bp, Homo sapiens
gcatcgccgcggttctgctcggctcgcgcttgggctgcctggaggctcaagtgccacccgacacggagaccttcatccgcgctgtgggctcggtgtttgtrtccacgctgttgaccatggcgatgccccactggctgcgccaccttgtgcctgggccctggggccgcctctgccgagactgggaccagatgtttgcatttg

SEQ ID NO: 49292 - DNA, 201 bp, Homo sapiens
aggcgaagaatggcaaaggctccgcagtctcctggccccgctcctcctccggcctcaagcggccgcccgctacgccggaaccctgaacaacgtagtctgcraccttgtgcggcgtctgaggcgccagcggggacgtggcacggggccgcccgccctggttcgggacgtggcgggggaattttacaagttcggactggaagg

SEQ ID NO: 49293 - DNA, 201 bp, Homo sapiens
tctcttccctttggctttggcaagcgcagctgtatggggagacgcctggcagagcttgaattgcaaatggctttggcccagatcctaacacattttgaggkgcagcctgagccaggtgcggccccagttagacccaagacccggactgtcctggtacctgaaaggagcatcaacctacagtttttggacagatagtcccat

SEQ ID NO: 49294 - DNA, 201 bp, Homo sapiens
ggagctgctgcgacaggagggaccccggcccgagcgctgcagcttctcgccctggacggagcaccgccgctgccgccagcgggcttgcggactgctcactrcggaaggcgaagaatggcaaaggctccgcagtctcctggccccgctcctcctccggcctcaagcggccgcccgctacgccggaaccctgaacaacgtagt

SEQ ID NO: 49295 - DNA, 201 bp, Homo sapiens; identical to SEQ ID NO: 49273

SEQ ID NO: 49296 - DNA, 201 bp, Homo sapiens; identical to SEQ ID NO: 49274

SEQ ID NO: 49297 - DNA, 201 bp, Homo sapiens; identical to SEQ ID NO: 49275

SEQ ID NO: 49298 - DNA, 201 bp, Homo sapiens; identical to SEQ ID NO: 49276

SEQ ID NO: 49299 - DNA, 201 bp, Homo sapiens; identical to SEQ ID NO: 49277

SEQ ID NO: 49300 - DNA, 201 bp, Homo sapiens; identical to SEQ ID NO: 49278

SEQ ID NO: 49301 - DNA, 201 bp, Homo sapiens; identical to SEQ ID NO: 49279

SEQ ID NO: 49302 - DNA, 201 bp, Homo sapiens; identical to SEQ ID NO: 49266

SEQ ID NO: 49303 - DNA, 201 bp, Homo sapiens; identical to SEQ ID NO: 49263

SEQ ID NO: 49304 - DNA, 201 bp, Homo sapiens; identical to SEQ ID NO: 49281

SEQ ID NO: 49305 - DNA, 201 bp, Homo sapiens; identical to SEQ ID NO: 49282

SEQ ID NO: 49306 - DNA, 201 bp, Homo sapiens; identical to SEQ ID NO: 49283

SEQ ID NO: 49307 - DNA, 201 bp, Homo sapiens; identical to SEQ ID NO: 49265

SEQ ID NO: 49308 - DNA, 201 bp, Homo sapiens; identical to SEQ ID NO: 49285

SEQ ID NO: 49309 - DNA, 201 bp, Homo sapiens; identical to SEQ ID NO: 49286

SEQ ID NO: 49310 - DNA, 201 bp, Homo sapiens; identical to SEQ ID NO: 49288

SEQ ID NO: 49311 - DNA, 201 bp, Homo sapiens; identical to SEQ ID NO: 49287

SEQ ID NO: 49312 - DNA, 201 bp, Homo sapiens; identical to SEQ ID NO: 49289

SEQ ID NO: 49313 - DNA, 201 bp, Homo sapiens; identical to SEQ ID NO: 49290

SEQ ID NO: 49314 - DNA, 201 bp, Homo sapiens; identical to SEQ ID NO: 49291

SEQ ID NO: 49315 - DNA, 201 bp, Homo sapiens; identical to SEQ ID NO: 49292

SEQ ID NO: 49316 - DNA, 201 bp, Homo sapiens; identical to SEQ ID NO: 49293

SEQ ID NO: 49317 - DNA, 201 bp, Homo sapiens; identical to SEQ ID NO: 49294

SEQ ID NO: 49318 - DNA, 201 bp, Homo sapiens; identical to SEQ ID NO: 49273

SEQ ID NO: 49319 - DNA, 201 bp, Homo sapiens; identical to SEQ ID NO: 49274

SEQ ID NO: 49320 - DNA, 201 bp, Homo sapiens; identical to SEQ ID NO: 49275

SEQ ID NO: 49321 - DNA, 201 bp, Homo sapiens; identical to SEQ ID NO: 49276

SEQ ID NO: 49322 - DNA, 201 bp, Homo sapiens; identical to SEQ ID NO: 49277

SEQ ID NO: 49323 - DNA, 201 bp, Homo sapiens; identical to SEQ ID NO: 49279

SEQ ID NO: 49324 - DNA, 201 bp, Homo sapiens; identical to SEQ ID NO: 49278

SEQ ID NO: 49325 - DNA, 201 bp, Homo sapiens; identical to SEQ ID NO: 49285

SEQ ID NO: 49326 - DNA, 201 bp, Homo sapiens; identical to SEQ ID NO: 49286

SEQ ID NO: 49327 - DNA, 201 bp, Homo sapiens; identical to SEQ ID NO: 49287

SEQ ID NO: 49328 - DNA, 201 bp, Homo sapiens; identical to SEQ ID NO: 49288

SEQ ID NO: 49329 - DNA, 201 bp, Homo sapiens; identical to SEQ ID NO: 49290

SEQ ID NO: 49330 - DNA, 201 bp, Homo sapiens; identical to SEQ ID NO: 49291

SEQ ID NO: 49331 - DNA, 201 bp, Homo sapiens; identical to SEQ ID NO: 49289

SEQ ID NO: 49332 - DNA, 201 bp, Homo sapiens; identical to SEQ ID NO: 49293

SEQ ID NO: 49333 - DNA, 201 bp, Homo sapiens; identical to SEQ ID NO: 49294

SEQ ID NO: 49334 - DNA, 201 bp, Homo sapiens; identical to SEQ ID NO: 49292

SEQ ID NO: 49335 - DNA, 201 bp, Homo sapiens; identical to SEQ ID NO: 49281

SEQ ID NO: 49336 - DNA, 201 bp, Homo sapiens; identical to SEQ ID NO: 49282

SEQ ID NO: 49337 - DNA, 115 bp, Homo sapiens
atgaaaagccatccytctagagctcagctcaccagagtgtcagcttcagcctcccagcagaggctgaaccaggaacagccccaagagatgaggggaagagaatgctctgggtgta

SEQ ID NO: 49338 - DNA, 155 bp, Homo sapiens
ctggagagggaattgaaggtcagccaaagagcaagccagtctggaaacctaaaggactctgtccaagtgtacaggaaccaggtggaattgctgagagtcckttttctggggaggcttacaggccactacgtaagacttgttctgtcgcttctctt

SEQ ID NO: 49339 - DNA, 201 bp, Homo sapiens
atgggatggagcccaaaggtgtcattgagagtaactggaatgagattgttgacagctttgatgacatgaacctctcagagtcccttctccgtggcatctaygcctatggtttagagaagccgtctgccatccagcagcgagccattctaccttgtatcaagggttatcacgtgattgctcaagcccaatctggggctggga

SEQ ID NO: 49340 - DNA, 201 bp, Homo sapiens
ttcatcaacacccggaggaaggtggactggctcaccgagaagatgcatgctcgagatttcactgtcttcaccattcgtggagatatggaccaaaacgaacragacgtgatcttgagggagtttctcaccaactatgaccttcccaccaacagggaaaaccatatccatagaatcggtcgaggtggacggtttggccgtaaa

SEQ ID NO: 49341 - DNA, 146 bp, Homo sapiens
tctaaggatcatgtctgcgagccaggattcctgatccagagacaayggccccaatgggatggagcccaaaggtgtcattgagagtaactggaatgagattgttgacagctttgatgacatgaacctctcagagtcccttctccgtg

SEQ ID NO: 49342 - DNA, 153 bp, Homo sapiens
tctaaggatcatgtctgcgagccaggattcctgatccagagacaacggccccratgggatggagcccaaaggtgtcattgagagtaactggaatgagattgttgacagctttgatgacatgaacctctcagagtcccttctccgtggcatcta

SEQ ID NO: 49343 - DNA, 201 bp, Homo sapiens
gacatgaacctctcagagtcccttctccgtggcatctacgcctatggtttagagaagccgtctgccatccagcagcgagccattctaccttgtatcaaggrttatcacgtgattgctcaagcccaatctggggctgggaaaatggccacatttgccatattgattctgcagcagattgaattagatctaaaagccacccag

SEQ ID NO: 49344 - DNA, 201 bp, Homo sapiens; identical to SEQ ID NO: 49339

SEQ ID NO: 49345 - DNA, 201 bp, Homo sapiens
ttcatcaacacccggaggaaggtggactggctcaccgagaagatgcatgctcgagatttcactgtcttcaccattcgtggagatatggaccaaaacgaacragacgtgatcttgagggagtttcgttatggctctagcagttttgattaccactgacctgctggccagaggcattgatgtgcaacaggtttctttagtcac

SEQ ID NO: 49346 - DNA, 154 bp, Homo sapiens
ctagagtttctaaggatcatgtctgcgagccaggattcctgatccagagacaayggccccaatgggatggagcccaaaggtgtcattgagagtaactggaatgagattgttgacagctttgatgacatgaacctctcagagtcccttctccgtg

SEQ ID NO: 49347 - DNA, 161 bp, Homo sapiens
ctagagtttctaaggatcatgtctgcgagccaggattcctgatccagagacaacggccccratgggatggagcccaaaggtgtcattgagagtaactggaatgagattgttgacagctttgatgacatgaacctctcagagtcccttctccgtggcatcta

SEQ ID NO: 49348 - DNA, 201 bp, Homo sapiens; identical to SEQ ID NO: 49343

SEQ ID NO: 49349 - DNA, 201 bp, Homo sapiens
cagcagaaaattttcgtgctctgagcactggagagaaaggatttggttataagggttcctgctttcacagaattattccagggtttatgtgtcagggtggwgacttcacacgccataatggcactggtggcaagtccatctatggggagaaatttgagcatgaatattgtggaggccatggagcgctttgggtccaggaat

SEQ ID NO: 49350 - DNA, 201 bp, Homo sapiens
caagaagatcaccattgctgactgtggacaactcgaataagtttgacttgtgttttatcttaaccaccagatcattccttctgtagctcaggagagcaccyctccaccccatttgctcgcagtatcctagaatctttgtgctctcgctgcagttccctttgggttccatgttttccttgttccctcccatgcctagctgga

SEQ ID NO: 49351 - DNA, 201 bp, Homo sapiens
gcgcgagaccgggttgcgggcggggccgaacgtggtataaaaggggcgggaggccaggctcgtgccgttttgcagacgccaccgccgaggaaaaccgtgtrctattagccatggtcaaccccaccgtgttcttcgacattgccgtcgacggcgagcccttgggccgcgtctcctttgagctgtttgcagacaaggtcccaa

SEQ ID NO: 49352 - DNA, 147 bp, Homo sapiens
aagccataagatctggtcaaagggatacccttcccactaaggacttggtttctcaggaaattatatgtacagtgcttgctggcagttagatgtcaggacartctaagctgagaaaaccccttctctgcccaccttaacagacctcta

SEQ ID NO: 49353 - DNA, 201 bp, Homo sapiens
cagcagaaaattttcgtgctctgagcactggagagaaaggatttggttataagggttcctgctttcacagaattattccagggtttatgtgtcagggtggwgacttcacacgccataatggcactggtggcaagtccatctatggggagaaatttgaagatgagaacttcatcctaaagcatacgggtcctggcatcttgt

SEQ ID NO: 49354 - DNA, 201 bp, Homo sapiens
gagttcatgcatttagaggtgttcttcaagatgactaatgtcaaaaattgagacatctgttgcggttcttttttttttttttttttcccctggaatgcagkggcgtgatctcagctcactgcagcctccgcctcctgggttcaagtgattctagtgcctcagcctcctgagtagctgggataacgggcgtgtgccaccatg

SEQ ID NO: 49355 - DNA, 201 bp, Homo sapiens; identical to SEQ ID NO: 49350

SEQ ID NO: 49356 - DNA, 201 bp, Homo sapiens
ggtcagtctgcagtgagttcatgcatttagaggtgttcttcaagatgactaatgtcaaaaattgagacatctgttgcggttcttttttttttttttttttyccctggaatgcagtggcgtgatctcagctcactgcagcctccgcctcctgggttcaagtgattctagtgcctcagcctcctgagtagctgggataacggg

SEQ ID NO: 49357 - DNA, 201 bp, Homo sapiens
cctagctgatctggaggctgacgtgggaggattgcttgagcctagagtgagctattatcatgccactgtacagcctgggtgttcacagatcttgtgtctcmaaggtaggcagaggcaggaaaagcaaggagccagaattaagaggttgggtcagtctgcagtgagttcatgcatttagaggtgttcttcaagatgactaat

SEQ ID NO: 49358 - DNA, 201 bp, Homo sapiens; identical to SEQ ID NO: 49351

SEQ ID NO: 49359 - DNA, 147 bp, Homo sapiens; identical to SEQ ID NO: 49352

SEQ ID NO: 49360 - DNA, 201 bp, Homo sapiens; identical to SEQ ID NO: 49353

SEQ ID NO: 49361 - DNA, 201 bp, Homo sapiens; identical to SEQ ID NO: 49354

SEQ ID NO: 49362 - DNA, 201 bp, Homo sapiens; identical to SEQ ID NO: 49350

SEQ ID NO: 49363 - DNA, 201 bp, Homo sapiens; identical to SEQ ID NO: 49356

SEQ ID NO: 49364 - DNA, 201 bp, Homo sapiens; identical to SEQ ID NO: 49357

SEQ ID NO: 49365 - DNA, 201 bp, Homo sapiens
gcgcgagaccgggttgcgggcggggccgaacgtggtataaaaggggcgggaggccaggctcgtgccgttttgcagacgccaccgccgaggaaaaccgtgtrctattagccatggtcaaccccaccgtgttcttcgacattgccgtcgacggcgagcccttgggccgcgtctcctttgaggtaaggggcctggataccaaga

SEQ ID NO: 49366 - DNA, 201 bp, Homo sapiens
aagccataagatctggtcaaagggatacccttcccactaaggacttggtttctcaggaaattatatgtacagtgcttgctggcagttagatgtcaggacartctaagctgagaaaaccccttctctgcccaccttaacagacctctagggttcttaacccagcaatcaagtttgcctatcctagaggtggcggatttgatc

SEQ ID NO: 49367 - DNA, 201 bp, Homo sapiens; identical to SEQ ID NO: 49353

SEQ ID NO: 49368 - DNA, 201 bp, Homo sapiens; identical to SEQ ID NO: 49350

SEQ ID NO: 49369 - DNA, 201 bp, Homo sapiens
ctgcccaccttaacagacctctagggttcttaacccagcaatcaagtttgcctatcctagaggtggcggatttgatcatttggtgtgttgggcaatttttkttttactgtctggttccttctgcgtgaattaccaccaccaccacttgtgcatctcagtcttgtgtgttgtctggttacgtattccctgggtgataccatt

SEQ ID NO: 49370 - DNA, 201 bp, Homo sapiens; identical to SEQ ID NO: 49351

SEQ ID NO: 49371 - DNA, 147 bp, Homo sapiens; identical to SEQ ID NO: 49352

SEQ ID NO: 49372 - DNA, 201 bp, Homo sapiens
gtcgggaaaattttcgtgctctgagcactggagagaaaggatttggttataagggttcctgctttcacagaattattccagggtttatgtgtcagggtggwgacttcacacgccataatggcactggtggcaagtccatctatggggagaaatttgaagatgagaacttcatcctaaagcatacgggtcctggcatcttgt

SEQ ID NO: 49373 - DNA, 201 bp, Homo sapiens; identical to SEQ ID NO: 49354

SEQ ID NO: 49374 - DNA, 201 bp, Homo sapiens; identical to SEQ ID NO: 49350

SEQ ID NO: 49375 - DNA, 201 bp, Homo sapiens; identical to SEQ ID NO: 49356

SEQ ID NO: 49376 - DNA, 201 bp, Homo sapiens; identical to SEQ ID NO: 49357

SEQ ID NO: 49377 - DNA, 201 bp, Homo sapiens
gtcttcgggtggctttgtgtgggcctgcaagaactatgacggagatgtgcagtcagacatcctggcccagggctttggctcccttggcctgatgacgtccrtcctggtctgccctgatgggaagacgattgaggctgaggccgctcatgggaccgtcacccgccactatcgggagcaccagaagggccggcccaccagcac

SEQ ID NO: 49378 - DNA, 201 bp, Homo sapiens
cctgagcgcggcagagggtgagcctcacagcccctctctggaggcctttctaggggatgtttttttataagccagatgtttttaaaagcatatgtgtgttycccctcatggtgacgtgaggcaggagcagtgcgttttacctcagccagtcagtatgttttgcatactgtaatttatattgcccttggaacacatggtgcc

SEQ ID NO: 49379 - DNA, 201 bp, Homo sapiens
aacaagggccctgcattgtctaggcctgcagttcccaggcttgggttcactttcaccatgcattggcaaaactagaaaagtaagcttgtgacaaattgttytcggccgggcacagtggcgcacgcctataatccctgtactttgggaggctgaggtgggtggatcacttgaggccaggagttcgagaccagcctggccaac

SEQ ID NO: 49380 - DNA, 201 bp, Homo sapiens
aaagtaagcttgtgacaaattgttctcggccgggcacagtggcgcacgcctataatccctgtactttgggaggctgaggtgggtggatcacttgaggccakgagttcgagaccagcctggccaacatggtgaaaccccatctctactcaaaatacaaaaattagccaggcgtggtgatgcgcacctgcagtcccagctact

SEQ ID NO: 49381 - DNA, 201 bp, Homo sapiens
tcaagtcttcgggtggctttgtgtgggcctgcaagaactatgacggagatgtgcagtcagacatcctggcccagggctttggctcccttggcctgatgacrtccgtcctggtctgccctgatgggaagacgattgaggctgaggccgctcatgggaccgtcacccgccactatcgggagcaccagaagggccggcccacca

SEQ ID NO: 49382 - DNA, 201 bp, Homo sapiens
agtcttcgggtggctttgtgtgggcctgcaagaactatgacggagatgtgcagtcagacatcctggcccagggctttggctcccttggcctgatgacgtcygtcctggtctgccctgatgggaagacgattgaggctgaggccgctcatgggaccgtcacccgccactatcgggagcaccagaagggccggcccaccagca

SEQ ID NO: 49383 - DNA, 201 bp, Homo sapiens
cagacatcctggcccagggctttggctcccttggcctgatgacgtccgtcctggtctgccctgatgggaagacgattgaggctgaggccgctcatgggacygtcacccgccactatcgggagcaccagaagggccggcccaccagcaccaaccccatcgccagcatctttgcctggacacgtggcctggagcaccggggga

SEQ ID NO: 49384 - DNA, 201 bp, Homo sapiens
ccaacatggtgaaaccccatctctactcaaaatacaaaaattagccaggcgtggtgatgcgcacctgcagtcccagctactcgggaggctgaggcaggaaratggcttgaacctgggaggcagaggttgcagtgagccgagactgcaccactgcactccagcctgggtgacagagcaagactctgtctcaaaaaaaaaaaa

SEQ ID NO: 49385 - DNA, 201 bp, Homo sapiens
actttgtggcagaccgggccggcactttcaaaatggtcttcaccccaaaagatggcagtggtgtcaaggagtgggaagtgtacaacttccccgcaggcggygtgggcatgggcatgtacaacaccgacgagtccatctcaggttttgcgcacagctgcttccagtatgccatccagaagaaatggccgctgtacatgagca

SEQ ID NO: 49386 - DNA, 201 bp, Homo sapiens
tgaaaccccatctctactcaaaatacaaaaattagccaggcgtggtgatgcgcacctgcagtcccagctactcgggaggctgaggcaggaaaatggcttgracctgggaggcagaggttgcagtgagccgagactgcaccactgcactccagcctgggtgacagagcaagactctgtctcaaaaaaaaaaaaaaaaaaaaa

SEQ ID NO: 49387 - DNA, 201 bp, Homo sapiens; identical to SEQ ID NO: 49377

SEQ ID NO: 49388 - DNA, 201 bp, Homo sapiens; identical to SEQ ID NO: 49378

SEQ ID NO: 49389 - DNA, 201 bp, Homo sapiens; identical to SEQ ID NO: 49379

SEQ ID NO: 49390 - DNA, 201 bp, Homo sapiens; identical to SEQ ID NO: 49380

SEQ ID NO: 49391 - DNA, 201 bp, Homo sapiens; identical to SEQ ID NO: 49381

SEQ ID NO: 49392 - DNA, 201 bp, Homo sapiens; identical to SEQ ID NO: 49382

SEQ ID NO: 49393 - DNA, 201 bp, Homo sapiens; identical to SEQ ID NO: 49383

SEQ ID NO: 49394 - DNA, 201 bp, Homo sapiens; identical to SEQ ID NO: 49384

SEQ ID NO: 49395 - DNA, 201 bp, Homo sapiens; identical to SEQ ID NO: 49385

SEQ ID NO: 49396 - DNA, 201 bp, Homo sapiens; identical to SEQ ID NO: 49386

SEQ ID NO: 49397 - DNA, 201 bp, Homo sapiens
tccgtacaaactcctttcaaatttttcccaggaatgctgtcggaactggaccttgatgaaggaaatactttctgactcattggaatttgttatagtcaaadtaagtaaggcacaaatattgaagataaacttggtacagtatgtagtgccttttgttattaaatgcaactttgggtgattacttgacattttgacttcatt

SEQ ID NO: 49398 - DNA, 201 bp, Homo sapiens
ggtatagtcaatgattttcaattattatgtcaattacattcgttgtattcacttacggactttatggtaggttacaaaaatatatactttgaaaagaaatrtactctttatgcaaaggaagctatgccatcaacaaacttgacctctaattcccaagtttattacagaaaaatttgtagtgtgaaaaaggcaaacatctcc

SEQ ID NO: 49399 - DNA, 128 bp, Homo sapiens
atggcaccggccagagcaggatgctgcyccctgctgctgctgcttctggggctgtgggtggcagaggtcctagtcagagccaagcccaaggacatgacatcatctcagtggtttaaaactcagcatgt

SEQ ID NO: 49400 - DNA, 201 bp, Homo sapiens
ctgatgaaagcggaagcaaattccagcttaaaacaatagaaaccttattgggtagtacaaccaaaatcggagatgcgattgttcttggaatgataacgcarttaaaagagggaaaattttttctggaagatcctactggaacagtccaactagaccttagtaaagctatttccatagtggtttatacacagaggcatgctt

SEQ ID NO: 49401 - DNA, 201 bp, Homo sapiens
tattgggtagtacaaccaaaatcggagatgcgattgttcttggaatgataacgcagttaaaagagggaaaattttttctggaagatcctactggaacagtmcaactagaccttagtaaagctatttccatagtggtttatacacagaggcatgctttgtcttagcagaaggttggtttgaagatcaagtgtttcatgtcaa

SEQ ID NO: 49402 - DNA, 201 bp, Homo sapiens
gcagttgagaagcaacccttgtcatcaaacatgattgaacgatctgtggtggaagcagcagtccaggaatgcagtcagtctgttgatgaaactatagagcmcgttttcaatatcataggagcatttgatattccacgctttgtgtacaattcagaaagaaaaaaatttcttcctctgttaatgaccaaccaccctgcacca

SEQ ID NO: 49403 - DNA, 201 bp, Homo sapiens
taatcactttgtaaagactatcttatcccaaggacatctgactcccctacctctttatgtctgcccagtgtattgggcatatgactatgctttgagagtgyatcctgtgcccgatctacttgtcattgcagacaaatatgatcctttcactacgacaaataccgaatgcctctgcataaaccctggctcttttccaagaag

SEQ ID NO: 49404 - DNA, 201 bp, Homo sapiens
accctgatgaaagcggaagcaaattccagcttaaaacaatagaaaccttattgggtagtacaaccaaaatcggagatgcgattgttcttggaatgataacrcagttaaaagagggaaaattttttctggaagatcctactggaacagtccaactagaccttagtaaagctatttccatagtggtttatacacagaggcatg

SEQ ID NO: 49405 - DNA, 150 bp, Homo sapiens
tttatccttctaataagacagtagaagatagcaaacttcaaggcttttgagattcttaaagatcatctgaagaaaattcatcagttttctgcttaactctrtatcttatgtgattctgatattacaataaaattatggtaaactttagga

SEQ ID NO: 49406 - DNA, 201 bp, Homo sapiens
aatgtgcagaaactgcgtccgttttcctagcagcaatttggctattcctaatcactttgtaaagactatcttatcccaaggacatctgactcccctacctstttatgtctgcccagtgtattgggcatatgactatgctttgagagtgtatcctgtgcccgatctacttgtcattgcagacaaatatgatcctttcactac

SEQ ID NO: 49407 - DNA, 201 bp, Homo sapiens
ctcacagacctggtggggcaggtcctgttcacagcagcaggagtgaaggcctggccatcggtggagagggcagctgtcagagggctgggggccagggcacrggattgaagagtttcacatatcatcacagcatacactgggaatttggtgggggcagaagaacccagggccactccctcaatatgaagggaaaccaagctg

SEQ ID NO: 49408 - DNA, 201 bp, Homo sapiens
gcaccaagatgctggagaggccgcccccgggacggccggaggagaagcctgagggggccaacggctcctcggcccggcggccaccccggtacctcctgagygcccgggagcgcacggggggccgaggcgcccggcgcaagtgggtggagtgcgtgtgcctgcccggctggcacggacccagctgcggcgtgcccactgtgg

SEQ ID NO: 49409 - DNA, 201 bp, Homo sapiens
gggtggacttggtgctgcccgaggacaccaccgagtatttcgtgcgcaccaaggccggcggcgtctgcttcaaacccggcaccaagatgctggagaggccscccccgggacggccggaggagaagcctgagggggccaacggctcctcggcccggcggccaccccggtacctcctgagcgcccgggagcgcacggggggcc

SEQ ID NO: 49410 - DNA, 201 bp, Homo sapiens
tcattgacgatgcggacgagatcccggcccgtgacggcgtccttttcctcaagctctacgatggctggaccgagcccttcgccttccacatgcgcaagtcrctctacggcttcttctggaagcagccgggcaccctggaggtggtgtcaggctgcacggtggacatgctgcaggcagtgtatgggctggacggcatccgcc

SEQ ID NO: 49411 - DNA, 201 bp, Homo sapiens
gttgtggccttgggtaaaggcctcccctgagaacacaggacaggcctgctgacaaggctgagtctaccttggcaaagaccaagatattttttcctgggccmctggggaatctgaggggtgatgggagagaaggaacctggagtggaaggagcagagttgcaaattaacaacttgcaaatgaggtgcaaataaaatgcagat

SEQ ID NO: 49412 - DNA, 201 bp, Homo sapiens
tgggtaaaggcctcccctgagaacacaggacaggcctgctgacaaggctgagtctaccttggcaaagaccaagatattttttcctgggccactggggaatytgaggggtgatgggagagaaggaacctggagtggaaggagcagagttgcaaattaacaacttgcaaatgaggtgcaaataaaatgcagatgattgcgcgg

SEQ ID NO: 49413 - DNA, 162 bp, Homo sapiens
actctgtcaccgcccctgggaagagtggaacccatacttgctggtctgatccatgcacaagrcggggctgctaggcctctgtgcccgggcttggaattcggtgcggatggccagctccgggatgacccgccgggacccgctcgcaaataaggtggccctggt

SEQ ID NO: 49414 - DNA, 197 bp, Homo sapiens
actctgtcaccgcccctgggaagagtggaacccatacttgctggtctgatccatgcacaaggcggggctgctaggcctctgtgcccgggcttggaaktcggtgcggatggccagctccgggatgacccgccgggacccgctcgcaaataaggtggccctggtaacggcctccaccgacgggatcggcttcgccatcg

SEQ ID NO: 49415 - DNA, 149 bp, Homo sapiens
tggcaaagaccaagatattttttcctgggccactggggaatctgaggggtgatgggagagaaggaacctggagtggaaggagcagagttgcaaattaacarcttgcaaatgaggtgcaaataaaatgcagatgattgcgcggctttgaa

SEQ ID NO: 49416 - DNA, 201 bp, Homo sapiens
gctgttgttgtggccttgggtaaaggcctcccctgagaacacaggacaggcctgctgacaaggctgagtctaccttggcaaagaccaagatattttttccygggccactggggaatctgaggggtgatgggagagaaggaacctggagtggaaggagcagagttgcaaattaacaacttgcaaatgaggtgcaaataaaat

SEQ ID NO: 49417 - DNA, 150 bp, Homo sapiens
actctgtcaccgcccctgggaagagtggaacccatacttgctggtctgakccatgcacaaggcggggctgctaggcctctgtgcccgggcttggaattcggtgcggatggccagctccgggatgacccgccgggacccgctcgcaaataa

SEQ ID NO: 49418 - DNA, 165 bp, Homo sapiens
actctgtcaccgcccctgggaagagtggaacccatacttgctggtctgatccatgcacaaggcgrggctgctaggcctctgtgcccgggcttggaattcggtgcggatggccagctccgggatgacccgccgggacccgctcgcaaataaggtggccctggtaac

SEQ ID NO: 49419 - DNA, 201 bp, Homo sapiens
cccacctctgctcaccttactgttcacctcatcaaatcagttctgccctgtgaaaagatccagccttccctgccgtcaaggtggcgtcttactcgggattyctgctgttgttgtggccttgggtaaaggcctcccctgagaacacaggacaggcctgctgacaaggctgagtctaccttggcaaagaccaagatatttttt

SEQ ID NO: 49420 - DNA, 201 bp, Homo sapiens
agacagcccacaggccagagttgggctctagctcctggtgctgttcctgcattcacccactggcctttcccacctctgctcaccttactgttcacctcatmaaatcagttctgccctgtgaaaagatccagccttccctgccgtcaaggtggcgtcttactcgggattcctgctgttgttgtggccttgggtaaaggcctc

SEQ ID NO: 49421 - DNA, 201 bp, Homo sapiens
ggggaaacagtggtggtgggtggaggaaccccgtcccgcctctgaggaccgggagacagcccacaggccagagttgggctctagctcctggtgctgttccygcattcacccactggcctttcccacctctgctcaccttactgttcacctcatcaaatcagttctgccctgtgaaaagatccagccttccctgccgtcaag

SEQ ID NO: 49422 - DNA, 201 bp, Homo sapiens
gtgctggcatcgtgtctttcctgtgctctgaagatgccagctacatcactggggaaacagtggtggtgggtggaggaaccccgtcccgcctctgaggaccsggagacagcccacaggccagagttgggctctagctcctggtgctgttcctgcattcacccactggcctttcccacctctgctcaccttactgttcacctc

SEQ ID NO: 49423 - DNA, 201 bp, Homo sapiens
ggaagagtggaacccatacttgctggtctgatccatgcacaaggcggggctgctaggcctctgtgcccgggcttggaattcggtgcggatggccagctccrggatgacccgccgggacccgctcgcaaataaggtggccctggtaacggcctccaccgacgggatcggcttcgccatcgcccggcgtttggcccaggacgg

SEQ ID NO: 49424 - DNA, 201 bp, Homo sapiens
aaccctgcggataagaaggttaggcgagccagaggattgtgctggcatcgtgtctttcctgtgctctgaagatgccagctacatcactggggaaacagtgrtggtgggtggaggaaccccgtcccgcctctgaggaccgggagacagcccacaggccagagttgggctctagctcctggtgctgttcctgcattcacccac

SEQ ID NO: 49425 - DNA, 201 bp, Homo sapiens
aacccatacttgctggtctgatccatgcacaaggcggggctgctaggcctctgtgcccgggcttggaattcggtgcggatggccagctccgggatgacccrccgggacccgctcgcaaataaggtggccctggtaacggcctccaccgacgggatcggcttcgccatcgcccggcgtttggcccaggacggggcccatgtg

SEQ ID NO: 49426 - DNA, 192 bp, Homo sapiens
ctgagaacacaggacaggcctgctgacaaggctgagtctaccttggcaaagaccaagatattttttcctgggccactggggaatctgaggggtgatgggaragaaggaacctggagtggaaggagcagagttgcaaattaacaacttgcaaatgaggtgcaaataaaatgcagatgattgcgcggctttgaa

SEQ ID NO: 49427 - DNA, 201 bp, Homo sapiens
tctgatccatgcacaaggcggggctgctaggcctctgtgcccgggcttggaattcggtgcggatggccagctccgggatgacccgccgggacccgctcgcraataaggtggccctggtaacggcctccaccgacgggatcggcttcgccatcgcccggcgtttggcccaggacggggcccatgtggtcgtcagcagccgga

SEQ ID NO: 49428 - DNA, 186 bp, Homo sapiens
actctgtcaccgcccctgggaagagtggaacccatacttgctggtctgatccatgcacaaggcggggctgctaggcctctgtgcchgggcttggaattcggtgcggatggccagctccgggatgacccgccgggacccgctcgcaaataaggtggccctggtaacggcctccaccgacgggatcgg

SEQ ID NO: 49429 - DNA, 201 bp, Homo sapiens; identical to SEQ ID NO: 49411

SEQ ID NO: 49430 - DNA, 201 bp, Homo sapiens; identical to SEQ ID NO: 49412

SEQ ID NO: 49431 - DNA, 162 bp, Homo sapiens; identical to SEQ ID NO: 49413

SEQ ID NO: 49432 - DNA, 197 bp, Homo sapiens; identical to SEQ ID NO: 49414

SEQ ID NO: 49433 - DNA, 155 bp, Homo sapiens
tggcaaagaccaagatattttttcctgggccactggggaatctgaggggtgatgggagagaaggaacctggagtggaaggagcagagttgcaaattaacarcttgcaaatgaggtgcaaataaaatgcagatgattgcgcggctttgaatccaat

SEQ ID NO: 49434 - DNA, 201 bp, Homo sapiens; identical to SEQ ID NO: 49416

SEQ ID NO: 49435 - DNA, 165 bp, Homo sapiens; identical to SEQ ID NO: 49418

SEQ ID NO: 49436 - DNA, 150 bp, Homo sapiens; identical to SEQ ID NO: 49417

SEQ ID NO: 49437 - DNA, 201 bp, Homo sapiens; identical to SEQ ID NO: 49419

SEQ ID NO: 49438 - DNA, 201 bp, Homo sapiens; identical to SEQ ID NO: 49420

SEQ ID NO: 49439 - DNA, 201 bp, Homo sapiens; identical to SEQ ID NO: 49421

SEQ ID NO: 49440 - DNA, 201 bp, Homo sapiens; identical to SEQ ID NO: 49422

SEQ ID NO: 49441 - DNA, 201 bp, Homo sapiens; identical to SEQ ID NO: 49423

SEQ ID NO: 49442 - DNA, 201 bp, Homo sapiens; identical to SEQ ID NO: 49424

SEQ ID NO: 49443 - DNA, 201 bp, Homo sapiens
cataatggatgtcactgaggaggtgtgggacaagactctggacattaatgtgaaggccccagccctgatgacaaaggcagtggtgccagaaatggagaaaygaggaggcggctcagtggtgatcgtgtcttccatagcagccttcagtccatctcctggcttcagtccttacaatgtcagtaaaacagccttgctgggcct

SEQ ID NO: 49444 - DNA, 201 bp, Homo sapiens; identical to SEQ ID NO: 49425

SEQ ID NO: 49445 - DNA, 198 bp, Homo sapiens
ctgagaacacaggacaggcctgctgacaaggctgagtctaccttggcaaagaccaagatattttttcctgggccactggggaatctgaggggtgatgggaragaaggaacctggagtggaaggagcagagttgcaaattaacaacttgcaaatgaggtgcaaataaaatgcagatgattgcgcggctttgaatccaat

SEQ ID NO: 49446 - DNA, 201 bp, Homo sapiens; identical to SEQ ID NO: 49427

SEQ ID NO: 49447 - DNA, 186 bp, Homo sapiens; identical to SEQ ID NO: 49428

SEQ ID NO: 49448 - DNA, 138 bp, Homo sapiens
tatgtacttagaatttgagttctgataatttatttttytatgggaggtggggaggtttattttttaaattgcagtccaaaggagtaaatttgatgttacattggacagtttattcagataccacaaactttacagatt

SEQ ID NO: 49449 - DNA, 201 bp, Homo sapiens
tgctttacatgtgcaaagaagctaaagaaaaggaataagccctgcccagtatgtagacaaccaattcaaatgattgtgctaacttatttcccctagttgayctgtctataagagaattatatatttctaactatataaccctaggaatttagacaacctgaaatttattcacatatatcaaagtgagaaaatgcctcaatt

SEQ ID NO: 49450 - DNA, 201 bp, Homo sapiens
ccctctgaccgagatcctgctgctttcgcagccaggagcaccgtccctccccggattagtgcgtacgagcgcccagtgccctggcccggagagtggaatgrtccccgaggcccagggcgtcgtgcttccgcgcgccccgtgaaggaaactggggagtcttgagggacccccgactccaagcgcgaaaaccccggatggtga

SEQ ID NO: 49451 - DNA, 201 bp, Homo sapiens
ctctccaaaatactctttctaggttaaaaaaaaaaaggctcttatatttggtgctatgtaaatgaaaatgttttttaggttttcttgatttaacaatagaracagggtctccctgtgttgcccaggctggtctcgaactcctgggctcaagagatcctcctgtcttggcctcgcaaagtgctaagtaggattacaggcgtt

SEQ ID NO: 49452 - DNA, 201 bp, Homo sapiens
tcaaaaatttatggctagtgatatatataaagtaaaattttctttgcagtaaaatatgccctttattatagaagggaggatataaggaaccaacagtttgkatgaaaatagctcaaataatatcttttattttgattttaatatttcttattttggtttattagtgtcttagaacaaaatggccttatataatgaagccta

SEQ ID NO: 49453 - DNA, 201 bp, Homo sapiens; identical to SEQ ID NO: 49449

SEQ ID NO: 49454 - DNA, 201 bp, Homo sapiens
ttcaaaaatttatggctagtgatatatataaagtaaaattttctttgcagtaaaatatgccctttattatagaagggaggatataaggaaccaacagtttktatgaaaatagctcaaataatatcttttattttgattttaatatttcttattttggtttattagtgtcttagaacaaaatggccttatataatgaagcct

SEQ ID NO: 49455 - DNA, 201 bp, Homo sapiens; identical to SEQ ID NO: 49450

SEQ ID NO: 49456 - DNA, 201 bp, Homo sapiens
atttgataaacagaattgttatttaaaaactaactggaaagattgttaagttctttctgaattattcagaaattatgcatcattttccttcaagaatgacrgggtcagcatgtggaattccaagatacctcttgacttcctctcaagctccgtgtttggtcagtggaggcccatccgagctcagcactgagaagtgttagt

SEQ ID NO: 49457 - DNA, 201 bp, Homo sapiens
cttgatttatatttaaatatgaatcttaagcaaaacagtgaaaataaccatcttgatttagtgtttttctcccatatgtgaattgtatatacttaggtgargacaataaaatcaactgaactgtaagcttagaataggactgaggtaattctgcacagcaactttactaatggtacattgttgcttcaaaactctctctct

SEQ ID NO: 49458 - DNA, 201 bp, Homo sapiens
tgcctgaaataactgacactatataatttctgctttggcaaatactaagttctaacttgtcattcctggtagaacaagctttatttttcgagcctagcaawgatctagaagcagatgttatctcagtgccttttgcaatttgttgtgtgggtttttttttttttaaagccacacaataattttggaaaacaatgtatgggt

SEQ ID NO: 49459 - DNA, 201 bp, Homo sapiens
ctaacctagattacatcaggccctttttcacacacaaaaaaatcctttatgggatttaatggaatctgttgtttccccctaagttgaaaaacaactctaaracactttaaagtaccttcttggcctgggttacatggttcccagcctaggtttcagacttttgcttaaggccagttttagaaacccgtgaattcagaaaag

SEQ ID NO: 49460 - DNA, 201 bp, Homo sapiens
aatgctgggattacagatgtgaggcacctggcctcagatttttgatactcttaaaccttctgatccttagtttctctctccaaaatactctttctaggttaaaaaaaaaaaggctcttatatttggtgctatgtaaatgaaaatgttttttaggttttcttgatttaacaatagagacagggtctccctgtgttgcccagg

SEQ ID NO: 49461 - DNA, 201 bp, Homo sapiens
aaatgttttttaggttttcttgatttaacaatagagacagggtctccctgtgttgcccaggctggtctcgaactcctgggctcaagagatcctcctgtctkggcctcgcaaagtgctaagtaggattacaggcgttagccaccacacccggctgtaaaaatgtacttattctccagcctcttttgtataaaccatagtaag

SEQ ID NO: 49462 - DNA, 201 bp, Homo sapiens
gacagggtctccctgtgttgcccaggctggtctcgaactcctgggctcaagagatcctcctgtcttggcctcgcaaagtgctaagtaggattacaggcgtkagccaccacacccggctgtaaaaatgtacttattctccagcctcttttgtataaaccatagtaagggatgggagtaatgatgttatctgtgaaaatagcc

SEQ ID NO: 49463 - DNA, 201 bp, Homo sapiens
aaggaataagttctagctgaagtattatgaactccaaataatgctttgaggacctccaaaggtaaaagtactaatccctttggccatttattgagagagasagagagagagagtagggtgactatagttaatgtattgaatgttcttgctacaaataaatgatatttgagctgatgggtgtgctaattacactgatttgat

SEQ ID NO: 49464 - DNA, 201 bp, Homo sapiens
ctcttgacttcctctcaagctccgtgtttggtcagtggaggcccatccgagctcagcactgagaagtgttagtttctttgggacccatctaccctgaccayatcatgatgttcatctgcagctgttgcaaggtgttcagattgtataaacataaatgtcacaaaaactttaaaagaagtgcaattctcaaaaggttaggtg

SEQ ID NO: 49465 - DNA, 155 bp, Homo sapiens
tggtacattgttgcttcaaaactctctctctctctctctgtctgtctcaataaatggccaaagggattagtagtttacctgtggaggtcctccaagcattrtttggagttgataatacttcagctacaaccaagcagaatctcttttttttggag

SEQ ID NO: 49466 - DNA, 201 bp, Homo sapiens
gatgttgggcccttcgtgagaattggcttcctgaagataaagggaaagataaaggggaaatctctgagaaagccaaactggaaaactcaacacaagctgargagggctttgatgttcctgattgtaaaaaaactatagtgaatgattccagagagtcatgtgttgaggaaaatgatgataaaattacacaagcttcacaat

SEQ ID NO: 49467 - DNA, 201 bp, Homo sapiens; identical to SEQ ID NO: 49451

SEQ ID NO: 49468 - DNA, 201 bp, Homo sapiens; identical to SEQ ID NO: 49452

SEQ ID NO: 49469 - DNA, 201 bp, Homo sapiens; identical to SEQ ID NO: 49449

SEQ ID NO: 49470 - DNA, 201 bp, Homo sapiens; identical to SEQ ID NO: 49454

SEQ ID NO: 49471 - DNA, 201 bp, Homo sapiens; identical to SEQ ID NO: 49450

SEQ ID NO: 49472 - DNA, 201 bp, Homo sapiens; identical to SEQ ID NO: 49456

SEQ ID NO: 49473 - DNA, 201 bp, Homo sapiens; identical to SEQ ID NO: 49457

SEQ ID NO: 49474 - DNA, 201 bp, Homo sapiens; identical to SEQ ID NO: 49458

SEQ ID NO: 49475 - DNA, 201 bp, Homo sapiens; identical to SEQ ID NO: 49459

SEQ ID NO: 49476 - DNA, 201 bp, Homo sapiens; identical to SEQ ID NO: 49460

SEQ ID NO: 49477 - DNA, 201 bp, Homo sapiens; identical to SEQ ID NO: 49461

SEQ ID NO: 49478 - DNA, 201 bp, Homo sapiens; identical to SEQ ID NO: 49462

SEQ ID NO: 49479 - DNA, 201 bp, Homo sapiens; identical to SEQ ID NO: 49463

SEQ ID NO: 49480 - DNA, 201 bp, Homo sapiens; identical to SEQ ID NO: 49464

SEQ ID NO: 49481 - DNA, 155 bp, Homo sapiens; identical to SEQ ID NO: 49465

SEQ ID NO: 49482 - DNA, 201 bp, Homo sapiens; identical to SEQ ID NO: 49466

SEQ ID NO: 49483 - DNA, 201 bp, Homo sapiens; identical to SEQ ID NO: 49451

SEQ ID NO: 49484 - DNA, 201 bp, Homo sapiens; identical to SEQ ID NO: 49452

SEQ ID NO: 49485 - DNA, 201 bp, Homo sapiens; identical to SEQ ID NO: 49449

SEQ ID NO: 49486 - DNA, 201 bp, Homo sapiens; identical to SEQ ID NO: 49454

SEQ ID NO: 49487 - DNA, 201 bp, Homo sapiens; identical to SEQ ID NO: 49450

SEQ ID NO: 49488 - DNA, 201 bp, Homo sapiens; identical to SEQ ID NO: 49456

SEQ ID NO: 49489 - DNA, 201 bp, Homo sapiens; identical to SEQ ID NO: 49457

SEQ ID NO: 49490 - DNA, 201 bp, Homo sapiens; identical to SEQ ID NO: 49458

SEQ ID NO: 49491 - DNA, 201 bp, Homo sapiens; identical to SEQ ID NO: 49459

SEQ ID NO: 49492 - DNA, 201 bp, Homo sapiens; identical to SEQ ID NO: 49460

SEQ ID NO: 49493 - DNA, 201 bp, Homo sapiens; identical to SEQ ID NO: 49461

SEQ ID NO: 49494 - DNA, 201 bp, Homo sapiens; identical to SEQ ID NO: 49462

SEQ ID NO: 49495 - DNA, 201 bp, Homo sapiens; identical to SEQ ID NO: 49463

SEQ ID NO: 49496 - DNA, 201 bp, Homo sapiens; identical to SEQ ID NO: 49464

SEQ ID NO: 49497 - DNA, 155 bp, Homo sapiens; identical to SEQ ID NO: 49465

SEQ ID NO: 49498 - DNA, 201 bp, Homo sapiens; identical to SEQ ID NO: 49466

SEQ ID NO: 49499 - DNA, 201 bp, Homo sapiens; identical to SEQ ID NO: 49463

SEQ ID NO: 49500 - DNA, 201 bp, Homo sapiens; identical to SEQ ID NO: 49451

SEQ ID NO: 49501 - DNA, 201 bp, Homo sapiens; identical to SEQ ID NO: 49452

SEQ ID NO: 49502 - DNA, 201 bp, Homo sapiens
ttcttttttatcttggccagtatattatgactaaacgattatatgatgagaagcaacaacatatttcaaatgattgtgctaacttatttcccctagttgayctgtctataagagaattatatatttctaactatataaccctaggaatttagacaacctgaaatttattcacatatatcaaagtgagaaaatgcctcaatt

SEQ ID NO: 49503 - DNA, 201 bp, Homo sapiens; identical to SEQ ID NO: 49454

SEQ ID NO: 49504 - DNA, 201 bp, Homo sapiens; identical to SEQ ID NO: 49450

SEQ ID NO: 49505 - DNA, 201 bp, Homo sapiens; identical to SEQ ID NO: 49456

SEQ ID NO: 49506 - DNA, 201 bp, Homo sapiens; identical to SEQ ID NO: 49457

SEQ ID NO: 49507 - DNA, 201 bp, Homo sapiens; identical to SEQ ID NO: 49464

SEQ ID NO: 49508 - DNA, 155 bp, Homo sapiens; identical to SEQ ID NO: 49465

SEQ ID NO: 49509 - DNA, 201 bp, Homo sapiens; identical to SEQ ID NO: 49458

SEQ ID NO: 49510 - DNA, 201 bp, Homo sapiens; identical to SEQ ID NO: 49459

SEQ ID NO: 49511 - DNA, 201 bp, Homo sapiens; identical to SEQ ID NO: 49460

SEQ ID NO: 49512 - DNA, 201 bp, Homo sapiens; identical to SEQ ID NO: 49461

SEQ ID NO: 49513 - DNA, 201 bp, Homo sapiens; identical to SEQ ID NO: 49462

SEQ ID NO: 49514 - DNA, 201 bp, Homo sapiens
agcaattagtgagacagaagaaaattcagatgaattatctggtgaacgacaaagaaaacgccacaaatctgatagtatttccctttcctttgatgaaagcytggctctgtgtgtaataagggagatatgttgtgaaagaagcagtagcagtgaatctacagggacgccatcgaatccggatcttgatgctggtgtaagtga

SEQ ID NO: 49515 - DNA, 201 bp, Homo sapiens; identical to SEQ ID NO: 49451

SEQ ID NO: 49516 - DNA, 201 bp, Homo sapiens; identical to SEQ ID NO: 49452

SEQ ID NO: 49517 - DNA, 201 bp, Homo sapiens; identical to SEQ ID NO: 49449

SEQ ID NO: 49518 - DNA, 201 bp, Homo sapiens; identical to SEQ ID NO: 49454

SEQ ID NO: 49519 - DNA, 201 bp, Homo sapiens; identical to SEQ ID NO: 49450

SEQ ID NO: 49520 - DNA, 201 bp, Homo sapiens; identical to SEQ ID NO: 49456

SEQ ID NO: 49521 - DNA, 201 bp, Homo sapiens; identical to SEQ ID NO: 49457

SEQ ID NO: 49522 - DNA, 201 bp, Homo sapiens; identical to SEQ ID NO: 49458

SEQ ID NO: 49523 - DNA, 201 bp, Homo sapiens; identical to SEQ ID NO: 49460

SEQ ID NO: 49524 - DNA, 201 bp, Homo sapiens; identical to SEQ ID NO: 49459

SEQ ID NO: 49525 - DNA, 201 bp, Homo sapiens; identical to SEQ ID NO: 49461

SEQ ID NO: 49526 - DNA, 201 bp, Homo sapiens; identical to SEQ ID NO: 49462

SEQ ID NO: 49527 - DNA, 201 bp, Homo sapiens; identical to SEQ ID NO: 49463

SEQ ID NO: 49528 - DNA, 201 bp, Homo sapiens; identical to SEQ ID NO: 49464

SEQ ID NO: 49529 - DNA, 155 bp, Homo sapiens; identical to SEQ ID NO: 49465

SEQ ID NO: 49530 - DNA, 201 bp, Homo sapiens; identical to SEQ ID NO: 49466

SEQ ID NO: 49531 - DNA, 201 bp, Homo sapiens; identical to SEQ ID NO: 49449

SEQ ID NO: 49532 - DNA, 201 bp, Homo sapiens; identical to SEQ ID NO: 49450

SEQ ID NO: 49533 - DNA, 201 bp, Homo sapiens; identical to SEQ ID NO: 49514

SEQ ID NO: 49534 - DNA, 201 bp, Homo sapiens; identical to SEQ ID NO: 49451

SEQ ID NO: 49535 - DNA, 201 bp, Homo sapiens; identical to SEQ ID NO: 49452

SEQ ID NO: 49536 - DNA, 201 bp, Homo sapiens; identical to SEQ ID NO: 49449

SEQ ID NO: 49537 - DNA, 201 bp, Homo sapiens; identical to SEQ ID NO: 49454

SEQ ID NO: 49538 - DNA, 201 bp, Homo sapiens; identical to SEQ ID NO: 49450

SEQ ID NO: 49539 - DNA, 201 bp, Homo sapiens; identical to SEQ ID NO: 49456

SEQ ID NO: 49540 - DNA, 201 bp, Homo sapiens; identical to SEQ ID NO: 49457

SEQ ID NO: 49541 - DNA, 201 bp, Homo sapiens; identical to SEQ ID NO: 49458

SEQ ID NO: 49542 - DNA, 201 bp, Homo sapiens; identical to SEQ ID NO: 49460

SEQ ID NO: 49543 - DNA, 201 bp, Homo sapiens; identical to SEQ ID NO: 49459

SEQ ID NO: 49544 - DNA, 201 bp, Homo sapiens; identical to SEQ ID NO: 49461

SEQ ID NO: 49545 - DNA, 201 bp, Homo sapiens; identical to SEQ ID NO: 49462

SEQ ID NO: 49546 - DNA, 201 bp, Homo sapiens; identical to SEQ ID NO: 49463

SEQ ID NO: 49547 - DNA, 201 bp, Homo sapiens; identical to SEQ ID NO: 49464

SEQ ID NO: 49548 - DNA, 155 bp, Homo sapiens; identical to SEQ ID NO: 49465

SEQ ID NO: 49549 - DNA, 201 bp, Homo sapiens; identical to SEQ ID NO: 49466

SEQ ID NO: 49550 - DNA, 201 bp, Homo sapiens; identical to SEQ ID NO: 49449

SEQ ID NO: 49551 - DNA, 201 bp, Homo sapiens; identical to SEQ ID NO: 49450

SEQ ID NO: 49552 - DNA, 201 bp, Homo sapiens; identical to SEQ ID NO: 49463

SEQ ID NO: 49553 - DNA, 201 bp, Homo sapiens; identical to SEQ ID NO: 49451

SEQ ID NO: 49554 - DNA, 201 bp, Homo sapiens; identical to SEQ ID NO: 49452

SEQ ID NO: 49555 - DNA, 201 bp, Homo sapiens; identical to SEQ ID NO: 49449

SEQ ID NO: 49556 - DNA, 201 bp, Homo sapiens; identical to SEQ ID NO: 49454

SEQ ID NO: 49557 - DNA, 201 bp, Homo sapiens; identical to SEQ ID NO: 49450

SEQ ID NO: 49558 - DNA, 201 bp, Homo sapiens; identical to SEQ ID NO: 49456

SEQ ID NO: 49559 - DNA, 201 bp, Homo sapiens; identical to SEQ ID NO: 49457

SEQ ID NO: 49560 - DNA, 201 bp, Homo sapiens; identical to SEQ ID NO: 49464

SEQ ID NO: 49561 - DNA, 155 bp, Homo sapiens; identical to SEQ ID NO: 49465

SEQ ID NO: 49562 - DNA, 201 bp, Homo sapiens; identical to SEQ ID NO: 49458

SEQ ID NO: 49563 - DNA, 201 bp, Homo sapiens; identical to SEQ ID NO: 49459

SEQ ID NO: 49564 - DNA, 201 bp, Homo sapiens; identical to SEQ ID NO: 49460

SEQ ID NO: 49565 - DNA, 201 bp, Homo sapiens; identical to SEQ ID NO: 49461

SEQ ID NO: 49566 - DNA, 201 bp, Homo sapiens; identical to SEQ ID NO: 49462

SEQ ID NO: 49567 - DNA, 201 bp, Homo sapiens
gcatggaacctggagaaccgcttcagcggctggtacgacgccgacctgagcccggcgggccacgaggaggcgaagcgcggcgggcaggcgctacgagatgytggctatgagtttgacatctgcttcacctcagtgcagaagagagcgatccggaccctctggacagtgctagatgccattgatcagatgtggctgccagtg

SEQ ID NO: 49568 - DNA, 198 bp, Homo sapiens
ctttcacagtcggtgccgcatccccagcccgccgccatggccgcctacaaactggtgctgatccggcacggcgagagcgcatggaacctggagaaccrcttcagcggctggtacgacgccgacctgagcccggcgggccacgaggaggcgaagcgcggcgggcaggcgctacgagatgctggctatgagtttgacatc

SEQ ID NO: 49569 - DNA, 201 bp, Homo sapiens
gtcggtgccgcatccccagcccgccgccatggccgcctacaaactggtgctgatccggcacggcgagagcgcatggaacctggagaaccgcttcagcggcyggtacgacgccgacctgagcccggcgggccacgaggaggcgaagcgcggcgggcaggcgctacgagatgctggctatgagtttgacatctgcttcacctc

SEQ ID NO: 49570 - DNA, 201 bp, Homo sapiens
tgccgcatccccagcccgccgccatggccgcctacaaactggtgctgatccggcacggcgagagcgcatggaacctggagaaccgcttcagcggctggtamgacgccgacctgagcccggcgggccacgaggaggcgaagcgcggcgggcaggcgctacgagatgctggctatgagtttgacatctgcttcacctcagtgc

SEQ ID NO: 49571 - DNA, 201 bp, Homo sapiens
acagtcggtgccgcatccccagcccgccgccatggccgcctacaaactggtgctgatccggcacggcgagagcgcatggaacctggagaaccgcttcagckgctggtacgacgccgacctgagcccggcgggccacgaggaggcgaagcgcggcgggcaggcgctacgagatgctggctatgagtttgacatctgcttcac

SEQ ID NO: 49572 - DNA, 201 bp, Homo sapiens
cccagcccgccgccatggccgcctacaaactggtgctgatccggcacggcgagagcgcatggaacctggagaaccgcttcagcggctggtacgacgccgayctgagcccggcgggccacgaggaggcgaagcgcggcgggcaggcgctacgagatgctggctatgagtttgacatctgcttcacctcagtgcagaagagag

SEQ ID NO: 49573 - DNA, 201 bp, Homo sapiens
tcccacatgtggtcatcagaaaataagccattcctcataccaatataggatcagctccttgacctctgaggggcaggagtgcttcctggtgtgtgtattaraatcccttcctgccttgtttcatggcagtgaaatgcctcttggtcctgtccaagtgtatctttcactgatttctgaatcatgttctagttgcttgaccct

SEQ ID NO: 49574 - DNA, 201 bp, Homo sapiens
gcatggaacctggagaaccgcttcagcggctggtacgacgccgacctgagcccggcgggccacgaggaggcgaagcgcggcgggcaggcgctacgagatgytggctatgagtttgacatctgcttcacctcagtgaagatctggaggcgctcctatgatgtcccaccacctccgatggagcccgaccatcctttctacagc

SEQ ID NO: 49575 - DNA, 162 bp, Homo sapiens
atggccgcctacaaactggtgctgatccggcacggcgagagcgcatggaacctggagaaccrcttcagcggctggtacgacgccgacctgagcccggcgggccacgaggaggcgaagcgcggcgggcaggcgctacgagatgctggctatgagtttgacatc

SEQ ID NO: 49576 - DNA, 173 bp, Homo sapiens
atggccgcctacaaactggtgctgatccggcacggcgagagcgcatggaacctggagaaccgcttcagcggcyggtacgacgccgacctgagcccggcgggccacgaggaggcgaagcgcggcgggcaggcgctacgagatgctggctatgagtttgacatctgcttcacctc

SEQ ID NO: 49577 - DNA, 178 bp, Homo sapiens
atggccgcctacaaactggtgctgatccggcacggcgagagcgcatggaacctggagaaccgcttcagcggctggtamgacgccgacctgagcccggcgggccacgaggaggcgaagcgcggcgggcaggcgctacgagatgctggctatgagtttgacatctgcttcacctcagtga

SEQ ID NO: 49578 - DNA, 170 bp, Homo sapiens
atggccgcctacaaactggtgctgatccggcacggcgagagcgcatggaacctggagaaccgcttcagckgctggtacgacgccgacctgagcccggcgggccacgaggaggcgaagcgcggcgggcaggcgctacgagatgctggctatgagtttgacatctgcttcac

SEQ ID NO: 49579 - DNA, 187 bp, Homo sapiens
atggccgcctacaaactggtgctgatccggcacggcgagagcgcatggaacctggagaaccgcttcagcggctggtacgacgccgayctgagcccggcgggccacgaggaggcgaagcgcggcgggcaggcgctacgagatgctggctatgagtttgacatctgcttcacctcagtgaagatctgga

SEQ ID NO: 49580 - DNA, 201 bp, Homo sapiens; identical to SEQ ID NO: 49573

SEQ ID NO: 49581 - DNA, 201 bp, Homo sapiens
taaggatcgtaggtatgcagacctcacagaagatcagctaccctcctgtgagagtctgaaggatactattgggcaggagtgcttcctggtgtgtgtattaraatcccttcctgccttgtttcatggcagtgaaatgcctcttggtcctgtccaagtgtatctttcactgatttctgaatcatgttctagttgcttgaccct

SEQ ID NO: 49582 - DNA, 201 bp, Homo sapiens
ctgggtacctggaagagtgagcctggtcaggtaaaagcagctgttaagtatgcccttagcgtaggctaccgccacattgattgtgctgctatctacggcartgagcctgagattggggaggccctgaaggaggacgtgggaccaggcaaggcggtgcctcgggaggagctgtttgtgacatccaagctgtggaacaccaag

SEQ ID NO: 49583 - DNA, 165 bp, Homo sapiens
gcagaactgagcccaggccacagtaccctattcacgctcttgtttcagggggcaatggcggcttyctgtgttctactgcacactgggcagaagatgcctctgattggtctgggtacctggaagagtgagcctggtcaggtaaaagcagctgttaagtatgccctt

SEQ ID NO: 49584 - DNA, 201 bp, Homo sapiens
accctattcacgctctgtgcttgtgccaaggtaaaagcagctgttaagtatgcccttagcgtaggctaccgccacattgattgtgctgctatctacggcartgagcctgagattggggaggccctgaaggaggacgtgggaccaggcaaggcggtgcctcgggaggagctgtttgtgacatccaagctgtggaacaccaag

SEQ ID NO: 49585 - DNA, 201 bp, Homo sapiens
aggtccttcctcgggaggcggcgaaggcggtccaccctgcgcgtgatccttcatgcccggcccctgcccctccctccgggtggaacttccccctcaccgcyagacttaagctgaggatcgttggatctctggcggggtgcagaactgagcccaggccacagtaccctattcacgctctgtgcttgtgccaaggtaaaagca

SEQ ID NO: 49586 - DNA, 201 bp, Homo sapiens
ccagaggtggagacggtactacctcccagctctgttttccatccccttcaggtccttcctcgggaggcggcgaaggcggtccaccctgcgcgtgatccttyatgcccggcccctgcccctccctccgggtggaacttccccctcaccgccagacttaagctgaggatcgttggatctctggcggggtgcagaactgagccc

SEQ ID NO: 49587 - DNA, 201 bp, Homo sapiens; identical to SEQ ID NO: 49582

SEQ ID NO: 49588 - DNA, 201 bp, Homo sapiens
agctgaggatcgttggatctctggcggggtgcagaactgagcccaggccacagtaccctattcacgctctgtgcttgtgccaagggggcaatggcggcttyctgtgttctactgcacactgggcagaagatgcctctgattggtctgggtacctggaagagtgagcctggtcaggtaaaagcagctgttaagtatgccctt

SEQ ID NO: 49589 - DNA, 201 bp, Homo sapiens
aggtccttcctcgggaggcggcgaaggcggtccaccctgcgcgtgatccttcatgcccggcccctgcccctccctccgggtggaacttccccctcaccgcyagacttaagctgaggatcgttggatctctggcggggtgcagaactgagcccaggccacagtaccctattcacgctctgtgcttgtgccaagggggcaatg

SEQ ID NO: 49590 - DNA, 201 bp, Homo sapiens; identical to SEQ ID NO: 49586

SEQ ID NO: 49591 - DNA, 201 bp, Homo sapiens; identical to SEQ ID NO: 49582

SEQ ID NO: 49592 - DNA, 201 bp, Homo sapiens
tacatgtatgagccactgcacctggaaaggagccagaaatgtgaagtgctagctgaaggatgagcagcagctagccaggcaaagggggcaatggcggcttyctgtgttctactgcacactgggcagaagatgcctctgattggtctgggtacctggaagagtgagcctggtcaggtaaaagcagctgttaagtatgccctt

SEQ ID NO: 49593 - DNA, 201 bp, Homo sapiens
gagtccttcctcgggaggcggcgaaggcggtccaccctgcgcgtgatccttcatgcccggcccctgcccctccctccgggtggaacttccccctcaccgcyagacttaagctgaggatcgttggatctctggcggggtgcagaactgagcccaggccacagtaccctattcacgctctgtgcttgtgccaaggtttcaagt

SEQ ID NO: 49594 - DNA, 201 bp, Homo sapiens
agcgccacctgcctcattgtgcccaggagttctccaaacccgcgctgcggagtccttcctcgggaggcggcgaaggcggtccaccctgcgcgtgatccttyatgcccggcccctgcccctccctccgggtggaacttccccctcaccgccagacttaagctgaggatcgttggatctctggcggggtgcagaactgagccc

SEQ ID NO: 49595 - DNA, 201 bp, Homo sapiens; identical to SEQ ID NO: 49582

SEQ ID NO: 49596 - DNA, 201 bp, Homo sapiens; identical to SEQ ID NO: 49588

SEQ ID NO: 49597 - DNA, 201 bp, Homo sapiens
gagtccttcctcgggaggcggcgaaggcggtccaccctgcgcgtgatccttcatgcccggcccctgcccctccctccgggtggaacttccccctcaccgcyagacttaagctgaggatcgttggatctctggcggggtgcagaactgagcccaggccacagtaccctattcacgctctgtgcttgtgccaagggggcaatg

SEQ ID NO: 49598 - DNA, 201 bp, Homo sapiens; identical to SEQ ID NO: 49594

SEQ ID NO: 49599 - DNA, 201 bp, Homo sapiens; identical to SEQ ID NO: 49582

SEQ ID NO: 49600 - DNA, 201 bp, Homo sapiens; identical to SEQ ID NO: 49592

SEQ ID NO: 49601 - DNA, 201 bp, Homo sapiens
cagcttggtttcccttcatattgagggagtggccctgggttcttctgcccccaccaaattcccagtgtatgctgtgatgatatgtgaaactcttcaatccygtgccctggcccccagccctctgacagctgccctctccaccgatggccaggccttcactcctgctgctgtgaacaggacctgccccaccaggtctgtgag

SEQ ID NO: 49602 - DNA, 201 bp, Homo sapiens
tgacggacatccactagagatgggtttgaggattttccaagcgtgtaataatgatgtttttcctaacatgacagatgagtagtaaatgttgatatatcctrtacatgacagtgtgagactttttcattaaataatattgaaagattttaaaattcatttgaaagtctgatggcttttacaataaaagatattaagaattgt

SEQ ID NO: 49603 - DNA, 201 bp, Homo sapiens
atatgatccaggttatgaggcagcatatggtggtgcttacggagaaaatccatgcagcagtgaaccttgtggcttctcttcaaatgggctaattgagagcvtggagttaagaggagaatcagctttcagtggcattcctaatgggcagtggatgacccagtcatttacagaccaaattccttcctttagtaatcactgtgg

SEQ ID NO: 49604 - DNA, 135 bp, Homo sapiens
gaagtgcagcacagaaagggggtccgtgggggacrgtagaagcctggaggaggagcttgagtccagccactgtctgggtactgccagccatcgggcccaggtctctggggttgtcttaccgcagtgagtaccacg

SEQ ID NO: 49605 - DNA, 201 bp, Homo sapiens
gtgtaaagcatgtaactaggtattgctttggtatataactattgtagctttacaagagattgttttatttgaatggggaaaataccctttaaattatgacrgacatccactagagatgggtttgaggattttccaagcgtgtaataatgatgtttttcctaacatgacagatgagtagtaaatgttgatatatcctataca

SEQ ID NO: 49606 - DNA, 201 bp, Homo sapiens
tactatatttcatttatgaagaaattgattttcttttgggagtcacttttaatctgtaattttaaaatacaagtctgaatatttatagttgattcttaactgtgcataaacctagatataccattatcccttttatacctaagaagggcatgctaataattaccactgtcaaagaggcaaaggtgttgatttttgtatatg

SEQ ID NO: 49607 - DNA, 201 bp, Homo sapiens
actatatttcatttatgaagaaattgattttcttttgggagtcacttttaatctgtaattttaaaatacaagtctgaatatttatagttgattcttaactgtgcataaacctagatataccattatcccttttatacctaagaagggcatgctaataattaccactgtcaaagaggcaaaggtgttgatttttgtatatga

SEQ ID NO: 49608 - DNA, 201 bp, Homo sapiens
gctaataattaccactgtcaaagaggcaaaggtgttgatttttgtatatgaagttaagcctcagtggagtctcatttgttagtttttagtggtaactaagsgtaaactcagggttccctgagctatatgcacactcagacctctttgctttaccagtggtgtttgtgagttgctcagtagtaaaaactggcccttacctga

SEQ ID NO: 49609 - DNA, 201 bp, Homo sapiens
agtggtgtttgtgagttgctcagtagtaaaaactggcccttacctgacagagccctggctttgacctgctcagccctgtgtgttaatcctctagtagccarttaactactctggggtggcaggttccagagaatgcagtagaccttttgccactcatctgtgttttacttgagacatgtaaatatgatagggaaggaactg

SEQ ID NO: 49610 - DNA, 201 bp, Homo sapiens; identical to SEQ ID NO: 49606

SEQ ID NO: 49611 - DNA, 201 bp, Homo sapiens; identical to SEQ ID NO: 49607

SEQ ID NO: 49612 - DNA, 201 bp, Homo sapiens; identical to SEQ ID NO: 49608

SEQ ID NO: 49613 - DNA, 201 bp, Homo sapiens; identical to SEQ ID NO: 49609

SEQ ID NO: 49614 - DNA, 201 bp, Homo sapiens; identical to SEQ ID NO: 49603

SEQ ID NO: 49615 - DNA, 135 bp, Homo sapiens; identical to SEQ ID NO: 49604

SEQ ID NO: 49616 - DNA, 201 bp, Homo sapiens; identical to SEQ ID NO: 49606

SEQ ID NO: 49617 - DNA, 201 bp, Homo sapiens
gctgcccgtgtgcccggcaggtggagccgcccgcatcagcggcctcggggaatggaagcggagaacgcgggcagagtttcactctgttgcccaagatggartacagtggtgcgatcaccgttcactgcaacctctgcttcccgagtttaagcgattctcatgcctattcccttcagcaagctcaagctttttatacgtttc

SEQ ID NO: 49618 - DNA, 201 bp, Homo sapiens; identical to SEQ ID NO: 49607

SEQ ID NO: 49619 - DNA, 201 bp, Homo sapiens; identical to SEQ ID NO: 49608

SEQ ID NO: 49620 - DNA, 201 bp, Homo sapiens; identical to SEQ ID NO: 49609

SEQ ID NO: 49621 - DNA, 201 bp, Homo sapiens; identical to SEQ ID NO: 49603

SEQ ID NO: 49622 - DNA, 148 bp, Homo sapiens
ctccgaggaggcggaagtgcagcacagaaagggggtccgtgggggacrgtagaagcctggaggaggagcttgagtccagccactgtctgggtactgccagccatcgggcccaggtctctggggttgtcttaccgcagtgagtaccacg

SEQ ID NO: 49623 - DNA, 201 bp, Homo sapiens; identical to SEQ ID NO: 49572

SEQ ID NO: 49624 - DNA, 201 bp, Homo sapiens
ctggaggcgctcctatgatgtcccaccacctccgatggagcccgaccatcctttctacagcaacatcagtaaggatcgcaggtatgcagacctcacagaasatcagctaccctcctgtgagagtctgaaggatactattgccagagctctgcccttctggaatgaagaaatagttccccagatcaaggaggggaaacgtgt

SEQ ID NO: 49625 - DNA, 187 bp, Homo sapiens
atccccagcccgccgccatggccgcctacaaactggtgctgatccggcacggcgagagcgcatggaacctggagaaccgcttcagckgctggtacgacgccgacctgagcccggcgggccacgaggaggcgaagcgcggcgggcaggcgctacgagatgctggctatgagtttgacatctgcttcac

SEQ ID NO: 49626 - DNA, 201 bp, Homo sapiens
ttggcccaggtgaagatctggaggcgctcctatgatgtcccaccacctccgatggagcccgaccatcctttctacagcaacatcagtaaggatcgcaggtrtgcagacctcacagaagatcagctaccctcctgtgagagtctgaaggatactattgccagagctctgcccttctggaatgaagaaatagttccccagatc

SEQ ID NO: 49627 - DNA, 201 bp, Homo sapiens
cagtaaggatcgcaggtatgcagacctcacagaagatcagctaccctcctgtgagagtctgaaggatactattgccagagctctgcccttctggaatgaaraaatagttccccagatcaaggaggggaaacgtgtactgattgcagcccatggcaacagcctccggggcattgtcaagcatctggagggtctctctgaaga

SEQ ID NO: 49628 - DNA, 201 bp, Homo sapiens
gtgtactgattgcagcccatggcaacagcctccggggcattgtcaagcatctggagggtctctctgaagaggctatcatggagctgaacctgccgactggkattcccattgtctatgaattggacaagaacttgaagcctatcaagcccatgcagtttctgggggatgaggagacggtgcgcaaagccatggaagctgtgg

SEQ ID NO: 49629 - DNA, 157 bp, Homo sapiens
tggcagtgaaatgcctcttggtcctgtccaagtgtatctttcactgatttctgaatcatgttctagttgcttgaccctgccacatgggtccagtgttcatytgagcataactgtactaaatcctttttccatatcagtataataaaggagtgatgtg

SEQ ID NO: 49630 - DNA, 201 bp, Homo sapiens
aggctatcatggagctgaacctgccgactggtattcccattgtctatgaattggacaagaacttgaagcctatcaagcccatgcagtttctgggggatgargagacggtgcgcaaagccatggaagctgtggctgcccagggcaaggccaagaagtgaaggccggggcaggagtgcttcctggtttgtgtattagaatccc

SEQ ID NO: 49631 - DNA, 201 bp, Homo sapiens
atcaagcccatgcagtttctgggggatgaggagacggtgcgcaaagccatggaagctgtggctgcccagggcaaggccaagaagtgaaggccggcggggargatactgtccccaggagcaccctccctgcccatcttgtccctctgcccctcccacctgcacatgtcacactgaccacatctgtagacatcttgagttgta

SEQ ID NO: 49632 - DNA, 201 bp, Homo sapiens; identical to SEQ ID NO: 49572

SEQ ID NO: 49633 - DNA, 201 bp, Homo sapiens
ccagtcggtgccgcatccccagcccgccgccatggccgcctacaaactggtgctgatccggcacggcgagagcgcatggaacctggagaaccgcttcagckgctggtacgacgccgacctgagcccggcgggccacgaggaggcgaagcgcggcgggcaggcgctacgagatgctggctatgagtttgacatctgcttcac

SEQ ID NO: 49634 - DNA, 201 bp, Homo sapiens; identical to SEQ ID NO: 49624

SEQ ID NO: 49635 - DNA, 201 bp, Homo sapiens
tgtggctgcccagggcaaggccaagaagtgaaggccggcggggaagatactgtccccaggagcaccctccctgcccatcttgtccctctgcccctcccacstgcacatgtcacactgaccacatctgtagacatcttgagttgtagctgcagatggggaccagtggctcccattttcattttagccattttgtcgcctgca

SEQ ID NO: 49636 - DNA, 201 bp, Homo sapiens
gacagtgctagatgccattgatcagatgtggctgccagtggtgaggacttggcgcctcaatgagcggcactatgggggtctaaccggtctcaataaagcasaaactgctgcaaagcatggtgaggcccaggtgaagatctggaggcgctcctatgatgtcccaccacctccgatggagcccgaccatcctttctacagcaa

SEQ ID NO: 49637 - DNA, 201 bp, Homo sapiens
gaggcccaggtgaagatctggaggcgctcctatgatgtcccaccacctccgatggagcccgaccatcctttctacagcaacatcagtaaggatcgcaggtrtgcagacctcacagaagatcagctaccctcctgtgagagtctgaaggatactattgccagagctctgcccttctggaatgaagaaatagttccccagatc

SEQ ID NO: 49638 - DNA, 201 bp, Homo sapiens; identical to SEQ ID NO: 49627

SEQ ID NO: 49639 - DNA, 201 bp, Homo sapiens; identical to SEQ ID NO: 49628

SEQ ID NO: 49640 - DNA, 162 bp, Homo sapiens
tggcagtgaaatgcctcttggtcctgtccaagtgtatctttcactgatttctgaatcatgttctagttgcttgaccctgccacatgggtccagtgttcatytgagcataactgtactaaatcctttttccatatcagtataataaaggagtgatgtgcaata

SEQ ID NO: 49641 - DNA, 201 bp, Homo sapiens
aggctatcatggagctgaacctgccgactggtattcccattgtctatgaattggacaagaacttgaagcctatcaagcccatgcagtttctgggggatgargagacggtgcgcaaagccatggaagctgtggctgcccagggcaaggccaagaagtgaaggccggcggggaagatactgtccccaggagcaccctccctgc

SEQ ID NO: 49642 - DNA, 201 bp, Homo sapiens; identical to SEQ ID NO: 49631

SEQ ID NO: 49643 - DNA, 201 bp, Homo sapiens; identical to SEQ ID NO: 49572

SEQ ID NO: 49644 - DNA, 201 bp, Homo sapiens; identical to SEQ ID NO: 49633

SEQ ID NO: 49645 - DNA, 201 bp, Homo sapiens; identical to SEQ ID NO: 49624

SEQ ID NO: 49646 - DNA, 201 bp, Homo sapiens; identical to SEQ ID NO: 49635

SEQ ID NO: 49647 - DNA, 201 bp, Homo sapiens; identical to SEQ ID NO: 49636

SEQ ID NO: 49648 - DNA, 201 bp, Homo sapiens; identical to SEQ ID NO: 49637

SEQ ID NO: 49649 - DNA, 201 bp, Homo sapiens; identical to SEQ ID NO: 49627

SEQ ID NO: 49650 - DNA, 201 bp, Homo sapiens; identical to SEQ ID NO: 49628

SEQ ID NO: 49651 - DNA, 106 bp, Homo sapiens
tccagtgttcatctgagcataactgtactaaatcctttttccatatcagtataataaaggagtgatgtgcaatagcaaaaaaaaaaaaaaaaaaaaaaaawtaggc

SEQ ID NO: 49652 - DNA, 201 bp, Homo sapiens
ccttatccaacagagtttaaaagtagtgacttgggtttttgcgagtgctttgtttactaaggactttggggaggaaccatgctaagccatgaccagtgagragaagcaacagagcctgtctgtccccatgagcggagtctgtcctctgctcttctgcagtcaggtcactgcctactgcctgggggctctagtcattccagt

SEQ ID NO: 49653 - DNA, 194 bp, Homo sapiens
tggcagtgaaatgcctcttggtcctgtccaagtgtatctttcactgatttctgaatcatgttctagttgcttgaccctgccacatgggtccagtgttcatytgagcataactgtactaaatcctttttccatatcagtataataaaggagtgatgtgcaatagcaaaaaaaaaaaaaaaaaaaaaaaaataggc

SEQ ID NO: 49654 - DNA, 201 bp, Homo sapiens; identical to SEQ ID NO: 49641

SEQ ID NO: 49655 - DNA, 201 bp, Homo sapiens; identical to SEQ ID NO: 49631

SEQ ID NO: 49656 - DNA, 187 bp, Homo sapiens; identical to SEQ ID NO: 49579

SEQ ID NO: 49657 - DNA, 170 bp, Homo sapiens; identical to SEQ ID NO: 49578

SEQ ID NO: 49658 - DNA, 201 bp, Homo sapiens; identical to SEQ ID NO: 49624

SEQ ID NO: 49659 - DNA, 201 bp, Homo sapiens; identical to SEQ ID NO: 49635

SEQ ID NO: 49660 - DNA, 201 bp, Homo sapiens
ttcacctcagtgaagatctggaggcgctcctatgatgtcccaccacctccgatggagcccgaccatcctttctacagcaacatcagtaaggatcgcaggtrtgcagacctcacagaagatcagctaccctcctgtgagagtctgaaggatactattgccagagctctgcccttctggaatgaagaaatagttccccagatc

SEQ ID NO: 49661 - DNA, 201 bp, Homo sapiens; identical to SEQ ID NO: 49627

SEQ ID NO: 49662 - DNA, 201 bp, Homo sapiens; identical to SEQ ID NO: 49628

SEQ ID NO: 49663 - DNA, 201 bp, Homo sapiens
atagcagttctagagcacaggttctcagtctaagctatggaaaagctccccttatcctaaggactttggggaggaaccatgctaagccatgaccagtgagragaagcaacagagcctgtctgtccccatgagcggagtctgtcctctgctcttctgcagtcaggtcactgcctactgcctgggggctctagtcattccagt

SEQ ID NO: 49664 - DNA, 161 bp, Homo sapiens
ggtcatcagaaaataagccattcctcataccatgtatctttcactgatttctgaatcatgttctagttgcttgaccctgccacatgggtccagtgttcatytgagcataactgtactaaatcctttttccatatcagtataataaaggagtgatgtgcaat

SEQ ID NO: 49665 - DNA, 201 bp, Homo sapiens; identical to SEQ ID NO: 49641

SEQ ID NO: 49666 - DNA, 201 bp, Homo sapiens
gtgggtggcagcaccgaggcgattttcttcgtctttttttcctccgggttttgtcatggaaacgctgacacaacctccagacggcggccgagcccggccgrggactgagggcttttgggaccctgcgggagcgcggcgcgcacaccgcactccccgggcaacagctggacgcgaccatatcccgggtaggggcggggggag

SEQ ID NO: 49667 - DNA, 201 bp, Homo sapiens
gccgcgagttgcatttggtaaaacccagccccggaatatatagatcgttggagcgcaatgaagtagcctttggagagaagggagagggcccgtcggacagycacagcggccagcgcagcggcagcggcggcggcaccaccatcaccgctcgcaccccagccgcccggcccgcgaccaggcagcggcggccgccggcgggat

SEQ ID NO: 49668 - DNA, 201 bp, Homo sapiens; identical to SEQ ID NO: 49667

SEQ ID NO: 49669 - DNA, 201 bp, Homo sapiens
acggtttcctgggacccagtgaagagtatggcgcttttgtcccaagtctccgattcatgctgatgcccgatgtttcccccagaagttccttccggaaagcrataaatgagctggagtttgaaaagaagtgtgacttcttcaaggaactggcagatactaggggagttcagaagcagctgacatccaattattcacggtcat

SEQ ID NO: 49670 - DNA, 201 bp, Homo sapiens
cagaactgttatgcctgggttggaggaagaggacgggttgcgaaaggaacttcctttgcatgcggtcagagtgctgggccatctgaacagccccctccacrgtctgcaacatttctacattctgatagaaacagttagtggtcttgacgtgtctgacaacctacaaaaccaacatatcctggggtttgatctctctggtgg

SEQ ID NO: 49671 - DNA, 119 bp, Homo sapiens
taaatgagctggagtttgaaaagaagtgtgacttcttcaaggaactggcagatactaggggagttcagaagcagctgacatccaattattcacggtcatgsgggaaagggattgaatga

SEQ ID NO: 49672 - DNA, 201 bp, Homo sapiens
acctggaggagttttccaagatgttgtcaggttataagaagagctacctggataaagaggaaaataaggtgaaaatgccagcactagctgccctcagagarccatcttatgctgaccgcatgtggttctcttatggttcctatgggcttgagccaggaccaaaacctaagaccctgagccagccaaccagtgatattgctt

SEQ ID NO: 49673 - DNA, 201 bp, Homo sapiens
atgcggaggaatccctttggtgtggacatctgctgccggaaggggtcccgaagccccctgcaggaactctacaacccaatccaggtgcagaggcggctggmcatcagggtggacggtttcctgggacccagtgaagagtatggcgcttttgtcccaagtctccgattcatgctgatgcccgatgtttcccccagaagttcc

SEQ ID NO: 49674 - DNA, 201 bp, Homo sapiens
ggtacagcagacctattggattgatcagcagcagaactgttatgcctgggttggaggaagaggacgggttgcgaaaggaacttcctttgcatgcggtcagwgtgctgggccatctgaacagccccctccacggtctgcaacatttctacattctgatagaaacagttagtggtcttgacgtgtctgacaacctacaaaacc

SEQ ID NO: 49675 - DNA, 201 bp, Homo sapiens
ggacagtggaatacctctatagtcaggatggcagcttccacttcttggagctgaatcctcgcttgcaggtggaacatccctgcacagaaatgattgctgaygttaatctgccggccgcccagctacagggttttaagccgagctccgggactgtccaggaactgaatttccggagcagcaagaacgtgtggggttacttca

SEQ ID NO: 49676 - DNA, 201 bp, Homo sapiens
atttttgtatttttggtagagacagagtttcaccaggttggtcaggctggtctcaaactcttgacttcaggtaatccacccaccttggcctcccaaagtgmtgggattacaggcatgagccaccatcttcagccagatgatttttttattgagagagtgaaatgctattttgttccccaaatggcgctagtgaatcactag

SEQ ID NO: 49677 - DNA, 201 bp, Homo sapiens
aatgagtcgggctactacctggacatcagcctctacaaagaagtgactgactccagatctggaaatatcatgtttcactccttcggcaacaagcaagggcsccagcacgggatgctgatcaatactccctacgtcaccaaggatctgctccaggccaagcgattccaggcccagaccctgggaaccacctacatctatgac

SEQ ID NO: 49678 - DNA, 201 bp, Homo sapiens
ccaggtcctcccagcggattcactactgaacctcgtagatgtggaattaatttacggaggtgttaagtacattctcaaggtggcccggcagtctctgaccrtgttcgttctcatcatgaatggctgccacatcgagattgatgcccaccggctgaatgatggggggctcctgctctcctacaatgggaacagctacaccac

SEQ ID NO: 49679 - DNA, 201 bp, Homo sapiens
tcgcgactgctccatccagcggcggcatcagaagatcgttgaggaagcaccggccaccatcgccccgctggccatattcgagttcatggagcagtgtgccrtccgcctggccaagaccgtgggctatgtgagtgcagggacagtggaatacctctatagtcaggatggcagcttccacttcttggagctgaatcctcgctt

SEQ ID NO: 49680 - DNA, 201 bp, Homo sapiens
ttgcggattcccaatttgggcactgcttctcctggggagagaaccgggaagaggccatttcgaacatggtggtggctttgaaggaactgtccatccgaggygactttaggactaccgtggaatacctcattaacctcctggagaccgagagcttccagaacaacgacatcgacaccgggtggttggactacctcattgctg

SEQ ID NO: 49681 - DNA, 201 bp, Homo sapiens
agtccctgcagaccctgccaacctggattctgaggccaagataattcagcaggcaggacaggtgtggttcccagactcagcctacaaaaccgcccaggccrtcaaggacttcaaccgggagaagttgcccctgatgatctttgccaactggagggggttctccggtggcatgaaagacatgtatgaccaggtgctgaagtt

SEQ ID NO: 49682 - DNA, 201 bp, Homo sapiens
agcaagctggctccccctccaaagaagacaagaagcaggcaaacatcaagaggcagctgatgaccaacttcatcctgggctcttttgatgactactcctcygacgaggactctgttgctggctcatctcgtgagtctacccggaagggcagccgggccagcttgggggccctgtccctggaggcttatctgaccacaggtg

SEQ ID NO: 49683 - DNA, 119 bp, Homo sapiens
atggtcttgcttctttgtytatcttgtctgattttctcctgtctgaccttttcctggttaaaaatctgggggaaaatgacggactccaagccgatcaccaagagtaaatcagaagcaaa

SEQ ID NO: 49684 - DNA, 201 bp, Homo sapiens
cagcctctacaaagaagtgactgactccagatctggaaatatcatgtttcactccttcggcaacaagcaagggccccagcacgggatgctgatcaatactscctacgtcaccaaggatctgctccaggccaagcgattccaggcccagaccctgggaaccacctacatctatgacttcccggaaatgttcaggcaggcaag

SEQ ID NO: 49685 - DNA, 201 bp, Homo sapiens
atcaccgtgccagatgactttgagggggtttataccatcctggagtggctgtcctatatgccaaaggataatcacagccctgtccctatcatcacacccaytgaccccattgacagagaaattgaattcctcccatccagagctccctacgacccccggtggatgcttgcaggaaggcctcacccaactctgaagggaacg

SEQ ID NO: 49686 - DNA, 201 bp, Homo sapiens
aagaatttcccaagtttttcacattcagagcaagagatgagtttgcagaagatcgcatttaccgtcacttggaacctgccctggccttccagctggaactyaaccggatgcgtaacttcgatctgaccgccgtgccctgtgccaaccacaagatgcacctttacctgggtgctgccaaggtgaaggaaggtgtggaagtga

SEQ ID NO: 49687 - DNA, 201 bp, Homo sapiens
cccgtcacctggaagttcagatcctcgctgaccagtatgggaatgctgtgtctctgtttggtcgcgactgctccatccagcggcggcatcagaagatcgtkgaggaagcaccggccaccatcgccccgctggccatattcgagttcatggagcagtgtgccatccgcctggccaagaccgtgggctatgtgagtgcaggga

SEQ ID NO: 49688 - DNA, 201 bp, Homo sapiens
ccatgccgatttgctcagggagaacgttgcaatgcacccagcagctcctggctctgcaggcggcacagcctggggccctgtgatcctctggtttcttccaytggggcggagtcgggggtggagggagctggccacaacccactgctctgatgggtggtttgtccaaggatgctgaatgtaatgcctggtcaatgtggaagc

SEQ ID NO: 49689 - DNA, 201 bp, Homo sapiens
tgtgatatacctgagccagcacatcagcccagctgagcgggcgcaggtcgttcacctgctgtctaccatggacagcccggcctccacctgaccgtggcccrcccagccactcccgggaccacggcaaaaggaaccacccagacccaccacccgtacaccctcagcagaccctgaagacttgcttttaaacaaagaaaatcc

SEQ ID NO: 49690 - DNA, 201 bp, Homo sapiens
agcctggggccctgtgatcctctggtttcttccattggggcggagtcgggggtggagggagctggccacaacccactgctctgatgggtggtttgtccaargatgctgaatgtaatgcctggtcaatgtggaagcccatgaggttgcccagggaagcctccaaaagctgggatgcttgagggtatccaagttgaaaaagac

SEQ ID NO: 49691 - DNA, 201 bp, Homo sapiens
acccgtacaccctcagcagaccctgaagacttgcttttaaacaaagaaaatcctgggcacttctgcagggctgctggttccgagctgacacccgtcttaayaaaaggcccaggagtgcctcttccaaacaaaaacagcctcctctccatagctgggaagtttattttgttttgtctctgaagacagcagttttattgcatc

SEQ ID NO: 49692 - DNA, 201 bp, Homo sapiens
cgcaaacaaagtcgtgtgcatggcgtccttggaggtttacgtgcggaggggctacatcgcctatgagttaaacagcctgcagcaccggcagctcccggacrgcacctgcgtggtagaattccagttcatgctgccgtcctcccacccaaaccggatgaccgtgcccatcagcatcaccaaccctgacctgctgaggcacag

SEQ ID NO: 49693 - DNA, 201 bp, Homo sapiens
ctgaaccgttcacaggagaactccctgcccagcagacactgcccatcctcggagagaaactgcaccaggtcttccacagcgtcctggaaaacctcaccaaygtcatgagtggcttttgtctgccagagcccgtttttagcataaagctgaaggagtgggtgcagaagctcatgatgaccctccggcacccgtcactgccgc

SEQ ID NO: 49694 - DNA, 201 bp, Homo sapiens
ataactcaggggagacaccgcagagaaatggggagggccacactctgcccaagacacccagccaggccgagccagcctcccacaaaggccccaaagatgcyggtcggcggagaaactccctaccaccctcccaccagaagcccccaagaaaccccctttcttccagtgacgcagcaccctccccagagcttcaagccaacg

SEQ ID NO: 49695 - DNA, 201 bp, Homo sapiens
gggtgaagtacatcaagcgtccaggtgccgtgctggaagcaggctgcgtggtggccaggctggagctcgatgacccttctaaagtccacccggctgaaccrttcacaggagaactccctgcccagcagacactgcccatcctcggagagaaactgcaccaggtcttccacagcgtcctggaaaacctcaccaacgtcatga

SEQ ID NO: 49696 - DNA, 201 bp, Homo sapiens
acagagactttaccgtggcttctcccgctgagtttgtcacacgctttgggggggatcgggtcatcgagaaggtgcttattgccaacaacgggattgccgcygtgaagtgcatgcgctccatccgcaggtgggcctatgagatgttccgcaacgagcgggccatccggtttgttgtgatggtgacccccgaggaccttaagg

SEQ ID NO: 49697 - DNA, 201 bp, Homo sapiens
gtacccggaaggacgggatgtgatcgtcatcggcaatgacatcacctttcgcattggatcctttggccctggagaggaccttctgtacctgcgggcatccragatggcccgggcagagggcattcccaaaatttacgtggcagccaacagtggcgcccgtattggcatggcagaggagatcaaacacatgttccacgtggc

SEQ ID NO: 49698 - DNA, 201 bp, Homo sapiens
acggccttagacaatacaaacagcccatcctgatctatatcccgccctatgcggagctccggggaggctcctgggtggtcatagatgccaccatcaaccckctgtgcatagaaatgtatgcagacaaagagagcaggggtggtgttctggaaccagaggggacagtggagattaagttccgaaagaaagatctgataaagt

SEQ ID NO: 49699 - DNA, 201 bp, Homo sapiens
gactccccaagactacaccagaatcagctccctgaactccgtccactgtaaacacatcgaggaaggaggagagtccagatacatgatcacggatatcatcrggaaggatgatggcttgggcgtggagaatctgaggggctcaggcatgattgctggggagtcctctctggcttacgaagagatcgtcaccattagcttggt

SEQ ID NO: 49700 - DNA, 201 bp, Homo sapiens
gggagaacgttgcaatgcacccagcagctcctggctctgcaggcggcacagcctggggccctgtgatcctctggtttcttccattggggcggagtcggggrtggagggagctggccacaacccactgctctgatgggtggtttgtccaaggatgctgaatgtaatgcctggtcaatgtggaagcccatgaggttgcccagg

SEQ ID NO: 49701 - DNA, 201 bp, Homo sapiens
aattcctcccatccagagctccctacgacccccggtggatgcttgcaggaaggcctcacccaactctgaagggaacgtggcagagcggattctttgaccayggcagtttcaaggaaatcatggcaccctgggcgcagaccgtggtgacaggacgagcaaggcttggggggattcccgtgggagtgattgctgtggagacac

SEQ ID NO: 49702 - DNA, 201 bp, Homo sapiens
tggaggtggcagtccctgcagaccctgccaacctggattctgaggccaagataattcagcaggcaggacaggtgtggttcccagactcagcctacaaaacygcccaggccatcaaggacttcaaccgggagaagttgcccctgatgatctttgccaactggagggggttctccggtggcatgaaagacatgtatgaccagg

SEQ ID NO: 49703 - DNA, 201 bp, Homo sapiens
ggacagtggaatacctctatagtcaggatggcagcttccacttcttggagctgaatcctcgcttgcaggtggaacatccctgcacagaaatgattgctgaygttaatctgccggccgcccagctacagatcgccatgggcgtgccactgcaccggctgaaggatatccggcttctgtatggagagtcaccatggggagtga

SEQ ID NO: 49704 - DNA, 201 bp, Homo sapiens; identical to SEQ ID NO: 49676

SEQ ID NO: 49705 - DNA, 201 bp, Homo sapiens; identical to SEQ ID NO: 49677

SEQ ID NO: 49706 - DNA, 201 bp, Homo sapiens; identical to SEQ ID NO: 49678

SEQ ID NO: 49707 - DNA, 201 bp, Homo sapiens; identical to SEQ ID NO: 49679

SEQ ID NO: 49708 - DNA, 201 bp, Homo sapiens
gctactggaggcctgcacgagtttgcggattcccaatttgggcactgcttctcctggggagagaaccgggaagaggccatttcgaactgtccatccgaggygactttaggactaccgtggaatacctcattaacctcctggagaccgagagcttccagaacaacgacatcgacaccgggtggttggactacctcattgctg

SEQ ID NO: 49709 - DNA, 201 bp, Homo sapiens
ggatatccggcttctgtatggagagtcaccatggggagtgactcccatttcttttgaaaccccctcaaaccctcccctcgcccgaggccacgtcattgccrccagaatcaccagcgaaaacccagacgaggcaaccgagctccgggactgtccaggaactgaatttccggagcagcaagaacgtgtggggttacttcagcg

SEQ ID NO: 49710 - DNA, 201 bp, Homo sapiens; identical to SEQ ID NO: 49681

SEQ ID NO: 49711 - DNA, 201 bp, Homo sapiens; identical to SEQ ID NO: 49682

SEQ ID NO: 49712 - DNA, 201 bp, Homo sapiens
cagcctctacaaagaagtgactgactccagatctggaaatatcatgtttcactccttcggcaacaagcaagggccccagcacgggatgctgatcaatactscctacgtcaccaaggatctgctccaggccaagcgattccaggcccagaccctgggaaccacctacatctatgacttcccggaaatgttcaggcaggcaaa

SEQ ID NO: 49713 - DNA, 119 bp, Homo sapiens; identical to SEQ ID NO: 49683

SEQ ID NO: 49714 - DNA, 201 bp, Homo sapiens; identical to SEQ ID NO: 49685

SEQ ID NO: 49715 - DNA, 201 bp, Homo sapiens; identical to SEQ ID NO: 49686

SEQ ID NO: 49716 - DNA, 201 bp, Homo sapiens; identical to SEQ ID NO: 49687

SEQ ID NO: 49717 - DNA, 201 bp, Homo sapiens; identical to SEQ ID NO: 49688

SEQ ID NO: 49718 - DNA, 201 bp, Homo sapiens; identical to SEQ ID NO: 49689

SEQ ID NO: 49719 - DNA, 201 bp, Homo sapiens
catcttcgacgtcctgcctactttcttctatcacgcaaacaaagtcgtgtgcatggcgtccttggagttaaacagcctgcagcaccggcagctcccggacrgcacctgcgtggtagaattccagttcatgctgccgtcctcccacccaaaccggcacagcacagagctcttcatggacagcggcttctccccactgtgcca

SEQ ID NO: 49720 - DNA, 201 bp, Homo sapiens; identical to SEQ ID NO: 49691

SEQ ID NO: 49721 - DNA, 201 bp, Homo sapiens; identical to SEQ ID NO: 49690

SEQ ID NO: 49722 - DNA, 201 bp, Homo sapiens; identical to SEQ ID NO: 49693

SEQ ID NO: 49723 - DNA, 201 bp, Homo sapiens; identical to SEQ ID NO: 49694

SEQ ID NO: 49724 - DNA, 201 bp, Homo sapiens; identical to SEQ ID NO: 49695

SEQ ID NO: 49725 - DNA, 201 bp, Homo sapiens; identical to SEQ ID NO: 49696

SEQ ID NO: 49726 - DNA, 201 bp, Homo sapiens; identical to SEQ ID NO: 49698

SEQ ID NO: 49727 - DNA, 201 bp, Homo sapiens; identical to SEQ ID NO: 49697

SEQ ID NO: 49728 - DNA, 201 bp, Homo sapiens; identical to SEQ ID NO: 49699

SEQ ID NO: 49729 - DNA, 201 bp, Homo sapiens; identical to SEQ ID NO: 49700

SEQ ID NO: 49730 - DNA, 201 bp, Homo sapiens; identical to SEQ ID NO: 49701

SEQ ID NO: 49731 - DNA, 201 bp, Homo sapiens; identical to SEQ ID NO: 49702

SEQ ID NO: 49732 - DNA, 201 bp, Homo sapiens; identical to SEQ ID NO: 49703

SEQ ID NO: 49733 - DNA, 201 bp, Homo sapiens; identical to SEQ ID NO: 49676

SEQ ID NO: 49734 - DNA, 201 bp, Homo sapiens; identical to SEQ ID NO: 49677

SEQ ID NO: 49735 - DNA, 201 bp, Homo sapiens; identical to SEQ ID NO: 49678

SEQ ID NO: 49736 - DNA, 201 bp, Homo sapiens; identical to SEQ ID NO: 49679

SEQ ID NO: 49737 - DNA, 201 bp, Homo sapiens; identical to SEQ ID NO: 49680

SEQ ID NO: 49738 - DNA, 201 bp, Homo sapiens
ggatatccggcttctgtatggagagtcaccatggggagtgactcccatttcttttgaaaccccctcaaaccctcccctcgcccgaggccacgtcattgccrccagaatcaccagcgaaaacccagacgagggttttaagccgagctccgggactgtccaggaactgaatttccggagcagcaagaacgtgtggggttactt

SEQ ID NO: 49739 - DNA, 201 bp, Homo sapiens; identical to SEQ ID NO: 49681

SEQ ID NO: 49740 - DNA, 201 bp, Homo sapiens; identical to SEQ ID NO: 49682

SEQ ID NO: 49741 - DNA, 201 bp, Homo sapiens
cagcctctacaaagaagtgactgactccagatctggaaatatcatgtttcactccttcggcaacaagcaagggccccagcacgggatgctgatcaatactscctacgtcaccaaggatctgctccaggccaagcgattccaggcccagaccctgggaaccacctacatctatgacttcccggaaatgttcaggcaggctct

SEQ ID NO: 49742 - DNA, 119 bp, Homo sapiens; identical to SEQ ID NO: 49683

SEQ ID NO: 49743 - DNA, 201 bp, Homo sapiens; identical to SEQ ID NO: 49685

SEQ ID NO: 49744 - DNA, 201 bp, Homo sapiens; identical to SEQ ID NO: 49686

SEQ ID NO: 49745 - DNA, 201 bp, Homo sapiens; identical to SEQ ID NO: 49687

SEQ ID NO: 49746 - DNA, 201 bp, Homo sapiens; identical to SEQ ID NO: 49688

SEQ ID NO: 49747 - DNA, 201 bp, Homo sapiens; identical to SEQ ID NO: 49689

SEQ ID NO: 49748 - DNA, 201 bp, Homo sapiens; identical to SEQ ID NO: 49692

SEQ ID NO: 49749 - DNA, 201 bp, Homo sapiens; identical to SEQ ID NO: 49691

SEQ ID NO: 49750 - DNA, 201 bp, Homo sapiens; identical to SEQ ID NO: 49690

SEQ ID NO: 49751 - DNA, 201 bp, Homo sapiens; identical to SEQ ID NO: 49693

SEQ ID NO: 49752 - DNA, 201 bp, Homo sapiens; identical to SEQ ID NO: 49694

SEQ ID NO: 49753 - DNA, 201 bp, Homo sapiens; identical to SEQ ID NO: 49695

SEQ ID NO: 49754 - DNA, 201 bp, Homo sapiens; identical to SEQ ID NO: 49696

SEQ ID NO: 49755 - DNA, 201 bp, Homo sapiens; identical to SEQ ID NO: 49698

SEQ ID NO: 49756 - DNA, 201 bp, Homo sapiens; identical to SEQ ID NO: 49697

SEQ ID NO: 49757 - DNA, 201 bp, Homo sapiens; identical to SEQ ID NO: 49699

SEQ ID NO: 49758 - DNA, 201 bp, Homo sapiens; identical to SEQ ID NO: 49700

SEQ ID NO: 49759 - DNA, 201 bp, Homo sapiens; identical to SEQ ID NO: 49701

SEQ ID NO: 49760 - DNA, 201 bp, Homo sapiens; identical to SEQ ID NO: 49702

SEQ ID NO: 49761 - DNA, 152 bp, Homo sapiens
gttgcgggcagagagctgcttgaggccaccacgctgcaggaagtgcagcttctgggcccggcgccgctgcttcaggatctgctgcttggtcttgagttccrggcggactcggcctgcaggggtgcctggggcgtggggccgggatgcacctg

SEQ ID NO: 49762 - DNA, 201 bp, Homo sapiens
cccaccctaaggccaatcaaggagccacggggctgggtcctggtcctcacatcctcttccgcatcttgcccttcttggagcgggcaccccggccgaaggcrccctgctgcagctcctggacgcggcggcggttgcgggcagagagctgcttgaggccaccacgctgcaggaagtgcagcttctgggcccggcgccgctgct

SEQ ID NO: 49763 - DNA, 201 bp, Homo sapiens
gaccggcgaggcccagagcgaagaggtgggaagcgagaccgtggccaagcaggtgcatcccggccccacgccccaggcacccctgcaggccgagtccgccyggaactcaagaccaagcagcagatcctgaagcagcggcgccgggcccagaagctgcacttcctgcagcgtggtggcctcaagcagctctctgcccgcaac

SEQ ID NO: 49764 - DNA, 201 bp, Homo sapiens
ccaggaattctacatcccctaccggcccaaggactttgacagcgagcggggcctgagcatcagcggggaagggggagcctttgagcagcaggcagctggcrctgtcctggacttgatgggggatgaagcccagaacctgacgaggggccggcagcagctcaagtgggaccgtaagaagaagcggtttgtgggacagtcagg

SEQ ID NO: 49765 - DNA, 201 bp, Homo sapiens
agcagcggcgccgggcccagaagctgcacttcctgcagcgtggtggcctcaagcagctctctgcccgcaaccgccgccgcgtccaggagctgcagcagggygccttcggccggggtgcccgctccaagaagggcaagatgcggaagaggatgtgaggaccaggacccagccccgtggctccttgattggccttagggtggg

SEQ ID NO: 49766 - DNA, 201 bp, Homo sapiens
cgctgcccaaactgctggtggaatttgcccgggctggcctcacggagcccgtgctcatccggcttgacgtggataccaagctcaacgagcagctgaagacytccttcttcctcgtgcgggaggacaccaaggctgccgtgctgctccacctgctgcacaacgtggtgcggccccaggaccagaccgtggtgtttgtggcca

SEQ ID NO: 49767 - DNA, 136 bp, Homo sapiens
ccttctgcgttcccagcgcgcggcccgaatggcggycgacaagggcccggcggctggacctcggtcgcgagctgccatggcccagtggaggaagaagaaagggctccggaagcgccgaggcgcggcctcccaggcc

SEQ ID NO: 49768 - DNA, 201 bp, Homo sapiens
ggaggaggagctgcagcggctgaggctggtggacagcataaagaactaccgctcccgggcgactatctttgagatcaacgcctccagccgagacctgtgcrgccaggtgatgcgcgccaagcggcagaaggaccgcaaggccatcgcccgcttccagcagggacagcaggggcggcaggagcagcaggagggcccagtggg

SEQ ID NO: 49769 - DNA, 201 bp, Homo sapiens
gacagtggtctgcagagcaccctggaggcatcgctggagctacggggcctggcccgcgttgctgataacgcccagcagcagtatgtgcgctcacgcccggygccctcgcctgagtccatcaagagggccaaggagatggaccttgtggggctgggcctgcaccccctcttcagctcgcgttttgaggaggaggagctgcag

SEQ ID NO: 49770 - DNA, 201 bp, Homo sapiens
atggaccttgtggggctgggcctgcaccccctcttcagctcgcgttttgaggaggaggagctgcagcggctgaggctggtggacagcataaagaactaccrctcccgggcgactatctttgagatcaacgcctccagccgagacctgtgcagccaggtgatgcgcgccaagcggcagaaggaccgcaaggccatcgcccgc

SEQ ID NO: 49771 - DNA, 117 bp, Homo sapiens
ccttctgcgttcccagmgcgcggcccgaatggcggccgacaagggcccggcggctggacctcggtcgcgagctgccatggcccagtggaggaagaagaaagggctccggaagcgccg

SEQ ID NO: 49772 - DNA, 144 bp, Homo sapiens
ccttctgcgttcccagcgcgcggcccgaatggcggccgacaagsgcccggcggctggacctcggtcgcgagctgccatggcccagtggaggaagaagaaagggctccggaagcgccgaggcgcggcctcccaggcccgcggcag

SEQ ID NO: 49773 - DNA, 201 bp, Homo sapiens
gaattctacatcccctaccggcccaaggactttgacagcgagcggggcctgagcatcagcggggaagggggagcctttgagcagcaggcagctggcgctgycctggacttgatgggggatgaagcccagaacctgacgaggggccggcagcagctcaagtgggaccgtaagaagaagcggtttgtgggacagtcaggacag

SEQ ID NO: 49774 - DNA, 201 bp, Homo sapiens
tcaggacccaacaggggagccaagaggcggagggaggaggcccggcagcgggaccaggaattctacatcccctaccggcccaaggactttgacagcgagcrgggcctgagcatcagcggggaagggggagcctttgagcagcaggcagctggcgctgtcctggacttgatgggggatgaagcccagaacctgacgaggggc

SEQ ID NO: 49775 - DNA, 201 bp, Homo sapiens
ccatggtctgggaggggctgaacgtcgtgaagacaggccgagtgatgcttggggagaccaatccagcagattctaagccaggcaccattcgtggggacttytgcattcaggttggcaggaacatcattcatggcagtgattcagtaaaaagtgctgaaaaagaaatcagcctacggtttaagcctgaagaactggttgact

SEQ ID NO: 49776 - DNA, 118 bp, Homo sapiens
ggagcgcagcactgccgyccggcccctccagcttcccggaccacggccaacctcgagcgcaccttcatcaccatcaggccggacagcatgcagtgcggcctggtgggcaagatcatca

SEQ ID NO: 49777 - DNA, 162 bp, Homo sapiens
ggtggacacagcagcagtctccttcagcacggtgtggtgtgtccctggacacagctcttcattctactgacttagaggcaacaggattgatcattcttttrtagagcatatttgccaataaagcttttggaagctggaaaaaaaaaagagagaaagagagaa

SEQ ID NO: 49778 - DNA, 201 bp, Homo sapiens
agcagaaggggttccgcctcgtggccatgaagttcctcccggcctctgaagaacacctgaagcagcactacattgacctgaaggaccgcccattcttcccygggctggtgaagtacatgaactcagggccggtcgtggccatggtctgggaggggctgaacgtcgtgaagacaggccgagtgatgcttggggagaccaatc

SEQ ID NO: 49779 - DNA, 201 bp, Homo sapiens
agcgcttcgagcagaaggggttccgcctcgtggccatgaagttcctcccggcctctgaagaacacctgaagcagcactacattgacctgaaggaccgcccrttcttccctgggctggtgaagtacatgaactcagggccggtcgtggccatggtctgggaggggctgaacgtcgtgaagacaggccgagtgatgcttgggg

SEQ ID NO: 49780 - DNA, 201 bp, Homo sapiens
agcctgaagaactggttgactacaagtcttgtgctcatgactgggtctatgaataagaggtggacacagcagcagtctccttcagcacggtgtggtgtgtycctggacacagctcttcattctactgacttagaggcaacaggattgatcattcttttatagagcatatttgccaataaagcttttggaagctggaaaaaa

SEQ ID NO: 49781 - DNA, 116 bp, Homo sapiens
agcgcagcactgccgyccggcccctccagcttcccggaccacggccaacctcgagcgcaccttcatcaccatcaggccggacagcatgcagtgcggcctggtgggcaagatcatca

SEQ ID NO: 49782 - DNA, 140 bp, Homo sapiens
ggtggacacagcagcagtctccttcagcacggtgtggtgtgtccctggacacagctcttcattctactgacttagaggcaacaggattgatcattcttttrtagagcatatttgccaataaagcttttggaagctggaaa

SEQ ID NO: 49783 - DNA, 201 bp, Homo sapiens
agcagaaggggttccgcctcgtggccatgaagttcctcccggcctctgaagaacacctgaagcagcactacattgacctgaaggaccgcccattcttcccygggctggtgaagtacatgaactcagggccggtcgtggccatggaacatcattcatggcagtgattcagtaaaaagtgctgaaaaagaaatcagcctacgg

SEQ ID NO: 49784 - DNA, 201 bp, Homo sapiens
agcgcttcgagcagaaggggttccgcctcgtggccatgaagttcctcccggcctctgaagaacacctgaagcagcactacattgacctgaaggaccgcccrttcttccctgggctggtgaagtacatgaactcagggccggtcgtggccatggaacatcattcatggcagtgattcagtaaaaagtgctgaaaaagaaatc

SEQ ID NO: 49785 - DNA, 198 bp, Homo sapiens
agcctgaagaactggttgactacaagtcttgtgctcatgactgggtctatgaataagaggtggacacagcagcagtctccttcagcacggtgtggtgtgtycctggacacagctcttcattctactgacttagaggcaacaggattgatcattcttttatagagcatatttgccaataaagcttttggaagctggaaa

SEQ ID NO: 49786 - DNA, 201 bp, Homo sapiens
cgccacgggcagtcggctccccagccacggcgacccctgacctggtgtccatggcaacgactcagggtgttcgagcggtcacttctgtgacagcctcggcygtggtcactaccaacctgaccccagtgcagaccccggcacggtctttggtgccccaagtgtcccaagccacaggagttcagctccctggaaaaaccatca

SEQ ID NO: 49787 - DNA, 201 bp, Homo sapiens
tgctcccctcgcaggcccaggcccgcttgcccagtggagaggtagtgaaaatagctcagctggcatccatcacaggaccacagagccgcgtggctcagccrgagacgccggtgacactgcagttccagggcagcaagttcaccctgtcacacagccagctccggcagctcacagcgggccagccgctgcagctgcaaggca

SEQ ID NO: 49788 - DNA, 201 bp, Homo sapiens
gccccaagtgtcccaagccacaggagttcagctccctggaaaaaccatcacacctgcacatttccagcttctcaggcagcagcagcagcagcagcaacaavagcagcagcagcagcagcagcagcagcagcagcagcagcagcagcaacagcagcagcagcaacagacgacgacgacctctcaggtgcaagttccacagat

SEQ ID NO: 49789 - DNA, 201 bp, Homo sapiens
gcagcccagtccggggccggggcaggccttgcagaatgtgcgtgcaggtgcccctggccctgggctgggcctctgcagcagcagccctacagggggcttcrtggatgccagcgtgctggtgaggcagatcagcttgagcccctccagtggtggacactttgtgtttcaggatgggtcagggctcacccagatcgcccaggg

SEQ ID NO: 49790 - DNA, 201 bp, Homo sapiens
tggcctcccccaggccctaccctgcaatgggattcgctttcatttaatggaaacttctgggactgatgcccaactcagtgcactcaagacgcatctccagytttcgggggaagctggtatttgacatagtgtgttaaacagctcctgagaacctttgggacactctgccatggctggcgtgaggcccagaggaccacgcag

SEQ ID NO: 49791 - DNA, 201 bp, Homo sapiens
atggcagagacttgctaaggatttgtgccctgcctagccatggaagggtacagtggcgtgggtccctggatggccgtcgtgggaaggaggccgggccagcrcacagttacacttcatcctcagaaagtccaagtgagctgatgttgacgctttgtcggtgtggagagtctctgcaggatgttattgacagggtggcctttg

SEQ ID NO: 49792 - DNA, 201 bp, Homo sapiens
gcctggtagcaggggccggaagcacagtagagacggacctgtttaagaggcagcaggcgatgccctccacaggtatggcagagcagtctaagaggcctcgycttgaagtgggtcaccaaggggtagttttccagcacccaggggcggacgcaggcgttcctctccagcaactaatgccgaccgcacaaggaggaatgcccc

SEQ ID NO: 49793 - DNA, 201 bp, Homo sapiens
aactacgagtagaattagaagaaaaaaggaagaaggccttaaatttacagaaagtttccaggagagggaaagaattgagacctaaaggatttgacgcattmcaggaaagttctctggattcaggaatgtctggaagaaaaagaaaagctagcatatctttgactgatgacgaagtggacgatgaagaggaaacaattgaag

SEQ ID NO: 49794 - DNA, 201 bp, Homo sapiens
actttcaagggaacatgatggatttcttagctttcaagaagaaacattatgccccattacaagcatatcttaggcagaatgatttggacattgaagaagargaggaggaggaggaagaggaggaagaaaaatctgaggttatcaatgacgagcagcaagccctcgcagggagcctggtagcaggggccggaagcacagtag

SEQ ID NO: 49795 - DNA, 201 bp, Homo sapiens
tttcttgcaacactttcaagggaacatgatggatttcttagctttcaagaagaaacattatgccccattacaagcatatcttaggcagaatgatttggacrttgaagaagaggaggaggaggaggaagaggaggaagaaaaatctgaggttatcaatgacgagcagcaagccctcgcagggagcctggtagcaggggccgg

SEQ ID NO: 49796 - DNA, 201 bp, Homo sapiens; identical to SEQ ID NO: 49786

SEQ ID NO: 49797 - DNA, 201 bp, Homo sapiens; identical to SEQ ID NO: 49787

SEQ ID NO: 49798 - DNA, 201 bp, Homo sapiens; identical to SEQ ID NO: 49788

SEQ ID NO: 49799 - DNA, 201 bp, Homo sapiens; identical to SEQ ID NO: 49789

SEQ ID NO: 49800 - DNA, 201 bp, Homo sapiens; identical to SEQ ID NO: 49790

SEQ ID NO: 49801 - DNA, 201 bp, Homo sapiens; identical to SEQ ID NO: 49791

SEQ ID NO: 49802 - DNA, 201 bp, Homo sapiens; identical to SEQ ID NO: 49792

SEQ ID NO: 49803 - DNA, 201 bp, Homo sapiens; identical to SEQ ID NO: 49793

SEQ ID NO: 49804 - DNA, 201 bp, Homo sapiens; identical to SEQ ID NO: 49794

SEQ ID NO: 49805 - DNA, 201 bp, Homo sapiens; identical to SEQ ID NO: 49795

SEQ ID NO: 49806 - DNA, 201 bp, Homo sapiens; identical to SEQ ID NO: 49786

SEQ ID NO: 49807 - DNA, 201 bp, Homo sapiens; identical to SEQ ID NO: 49788

SEQ ID NO: 49808 - DNA, 201 bp, Homo sapiens; identical to SEQ ID NO: 49787

SEQ ID NO: 49809 - DNA, 201 bp, Homo sapiens; identical to SEQ ID NO: 49789

SEQ ID NO: 49810 - DNA, 201 bp, Homo sapiens; identical to SEQ ID NO: 49791

SEQ ID NO: 49811 - DNA, 201 bp, Homo sapiens; identical to SEQ ID NO: 49792

SEQ ID NO: 49812 - DNA, 201 bp, Homo sapiens; identical to SEQ ID NO: 49794

SEQ ID NO: 49813 - DNA, 201 bp, Homo sapiens; identical to SEQ ID NO: 49793

SEQ ID NO: 49814 - DNA, 201 bp, Homo sapiens; identical to SEQ ID NO: 49795

SEQ ID NO: 49815 - DNA, 201 bp, Homo sapiens; identical to SEQ ID NO: 49786

SEQ ID NO: 49816 - DNA, 201 bp, Homo sapiens; identical to SEQ ID NO: 49787

SEQ ID NO: 49817 - DNA, 201 bp, Homo sapiens; identical to SEQ ID NO: 49788

SEQ ID NO: 49818 - DNA, 201 bp, Homo sapiens; identical to SEQ ID NO: 49789

SEQ ID NO: 49819 - DNA, 201 bp, Homo sapiens; identical to SEQ ID NO: 49791

SEQ ID NO: 49820 - DNA, 201 bp, Homo sapiens; identical to SEQ ID NO: 49792

SEQ ID NO: 49821 - DNA, 201 bp, Homo sapiens; identical to SEQ ID NO: 49794

SEQ ID NO: 49822 - DNA, 201 bp, Homo sapiens; identical to SEQ ID NO: 49793

SEQ ID NO: 49823 - DNA, 201 bp, Homo sapiens; identical to SEQ ID NO: 49795

SEQ ID NO: 49824 - DNA, 201 bp, Homo sapiens
tgtccctttctgtaaaaggggcagaggtggcatccatgacaatgaatgtgatccaaaccgtgcctaacttggactggctctctgtgtggatcaaagcgtaygcttttgtgcacactggtgacaactcaagagcaatcagtaccatctgttcactagagaaaaaatccttattgcgagataacgtggacctattgggaagct

SEQ ID NO: 49825 - DNA, 201 bp, Homo sapiens; identical to SEQ ID NO: 49824

SEQ ID NO: 49826 - DNA, 201 bp, Homo sapiens
tcctgccccatgagaatgggcagggggaggacttggcactggctgtgggagaggttatggctccaccaggcctctgggcactggaaaaaggaggggtgtcrccaggacaacccctactgggcatcaggttctgaaaaggaagagtgaggaactagaggctcagggacagccagtagagtgctcacagggtggtggggtttg

SEQ ID NO: 49827 - DNA, 201 bp, Homo sapiens
gttcctccttttctctagctggcaggcctcttctcctgcacagtggtcctgtcggtgctgctgtggctggggcccttcttttactatctgcccaaggtaakgagcagaggaggcatgagcatggctgggaggggtagctgtattccaggacatcgaggtagtcagcccacctcctctgcctcaaggctgtcctggcttgca

SEQ ID NO: 49828 - DNA, 201 bp, Homo sapiens
gagtgcagagggccctgatgacatgtgtgtgatgaggaccatgacccttgaacccccttacctaacgtaactaataaaatgaagctgagagctttggaatmcatgaagtgagtctaggtgtttgcacagggactctggtgccccttcttttgtgcccacagcattgcagagacacaactaagaatggctttcaccaaccac

SEQ ID NO: 49829 - DNA, 201 bp, Homo sapiens
gactcctggacagggtgactccagatcagctgtttgtgagtgtgcaggatgcagctgcttatgccctggggagcctggtaaggggcagtagcaccaggagygggagccaggaggcactgggctgcggcaagtgaggcaggggagctcactgacccaaagatttgcaccgtgtgggtctgacctcatcatgtggagtgcaga

SEQ ID NO: 49830 - DNA, 201 bp, Homo sapiens
aagactggggatctgtgagaaagggtgactgaggggatggaattatagataggagagatggaagataacaatgttccagtaagacctttgtaggctctaascgctgaaaaagtttatggtgccccaggtgtggttcaaaataaaaacacaaaactataaaataaacttaagagataaaattcttatttttttcacacaatg

SEQ ID NO: 49831 - DNA, 201 bp, Homo sapiens
gcaggggacactgacccgggtaggactcctggacagggtgactccagatcagctgtttgtgagtgtgcaggatgcagctgcttatgccctggggagcctgktaaggggcagtagcaccaggagcgggagccaggaggcactgggctgcggcaagtgaggcaggggagctcactgacccaaagatttgcaccgtgtgggtct

SEQ ID NO: 49832 - DNA, 201 bp, Homo sapiens
ccctcaccccagccccagagccacaagttctctctgtgggggtggggctggagcaggtacacagagtactggatctgaagatgcagatgaggggcacagtyttgggattatgtgttggggaacttccccaccccctcggtcccaagatgagaggacagtgtttccaccttaggttcttagagtccctctgggctctttggc

SEQ ID NO: 49833 - DNA, 201 bp, Homo sapiens
ccaatggttgcagttgctgagcctgtcagggtggtggtcctagacttcagtggtgtcacctttgcagatgctgctggggccagagaagtggtgcagctggycagccgatgtcgagatgctaggatccgcctcctcctggctcagtgtaatgccttggtgcaggggacactgacccgggtaggactcctggacagggtgact

SEQ ID NO: 49834 - DNA, 201 bp, Homo sapiens
gcccaatggttgcagttgctgagcctgtcagggtggtggtcctagacttcagtggtgtcacctttgcagatgctgctggggccagagaagtggtgcagctsgccagccgatgtcgagatgctaggatccgcctcctcctggctcagtgtaatgccttggtgcaggggacactgacccgggtaggactcctggacagggtga

SEQ ID NO: 49835 - DNA, 201 bp, Homo sapiens
gcacgtgctcttgtcccagctgccgagcctcttggggttgtccctcccgcgccagatcggctgcttctctctcttcaagacgctggcctccttgctgactrcgctgcctcggagcagtccggccgaactgaccatctccgcgctcagcctggcgctgctcgtgccggtcaaggaattgaacgtgagattccgagaccggct

SEQ ID NO: 49836 - DNA, 201 bp, Homo sapiens; identical to SEQ ID NO: 49826

SEQ ID NO: 49837 - DNA, 201 bp, Homo sapiens; identical to SEQ ID NO: 49827

SEQ ID NO: 49838 - DNA, 201 bp, Homo sapiens; identical to SEQ ID NO: 49828

SEQ ID NO: 49839 - DNA, 201 bp, Homo sapiens; identical to SEQ ID NO: 49830

SEQ ID NO: 49840 - DNA, 201 bp, Homo sapiens; identical to SEQ ID NO: 49829

SEQ ID NO: 49841 - DNA, 201 bp, Homo sapiens; identical to SEQ ID NO: 49831

SEQ ID NO: 49842 - DNA, 201 bp, Homo sapiens; identical to SEQ ID NO: 49832

SEQ ID NO: 49843 - DNA, 201 bp, Homo sapiens
gaacccctcgtggggaatctgagcggaatcgagaaggagcagctggacgctcaacgggttggggtagccgcggccgtggccttcgggagcggggcgttgaygctttcggcttgggttcgggagggcggaggtgcgcggggttggtttgctcctcctctagatggtgacagcgcgtcttctcccccacagctggggatgttc

SEQ ID NO: 49844 - DNA, 201 bp, Homo sapiens; identical to SEQ ID NO: 49833

SEQ ID NO: 49845 - DNA, 201 bp, Homo sapiens; identical to SEQ ID NO: 49834

SEQ ID NO: 49846 - DNA, 201 bp, Homo sapiens; identical to SEQ ID NO: 49835

SEQ ID NO: 49847 - DNA, 201 bp, Homo sapiens; identical to SEQ ID NO: 49826

SEQ ID NO: 49848 - DNA, 201 bp, Homo sapiens; identical to SEQ ID NO: 49827

SEQ ID NO: 49849 - DNA, 201 bp, Homo sapiens; identical to SEQ ID NO: 49828

SEQ ID NO: 49850 - DNA, 201 bp, Homo sapiens; identical to SEQ ID NO: 49829

SEQ ID NO: 49851 - DNA, 201 bp, Homo sapiens; identical to SEQ ID NO: 49830

SEQ ID NO: 49852 - DNA, 201 bp, Homo sapiens; identical to SEQ ID NO: 49831

SEQ ID NO: 49853 - DNA, 201 bp, Homo sapiens; identical to SEQ ID NO: 49832

SEQ ID NO: 49854 - DNA, 147 bp, Homo sapiens
cgggttggggtagccgcggccgtggccttcgggagcggggcgttgaygctggggatgttcgtgctgcagctcggcgtcttgtccacctttttgtccgagcctgtggtcaaggcgctgaccagcggggccgcgctgcacgtgctcttg

SEQ ID NO: 49855 - DNA, 201 bp, Homo sapiens; identical to SEQ ID NO: 49833

SEQ ID NO: 49856 - DNA, 201 bp, Homo sapiens; identical to SEQ ID NO: 49834

SEQ ID NO: 49857 - DNA, 201 bp, Homo sapiens; identical to SEQ ID NO: 49835

SEQ ID NO: 49858 - DNA, 201 bp, Homo sapiens
aggttgtgattggagatggcagctttctcattactctggagaagagaggctatgtgaaggctgggctctggactccagaggcagtgatagaacacccagaygcagttcgtcaacttcacatggaattcttgagagcaggatcaaatgtcatgcagacttttaccttttctgccagtgaggacaatatggaaagcaagtggg

SEQ ID NO: 49859 - DNA, 143 bp, Homo sapiens
ctcacacctgcaatcccacctgggagacataattcaaatctattttggtcttatatcttcttatgtttgtgttatttcatgtgtgccagtttctctttttktcacaacaatttatcaatttgtggcaataaaaatgatttacc

SEQ ID NO: 49860 - DNA, 201 bp, Homo sapiens; identical to SEQ ID NO: 49858

SEQ ID NO: 49861 - DNA, 201 bp, Homo sapiens; identical to SEQ ID NO: 49858

SEQ ID NO: 49862 - DNA, 201 bp, Homo sapiens; identical to SEQ ID NO: 49858

SEQ ID NO: 49863 - DNA, 201 bp, Homo sapiens
tcttgcagcccggcatgccagtgcttcctccacgaatttgaaagacatattggctgacctgatacctaaggagcaggccagaattaagactttcaggcagsaacatggcaagacggtggtgggccaaatcactgtggacatgatgtatggtggcatgagaggcatgaagggattggtctatgaaacatcagttcttgatcc

SEQ ID NO: 49864 - DNA, 201 bp, Homo sapiens
cttgtcttgttcttgcagcccggcatgccagtgcttcctccacgaatttgaaagacatattggctgacctgatacctaaggagcaggccagaattaagacyttcaggcagcaacatggcaagacggtggtgggccaaatcactgtggacatgatgtatggtggcatgagaggcatgaagggattggtctatgaaacatcag

SEQ ID NO: 49865 - DNA, 201 bp, Homo sapiens
cggctcttgggaaccaagaatgcatcttgtcttgttcttgcagcccggcatgccagtgcttcctccacgaatttgaaagacatattggctgacctgatacytaaggagcaggccagaattaagactttcaggcagcaacatggcaagacggtggtgggccaaatcactgtggacatgatgtatggtggcatgagaggcatg

SEQ ID NO: 49866 - DNA, 201 bp, Homo sapiens
aggcagcggtattggggccattgactctaacctggactggtctcacaatttcaccaacatgttaggctatactgatcatcagttcactgagctcacgcgcytgtacctcaccatccacagtgaccatgagggtggcaatgtaagtgcccataccagccatttggtgggcagtgccctttccgacccttacctgtcctttgc

SEQ ID NO: 49867 - DNA, 201 bp, Homo sapiens
ccatgtttaagttggttgctcagctgtacaagattgtgcccaatgtcctcttagagcagggtaaagccaagaatccttggcccaatgtagatgctcacagkggggtgctgctccagtattatggcatgacggagatgaattactacacggtcctgtttggggtgtcacgagcattgggtgtactggcacagctcatctgga

SEQ ID NO: 49868 - DNA, 201 bp, Homo sapiens
tttgaggttaaaatataaattaagactttaaaagatgaaaaatggtcccttcttccctaatcagctcccttcccctgcctggtatgagttgcccatcatasgcatggtcctggaggatgaccaggactaatgcatgtggtatgagtaggtttggccccctcactatctctagagtgagaatctggctcctgtttccatggg

SEQ ID NO: 49869 - DNA, 201 bp, Homo sapiens; identical to SEQ ID NO: 49863

SEQ ID NO: 49870 - DNA, 201 bp, Homo sapiens; identical to SEQ ID NO: 49864

SEQ ID NO: 49871 - DNA, 201 bp, Homo sapiens; identical to SEQ ID NO: 49865

SEQ ID NO: 49872 - DNA, 201 bp, Homo sapiens; identical to SEQ ID NO: 49866

SEQ ID NO: 49873 - DNA, 201 bp, Homo sapiens; identical to SEQ ID NO: 49867

SEQ ID NO: 49874 - DNA, 201 bp, Homo sapiens
gggggcctttaaagacttaagattaaattatatctgaggcactgataatatgtttgaggttaaaatataaattaagactttaaaagatttgcccatcatasgcatggtcctggaggatgaccaggactaatgcatgtggtatgagtaggtttggccccctcactatctctagagtgagaatctggctcctgtttccatggg

SEQ ID NO: 49875 - DNA, 201 bp, Homo sapiens; identical to SEQ ID NO: 49863

SEQ ID NO: 49876 - DNA, 201 bp, Homo sapiens; identical to SEQ ID NO: 49864

SEQ ID NO: 49877 - DNA, 201 bp, Homo sapiens; identical to SEQ ID NO: 49865

SEQ ID NO: 49878 - DNA, 201 bp, Homo sapiens; identical to SEQ ID NO: 49866

SEQ ID NO: 49879 - DNA, 201 bp, Homo sapiens; identical to SEQ ID NO: 49867

SEQ ID NO: 49880 - DNA, 201 bp, Homo sapiens; identical to SEQ ID NO: 49868

SEQ ID NO: 49881 - DNA, 201 bp, Homo sapiens; identical to SEQ ID NO: 49863

SEQ ID NO: 49882 - DNA, 201 bp, Homo sapiens; identical to SEQ ID NO: 49864

SEQ ID NO: 49883 - DNA, 201 bp, Homo sapiens; identical to SEQ ID NO: 49865

SEQ ID NO: 49884 - DNA, 201 bp, Homo sapiens; identical to SEQ ID NO: 49866

SEQ ID NO: 49885 - DNA, 201 bp, Homo sapiens; identical to SEQ ID NO: 49867

SEQ ID NO: 49886 - DNA, 201 bp, Homo sapiens; identical to SEQ ID NO: 49868

SEQ ID NO: 49887 - DNA, 151 bp, Homo sapiens
ccccaaatatggtgaaggccaccaagcatggattattgggattgtggagaagggcaactgcacagccagaatcatagacaaacccaggatcatcgaggtcrcaccacaagtggccactcaaaatgcgaatccctcacctggggccacctct

SEQ ID NO: 49888 - DNA, 201 bp, Homo sapiens
gtggggagccaagcctaaagggcaaacagaccacgcagaatccaccctagccggcagttttcttagtgctgtctctattcctcctgcgacttttcaggctygacaacctggtgtttcatccagaagagccagaggtgcttgctgtccttgactgggaactttctaccttgggcgacccccttgctgatgtggcctacagct

SEQ ID NO: 49889 - DNA, 201 bp, Homo sapiens
tctgcaagaagcctggagtctgtttcaggccaggaggaggggatttgctgagggccaagggggttctgggacagagtctggaaagctggtcttcaggctcycagtcccaggctgggcaggcacggtcacttcacttcagcctttcagtccctctctctctgcctgtgggaatctggacacattttgggaggcctcccaagg

SEQ ID NO: 49890 - DNA, 201 bp, Homo sapiens
ggaatccctgctgcagaggagtatttcaggatgtactgtctccaaatggggctccctcccactgagaactggaacttctatatggctttttcctttttccrtgtggctgcaatcctacagggagtctacaagcgatcactcacagggcaagcaagctccacatatgcggaacaaactggaaagctgaccgaatttgtgtct

SEQ ID NO: 49891 - DNA, 201 bp, Homo sapiens
gtgcccagatctgtcactgatgtgcctcgaaagatccggtgtttgtggctcctgcaccctgctcagcagctctgtcccgggacagtcagggtggactcaakctttctggttctccacagaagacgtctctgcaagaagcctggagtctgtttcaggccaggaggaggggatttgctgagggccaagggggttctgggacag

SEQ ID NO: 49892 - DNA, 151 bp, Homo sapiens
gggagctcaggcacccgggcacagaggggatgggagggtggggagccaagyctaaagggcaaacagaccacgcagaatccaccctagccggcagttttcttagtgctgtctctattcctcctgcgacttttcaggctcgacaacctggtgt

SEQ ID NO: 49893 - DNA, 158 bp, Homo sapiens
gggagctcaggcacccgggcacagaggggatgggagggtggggagccaagcctaaagrgcaaacagaccacgcagaatccaccctagccggcagttttcttagtgctgtctctattcctcctgcgacttttcaggctcgacaacctggtgtttcatcc

SEQ ID NO: 49894 - DNA, 201 bp, Homo sapiens
ggcctcccaaggctgtgggacgtgcttgctctggcagctgcagggttcctgtctggcctccctggtgagcagaggggcggccacggcgggcggtggcctaragacccaggacctgggcgcctgggaaaatggaatgcaacccacattgtaaagccactggcatctgattatctccatttgaacacacagcacagaacaatc

SEQ ID NO: 49895 - DNA, 201 bp, Homo sapiens
tctcagagagggccctggcactcatgaaggcccgcgtgaagtcccgcttggcttttgggaagcccctggtggagcagggcacagtgctggcggacatcgcrcagtcgcgcgtggagattgagcaggcacggctgctggtgctgagagctgcccacctcatggacctggcaggaaacaaggctgcagccttggatatagcca

SEQ ID NO: 49896 - DNA, 117 bp, Homo sapiens
gggagctcaggcacccrggcacagaggggatgggagggtggggagccaagcctaaagggcaaacagaccacgcagaatccaccctagccggcagttttcttagtgctgtctctattc

SEQ ID NO: 49897 - DNA, 201 bp, Homo sapiens
cattttgggaggcctcccaaggctgtgggacgtgcttgctctggcagctgcagggttcctgtctggcctccctggtgagcagaggggcggccacggcgggyggtggcctagagacccaggacctgggcgcctgggaaaatggaatgcaacccacattgtaaagccactggcatctgattatctccatttgaacacacagca

SEQ ID NO: 49898 - DNA, 201 bp, Homo sapiens
ccagtggtgccccacaggcagcaggagttatagctccgttccagaagcttccccagctcatacctcaaggggaggtctggttatctctccagagagcctcyctccacctgtcagagagctgtatcaccggctgaagcacttcatggagcaacgtgtgtaccctgcagagccagagctgcagagtcaccaggcctcagcagc

SEQ ID NO: 49899 - DNA, 201 bp, Homo sapiens
gctgcagaggagtatttcaggatgtactgtctccaaatggggctccctcccactgagaactggaacttctatatggctttttcctttttccgtgtggctgsaatcctacagggagtctacaagcgatcactcacagggcaagcaagctccacatatgcggaacaaactggaaagctgaccgaatttgtgtctaacctggcg

SEQ ID NO: 49900 - DNA, 189 bp, Homo sapiens
gggagctcaggcacccgggcacagaggggatgggagggtggggagccaagcctaaagggcaaacagaccacgcagaatccaccctagcyggcagttttcttagtgctgtctctattcctcctgcgacttttcaggctcgacaacctggtgtttcatccagaagagccagaggtgcttgctgtccttgac

SEQ ID NO: 49901 - DNA, 201 bp, Homo sapiens
catgcaccaagacaccggcagcagtctgtgctcttggttcccatggataccccagggataaaaatcatccggcctctgacggtgtatggactggaagatgyaccaggtggccatggtgaagtccgatttgagcacgtgcgtgtgcccaaagagaacatggtcctgggccctggccgaggctttgagatcgcccagggcaga

SEQ ID NO: 49902 - DNA, 201 bp, Homo sapiens
aaactagcaccatcccagccatggagaggctgatcgaatggctgcccctccatcttccccgtcagcagaggaccacagtggtgcacggggacttcaggctygacaacctggtgtttcatccagaagagccagaggtgcttgctgtccttgactgggaactttctaccttgggcgacccccttgctgatgtggcctacagct

SEQ ID NO: 49903 - DNA, 201 bp, Homo sapiens; identical to SEQ ID NO: 49889

SEQ ID NO: 49904 - DNA, 201 bp, Homo sapiens
catggaagggatctgtaagccagaccctaggatctacaagctgtgcttggagcagctcggcctgcagccctctgagtccatctttcttgatgaccttggamcaaatctaaaagaagctgccagacttggtattcacaccattaaggttaatgacccagagactgcagtaaaggaattagaagctctcttgggttttacatt

SEQ ID NO: 49905 - DNA, 201 bp, Homo sapiens
aagattcaagtgtcattggcacccccttctatgtgatggagtactgcccaggtctcatctacaaagacccttccctgccaggcttggagcccagccacagrcgagccatatacactgccatgaacacagtcctgtgcaaaattcacagtgtggatctgcaggctgtgggacttgaagactatgggaagcaaggggactata

SEQ ID NO: 49906 - DNA, 201 bp, Homo sapiens; identical to SEQ ID NO: 49890

SEQ ID NO: 49907 - DNA, 201 bp, Homo sapiens; identical to SEQ ID NO: 49894

SEQ ID NO: 49908 - DNA, 201 bp, Homo sapiens
tcgagcttccgaaactagcaccatcccagccatggagaggctgatcgaatggctgcccctccatcttccccgtcagcagaggaccacagtggtgcacgggracttcaggctcgacaacctggtgtttcatccagaagagccagaggtgcttgctgtccttgactgggaactttctaccttgggcgacccccttgctgatgt

SEQ ID NO: 49909 - DNA, 201 bp, Homo sapiens; identical to SEQ ID NO: 49895

SEQ ID NO: 49910 - DNA, 201 bp, Homo sapiens; identical to SEQ ID NO: 49897

SEQ ID NO: 49911 - DNA, 201 bp, Homo sapiens; identical to SEQ ID NO: 49898

SEQ ID NO: 49912 - DNA, 201 bp, Homo sapiens; identical to SEQ ID NO: 49899

SEQ ID NO: 49913 - DNA, 201 bp, Homo sapiens
ttacgagaatttgggagactttgctctgaaatgattgtggagtcctgcatggaagggatctgtaagccagaccctaggatctacaagctgtgcttggagcrgctcggcctgcagccctctgagtccatctttcttgatgaccttggaacaaatctaaaagaagctgccagacttggtattcacaccattaaggttaatgac

SEQ ID NO: 49914 - DNA, 201 bp, Homo sapiens; identical to SEQ ID NO: 49901

SEQ ID NO: 49915 - DNA, 201 bp, Homo sapiens; identical to SEQ ID NO: 49902

SEQ ID NO: 49916 - DNA, 201 bp, Homo sapiens; identical to SEQ ID NO: 49890

SEQ ID NO: 49917 - DNA, 201 bp, Homo sapiens; identical to SEQ ID NO: 49908

SEQ ID NO: 49918 - DNA, 201 bp, Homo sapiens
cgcctccctccactctgtgtctgccaggcctttggagcagcagggttcctgtctggcctccctggtgagcagaggggcggccacggcgggcggtggcctaragacccaggacctgggcgcctgggaaaatggaatgcaacccacattgtaaagccactggcatctgattatctccatttgaacacacagcacagaacaatc

SEQ ID NO: 49919 - DNA, 201 bp, Homo sapiens
gacccagggccgcctccctccactctgtgtctgccaggcctttggagcagcagggttcctgtctggcctccctggtgagcagaggggcggccacggcgggyggtggcctagagacccaggacctgggcgcctgggaaaatggaatgcaacccacattgtaaagccactggcatctgattatctccatttgaacacacagca

SEQ ID NO: 49920 - DNA, 201 bp, Homo sapiens; identical to SEQ ID NO: 49898

SEQ ID NO: 49921 - DNA, 201 bp, Homo sapiens; identical to SEQ ID NO: 49899

SEQ ID NO: 49922 - DNA, 201 bp, Homo sapiens
catgcaccaagacaccggcagcagtctgtgctcttggttcccatggataccccagggataaaaatcatccggcctctgacggtgtatggactggaagatgyaccaggctgtttcctgccgtccttttccctttaaccatgtcccagtaagaaggctaaataaagggcagggacattgccagcagataacccagactgaggc

SEQ ID NO: 49923 - DNA, 201 bp, Homo sapiens
ccggggagcccctggtgtccaccgtgtgcaacttcggcgtggtccgcacattgacatctgacaggctgacgttggccagggattcaaagaagattaagaargttgccaaaaaagaaaagccgaaagccgtgattccgatctacgaaggcgattaccaccctgagcccctgaccgtagaggtgcagatccagctgaaccagt

SEQ ID NO: 49924 - DNA, 201 bp, Homo sapiens
tcttcctcaaacttggcgaacttggagggagcttgtccccagagaggaggatgtggtgagccccggagaggagacggtggaggccctgctgggcctggtcygcagccgccactccccctgggctctgctgaacaactcgaatgcagaagacagtttcctgagagaattggccatccggaacccgctgacgatcacagacac

SEQ ID NO: 49925 - DNA, 201 bp, Homo sapiens
cgatcacagacaccttcttctactcctacttccggtccctgcgggtaatagacaagaagattctctcctggcctgtggtgctacctgctgttgacagtccyctgtctgccaagaaaggaaagggggagaaagacaagaaagggaaggagaaagacaggacggggaaaggagagaaagagccggccaaggagtggaaggtgc

SEQ ID NO: 49926 - DNA, 201 bp, Homo sapiens
gcacacctgagactcatctcgcttcgaccccgccgccgccgccgcccggcatcctgagcacggagacagtctccagctgccgttcatgcttcctccccagscttccgcagcccaccagggaaggggcggtaggagtggccttttaccaaagggaccggcgatgctctgcaggctgtgctggctggtctcgtacagcttggc

SEQ ID NO: 49927 - DNA, 201 bp, Homo sapiens
acgctcagcccgcggtgctcgcacacctgagactcatctcgcttcgaccccgccgccgccgccgcccggcatcctgagcacggagacagtctccagctgcsgttcatgcttcctccccagccttccgcagcccaccagggaaggggcggtaggagtggccttttaccaaagggaccggcgatgctctgcaggctgtgctgg

SEQ ID NO: 49928 - DNA, 201 bp, Homo sapiens
atatgtcatgtccagagccacagtgcggcgcctccaggctatcatggaagatgctgaactcttccccattgatgatgtctttgtgggtatgtgcctgaggmggctggggctgagccctatgcaccatgctggcttcaagacatttggaatccggcggcccctggaccccttagacccctgcctgtatagggggctcctgct

SEQ ID NO: 49929 - DNA, 201 bp, Homo sapiens
aagcccgcaggagaccccacggcccaccagcctttctgggctcccccaacaccccgtcacagccggtgtccacccaaccacacagtgtctagcgcctctcygtccctgcctagccgtcaccgtctcttcttgacctatcgtcactgccgaaatttctctatcttgctggagccttcaggctgttccaaggataccttcttg

SEQ ID NO: 49930 - DNA, 201 bp, Homo sapiens
gaggaaggcggccaagcccgcaggagaccccacggcccaccagcctttctgggctcccccaacaccccgtcacagccggtgtccacccaaccacacagtgwctagcgcctctctgtccctgcctagccgtcaccgtctcttcttgacctatcgtcactgccgaaatttctctatcttgctggagccttcaggctgttccaa

SEQ ID NO: 49931 - DNA, 201 bp, Homo sapiens
tgaaatttctaaagctggaggagttggtactgagcgccaatcgaatcaaggaggtggatgccaccaatctgccccccacactcaaggtgctggagctctayggcaatgagatcagcagcatggagtgtctgtgtgcccacccacccgccggcctgcagcacttggggttaggccacaacaaacttctaggccccttggaaa

SEQ ID NO: 49932 - DNA, 201 bp, Homo sapiens; identical to SEQ ID NO: 49923

SEQ ID NO: 49933 - DNA, 201 bp, Homo sapiens; identical to SEQ ID NO: 49924

SEQ ID NO: 49934 - DNA, 201 bp, Homo sapiens
caacctcgtctccctggacctgggcttcaacgacctgacagacctgcagagcatggtcaccagcctgaggaccctccgacacctgcgactcctggtgctgmagggaaacccactggccttggtgccctactaccgcggcctcaccatcgacagcctggcccagctctgcgtgctggacgacatcaccgtgtctcccaatga

SEQ ID NO: 49935 - DNA, 201 bp, Homo sapiens
acgtcaccgctaatcactggcccaacctcgtctccctggacctgggcttcaacgacctgacagacctgcagagcatggtcaccagcctgaggaccctccgrcacctgcgactcctggtgctgcagggaaacccactggccttggtgccctactaccgcggcctcaccatcgacagcctggcccagctctgcgtgctggacg

SEQ ID NO: 49936 - DNA, 201 bp, Homo sapiens
tggtcccactgaaggccttcctgctggcggggaccaccgtgaccatcgtggaggagaagattctctcctggcctgtggtgctacctgctgttgacagtccyctgtctgccaagaaaggaaagggggagaaagacaagaaagggaaggagaaagacaggacggggaaaggagagaaagagccggccaaggagtggaaggtgc

SEQ ID NO: 49937 - DNA, 201 bp, Homo sapiens
tcactggcccaacctcgtctccctggacctgggcttcaacgacctgacagacctgcagagcatggtcaccagcctgaggaccctccgacacctgcgactcytggtgctgcagggaaacccactggccttggtgccctactaccgcggcctcaccatcgacagcctggcccagctctgcgtgctggacgacatcaccgtgtc

SEQ ID NO: 49938 - DNA, 201 bp, Homo sapiens
acaagccctgggctgaggtcatcccctgcagttacgagatgcagcactctctcagggacctggtcccactgaaggccttcctgctggcggggaccaccgtraccatcgtggaggagaagattctctcctggcctgtggtgctacctgctgttgacagtcccctgtctgccaagaaaggaaagggggagaaagacaagaaag

SEQ ID NO: 49939 - DNA, 201 bp, Homo sapiens; identical to SEQ ID NO: 49926

SEQ ID NO: 49940 - DNA, 201 bp, Homo sapiens; identical to SEQ ID NO: 49927

SEQ ID NO: 49941 - DNA, 201 bp, Homo sapiens; identical to SEQ ID NO: 49928

SEQ ID NO: 49942 - DNA, 201 bp, Homo sapiens; identical to SEQ ID NO: 49929

SEQ ID NO: 49943 - DNA, 201 bp, Homo sapiens
caacgacctgacagacctgcagagcatggtcaccagcctgaggaccctccgacacctgcgactcctggtgctgcagggaaacccactggccttggtgcccyactaccgcggcctcaccatcgacagcctggcccagctctgcgtgctggacgacatcaccgtgtctcccaatgagaagcatctcttccgggggctcagcct

SEQ ID NO: 49944 - DNA, 201 bp, Homo sapiens; identical to SEQ ID NO: 49930

SEQ ID NO: 49945 - DNA, 201 bp, Homo sapiens; identical to SEQ ID NO: 49926

SEQ ID NO: 49946 - DNA, 201 bp, Homo sapiens; identical to SEQ ID NO: 49928

SEQ ID NO: 49947 - DNA, 193 bp, Homo sapiens
cccgcggtgctcgcacacctgagactcatctcgcttcgaccccgccgccgccgccgcccggcatcctgagcacggagacagtctccagctgcsgttcatgcttcctccccagccttccgcagcccaccagggaaggggcggtaggagtggccttttaccaaagggaccggcgatgctctgcaggctgtgctgg

SEQ ID NO: 49948 - DNA, 201 bp, Homo sapiens; identical to SEQ ID NO: 49929

SEQ ID NO: 49949 - DNA, 201 bp, Homo sapiens; identical to SEQ ID NO: 49930

SEQ ID NO: 49950 - DNA, 201 bp, Homo sapiens
ctgtggctctgaccccactccggccgcccgtcccggagtcccactcaccgtgtttcacgttgtccttccactcgcccacatagtagtcgccattcacagcrtatacctggctccgcaggccgttcctctgggccttccggtcccaccccttccacagggactccgacttttttgggcacttagagactggcatggtggctg

SEQ ID NO: 49951 - DNA, 201 bp, Homo sapiens
cagggactccgacttttttgggcacttagagactggcatggtggctgcttctgcaaggctggagggtgctggaaaggggttagggacatctggggctcagygcgccccgtgtaatgccgggatcctgagctcaagtggggagagtcatgtgtgttctgagtccctggggcaggtgaacagcccttagtggggatcctttag

SEQ ID NO: 49952 - DNA, 201 bp, Homo sapiens
gggaaaccagtagagcaggagggtttgtgatggcatcagggagaagctgcccccagggagggggtggcggtcatatatacatatatatatatatatatatwtttttttttttatgtcttctaaatatttttatttatttatgtatttatttatttatttagagatggaatcttgctttgttgcccaggctggagtgcagtg

SEQ ID NO: 49953 - DNA, 201 bp, Homo sapiens
gaaaccagtagagcaggagggtttgtgatggcatcagggagaagctgcccccagggagggggtggcggtcatatatacatatatatatatatatatatatwtttttttttatgtcttctaaatatttttatttatttatgtatttatttatttatttagagatggaatcttgctttgttgcccaggctggagtgcagtggc

SEQ ID NO: 49954 - DNA, 201 bp, Homo sapiens
ggccgcccgtcccggagtcccactcaccgtgtttcacgttgtccttccactcgcccacatagtagtcgccattcacagcgtatacctggctccgcaggccrttcctctgggccttccggtcccaccccttccacagggactccgacttttttgggcacttagagactggcatggtggctgcttctgcaaggctggagggtg

SEQ ID NO: 49955 - DNA, 201 bp, Homo sapiens
tgccgggatcctgagctcaagtggggagagtcatgtgtgttctgagtccctggggcaggtgaacagcccttagtggggatcctttagtgctggactgacckttggttggcccctcccttgcctctcctggggccccctcccagggggtctgatggcacaattacttgggaatctagggaaaccagtagagcaggagggttt

SEQ ID NO: 49956 - DNA, 201 bp, Homo sapiens
tagggaaaccagtagagcaggagggtttgtgatggcatcagggagaagctgcccccagggagggggtggcggtcatatatacatatatatatatatatatatatttttttttttatgtcttctaaatatttttatttatttatgtatttatttatttatttagagatggaatcttgctttgttgcccaggctggagtgcag

SEQ ID NO: 49957 - DNA, 201 bp, Homo sapiens
tcccactcaccgtgtttcacgttgtccttccactcgcccacatagtagtcgccattcacagcgtatacctggctccgcaggccgttcctctgggccttccrgtcccaccccttccacagggactccgacttttttgggcacttagagactggcatggtggctgcttctgcaaggctggagggtgctggaaaggggttaggg

SEQ ID NO: 49958 - DNA, 201 bp, Homo sapiens
cccagtgagctctgcactctgccttcctggccctgttgcccactgtggctctgaccccactccggccgcccgtcccggagtcccactcaccgtgtttcacrttgtccttccactcgcccacatagtagtcgccattcacagcgtatacctggctccgcaggccgttcctctgggccttccggtcccaccccttccacaggg

SEQ ID NO: 49959 - DNA, 185 bp, Homo sapiens
cgcggggccgccggccgtgctgttcccgccaattcctgtggtaatccttaccgtggcgagttccgcgctcaatggagacgtttgmccccaccgagctgcccgagctgcttaaactttattaccggaggctctttccctactctcagtactatcgctggctcaactacggtggagtgataaagaat

SEQ ID NO: 49960 - DNA, 201 bp, Homo sapiens
ttattaccggaggctctttccctactctcagtactatcgctggctcaactacggtggagtgataaagaattactttcaacaccgtgaattttcattcacaytgaaagatgatatttacattcgctaccaatccttcaacaaccagagtgatctggaaaaggagatgcagaaaatgaatccatacaagattgatataggcgc

SEQ ID NO: 49961 - DNA, 201 bp, Homo sapiens
tgctccagtactgttttccacggctggatatcaatgtcagcaaaggaatcaatcatctactgaagagcccttttagtgttcatcctaaaacaggtcgcatmtctgtgcctattgatttgcagaaagtggaccagtttgatccatttactgttccgaccataagcttcatctgccgtgaattggatgccatttccactaatg

SEQ ID NO: 49962 - DNA, 201 bp, Homo sapiens
ctgccgccatcttggttccgcgttccctgcacagtaagtactttctgtgccgctactgtctatccgcagccatccgcctttctttcgggctaagccgcccsggggactgagagttaaggagagttggaggctttactgggccacagggttcctactcgcccctgggcctccggacaaaatggggtctgcggttggtgtcct

SEQ ID NO: 49963 - DNA, 201 bp, Homo sapiens
cagatacttacatagtttttggggaagccaagatcgaagatttatcccagcaagcacaactagcagctgctgagaaattcaaagttcaaggtgaagctgtytcaaacattcaagaaaacacacagactccaactgtacaagaggagagtgaagaggaagaggtcgatgaaacaggtgtagaagttaaggacatagaattgg

SEQ ID NO: 49964 - DNA, 201 bp, Homo sapiens
aagctgtctcaaacattcaagaaaacacacagactccaactgtacaagaggagagtgaagaggaagaggtcgatgaaacaggtgtagaagttaaggacatwgaattggtcatgtcacaagcaaatgtgtcgagagcaaaggcagtccgagccctgaagaacaacagtaatgatattgtaaatgcgattatggaattaacaa

SEQ ID NO: 49965 - DNA, 195 bp, Homo sapiens
tgtcgagagcaaaggcagtccgagccctgaagaacaacagtaatgatattgtaaatgcgattatggaattaacaatgtaaccatatggaagcaactttttytggtgtctcaaaggagtaactgcagcttggtttgaaatttgtactgtttctatcataaataaagttatggcttcttgttggatgaattcagtcg

SEQ ID NO: 49966 - DNA, 201 bp, Homo sapiens
gaacagaatctgacagtgatgaatcagtaccagagcttgaagaacaggattccacccaggcaaccacacaacaagcccagctggcggcagcagctgaaatygatgaagaaccagtcagtaaagcaaaacagagtcggagtgaaaagaaggcacggaaggctatgtccaaactgggtcttcggcaggttacaggagttacta

SEQ ID NO: 49967 - DNA, 201 bp, Homo sapiens
agagtcggagtgaaaagaaggcacggaaggctatgtccaaactgggtcttcggcaggttacaggagttactagagtcactatccggaaatctaagaatatmctctttgtcatcacaaaaccagatgtctacaagagccctgcttcagatacttacatagtttttggggaagccaagatcgaagatttatcccagcaagcac

SEQ ID NO: 49968 - DNA, 185 bp, Homo sapiens; identical to SEQ ID NO: 49959

SEQ ID NO: 49969 - DNA, 201 bp, Homo sapiens; identical to SEQ ID NO: 49960

SEQ ID NO: 49970 - DNA, 201 bp, Homo sapiens; identical to SEQ ID NO: 49961

SEQ ID NO: 49971 - DNA, 201 bp, Homo sapiens; identical to SEQ ID NO: 49963

SEQ ID NO: 49972 - DNA, 201 bp, Homo sapiens; identical to SEQ ID NO: 49964

SEQ ID NO: 49973 - DNA, 195 bp, Homo sapiens; identical to SEQ ID NO: 49965

SEQ ID NO: 49974 - DNA, 201 bp, Homo sapiens; identical to SEQ ID NO: 49966

SEQ ID NO: 49975 - DNA, 201 bp, Homo sapiens; identical to SEQ ID NO: 49967

SEQ ID NO: 49976 - DNA, 201 bp, Homo sapiens; identical to SEQ ID NO: 49963

SEQ ID NO: 49977 - DNA, 201 bp, Homo sapiens; identical to SEQ ID NO: 49964

SEQ ID NO: 49978 - DNA, 195 bp, Homo sapiens; identical to SEQ ID NO: 49965

SEQ ID NO: 49979 - DNA, 201 bp, Homo sapiens; identical to SEQ ID NO: 49966

SEQ ID NO: 49980 - DNA, 201 bp, Homo sapiens
gagaaataatttatgttgaaaagatttcctggccaagtgcagtggctcacacccgtaatcccagcactttgggaggccgaggcaggcggatcacctgagtycttgtcaccacccccgccgtgggaacggcctgacagtcactcgtcaaaggaagtggctgccggcagctcttgacccggaatcggatcctagtcccacccc

SEQ ID NO: 49981 - DNA, 201 bp, Homo sapiens; identical to SEQ ID NO: 49967

SEQ ID NO: 49982 - DNA, 174 bp, Homo sapiens
gaagtgtgattgtcacacttatcatgttgtccagaggtccagtctggctgctgttgtggaggcaaggaaggcaactcatcccagaaggcatctggtgcttyttgtagcttaactactgcctcctcatttttcagtatgtgttctaagtataaaaagtccttggttctcatggaa

SEQ ID NO: 49983 - DNA, 132 bp, Homo sapiens
tctggctgctgttgtggaggcaaggaaggcaactcatcccagaaggcatctggtgcttcttgtagcttaactactgcctcctcatttttcagtatgtgttytaagtataaaaagtccttggttctcatggaa

SEQ ID NO: 49984 - DNA, 184 bp, Homo sapiens
cctactctaggaagtgtgattgtcacacttatcatgttgtccagaggtccagtctggctgctgttgtggaggcaaggaaggcaactcatcccagaaggcawctggtgcttcttgtagcttaactactgcctcctcatttttcagtatgtgttctaagtataaaaagtccttggttctcatggaa

SEQ ID NO: 49985 - DNA, 201 bp, Homo sapiens
gattgtggggacccgtgtggacaagaatgacatttttgctattggctccctgatggacgattacttggggcttgtaagctgagcctggtggcctcctaccmttggtcctactctaggaagtgtgattgtcacacttatcatgttgtccagaggtccagtctggctgctgttgtggaggcaaggaaggcaactcatcccaga

SEQ ID NO: 49986 - DNA, 201 bp, Homo sapiens
ctgatggacgattacttggggcttgtaagctgagcctggtggcctcctacccttggtcctactctaggaagtgtgattgtcacacttatcatgttgtccaraggtccagtctggctgctgttgtggaggcaaggaaggcaactcatcccagaaggcatctggtgcttcttgtagcttaactactgcctcctcatttttcag

SEQ ID NO: 49987 - DNA, 183 bp, Homo sapiens
ctactctaggaagtgtgattgtcacacttatcatgttgtccagaggtccagtctggctgctgttgtggaggcaaggaaggcaactcatcccagaaggcatytggtgcttcttgtagcttaactactgcctcctcatttttcagtatgtgttctaagtataaaaagtccttggttctcatggaa

SEQ ID NO: 49988 - DNA, 174 bp, Homo sapiens; identical to SEQ ID NO: 49982

SEQ ID NO: 49989 - DNA, 132 bp, Homo sapiens; identical to SEQ ID NO: 49983

SEQ ID NO: 49990 - DNA, 184 bp, Homo sapiens; identical to SEQ ID NO: 49984

SEQ ID NO: 49991 - DNA, 201 bp, Homo sapiens; identical to SEQ ID NO: 49985

SEQ ID NO: 49992 - DNA, 201 bp, Homo sapiens; identical to SEQ ID NO: 49986

SEQ ID NO: 49993 - DNA, 183 bp, Homo sapiens; identical to SEQ ID NO: 49987

SEQ ID NO: 49994 - DNA, 201 bp, Homo sapiens
caggcttggaccagagctggaaatatgcggctacggatgttgggatcattattacgagtcggacaccctcttgcactcgtttcaagtcctagcggcccttstggagtctcccgtcactcaggacatcatctgcgacgtggggatgcctgtaatgcaccgaaacgtccgctacaactgcagagtgatattcctcaacaggaa

SEQ ID NO: 49995 - DNA, 201 bp, Homo sapiens
tcgtgactatggtcaccagcaagaacggtgggatttacttgctggccaaccagaagggttgcgacggggaccgcctgtactacgacggctgtgccatgatygccatgaacggaagcgtctttgctcaaggatcccagttttctctggatgacgtggaagtcctgacggccacgctggatctggaggacgtccggagctaca

SEQ ID NO: 49996 - DNA, 201 bp, Homo sapiens
atgttgggatcattattacgagtcggacaccctcttgcactcgtttcaagtcctagcggcccttgtggagtctcccgtcactcaggacatcatctgcgacrtggggatgcctgtaatgcaccgaaacgtccgctacaactgcagagtgatattcctcaacaggaagatcctgctcatcagacccaagatggccttggccaa

SEQ ID NO: 49997 - DNA, 201 bp, Homo sapiens
gccaccacgtgctgcgcaaagccaacaccagggtggatctcgtgactatggtcaccagcaagaacggtgggatttacttgctggccaaccagaagggttgygacggggaccgcctgtactacgacggctgtgccatgatcgccatgaacggaagcgtctttgctcaaggatcccagttttctctggatgacgtggaagtcc

SEQ ID NO: 49998 - DNA, 201 bp, Homo sapiens
tccagcttcctgccctgcagagcatcctgttggcgccggccaccgcagagctggagcccttggctgatggacaggtgtcccagaccgacgaggaagatatrgggatgacatatgcggagctctcggtctatgggaaactcaggaaggtggccaagatggggccctacagcatgttctgcaaactcctcggcatgtggagac

SEQ ID NO: 49999 - DNA, 201 bp, Homo sapiens
ctgatggacaggtgtcccagaccgacgaggaagatatggggatgacatatgcggagctctcggtctatgggaaactcaggaaggtggccaagatggggccytacagcatgttctgcaaactcctcggcatgtggagacacatctgcaccccgagacaggtcgctgacaaagtgaagcggtttttctccaagtactccatga

SEQ ID NO: 50000 - DNA, 201 bp, Homo sapiens
gatgacgtggaagtcctgacggccacgctggatctggaggacgtccggagctacagggcggagatttcatctcgaaacctggcggccagcagggcgagccyctaccccagagtgaaggtggactttgccctctcgtgccacgaggacttgctggcacccatctctgagcccatcgagtggaaataccacagccctgaggag

SEQ ID NO: 50001 - DNA, 201 bp, Homo sapiens
aagtactccatgaacagacacaagatgaccacgctcacacccgcgtaccacgccgagaactacagccctgaggacaacaggtttgatctgcgaccatttckgtacaacacaagctggccttggcagtttcggtgcatagaaaatcaggtgctacagctcgagagggcagagccacagtccctggacggcgtggactgaggc

SEQ ID NO: 50002 - DNA, 201 bp, Homo sapiens
gatcccagttttctctggatgacgtggaagtcctgacggccacgctggatctggaggacgtccggagctacagggcggagatttcatctcgaaacctggcrgccagcagggcgagcccctaccccagagtgaaggtggactttgccctctcgtgccacgaggacttgctggcacccatctctgagcccatcgagtggaaat

SEQ ID NO: 50003 - DNA, 201 bp, Homo sapiens
cggagctctcggtctatgggaaactcaggaaggtggccaagatggggccctacagcatgttctgcaaactcctcggcatgtggagacacatctgcaccccragacaggtcgctgacaaagtgaagcggtttttctccaagtactccatgaacagacacaagatgaccacgctcacacccgcgtaccacgccgagaactaca

SEQ ID NO: 50004 - DNA, 201 bp, Homo sapiens
actagatgattcgctggtgtccatctttgggaatcgacgtctcaagaggttctccatggtggtacaggatggcatagtgaaggccctgaatgtggaaccaratggcacaggcctcacctgcagcctggcacccaatatcatctcacagctctgaggccctgggccagattacttcctccacccctccctatctcacctgcc

SEQ ID NO: 50005 - DNA, 201 bp, Homo sapiens
tctccatggtggtacaggatggcatagtgaaggccctgaatgtggaaccagatggcacaggcctcacctgcagcctggcacccaatatcatctcacagctytgaggccctgggccagattacttcctccacccctccctatctcacctgcccagccctgtgctggggccctgcaattggaatgttggccagatttctgcaa

SEQ ID NO: 50006 - DNA, 170 bp, Homo sapiens
acaggcctcacctgcagcctggcacccaatatcatctcacagctctgaggccctgggccagattacttcctccacccctccctatctcacctgcccagccstgtgctggggccctgcaattggaatgttggccagatttctgcaataaacacttgtggtttgcggccatc

SEQ ID NO: 50007 - DNA, 185 bp, Homo sapiens
gtggaaccagatggcacaggcctcacctgcagcctggcacccaatatcatctcacagctctgaggccctgggccagattacttcctccacccctccctatytcacctgcccagccctgtgctggggccctgcaattggaatgttggccagatttctgcaataaacacttgtggtttgcggccatc

SEQ ID NO: 50008 - DNA, 201 bp, Homo sapiens
ggtatgggactagctggcgtgtgcgccctgagacgctcagcgggctatatactcgtcggtggggccggcggtcagtctgcggcagcggcagcaagacggtrcagtgaaggagagtgggcgtctggcggggtccgcagtttcagcagagccgctgcagccatggccccaatcaaggtgggagatgccatcccagcagtggag

SEQ ID NO: 50009 - DNA, 201 bp, Homo sapiens
attcagactctgtgcacatcgaagatgccgaggctgtggagcagctgcgagaagctctgcacgaggccctgctggagtatgaagccggccgggctggcccyggagggggtgctgagcggcggcgggcgggcaggctgctgctcacgctaccgctcctccgccagacagcgggcaaagtgctggcccatttctatggggtga

SEQ ID NO: 50010 - DNA, 201 bp, Homo sapiens
tgagcctctctacatcaaggcagagccggccagccctgacagtccaaagggttcctcggagacagagaccgagcctcctgtggccctggcccctggtccasctcccactcgctgcctcccaggccacaaggaagaggaggatggggagggggctgggcctggcgagcagggcggtgggaagctggtgctcagctccctgcc

SEQ ID NO: 50011 - DNA, 198 bp, Homo sapiens
gcacagtgctgccccctgcagagcaataacactatatttatttttgggtttggccagggaggcgcagggacatggggcaagccagggcccagagcccttgrctgtacagagactctattttaatgtatatttgctgcaaagagaaaccgcttttggttttaaacctttaatgagaaaaaaatatataataccgagctc

SEQ ID NO: 50012 - DNA, 201 bp, Homo sapiens
gggacgtggcctccggctaccactatggtgtggcatcctgtgaggcctgcaaagccttcttcaagaggaccatccaggggagcatcgagtacagctgtccrgcctccaacgagtgtgagatcaccaagcggagacgcaaggcctgccaggcctgccgcttcaccaagtgcctgcgggtgggcatgctcaaggagggagtgc

SEQ ID NO: 50013 - DNA, 201 bp, Homo sapiens
aagctgttcttggagatgctcgaggccatgatggactgaggcaaggggtgggactggtgggggttctggcaggacctgcctagcatggggtcagccccaakggctggggcggagctggggtctgggcagtgccacagcctgctggcagggccagggcaatgccatcagcccctgggaacaggccccacgccctctcctccc

SEQ ID NO: 50014 - DNA, 201 bp, Homo sapiens; identical to SEQ ID NO: 50009

SEQ ID NO: 50015 - DNA, 201 bp, Homo sapiens
aataactccaagcagactccagcccctggacccctggggtggccagggcttccccatcagctcccaacgagcctcctcagggggtaggagagcactgcctytatgccctgcagagcaataacactatatttatttttgggtttggccagggaggcgcagggacatggggcaagccagggcccagagcccttggctgtacag

SEQ ID NO: 50016 - DNA, 201 bp, Homo sapiens; identical to SEQ ID NO: 50010

SEQ ID NO: 50017 - DNA, 201 bp, Homo sapiens
cactgcctctatgccctgcagagcaataacactatatttatttttgggtttggccagggaggcgcagggacatggggcaagccagggcccagagcccttgrctgtacagagactctattttaatgtatatttgctgcaaagagaaaccgcttttggttttaaacctttaatgagaaaaaaatatataataccgagctcaaa

SEQ ID NO: 50018 - DNA, 201 bp, Homo sapiens; identical to SEQ ID NO: 50012

SEQ ID NO: 50019 - DNA, 201 bp, Homo sapiens; identical to SEQ ID NO: 50013

SEQ ID NO: 50020 - DNA, 201 bp, Homo sapiens; identical to SEQ ID NO: 50004

SEQ ID NO: 50021 - DNA, 201 bp, Homo sapiens; identical to SEQ ID NO: 50005

SEQ ID NO: 50022 - DNA, 170 bp, Homo sapiens; identical to SEQ ID NO: 50006

SEQ ID NO: 50023 - DNA, 201 bp, Homo sapiens; identical to SEQ ID NO: 50010

SEQ ID NO: 50024 - DNA, 201 bp, Homo sapiens
gggacgtggcctccggctaccactatggtgtggcatcctgtgaggcctgcaaagccttcttcaagaggaccatccaggggagcatcgagtacagctgtccrgcctccaacgagtgtgagatcaccaagcggagacgcaaggcctgccaggcctgccgcttcaccaagtgcctgcgggtgggcatgctcaaggaggtgcaaa

SEQ ID NO: 50025 - DNA, 185 bp, Homo sapiens; identical to SEQ ID NO: 50007

SEQ ID NO: 50026 - DNA, 201 bp, Homo sapiens; identical to SEQ ID NO: 50008

SEQ ID NO: 50027 - DNA, 201 bp, Homo sapiens; identical to SEQ ID NO: 50009

SEQ ID NO: 50028 - DNA, 201 bp, Homo sapiens; identical to SEQ ID NO: 50015

SEQ ID NO: 50029 - DNA, 201 bp, Homo sapiens; identical to SEQ ID NO: 50010

SEQ ID NO: 50030 - DNA, 201 bp, Homo sapiens; identical to SEQ ID NO: 50017

SEQ ID NO: 50031 - DNA, 201 bp, Homo sapiens
gggacgtggcctccggctaccactatggtgtggcatcctgtgaggcctgcaaagccttcttcaagaggaccatccaggggagcatcgagtacagctgtccrgcctccaacgagtgtgagatcaccaagcggagacgcaaggcctgccaggcctgccgcttcaccaagtgcctgcgggagtgcgcctggaccgcgtccgggg

SEQ ID NO: 50032 - DNA, 201 bp, Homo sapiens; identical to SEQ ID NO: 50013

SEQ ID NO: 50033 - DNA, 201 bp, Homo sapiens; identical to SEQ ID NO: 50010

SEQ ID NO: 50034 - DNA, 201 bp, Homo sapiens
gggacgtggcctccggctaccactatggtgtggcatcctgtgaggcctgcaaagccttcttcaagaggaccatccaggggagcatcgagtacagctgtccrgcctccaacgagtgtgagatcaccaagcggagacgcaaggcctgccaggcctgccgcttcaccaagtgcctgcgggtgggcatgctcaaggagggtgagc

SEQ ID NO: 50035 - DNA, 201 bp, Homo sapiens; identical to SEQ ID NO: 50004

SEQ ID NO: 50036 - DNA, 201 bp, Homo sapiens; identical to SEQ ID NO: 50005

SEQ ID NO: 50037 - DNA, 170 bp, Homo sapiens; identical to SEQ ID NO: 50006

SEQ ID NO: 50038 - DNA, 185 bp, Homo sapiens; identical to SEQ ID NO: 50007

SEQ ID NO: 50039 - DNA, 201 bp, Homo sapiens; identical to SEQ ID NO: 50008

SEQ ID NO: 50040 - DNA, 201 bp, Homo sapiens; identical to SEQ ID NO: 50009

SEQ ID NO: 50041 - DNA, 201 bp, Homo sapiens; identical to SEQ ID NO: 50010

SEQ ID NO: 50042 - DNA, 198 bp, Homo sapiens; identical to SEQ ID NO: 50011

SEQ ID NO: 50043 - DNA, 201 bp, Homo sapiens; identical to SEQ ID NO: 50012

SEQ ID NO: 50044 - DNA, 201 bp, Homo sapiens; identical to SEQ ID NO: 50013

SEQ ID NO: 50045 - DNA, 201 bp, Homo sapiens
cccaagaagacatggccattgactatgagtcgttctatgtttacgcacagctgcctgtcaccccagatgtcctcatcatcccgtcagagctgaggtacttygtgaaggatgtcctcggctgtgtctgtgtgaaccctgggcgccttaccaaagggcaggtgggaggcaccttcgcccgactctaccttaggaggccggcag

SEQ ID NO: 50046 - DNA, 201 bp, Homo sapiens
aggtgaacagttgggtgggaaaggagagaggagccagccagggaggggcagctgcagtgaccaggcccagcagggaggacttgtgcagccgggcctgcctstgagtggtgcctctcctggaaggaagctcttgcttctcagtccatgctccgtgtccagaagtaagccagctgtggatcccgcccactcagaaaaggcgag

SEQ ID NO: 50047 - DNA, 201 bp, Homo sapiens
ggatgtcctcggctgtgtctgtgtgaaccctgggcgccttaccaaagggcaggtgggaggcaccttcgcccgactctaccttaggaggccggcagcggacrgggcagagaggcagagcccatgcattgctgtgcaggtcgtcaggatctgaggcttctgtcctctgctgttctctgctgtgtgggcccttaaagtcttagc

SEQ ID NO: 50048 - DNA, 201 bp, Homo sapiens
tgagccggggaaagcaaggggaaggtttggggttggctcccggtttcgcgcatgcgtgcactgcacaaaccatttggcgggtttttccggccactcagttmtgccaccgtcactgagaagctcagcggtagcttttgggaagcaggacgttctcaccaggagagcgtcctctcgagatttctgctccctccattcagggcg

SEQ ID NO: 50049 - DNA, 201 bp, Homo sapiens
gtctgtgtgaaccctgggcgccttaccaaagggcaggtgggaggcaccttcgcccgactctaccttaggaggccggcagcggacggggcagagaggcagarcccatgcattgctgtgcaggtcgtcaggatctgaggcttctgtcctctgctgttctctgctgtgtgggcccttaaagtcttagccaagagccaagacata

SEQ ID NO: 50050 - DNA, 201 bp, Homo sapiens
cttcgcccgactctaccttaggaggccggcagcggacggggcagagaggcagagcccatgcattgctgtgcaggtcgtcaggatctgaggcttctgtcctytgctgttctctgctgtgtgggcccttaaagtcttagccaagagccaagacatagccctgtgacaaggtgaacagttgggtgggaaaggagagaggagcca

SEQ ID NO: 50051 - DNA, 201 bp, Homo sapiens
gccaggcgcgtgcgtagagacgcccacacgcccgctgatgcgcacgcgccctgggccgcgcgtgcgcgcgtggggttccggaatgagccggggaaagcaargggaaggtttggggttggctcccggtttcgcgcatgcgtgcactgcacaaaccatttggcgggtttttccggccactcagttctgccaccgtcactgaga

SEQ ID NO: 50052 - DNA, 201 bp, Homo sapiens
gctgccccaggagcagcacgaggaagagatggcagcagaggctggggaagccgtggcgtcccccatggacgacgggtttctgagcctggattcgccctccyatgtcccgtacagggacagaacagaatgggctgatacagatccagtgccgcagaatgatggccccaatcccgtggtccagatcatttatagtgacaaatt

SEQ ID NO: 50053 - DNA, 201 bp, Homo sapiens; identical to SEQ ID NO: 50052

SEQ ID NO: 50054 - DNA, 122 bp, Homo sapiens
gacagcttgaggttgggttttwatttttttatttgtatagtacaatctctgtggtagcagaaatatatgcacaaaaaacaattcaaataagagttcagagtaaaaaaaagtcagctaagact

SEQ ID NO: 50055 - DNA, 201 bp, Homo sapiens
gccccaggcagaggccaccttgcagcagtgactggcgactttgcagtacatctctgctcacttgctgtcccttgggagtgagcaccgtctataacacatcrccatctacaaaagcctggtcacagtgttcaccagcacattcatgaaaatttaaatcaacattaaccaaagtacctgcaagtaacactgcttactcttgct

SEQ ID NO: 50056 - DNA, 201 bp, Homo sapiens
cccgagacggcgggccctgcgcaggccgccctattccgcgccctcagggcgtcagtatccgcctgaggccggataccccagctgggcccggatgccgtcgmtgggcccggagcatcctcggcgctgccctcccagagccccgcagaggctgaggtggcgcggggggcgggcccggctccgcgagaagcagcggcagcgagg

SEQ ID NO: 50057 - DNA, 201 bp, Homo sapiens
ttggggctggggcctccggggaggttccggtaggggcgttggagaggccgctctttttgcaaggcccgagacggcgggccctgcgcaggccgccctattcygcgccctcagggcgtcagtatccgcctgaggccggataccccagctgggcccggatgccgtcgatgggcccggagcatcctcggcgctgccctcccagag

SEQ ID NO: 50058 - DNA, 162 bp, Homo sapiens
agtctgcctccctcggcgggccgggtctccagggaggacctgatttttcttcacccatagtyagggaggcgcaatcgccctggctttggggctggggcctccggggaggttccggtaggggcgttggagaggccgctctttttgcaaggcccgagacggcgg

SEQ ID NO: 50059 - DNA, 201 bp, Homo sapiens; identical to SEQ ID NO: 50056

SEQ ID NO: 50060 - DNA, 201 bp, Homo sapiens; identical to SEQ ID NO: 50057

SEQ ID NO: 50061 - DNA, 142 bp, Homo sapiens
ctccgcaggaccccgaccagcgacacgatggcttctgggcaatacagcacgtctacggtgaaagcttcaggttactgaaagggaccagcggacagttccakgtcatgctgacctcagcagaagggcgaggccagagaggcag

SEQ ID NO: 50062 - DNA, 162 bp, Homo sapiens; identical to SEQ ID NO: 50058

SEQ ID NO: 50063 - DNA, 188 bp, Homo sapiens
tctctgtgaaggcaaagggcctctgagggagtattacagtcgcctcatccaccagaagcatttccagcacatccaggtctgcaccccytggctggagggccgaggactacccccgcttctagggtcggtggacctgggtgtctgtctggacacatcctccagtggcctggacctgcccatgaaggtgg

SEQ ID NO: 50064 - DNA, 201 bp, Homo sapiens
cgtcaccaatgacagaaccgcatctcaagggcagtggggccgtgcctgggaggtggactggttttcactggcgagcgtcatcttcctactgctgttcgccyccttcatcgtctactacttcatcatggcttgtgaccaatacagctgcgccctgaccggccctgtggtggacatcgtcaccggacatgctcggctctcgga

SEQ ID NO: 50065 - DNA, 201 bp, Homo sapiens
gcttgtgaccaatacagctgcgccctgaccggccctgtggtggacatcgtcaccggacatgctcggctctcggacatctgggccaagactccacctataaygaggaaagccgcccagctctataccttgtgggtcaccttccaggtgcttctgtacacgtctctccctgacttctgccataagtttctacccggctacgta

SEQ ID NO: 50066 - DNA, 201 bp, Homo sapiens
gcccaaggtcatcgagtgctcctacacatccgccgatgggcagaggcaccacagcaagctgctggtgtcgggcttctggggcgtggcccgccacttcaacyacgtcggcgacctgatgggcagcctggcctactgcctggcctgtggcggcggccacctgctgccctacttctacatcatctacatggccatcctgctgac

SEQ ID NO: 50067 - DNA, 201 bp, Homo sapiens
ggtcatcgagtgctcctacacatccgccgatgggcagaggcaccacagcaagctgctggtgtcgggcttctggggcgtggcccgccacttcaactacgtcvgcgacctgatgggcagcctggcctactgcctggcctgtggcggcggccacctgctgccctacttctacatcatctacatggccatcctgctgacccaccg

SEQ ID NO: 50068 - DNA, 201 bp, Homo sapiens
cggcgacctgatgggcagcctggcctactgcctggcctgtggcggcggccacctgctgccctacttctacatcatctacatggccatcctgctgacccacygctgcctccgggacgagcaccgctgcgccagcaagtacggccgggactgggagcgctacaccgccgcagtgccttaccgcctgctgcctggaatcttcta

SEQ ID NO: 50069 - DNA, 201 bp, Homo sapiens
atgggcagcctggcctactgcctggcctgtggcggcggccacctgctgccctacttctacatcatctacatggccatcctgctgacccaccgctgcctccrggacgagcaccgctgcgccagcaagtacggccgggactgggagcgctacaccgccgcagtgccttaccgcctgctgcctggaatcttctaagggcacgcc

SEQ ID NO: 50070 - DNA, 201 bp, Homo sapiens
cagcctggcctactgcctggcctgtggcggcggccacctgctgccctacttctacatcatctacatggccatcctgctgacccaccgctgcctccgggacvagcaccgctgcgccagcaagtacggccgggactgggagcgctacaccgccgcagtgccttaccgcctgctgcctggaatcttctaagggcacgccctagg

SEQ ID NO: 50071 - DNA, 201 bp, Homo sapiens
ccctgtgagcgcccaccctctcgaaagaattttctgcttgccctgtgactgtgcagactctggctcgagcaacccggggaacttcaccctcaggggcctcycacaccttctccagcgaggaggtctcagtcccagcctcgggagggcacctccttttctgtgctttcttccctgaggcattcttcctcatccctagggtgt

SEQ ID NO: 50072 - DNA, 201 bp, Homo sapiens
atggccatcctgctgacccaccgctgcctccgggacgagcaccgctgcgccagcaagtacggccgggactgggagcgctacaccgccgcagtgccttaccscctgctgcctggaatcttctaagggcacgccctagggagaagccctgtggggctgtcaagagcgtgttctgccaggtccatgggggctggcatcccagct

SEQ ID NO: 50073 - DNA, 201 bp, Homo sapiens
atctacatggccatcctgctgacccaccgctgcctccgggacgagcaccgctgcgccagcaagtacggccgggactgggagcgctacaccgccgcagtgcyttaccgcctgctgcctggaatcttctaagggcacgccctagggagaagccctgtggggctgtcaagagcgtgttctgccaggtccatgggggctggcatc

SEQ ID NO: 50074 - DNA, 201 bp, Homo sapiens
gccctagggagaagccctgtggggctgtcaagagcgtgttctgccaggtccatgggggctggcatcccagctccaactcgaggagcctcagtttcctcatytgtaaactggagagagcccagcacttggcaggtgtccagtacctaatcacgctctgttccttgcttttgccttcaagggaattccgagtgtccagcactg

SEQ ID NO: 50075 - DNA, 201 bp, Homo sapiens
tggggcgactgtgtctggctgccttatctttacacgctgcagggtctgtacttggtgtaccaccccgtgcagctgtccaccccgcacgccgtgggcgtccygctgctgggcctggtgggctactacatcttccgggtggccaaccaccagaaggacctgttccgccgcacggatgggcgctgcctcatctggggcaggaag

SEQ ID NO: 50076 - DNA, 201 bp, Homo sapiens
ctctccctgacttctgccataagtttctacccggctacgtaggaggcatccaggagggggccgtgactcctgcaggggttgtgaacaagtatcagatcaayggcctgcaagcctggctcctcacgcacctgctctggtttgcaaacgctcatctcctgtcctggttctcgcccaccatcatcttcgacaactggatcccac

SEQ ID NO: 50077 - DNA, 201 bp, Homo sapiens
tggggccgtgcctgggaggtggactggttttcactggcgagcgtcatcttcctactgctgttcgcccccttcatcgtctactacttcatcatggcttgtgwccaatacagctgcgccctgaccggccctgtggtggacatcgtcaccggacatgctcggctctcggacatctgggccaagactccacctataacgaggaaa

SEQ ID NO: 50078 - DNA, 201 bp, Homo sapiens
caagggcagtggggccgtgcctgggaggtggactggttttcactggcgagcgtcatcttcctactgctgttcgcccccttcatcgtctactacttcatcakggcttgtgaccaatacagctgcgccctgaccggccctgtggtggacatcgtcaccggacatgctcggctctcggacatctgggccaagactccacctata

SEQ ID NO: 50079 - DNA, 201 bp, Homo sapiens
aagcctggctcctcacgcacctgctctggtttgcaaacgctcatctcctgtcctggttctcgcccaccatcatcttcgacaactggatcccactgctgtgstgcgccaacatccttggctatgccgtctccaccttcgccatggtcaagggctacttcttccccaccagcgccagagactgcaaattcacaggcaatttct

SEQ ID NO: 50080 - DNA, 201 bp, Homo sapiens
aacggcctgcaagcctggctcctcacgcacctgctctggtttgcaaacgctcatctcctgtcctggttctcgcccaccatcatcttcgacaactggatccyactgctgtggtgcgccaacatccttggctatgccgtctccaccttcgccatggtcaagggctacttcttccccaccagcgccagagactgcaaattcaca

SEQ ID NO: 50081 - DNA, 201 bp, Homo sapiens
atcaacggcctgcaagcctggctcctcacgcacctgctctggtttgcaaacgctcatctcctgtcctggttctcgcccaccatcatcttcgacaactggawcccactgctgtggtgcgccaacatccttggctatgccgtctccaccttcgccatggtcaagggctacttcttccccaccagcgccagagactgcaaattc

SEQ ID NO: 50082 - DNA, 201 bp, Homo sapiens
caagcctggctcctcacgcacctgctctggtttgcaaacgctcatctcctgtcctggttctcgcccaccatcatcttcgacaactggatcccactgctgtkgtgcgccaacatccttggctatgccgtctccaccttcgccatggtcaagggctacttcttccccaccagcgccagagactgcaaattcacaggcaatttc

SEQ ID NO: 50083 - DNA, 201 bp, Homo sapiens
tgccataagtttctacccggctacgtaggaggcatccaggagggggccgtgactcctgcaggggttgtgaacaagtatcagatcaacggcctgcaagcctrgctcctcacgcacctgctctggtttgcaaacgctcatctcctgtcctggttctcgcccaccatcatcttcgacaactggatcccactgctgtggtgcgcc

SEQ ID NO: 50084 - DNA, 201 bp, Homo sapiens
gccataagtttctacccggctacgtaggaggcatccaggagggggccgtgactcctgcaggggttgtgaacaagtatcagatcaacggcctgcaagcctgrctcctcacgcacctgctctggtttgcaaacgctcatctcctgtcctggttctcgcccaccatcatcttcgacaactggatcccactgctgtggtgcgcca

SEQ ID NO: 50085 - DNA, 201 bp, Homo sapiens
tttctacccggctacgtaggaggcatccaggagggggccgtgactcctgcaggggttgtgaacaagtatcagatcaacggcctgcaagcctggctcctcabgcacctgctctggtttgcaaacgctcatctcctgtcctggttctcgcccaccatcatcttcgacaactggatcccactgctgtggtgcgccaacatcctt

SEQ ID NO: 50086 - DNA, 201 bp, Homo sapiens
ggctacgtaggaggcatccaggagggggccgtgactcctgcaggggttgtgaacaagtatcagatcaacggcctgcaagcctggctcctcacgcacctgcyctggtttgcaaacgctcatctcctgtcctggttctcgcccaccatcatcttcgacaactggatcccactgctgtggtgcgccaacatccttggctatgcc

SEQ ID NO: 50087 - DNA, 201 bp, Homo sapiens
caggcaatttcttttacaactacatgatgggcatcgagtttaaccctcggatcgggaagtggtttgacttcaagctgttcttcaatgggcgccccgggatygtcgcctggaccctcatcaacctgtccttcgcagcgaagcagcgggagctccacagccatgtgaccaatgccatggtcctggtcaacgtcctgcaggcca

SEQ ID NO: 50088 - DNA, 121 bp, Homo sapiens
cccctgccctgcgggtgactycgacccctggctagagggtaggcggcgtggagcagcgcgcgcaagcgaggccaggggaaggtgggcgcaggactttagccggttgagaaggatcaagcag

SEQ ID NO: 50089 - DNA, 201 bp, Homo sapiens
ctgcaaattcacaggcaatttcttttacaactacatgatgggcatcgagtttaaccctcggatcgggaagtggtttgacttcaagctgttcttcaatgggygccccgggatcgtcgcctggaccctcatcaacctgtccttcgcagcgaagcagcgggagctccacagccatgtgaccaatgccatggtcctggtcaacgt

SEQ ID NO: 50090 - DNA, 201 bp, Homo sapiens
tcagatcaacggcctgcaagcctggctcctcacgcacctgctctggtttgcaaacgctcatctcctgtcctggttctcgcccaccatcatcttcgacaacyggatcccactgctgtggtgcgccaacatccttggctatgccgtctccaccttcgccatggtcaagggctacttcttccccaccagcgccagagactgcaa

SEQ ID NO: 50091 - DNA, 201 bp, Homo sapiens
cagcaagctgctggtgtcgggcttctggggcgtggcccgccacttcaactacgtcggcgacctgatgggcagcctggcctactgcctggcctgtggcggcrgccacctgctgccctacttctacatcatctacatggccatcctgctgacccaccgctgcctccgggacgagcaccgctgcgccagcaagtacggccggga

SEQ ID NO: 50092 - DNA, 201 bp, Homo sapiens
gacctgatgggcagcctggcctactgcctggcctgtggcggcggccacctgctgccctacttctacatcatctacatggccatcctgctgacccaccgctrcctccgggacgagcaccgctgcgccagcaagtacggccgggactgggagcgctacaccgccgcagtgccttaccgcctgctgcctggaatcttctaaggg

SEQ ID NO: 50093 - DNA, 201 bp, Homo sapiens
gcctggctcctcacgcacctgctctggtttgcaaacgctcatctcctgtcctggttctcgcccaccatcatcttcgacaactggatcccactgctgtggtrcgccaacatccttggctatgccgtctccaccttcgccatggtcaagggctacttcttccccaccagcgccagagactgcaaattcacaggcaatttcttt

SEQ ID NO: 50094 - DNA, 201 bp, Homo sapiens
gcatcgagtttaaccctcggatcgggaagtggtttgacttcaagctgttcttcaatgggcgccccgggatcgtcgcctggaccctcatcaacctgtccttmgcagcgaagcagcgggagctccacagccatgtgaccaatgccatggtcctggtcaacgtcctgcaggccatctacgtgattgacttcttctggaacgaaa

SEQ ID NO: 50095 - DNA, 201 bp, Homo sapiens
tcttcctactgctgttcgcccccttcatcgtctactacttcatcatggcttgtgaccaatacagctgcgccctgaccggccctgtggtggacatcgtcacyggacatgctcggctctcggacatctgggccaagactccacctataacgaggaaagccgcccagctctataccttgtgggtcaccttccaggtgcttctgt

SEQ ID NO: 50096 - DNA, 201 bp, Homo sapiens
caagtatcagatcaacggcctgcaagcctggctcctcacgcacctgctctggtttgcaaacgctcatctcctgtcctggttctcgcccaccatcatcttcsacaactggatcccactgctgtggtgcgccaacatccttggctatgccgtctccaccttcgccatggtcaagggctacttcttccccaccagcgccagaga

SEQ ID NO: 50097 - DNA, 201 bp, Homo sapiens
cctgcaggggttgtgaacaagtatcagatcaacggcctgcaagcctggctcctcacgcacctgctctggtttgcaaacgctcatctcctgtcctggttctygcccaccatcatcttcgacaactggatcccactgctgtggtgcgccaacatccttggctatgccgtctccaccttcgccatggtcaagggctacttcttc

SEQ ID NO: 50098 - DNA, 201 bp, Homo sapiens
gactcctgcaggggttgtgaacaagtatcagatcaacggcctgcaagcctggctcctcacgcacctgctctggtttgcaaacgctcatctcctgtcctggwtctcgcccaccatcatcttcgacaactggatcccactgctgtggtgcgccaacatccttggctatgccgtctccaccttcgccatggtcaagggctactt

SEQ ID NO: 50099 - DNA, 201 bp, Homo sapiens
attcacaggcaatttcttttacaactacatgatgggcatcgagtttaaccctcggatcgggaagtggtttgacttcaagctgttcttcaatgggcgccccrggatcgtcgcctggaccctcatcaacctgtccttcgcagcgaagcagcgggagctccacagccatgtgaccaatgccatggtcctggtcaacgtcctgca

SEQ ID NO: 50100 - DNA, 201 bp, Homo sapiens
aatttcttttacaactacatgatgggcatcgagtttaaccctcggatcgggaagtggtttgacttcaagctgttcttcaatgggcgccccgggatcgtcgyctggaccctcatcaacctgtccttcgcagcgaagcagcgggagctccacagccatgtgaccaatgccatggtcctggtcaacgtcctgcaggccatctac

SEQ ID NO: 50101 - DNA, 201 bp, Homo sapiens
tcttttacaactacatgatgggcatcgagtttaaccctcggatcgggaagtggtttgacttcaagctgttcttcaatgggcgccccgggatcgtcgcctgkaccctcatcaacctgtccttcgcagcgaagcagcgggagctccacagccatgtgaccaatgccatggtcctggtcaacgtcctgcaggccatctacgtga

SEQ ID NO: 50102 - DNA, 201 bp, Homo sapiens
tggccaaccaccagaaggacctgttccgccgcacggatgggcgctgcctcatctggggcaggaagcccaaggtcatcgagtgctcctacacatccgccgaygggcagaggcaccacagcaagctgctggtgtcgggcttctggggcgtggcccgccacttcaactacgtcggcgacctgatgggcagcctggcctactgcc

SEQ ID NO: 50103 - DNA, 201 bp, Homo sapiens
tttggagcacaggtgtctagaaacttttaaggggccggttcaagaaggaaaagttcccttctgctgtgaaactatttggcaagaggctggagggcccaatrgctgcaaaatcgcaacccaacattcccaaagccaagagtctagatggcgtcaccaatgacagaaccgcatctcaagggcagtggggccgtgcctgggagg

SEQ ID NO: 50104 - DNA, 201 bp, Homo sapiens
acagcaagctgctggtgtcgggcttctggggcgtggcccgccacttcaactacgtcggcgacctgatgggcagcctggcctactgcctggcctgtggcggyggccacctgctgccctacttctacatcatctacatggccatcctgctgacccaccgctgcctccgggacgagcaccgctgcgccagcaagtacggccggg

SEQ ID NO: 50105 - DNA, 201 bp, Homo sapiens
aatcgcaacccaacattcccaaagccaagagtctagatggcgtcaccaatgacagaaccgcatctcaagggcagtggggccgtgcctgggaggtggactgrttttcactggcgagcgtcatcttcctactgctgttcgcccccttcatcgtctactacttcatcatggcttgtgaccaatacagctgcgccctgaccggcc

SEQ ID NO: 50106 - DNA, 201 bp, Homo sapiens
tcccagcactggctgtggcctttcaggtgtaggcaggtgggctctgcttcccgattccctgtgagcgcccaccctctcgaaagaattttctgcttgccctrtgactgtgcagactctggctcgagcaacccggggaacttcaccctcaggggcctcccacaccttctccagcgaggaggtctcagtcccagcctcgggagg

SEQ ID NO: 50107 - DNA, 201 bp, Homo sapiens
gcctactgcctggcctgtggcggcggccacctgctgccctacttctacatcatctacatggccatcctgctgacccaccgctgcctccgggacgagcacckctgcgccagcaagtacggccgggactgggagcgctacaccgccgcagtgccttaccgcctgctgcctggaatcttctaagggcacgccctagggagaagc

SEQ ID NO: 50108 - DNA, 201 bp, Homo sapiens
acatcgtcaccggacatgctcggctctcggacatctgggccaagactccacctataacgaggaaagccgcccagctctataccttgtgggtcaccttccasgtgcttctgtacacgtctctccctgacttctgccataagtttctacccggctacgtaggaggcatccaggagggggccgtgactcctgcaggggttgtga

SEQ ID NO: 50109 - DNA, 201 bp, Homo sapiens
gtcaccggacatgctcggctctcggacatctgggccaagactccacctataacgaggaaagccgcccagctctataccttgtgggtcaccttccaggtgcytctgtacacgtctctccctgacttctgccataagtttctacccggctacgtaggaggcatccaggagggggccgtgactcctgcaggggttgtgaacaag

SEQ ID NO: 50110 - DNA, 201 bp, Homo sapiens
ctggctgtggcctttcaggtgtaggcaggtgggctctgcttcccgattccctgtgagcgcccaccctctcgaaagaattttctgcttgccctgtgactgtkcagactctggctcgagcaacccggggaacttcaccctcaggggcctcccacaccttctccagcgaggaggtctcagtcccagcctcgggagggcacctcc

SEQ ID NO: 50111 - DNA, 201 bp, Homo sapiens
gccctacttctacatcatctacatggccatcctgctgacccaccgctgcctccgggacgagcaccgctgcgccagcaagtacggccgggactgggagcgcyacaccgccgcagtgccttaccgcctgctgcctggaatcttctaagggcacgccctagggagaagccctgtggggctgtcaagagcgtgttctgccaggtc

SEQ ID NO: 50112 - DNA, 201 bp, Homo sapiens
ggcgacctgatgggcagcctggcctactgcctggcctgtggcggcggccacctgctgccctacttctacatcatctacatggccatcctgctgacccaccrctgcctccgggacgagcaccgctgcgccagcaagtacggccgggactgggagcgctacaccgccgcagtgccttaccgcctgctgcctggaatcttctaa

SEQ ID NO: 50113 - DNA, 201 bp, Homo sapiens
tttcttttacaactacatgatgggcatcgagtttaaccctcggatcgggaagtggtttgacttcaagctgttcttcaatgggcgccccgggatcgtcgccyggaccctcatcaacctgtccttcgcagcgaagcagcgggagctccacagccatgtgaccaatgccatggtcctggtcaacgtcctgcaggccatctacgt

SEQ ID NO: 50114 - DNA, 201 bp, Homo sapiens
gggtctgtacttggtgtaccaccccgtgcagctgtccaccccgcacgccgtgggcgtcctgctgctgggcctggtgggctactacatcttccgggtggccraccaccagaaggacctgttccgccgcacggatgggcgctgcctcatctggggcaggaagcccaaggtcatcgagtgctcctacacatccgccgatgggca

SEQ ID NO: 50115 - DNA, 201 bp, Homo sapiens
agctgtccaccccgcacgccgtgggcgtcctgctgctgggcctggtgggctactacatcttccgggtggccaaccaccagaaggacctgttccgccgcacrgatgggcgctgcctcatctggggcaggaagcccaaggtcatcgagtgctcctacacatccgccgatgggcagaggcaccacagcaagctgctggtgtcgg

SEQ ID NO: 50116 - DNA, 201 bp, Homo sapiens
aacgtcctgcaggccatctacgtgattgacttcttctggaacgaaacctggtacctgaagaccattgacatctgccatgaccacttcgggtggtacctggrctggggcgactgtgtctggctgccttatctttacacgctgcagggtctgtacttggtgtaccaccccgtgcagctgtccaccccgcacgccgtgggcgtc

SEQ ID NO: 50117 - DNA, 201 bp, Homo sapiens
ccatggtcctggtcaacgtcctgcaggccatctacgtgattgacttcttctggaacgaaacctggtacctgaagaccattgacatctgccatgaccacttsgggtggtacctgggctggggcgactgtgtctggctgccttatctttacacgctgcagggtctgtacttggtgtaccaccccgtgcagctgtccaccccgc

SEQ ID NO: 50118 - DNA, 201 bp, Homo sapiens
gctgttcttcaatgggcgccccgggatcgtcgcctggaccctcatcaacctgtccttcgcagcgaagcagcgggagctccacagccatgtgaccaatgccrtggtcctggtcaacgtcctgcaggccatctacgtgattgacttcttctggaacgaaacctggtacctgaagaccattgacatctgccatgaccacttcgg

SEQ ID NO: 50119 - DNA, 201 bp, Homo sapiens
gcctggaccctcatcaacctgtccttcgcagcgaagcagcgggagctccacagccatgtgaccaatgccatggtcctggtcaacgtcctgcaggccatctrcgtgattgacttcttctggaacgaaacctggtacctgaagaccattgacatctgccatgaccacttcgggtggtacctgggctggggcgactgtgtctgg

SEQ ID NO: 50120 - DNA, 201 bp, Homo sapiens
cacgctgcagggtctgtacttggtgtaccaccccgtgcagctgtccaccccgcacgccgtgggcgtcctgctgctgggcctggtgggctactacatcttcygggtggccaaccaccagaaggacctgttccgccgcacggatgggcgctgcctcatctggggcaggaagcccaaggtcatcgagtgctcctacacatccgc

SEQ ID NO: 50121 - DNA, 201 bp, Homo sapiens
gaagcccaaggtcatcgagtgctcctacacatccgccgatgggcagaggcaccacagcaagctgctggtgtcgggcttctggggcgtggcccgccacttcwactacgtcggcgacctgatgggcagcctggcctactgcctggcctgtggcggcggccacctgctgccctacttctacatcatctacatggccatcctgct

SEQ ID NO: 50122 - DNA, 201 bp, Homo sapiens
ctggaccctcatcaacctgtccttcgcagcgaagcagcgggagctccacagccatgtgaccaatgccatggtcctggtcaacgtcctgcaggccatctacrtgattgacttcttctggaacgaaacctggtacctgaagaccattgacatctgccatgaccacttcgggtggtacctgggctggggcgactgtgtctggct

SEQ ID NO: 50123 - DNA, 201 bp, Homo sapiens
acgctgcagggtctgtacttggtgtaccaccccgtgcagctgtccaccccgcacgccgtgggcgtcctgctgctgggcctggtgggctactacatcttccrggtggccaaccaccagaaggacctgttccgccgcacggatgggcgctgcctcatctggggcaggaagcccaaggtcatcgagtgctcctacacatccgcc

SEQ ID NO: 50124 - DNA, 201 bp, Homo sapiens
tcaacctgtccttcgcagcgaagcagcgggagctccacagccatgtgaccaatgccatggtcctggtcaacgtcctgcaggccatctacgtgattgacttmttctggaacgaaacctggtacctgaagaccattgacatctgccatgaccacttcgggtggtacctgggctggggcgactgtgtctggctgccttatcttt

SEQ ID NO: 50125 - DNA, 201 bp, Homo sapiens
ctgcagggtctgtacttggtgtaccaccccgtgcagctgtccaccccgcacgccgtgggcgtcctgctgctgggcctggtgggctactacatcttccgggyggccaaccaccagaaggacctgttccgccgcacggatgggcgctgcctcatctggggcaggaagcccaaggtcatcgagtgctcctacacatccgccgat

SEQ ID NO: 50126 - DNA, 201 bp, Homo sapiens
cttctggaacgaaacctggtacctgaagaccattgacatctgccatgaccacttcgggtggtacctgggctggggcgactgtgtctggctgccttatcttwacacgctgcagggtctgtacttggtgtaccaccccgtgcagctgtccaccccgcacgccgtgggcgtcctgctgctgggcctggtgggctactacatctt

SEQ ID NO: 50127 - DNA, 201 bp, Homo sapiens
ccccgtgcagctgtccaccccgcacgccgtgggcgtcctgctgctgggcctggtgggctactacatcttccgggtggccaaccaccagaaggacctgttcygccgcacggatgggcgctgcctcatctggggcaggaagcccaaggtcatcgagtgctcctacacatccgccgatgggcagaggcaccacagcaagctgct

SEQ ID NO: 50128 - DNA, 201 bp, Homo sapiens
tggaacgaaacctggtacctgaagaccattgacatctgccatgaccacttcgggtggtacctgggctggggcgactgtgtctggctgccttatctttacaygctgcagggtctgtacttggtgtaccaccccgtgcagctgtccaccccgcacgccgtgggcgtcctgctgctgggcctggtgggctactacatcttccgg

SEQ ID NO: 50129 - DNA, 201 bp, Homo sapiens
gggctactacatcttccgggtggccaaccaccagaaggacctgttccgccgcacggatgggcgctgcctcatctggggcaggaagcccaaggtcatcgaghgctcctacacatccgccgatgggcagaggcaccacagcaagctgctggtgtcgggcttctggggcgtggcccgccacttcaactacgtcggcgacctgat

SEQ ID NO: 50130 - DNA, 201 bp, Homo sapiens
gtacctgaagaccattgacatctgccatgaccacttcgggtggtacctgggctggggcgactgtgtctggctgccttatctttacacgctgcagggtctgyacttggtgtaccaccccgtgcagctgtccaccccgcacgccgtgggcgtcctgctgctgggcctggtgggctactacatcttccgggtggccaaccacca

SEQ ID NO: 50131 - DNA, 201 bp, Homo sapiens
gaagaccattgacatctgccatgaccacttcgggtggtacctgggctggggcgactgtgtctggctgccttatctttacacgctgcagggtctgtacttgktgtaccaccccgtgcagctgtccaccccgcacgccgtgggcgtcctgctgctgggcctggtgggctactacatcttccgggtggccaaccaccagaagga

SEQ ID NO: 50132 - DNA, 201 bp, Homo sapiens
ggctactacatcttccgggtggccaaccaccagaaggacctgttccgccgcacggatgggcgctgcctcatctggggcaggaagcccaaggtcatcgagtvctcctacacatccgccgatgggcagaggcaccacagcaagctgctggtgtcgggcttctggggcgtggcccgccacttcaactacgtcggcgacctgatg

SEQ ID NO: 50133 - DNA, 201 bp, Homo sapiens
acggatgggcgctgcctcatctggggcaggaagcccaaggtcatcgagtgctcctacacatccgccgatgggcagaggcaccacagcaagctgctggtgtygggcttctggggcgtggcccgccacttcaactacgtcggcgacctgatgggcagcctggcctactgcctggcctgtggcggcggccacctgctgccctac

SEQ ID NO: 50134 - DNA, 201 bp, Homo sapiens
ctggggcaggaagcccaaggtcatcgagtgctcctacacatccgccgatgggcagaggcaccacagcaagctgctggtgtcgggcttctggggcgtggcchgccacttcaactacgtcggcgacctgatgggcagcctggcctactgcctggcctgtggcggcggccacctgctgccctacttctacatcatctacatggc

SEQ ID NO: 50135 - DNA, 201 bp, Homo sapiens
gggagaaaggggctttcatgtcgtttccttcctgctcctgctgcacagctgccaggagtgctctgcctggagtctgcagacctcagagaggtcccagcacyggctgtggcctttcaggtgtaggcaggtgggctctgcttcccgattccctgtgagcgcccaccctctcgaaagaattttctgcttgccctgtgactgtgc

SEQ ID NO: 50136 - DNA, 201 bp, Homo sapiens
ctacactctgcccacactggtgagcaggaggtcttcccacgccctgtcattaggctgcatttactcttgctaaatccccctcccctgcctgctctgcagtygtgggtggggcccgtgcgccgtttctccttggtagcgtgcacggtgttgaactgggacactggggagaaaggggctttcatgtcgtttccttcctgctcc

SEQ ID NO: 50137 - DNA, 201 bp, Homo sapiens
actgccgtattgccagcacagacggattttctctaatcagtgtccctggggcaggaggatgacccagtcacctttactagtcctttggagacaatttacckgtattaggagcccaggccacgctacactctgcccacactggtgagcaggaggtcttcccacgccctgtcattaggctgcatttactcttgctaaatcccc

SEQ ID NO: 50138 - DNA, 201 bp, Homo sapiens
actggttttcactggcgagcgtcatcttcctactgctgttcgcccccttcatcgtctactacttcatcatggcttgtgaccaatacagctgcgccctgacyggccctgtggtggacatcgtcaccggacatgctcggctctcggacatctgggccaagactccacctataacgaggaaagccgcccagctctataccttgt

SEQ ID NO: 50139 - DNA, 201 bp, Homo sapiens
gccgtgcctgggaggtggactggttttcactggcgagcgtcatcttcctactgctgttcgcccccttcatcgtctactacttcatcatggcttgtgaccartacagctgcgccctgaccggccctgtggtggacatcgtcaccggacatgctcggctctcggacatctgggccaagactccacctataacgaggaaagccg

SEQ ID NO: 50140 - DNA, 201 bp, Homo sapiens
tacatgatgggcatcgagtttaaccctcggatcgggaagtggtttgacttcaagctgttcttcaatgggcgccccgggatcgtcgcctggaccctcatcarcctgtccttcgcagcgaagcagcgggagctccacagccatgtgaccaatgccatggtcctggtcaacgtcctgcaggccatctacgtgattgacttcttc

SEQ ID NO: 50141 - DNA, 201 bp, Homo sapiens
tgcaaattcacaggcaatttcttttacaactacatgatgggcatcgagtttaaccctcggatcgggaagtggtttgacttcaagctgttcttcaatgggcrccccgggatcgtcgcctggaccctcatcaacctgtccttcgcagcgaagcagcgggagctccacagccatgtgaccaatgccatggtcctggtcaacgtc

SEQ ID NO: 50142 - DNA, 201 bp, Homo sapiens
actacatgatgggcatcgagtttaaccctcggatcgggaagtggtttgacttcaagctgttcttcaatgggcgccccgggatcgtcgcctggaccctcatsaacctgtccttcgcagcgaagcagcgggagctccacagccatgtgaccaatgccatggtcctggtcaacgtcctgcaggccatctacgtgattgacttct

SEQ ID NO: 50143 - DNA, 201 bp, Homo sapiens
aaattcacaggcaatttcttttacaactacatgatgggcatcgagtttaaccctcggatcgggaagtggtttgacttcaagctgttcttcaatgggcgccscgggatcgtcgcctggaccctcatcaacctgtccttcgcagcgaagcagcgggagctccacagccatgtgaccaatgccatggtcctggtcaacgtcctg

SEQ ID NO: 50144 - DNA, 201 bp, Homo sapiens; identical to SEQ ID NO: 50064

SEQ ID NO: 50145 - DNA, 201 bp, Homo sapiens; identical to SEQ ID NO: 50065

SEQ ID NO: 50146 - DNA, 201 bp, Homo sapiens; identical to SEQ ID NO: 50066

SEQ ID NO: 50147 - DNA, 201 bp, Homo sapiens; identical to SEQ ID NO: 50067

SEQ ID NO: 50148 - DNA, 201 bp, Homo sapiens; identical to SEQ ID NO: 50068

SEQ ID NO: 50149 - DNA, 201 bp, Homo sapiens; identical to SEQ ID NO: 50069

SEQ ID NO: 50150 - DNA, 201 bp, Homo sapiens; identical to SEQ ID NO: 50070

SEQ ID NO: 50151 - DNA, 201 bp, Homo sapiens; identical to SEQ ID NO: 50071

SEQ ID NO: 50152 - DNA, 201 bp, Homo sapiens; identical to SEQ ID NO: 50072

SEQ ID NO: 50153 - DNA, 201 bp, Homo sapiens; identical to SEQ ID NO: 50073

SEQ ID NO: 50154 - DNA, 201 bp, Homo sapiens; identical to SEQ ID NO: 50074

SEQ ID NO: 50155 - DNA, 201 bp, Homo sapiens; identical to SEQ ID NO: 50075

SEQ ID NO: 50156 - DNA, 201 bp, Homo sapiens; identical to SEQ ID NO: 50076

SEQ ID NO: 50157 - DNA, 201 bp, Homo sapiens; identical to SEQ ID NO: 50077

SEQ ID NO: 50158 - DNA, 201 bp, Homo sapiens; identical to SEQ ID NO: 50078

SEQ ID NO: 50159 - DNA, 201 bp, Homo sapiens; identical to SEQ ID NO: 50079

SEQ ID NO: 50160 - DNA, 201 bp, Homo sapiens; identical to SEQ ID NO: 50080

SEQ ID NO: 50161 - DNA, 201 bp, Homo sapiens; identical to SEQ ID NO: 50081

SEQ ID NO: 50162 - DNA, 201 bp, Homo sapiens; identical to SEQ ID NO: 50082

SEQ ID NO: 50163 - DNA, 201 bp, Homo sapiens; identical to SEQ ID NO: 50083

SEQ ID NO: 50164 - DNA, 201 bp, Homo sapiens; identical to SEQ ID NO: 50084

SEQ ID NO: 50165 - DNA, 201 bp, Homo sapiens; identical to SEQ ID NO: 50085

SEQ ID NO: 50166 - DNA, 201 bp, Homo sapiens; identical to SEQ ID NO: 50086

SEQ ID NO: 50167 - DNA, 201 bp, Homo sapiens; identical to SEQ ID NO: 50087

SEQ ID NO: 50168 - DNA, 121 bp, Homo sapiens
cccctgccctgcgggtgactycgacccctggctagagggtaggcggcgtggagcagcgcgcgcaagcgaggccaggggaaggtgggcgcaggtgaggggccgaggtgtgcgcaggacttta

SEQ ID NO: 50169 - DNA, 201 bp, Homo sapiens; identical to SEQ ID NO: 50089

SEQ ID NO: 50170 - DNA, 201 bp, Homo sapiens; identical to SEQ ID NO: 50090

SEQ ID NO: 50171 - DNA, 201 bp, Homo sapiens; identical to SEQ ID NO: 50091

SEQ ID NO: 50172 - DNA, 201 bp, Homo sapiens; identical to SEQ ID NO: 50092

SEQ ID NO: 50173 - DNA, 201 bp, Homo sapiens; identical to SEQ ID NO: 50093

SEQ ID NO: 50174 - DNA, 201 bp, Homo sapiens; identical to SEQ ID NO: 50094

SEQ ID NO: 50175 - DNA, 201 bp, Homo sapiens; identical to SEQ ID NO: 50095

SEQ ID NO: 50176 - DNA, 201 bp, Homo sapiens; identical to SEQ ID NO: 50096

SEQ ID NO: 50177 - DNA, 201 bp, Homo sapiens; identical to SEQ ID NO: 50097

SEQ ID NO: 50178 - DNA, 201 bp, Homo sapiens; identical to SEQ ID NO: 50098

SEQ ID NO: 50179 - DNA, 201 bp, Homo sapiens; identical to SEQ ID NO: 50099

SEQ ID NO: 50180 - DNA, 201 bp, Homo sapiens; identical to SEQ ID NO: 50100

SEQ ID NO: 50181 - DNA, 201 bp, Homo sapiens; identical to SEQ ID NO: 50101

SEQ ID NO: 50182 - DNA, 201 bp, Homo sapiens; identical to SEQ ID NO: 50102

SEQ ID NO: 50183 - DNA, 201 bp, Homo sapiens; identical to SEQ ID NO: 50103

SEQ ID NO: 50184 - DNA, 201 bp, Homo sapiens; identical to SEQ ID NO: 50104

SEQ ID NO: 50185 - DNA, 201 bp, Homo sapiens; identical to SEQ ID NO: 50105

SEQ ID NO: 50186 - DNA, 201 bp, Homo sapiens; identical to SEQ ID NO: 50106

SEQ ID NO: 50187 - DNA, 201 bp, Homo sapiens; identical to SEQ ID NO: 50107

SEQ ID NO: 50188 - DNA, 201 bp, Homo sapiens; identical to SEQ ID NO: 50108

SEQ ID NO: 50189 - DNA, 201 bp, Homo sapiens; identical to SEQ ID NO: 50109

SEQ ID NO: 50190 - DNA, 201 bp, Homo sapiens; identical to SEQ ID NO: 50110

SEQ ID NO: 50191 - DNA, 201 bp, Homo sapiens; identical to SEQ ID NO: 50111

SEQ ID NO: 50192 - DNA, 201 bp, Homo sapiens; identical to SEQ ID NO: 50112

SEQ ID NO: 50193 - DNA, 201 bp, Homo sapiens; identical to SEQ ID NO: 50113

SEQ ID NO: 50194 - DNA, 201 bp, Homo sapiens; identical to SEQ ID NO: 50114

SEQ ID NO: 50195 - DNA, 201 bp, Homo sapiens; identical to SEQ ID NO: 50115

SEQ ID NO: 50196 - DNA, 201 bp, Homo sapiens; identical to SEQ ID NO: 50116

SEQ ID NO: 50197 - DNA, 201 bp, Homo sapiens; identical to SEQ ID NO: 50117

SEQ ID NO: 50198 - DNA, 201 bp, Homo sapiens; identical to SEQ ID NO: 50118

SEQ ID NO: 50199 - DNA, 201 bp, Homo sapiens; identical to SEQ ID NO: 50119

SEQ ID NO: 50200 - DNA, 201 bp, Homo sapiens; identical to SEQ ID NO: 50120

SEQ ID NO: 50201 - DNA, 201 bp, Homo sapiens; identical to SEQ ID NO: 50121

SEQ ID NO: 50202 - DNA, 201 bp, Homo sapiens; identical to SEQ ID NO: 50122

SEQ ID NO: 50203 - DNA, 201 bp, Homo sapiens; identical to SEQ ID NO: 50123

SEQ ID NO: 50204 - DNA, 201 bp, Homo sapiens; identical to SEQ ID NO: 50124

SEQ ID NO: 50205 - DNA, 201 bp, Homo sapiens; identical to SEQ ID NO: 50125

SEQ ID NO: 50206 - DNA, 201 bp, Homo sapiens; identical to SEQ ID NO: 50126

SEQ ID NO: 50207 - DNA, 201 bp, Homo sapiens; identical to SEQ ID NO: 50127

SEQ ID NO: 50208 - DNA, 201 bp, Homo sapiens; identical to SEQ ID NO: 50128

SEQ ID NO: 50209 - DNA, 201 bp, Homo sapiens; identical to SEQ ID NO: 50129

SEQ ID NO: 50210 - DNA, 201 bp, Homo sapiens; identical to SEQ ID NO: 50130

SEQ ID NO: 50211 - DNA, 201 bp, Homo sapiens; identical to SEQ ID NO: 50131

SEQ ID NO: 50212 - DNA, 201 bp, Homo sapiens; identical to SEQ ID NO: 50132

SEQ ID NO: 50213 - DNA, 201 bp, Homo sapiens; identical to SEQ ID NO: 50133

SEQ ID NO: 50214 - DNA, 201 bp, Homo sapiens; identical to SEQ ID NO: 50134

SEQ ID NO: 50215 - DNA, 201 bp, Homo sapiens; identical to SEQ ID NO: 50135

SEQ ID NO: 50216 - DNA, 201 bp, Homo sapiens
ctgcatttactcttgctaaataaaagtgggagtggggcgtgcgcgttatccatgtattgcctttcagctctagatccccctcccctgcctgctctgcagtygtgggtggggcccgtgcgccgtttctccttggtagcgtgcacggtgttgaactgggacactggggagaaaggggctttcatgtcgtttccttcctgctcc

SEQ ID NO: 50217 - DNA, 201 bp, Homo sapiens
actgccgtattgccagcacagacggattttctctaatcagtgtccctggggcaggaggatgacccagtcacctttactagtcctttggagacaatttacckgtattaggagcccaggccacgctacactctgcccacactggtgagcaggaggtcttcccacgccctgtcattaggctgcatttactcttgctaaataaaa

SEQ ID NO: 50218 - DNA, 201 bp, Homo sapiens; identical to SEQ ID NO: 50138

SEQ ID NO: 50219 - DNA, 201 bp, Homo sapiens; identical to SEQ ID NO: 50139

SEQ ID NO: 50220 - DNA, 201 bp, Homo sapiens; identical to SEQ ID NO: 50140

SEQ ID NO: 50221 - DNA, 201 bp, Homo sapiens; identical to SEQ ID NO: 50141

SEQ ID NO: 50222 - DNA, 201 bp, Homo sapiens; identical to SEQ ID NO: 50142

SEQ ID NO: 50223 - DNA, 201 bp, Homo sapiens; identical to SEQ ID NO: 50143

SEQ ID NO: 50224 - DNA, 106 bp, Homo sapiens
gcattctgttcccagtgaagccacagtgcctgatccctgggaagctggcctggcctttgcccccttccagaatgaaggacggctcggaccaattgccaggrccatc

SEQ ID NO: 50225 - DNA, 201 bp, Homo sapiens
ccatccggtgcgccttctaccagctgctgctggccgcgctcatgctggtggcgatgctgcagctgctctacctgtcgctgctgtccggactgcacgggcargaggagcaagaccaatattttgagttctttcccccgtccccacggtccgtggaccaggtcaaggcgcagctccgcaccgcgctggcctctggaggcgtcc

SEQ ID NO: 50226 - DNA, 191 bp, Homo sapiens
gccaagtaccccaactctccccgacgctgctgagcccttccctcccctaatctgagaatctgaatacttaatgaaatggactttttggaaagaaatcagaygaaggcataaaatttagttcttagctcttgaacagaagcctaaaattcctggttctctcagggcttcgccttcaagggttctggaggagg

SEQ ID NO: 50227 - DNA, 201 bp, Homo sapiens
cccaaaaggaggctgaaaatcagcacaataagatcctatatcgccagttcaaacaggagttgaaggccaagtaccccaactctccccgacgctgctgagcycttccctcccctaatctgagaatctgaatacttaatgaaatggactttttggaaagaaatcagatgaaggcataaaatttagttcttagctcttgaacag

SEQ ID NO: 50228 - DNA, 201 bp, Homo sapiens
aggcacccaccaactattcccgctgggtcaacctgccggaagagagcttgctgcggcccgcctacgtggtaccttggcaggacccctgggagccattctaygtggcaggaggcaaggtgcccaccttcgacgagcgctttcggcagtacggcttcaaccgaatcagccaggcctgcgagctgcatgtggcggggtttgatt

SEQ ID NO: 50229 - DNA, 201 bp, Homo sapiens
cccgagagccatgcagatgtcctacgccatccggtgcgccttctaccagctgctgctggccgcgctcatgctggtggcgatgctgcagctgctctacctgycgctgctgtccggactgcacgggcaggaggagcaagaccaatattttgagttctttcccccgtccccacggtccgtggaccaggtcaaggcgcagctccg

SEQ ID NO: 50230 - DNA, 201 bp, Homo sapiens; identical to SEQ ID NO: 50225

SEQ ID NO: 50231 - DNA, 201 bp, Homo sapiens
aacaatcttgggtgggtagtaggagagcaaaaagtatgaatgggatggagctaagaagtctgaatacttaatgaaatggactttttggaaagaaatcagaygaaggcataaaatttagttcttagctcttgaacagaagcctaaaattcctggttctctcagggcttcgccttcaagggttctggaggagggaagggtctg

SEQ ID NO: 50232 - DNA, 201 bp, Homo sapiens
cagaggtagctgtggtgttgaaacactggacttggatatggggtgctgggatcgattcctagctttaccactaactagctgtgtggccttgagtaaatccygttacctctctgagcctcggttaccctgtctgtaaaaagggaggtgagaatacctacctcacggaactgttgggaggctcagatgagatgctatatgtga

SEQ ID NO: 50233 - DNA, 201 bp, Homo sapiens
cccaaaaggaggctgaaaatcagcacaataagatcctatatcgccagttcaaacaggagttgaaggccaagtaccccaactctccccgacgctgctgagcycttccctcccctaatctgagaagtcagcctcttggctcctcaggccaccatttaggcctgactggggtaagaaatgtcgctccactttacagaggtagct

SEQ ID NO: 50234 - DNA, 201 bp, Homo sapiens; identical to SEQ ID NO: 50228

SEQ ID NO: 50235 - DNA, 201 bp, Homo sapiens; identical to SEQ ID NO: 50229

SEQ ID NO: 50236 - DNA, 106 bp, Homo sapiens
gagaawtgcgcatgcgcgcctgtctcccgggacgctagagcaggcggttcctgggctgctccggtaggtttggcgtgcgcgggtttctgcagatctagggcgagct

SEQ ID NO: 50237 - DNA, 201 bp, Homo sapiens
ttcgagatgatgcccgaagtgggcgtccagtcacccaccgaacagatgacaatatccagaaggtcaaggacttggtttgttcaaacaggcagttaaccgtkaggatgatggctgaagagttaaatttagacaaagaaactgttaggctcattttgaaagaaaacttgaacatgaggaagatttctgcaaaagttatttcgg

SEQ ID NO: 50238 - DNA, 152 bp, Homo sapiens
gagaattgcgcatgcgcgcctgtctcccgggacgctagagcaggcggttccygggctgctccggtaggtttggcgtgcgcgggtttctgcagatctagggcgagcttgcacgttacatcaccgatgcatctcttcttgcttgcttaatttgc

SEQ ID NO: 50239 - DNA, 201 bp, Homo sapiens
ctcatgtttgaggaaaaaggtaacaggttctgaaacatggagttatctccagggtgaagctggtggggaaatgcccctgccggtatcccatcccagagtcyactactctgccagtcagcttctgcaggcgtcatcttcaacaagccttccccccaggtcctatgaacagggctggtatgtccctgccagtgatgctggacc

SEQ ID NO: 50240 - DNA, 201 bp, Homo sapiens
atgcagtttctgggggatgaagagatggtacgcaaagccatggaagctgtggctgcccagggcaaggccaagaagtgaaggccagcagggaggatactgtycccaggagcaccctccctgcctgtcttgtccctctgcccctcccacctgcacatgtcacactgaccccatctgtagacatcttgagttgtagctgcagat

SEQ ID NO: 50241 - DNA, 201 bp, Homo sapiens
ccaagaagtgaaggccagcagggaggatactgtccccaggagcaccctccctgcctgtcttgtccctctgcccctcccacctgcacatgtcacactgaccmcatctgtagacatcttgagttgtagctgcagatggggaccagtgactcccattttcattttagccattttgtctcctgcacccactcccttcatacaatc

SEQ ID NO: 50242 - DNA, 201 bp, Homo sapiens
atgcagtttctgggggatgaagagatggtacgcaaagccatggaagctgtggctgcccagggcaaggccaagaagtgaaggccagcagggaggatactgtycccaggagtgcttcctggtgtgggtattacaatcccttcctgccttgtttcgtgacagtgaaatgcctcttggtcctgtccaagtatgtctttcactgat

SEQ ID NO: 50243 - DNA, 201 bp, Homo sapiens; identical to SEQ ID NO: 50240

SEQ ID NO: 50244 - DNA, 201 bp, Homo sapiens
ttatgtgttacatttaatttaagaagtatagtatatataaataatacaaaacaataacccttctggggtttctcgtggcggttgaaatagtcccacatgtrgtcatcagaaaataagccattcctcataccaatataggatcagctccttgacctctgaggggcaggagtgcttcctggtgtgggtattacaatcccttcc

SEQ ID NO: 50245 - DNA, 201 bp, Homo sapiens
cctgagggctctagtcattccagtggaagatgaatgtaacctgcatggtgatgtgacaactgtttcctccctgacgccagaggagctggctctagaaggttgggatcaatcctgaatttagttatgtgttacatttaatttaagaagtatagtatatataaataatacaaaacaataacccttctggggtttctcgtggcg

SEQ ID NO: 50246 - DNA, 201 bp, Homo sapiens
tgggatcaatcctgaatttagttatgtgttacatttaatttaagaagtatagtatatataaataatacaaaacaataacccttctggggtttctcgtggcrgttgaaatagtcccacatgtagtcatcagaaaataagccattcctcataccaatataggatcagctccttgacctctgaggggcaggagtgcttcctggt

SEQ ID NO: 50247 - DNA, 201 bp, Homo sapiens; identical to SEQ ID NO: 50241

SEQ ID NO: 50248 - DNA, 201 bp, Homo sapiens; identical to SEQ ID NO: 50240

SEQ ID NO: 50249 - DNA, 201 bp, Homo sapiens; identical to SEQ ID NO: 50244

SEQ ID NO: 50250 - DNA, 201 bp, Homo sapiens; identical to SEQ ID NO: 50245

SEQ ID NO: 50251 - DNA, 201 bp, Homo sapiens; identical to SEQ ID NO: 50246

SEQ ID NO: 50252 - DNA, 201 bp, Homo sapiens; identical to SEQ ID NO: 50241

SEQ ID NO: 50253 - DNA, 201 bp, Homo sapiens
taccacgtgagcaagcagctcggttctgtgcagagataaagtcccccaaatatggtgaaggccaccaagcatggattattgggattgtagagaagggcaamcgcacagccagaatcatagacaaaccccggatcatcgaggtcgcaccacaagtggccactcaaaatgtgaatcccacacccggggccacctcttaatcta

SEQ ID NO: 50254 - DNA, 201 bp, Homo sapiens
ccgccactgacatcacgggcttcgggattttgggccatgcgcagaacctggccaagcagcagaggaacgaggtgtcgtttgtaattcacaacctcccggtsctggccaagatggctgcggtgagcaaggcctgcggaaacatgttcggcctcatgcacgggacctgcccggagacttcaggcggccttctgatctgtttac

SEQ ID NO: 50255 - DNA, 201 bp, Homo sapiens
cgatgatgaacatggcgaggctcaacaggacagctgcaggactcatgcacacgttcaatgcccacgccgccactgacatcacgggcttcgggattttgggycatgcgcagaacctggccaagcagcagaggaacgaggtgtcgtttgtaattcacaacctcccggtgctggccaagatggctgcggtgagcaaggcctgcg

SEQ ID NO: 50256 - DNA, 201 bp, Homo sapiens
tcgtagacgacccttacatgatgggcaggatagcgtgtgccaatgtcctcagtgacctctatgcaatgggggtcacggaatgtgacaatatgctgatgctscttggagtcagtaataaaatgaccgacagggaaagggataaagtgatgcctctgattatccaaggttttaaagacgcagctgaggaagcaggaacgtctg

SEQ ID NO: 50257 - DNA, 201 bp, Homo sapiens
atcctcaagtgcccatcttcgtgagagaaaaagcagcacatcctgcccatttctggtgctttctgctcacaggcaccaaagctgcacatgtaaactgactwcttgccaaaggaaatgacccctgggaagttcaagctcctggaagaggctttaactcggacgcgccctcctccaggaaccagtgggcagggcagccttcat

SEQ ID NO: 50258 - DNA, 201 bp, Homo sapiens
ttcaaaccacagattacatttacccgatcgtagacgacccttacatgatgggcaggatagcgtgtgccaatgtcctcagtgacctctatgcaatgggggtyacggaatgtgacaatatgctgatgctccttggagtcagtaataaaatgaccgacagggaaagggataaagtgatgcctctgattatccaaggttttaaag

SEQ ID NO: 50259 - DNA, 201 bp, Homo sapiens
ttgtacagtgatttcaggccttttgttttcttaaaatcagcagctgtttggcctaattcttagcattattttgtcctttgcgccagtacttttttgtgcaygctttttgtgatctgtgttaaaaacctgcattgccaacattgcagctcgaacttaaacttgttattcaaataaatatttaattttttaaattgctcttgt

SEQ ID NO: 50260 - DNA, 201 bp, Homo sapiens
tgctccttggagtcagtaataaaatgaccgacagggaaagggataaagtgatgcctctgattatccaaggttttaaagacgcagctgaggaagcaggaacrtctgtaacaggcggccaaacagtactaaacccctggattgtcctgggaggagtggctaccactgtctgccaacccaatgaatttatcatgccagacaatg

SEQ ID NO: 50261 - DNA, 201 bp, Homo sapiens
cccggaaagttacgaattggacaaaagcttccggctaaccagattcactgaactgaagggcacaggctgcaaagtgccccaagatgtcctgcaaaaattgytggaatctttacaggagaaccacttccaagaagatgagcagtttctgggagccgttatgccaaggcttggcattggaatggatacttgtgtcattccttt

SEQ ID NO: 50262 - DNA, 201 bp, Homo sapiens; identical to SEQ ID NO: 50260

SEQ ID NO: 50263 - DNA, 201 bp, Homo sapiens; identical to SEQ ID NO: 50253

SEQ ID NO: 50264 - DNA, 201 bp, Homo sapiens; identical to SEQ ID NO: 50259

SEQ ID NO: 50265 - DNA, 201 bp, Homo sapiens; identical to SEQ ID NO: 50256

SEQ ID NO: 50266 - DNA, 201 bp, Homo sapiens; identical to SEQ ID NO: 50261

SEQ ID NO: 50267 - DNA, 201 bp, Homo sapiens; identical to SEQ ID NO: 50258

SEQ ID NO: 50268 - DNA, 201 bp, Homo sapiens; identical to SEQ ID NO: 50253

SEQ ID NO: 50269 - DNA, 201 bp, Homo sapiens; identical to SEQ ID NO: 50254

SEQ ID NO: 50270 - DNA, 201 bp, Homo sapiens; identical to SEQ ID NO: 50255

SEQ ID NO: 50271 - DNA, 201 bp, Homo sapiens; identical to SEQ ID NO: 50256

SEQ ID NO: 50272 - DNA, 201 bp, Homo sapiens; identical to SEQ ID NO: 50257

SEQ ID NO: 50273 - DNA, 201 bp, Homo sapiens; identical to SEQ ID NO: 50258

SEQ ID NO: 50274 - DNA, 201 bp, Homo sapiens; identical to SEQ ID NO: 50259

SEQ ID NO: 50275 - DNA, 201 bp, Homo sapiens; identical to SEQ ID NO: 50260

SEQ ID NO: 50276 - DNA, 201 bp, Homo sapiens; identical to SEQ ID NO: 50261

SEQ ID NO: 50277 - DNA, 201 bp, Homo sapiens; identical to SEQ ID NO: 50253

SEQ ID NO: 50278 - DNA, 201 bp, Homo sapiens; identical to SEQ ID NO: 50254

SEQ ID NO: 50279 - DNA, 201 bp, Homo sapiens; identical to SEQ ID NO: 50255

SEQ ID NO: 50280 - DNA, 201 bp, Homo sapiens; identical to SEQ ID NO: 50256

SEQ ID NO: 50281 - DNA, 201 bp, Homo sapiens; identical to SEQ ID NO: 50257

SEQ ID NO: 50282 - DNA, 201 bp, Homo sapiens; identical to SEQ ID NO: 50258

SEQ ID NO: 50283 - DNA, 201 bp, Homo sapiens; identical to SEQ ID NO: 50259

SEQ ID NO: 50284 - DNA, 201 bp, Homo sapiens; identical to SEQ ID NO: 50260

SEQ ID NO: 50285 - DNA, 201 bp, Homo sapiens; identical to SEQ ID NO: 50261

SEQ ID NO: 50286 - DNA, 201 bp, Homo sapiens; identical to SEQ ID NO: 50253

SEQ ID NO: 50287 - DNA, 201 bp, Homo sapiens; identical to SEQ ID NO: 50254

SEQ ID NO: 50288 - DNA, 201 bp, Homo sapiens; identical to SEQ ID NO: 50255

SEQ ID NO: 50289 - DNA, 201 bp, Homo sapiens; identical to SEQ ID NO: 50256

SEQ ID NO: 50290 - DNA, 201 bp, Homo sapiens; identical to SEQ ID NO: 50257

SEQ ID NO: 50291 - DNA, 201 bp, Homo sapiens; identical to SEQ ID NO: 50258

SEQ ID NO: 50292 - DNA, 201 bp, Homo sapiens; identical to SEQ ID NO: 50259

SEQ ID NO: 50293 - DNA, 201 bp, Homo sapiens; identical to SEQ ID NO: 50260

SEQ ID NO: 50294 - DNA, 201 bp, Homo sapiens; identical to SEQ ID NO: 50261

SEQ ID NO: 50295 - DNA, 201 bp, Homo sapiens
tcatttctttacccaagaatgacctgctgcagagacttgatgctctggtagctgaagaacatctcacagtggacgccagggtctattcctacgctctagcrctgaaacatgcaaatgcaaagccatttgaagtgcccttcttgaaattttaagcccaaatatgacactggccatttttgtaaacgagaccaccaggccttc

SEQ ID NO: 50296 - DNA, 201 bp, Homo sapiens
tactgcatagagttccctgcaggtctcatagatgatggtgaaaccccagaagcagctgctctccgggagcttgaagaagaaactggctacaaaggggacaytgccgaatgttctccagcggtctgtatggacccaggcttgtcaaactgtactatacacatcgtgacagtcaccattaacggagatgatgccgaaaacgca

SEQ ID NO: 50297 - DNA, 201 bp, Homo sapiens
aattaacaaagaatataaatgcaagtatgtttactccaatttttttaaagctcaacagcagttaactacagctcagttacttttctagtccagtctggtasacaggggtatttgtatagagaaatagacctgagttctcaattaggtcatttccactctcaacccccaatataaaattctaagctgggtatgcaaataacc

SEQ ID NO: 50298 - DNA, 201 bp, Homo sapiens
tcggctgacactgctgcctccagctagttatttcgtcctcttccgttcttcacccctacaccttggaggtgaacttctcacctgagggctgtaaagactcrtttgaaaatggagagccaagaaccaacggaatcttctcagaatggcaaacagtatatcatttcagaggagttaatttcagaaggaaaatgggtcaagctt

SEQ ID NO: 50299 - DNA, 201 bp, Homo sapiens; identical to SEQ ID NO: 50295

SEQ ID NO: 50300 - DNA, 201 bp, Homo sapiens; identical to SEQ ID NO: 50296

SEQ ID NO: 50301 - DNA, 201 bp, Homo sapiens; identical to SEQ ID NO: 50297

SEQ ID NO: 50302 - DNA, 201 bp, Homo sapiens; identical to SEQ ID NO: 50298

SEQ ID NO: 50303 - DNA, 201 bp, Homo sapiens
ccaacctttttcgttggtggcatttatggctttggagcactgtcaggcccatgttcattaccgtgagctcctgtgcatctcctaatttccaaactagcctkgaaaacgcctccattgaccatgattggttcatggtcctgtgcatggaacatcatatgttcagggagataaagaactctgatagtggcacctgggtaaaaa

SEQ ID NO: 50304 - DNA, 201 bp, Homo sapiens
tcctttttcccaggccatggagaagtgtaaagatgcaggattggccaagtccatcggggtgtccaacttcaaccacaggctgctggagatgatcctcaacragccagggctcaagtacaagcctgtctgcaaccaggtggaatgtcatccttacttcaaccagagaaaactgctggatttctgcaagtcaaaagacattgt

SEQ ID NO: 50305 - DNA, 201 bp, Homo sapiens
ttttcgttggtggcatttatggctttggagcactgtcaggcccatgttcattaccgtgagctcctgtgcatctcctaatttccaaactagcctggaaaacrcctccattgaccatgattggttcatggtcctgtgcatggaacatcatatgttcagggagataaagaactctgatagtggcacctgggtaaaaagtacaat

SEQ ID NO: 50306 - DNA, 201 bp, Homo sapiens
ggagaagtgtaaagatgcaggattggccaagtccatcggggtgtccaacttcaaccacaggctgctggagatgatcctcaacaagccagggctcaagtacragcctgtctgcaaccaggtggaatgtcatccttacttcaaccagagaaaactgctggatttctgcaagtcaaaagacattgttctggttgcctatagtgc

SEQ ID NO: 50307 - DNA, 201 bp, Homo sapiens
agtgtgctcaggggcgttgcagctcattgctcttatagcctgtgagggcacggaagaaacatttgctaaccaggccagtgacagaaatggattcgaaataycagtgtgtgaagctgaatgatggtcacttcatgcctgtcctgggatttggcacctatgcgcctgcagaggttcctaaaagtaaagctctagaggccgtca

SEQ ID NO: 50308 - DNA, 157 bp, Homo sapiens
gacacagaggatggctctatgctggtgactggacacatcgcctctggttaaatctctcctgcttggcgacttcagtaagctacagctaagcccatcggccrgaaaagaaagacaataattttgtttttcattttgaaaaaattaaatgctctctcct

SEQ ID NO: 50309 - DNA, 152 bp, Homo sapiens
agaggatggctctatgctggtgactggacacatcgcctctggttaaatctctcctgcttggcgacttcagtaagctacagctaagcccatcggccggaaargaaagacaataattttgtttttcattttgaaaaaattaaatgctctctcct

SEQ ID NO: 50310 - DNA, 201 bp, Homo sapiens
agacagaacgtgcaggtgttttgctggcccccctaattatccattttctgatgaatattaacatggagggcattgcatgaggtctgccagaaggccctgcrtgtggatggtgacacagaggatggctctatgctggtgactggacacatcgcctctggttaaatctctcctgcttggcgacttcagtaagctacagctaag

SEQ ID NO: 50311 - DNA, 191 bp, Homo sapiens
tgaggtctgccagaaggccctgcgtgtggatggtgacacagaggatggctctatgctggtgactggacacatcgcctctggttaaatctctcctgcttggygacttcagtaagctacagctaagcccatcggccggaaaagaaagacaataattttgtttttcattttgaaaaaattaaatgctctctcct

SEQ ID NO: 50312 - DNA, 188 bp, Homo sapiens
ggtctgccagaaggccctgcgtgtggatggtgacacagaggatggctctatgctggtgactggacacatcgcctctggttaaatctctcctgcttggcgayttcagtaagctacagctaagcccatcggccggaaaagaaagacaataattttgtttttcattttgaaaaaattaaatgctctctcct

SEQ ID NO: 50313 - DNA, 182 bp, Homo sapiens
ccagaaggccctgcgtgtggatggtgacacagaggatggctctatgctggtgactggacacatcgcctctggttaaatctctcctgcttggcgacttcagyaagctacagctaagcccatcggccggaaaagaaagacaataattttgtttttcattttgaaaaaattaaatgctctctcct

SEQ ID NO: 50314 - DNA, 171 bp, Homo sapiens
tgcgtgtggatggtgacacagaggatggctctatgctggtgactggacacatcgcctctggttaaatctctcctgcttggcgacttcagtaagctacagcwaagcccatcggccggaaaagaaagacaataattttgtttttcattttgaaaaaattaaatgctctctcct

SEQ ID NO: 50315 - DNA, 201 bp, Homo sapiens
atgatggtcacttcatgcctgtcctgggatttggcacctatgcgcctgcagaggttcctaaaagtaaagctctagaggccgtcaaattggcaatagaagcygggttccaccatattgattctgcacatgtttacaataatgaggagcaggttggactggccatccgaagcaagattgcagatggcagtgtgaagagagaag

SEQ ID NO: 50316 - DNA, 201 bp, Homo sapiens
cacttcatgcctgtcctgggatttggcacctatgcgcctgcagaggttcctaaaagtaaagctctagaggccgtcaaattggcaatagaagccgggttccrccatattgattctgcacatgtttacaataatgaggagcaggttggactggccatccgaagcaagattgcagatggcagtgtgaagagagaagacatattc

SEQ ID NO: 50317 - DNA, 201 bp, Homo sapiens
atggtcacttcatgcctgtcctgggatttggcacctatgcgcctgcagaggttcctaaaagtaaagctctagaggccgtcaaattggcaatagaagccggsttccaccatattgattctgcacatgtttacaataatgaggagcaggttggactggccatccgaagcaagattgcagatggcagtgtgaagagagaagaca

SEQ ID NO: 50318 - DNA, 201 bp, Homo sapiens
tgggatttggcacctatgcgcctgcagaggttcctaaaagtaaagctctagaggccgtcaaattggcaatagaagccgggttccaccatattgattctgcwcatgtttacaataatgaggagcaggttggactggccatccgaagcaagattgcagatggcagtgtgaagagagaagacatattctacacttcaaagcttt

SEQ ID NO: 50319 - DNA, 201 bp, Homo sapiens
aggcccatgttcattaccgtgagctcctgtgcatctcctaatttccaaactagcctggaaaacgcctccattgaccatgattggttcatggtcctgtgcayggaacatcatatgttcagggagataaagaactctgatagtggcacctgggtaaaaagtacaatccattatatctggatatcaagatcttttgcagttgaa

SEQ ID NO: 50320 - DNA, 201 bp, Homo sapiens
tcattaccgtgagctcctgtgcatctcctaatttccaaactagcctggaaaacgcctccattgaccatgattggttcatggtcctgtgcatggaacatcayatgttcagggagataaagaactctgatagtggcacctgggtaaaaagtacaatccattatatctggatatcaagatcttttgcagttgaagagaggtatt

SEQ ID NO: 50321 - DNA, 201 bp, Homo sapiens
gagaagacatattctacacttcaaagctttggagcaattcccatcgaccagagttggtccgaccagccttggaaaggtcactgaaaaatcttcaattggaytatgttgacctctatcttattcattttccagtgtctgtaaaggtaggcagcttgtgtgatcaaattaatttcacttttgttctcagcataaatattgttt

SEQ ID NO: 50322 - DNA, 201 bp, Homo sapiens
aagagaggtattgccacagagaaaattataggagcagaagaaagtcaatgaaagtcaatgatgacactccattaggaaccagaaagatggtatttatttayacatataataggtgtaagagattagaggaagcctgtcacctgaagacattccttataccttcatatgtagtacactttgtacataccactctctggagcg

SEQ ID NO: 50323 - DNA, 201 bp, Homo sapiens
ttcattttccagtgtctgtaaaggtaggcagcttgtgtgatcaaattaatttcacttttgttctcagcataaatattgttttcatggagatttgaactaarctttttcttaggaggacatagggattttaacatggaagaagagccctaaacataactcctaattcctttctatggaacagaaagcaattttgaatccata

SEQ ID NO: 50324 - DNA, 201 bp, Homo sapiens
ggattcgaaataccagtgtgtgaagctgaatgatggtcacttcatgcctgtcctgggatttggcacctatgcgcctgcagaggttcctaaaagtaaagctytagaggccgtcaaattggcaatagaagccgggttccaccatattgattctgcacatgtttacaataatgaggagcaggttggactggccatccgaagcaa

SEQ ID NO: 50325 - DNA, 201 bp, Homo sapiens
gaaaatgcaccattggatcaaaaacttaggaactttacaaaggtagtttttgtgagcagcgaggaaaaagaaatgacaggcatacaaaagagagaagtggwggagaagaattgggggtaaggaggactgggatttctttccttgcctgtacattaatctctccactttcctaaggaggaaacagaaattctcactcttgca

SEQ ID NO: 50326 - DNA, 201 bp, Homo sapiens
gcctcttttcaaggggcaagaactcagtccgggaatgtcttaaactacaaaccttcatgggaaaccttgttgcttctgcttcctctcttttcacactggasgttttatttttgcttagccatgaattcttgtgtcattcataacttttgtcttaaggtactgaaaactagtcaggctagttaatgcaaaagggtatattag

SEQ ID NO: 50327 - DNA, 201 bp, Homo sapiens
aaacagaaattctcactcttgcaatcactatcttcttccccaatttttctgttttattttctcccttttaagaaccacggctagctagtttgattgtcacrtctagacagttgttgctttcacagttctatgttacatttatcttgctcttcagtcgactacacaaatgatacctcacaattcctttttcccaggccatgg

SEQ ID NO: 50328 - DNA, 201 bp, Homo sapiens
agctgaatgatggtcacttcatgcctgtcctgggatttggcacctatgcgcctgcagaggttcctaaaagtaaagctctagaggccgtcaaattggcaatwgaagccgggttccaccatattgattctgcacatgtttacaataatgaggagcaggttggactggccatccgaagcaagattgcagatggcagtgtgaaga

SEQ ID NO: 50329 - DNA, 201 bp, Homo sapiens
cgactacacaaatgatacctcacaattcctttttcccaggccatggagaagtgtaaagatgcaggattggccaagtccatcggggtgtccaacttcaaccrcaggctgctggagatgatcctcaacaagccagggctcaagtacaagcctgtctgcaaccaggtggaatgtcatccttacttcaaccagagaaaactgctg

SEQ ID NO: 50330 - DNA, 201 bp, Homo sapiens
ttttcaaggggcaagaactcagtccgggaatgtcttaaactacaaaccttcatgggaaaccttgttgcttctgcttcctctcttttcacactggaggtttyatttttgcttagccatgaattcttgtgtcattcataacttttgtcttaaggtactgaaaactagtcaggctagttaatgcaaaagggtatattagatatg

SEQ ID NO: 50331 - DNA, 201 bp, Homo sapiens
ggtcacttcatgcctgtcctgggatttggcacctatgcgcctgcagaggttcctaaaagtaaagctctagaggccgtcaaattggcaatagaagccgggtwccaccatattgattctgcacatgtttacaataatgaggagcaggttggactggccatccgaagcaagattgcagatggcagtgtgaagagagaagacata

SEQ ID NO: 50332 - DNA, 201 bp, Homo sapiens
tgccacatgggaggccatggagaagtgtaaagatgcaggattggccaagtccatcggggtgtccaacttcaaccacaggctgctggagatgatcctcaacragccagggctcaagtacaagcctgtctgcaaccaggtggaatgtcatccttacttcaaccagagaaaactgctggatttctgcaagtcaaaagacattgt

SEQ ID NO: 50333 - DNA, 201 bp, Homo sapiens; identical to SEQ ID NO: 50306

SEQ ID NO: 50334 - DNA, 201 bp, Homo sapiens; identical to SEQ ID NO: 50307

SEQ ID NO: 50335 - DNA, 172 bp, Homo sapiens
gacacagaggatggctctatgctggtgactggacacatcgcctctggttaaatctctcctgcttggcgacttcagtaagctacagctaagcccatcggccrgaaaagaaagacaataattttgtttttcattttgaaaaaattaaatgctctctcctaaagattcttcacct

SEQ ID NO: 50336 - DNA, 167 bp, Homo sapiens
agaggatggctctatgctggtgactggacacatcgcctctggttaaatctctcctgcttggcgacttcagtaagctacagctaagcccatcggccggaaargaaagacaataattttgtttttcattttgaaaaaattaaatgctctctcctaaagattcttcacct

SEQ ID NO: 50337 - DNA, 201 bp, Homo sapiens; identical to SEQ ID NO: 50310

SEQ ID NO: 50338 - DNA, 201 bp, Homo sapiens
tgaggtctgccagaaggccctgcgtgtggatggtgacacagaggatggctctatgctggtgactggacacatcgcctctggttaaatctctcctgcttggygacttcagtaagctacagctaagcccatcggccggaaaagaaagacaataattttgtttttcattttgaaaaaattaaatgctctctcctaaagattctt

SEQ ID NO: 50339 - DNA, 201 bp, Homo sapiens
ggtctgccagaaggccctgcgtgtggatggtgacacagaggatggctctatgctggtgactggacacatcgcctctggttaaatctctcctgcttggcgayttcagtaagctacagctaagcccatcggccggaaaagaaagacaataattttgtttttcattttgaaaaaattaaatgctctctcctaaagattcttcac

SEQ ID NO: 50340 - DNA, 197 bp, Homo sapiens
ccagaaggccctgcgtgtggatggtgacacagaggatggctctatgctggtgactggacacatcgcctctggttaaatctctcctgcttggcgacttcagyaagctacagctaagcccatcggccggaaaagaaagacaataattttgtttttcattttgaaaaaattaaatgctctctcctaaagattcttcacct

SEQ ID NO: 50341 - DNA, 186 bp, Homo sapiens
tgcgtgtggatggtgacacagaggatggctctatgctggtgactggacacatcgcctctggttaaatctctcctgcttggcgacttcagtaagctacagcwaagcccatcggccggaaaagaaagacaataattttgtttttcattttgaaaaaattaaatgctctctcctaaagattcttcacct

SEQ ID NO: 50342 - DNA, 201 bp, Homo sapiens; identical to SEQ ID NO: 50315

SEQ ID NO: 50343 - DNA, 201 bp, Homo sapiens; identical to SEQ ID NO: 50316

SEQ ID NO: 50344 - DNA, 201 bp, Homo sapiens; identical to SEQ ID NO: 50318

SEQ ID NO: 50345 - DNA, 201 bp, Homo sapiens; identical to SEQ ID NO: 50317

SEQ ID NO: 50346 - DNA, 201 bp, Homo sapiens
gagaagacatattctacacttcaaagctttggagcaattcccatcgaccagagttggtccgaccagccttggaaaggtcactgaaaaatcttcaattggaytatgttgacctctatcttattcattttccagtgtctgtaaagccaggtgaggaagtgatcccaaaagatgaaaatggaaaaatactatttgacacagtgg

SEQ ID NO: 50347 - DNA, 201 bp, Homo sapiens; identical to SEQ ID NO: 50324

SEQ ID NO: 50348 - DNA, 201 bp, Homo sapiens; identical to SEQ ID NO: 50328

SEQ ID NO: 50349 - DNA, 201 bp, Homo sapiens
atactatttgacacagtggatctctgtgccacatgggaggccatggagaagtgtaaagatgcaggattggccaagtccatcggggtgtccaacttcaaccrcaggctgctggagatgatcctcaacaagccagggctcaagtacaagcctgtctgcaaccaggtggaatgtcatccttacttcaaccagagaaaactgctg

SEQ ID NO: 50350 - DNA, 201 bp, Homo sapiens; identical to SEQ ID NO: 50331

SEQ ID NO: 50351 - DNA, 201 bp, Homo sapiens; identical to SEQ ID NO: 50332

SEQ ID NO: 50352 - DNA, 201 bp, Homo sapiens; identical to SEQ ID NO: 50306

SEQ ID NO: 50353 - DNA, 201 bp, Homo sapiens; identical to SEQ ID NO: 50307

SEQ ID NO: 50354 - DNA, 172 bp, Homo sapiens; identical to SEQ ID NO: 50335

SEQ ID NO: 50355 - DNA, 167 bp, Homo sapiens; identical to SEQ ID NO: 50336

SEQ ID NO: 50356 - DNA, 201 bp, Homo sapiens; identical to SEQ ID NO: 50310

SEQ ID NO: 50357 - DNA, 201 bp, Homo sapiens; identical to SEQ ID NO: 50338

SEQ ID NO: 50358 - DNA, 201 bp, Homo sapiens; identical to SEQ ID NO: 50339

SEQ ID NO: 50359 - DNA, 197 bp, Homo sapiens; identical to SEQ ID NO: 50340

SEQ ID NO: 50360 - DNA, 186 bp, Homo sapiens; identical to SEQ ID NO: 50341

SEQ ID NO: 50361 - DNA, 201 bp, Homo sapiens; identical to SEQ ID NO: 50315

SEQ ID NO: 50362 - DNA, 201 bp, Homo sapiens; identical to SEQ ID NO: 50316

SEQ ID NO: 50363 - DNA, 201 bp, Homo sapiens; identical to SEQ ID NO: 50318

SEQ ID NO: 50364 - DNA, 201 bp, Homo sapiens; identical to SEQ ID NO: 50317

SEQ ID NO: 50365 - DNA, 201 bp, Homo sapiens; identical to SEQ ID NO: 50346

SEQ ID NO: 50366 - DNA, 201 bp, Homo sapiens; identical to SEQ ID NO: 50324

SEQ ID NO: 50367 - DNA, 201 bp, Homo sapiens; identical to SEQ ID NO: 50328

SEQ ID NO: 50368 - DNA, 201 bp, Homo sapiens; identical to SEQ ID NO: 50349

SEQ ID NO: 50369 - DNA, 201 bp, Homo sapiens; identical to SEQ ID NO: 50331

SEQ ID NO: 50370 - DNA, 201 bp, Homo sapiens
ccccacaaagccaagcccgctgcagctgccacatccctggacacatttggttcctcacaaagccaagcccgctgcagctgccacatccgtggacacactcrgttcttcacaaagccaagcccactgcagctgccacatccctgggcttacagtgcagcaggtgcttttttcaagacaggaatcaaaatgttaggaacacgg

SEQ ID NO: 50371 - DNA, 201 bp, Homo sapiens
tgatgttcccccaatgtggacacactcggttccccacaaagccaagcccgctgcagctgccacatccctggacacatttggttcctcacaaagccaagccygctgcagctgccacatccgtggacacactcggttcttcacaaagccaagcccactgcagctgccacatccctgggcttacagtgcagcaggtgctttttt

SEQ ID NO: 50372 - DNA, 201 bp, Homo sapiens
gaaaagaaatcagagccaagcacagcttcccgggtcacagaaccaattcatttaccaggcggcaccactgccgtcatttcaccttctggccactgggaggygctgctcgaaagggtttgccctgagactccgagaagaagctgcgggaaggacagcaggggtcccggggttttagcctctggcccaggagttatgtgtcca

SEQ ID NO: 50373 - DNA, 201 bp, Homo sapiens
ttcctcacaaagccaagcccgctgcagctgccacatccgtggacacactcggttcttcacaaagccaagcccactgcagctgccacatccctgggcttacrgtgcagcaggtgcttttttcaagacaggaatcaaaatgttaggaacacggcggaaagatgacacctggagagcaaacgcaggatgaggagtactgcagag

SEQ ID NO: 50374 - DNA, 201 bp, Homo sapiens
tttctttgtgcaaataaaaacgtgtgtatcaagtatgatgacacatttggttcctcacaaagccaagcccgctgcagctgccacatccgtggacacactcrgttcttcacaaagccaagcccactgcagctgccacatccctgggcttacagtgcagcaggtgcttttttcaagacaggaatcaaaatgttaggaacacgg

SEQ ID NO: 50375 - DNA, 201 bp, Homo sapiens
gacatgaaatctctggctccaaaaatagcattttctttgtgcaaataaaaacgtgtgtatcaagtatgatgacacatttggttcctcacaaagccaagccygctgcagctgccacatccgtggacacactcggttcttcacaaagccaagcccactgcagctgccacatccctgggcttacagtgcagcaggtgctttttt

SEQ ID NO: 50376 - DNA, 201 bp, Homo sapiens; identical to SEQ ID NO: 50372

SEQ ID NO: 50377 - DNA, 201 bp, Homo sapiens; identical to SEQ ID NO: 50373

SEQ ID NO: 50378 - DNA, 201 bp, Homo sapiens
atcaatcagacatgaaatctctggctccaaaaatagcattttctttgtgcaaataaaaacgtgtgtatcaagtatgatgttcccccaattggacacactcrgttcttcacaaagccaagcccactgcagctgccacatccctgggcttacagtgcagcaggtgcttttttcaagacaggaatcaaaatgttaggaacacgg

SEQ ID NO: 50379 - DNA, 201 bp, Homo sapiens; identical to SEQ ID NO: 50372

SEQ ID NO: 50380 - DNA, 201 bp, Homo sapiens
aaataaaaacgtgtgtatcaagtatgatgttcccccaattggacacactcggttcttcacaaagccaagcccactgcagctgccacatccctgggcttacrgtgcagcaggtgcttttttcaagacaggaatcaaaatgttaggaacacggcggaaagatgacacctggagagcaaacgcaggatgaggagtactgcagag

SEQ ID NO: 50381 - DNA, 201 bp, Homo sapiens; identical to SEQ ID NO: 50370

SEQ ID NO: 50382 - DNA, 201 bp, Homo sapiens
tgtgtatcaagtatgatggacacactcggttccccacaaagccaagcccgctgcagctgccacatccctggacacatttggttcctcacaaagccaagccygctgcagctgccacatccgtggacacactcggttcttcacaaagccaagcccactgcagctgccacatccctgggcttacagtgcagcaggtgctttttt

SEQ ID NO: 50383 - DNA, 201 bp, Homo sapiens
agtcgcagaacagtaatccgctagcaggggcatggggcgtgaagaacagaagaaccaggcggcaccactgccgtcatttcaccttctggccactgggaggygctgctcgaaagggtttgccctgagactccgagaagaagctgcgggaaggacagcaggggtcccggggttttagcctctggcccaggagttatgtgtcca

SEQ ID NO: 50384 - DNA, 201 bp, Homo sapiens; identical to SEQ ID NO: 50373

SEQ ID NO: 50385 - DNA, 201 bp, Homo sapiens
caggaggagctgcaggactgggtgaaaaagatccgtgaagtggcccagacagcagacgccaggctcactgaagggaagataatggaacggaggaagaagaytgccctggagctctctgaacttgtcgtctactgccggcctgttccctttgatgaagagaagattggcacagaacgtgcttgctaccgggacatgtcatcc

SEQ ID NO: 50386 - DNA, 201 bp, Homo sapiens
aaggacactcttcccttctgtccagggccccaagaaggactcgggtcaatggagacaaccgcctctagttgtaccccagcctcgttggagagcagcaggtrctgtgcgccttgtagaatgccgcgaactgggttctttggaagcagccccctgtggcggccttccgggtctcgcagcctgaagcctggattccagcagtga

SEQ ID NO: 50387 - DNA, 201 bp, Homo sapiens
cctggcttctatgtagaggcaaaccctatgccaactttcaagtgtgcagtcaaagccctctttgactacaaggcccagagggaggacgagctgaccttcaycaagagcgccatcatccagaatgtggagaagcaagagggaggctggtggcgaggggactacggagggaagaagcagctgtggttcccatcaaactacgtg

SEQ ID NO: 50388 - DNA, 201 bp, Homo sapiens
gacctgaagaacatgctgtcccaggtcaactaccgggtccccaacatgcgcttcctccgagagcggctgacggacctggagcagcgcagcggggacatcamctacgggcagtttgctcagctgtaccgcagcctcatgtacagcgcccagaagacgatggacctccccttcttggaagccagtactctgagggctggggag

SEQ ID NO: 50389 - DNA, 201 bp, Homo sapiens
acctggagttggcctccctgctgatcaagattgacattttccctgccaagcaggagaatggtgacctcagtcccttcagtggtacgtccctgcgggagcgkggctcagatgcctcaggccagctgtttcatggccgagcccgggaaggctcctttgaatcccgctaccagcagccgtttgaggacttccgcatctcccagg

SEQ ID NO: 50390 - DNA, 201 bp, Homo sapiens
gctttgccgagtgtcccttcctgagttccagcagttccttcttgactaccagggggagctgtgggctgttgatcgcctccaggtgcaggagttcatgctcrgcttcctccgagaccccttacgagagatcgaggagccatacttcttcctggatgagtttgtcaccttcctgttctccaaagagaacagtgtgtggaactc

SEQ ID NO: 50391 - DNA, 201 bp, Homo sapiens
tctactgccggcctgttccctttgatgaagagaagattggcacagaacgtgcttgctaccgggacatgtcatccttcccggaaaccaaggctgagaaataygtgaacaaggccaaaggcaagaagttccttcagtacaatcgactgcagctctcccgcatctaccccaagggccagcgactggattcctccaactacgatc

SEQ ID NO: 50392 - DNA, 201 bp, Homo sapiens; identical to SEQ ID NO: 50387

SEQ ID NO: 50393 - DNA, 201 bp, Homo sapiens; identical to SEQ ID NO: 50388

SEQ ID NO: 50394 - DNA, 201 bp, Homo sapiens
agctcccagcacaggccccctcagagcagtggggcagccgatggcctatgctagataggccacagcccctgccttagctagggattgagaagaaacagacwcataagatgcaatgtggtgtgtttaggttgtgttgagtttgagatactgatgggtcgttgaagtgggtctgcttagtgggcaattggatacacaagacca

SEQ ID NO: 50395 - DNA, 201 bp, Homo sapiens; identical to SEQ ID NO: 50390

SEQ ID NO: 50396 - DNA, 201 bp, Homo sapiens; identical to SEQ ID NO: 50385

SEQ ID NO: 50397 - DNA, 201 bp, Homo sapiens
accattttgacagtcgagaacgaagggccccaagaaggactcgggtcaatggagacaaccgcctctagttgtaccccagcctcgttggagagcagcaggtrctgtgcgccttgtagaatgccgcgaactgggttctttggaagcagccccctgtggcggccttccgggtctcgcagcctgaagcctggattccagcagtga

SEQ ID NO: 50398 - DNA, 201 bp, Homo sapiens; identical to SEQ ID NO: 50387

SEQ ID NO: 50399 - DNA, 201 bp, Homo sapiens; identical to SEQ ID NO: 50388

SEQ ID NO: 50400 - DNA, 201 bp, Homo sapiens
aggacctggagttggcctccctgctgatcaagattgacattttccctgccaaggagaatggtgacctcagtcccttcagtggtacgtccctgcgggagcgkggctcagatgcctcaggccagctgtttcatggccgagcccgggaaggctcctttgaatcccgctaccagcagccgtttgaggacttccgcatctcccagg

SEQ ID NO: 50401 - DNA, 201 bp, Homo sapiens; identical to SEQ ID NO: 50390

SEQ ID NO: 50402 - DNA, 201 bp, Homo sapiens; identical to SEQ ID NO: 50391

SEQ ID NO: 50403 - DNA, 201 bp, Homo sapiens; identical to SEQ ID NO: 50385

SEQ ID NO: 50404 - DNA, 201 bp, Homo sapiens; identical to SEQ ID NO: 50397

SEQ ID NO: 50405 - DNA, 201 bp, Homo sapiens; identical to SEQ ID NO: 50387

SEQ ID NO: 50406 - DNA, 201 bp, Homo sapiens; identical to SEQ ID NO: 50388

SEQ ID NO: 50407 - DNA, 201 bp, Homo sapiens; identical to SEQ ID NO: 50400

SEQ ID NO: 50408 - DNA, 201 bp, Homo sapiens; identical to SEQ ID NO: 50390

SEQ ID NO: 50409 - DNA, 201 bp, Homo sapiens; identical to SEQ ID NO: 50391

SEQ ID NO: 50410 - DNA, 201 bp, Homo sapiens
cggccgcccgccacaccccgctcttccccatcgacgacgcctacatgggcatgtgtctggagcgcgccggcctggcgcccagcggccacgagggcatccgrcccttcggcgtgcagctgcctggcgcacagcagtcctccttcgacccctgcatgtaccgcgagttgctgctagtgcaccgcttcgcgccctacgagatgc

SEQ ID NO: 50411 - DNA, 201 bp, Homo sapiens
agaagcccctgtcaaccttttattgggagtggaacacatgaggttcagctcgtgccgggcactgtacattcactgaagcagctcaaggggctcagccccgmcactgacgccacactgagcaggatgcacggcccggggctcacactgtccatggaggaggtggggtcagcccgaggtgggcggatggtggcccgagacacc

SEQ ID NO: 50412 - DNA, 201 bp, Homo sapiens
agtaaagaatttgatcctcttggtccattgccacctggatgggagaagagaacagacagcaatggcagagtatatttcgtcaaccacaacacacgaattayacaatgggaagaccccagaagtcaaggtcaattaaatgaaaagcccttacctgaaggttgggaaatgagattcacagtggatggaattccatattttgtg

SEQ ID NO: 50413 - DNA, 201 bp, Homo sapiens
tcgctctagtagctgtggtcggggctcgggaccggctgccatcttagtctagggactgaggagtcgccgccgccccgagtcccggtaccatgcatttcacrgtggccttgtggagacaacgccttaacccaaggaagtgactcaaactgtgagaacttcaggttttccaacctattggtggtatgtctgacagtggatcac

SEQ ID NO: 50414 - DNA, 201 bp, Homo sapiens
gtcatacctgttttaatcgcctggacctgccaccatacaagagctatgagcaactgaaggaaaagctgttgtttgccatagaagaaacagaaggatttggwcaagagtaacttctgagaacttgcaccatgaatgggcaagaacttatttgcaatgtttgtccttctctgcctgttgcacatcttgtaaaattggacaatg

SEQ ID NO: 50415 - DNA, 183 bp, Homo sapiens
aaaatactgcaaatagaccgcagacataaatatctaccaaatgctatcttaaattttggtccaaactgaacatatggaaatagatttattgtaagtatttrcttagagctttttcttaaatctgaactaacttgcttttagaagtctttttctttgtaagcattgtaaatgctaataaatcct

SEQ ID NO: 50416 - DNA, 201 bp, Homo sapiens; identical to SEQ ID NO: 50412

SEQ ID NO: 50417 - DNA, 201 bp, Homo sapiens
tcgctctagtagctgtggtcggggctcgggaccggctgccatcttagtctagggactgaggagtcgccgccgccccgagtcccggtaccatgcatttcacrgtggccttgtggagacaacgccttaacccaaggaagtgactcaaactgtgagaacttcagtgtctcctttgccatgttcaggttttccaacctattggtg

SEQ ID NO: 50418 - DNA, 201 bp, Homo sapiens
atgactagtcagaaccttgcttaacatgagattttaacacaacaatgaaatttgccttgtcttattccactagtttattcctttaacaacaatattttatrtgtgtcaaaagtctcacttgggagtagtgtttttttcttttagacattctgcagacatgcagggaagtcctttggtaactgcaatatacaagattttcct

SEQ ID NO: 50419 - DNA, 201 bp, Homo sapiens; identical to SEQ ID NO: 50412

SEQ ID NO: 50420 - DNA, 201 bp, Homo sapiens; identical to SEQ ID NO: 50413

SEQ ID NO: 50421 - DNA, 201 bp, Homo sapiens
cgcacaggaaaatctgccctgtaagttttctaaacattgtagattaagagtaaaatactagtccttcagattttgatataaagatttgtattagcaaggartggaagtcttagtatttcttgagttagcttgacaataggtttctgttcattaagtattttgcatttccatctccctcttggatattttatcctagagatt

SEQ ID NO: 50422 - DNA, 201 bp, Homo sapiens; identical to SEQ ID NO: 50414

SEQ ID NO: 50423 - DNA, 201 bp, Homo sapiens; identical to SEQ ID NO: 50412

SEQ ID NO: 50424 - DNA, 201 bp, Homo sapiens
tcgctctagtagctgtggtcggggctcgggaccggctgccatcttagtctagggactgaggagtcgccgccgccccgagtcccggtaccatgcatttcacrgtggccttgtggagacaacgctgtctcctttgccatgttcaggttttccaacctattggtggtatgtctgacagtggatcacaacttggttcaatgggta

SEQ ID NO: 50425 - DNA, 201 bp, Homo sapiens; identical to SEQ ID NO: 50414

SEQ ID NO: 50426 - DNA, 201 bp, Homo sapiens; identical to SEQ ID NO: 50412

SEQ ID NO: 50427 - DNA, 201 bp, Homo sapiens; identical to SEQ ID NO: 50417

SEQ ID NO: 50428 - DNA, 201 bp, Homo sapiens; identical to SEQ ID NO: 50414

SEQ ID NO: 50429 - DNA, 183 bp, Homo sapiens; identical to SEQ ID NO: 50415

SEQ ID NO: 50430 - DNA, 201 bp, Homo sapiens; identical to SEQ ID NO: 50412

SEQ ID NO: 50431 - DNA, 201 bp, Homo sapiens; identical to SEQ ID NO: 50413

SEQ ID NO: 50432 - DNA, 201 bp, Homo sapiens; identical to SEQ ID NO: 50418

SEQ ID NO: 50433 - DNA, 201 bp, Homo sapiens
gttctggctgcggttcctgctcagccaaaagagccgacgccagcttctgcttcagcgaattcaattcctcctcacgttgggcaacttcagcttgtaaggckagtacctcctcccgggaagccatggcgacctcttccggaagttgtcgtgaaaggcatttccgcttccgtcttctgtctcctagcgactgggataaactaa

SEQ ID NO: 50434 - DNA, 201 bp, Homo sapiens
tttcaggttaaacatgaaagaagcctggttactgatttgtataaaatgtactcttaaagtataaaatataaggtaaggtaaatttcatgcatctttttatkaagaccacctattttatatttcaaattaaataattttaaagttgctggcctaatgagcaatgttctcaattttcgttttcattttgctgtattgagacct

SEQ ID NO: 50435 - DNA, 201 bp, Homo sapiens
cctcacgttgggcaacttcagcttgtaaggcgagtacctcctcccgggaagccatggcgacctcttccggaagttgtcgtgaaaggcatttccgcttccgkcttctgtctcctagcgactgggataaactaaaaaactttatggagcttgggaaaaggtgatgaatagatatttacttcctgaagaaaccttcagattaaa

SEQ ID NO: 50436 - DNA, 201 bp, Homo sapiens
gtatgtgaatgtagaattttttacatggggaataatttgaaatagtctttttaaaaactggaatcatagatctttatacctaattgatctcagaagtaagrtaatgttaactgatgaaatgtttatggctgtgtctgtatgaattgaaaaagaaatacacacctctgccctttccttaaaaatgtatctcaaatttcttaa

SEQ ID NO: 50437 - DNA, 201 bp, Homo sapiens
gatttatttcagtgatttgctcagtatcaagtactcacacctgggagagacagatggcaccagactcctgctcatttgtgacgtagccctcagaaagtgtrtggacttacacgagaagaacttttccttgactgaagcaccaccaggctacgacagtgtgcatggagtttcacaaacagcctctgtcaccacagacttaga

SEQ ID NO: 50438 - DNA, 201 bp, Homo sapiens
tgctgcggctggggagaggctgcttctacgatgccaacccaggttgtcatggaaattagccagagcaggtaccccagggcccagcaggtttcctgcatacrgtttggtacacagaatgttgaaattcctcatcttcctcaagattttgaagttgcaaaatataacaccttggagaaagtgggaatggagggaggccaggaa

SEQ ID NO: 50439 - DNA, 201 bp, Homo sapiens
tacccaaagtagtggaagatcgtggtgtgcaaagaacagacgtcggaaaccttggaagtgggatttatttcagtgatttgctcagtatcaagtactcacamctgggagagacagatggcaccagactcctgctcatttgtgacgtagccctcagaaagtgtatggacttacacgagaagaacttttccttgactgaagcac

SEQ ID NO: 50440 - DNA, 151 bp, Homo sapiens
tgaagattaccagttaccagatgccaaaacttccagcagcaccaaggccagcctccaggatgcctctgggaacttggttcctctggaggatgtccacatcraggagaatcatagacactgtagcccaggtatgttgtctgtggctttatga

SEQ ID NO: 50441 - DNA, 201 bp, Homo sapiens
cccaaagtagtggaagatcgtggtgtgcaaagaacagacgtcggaaaccttggaagtgggatttatttcagtgatttgctcagtatcaagtactcacaccygggagagacagatggcaccagactcctgctcatttgtgacgtagccctcagaaagtgtatggacttacacgagaagaacttttccttgactgaagcacca

SEQ ID NO: 50442 - DNA, 201 bp, Homo sapiens
tggaagtgggatttatttcagtgatttgctcagtatcaagtactcacacctgggagagacagatggcaccagactcctgctcatttgtgacgtagccctcrgaaagtgtatggacttacacgagaagaacttttccttgactgaagcaccaccaggctacgacagtgtgcatggagtttcacaaacagcctctgtcaccac

SEQ ID NO: 50443 - DNA, 156 bp, Homo sapiens
atggccccgtgctggccctgctggccttgctgcggctggggagaggctgcttctaygatgccaacccaggttgtcatggaaattagccagagcaggtaccccagggcccagcaggtttcctgcatacggtttggtacacagaatgttgaaattcct

SEQ ID NO: 50444 - DNA, 201 bp, Homo sapiens
gatgaatttgttgtctataaaaccaatcaggttaaaatgaaatatattattaaatttcccatgcctggagatcaaataaaggactttcatcctagtgatcmtactgaattagaggaatacagacctgagttttcaaatttttcaaaggatgaagattaccagttaccagatgccaaaacttccagcagcaccaaggccagc

SEQ ID NO: 50445 - DNA, 201 bp, Homo sapiens
ggtttgatgcatctcaattcagccaaggccctgcgcctggcagttgtgctgactggatcccacagttggcgtcttgtcccacaggacctctccagaacccstcttctgcaccctactgtggcattactttttcagggagctcattgagctccacacagtctgctccactgcaacctgctggaggccgtatgaccaggcctt

SEQ ID NO: 50446 - DNA, 201 bp, Homo sapiens
tctgagtggcaagaattacgttcatccaaaccaaaatttagggctaaaagaaaaatgaaattatctaagccagaagtttctgaagattttgaagaggatgscttaggtgtactactagctttcacatcaactttagaacgtggagcctttggttcctctcttccccggctgcccgctctcacaatgctgcttccttgcctt

SEQ ID NO: 50447 - DNA, 201 bp, Homo sapiens
ccctgcgcctggcagttgtgctgactggatcccacagttggcgtcttgtcccacaggacctctccagaacccgtcttctgcaccctactgtggcattactytttcagggagctcattgagctccacacagtctgctccactgcaacctgctggaggccgtatgaccaggccttctgctggcaccttccctgagctggattc

SEQ ID NO: 50448 - DNA, 201 bp, Homo sapiens
taaaagaaaaatgaaattatctaagccagaagtttctgaagattttgaagaggatggcttaggtgtactactagctttcacatcaactttagaacgtggascctttggttcctctcttccccggctgcccgctctcacaatgctgcttccttgccttttgcctcatattgtcagatagctagttttggttttgctgctcct

SEQ ID NO: 50449 - DNA, 201 bp, Homo sapiens
ccttccagacggtttgatgcatctcaattcagccaaggccctgcgcctggcagttgtgctgactggatcccacagttggcgtcttgtcccacaggacctcyccagaacccgtcttctgcaccctactgtggcattactttttcagggagctcattgagctccacacagtctgctccactgcaacctgctggaggccgtatg

SEQ ID NO: 50450 - DNA, 201 bp, Homo sapiens
ttgtgcagtgtcagcttctcatgctgagagttctgcgcttccaggtctccttccagcatccacacaagtacctgctccactacctgctttccctcaagaastggctgaaccgccacagctggcagcggatccccgttgccgtcactgcctgggccctgctgcgggacagctaccacgggggtctgtgcctccgcttccagg

SEQ ID NO: 50451 - DNA, 201 bp, Homo sapiens
agcccgggagggcggcggagcggggcccgcagcgcggggcccggaggggcagccggcgcccgaagccagggtgcacttccgagtggcgaggttcatcatgsaggcaagtgtcaagctagggatgcggtccattcccattgccactgcttgcaccatttaccataagttcttctgcgagaccagcctggacgcctgtgaccc

SEQ ID NO: 50452 - DNA, 201 bp, Homo sapiens
gcccggaggggcagccggcgcccgaagccagggtgcacttccgagtggcgaggttcatcatgcaggcaagtgtcaagctagggatgcggtccattcccatygccactgcttgcaccatttaccataagttcttctgcgagaccagcctggacgcctgtgacccttacctgattgccatgtcttccatttacttggccggca

SEQ ID NO: 50453 - DNA, 201 bp, Homo sapiens
aagccgtggtggcagatgatccacaagctggcaacccgagctctaatcggagattacgaagatggcattcttcacgaaaatgaaaccagtcatgagaccasggcctcagcagaggggcccctcagccaggccaccaggactgcccagctgttctctcggggatgagatcttcaacaaggctgatgagaatgaatcgccttt

SEQ ID NO: 50454 - DNA, 201 bp, Homo sapiens
cagcattgtgcagtgtcagcttctcatgctgagagttctgcgcttccaggtctccttccagcatccacacaagtacctgctccactacctgctttccctcragaagtggctgaaccgccacagctggcagcggatccccgttgccgtcactgcctgggccctgctgcgggacagctaccacgggggtctgtgcctccgctt

SEQ ID NO: 50455 - DNA, 201 bp, Homo sapiens
gttctgcgcttccaggtctccttccagcatccacacaagtacctgctccactacctgctttccctcaagaagtggctgaaccgccacagctggcagcggayccccgttgccgtcactgcctgggccctgctgcgggacagctaccacgggggtctgtgcctccgcttccaggaccagcacatcaccgtggcggtgctctac

SEQ ID NO: 50456 - DNA, 201 bp, Homo sapiens
gcagttgtgctgactggatcccacagttggcgtcttgtcccacaggacctctccagaacccgtcttctgcaccctactgtggcattactttttcagggagytcattgagctccacacagtctgctccactgcaacctgctggaggccgtatgaccaggccttctgctggcaccttccctgagctggattctccccagcttc

SEQ ID NO: 50457 - DNA, 201 bp, Homo sapiens
agcgcggggcccggaggggcagccggcgcccgaagccagggtgcacttccgagtggcgaggttcatcatgcaggcaagtgtcaagctagggatgcggtccrttcccattgccactgcttgcaccatttaccataagttcttctgcgagaccagcctggacgcctgtgacccttacctgattgccatgtcttccatttactt

SEQ ID NO: 50458 - DNA, 201 bp, Homo sapiens
accagcctggacgcctgtgacccttacctgattgccatgtcttccatttacttggccggcaaagtggaagagcagcacctgcagactcgtgacatcatcartgtgtccaacaggtactttaacccaagcggtgagcccctggaattggactcccgcttctgggagctccgggacagcattgtgcagtgtcagcttctcatg

SEQ ID NO: 50459 - DNA, 201 bp, Homo sapiens
cgaagatggcattcttcacgaaaatgaaaccagtcatgagaccacggcctcagcagaggggcccctcagccaggccaccaggactgcccagctgttctctsggggatgagatcttcaacaaggctgatgagaatgaatcgcctttccctgatattccaaaagtttctgaacttattgccaaagaagatgtagacttcctgc

SEQ ID NO: 50460 - DNA, 201 bp, Homo sapiens
gaagatggcattcttcacgaaaatgaaaccagtcatgagaccacggcctcagcagaggggcccctcagccaggccaccaggactgcccagctgttctctcrgggatgagatcttcaacaaggctgatgagaatgaatcgcctttccctgatattccaaaagtttctgaacttattgccaaagaagatgtagacttcctgcc

SEQ ID NO: 50461 - DNA, 201 bp, Homo sapiens
gtggcggtgctctacctggccctgcaggtctgcggagttgaggtgcccgctgaggtcgaggctgagaagccgtggtggcagatgatccacaagctggcaayccgagctctaatcggagattacgaagatggcattcttcacgaaaatgaaaccagtcatgagaccacggcctcagcagaggggcccctcagccaggccacc

SEQ ID NO: 50462 - DNA, 201 bp, Homo sapiens; identical to SEQ ID NO: 50452

SEQ ID NO: 50463 - DNA, 201 bp, Homo sapiens; identical to SEQ ID NO: 50450

SEQ ID NO: 50464 - DNA, 201 bp, Homo sapiens; identical to SEQ ID NO: 50458

SEQ ID NO: 50465 - DNA, 201 bp, Homo sapiens; identical to SEQ ID NO: 50454

SEQ ID NO: 50466 - DNA, 201 bp, Homo sapiens; identical to SEQ ID NO: 50455

SEQ ID NO: 50467 - DNA, 201 bp, Homo sapiens; identical to SEQ ID NO: 50457

SEQ ID NO: 50468 - DNA, 201 bp, Homo sapiens; identical to SEQ ID NO: 50451

SEQ ID NO: 50469 - DNA, 201 bp, Homo sapiens
ctgtgtcccctcttcatagagtccttcattacagtcaaggctaaatcaaatgaaactgaattttaaactttttgcatgcttctatgtagaaaataatcaarcgataatagatacttacaatgaaactccattaaggttttattcagtgtagcaattagtgtctttaaaaataaagtggaagcagaattactttaatcaact

SEQ ID NO: 50470 - DNA, 201 bp, Homo sapiens; identical to SEQ ID NO: 50449

SEQ ID NO: 50471 - DNA, 201 bp, Homo sapiens
agacaactgcaaagatgatccacaagctggcaacccgagctctaatcggagattacgaagatggcattcttcacgaaaatgaaaccagtcatgagatgaaraaacaaaccttgaaatctctgattattaaactcagtaaagaaaactctctcataatacaatttacaagctttgtggcagttgagaaaagggatgagaatg

SEQ ID NO: 50472 - DNA, 201 bp, Homo sapiens
aagtagtggaagatcgtggtgtgcaaagaacagacgtcggaaaccttggaagtgggatttatttcagtgatttgctcagtacaagtatcaagtactcacamctgggagagacagatggcaccagactcctgctcatttgtgacgtagccctcagaaagtgtatggacttacacgagaagaacttttccttgactgaagcac

SEQ ID NO: 50473 - DNA, 201 bp, Homo sapiens; identical to SEQ ID NO: 50445

SEQ ID NO: 50474 - DNA, 201 bp, Homo sapiens
tgaagattaccagttaccagatgccaaaacttccagcagcaccaaggccagcctccaggatgcctctgggaacttggttcctctggaggatgtccacatcraggagaatcatagacactgtagcccaggtcattgtatttcagacatacacaaataaaagtcatgtgcccattgaggcaaaatatatctttcctttggatg

SEQ ID NO: 50475 - DNA, 201 bp, Homo sapiens
tctgagtggcaagaattacgttcatccaaaccaaaatttagggctaaaagaaaaatgaaattatctaagccagaagtttctgaagattttgaagaggatgscttaggtgtactactagctttcacatcaactttagaacgtggaggtgtggaaaagctattggatttaaattggacagagtcatgtaaaccaacagcaact

SEQ ID NO: 50476 - DNA, 201 bp, Homo sapiens; identical to SEQ ID NO: 50447

SEQ ID NO: 50477 - DNA, 201 bp, Homo sapiens
gtagtggaagatcgtggtgtgcaaagaacagacgtcggaaaccttggaagtgggatttatttcagtgatttgctcagtacaagtatcaagtactcacaccygggagagacagatggcaccagactcctgctcatttgtgacgtagccctcagaaagtgtatggacttacacgagaagaacttttccttgactgaagcacca

SEQ ID NO: 50478 - DNA, 201 bp, Homo sapiens
gtacttctagacagctgctttttacaaataaaatgtgatacaacagacaacagtatcccgtgccttctggaggtaatagaggaggatgagatagtgtgcayacagcactggcaggatgctgtgccttggactgaactcttcagtctacagacagaggatggcttctggaaacttacaccagaactgggatttatattaaat

SEQ ID NO: 50479 - DNA, 201 bp, Homo sapiens
taaaagaaaaatgaaattatctaagccagaagtttctgaagattttgaagaggatggcttaggtgtactactagctttcacatcaactttagaacgtggasgtgtggaaaagctattggatttaaattggacagagtcatgtaaaccaacagcaactgaaccactatttaagaaacgcccggccggaaacatctacttcta

SEQ ID NO: 50480 - DNA, 201 bp, Homo sapiens
caagtttgtgtgcactaatttaagagaaagaatttttgtacaatagtgtcgactattgagcttcagaagacaactgcaaagatgatccacaagctggcaayccgagctctaatcggagattacgaagatggcattcttcacgaaaatgaaaccagtcatgagatgaagaaacaaaccttgaaatctctgattattaaactc

SEQ ID NO: 50481 - DNA, 201 bp, Homo sapiens; identical to SEQ ID NO: 50456

SEQ ID NO: 50482 - DNA, 201 bp, Homo sapiens
tgggatttatttcagtgatttgctcagtacaagtatcaagtactcacacctgggagagacagatggcaccagactcctgctcatttgtgacgtagccctcrgaaagtgtatggacttacacgagaagaacttttccttgactgaagcaccaccaggctacgacagtgtgcatggagtttcacaaacagcctctgtcaccac

SEQ ID NO: 50483 - DNA, 201 bp, Homo sapiens
aagttgttctgaaacagaaagtcatgagctatgagaagtacttctagacagctgctttttacaaataaaatgtgatacaacagacaacagtatcccgtgcyttctggaggtaatagaggaggatgagatagtgtgcacacagcactggcaggatgctgtgccttggactgaactcttcagtctacagacagaggatggctt

SEQ ID NO: 50484 - DNA, 201 bp, Homo sapiens
aatcagtaagcggtctcgaaggaagtcaatatcctgactatggttttcaaagttgttctgaaacagaaagtcatgagctatgagaagtacttctagacagytgctttttacaaataaaatgtgatacaacagacaacagtatcccgtgccttctggaggtaatagaggaggatgagatagtgtgcacacagcactggcagg

SEQ ID NO: 50485 - DNA, 201 bp, Homo sapiens; identical to SEQ ID NO: 50444

SEQ ID NO: 50486 - DNA, 201 bp, Homo sapiens
tctccagaacccgtcttctgcaccctactgtggcattactttttcagggagctcattgagctccacacagtctgctccactgcaacctgctggaggccgtktgaccaggccttctgctggcaccttccctgagctggattctccccagcttcatttctctcttcctacagaccctgatcccatcagaggttttgggtctta

SEQ ID NO: 50487 - DNA, 201 bp, Homo sapiens
agctatgagaagtacttctagacagctgctttttacaaataaaatgtgatacaacagacaacagtatcccgtgccttctggaggtaatagaggaggatgaratagtgtgcacacagcactggcaggatgctgtgccttggactgaactcttcagtctacagacagaggatggcttctggaaacttacaccagaactgggat

SEQ ID NO: 50488 - DNA, 201 bp, Homo sapiens; identical to SEQ ID NO: 50452

SEQ ID NO: 50489 - DNA, 201 bp, Homo sapiens
gagaaggcgatagcatgctgccgctttgacagtccctagcagtcgcggtccagatgatggtgggagccgcgcctccagcgggcaggccgggagtgcactgygtgcagctgatccaaggcagccacatctgcttttgtcctttgagaggactctgactacaatataggcatgacatcaatgaaaggaaaatcatgaaatcga

SEQ ID NO: 50490 - DNA, 201 bp, Homo sapiens; identical to SEQ ID NO: 50454

SEQ ID NO: 50491 - DNA, 201 bp, Homo sapiens; identical to SEQ ID NO: 50455

SEQ ID NO: 50492 - DNA, 201 bp, Homo sapiens; identical to SEQ ID NO: 50457

SEQ ID NO: 50493 - DNA, 201 bp, Homo sapiens
ccctggcccaggtctgcccaaagagaagcccaggatggtcggctgcctggggacattgccaccacgtcgccacgatggctggtcctcagaggaccagctgrgaggactggttgtgctgctggagaagggctggagaaggcgatagcatgctgccgctttgacagtccctagcagtcgcggtccagatgatggtgggagccg

SEQ ID NO: 50494 - DNA, 201 bp, Homo sapiens
cccaggatggtcggctgcctggggacattgccaccacgtcgccacgatggctggtcctcagaggaccagctgggaggactggttgtgctgctggagaaggrctggagaaggcgatagcatgctgccgctttgacagtccctagcagtcgcggtccagatgatggtgggagccgcgcctccagcgggcaggccgggagtgca

SEQ ID NO: 50495 - DNA, 201 bp, Homo sapiens; identical to SEQ ID NO: 50450

SEQ ID NO: 50496 - DNA, 201 bp, Homo sapiens; identical to SEQ ID NO: 50458

SEQ ID NO: 50497 - DNA, 201 bp, Homo sapiens; identical to SEQ ID NO: 50451

SEQ ID NO: 50498 - DNA, 201 bp, Homo sapiens
tgctgctggagaagggctggagaaggcgatagcatgctgccgctttgacagtccctagcagtcgcggtccagatgatggtgggagccgcgcctccagcggscaggccgggagtgcactgcgtgcagctgatccaaggcagccacatctgcttttgtcctttgagaggactctgactacaatataggcatgacatcaatgaa

SEQ ID NO: 50499 - DNA, 201 bp, Homo sapiens; identical to SEQ ID NO: 50445

SEQ ID NO: 50500 - DNA, 201 bp, Homo sapiens; identical to SEQ ID NO: 50475

SEQ ID NO: 50501 - DNA, 201 bp, Homo sapiens; identical to SEQ ID NO: 50447

SEQ ID NO: 50502 - DNA, 201 bp, Homo sapiens; identical to SEQ ID NO: 50479

SEQ ID NO: 50503 - DNA, 201 bp, Homo sapiens
aagtgttgttcagagtgtggcagaagtggggaggccagaaggagtgttgcccaatgctgtcctcatccagtccaccccccacccaccaccaacagatgagyatggtcatgagtgtggtcacctcatcagtcatttgctcagctgtgaaaaagaaattgttcagagaagagcaaagtgtttttccatgagccagaggaataa

SEQ ID NO: 50504 - DNA, 201 bp, Homo sapiens; identical to SEQ ID NO: 50484

SEQ ID NO: 50505 - DNA, 201 bp, Homo sapiens
tgtggcagaagtggggaggccagaaggagtgttgcccaatgctgtcctcatccagtccaccccccacccaccaccaacagatgagtatggtcatgagtgtrgtcacctcatcagtcatttgctcagctgtgaaaaagaaattgttcagagaagagcaaagtgtttttccatgagccagaggaataatggccttatattctg

SEQ ID NO: 50506 - DNA, 201 bp, Homo sapiens; identical to SEQ ID NO: 50487

SEQ ID NO: 50507 - DNA, 201 bp, Homo sapiens; identical to SEQ ID NO: 50449

SEQ ID NO: 50508 - DNA, 201 bp, Homo sapiens; identical to SEQ ID NO: 50483

SEQ ID NO: 50509 - DNA, 201 bp, Homo sapiens; identical to SEQ ID NO: 50444

SEQ ID NO: 50510 - DNA, 201 bp, Homo sapiens
aaatcttaatacaaatgctttgcacagctttcttaaacaaaaaggcattcaatctctaggtgtaaaaggaagagaacatctcctggacctaattgccacaktgcgatactacagtttattcgcaccagtgttcaaatcactgatggaactggatgacgcttctatttccaggaatattccctgggcttttgaggcaataaa

SEQ ID NO: 50511 - DNA, 201 bp, Homo sapiens
aaatcttaatacaaatgctttgcacagctttcttaaacaaaaaggcattcaatctctaggtgtaaaaggaagagaacatctcctggacctaattgccacartgcgatactacagtttattcgcaccagtgttcaaatcactgatggaactggatgacgcttctatttccaggaatattccctgggcttttgaggcaataaa

SEQ ID NO: 50512 - DNA, 201 bp, Homo sapiens
ggcagaagtggggaggccagaaggagtgttgcccaatgctgtcctcatccagtccaccccccacccaccaccaacagatgagtatggtcatgagtgtggtyacctcatcagtcatttgctcagctgtgaaaaagaaattgttcagagaagagcaaagtgtttttccatgagccagaggaataatggccttatattctggac

SEQ ID NO: 50513 - DNA, 201 bp, Homo sapiens; identical to SEQ ID NO: 50438

SEQ ID NO: 50514 - DNA, 201 bp, Homo sapiens; identical to SEQ ID NO: 50472

SEQ ID NO: 50515 - DNA, 201 bp, Homo sapiens; identical to SEQ ID NO: 50474

SEQ ID NO: 50516 - DNA, 201 bp, Homo sapiens; identical to SEQ ID NO: 50477

SEQ ID NO: 50517 - DNA, 201 bp, Homo sapiens; identical to SEQ ID NO: 50478

SEQ ID NO: 50518 - DNA, 156 bp, Homo sapiens; identical to SEQ ID NO: 50443

SEQ ID NO: 50519 - DNA, 201 bp, Homo sapiens; identical to SEQ ID NO: 50482

SEQ ID NO: 50520 - DNA, 201 bp, Homo sapiens; identical to SEQ ID NO: 50456

SEQ ID NO: 50521 - DNA, 201 bp, Homo sapiens
agacaactgcaactatgatccacaagctggcaacccgagctctaatcggagattacgaagatggcattcttcacgaaaatgaaaccagtcatgagatgaaraaacaaaccttgaaatctctgattattaaactcagtaaagaaaactctctcataatacaatttacaagctttgtggcagttgagaaaagggatgagaatg

SEQ ID NO: 50522 - DNA, 201 bp, Homo sapiens
caagtttgtgtgcactaatttaagagaaagaatttttgtacaatagtgtcgactattgagcttcagaagacaactgcaactatgatccacaagctggcaayccgagctctaatcggagattacgaagatggcattcttcacgaaaatgaaaccagtcatgagatgaagaaacaaaccttgaaatctctgattattaaactc

SEQ ID NO: 50523 - DNA, 136 bp, Homo sapiens
gcaagtgtcaagctagggatgcggtccattcccatygccactgcttgcaccatttaccataagttcttctgcgagaccagcctggacgcctgtgacccttacctgattgccatgtcttccatttacttggccggca

SEQ ID NO: 50524 - DNA, 201 bp, Homo sapiens; identical to SEQ ID NO: 50489

SEQ ID NO: 50525 - DNA, 201 bp, Homo sapiens; identical to SEQ ID NO: 50458

SEQ ID NO: 50526 - DNA, 128 bp, Homo sapiens
gcaagtgtcaagctagggatgcggtccrttcccattgccactgcttgcaccatttaccataagttcttctgcgagaccagcctggacgcctgtgacccttacctgattgccatgtcttccatttactt

SEQ ID NO: 50527 - DNA, 201 bp, Homo sapiens; identical to SEQ ID NO: 50493

SEQ ID NO: 50528 - DNA, 201 bp, Homo sapiens; identical to SEQ ID NO: 50494

SEQ ID NO: 50529 - DNA, 201 bp, Homo sapiens; identical to SEQ ID NO: 50498

SEQ ID NO: 50530 - DNA, 170 bp, Homo sapiens
atggccccgtgctggccctgctggccttgctgcggctggggagaggctgcttctacgatgccaacccagrttgtcatggaaattagccagagcaggtaccccagggcccagcaggtttcctgcatacggtttggtacacagaatgttgaaattcctcatcttcctcaaga

SEQ ID NO: 50531 - DNA, 201 bp, Homo sapiens; identical to SEQ ID NO: 50438

SEQ ID NO: 50532 - DNA, 156 bp, Homo sapiens; identical to SEQ ID NO: 50443

SEQ ID NO: 50533 - DNA, 101 bp, Homo sapiens
cctcctggatgatggcatgcagagcgagcccgagtctgtgtagagatgatagaatgtgtcgttgttttcttcattgagaaagaaaaccgtagcatcgtgtr

SEQ ID NO: 50534 - DNA, 201 bp, Homo sapiens; identical to SEQ ID NO: 50452

SEQ ID NO: 50535 - DNA, 201 bp, Homo sapiens; identical to SEQ ID NO: 50489

SEQ ID NO: 50536 - DNA, 201 bp, Homo sapiens
cattgtgcagtgtcagcttctcatgctgagagttctgcgcttccaggtctccttccagcatccacacaaaagtggctgaaccgccacagctggcagcggayccccgttgccgtcactgcctgggccctgctgcgggacagctaccacgggggtctgtgcctccgcttccaggaccagcacatcaccgtggcggtgctctac

SEQ ID NO: 50537 - DNA, 201 bp, Homo sapiens; identical to SEQ ID NO: 50457

SEQ ID NO: 50538 - DNA, 201 bp, Homo sapiens; identical to SEQ ID NO: 50493

SEQ ID NO: 50539 - DNA, 201 bp, Homo sapiens; identical to SEQ ID NO: 50494

SEQ ID NO: 50540 - DNA, 201 bp, Homo sapiens
gactcccgcttctgggagctccgggacagcattgtgcagtgtcagcttctcatgctgagagttctgcgcttccaggtctccttccagcatccacacaaaastggctgaaccgccacagctggcagcggatccccgttgccgtcactgcctgggccctgctgcgggacagctaccacgggggtctgtgcctccgcttccagg

SEQ ID NO: 50541 - DNA, 201 bp, Homo sapiens; identical to SEQ ID NO: 50458

SEQ ID NO: 50542 - DNA, 201 bp, Homo sapiens; identical to SEQ ID NO: 50451

SEQ ID NO: 50543 - DNA, 201 bp, Homo sapiens; identical to SEQ ID NO: 50498

SEQ ID NO: 50544 - DNA, 160 bp, Homo sapiens
caagttattcattttattttgttttcattttggggtgaagattcagtttcagtcttttggatataggtttccaattaagtacatggtcaagtattaacacmccatttatgagtctcaagttttattattgcaataaaagtgctttatgccggcttttctc

SEQ ID NO: 50545 - DNA, 201 bp, Homo sapiens
agcttctaaaactggaatgacaggaatggcctcctcccttagctccctgttcttggatctgccatggagggatctggtgcctccagacatgtgcacatgartccatatggagcttttcctgatgttccactccactttgtatagacatctgccctgactgaatgtgttctgtcactcagctttgcttccgacacctctgtt

SEQ ID NO: 50546 - DNA, 201 bp, Homo sapiens
tgttctgtcactcagctttgcttccgacacctctgtttcctcttcccctttctcctcgtatgtgtgtttacctaaactatatgccataaacctcaagttaytcattttattttgttttcattttggggtgaagattcagtttcagtcttttggatataggtttccaattaagtacatggtcaagtattaacacaccattta

SEQ ID NO: 50547 - DNA, 160 bp, Homo sapiens
atctcagtttcctggcttttcctccctcagccccttctcacccctttgctgtcctgtgtagtgatttggtgagaaatcgttgctgcacccttcccccagcmccatttatgagtctcaagttttattattgcaataaaagtgctttatgccggcttttctc

SEQ ID NO: 50548 - DNA, 201 bp, Homo sapiens
tgggttaaattaaaagccctacctaaaactgaggtggggatggggagagcctttgcctccaccattcccacccaccctccccttaaaccctctgcctttgmaagtagatcatgttcactgcaatgctggacactacaggtatctgtccctgggccagcagggacctctgaagccttctttgtggccttttttttttttcat

SEQ ID NO: 50549 - DNA, 173 bp, Homo sapiens
gctccctctgctgatctcagtttcctggcttttcctccctcagccccttctcacccctttgctgtcctgtgtagtgatttggtgagaaatcgttgctgcayccttcccccagcaccatttatgagtctcaagttttattattgcaataaaagtgctttatgccggcttttctc

SEQ ID NO: 50550 - DNA, 201 bp, Homo sapiens
tcagtcttttggatataggtttccaattaagtacatggtcaagtattaacagcacaagtggtaggttaacattagaataggaattggtgttggggggggggtttgcaagaatattttattttaattttttggatgaaatttttatctattatatattaaacattcttgctgctgcgctgcaaagccatagcagatttgagg

SEQ ID NO: 50551 - DNA, 201 bp, Homo sapiens; identical to SEQ ID NO: 50545

SEQ ID NO: 50552 - DNA, 201 bp, Homo sapiens
tgttctgtcactcagctttgcttccgacacctctgtttcctcttcccctttctcctcgtatgtgtgtttacctaaactatatgccataaacctcaagttaytcattttattttgttttcattttggggtgaagattcagtttcagtcttttggatataggtttccaattaagtacatggtcaagtattaacagcacaagtg

SEQ ID NO: 50553 - DNA, 201 bp, Homo sapiens
ctttgaatgtaaaaattggtcaccctaaggaaaggaattggcatgtgtatgttcccagttcaactcatggagatggcagctgtttaaatgtttttctatgyagtttataaattaaaactgaattgaggactatggaaatgtaggccaaatttgtagtgccaacattttagttctttggaaataagactcttaatgaatgac

SEQ ID NO: 50554 - DNA, 201 bp, Homo sapiens
aggactatggaaatgtaggccaaatttgtagtgccaacattttagttctttggaaataagactcttaatgaatgactttgttctaccctgtgtttctagargctagagggggaaaaaaaaagccctttggatatgaatatcatgtcctagcttctgcggctctctcttcactgtggtttgtggttactgcctattagatgg

SEQ ID NO: 50555 - DNA, 201 bp, Homo sapiens
acaaccattggctgcaaggacccggcccagggacaactcctgaaagagctgatgcagacaccaaacttccgtatcacagtggtgcaagaggtggacacagyagagatctgtggagccttaaagaatgtagtggccgtgggggctggcttctgtgatggcctgggctttggcgacaacaccaaggcggcagtgatccggctg

SEQ ID NO: 50556 - DNA, 201 bp, Homo sapiens
agagacgcggcaccatggctagcaagaaagtctgcattgtaggctccgggaactggggctcagccatcgccaagatcgtgggtggcaatgcagcccagctsgcacagtttgacccacgggtgaccatgtgggtatttgaggaagacattggaggcaaaaagctgactgagatcatcaacacgcagcatgagaatgtcaaat

SEQ ID NO: 50557 - DNA, 201 bp, Homo sapiens
tcctccagcacaagggcctggtagacaagtttcccttgttcatggctgtgtacaaggtgtgctacgagggccagccagtgggtgaattcattcactgcctrcagaatcatccagaacatatgtgagtggggccagggcccaggccaggccgcttttttaccccagtggagaccagcagaagcctggggtacctagtcacca

SEQ ID NO: 50558 - DNA, 201 bp, Homo sapiens
tatacagcatcctccagcacaagggcctggtagacaagtttcccttgttcatggctgtgtacaaggtgtgctacgagggccagccagtgggtgaattcatycactgcctgcagaatcatccagaacatatgtgagtggggccagggcccaggccaggccgcttttttaccccagtggagaccagcagaagcctggggtacc

SEQ ID NO: 50559 - DNA, 201 bp, Homo sapiens
gatcgtgggtggcaatgcagcccagctggcacagtttgacccacgggtgaccatgtgggtatttgaggaagacattggaggcaaaaagctgactgagatcrtcaacacgcagcatgagaatgtcaaatacctgccagggcacaagttgcccccaaatgtggtggctgtcccagatgtggtccaggctgcagaggatgctga

SEQ ID NO: 50560 - DNA, 201 bp, Homo sapiens
catcctgatctttgtggtgccccatcagttcatcggcaagatctgtgaccagctcaagggccatctgaaggcaaacgccactggcatatctcttattaagrgggtagacgagggccccaatgggctgaagctcatctcggaagtgattggggagcgcctcggcatccccatgagtgtgctgatgggggccaacattgccag

SEQ ID NO: 50561 - DNA, 201 bp, Homo sapiens
cacagtagagatctgtggagccttaaagaatgtagtggccgtgggggctggcttctgtgatggcctgggctttggcgacaacaccaaggcggcagtgatcyggctgggactcatggagatgatagccttcgccaagctcttctgcagtggccctgtgtcctctgccaccttcttggagagctgtggtgttgctgacctgat

SEQ ID NO: 50562 - DNA, 201 bp, Homo sapiens
ctttgtggtgccccatcagttcatcggcaagatctgtgaccagctcaagggccatctgaaggcaaacgccactggcatatctcttattaagggggtagacragggccccaatgggctgaagctcatctcggaagtgattggggagcgcctcggcatccccatgagtgtgctgatgggggccaacattgccagcgaggtggc

SEQ ID NO: 50563 - DNA, 201 bp, Homo sapiens
cggcccagggacaactcctgaaagagctgatgcagacaccaaacttccgtatcacagtggtgcaagaggtggacacagtagagatctgtggagccttaaaraatgtagtggccgtgggggctggcttctgtgatggcctgggctttggcgacaacaccaaggcggcagtgatccggctgggactcatggagatgatagcct

SEQ ID NO: 50564 - DNA, 201 bp, Homo sapiens
ggtgaccatgtgggtatttgaggaagacattggaggcaaaaagctgactgagatcatcaacacgcagcatgagaatgtcaaatacctgccagggcacaagytgcccccaaatgtggtggctgtcccagatgtggtccaggctgcagaggatgctgacatcctgatctttgtggtgccccatcagttcatcggcaagatctg

SEQ ID NO: 50565 - DNA, 201 bp, Homo sapiens; identical to SEQ ID NO: 50555

SEQ ID NO: 50566 - DNA, 201 bp, Homo sapiens; identical to SEQ ID NO: 50556

SEQ ID NO: 50567 - DNA, 201 bp, Homo sapiens; identical to SEQ ID NO: 50557

SEQ ID NO: 50568 - DNA, 201 bp, Homo sapiens; identical to SEQ ID NO: 50558

SEQ ID NO: 50569 - DNA, 201 bp, Homo sapiens; identical to SEQ ID NO: 50559

SEQ ID NO: 50570 - DNA, 201 bp, Homo sapiens; identical to SEQ ID NO: 50560

SEQ ID NO: 50571 - DNA, 201 bp, Homo sapiens; identical to SEQ ID NO: 50561

SEQ ID NO: 50572 - DNA, 201 bp, Homo sapiens; identical to SEQ ID NO: 50562

SEQ ID NO: 50573 - DNA, 201 bp, Homo sapiens; identical to SEQ ID NO: 50563

SEQ ID NO: 50574 - DNA, 201 bp, Homo sapiens; identical to SEQ ID NO: 50564

SEQ ID NO: 50575 - DNA, 201 bp, Homo sapiens
ttgacaagtttgaggccagcataaaggactataaggatcaaaaagcaagcagaaatgaatccacattctagtcctttatgcagtatacaaggagaactgtmctgtaggatattctcttcctgatggtgcagaacccagaattagaagtttgtggttacagcatactctgtccttcagaaaggcgtgattctagctgttgac

SEQ ID NO: 50576 - DNA, 201 bp, Homo sapiens
cataaaggactataaggatcaaaaagcaagcagaaatgaatccacattctagtcctttatgcagtatacaaggagaactgtcctgtaggatattctcttcytgatggtgcagaacccagaattagaagtttgtggttacagcatactctgtccttcagaaaggcgtgattctagctgttgaccccttgcagctgttggaat

SEQ ID NO: 50577 - DNA, 201 bp, Homo sapiens
ggtaaggccgcgccccttcgccatcacctggggaaaggtaccagagttgagccggggcgcccgcaggcctgtctgggcctcggggtaaggcggcgctggcyccgccccctgcccctcccgccgcgagtggcctcgcgtggtcgcccaggtgagccgcggggccgcgagccaccgctcaccccgcgtcggggcgggggctgg

SEQ ID NO: 50578 - DNA, 201 bp, Homo sapiens
ggaagccccgctggctaggtgtctgcgcgcacccccggccgccgccaagagtggcacagctggggaaggagtgaacatccagaggaatcgcggggcggggkggggggaggccaggagaacaggtggcgcagggaagcagaaacgtagttgcgctggacagctggagtcgggcagggtcggggccagcggcgaggggacaag

SEQ ID NO: 50579 - DNA, 201 bp, Homo sapiens
ggacgcagggagctggatggagagcgagcctgggcggcgaaaggttgccgaggcgggggctgggcgcctgggaacaaagttgaaaatgcaactgcaagctycccggtgaaacaaatatcgccttcaaccttcgtattctgtggtgactcatctcgcacgtgacccccctccctcttcaaggtgtgttgaccgactacagtt

SEQ ID NO: 50580 - DNA, 201 bp, Homo sapiens
cgcccgcaggcctgtctgggcctcggggtaaggcggcgctggccccgccccctgcccctcccgccgcgagtggcctcgcgtggtcgcccaggtgagccgcrgggccgcgagccaccgctcaccccgcgtcggggcgggggctgggggtggagcctcatgccccgccccgcggctgggccctgccgcgccgctgcggctcct

SEQ ID NO: 50581 - DNA, 201 bp, Homo sapiens
tggagagcgagcctgggcggcgaaaggttgccgaggcgggggctgggcgcctgggaacaaagttgaaaatgcaactgcaagcttcccggtgaaacaaataycgccttcaaccttcgtattctgtggtgactcatctcgcacgtgacccccctccctcttcaaggtgtgttgaccgactacagtttaagcctgtcgtcccac

SEQ ID NO: 50582 - DNA, 201 bp, Homo sapiens
gggcggcgaaaggttgccgaggcgggggctgggcgcctgggaacaaagttgaaaatgcaactgcaagcttcccggtgaaacaaatatcgccttcaaccttygtattctgtggtgactcatctcgcacgtgacccccctccctcttcaaggtgtgttgaccgactacagtttaagcctgtcgtcccacaaaaggcccgggag

SEQ ID NO: 50583 - DNA, 201 bp, Homo sapiens
tcgcccaggtgagccgcggggccgcgagccaccgctcaccccgcgtcggggcgggggctgggggtggagcctcatgccccgccccgcggctgggccctgcygcgccgctgcggctcctcctccctccttccgtcctccgcgccttccgtcggtcggtccttgcttcctgcttcgcctccgcgcctcgcgctatgggacaga

SEQ ID NO: 50584 - DNA, 201 bp, Homo sapiens
cccgcgtcggggcgggggctgggggtggagcctcatgccccgccccgcggctgggccctgccgcgccgctgcggctcctcctccctccttccgtcctccgmgccttccgtcggtcggtccttgcttcctgcttcgcctccgcgcctcgcgctatgggacagagcccccgatccgccagcaccacctgaggatccagaaacc

SEQ ID NO: 50585 - DNA, 201 bp, Homo sapiens
cgggagggccggggtcccaggaagggccatcctgggtcaacaccgccccagttgggaagtcgggccgctttcggacttgccactgggaagggaagtgattkgggggcggcaggtaaggccgcgccccttcgccatcacctggggaaaggtaccagagttgagccggggcgcccgcaggcctgtctgggcctcggggtaagg

SEQ ID NO: 50586 - DNA, 201 bp, Homo sapiens
gcgtcggggcgggggctgggggtggagcctcatgccccgccccgcggctgggccctgccgcgccgctgcggctcctcctccctccttccgtcctccgcgcyttccgtcggtcggtccttgcttcctgcttcgcctccgcgcctcgcgctatgggacagagcccccgatccgccagcaccacctgaggatccagaaaccgcc

SEQ ID NO: 50587 - DNA, 201 bp, Homo sapiens
ggcggcaggtaaggccgcgccccttcgccatcacctggggaaaggtaccagagttgagccggggcgcccgcaggcctgtctgggcctcggggtaaggcggygctggccccgccccctgcccctcccgccgcgagtggcctcgcgtggtcgcccaggtgagccgcggggccgcgagccaccgctcaccccgcgtcggggcgg

SEQ ID NO: 50588 - DNA, 201 bp, Homo sapiens
tccgtcctccgcgccttccgtcggtcggtccttgcttcctgcttcgcctccgcgcctcgcgctatgggacagagcccccgatccgccagcaccacctgagratccagaaaccgccccagcgatggaagaggatcaggagctggagagaaaaatatctggattgaagacctcaatggctgaaggcgagaggaagacagccct

SEQ ID NO: 50589 - DNA, 201 bp, Homo sapiens
gggtggagcctcatgccccgccccgcggctgggccctgccgcgccgctgcggctcctcctccctccttccgtcctccgcgccttccgtcggtcggtccttscttcctgcttcgcctccgcgcctcgcgctatgggacagagcccccgatccgccagcaccacctgaggatccagaaaccgccccagcgatggaagaggatc

SEQ ID NO: 50590 - DNA, 201 bp, Homo sapiens
gattcgagaggaagcgcacctgagggagcacagcgaaggccgggacgcagggagctggatggagagcgagcctgggcggcgaaaggttgccgaggcggggrctgggcgcctgggaacaaagttgaaaatgcaactgcaagcttcccggtgaaacaaatatcgccttcaaccttcgtattctgtggtgactcatctcgcacg

SEQ ID NO: 50591 - DNA, 201 bp, Homo sapiens
cagaggaatcgcggggcggggtggggggaggccaggagaacaggtggcgcagggaagcagaaacgtagttgcgctggacagctggagtcgggcagggtcgrggccagcggcgaggggacaagaagggccgattcgagaggaagcgcacctgagggagcacagcgaaggccgggacgcagggagctggatggagagcgagcc

SEQ ID NO: 50592 - DNA, 201 bp, Homo sapiens; identical to SEQ ID NO: 50575

SEQ ID NO: 50593 - DNA, 201 bp, Homo sapiens; identical to SEQ ID NO: 50576

SEQ ID NO: 50594 - DNA, 192 bp, Homo sapiens
tagatggacttttgggacccagcagttttgaaacgtgtttatggagtttaagaaatttattttccaggtgcagcccctgtctaactgaaatttctcttcaycttgtacatttgacagctgaaaaaaaataacatgggagtaataatcggtcaaaatttgcaaaataaagtactgttttggtgtggggaaaaa

SEQ ID NO: 50595 - DNA, 201 bp, Homo sapiens
gacacattgcttgacctgatttatgcagaattaataagctatttagatagcgtagctttaaagtgctgcacatgatactggcagccctagagttcatagayggacttttgggacccagcagttttgaaacgtgtttatggagtttaagaaatttattttccaggtgcagcccctgtctaactgaaatttctcttcatcttg

SEQ ID NO: 50596 - DNA, 201 bp, Homo sapiens
gagtgatcaactaacagctctgctagtaattgatttatttttcttcaataaagttaaataaaccaatgagttagctgcctggattagtcagtatgggaaaygatcttttataaatgcaaagctgttttttgtatatactgttgggatttgcttcattgtttgacatcaaatgatgatgtaaagttcaaaagagtgaatatt

SEQ ID NO: 50597 - DNA, 201 bp, Homo sapiens
acagaccatatcaaggcggtgtattcttttggacaattcgttttcctacagactaccccttcaaaccatctaaggttgcatttacaacaagaatttatcayccaaatattaacagtaatggcagcatttttcttgacattctaagatcacagtggtcgcctgctttaacactttctaaagttcttttatccatttgttcac

SEQ ID NO: 50598 - DNA, 201 bp, Homo sapiens
cccgtgaccctccagcacaatgttctgcaggtccagttggggatgatatgtttcactggcaagccacaattatgggacctcatgacagaccatatcaaggyggtgtattcttttggacaattcgttttcctacagactaccccttcaaaccatctaaggttgcatttacaacaagaatttatcacccaaatattaacagta

SEQ ID NO: 50599 - DNA, 201 bp, Homo sapiens
acactatggcgctgaaacggattaataaggaacttagtgatttggcccgtgaccctccagcacaatgttctgcaggtccagttggggatgatatgtttcaytggcaagccacaattatgggacctcatgacagaccatatcaaggcggtgtattcttttggacaattcgttttcctacagactaccccttcaaaccatcta

SEQ ID NO: 50600 - DNA, 201 bp, Homo sapiens
cgtgaccctccagcacaatgttctgcaggtccagttggggatgatatgtttcactggcaagccacaattatgggacctcatgacagaccatatcaaggcgstgtattcttttggacaattcgttttcctacagactaccccttcaaaccatctaaggttgcatttacaacaagaatttatcacccaaatattaacagtaat

SEQ ID NO: 50601 - DNA, 201 bp, Homo sapiens
tctgcaggtccagttggggatgatatgtttcactggcaagccacaattatgggacctcatgacagaccatatcaaggcggtgtattcttttggacaattcrttttcctacagactaccccttcaaaccatctaaggttgcatttacaacaagaatttatcacccaaatattaacagtaatggcagcatttttcttgacatt

SEQ ID NO: 50602 - DNA, 201 bp, Homo sapiens
acagtggtcgcctgctttaacactttctaaagttcttttatccatttgttcactgctatgtgatccaaacccagatgatcccctagtgccagagattgcayggatctataaaacagacagagataagtacaacagaatatctcgggaatggactcagaagtatgccatgtgatgttaccttaaagtcagaataacctgcat

SEQ ID NO: 50603 - DNA, 201 bp, Homo sapiens
taggaggctcggagctattagttaatctatcttccaatacactgtttgatatagcactgaataaatgatgcaagttgtcaatggatgagtgatcaactaayagctctgctagtaattgatttatttttcttcaataaagttaaataaaccaatgagttagctgcctggattagtcagtatgggaaacgatcttttataaat

SEQ ID NO: 50604 - DNA, 201 bp, Homo sapiens
agttgtcaatggatgagtgatcaactaacagctctgctagtaattgatttatttttcttcaataaagttaaataaaccaatgagttagctgcctggattartcagtatgggaaacgatcttttataaatgcaaagctgttttttgtatatactgttgggatttgcttcattgtttgacatcaaatgatgatgtaaagttca

SEQ ID NO: 50605 - DNA, 201 bp, Homo sapiens
ttctgcaggtccagttggggatgatatgtttcactggcaagccacaattatgggacctcatgacagaccatatcaaggcggtgtattcttttggacaattygttttcctacagactaccccttcaaaccatctaaggttgcatttacaacaagaatttatcacccaaatattaacagtaatggcagcatttttcttgacat

SEQ ID NO: 50606 - DNA, 201 bp, Homo sapiens
ccatcagatactggcagtcaaagcgatccatgatgcctccatggccaggaatggtattggcaaagtctttgattttaaaggctcgtttgaatccacttgcraagaatcctccaaaggggccaatgagcgaggcaaaggtggagagagcgatgctgtgaatctggaaggggtacatccggaccgttttccagccaatgactg

SEQ ID NO: 50607 - DNA, 201 bp, Homo sapiens
ccacagggcagacaaagcatctgtacccggacatcacataggacagcagaaggccaaacaccacagtagcaaagaagcccccaatgaagccttcccaggtyttcttcggggacagcttgatgagtggggtccgaccaaagaaaaagccaaacatataggccatgatgtcattacagatcacacaagatatggggacaatga

SEQ ID NO: 50608 - DNA, 201 bp, Homo sapiens
tcttcaccctggtccagagagaagagcctttgcggattctcagtaaataccaccggttcatttcctttactctctatctaataggattctgcatgtttgtrctgagtctggtcaagaagcattatcgactgcagttctacatgtttggctggacccatgtgacattgctgattgttgtaacacagtcacatcttgttatcc

SEQ ID NO: 50609 - DNA, 201 bp, Homo sapiens
cagtcattggctggaaaacggtccggatgtaccccttccagattcacagcatcgctctctccacctttgcctcgctcattggcccctttggaggattcttygcaagtggattcaaacgagcctttaaaatcaaagactttgccaataccattcctggccatggaggcatcatggatcgctttgactgccagtatctgatgg

SEQ ID NO: 50610 - DNA, 201 bp, Homo sapiens
ggcgacgtcgggccgattttcccaggatgacagagctgaggcagagggtggcccatgagccggttgcgccacccgaggacaaggagtcagagtcagaagcmaaggtagatggagagactgcatcggacagtgagagccgggcagaatccgcacccctgccagtctctgcagatgataccccggaggtcctcaatagggccc

SEQ ID NO: 50611 - DNA, 201 bp, Homo sapiens
cggtgacggcactgggtggggccgagctccagggctggctgctgggctgctaagggaactgtgagccgctcagagccgcgcgcctcccgggcggggcgggsccggccgtgggagtccgcgcgtgcccgcgccgagctgcctgctccggcggcttcgctgctagctcgcggcgacgtcgggccgattttcccaggatgacag

SEQ ID NO: 50612 - DNA, 201 bp, Homo sapiens
ctaacctgattagagccttgactattttgaagattaaatgcacactttttatataatgtgaccagtttaaatgtagtttgtattgtactgggggacctttygttgttgttgtttgcttaaactgtgattttttttcccctccctaatttcaggggtgagattgactttgggaagacagattagttctttgtcaggccaaca

SEQ ID NO: 50613 - DNA, 201 bp, Homo sapiens
tcattgtccccatatcttgtgtgatctgtaatgacatcatggcctatatgtttggctttttctttggtcggaccccactcatcaagctgtccccgaagaaracctgggaaggcttcattgggggcttctttgctactgtggtgtttggccttctgctgtcctatgtgatgtccgggtacagatgctttgtctgccctgtgg

SEQ ID NO: 50614 - DNA, 201 bp, Homo sapiens
ctgctgcaccctatgggggccccattgcactgctgaggaacccctggcggaaggagaaagctgctagtgtgaggccagtgctcgatatatactctgcttcyggcatgcctctggccagcctgctgtggaagagtggacccgtggtgtccctgggctggtcagctgaggaggagctgctctgtgtgcaggaagatggtgctg

SEQ ID NO: 50615 - DNA, 201 bp, Homo sapiens
accctcctgctggactgtgctgtgccaggaccgagtggcacacattcttctggctgtggggcctgacctttacctcttggaccatgcagcctgctccgcartgacgccccctggcctggccccaggagtaagcagcttcctacagatggctgtctccttcacctaccgacacctggcactcttcacagacacaggctacat

SEQ ID NO: 50616 - DNA, 201 bp, Homo sapiens
agctggccatcaagctgctggagtatgagccacgctcaggggagcaggtaccccttctcctaaagatgaagaggagcaaactggcactaagcaaggccatygagagcggggacactgacctggtgttcacggtgttgctgcacctgaagaacgagctgaaccgaggagattttttcatgacccttcggaatcagcccatgg

SEQ ID NO: 50617 - DNA, 201 bp, Homo sapiens
tgaggccagtgctcgatatatactctgcttccggcatgcctctggccagcctgctgtggaagagtggacccgtggtgtccctgggctggtcagctgaggargagctgctctgtgtgcaggaagatggtgctgtactggtttatgggcttcatggtgacttccggagacacttcagcatgggcaatgaagtgctccagaacc

SEQ ID NO: 50618 - DNA, 201 bp, Homo sapiens
cccttctcctaaagatgaagaggagcaaactggcactaagcaaggccatcgagagcggggacactgacctggtgttcacggtgttgctgcacctgaagaaygagctgaaccgaggagattttttcatgacccttcggaatcagcccatggccctcagtttgtaccgacagttctgtaagcatcaggagctagagacgctga

SEQ ID NO: 50619 - DNA, 201 bp, Homo sapiens
cctgaagaacgagctgaaccgaggagattttttcatgacccttcggaatcagcccatggccctcagtttgtaccgacagttctgtaagcatcaggagctaragacgctgaaggacctttacaatcaggatgacaatcaccaggaattgggcagcttccacatccgagccagctatgctgcagaagagcgtattgaggggcg

SEQ ID NO: 50620 - DNA, 198 bp, Homo sapiens
atggccgcggcggcggcctcgccacgtgacccggacgggcggaagcggaagtgccggcctggagcccgctctaggtgggtgtcccctcggtgcttccyagctgccgtctgcaccagccatggactgctacacggcgaactggaacccactcggggactctgccttttaccggaaatatgagctgtacagcatggactg

SEQ ID NO: 50621 - DNA, 201 bp, Homo sapiens
taccgacagttctgtaagcatcaggagctagagacgctgaaggacctttacaatcaggatgacaatcaccaggaattgggcagcttccacatccgagccakctatgctgcagaagagcgtattgaggggcgagtagcagctctgcagacagccgccgatgccttctacaaggccaagaatgagtttgcagccaaggctaca

SEQ ID NO: 50622 - DNA, 201 bp, Homo sapiens
ggaatgaggctgagctgagcctcgtattgtcccactgcacgggagccacagatggggccacagctgacaagattcaacgggccagggcacaagcccagaaraagtgaggagtccatcctgtacatctcaagcaaggggttcctcccctagcacctgggcttggcagaagggccatagttcatccagctcctcccctagagc

SEQ ID NO: 50623 - DNA, 201 bp, Homo sapiens
gtctctacatgacacagttaccaccctcattcttggcggtcacaacaagcgtgcagagcagctggcacgtgacttccgcatccctgacaagaggctctggyggctgaagctgactgccctggcagatttggaagattgggaagagctagagaagttttccaagagcaagaaatcacccattggctacctgccttttgtgga

SEQ ID NO: 50624 - DNA, 201 bp, Homo sapiens
cagaagggccatagttcatccagctcctcccctagagcaatgctgaggagcgggggcatggtagcagggctgtctggttttaaataaagttggaacacttyacagtgcttgtcttacacagtccagcctaagcaaaggcaagctcaagacaggatcctccagacaccacagcaaaactccatgtgttccgttgtgttggga

SEQ ID NO: 50625 - DNA, 201 bp, Homo sapiens
gccatagttcatccagctcctcccctagagcaatgctgaggagcgggggcatggtagcagggctgtctggttttaaataaagttggaacacttcacagtgyttgtcttacacagtccagcctaagcaaaggcaagctcaagacaggatcctccagacaccacagcaaaactccatgtgttccgttgtgttgggaccggagg

SEQ ID NO: 50626 - DNA, 201 bp, Homo sapiens
ctgggcctgctacaaggtgcaacagaaggatgtctcagatgaggatgtggctcgagccattaaccagaagctgggggacacgcctggtgtctcttactccracattgctgcacgagcctatggttgtggccgcacggagctggccatcaagctgctggagtatgagccacgctcaggggagcaggtaccccttctcctaaa

SEQ ID NO: 50627 - DNA, 201 bp, Homo sapiens
tgtccaccaaacacagcccttccagttcttaggtgatctccaggaccctcctttcattcccagcacatctttggtttagtggtcctggccagcctccctcyctaggaaggtggccaggtcctcactgagtctccttaaggacaggggcacaggggagactagagctggctcagctttgggctgaggccagtctgacctctc

SEQ ID NO: 50628 - DNA, 201 bp, Homo sapiens
tgcactgtaaatatccctcccctctctccctggtcccctcccccatccccaccactgatatcatggggagtaataggaccagagcggtatctctggcaccmcactagggactatcaggtaataaaagctttgactccctgaggaaatgtctctccctttgtctgggggtggggcagccatacaggctggggctctcctcgg

SEQ ID NO: 50629 - DNA, 201 bp, Homo sapiens; identical to SEQ ID NO: 50617

SEQ ID NO: 50630 - DNA, 201 bp, Homo sapiens
gcactgatagtcctttttccaatgttttattggggaattaaatagtgtgatgtttggattgatatcgtgaaatcctcagccgagaaattgggctggattgygctttggttaatacatctttccctaaagaagataaacacaaaatccattccaggtagctcggcaccaactaagaaaaaaagcacaaagttctcagagctc

SEQ ID NO: 50631 - DNA, 198 bp, Homo sapiens; identical to SEQ ID NO: 50620

SEQ ID NO: 50632 - DNA, 201 bp, Homo sapiens
ttaaccactgtcaattcttcagactctgacaatgggaccacaagaacagcaagcaccaattctataggcattacaatttcaccaaatggaacgtggcttcyagataaccagttcacggatgccagaacagaaccctgggaggggaattccagcaccgcagcaaccactccagaaactttccctccttcaggtaattctgac

SEQ ID NO: 50633 - DNA, 201 bp, Homo sapiens
ggccacacatggtccagacactggaacagtatgagttctgctacaaggtggtgcaggagtatattgatgcattctcagattatgccaacttcaagtaagcrgcaacaagggtccgtggaccaggaggattgcctttaatattttgtaatattctgttttgttaatataccccaaattgtgtatatatcttataactgtttt

SEQ ID NO: 50634 - DNA, 201 bp, Homo sapiens
ttgatggctaccggcagaaggactcctatatcgccagccagggccctcttctccacacaattgaggacttctggcgaatgatctgggagtggaaatcctgytctatcgtgatgctaacagaactggaggagagaggccaggagaagtgtgcccagtactggccatctgatggactggtgtcctatggagatattacagtgg

SEQ ID NO: 50635 - DNA, 201 bp, Homo sapiens; identical to SEQ ID NO: 50614

SEQ ID NO: 50636 - DNA, 201 bp, Homo sapiens; identical to SEQ ID NO: 50615

SEQ ID NO: 50637 - DNA, 201 bp, Homo sapiens; identical to SEQ ID NO: 50616

SEQ ID NO: 50638 - DNA, 201 bp, Homo sapiens; identical to SEQ ID NO: 50618

SEQ ID NO: 50639 - DNA, 201 bp, Homo sapiens
agaaatacaagcaagctgggagccattccaattctttccgcttatccaacggccgcactgaggatgtggagccccagagtgtgccacttctggccagatcsccaagcaccaacaggaaatacccacccctgcccgtggacaagctggaagaggaaattaaccggagaatggcagacgacaataagctcttcagggaggaat

SEQ ID NO: 50640 - DNA, 201 bp, Homo sapiens; identical to SEQ ID NO: 50619

SEQ ID NO: 50641 - DNA, 201 bp, Homo sapiens
gccaccatcgtcatggttaccaacctgaaggagagaaaggagtgcaagtgcgcccagtactggccagaccaaggctgctggacctatgggaatattcgggygtctgtagaggatgtgactgtcctggtggactacacagtacggaagttctgcatccagcaggtgggcgacatgaccaacagaaagccacagcgcctcatc

SEQ ID NO: 50642 - DNA, 201 bp, Homo sapiens
tggagccccagagtgtgccacttctggccagatccccaagcaccaacaggaaatacccacccctgcccgtggacaagctggaagaggaaattaaccggagratggcagacgacaataagctcttcagggaggaattcaacgctctccctgcatgtcctatccaggccacctgtgaggctgcttccaaggaggaaaacaagg

SEQ ID NO: 50643 - DNA, 201 bp, Homo sapiens
gatatgtaaacatcttgccttatgaccactctagagtccacctgacaccggttgaaggggttccagattctgattacatcaatgcttcattcatcaacggytaccaagaaaagaacaaattcattgctgcacaaggaccaaaagaagaaacggtgaatgatttctggcggatgatctgggaacaaaacacagccaccatcg

SEQ ID NO: 50644 - DNA, 201 bp, Homo sapiens; identical to SEQ ID NO: 50621

SEQ ID NO: 50645 - DNA, 201 bp, Homo sapiens; identical to SEQ ID NO: 50626

SEQ ID NO: 50646 - DNA, 201 bp, Homo sapiens
ccaggagaagtgtgcccagtactggccatctgatggactggtgtcctatggagatattacagtggaactgaagaaggaggaggaatgtgagagctacaccstccgagacctcctggtcaccaacaccagggagaataagagccggcagatccggcagttccacttccatggctggcctgaagtgggcatccccagtgacgg

SEQ ID NO: 50647 - DNA, 201 bp, Homo sapiens
ttctcacctcacagctgctggagtatgagccacgctcaggggagcaggtaccccttctcctaaagatgaagaggagcaaactggcactaagcaaggccatygagagcggggacactgacctggtgttcacggtgttgctgcacctgaagaacgagctgaaccgaggagattttttcatgacccttcggaatcagcccatgg

SEQ ID NO: 50648 - DNA, 201 bp, Homo sapiens; identical to SEQ ID NO: 50618

SEQ ID NO: 50649 - DNA, 201 bp, Homo sapiens; identical to SEQ ID NO: 50619

SEQ ID NO: 50650 - DNA, 201 bp, Homo sapiens; identical to SEQ ID NO: 50621

SEQ ID NO: 50651 - DNA, 201 bp, Homo sapiens; identical to SEQ ID NO: 50622

SEQ ID NO: 50652 - DNA, 201 bp, Homo sapiens; identical to SEQ ID NO: 50624

SEQ ID NO: 50653 - DNA, 201 bp, Homo sapiens; identical to SEQ ID NO: 50623

SEQ ID NO: 50654 - DNA, 201 bp, Homo sapiens; identical to SEQ ID NO: 50625

SEQ ID NO: 50655 - DNA, 185 bp, Homo sapiens
gtgcaacagaaggatgtctcagatgaggatgtggctcgagccattaaccagaagctgggggacacgcctggtgtctcttactccracattgctgcacgagcctatggttgtggccgcacggagctggccatcaaggtgtgggtgcccagccctccacagacactctgatgtggttgttcagggcc

SEQ ID NO: 50656 - DNA, 198 bp, Homo sapiens; identical to SEQ ID NO: 50620

SEQ ID NO: 50657 - DNA, 201 bp, Homo sapiens; identical to SEQ ID NO: 50621

SEQ ID NO: 50658 - DNA, 201 bp, Homo sapiens; identical to SEQ ID NO: 50622

SEQ ID NO: 50659 - DNA, 201 bp, Homo sapiens; identical to SEQ ID NO: 50623

SEQ ID NO: 50660 - DNA, 201 bp, Homo sapiens; identical to SEQ ID NO: 50624

SEQ ID NO: 50661 - DNA, 201 bp, Homo sapiens; identical to SEQ ID NO: 50615

SEQ ID NO: 50662 - DNA, 201 bp, Homo sapiens; identical to SEQ ID NO: 50625

SEQ ID NO: 50663 - DNA, 201 bp, Homo sapiens; identical to SEQ ID NO: 50647

SEQ ID NO: 50664 - DNA, 201 bp, Homo sapiens; identical to SEQ ID NO: 50618

SEQ ID NO: 50665 - DNA, 201 bp, Homo sapiens
ctgggcctgctacaaggtgcaacagaaggatgtctcagatgaggatgtggctcgagccattaaccagaagctgggggacacgcctggtgtctcttactccracattgctgcacgagcctatggttgtggccgcacggagctggccatcaaggtgtgggtgcccagccctccacagacactctgatgtggttgttcagggcc

SEQ ID NO: 50666 - DNA, 201 bp, Homo sapiens; identical to SEQ ID NO: 50619

SEQ ID NO: 50667 - DNA, 201 bp, Homo sapiens; identical to SEQ ID NO: 50614

SEQ ID NO: 50668 - DNA, 201 bp, Homo sapiens; identical to SEQ ID NO: 50615

SEQ ID NO: 50669 - DNA, 201 bp, Homo sapiens; identical to SEQ ID NO: 50617

SEQ ID NO: 50670 - DNA, 201 bp, Homo sapiens; identical to SEQ ID NO: 50616

SEQ ID NO: 50671 - DNA, 201 bp, Homo sapiens; identical to SEQ ID NO: 50618

SEQ ID NO: 50672 - DNA, 201 bp, Homo sapiens; identical to SEQ ID NO: 50619

SEQ ID NO: 50673 - DNA, 198 bp, Homo sapiens; identical to SEQ ID NO: 50620

SEQ ID NO: 50674 - DNA, 201 bp, Homo sapiens; identical to SEQ ID NO: 50621

SEQ ID NO: 50675 - DNA, 201 bp, Homo sapiens; identical to SEQ ID NO: 50622

SEQ ID NO: 50676 - DNA, 201 bp, Homo sapiens; identical to SEQ ID NO: 50624

SEQ ID NO: 50677 - DNA, 201 bp, Homo sapiens; identical to SEQ ID NO: 50623

SEQ ID NO: 50678 - DNA, 201 bp, Homo sapiens; identical to SEQ ID NO: 50625

SEQ ID NO: 50679 - DNA, 201 bp, Homo sapiens
aggtgctgctggacaggtgcaacagaaggatgtctcagatgaggatgtggctcgagccattaaccagaagctgggggacacgcctggtgtctcttactccracattgctgcacgagcctatggttgtggccgcacggagctggccatcaagctgctggagtatgagccacgctcaggggagcaggtaccccttctcctaaa

SEQ ID NO: 50680 - DNA, 201 bp, Homo sapiens; identical to SEQ ID NO: 50627

SEQ ID NO: 50681 - DNA, 201 bp, Homo sapiens; identical to SEQ ID NO: 50628

SEQ ID NO: 50682 - DNA, 201 bp, Homo sapiens; identical to SEQ ID NO: 50630

SEQ ID NO: 50683 - DNA, 201 bp, Homo sapiens; identical to SEQ ID NO: 50632

SEQ ID NO: 50684 - DNA, 201 bp, Homo sapiens; identical to SEQ ID NO: 50633

SEQ ID NO: 50685 - DNA, 201 bp, Homo sapiens; identical to SEQ ID NO: 50634

SEQ ID NO: 50686 - DNA, 201 bp, Homo sapiens; identical to SEQ ID NO: 50618

SEQ ID NO: 50687 - DNA, 201 bp, Homo sapiens; identical to SEQ ID NO: 50647

SEQ ID NO: 50688 - DNA, 201 bp, Homo sapiens; identical to SEQ ID NO: 50619

SEQ ID NO: 50689 - DNA, 201 bp, Homo sapiens; identical to SEQ ID NO: 50639

SEQ ID NO: 50690 - DNA, 201 bp, Homo sapiens; identical to SEQ ID NO: 50642

SEQ ID NO: 50691 - DNA, 201 bp, Homo sapiens; identical to SEQ ID NO: 50641

SEQ ID NO: 50692 - DNA, 201 bp, Homo sapiens; identical to SEQ ID NO: 50621

SEQ ID NO: 50693 - DNA, 201 bp, Homo sapiens; identical to SEQ ID NO: 50643

SEQ ID NO: 50694 - DNA, 185 bp, Homo sapiens; identical to SEQ ID NO: 50655

SEQ ID NO: 50695 - DNA, 201 bp, Homo sapiens; identical to SEQ ID NO: 50646

SEQ ID NO: 50696 - DNA, 201 bp, Homo sapiens; identical to SEQ ID NO: 50614

SEQ ID NO: 50697 - DNA, 201 bp, Homo sapiens; identical to SEQ ID NO: 50615

SEQ ID NO: 50698 - DNA, 201 bp, Homo sapiens; identical to SEQ ID NO: 50616

SEQ ID NO: 50699 - DNA, 201 bp, Homo sapiens; identical to SEQ ID NO: 50617

SEQ ID NO: 50700 - DNA, 201 bp, Homo sapiens; identical to SEQ ID NO: 50618

SEQ ID NO: 50701 - DNA, 201 bp, Homo sapiens; identical to SEQ ID NO: 50619

SEQ ID NO: 50702 - DNA, 198 bp, Homo sapiens; identical to SEQ ID NO: 50620

SEQ ID NO: 50703 - DNA, 201 bp, Homo sapiens; identical to SEQ ID NO: 50621

SEQ ID NO: 50704 - DNA, 201 bp, Homo sapiens; identical to SEQ ID NO: 50622

SEQ ID NO: 50705 - DNA, 201 bp, Homo sapiens; identical to SEQ ID NO: 50623

SEQ ID NO: 50706 - DNA, 201 bp, Homo sapiens; identical to SEQ ID NO: 50624

SEQ ID NO: 50707 - DNA, 201 bp, Homo sapiens; identical to SEQ ID NO: 50625

SEQ ID NO: 50708 - DNA, 201 bp, Homo sapiens; identical to SEQ ID NO: 50626

SEQ ID NO: 50709 - DNA, 201 bp, Homo sapiens; identical to SEQ ID NO: 50627

SEQ ID NO: 50710 - DNA, 201 bp, Homo sapiens; identical to SEQ ID NO: 50628

SEQ ID NO: 50711 - DNA, 201 bp, Homo sapiens; identical to SEQ ID NO: 50617

SEQ ID NO: 50712 - DNA, 201 bp, Homo sapiens; identical to SEQ ID NO: 50630

SEQ ID NO: 50713 - DNA, 198 bp, Homo sapiens; identical to SEQ ID NO: 50620

SEQ ID NO: 50714 - DNA, 201 bp, Homo sapiens; identical to SEQ ID NO: 50632

SEQ ID NO: 50715 - DNA, 201 bp, Homo sapiens; identical to SEQ ID NO: 50633

SEQ ID NO: 50716 - DNA, 201 bp, Homo sapiens; identical to SEQ ID NO: 50634

SEQ ID NO: 50717 - DNA, 201 bp, Homo sapiens; identical to SEQ ID NO: 50614

SEQ ID NO: 50718 - DNA, 201 bp, Homo sapiens; identical to SEQ ID NO: 50615

SEQ ID NO: 50719 - DNA, 201 bp, Homo sapiens; identical to SEQ ID NO: 50647

SEQ ID NO: 50720 - DNA, 201 bp, Homo sapiens; identical to SEQ ID NO: 50618

SEQ ID NO: 50721 - DNA, 201 bp, Homo sapiens; identical to SEQ ID NO: 50639

SEQ ID NO: 50722 - DNA, 201 bp, Homo sapiens; identical to SEQ ID NO: 50619

SEQ ID NO: 50723 - DNA, 201 bp, Homo sapiens; identical to SEQ ID NO: 50641

SEQ ID NO: 50724 - DNA, 201 bp, Homo sapiens; identical to SEQ ID NO: 50642

SEQ ID NO: 50725 - DNA, 201 bp, Homo sapiens; identical to SEQ ID NO: 50643

SEQ ID NO: 50726 - DNA, 201 bp, Homo sapiens; identical to SEQ ID NO: 50621

SEQ ID NO: 50727 - DNA, 201 bp, Homo sapiens; identical to SEQ ID NO: 50665

SEQ ID NO: 50728 - DNA, 201 bp, Homo sapiens; identical to SEQ ID NO: 50646

SEQ ID NO: 50729 - DNA, 201 bp, Homo sapiens; identical to SEQ ID NO: 50627

SEQ ID NO: 50730 - DNA, 201 bp, Homo sapiens; identical to SEQ ID NO: 50628

SEQ ID NO: 50731 - DNA, 201 bp, Homo sapiens; identical to SEQ ID NO: 50630

SEQ ID NO: 50732 - DNA, 198 bp, Homo sapiens; identical to SEQ ID NO: 50620

SEQ ID NO: 50733 - DNA, 201 bp, Homo sapiens
ttaaccactgtcaattcttcagactctgacaatgggaccacaagaacagcaagcaccaattctataggcattacaatttcaccaaatggaacgtggcttcyagataaccagttcacggatgccagaacagaaccctgggaggggaattccagcaccgcagcaaccactccagaaactttccctccttcagatgagacacca

SEQ ID NO: 50734 - DNA, 201 bp, Homo sapiens; identical to SEQ ID NO: 50633

SEQ ID NO: 50735 - DNA, 201 bp, Homo sapiens; identical to SEQ ID NO: 50634

SEQ ID NO: 50736 - DNA, 201 bp, Homo sapiens; identical to SEQ ID NO: 50615

SEQ ID NO: 50737 - DNA, 201 bp, Homo sapiens; identical to SEQ ID NO: 50647

SEQ ID NO: 50738 - DNA, 201 bp, Homo sapiens; identical to SEQ ID NO: 50618

SEQ ID NO: 50739 - DNA, 201 bp, Homo sapiens; identical to SEQ ID NO: 50639

SEQ ID NO: 50740 - DNA, 201 bp, Homo sapiens; identical to SEQ ID NO: 50619

SEQ ID NO: 50741 - DNA, 201 bp, Homo sapiens; identical to SEQ ID NO: 50641

SEQ ID NO: 50742 - DNA, 201 bp, Homo sapiens; identical to SEQ ID NO: 50642

SEQ ID NO: 50743 - DNA, 201 bp, Homo sapiens; identical to SEQ ID NO: 50643

SEQ ID NO: 50744 - DNA, 201 bp, Homo sapiens; identical to SEQ ID NO: 50621

SEQ ID NO: 50745 - DNA, 201 bp, Homo sapiens; identical to SEQ ID NO: 50665

SEQ ID NO: 50746 - DNA, 201 bp, Homo sapiens; identical to SEQ ID NO: 50646

SEQ ID NO: 50747 - DNA, 201 bp, Homo sapiens; identical to SEQ ID NO: 50627

SEQ ID NO: 50748 - DNA, 201 bp, Homo sapiens; identical to SEQ ID NO: 50628

SEQ ID NO: 50749 - DNA, 201 bp, Homo sapiens; identical to SEQ ID NO: 50617

SEQ ID NO: 50750 - DNA, 201 bp, Homo sapiens; identical to SEQ ID NO: 50630

SEQ ID NO: 50751 - DNA, 198 bp, Homo sapiens; identical to SEQ ID NO: 50620

SEQ ID NO: 50752 - DNA, 201 bp, Homo sapiens; identical to SEQ ID NO: 50733

SEQ ID NO: 50753 - DNA, 201 bp, Homo sapiens; identical to SEQ ID NO: 50633

SEQ ID NO: 50754 - DNA, 201 bp, Homo sapiens; identical to SEQ ID NO: 50634

SEQ ID NO: 50755 - DNA, 201 bp, Homo sapiens; identical to SEQ ID NO: 50614

SEQ ID NO: 50756 - DNA, 201 bp, Homo sapiens; identical to SEQ ID NO: 50615

SEQ ID NO: 50757 - DNA, 201 bp, Homo sapiens; identical to SEQ ID NO: 50647

SEQ ID NO: 50758 - DNA, 201 bp, Homo sapiens; identical to SEQ ID NO: 50618

SEQ ID NO: 50759 - DNA, 201 bp, Homo sapiens; identical to SEQ ID NO: 50639

SEQ ID NO: 50760 - DNA, 201 bp, Homo sapiens; identical to SEQ ID NO: 50619

SEQ ID NO: 50761 - DNA, 201 bp, Homo sapiens; identical to SEQ ID NO: 50641

SEQ ID NO: 50762 - DNA, 201 bp, Homo sapiens; identical to SEQ ID NO: 50642

SEQ ID NO: 50763 - DNA, 201 bp, Homo sapiens; identical to SEQ ID NO: 50643

SEQ ID NO: 50764 - DNA, 201 bp, Homo sapiens; identical to SEQ ID NO: 50621

SEQ ID NO: 50765 - DNA, 201 bp, Homo sapiens; identical to SEQ ID NO: 50665

SEQ ID NO: 50766 - DNA, 201 bp, Homo sapiens; identical to SEQ ID NO: 50646

SEQ ID NO: 50767 - DNA, 201 bp, Homo sapiens; identical to SEQ ID NO: 50627

SEQ ID NO: 50768 - DNA, 201 bp, Homo sapiens; identical to SEQ ID NO: 50628

SEQ ID NO: 50769 - DNA, 201 bp, Homo sapiens; identical to SEQ ID NO: 50639

SEQ ID NO: 50770 - DNA, 201 bp, Homo sapiens; identical to SEQ ID NO: 50630

SEQ ID NO: 50771 - DNA, 201 bp, Homo sapiens; identical to SEQ ID NO: 50733

SEQ ID NO: 50772 - DNA, 201 bp, Homo sapiens; identical to SEQ ID NO: 50641

SEQ ID NO: 50773 - DNA, 201 bp, Homo sapiens; identical to SEQ ID NO: 50642

SEQ ID NO: 50774 - DNA, 201 bp, Homo sapiens; identical to SEQ ID NO: 50633

SEQ ID NO: 50775 - DNA, 201 bp, Homo sapiens; identical to SEQ ID NO: 50643

SEQ ID NO: 50776 - DNA, 201 bp, Homo sapiens; identical to SEQ ID NO: 50634

SEQ ID NO: 50777 - DNA, 201 bp, Homo sapiens; identical to SEQ ID NO: 50646

SEQ ID NO: 50778 - DNA, 201 bp, Homo sapiens; identical to SEQ ID NO: 50614

SEQ ID NO: 50779 - DNA, 201 bp, Homo sapiens; identical to SEQ ID NO: 50615

SEQ ID NO: 50780 - DNA, 201 bp, Homo sapiens; identical to SEQ ID NO: 50617

SEQ ID NO: 50781 - DNA, 201 bp, Homo sapiens; identical to SEQ ID NO: 50647

SEQ ID NO: 50782 - DNA, 201 bp, Homo sapiens; identical to SEQ ID NO: 50618

SEQ ID NO: 50783 - DNA, 201 bp, Homo sapiens; identical to SEQ ID NO: 50619

SEQ ID NO: 50784 - DNA, 198 bp, Homo sapiens; identical to SEQ ID NO: 50620

SEQ ID NO: 50785 - DNA, 201 bp, Homo sapiens; identical to SEQ ID NO: 50621

SEQ ID NO: 50786 - DNA, 201 bp, Homo sapiens; identical to SEQ ID NO: 50622

SEQ ID NO: 50787 - DNA, 201 bp, Homo sapiens; identical to SEQ ID NO: 50623

SEQ ID NO: 50788 - DNA, 201 bp, Homo sapiens; identical to SEQ ID NO: 50624

SEQ ID NO: 50789 - DNA, 201 bp, Homo sapiens; identical to SEQ ID NO: 50625

SEQ ID NO: 50790 - DNA, 201 bp, Homo sapiens; identical to SEQ ID NO: 50665

SEQ ID NO: 50791 - DNA, 201 bp, Homo sapiens; identical to SEQ ID NO: 50627

SEQ ID NO: 50792 - DNA, 201 bp, Homo sapiens; identical to SEQ ID NO: 50628

SEQ ID NO: 50793 - DNA, 201 bp, Homo sapiens; identical to SEQ ID NO: 50639

SEQ ID NO: 50794 - DNA, 201 bp, Homo sapiens; identical to SEQ ID NO: 50630

SEQ ID NO: 50795 - DNA, 201 bp, Homo sapiens; identical to SEQ ID NO: 50733

SEQ ID NO: 50796 - DNA, 201 bp, Homo sapiens; identical to SEQ ID NO: 50641

SEQ ID NO: 50797 - DNA, 201 bp, Homo sapiens; identical to SEQ ID NO: 50642

SEQ ID NO: 50798 - DNA, 201 bp, Homo sapiens; identical to SEQ ID NO: 50633

SEQ ID NO: 50799 - DNA, 201 bp, Homo sapiens; identical to SEQ ID NO: 50643

SEQ ID NO: 50800 - DNA, 201 bp, Homo sapiens; identical to SEQ ID NO: 50634

SEQ ID NO: 50801 - DNA, 201 bp, Homo sapiens; identical to SEQ ID NO: 50646

SEQ ID NO: 50802 - DNA, 201 bp, Homo sapiens
aaccaggccaccatggtgcagaaggccaagcggcggagcgccgcccccctgcacagcgaccagcagccggtgccagagcagttgcgcatccaggtgagacrcgtcagcatgcacgactatgaggccctgcactacgacaaggagcagctcaaggaggcctccgtgccgctgggcactgtggtggtcccaggagacagtgac

SEQ ID NO: 50803 - DNA, 201 bp, Homo sapiens
ggggagacctgtttgcaccaagcagcggccctgggccagcgcaccatctgccactacatcgtggaggccggggccagaccagcagggcgacactccccggyagcaggctgagaaggctcaggacaccgagctggcggcctacctggagaaccggcagcactaccagatgatccagcgggaggaccaggagacggctgtgta

SEQ ID NO: 50804 - DNA, 201 bp, Homo sapiens
ctgacctcccaacccccacttcccctctccccacctcaccctgctcacccacgccccggtcactgcaaggggatgctgcaccccctcaaggtgaagagctrattgaggctgccaagaggaacgacttctgtaagctccaggagctgcaccgagctgggggcgacatcatgcaccgagacaagcagagtcgcacgctcctgc

SEQ ID NO: 50805 - DNA, 201 bp, Homo sapiens
acctgtttgcaccaagcagcggccctgggccagcgcaccatctgccactacatcgtggaggccggggccagaccagcagggcgacactccccggcagcagsctgagaaggctcaggacaccgagctggcggcctacctggagaaccggcagcactaccagatgatccagcgggaggaccaggagacggctgtgtagcgggc

SEQ ID NO: 50806 - DNA, 201 bp, Homo sapiens
cacgctcctgcaccacgcagtcagcactggcagcaaggatgtggtccgctacctgctggaccacgctcccccagagatccttgatgcggtggaggaaaacrgggagacctgtttgcaccaagcagcggccctgggccagcgcaccatctgccactacatcgtggaggccggggccagaccagcagggcgacactccccggc

SEQ ID NO: 50807 - DNA, 201 bp, Homo sapiens
aggaaaacggggagacctgtttgcaccaagcagcggccctgggccagcgcaccatctgccactacatcgtggaggccggggccagaccagcagggcgacamtccccggcagcaggctgagaaggctcaggacaccgagctggcggcctacctggagaaccggcagcactaccagatgatccagcgggaggaccaggagacg

SEQ ID NO: 50808 - DNA, 201 bp, Homo sapiens
tgccctgcggccaccctggggagcaccacgactttgagccccagcggcatgacgacggctacctcgaggtcattggcttcaccatgacgtcattggccgcrctgcaggtgggcggacacggcgagcggctgacgcagtgtcgcgaggtggtgctcaccacatccaaggccatcccggtgcaggtggatggcgagccctgca

SEQ ID NO: 50809 - DNA, 201 bp, Homo sapiens
agcagttgcgcatccaggtgagacgcgtcagcatgcacgactatgaggccctgcactacgacaaggagcagctcaaggaggcctccgtgccgctgggcacygtggtggtcccaggagacagtgacctagagctctgccgtgcccacattgagagactccagcaggagcccgatggtgctggagccaagtccccgacatgcc

SEQ ID NO: 50810 - DNA, 201 bp, Homo sapiens
cccctcccccctcatgaagcccctgctggtgtttgtgaaccccaagagtgggggcaaccagggtgcaaagatcatccagtctttcctctggtatctcaatmcccgacaagtcttcgacctgagccagggagggcccaaggaggcgctggagatgtaccgcaaagtgcacaacctgcggatcctggcgtgcgggggcgacgg

SEQ ID NO: 50811 - DNA, 201 bp, Homo sapiens
aggcctccgtgccgctgggcactgtggtggtcccaggagacagtgacctagagctctgccgtgcccacattgagagactccagcaggagcccgatggtgcwggagccaagtccccgacatgccagaaactgtcccccaagtggtgcttcctggacgccaccactgccagccgcttctacaggatcaaccgagcccaggagc

SEQ ID NO: 50812 - DNA, 201 bp, Homo sapiens
agccaggatgctgcagaagtcagtgtctcgaagaaagtgcgcagcctgcaagattgtggtgcacacgccctgcatcgagcagctggagaagataaatttcygctgtaagccgtccttccgtgaatcaggctccaggaatgtcctcgagccaacctttgtatggcaccactgggtacacagacgacgccaggacagcaagtg

SEQ ID NO: 50813 - DNA, 201 bp, Homo sapiens
aaatttctgctgtaagccgtccttccgtgaatcaggctccaggaatgtcctcgagccaacctttgtatggcaccactgggtacacagacgacgccaggacrgcaagtgtcggcactgtgggaagggattccagcagaagttcaccttccacagcaaggagattgtggccatcagctgctcgtggtgcaagcaggcatacca

SEQ ID NO: 50814 - DNA, 201 bp, Homo sapiens
tgcagaagtcagtgtctcgaagaaagtgcgcagcctgcaagattgtggtgcacacgccctgcatcgagcagctggagaagataaatttctgctgtaagccrtccttccgtgaatcaggctccaggaatgtcctcgagccaacctttgtatggcaccactgggtacacagacgacgccaggacagcaagtgtcggcactgtg

SEQ ID NO: 50815 - DNA, 201 bp, Homo sapiens; identical to SEQ ID NO: 38914

SEQ ID NO: 50816 - DNA, 201 bp, Homo sapiens
ccacgactttgagccccagcggcatgacgacggctacctcgaggtcattggcttcaccatgacgtcattggccgcgctgcaggtgggcggacacggcgagyggctgacgcagtgtcgcgaggtggtgctcaccacatccaaggccatcccggtgcaggtggatggcgagccctgcaagcttgcagcctcacgcatccgcat

SEQ ID NO: 50817 - DNA, 201 bp, Homo sapiens
tgtgtgatggaatggacttgactcccaagatccaggacctgaaaccccagtgtgttgttttcctgaacatccccaggtactgtgcgggcaccatgccctgsggccaccctggggagcaccacgactttgagccccagcggcatgacgacggctacctcgaggtcattggcttcaccatgacgtcattggccgcgctgcagg

SEQ ID NO: 50818 - DNA, 201 bp, Homo sapiens
atcccggtgcaggtggatggcgagccctgcaagcttgcagcctcacgcatccgcattgccctgcgcaaccaggccaccatggtgcagaaggccaagcggcrgagcgccgcccccctgcacagcgaccagcagccggtgccagagcagttgcgcatccaggtgagacgcgtcagcatgcacgactatgaggccctgcactac

SEQ ID NO: 50819 - DNA, 201 bp, Homo sapiens
cctgctcacccacgccccggtcactgcaaggggatgctgcaccccctcaaggtgaagagctaattgaggctgccaagaggaacgacttctgtaagctccargagctgcaccgagctgggggcgacatcatgcaccgagacaagcagagtcgcacgctcctgcaccacgcagtcagcactggcagcaaggatgtggtccgct

SEQ ID NO: 50820 - DNA, 201 bp, Homo sapiens
agggccggatggagccgcgggacggtagcccggaggcccggagcagcgactccgagtcggcttccacctcgtccagcggctccgagcgcgacgccggtccsgagccggacaaggcgccgcggcgactcaacaagcggcgcttcccggggctgcggctcttcgggcacaggaaagccatcaccaagtctggcctccagcacc

SEQ ID NO: 50821 - DNA, 201 bp, Homo sapiens
acgccggtcccgagccggacaaggcgccgcggcgactcaacaagcggcgcttcccggggctgcggctcttcgggcacaggaaagccatcaccaagtctggyctccagcacctggccccccctccgcccacccctggggcccggtgcagcgagtcagagcggcagatccggagtacagtggactggagcgagtcggcgacat

SEQ ID NO: 50822 - DNA, 201 bp, Homo sapiens
gagccaagtccccgacatgccagaaactgtcccccaagtggtgcttcctggacgccaccactgccagccgcttctacaggatcaaccgagcccaggagcayctcaactatgtgactgagatcgcacaggatgagatttatatcctggaccctgagctgctgggggcatcggcccggcctgacctcccaacccccacttccc

SEQ ID NO: 50823 - DNA, 201 bp, Homo sapiens
cccagagatccttgatgcggtggaggaaaacggggagacctgtttgcaccaagcagcggccctgggccagcgcaccatctgccactacatcgtggaggccrgggccagaccagcagggcgacactccccggcagcaggctgagaaggctcaggacaccgagctggcggcctacctggagaaccggcagcactaccagatga

SEQ ID NO: 50824 - DNA, 201 bp, Homo sapiens
aaaagacaacttgaaaagctgatgagaaggctggtttcagaaaacaaaaggcgatacacaagggatggatttgacctagacctcacttacgttacagaacrtattattgctatgtcatttccatcttctggaaggcagtctttctatagaaatccaattgaggaagttgtgcggtttctagataagaaacatcgaaaccac

SEQ ID NO: 50825 - DNA, 201 bp, Homo sapiens
ggcttattttttctcatggatgttcttcttcgagtatttgtagaaggatggacacatttagttcgacttctacgacttattattctgataagaatttttcrtctgcttcatcaaaaaagacaacttgaaaagctgatgagaaggctggtttcagaaaacaaaaggcgatacacaagggatggatttgacctagacctcact

SEQ ID NO: 50826 - DNA, 201 bp, Homo sapiens
attcctttggagtatcgttctatttctctagctattggcttattttttctcatggatgttcttcttcgagtatttgtagaaggatggacacatttagttcracttctacgacttattattctgataagaatttttcatctgcttcatcaaaaaagacaacttgaaaagctgatgagaaggctggtttcagaaaacaaaagg

SEQ ID NO: 50827 - DNA, 201 bp, Homo sapiens
agaatagatatgttggatattttgcacaagtgaaacatctctacaactggaatctccctccaagacggatactctttataaaaagattcattatttattcrattcgtggtgatgtatgtgatctaaaagtccaagtagtaatggagaaaaaggttgtcttttccagtacttcattaggaaattgttcggtaagagaaaaca

SEQ ID NO: 50828 - DNA, 201 bp, Homo sapiens
ttccatcttctggaaggcagtctttctatagaaatccaattgaggaagttgtgcggtttctagataagaaacatcgaaaccactatcgagtctacaatctmtgcagtgaaagagcttatgatcctaagcacttccataatagggtcagtagaatcatgattgatgatcataatgtccccactctacatgagatggtggttt

SEQ ID NO: 50829 - DNA, 201 bp, Homo sapiens
agctgatgagaaggctggtttcagaaaacaaaaggcgatacacaagggatggatttgacctagacctcacttacgttacagaacgtattattgctatgtcrtttccatcttctggaaggcagtctttctatagaaatccaattgaggaagttgtgcggtttctagataagaaacatcgaaaccactatcgagtctacaatc

SEQ ID NO: 50830 - DNA, 201 bp, Homo sapiens
ccttattgcctccgaaatatttttaactgccgaggaaagcctatattattttggagaaaggcgaaccaataaaacccacagcaataaatttcagggagtaraaactccttctcagaatagatatgttggatattttgcacaagtgaaacatctctacaactggaatctccctccaagacggatactctttataaaaagatt

SEQ ID NO: 50831 - DNA, 201 bp, Homo sapiens
acttctacgacttattattctgataagaatttttcatctgcttcatcaaaaaagacaacttgaaaagctgatgagaaggctggtttcagaaaacaaaaggygatacacaagggatggatttgacctagacctcacttacgttacagaacgtattattgctatgtcatttccatcttctggaaggcagtctttctatagaaa

SEQ ID NO: 50832 - DNA, 201 bp, Homo sapiens; identical to SEQ ID NO: 50824

SEQ ID NO: 50833 - DNA, 201 bp, Homo sapiens; identical to SEQ ID NO: 50825

SEQ ID NO: 50834 - DNA, 201 bp, Homo sapiens; identical to SEQ ID NO: 50826

SEQ ID NO: 50835 - DNA, 201 bp, Homo sapiens
agaatagatatgttggatattttgcacaagtgaaacatctctacaactggaatctccctccaagacggatactctttataaaaagattcattatttattcrattcgtggtgatgtatgtgatctaaaagtccaagtagtaatggagaaaaaggttgtcttttccagtacttcattaggaaattgttcgatattgcatgaca

SEQ ID NO: 50836 - DNA, 201 bp, Homo sapiens
attgtccatttttcttctggttcaacacgtcttttattcaaaataacaggctttgtctaccaagaaatgaattggataatccacataaacaaaaagcatgraaaatttatccaccagaatttgctgtggagatactttttggcgagaaatgacttccaatgatgttgtagctggatccgactaagtatagctcccccttcc

SEQ ID NO: 50837 - DNA, 201 bp, Homo sapiens; identical to SEQ ID NO: 50828

SEQ ID NO: 50838 - DNA, 201 bp, Homo sapiens; identical to SEQ ID NO: 50829

SEQ ID NO: 50839 - DNA, 201 bp, Homo sapiens
ggaaattgttcgatattgcatgacattgaaacagacaaaatattaattaatgtatatgacggtccacctctgtatgatgatgtgaaagtgcagtttttctmttcgaatcttcctaaatactatgacaattgtccatttttcttctggttcaacacgtcttttattcaaaataacaggctttgtctaccaagaaatgaattg

SEQ ID NO: 50840 - DNA, 201 bp, Homo sapiens; identical to SEQ ID NO: 50830

SEQ ID NO: 50841 - DNA, 201 bp, Homo sapiens
atggagaaaaaggttgtcttttccagtacttcattaggaaattgttcgatattgcatgacattgaaacagacaaaatattaattaatgtatatgacggtcyacctctgtatgatgatgtgaaagtgcagtttttctcttcgaatcttcctaaatactatgacaattgtccatttttcttctggttcaacacgtcttttatt

SEQ ID NO: 50842 - DNA, 201 bp, Homo sapiens
atgtgatctaaaagtccaagtagtaatggagaaaaaggttgtcttttccagtacttcattaggaaattgttcgatattgcatgacattgaaacagacaaartattaattaatgtatatgacggtccacctctgtatgatgatgtgaaagtgcagtttttctcttcgaatcttcctaaatactatgacaattgtccattttt

SEQ ID NO: 50843 - DNA, 201 bp, Homo sapiens; identical to SEQ ID NO: 50831

SEQ ID NO: 50844 - DNA, 201 bp, Homo sapiens
aaaccatggctactcttgggaaccacccggccatgtggtcgccaagtagagcaagccccctttctcttcccaatcacgtggctgagtgtggatgacttttwttttaggagaagggcgattaacacttttgacagtattttgttttgccctgatttgggggattgttttgttttggtggttgttttggaaaaacagtttata

SEQ ID NO: 50845 - DNA, 201 bp, Homo sapiens
ggtgcgcggagcggttcaccgtcttcggagcggttcggcccagcctttcgcccaggcgcccaggcccgctgcgcgcgtgcgtgagcgcgcctgcgccgccrgggccgctgcaaggggaggagagcggccgcctcaggaggatcccttttcccccagaaattactcaatgctgaaacctctcaaagtggtattagagacgct

SEQ ID NO: 50846 - DNA, 201 bp, Homo sapiens
tcggagcggttcggcccagcctttcgcccaggcgcccaggcccgctgcgcgcgtgcgtgagcgcgcctgcgccgccagggccgctgcaaggggaggagagmggccgcctcaggaggatcccttttcccccagaaattactcaatgctgaaacctctcaaagtggtattagagacgctgaaagcaccatggacgggttttat

SEQ ID NO: 50847 - DNA, 201 bp, Homo sapiens
gtgcttcatgccccacctccaaccaagatcaaacgggagctgcacagcccctcctctgagctgtcgtcttgtagccatgagcaggctcttggtgctaactrtggagaaaagtgcctctacaactattgtgcctatgataggaagcctccctctgggttcaagccattaacccctcctacaacccccctctcacccacccat

SEQ ID NO: 50848 - DNA, 201 bp, Homo sapiens
gggggttatttctccagcagccatgaaggtttttcatatgaaaaagatccccgattatactttgacgacacttgtgttgtgcctgagagactggaaggcaragtcaaacaggagcctaccatgtatcgagaggggcccccttaccagaggcgaggttcccttcagctgtggcagttcctggtcacccttcttgatgaccca

SEQ ID NO: 50849 - DNA, 201 bp, Homo sapiens; identical to SEQ ID NO: 50844

SEQ ID NO: 50850 - DNA, 201 bp, Homo sapiens
acctactgcaacttctgccatatcatgctcatgggcgtccgcaagcaaggcctgtgctgcacttactgtaaatacactgtccacgaacgctgtgtgtccaraaacattcctggttgtgtcaaaacgtactcaaaagccaaaaggagtggtgaggtgatgcagcacgcatgggtggaagggaactcctccgtcaagtgtgac

SEQ ID NO: 50851 - DNA, 201 bp, Homo sapiens; identical to SEQ ID NO: 50848

SEQ ID NO: 50852 - DNA, 201 bp, Homo sapiens
tactttgaatttggcacctcggagacttttgcagcgacctgcaagaaactccacgaccacattgagttggagacctcagtgaccagctccttgaagtggtsgggctagaaggagccatggagatggggcagatctacaccggcctgaagagtgcaggcaggaggctggcccagtgcgcctctgtcaccatcaggacaaaca

SEQ ID NO: 50853 - DNA, 201 bp, Homo sapiens
cagccactgagcactcacctcttcctggccttcagccagaagcccagacacgagacctctgaccacccgacggagggagccagcaacagtgaggccaacarcgcagatactaatatacagaatgcagataatgccaccaaagcagacgaggcctgtgcccctgatactgaatcaaatatggctgagaagcaagcaccagct

SEQ ID NO: 50854 - DNA, 201 bp, Homo sapiens; identical to SEQ ID NO: 50847

SEQ ID NO: 50855 - DNA, 201 bp, Homo sapiens
caaatatggctgagaagcaagcaccagctgaagaccaagtggctgcgacccccctggaaccccccgtccctcggtcttcaagctcggaatccccagtggtrtacctgaaggatgttgtgtgctacctgtccctgctggagacggggaggcctcaggataagctggagttcatgtttcgcctctatgattcagatgagaacg

SEQ ID NO: 50856 - DNA, 201 bp, Homo sapiens
aatgcagataatgccaccaaagcagacgaggcctgtgcccctgatactgaatcaaatatggctgagaagcaagcaccagctgaagaccaagtggctgcgasccccctggaaccccccgtccctcggtcttcaagctcggaatccccagtggtgtacctgaaggatgttgtgtgctacctgtccctgctggagacggggagg

SEQ ID NO: 50857 - DNA, 201 bp, Homo sapiens; identical to SEQ ID NO: 50853

SEQ ID NO: 50858 - DNA, 201 bp, Homo sapiens
ccttcgggaagaaaacgtcaccttgccatacattctgtttcaacagtgggtacacccctaacagagccagtgccaacaaaacattttgaatggacttaggrcccatgaggttgtggctggcttaggcagcaacctccacattcccacaggccttgagcagaattttctgagactgaagggaaatccccctttctttctacc

SEQ ID NO: 50859 - DNA, 201 bp, Homo sapiens
ggctgcaggtttcctgcctatggtgagatcagatgtggccaagggaaggagctctggttccagagaatttgcacaaagttccctctgtacagagacaaaamggcctccggctctcagagcataatccttggcagggctcagcaggcgcacgttggtttcttggtcgtcctttgagtgacaacttctccgtgaacctgctga

SEQ ID NO: 50860 - DNA, 201 bp, Homo sapiens; identical to SEQ ID NO: 50855

SEQ ID NO: 50861 - DNA, 201 bp, Homo sapiens; identical to SEQ ID NO: 50850

SEQ ID NO: 50862 - DNA, 201 bp, Homo sapiens
gaatggacttagggcccatgaggttgtggctggcttaggcagcaacctccacattcccacaggccttgagcagaattttctgagactgaagggaaatcccsctttctttctaccagccctgcaagtttcctcatggacgctcgcgaggagcaggctgcaggtttcctgcctatggtgagatcagatgtggccaagggaagg

SEQ ID NO: 50863 - DNA, 201 bp, Homo sapiens
agaaccgggctgtgatccgggaaagcaggaagggtgtcactgaccccaaagaactgaaattctgcgttcaagacctcagtgaccagctccttgaagtggtsgggctagaaggagccatggagatggggcagatctacaccggcctgaagagtgcaggcaggaggctggcccagtgcgcctctgtcaccatcaggacaaaca

SEQ ID NO: 50864 - DNA, 201 bp, Homo sapiens
ggtttcctgcctatggtgagatcagatgtggccaagggaaggagctctggttccagagaatttgcacaaagttccctctgtacagagacaaaacggcctcyggctctcagagcataatccttggcagggctcagcaggcgcacgttggtttcttggtcgtcctttgagtgacaacttctccgtgaacctgctgaagaggca

SEQ ID NO: 50865 - DNA, 201 bp, Homo sapiens; identical to SEQ ID NO: 50856

SEQ ID NO: 50866 - DNA, 201 bp, Homo sapiens
gtgatggggttggggtggacctgagcaacatcttcctggaaggcattgccattctcaacattcccagcatgtacggaggcaccaatctctggggagaaaamaagaagaaccgggctgtgatccgggaaagcaggaagggtgtcactgaccccaaagaactgaaattctgcgttcaagacctcagtgaccagctccttgaag

SEQ ID NO: 50867 - DNA, 201 bp, Homo sapiens; identical to SEQ ID NO: 50844

SEQ ID NO: 50868 - DNA, 201 bp, Homo sapiens; identical to SEQ ID NO: 50845

SEQ ID NO: 50869 - DNA, 201 bp, Homo sapiens; identical to SEQ ID NO: 50846

SEQ ID NO: 50870 - DNA, 201 bp, Homo sapiens; identical to SEQ ID NO: 50847

SEQ ID NO: 50871 - DNA, 201 bp, Homo sapiens; identical to SEQ ID NO: 50848

SEQ ID NO: 50872 - DNA, 201 bp, Homo sapiens; identical to SEQ ID NO: 50844

SEQ ID NO: 50873 - DNA, 201 bp, Homo sapiens; identical to SEQ ID NO: 50847

SEQ ID NO: 50874 - DNA, 201 bp, Homo sapiens; identical to SEQ ID NO: 50848

SEQ ID NO: 50875 - DNA, 169 bp, Homo sapiens
cttcataaagaatataataaaactttattaaaagacagcaaggaaggactaaatatatgcagaaatatrccattttcttggacaggaagagtcaatattataaagatgtcaatttccttcaaactgatcttgaggtttattgcaattccaaccgaagtgttaaacaggt

SEQ ID NO: 50876 - DNA, 201 bp, Homo sapiens
agatgtcaatttccttcaaactgatcttgaggtttattgcaattccaaccgaagtgttaaacaggttttggaatccagttcaaaactcggcaaaggatttragtagacattttttccaagaagatatacaaatgtccaaggagtacgtgaaaagcttctcagcatcattaatcattaggaaaatgcaaatcagaatcacaa

SEQ ID NO: 50877 - DNA, 201 bp, Homo sapiens
gctggatagctggattgataagttttgcctagatgctgatgtctttgttttggtcgcaaactctgaatcaacactaatgaatacggaaaaacacttttttyacaaggtgaatgagcggctttccaagcctaatattttcattctcaataatcgttgggatgcctctgcatcagagccagaatatatggaagacgtacgcag

SEQ ID NO: 50878 - DNA, 201 bp, Homo sapiens
aactagtttttgatgctttctttcatgggaatagtcacttttttatttagtaaatcgcattgctggaaccaccaaggagtgtggaatgtccttgagtgtaktatttatgcaagtcacagtcacgttgccatcatggcagctatgtgaaacactaataaatgtgtttttactttttattcccgttaaaactgatgtaaaaca

SEQ ID NO: 50879 - DNA, 201 bp, Homo sapiens
tggaaagatgcctgcatttcttggtggaggagctcaaagttgtaaatgctttagaagcacagaatcgtatcttctttgtttcagcaaaggaagttcttagygctagaaagcaaaaagcacaggggatgccagaaagtggtgtggcacttgctgaaggatttcatgcaagattacaggaatttcagaattttgaacaaatct

SEQ ID NO: 50880 - DNA, 201 bp, Homo sapiens
ctttcctagtgcaattttaggagtaaagtttgaagagataaaaatagccaaagataggagacgtctgaattttgaatgataaacagtgatgttttaaaaargctgttgttcttcaggaggcatttgcctaggatattgctggattataccccattggaggcttttaattttatttgtatgaattttccaggatttcattaa

SEQ ID NO: 50881 - DNA, 150 bp, Homo sapiens
tacaaaaatgacaccattctaggaatttgctagacaaaatgtaggactaccagatcagtatctcctagacacttgttagaaatgcacaatcccggggaacrcagtacatttggccacatgtagtttatgtttccttttcatgggagggat

SEQ ID NO: 50882 - DNA, 201 bp, Homo sapiens
gtggaatgtccttgagtgtattatttatgcaagtcacagtcacgttgccatcatggcagctatgtgaaacactaataaatgtgtttttactttttattccygttaaaactgatgtaaaacaggataaaggcttgttatagtcacttataagtatctgggtctaagtaatttccttagatgtttctaaagaaacattttcag

SEQ ID NO: 50883 - DNA, 201 bp, Homo sapiens
gctggatagctggattgataagttttgcctagatgctgatgtctttgttttggtcgcaaactctgaatcaacactaatgaatacggaaaaacacttttttyacaaggtgaatgagcggctttccaagcctaatattttcattctcaataatcgttgggatgcctctgcatcagagccagaatatatggaagacgtgtggca

SEQ ID NO: 50884 - DNA, 201 bp, Homo sapiens; identical to SEQ ID NO: 50878

SEQ ID NO: 50885 - DNA, 201 bp, Homo sapiens; identical to SEQ ID NO: 50880

SEQ ID NO: 50886 - DNA, 150 bp, Homo sapiens; identical to SEQ ID NO: 50881

SEQ ID NO: 50887 - DNA, 201 bp, Homo sapiens; identical to SEQ ID NO: 50882

SEQ ID NO: 50888 - DNA, 201 bp, Homo sapiens; identical to SEQ ID NO: 50877

SEQ ID NO: 50889 - DNA, 201 bp, Homo sapiens; identical to SEQ ID NO: 50878

SEQ ID NO: 50890 - DNA, 201 bp, Homo sapiens; identical to SEQ ID NO: 50879

SEQ ID NO: 50891 - DNA, 201 bp, Homo sapiens; identical to SEQ ID NO: 50880

SEQ ID NO: 50892 - DNA, 201 bp, Homo sapiens; identical to SEQ ID NO: 50882

SEQ ID NO: 50893 - DNA, 201 bp, Homo sapiens; identical to SEQ ID NO: 50877

SEQ ID NO: 50894 - DNA, 201 bp, Homo sapiens; identical to SEQ ID NO: 50878

SEQ ID NO: 50895 - DNA, 201 bp, Homo sapiens; identical to SEQ ID NO: 50879

SEQ ID NO: 50896 - DNA, 106 bp, Homo sapiens
gaccgscctttgccactccccctgcctcctctccgcctttaacttctcgggaagatgaggcagtttggcatctgtggccgagttgctgttgccgggtgatagttgg

SEQ ID NO: 50897 - DNA, 201 bp, Homo sapiens; identical to SEQ ID NO: 50880

SEQ ID NO: 50898 - DNA, 150 bp, Homo sapiens; identical to SEQ ID NO: 50881

SEQ ID NO: 50899 - DNA, 201 bp, Homo sapiens; identical to SEQ ID NO: 50882

SEQ ID NO: 50900 - DNA, 201 bp, Homo sapiens; identical to SEQ ID NO: 50877

SEQ ID NO: 50901 - DNA, 201 bp, Homo sapiens; identical to SEQ ID NO: 50878

SEQ ID NO: 50902 - DNA, 201 bp, Homo sapiens; identical to SEQ ID NO: 50879

SEQ ID NO: 50903 - DNA, 106 bp, Homo sapiens; identical to SEQ ID NO: 50896

SEQ ID NO: 50904 - DNA, 201 bp, Homo sapiens; identical to SEQ ID NO: 50880

SEQ ID NO: 50905 - DNA, 150 bp, Homo sapiens; identical to SEQ ID NO: 50881

SEQ ID NO: 50906 - DNA, 201 bp, Homo sapiens; identical to SEQ ID NO: 50882

SEQ ID NO: 50907 - DNA, 201 bp, Homo sapiens; identical to SEQ ID NO: 50877

SEQ ID NO: 50908 - DNA, 201 bp, Homo sapiens; identical to SEQ ID NO: 50878

SEQ ID NO: 50909 - DNA, 201 bp, Homo sapiens; identical to SEQ ID NO: 50879

SEQ ID NO: 50910 - DNA, 106 bp, Homo sapiens; identical to SEQ ID NO: 50896

SEQ ID NO: 50911 - DNA, 201 bp, Homo sapiens; identical to SEQ ID NO: 50880

SEQ ID NO: 50912 - DNA, 150 bp, Homo sapiens; identical to SEQ ID NO: 50881

SEQ ID NO: 50913 - DNA, 201 bp, Homo sapiens; identical to SEQ ID NO: 50882

SEQ ID NO: 50914 - DNA, 201 bp, Homo sapiens; identical to SEQ ID NO: 50877

SEQ ID NO: 50915 - DNA, 201 bp, Homo sapiens; identical to SEQ ID NO: 50878

SEQ ID NO: 50916 - DNA, 201 bp, Homo sapiens; identical to SEQ ID NO: 50879

SEQ ID NO: 50917 - DNA, 201 bp, Homo sapiens; identical to SEQ ID NO: 50880

SEQ ID NO: 50918 - DNA, 201 bp, Homo sapiens; identical to SEQ ID NO: 50882

SEQ ID NO: 50919 - DNA, 154 bp, Homo sapiens
cggccgccaccgagcgtgctgagcaaccgcagcctccgcggccgagagtgcagmgagggagagccagttgcgcagagccctgcaaccagcagtccagggagaagtggtgaatgtcatggagcccagctgaaatggactggcccccttgagcctg

SEQ ID NO: 50920 - DNA, 168 bp, Homo sapiens
cggccgccaccgagcgtgctgagcaaccgcagcctccgcggccgagagtgcagcgagggagagccagytgcgcagagccctgcaaccagcagtccagggagaagtggtgaatgtcatggagcccagctgaaatggactggcccccttgagcctgtcccaagccctggt

SEQ ID NO: 50921 - DNA, 197 bp, Homo sapiens
tggttcagtcaaaccatctgcttcagcctcagcccgttgggaggcaaggtcaattggtggccaaagaggcttctgctttgtcagagcaggtctttggaatyttgatgggagttgtattttctcagttgctggtgaaatttgaattcccaagggaatacatttatcctccaggtaagactgcaccggattcaggtgaa

SEQ ID NO: 50922 - DNA, 201 bp, Homo sapiens
gaatggtctcttggccaccccagcctgggaagaacattttcctgaacaattccagcctgctccttttactctaggggcctctgtcagcaagaccatggggrcttcaagagcctgtggtcaggaaatcaggtccagccttccctgtagccagacagtttatgagcccagagcctcctgccacacacatgcacacatatctag

SEQ ID NO: 50923 - DNA, 118 bp, Homo sapiens
atgatatggacgttatcattggtctggtgagatgtttcatatttgtgacagttaatttccatctattcatctggatcatgggaccctctctaatccttccmccaatcaaataagctat

SEQ ID NO: 50924 - DNA, 201 bp, Homo sapiens
gcgttaacaaagggagccgataccgaccggcgtgggcgcggagcgggcggccgccaccgagcgtgctgagcaaccgcagcctccgcggccgagagtgcagmgagcaaggggagagccagttgcgcagagccctgcaaccagcagtccagggagaagtggtgaatgtcatggagcccagctgaaatggactggcccccttga

SEQ ID NO: 50925 - DNA, 201 bp, Homo sapiens
aacaggcaggtaggattcagtgtgctcagtgcactggggatttggagagagatgggcttgctctctctgtgcacccaggagggccacgcacttaaaactgwgtttgtggatcagagaaggctttatagcacagggggcattcagatgagtcttagaggaagagaagaaacatggcaagcagattacatctgagccgtttga

SEQ ID NO: 50926 - DNA, 201 bp, Homo sapiens
ctcactcttctccatcaggcattaaatgaatggtctcttggccaccccagcctgggaagaacattttcctgaacaattccagcctgctccttttactctargggcctctgtcagcaagaccatggggacttcaagagcctgtggtcaggaaatcaggtccagccttccctgtagccagacagtttatgagcccagagcctc

SEQ ID NO: 50927 - DNA, 138 bp, Homo sapiens
ccttccactgtgcgtcttctgtcccccgttcttccccmgcggacccctctttcgagactccctagtggggttcccagctcccgggcgatcctgcccttgccgagcgcgttttctggagtcacctgggggaggggagtc

SEQ ID NO: 50928 - DNA, 201 bp, Homo sapiens
cccctctccctgatagggaatcctgctggaccagcgcagccctggtgtggagagacccagggctctgcactctcaaggctggccccatgtgctcaaggggrtctaatgtttgggctccaaactaaccatctcggagctgggctcctcatttactgccaaaccctcagcttatgtagctagaaagggccctggagtgagaaa

SEQ ID NO: 50929 - DNA, 201 bp, Homo sapiens
gtgctcacacctcggctgcatgcaccctgctgtgacggaggctagtgtggaagaggtcctgtcctcagggaattaactgtcttattgggagacaacaactrtcctccttggaacacccaagaaaccatgcaaagcagtggacaacacagaacacgccctcctcctcgctgcctgcagctccaatctgattctgcttgggaa

SEQ ID NO: 50930 - DNA, 201 bp, Homo sapiens
acagtttgtacaatgaaggaatcctaattgtatgggacccatctgtataccactcagatatcccaaagtggtaccagaatccggattataatttctttaayaactacaagacttatcgtaagctgcaccccaatcagcccttttacatcctcaagccccagatgccttgggagctatgggacattcttcaagaaatctccc

SEQ ID NO: 50931 - DNA, 201 bp, Homo sapiens
caatccagagccacaaaacgtgattcctccaggctctgcctggcctgaccctgtcctgtcagctgggtttacataccagtcccattcttccttttcaatamctacccccaaatcttctcctaaccaccatctgttttttttttttaaagcattttttgctttaaaagcatcctgaccccaatttctttgagctcacgggcc

SEQ ID NO: 50932 - DNA, 201 bp, Homo sapiens
ttaattattattaatataaaggatcaaattaatttaaatatgattctgaagtctacagaacttttagttctgtgctgtctatgtggacactttggtaaaaygcaaattatgatatggacgttatcattggtctggtgagatgtttcatatttgtgacagttaatttccatctattcatctggatcatgggaccctctctaa

SEQ ID NO: 50933 - DNA, 201 bp, Homo sapiens
ctgaccctgtcctgtcagctgggtttacataccagtcccattcttccttttcaatacctacccccaaatcttctcctaaccaccatctgttttttttttttaaagcattttttgctttaaaagcatcctgaccccaatttctttgagctcacgggccttttgctgaaggtctctcagggtgtagtggtgtggctctctgga

SEQ ID NO: 50934 - DNA, 201 bp, Homo sapiens
gatttcacgttttaaagaaattctcttaaattacaattgtgcccaatgcagggtggctctggggggcaagtaggtggtacaggggattggaaacatgctcygcgcctccagagaaaagttgggctggtccttagactgggtgcttatgattaaagggtcttggttagcccactttccctctccatgtggagatggaaggta

SEQ ID NO: 50935 - DNA, 201 bp, Homo sapiens
taaagaaattctcttaaattacaattgtgcccaatgcagggtggctctggggggcaagtaggtggtacaggggattggaaacatgctccgcgcctccagaraaaagttgggctggtccttagactgggtgcttatgattaaagggtcttggttagcccactttccctctccatgtggagatggaaggtagagaaggataca

SEQ ID NO: 50936 - DNA, 172 bp, Homo sapiens
ccttccactgtgcgtcttctgtcccccgttcttccccagcggacccctctttcgagactccctagtggggtycccagctcccgggcgatcctgcccttgccgagcgcgttttctggagtcacctgggggaggggagtcctgggcagggccgggctggggaagacgcctgggg

SEQ ID NO: 50937 - DNA, 201 bp, Homo sapiens
ataccgaccggcgtgggcgcggagcgggcggccgccaccgagcgtgctgagcaaccgcagcctccgcggccgagagtgcagcgagcaaggggagagccagytgcgcagagccctgcaaccagcagtccagggagaagtggtgaatgtcatggagcccagctgaaatggactggcccccttgagcctgtcccaagccctggt

SEQ ID NO: 50938 - DNA, 201 bp, Homo sapiens
agcgcagccctggtgtggagagacccagggctctgcactctcaaggctggccccatgtgctcaaggggatctaatgtttgggctccaaactaaccatctcrgagctgggctcctcatttactgccaaaccctcagcttatgtagctagaaagggccctggagtgagaaagcctggattttcaaattgatgctcccctactg

SEQ ID NO: 50939 - DNA, 201 bp, Homo sapiens
aatccagagccacaaaacgtgattcctccaggctctgcctggcctgaccctgtcctgtcagctgggtttacataccagtcccattcttccttttcaatacmtacccccaaatcttctcctaaccaccatctgttttttttttttaaagcattttttgctttaaaagcatcctgaccccaatttctttgagctcacgggcct

SEQ ID NO: 50940 - DNA, 201 bp, Homo sapiens; identical to SEQ ID NO: 50922

SEQ ID NO: 50941 - DNA, 201 bp, Homo sapiens; identical to SEQ ID NO: 50925

SEQ ID NO: 50942 - DNA, 201 bp, Homo sapiens
atttaaaaattatgagttaatgctgcctgtgtctatggggttctgtcttctttgatagccatctattcatctggatcatgggaccctctctaatccttccmccaatcaaataagctattgctattggtttggagttgagatatcagtctcggaaacttctgaaaaatgctaataattacccaaggattatgtcaaatttta

SEQ ID NO: 50943 - DNA, 201 bp, Homo sapiens; identical to SEQ ID NO: 50926

SEQ ID NO: 50944 - DNA, 201 bp, Homo sapiens
gttaaaagacttgcacaggatcaccaagtcatgctgtagagccaggattcctagacccagggctctgcactctcaaggctggccccatgtgctcaaggggrtctaatgtttgggctccaaactaaccatctcggagctgggctcctcatttactgccaaaccctcagcttatgtagctagaaagggccctggagtgagaaa

SEQ ID NO: 50945 - DNA, 201 bp, Homo sapiens; identical to SEQ ID NO: 50929

SEQ ID NO: 50946 - DNA, 201 bp, Homo sapiens; identical to SEQ ID NO: 50930

SEQ ID NO: 50947 - DNA, 201 bp, Homo sapiens; identical to SEQ ID NO: 50931

SEQ ID NO: 50948 - DNA, 201 bp, Homo sapiens
ttaattattattaatataaaggatcaaattaatttaaatatgattctgaagtctacagaacttttagttctgtgctgtctatgtggacactttggtaaaaygcaaattatgatatggacgttatcattggtctggtgagatgtttcatatttgtgacagttaatttaaaaattatgagttaatgctgcctgtgtctatggg

SEQ ID NO: 50949 - DNA, 201 bp, Homo sapiens; identical to SEQ ID NO: 50933

SEQ ID NO: 50950 - DNA, 201 bp, Homo sapiens
tctatgtggacactttggtaaaatgcaaattatgatatggacgttatcattggtctggtgagatgtttcatatttgtgacagttaatttaaaaattatgasttaatgctgcctgtgtctatggggttctgtcttctttgatagccatctattcatctggatcatgggaccctctctaatccttccaccaatcaaataagct

SEQ ID NO: 50951 - DNA, 201 bp, Homo sapiens
gatttcacgttttaaagaaattctcttaaattacaattgtgcccaatgcagggtggctctggggggcaagtaggtggtacaggggattggaaacatgctcygcgcctccagagaaaagttgctcccgaggtccatgcccctggaacgtgttcctatcactctggctggttgggctggtccttagactgggtgcttatgatt

SEQ ID NO: 50952 - DNA, 201 bp, Homo sapiens
taaagaaattctcttaaattacaattgtgcccaatgcagggtggctctggggggcaagtaggtggtacaggggattggaaacatgctccgcgcctccagaraaaagttgctcccgaggtccatgcccctggaacgtgttcctatcactctggctggttgggctggtccttagactgggtgcttatgattaaagggtcttgg

SEQ ID NO: 50953 - DNA, 201 bp, Homo sapiens
gctgtagagccaggattcctagacccagggctctgcactctcaaggctggccccatgtgctcaaggggatctaatgtttgggctccaaactaaccatctcrgagctgggctcctcatttactgccaaaccctcagcttatgtagctagaaagggccctggagtgagaaagcctggattttcaaattgatgctcccctactg

SEQ ID NO: 50954 - DNA, 201 bp, Homo sapiens; identical to SEQ ID NO: 50939

SEQ ID NO: 50955 - DNA, 201 bp, Homo sapiens
agacctagcctaggtctgcataagcacctttccatcttgttaatgtttaacactgcctctgctggaaaacagctctcacctcctctctttctgtctcttaytttttgcctttgcagatgagttttgatcatcctgagaaaaatgggccttggcctgcagacccaataaaccttccctcccatggataatagtgctaattcc

SEQ ID NO: 50956 - DNA, 201 bp, Homo sapiens
ctttaactgctgattcaatgtgggtttcattggggggtgtagagaaatggcttgtccatttctattaactatataagatttaagttattctgtatttcagkcaaccattctgagtacctactacctgccacgaatgcaactggtactgagtatgtcatgacgggtgggtcgggacaggatttccttgctttgagcattgat

SEQ ID NO: 50957 - DNA, 201 bp, Homo sapiens
atgtgattacctgtgttgggtgtctgcggaaattgaattccttagtttctggtaatacaacaagcttccacccttcacttcatgatcttctatctgaattmttcttccactgtgtacatttaatcatttccacaacttcagcagcccaagataggagcccatcgttcccagagtcactggttcctgaggtctgggatggtg

SEQ ID NO: 50958 - DNA, 201 bp, Homo sapiens
ttttctttttgtatgtattttttagtcctctttaactgctgattcaatgtgggtttcattggggggtgtagagaaatggcttgtccatttctattaactayataagatttaagttattctgtatttcagtcaaccattctgagtacctactacctgccacgaatgcaactggtactgagtatgtcatgacgggtgggtcgg

SEQ ID NO: 50959 - DNA, 201 bp, Homo sapiens; identical to SEQ ID NO: 50922

SEQ ID NO: 50960 - DNA, 201 bp, Homo sapiens; identical to SEQ ID NO: 50924

SEQ ID NO: 50961 - DNA, 201 bp, Homo sapiens; identical to SEQ ID NO: 50925

SEQ ID NO: 50962 - DNA, 201 bp, Homo sapiens; identical to SEQ ID NO: 50944

SEQ ID NO: 50963 - DNA, 201 bp, Homo sapiens; identical to SEQ ID NO: 50929

SEQ ID NO: 50964 - DNA, 201 bp, Homo sapiens; identical to SEQ ID NO: 50930

SEQ ID NO: 50965 - DNA, 201 bp, Homo sapiens; identical to SEQ ID NO: 50931

SEQ ID NO: 50966 - DNA, 201 bp, Homo sapiens; identical to SEQ ID NO: 50948

SEQ ID NO: 50967 - DNA, 201 bp, Homo sapiens; identical to SEQ ID NO: 50950

SEQ ID NO: 50968 - DNA, 201 bp, Homo sapiens; identical to SEQ ID NO: 50933

SEQ ID NO: 50969 - DNA, 201 bp, Homo sapiens; identical to SEQ ID NO: 50939

SEQ ID NO: 50970 - DNA, 201 bp, Homo sapiens; identical to SEQ ID NO: 50942

SEQ ID NO: 50971 - DNA, 201 bp, Homo sapiens; identical to SEQ ID NO: 50926

SEQ ID NO: 50972 - DNA, 138 bp, Homo sapiens; identical to SEQ ID NO: 50927

SEQ ID NO: 50973 - DNA, 201 bp, Homo sapiens; identical to SEQ ID NO: 50951

SEQ ID NO: 50974 - DNA, 201 bp, Homo sapiens; identical to SEQ ID NO: 50952

SEQ ID NO: 50975 - DNA, 172 bp, Homo sapiens; identical to SEQ ID NO: 50936

SEQ ID NO: 50976 - DNA, 201 bp, Homo sapiens; identical to SEQ ID NO: 50937

SEQ ID NO: 50977 - DNA, 201 bp, Homo sapiens; identical to SEQ ID NO: 50953

SEQ ID NO: 50978 - DNA, 201 bp, Homo sapiens; identical to SEQ ID NO: 50924

SEQ ID NO: 50979 - DNA, 172 bp, Homo sapiens; identical to SEQ ID NO: 50936

SEQ ID NO: 50980 - DNA, 201 bp, Homo sapiens; identical to SEQ ID NO: 50937

SEQ ID NO: 50981 - DNA, 138 bp, Homo sapiens; identical to SEQ ID NO: 50927

SEQ ID NO: 50982 - DNA, 201 bp, Homo sapiens
tggttcagtcaaaccatctgcttcagcctcagcccgttgggaggcaaggtcaattggtggccaaagaggcttctgctttgtcagagcaggtctttggaatyttgatgggagttgtattttctcagttgctggtgaaatttgaattcccaagggaatacatttatcctccaggtaagactgcaccggattcaggtgaatgct

SEQ ID NO: 50983 - DNA, 201 bp, Homo sapiens
caaccatgcccagggtctcagaagacgtgtaccgcagccacgtggcaggccagatgctgcatgggggcggcagcaggctcaacagcggcaaccgctggttygacaagacgctgcagttcatcgtggcagaagatggctcctgtgggcttgtgtacgagcatgctgcagcggaggggccccctattgtcacccttctggact

SEQ ID NO: 50984 - DNA, 201 bp, Homo sapiens
aggggctggagcgtcgggccaggaagacggagaactggctgtctgagtggtggctcaagaccgcctacctccagtaccgccagcctgtggtcatctactcsagcccaggcgtgatgctacccaagcaggacttcgtggacctgcagggtcagctccgatttgctgccaaactcattgagggtgtgttggatttcaaggtca

SEQ ID NO: 50985 - DNA, 201 bp, Homo sapiens
tcgggcccgtggtccccgacggctacggtgtctgctataaccccatggaggcccacatcaacttctccctgtcggcctacaacagctgcgcggagaccaaygccgcccgcctggcgcattacctggagaaggcgctcctggacatgcgtgccctgctgcagagccacccccgggccaagctctgagcccctaggactcagg

SEQ ID NO: 50986 - DNA, 201 bp, Homo sapiens
gaagggaaccagccctccagagcaggagactggcaagagctctttgtctcaccagctcagccccggccactccctgccaactccatgaccaggccaccatytgtaccctgcttcccaaactcccaggacctggagacaggattgtctggggccgaggggccagggtgtgaggtttcacctccgttgcggctgtgctcctgt

SEQ ID NO: 50987 - DNA, 201 bp, Homo sapiens
ggcgctcctggacatgcgtgccctgctgcagagccacccccgggccaagctctgagcccctaggactcaggcctgccaatgccacagccaagcccaccctrggatgggccacccaccagggctcagctccttggttccctcttccttggttccctcttccctggtccccccaaatctactgagccacggaccgcatcctcc

SEQ ID NO: 50988 - DNA, 181 bp, Homo sapiens
gacaggattgtctggggccgaggggccagggtgtgaggtttcacctccgttgcggctgtgctcctgtggataacattgctagcgagccgcctctggttccmctcagcttggttcctgcccccgccctgctgtatgatattaatgtggaaggtcatcaataaaggggaattgtgttggtgaa

SEQ ID NO: 50989 - DNA, 201 bp, Homo sapiens
ccaatgccacagccaagcccaccctaggatgggccacccaccagggctcagctccttggttccctcttccttggttccctcttccctggtccccccaaatstactgagccacggaccgcatcctccagggggcctgcaggccccagccaagtgccttccgtgggtcatcccagcacctgccagggcccgacctggggctga

SEQ ID NO: 50990 - DNA, 201 bp, Homo sapiens
gctcaacagcggcaaccgctggttcgacaagacgctgcagttcatcgtggcagaagatggctcctgtgggcttgtgtacgagcatgctgcagcggaggggycccctattgtcacccttctggactatgtcatcgagtacacgaagaaacccgagcttgtgcggtctcccatggtgcccctgcccatgcccaagaagctgcg

SEQ ID NO: 50991 - DNA, 135 bp, Homo sapiens
ccgttgcggctgtgctcctgtggataacattgctagcgagccgcctctggttccactcagcttggttcctgcccccgccctgctgtatgatattaatgtgsaaggtcatcaataaaggggaattgtgttggtgaa

SEQ ID NO: 50992 - DNA, 201 bp, Homo sapiens
ggcctacaacagctgcgcggagaccaacgccgcccgcctggcgcattacctggagaaggcgctcctggacatgcgtgccctgctgcagagccacccccggsccaagctctgagcccctaggactcaggcctgccaatgccacagccaagcccaccctaggatgggccacccaccagggctcagctccttggttccctcttc

SEQ ID NO: 50993 - DNA, 201 bp, Homo sapiens
tggtgttccaccattttggaaaagacttccccaagtcggagaagctaagcccagatgccttcatccagatggctttgcagctggcctactacaggatctayggacaggcatgtgccacctatgaaagtgcctccctgcgcatgtttcacctgggccgcaccgacaccatccgctcggcttccatggactcactcacctttg

SEQ ID NO: 50994 - DNA, 147 bp, Homo sapiens
cttctagagtccaggagcttcccctgccactgccacaacccccgatkccaccacagccatcgccactgccacctgcctcccgctgaatcttggctcttgtcttctctttccagcccaggcaacctctgggcttcctgaagcccttct

SEQ ID NO: 50995 - DNA, 201 bp, Homo sapiens
caggcccaccgaggctacaccgaccgggccatccgcggggaggcctttgatcgacacctgctgggcctgaagctgcaggccatcgaggacctggtgagcaygcccgacatcttcatggacacctcctacgccatcgccatgcacttccacctctccaccagccaggtccctgccaagacagactgtgtcatgttcttcggg

SEQ ID NO: 50996 - DNA, 201 bp, Homo sapiens; identical to SEQ ID NO: 50983

SEQ ID NO: 50997 - DNA, 201 bp, Homo sapiens; identical to SEQ ID NO: 50984

SEQ ID NO: 50998 - DNA, 201 bp, Homo sapiens; identical to SEQ ID NO: 50985

SEQ ID NO: 50999 - DNA, 201 bp, Homo sapiens; identical to SEQ ID NO: 50986

SEQ ID NO: 51000 - DNA, 201 bp, Homo sapiens; identical to SEQ ID NO: 50987

SEQ ID NO: 51001 - DNA, 181 bp, Homo sapiens; identical to SEQ ID NO: 50988

SEQ ID NO: 51002 - DNA, 201 bp, Homo sapiens; identical to SEQ ID NO: 50989

SEQ ID NO: 51003 - DNA, 201 bp, Homo sapiens
gagggtgggcgcggggctgcctctaccggctggcggctgtaactcagcgaccttggcccgaaggctctagcaaggacccaccgaccccagccgcggcggcrcggactttgcccggtgtgtggggcggagcggactgcgtgtccgcggacgggcagcgaagatgttagccttcgctgccaggaccgtggtgaagcctctggg

SEQ ID NO: 51004 - DNA, 201 bp, Homo sapiens; identical to SEQ ID NO: 50990

SEQ ID NO: 51005 - DNA, 135 bp, Homo sapiens; identical to SEQ ID NO: 50991

SEQ ID NO: 51006 - DNA, 109 bp, Homo sapiens
atgccccgyccccgccccacagccaacctcccgggcaccgttgcccgcccggggcccgctaccggcccaggccccgcctcgcgagtcctcctccccgggtgcctgcccg

SEQ ID NO: 51007 - DNA, 201 bp, Homo sapiens; identical to SEQ ID NO: 50992

SEQ ID NO: 51008 - DNA, 201 bp, Homo sapiens; identical to SEQ ID NO: 50993

SEQ ID NO: 51009 - DNA, 201 bp, Homo sapiens; identical to SEQ ID NO: 50995

SEQ ID NO: 51010 - DNA, 201 bp, Homo sapiens; identical to SEQ ID NO: 50983

SEQ ID NO: 51011 - DNA, 201 bp, Homo sapiens; identical to SEQ ID NO: 50984

SEQ ID NO: 51012 - DNA, 201 bp, Homo sapiens; identical to SEQ ID NO: 50990

SEQ ID NO: 51013 - DNA, 201 bp, Homo sapiens; identical to SEQ ID NO: 50993

SEQ ID NO: 51014 - DNA, 147 bp, Homo sapiens
cttctagagtccaggagcttcccctgccactgccacaacccccgatkccaccacagccatcgccactgccacctgcctcccgctgaatcttggctcttgtcttctctttccagcccaggtgaagcctctgggcttcctgaagccctt

SEQ ID NO: 51015 - DNA, 201 bp, Homo sapiens; identical to SEQ ID NO: 50983

SEQ ID NO: 51016 - DNA, 201 bp, Homo sapiens; identical to SEQ ID NO: 50984

SEQ ID NO: 51017 - DNA, 201 bp, Homo sapiens; identical to SEQ ID NO: 50985

SEQ ID NO: 51018 - DNA, 201 bp, Homo sapiens; identical to SEQ ID NO: 50986

SEQ ID NO: 51019 - DNA, 201 bp, Homo sapiens; identical to SEQ ID NO: 50987

SEQ ID NO: 51020 - DNA, 181 bp, Homo sapiens; identical to SEQ ID NO: 50988

SEQ ID NO: 51021 - DNA, 201 bp, Homo sapiens; identical to SEQ ID NO: 50989

SEQ ID NO: 51022 - DNA, 201 bp, Homo sapiens; identical to SEQ ID NO: 51003

SEQ ID NO: 51023 - DNA, 201 bp, Homo sapiens; identical to SEQ ID NO: 50990

SEQ ID NO: 51024 - DNA, 135 bp, Homo sapiens; identical to SEQ ID NO: 50991

SEQ ID NO: 51025 - DNA, 193 bp, Homo sapiens
cctactgcgacccgctaccgggcgacgccccgcccctccgtccccgcccctcctgtccctcctcaaggagactccgccccatcgatgccccgyccccgccccacagccaacctcccgggcaccgttgcccgcccggggcccgctaccggcccaggccccgcctcgcgagtcctcctccccgggtgcctgcccg

SEQ ID NO: 51026 - DNA, 201 bp, Homo sapiens; identical to SEQ ID NO: 50992

SEQ ID NO: 51027 - DNA, 201 bp, Homo sapiens; identical to SEQ ID NO: 50993

SEQ ID NO: 51028 - DNA, 201 bp, Homo sapiens; identical to SEQ ID NO: 50995

SEQ ID NO: 51029 - DNA, 201 bp, Homo sapiens; identical to SEQ ID NO: 50983

SEQ ID NO: 51030 - DNA, 201 bp, Homo sapiens; identical to SEQ ID NO: 50984

SEQ ID NO: 51031 - DNA, 201 bp, Homo sapiens; identical to SEQ ID NO: 50985

SEQ ID NO: 51032 - DNA, 201 bp, Homo sapiens; identical to SEQ ID NO: 50986

SEQ ID NO: 51033 - DNA, 201 bp, Homo sapiens; identical to SEQ ID NO: 50987

SEQ ID NO: 51034 - DNA, 181 bp, Homo sapiens; identical to SEQ ID NO: 50988

SEQ ID NO: 51035 - DNA, 201 bp, Homo sapiens; identical to SEQ ID NO: 50989

SEQ ID NO: 51036 - DNA, 201 bp, Homo sapiens; identical to SEQ ID NO: 51003

SEQ ID NO: 51037 - DNA, 201 bp, Homo sapiens; identical to SEQ ID NO: 50990

SEQ ID NO: 51038 - DNA, 135 bp, Homo sapiens; identical to SEQ ID NO: 50991

SEQ ID NO: 51039 - DNA, 201 bp, Homo sapiens
ccatgtcgcctactgcgacccgctaccgggcgacgccccgcccctccgtccccgcccctcctgtccctcctcaaggagactccgccccatcgatgccccgyccccgccccacagccaacctcccgggcaccgttgcccgcccggggcccgctaccggcccaggccccgcctcgcgagtcctcctccccgggtgcctgcccg

SEQ ID NO: 51040 - DNA, 201 bp, Homo sapiens; identical to SEQ ID NO: 50992

SEQ ID NO: 51041 - DNA, 201 bp, Homo sapiens; identical to SEQ ID NO: 50993

SEQ ID NO: 51042 - DNA, 201 bp, Homo sapiens; identical to SEQ ID NO: 50995

SEQ ID NO: 51043 - DNA, 201 bp, Homo sapiens
gctctccacctgggatttgctattgaatctctaccctctcccaccacacagtactgattgctcactgaaagactcagcacccccaatggtgcgcggaagcyaggcgggcgattacaatccaattacctattgtcgactcagcccacacaagcttttctcctcctcttgcagggcatggggccaggctccactcccaaatga

SEQ ID NO: 51044 - DNA, 201 bp, Homo sapiens
gacctctcactcctgcctggtgttccaacccgttctgtggccagagtatacattttggaacctcttcgaggccatcctgcagttccagatgaaccatagcrtgcttcagaaggcccgagacatgtatgcagaggagcggaagaggcagcagctggagagggaccaggctacagtgacagagcagctgctgcgagaggggct

SEQ ID NO: 51045 - DNA, 111 bp, Homo sapiens
gctaactgcaacggaagaacaccttcttttgctgctgcaattgcctaccctccctcaggtgcacttggctagctccaagaccctggctttggactaggggrcaccggaaga

SEQ ID NO: 51046 - DNA, 201 bp, Homo sapiens
ttggagacagcatctcaccctgtcctggctggtctcgaactcctgacctcaggtgatccgccggcctcaccctcccaaagtgctgggattacaggcatgasccaccatgccagacttcccattttactttctgcaagctgtttccctagcagctccctctaggggagaggtgaaatcttgcaagttgtagcaagagcacac

SEQ ID NO: 51047 - DNA, 201 bp, Homo sapiens
tggaaagaagaggcagagaggtcgtcgtcgtcgcccagcagcaagggctgcaaaatagtagaactcgtggttgctttggacaggtgtgatttgtgcaagcyaggttcaacccttgcctcaagaaatcagatgggaccaatttagtgtccttccacctgtgagccaagcccccatttgaggacatctatcgtattcttgtgt

SEQ ID NO: 51048 - DNA, 201 bp, Homo sapiens
cctgggtctgactttccgtaatatgattggggtacagtagaggtgattaatggggctggcatctctctttggcctgaggttctgtattctgggaaaggtayacagggtggagtagggagaagctgccccaggaggcgatgtagtggtggaaagaagaggcagagaggtcgtcgtcgtcgcccagcagcaagggctgcaaaa

SEQ ID NO: 51049 - DNA, 201 bp, Homo sapiens
gaagatggagaaggaagaaacggggaatgatcaagatgtgggcaccatgatgtggcaggaaaccgacttagatgttcagaagaagtcagtgcagatacggrggaaatgggaatgggaagaagtctgcaaagccaggagaaccgaggaaaggcttttgcctccagaggtcacattgcgttataaaactctgggtggtaaaag

SEQ ID NO: 51050 - DNA, 201 bp, Homo sapiens
ctatttcaggtgccccacaccggcaagtaccagccagcaacaccaaccaaatgctactctctttaaagtccattttccttcttctttttttttttttttttggagacagcatctcaccctgtcctggctggtctcgaactcctgacctcaggtgatccgccggcctcaccctcccaaagtgctgggattacaggcatgagc

SEQ ID NO: 51051 - DNA, 201 bp, Homo sapiens; identical to SEQ ID NO: 51043

SEQ ID NO: 51052 - DNA, 201 bp, Homo sapiens
gacctctcactcctgcctggtgttccaacccgttctgtggccagagtatacattttggaacctcttcgaggccatcctgcagttccagatgaaccatagcrtgcttcagcagaaggcccgagacatgtatgcagaggagcggaagaggcagcagctggagagggaccaggctacagtgacagagcagctgctgcgagaggg

SEQ ID NO: 51053 - DNA, 111 bp, Homo sapiens; identical to SEQ ID NO: 51045

SEQ ID NO: 51054 - DNA, 201 bp, Homo sapiens; identical to SEQ ID NO: 51046

SEQ ID NO: 51055 - DNA, 201 bp, Homo sapiens; identical to SEQ ID NO: 51047

SEQ ID NO: 51056 - DNA, 201 bp, Homo sapiens; identical to SEQ ID NO: 51048

SEQ ID NO: 51057 - DNA, 201 bp, Homo sapiens; identical to SEQ ID NO: 51049

SEQ ID NO: 51058 - DNA, 201 bp, Homo sapiens; identical to SEQ ID NO: 51050

SEQ ID NO: 51059 - DNA, 201 bp, Homo sapiens; identical to SEQ ID NO: 51043

SEQ ID NO: 51060 - DNA, 201 bp, Homo sapiens; identical to SEQ ID NO: 51044

SEQ ID NO: 51061 - DNA, 111 bp, Homo sapiens; identical to SEQ ID NO: 51045

SEQ ID NO: 51062 - DNA, 201 bp, Homo sapiens; identical to SEQ ID NO: 51046

SEQ ID NO: 51063 - DNA, 201 bp, Homo sapiens; identical to SEQ ID NO: 51047

SEQ ID NO: 51064 - DNA, 201 bp, Homo sapiens; identical to SEQ ID NO: 51048

SEQ ID NO: 51065 - DNA, 201 bp, Homo sapiens; identical to SEQ ID NO: 51049

SEQ ID NO: 51066 - DNA, 201 bp, Homo sapiens; identical to SEQ ID NO: 51050

SEQ ID NO: 51067 - DNA, 157 bp, Homo sapiens
ttttgctggtgcccagaagaatgttggctctgctggggtcaccgtggagattgtccrtgatgacctgctgggatttgccctcctagagtgcccctcagtcctggaatacaaggtgcaggctggaaacagctccttgtacaacatgcctccatgtttc

SEQ ID NO: 51068 - DNA, 201 bp, Homo sapiens
ctccatcaaatctcaaatgatttatgagattattgataattctcaaggattctacatattctgtgggaggcatctgggcctctctgtataatgctgtcacrattgaagatgttcagaagctagccgccttcatgaaaaaattttggagatgcatcagctacaaacacatcctaaccaggatatactctgttcttgaacaac

SEQ ID NO: 51069 - DNA, 201 bp, Homo sapiens
aaaaaagatttcttgataaagctcttgaactcaatatgttgtccttgaaagggcataagtctgtgggaggcatctgggcctctctgtataatgctgtcacrattgaagatgttcagaagctagccgccttcatgaaaaaattttggagatgcatcagctacaaacacatcctaaccaggatatactctgttcttgaacaac

SEQ ID NO: 51070 - DNA, 201 bp, Homo sapiens
ctaaccaggatatactctgttcttgaacaacatacaaagtttaaagtaaattggggatggctagaaaaagttaacaaacacagtatttttctcaaatgaamatgtttattgtagattcttcttttttgaaggaacaacagcaaaacatctacagctctgtaaagctggtgggacctaatgttcaccttaattctaacttga

SEQ ID NO: 51071 - DNA, 201 bp, Homo sapiens
taattctcaaggattctacatatgtccagtggggccccaaaatagaagcaagatgaatattccattctgcattggcaatgccaaaggagatgatgctttaraaaaaagatttcttgataaagctcttgaactcaatatgttgtccttgaaagggcataagtctgtgggaggcatctgggcctctctgtataatgctgtcac

SEQ ID NO: 51072 - DNA, 188 bp, Homo sapiens
agaccccgcctgctggggcgcaggcggcagcggcgtggccatgaagctgaaggtgaagaacgtgtttctcgcctacttcctggtgtcratcgccggcctcctctacgcgctggccagccatgtgactgccttcctcccctgcgggcagcagctgagcagctacggcagaaggatctgaggatttccca

SEQ ID NO: 51073 - DNA, 201 bp, Homo sapiens
actgcccacaggctggggacaagcagcccttgtattgagccaggttggccctgtctagggtggaacagaaggacagacggacccaggagggagggcagctkattaactgggtaacttattggggctgggcaagcactggggggctggaggagctgggctggaccctccctacctgagcatgctgacccccttcctacctcc

SEQ ID NO: 51074 - DNA, 201 bp, Homo sapiens
tctcccccagcctgccatgtggcactgcccacaggctggggacaagcagcccttgtattgagccaggttggccctgtctagggtggaacagaaggacagayggacccaggagggagggcagctgattaactgggtaacttattggggctgggcaagcactggggggctggaggagctgggctggaccctccctacctgagc

SEQ ID NO: 51075 - DNA, 201 bp, Homo sapiens
agagggagtgctgtgggtgggaagaaggacccatcaccaccagggacccaaggagtcgtgtactttgctgacagtggcaacacctacagctgggagctgtytgaggagatgcgctggacccgtggtgtctcagtgtggcctgtggggctggtgggtggcctgcgagtcaagggccctcaggtacaggacagccgggtagtg

SEQ ID NO: 51076 - DNA, 201 bp, Homo sapiens
tattgagccaggttggccctgtctagggtggaacagaaggacagacggacccaggagggagggcagctgattaactgggtaacttattggggctgggcaarcactggggggctggaggagctgggctggaccctccctacctgagcatgctgacccccttcctacctccagaataaagaatctcaacctgaaaaaaaagaa

SEQ ID NO: 51077 - DNA, 201 bp, Homo sapiens
tgcccacaggctggggacaagcagcccttgtattgagccaggttggccctgtctagggtggaacagaaggacagacggacccaggagggagggcagctgaktaactgggtaacttattggggctgggcaagcactggggggctggaggagctgggctggaccctccctacctgagcatgctgacccccttcctacctccag

SEQ ID NO: 51078 - DNA, 201 bp, Homo sapiens
gcccacaggctggggacaagcagcccttgtattgagccaggttggccctgtctagggtggaacagaaggacagacggacccaggagggagggcagctgatyaactgggtaacttattggggctgggcaagcactggggggctggaggagctgggctggaccctccctacctgagcatgctgacccccttcctacctccaga

SEQ ID NO: 51079 - DNA, 201 bp, Homo sapiens
agacccagggcatggtcctgctgcttcatctctcccccagcctgccatgtggcactgcccacaggctggggacaagcagcccttgtattgagccaggttgsccctgtctagggtggaacagaaggacagacggacccaggagggagggcagctgattaactgggtaacttattggggctgggcaagcactggggggctgga

SEQ ID NO: 51080 - DNA, 201 bp, Homo sapiens
aaggtgctgaggcatcatcacagcaaactgctcagatctccaccccagatggaaggcccagaccatggcaaggcactcttctcgacccctgcagctgtgcytgagctgaagcttctctgtggggcagacgtcttgaagaccttccagacccccaacctctggaaggatgcgcacatccaggaaatagtggagaagtttggc

SEQ ID NO: 51081 - DNA, 160 bp, Homo sapiens
tttcagaatatgaactgaggagtcaaacagttggaaacagcacattgctgatttacactggatcttgccttagaaaccattgtctgcctgcctaaccagcytttcataaaatttaaacaaaactctttctacgtagtgatcctcaagcaatatttttgat

SEQ ID NO: 51082 - DNA, 201 bp, Homo sapiens
tccgactggatccgggtggacccttgggagagtgagcaggcacagtggatggagacagtgaaggtgctgaggcatcatcacagcaaactgctcagatctcyaccccagatggaaggcccagaccatggcaaggcactcttctcgacccctgcagctgtgcctgagctgaagcttctctgtggggcagacgtcttgaagacc

SEQ ID NO: 51083 - DNA, 201 bp, Homo sapiens
tgtttgaggtggccagagatcacctacaccaaacaggaatgtaccaggtcatccagggtatcatctctcctgtcaacgacacctatgggaagaaagacctygcagcttctcatcaccgagtggccatggcccggctggccctgcagacatccgactggatccgggtggacccttgggagagtgagcaggcacagtggatgg

SEQ ID NO: 51084 - DNA, 201 bp, Homo sapiens
acctgtggtgctcctggcctgtggctcctttaaccccatcaccaacatgcacctgcgcatgtttgaggtggccagagatcacctacaccaaacaggaatgyaccaggtcatccagggtatcatctctcctgtcaacgacacctatgggaagaaagacctcgcagcttctcatcaccgagtggccatggcccggctggccct

SEQ ID NO: 51085 - DNA, 201 bp, Homo sapiens
aggttacatcgcagaatctcccatcctacggatgcaccagcacaacattcacctggccaaggagcctcgtaaagtacctgattcccgatgctgtcatcacrtacatcaaggaccatggcctctacaccaagggcagtacctggaaaggcaaaagcacccagagcactgagggcaagacaagctagggaggggggactcagc

SEQ ID NO: 51086 - DNA, 201 bp, Homo sapiens; identical to SEQ ID NO: 51080

SEQ ID NO: 51087 - DNA, 201 bp, Homo sapiens
tttcagaatatgaactgaggagtcaaacagttggaaacagcacattgctgatttacactggatcttgccttagaaaccattgtctgcctgcctaaccagcytttcataaaatttaaacaaaactctttctacgtagtgatcctcaagcaatatttttgatacagcaagtgtcaaacttgctatagcataaaagccggggct

SEQ ID NO: 51088 - DNA, 201 bp, Homo sapiens
ctttctacgtagtgatcctcaagcaatatttttgatacagcaagtgtcaaacttgctatagcataaaagccggggctcctgatttccaggtttctaaaaakgaactgaggtaaaacagatgcctgaccgttttaaaggatcttttttaatgttttatgactgcctgtctgtttgaatactggcaaagggataaataataaa

SEQ ID NO: 51089 - DNA, 201 bp, Homo sapiens; identical to SEQ ID NO: 51082

SEQ ID NO: 51090 - DNA, 201 bp, Homo sapiens
tgcttttcactcttgccttgtctcccaattaataaggaatgtaccaggtcatccagggtatcatctctcctgtcaacgacacctatgggaagaaagacctygcagcttctcatcaccgagtggccatggcccggctggccctgcagacatccgactggatccgggtggacccttgggagagtgagcaggcacagtggatgg

SEQ ID NO: 51091 - DNA, 201 bp, Homo sapiens
ccaaggagcctgtgcagaatgagatcagtgccacatacatcaggcgagccttgggccaagggcagagcgtaaagtacctgattcccgatgctgtcatcacrtacatcaaggaccatggcctctacaccaagggcagtacctggaaaggcaaaagcacccagagcactgagggcaagacaagctagggaggggggactcagc

SEQ ID NO: 51092 - DNA, 201 bp, Homo sapiens
tctttctacgtagtgatcctcaagcaatatttttgatacagcaagtgtcaaacttgctatagcataaaagccggggctcctgatttccaggtttctaaaawggaactgaggtaaaacagatgcctgaccgttttaaaggatcttttttaatgttttatgactgcctgtctgtttgaatactggcaaagggataaataataa

SEQ ID NO: 51093 - DNA, 201 bp, Homo sapiens
tgcttcagcctagatcctgccatgaagcggactgctgctccctggctcccactctgatctgcttttcactcttgccttgtctcccaattaataaggaatgyaccaggtcatccagggtatcatctctcctgtcaacgacacctatgggaagaaagacctcgcagcttctcatcaccgagtggccatggcccggctggccct

SEQ ID NO: 51094 - DNA, 201 bp, Homo sapiens
ggaccttcaaggcatcatcacagcaaactgctcagatctccaccccagatggaaggcccagaccatggcaaggcactcttctcgacccctgcagctgtgcytgagctgaagcttctctgtggggcagacgtcttgaagaccttccagacccccaacctctggaaggatgcgcacatccaggaaatagtggagaagtttggc

SEQ ID NO: 51095 - DNA, 201 bp, Homo sapiens; identical to SEQ ID NO: 51087

SEQ ID NO: 51096 - DNA, 201 bp, Homo sapiens; identical to SEQ ID NO: 51092

SEQ ID NO: 51097 - DNA, 201 bp, Homo sapiens
cccagggtcaatccacaggcccaaggtaccactcaggcaggcagcaagaagcagttaatggtcatgccccatagaggcgcagtggaagtccctggcaaatrcatgttgtattggaagtaattatttccacaacaaagttcagagatccagctaatattcaaagtagggtcaacctgaactaggaccttcaaggcatcatca

SEQ ID NO: 51098 - DNA, 201 bp, Homo sapiens; identical to SEQ ID NO: 51088

SEQ ID NO: 51099 - DNA, 201 bp, Homo sapiens
tatttccacaacaaagttcagagatccagctaatattcaaagtagggtcaacctgaactaggaccttcaaggcatcatcacagcaaactgctcagatctcyaccccagatggaaggcccagaccatggcaaggcactcttctcgacccctgcagctgtgcctgagctgaagcttctctgtggggcagacgtcttgaagacc

SEQ ID NO: 51100 - DNA, 201 bp, Homo sapiens; identical to SEQ ID NO: 51084

SEQ ID NO: 51101 - DNA, 201 bp, Homo sapiens; identical to SEQ ID NO: 51083

SEQ ID NO: 51102 - DNA, 201 bp, Homo sapiens; identical to SEQ ID NO: 51091

SEQ ID NO: 51103 - DNA, 201 bp, Homo sapiens
gaggtggccagagatcacctacaccaaacagatttttgtctttcaaggcctttgtttcccagggtgcacttcagccaacacaaccaagggaagaagaaaawgggcaaaagtgtgcatgaggtggtaggggccagactgtgcttgtgcccacagaaacaccaagcttctcccagcaaaagccccagaactgaagtctgcaaa

SEQ ID NO: 51104 - DNA, 201 bp, Homo sapiens
agcacctcactggaacagactctgggctcaggctgagaacagagacagccagccccagcccccacctcaagctggagacagggtatgaatggagctgtgcytgagctgaagcttctctgtggggcagacgtcttgaagaccttccagacccccaacctctggaaggatgcgcacatccaggaaatagtggagaagtttggc

SEQ ID NO: 51105 - DNA, 201 bp, Homo sapiens; identical to SEQ ID NO: 51087

SEQ ID NO: 51106 - DNA, 201 bp, Homo sapiens; identical to SEQ ID NO: 51092

SEQ ID NO: 51107 - DNA, 201 bp, Homo sapiens; identical to SEQ ID NO: 51088

SEQ ID NO: 51108 - DNA, 201 bp, Homo sapiens
tccgactggatccgggtggacccttgggagagtgagcaggcacagtggatggagacagtgaaggtgctgaggcatcatcacagcaaactgctcagatctcyaccccagatggaaggcccagaccatggcaaggcactcttctcgacccctgcaggtattcttaaaaggattctacagacactttttgagcacctcactgga

SEQ ID NO: 51109 - DNA, 201 bp, Homo sapiens; identical to SEQ ID NO: 51084

SEQ ID NO: 51110 - DNA, 201 bp, Homo sapiens; identical to SEQ ID NO: 51083

SEQ ID NO: 51111 - DNA, 201 bp, Homo sapiens; identical to SEQ ID NO: 51091

SEQ ID NO: 51112 - DNA, 201 bp, Homo sapiens
tggcccggctggccctgcagacatccgactggatccgggtggacccttgggagagtgagcaggcacagtggatggagacagtgaaggtgctgagctgtgcytgagctgaagcttctctgtggggcagacgtcttgaagaccttccagacccccaacctctggaaggatgcgcacatccaggaaatagtggagaagtttggc

SEQ ID NO: 51113 - DNA, 160 bp, Homo sapiens; identical to SEQ ID NO: 51081

SEQ ID NO: 51114 - DNA, 201 bp, Homo sapiens; identical to SEQ ID NO: 51090

SEQ ID NO: 51115 - DNA, 201 bp, Homo sapiens; identical to SEQ ID NO: 51093

SEQ ID NO: 51116 - DNA, 201 bp, Homo sapiens; identical to SEQ ID NO: 51091

SEQ ID NO: 51117 - DNA, 201 bp, Homo sapiens; identical to SEQ ID NO: 51080

SEQ ID NO: 51118 - DNA, 201 bp, Homo sapiens; identical to SEQ ID NO: 51087

SEQ ID NO: 51119 - DNA, 201 bp, Homo sapiens; identical to SEQ ID NO: 51088

SEQ ID NO: 51120 - DNA, 201 bp, Homo sapiens; identical to SEQ ID NO: 51082

SEQ ID NO: 51121 - DNA, 201 bp, Homo sapiens
tcgccgagcgccgttgctgagccctgcaaatagcaggaatgtaccaggtcatccagggtatcatctctcctgtcaacgacacctatgggaagaaagacctygcagcttctcatcaccgagtggccatggcccggctggccctgcagacatccgactggatccgggtggacccttgggagagtgagcaggcacagtggatgg

SEQ ID NO: 51122 - DNA, 201 bp, Homo sapiens; identical to SEQ ID NO: 51091

SEQ ID NO: 51123 - DNA, 201 bp, Homo sapiens; identical to SEQ ID NO: 51092

SEQ ID NO: 51124 - DNA, 201 bp, Homo sapiens
tgaccgacagcccctgctaggcccagcaggtcccctagtcccccgcagtcccccgagactcgccgagcgccgttgctgagccctgcaaatagcaggaatgyaccaggtcatccagggtatcatctctcctgtcaacgacacctatgggaagaaagacctcgcagcttctcatcaccgagtggccatggcccggctggccct

SEQ ID NO: 51125 - DNA, 201 bp, Homo sapiens; identical to SEQ ID NO: 51080

SEQ ID NO: 51126 - DNA, 201 bp, Homo sapiens; identical to SEQ ID NO: 51087

SEQ ID NO: 51127 - DNA, 201 bp, Homo sapiens; identical to SEQ ID NO: 51088

SEQ ID NO: 51128 - DNA, 201 bp, Homo sapiens; identical to SEQ ID NO: 51082

SEQ ID NO: 51129 - DNA, 201 bp, Homo sapiens; identical to SEQ ID NO: 51083

SEQ ID NO: 51130 - DNA, 201 bp, Homo sapiens; identical to SEQ ID NO: 51091

SEQ ID NO: 51131 - DNA, 201 bp, Homo sapiens; identical to SEQ ID NO: 51092

SEQ ID NO: 51132 - DNA, 201 bp, Homo sapiens; identical to SEQ ID NO: 51084

SEQ ID NO: 51133 - DNA, 201 bp, Homo sapiens; identical to SEQ ID NO: 51080

SEQ ID NO: 51134 - DNA, 201 bp, Homo sapiens; identical to SEQ ID NO: 51087

SEQ ID NO: 51135 - DNA, 201 bp, Homo sapiens; identical to SEQ ID NO: 51088

SEQ ID NO: 51136 - DNA, 201 bp, Homo sapiens; identical to SEQ ID NO: 51082

SEQ ID NO: 51137 - DNA, 201 bp, Homo sapiens; identical to SEQ ID NO: 51083

SEQ ID NO: 51138 - DNA, 201 bp, Homo sapiens; identical to SEQ ID NO: 51091

SEQ ID NO: 51139 - DNA, 201 bp, Homo sapiens; identical to SEQ ID NO: 51092

SEQ ID NO: 51140 - DNA, 201 bp, Homo sapiens; identical to SEQ ID NO: 51084

SEQ ID NO: 51141 - DNA, 201 bp, Homo sapiens
agactttttcacagaaaacaaaaaaggcacctttgaatttcaattcagaaaagatgagcagaagttttcgatcttggaaacgtagaaagcatctaaagcgrtctagggacagcagccccctgaaagactctggagcgtgtagaatccatttacaaggacagactctgtctaatcctagtctttgtgaagacccgtttacct

SEQ ID NO: 51142 - DNA, 201 bp, Homo sapiens
caacctggcagcagggataatgcagaagagcttagtccaacagaactcaatgaactcttttcagaaggagtgtcacattccttttcctgctgaacagcacmctctaggagcgactaagatagatcatttggaccttaagactgtaggtactatgaaacaaagcagtgattcacatggggttgatatcctgactccagaaag

SEQ ID NO: 51143 - DNA, 201 bp, Homo sapiens
agtagttacataaatagagactcaaatgttactatcaattgtgaaaggataaagcttaatacagaggaaaataaaccaagtcattttcaggcattaggagrtgatataagcagaactgtgatacccagtgaagtacttccatcagctggagcatttagcaaatcagaaggccagcatgagaattttctaaatatttctaga

SEQ ID NO: 51144 - DNA, 201 bp, Homo sapiens
caacactagtaggagaaagcccaccttctcaagctgtaggcaaaggcctacttcccatgggcagaggaaaatataagaagggtttcagcgtgaatcctagrtgccaggcacagatggaggagagagctgcagacagaggaatgccattttcaattagcatgcgacatgcctttgtgcctttcccaggtggttcaatactgg

SEQ ID NO: 51145 - DNA, 201 bp, Homo sapiens
atcatgtttctgacttaggtttagtcctctgtgattttgaagatagtttctatctggatactcagtcagagaaaataatacaacagatggcaactgaaaaygccaaactaggagcaaaggacaccaacctggcagcagggataatgcagaagagcttagtccaacagaactcaatgaactcttttcagaaggagtgtcaca

SEQ ID NO: 51146 - DNA, 201 bp, Homo sapiens
agcaggacttagttgaaatgggagtgcaatggaatccatgtgccctgttacattctagtacatgctcattgactcatagtgagtccgaagtaaaggaacayacatttatatcccaaactaagagttcttataaaaaattaacatcaaagaacaaaagtaacacaatatttagtgattcttatattaagcattcaccaaata

SEQ ID NO: 51147 - DNA, 201 bp, Homo sapiens
cccttccttcagaagtaacatcaaaccattttagtgattctctgtgtctacaagaagacctaattaaaaaatcaaatgtaaatgagaatcaagatacccamcagcagttgacttgttccaatgatgaatctattatattttcagaaatggattctgttcagatggttgaagctttggacaatgtggatatatttcctgtcc

SEQ ID NO: 51148 - DNA, 201 bp, Homo sapiens
gaacaaaagcattctgaaattagtgccagtttggttccaccttctttagatccaagcctgactttgaaagacaggatgtggtaccttcaatcttgcttgcraaaggaatctgataaagaatgttctgttgtcatctatgacttcatccagagctataaaattcttcttctttcttgtggcatctccttggagcaaagttat

SEQ ID NO: 51149 - DNA, 201 bp, Homo sapiens
caagctgtaggcaaaggcctacttcccatgggcagaggaaaatataagaagggtttcagcgtgaatcctagatgccaggcacagatggaggagagagctgyagacagaggaatgccattttcaattagcatgcgacatgcctttgtgcctttcccaggtggttcaatactggctgctgactactctcagcttgaactgagg

SEQ ID NO: 51150 - DNA, 201 bp, Homo sapiens
gaatgtcttccagttcctgaaacaagtttgaatatgagtgatagtttactatttgatagcttcagtgatgactatctagtaaaagaacaattacctgataygcaaatgaaagaaccccttccttcagaagtaacatcaaaccattttagtgattctctgtgtctacaagaagacctaattaaaaaatcaaatgtaaatgag

SEQ ID NO: 51151 - DNA, 201 bp, Homo sapiens
acaaaaaaggcacctttgaatttcaattcagaaaagatgagcagaagttttcgatcttggaaacgtagaaagcatctaaagcgatctagggacagcagccycctgaaagactctggagcgtgtagaatccatttacaaggacagactctgtctaatcctagtctttgtgaagacccgtttaccttagatgagaagaaaacg

SEQ ID NO: 51152 - DNA, 201 bp, Homo sapiens
acaggattgtcacgaaagagaaaactgcaagggatgttctgcccaatcagaggaggcttcttcatccttcaactccatgatgaactcctatatgaagtggyagaagaagatgttgttcaggtagctcagattgtcaagaatgaaatggaaagtgctgtaaaactgtctgtgaaattgaaagtgaaagtgaaaataggcgcc

SEQ ID NO: 51153 - DNA, 201 bp, Homo sapiens
ataaatgaagtgctgatacaaaatggttcaaaaaaccagaatgtttatatgaaacaccatgacatccatccaattaaccagtacctgcgaaagcaatctcrtgaacagacaagcactattaccaaacagaaaaatataatagagagacaaatgccctgtgaagcagtcagtagttacataaatagagactcaaatgttact

SEQ ID NO: 51154 - DNA, 201 bp, Homo sapiens
gtcagtagttacataaatagagactcaaatgttactatcaattgtgaaaggataaagcttaatacagaggaaaataaaccaagtcattttcaggcattagragatgatataagcagaactgtgatacccagtgaagtacttccatcagctggagcatttagcaaatcagaaggccagcatgagaattttctaaatatttct

SEQ ID NO: 51155 - DNA, 201 bp, Homo sapiens
attaagcattcaccaaatatagtgcaagacttaaataaaagtagagagcatacaagttcctttaattgtaatttccagaatgggaatcaagaacatcagasatgttccattttcagagcaagaaaacgggcctctttagatataaataaagagaagccaggagcctctcagaatgaggggaaaacaagtgataagaaagtt

SEQ ID NO: 51156 - DNA, 201 bp, Homo sapiens
acaagaagacctaattaaaaaatcaaatgtaaatgagaatcaagatacccaccagcagttgacttgttccaatgatgaatctattatattttcagaaatgkattctgttcagatggttgaagctttggacaatgtggatatatttcctgtccaagagaagaatcatactgtagtatctcctagagcattagaactaagtga

SEQ ID NO: 51157 - DNA, 201 bp, Homo sapiens
ctaagagttcttataaaaaattaacatcaaagaacaaaagtaacacaatatttagtgattcttatattaagcattcaccaaatatagtgcaagacttaaayaaaagtagagagcatacaagttcctttaattgtaatttccagaatgggaatcaagaacatcagacatgttccattttcagagcaagaaaacgggcctctt

SEQ ID NO: 51158 - DNA, 201 bp, Homo sapiens
gagttcttataaaaaattaacatcaaagaacaaaagtaacacaatatttagtgattcttatattaagcattcaccaaatatagtgcaagacttaaataaargtagagagcatacaagttcctttaattgtaatttccagaatgggaatcaagaacatcagacatgttccattttcagagcaagaaaacgggcctctttaga

SEQ ID NO: 51159 - DNA, 201 bp, Homo sapiens
ctcatccctcttacctcgtaaagaaagtaatatagttgatgataatggtctcattcctcctacacccattccaacatctgcttctaagctgacatttccakggattcttgaaacacctgtaaacccttggaaaactaataatgttttacaacctggtgaaagttatttatttggctcaccttcagatattaaaaaccacga

SEQ ID NO: 51160 - DNA, 201 bp, Homo sapiens
attgtcaaaatagccacagttaacattcagaagcaattagagaccttccactcaaccttcaaatcccatggtcatcgagagggtatgctccaaagtgaccraacaggattgtcacgaaagagaaaactgcaagggatgttctgcccaatcagaggaggcttcttcatccttcaactccatgatgaactcctatatgaagtg

SEQ ID NO: 51161 - DNA, 201 bp, Homo sapiens
tataaaaaattaacatcaaagaacaaaagtaacacaatatttagtgattcttatattaagcattcaccaaatatagtgcaagacttaaataaaagtagagmgcatacaagttcctttaattgtaatttccagaatgggaatcaagaacatcagacatgttccattttcagagcaagaaaacgggcctctttagatataaat

SEQ ID NO: 51162 - DNA, 201 bp, Homo sapiens
tcgagagggtatgctccaaagtgaccgaacaggattgtcacgaaagagaaaactgcaagggatgttctgcccaatcagaggaggcttcttcatccttcaastccatgatgaactcctatatgaagtggcagaagaagatgttgttcaggtagctcagattgtcaagaatgaaatggaaagtgctgtaaaactgtctgtgaa

SEQ ID NO: 51163 - DNA, 201 bp, Homo sapiens
tttacaacctggtgaaagttatttatttggctcaccttcagatattaaaaaccacgatttaagtccagggagtagaaatgggttcaaagacaacagccctwttagtgacacaagcttttcacttcagttatcacaggatggattacagttaactccagcctcaagcagttcagaaagtttgtccataattgatgtagcaag

SEQ ID NO: 51164 - DNA, 201 bp, Homo sapiens
tgggagagcagatgggcattaaagaaaatgatgctgcatgctatattgactccttcaaatccagatacacagggattaatcaattcatgacagagacagtraagaattgtaaaagagacggatttgttcagaccattttgggaaggcgtagatatttgccaggaatcaaagacaacaacccttatcgtaaagctcacgctg

SEQ ID NO: 51165 - DNA, 201 bp, Homo sapiens
agggattcttgaaacacctgtaaacccttggaaaactaataatgttttacaacctggtgaaagttatttatttggctcaccttcagatattaaaaaccackatttaagtccagggagtagaaatgggttcaaagacaacagccctattagtgacacaagcttttcacttcagttatcacaggatggattacagttaactcc

SEQ ID NO: 51166 - DNA, 201 bp, Homo sapiens
gaaaaaccaaggcagcaagaaaactctgggttctaccagaagagggattgacaatggacgcaagctaaggctgggaagacagttcagcactagtaaggacrttttaaataaattaaaggcattacatcctttaccaggcttgatattagaatggagaagaatcactaatgctattaccaaagtggtctttccccttcagcg

SEQ ID NO: 51167 - DNA, 201 bp, Homo sapiens
taattaaaaaatcaaatgtaaatgagaatcaagatacccaccagcagttgacttgttccaatgatgaatctattatattttcagaaatggattctgttcakatggttgaagctttggacaatgtggatatatttcctgtccaagagaagaatcatactgtagtatctcctagagcattagaactaagtgatccagtacttg

SEQ ID NO: 51168 - DNA, 201 bp, Homo sapiens; identical to SEQ ID NO: 51142

SEQ ID NO: 51169 - DNA, 201 bp, Homo sapiens; identical to SEQ ID NO: 51144

SEQ ID NO: 51170 - DNA, 201 bp, Homo sapiens; identical to SEQ ID NO: 51145

SEQ ID NO: 51171 - DNA, 201 bp, Homo sapiens
caggaaaggagtggacacagtaggcgagagtatcttaatttgtaagaactctgagaaatcaaaaggcatagctctccttcagggttctctaaagcctgttygcagctgtctgcaaagacgagaaggagaagaagtaactggcagcatgatacgagctattctggagataatagttggtggagtggcaagtacatcacaaga

SEQ ID NO: 51172 - DNA, 201 bp, Homo sapiens
caagatatgcatacttatgctgcctgcacatttttggctgcaagtatgaaagaagggaagcaaggaattcagagaaatcaagagtctgttcagcttggagygattgaggcctgtgtgatgtggctactagaaaatgaattcatccagagtacagaagccagtgatggaacagaaggaaaggtgtatcatccaacacatctt

SEQ ID NO: 51173 - DNA, 201 bp, Homo sapiens; identical to SEQ ID NO: 51148

SEQ ID NO: 51174 - DNA, 201 bp, Homo sapiens; identical to SEQ ID NO: 51152

SEQ ID NO: 51175 - DNA, 201 bp, Homo sapiens; identical to SEQ ID NO: 51154

SEQ ID NO: 51176 - DNA, 201 bp, Homo sapiens; identical to SEQ ID NO: 51153

SEQ ID NO: 51177 - DNA, 201 bp, Homo sapiens; identical to SEQ ID NO: 51156

SEQ ID NO: 51178 - DNA, 201 bp, Homo sapiens; identical to SEQ ID NO: 51155

SEQ ID NO: 51179 - DNA, 201 bp, Homo sapiens; identical to SEQ ID NO: 51157

SEQ ID NO: 51180 - DNA, 201 bp, Homo sapiens; identical to SEQ ID NO: 51158

SEQ ID NO: 51181 - DNA, 109 bp, Homo sapiens
atgaatggycaccgttttacgttcagaactcgttcgcttctacctttacaaaagggacaacacagatgcattactaagctcttggctcataacgatccctggggtatat

SEQ ID NO: 51182 - DNA, 201 bp, Homo sapiens; identical to SEQ ID NO: 51159

SEQ ID NO: 51183 - DNA, 201 bp, Homo sapiens; identical to SEQ ID NO: 51161

SEQ ID NO: 51184 - DNA, 201 bp, Homo sapiens; identical to SEQ ID NO: 51160

SEQ ID NO: 51185 - DNA, 201 bp, Homo sapiens; identical to SEQ ID NO: 51162

SEQ ID NO: 51186 - DNA, 201 bp, Homo sapiens; identical to SEQ ID NO: 51165

SEQ ID NO: 51187 - DNA, 201 bp, Homo sapiens
ttcctctccgggtccgtgctgagcccgccgcccggccttggtcgctgcctgaaggccgcagctgcaggagaatgcaagcctacagttcctgactacgaaakagacaagctactattggcaaactggggacttcctaaagcagttctggaaaaataccacagttttggtgtaaaaaagatgtttgaatggcaggcagagtgc

SEQ ID NO: 51188 - DNA, 201 bp, Homo sapiens; identical to SEQ ID NO: 51166

SEQ ID NO: 51189 - DNA, 201 bp, Homo sapiens
ctgtggctaaagagaagaaatactacctccagagtctgtttcaggaagtaggaataaaagtagacggttatatgggcagcacctctccatcaaggcatttytcttcattggatattgcagtctgcacaattgagagagccaatggtctgatcaatcgcctcatagaggaaaataagatggatctgttaggaatggtggttg

SEQ ID NO: 51190 - DNA, 201 bp, Homo sapiens; identical to SEQ ID NO: 51167

SEQ ID NO: 51191 - DNA, 201 bp, Homo sapiens
tttcttctggggtgaatttacctgcacgtcgtgtgattattcgaacccctatttttggtggtcgacctctagatattcttacttataagcagatggttggycgtgctggcaggaaaggagtggacacagtaggcgagagtatcttaatttgtaagaactctgagaaatcaaaaggcatagctctccttcagggttctctaa

SEQ ID NO: 51192 - DNA, 201 bp, Homo sapiens; identical to SEQ ID NO: 51141

SEQ ID NO: 51193 - DNA, 201 bp, Homo sapiens; identical to SEQ ID NO: 51143

SEQ ID NO: 51194 - DNA, 201 bp, Homo sapiens; identical to SEQ ID NO: 51146

SEQ ID NO: 51195 - DNA, 201 bp, Homo sapiens; identical to SEQ ID NO: 51147

SEQ ID NO: 51196 - DNA, 201 bp, Homo sapiens; identical to SEQ ID NO: 51149

SEQ ID NO: 51197 - DNA, 201 bp, Homo sapiens; identical to SEQ ID NO: 51150

SEQ ID NO: 51198 - DNA, 201 bp, Homo sapiens; identical to SEQ ID NO: 51151

SEQ ID NO: 51199 - DNA, 201 bp, Homo sapiens
gaggaaattatgctctattagaaacctttgaagactggcgggaagatgtccgcagctgttgccaggccagggttctcccgagagggaggacgctgggactstggcttgccctgatcggccgagaagagtttgccatgaatcttctgcgtcggagtgggaaacggcggcgttcagaatcaggctcagattcgttctcgggaa

SEQ ID NO: 51200 - DNA, 201 bp, Homo sapiens; identical to SEQ ID NO: 51163

SEQ ID NO: 51201 - DNA, 201 bp, Homo sapiens
ctgtaccatggggagtagcatttcatcatgcaggtcttacttttgaggagagggatatcattgaaggagcctttcgtcaaggtctcattcgggtcttggcrgcaacttctactctttcttctggggtgaatttacctgcacgtcgtgtgattattcgaacccctatttttggtggtcgacctctagatattcttacttata

SEQ ID NO: 51202 - DNA, 201 bp, Homo sapiens; identical to SEQ ID NO: 51164

SEQ ID NO: 51203 - DNA, 201 bp, Homo sapiens; identical to SEQ ID NO: 51142

SEQ ID NO: 51204 - DNA, 201 bp, Homo sapiens; identical to SEQ ID NO: 51144

SEQ ID NO: 51205 - DNA, 201 bp, Homo sapiens; identical to SEQ ID NO: 51145

SEQ ID NO: 51206 - DNA, 201 bp, Homo sapiens; identical to SEQ ID NO: 51171

SEQ ID NO: 51207 - DNA, 201 bp, Homo sapiens; identical to SEQ ID NO: 51172

SEQ ID NO: 51208 - DNA, 201 bp, Homo sapiens; identical to SEQ ID NO: 51148

SEQ ID NO: 51209 - DNA, 201 bp, Homo sapiens; identical to SEQ ID NO: 51152

SEQ ID NO: 51210 - DNA, 201 bp, Homo sapiens; identical to SEQ ID NO: 51154

SEQ ID NO: 51211 - DNA, 201 bp, Homo sapiens; identical to SEQ ID NO: 51153

SEQ ID NO: 51212 - DNA, 201 bp, Homo sapiens; identical to SEQ ID NO: 51156

SEQ ID NO: 51213 - DNA, 201 bp, Homo sapiens; identical to SEQ ID NO: 51155

SEQ ID NO: 51214 - DNA, 201 bp, Homo sapiens; identical to SEQ ID NO: 51157

SEQ ID NO: 51215 - DNA, 201 bp, Homo sapiens; identical to SEQ ID NO: 51158

SEQ ID NO: 51216 - DNA, 109 bp, Homo sapiens; identical to SEQ ID NO: 51181

SEQ ID NO: 51217 - DNA, 201 bp, Homo sapiens; identical to SEQ ID NO: 51159

SEQ ID NO: 51218 - DNA, 201 bp, Homo sapiens; identical to SEQ ID NO: 51161

SEQ ID NO: 51219 - DNA, 201 bp, Homo sapiens; identical to SEQ ID NO: 51160

SEQ ID NO: 51220 - DNA, 201 bp, Homo sapiens; identical to SEQ ID NO: 51162

SEQ ID NO: 51221 - DNA, 201 bp, Homo sapiens; identical to SEQ ID NO: 51165

SEQ ID NO: 51222 - DNA, 201 bp, Homo sapiens; identical to SEQ ID NO: 51187

SEQ ID NO: 51223 - DNA, 201 bp, Homo sapiens; identical to SEQ ID NO: 51189

SEQ ID NO: 51224 - DNA, 201 bp, Homo sapiens; identical to SEQ ID NO: 51166

SEQ ID NO: 51225 - DNA, 201 bp, Homo sapiens; identical to SEQ ID NO: 51167

SEQ ID NO: 51226 - DNA, 201 bp, Homo sapiens; identical to SEQ ID NO: 51191

SEQ ID NO: 51227 - DNA, 201 bp, Homo sapiens; identical to SEQ ID NO: 51141

SEQ ID NO: 51228 - DNA, 201 bp, Homo sapiens; identical to SEQ ID NO: 51143

SEQ ID NO: 51229 - DNA, 201 bp, Homo sapiens; identical to SEQ ID NO: 51146

SEQ ID NO: 51230 - DNA, 201 bp, Homo sapiens; identical to SEQ ID NO: 51147

SEQ ID NO: 51231 - DNA, 201 bp, Homo sapiens; identical to SEQ ID NO: 51149

SEQ ID NO: 51232 - DNA, 201 bp, Homo sapiens; identical to SEQ ID NO: 51150

SEQ ID NO: 51233 - DNA, 201 bp, Homo sapiens; identical to SEQ ID NO: 51151

SEQ ID NO: 51234 - DNA, 201 bp, Homo sapiens
aattatgctctattagaaagtttgagtttgaagactggcgggaagatgtccgcagctgttgccaggccagggttctcccgagagggaggacgctgggactstggcttgccctgatcggccgagaagagtttgccatgaatcttctgcgtcggagtgggaaacggcggcgttcagaatcaggctcagattcgttctcgggaa

SEQ ID NO: 51235 - DNA, 201 bp, Homo sapiens; identical to SEQ ID NO: 51163

SEQ ID NO: 51236 - DNA, 201 bp, Homo sapiens; identical to SEQ ID NO: 51164

SEQ ID NO: 51237 - DNA, 201 bp, Homo sapiens; identical to SEQ ID NO: 51201

SEQ ID NO: 51238 - DNA, 201 bp, Homo sapiens
gcctgccaccagcctggctaatttttttgtatttttagtagagacggggtttcaccgtgttaaccaggatggtctccatctccagacctcgtgatccgccygcctcggactcccaaagtgctgggattacaggcatgagccaccgcgcccggtggcttgcatgttttcttaaaaagctacagaaatttccaaatatcttct

SEQ ID NO: 51239 - DNA, 201 bp, Homo sapiens
tagaaaatgaattcatccagagtacagaagccagtgatggaacagaaggtaagtgtgacttctcagttgcaatttactcactttttcttctttagtgaggktgtatgactgctcagtgaatggaaattgtcttttcatgtagtataaaaggaatttgattttttgagcagtgtatcaactcatttttagtaaatcagtatt

SEQ ID NO: 51240 - DNA, 201 bp, Homo sapiens
aaggtctgtgcccaagaatgtggctgggaggaatctcaaagcaggtttcaccggtcatctatcatggccttaaaaataagtcatttattatacagtggctragattgtgggctctaggatcagactgccttagttcaacttttggcctcatcacttagtaatcatataaccttgggtaagtatttaacctctcttacgatt

SEQ ID NO: 51241 - DNA, 201 bp, Homo sapiens
caagatatgcatacttatgctgcctgcacatttttggctgcaagtatgaaagaagggaagcaaggaattcagagaaatcaagagtctgttcagcttggagygattgaggcctgtgtgatgtggctactagaaaatgaattcatccagagtacagaagccagtgatggaacagaaggtaagtgtgacttctcagttgcaatt

SEQ ID NO: 51242 - DNA, 201 bp, Homo sapiens
tgatactttagatatttttgctgacctgcaaagagcaatgaagggctttgttttagagaatgatcttcatattctctatctggtaagttctgttttaacarttatgtttgtgaaaatagggagaaaaaaatagatatataatcctgaacatcaaagataccctaacagaacatctcgtctgttttccatgcctaggttagt

SEQ ID NO: 51243 - DNA, 201 bp, Homo sapiens
ctttctccagctgatactttagatatttttgctgacctgcaaagagcaatgaagggctttgttttagagaatgatcttcatattctctatctggtaagttstgttttaacaattatgtttgtgaaaatagggagaaaaaaatagatatataatcctgaacatcaaagataccctaacagaacatctcgtctgttttccatg

SEQ ID NO: 51244 - DNA, 201 bp, Homo sapiens
cctggtcggggtcctgcggaggctggctgcctgctgggagcaccagcgggctcctgaggtctacatggcctttaccgtccgcaacccagagacgtgccagstgttcaccaccgagctaggctgggctgggatcagatgggaagcggaagctcatcatgaccagaaactgtttccctatggagagcacttggagatggcaat

SEQ ID NO: 51245 - DNA, 175 bp, Homo sapiens
aggcagtaatcgttctggtcactgggacacagctgccctcgcccattctaaaaagtcagcaccctcaggcccgcrggtaaccacctcctcctgagcacggtgaccagcttagaagcaaaattaagagactcatcagattctgagctgctgcgggatattttgcagaagactgtga

SEQ ID NO: 51246 - DNA, 201 bp, Homo sapiens
cgagggaatgtccttctcaatggcctctcattagaggcagacatcactgccaacttagatagccccagggtgacagtggcccagctggactgggacgtagygacggtccatcagctctctgccttccagccagatgttgtcattacagcagacgtgctgtattgcccagaagccatcgtgtccctggtcggggtcctgcgg

SEQ ID NO: 51247 - DNA, 201 bp, Homo sapiens
aatggcctctcattagaggcagacatcactgccaacttagatagccccagggtgacagtggcccagctggactgggacgtagcgacggtccatcagctctstgccttccagccagatgttgtcattacagcagacgtgctgtattgcccagaagccatcgtgtccctggtcggggtcctgcggaggctggctgcctgctgg

SEQ ID NO: 51248 - DNA, 201 bp, Homo sapiens
cacagcttcccgggtcattcaccaggtggcaccactgccgtcatttcagcttctggccactgggaggcgctgcttgaaagggtttgccctgagactccaaraagaagctgcgggaaggacagcaggggccctggggttttagcctctggcccaggagttatgtgtccataaccaaagggagcacagtctgcacccagctct

SEQ ID NO: 51249 - DNA, 201 bp, Homo sapiens
ttcccgggtcattcaccaggtggcaccactgccgtcatttcagcttctggccactgggaggcgctgcttgaaagggtttgccctgagactccaagaagaarctgcgggaaggacagcaggggccctggggttttagcctctggcccaggagttatgtgtccataaccaaagggagcacagtctgcacccagctctcatccc

SEQ ID NO: 51250 - DNA, 201 bp, Homo sapiens
agctccgagggaatgtccttctcaatggcctctcattagaggcagacatcactgccaacttagatagccccagggtgacagtggcccagctggactgggaygtagcgacggtccatcagctctctgccttccagccagatgttgtcattacagcagacgtgctgtattgcccagaagccatcgtgtccctggtcggggtcc

SEQ ID NO: 51251 - DNA, 201 bp, Homo sapiens
ccttcaggatcaggaaagtttgagaaaagcatctgcaaaatactgaagagcagagcttacctcattgcctgtccccaccccatcccaggtcaccacctggmtgaccccagctccccgacccaacaacaacccctcccaagtccctagctccctcacttggacttgagacccttcacaccccagcacatgctttctggaaac

SEQ ID NO: 51252 - DNA, 201 bp, Homo sapiens
ctggaaacttccccgtatgtcccactttcccacacttggtgccctggagcaccttccggcctctacatgatgtacgttcccctgtgagcaccctcctctcrgcctctggccaacacagtcccacccatctgtgggtaacaagggggtgttcttttcagccttgctaaactgtctgaatcaaggatcacaaactacagcctg

SEQ ID NO: 51253 - DNA, 201 bp, Homo sapiens
caggaaagtttgagaaaagcatctgcaaaatactgaagagcagagcttacctcattgcctgtccccaccccatcccaggtcaccacctggatgaccccagstccccgacccaacaacaacccctcccaagtccctagctccctcacttggacttgagacccttcacaccccagcacatgctttctggaaacttccccgtat

SEQ ID NO: 51254 - DNA, 201 bp, Homo sapiens
ctggagcaccttccggcctctacatgatgtacgttcccctgtgagcaccctcctctcggcctctggccaacacagtcccacccatctgtgggtaacaaggwggtgttcttttcagccttgctaaactgtctgaatcaaggatcacaaactacagcctgcaggccaaatccagcccacagcctgtgtttgtaaataaagctt

SEQ ID NO: 51255 - DNA, 201 bp, Homo sapiens
catctgcaaaatactgaagagcagagcttacctcattgcctgtccccaccccatcccaggtcaccacctggatgaccccagctccccgacccaacaacaamccctcccaagtccctagctccctcacttggacttgagacccttcacaccccagcacatgctttctggaaacttccccgtatgtcccactttcccacactt

SEQ ID NO: 51256 - DNA, 201 bp, Homo sapiens
ggagcaccttccggcctctacatgatgtacgttcccctgtgagcaccctcctctcggcctctggccaacacagtcccacccatctgtgggtaacaaggggktgttcttttcagccttgctaaactgtctgaatcaaggatcacaaactacagcctgcaggccaaatccagcccacagcctgtgtttgtaaataaagcttta

SEQ ID NO: 51257 - DNA, 201 bp, Homo sapiens
gccagatgttgtcattacagcagacgtgctgtattgcccagaagccatcgtgtccctggtcggggtcctgcggaggctggctgcctgctgggagcaccagygggctcctgaggtctacatggcctttaccgtccgcaacccagagacgtgccaggtgttcaccaccgagctaggctgggctgggatcagatgggaagcgga

SEQ ID NO: 51258 - DNA, 201 bp, Homo sapiens
ctccctcacttggacttgagacccttcacaccccagcacatgctttctggaaacttccccgtatgtcccactttcccacacttggtgccctggagcacctyccggcctctacatgatgtacgttcccctgtgagcaccctcctctcggcctctggccaacacagtcccacccatctgtgggtaacaagggggtgttctttt

SEQ ID NO: 51259 - DNA, 201 bp, Homo sapiens
gagcaccttccggcctctacatgatgtacgttcccctgtgagcaccctcctctcggcctctggccaacacagtcccacccatctgtgggtaacaagggggsgttcttttcagccttgctaaactgtctgaatcaaggatcacaaactacagcctgcaggccaaatccagcccacagcctgtgtttgtaaataaagctttat

SEQ ID NO: 51260 - DNA, 201 bp, Homo sapiens
ttctggttcttaagaaaatcaccataaatcagacatgaaaattctggctccaaaaatagcattttctttgtgcaaataaaaacgtgtgtatcaagtatgaygttcccccaacgtggacaacactcggttcctcacaaagccaagctcgctgcagctgccacatccctggacacattcggttcctcacaaagccaagcccgc

SEQ ID NO: 51261 - DNA, 201 bp, Homo sapiens
gacttgagacccttcacaccccagcacatgctttctggaaacttccccgtatgtcccactttcccacacttggtgccctggagcaccttccggcctctacrtgatgtacgttcccctgtgagcaccctcctctcggcctctggccaacacagtcccacccatctgtgggtaacaagggggtgttcttttcagccttgctaa

SEQ ID NO: 51262 - DNA, 160 bp, Homo sapiens
caacacagtcccacccatctgtgggtaacaagggggtgttcttttcagccttgctaaactgtctgaatcaaggatcacaaactacagcctgcaggccaaakccagcccacagcctgtgtttgtaaataaagctttattggaacaaagccacaccccttaa

SEQ ID NO: 51263 - DNA, 201 bp, Homo sapiens
ggttcctcacaaagccaagcccgcggcagctgccacatccctggacacactcggttcctcacaaagccaagcccgctgcagctgccacatccctgggcttrtggtgcagcaggtgcttttctcaagacaggaatcaaagtgttaggaacatggcagaaaggtgacacctggagaccaaatgcaggatgaggagtactgcag

SEQ ID NO: 51264 - DNA, 201 bp, Homo sapiens
gacccttcacaccccagcacatgctttctggaaacttccccgtatgtcccactttcccacacttggtgccctggagcaccttccggcctctacatgatgtmcgttcccctgtgagcaccctcctctcggcctctggccaacacagtcccacccatctgtgggtaacaagggggtgttcttttcagccttgctaaactgtct

SEQ ID NO: 51265 - DNA, 125 bp, Homo sapiens
gtgttcttttcagccttgctaaactgtctgaatcaaggatcacaaactacagcctgcaggccaaatccagcccacagcctgtgtttgtaaataaagctttrttggaacaaagccacaccccttaa

SEQ ID NO: 51266 - DNA, 201 bp, Homo sapiens
ccccagcacatgctttctggaaacttccccgtatgtcccactttcccacacttggtgccctggagcaccttccggcctctacatgatgtacgttcccctgygagcaccctcctctcggcctctggccaacacagtcccacccatctgtgggtaacaagggggtgttcttttcagccttgctaaactgtctgaatcaaggat

SEQ ID NO: 51267 - DNA, 201 bp, Homo sapiens
tctggaaacttccccgtatgtcccactttcccacacttggtgccctggagcaccttccggcctctacatgatgtacgttcccctgtgagcaccctcctctyggcctctggccaacacagtcccacccatctgtgggtaacaagggggtgttcttttcagccttgctaaactgtctgaatcaaggatcacaaactacagcct

SEQ ID NO: 51268 - DNA, 201 bp, Homo sapiens
tcacaccccagcacatgctttctggaaacttccccgtatgtcccactttcccacacttggtgccctggagcaccttccggcctctacatgatgtacgttcmcctgtgagcaccctcctctcggcctctggccaacacagtcccacccatctgtgggtaacaagggggtgttcttttcagccttgctaaactgtctgaatca

SEQ ID NO: 51269 - DNA, 198 bp, Homo sapiens
aggcagtaatcgttctggtcactgggacacagctgccctcgcccattctaaaaagtcagcaccctcaggcccgcgggtaaccacctcctcctgagcayggtgaccagcttagaagcaaaattaagagactcatcagattctgagctgctgcgggatattttgcagaagactgtgaagcatcctgtgtgtgtgaagcac

SEQ ID NO: 51270 - DNA, 201 bp, Homo sapiens; identical to SEQ ID NO: 51244

SEQ ID NO: 51271 - DNA, 201 bp, Homo sapiens; identical to SEQ ID NO: 51248

SEQ ID NO: 51272 - DNA, 201 bp, Homo sapiens; identical to SEQ ID NO: 51249

SEQ ID NO: 51273 - DNA, 201 bp, Homo sapiens
ccttcaggatcaggaaagtttgagaaaagcatctgcaaaatactgaagagcagagcttacctcattgcctgtccccaccccatcccaggtcaccacctggmtgaccccagctccccgacccaacaacaacccctcccaagtccctagctccctcacttggacttgagacccttcacaccccagcagcgctccgcctccatc

SEQ ID NO: 51274 - DNA, 201 bp, Homo sapiens; identical to SEQ ID NO: 51252

SEQ ID NO: 51275 - DNA, 201 bp, Homo sapiens; identical to SEQ ID NO: 51254

SEQ ID NO: 51276 - DNA, 201 bp, Homo sapiens
caggaaagtttgagaaaagcatctgcaaaatactgaagagcagagcttacctcattgcctgtccccaccccatcccaggtcaccacctggatgaccccagstccccgacccaacaacaacccctcccaagtccctagctccctcacttggacttgagacccttcacaccccagcagcgctccgcctccatcttgacatgct

SEQ ID NO: 51277 - DNA, 201 bp, Homo sapiens
catctgcaaaatactgaagagcagagcttacctcattgcctgtccccaccccatcccaggtcaccacctggatgaccccagctccccgacccaacaacaamccctcccaagtccctagctccctcacttggacttgagacccttcacaccccagcagcgctccgcctccatcttgacatgctttctggaaacttccccgta

SEQ ID NO: 51278 - DNA, 201 bp, Homo sapiens; identical to SEQ ID NO: 51256

SEQ ID NO: 51279 - DNA, 201 bp, Homo sapiens
agggccactggagctatttgctgacgtgctgtattgcccagaagccatcgtgtccctggtcggggtcctgcggaggctggctgcctgctgggagcaccagygggctcctgaggtctacatggcctttaccgtccgcaacccagagacgtgccaggtgttcaccaccgagctaggctgggctgggatcagatgggaagcgga

SEQ ID NO: 51280 - DNA, 201 bp, Homo sapiens
acccttcacaccccagcagcgctccgcctccatcttgacatgctttctggaaacttccccgtatgtcccactttcccacacttggtgccctggagcacctyccggcctctacatgatgtacgttcccctgtgagcaccctcctctcggcctctggccaacacagtcccacccatctgtgggtaacaagggggtgttctttt

SEQ ID NO: 51281 - DNA, 201 bp, Homo sapiens; identical to SEQ ID NO: 51259

SEQ ID NO: 51282 - DNA, 201 bp, Homo sapiens
ttctggttcttaagaaaatcaccataaatcagacatgaaaattctggctccaaaaatagcattttctttgtgcaaataaaaacgtgtgtatcaagtatgaygttcccccaacgtggacacactcggttcctcacaaagccaagcccgctgcagctgccacatccctggacacactcggttcctcacaaagccaagctcgct

SEQ ID NO: 51283 - DNA, 201 bp, Homo sapiens
ccagcagcgctccgcctccatcttgacatgctttctggaaacttccccgtatgtcccactttcccacacttggtgccctggagcaccttccggcctctacrtgatgtacgttcccctgtgagcaccctcctctcggcctctggccaacacagtcccacccatctgtgggtaacaagggggtgttcttttcagccttgctaa

SEQ ID NO: 51284 - DNA, 149 bp, Homo sapiens
caacacagtcccacccatctgtgggtaacaagggggtgttcttttcagccttgctaaactgtctgaatcaaggatcacaaactacagcctgcaggccaaakccagcccacagcctgtgtttgtaaataaagctttattggaacaaagcc

SEQ ID NO: 51285 - DNA, 201 bp, Homo sapiens; identical to SEQ ID NO: 51263

SEQ ID NO: 51286 - DNA, 201 bp, Homo sapiens
cgctccgcctccatcttgacatgctttctggaaacttccccgtatgtcccactttcccacacttggtgccctggagcaccttccggcctctacatgatgtmcgttcccctgtgagcaccctcctctcggcctctggccaacacagtcccacccatctgtgggtaacaagggggtgttcttttcagccttgctaaactgtct

SEQ ID NO: 51287 - DNA, 114 bp, Homo sapiens
gtgttcttttcagccttgctaaactgtctgaatcaaggatcacaaactacagcctgcaggccaaatccagcccacagcctgtgtttgtaaataaagctttrttggaacaaagcc

SEQ ID NO: 51288 - DNA, 201 bp, Homo sapiens
catcttgacatgctttctggaaacttccccgtatgtcccactttcccacacttggtgccctggagcaccttccggcctctacatgatgtacgttcccctgygagcaccctcctctcggcctctggccaacacagtcccacccatctgtgggtaacaagggggtgttcttttcagccttgctaaactgtctgaatcaaggat

SEQ ID NO: 51289 - DNA, 201 bp, Homo sapiens; identical to SEQ ID NO: 51267

SEQ ID NO: 51290 - DNA, 201 bp, Homo sapiens
gcctccatcttgacatgctttctggaaacttccccgtatgtcccactttcccacacttggtgccctggagcaccttccggcctctacatgatgtacgttcmcctgtgagcaccctcctctcggcctctggccaacacagtcccacccatctgtgggtaacaagggggtgttcttttcagccttgctaaactgtctgaatca

SEQ ID NO: 51291 - DNA, 201 bp, Homo sapiens
cctagcggcgcgcacactgcgctccttcccctggcagcttagaagcaaaattaagagactcatcagattctgagctgctgcgggatattttgcagaagcaygaggctgtccacacggagcttttggacgagctgtacgaggcgctggcagagaccctgatggccaaggagtccacccagggccactggagctatttgctga

SEQ ID NO: 51292 - DNA, 201 bp, Homo sapiens
aattaagagactcatcagattctgagctgctgcgggatattttgcagaagcacgaggctgtccacacggagcttttggacgagctgtacgaggcgctggcrgagaccctgatggccaaggagtccacccagggccactggagctatttgctgacgtgctgtattgcccagaagccatcgtgtccctggtcggggtcctgcg

SEQ ID NO: 51293 - DNA, 201 bp, Homo sapiens; identical to SEQ ID NO: 51244

SEQ ID NO: 51294 - DNA, 201 bp, Homo sapiens; identical to SEQ ID NO: 51248

SEQ ID NO: 51295 - DNA, 201 bp, Homo sapiens; identical to SEQ ID NO: 51249

SEQ ID NO: 51296 - DNA, 201 bp, Homo sapiens; identical to SEQ ID NO: 51251

SEQ ID NO: 51297 - DNA, 201 bp, Homo sapiens; identical to SEQ ID NO: 51252

SEQ ID NO: 51298 - DNA, 201 bp, Homo sapiens; identical to SEQ ID NO: 51254

SEQ ID NO: 51299 - DNA, 201 bp, Homo sapiens; identical to SEQ ID NO: 51253

SEQ ID NO: 51300 - DNA, 201 bp, Homo sapiens; identical to SEQ ID NO: 51255

SEQ ID NO: 51301 - DNA, 201 bp, Homo sapiens; identical to SEQ ID NO: 51256

SEQ ID NO: 51302 - DNA, 201 bp, Homo sapiens
cactgcgctccttcccctggcagacgtgctgtattgcccagaagccatcgtgtccctggtcggggtcctgcggaggctggctgcctgctgggagcaccagygggctcctgaggtctacatggcctttaccgtccgcaacccagagacgtgccaggtgttcaccaccgagctaggctgggctgggatcagatgggaagcgga

SEQ ID NO: 51303 - DNA, 201 bp, Homo sapiens; identical to SEQ ID NO: 51258

SEQ ID NO: 51304 - DNA, 201 bp, Homo sapiens; identical to SEQ ID NO: 51259

SEQ ID NO: 51305 - DNA, 201 bp, Homo sapiens
ttctggttcttaagaaaatcaccataaatcagacatgaaaattctggctccaaaaatagcattttctttgtgcaaataaaaacgtgtgtatcaagtatgaygttcccccaacgtggacaacattcggttcctcacaaagccaagcccgcggcagctgccacatccctggacacactcggttcctcacaaagccaagcccgc

SEQ ID NO: 51306 - DNA, 201 bp, Homo sapiens; identical to SEQ ID NO: 51261

SEQ ID NO: 51307 - DNA, 160 bp, Homo sapiens; identical to SEQ ID NO: 51262

SEQ ID NO: 51308 - DNA, 201 bp, Homo sapiens; identical to SEQ ID NO: 51263

SEQ ID NO: 51309 - DNA, 201 bp, Homo sapiens; identical to SEQ ID NO: 51264

SEQ ID NO: 51310 - DNA, 125 bp, Homo sapiens; identical to SEQ ID NO: 51265

SEQ ID NO: 51311 - DNA, 201 bp, Homo sapiens; identical to SEQ ID NO: 51266

SEQ ID NO: 51312 - DNA, 201 bp, Homo sapiens; identical to SEQ ID NO: 51267

SEQ ID NO: 51313 - DNA, 201 bp, Homo sapiens; identical to SEQ ID NO: 51268

SEQ ID NO: 51314 - DNA, 201 bp, Homo sapiens
ttagagggcagtttgtagttcctgatttggaaattaacattctccaaacattccagtccagtgaaagttttatcagctttcccatatgaaacctcttcccwtgagagtgacttgattctcacaatcccattggagtcgtgtgtgagtcctacagtgtgaggttcagcattgccatctccaagtgctcttcatagggaaaca

SEQ ID NO: 51315 - DNA, 201 bp, Homo sapiens
aaatggcctggtctttgaggactcagaggaactggcagctctgcagatgcttttctcaaactttcctgatcctgcaggcaagctaaaccagttttggaagracctgcgggagtcgcagcagctccgatgggatgagagctgggtgcagactgtgctccctttggttatggacatacaactcctgggccagaggctaaaacc

SEQ ID NO: 51316 - DNA, 201 bp, Homo sapiens
cacacgcttagatagccgatgtcttattagagggcagtttgtagttcctgatttggaaattaacattctccaaacattccagtccagtgaaagttttatcmgctttcccatatgaaacctcttcccttgagagtgacttgattctcacaatcccattggagtcgtgtgtgagtcctacagtgtgaggttcagcattgccat

SEQ ID NO: 51317 - DNA, 201 bp, Homo sapiens
tacttgatacacacgtttttatttgcacaaagaaaatgctatttttggagccagagttttcatgtctgagtgatggcgatttccttaagaaccagaactgytggcagaaagggagcacccacacgcttagatagccgatgtcttattagagggcagtttgtagttcctgatttggaaattaacattctccaaacattccag

SEQ ID NO: 51318 - DNA, 201 bp, Homo sapiens
tgaagaaaatggcctggtctttgaggactcagaggaactggcagctctgcagatgcttttctcaaactttcctgatcctgcaggcaagctaaaccagtttyggaagaacctgcgggagtcgcagcagctccgatgggatgagagctgggtgcagactgtgctccctttggttatggacatacaactcctgggccagaggct

SEQ ID NO: 51319 - DNA, 201 bp, Homo sapiens
atgaagaaaatggcctggtctttgaggactcagaggaactggcagctctgcagatgcttttctcaaactttcctgatcctgcaggcaagctaaaccagttytggaagaacctgcgggagtcgcagcagctccgatgggatgagagctgggtgcagactgtgctccctttggttatggacatacaactcctgggccagaggc

SEQ ID NO: 51320 - DNA, 201 bp, Homo sapiens
tttgaggactcagaggaactggcagctctgcagatgcttttctcaaactttcctgatcctgcaggcaagctaaaccagttttggaagaacctgcgggagtygcagcagctccgatgggatgagagctgggtgcagactgtgctccctttggttatggacatacaactcctgggccagaggctaaaaccccgggacccctgc

SEQ ID NO: 51321 - DNA, 181 bp, Homo sapiens
gtcctacagtgtgaggttcagcattgccatctccaagtgctcttcatagggaaacagtttctggtcatgacgaggttccacttcccatctgatcctggccyggcctggaaacagagcacatgtgtttcaggatggcagtgtttggggacaggacatgagcgtattgtgtggggctgctagg

SEQ ID NO: 51322 - DNA, 159 bp, Homo sapiens
cgcttccggaaaggatcacgccgaaggccgcacttcatagtctccgacgcacctccaarccctttctcctgctctaggcccagcgccttggacgtgcacagtagatccctcccggcttcccggcttcccgtctcgtcaccctctgctcagaacctgagg

SEQ ID NO: 51323 - DNA, 201 bp, Homo sapiens
atgaaacctcttcccttgagagtgacttgattctcacaatcccattggagtcgtgtgtgagtcctacagtgtgaggttcagcattgccatctccaagtgckcttcatagggaaacagtttctggtcatgacgaggttccacttcccatctgatcctggcctggcctggaaacagagcacatgtgtttcaggatggcagtgt

SEQ ID NO: 51324 - DNA, 153 bp, Homo sapiens
tctcagactgctgtgctagcaatcagtgagactccgtgggcgtaggaccctcygagccaggtgcgggatataatcttgtggtgcgccgttttttaagccggtccgaaaagcgcaatattcgggtgggagtgacccgatttcccagggctgtga

SEQ ID NO: 51325 - DNA, 201 bp, Homo sapiens; identical to SEQ ID NO: 51315

SEQ ID NO: 51326 - DNA, 201 bp, Homo sapiens; identical to SEQ ID NO: 51318

SEQ ID NO: 51327 - DNA, 201 bp, Homo sapiens; identical to SEQ ID NO: 51319

SEQ ID NO: 51328 - DNA, 201 bp, Homo sapiens; identical to SEQ ID NO: 51320

SEQ ID NO: 51329 - DNA, 201 bp, Homo sapiens
agggctgtgaccatctatgacaagccggcatctttctttaaagagacacctctggacctgctgcaccggctcttcatgaagctgggtggcactcactctcygttcagggcctgctcagaacctgaggacgcagccatggagcggtcggccttcatggagctggatgctgggagcaggctggtgatgcatctccgcgagtgg

SEQ ID NO: 51330 - DNA, 201 bp, Homo sapiens; identical to SEQ ID NO: 51314

SEQ ID NO: 51331 - DNA, 201 bp, Homo sapiens; identical to SEQ ID NO: 51315

SEQ ID NO: 51332 - DNA, 201 bp, Homo sapiens; identical to SEQ ID NO: 51316

SEQ ID NO: 51333 - DNA, 201 bp, Homo sapiens; identical to SEQ ID NO: 51317

SEQ ID NO: 51334 - DNA, 201 bp, Homo sapiens; identical to SEQ ID NO: 51318

SEQ ID NO: 51335 - DNA, 201 bp, Homo sapiens; identical to SEQ ID NO: 51319

SEQ ID NO: 51336 - DNA, 201 bp, Homo sapiens; identical to SEQ ID NO: 51320

SEQ ID NO: 51337 - DNA, 181 bp, Homo sapiens; identical to SEQ ID NO: 51321

SEQ ID NO: 51338 - DNA, 201 bp, Homo sapiens; identical to SEQ ID NO: 51323

SEQ ID NO: 51339 - DNA, 201 bp, Homo sapiens; identical to SEQ ID NO: 51314

SEQ ID NO: 51340 - DNA, 201 bp, Homo sapiens; identical to SEQ ID NO: 51315

SEQ ID NO: 51341 - DNA, 201 bp, Homo sapiens; identical to SEQ ID NO: 51316

SEQ ID NO: 51342 - DNA, 201 bp, Homo sapiens; identical to SEQ ID NO: 51317

SEQ ID NO: 51343 - DNA, 201 bp, Homo sapiens; identical to SEQ ID NO: 51318

SEQ ID NO: 51344 - DNA, 201 bp, Homo sapiens; identical to SEQ ID NO: 51319

SEQ ID NO: 51345 - DNA, 201 bp, Homo sapiens; identical to SEQ ID NO: 51320

SEQ ID NO: 51346 - DNA, 181 bp, Homo sapiens; identical to SEQ ID NO: 51321

SEQ ID NO: 51347 - DNA, 159 bp, Homo sapiens; identical to SEQ ID NO: 51322

SEQ ID NO: 51348 - DNA, 201 bp, Homo sapiens; identical to SEQ ID NO: 51323

SEQ ID NO: 51349 - DNA, 201 bp, Homo sapiens
tgtttccctatgaagagcacttggagatggcaatgctgaacctcacactgtaggactcacacacgactccaatgggattgtgagaatcaagtcactctcawgggaagaggtttcatatgggaaagctgataaaactttcactggactggaatgtttggagaatgttaatttccaaatcaggaactacaaactgccctctaa

SEQ ID NO: 51350 - DNA, 201 bp, Homo sapiens
atggcaatgctgaacctcacactgtaggactcacacacgactccaatgggattgtgagaatcaagtcactctcaagggaagaggtttcatatgggaaagckgataaaactttcactggactggaatgtttggagaatgttaatttccaaatcaggaactacaaactgccctctaataagacatcggctatctaagcgtgtg

SEQ ID NO: 51351 - DNA, 201 bp, Homo sapiens
ggttttagcctctggcccaggagttgtatgtccataaccaaagggagcacagtctgcacccagctctcatcccatcggagctgctgcgactcccgcaggtycttccaaaactggtttagcttgcctgcaggatcaggaaagtttgagaaaagcatctgcaaaaaaataaagagcagagcttacctcattgcctgtccccac

SEQ ID NO: 51352 - DNA, 201 bp, Homo sapiens
ctggaatgtttggagaatgttaatttccaaatcaggaactacaaactgccctctaataagacatcggctatctaagcgtgtgggtgctccctttctgccarcagttctggttcttaaggaaatcgccatcactcagacatgaaaactctggctccaaaaatagcattttctttgtgcaaataaaaacgtgtgtatcaagta

SEQ ID NO: 51353 - DNA, 201 bp, Homo sapiens
aatcgccatcactcagacatgaaaactctggctccaaaaatagcattttctttgtgcaaataaaaacgtgtgtatcaagtatgtggacacactcggttccycacaaagccaagcctgctgcagctgccacatccctggacacacttggttcctcacaaagccaagactgctgcagctgccacatccgcggacacactcagt

SEQ ID NO: 51354 - DNA, 201 bp, Homo sapiens
agcctctggcccaggagttgtatgtccataaccaaagggagcacagtctgcacccagctctcatcccatcggagctgctgcgactcccgcaggttcttccraaactggtttagcttgcctgcaggatcaggaaagtttgagaaaagcatctgcaaaaaaataaagagcagagcttacctcattgcctgtccccaccccatc

SEQ ID NO: 51355 - DNA, 201 bp, Homo sapiens
gcctctggcccaggagttgtatgtccataaccaaagggagcacagtctgcacccagctctcatcccatcggagctgctgcgactcccgcaggttcttccaraactggtttagcttgcctgcaggatcaggaaagtttgagaaaagcatctgcaaaaaaataaagagcagagcttacctcattgcctgtccccaccccatcc

SEQ ID NO: 51356 - DNA, 201 bp, Homo sapiens
ctggctgcctgccgggagcaccagcgggctcctgaggtctatgtggcctttactgtccgcaacccagagacatgccagctgttcaccaccgagctaggccrggccaggatcagatgggaagtggaacctcgtcatgaccagaaactgtttccctatgaagagcacttggagatggcaatgctgaacctcacactgtaggac

SEQ ID NO: 51357 - DNA, 201 bp, Homo sapiens
gtccccgacccaacaacaacccctcccaagttcctaactctctcacttggactcgagactcttcacgccccagcagcgctccgcctccaacttgacatcaygctttctggaaacttccccgtatgtcccactttcccacacttggtgccctggagcacctcccggcctctaacgtgctgtatgttcccctgcgagcaccct

SEQ ID NO: 51358 - DNA, 201 bp, Homo sapiens
tccccgacccaacaacaacccctcccaagttcctaactctctcacttggactcgagactcttcacgccccagcagcgctccgcctccaacttgacatcatrctttctggaaacttccccgtatgtcccactttcccacacttggtgccctggagcacctcccggcctctaacgtgctgtatgttcccctgcgagcaccctc

SEQ ID NO: 51359 - DNA, 201 bp, Homo sapiens
ccccgacccaacaacaacccctcccaagttcctaactctctcacttggactcgagactcttcacgccccagcagcgctccgcctccaacttgacatcatgstttctggaaacttccccgtatgtcccactttcccacacttggtgccctggagcacctcccggcctctaacgtgctgtatgttcccctgcgagcaccctcc

SEQ ID NO: 51360 - DNA, 201 bp, Homo sapiens
cctcccaagttcctaactctctcacttggactcgagactcttcacgccccagcagcgctccgcctccaacttgacatcatgctttctggaaacttccccgyatgtcccactttcccacacttggtgccctggagcacctcccggcctctaacgtgctgtatgttcccctgcgagcaccctcctcttggcctctggccaagt

SEQ ID NO: 51361 - DNA, 201 bp, Homo sapiens
gcaggggtcccggggttttagcctctggcccaggagttgtatgtccataaccaaagggagcacagtctgcacccagctctcatcccatcggagctgctgcractcccgcaggttcttccaaaactggtttagcttgcctgcaggatcaggaaagtttgagaaaagcatctgcaaaaaaataaagagcagagcttacctcat

SEQ ID NO: 51362 - DNA, 109 bp, Homo sapiens
cactgcggccccgcccacgtcatggcgcccgaggagaacgctgggacctaactcttgctgcagagtttgcagcgccgctttctggcggcgcgcgcgctgcgctccttcc

SEQ ID NO: 51363 - DNA, 170 bp, Homo sapiens
cactgcggccccgcccacgtcatggcgcccgaggagaacgctgggacctaactcttgctgcagagtttgsagcgccgctttctggcggcgcgcgcgctgcgctccttcccctggcagagcttagaagcaaaattaacagactcatcagattctgagcttctgcgggatat

SEQ ID NO: 51364 - DNA, 196 bp, Homo sapiens
cactgcggccccgcccacgtcatggcgcccgaggagaacgctgggacctaactcttgctgcagagtttgcagcgccgctttctggcggcgcgcgcrctgcgctccttcccctggcagagcttagaagcaaaattaacagactcatcagattctgagcttctgcgggatattttgcagaagactgtgaagcatcctg

SEQ ID NO: 51365 - DNA, 201 bp, Homo sapiens
aacccagagacatgccagctgttcaccaccgagctaggccaggccaggatcagatgggaagtggaacctcgtcatgaccagaaactgtttccctatgaagmgcacttggagatggcaatgctgaacctcacactgtaggactcacacacgactccaatgggattgtgagaatcaagtcactctcaagggaagaggtttcat

SEQ ID NO: 51366 - DNA, 201 bp, Homo sapiens
aagtgagcacagtcatggataccgttggccggaggcttcgggactccctgggccgaactgtggacctggggctgacaggcaaccatggagttgtgcacccyagtcttgcggacagtgccaacaagtttgaggagaacacctactgcttcggccggaccgtggagacactgctgctccgctttggcaagaccatcatggagg

SEQ ID NO: 51367 - DNA, 201 bp, Homo sapiens
cccagatgaaactttggagaaattgaagagcctagggctttttgggctgcaagtcccagaagaatatggtggcctgggcttctccaacaccatgtactcamgactaggggagatcatcagcatggatgggtccatcactgtgaccctggcagcgcaccaggctattggcctcaaggggatcatcttggctggcactgagga

SEQ ID NO: 51368 - DNA, 201 bp, Homo sapiens
tgttccccgtctgcacctgaagggttgtcgcctggcctgggagagcctcttccaggttttgacctgcaggcagtgctctctaacaggaccatcacagcttytgaactgagccggagagagagaatggaattgctgacccctggaactggcggggataaagaggaagaggacttggagggactggtacagcaagacctacgt

SEQ ID NO: 51369 - DNA, 201 bp, Homo sapiens
tgaggtcgttgattctgatggatcagtgaaagacaaaatcacagcattcatagtagaaagagactttggtggagtcactaatgggaaacccgaagataaaytaggcattcggggctccaacacttgtgaagtccattttgaaaacaccaagatacctgtggaaaacatccttggagaggtcggagatgggtttaaggtggc

SEQ ID NO: 51370 - DNA, 165 bp, Homo sapiens
ggggataaagaggaagaggacttggagggactggtacagcaagacctacgtttcctgtctctgccttaccccaaagaaagaactgtcagtatctttgccgytggaaggtcccagtgaagcccagagcctctgcccccagctcttggctggacacctagagatcag

SEQ ID NO: 51371 - DNA, 201 bp, Homo sapiens
gccggccgcatcctgactaccaggatccatgagcttaaacaggccaaagtgagcacagtcatggataccgttggccggaggcttcgggactccctgggccraactgtggacctggggctgacaggcaaccatggagttgtgcaccctagtcttgcggacagtgccaacaagtttgaggagaacacctactgcttcggccgg

SEQ ID NO: 51372 - DNA, 201 bp, Homo sapiens
gaaagtgtcccagcagatccttgagaagcgagcctatatctgtgcccaccctctggacaggacatgctgaggcaggggacagtgtcccctgctaccgcccrcccctacccatggcccgttgctggatgactgttactcttttttcagaaggtgttgggattatcacaggttaagccttttgttccccgtctgcacctgaag

SEQ ID NO: 51373 - DNA, 201 bp, Homo sapiens; identical to SEQ ID NO: 51366

SEQ ID NO: 51374 - DNA, 201 bp, Homo sapiens; identical to SEQ ID NO: 51367

SEQ ID NO: 51375 - DNA, 201 bp, Homo sapiens; identical to SEQ ID NO: 51369

SEQ ID NO: 51376 - DNA, 201 bp, Homo sapiens; identical to SEQ ID NO: 51371

SEQ ID NO: 51377 - DNA, 201 bp, Homo sapiens; identical to SEQ ID NO: 51372

SEQ ID NO: 51378 - DNA, 201 bp, Homo sapiens; identical to SEQ ID NO: 51366

SEQ ID NO: 51379 - DNA, 201 bp, Homo sapiens; identical to SEQ ID NO: 51367

SEQ ID NO: 51380 - DNA, 201 bp, Homo sapiens
tgttccccgtctgcacctgaagggttgtcgcctggcctgggagagcctcttccaggttttgacctgcaggcagtgctctctaacaggaccatcacagcttytgaactgagccggagagagagaatggaattgctgacccctggaactggcgggtattctggtcattgaggagacaccatagtggaaactggggcttatgct

SEQ ID NO: 51381 - DNA, 201 bp, Homo sapiens; identical to SEQ ID NO: 51369

SEQ ID NO: 51382 - DNA, 201 bp, Homo sapiens; identical to SEQ ID NO: 51371

SEQ ID NO: 51383 - DNA, 201 bp, Homo sapiens; identical to SEQ ID NO: 51372

SEQ ID NO: 51384 - DNA, 201 bp, Homo sapiens
cctccaggtctgtcaagtggcctttgtccctggggctgatggcccccaactcaccagcatcatgaccttgtgccagtcctggtcctccctccccagccgcycctaccaccttttggtgccacacttctcaggctggccgccctggttggggcagccgagagcctggggttcattggtgaaggggccttggagttgtgactg

SEQ ID NO: 51385 - DNA, 201 bp, Homo sapiens
cccaccgcttcatcactgagaaggcggtcttctcccgctgggccaagaagaggcccatcgtgttcgcccatccgtcctggaggactgagtagcttccgtcrtcctgccagtcgccatgccgttgcgaggcctccgggatgtcccatcccaagccatcacactccacaaaaacatttaatttatggatcctgcctcctgcca

SEQ ID NO: 51386 - DNA, 201 bp, Homo sapiens
tccgcatgaaccaggcgcccaccgtgggctttgaggcggatgtgggccagcgcagcaccctgcgtgtcgtctcacacacaagcgtgccgctgctgctgcgsaactattcacactacttccagaaggcccgagacacgctctacatggtgtggggccagggcaggcacatggaccgggtgctcggcggccgcacctaccgca

SEQ ID NO: 51387 - DNA, 201 bp, Homo sapiens
cacctccaggtctgtcaagtggcctttgtccctggggctgatggcccccaactcaccagcatcatgaccttgtgccagtcctggtcctccctccccagccrcccctaccaccttttggtgccacacttctcaggctggccgccctggttggggcagccgagagcctggggttcattggtgaaggggccttggagttgtgac

SEQ ID NO: 51388 - DNA, 201 bp, Homo sapiens
atcctgcctcctgccacgtgctgggtggacctaaggttccttcccgccccattctggcgacacttggagccatctcagcctccactccctgagtaattcayggcatttgggggctcaccccacctccaggtctgtcaagtggcctttgtccctggggctgatggcccccaactcaccagcatcatgaccttgtgccagtcc

SEQ ID NO: 51389 - DNA, 201 bp, Homo sapiens
tggtcagcgacagctactgcagggagaagagccacccctcagtgccttaccactactttgagaagggccggctagatgagtgtcagatgtacctggcacaygagcaggcgccccgaagcgcccaccgcttcatcactgagaaggcggtcttctcccgctgggccaagaagaggcccatcgtgttcgcccatccgtcctgga

SEQ ID NO: 51390 - DNA, 201 bp, Homo sapiens
ctccgggatgtcccatcccaagccatcacactccacaaaaacatttaatttatggatcctgcctcctgccacgtgctgggtggacctaaggttccttcccrccccattctggcgacacttggagccatctcagcctccactccctgagtaattcatggcatttgggggctcaccccacctccaggtctgtcaagtggcctt

SEQ ID NO: 51391 - DNA, 201 bp, Homo sapiens
catcactgagaaggcggtcttctcccgctgggccaagaagaggcccatcgtgttcgcccatccgtcctggaggactgagtagcttccgtcgtcctgccagycgccatgccgttgcgaggcctccgggatgtcccatcccaagccatcacactccacaaaaacatttaatttatggatcctgcctcctgccacgtgctgggt

SEQ ID NO: 51392 - DNA, 201 bp, Homo sapiens
ctgtgccgggacccctgcacttcagtggatatagcagtgtgccagatgggaagccgctggtccgcgagccctgccgcagctgtgccgtggtgtccagctcyggccaaatgctgggctcaggcctgggtgctgagatcgacagtgccgagtgcgtgttccgcatgaaccaggcgcccaccgtgggctttgaggcggatgtgg

SEQ ID NO: 51393 - DNA, 201 bp, Homo sapiens
tgagtagcttccgtcgtcctgccagtcgccatgccgttgcgaggcctccgggatgtcccatcccaagccatcacactccacaaaaacatttaatttatggwtcctgcctcctgccacgtgctgggtggacctaaggttccttcccgccccattctggcgacacttggagccatctcagcctccactccctgagtaattcat

SEQ ID NO: 51394 - DNA, 201 bp, Homo sapiens; identical to SEQ ID NO: 51386

SEQ ID NO: 51395 - DNA, 201 bp, Homo sapiens; identical to SEQ ID NO: 51389

SEQ ID NO: 51396 - DNA, 201 bp, Homo sapiens
catcactgagaaggcggtcttctcccgctgggccaagaagaggcccatcgtgttcgcccatccgtcctggaggactgagtagcttccgtcgtcctgccagycgccatgccgttgcgaggcctccgggatgtcccatcccaagccatcacactccactccctgagtaattcatggcatttgggggctcaccccacctccagg

SEQ ID NO: 51397 - DNA, 201 bp, Homo sapiens
cccaccgcttcatcactgagaaggcggtcttctcccgctgggccaagaagaggcccatcgtgttcgcccatccgtcctggaggactgagtagcttccgtcrtcctgccagtcgccatgccgttgcgaggcctccgggatgtcccatcccaagccatcacactccactccctgagtaattcatggcatttgggggctcaccc

SEQ ID NO: 51398 - DNA, 201 bp, Homo sapiens; identical to SEQ ID NO: 51384

SEQ ID NO: 51399 - DNA, 201 bp, Homo sapiens; identical to SEQ ID NO: 51387

SEQ ID NO: 51400 - DNA, 201 bp, Homo sapiens
ggactgagtagcttccgtcgtcctgccagtcgccatgccgttgcgaggcctccgggatgtcccatcccaagccatcacactccactccctgagtaattcayggcatttgggggctcaccccacctccaggtctgtcaagtggcctttgtccctggggctgatggcccccaactcaccagcatcatgaccttgtgccagtcc

SEQ ID NO: 51401 - DNA, 201 bp, Homo sapiens; identical to SEQ ID NO: 51392

SEQ ID NO: 51402 - DNA, 201 bp, Homo sapiens; identical to SEQ ID NO: 51384

SEQ ID NO: 51403 - DNA, 201 bp, Homo sapiens; identical to SEQ ID NO: 51385

SEQ ID NO: 51404 - DNA, 201 bp, Homo sapiens; identical to SEQ ID NO: 51386

SEQ ID NO: 51405 - DNA, 201 bp, Homo sapiens; identical to SEQ ID NO: 51387

SEQ ID NO: 51406 - DNA, 201 bp, Homo sapiens
gccccattctggcgacacttggagccatctcaggcctcatgacttgaaggggagtggaggggggagccgtgtctcccccctccactccctgagtaattcayggcatttgggggctcaccccacctccaggtctgtcaagtggcctttgtccctggggctgatggcccccaactcaccagcatcatgaccttgtgccagtcc

SEQ ID NO: 51407 - DNA, 201 bp, Homo sapiens; identical to SEQ ID NO: 51389

SEQ ID NO: 51408 - DNA, 201 bp, Homo sapiens
ctccgggatgtcccatcccaagccatcacactccacaaaaacatttaatttatggatcctgcctcctgccacgtgctgggtggacctaaggttccttcccrccccattctggcgacacttggagccatctcaggcctcatgacttgaaggggagtggaggggggagccgtgtctcccccctccactccctgagtaattcat

SEQ ID NO: 51409 - DNA, 201 bp, Homo sapiens; identical to SEQ ID NO: 51391

SEQ ID NO: 51410 - DNA, 201 bp, Homo sapiens; identical to SEQ ID NO: 51392

SEQ ID NO: 51411 - DNA, 201 bp, Homo sapiens
tgagtagcttccgtcgtcctgccagtcgccatgccgttgcgaggcctccgggatgtcccatcccaagccatcacactccacaaaaacatttaatttatggwtcctgcctcctgccacgtgctgggtggacctaaggttccttcccgccccattctggcgacacttggagccatctcaggcctcatgacttgaaggggagtg

SEQ ID NO: 51412 - DNA, 201 bp, Homo sapiens; identical to SEQ ID NO: 51384

SEQ ID NO: 51413 - DNA, 201 bp, Homo sapiens; identical to SEQ ID NO: 51385

SEQ ID NO: 51414 - DNA, 201 bp, Homo sapiens; identical to SEQ ID NO: 51386

SEQ ID NO: 51415 - DNA, 201 bp, Homo sapiens; identical to SEQ ID NO: 51387

SEQ ID NO: 51416 - DNA, 201 bp, Homo sapiens; identical to SEQ ID NO: 51388

SEQ ID NO: 51417 - DNA, 201 bp, Homo sapiens; identical to SEQ ID NO: 51389

SEQ ID NO: 51418 - DNA, 201 bp, Homo sapiens; identical to SEQ ID NO: 51390

SEQ ID NO: 51419 - DNA, 201 bp, Homo sapiens; identical to SEQ ID NO: 51391

SEQ ID NO: 51420 - DNA, 201 bp, Homo sapiens; identical to SEQ ID NO: 51392

SEQ ID NO: 51421 - DNA, 201 bp, Homo sapiens; identical to SEQ ID NO: 51393

SEQ ID NO: 51422 - DNA, 201 bp, Homo sapiens
ctacaagaggatcaaagctcgcaacaggctggcggagatccacggtgtgccccgtgggctgtatgacgggcccgtccacgaggtgatggtgcctgccaagmcagggagtggcgctccggcccgcgcgtcctgcccaggcaagatctccgtccctcctgtgcgcaacctacatcagtcggggttcagcctatctgggtctca

SEQ ID NO: 51423 - DNA, 201 bp, Homo sapiens
cccgtgggctgtatgacgggcccgtccacgaggtgatggtgcctgccaagccagggagtggcgctccggcccgcgcgtcctgcccaggcaagatctccgtscctcctgtgcgcaacctacatcagtcggggttcagcctatctgggtctcaggctgatgaccacatcgcccgacgcacagcacagaagatcatggcaccac

SEQ ID NO: 51424 - DNA, 201 bp, Homo sapiens
gggcgggccgcttcgtccctcggaaaacattcccggactttgtctacaagaggatcaaagctcgcaacaggctggcggagatccacggtgtgccccgtggrctgtatgacgggcccgtccacgaggtgatggtgcctgccaagccagggagtggcgctccggcccgcgcgtcctgcccaggcaagatctccgtccctcctg

SEQ ID NO: 51425 - DNA, 201 bp, Homo sapiens
ccagcctgggcaccgacggttcacactactggagcaagaactgggccaaggccgcagccttcgtcacatcaccccctgtcaacccagaccccaccacggcrgaccacctcacctgcttgctgtccagcggggacctccaggtgacaggcagcgcccactgcaccttcaccactgcccagaaggctgtgggcaaggacaact

SEQ ID NO: 51426 - DNA, 201 bp, Homo sapiens
cgctgatccccgagggcaccaacggcattgaggagcgcatgtcgatggtctgggagaaatgtgtggcctctgggaagatggacgagaatgagttcgtcgcrgtgaccagtacaaatgctgccaaaatcttcaatttttacccaaggaaggggcgagtggctgtgggctctgacgctgacctggtcatatggaaccccaagg

SEQ ID NO: 51427 - DNA, 201 bp, Homo sapiens
ggtcccaggtcctgctgccaagagcccctcaagagaagggctgaacctggggagatgtcactgccagggtgaggtggagccacatggcagggacaatgccrgcagcctgagcccaggcaccccagtgcccgctgggcccagcctggggacagggaacctgccgggctcacagtgtgggagcagctggacaccaggcttctt

SEQ ID NO: 51428 - DNA, 201 bp, Homo sapiens
ggggacagggaacctgccgggctcacagtgtgggagcagctggacaccaggcttcttggtgaaccggcgaggggccgagtcccgcctggtgggcatttgcygccgcctccccaccaccagtcactgcctcgcagagccctacactcccgcagccgctcctcagaggcctgtgcccatcgcaggcctgggaggaaagtgggc

SEQ ID NO: 51429 - DNA, 201 bp, Homo sapiens
ctgccctccgtctctcgcggccagcgtggaacagcctcgcggggtcacagcctggcgctcggaccctggcccgggtcatctgcgaaggagccggctttggscaagagacccccaggagcaggatgtccttccagggcaagaaaagcatcccccggatcacgagtgaccgccttctgatcagaggtgggaggatcgtgaatg

SEQ ID NO: 51430 - DNA, 201 bp, Homo sapiens; identical to SEQ ID NO: 51422

SEQ ID NO: 51431 - DNA, 201 bp, Homo sapiens; identical to SEQ ID NO: 51423

SEQ ID NO: 51432 - DNA, 201 bp, Homo sapiens; identical to SEQ ID NO: 51424

SEQ ID NO: 51433 - DNA, 201 bp, Homo sapiens; identical to SEQ ID NO: 51426

SEQ ID NO: 51434 - DNA, 201 bp, Homo sapiens; identical to SEQ ID NO: 51425

SEQ ID NO: 51435 - DNA, 201 bp, Homo sapiens; identical to SEQ ID NO: 51427

SEQ ID NO: 51436 - DNA, 201 bp, Homo sapiens; identical to SEQ ID NO: 51428

SEQ ID NO: 51437 - DNA, 201 bp, Homo sapiens
ctgccctccgtctctcgcggccagcgtggaacagcctcgcggggtcacagcctggcgctcggaccctggcccgggtcatctgcgaaggagccggctttggscaagagtgaccgccttctgatcagaggtgggaggatcgtgaatgacgaccagtccttttacgctgatgtgcacgtggaagatggcttgataaacacttag

SEQ ID NO: 51438 - DNA, 201 bp, Homo sapiens; identical to SEQ ID NO: 51422

SEQ ID NO: 51439 - DNA, 201 bp, Homo sapiens; identical to SEQ ID NO: 51423

SEQ ID NO: 51440 - DNA, 201 bp, Homo sapiens; identical to SEQ ID NO: 51424

SEQ ID NO: 51441 - DNA, 201 bp, Homo sapiens; identical to SEQ ID NO: 51426

SEQ ID NO: 51442 - DNA, 201 bp, Homo sapiens; identical to SEQ ID NO: 51425

SEQ ID NO: 51443 - DNA, 201 bp, Homo sapiens; identical to SEQ ID NO: 51427

SEQ ID NO: 51444 - DNA, 201 bp, Homo sapiens; identical to SEQ ID NO: 51428

SEQ ID NO: 51445 - DNA, 201 bp, Homo sapiens; identical to SEQ ID NO: 51422

SEQ ID NO: 51446 - DNA, 201 bp, Homo sapiens; identical to SEQ ID NO: 51423

SEQ ID NO: 51447 - DNA, 201 bp, Homo sapiens; identical to SEQ ID NO: 51424

SEQ ID NO: 51448 - DNA, 201 bp, Homo sapiens; identical to SEQ ID NO: 51425

SEQ ID NO: 51449 - DNA, 201 bp, Homo sapiens; identical to SEQ ID NO: 51426

SEQ ID NO: 51450 - DNA, 201 bp, Homo sapiens; identical to SEQ ID NO: 51427

SEQ ID NO: 51451 - DNA, 201 bp, Homo sapiens; identical to SEQ ID NO: 51428

SEQ ID NO: 51452 - DNA, 201 bp, Homo sapiens; identical to SEQ ID NO: 51422

SEQ ID NO: 51453 - DNA, 201 bp, Homo sapiens; identical to SEQ ID NO: 51423

SEQ ID NO: 51454 - DNA, 201 bp, Homo sapiens; identical to SEQ ID NO: 51424

SEQ ID NO: 51455 - DNA, 201 bp, Homo sapiens; identical to SEQ ID NO: 51425

SEQ ID NO: 51456 - DNA, 201 bp, Homo sapiens; identical to SEQ ID NO: 51426

SEQ ID NO: 51457 - DNA, 201 bp, Homo sapiens; identical to SEQ ID NO: 51427

SEQ ID NO: 51458 - DNA, 201 bp, Homo sapiens; identical to SEQ ID NO: 51428

SEQ ID NO: 51459 - DNA, 201 bp, Homo sapiens; identical to SEQ ID NO: 51422

SEQ ID NO: 51460 - DNA, 201 bp, Homo sapiens; identical to SEQ ID NO: 51423

SEQ ID NO: 51461 - DNA, 201 bp, Homo sapiens; identical to SEQ ID NO: 51424

SEQ ID NO: 51462 - DNA, 201 bp, Homo sapiens; identical to SEQ ID NO: 51425

SEQ ID NO: 51463 - DNA, 201 bp, Homo sapiens; identical to SEQ ID NO: 51426

SEQ ID NO: 51464 - DNA, 201 bp, Homo sapiens; identical to SEQ ID NO: 51427

SEQ ID NO: 51465 - DNA, 201 bp, Homo sapiens; identical to SEQ ID NO: 51428

SEQ ID NO: 51466 - DNA, 201 bp, Homo sapiens; identical to SEQ ID NO: 51429

SEQ ID NO: 51467 - DNA, 201 bp, Homo sapiens; identical to SEQ ID NO: 51422

SEQ ID NO: 51468 - DNA, 201 bp, Homo sapiens; identical to SEQ ID NO: 51423

SEQ ID NO: 51469 - DNA, 201 bp, Homo sapiens; identical to SEQ ID NO: 51424

SEQ ID NO: 51470 - DNA, 201 bp, Homo sapiens; identical to SEQ ID NO: 51426

SEQ ID NO: 51471 - DNA, 201 bp, Homo sapiens; identical to SEQ ID NO: 51425

SEQ ID NO: 51472 - DNA, 201 bp, Homo sapiens; identical to SEQ ID NO: 51427

SEQ ID NO: 51473 - DNA, 201 bp, Homo sapiens; identical to SEQ ID NO: 51428

SEQ ID NO: 51474 - DNA, 201 bp, Homo sapiens
gatcatctctgccaagacccacaatctgctggcggagatccacggtgtgccccgtgggctgtatgacgggcccgtccacgaggtgatggtgcctgccaagmcagggagtggcgctccggcccgcgcgtcctgcccaggcaagatctccgtccctcctgtgcgcaacctacatcagtcggggttcagcctatctgggtctca

SEQ ID NO: 51475 - DNA, 201 bp, Homo sapiens; identical to SEQ ID NO: 51423

SEQ ID NO: 51476 - DNA, 201 bp, Homo sapiens
gctctgacgctgacctggtcatatggaaccccaaggccaccaagatcatctctgccaagacccacaatctgctggcggagatccacggtgtgccccgtggrctgtatgacgggcccgtccacgaggtgatggtgcctgccaagccagggagtggcgctccggcccgcgcgtcctgcccaggcaagatctccgtccctcctg

SEQ ID NO: 51477 - DNA, 201 bp, Homo sapiens; identical to SEQ ID NO: 51425

SEQ ID NO: 51478 - DNA, 201 bp, Homo sapiens; identical to SEQ ID NO: 51426

SEQ ID NO: 51479 - DNA, 201 bp, Homo sapiens; identical to SEQ ID NO: 51427

SEQ ID NO: 51480 - DNA, 201 bp, Homo sapiens; identical to SEQ ID NO: 51428

SEQ ID NO: 51481 - DNA, 201 bp, Homo sapiens
ggggtctggctctgtcacccaggctggagtgcagtggcacgattatggctcattgcagcctcgacttctcggggccaagcgatcctcctgcctcagccttytgagtagctgggaccacaggcgtgcaccaccatgcccacctaattttttatttcttgtagagatgaggtctcctgcctcagcctcccaaagtgctggaat

SEQ ID NO: 51482 - DNA, 201 bp, Homo sapiens
gctttgtctgatatttagagacattcagattcagaagccatgagttcagttagctcatgggccgggcacgtgcactgactcactggctgcagcagaacacrttgagggagtcttggtgcacttaggtcactgtaaggttctagggctgggagctgggatttgaaccaggatctgtcagcgcagccccagtgctgtgcttga

SEQ ID NO: 51483 - DNA, 201 bp, Homo sapiens
aagatctcaaccttcgcttgaagaaattgactcatgctgccccctgcatgctgtttatgaaaggaactcctcaagaaccacgctgtggtttcagcaagcaratggtggaaattcttcacaaacataatattcagtttagcagttttgatatcttctcagatgaagaggttcgacagggactcaaagcctattccagttggc

SEQ ID NO: 51484 - DNA, 171 bp, Homo sapiens
gcggcagcatggcggcgggggcggctgaggcagctgtagcggccgtggaggaggtcggctcagccgggcastttgaggagctgctgcgcctcaaagccaagtccctccttgtggtccatttctgggcaccatgggctccacagtgtgcacagatgaacgaagttatggcag

SEQ ID NO: 51485 - DNA, 201 bp, Homo sapiens
gtttttcaagaattctcagaaaatcgaccgattagatggtgcacatgccccagagttgaccaaaaaagttcagcgacatgcatctagtggctccttcctayccagcgctaatgaacatcttaaagaagatctcaaccttcgcttgaagaaattgactcatgctgccccctgcatgctgtttatgaaaggaactcctcaaga

SEQ ID NO: 51486 - DNA, 201 bp, Homo sapiens; identical to SEQ ID NO: 51481

SEQ ID NO: 51487 - DNA, 201 bp, Homo sapiens; identical to SEQ ID NO: 51482

SEQ ID NO: 51488 - DNA, 201 bp, Homo sapiens; identical to SEQ ID NO: 51483

SEQ ID NO: 51489 - DNA, 201 bp, Homo sapiens
gtttgatggccccagggcttgccattgacggcggcagcatggcggcgggggcggctgaggcagctgtagcggccgtggaggaggtcggctcagccgggcastttgaggagctgctgcgcctcaaagccaagtccctccttgtggtccatttctgggcaccatgggctccacagtgtgcacagatgaacgaagttatggcag

SEQ ID NO: 51490 - DNA, 201 bp, Homo sapiens; identical to SEQ ID NO: 51485

SEQ ID NO: 51491 - DNA, 201 bp, Homo sapiens
ctgttgccggagacagagatttcctgttccatgaactggtgtagtgagagtctgttcagatttggcgccggtgtccaggtcttcaatccctgggaagactrcaaaaggagatccagaggaatgcatagaaagcgttttctgggtggactagaagctctgaactgcaagcatgcttacgagtaaatgcttactagcgtgcgt

SEQ ID NO: 51492 - DNA, 201 bp, Homo sapiens
gcctcattaagagtctcatctccctctcctacccccgcctcattaagagtctcatctccctctcctacccccgcctcattaagagtctcatctccctctcytacccccgcctcattaagagtctcatctccctctcccgcccccacctagggcccgttcatgagaagagcacctcctttccccccacctcctccaggaacc

SEQ ID NO: 51493 - DNA, 201 bp, Homo sapiens
tataattttaataagctctgcacacacacacacacacacacacatgcatgtacacacatgcacccatgtgcatactctcacatgaacacgtgtaacacacrcacacacacatgcacacactcatacaattacatatgccctatgtgtacacataaccacatatgtacatgcccatgcacaccctaagcacacattcacatg

SEQ ID NO: 51494 - DNA, 201 bp, Homo sapiens; identical to SEQ ID NO: 51483

SEQ ID NO: 51495 - DNA, 201 bp, Homo sapiens
cataaccacatatgtacatgcccatgcacaccctaagcacacattcacatgcacactcatgcacattatgcatgcacacacgttcatacatacccaaatakgcacttgtgtacacacgtgcacacccacacatgcacactatgaacacacagctacacattcatgtgcacacccatacatacacacacagacaaccccatc

SEQ ID NO: 51496 - DNA, 201 bp, Homo sapiens
caaccccatcatctccctctcctacccccgcctcattaagagtctcatctccctctcctacccccgcctcattaagagtctcatctccctctcctaccccygcctcattaagagtctcatctccctctcctacccccgcctcattaagagtctcatctccctctcctacccccgcctcattaagagtctcatctccctctc

SEQ ID NO: 51497 - DNA, 201 bp, Homo sapiens
cacagacaaccccatcatctccctctcctacccccgcctcattaagagtctcatctccctctcctacccccgcctcattaagagtctcatctccctctccyacccccgcctcattaagagtctcatctccctctcctacccccgcctcattaagagtctcatctccctctcctacccccgcctcattaagagtctcatctc

SEQ ID NO: 51498 - DNA, 201 bp, Homo sapiens
ccccgacggctgtccaagcccgggggacgcgaccttcccggcctctggcctgggcggccccgccgcgggacggaggcggtggtgactcagccgtgccgcaktggcggggcgggggacggggcggcgccgagaccccggccctccgcgccacggagcgggacccacggctgcgggctccacctttcctgtgcccgccgggag

SEQ ID NO: 51499 - DNA, 201 bp, Homo sapiens
cctgaagtatctgaaaaatatgaaattagctctgttcccacttttctgtttttcaaggaccaaaaaagttcagcgacatgcatctagtggctccttcctayccagcgctaatgaacatcttaaagaagatctcaaccttcgcttgaagaaattgactcatgctgccccctgcatgctgtttatgaaaggaactcctcaaga

SEQ ID NO: 51500 - DNA, 201 bp, Homo sapiens
cctctggaccatcagattaccaaggaaagaggagaatcaagctgtgaaaggttaaccgatcctcacaggtctccttctgacactgggtccctgtcacttcygagggaacaggaccgtaggatgatgtttcctccaccagcgcaatcatatcttgattcagctcttcctccacaaaggcaagacagattttattctaactct

SEQ ID NO: 51501 - DNA, 201 bp, Homo sapiens
attaccaaggaaagaggagaatcaagctgtgaaaggttaaccgatcctcacaggtctccttctgacactgggtccctgtcacttccgagggaacaggaccrtaggatgatgtttcctccaccagcgcaatcatatcttgattcagctcttcctccacaaaggcaagacagattttattctaactctggtggactgtctgga

SEQ ID NO: 51502 - DNA, 201 bp, Homo sapiens
gtgggcctgtgagcgcccgcatcccccagctcccccccgcagccggctccacaatggtctgctccggttgccgggtgcggattcgggttccggacgcaagrctgcgagttctccgctgcttgttgtggccggggttactgcggcgaccgccagagcagccttggcgctatgttggagccaggggctacccctcagcggtac

SEQ ID NO: 51503 - DNA, 201 bp, Homo sapiens
ttgaacaggtccaattctgaacttgagcatgaaattctctgtctagaaaaagagttaaaagaagagaaatctaaacattcgcaacaaaatgaattgatggyggatatttcaaaaacgatacagcctctagcagatgagtcagaatccctcaaatcacaagtagctgaagccaaaatgatcttcaagagatttaaaatgact

SEQ ID NO: 51504 - DNA, 201 bp, Homo sapiens
ggctccacaatggtctgctccggttgccgggtgcggattcgggttccggacgcaaggctgcgagttctccgctgcttgttgtggccggggttactgcggcraccgccagagcagccttggcgctatgttggagccaggggctacccctcagcggtacttggggctggtcctgggggagccacgcagggttgtggcagcgct

SEQ ID NO: 51505 - DNA, 201 bp, Homo sapiens
ctgttggagggtccactcagactctcacctttgcctccagggggggaaggaagaggctcaagaggcccagggaatcctctggaccatcagattaccaaggmaagaggagaatcaagctgtgaaaggttaaccgatcctcacaggtctccttctgacactgggtccctgtcacttccgagggaacaggaccgtaggatgatg

SEQ ID NO: 51506 - DNA, 201 bp, Homo sapiens
aagttttaatatgcctcctttggataaaatggatgggtcaatgccttcagaaatggaatccagtagaaatgacaccaaagatgatcttggtaatttaaatrtccctgattcatctctccctgctgaaaatgcagcaactggccctcgctttgttcctccacctcttgccctaatcagaggtccactgtttccagtggatac

SEQ ID NO: 51507 - DNA, 201 bp, Homo sapiens
gttttaatatgcctcctttggataaaatggatgggtcaatgccttcagaaatggaatccagtagaaatgacaccaaagatgatcttggtaatttaaatatscctgattcatctctccctgctgaaaatgcagcaactggccctcgctttgttcctccacctcttgccctaatcagaggtccactgtttccagtggatacaa

SEQ ID NO: 51508 - DNA, 201 bp, Homo sapiens
agactggattcgaatcctcatggttttccatgggaaatggtgatatgtgcagctgttgctgcattttttgctgttctcctttttctgtggagaagttttasatcggttaggagtcggctttatgtgggaagagagaaaaagcttgctataatgctttctggactaattgaagaaaaatgtaaactacttgaaaaatttagc

SEQ ID NO: 51509 - DNA, 181 bp, Homo sapiens
gctacctcaggatgtagtgtaacaagggggctgggtgggcagagtgggcctgtgagcgcccgcatcccccagctccccccsgcagccggctccacaatggtctgctccggttgccgggtgcggattcgggttccggacgcaaggctgcgagttctccgctgcttgttgtggccggggttac

SEQ ID NO: 51510 - DNA, 201 bp, Homo sapiens
caacattatacaagaaacagcaagcaaatcattcggttctggcagtttgtgaaagagacagacaatgaagtaagaatgctactattgcagttcgtcactgkaacctgccgtttatctctaggaggatttgctgagctcatgggaagtaatgggcctcaaaagttttgcattgaaaaagttggcaaagatacttggttacca

SEQ ID NO: 51511 - DNA, 201 bp, Homo sapiens
caaactaccacacgggagagaccacaacctttaccttcaggttgggaaagaagagttgatgatcgtggaagagcttattatgtggatcataacaccagaasaacaacatggcagcggcctaccatggaatgggtcagaaattttgaacagtggcaatctcagcagaaccaacctcagggagctatgcaacagtttaaccaa

SEQ ID NO: 51512 - DNA, 201 bp, Homo sapiens
agaaaccttgccatcagggtgggaacaaagaaaatatcctcatggtagaacctattatgtggatcataatactcaaactaccacacgggagagaccacaasctttaccttcaggttgggaaagaagagttgatgatcgtggaagagcttattatgtggatcataacaccagaagaacaacatggcagcggcctaccatgga

SEQ ID NO: 51513 - DNA, 201 bp, Homo sapiens
caggagtctgggaatgccaacacagaaaccttgccatcagggtgggaacaaagaaaatatcctcatggtagaacctattatgtggatcataatactcaaastaccacacgggagagaccacaacctttaccttcaggttgggaaagaagagttgatgatcgtggaagagcttattatgtggatcataacaccagaagaaca

SEQ ID NO: 51514 - DNA, 201 bp, Homo sapiens
cttaagagaagaaagaactggttcggaacagcaatatatacagaagtagttgtagatgaggaaattaggaaaacagcaaaatccagtagttcttctaatcyaaaatgggatgaacagctaactgtaaatgttacgccacagactacattggaatttcgagtttggagtcatcacactttaaaagcagatgcttaattagga

SEQ ID NO: 51515 - DNA, 201 bp, Homo sapiens; identical to SEQ ID NO: 51510

SEQ ID NO: 51516 - DNA, 201 bp, Homo sapiens; identical to SEQ ID NO: 51511

SEQ ID NO: 51517 - DNA, 201 bp, Homo sapiens; identical to SEQ ID NO: 51512

SEQ ID NO: 51518 - DNA, 201 bp, Homo sapiens; identical to SEQ ID NO: 51513

SEQ ID NO: 51519 - DNA, 201 bp, Homo sapiens; identical to SEQ ID NO: 51514

SEQ ID NO: 51520 - DNA, 201 bp, Homo sapiens
catgccaaactttgcgccagatgaaccaggaaaaatcttcttgatggatctgaatgaacaaaacccaagggcacaagcactagaaatcagtggtggatttracaaagaattatttaatccacatgggatcagtattttcatcgacaaagacaatactgtgtatctttatgttgtgaatcatccccacatgaagtccactgt

SEQ ID NO: 51521 - DNA, 188 bp, Homo sapiens
agtcgccgctgggcaccccgagaccatggggaagctcgtggcgctggtcctgctgggggtcggcctgtccttagtcggggagatgttyctggcgtttagagaaagggtgaatgcctctcgagaagtggagccagtagaacctgaaaactgccaccttattgaggaacttgaaagtggctctgaagata

SEQ ID NO: 51522 - DNA, 201 bp, Homo sapiens
atgagggattaaaatatccaggcatgccaaactttgcgccagatgaaccaggaaaaatcttcttgatggatctgaatgaacaaaacccaagggcacaagcrctagaaatcagtggtggatttgacaaagaattatttaatccacatgggatcagtattttcatcgacaaagacaatactgtgtatctttatgttgtgaatc

SEQ ID NO: 51523 - DNA, 201 bp, Homo sapiens
aaaacccaagggcacaagcactagaaatcagtggtggatttgacaaagaattatttaatccacatgggatcagtattttcatcgacaaagacaatactgtrtatctttatgttgtgaatcatccccacatgaagtccactgtggagatatttaaatttgaggaacaacaacgttctctggtatacctgaaaactataaaac

SEQ ID NO: 51524 - DNA, 201 bp, Homo sapiens
gaggaacaacaacgttctctggtatacctgaaaactataaaacatgaacttctcaaaagtgtgaatgacattgtggttcttggaccagaacagttctatgmcaccagagaccactattttaccaactccctcctgtcattttttgagatgatcttggatcttcgctggacttatgttcttttctacagcccaagggaggtt

SEQ ID NO: 51525 - DNA, 201 bp, Homo sapiens
aggagcaaaatgggacttttggctgaaagtgctgagctcctgcggtgggggctgaccgcaagccacgccttctgtgcacctggtcggcccagctagctgcsgacccggcggggaggggcggggcgggccaatcggcgctgccccagcagggctgcggctgcaggcaggcagagcctcctagcccgtcggtgtctgcgccca

SEQ ID NO: 51526 - DNA, 201 bp, Homo sapiens
ctactccatgcacatagtaagtctgactatggcagtcagacttacttactcccattttcccttcgatatatgactttttctcagtaaatattaacctgaaytattccaactccccttgtactcttgctttttcaattctcctgttgcaatgacacataggaaaatcttaaaattcttgggagtgttgtcacacctgaaaat

SEQ ID NO: 51527 - DNA, 201 bp, Homo sapiens
aggtaaacaaacaaataaatagaaaagatcaacaacccctttggctatctactgagacatgactaggaagaaaacatgactttatcattttgttatagaarctgatatataaaggttacacattttcatttatttgtttttctgatttgaaggtataaccttcatgatgaattacttcttcagggtgttaaggcagtgact

SEQ ID NO: 51528 - DNA, 201 bp, Homo sapiens
gtcttcttaccaaacacgacttaatgctctccgagaggtacaacccgtagaacttcctaactgtaatttagttaaaggaatcgaaactggctctgaagacwtggagatactgcctaatggactggctttcattagctctggattaaagtatcctggaataaagagcttcaaccccaacagtcctggaaaaatacttctgat

SEQ ID NO: 51529 - DNA, 201 bp, Homo sapiens
atcagacataaacttctgcctaatttgaatgatattgttgctgtgggacctgagcacttttatggcacaaatgatcactattttcttgacccctacttacratcctgggagatgtatttgggtttagcgtggtcgtatgttgtctactatagtccaagtgaagttcgagtggtggcagaaggatttgattttgctaatgga

SEQ ID NO: 51530 - DNA, 201 bp, Homo sapiens
tccttctcactaaaatggataaatcagttatgtcaattgtcagatattaaataacagtgtgtgaccccaaaagtacttaccctaaaacatgtgttgcctgraagcacatgtgtgtatcgctgccttgccatgtcttgttcagaagacacaggggagcagggttagctcacgtgtctttagaactccagtactcacccaggg

SEQ ID NO: 51531 - DNA, 201 bp, Homo sapiens
ttggctgaaagtgctgagctcctgcggtgggggctgaccgcaagccacgccttctgtgcacctggtcggcccagctagctgcggacccggcggggaggggyggggcgggccaatcggcgctgccccagcagggctgcggctgcaggcaggcagagcctcctagcccgtcggtgtctgcgcccatcgatccctttgtctatc

SEQ ID NO: 51532 - DNA, 201 bp, Homo sapiens
gagcttcaaccccaacagtcctggaaaaatacttctgatggacctgaatgaagaagatccaacagtgttggaattggggatcactggaagtaaatttgatrtatcttcatttaaccctcatgggattagcacattcacagatgaagataatgccatgtacctcctggtggtgaaccatccagatgccaagtccacagtgga

SEQ ID NO: 51533 - DNA, 170 bp, Homo sapiens
ttggaaggagcaaaatgggacttttggctgaaagtgctgagctcctgcggtgggggctgaccgcaagccrcgccttctgtgcacctggtcggcccagctagctgcggacccggcggggaggggcggggcgggccaatcggcgctgccccagcagggctgcggctgcaggc

SEQ ID NO: 51534 - DNA, 201 bp, Homo sapiens
tgttgtcacacctgaaaattatgagtctctatgatcttggcacaaattgtacatttgagtgtctttgacttggttaaaggaagtttgttcacttcgatgaytggatacagaatgaatcccataattgacatgggcgaagctaaaagtgtccccaaagactacactgttgttgaggtggtggtagtgctggtgggtttttgt

SEQ ID NO: 51535 - DNA, 201 bp, Homo sapiens
catgccaaactttgcgccagatgaaccaggaaaaatcttcttgatggatctgaatgaacaaaacccaagggcacaagcactagaaatcagtggtggatttracaaagaattatttaatccacatgggatcagtattttcatcgacaaagaacacgacttaatgctctccgagaggtacaacccgtagaacttcctaactgt

SEQ ID NO: 51536 - DNA, 201 bp, Homo sapiens; identical to SEQ ID NO: 51526

SEQ ID NO: 51537 - DNA, 201 bp, Homo sapiens; identical to SEQ ID NO: 51527

SEQ ID NO: 51538 - DNA, 201 bp, Homo sapiens
tcatcgacaaagaacacgacttaatgctctccgagaggtacaacccgtagaacttcctaactgtaatttagttaaaggaatcgaaactggctctgaagacwtggagatactgcctaatggactggctttcattagctctggattaaagtatcctggaataaagagcttcaaccccaacagtcctggaaaaatacttctgat

SEQ ID NO: 51539 - DNA, 201 bp, Homo sapiens
atgagggattaaaatatccaggcatgccaaactttgcgccagatgaaccaggaaaaatcttcttgatggatctgaatgaacaaaacccaagggcacaagcrctagaaatcagtggtggatttgacaaagaattatttaatccacatgggatcagtattttcatcgacaaagaacacgacttaatgctctccgagaggtaca

SEQ ID NO: 51540 - DNA, 201 bp, Homo sapiens; identical to SEQ ID NO: 51529

SEQ ID NO: 51541 - DNA, 201 bp, Homo sapiens; identical to SEQ ID NO: 51530

SEQ ID NO: 51542 - DNA, 201 bp, Homo sapiens; identical to SEQ ID NO: 51532

SEQ ID NO: 51543 - DNA, 201 bp, Homo sapiens; identical to SEQ ID NO: 51534

SEQ ID NO: 51544 - DNA, 201 bp, Homo sapiens; identical to SEQ ID NO: 51520

SEQ ID NO: 51545 - DNA, 188 bp, Homo sapiens; identical to SEQ ID NO: 51521

SEQ ID NO: 51546 - DNA, 201 bp, Homo sapiens
ccagtggattaaaatatccaggcatgccaaactttgcgccagatgaaccaggaaaaatcttcttgatggatctgaatgaacaaaacccaagggcacaagcrctagaaatcagtggtggatttgacaaagaattatttaatccacatgggatcagtattttcatcgacaaagacaatactgtgtatctttatgttgtgaatc

SEQ ID NO: 51547 - DNA, 201 bp, Homo sapiens; identical to SEQ ID NO: 51523

SEQ ID NO: 51548 - DNA, 201 bp, Homo sapiens; identical to SEQ ID NO: 51524

SEQ ID NO: 51549 - DNA, 201 bp, Homo sapiens; identical to SEQ ID NO: 51525

SEQ ID NO: 51550 - DNA, 201 bp, Homo sapiens; identical to SEQ ID NO: 51526

SEQ ID NO: 51551 - DNA, 201 bp, Homo sapiens; identical to SEQ ID NO: 51527

SEQ ID NO: 51552 - DNA, 201 bp, Homo sapiens; identical to SEQ ID NO: 51528

SEQ ID NO: 51553 - DNA, 201 bp, Homo sapiens; identical to SEQ ID NO: 51529

SEQ ID NO: 51554 - DNA, 201 bp, Homo sapiens; identical to SEQ ID NO: 51530

SEQ ID NO: 51555 - DNA, 201 bp, Homo sapiens; identical to SEQ ID NO: 51531

SEQ ID NO: 51556 - DNA, 201 bp, Homo sapiens; identical to SEQ ID NO: 51532

SEQ ID NO: 51557 - DNA, 201 bp, Homo sapiens
ttcatcccagaggggcatccgcctgtatgagttggaaggagcaaaatgggacttttggctgaaagtgctgagctcctgcggtgggggctgaccgcaagccrcgccttctgtgcacctggtcggcccagctagctgcggacccggcggggaggggcggggcgggccaatcggcgctgccccagcagggctgcggctgcaggc

SEQ ID NO: 51558 - DNA, 201 bp, Homo sapiens; identical to SEQ ID NO: 51534

SEQ ID NO: 51559 - DNA, 201 bp, Homo sapiens
cttttcctacaagcatctcaagcacgagcggctccgcaaataccactgaagaggacacactctgcacccccccaccccacgaccttggcccgagcccctcygtgaggaacacaatctcaatcgttgctgaatcctttcatatcctaataggaattaacctccaaataaaacatgactggtacgtgtgctgattgcctgcct

SEQ ID NO: 51560 - DNA, 178 bp, Homo sapiens
caaataccactgaagaggacacactctgcacccccccaccccacgaccttggcccgagcccctccgtgaggaacacaatctcaatcgttgctgaatccttycatatcctaataggaattaacctccaaataaaacatgactggtacgtgtgctgattgcctgcctgtctgccgtagcc

SEQ ID NO: 51561 - DNA, 201 bp, Homo sapiens
taccatggtgctggcatgctacgtgctctttagctactccttttcctacaagcatctcaagcacgagcggctccgcaaataccactgaagaggacacactytgcacccccccaccccacgaccttggcccgagcccctccgtgaggaacacaatctcaatcgttgctgaatcctttcatatcctaataggaattaacctcc

SEQ ID NO: 51562 - DNA, 151 bp, Homo sapiens
gcacccccccaccccacgaccttggcccgagcccctccgtgaggaacacaatctcaatcgttgctgaatcctttcatatcctaataggaattaacctccarataaaacatgactggtacgtgtgctgattgcctgcctgtctgccgtagcc

SEQ ID NO: 51563 - DNA, 201 bp, Homo sapiens
gattaccatggtgctggcatgctacgtgctctttagctactccttttcctacaagcatctcaagcacgagcggctccgcaaataccactgaagaggacacrctctgcacccccccaccccacgaccttggcccgagcccctccgtgaggaacacaatctcaatcgttgctgaatcctttcatatcctaataggaattaacc

SEQ ID NO: 51564 - DNA, 135 bp, Homo sapiens
cgaccttggcccgagcccctccgtgaggaacacaatctcaatcgttgctgaatcctttcatatcctaataggaattaacctccaaataaaacatgactggyacgtgtgctgattgcctgcctgtctgccgtagcc

SEQ ID NO: 51565 - DNA, 181 bp, Homo sapiens
ccgcaaataccactgaagaggacacactctgcacccccccaccccacgaccttggcccgagcccctccgtgaggaacacaatctcaatcgttgctgaatcmtttcatatcctaataggaattaacctccaaataaaacatgactggtacgtgtgctgattgcctgcctgtctgccgtagcc

SEQ ID NO: 51566 - DNA, 180 bp, Homo sapiens
cgcaaataccactgaagaggacacactctgcacccccccaccccacgaccttggcccgagcccctccgtgaggaacacaatctcaatcgttgctgaatccyttcatatcctaataggaattaacctccaaataaaacatgactggtacgtgtgctgattgcctgcctgtctgccgtagcc

SEQ ID NO: 51567 - DNA, 201 bp, Homo sapiens
gtacaagagctgctgcctcagtacaaggagagggaagtggtaaataaagatgtcctggacgtttacattgagcatcggctaatgatggagcagcggagtcrggaccctgggatggtccgaagcccccagaaccagtaccctgctgaactcatgcgcagatttgagctgtattttcaaggccctagcagcaacaagcctcgt

SEQ ID NO: 51568 - DNA, 201 bp, Homo sapiens
cagcggagtcgggaccctgggatggtccgaagcccccagaaccagtaccctgctgaactcatgcgcagatttgagctgtattttcaaggccctagcagcarcaagcctcgtgtgatccgggaagtgcgggctgactctgtggggaagttggtaactgtgcgtggaatcgtcactcgtgtctctgaagtcaaacccaagatg

SEQ ID NO: 51569 - DNA, 201 bp, Homo sapiens
acctggaagcccatcggattgtgaagatgaacaagagtgaggatgatgagtctggggctggagagctcaccagggaggagctgaggcaaattgcagatgtsatatttgccaccgtccgtgaactggtctcagggggccgaagtgtccggttctctgaggcagagcagcgctgtgtatctcgtggcttcacacccgcccagt

SEQ ID NO: 51570 - DNA, 142 bp, Homo sapiens
ccgaagtgtccggttctctgaggcagagcagcgctgtgtatctcgtggcttcacacccgcccagttccaggcggctctggatgaatatgaggagctcaatktctggcaggtcaatgcttcccggacacggatcacttttgtc

SEQ ID NO: 51571 - DNA, 201 bp, Homo sapiens
atgagtctggggctggagagctcaccagggaggagctgaggcaaattgcagatgtgatatttgccaccgtccgtgaactggtctcagggggccgaagtgtscggttctctgaggcagagcagcgctgtgtatctcgtggcttcacacccgcccagttccaggcggctctggatgaatatgaggagctcaatgtctggcagg

SEQ ID NO: 51572 - DNA, 171 bp, Homo sapiens
gccaccgtccgtgaactggtctcagggggccgaagtgtccggttctctgaggcagagcagcgctgtgtatctcgtggcttcacacccgcccagttccaggyggctctggatgaatatgaggagctcaatgtctggcaggtcaatgcttcccggacacggatcacttttgtc

SEQ ID NO: 51573 - DNA, 132 bp, Homo sapiens
acccggcgcctgcactaccccgcccggagatwcccttccgacgcccgcaccgcctccccgtcactcattctaggcccgcacggtgattggcttgcggctagcgggaggtgaagaaggccgccttgtccgatt

SEQ ID NO: 51574 - DNA, 201 bp, Homo sapiens; identical to SEQ ID NO: 51568

SEQ ID NO: 51575 - DNA, 201 bp, Homo sapiens
caccagggaggagctgaggcaaattgcagaggaggatttctacgaaaagctggcagcttcaatcgccccagaaatatacgggcatgaagatgtgaagaagkcactgctgctcctgctagtcgggggtgtggaccagtctcctcgaggcatgaaaatccggggcaacatcaacatctgtctgatgggggatcctggtgtggc

SEQ ID NO: 51576 - DNA, 201 bp, Homo sapiens
aggcaaattgcagaggaggatttctacgaaaagctggcagcttcaatcgccccagaaatatacgggcatgaagatgtgaagaaggcactgctgctcctgckagtcgggggtgtggaccagtctcctcgaggcatgaaaatccggggcaacatcaacatctgtctgatgggggatcctggtgtggccaagtctcagctcctg

SEQ ID NO: 51577 - DNA, 201 bp, Homo sapiens
acatacagctacctgctgcactgctctcccggtttgacctcctctggctgattcaggaccggcccgaccgagacaatgacctacggttggcccagcacatyacctatgtgcaccagcacagccggcagcccccctcccagtttgaacctctggacatgaagctcatgaggcgttacatagccatgtgccgcgagaagcagc

SEQ ID NO: 51578 - DNA, 201 bp, Homo sapiens
ccgaagtgtccggttctctgaggcagagcagcgctgtgtatctcgtggcttcacacccgcccagttccaggcggctctggatgaatatgaggagctcaatktctggcaggtcaatgcttcccggacacggatcacttttgtctgattccagcctgcttgcaaccctggggtcctcttgttccctgctggcctgccccttgg

SEQ ID NO: 51579 - DNA, 201 bp, Homo sapiens
aagaagatgtgaatgaagccatcaggctaatggagatgtcaaaggactctcttctaggagacaaggggcagacagctaggactcagagaccagcagatgtsatatttgccaccgtccgtgaactggtctcagggggccgaagtgtccggttctctgaggcagagcagcgctgtgtatctcgtggcttcacacccgcccagt

SEQ ID NO: 51580 - DNA, 201 bp, Homo sapiens
actctcttctaggagacaaggggcagacagctaggactcagagaccagcagatgtgatatttgccaccgtccgtgaactggtctcagggggccgaagtgtscggttctctgaggcagagcagcgctgtgtatctcgtggcttcacacccgcccagttccaggcggctctggatgaatatgaggagctcaatgtctggcagg

SEQ ID NO: 51581 - DNA, 201 bp, Homo sapiens
gccaccgtccgtgaactggtctcagggggccgaagtgtccggttctctgaggcagagcagcgctgtgtatctcgtggcttcacacccgcccagttccaggyggctctggatgaatatgaggagctcaatgtctggcaggtcaatgcttcccggacacggatcacttttgtctgattccagcctgcttgcaaccctggggtc

SEQ ID NO: 51582 - DNA, 201 bp, Homo sapiens
atgtggtggagaaagaagatgtgaatgaagccatcaggctaatggagatgtcaaaggactctcttctaggagacaaggggcagacagctaggactcagagrccagcagatgtgatatttgccaccgtccgtgaactggtctcagggggccgaagtgtccggttctctgaggcagagcagcgctgtgtatctcgtggcttca

SEQ ID NO: 51583 - DNA, 201 bp, Homo sapiens
tcgacaagatggctgaggccgaccgcacagccatccacgaggtcatggagcagcagaccatctccattgccaaggccggcattctcaccacactcaatgcycgctgctccatcctggctgccgccaaccctgcctacgggcgctacaaccctcgccgcagcctggagcagaacatacagctacctgctgcactgctctccc

SEQ ID NO: 51584 - DNA, 201 bp, Homo sapiens; identical to SEQ ID NO: 51567

SEQ ID NO: 51585 - DNA, 201 bp, Homo sapiens
cagggttttgtgcgttttttagattcctgttcgtttttatgctatttcatccactcagtaaattacctgagtaaagtgcatctccctgccaggcccccagtatagacactggggatgcggcaaggactaagcggtccctgctgtttggagatacttaagatggggctccactttttgagccccccgactcccttatttggt

SEQ ID NO: 51586 - DNA, 201 bp, Homo sapiens
agggttttgtgcgttttttagattcctgttcgtttttatgctatttcatccactcagtaaattacctgagtaaagtgcatctccctgccaggcccccagtatagacactggggatgcggcaaggactaagcggtccctgctgtttggagatacttaagatggggctccactttttgagccccccgactcccttatttggtc

SEQ ID NO: 51587 - DNA, 201 bp, Homo sapiens
aactgaccttagagggtggggccctggtgctggctgaccagggtgtgtgctgcattgatgagttcgacaagatggctgaggccgaccgcacagccatccaygaggtcatggagcagcagaccatctccattgccaaggccggcattctcaccacactcaatgcccgctgctccatcctggctgccgccaaccctgcctacg

SEQ ID NO: 51588 - DNA, 201 bp, Homo sapiens
agggtgtgtgctgcattgatgagttcgacaagatggctgaggccgaccgcacagccatccacgaggtcatggagcagcagaccatctccattgccaaggcyggcattctcaccacactcaatgcccgctgctccatcctggctgccgccaaccctgcctacgggcgctacaaccctcgccgcagcctggagcagaacatac

SEQ ID NO: 51589 - DNA, 201 bp, Homo sapiens
gggtgtgtgctgcattgatgagttcgacaagatggctgaggccgaccgcacagccatccacgaggtcatggagcagcagaccatctccattgccaaggccrgcattctcaccacactcaatgcccgctgctccatcctggctgccgccaaccctgcctacgggcgctacaaccctcgccgcagcctggagcagaacataca

SEQ ID NO: 51590 - DNA, 132 bp, Homo sapiens; identical to SEQ ID NO: 51573

SEQ ID NO: 51591 - DNA, 201 bp, Homo sapiens
ggcgagaggcttgggctagtaaggatgccacctatacttctgcccggaccctgctggctatcctgcgcctttccactgctctggcacgtctgagaatggtrgatgtggtggagaaagaagatgtgaatgaagccatcaggctaatggagatgtcaaaggactctcttctaggagacaaggggcagacagctaggactcaga

SEQ ID NO: 51592 - DNA, 201 bp, Homo sapiens
ccaaaatggggcactatgctgaccaatttaaggggaaaacaagtgctgtggaacaaacctttttcctgaacacaggagagagtggtaactttactagttgragatataaggtatcagtcacactttctggaaaagagaaagtgaatgggtacatcaggattgctttgtatggaagtaatgaaaactcaaaacaatatgaga

SEQ ID NO: 51593 - DNA, 140 bp, Homo sapiens
tgcaaagtggtgaagatgggactgagtataatttttgtagcagcgacactgtggaagaaaacgtcttgcaatctctttacccttgttaaaaacgtggtgcrgctattgcggtaataaaatctttaatgcactcggtttga

SEQ ID NO: 51594 - DNA, 201 bp, Homo sapiens
gtgtggactggaggcacgggtcccgggcaatgtacacccaagccgtgcaaaacattcgggttgttggggcggagacagctttcttaatacaagcactgtcvacgcagctagggtacagccttgaggacgtgcatgtcatcggccacagcctgggcgcgcacacggccgcggaggcgggcaggaggctggggggccgcgtgg

SEQ ID NO: 51595 - DNA, 201 bp, Homo sapiens
ggaggcacgggtcccgggcaatgtacacccaagccgtgcaaaacattcgggttgttggggcggagacagctttcttaatacaagcactgtcgacgcagctrgggtacagccttgaggacgtgcatgtcatcggccacagcctgggcgcgcacacggccgcggaggcgggcaggaggctggggggccgcgtgggcaggatca

SEQ ID NO: 51596 - DNA, 201 bp, Homo sapiens
  misc_feature (1)...(201): n = A,T,C or G
gcactatgctgaccaatttaaggggaaaacaagtgctgtggaacaaacctttttcctgaacacaggagagagtggtaactttactagttggagatataagntatcagtcacactttctggaaaagagaaagtgaatgggtacatcaggattgctttgtatggaagtaatgaaaactcaaaacaatatgagattttcaaagg

SEQ ID NO: 51597 - DNA, 201 bp, Homo sapiens
cttgcaatcacctaagaagcttcgagtattactcaagcagcgtcctcaaccctgatggcttcctgggctatccctgtgcctcctacgatgagtttcaggasagtaagtgtttcccttgtccagctgaaggatgccccaaaatggggcactatgctgaccaatttaaggggaaaacaagtgctgtggaacaaacctttttcc

SEQ ID NO: 51598 - DNA, 201 bp, Homo sapiens
ttcaaaggatccctcaaaccagatgcaagtcacacgtgtgctattgatgtggattttaatgttggaaaaatacagaaagttaaattcctctggaacaaacrtgggataaatctatctgagcccaaactgggggcttcccaaatcacagtgcaaagtggtgaagatgggactgagtataatttttgtagcagcgacactgtg

SEQ ID NO: 51599 - DNA, 201 bp, Homo sapiens
aaaagaggtctgctacggacaacttggctgcttttctgatgaaaaaccatgggcaggaacccttcagcgacctgtaaaattacttccctggtcccccgagsacattgacacccgctttcttctgtacacaaatgaaaatccaaacaacttccaactaatcactggcacggaaccagacaccattgaggcttcaaacttcca

SEQ ID NO: 51600 - DNA, 201 bp, Homo sapiens
actttactagttggagatataaggtatcagtcacactttctggaaaagagaaagtgaatgggtacatcaggattgctttgtatggaagtaatgaaaactcraaacaatatgagattttcaaaggatccctcaaaccagatgcaagtcacacgtgtgctattgatgtggattttaatgttggaaaaatacagaaagttaaat

SEQ ID NO: 51601 - DNA, 201 bp, Homo sapiens; identical to SEQ ID NO: 51592

SEQ ID NO: 51602 - DNA, 201 bp, Homo sapiens
aaaagaggtctgctacggacaacttggctgcttttctgatgaaaaaccatgggcaggaacccttcagcgacctgtaaaattacttccctggtcccccgagsacattgacacccgctttcttctgtacacaaatgaaaatccaaacaacttccaagtaagagcagctaatcactggcacggaaccagacaccattgaggctt

SEQ ID NO: 51603 - DNA, 201 bp, Homo sapiens; identical to SEQ ID NO: 51594

SEQ ID NO: 51604 - DNA, 201 bp, Homo sapiens; identical to SEQ ID NO: 51595

SEQ ID NO: 51605 - DNA, 201 bp, Homo sapiens; identical to SEQ ID NO: 51600

SEQ ID NO: 51606 - DNA, 201 bp, Homo sapiens; identical to SEQ ID NO: 51596
  misc_feature (1)...(201): n = A,T,C or G

SEQ ID NO: 51607 - DNA, 201 bp, Homo sapiens
cttgcaatcacctaagaagcttcgagtattactcaagcagcgtcctcaaccctgatggcttcctgggctatccctgtgcctcctacgatgagtttcaggastgtttcccttgtccagctgaaggatgccccaaaatggggcactatgctgaccaatttaaggggaaaacaagtgctgtggaacaaacctttttcctgaaca

SEQ ID NO: 51608 - DNA, 173 bp, Homo sapiens
ttcaaaggatccctcaaaccagatgcaagtcacacgtgtgctattgatgtggattttaatgttggaaaaatacagaaagttaaattcctctggaacaaacrtgggataaatctatctgagcccaaactgggggcttcccaaatcacagtgcaaagtggtgaagatgggactga

SEQ ID NO: 51609 - DNA, 201 bp, Homo sapiens
ttatgtattctcaaattttgtctggctagttatccaccgcttctccaatggattcattcagtttcttggagaaccatatagactaatgacagcatctgggrcacacggacgtatcaagttcatggtggacattcctattataaaaaatactcaggtcttgagaattcctgtgctgaaggatcccaaaatgctttctaaaaa

SEQ ID NO: 51610 - DNA, 201 bp, Homo sapiens
tattccaaaattattcttgtcacaagtaactactatatcccacataaaaagggaaaaaatcccacccaatcacagaaaaggcatcctctgtatgtttccgkggcaatgcgttgtttatgtattctcaaattttgtctggctagttatccaccgcttctccaatggattcattcagtttcttggagaaccatatagactaat

SEQ ID NO: 51611 - DNA, 124 bp, Homo sapiens
actaatgacagcatctgggacacacggacgtatcaagttcatggtggacattcctattataaaaaatactcaggtcttgagaattcctgtgctgaaggatyccaaaatgctttctaaaaagcat

SEQ ID NO: 51612 - DNA, 144 bp, Homo sapiens
actggctgtacaatatctaaaaagaaagtgacatgaaggaagcaatctacaacttccttccgcttagcgtgcatgcatgtgtgtacgtgcacgtgtgtacrtgtctgcatgtgtgggaatccgggggctggcaggtggagcatc

SEQ ID NO: 51613 - DNA, 175 bp, Homo sapiens
gaacttacaaaccaaacttttattctgagaaactggctgtacaatatctaaaaagaaagtgacatgaaggaagcaatctacaacttccttccgcttagcgwgcatgcatgtgtgtacgtgcacgtgtgtacgtgtctgcatgtgtgggaatccgggggctggcaggtggagcatc

SEQ ID NO: 51614 - DNA, 129 bp, Homo sapiens
cggggaggcggtgcgggcgtcggaagggwatctccgggcggggtagtgcaggcgccgggtttcccgcggtccgagctggcgcgggcggaggagaatcgctcttaaagggccagcgcacacgcgttcttt

SEQ ID NO: 51615 - DNA, 129 bp, Homo sapiens; identical to SEQ ID NO: 51614

SEQ ID NO: 51616 - DNA, 144 bp, Homo sapiens; identical to SEQ ID NO: 51612

SEQ ID NO: 51617 - DNA, 175 bp, Homo sapiens; identical to SEQ ID NO: 51613

SEQ ID NO: 51618 - DNA, 129 bp, Homo sapiens; identical to SEQ ID NO: 51614

SEQ ID NO: 51619 - DNA, 201 bp, Homo sapiens
tccaaattccataatcaaggctgtttttggtaccaaaggtttctttttagaagataagaaaacgaagatagcttctaccaaaatctgcaacaataagataytctggttgatatgtagcgaatttatgtccttatgggctggatccaacaagaaaaatatgaatcagagtcgaatggatgtgtatatgtcacatgctcccac

SEQ ID NO: 51620 - DNA, 201 bp, Homo sapiens
tatgggcgaacacatgctaggagcacagcagatgcaggttatgatgtatggatgggaaacagtcggggaaacacttggtcaagaagacacaaaacactctyagagacagatgagaaattctgggcctttagttttgatgaaatggccaaatatgatctcccaggagtaatagacttcattgtaaataaaactggtcaggag

SEQ ID NO: 51621 - DNA, 201 bp, Homo sapiens
tgtatggttatgacaagaaaggaaacaatgcaaaccctgaagctaatatgaatattcatgccctgtttgcagacaatgcctactggcttgagaattatgcyaatggaagccttggattccttctagcagatgcaggttatgatgtatggatgggaaacagtcggggaaacacttggtcaagaagacacaaaacactctcag

SEQ ID NO: 51622 - DNA, 132 bp, Homo sapiens
gccaatggaagccttggattccttctagcagatgcaggttatgatgtatggatgggaaacagtcggggaaacacttggtcaagaagacacaaaacactctyagagacagatgagaaattctgggcctttagg

SEQ ID NO: 51623 - DNA, 201 bp, Homo sapiens
aaaacatgttccattggacccaggctgttaagtctgggaaattccaagcttatgactggggaagcccagttcagaataggatgcactatgatcagtcccarcctccctactacaatgtgacagccatgaatgtaccaattgcagtgtggaacggtggcaaggacctgttggctgacccccaagatgttggccttttgcttc

SEQ ID NO: 51624 - DNA, 201 bp, Homo sapiens
  misc_feature (1)...(201): n = A,T,C or G
cttgtactattcaccagattcagttgaattctgggctttcagctttgatgaaatggctaaatatgaccttccagccacaatcgacttcattgtaaagaaanctggacagaagcagctacactatgttggccattcccagggcaccaccattggttttattgccttttccaccaatcccagcctggctaaaagaatcaaaac

SEQ ID NO: 51625 - DNA, 175 bp, Homo sapiens
ttacaatgacattgtttctatgatatcagaagataaaaagtagttctggatttaaagaattatccgtttgtttttccaaaatactttattctctcatacayagtattttcataatgtttgacatgcagtgcttctttctgtaattttgactttagaaatatattggcatcaacaa

SEQ ID NO: 51626 - DNA, 201 bp, Homo sapiens
tgtggaacggtggcaaggacctgttggctgacccccaagatgttggccttttgcttccaaaactccccaatcttatttaccacaaggagattcctttttayaatcacttggactttatctgggcaatggatgcccctcaagaagtttacaatgacattgtttctatgatatcagaagataaaaagtagttctggatttaaa

SEQ ID NO: 51627 - DNA, 201 bp, Homo sapiens
tcctcaatccctcttcaagtttatatttggtgacaaaatattctacccacacaacttctttgatcaatttcttgctactgaagtgtgctcccgtgagatgytgaatctcctttgcagcaatgccttatttataatttgtggatttgacagtaagaactttaacacgagtcgcttggatgtgtatctatcacataatccagc

SEQ ID NO: 51628 - DNA, 201 bp, Homo sapiens
aagaatcaaaaccttctatgctctagctcctgttgccactgtgaagtatacaaaaagccttataaacaaacttagatttgttcctcaatccctcttcaagwttatatttggtgacaaaatattctacccacacaacttctttgatcaatttcttgctactgaagtgtgctcccgtgagatgctgaatctcctttgcagcaa

SEQ ID NO: 51629 - DNA, 201 bp, Homo sapiens
tcgcaggccgaggagacagtgagtgcgcgccctgagtcgcaggccgaggagacagtgagtgcgcgccctgggcgccccgccccagcccccagccccttccytgggcccccgcaaggcgggaacgcgagcgcctcccccgagctgtgtctcgagacctttgtcctcccctcacccctcggcccgctgcctgccctttactgg

SEQ ID NO: 51630 - DNA, 201 bp, Homo sapiens
tgggcgccccgccccagcccccagccccttccctgggcccccgcaaggcgggaacgcgagcgcctcccccgagctgtgtctcgagacctttgtcctcccckcacccctcggcccgctgcctgccctttactggccccctccctcatgcccgtccctcagcaccctctcctttcaactaactttcccgctcccgacagtggc

SEQ ID NO: 51631 - DNA, 125 bp, Homo sapiens
cccagcactttgggaggccgaggcaggcagatcacctgaggtcaggagtttgataccagcctggccaacatggtgaaatcctgtctctaccaaaaatacaraaaaaattagctgggcatggtggt

SEQ ID NO: 51632 - DNA, 201 bp, Homo sapiens
agtctcaagcgcggttcggtcagtccgtgaaggggcttctcacggagaaggtgaccacctgtggtactgacgtaatcgcgctcaccaagcaggtgctgaarggctcccggagctccgagctgctaggtcaggcagctcgaaacatggtactccaggaagatgccatcttgcactcagaagatagtttaaggaagatggcaa

SEQ ID NO: 51633 - DNA, 201 bp, Homo sapiens
gccccggcgactcaccatcgtcagtgcgcaaccgttcgctaactgaaatgatggcgactggaacgccagagtctcaagcgcggttcggtcagtccgtgaargggcttctcacggagaaggtgaccacctgtggtactgacgtaatcgcgctcaccaagcaggtgctgaaaggctcccggagctccgagctgctaggtcagg

SEQ ID NO: 51634 - DNA, 201 bp, Homo sapiens; identical to SEQ ID NO: 51632

SEQ ID NO: 51635 - DNA, 201 bp, Homo sapiens
taagccttgttcaagaagcaggaaaggcatcagaagaagtaacagttggcagagggtctcaggaaaaacatcttccttctgatcttttgcatagcaccttytggaattttcatcatgtttgcttattaaacaaagctcctactgccatcatactaatcatgcaaaaagattgccaaatcatgtttggtaggaggacttttg

SEQ ID NO: 51636 - DNA, 201 bp, Homo sapiens; identical to SEQ ID NO: 51633

SEQ ID NO: 51637 - DNA, 201 bp, Homo sapiens; identical to SEQ ID NO: 51635

SEQ ID NO: 51638 - DNA, 201 bp, Homo sapiens; identical to SEQ ID NO: 51629

SEQ ID NO: 51639 - DNA, 201 bp, Homo sapiens; identical to SEQ ID NO: 51630

SEQ ID NO: 51640 - DNA, 201 bp, Homo sapiens; identical to SEQ ID NO: 51635

SEQ ID NO: 51641 - DNA, 201 bp, Homo sapiens
gctagactctggggccgattatctgcatctggatgtaatggatgggcattttgttcccaacatcacctttggtcaccctgtggtagaaagccttcgaaagyagctaggccaggaccctttctttgacatgcacatgatggtgtccaagccagaacagtgggtaaagccaatggctgtagcagaagccaatcagtacacctt

SEQ ID NO: 51642 - DNA, 201 bp, Homo sapiens
cagatgctagactctggggccgattatctgcatctggatgtaatggatgggcattttgttcccaacatcacctttggtcaccctgtggtagaaagccttcraaagcagctaggccaggaccctttctttgacatgcacatgatggtgtccaagccagaacagtgggtaaagccaatggctgtagcagaagccaatcagtac

SEQ ID NO: 51643 - DNA, 201 bp, Homo sapiens
cgtacaattacaaaaaacaaatgcatcggaagttccgaagtggtctcattgtaccttatgcctcgaacctgatatttgtgctttaccactgtgaaaatgcyaagactcctaaagaacaattccgagtgcagatgttattaaatgaaaaggtgttacctttggcttactcacaagaaactgtttcattttatgaagatctga

SEQ ID NO: 51644 - DNA, 201 bp, Homo sapiens
gggatggcggggctagtagtaccggcagccgcgacctgggtgcagcgctggccgactggcctttgtggtacgcggactggatggacgggcagctagtagaraagggacggcaggatatgcgacagctggcgctgcgtctggcctcgctcttcccggcccttttcagccgtgagaactacggccgcctgcggctcatcacca

SEQ ID NO: 51645 - DNA, 201 bp, Homo sapiens
ggccccgaggctccgtggcgggaccctgagctgctggaggggacctgcaccccggtgcagctggtcgccctcattcgccacggcacccgctaccccacggkcaaacagatccgcaagctgaggcagctgcacgggttgctgcaggcccgcgggtccagggatggcggggctagtagtaccggcagccgcgacctgggtgca

SEQ ID NO: 51646 - DNA, 201 bp, Homo sapiens; identical to SEQ ID NO: 51643

SEQ ID NO: 51647 - DNA, 201 bp, Homo sapiens; identical to SEQ ID NO: 51644

SEQ ID NO: 51648 - DNA, 201 bp, Homo sapiens; identical to SEQ ID NO: 51645

SEQ ID NO: 51649 - DNA, 201 bp, Homo sapiens
tgatccaagctattgatcacaatgaaggcttcagtttaatataactttggagttataactattcagtttagtgcaaaagcattaaactatttgtgtttttyttgtggtgatgaattcagcaaggtgacagaggtactattataattcttacttgcagaatgttcaatctacgagtgttcatggaagccaaaaaatattaaa

SEQ ID NO: 51650 - DNA, 201 bp, Homo sapiens
tgggccataattctaccagtcatgaaataaacccaaggaaagtttttgaacttatgggaagcattgtcactgagattgcttgtggacggcagcacacttcygcttttgttccttcatcaggacgaatttactcttttgggcttggtggtaatgggcagctgggaaccggttcaacaagcaacaggaaaagtccctttactg

SEQ ID NO: 51651 - DNA, 186 bp, Homo sapiens
ctccctcgcgtggccacctccccctctgccttctcctacccagtctcttccccaactctccccacccctggtgctctccgccccgyttgcctcccgttcttccccgcccgctccatccgggtcgctgacggctgtctctggactggacagcagtggcgtccgcttttctctaaggaacccgataag

SEQ ID NO: 51652 - DNA, 199 bp, Homo sapiens
ctccctcgcgtggccacctccccctctgccttctcctacccagtctcttccccaactctccccacccctggtgctctccgccccgcttgcctcccgttyttccccgcccgctccatccgggtcgctgacggctgtctctggactggacagcagtggcgtccgcttttctctaaggaacccgataagaactccattttct

SEQ ID NO: 51653 - DNA, 201 bp, Homo sapiens
agcacacttctgcttttgttccttcatcaggacgaatttactcttttgggcttggtggtaatgggcagctgggaaccggttcaacaagcaacaggaaaagyccctttactgtaaaaggaaattggtacccctataatgggcagtgtctaccagatattgattctgaagaatatttctgtgtaaaaagaattttctcagggg

SEQ ID NO: 51654 - DNA, 201 bp, Homo sapiens
atccagaagatgacatagaggaaacattttgtcttaattttacgatcacagttgaaaactttggtgcaacagaagtgaaagagctggttctaaatggtgcmgacacagctgttaacaaacaaaatcggcaagagtttgtcgatgcttatgtggattacatattcaataaatcagtggcttccttatttgatgcttttcatg

SEQ ID NO: 51655 - DNA, 201 bp, Homo sapiens
cagttgccagtaataaaaagaaacattggctactatgagcaccaatcactgggttatagctttcaaaattattgatgctgcagtgctttagagctatttcyttgaatttaagaaacaaatcttaacagttttatggtgctgatgcttagttgtctcatgccattaaattgtaaaagtgagttgatgcaatacatgtgactt

SEQ ID NO: 51656 - DNA, 201 bp, Homo sapiens
agaataaatatggccaattgggtttaggtactgactgtaaaaagcaaacttcaccgcagctgcttaagtctttgcttggaatccctttcatgcaagttgcmgcaggaggagcccatagttttgtactcaccctttctggagctatctttggatggggacgcaacaagtttggtcagctaggtcttaatgatgaaaatgata

SEQ ID NO: 51657 - DNA, 201 bp, Homo sapiens
aagcattgaggttttatcttactctaccagaatgtcccctgatgagtgattccaacaatttcacaacaatagcaattccctttggtacagctcttgtgaasctagaaaaggcaccactgaaagtacttgaaaactggtggtcagtacttgaacctccactattcctcaagatagtagaactttttaaggaagttgtggtac

SEQ ID NO: 51658 - DNA, 201 bp, Homo sapiens
ctttaaaggtttgtttttgctcctccctctttaccctcccctccagtgaatgttttttagaaaaaccaatgctcagatttatcagtattactaccgttctrtactggcttactctaatggtgttatgagttatacattatacattagtataaaaacattcaaaagggtactctttatgctcagtttattaagttttatgct

SEQ ID NO: 51659 - DNA, 201 bp, Homo sapiens
gatcctaaatacggcatgtttaggtattatgaagattccaggctcatttggttttctgataaggtaaaatgtccaaccatctaaattacttctgtgtatayacccatgtatttatacctgtatgtatcaagttaattcagtaaataaggaattactactggatccctaacatataagatctgctttattacaatttgagaa

SEQ ID NO: 51660 - DNA, 201 bp, Homo sapiens
ataaaagaacaaaagttttaaatggtaaaagtcaaatccttggttcgtgagcacataccatgatcacttagttaagtgaatttgtgtaatgcttccttagycagatcattccttattctttgttttttattttttatttttgagacggagtttcgctcttgtcgcccaggctgtagtgcagtggtacagtctcagctcact

SEQ ID NO: 51661 - DNA, 201 bp, Homo sapiens; identical to SEQ ID NO: 51653

SEQ ID NO: 51662 - DNA, 201 bp, Homo sapiens; identical to SEQ ID NO: 51649

SEQ ID NO: 51663 - DNA, 201 bp, Homo sapiens; identical to SEQ ID NO: 51650

SEQ ID NO: 51664 - DNA, 201 bp, Homo sapiens; identical to SEQ ID NO: 51654

SEQ ID NO: 51665 - DNA, 201 bp, Homo sapiens; identical to SEQ ID NO: 51655

SEQ ID NO: 51666 - DNA, 201 bp, Homo sapiens; identical to SEQ ID NO: 51656

SEQ ID NO: 51667 - DNA, 201 bp, Homo sapiens; identical to SEQ ID NO: 51657

SEQ ID NO: 51668 - DNA, 201 bp, Homo sapiens; identical to SEQ ID NO: 51649

SEQ ID NO: 51669 - DNA, 201 bp, Homo sapiens; identical to SEQ ID NO: 51650

SEQ ID NO: 51670 - DNA, 111 bp, Homo sapiens
ctccgccccgyttgcctcccgttcttccccgcccgctccatccgggtcgctgacggctgtctctggactggacagcagtggcgtccgcttttctctaaggaacccgataag

SEQ ID NO: 51671 - DNA, 124 bp, Homo sapiens
ctccgccccgcttgcctcccgttyttccccgcccgctccatccgggtcgctgacggctgtctctggactggacagcagtggcgtccgcttttctctaaggaacccgataagaactccattttct

SEQ ID NO: 51672 - DNA, 201 bp, Homo sapiens; identical to SEQ ID NO: 51653

SEQ ID NO: 51673 - DNA, 201 bp, Homo sapiens; identical to SEQ ID NO: 51654

SEQ ID NO: 51674 - DNA, 201 bp, Homo sapiens; identical to SEQ ID NO: 51655

SEQ ID NO: 51675 - DNA, 201 bp, Homo sapiens; identical to SEQ ID NO: 51657

SEQ ID NO: 51676 - DNA, 201 bp, Homo sapiens
agaataaatatggccaattgggtttaggtactgactgtaaaaagcaaacttcaccgcagctgcttaagtctttgcttggaatccctttcatgcaagttgcmgcaggaggagcccatagttttgtactcaccctttctggagctatctttggatggggacgcaacaagtttggtcagctaggtcttaatgatgaaaatggaa

SEQ ID NO: 51677 - DNA, 201 bp, Homo sapiens; identical to SEQ ID NO: 51649

SEQ ID NO: 51678 - DNA, 201 bp, Homo sapiens; identical to SEQ ID NO: 51650

SEQ ID NO: 51679 - DNA, 201 bp, Homo sapiens
ggggtgaggggcgtggggcgagggcagggctgtggctccctggccccggggctggaatgtctcatctgcctggggatgggcttctctcaggttgaggccgygcactgccaagcctcggccgccggcctctgaagctgttgcgagcggccggttgcggtagtcgtctgcttggctgcgaggttggataagaactccattttc

SEQ ID NO: 51680 - DNA, 201 bp, Homo sapiens
cgcccgctccatccgggtcgctgacggctgtctctggactggacagcagtggcgtccgcttttctctaaggaacccggtaaagtttcccaggggccggggrggggagcagcggagcagcggcacagacgccggaggtgccctggtgatcgtcgccactggctgacagaggagggtcccaggagccggagacgtgcttcagc

SEQ ID NO: 51681 - DNA, 201 bp, Homo sapiens
ctccctggccccggggctggaatgtctcatctgcctggggatgggcttctctcaggttgaggccgcgcactgccaagcctcggccgccggcctctgaagcygttgcgagcggccggttgcggtagtcgtctgcttggctgcgaggttggataagaactccattttctgttgatgtggagacatagggtacctccaactttc

SEQ ID NO: 51682 - DNA, 137 bp, Homo sapiens
ccccaactctccccacccctggtgctctccgccccgyttgcctcccgttcttccccgcccgctccatccgggtcgctgacggctgtctctggactggacagcagtggcgtccgcttttctctaaggaacccggtaaa

SEQ ID NO: 51683 - DNA, 150 bp, Homo sapiens
ccccaactctccccacccctggtgctctccgccccgcttgcctcccgttyttccccgcccgctccatccgggtcgctgacggctgtctctggactggacagcagtggcgtccgcttttctctaaggaacccggtaaagtttcccaggggc

SEQ ID NO: 51684 - DNA, 201 bp, Homo sapiens; identical to SEQ ID NO: 51653

SEQ ID NO: 51685 - DNA, 201 bp, Homo sapiens; identical to SEQ ID NO: 51654

SEQ ID NO: 51686 - DNA, 201 bp, Homo sapiens; identical to SEQ ID NO: 51655

SEQ ID NO: 51687 - DNA, 201 bp, Homo sapiens; identical to SEQ ID NO: 51657

SEQ ID NO: 51688 - DNA, 201 bp, Homo sapiens; identical to SEQ ID NO: 51656

SEQ ID NO: 51689 - DNA, 201 bp, Homo sapiens
acggactggctgcacctttcctgagaagccagacttccactgatggaagagctgaaaacacaagcccaggagtgcagacactgccctaattgcttcctgasaattcccatattaataaagaagaaaattatctgccattttttcctactataataatgctgaatcttaatttagagggtacaagggtatggtaatgcttgt

SEQ ID NO: 51690 - DNA, 201 bp, Homo sapiens
atgcttctgaaaacaacaggattttcactttgaatctatctgcaccgtttattagccagttctacaaggaatcattgatgaaagttatgccttatgttgayatactttttggaaatgagacagaagctgccacttttgctagagagcaaggctttgagactaaagacattaaagagatagccaaaaagacacaagccctgc

SEQ ID NO: 51691 - DNA, 201 bp, Homo sapiens
tgaagagaaaagctgctgaagcccatgtggatgctcattactacgagcagaatgagcagccaacaggaacttgtgctgcatgcatcactggtgacaacagrtccctcatagctaatcttgctgctgccaattgttataaaaaggaaaaacatcttgatctggagaaaaactggatgttggtagaaaaagcaagagtttgtt

SEQ ID NO: 51692 - DNA, 201 bp, Homo sapiens
cactcaaacatgtaataaactttggataattaaataatgtgccaaatttaagttgtaccacaatattcaaatcatagtcttatggaactctgtaattggayacaaacaaaaacttgtcatataggaatttttttctgtcttttccctgtgtacagcaaactgaggaagaaagatcattatttaatactgggccctgaaatg

SEQ ID NO: 51693 - DNA, 201 bp, Homo sapiens
tcagactttatatgaccttaggtaaatcttcgaacctcagtttcctttttgtaaaatgagataataacccttacatagaaggtcattgagatgatttgagmgagattaccaagtataagatatttgttataatgccttgtaaatgctttataagtagctgctgttattatcattatgattattttctttttgaagaaaaaa

SEQ ID NO: 51694 - DNA, 201 bp, Homo sapiens
acgcgctcccagtcgctgagtgcctgagccgggaagcagttgctgtggtacctgctgctgcccgagcggacgtagagcatcggacgcgggcgccgtggcgytgggcaggagggcgaagccatgacgtcagtcagagaaaatattctctttggaatgggaaatcctctgcttgacatctctgctgtagtggacaaagatttc

SEQ ID NO: 51695 - DNA, 201 bp, Homo sapiens; identical to SEQ ID NO: 51689

SEQ ID NO: 51696 - DNA, 201 bp, Homo sapiens; identical to SEQ ID NO: 51691

SEQ ID NO: 51697 - DNA, 201 bp, Homo sapiens; identical to SEQ ID NO: 51692

SEQ ID NO: 51698 - DNA, 201 bp, Homo sapiens; identical to SEQ ID NO: 51693

SEQ ID NO: 51699 - DNA, 201 bp, Homo sapiens
ttagaagtaaaagtagtagcttttcaaagctttaaatttgtagaactcatctaactaaagtaaattctgctgtgactaatccaatatactcagaatgttayccatctaaagcatttttcatatctcaactaagataacttttagcacatgcttaaatatcaaagcagttgtcatttggaagtcacttgtgaatagatgtgc

SEQ ID NO: 51700 - DNA, 201 bp, Homo sapiens
ccatcaccagaaaaactaatgagatttctctggaatacaagctgatattgctacatcgtgttcatctggatgtattagaagtaaaagtagtagcttttcaragctttaaatttgtagaactcatctaactaaagtaaattctgctgtgactaatccaatatactcagaatgttatccatctaaagcatttttcatatctca

SEQ ID NO: 51701 - DNA, 201 bp, Homo sapiens
ttagaaggtataaggttcctgatggaaaaccagaaaatgagtttgcgtttaatgcagaatttaaagataaggactttgccattgatattattaaaagcacwcatgaccattggaaagcattagtgactaagaaaacgaatggaaaaggaatcagttgcatgaatacaactttgtctgagagccccttcaagtgtgatcctg

SEQ ID NO: 51702 - DNA, 201 bp, Homo sapiens
tgtgtgaaattggaagcaaggtatgtgcaagaggtgaaataattggcgtgaaagttctaggcatattggctatgattgacgaaggggaaaccgactggaargtcattgccattaatgtggatgatcctgatgcagccaattataatgatatcaatgatgtcaaacggctgaaacctggctacttagaagctactgtggact

SEQ ID NO: 51703 - DNA, 201 bp, Homo sapiens
ttagaagtaaaagtagtagcttttcaaagctttaaatttgtagaactcatctaactaaagtaaattctgctgtgactaatccaatatactcagaatgttayccatctaaaataacttttagcacatgcttaaatatcaaagcagttgtcatttggaagtcacttgtgaatagatgtgcaaggggagcacatattggatgta

SEQ ID NO: 51704 - DNA, 201 bp, Homo sapiens
ccatcaccagaaaaactaatgagatttctctggaatacaagctgatattgctacatcgtgttcatctggatgtattagaagtaaaagtagtagcttttcaragctttaaatttgtagaactcatctaactaaagtaaattctgctgtgactaatccaatatactcagaatgttatccatctaaaataacttttagcacatg

SEQ ID NO: 51705 - DNA, 201 bp, Homo sapiens; identical to SEQ ID NO: 51701

SEQ ID NO: 51706 - DNA, 201 bp, Homo sapiens; identical to SEQ ID NO: 51702

SEQ ID NO: 51707 - DNA, 201 bp, Homo sapiens; identical to SEQ ID NO: 51699

SEQ ID NO: 51708 - DNA, 201 bp, Homo sapiens
agtggcgcaatctcagcttactgcaacctccgcctcccaggttcaagcggttctctgcctcagcctcccgagcagctgggattacaggtgcccgccaccaygcccagcttttatttttagtagagacggggtttcaccatcttggccaggctggtcttgaactcctgaccttgtgatccacccacttcagcctcccgaagt

SEQ ID NO: 51709 - DNA, 201 bp, Homo sapiens
cccagcttttatttttagtagagacggggtttcaccatcttggccaggctggtcttgaactcctgaccttgtgatccacccacttcagcctcccgaagtgytgggattatgggcatgagccactgcactgtccaagaggcttgaatttgttagcatctcagcagtagagcaaaccttctattgttcctatatattataaat

SEQ ID NO: 51710 - DNA, 201 bp, Homo sapiens; identical to SEQ ID NO: 51700

SEQ ID NO: 51711 - DNA, 201 bp, Homo sapiens; identical to SEQ ID NO: 51699

SEQ ID NO: 51712 - DNA, 201 bp, Homo sapiens; identical to SEQ ID NO: 51700

SEQ ID NO: 51713 - DNA, 201 bp, Homo sapiens; identical to SEQ ID NO: 51701

SEQ ID NO: 51714 - DNA, 201 bp, Homo sapiens; identical to SEQ ID NO: 51702

SEQ ID NO: 51715 - DNA, 201 bp, Homo sapiens
gaatcaagcatgtgtaaggcactgcccccgccagacccttctaacttctgcacactggaaggtgaaacctggagagagaagacactcccctccctagcttytacctggcaccctccaaagatgagcattcatcttggagaccaaaataaaaaagggagcagggtgggcggagccccagcagctagtgaggagttccattcc

SEQ ID NO: 51716 - DNA, 201 bp, Homo sapiens
ttattccacacacctcccaaggcagggggtagcgtgggaatcaagcatgtgtaaggcactgcccccgccagacccttctaacttctgcacactggaaggtraaacctggagagagaagacactcccctccctagcttctacctggcaccctccaaagatgagcattcatcttggagaccaaaataaaaaagggagcagggt

SEQ ID NO: 51717 - DNA, 201 bp, Homo sapiens
tttattccacacacctcccaaggcagggggtagcgtgggaatcaagcatgtgtaaggcactgcccccgccagacccttctaacttctgcacactggaaggkgaaacctggagagagaagacactcccctccctagcttctacctggcaccctccaaagatgagcattcatcttggagaccaaaataaaaaagggagcaggg

SEQ ID NO: 51718 - DNA, 201 bp, Homo sapiens
ccttaacaaaaataatttattccacacacctcccaaggcagggggtagcgtgggaatcaagcatgtgtaaggcactgcccccgccagacccttctaacttytgcacactggaaggtgaaacctggagagagaagacactcccctccctagcttctacctggcaccctccaaagatgagcattcatcttggagaccaaaata

SEQ ID NO: 51719 - DNA, 201 bp, Homo sapiens
agttaaagaacacaccaatgcttgccttaacaaaaataatttattccacacacctcccaaggcagggggtagcgtgggaatcaagcatgtgtaaggcactrcccccgccagacccttctaacttctgcacactggaaggtgaaacctggagagagaagacactcccctccctagcttctacctggcaccctccaaagatga

SEQ ID NO: 51720 - DNA, 201 bp, Homo sapiens
atgcttgccttaacaaaaataatttattccacacacctcccaaggcagggggtagcgtgggaatcaagcatgtgtaaggcactgcccccgccagacccttytaacttctgcacactggaaggtgaaacctggagagagaagacactcccctccctagcttctacctggcaccctccaaagatgagcattcatcttggagac

SEQ ID NO: 51721 - DNA, 201 bp, Homo sapiens
actggacactaggtctccaagtagcaagttaaagaacacaccaatgcttgccttaacaaaaataatttattccacacacctcccaaggcagggggtagcgkgggaatcaagcatgtgtaaggcactgcccccgccagacccttctaacttctgcacactggaaggtgaaacctggagagagaagacactcccctccctagc

SEQ ID NO: 51722 - DNA, 201 bp, Homo sapiens
aaggtgaaaccccatctctactaaaaatacaaaaaattagccaggtgtggtggtgtgcacctgtagtcccagctatttgggaggctgaggtgggagaatcrcttgaacctgggaggcggaggttgcagtgagctgaaatcgcgtaccacactccagcctgggtgacagagcgagactgtgtttcaaagaaaaaaaaaaaca

SEQ ID NO: 51723 - DNA, 201 bp, Homo sapiens
atatcctttaaatgactgagaatgcagctggtaaagttggaagaataaagttaaccaagcaggccaggcacggtggctcacgcctataatcccagcacttrgggaggccaaggcgggcagatcacctgaggtcaatagttcgagaccagcctggccaacaaggtgaaaccccatctctactaaaaatacaaaaaattagcc

SEQ ID NO: 51724 - DNA, 201 bp, Homo sapiens
acgcctataatcccagcacttagggaggccaaggcgggcagatcacctgaggtcaatagttcgagaccagcctggccaacaaggtgaaaccccatctctaytaaaaatacaaaaaattagccaggtgtggtggtgtgcacctgtagtcccagctatttgggaggctgaggtgggagaatcacttgaacctgggaggcggag

SEQ ID NO: 51725 - DNA, 201 bp, Homo sapiens
aacaggagggataaggaggtgctccagaagcacgggactgtggaccttgcaggagtgaagactgtgatgtgtggtccccatatgtggctcagcaaagactsgagagatcatccctttgtctgcattgacggccctgtgacggcctccagcccacaggcctgctttctcctgtcctaacaccaagcctgggtggcagatgaa

SEQ ID NO: 51726 - DNA, 201 bp, Homo sapiens
acggagctgtctctttgcacacgaggagcctgaaatatggaaaactaggtcagggggttttggtccaggtttccccctccctggtgaaacggcagaagacscactttcatgatttgccatgtggtgcctcagtgattctcggtaacaacggcttcatctggatttacccaacacctgagcacaaagaagaggaagcagggg

SEQ ID NO: 51727 - DNA, 201 bp, Homo sapiens
cagtgagctgaaatcgcgtaccacactccagcctgggtgacagagcgagactgtgtttcaaagaaaaaaaaaaacaagcagccttttgcttggttggaatmtgattttctgttgcgtgttccttgtagccatagatgtgattatgtccacaccgggctgccttaatctgtcctgcttggagagtgacttgtaagatgctga

SEQ ID NO: 51728 - DNA, 201 bp, Homo sapiens
actgctatgaagcatcccttccacatcagatcaaagacatcttaaagccagaaataatggaggagattgtgatggaaacacgccagaggcttttggaacargagggataaggaggtgctccagaagcacgggactgtggaccttgcaggagtgaagactgtgatgtgtggtccccatatgtggctcagcaaagactcgaga

SEQ ID NO: 51729 - DNA, 201 bp, Homo sapiens; identical to SEQ ID NO: 51722

SEQ ID NO: 51730 - DNA, 201 bp, Homo sapiens; identical to SEQ ID NO: 51723

SEQ ID NO: 51731 - DNA, 201 bp, Homo sapiens; identical to SEQ ID NO: 51724

SEQ ID NO: 51732 - DNA, 201 bp, Homo sapiens; identical to SEQ ID NO: 51725

SEQ ID NO: 51733 - DNA, 201 bp, Homo sapiens; identical to SEQ ID NO: 51726

SEQ ID NO: 51734 - DNA, 201 bp, Homo sapiens; identical to SEQ ID NO: 51727

SEQ ID NO: 51735 - DNA, 201 bp, Homo sapiens; identical to SEQ ID NO: 51728

SEQ ID NO: 51736 - DNA, 201 bp, Homo sapiens
tagatggatcgacctgtcatgtttttgaggttatccaggctgtatatctctggagagaagggaatggcaaagagtgggagtctgagtcaagtttggttttktttttttaagagacaaggtctctgtaatccaggctgcagtacactggcatgaccatggctcactatagacttgggctcagccaatcttcctgcctcagcc

SEQ ID NO: 51737 - DNA, 201 bp, Homo sapiens
atttaccctcctcacttggtgtctcccagcctgccagcccatgctgttcatccagtatctgctgaatggtgattacctattaagtggaactaacacaaaaktgcttatctaaaagcaattattggtgattatttccttgcagtggcccactagagggcgccattgttaagtgtaattccagtaggtgttttgtgttttttt

SEQ ID NO: 51738 - DNA, 201 bp, Homo sapiens
tcagcatcttacaagtcactctccaagcaggacagattaaggcagcccggtgtggacataatcacatctatggctacaaggaacacgcaacagaaaatcakattccaaccaagcaaaaggctgcttgtttttttttttctttgaaacacagtctcgctctgtcacccaggcttggtgttaggacaggagaaagcaggcctg

SEQ ID NO: 51739 - DNA, 201 bp, Homo sapiens
aaaaaaacacaaaacacctactggaattacacttaacaatggcgccctctagtgggccactgcaaggaaataatcaccaataattgcttttagataagcamttttgtgttagttccacttaataggtaatcaccattcagcagatactggatgaacagcatgggctggcaggctgggagacaccaagtgaggagggtaaat

SEQ ID NO: 51740 - DNA, 201 bp, Homo sapiens
atgatattaacattaaacaagtgttactgaacataagaaaattccaaatgggtcttatctcagaccccagatcaactgagattctcatacatggctataayagaaggagcaaaatgtgtaaagggagattctagtatacagaaacgatggaaagaactttctaaggaagactacctcctgcttttgatcattcaccaaaca

SEQ ID NO: 51741 - DNA, 201 bp, Homo sapiens
agaaaatatcaatatgagagaatctggctccttgaaccctgaccatggacctgtggtgatccaccgtagtgcaggcactggacgctccagcaccttctctstggtagacacttgtcttgttttgatggaaaaaggagatgatattaacattaaacaagtgttactgaacataagaaaattccaaatgggtcttatctcaga

SEQ ID NO: 51742 - DNA, 201 bp, Homo sapiens
ctggcacaggctctgctcgcaccagctcgctcctgctgccatgcccaccaccatcaagtgggagttcaaggagttggatgctcagcatcgctggcagctgytgtacttgatgatcacagttgtgttaaactgcaaaatgctgagaatgattatattaatgccagcttagttgacatagaagaggacaaaggagttacatct

SEQ ID NO: 51743 - DNA, 201 bp, Homo sapiens
tatcaatatgagagaatctggctccttgaaccctgaccatggacctgtggtgatccaccgtagtgcaggcactggacgctccagcaccttctctctggtasacacttgtcttgttttgatggaaaaaggagatgatattaacattaaacaagtgttactgaacataagaaaattccaaatgggtcttatctcagaccccag

SEQ ID NO: 51744 - DNA, 201 bp, Homo sapiens; identical to SEQ ID NO: 51740

SEQ ID NO: 51745 - DNA, 201 bp, Homo sapiens
tttcttgtttaaagtgagagaatctggctccttgaaccctgaccatggacctgtggtgatccaccgtagtgcaggcactggacgctccagcaccttctctstggtagacacttgtcttgttttgatggaaaaaggagatgatattaacattaaacaagtgttactgaacataagaaaattccaaatgggtcttatctcaga

SEQ ID NO: 51746 - DNA, 201 bp, Homo sapiens; identical to SEQ ID NO: 51742

SEQ ID NO: 51747 - DNA, 201 bp, Homo sapiens
gtttaaagtgagagaatctggctccttgaaccctgaccatggacctgtggtgatccaccgtagtgcaggcactggacgctccagcaccttctctctggtasacacttgtcttgttttgatggaaaaaggagatgatattaacattaaacaagtgttactgaacataagaaaattccaaatgggtcttatctcagaccccag

SEQ ID NO: 51748 - DNA, 201 bp, Homo sapiens; identical to SEQ ID NO: 51740

SEQ ID NO: 51749 - DNA, 201 bp, Homo sapiens; identical to SEQ ID NO: 51745

SEQ ID NO: 51750 - DNA, 201 bp, Homo sapiens; identical to SEQ ID NO: 51742

SEQ ID NO: 51751 - DNA, 201 bp, Homo sapiens; identical to SEQ ID NO: 51747

SEQ ID NO: 51752 - DNA, 201 bp, Homo sapiens
ctcttccacttataataccaactgtcttgtcagactggcaaattatattggcctctccttatgtggtggtttttttggtaggtcatagttccttatacacrgacacctgcatcatcgaaggtctttttttcctaaaaaaaaaaaatgggattttagttcttattctgtgataactatcctcctcatataatactattcttt

SEQ ID NO: 51753 - DNA, 201 bp, Homo sapiens
gccctttcctctttgccagcccgctggcgagccgagccagggcaagatgaggtcgtcctgtgtcctgctcaccgccctggtggcgctggccgcctattacktctacatcccgctgcctggctccgtgtccgacccctggaagctgatgctgctggacgccactttccggggtgcacagcaagtgagtaacctgatccacta

SEQ ID NO: 51754 - DNA, 201 bp, Homo sapiens
cctcccgacgcagcctctgattggctcctgggcttataagaaacgcgtgaatgagcagctgccgcgggcagaaagttgccggaggtctccgggtggtatcsccctttcctctttgccagcccgctggcgagccgagccagggcaagatgaggtcgtcctgtgtcctgctcaccgccctggtggcgctggccgcctattacg

SEQ ID NO: 51755 - DNA, 201 bp, Homo sapiens
cgccactttccggggtgcacagcaagtgagtaacctgatccactacctgggactgagccatcacctgctggcactgaattttatcattgtttcttttggcmaaaaaagcgcgtggtcttctgcccaagtgaaggtgaccgacacagactttgatggtgtggaagtcagagtgtttgaaggccctccgaagcccgaagagcc

SEQ ID NO: 51756 - DNA, 201 bp, Homo sapiens
tttttaaaaatgaatttgactaacttaagtgcaaaacatgtaaatttggttcccagagtgggccaatctctctgttcttgttatcttagccaactatactsatacctacagctacagaaagcaggactaggaactggaaataactttgggtcctgccttcattaggacgttctttttagaagcagttcttccagctctgga

SEQ ID NO: 51757 - DNA, 201 bp, Homo sapiens
acattctgacgtgtgagcatgatgtcctcagagacgatggcatcatgtatgccaagcgtttggagagtgccggtgtggaggtgaccctggatcactttgargatggctttcacggatgtatgattttcactagctggcccaccaacttctcagtgggaatccggactaggaatagttacatcaagtggctagatcaaaacc

SEQ ID NO: 51758 - DNA, 201 bp, Homo sapiens
agtaaaaacagacaaatgaaacaacctagtgtttcacataaaaatacttctgacataaagtaccaagagcagtgtgaatatacttggcatagtcaaaaaaraaaatacatttaatattagttcaaaattgttaaaaatacctttagaaggtctagtctattattgaaaactcaattttttcacttatatggctttaaaatg

SEQ ID NO: 51759 - DNA, 201 bp, Homo sapiens
ttttaaaaatgaatttgactaacttaagtgcaaaacatgtaaatttggttcccagagtgggccaatctctctgttcttgttatcttagccaactatactgmtacctacagctacagaaagcaggactaggaactggaaataactttgggtcctgccttcattaggacgttctttttagaagcagttcttccagctctggat

SEQ ID NO: 51760 - DNA, 201 bp, Homo sapiens
gcattttccccagaattgtgagccaaagcctatagtaattgcagacagcaaatgattccggatctctaaaaggctctctcagatgaaaagggagtaaaggaaaaaagaggtcaaccactgtttctgataatgtacttgagtttcattgttcttttagtttgtattcttataaaaaatgtttacactctgcagattgatttt

SEQ ID NO: 51761 - DNA, 201 bp, Homo sapiens
tccccagaattgtgagccaaagcctatagtaattgcagacagcaaatgattccggatctctaaaaggctctctcagatgaaaagggagtaaaggaaaaaagaggtcaaccactgtttctgataatgtacttgagtttcattgttcttttagtttgtattcttataaaaaatgtttacactctgcagattgatttttttttt

SEQ ID NO: 51762 - DNA, 201 bp, Homo sapiens
agaaacgcgtgaatgagcagctgccgcgggcagaaagttgccggaggtctccgggtggtatcgccctttcctctttgccagcccgctggcgagccgagccrgggcaagatgaggtcgtcctgtgtcctgctcaccgccctggtggcgctggccgcctattacgtctacatcccgctgcctggctccgtgtccgacccctgg

SEQ ID NO: 51763 - DNA, 201 bp, Homo sapiens
aacctagtgtttcacataaaaatacttctgacataaagtaccaagagcagtgtgaatatacttggcatagtcaaaaaagaaaatacatttaatattagttmaaaattgttaaaaatacctttagaaggtctagtctattattgaaaactcaattttttcacttatatggctttaaaatggagctattttgctacaatataa

SEQ ID NO: 51764 - DNA, 201 bp, Homo sapiens
ttgtttatttttttaagttatttaatgttaatatacatagctagacttaaggtttttcagaaagatgtccataataaatattaaaaacaatggtatttttwaaaaaactgccttagggttttaaaaccttccctacagttataaccacgtgtaattttgtggaaatgatataacagctattaatactactataacataggc

SEQ ID NO: 51765 - DNA, 201 bp, Homo sapiens
agcaagagtaagcagtgttacttgcaggtactttggttaatgttgatttaaattttcatgaatgtgctggtgaacactgtgaccaggcttttgtagatggygcagcaagtgagcagagatgtactgcaaagtcgccagtcactgctgcaaggtggcctctgcctggggcctccagaagctgctcctttaccctcttggtcc

SEQ ID NO: 51766 - DNA, 201 bp, Homo sapiens
ataaagagggatccgaacaagctcagaaagaaaatgaatttcaaggggctgaggccatggttctggagagcgttatgtttgccattctcgcagagaggtcrcttgggccaaaactctatggcatctttccccaaggccgactggagcagttcatcccgagccggcgattagatactgaagaattaagtttgccagatattt

SEQ ID NO: 51767 - DNA, 114 bp, Homo sapiens
agtcttagctgacttttttttactctgaactcttatttgaattgttttttgtgcatatatttctgctaccacagagattgtactatacaaataaaaaaatwaaaacccaacctc

SEQ ID NO: 51768 - DNA, 201 bp, Homo sapiens
agcaagagtaagcagtgttacttgcaggtactttggttaatgttgatttaaattttcatgaatgtgctggtgaacactgtgaccaggcttttgtagatggygatgtgttatagacggtgctcactcccaagggacagcaagtgagcagagatgtactgcaaagtcgccagtcactgctgcaaggtggcctctgcctggggc

SEQ ID NO: 51769 - DNA, 201 bp, Homo sapiens; identical to SEQ ID NO: 51766

SEQ ID NO: 51770 - DNA, 114 bp, Homo sapiens; identical to SEQ ID NO: 51767

SEQ ID NO: 51771 - DNA, 201 bp, Homo sapiens; identical to SEQ ID NO: 51768

SEQ ID NO: 51772 - DNA, 201 bp, Homo sapiens; identical to SEQ ID NO: 51766

SEQ ID NO: 51773 - DNA, 201 bp, Homo sapiens
ttgccatcagccagggcgaggtcaccctggccctcaggaacctccgggcctggatgaaggacgagcgtgtgcccaagaacctggccacgcagctggactcygccttcatccggaaggagccctttggcctggtcctcatcattgcgccctggaactatccgctgaacctgacgctggtgcccctcgtgggagccctcgctg

SEQ ID NO: 51774 - DNA, 201 bp, Homo sapiens
cggtgtgggcatggtccagaagacctcaccgccctcccaggatggacccccttggggacacgctgcggcgactgcgggaggccttccacgcggggcgcacrcggccagctgagttccgggctgcgcagctccaaggcctgggccgcttcctgcaagaaaacaagcagcttctgcacgacgcactggcccaggacctgcaca

SEQ ID NO: 51775 - DNA, 201 bp, Homo sapiens
gccctcccaggatggacccccttggggacacgctgcggcgactgcgggaggccttccacgcggggcgcacgcggccagctgagttccgggctgcgcagctycaaggcctgggccgcttcctgcaagaaaacaagcagcttctgcacgacgcactggcccaggacctgcacaagtcagccttcgagtcggaggtgtctgagg

SEQ ID NO: 51776 - DNA, 201 bp, Homo sapiens
tgccttttggaggagtgggtgccagtgggatgggccggtaccatggcaagttctccttcgacaccttctcccaccatcgcgcctgcctcctgcgcagcccrgggatggagaagctcaacgccctccgctacccgccgcaatcgccgcgccgcctgaggatgctgctggtggccatggaggcccaaggctgcagctgcacac

SEQ ID NO: 51777 - DNA, 201 bp, Homo sapiens
aggccatcgagttcatcaaccggcgggagaagcccctggccctgtacgccttctccaacagcagccaggtggtcaagcgggtgctgacccagaccagcagygggggcttctgtgggaacgacggcttcatgcacatgaccctggccagcctgccttttggaggagtgggtgccagtgggatgggccggtaccatggcaagt

SEQ ID NO: 51778 - DNA, 201 bp, Homo sapiens
ctccagggcacccctcaaagcagcgcctgcctcctccctcctgggtcttccctctccctgcctcagcctcctccctcagccgctcccaaccatgagagccraggtgggaggcatgggaaacagtgcagtgactcaccccctgcccccgcaccaaccacccatattcaggagaagaggacagacacggcacctctgagtcac

SEQ ID NO: 51779 - DNA, 201 bp, Homo sapiens
ctgcgcagctccaaggcctgggccgcttcctgcaagaaaacaagcagcttctgcacgacgcactggcccaggacctgcacaaggccacgcagctggactcygccttcatccggaaggagccctttggcctggtcctcatcattgcgccctggaactatccgctgaacctgacgctggtgcccctcgtgggagccctcgctg

SEQ ID NO: 51780 - DNA, 201 bp, Homo sapiens; identical to SEQ ID NO: 51774

SEQ ID NO: 51781 - DNA, 201 bp, Homo sapiens
gccctcccaggatggacccccttggggacacgctgcggcgactgcgggaggccttccacgcggggcgcacgcggccagctgagttccgggctgcgcagctycaaggcctgggccgcttcctgcaagaaaacaagcagcttctgcacgacgcactggcccaggacctgcacaaggccacgcagctggactccgccttcatcc

SEQ ID NO: 51782 - DNA, 201 bp, Homo sapiens
cctaacaagccggatgcttgagaaacctacatttggacaatgagaggctgctcctgcggcctgcgggccacctcctcttccttggctcctgctttcttttyagactatatcaacctacaactttagtcgggaagagggacaggggtggacctgagtttcgtctcctgtctctctggctgatgtcacctgaataaagccttc

SEQ ID NO: 51783 - DNA, 201 bp, Homo sapiens
cttgctacgtggacgacaactgcgacccccagaccgtggccaaccgcgtggcctggttccgctacttcaacgccggccagacctgcgtggcccccgactaygtcctatgcagccctgagatgcaggagaggctgctgcctgccctgcagagcaccatcacccgtttctatggcgacgacccccagagctccccaaacctgg

SEQ ID NO: 51784 - DNA, 201 bp, Homo sapiens
ccttcgacaccttctcccaccatcgcgcctgcctcctgcgcagcccggggatggagaagctcaacgccctccgctacccgccgcaatcgccgcgccgcctraggatgctgctggtggccatggaggcccaaggctgcagctgcacactgctctgagcccttccccaggcccaggctgtagaccaccatgacagctgtcgcc

SEQ ID NO: 51785 - DNA, 201 bp, Homo sapiens; identical to SEQ ID NO: 51776

SEQ ID NO: 51786 - DNA, 201 bp, Homo sapiens; identical to SEQ ID NO: 51777

SEQ ID NO: 51787 - DNA, 201 bp, Homo sapiens; identical to SEQ ID NO: 51778

SEQ ID NO: 51788 - DNA, 201 bp, Homo sapiens; identical to SEQ ID NO: 51773

SEQ ID NO: 51789 - DNA, 201 bp, Homo sapiens; identical to SEQ ID NO: 51774

SEQ ID NO: 51790 - DNA, 201 bp, Homo sapiens; identical to SEQ ID NO: 51775

SEQ ID NO: 51791 - DNA, 201 bp, Homo sapiens; identical to SEQ ID NO: 51782

SEQ ID NO: 51792 - DNA, 201 bp, Homo sapiens; identical to SEQ ID NO: 51783

SEQ ID NO: 51793 - DNA, 201 bp, Homo sapiens; identical to SEQ ID NO: 51784

SEQ ID NO: 51794 - DNA, 201 bp, Homo sapiens; identical to SEQ ID NO: 51776

SEQ ID NO: 51795 - DNA, 201 bp, Homo sapiens; identical to SEQ ID NO: 51777

SEQ ID NO: 51796 - DNA, 201 bp, Homo sapiens; identical to SEQ ID NO: 51778

SEQ ID NO: 51797 - DNA, 201 bp, Homo sapiens; identical to SEQ ID NO: 51773

SEQ ID NO: 51798 - DNA, 201 bp, Homo sapiens
cgggacagccaggaggaagggcagcttggcagagcctcaggatggacccccttggggacacgctgcggcgactgcgggaggccttccacgcggggcgcacrcggccagctgagttccgggctgcgcagctccaaggcctgggccgcttcctgcaagaaaacaagcagcttctgcacgacgcactggcccaggacctgcaca

SEQ ID NO: 51799 - DNA, 201 bp, Homo sapiens
agagcctcaggatggacccccttggggacacgctgcggcgactgcgggaggccttccacgcggggcgcacgcggccagctgagttccgggctgcgcagctycaaggcctgggccgcttcctgcaagaaaacaagcagcttctgcacgacgcactggcccaggacctgcacaagtcagccttcgagtcggaggtgtctgagg

SEQ ID NO: 51800 - DNA, 201 bp, Homo sapiens; identical to SEQ ID NO: 51782

SEQ ID NO: 51801 - DNA, 201 bp, Homo sapiens; identical to SEQ ID NO: 51783

SEQ ID NO: 51802 - DNA, 201 bp, Homo sapiens; identical to SEQ ID NO: 51784

SEQ ID NO: 51803 - DNA, 201 bp, Homo sapiens
tcgcccttaaaaacgaagcgcacgtcggggcagaaagctgaggcccaggctagaaagtggatctccttgagcgttaggttaaaaaaggtgtcgtcgaaggsccagagcaggatgtccgcatacgcaaggctctcggcccgcagcagggcgcgccagtgggttcgcgcgccctccccaacttcgtcggccccgcccgagcct

SEQ ID NO: 51804 - DNA, 201 bp, Homo sapiens
gggcgcgccagtgggttcgcgcgccctccccaacttcgtcggccccgcccgagcctgcgcccctgggcacgcccagcaagaacacgcggcgcaccagcgcyccctgcacgcgaccctccgcgccccacgtctggcgcacggcttggcgccgctcgaagtcctctgccaccgacttgacagcaataagcaggtccgggcggc

SEQ ID NO: 51805 - DNA, 201 bp, Homo sapiens
agctggtgatgatgcaggactcctctccagactttgaggacacttggcgcttcctggaaaaccgggttaatgatgcaatgaacatgggccacactgccaascaggtaaagtccacaggagaggcactggtgcaaggactcatgggtgcagcagtgacgctcaagaacttgacaggtctaaaccagcgtcggtgagaggaag

SEQ ID NO: 51806 - DNA, 201 bp, Homo sapiens
tggcggcggcggcggtatctggtgcgcttggccgggcgggctggaggctcctgcagctgcgatgcctgcccgtggcccgttgccgacaagccctggtgccrcgtgccttccatgcttcagctgtggggctaaggtcttcagatgagcagaagcagcagcctcccaactcattttctcagcagcattctgagacacaggggg

SEQ ID NO: 51807 - DNA, 201 bp, Homo sapiens
tgctccctcacaacatcccgtccagcctgagcctgctcaccagcatggtggatgacatgtggcattacgctggggaccagtccactgattttaactggtayacccgccgagccatgctggctgccatctacaacacaacagagctggtgatgatgcaggactcctctccagactttgaggacacttggcgcttcctggaaa

SEQ ID NO: 51808 - DNA, 201 bp, Homo sapiens
cagatgagcagaagcagcagcctcccaactcattttctcagcagcattctgagacacagggggcagaaaaacctgatccagagtcttctcattcacccccsaggtatacagaccagggcggcgaggaggaggaggactatgaaagtgaggagcagttgcagcaccgcatcctgacggcagcccttgagtttgtgcccgccc

SEQ ID NO: 51809 - DNA, 201 bp, Homo sapiens
cgccacctcaaggtgacagctcatctccagcacagcacaggcgtgtgcacacagaggtgttccttgcagccccctccctctcaggtgtcctgagatgctgytcctgggagccccctcagaaaactgcctcacctgagacaagtgcctgctggacagaggtgtgattccaggcctggtgtcacatgacaccagcatgcattg

SEQ ID NO: 51810 - DNA, 201 bp, Homo sapiens
accttggggctcccaagccagagtcaaggtctgacgccacctcaaggtgacagctcatctccagcacagcacaggcgtgtgcacacagaggtgttccttgmagccccctccctctcaggtgtcctgagatgctgctcctgggagccccctcagaaaactgcctcacctgagacaagtgcctgctggacagaggtgtgattc

SEQ ID NO: 51811 - DNA, 107 bp, Homo sapiens
ggtgtgattccaggcctggtgtcacatgacaccagcatgcattgcaggattattagtgtattttgagtctgtaaaaataataaatatgtttgaagtagttwcccatt

SEQ ID NO: 51812 - DNA, 201 bp, Homo sapiens
gagaggaaggggtataagctacaatgcctagaagagaatgagcggacagattgaaagagctttgaaaagtataaggtgccatccacataacctggtgttcrcgagaacacactaaaggactcctgagtcactaccacagccacctggaaaccacaaggcatttgatgctaccgttctggtcagggattgggctgcttcttc

SEQ ID NO: 51813 - DNA, 201 bp, Homo sapiens
acaccgacctggcggtggccaattcgattcggagggtcttcatcgctgaggttcccataatagccattgactgggttcagattgatgccaattcctcagtycttcatgatgaattcattgctcacaggcttggattaattcccctcattagtgatgacattgtggacaagctgcagtactctcgggactgcacatgtgagg

SEQ ID NO: 51814 - DNA, 126 bp, Homo sapiens
caggaggccgcagaagacgctcggcrgttctggcctccgagcagcaggcggcgctgtgagtcgtctttgcggaagccgcggaggcctcgctgactgacttccggtgttggcggtggcgccgcgcag

SEQ ID NO: 51815 - DNA, 201 bp, Homo sapiens; identical to SEQ ID NO: 51805

SEQ ID NO: 51816 - DNA, 201 bp, Homo sapiens
ggtgtcctgagatgctgctcctgggagccccctcagaaaactgcctcacctgagacaagtgcctgctggacagagcaggaggccgcagaagacgctcggcrgttctggcctccgagcagcaggcggcgctgtgagtcgtctttgcggaagccgcggaggcctcgctgactgacttccggtgttggcggtggcgccgcgcag

SEQ ID NO: 51817 - DNA, 201 bp, Homo sapiens; identical to SEQ ID NO: 51808

SEQ ID NO: 51818 - DNA, 201 bp, Homo sapiens
cgccacctcaaggtgacagctcatctccagcacagcacaggcgtgtgcacacagaggtgttccttgcagccccctccctctcaggtgtcctgagatgctgytcctgggagccccctcagaaaactgcctcacctgagacaagtgcctgctggacagagcaggaggccgcagaagacgctcggcagttctggcctccgagca

SEQ ID NO: 51819 - DNA, 201 bp, Homo sapiens
accttggggctcccaagccagagtcaaggtctgacgccacctcaaggtgacagctcatctccagcacagcacaggcgtgtgcacacagaggtgttccttgmagccccctccctctcaggtgtcctgagatgctgctcctgggagccccctcagaaaactgcctcacctgagacaagtgcctgctggacagagcaggaggcc

SEQ ID NO: 51820 - DNA, 166 bp, Homo sapiens
acaagttgcaggttcgaaattacaatcgtgagctcagtggcccgttgccgacaagccctggtgccrcgtgccttccatgcttcagctgtggggctaaggtcttcagatgagcagaagcagcagcctcccaactcattttctcagcagcattctgagacacaggggg

SEQ ID NO: 51821 - DNA, 201 bp, Homo sapiens; identical to SEQ ID NO: 51813

SEQ ID NO: 51822 - DNA, 201 bp, Homo sapiens; identical to SEQ ID NO: 51807

SEQ ID NO: 51823 - DNA, 201 bp, Homo sapiens; identical to SEQ ID NO: 51812

SEQ ID NO: 51824 - DNA, 149 bp, Homo sapiens
agctggtgatgatgcaggactcctctccagactttgaggacacttggcgcttcctggaaaaccgggttaatgatgcaatgaacatgggccacactgccaascaggtagtgcctgctggacagaggtgtgattccaggcctggtgtcaca

SEQ ID NO: 51825 - DNA, 201 bp, Homo sapiens; identical to SEQ ID NO: 51806

SEQ ID NO: 51826 - DNA, 201 bp, Homo sapiens; identical to SEQ ID NO: 51807

SEQ ID NO: 51827 - DNA, 201 bp, Homo sapiens; identical to SEQ ID NO: 51808

SEQ ID NO: 51828 - DNA, 201 bp, Homo sapiens; identical to SEQ ID NO: 51805

SEQ ID NO: 51829 - DNA, 201 bp, Homo sapiens; identical to SEQ ID NO: 51816

SEQ ID NO: 51830 - DNA, 201 bp, Homo sapiens; identical to SEQ ID NO: 51808

SEQ ID NO: 51831 - DNA, 201 bp, Homo sapiens; identical to SEQ ID NO: 51818

SEQ ID NO: 51832 - DNA, 201 bp, Homo sapiens; identical to SEQ ID NO: 51819

SEQ ID NO: 51833 - DNA, 166 bp, Homo sapiens; identical to SEQ ID NO: 51820

SEQ ID NO: 51834 - DNA, 201 bp, Homo sapiens; identical to SEQ ID NO: 51813

SEQ ID NO: 51835 - DNA, 201 bp, Homo sapiens; identical to SEQ ID NO: 51807

SEQ ID NO: 51836 - DNA, 201 bp, Homo sapiens; identical to SEQ ID NO: 51812

SEQ ID NO: 51837 - DNA, 201 bp, Homo sapiens; identical to SEQ ID NO: 51805

SEQ ID NO: 51838 - DNA, 201 bp, Homo sapiens; identical to SEQ ID NO: 51816

SEQ ID NO: 51839 - DNA, 201 bp, Homo sapiens; identical to SEQ ID NO: 51808

SEQ ID NO: 51840 - DNA, 201 bp, Homo sapiens; identical to SEQ ID NO: 51818

SEQ ID NO: 51841 - DNA, 201 bp, Homo sapiens; identical to SEQ ID NO: 51819

SEQ ID NO: 51842 - DNA, 201 bp, Homo sapiens; identical to SEQ ID NO: 51806

SEQ ID NO: 51843 - DNA, 201 bp, Homo sapiens; identical to SEQ ID NO: 51807

SEQ ID NO: 51844 - DNA, 201 bp, Homo sapiens
taaggctaccgagggtggccaattcgattcggagggtcttcatcgctgaggttcccataatagccattgactgggttcagattgatgccaattcctcagtycttcatgatgaattcattgctcacaggcttggattaattcccctcattagtgatgacattgtggacaagctgcagtactctcgggactgcacatgtgagg

SEQ ID NO: 51845 - DNA, 201 bp, Homo sapiens; identical to SEQ ID NO: 51812

SEQ ID NO: 51846 - DNA, 201 bp, Homo sapiens; identical to SEQ ID NO: 51805

SEQ ID NO: 51847 - DNA, 201 bp, Homo sapiens; identical to SEQ ID NO: 51816

SEQ ID NO: 51848 - DNA, 201 bp, Homo sapiens; identical to SEQ ID NO: 51808

SEQ ID NO: 51849 - DNA, 201 bp, Homo sapiens; identical to SEQ ID NO: 51818

SEQ ID NO: 51850 - DNA, 201 bp, Homo sapiens; identical to SEQ ID NO: 51819

SEQ ID NO: 51851 - DNA, 166 bp, Homo sapiens; identical to SEQ ID NO: 51820

SEQ ID NO: 51852 - DNA, 201 bp, Homo sapiens; identical to SEQ ID NO: 51813

SEQ ID NO: 51853 - DNA, 201 bp, Homo sapiens
ccctcacaacatcccgtccagcctgagcctgctcaccagcatggtggatgacatgtggcattacgctggggaccagtccactgatgtgatttaactggtayacccgccgagccatgctggctgccatctacaacacaacagagctggtgatgatgcaggactcctctccagactttgaggacacttggcgcttcctggaaa

SEQ ID NO: 51854 - DNA, 201 bp, Homo sapiens; identical to SEQ ID NO: 51812

SEQ ID NO: 51855 - DNA, 201 bp, Homo sapiens; identical to SEQ ID NO: 51813

SEQ ID NO: 51856 - DNA, 126 bp, Homo sapiens; identical to SEQ ID NO: 51814

SEQ ID NO: 51857 - DNA, 201 bp, Homo sapiens; identical to SEQ ID NO: 51805

SEQ ID NO: 51858 - DNA, 201 bp, Homo sapiens; identical to SEQ ID NO: 51816

SEQ ID NO: 51859 - DNA, 201 bp, Homo sapiens; identical to SEQ ID NO: 51808

SEQ ID NO: 51860 - DNA, 201 bp, Homo sapiens; identical to SEQ ID NO: 51818

SEQ ID NO: 51861 - DNA, 201 bp, Homo sapiens; identical to SEQ ID NO: 51819

SEQ ID NO: 51862 - DNA, 166 bp, Homo sapiens; identical to SEQ ID NO: 51820

SEQ ID NO: 51863 - DNA, 201 bp, Homo sapiens; identical to SEQ ID NO: 51813

SEQ ID NO: 51864 - DNA, 201 bp, Homo sapiens; identical to SEQ ID NO: 51807

SEQ ID NO: 51865 - DNA, 201 bp, Homo sapiens; identical to SEQ ID NO: 51812

SEQ ID NO: 51866 - DNA, 201 bp, Homo sapiens
cggcttctgccaggaggcctgtcccgtggatgccatcgtcgaggcacggccccaactttgagttctccacggagacccatgaggagctgctgtacaacaaygagaagttgctcaacaacggggacaagtgggaggccgagatcgccgccaacatccaggctgactacttgtatcggtgacgccccaccggcccgcagcccc

SEQ ID NO: 51867 - DNA, 201 bp, Homo sapiens
agccgccggaccacccgctatgacatcgacatgaccaagtgcatctactgcggcttctgccaggaggcctgtcccgtggatgccatcgtcgaggcacggcmccaactttgagttctccacggagacccatgaggagctgctgtacaacaaggagaagttgctcaacaacggggacaagtgggaggccgagatcgccgccaa

SEQ ID NO: 51868 - DNA, 201 bp, Homo sapiens
cggaccacccgctatgacatcgacatgaccaagtgcatctactgcggcttctgccaggaggcctgtcccgtggatgccatcgtcgaggcacggccccaacyttgagttctccacggagacccatgaggagctgctgtacaacaaggagaagttgctcaacaacggggacaagtgggaggccgagatcgccgccaacatcca

SEQ ID NO: 51869 - DNA, 201 bp, Homo sapiens
ccgcccaggccatcaccatcgaggctgagccaagagctgatggcagccgccggaccacccgctatgacatcgacatgaccaagtgcatctactgcggcttmtgccaggaggcctgtcccgtggatgccatcgtcgaggcacggccccaactttgagttctccacggagacccatgaggagctgctgtacaacaaggagaag

SEQ ID NO: 51870 - DNA, 201 bp, Homo sapiens
actgcggcttctgccaggaggcctgtcccgtggatgccatcgtcgagggccccaactttgagttctccacggagacccatgaggagctgctgtacaacaaygagaagttgctcaacaacggggacaagtgggaggccgagatcgccgccaacatccaggctgactacttgtatcggtgacgccccaccggcccgcagcccc

SEQ ID NO: 51871 - DNA, 201 bp, Homo sapiens
tggcagccgccggaccacccgctatgacatcgacatgaccaagtgcatctactgcggcttctgccaggaggcctgtcccgtggatgccatcgtcgagggcmccaactttgagttctccacggagacccatgaggagctgctgtacaacaaggagaagttgctcaacaacggggacaagtgggaggccgagatcgccgccaa

SEQ ID NO: 51872 - DNA, 201 bp, Homo sapiens
cccttctacctcccctaccctatgctaaggggactcgtctccacctcgtaaaggaaactccccaagggaatccctgtcccctattttcctatccttctacycttccaagacagtcctagcctatagaactcctacctcccatcccctgaggtggtccccattcctccctcccttcctccccccgccatgctccagttgtgg

SEQ ID NO: 51873 - DNA, 201 bp, Homo sapiens
tcaacttgggcttctcgggcaagttctatcatactgggacagaggaggaggatgcaggggacgacatgctgctgaagcaccgcaaagagttctggtggttyccccacatgtggagccacatgcagccacacctgttccacaatcgctccgtgctggctgaccagatgaggctcaacaaacagtttgctctggagcatggga

SEQ ID NO: 51874 - DNA, 201 bp, Homo sapiens
gtaccccacataatagtgctaggtacctttgacccatcatcttgggaggtggggaggaatgagagggtccaggcagggtgtaggggaatgtattagtccartgagatttccctcttcatccgcagcagtgtatctattctatacctggctatgggagagaccccttgcatgggagggaccccttgctatggcccctttagc

SEQ ID NO: 51875 - DNA, 201 bp, Homo sapiens
tgccccctgcttccccttctacctcccctaccctatgctaaggggactcgtctccacctcgtaaaggaaactccccaagggaatccctgtcccctattttyctatccttctacccttccaagacagtcctagcctatagaactcctacctcccatcccctgaggtggtccccattcctccctcccttcctccccccgccat

SEQ ID NO: 51876 - DNA, 201 bp, Homo sapiens
agccagtgccctcgtggcttcgggaagaactgcagcattccagtctgggctgatgtcccagcctcccataccagcaaaatgccccctgcttccctaagggkcaggtccagagcagggcccacaagggggattagagtggcctggcccctccccctctacctcagtagcccccaggcctgagatggctgagaagggaagggt

SEQ ID NO: 51877 - DNA, 201 bp, Homo sapiens
agatttgcagcctgaagccatgggccagggggccatggtgacctgagacaagtggactctgtatagttgccccctgcttccccttctacctcccctaccctatgctaaggggactcgtctccacctcgtaaaggaaactccccaagggaatccctgtcccctattttcctatccttctacccttccaagacagtcctagcc

SEQ ID NO: 51878 - DNA, 201 bp, Homo sapiens
aagatttgcagcctgaagccatgggccagggggccatggtgacctgagacaagtggactctgtatagttgccccctgcttccccttctacctcccctaccctatgctaaggggactcgtctccacctcgtaaaggaaactccccaagggaatccctgtcccctattttcctatccttctacccttccaagacagtcctagc

SEQ ID NO: 51879 - DNA, 201 bp, Homo sapiens
tgtcccagcctcccataccagcaaaatgccccctgcttccctaagggtcaggtccagagcagggcccacaagggggattagagtggcctggcccctccccytctacctcagtagcccccaggcctgagatggctgagaagggaagggtatccttttcccacagttctgggacaaataaaggggcttcctttggtaccccac

SEQ ID NO: 51880 - DNA, 201 bp, Homo sapiens; identical to SEQ ID NO: 51872

SEQ ID NO: 51881 - DNA, 201 bp, Homo sapiens; identical to SEQ ID NO: 51873

SEQ ID NO: 51882 - DNA, 201 bp, Homo sapiens; identical to SEQ ID NO: 51874

SEQ ID NO: 51883 - DNA, 201 bp, Homo sapiens; identical to SEQ ID NO: 51875

SEQ ID NO: 51884 - DNA, 201 bp, Homo sapiens; identical to SEQ ID NO: 51876

SEQ ID NO: 51885 - DNA, 201 bp, Homo sapiens; identical to SEQ ID NO: 51877

SEQ ID NO: 51886 - DNA, 201 bp, Homo sapiens; identical to SEQ ID NO: 51878

SEQ ID NO: 51887 - DNA, 201 bp, Homo sapiens; identical to SEQ ID NO: 51879

SEQ ID NO: 51888 - DNA, 201 bp, Homo sapiens; identical to SEQ ID NO: 51872

SEQ ID NO: 51889 - DNA, 201 bp, Homo sapiens; identical to SEQ ID NO: 51873

SEQ ID NO: 51890 - DNA, 201 bp, Homo sapiens; identical to SEQ ID NO: 51875

SEQ ID NO: 51891 - DNA, 201 bp, Homo sapiens; identical to SEQ ID NO: 51877

SEQ ID NO: 51892 - DNA, 201 bp, Homo sapiens; identical to SEQ ID NO: 51878

SEQ ID NO: 51893 - DNA, 201 bp, Homo sapiens
tggcctctaagggagctctgtttctcaaggtgcaggtgggaagcacacctcaggaccaaagaatcgtcgggtacatcgcctgcacacacctgcatgccccrcaagaggacagcgccatccggtgtgggcagctggacctgcttcaggactggctggctgatttccgaaaatctacctcctcgtccagcgcagccaaccccg

SEQ ID NO: 51894 - DNA, 201 bp, Homo sapiens
ctaccagccagcccagggctcttcccagggtctcgcattcaagggcaattacattttaaaaagaaaaacagaaaaaggttaatcacaaaaccaaccctcayttcacagggtctgtaagtcactcatagaactttgctcttcccgagacagggtcccttccccagctcaggcacaacagagtctggcaggctctggcaccct

SEQ ID NO: 51895 - DNA, 201 bp, Homo sapiens
tgctctgcactgccctcttcacgcccatctacctggccctcctggtggcctcgctgccctttgcgtttctcggctttctcttctggtccccactgcagtcrgcccgccggccctacatctattcacggctggaagacaagggcctggccggtggggcagccctgctcagtgaatggaagggcacggggcctggcaaaagct

SEQ ID NO: 51896 - DNA, 201 bp, Homo sapiens
ttcacggctggaagacaagggcctggccggtggggcagccctgctcagtgaatggaagggcacggggcctggcaaaagcttctgctttgccactgccaacstctgcctcctgcccgactcactcgccagggtcaacaacctttttaacacccaagcgcgggccaaggagatcgggcagagaatccgcaatggggccgcccg

SEQ ID NO: 51897 - DNA, 201 bp, Homo sapiens
gcactgtgtgtcctgggcccttatctttccatgctactggctggtggaccggctcgctgcctccttcatacccaccacctacgagaagcgccagcgggcasacgacccgtgctgcctgcagctgctctgcactgccctcttcacgcccatctacctggccctcctggtggcctcgctgccctttgcgtttctcggctttct

SEQ ID NO: 51898 - DNA, 201 bp, Homo sapiens
ggggctgcggctctggcctcccaggcccatcctcaacagctaccccagccaacaccaaggccacaaggggaccccggcctaggaggcaggaagccaaggtrcagagagcagcctggccctcaccagtgcgcaagctggggcagcaaggctgacagttgctgcatgcccagggcagggtgtggtactggcacccaagttcag

SEQ ID NO: 51899 - DNA, 201 bp, Homo sapiens
gtctggcaggctctggcaccctgggcctcctccgggagcctcccatttgggcagtggagccataaacggggatccgagaagagagtatccactttttttttacaggaagaagggactcacagcataaacgggggtgggggggatcctgattttgaaaataatctatttgtagcttctcttctatcaaaaccaacacatcct

SEQ ID NO: 51900 - DNA, 201 bp, Homo sapiens
ctgcctaaccagtgccattctttcacaacacgattttctacaaatctacagcacaaccgagtttgtaacccgtgggttagtatgaggaccgggttcgtgtrctctctgtatctcctcttaagcttcgtccagggttctttatttttgtctgctgccaatgtcgtctcgcatgcctgcaccctcgcatgcacgctgcccgca

SEQ ID NO: 51901 - DNA, 201 bp, Homo sapiens
ggttcgtgtactctctgtatctcctcttaagcttcgtccagggttctttatttttgtctgctgccaatgtcgtctcgcatgcctgcaccctcgcatgcacrctgcccgcatgccacgtgccacgctgtagccacagaccccttgctcgggcctcacccaaggccaaactccaaacacaatcagaaccagccaaagaagcac

SEQ ID NO: 51902 - DNA, 201 bp, Homo sapiens
tgccctgatgctgtgccttgtcacccattgagctgcaagagggaccaagagggggccacgcagccagccagatgcctggccctgtgctggggcagacaacrctgcagagcccagggagcctggcgctaggacgtgcgtccttgtgacactggcctgtctgaactcacctggcctgggaagcaccgtctgcccgggcccaag

SEQ ID NO: 51903 - DNA, 201 bp, Homo sapiens
gttttatcacccagctgtccggcctgacggaccacctgccagtagccatgcgactgatggtgtcttcgggggaggaggaggcatagaccgtccggagcagyggggcctctgccagcccttgcagctgcagcccatccctgggccatgtcccctccatcgagtgcccggtgcttgggggaggagggcagggacagggaggga

SEQ ID NO: 51904 - DNA, 201 bp, Homo sapiens
ttttctacaaatctacagcacaaccgagtttgtaacccgtgggttagtatgaggaccgggttcgtgtactctctgtatctcctcttaagcttcgtccaggrttctttatttttgtctgctgccaatgtcgtctcgcatgcctgcaccctcgcatgcacgctgcccgcatgccacgtgccacgctgtagccacagacccctt

SEQ ID NO: 51905 - DNA, 201 bp, Homo sapiens
tagaactttgctcttcccgagacagggtcccttccccagctcaggcacaacagagtctggcaggctctggcaccctgggcctcctccgggagcctcccatytgggcagtggagccataaacggggatccgagaagagagtatccactttttttttacaggaagaagggactcacagcataaacgggggtgggggggatcct

SEQ ID NO: 51906 - DNA, 201 bp, Homo sapiens
acctgccagtagccatgcgactgatggtgtcttcgggggaggaggaggcatagaccgtccggagcagtggggcctctgccagcccttgcagctgcagcccrtccctgggccatgtcccctccatcgagtgcccggtgcttgggggaggagggcagggacagggagggagccacagtcagtgcccgggaacctggaagctgc

SEQ ID NO: 51907 - DNA, 201 bp, Homo sapiens
gcacggtagcaggcgccgccgtgctgctcaaggactatgtcaccggtggggcttgccccagcaaggccaccatccctgggaagacggtcatcgtgacgggygccaacacaggcatcgggaagcagaccgccttggaactggccaggagaggaggcaacatcatcctggcctgccgagacatggagaagtgtgaggcggcag

SEQ ID NO: 51908 - DNA, 201 bp, Homo sapiens
cccgcgccccgcccctcgcagcccagttccggacgcgggcccagccgcgcctgcgcttccgctcgcctgtggctgcgtcgcgcgctcttcctcggagctayccaggcggctggtgtgcagcaagctccgcgccgaccccggacgcctgacgcctgacgcctgctacccggcccggcatgagccgctacctgctgccgctgt

SEQ ID NO: 51909 - DNA, 201 bp, Homo sapiens
tctcgtccctggcccatgttgctgggcacatagactttgacgacttgaactggcagacgaggaagtataacaccaaagccgcctactgccagagcaagctygccatcgtcctcttcaccaaggagctgagccggcggctgcaaggctctggtgtgactgtcaacgccctgcaccccggcgtggccaggacagagctgggca

SEQ ID NO: 51910 - DNA, 201 bp, Homo sapiens
gcctgtggctgcgtcgcgcgctcttcctcggagctacccaggcggctggtgtgcagcaagctccgcgccgaccccggacgcctgacgcctgacgcctgctmcccggcccggcatgagccgctacctgctgccgctgtcggcgctgggcacggtagcaggcgccgccgtgctgctcaaggactatgtcaccggtggggcttg

SEQ ID NO: 51911 - DNA, 201 bp, Homo sapiens
gcacatagactttgacgacttgaactggcagacgaggaagtataacaccaaagccgcctactgccagagcaagctcgccatcgtcctcttcaccaaggagytgagccggcggctgcaaggctctggtgtgactgtcaacgccctgcaccccggcgtggccaggacagagctgggcagacacacgggcatccatggctccac

SEQ ID NO: 51912 - DNA, 201 bp, Homo sapiens
ccccggcccccgaggctgaggatgaggaggtggcccggaggctttgggctgaaagtgcccgcctggtgggcttagaggctccctctgtgagggagcagccmctccccagataacctctggagcagatttgaaagccaggatggcgcctccagaccgaggacagctgtccgccatgcccgcagcttcctggcactacctgag

SEQ ID NO: 51913 - DNA, 201 bp, Homo sapiens
cctgagccgggagacccaggactggcggccgccatgcccgcagtaggttctagggggcggtgctggccgcagtggactggcctgcaggtgagcactgcccygggctctggctggttccgtctgctctgctgccagcaggggagaggggccatctgatgcttcccctgggaatctaaactgggaatggccgaggaggaaggg

SEQ ID NO: 51914 - DNA, 201 bp, Homo sapiens
cagcgagctgttgtctggctatggcatggctgtgccgggggtgtttgctgagggcttcctgtgccagagcccagccagagagcaggtgcaggtgtcatccygagttcaggctctgcacggcatggagtgggaaccccaccagctgctgctacaggacctgggattgcctgggactcccaccttcctatcaattctcatggt

SEQ ID NO: 51915 - DNA, 201 bp, Homo sapiens
accgatgctcataggtcccgtccctaggatccccgccccctccgcccgcgccccgcccctcgcagcccagttccggacgcgggcccagccgcgcctgcgcytccgctcgcctgtggctgcgtcgcgcgctcttcctcggagctacccaggcggctggtgtgcagcaagctccgcgccgaccccggacgcctgacgcctgac

SEQ ID NO: 51916 - DNA, 201 bp, Homo sapiens
tctggctggttccgtctgctctgctgccagcaggggagaggggccatctgatgcttcccctgggaatctaaactgggaatggccgaggaggaaggggctcygtgcacttgcaggccacgtcaggagagccagcggtgcctgtcggggagggttccaaggtgctccgtgaagagcatgggcaagttgtctgacacttggtgg

SEQ ID NO: 51917 - DNA, 201 bp, Homo sapiens
tgaagagcatgggcaagttgtctgacacttggtggattcttgggtccctgtgggaccttgtgcatgcatggtcctctctgagccttggtttcttcagcagygagatgctcagaataactgctgtctcccatgatggtgtggtacagcgagctgttgtctggctatggcatggctgtgccgggggtgtttgctgagggcttc

SEQ ID NO: 51918 - DNA, 201 bp, Homo sapiens
caggagaggaggcaacatcatcctggcctgccgagacatggagaagtgtgaggcggcagcaaaggacatccgcggggagaccctcaatcaccatgtcaacrcccggcacctggacttggcttccctcaagtctatccgagagtttgcagcaaagatcattgaagaggaggagcgagtggacattctaatcaacaacgcggg

SEQ ID NO: 51919 - DNA, 201 bp, Homo sapiens
ccaggagaggaggcaacatcatcctggcctgccgagacatggagaagtgtgaggcggcagcaaaggacatccgcggggagaccctcaatcaccatgtcaamgcccggcacctggacttggcttccctcaagtctatccgagagtttgcagcaaagatcattgaagaggaggagcgagtggacattctaatcaacaacgcgg

SEQ ID NO: 51920 - DNA, 201 bp, Homo sapiens
tcatcggcgaatttcactctgtcgccaggctggaatgcagtagggcaatctcggctcactgcaacctccacctcccgagttcaagtgatgctcctgcttcrgcctcctgagtagctgggactacagaactgcgtagcgccttatacgctgcggcaagtgtgacgtcattcgaacaaaccataggccccgcccccggactag

SEQ ID NO: 51921 - DNA, 201 bp, Homo sapiens
cccagccgcgcctgcgcttccgctcgcctgtggctgcgtcgcgcgctcttcctcggagctacccaggcggctggtgtgcagcaagctccgcgccgacccckgacgcctgacgcctgacgcctgctacccggcccggcatgagccgctacctgctgccgctgtcggcgctgggcacggtagcaggcgccgccgtgctgctca

SEQ ID NO: 51922 - DNA, 201 bp, Homo sapiens
tgcgtcgcgcgctcttcctcggagctacccaggcggctggtgtgcagcaagctccgcgccgaccccggacgcctgacgcctgacgcctgctacccggcccsgcatgagccgctacctgctgccgctgtcggcgctgggcacggtagcaggcgccgccgtgctgctcaaggactatgtcaccggtggggcttgccccagcaa

SEQ ID NO: 51923 - DNA, 201 bp, Homo sapiens
gcttcggcctcctgagtagctgggactacagggactatgtcaccggtggggcttgccccagcaaggccaccatccctgggaagacggtcatcgtgacgggygccaacacaggcatcgggaagcagaccgccttggaactggccaggagaggaggcaacatcatcctggcctgccgagacatggagaagtgtgaggcggcag

SEQ ID NO: 51924 - DNA, 201 bp, Homo sapiens; identical to SEQ ID NO: 51909

SEQ ID NO: 51925 - DNA, 201 bp, Homo sapiens; identical to SEQ ID NO: 51917

SEQ ID NO: 51926 - DNA, 201 bp, Homo sapiens; identical to SEQ ID NO: 51916

SEQ ID NO: 51927 - DNA, 201 bp, Homo sapiens; identical to SEQ ID NO: 51918

SEQ ID NO: 51928 - DNA, 201 bp, Homo sapiens; identical to SEQ ID NO: 51919

SEQ ID NO: 51929 - DNA, 201 bp, Homo sapiens; identical to SEQ ID NO: 51911

SEQ ID NO: 51930 - DNA, 201 bp, Homo sapiens
ggggttcggaatttcactctgtcgccaggctggaatgcagtagggcaatctcggctcactgcaacctccacctcccgagttcaagtgatgctcctgcttcrgcctcctgagtagctgggactacagggactatgtcaccggtggggcttgccccagcaaggccaccatccctgggaagacggtcatcgtgacgggcgccaa

SEQ ID NO: 51931 - DNA, 201 bp, Homo sapiens; identical to SEQ ID NO: 51912

SEQ ID NO: 51932 - DNA, 201 bp, Homo sapiens; identical to SEQ ID NO: 51913

SEQ ID NO: 51933 - DNA, 201 bp, Homo sapiens; identical to SEQ ID NO: 51914

SEQ ID NO: 51934 - DNA, 201 bp, Homo sapiens; identical to SEQ ID NO: 51907

SEQ ID NO: 51935 - DNA, 201 bp, Homo sapiens; identical to SEQ ID NO: 51908

SEQ ID NO: 51936 - DNA, 201 bp, Homo sapiens; identical to SEQ ID NO: 51909

SEQ ID NO: 51937 - DNA, 201 bp, Homo sapiens; identical to SEQ ID NO: 51910

SEQ ID NO: 51938 - DNA, 201 bp, Homo sapiens; identical to SEQ ID NO: 51911

SEQ ID NO: 51939 - DNA, 201 bp, Homo sapiens; identical to SEQ ID NO: 51912

SEQ ID NO: 51940 - DNA, 201 bp, Homo sapiens; identical to SEQ ID NO: 51913

SEQ ID NO: 51941 - DNA, 201 bp, Homo sapiens; identical to SEQ ID NO: 51914

SEQ ID NO: 51942 - DNA, 201 bp, Homo sapiens; identical to SEQ ID NO: 51915

SEQ ID NO: 51943 - DNA, 201 bp, Homo sapiens; identical to SEQ ID NO: 51916

SEQ ID NO: 51944 - DNA, 201 bp, Homo sapiens; identical to SEQ ID NO: 51917

SEQ ID NO: 51945 - DNA, 201 bp, Homo sapiens; identical to SEQ ID NO: 51918

SEQ ID NO: 51946 - DNA, 201 bp, Homo sapiens; identical to SEQ ID NO: 51919

SEQ ID NO: 51947 - DNA, 201 bp, Homo sapiens
ggggttcggaatttcactctgtcgccaggctggaatgcagtagggcaatctcggctcactgcaacctccacctcccgagttcaagtgatgctcctgcttcrgcctcctgagtagctgggactacagaactgcgtagcgccttatacgctgcggcaagtgtgacgtcattcgaacaaaccataggccccgcccccggactag

SEQ ID NO: 51948 - DNA, 201 bp, Homo sapiens; identical to SEQ ID NO: 51921

SEQ ID NO: 51949 - DNA, 201 bp, Homo sapiens; identical to SEQ ID NO: 51922

SEQ ID NO: 51950 - DNA, 201 bp, Homo sapiens; identical to SEQ ID NO: 51923

SEQ ID NO: 51951 - DNA, 201 bp, Homo sapiens; identical to SEQ ID NO: 51909

SEQ ID NO: 51952 - DNA, 201 bp, Homo sapiens; identical to SEQ ID NO: 51917

SEQ ID NO: 51953 - DNA, 201 bp, Homo sapiens; identical to SEQ ID NO: 51916

SEQ ID NO: 51954 - DNA, 201 bp, Homo sapiens; identical to SEQ ID NO: 51918

SEQ ID NO: 51955 - DNA, 201 bp, Homo sapiens; identical to SEQ ID NO: 51919

SEQ ID NO: 51956 - DNA, 201 bp, Homo sapiens; identical to SEQ ID NO: 51911

SEQ ID NO: 51957 - DNA, 201 bp, Homo sapiens; identical to SEQ ID NO: 51930

SEQ ID NO: 51958 - DNA, 201 bp, Homo sapiens; identical to SEQ ID NO: 51912

SEQ ID NO: 51959 - DNA, 201 bp, Homo sapiens; identical to SEQ ID NO: 51913

SEQ ID NO: 51960 - DNA, 201 bp, Homo sapiens; identical to SEQ ID NO: 51914

SEQ ID NO: 51961 - DNA, 201 bp, Homo sapiens; identical to SEQ ID NO: 51907

SEQ ID NO: 51962 - DNA, 201 bp, Homo sapiens; identical to SEQ ID NO: 51908

SEQ ID NO: 51963 - DNA, 201 bp, Homo sapiens; identical to SEQ ID NO: 51909

SEQ ID NO: 51964 - DNA, 201 bp, Homo sapiens; identical to SEQ ID NO: 51910

SEQ ID NO: 51965 - DNA, 201 bp, Homo sapiens; identical to SEQ ID NO: 51911

SEQ ID NO: 51966 - DNA, 201 bp, Homo sapiens; identical to SEQ ID NO: 51912

SEQ ID NO: 51967 - DNA, 201 bp, Homo sapiens; identical to SEQ ID NO: 51913

SEQ ID NO: 51968 - DNA, 201 bp, Homo sapiens; identical to SEQ ID NO: 51914

SEQ ID NO: 51969 - DNA, 201 bp, Homo sapiens; identical to SEQ ID NO: 51915

SEQ ID NO: 51970 - DNA, 201 bp, Homo sapiens; identical to SEQ ID NO: 51916

SEQ ID NO: 51971 - DNA, 201 bp, Homo sapiens; identical to SEQ ID NO: 51917

SEQ ID NO: 51972 - DNA, 201 bp, Homo sapiens; identical to SEQ ID NO: 51918

SEQ ID NO: 51973 - DNA, 201 bp, Homo sapiens; identical to SEQ ID NO: 51919

SEQ ID NO: 51974 - DNA, 201 bp, Homo sapiens; identical to SEQ ID NO: 51920

SEQ ID NO: 51975 - DNA, 201 bp, Homo sapiens; identical to SEQ ID NO: 51921

SEQ ID NO: 51976 - DNA, 201 bp, Homo sapiens; identical to SEQ ID NO: 51922

SEQ ID NO: 51977 - DNA, 201 bp, Homo sapiens
ccaaaataaaactaacagtctatgatgtcaaggataagtctcatgacaccgttcgaaccagtgtcctaccagaacataaggatcccccgccagaagttggscgaagtttcttgggctatgccagttttaaagtgggagagctgctgaagtcaaaggagcaattgctggtcctgagcctgagaacttcagatggtggcaaag

SEQ ID NO: 51978 - DNA, 201 bp, Homo sapiens
tgcagaaaccaggagataaaagaacttggtgagctttctccacattgggacaatctgcgaaaaaatgtccttactcactgtgatcaaatggtgaatatgtwccaagacattctgacagaacttagcaaggaaacagggtcctctttcaaatcaagcagcagcaaaggagagaaaacattagaatttgttccaataaatcta

SEQ ID NO: 51979 - DNA, 201 bp, Homo sapiens
tcatcaaattacagacaagtctgtatgacccaggcttcctacagcagcttcacacagtggggttgatagtacaatatgaaggactgctaagtacatacagygatgaaattggaatgctagaggacatggccgttggcatttccgatttaaagaaagttgcatttaaaataattgaagccaaatccaatgatgtgttgccag

SEQ ID NO: 51980 - DNA, 201 bp, Homo sapiens
tggccgttggcatttccgatttaaagaaagttgcatttaaaataattgaagccaaatccaatgatgtgttgccagttataacaggaagacgagaacattaygtggtagaggtcaagcttccagccagaatgtttgagtcactacctctacagattaaagaaggacagttgcttcatgtgtatccagtactttttaatgttg

SEQ ID NO: 51981 - DNA, 201 bp, Homo sapiens
gaaccttcattaacagatgccattccctctcacccaagagaggactggtatgaacagttgtatcccctcatccttaccctgaaggactgcatgggagaagyggtgaaccgagccaagcagtccctgacatttgtgctccttcaggaacttgcgtacagcttgccccagtgtctgatgctgacgctaagaagagacatcgtc

SEQ ID NO: 51982 - DNA, 201 bp, Homo sapiens
tggggttgatagtacaatatgaaggactgctaagtacatacagcgatgaaattggaatgctagaggacatggccgttggcatttccgatttaaagaaagtygcatttaaaataattgaagccaaatccaatgatgtgttgccagttataacaggaagacgagaacattacgtggtagaggtcaagcttccagccagaatgt

SEQ ID NO: 51983 - DNA, 201 bp, Homo sapiens
acatgccttcaaggatcaacttgtcaggagtgctcttttagcactctacactgcaaggccaggaggcattcttaagaagccaccctctcctaagagcagcmcagaggagagcagtccccaagaccaacccccagtgatgagagggcaggactccataccacatcattcagactatgatgaggaagagtgggacagggtgtg

SEQ ID NO: 51984 - DNA, 201 bp, Homo sapiens
cactgtttttgactggtgtcacattcccatctgagtatcccatctatgaggagaccaaaataaaactaacagtctatgatgtcaaggataagtctcatgayaccgttcgaaccagtgtcctaccagaacataaggatcccccgccagaagttgggcgaagtttcttgggctatgccagttttaaagtgggagagctgctga

SEQ ID NO: 51985 - DNA, 201 bp, Homo sapiens
tttcccttcacattaaagaagatttgtgcagaaaccaggagataaaagaacttggtgagctttctccacattgggacaatctgcgaaaaaatgtccttackcactgtgatcaaatggtgaatatgtaccaagacattctgacagaacttagcaaggaaacagggtcctctttcaaatcaagcagcagcaaaggagagaaaa

SEQ ID NO: 51986 - DNA, 201 bp, Homo sapiens
gtggtgaaccgagccaagcagtccctgacatttgtgctccttcaggaacttgcgtacagcttgccccagtgtctgatgctgacgctaagaagagacatcgwcttcagccaagcacttgctggattggtttgtggttttatcatcaaattacagacaagtctgtatgacccaggcttcctacagcagcttcacacagtgggg

SEQ ID NO: 51987 - DNA, 201 bp, Homo sapiens
  misc_feature (1)...(201): n = A,T,C or G
aagccaaatccaatgatgtgttgccagttataacaggaagacgagaacattacgtggtagaggtcaagcttccagccagaatgtttgagtcactacctctncagattaaagaaggacagttgcttcatgtgtatccagtactttttaatgttggaatcaatgaacagcaaactctggctgaaaggtttggagatgtctctt

SEQ ID NO: 51988 - DNA, 201 bp, Homo sapiens
agtgggacagggtgtgggccaatgtggggaagagcctgaactgcattattgctatggtggacaaactgattgaaagagatggtggcagtgaaggcagtggyggcaacaatgatggagaaaaggaaccttcattaacagatgccattccctctcacccaagagaggactggtatgaacagttgtatcccctcatccttaccc

SEQ ID NO: 51989 - DNA, 201 bp, Homo sapiens
gtgggacagggtgtgggccaatgtggggaagagcctgaactgcattattgctatggtggacaaactgattgaaagagatggtggcagtgaaggcagtggcrgcaacaatgatggagaaaaggaaccttcattaacagatgccattccctctcacccaagagaggactggtatgaacagttgtatcccctcatccttaccct

SEQ ID NO: 51990 - DNA, 201 bp, Homo sapiens; identical to SEQ ID NO: 51977

SEQ ID NO: 51991 - DNA, 201 bp, Homo sapiens; identical to SEQ ID NO: 51978

SEQ ID NO: 51992 - DNA, 201 bp, Homo sapiens; identical to SEQ ID NO: 51979

SEQ ID NO: 51993 - DNA, 201 bp, Homo sapiens; identical to SEQ ID NO: 51980

SEQ ID NO: 51994 - DNA, 201 bp, Homo sapiens; identical to SEQ ID NO: 51981

SEQ ID NO: 51995 - DNA, 201 bp, Homo sapiens; identical to SEQ ID NO: 51982

SEQ ID NO: 51996 - DNA, 201 bp, Homo sapiens; identical to SEQ ID NO: 51983

SEQ ID NO: 51997 - DNA, 201 bp, Homo sapiens; identical to SEQ ID NO: 51984

SEQ ID NO: 51998 - DNA, 201 bp, Homo sapiens; identical to SEQ ID NO: 51985

SEQ ID NO: 51999 - DNA, 201 bp, Homo sapiens; identical to SEQ ID NO: 51986

SEQ ID NO: 52000 - DNA, 201 bp, Homo sapiens; identical to SEQ ID NO: 51987
  misc_feature (1)...(201): n = A,T,C or G

SEQ ID NO: 52001 - DNA, 201 bp, Homo sapiens; identical to SEQ ID NO: 51988

SEQ ID NO: 52002 - DNA, 201 bp, Homo sapiens; identical to SEQ ID NO: 51989

SEQ ID NO: 52003 - DNA, 201 bp, Homo sapiens
tttcactgtgttagccaggatgttctcgatttcctgaccttgtgatccgcccgcgtcggcctcccaaagtgctgggattacaggcgtgagccaccgcgcccagcaactctcgacttttaaatgttagcggcccaaagtgctgggattacaggcgtgagccaccgcgcccagcaactctcgacttttaaatgttagcggcag

SEQ ID NO: 52004 - DNA, 201 bp, Homo sapiens
accacgcccggctaatttttttatttttagtgagacggggtttcactgtgttagccaggatgttctcgatttcctgaccttgtgatccgcccgcgtcggcctcccaaagtgctgggattacaggcgtgagccaccgcgcccagcaactctcgacttttaaatgttagcggcccaaagtgctgggattacaggcgtgagcca

SEQ ID NO: 52005 - DNA, 201 bp, Homo sapiens
gtttcactgtgttagccaggatgttctcgatttcctgaccttgtgatccgcccgcgtcggcctcccaaagtgctgggattacaggcgtgagccaccgcgcccagcaactctcgacttttaaatgttagcggcccaaagtgctgggattacaggcgtgagccaccgcgcccagcaactctcgacttttaaatgttagcggca

SEQ ID NO: 52006 - DNA, 201 bp, Homo sapiens
caccacgcccggctaatttttttatttttagtgagacggggtttcactgtgttagccaggatgttctcgatttcctgaccttgtgatccgcccgcgtcggcctcccaaagtgctgggattacaggcgtgagccaccgcgcccagcaactctcgacttttaaatgttagcggcccaaagtgctgggattacaggcgtgagcc

SEQ ID NO: 52007 - DNA, 201 bp, Homo sapiens
ggtttcactgtgttagccaggatgttctcgatttcctgaccttgtgatccgcccgcgtcggcctcccaaagtgctgggattacaggcgtgagccaccgcgcccagcaactctcgacttttaaatgttagcggcccaaagtgctgggattacaggcgtgagccaccgcgcccagcaactctcgacttttaaatgttagcggc

SEQ ID NO: 52008 - DNA, 201 bp, Homo sapiens
ccaccaccacgcccggctaatttttttatttttagtgagacggggtttcactgtgttagccaggatgttctcgatttcctgaccttgtgatccgcccgcgtcggcctcccaaagtgctgggattacaggcgtgagccaccgcgcccagcaactctcgacttttaaatgttagcggcccaaagtgctgggattacaggcgtg

SEQ ID NO: 52009 - DNA, 201 bp, Homo sapiens
atttttagtgagacggggtttcactgtgttagccaggatgttctcgatttcctgaccttgtgatccgcccgcgtcggcctcccaaagtgctgggattacaggcgtgagccaccgcgcccagcaactctcgacttttaaatgttagcggcccaaagtgctgggattacaggcgtgagccaccgcgcccagcaactctcgact

SEQ ID NO: 52010 - DNA, 201 bp, Homo sapiens
cccaccaccacgcccggctaatttttttatttttagtgagacggggtttcactgtgttagccaggatgttctcgatttcctgaccttgtgatccgcccgcgtcggcctcccaaagtgctgggattacaggcgtgagccaccgcgcccagcaactctcgacttttaaatgttagcggcccaaagtgctgggattacaggcgt

SEQ ID NO: 52011 - DNA, 201 bp, Homo sapiens
tatttttagtgagacggggtttcactgtgttagccaggatgttctcgatttcctgaccttgtgatccgcccgcgtcggcctcccaaagtgctgggattacaggcgtgagccaccgcgcccagcaactctcgacttttaaatgttagcggcccaaagtgctgggattacaggcgtgagccaccgcgcccagcaactctcgac

SEQ ID NO: 52012 - DNA, 201 bp, Homo sapiens
acgcccggctaatttttttatttttagtgagacggggtttcactgtgttagccaggatgttctcgatttcctgaccttgtgatccgcccgcgtcggcctcccaaagtgctgggattacaggcgtgagccaccgcgcccagcaactctcgacttttaaatgttagcggcccaaagtgctgggattacaggcgtgagccaccg

SEQ ID NO: 52013 - DNA, 201 bp, Homo sapiens
cacgcccggctaatttttttatttttagtgagacggggtttcactgtgttagccaggatgttctcgatttcctgaccttgtgatccgcccgcgtcggcctcccaaagtgctgggattacaggcgtgagccaccgcgcccagcaactctcgacttttaaatgttagcggcccaaagtgctgggattacaggcgtgagccacc

SEQ ID NO: 52014 - DNA, 201 bp, Homo sapiens
ccacgcccggctaatttttttatttttagtgagacggggtttcactgtgttagccaggatgttctcgatttcctgaccttgtgatccgcccgcgtcggcctcccaaagtgctgggattacaggcgtgagccaccgcgcccagcaactctcgacttttaaatgttagcggcccaaagtgctgggattacaggcgtgagccac

SEQ ID NO: 52015 - DNA, 201 bp, Homo sapiens
caaagtgctgggatcagttgtgagccacactacccagccaaactccagttttagttaaactgtttcacctcatttttatgctgagttttgtaaagtaggtwttcttgctgaacagagtcctgaaaatcaaactatacaagtagtaggaagtccattaagctgtttagaggaaaaagtgttataaatggcagttaaatgaac

SEQ ID NO: 52016 - DNA, 201 bp, Homo sapiens
agctgggggtgccgcggcaggtgctggcgctggagctccccgaggcgctgtgtcgggagtgcccgccccgccagcgcgcgctccgccaaatggagcccttycccctgcgcgtgttcgtgaaccccagcctgcgagtgcttgacagccgcctggtcacctttcccgagggctgcgagagcgtcgccggcttcctggcctgcg

SEQ ID NO: 52017 - DNA, 201 bp, Homo sapiens
ttttaattggaagcaagggtggcccttcagagtctcagttaagagtcaaggaaagatgagatcacttgggtagctcaagaagggaaaaggatttattagaycatttccaggacagggacccaggggcagtggctgggttcagtgttctcacgctcagaggaagaaaaggcagtggtgaacacccgcctgactgccttaccc

SEQ ID NO: 52018 - DNA, 201 bp, Homo sapiens
gtgctgggattacaggcgtgagccaccgcgcccagcaactctcgacttttaaatgttagcggcccaaagtgctgggattacaggcgtgagccaccgcgccyagcaactctcgacttttaaatgttagcggcagaccaaaccaaacaaacacagctgcaggacgggtctggtacgcagggctcccactttgcagtctctgat

SEQ ID NO: 52019 - DNA, 201 bp, Homo sapiens
tttcctgaccttgtgatccgcccgcgtcggcctcccaaagtgctgggattacaggcgtgagccaccgcgcccagcaactctcgacttttaaatgttagcggcccaaagtgctgggattacaggcgtgagccaccgcgcccagcaactctcgacttttaaatgttagcggcagaccaaaccaaacaaacacagctgcaggac

SEQ ID NO: 52020 - DNA, 201 bp, Homo sapiens
atttcctgaccttgtgatccgcccgcgtcggcctcccaaagtgctgggattacaggcgtgagccaccgcgcccagcaactctcgacttttaaatgttagcggcccaaagtgctgggattacaggcgtgagccaccgcgcccagcaactctcgacttttaaatgttagcggcagaccaaaccaaacaaacacagctgcagga

SEQ ID NO: 52021 - DNA, 201 bp, Homo sapiens
gatttcctgaccttgtgatccgcccgcgtcggcctcccaaagtgctgggattacaggcgtgagccaccgcgcccagcaactctcgacttttaaatgttagcggcccaaagtgctgggattacaggcgtgagccaccgcgcccagcaactctcgacttttaaatgttagcggcagaccaaaccaaacaaacacagctgcagg

SEQ ID NO: 52022 - DNA, 201 bp, Homo sapiens
cgatttcctgaccttgtgatccgcccgcgtcggcctcccaaagtgctgggattacaggcgtgagccaccgcgcccagcaactctcgacttttaaatgttagcggcccaaagtgctgggattacaggcgtgagccaccgcgcccagcaactctcgacttttaaatgttagcggcagaccaaaccaaacaaacacagctgcag

SEQ ID NO: 52023 - DNA, 201 bp, Homo sapiens
tcgatttcctgaccttgtgatccgcccgcgtcggcctcccaaagtgctgggattacaggcgtgagccaccgcgcccagcaactctcgacttttaaatgttagcggcccaaagtgctgggattacaggcgtgagccaccgcgcccagcaactctcgacttttaaatgttagcggcagaccaaaccaaacaaacacagctgca

SEQ ID NO: 52024 - DNA, 201 bp, Homo sapiens
aactagaagtaaaaatttaaaaacttgtaagctcactaaagtgaagctctgcagacacggttcatatcctggtggctgagggcacataaccaagaacttamacaagcacccccaagccacaaagatcccagctgctatggttgaggggtaacctgccagcactggagccaagtgttggagctactgatccaaagttagctc

SEQ ID NO: 52025 - DNA, 201 bp, Homo sapiens
agccaggatgttctcgatttcctgaccttgtgatccgcccgcgtcggcctcccaaagtgctgggattacaggcgtgagccaccgcgcccagcaactctcgacttttaaatgttagcggcccaaagtgctgggattacaggcgtgagccaccgcgcccagcaactctcgacttttaaatgttagcggcagaccaaaccaaac

SEQ ID NO: 52026 - DNA, 201 bp, Homo sapiens
accaccacgcccggctaatttttttatttttagtgagacggggtttcactgtgttagccaggatgttctcgatttcctgaccttgtgatccgcccgcgtcggcctcccaaagtgctgggattacaggcgtgagccaccgcgcccagcaactctcgacttttaaatgttagcggcccaaagtgctgggattacaggcgtgag

SEQ ID NO: 52027 - DNA, 201 bp, Homo sapiens
caatgtaggcagaaggtttataacagaatccccaggcagagaagtgaatttcagagcatttcagggaggaaactcctctgcacatgtcagcatgtttaacrtcgatgatggcaggttgtgtgctggcagccagagtctgaggccactgtccaaagttcagcgtcagtggttcctgttgctggtcatggagagagacaactg

SEQ ID NO: 52028 - DNA, 201 bp, Homo sapiens
ttaaaaatgcaggtaagcatgtgactggccatttgtgccgagttcttatttttacggagggcttgtggccttagacgccagtttgcttatggaaatgaaasagaatagtccctgttcaaggatgtgtttcatgacagcacgagtgtaaatgagtgcccacacattttaacagccttgggcaggattttgctgctgagatcc

SEQ ID NO: 52029 - DNA, 201 bp, Homo sapiens
actttcactttgagctgggcaaatcttacttggcatcaacttggatggctcgcatatgacaggaaactggattgccaaggcatggcagactgagctggagkaagatgtcagaaatgtttgccctgaaatcagttacggacaaaatgttggctacaacttgaggagaaaaatcacccccaaaggagtggacatttcctaaca

SEQ ID NO: 52030 - DNA, 201 bp, Homo sapiens
tttcactttgagctgggcaaatcttacttggcatcaacttggatggctcgcatatgacaggaaactggattgccaaggcatggcagactgagctggaggawgatgtcagaaatgtttgccctgaaatcagttacggacaaaatgttggctacaacttgaggagaaaaatcacccccaaaggagtggacatttcctaacaat

SEQ ID NO: 52031 - DNA, 201 bp, Homo sapiens
tagccaggatgttctcgatttcctgaccttgtgatccgcccgcgtcggcctcccaaagtgctgggattacaggcgtgagccaccgcgcccagcaactctcgacttttaaatgttagcggcccaaagtgctgggattacaggcgtgagccaccgcgcccagcaactctcgacttttaaatgttagcggcagaccaaaccaaa

SEQ ID NO: 52032 - DNA, 201 bp, Homo sapiens
ttcactgtgttagccaggatgttctcgatttcctgaccttgtgatccgcccgcgtcggcctcccaaagtgctgggattacaggcgtgagccaccgcgcccagcaactctcgacttttaaatgttagcggcccaaagtgctgggattacaggcgtgagccaccgcgcccagcaactctcgacttttaaatgttagcggcaga

SEQ ID NO: 52033 - DNA, 201 bp, Homo sapiens
cagctcatggacacctgtgtccggaacagttattatgaagaggccctggagcttgcagcctacgtacgccgactggagaggaaatactcttccatccctgycatccagggcatcgtgaacgaagtgcgccagtccatgcagctgatgctgagccagctgatccagcaactgaggaccaacatccagcttcctgcctgcctc

SEQ ID NO: 52034 - DNA, 201 bp, Homo sapiens
gaggctgccttcagcagcggggagcaagagctctttgtccagttctgcactgtcttcctggaagaccttgttccgtatttaaatcgctgtctccaagtcckttttccaccagctcagatagcacagactttaggcattcctcccactcagctctccaagtacggtaacctagggcatgtgaacatcggcgccattcaggag

SEQ ID NO: 52035 - DNA, 201 bp, Homo sapiens; identical to SEQ ID NO: 52028

SEQ ID NO: 52036 - DNA, 201 bp, Homo sapiens; identical to SEQ ID NO: 52029

SEQ ID NO: 52037 - DNA, 201 bp, Homo sapiens
taagttcggagtcagcgccccttgtggtccggaagggaagtgacgttgttgctgggaagatggcgaccgcggcgactatcccatcggtagccacggccacrgcagcggctctcggcgaggtggaggatgaagggctcctggcgtcgctgttccgggaccgcttccccgaggcccagtggcgcgagcggcccgatgtgggcc

SEQ ID NO: 52038 - DNA, 201 bp, Homo sapiens; identical to SEQ ID NO: 52015

SEQ ID NO: 52039 - DNA, 201 bp, Homo sapiens; identical to SEQ ID NO: 52030

SEQ ID NO: 52040 - DNA, 201 bp, Homo sapiens; identical to SEQ ID NO: 52033

SEQ ID NO: 52041 - DNA, 201 bp, Homo sapiens
gaggctgccttcagcagcggggagcaagagctctttgtccagttctgcactgtcttcctggaagaccttgttccgtatttaaatcgctgtctccaagtcckttttccaccagctcagatagcacagactttagggcatgtgaacatcggcgccattcaggagcccctcgcctttatcctgccaaagagagagacgcttttc

SEQ ID NO: 52042 - DNA, 201 bp, Homo sapiens; identical to SEQ ID NO: 52037

SEQ ID NO: 52043 - DNA, 201 bp, Homo sapiens; identical to SEQ ID NO: 52004

SEQ ID NO: 52044 - DNA, 201 bp, Homo sapiens; identical to SEQ ID NO: 52006

SEQ ID NO: 52045 - DNA, 201 bp, Homo sapiens; identical to SEQ ID NO: 52037

SEQ ID NO: 52046 - DNA, 201 bp, Homo sapiens; identical to SEQ ID NO: 52008

SEQ ID NO: 52047 - DNA, 201 bp, Homo sapiens; identical to SEQ ID NO: 52010

SEQ ID NO: 52048 - DNA, 201 bp, Homo sapiens; identical to SEQ ID NO: 52034

SEQ ID NO: 52049 - DNA, 201 bp, Homo sapiens; identical to SEQ ID NO: 52015

SEQ ID NO: 52050 - DNA, 201 bp, Homo sapiens; identical to SEQ ID NO: 52017

SEQ ID NO: 52051 - DNA, 201 bp, Homo sapiens; identical to SEQ ID NO: 52031

SEQ ID NO: 52052 - DNA, 201 bp, Homo sapiens; identical to SEQ ID NO: 52032

SEQ ID NO: 52053 - DNA, 201 bp, Homo sapiens; identical to SEQ ID NO: 52003

SEQ ID NO: 52054 - DNA, 201 bp, Homo sapiens; identical to SEQ ID NO: 52005

SEQ ID NO: 52055 - DNA, 201 bp, Homo sapiens; identical to SEQ ID NO: 52007

SEQ ID NO: 52056 - DNA, 201 bp, Homo sapiens; identical to SEQ ID NO: 52009

SEQ ID NO: 52057 - DNA, 201 bp, Homo sapiens; identical to SEQ ID NO: 52011

SEQ ID NO: 52058 - DNA, 201 bp, Homo sapiens; identical to SEQ ID NO: 52012

SEQ ID NO: 52059 - DNA, 201 bp, Homo sapiens; identical to SEQ ID NO: 52013

SEQ ID NO: 52060 - DNA, 201 bp, Homo sapiens; identical to SEQ ID NO: 52014

SEQ ID NO: 52061 - DNA, 201 bp, Homo sapiens; identical to SEQ ID NO: 52018

SEQ ID NO: 52062 - DNA, 201 bp, Homo sapiens; identical to SEQ ID NO: 52019

SEQ ID NO: 52063 - DNA, 201 bp, Homo sapiens; identical to SEQ ID NO: 52020

SEQ ID NO: 52064 - DNA, 201 bp, Homo sapiens; identical to SEQ ID NO: 52021

SEQ ID NO: 52065 - DNA, 201 bp, Homo sapiens; identical to SEQ ID NO: 52022

SEQ ID NO: 52066 - DNA, 201 bp, Homo sapiens; identical to SEQ ID NO: 52023

SEQ ID NO: 52067 - DNA, 201 bp, Homo sapiens; identical to SEQ ID NO: 52025

SEQ ID NO: 52068 - DNA, 201 bp, Homo sapiens; identical to SEQ ID NO: 52024

SEQ ID NO: 52069 - DNA, 201 bp, Homo sapiens; identical to SEQ ID NO: 52033

SEQ ID NO: 52070 - DNA, 201 bp, Homo sapiens; identical to SEQ ID NO: 52026

SEQ ID NO: 52071 - DNA, 201 bp, Homo sapiens; identical to SEQ ID NO: 52027

SEQ ID NO: 52072 - DNA, 201 bp, Homo sapiens; identical to SEQ ID NO: 52029

SEQ ID NO: 52073 - DNA, 201 bp, Homo sapiens; identical to SEQ ID NO: 52028

SEQ ID NO: 52074 - DNA, 201 bp, Homo sapiens; identical to SEQ ID NO: 52030

SEQ ID NO: 52075 - DNA, 201 bp, Homo sapiens; identical to SEQ ID NO: 52028

SEQ ID NO: 52076 - DNA, 201 bp, Homo sapiens; identical to SEQ ID NO: 52029

SEQ ID NO: 52077 - DNA, 201 bp, Homo sapiens; identical to SEQ ID NO: 52015

SEQ ID NO: 52078 - DNA, 201 bp, Homo sapiens; identical to SEQ ID NO: 52030

SEQ ID NO: 52079 - DNA, 201 bp, Homo sapiens; identical to SEQ ID NO: 52016

SEQ ID NO: 52080 - DNA, 201 bp, Homo sapiens
attttcctattctcacttcccatgacacgatatacattacaattgtttttagaaaaataaagtttaccatctcatgattcatttagatcctggctatacamgttatttctcatgttgatttaaaactaatttttatatacttcttataacaacacactgtcttattggatcttcaggaaacagacgtggtaccagacacca

SEQ ID NO: 52081 - DNA, 201 bp, Homo sapiens
tttagtttaatagttaagagagtctccattgatgaggtgcattctggattatccatttgtttttatatcttttattttcctattctcacttcccatgacaygatatacattacaattgtttttagaaaaataaagtttaccatctcatgattcatttagatcctggctatacaagttatttctcatgttgatttaaaacta

SEQ ID NO: 52082 - DNA, 201 bp, Homo sapiens
gtgacatcaaagtatgctaaccaatcagctggcaagtcaggaagaagacccatgcctggcccttctgctgtatttgcaatgaagtcagcaagttcctgtgstattgagcaaggaaacttatctctgtgtgaaactgctttagatcaaggctactctgaaactaaggcctttgagatggctggaccctccaaaggtaaagaa

SEQ ID NO: 52083 - DNA, 201 bp, Homo sapiens
acagctgtcaacatagcttatgcatgcaaactactggagccagatgacaagctttttatcctcaatacccaaagtaaagatgcctgtgggatgctgatgarcacaattttgaaagaacttcagaagaaaactcaagccctgccagagcaagtgtcattaagtgaagatttacttcagcctcctgtcccccgggactcaggg

SEQ ID NO: 52084 - DNA, 201 bp, Homo sapiens
ttcttcaacctcctcttcacatctgcccctcctgtcatttatggtgttttggagaaagatgtgtctgcagagaccctcatgcaactgcctgaactttacaraagtggtcagaaatcagaggcatacttaccccataccttctggatcaccttattggatgctttttatcaaagcctggtctgcttctttgtgccttatttt

SEQ ID NO: 52085 - DNA, 201 bp, Homo sapiens
tcatttactttatacagccacctgggaggtaagtgttatttttaccattaggtagaagaggaaaaggaggttaagtaagctgcccaagacctccagttagwatgcactggagctaagacctgaacctaaacccatatggtttccatcccatgctctcttcttattaaacctatgctaactctcaccaaacttttaagcata

SEQ ID NO: 52086 - DNA, 201 bp, Homo sapiens
cattacaattgtttttagaaaaataaagtttaccatctcatgattcatttagatcctggctatacaagttatttctcatgttgatttaaaactaatttttrtatacttcttataacaacacactgtcttattggatcttcaggaaacagacgtggtaccagacaccaggcttttagacaaatttagtcagattacacctcg

SEQ ID NO: 52087 - DNA, 201 bp, Homo sapiens
cttagaaattcaagtattttcaaggggagtcatttgagatatatttattttactaggagatcttatattctagggaaatgctttaaatggtcaggctccartcggaatttttttaagaaaaaagtagtttttaatacattggttaggactcagaggaaatacggaaaaaacattgtagatggttaatttacagataaaatc

SEQ ID NO: 52088 - DNA, 201 bp, Homo sapiens
cattcctctgtcaggttccaatcaagagaagaccttttatgagatctgcctctgtatagatgttgtcagttaggaaactgaagccataggtcaggcagacrtcagctcagcctgtggcccattgggtgatttcctgtattttaaaactgacagtagcctgatcaaagtgatacaatcaatttcaaaacaatcttccagaga

SEQ ID NO: 52089 - DNA, 201 bp, Homo sapiens
tcccaagagccttttaaacaacaaggtacctaaaatagggtataattatactgcttaaaatacagttagtgcctattaatagctttttatttcctatgggragatgcttttggtcttctggctgaagatgtaggcatacctctcactcatttcaatgttttcctgaggtggagccttcattggaaaggggaaagagggatt

SEQ ID NO: 52090 - DNA, 201 bp, Homo sapiens
actttatacagccacctgggaggtaagtgttatttttaccattaggtagaagaggaaaaggaggttaagtaagctgcccaagacctccagttagaatgcastggagctaagacctgaacctaaacccatatggtttccatcccatgctctcttcttattaaacctatgctaactctcaccaaacttttaagcataagtgca

SEQ ID NO: 52091 - DNA, 201 bp, Homo sapiens
aagcctggtctgcttctttgtgccttattttacctaccagggctcagatactgacatctttgcatttggaaaccccctgaacacagccgctctgttcatcrttctcctccatctggtcattgaaagcaagagtttgacttggattcacttgctggtcatcattggtagcatcttgtcttattttttatttgccatagtttt

SEQ ID NO: 52092 - DNA, 201 bp, Homo sapiens
tgaatctatagaagctcttcacaaagcgggcatcaagatctggatgctgacaggggacaagcaggagacagctgtcaacatagcttatgcatgcaaactaytggagccagatgacaagctttttatcctcaatacccaaagtaaagatgcctgtgggatgctgatgagcacaattttgaaagaacttcagaagaaaactca

SEQ ID NO: 52093 - DNA, 201 bp, Homo sapiens
agtagctcagcttgctgcacagaaacagagaaacaacacggtgatgcaggcctcctgaatggcaaggcagagtccctccctggacagccattggcctgcarcctgtgttatgaggccgagagcccagacgaagcggccttagtgtatgccgccagggcttaccaatgcactttacggtctcggacaccagagcaggtcatg

SEQ ID NO: 52094 - DNA, 201 bp, Homo sapiens
tccaatcaagagaagaccttttatgagatctgcctctgtatagatgttgtcagttaggaaactgaagccataggtcaggcagacatcagctcagcctgtgrcccattgggtgatttcctgtattttaaaactgacagtagcctgatcaaagtgatacaatcaatttcaaaacaatcttccagagaccacttgaaggttcat

SEQ ID NO: 52095 - DNA, 201 bp, Homo sapiens
gagccatgtgtgtaacttgcaacccaccatccaacccttactggattatgcaggagcacatgctggatccagtattctacttagtttgtatcctcacgacrtccattgctcttctgcccaggtttgtatacagagttcttcagggatccctgtttccatctccaattctgagagctaagcactttgacagactaactccag

SEQ ID NO: 52096 - DNA, 201 bp, Homo sapiens
atgaatcaagtgacatcaaagtatgctaaccaatcagctggcaagtcaggaagaagacccatgcctggcccttctgctgtatttgcaatgaagtcagcaasttcctgtgctattgagcaaggaaacttatctctgtgtgaaactgctttagatcaaggctactctgaaactaaggcctttgagatggctggaccctccaaa

SEQ ID NO: 52097 - DNA, 201 bp, Homo sapiens
ccgccagggcttaccaatgcactttacggtctcggacaccagagcaggtcatggtggactttgctgctttgggaccattaacatttcaactcctacacatmctgccctttgactcagtaagaaaaagaatgtctgttgtggtccgacaccctctttccaatcaagttgtggtgtatacgaaaggcgctgattctgtgatca

SEQ ID NO: 52098 - DNA, 201 bp, Homo sapiens
ggttggaagagggattttgaagaggtatctctccaagcaagaatgacttgtttttccataagggacatgagcattttactaggcttggaagagctgacatratgagcattattgtatgtttgtatatacatttgtgatagagggctagagtttgacctagagagagtttaaggaagtgaaatatttaattcagaaccaaat

SEQ ID NO: 52099 - DNA, 201 bp, Homo sapiens
tctacatcaaggtcttcttaatgactattattctcagggtttagttttctaccttctgcctactattttggtctgacatttttgtagccttctgttattaytggaaatagtctcttacataagctgatttcgagaactttcaaaatctcacatagctaatggaagttgctttctgctttcttatgactgtttttataaata

SEQ ID NO: 52100 - DNA, 201 bp, Homo sapiens
cccccagtgctccagtagctcagcttgctgcacagaaacagagaaacaacacggtgatgcaggcctcctgaatggcaaggcagagtccctccctggacagmcattggcctgcaacctgtgttatgaggccgagagcccagacgaagcggccttagtgtatgccgccagggcttaccaatgcactttacggtctcggacacc

SEQ ID NO: 52101 - DNA, 201 bp, Homo sapiens; identical to SEQ ID NO: 52082

SEQ ID NO: 52102 - DNA, 201 bp, Homo sapiens; identical to SEQ ID NO: 52083

SEQ ID NO: 52103 - DNA, 201 bp, Homo sapiens; identical to SEQ ID NO: 52084

SEQ ID NO: 52104 - DNA, 201 bp, Homo sapiens; identical to SEQ ID NO: 52087

SEQ ID NO: 52105 - DNA, 201 bp, Homo sapiens; identical to SEQ ID NO: 52088

SEQ ID NO: 52106 - DNA, 201 bp, Homo sapiens; identical to SEQ ID NO: 52089

SEQ ID NO: 52107 - DNA, 201 bp, Homo sapiens; identical to SEQ ID NO: 52091

SEQ ID NO: 52108 - DNA, 201 bp, Homo sapiens; identical to SEQ ID NO: 52092

SEQ ID NO: 52109 - DNA, 201 bp, Homo sapiens; identical to SEQ ID NO: 52093

SEQ ID NO: 52110 - DNA, 201 bp, Homo sapiens; identical to SEQ ID NO: 52094

SEQ ID NO: 52111 - DNA, 201 bp, Homo sapiens; identical to SEQ ID NO: 52095

SEQ ID NO: 52112 - DNA, 132 bp, Homo sapiens
tgcaggacagttcataatgggcctttgggaartaagccctcaaatcatcttgctgggagctcttttactctaggaagtggagaaggagccagtgaagtgcctcattccagacaggctgctttcagtagcccc

SEQ ID NO: 52113 - DNA, 201 bp, Homo sapiens; identical to SEQ ID NO: 52096

SEQ ID NO: 52114 - DNA, 201 bp, Homo sapiens; identical to SEQ ID NO: 52097

SEQ ID NO: 52115 - DNA, 201 bp, Homo sapiens; identical to SEQ ID NO: 52098

SEQ ID NO: 52116 - DNA, 201 bp, Homo sapiens; identical to SEQ ID NO: 52099

SEQ ID NO: 52117 - DNA, 201 bp, Homo sapiens; identical to SEQ ID NO: 52100

SEQ ID NO: 52118 - DNA, 201 bp, Homo sapiens; identical to SEQ ID NO: 52082

SEQ ID NO: 52119 - DNA, 201 bp, Homo sapiens; identical to SEQ ID NO: 52084

SEQ ID NO: 52120 - DNA, 201 bp, Homo sapiens; identical to SEQ ID NO: 52087

SEQ ID NO: 52121 - DNA, 201 bp, Homo sapiens; identical to SEQ ID NO: 52088

SEQ ID NO: 52122 - DNA, 201 bp, Homo sapiens; identical to SEQ ID NO: 52089

SEQ ID NO: 52123 - DNA, 201 bp, Homo sapiens; identical to SEQ ID NO: 52091

SEQ ID NO: 52124 - DNA, 201 bp, Homo sapiens
tgaatctatagaagctcttcacaaagcgggcatcaagatctggatgctgacaggggacaagcaggagacagctgtcaacatagcttatgcatgcaaactaytggagccagatgacaagctttttatcctcaatacccaaaagcaagtgtcattaagtgaagatttacttcagcctcctgtcccccgggactcagggttacg

SEQ ID NO: 52125 - DNA, 201 bp, Homo sapiens; identical to SEQ ID NO: 52093

SEQ ID NO: 52126 - DNA, 201 bp, Homo sapiens; identical to SEQ ID NO: 52094

SEQ ID NO: 52127 - DNA, 201 bp, Homo sapiens; identical to SEQ ID NO: 52095

SEQ ID NO: 52128 - DNA, 201 bp, Homo sapiens
caacagtgggccacggtataagcgcagcaaattagaaagaagagcaaacacagatgtcctctggtgtgtcatgcttctggtcataatgtgcttaactggcrcagtaggtaggtatgaaaagatgcattttttcaatgttcccgagcctgatggacatatcatatcaccactgttggcaggattttatatgttttggaccat

SEQ ID NO: 52129 - DNA, 201 bp, Homo sapiens; identical to SEQ ID NO: 52096

SEQ ID NO: 52130 - DNA, 201 bp, Homo sapiens; identical to SEQ ID NO: 52097

SEQ ID NO: 52131 - DNA, 201 bp, Homo sapiens; identical to SEQ ID NO: 52098

SEQ ID NO: 52132 - DNA, 201 bp, Homo sapiens; identical to SEQ ID NO: 52099

SEQ ID NO: 52133 - DNA, 201 bp, Homo sapiens
gttgtgggcattgtggtttatgcaggccatgaaaccaaagcaatgctgaacaacagtgggccacggtataagcgcagcaaattagaaagaagagcaaacayagatgtcctctggtgtgtcatgcttctggtcataatgtgcttaactggcgcagtaggtaggtatgaaaagatgcattttttcaatgttcccgagcctgat

SEQ ID NO: 52134 - DNA, 201 bp, Homo sapiens; identical to SEQ ID NO: 52100

SEQ ID NO: 52135 - DNA, 201 bp, Homo sapiens; identical to SEQ ID NO: 52080

SEQ ID NO: 52136 - DNA, 201 bp, Homo sapiens; identical to SEQ ID NO: 52081

SEQ ID NO: 52137 - DNA, 201 bp, Homo sapiens; identical to SEQ ID NO: 52086

SEQ ID NO: 52138 - DNA, 201 bp, Homo sapiens
ccacccaacccgtctatggaaaattgtcttcacaaaactggtccctggtgccaaaaaggttgaggaccgctggtctaagtgatttattggtattaacaagwtgaatcctcctaacaatcctatgagttagatgctattaccctactattctccattttacagatgaggctaagtaatttacccagggtcacaaaactggtt

SEQ ID NO: 52139 - DNA, 201 bp, Homo sapiens
ctgtactatcagccatggttaaccccaccatgttctttgacatcgccgcgagcccttagactgtgtctccttcgagctgtttgcagacaaagtttcaaagrcagcagaaaactttcgtgctctgagcactggagagaaaggatttggttgtaagggttcctgctttcacagaattattccagggtttatgtgtcagggtgg

SEQ ID NO: 52140 - DNA, 201 bp, Homo sapiens
aatttgatgatgagaacttcatcctaaagcatacaggtcctggcatcttatccatggcaaatgctggacccaacacaaatggttcccagtttttcatctgyactgccaagactaagtggttggatggcaagcatgtggcctttggcaaggtgaaagaaggcatgaatattgtggaggccatggagggtccaggaatggcaa

SEQ ID NO: 52141 - DNA, 201 bp, Homo sapiens
ggaggctgaagcaagcagatcacttgaggtcaggagtttgagaccagcctggccaacatggtgaaaccctgtctctactaaaaatacaaaaagtagccagycgtgatgacaggcacctgtaatcccagctactcgggaggctgaggcatgagaattgcttgaacccgggaggcggaggttgcagtgagcctagatcatgcc

SEQ ID NO: 52142 - DNA, 201 bp, Homo sapiens
acttgaggtcaggagtttgagaccagcctggccaacatggtgaaaccctgtctctactaaaaatacaaaaagtagccagccgtgatgacaggcacctgtartcccagctactcgggaggctgaggcatgagaattgcttgaacccgggaggcggaggttgcagtgagcctagatcatgccactgcactccaacctgggcag

SEQ ID NO: 52143 - DNA, 201 bp, Homo sapiens
gcctcccaaagtgctagggttacagacatgagccactgtgcctgtctagacttgtactttcaactgtccatttctccctgtctgtcccatgggcactcatraaaaaacagaatgctcccaactttattcatcttccaagcctgtagctcttggtatactcactgttgcaagtcagaagcttgatttcatcattgatgtttt

SEQ ID NO: 52144 - DNA, 201 bp, Homo sapiens
actactattgagtttcttccttaacactgattaaatgatcttaactccctcagctaaaactggcattactgactcccagctatatttctccagacttgcatttttttttttttttttgagacagggtctcactgtcgcccaggctggagtgcagtggcgtgatctcagttcactgctgctttccctcctgggctcaagcag

SEQ ID NO: 52145 - DNA, 201 bp, Homo sapiens
gaaaccctgtctctactaaaaatacaaaaagtagccagccgtgatgacaggcacctgtaatcccagctactcgggaggctgaggcatgagaattgcttgarcccgggaggcggaggttgcagtgagcctagatcatgccactgcactccaacctgggcagcagagcaagactctgtctcaaaaggggaaaaaaaaaattgc

SEQ ID NO: 52146 - DNA, 201 bp, Homo sapiens
agtagccagccgtgatgacaggcacctgtaatcccagctactcgggaggctgaggcatgagaattgcttgaacccgggaggcggaggttgcagtgagcctrgatcatgccactgcactccaacctgggcagcagagcaagactctgtctcaaaaggggaaaaaaaaaattgctgatgtgacccatgaagggaactcatttt

SEQ ID NO: 52147 - DNA, 201 bp, Homo sapiens
ctacacaggctatatttgaaatactggagaaatcctggttgccccagaattgtacactggttgatatgaagattgaatttggtgttgatgtaaccaccaamgaaattgttcttgctgatgttattgacaatgattcctggagactctggccatcaggagatcgaagccaacagaaagacaaacagtcttatcgggacctca

SEQ ID NO: 52148 - DNA, 201 bp, Homo sapiens
tctgtaaccacagtgactacaagtagttctttctctattgaattattaggtccagaatagaagatgtcattgtacactttatttccctcacactgtgttaygctctgatgtgctatgcttagctatctgtcagagattagtaaattataaaactcatgtgtactacttaagtttatatcttatgctagtttataagaacaa

SEQ ID NO: 52149 - DNA, 201 bp, Homo sapiens; identical to SEQ ID NO: 52141

SEQ ID NO: 52150 - DNA, 201 bp, Homo sapiens; identical to SEQ ID NO: 52142

SEQ ID NO: 52151 - DNA, 201 bp, Homo sapiens; identical to SEQ ID NO: 52143

SEQ ID NO: 52152 - DNA, 201 bp, Homo sapiens; identical to SEQ ID NO: 52144

SEQ ID NO: 52153 - DNA, 201 bp, Homo sapiens; identical to SEQ ID NO: 52145

SEQ ID NO: 52154 - DNA, 201 bp, Homo sapiens; identical to SEQ ID NO: 52146

SEQ ID NO: 52155 - DNA, 201 bp, Homo sapiens; identical to SEQ ID NO: 52147

SEQ ID NO: 52156 - DNA, 201 bp, Homo sapiens; identical to SEQ ID NO: 52148

SEQ ID NO: 52157 - DNA, 201 bp, Homo sapiens; identical to SEQ ID NO: 52141

SEQ ID NO: 52158 - DNA, 201 bp, Homo sapiens; identical to SEQ ID NO: 52142

SEQ ID NO: 52159 - DNA, 201 bp, Homo sapiens; identical to SEQ ID NO: 52143

SEQ ID NO: 52160 - DNA, 201 bp, Homo sapiens; identical to SEQ ID NO: 52144

SEQ ID NO: 52161 - DNA, 201 bp, Homo sapiens; identical to SEQ ID NO: 52145

SEQ ID NO: 52162 - DNA, 201 bp, Homo sapiens; identical to SEQ ID NO: 52146

SEQ ID NO: 52163 - DNA, 201 bp, Homo sapiens; identical to SEQ ID NO: 52147

SEQ ID NO: 52164 - DNA, 201 bp, Homo sapiens; identical to SEQ ID NO: 52148

SEQ ID NO: 52165 - DNA, 201 bp, Homo sapiens; identical to SEQ ID NO: 52141

SEQ ID NO: 52166 - DNA, 201 bp, Homo sapiens; identical to SEQ ID NO: 52142

SEQ ID NO: 52167 - DNA, 201 bp, Homo sapiens; identical to SEQ ID NO: 52143

SEQ ID NO: 52168 - DNA, 201 bp, Homo sapiens; identical to SEQ ID NO: 52144

SEQ ID NO: 52169 - DNA, 201 bp, Homo sapiens; identical to SEQ ID NO: 52145

SEQ ID NO: 52170 - DNA, 201 bp, Homo sapiens; identical to SEQ ID NO: 52146

SEQ ID NO: 52171 - DNA, 201 bp, Homo sapiens; identical to SEQ ID NO: 52147

SEQ ID NO: 52172 - DNA, 201 bp, Homo sapiens; identical to SEQ ID NO: 52148

SEQ ID NO: 52173 - DNA, 201 bp, Homo sapiens
actactattgagtttcttccttaacactgattaaatgatcttaactccctcagctaaaactggcattactgactcccagctatatttctccagacttgcatttttttttttttttttgagacagggtctcactgtcgcccaggctggagtgcagtcagctactcgggaggctgaggcatgagaattgcttgaacccgggag

SEQ ID NO: 52174 - DNA, 201 bp, Homo sapiens
gacttgcatttttttttttttttttgagacagggtctcactgtcgcccaggctggagtgcagtcagctactcgggaggctgaggcatgagaattgcttgarcccgggaggcggaggttgcagtgagcctagatcatgccactgcactccaacctgggcagcagagcaagactctgtctcaaaaggggaaaaaaaaaattgc

SEQ ID NO: 52175 - DNA, 201 bp, Homo sapiens
cagggtctcactgtcgcccaggctggagtgcagtcagctactcgggaggctgaggcatgagaattgcttgaacccgggaggcggaggttgcagtgagcctrgatcatgccactgcactccaacctgggcagcagagcaagactctgtctcaaaaggggaaaaaaaaaattgctgatgtgacccatgaagggaactcatttt

SEQ ID NO: 52176 - DNA, 201 bp, Homo sapiens; identical to SEQ ID NO: 52147

SEQ ID NO: 52177 - DNA, 201 bp, Homo sapiens; identical to SEQ ID NO: 52148

SEQ ID NO: 52178 - DNA, 201 bp, Homo sapiens
acccatccaccaatggggtgtttgaagagaacatcagtgacgtgtgtgacctcatccatcaacatggaggataggtctacctagacggggcaaatatgaaygctcaggtgggaatctgtcgccctggagactttgggtctgatgtctcgcacctaaatcttcacaagaccttctgcattccccacagaggaggtggtcctg

SEQ ID NO: 52179 - DNA, 201 bp, Homo sapiens
gtggataagcacaaggagaacctagcagccatcatgattacatacccatccaccaatggggtgtttgaagagaacatcagtgacgtgtgtgacctcatccmtcaacatggaggataggtctacctagacggggcaaatatgaacgctcaggtgggaatctgtcgccctggagactttgggtctgatgtctcgcacctaaat

SEQ ID NO: 52180 - DNA, 201 bp, Homo sapiens
acgatttgttgcggatctttgtttgtgagtcatctgcagaactggttgctgaaagcatgggagaggagtgcagaggtattccagggtctgtgttcaagagsaccagcccgttcctcacccatcaagtgttcaacagctaccactctgaaacaaatattgtccggtatatgaagaaactggaaaataaagacatttcccttg

SEQ ID NO: 52181 - DNA, 201 bp, Homo sapiens
ggacatggccagtgcatccctgctggatgagggactgcggctgcagaggcgctgcagctgtgctacagacacaagaggaggaaattttttgttgacccccrttgccacccacagacaatagctgttgtccagactcgagccaaatatactggagtcctcattgagctgaagttaccctgtgaaatggacttcagtggaaaa

SEQ ID NO: 52182 - DNA, 201 bp, Homo sapiens
gtcgccctggagactttgggtctgatgtctcgcacctaaatcttcacaagaccttctgcattccccacagaggaggtggtcctggcatggggcccattggmgtaagaaataccttgccccgtttttgcccaatcatcccatcatttcactaaagcggaatgaggatgcctgtcctgtgggaaccgtcagtgcggccccatg

SEQ ID NO: 52183 - DNA, 201 bp, Homo sapiens
gaaacaaatattgtccggtatatgaagaaactggaaaataaagacatttcccttgttcacagcatgattccactgggatcctgcaccatgaaactgaacakttcgtctgaactcgcacctatcacatggaaagaatttgcaaacatccacccctttgtgcctctggaccaagctcaaggatatcagcagcttttctgagag

SEQ ID NO: 52184 - DNA, 182 bp, Homo sapiens
catctgtgggaaatcccaggacaaatgtttacattttgtataccctgaagaactctttttcctctaatatgcctaatctgtaatcacatttctgagtgttytcctctttttctgtgtgaggttttttttatctgcatttattagtattctaataaaagcattttgattggaaaacaaaacac

SEQ ID NO: 52185 - DNA, 201 bp, Homo sapiens
atccgctgaagatgtctccacactccctgacctgcgttatatcttcccactgggaccggccttatattccagagaggtggcagcattcccactccccttcrtgaaaccagagaacaaattctggccagtgattgcccggattgatgacatatatggagatcagcacctggtttgtacctgcccacccatggaagtttatga

SEQ ID NO: 52186 - DNA, 201 bp, Homo sapiens
ctggcctgtggcagggaccctcatggttgagcccactgagtcggaggacaaggcagagctggacagattctgtgatgccatgatcagcattcggcaggaarttgctgacattgaggagggccgcatcgaccccagggtcaatccgctgaagatgtctccacactccctgacctgcgttatatcttcccactgggaccggcc

SEQ ID NO: 52187 - DNA, 201 bp, Homo sapiens
ggtgtttgaagagaacatcagtgacgtgtgtgacctcatccatcaacatggaggataggtctacctagacggggcaaatatgaacgctcaggtgggaatcwgtcgccctggagactttgggtctgatgtctcgcacctaaatcttcacaagaccttctgcattccccacagaggaggtggtcctggcatggggcccattgg

SEQ ID NO: 52188 - DNA, 201 bp, Homo sapiens
tagcagccatcatgattacatacccatccaccaatggggtgtttgaagagaacatcagtgacgtgtgtgacctcatccatcaacatggaggataggtctayctagacggggcaaatatgaacgctcaggtgggaatctgtcgccctggagactttgggtctgatgtctcgcacctaaatcttcacaagaccttctgcattc

SEQ ID NO: 52189 - DNA, 201 bp, Homo sapiens
atcacaggcctggacatggccagtgcatccctgctggatgagggactgcggctgcagaggcgctgcagctgtgctacagacacaagaggaggaaatttttygttgacccccgttgccacccacagacaatagctgttgtccagactcgagccaaatatactggagtcctcattgagctgaagttaccctgtgaaatggact

SEQ ID NO: 52190 - DNA, 201 bp, Homo sapiens
tttatgcagtacgagatccttatggaaatcgtcccttatgcattggtcgtcttattccagtgtctgatataaatgacaaagagaaaaaaacatcagaaacdgaaggatgggtggtgtcttcagaatcttgtagcttcttatctattggtgcaagatattaccgtgaagtcttgcctggagaaattgtggaaatatccagac

SEQ ID NO: 52191 - DNA, 201 bp, Homo sapiens
tttctgaagtctgaattcaattacaattttttttttaccaatttaatctcaaatgttgtttaactgctttaaattcatatacgtagagtattataaactgsagagatgaaaaatgtgttttcacgggatttatattgtgaactaaactaagcctactttttgtgacttatttgtgatgccttgttgataaatatgtgtaat

SEQ ID NO: 52192 - DNA, 201 bp, Homo sapiens
agctagcgattgaagcacctgtggatgcagatttggttagcactgttccagaatctgctacgcctgctgctcttgcttacgcaggaaagtgtggacttccrtatgtggaggtgctgtgtaaaaaccggtatgtagggagaaccttcattcagccaaacatgaggttaagacaacttggtgttgcaaaaaaatttggagtat

SEQ ID NO: 52193 - DNA, 201 bp, Homo sapiens
aaacagtgttgtgtatctgtcagtagaaggactggtttcatctgtacaagaagggataaagtttaaaaaacagaaagagaaaaagcacgatattatgatcyaagaaaatggaaatggtctggaatgttttgaaaagagtggtcattgtacagcttgtctcactggaaaatatcctgtagaattagaatggtagctggtagg

SEQ ID NO: 52194 - DNA, 201 bp, Homo sapiens
tcatcttataatcacttttttctactatattaagatctaatgaatttgatttcttttttgaagttttttcttgtaacatctgagattagaagtttaagatsacttgaccccaaacctttgtttatgtaagaatttttaaacataaaagtgtttgtttctgttatgttaccataatttgatgtatatagtgtccagatccat

SEQ ID NO: 52195 - DNA, 201 bp, Homo sapiens
agatctaatgaatttgatttcttttttgaagttttttcttgtaacatctgagattagaagtttaagatcacttgaccccaaacctttgtttatgtaagaawttttaaacataaaagtgtttgtttctgttatgttaccataatttgatgtatatagtgtccagatccatttagaaatttaatatttattaataactgaaac

SEQ ID NO: 52196 - DNA, 201 bp, Homo sapiens
agaatacattatacctcataggtgtctagcctctacagttctggctgtagttatgaccttggcttccctgtctaactgtagacaaatctttaaaaaaaaawaaaaatctggtgcctcagtttccccacatgtgcaatgggatacttattaaataattaataagaatgtgaataagtgtcatacttttgtgatttgagccat

SEQ ID NO: 52197 - DNA, 201 bp, Homo sapiens
caggagagtggcccacgcagctggatgtaccgcatgtgatcactctgggactcgtggggggtcaggagagtgctggtattgtgactagtgatgggagttcsgtgccaacattcaaatcacacaagggaatgggtcttgtaaatcacgtctttactgaagacaatttgaaaaaattatatgtttcaaatcttggaattggac

SEQ ID NO: 52198 - DNA, 115 bp, Homo sapiens
tcgggaaggaagagyctgtcgcgagcgcgagcttctgagctcgacgggccgagctggcagctggttggtgcttacaccttggccgcagcggcaggtccttccacgtgctttcggc

SEQ ID NO: 52199 - DNA, 201 bp, Homo sapiens
ttggatgtgtgtagtttcaagatagaaagttggtcaagaagttatagtggtcacacctcatctatttactgttactcagttggtacaatgtaaaatgccaygcttatgtttataagttttgagattttttttttttctgaaaaggataccaaagtgcgataactgaacatttccaattgcatataatacaacaatatgtgg

SEQ ID NO: 52200 - DNA, 201 bp, Homo sapiens
aagagctcattgccaataaaccagaatttgatcaccttgcagaatatctaggagcaaacagtgttgtgtatctgtcagtagaaggactggtttcatctgtrcaagaagggataaagtttaaaaaacagaaagagaaaaagcacgatattatgatccaagaaaatggaaatggtctggaatgttttgaaaagagtggtcatt

SEQ ID NO: 52201 - DNA, 129 bp, Homo sapiens
tcgggaaggaagagcctgtcgcgagcgcsagcttctgagctcgacgggccgagctggcagctggttggtgcttacaccttggccgcagcggcaggtccttccacgtgctttcggcggcgacatggagct

SEQ ID NO: 52202 - DNA, 201 bp, Homo sapiens
caataaaccagaatttgatcaccttgcagaatatctaggagcaaacagtgttgtgtatctgtcagtagaaggactggtttcatctgtacaagaagggatamagtttaaaaaacagaaagagaaaaagcacgatattatgatccaagaaaatggaaatggtctggaatgttttgaaaagagtggtcattgtacagcttgtct

SEQ ID NO: 52203 - DNA, 184 bp, Homo sapiens
tcgggaaggaagagcctgtcgcgagcgcgagcttctgagctcgacgggccgagctggcagctggttggtgcttacaccttggcygcagcggcaggtccttccacgtgctttcggcggcgacatggagctggaggagttggggatccgagaggaatgtggcgtgttcgggtgcatcgcctcagga

SEQ ID NO: 52204 - DNA, 201 bp, Homo sapiens; identical to SEQ ID NO: 52190

SEQ ID NO: 52205 - DNA, 201 bp, Homo sapiens; identical to SEQ ID NO: 52191

SEQ ID NO: 52206 - DNA, 201 bp, Homo sapiens; identical to SEQ ID NO: 52192

SEQ ID NO: 52207 - DNA, 201 bp, Homo sapiens; identical to SEQ ID NO: 52193

SEQ ID NO: 52208 - DNA, 201 bp, Homo sapiens; identical to SEQ ID NO: 52194

SEQ ID NO: 52209 - DNA, 201 bp, Homo sapiens; identical to SEQ ID NO: 52195

SEQ ID NO: 52210 - DNA, 201 bp, Homo sapiens; identical to SEQ ID NO: 52196

SEQ ID NO: 52211 - DNA, 201 bp, Homo sapiens
ccacgcagctggatgtaccgcatgtgatcactctgggactcgtggggctgcagcaccggggtcaggagagtgctggtattgtgactagtgatgggagttcsgtgccaacattcaaatcacacaagggaatgggtcttgtaaatcacgtctttactgaagacaatttgaaaaaattatatgtttcaaatcttggaattggac

SEQ ID NO: 52212 - DNA, 132 bp, Homo sapiens
agtagctggggccaccctcgggaaggaagagyctgtcgcgagcgcgagcttctgagctcgacgggccgagctggcagctggttggtgcttacaccttggccgcagcggcaggtccttccacgtgctttcggc

SEQ ID NO: 52213 - DNA, 201 bp, Homo sapiens; identical to SEQ ID NO: 52199

SEQ ID NO: 52214 - DNA, 201 bp, Homo sapiens; identical to SEQ ID NO: 52200

SEQ ID NO: 52215 - DNA, 146 bp, Homo sapiens
agtagctggggccaccctcgggaaggaagagcctgtcgcgagcgcsagcttctgagctcgacgggccgagctggcagctggttggtgcttacaccttggccgcagcggcaggtccttccacgtgctttcggcggcgacatggagct

SEQ ID NO: 52216 - DNA, 201 bp, Homo sapiens; identical to SEQ ID NO: 52202

SEQ ID NO: 52217 - DNA, 201 bp, Homo sapiens
agtagctggggccaccctcgggaaggaagagcctgtcgcgagcgcgagcttctgagctcgacgggccgagctggcagctggttggtgcttacaccttggcygcagcggcaggtccttccacgtgctttcggcggcgacatggagctggaggagttggggatccgagaggaatgtggcgtgttcgggtgcatcgcctcagga

SEQ ID NO: 52218 - DNA, 114 bp, Homo sapiens
agtagctggggccrccctcgggaaggaagagcctgtcgcgagcgcgagcttctgagctcgacgggccgagctggcagctggttggtgcttacaccttggccgcagcggcaggtc

SEQ ID NO: 52219 - DNA, 201 bp, Homo sapiens
ccacaaaaggttctgtggagatttgatgggaataaaccagatgccttaggtctcaatactcggctgtataagtggataccccagaatgaccttctaggtcwtccaaaaaccagagcttttataactcatggtggagccaatggcatctatgaggcaatctaccatgggatccctatggtgggcattccattgttttgggat

SEQ ID NO: 52220 - DNA, 201 bp, Homo sapiens; identical to SEQ ID NO: 52219

SEQ ID NO: 52221 - DNA, 201 bp, Homo sapiens; identical to SEQ ID NO: 52219

SEQ ID NO: 52222 - DNA, 201 bp, Homo sapiens
tttaaatgatttaaccaatctgaaatctgctttgttttttatctgttatttaaaaattgtgcttgaatcccatacatctaatgagtaaccagttagtgaarcaattttctaaacaaaaataattttaaaatgtcatagataatataaaaaatacatttcttaaaattttaacataacgaatccatagtagaaaggaagaat

SEQ ID NO: 52223 - DNA, 201 bp, Homo sapiens
actgaaaaagttccaatgttggaaatgactctccctggattaagaacatcaggtatagaacaattggagaagaatccatcaccccggattgtgaaaacacrtctaccgactgatcttcttcctaaatctttctgggaaaacaattgcaagatgatttatctggctcgtaatgccaaggatgtttcagtctcatattaccat

SEQ ID NO: 52224 - DNA, 201 bp, Homo sapiens
gtttcaagttgttctctgagtcatagctcatcttcctgcagtgcctctatttggataacaaagttcatgtccccgatcatgtagttcagattttggaaatmttttttctatatcatacctaatgtctaagtctccgaaaggcaaacgcctacaatagtctctgtaggattggttacctgggaactggagctctgttctgaa

SEQ ID NO: 52225 - DNA, 201 bp, Homo sapiens
caccgtggcccaaaatgagaaatttgatgctatttatgagacagaaatgtccaaaactgcacttcaattccgcacagagatttaaagtgtctaaatcacamatctgaagaaataagagattgtctgtagttgattgaaacgagggcagttatgaattgatttgggcaatcaaatgaatttataaaggagaataatatgctt

SEQ ID NO: 52226 - DNA, 201 bp, Homo sapiens
gagaataatatgcttttaatatgttgattcttttcaatgttattaatcagatcccagttttgttcctttgattctgagtttccaaattctctaaggctaawgttcattgttaactttttgtaacaaaggaacaatgtaaccacaggctcttcctgcctttttctacactagtactgataagaaagaagggatttattttac

SEQ ID NO: 52227 - DNA, 201 bp, Homo sapiens
acctcatttgaagtgatgaaggacaatcctttggtaaattatacacatctaccaactacagtgatggatcatagcaaatccccttttatgcgtaaagggayggctggtgactggaagaattacttcaccgtggcccaaaatgagaaatttgatgctatttatgagacagaaatgtccaaaactgcacttcaattccgcaca

SEQ ID NO: 52228 - DNA, 201 bp, Homo sapiens
gaattgatttgggcaatcaaatgaatttataaaggagaataatatgcttttaatatgttgattcttttcaatgttattaatcagatcccagttttgttcckttgattctgagtttccaaattctctaaggctaaagttcattgttaactttttgtaacaaaggaacaatgtaaccacaggctcttcctgcctttttctaca

SEQ ID NO: 52229 - DNA, 201 bp, Homo sapiens; identical to SEQ ID NO: 52223

SEQ ID NO: 52230 - DNA, 201 bp, Homo sapiens; identical to SEQ ID NO: 52224

SEQ ID NO: 52231 - DNA, 201 bp, Homo sapiens; identical to SEQ ID NO: 52225

SEQ ID NO: 52232 - DNA, 201 bp, Homo sapiens; identical to SEQ ID NO: 52226

SEQ ID NO: 52233 - DNA, 201 bp, Homo sapiens; identical to SEQ ID NO: 52227

SEQ ID NO: 52234 - DNA, 201 bp, Homo sapiens; identical to SEQ ID NO: 52228

SEQ ID NO: 52235 - DNA, 105 bp, Homo sapiens
caagrttataaaaattactttatttcaaatgtgaaaatataaaaaccacttacatataaaatttaagagtattgaaagatctaaaatttaattttcagctttagc

SEQ ID NO: 52236 - DNA, 201 bp, Homo sapiens
catgactggaaatgcgaaggcccagacaccaatattttctagaagtaaacagctcaaagacactctcctatctgaggaaattaatgttgctaagaaaacarttgagtcatcatcaaatgaccttggtcctttttattcattacccagcaaaatatgtgtcattttagaccaagaagggacagttgctgccatactggaggg

SEQ ID NO: 52237 - DNA, 201 bp, Homo sapiens
ttgtagacgagttgcacatgattggtgaaggaagccgtggagctacactggaaatgaccctagcaaaaatcctctacactagcaaaacgactcaaattatyggtatgagtgcaacattaaacaatgttgaagacctacaaaagtttcttcaagcagaatattataccagtcaatttagaccagttgagttaaaagaatatc

SEQ ID NO: 52238 - DNA, 201 bp, Homo sapiens
agaactacaggaaacaaagtctaataaaagactctacaagaatccaaattgtgaggttcatggcttaagagctaatgaatggcaacatacttgtttaacaytgaattctgtgcaagaaagaaaaaatttaatatattccttgccaacaagtggtggaaaaaccctcgtggctgagattttaatgctgcaagaactgctttg

SEQ ID NO: 52239 - DNA, 201 bp, Homo sapiens; identical to SEQ ID NO: 52236

SEQ ID NO: 52240 - DNA, 201 bp, Homo sapiens; identical to SEQ ID NO: 52238

SEQ ID NO: 52241 - DNA, 201 bp, Homo sapiens
catgactggaaatgcgaaggcccagacaccaatattttctagaagtaaacagctcaaagacactctcctatctgaggaaattaatgttgctaagaaaacarttgagtcatcatcaaatgaccttggtcctttttattcattacccagcaaagtgagagacctttatgcccaattcaagggaattgaaaaattatatgaatg

SEQ ID NO: 52242 - DNA, 201 bp, Homo sapiens
ttgtagacgagttgcacatgattggtgaaggaagccgtggagctacactggaaatgaccctagcaaaaatcctctacactagcaaaacgactcaaattatyggtatgagtgcaacattaaacaatgttgaagacctacaaaagtttcttcaagcagaatattataccagtcaatttagaccagtaggtttcatgtttacta

SEQ ID NO: 52243 - DNA, 201 bp, Homo sapiens
ccttggtcctttttattcattacccagcaaagtgagagacctttatgcccaattcaagggaattgaaaaattatatgaatggcaacatacttgtttaacaytgaattctgtgcaagaaagaaaaaatttaatatattccttgccaacaagtggtggaaaaaccctcgtggctgagattttaatgctgcaagaactgctttg

SEQ ID NO: 52244 - DNA, 201 bp, Homo sapiens; identical to SEQ ID NO: 52241

SEQ ID NO: 52245 - DNA, 201 bp, Homo sapiens; identical to SEQ ID NO: 52237

SEQ ID NO: 52246 - DNA, 201 bp, Homo sapiens; identical to SEQ ID NO: 52243

SEQ ID NO: 52247 - DNA, 201 bp, Homo sapiens
caaagagaaggaagcttcgagtataccttcattgcacaaacactgacaatccaaggtataaagaaggagatttaactctgtatgccataaacctccataaygtcaccaagtacttgcggttaccctatcctttttctaacaagcaagtggataaataccttctaagacctttgggacctcatggattactttccaaatctg

SEQ ID NO: 52248 - DNA, 201 bp, Homo sapiens
aacagttctaatgctcagttgctcctggactactgctcttccaaggggtataacatttcttgggaactaggcaatgaacctaacagtttccttaagaaggstgatattttcatcaatgggtcgcagttaggagaagattttattcaattgcataaacttctaagaaagtccaccttcaaaaatgcaaaactctatggtcct

SEQ ID NO: 52249 - DNA, 201 bp, Homo sapiens; identical to SEQ ID NO: 52247

SEQ ID NO: 52250 - DNA, 201 bp, Homo sapiens; identical to SEQ ID NO: 52248

SEQ ID NO: 52251 - DNA, 105 bp, Homo sapiens
gctaaagctgaaaattaaattttagatctttcaatactcttaaattttatatgtaagtggtttttatattttcacatttgaaataaagtaatttttataaycttg

SEQ ID NO: 52252 - DNA, 201 bp, Homo sapiens; identical to SEQ ID NO: 52247

SEQ ID NO: 52253 - DNA, 201 bp, Homo sapiens; identical to SEQ ID NO: 52248

SEQ ID NO: 52254 - DNA, 105 bp, Homo sapiens; identical to SEQ ID NO: 52251

SEQ ID NO: 52255 - DNA, 201 bp, Homo sapiens
atgacactatttatgcccatcaggacaaaagagatgatgttttgattggtcttaagtcaacggctctgcggttcggagaaaataccaagccgtggctcagyggcttcagtgttgcaatgctgggggcactgagcctagtgggtgtgaacagtggacagactgctccctactacgctgccctgggtgctgtaggagcccatc

SEQ ID NO: 52256 - DNA, 201 bp, Homo sapiens; identical to SEQ ID NO: 52255

SEQ ID NO: 52257 - DNA, 201 bp, Homo sapiens; identical to SEQ ID NO: 52255

SEQ ID NO: 52258 - DNA, 201 bp, Homo sapiens; identical to SEQ ID NO: 52255

SEQ ID NO: 52259 - DNA, 201 bp, Homo sapiens; identical to SEQ ID NO: 52255

SEQ ID NO: 52260 - DNA, 201 bp, Homo sapiens
aactatagataactggttaagggaagttaatttatggtgccctactttgaaggtcctctgttactatggttctcaagaagaacgtaaacaaattagatttmacattcatagtagatatgaagattacaatgtaattgtgaccacatataactgtgcgatcagcagttctgatgaccgtagtctgtttcgacggctgaaact

SEQ ID NO: 52261 - DNA, 201 bp, Homo sapiens
acaaatgtgaagacatttcaaataaattgaccaaacaagttaccatgcttactggaaatggaggtggatggaacatagaacaaccttccattctaaaccaragtttgtcactcaagccctatcagaaggttggtttgaattggctggcattggtacataaacatggacttaatggcattttggcagatgaaatgggcctag

SEQ ID NO: 52262 - DNA, 201 bp, Homo sapiens
tctctaaatagtagtttattactgccacatctccatgcatcagcaaaatgttggtgacatttttctagcctggcagaacagattacttaaagctatttcayttcaaagcagactgaatgtgacttcatctaaaggcagcattaggtactgcatggaaataggtcattaacttgaaactcttatcaaaatatattttaccag

SEQ ID NO: 52263 - DNA, 201 bp, Homo sapiens
tagatattaaagactgagaactcacggcttaaccccagtcttgatggtatattgaacagactgaatatattttaccattacagggctaaaaggagtcttcrtgtgttaatactacctccttgtacatcactatacccaaatcagttattcaaattgttaggaattttaccttttaaaatctcataatggatatctcatgtt

SEQ ID NO: 52264 - DNA, 201 bp, Homo sapiens
taccccccaagaaagatcgaattgagttgtgtgcaatgtcggagaagcaggagcaactctatttgggtcttttcaacagattgaaaaaatctatcaataayttggaaaaaaacacagaaatgtgcaatgtcatgatgcagttgaggaaaatggccaatcatcctttattacatcgccaatattacacagctgaaaaactca

SEQ ID NO: 52265 - DNA, 201 bp, Homo sapiens
ctccaatacagttcaagagaaaacattcaacaaagatacagtgattatagtttctgagccatctgaagatgaagagtcccaaggccttcctaccatggcaygtagaaatgatgatatttcagaactggaagacctttcggaattggaagaccttaaagatgctaaacttcagactttgaaggaactttttccacaaagaag

SEQ ID NO: 52266 - DNA, 201 bp, Homo sapiens
gaaatttagaagtgaagttgtctatttgatatttaactctttattaaatctttctttaaatttctgcctgtcagtctatattgctgtttttattatacatmagtttctttgtataacttgtgagttccatgtgttttgtttttattatgtaaatatcattataaataaacttatttataaatcaaagatttgttaattttt

SEQ ID NO: 52267 - DNA, 201 bp, Homo sapiens
ggcattttggcagatgaaatgggcctaggaaaaactattcaagccattgcatttctggcatacctctatcaggagggtaataatggtcctcatttgatcgktgttccagcttcaactatagataactggttaagggaagttaatttatggtgccctactttgaaggtcctctgttactatggttctcaagaagaacgtaaa

SEQ ID NO: 52268 - DNA, 201 bp, Homo sapiens
ttattcaaattgttaggaattttaccttttaaaatctcataatggatatctcatgttttctgtattaatgtattttcaatgataggctgtttctttttttkttgttattgttgttgttgttatatccatacttttatctctaatgaaatgtagttgggttcttcctgtaatgcgctattatgtcttgggcttaataaaaat

SEQ ID NO: 52269 - DNA, 201 bp, Homo sapiens
aagaagaacgtaaacaaattagatttaacattcatagtagatatgaagattacaatgtaattgtgaccacatataactgtgcgatcagcagttctgatgaycgtagtctgtttcgacggctgaaacttaattacgcaatttttgatgagggccatatgctgaagaatatgggctccattcgctaccagcaccttatgacaa

SEQ ID NO: 52270 - DNA, 201 bp, Homo sapiens
aaacaggaacttagagaagtactcaaggaacatgaatggatgtacacagaagctttagaatctctaaaagtgtttgcagaagaccaagatatgcaatatgyatcacaaagtgaggttccaaatggaaaagaagtttcttcaagaagtcaaaattaccctaaaaatgcaactaaaacaaaactaaaacagaaattttcaatg

SEQ ID NO: 52271 - DNA, 201 bp, Homo sapiens
tcagagccatatgaggaagatgaatttaatgatgatcaatctataaaaaagacaagactggatcatggagaggaatcaaatgagtctgcagaatctagcartaattgggaaaagcaggaaagtattgtactgaaattgcaaaaggaatttcccaattttgataaacaggaacttagagaagtactcaaggaacatgaatgg

SEQ ID NO: 52272 - DNA, 201 bp, Homo sapiens
aaaattaccctaaaaatgcaactaaaacaaaactaaaacagaaattttcaatgaaagcacaaaatggctttaacaagaaacgtaaaaaaaatgtttttaakccaaagagagttgttgaagactctgaatatgattcaggttctgatgtcggtagttcactagatgaggactatagtagtggtgaagaagtgatggaggatg

SEQ ID NO: 52273 - DNA, 201 bp, Homo sapiens
cgtttccccaaattgctccaatacagttcaagagaaaacattcaacaaagatacagtgattatagtttctgagccatctgaagatgaagagtcccaaggcyttcctaccatggcacgtagaaatgatgatatttcagaactggaagacctttcggaattggaagaccttaaagatgctaaacttcagactttgaaggaact

SEQ ID NO: 52274 - DNA, 201 bp, Homo sapiens
taggaaattttttttttattttcaacctttgttacatagcactgaggctacaagatcatagttcatttaaagcccccatccctgcaaggtggtgctttctrccaatatgaatcttttcaacctggaccgttttcgctttgagaaaaggaataagattgaggaagcgcccgaagcaacccctcaaccttcccagcctggccc

SEQ ID NO: 52275 - DNA, 201 bp, Homo sapiens
tgcttcaattggtgaacttactttgattcctcagtgttctcagaaaaaggctcagaagataacagaactccggccctttaatagttgggaggctctgttcrcaaagatgtccaaaactaatggcttatcagaagatttgatatggcactgtaaaacactgatccaagaaagagatgtagttataaggcttatgaacaaatg

SEQ ID NO: 52276 - DNA, 201 bp, Homo sapiens; identical to SEQ ID NO: 52260

SEQ ID NO: 52277 - DNA, 201 bp, Homo sapiens; identical to SEQ ID NO: 52261

SEQ ID NO: 52278 - DNA, 201 bp, Homo sapiens; identical to SEQ ID NO: 52267

SEQ ID NO: 52279 - DNA, 201 bp, Homo sapiens; identical to SEQ ID NO: 52269

SEQ ID NO: 52280 - DNA, 201 bp, Homo sapiens; identical to SEQ ID NO: 52270

SEQ ID NO: 52281 - DNA, 201 bp, Homo sapiens; identical to SEQ ID NO: 52271

SEQ ID NO: 52282 - DNA, 201 bp, Homo sapiens; identical to SEQ ID NO: 52272

SEQ ID NO: 52283 - DNA, 201 bp, Homo sapiens; identical to SEQ ID NO: 52273

SEQ ID NO: 52284 - DNA, 201 bp, Homo sapiens; identical to SEQ ID NO: 52264

SEQ ID NO: 52285 - DNA, 201 bp, Homo sapiens
ggcgggcgcgaggcccgctagggggttatactggggaacgtgcctgcgcgtgcttggatagttcatttaaagcccccatccctgcaaggtggtgctttctrccaatatgaatcttttcaacctggaccgttttcgctttgagaaaaggaataagattgaggaagcgcccgaagcaacccctcaaccttcccagcctggccc

SEQ ID NO: 52286 - DNA, 201 bp, Homo sapiens; identical to SEQ ID NO: 52275

SEQ ID NO: 52287 - DNA, 201 bp, Homo sapiens; identical to SEQ ID NO: 52265

SEQ ID NO: 52288 - DNA, 201 bp, Homo sapiens; identical to SEQ ID NO: 52260

SEQ ID NO: 52289 - DNA, 201 bp, Homo sapiens; identical to SEQ ID NO: 52261

SEQ ID NO: 52290 - DNA, 201 bp, Homo sapiens; identical to SEQ ID NO: 52262

SEQ ID NO: 52291 - DNA, 201 bp, Homo sapiens; identical to SEQ ID NO: 52263

SEQ ID NO: 52292 - DNA, 201 bp, Homo sapiens
taccccccaagaaagatcgaattgagttgtgtgcaatgtcggagaagcaggagcaactctatttgggtcttttcaacagattgaaaaaatctatcaataayttggtcacagaaaaaaacacagaaatgtgcaatgtcatgatgcagttgaggaaaatggccaatcatcctttattacatcgccaatattacacagctgaaa

SEQ ID NO: 52293 - DNA, 201 bp, Homo sapiens; identical to SEQ ID NO: 52265

SEQ ID NO: 52294 - DNA, 201 bp, Homo sapiens; identical to SEQ ID NO: 52266

SEQ ID NO: 52295 - DNA, 201 bp, Homo sapiens; identical to SEQ ID NO: 52267

SEQ ID NO: 52296 - DNA, 201 bp, Homo sapiens; identical to SEQ ID NO: 52268

SEQ ID NO: 52297 - DNA, 201 bp, Homo sapiens; identical to SEQ ID NO: 52269

SEQ ID NO: 52298 - DNA, 201 bp, Homo sapiens; identical to SEQ ID NO: 52270

SEQ ID NO: 52299 - DNA, 201 bp, Homo sapiens; identical to SEQ ID NO: 52271

SEQ ID NO: 52300 - DNA, 201 bp, Homo sapiens; identical to SEQ ID NO: 52272

SEQ ID NO: 52301 - DNA, 201 bp, Homo sapiens; identical to SEQ ID NO: 52273

SEQ ID NO: 52302 - DNA, 201 bp, Homo sapiens; identical to SEQ ID NO: 52274

SEQ ID NO: 52303 - DNA, 201 bp, Homo sapiens; identical to SEQ ID NO: 52275

SEQ ID NO: 52304 - DNA, 201 bp, Homo sapiens; identical to SEQ ID NO: 52260

SEQ ID NO: 52305 - DNA, 201 bp, Homo sapiens; identical to SEQ ID NO: 52261

SEQ ID NO: 52306 - DNA, 201 bp, Homo sapiens; identical to SEQ ID NO: 52262

SEQ ID NO: 52307 - DNA, 201 bp, Homo sapiens; identical to SEQ ID NO: 52263

SEQ ID NO: 52308 - DNA, 201 bp, Homo sapiens; identical to SEQ ID NO: 52264

SEQ ID NO: 52309 - DNA, 201 bp, Homo sapiens; identical to SEQ ID NO: 52265

SEQ ID NO: 52310 - DNA, 201 bp, Homo sapiens; identical to SEQ ID NO: 52266

SEQ ID NO: 52311 - DNA, 201 bp, Homo sapiens; identical to SEQ ID NO: 52267

SEQ ID NO: 52312 - DNA, 201 bp, Homo sapiens; identical to SEQ ID NO: 52268

SEQ ID NO: 52313 - DNA, 201 bp, Homo sapiens; identical to SEQ ID NO: 52269

SEQ ID NO: 52314 - DNA, 201 bp, Homo sapiens; identical to SEQ ID NO: 52270

SEQ ID NO: 52315 - DNA, 201 bp, Homo sapiens; identical to SEQ ID NO: 52271

SEQ ID NO: 52316 - DNA, 201 bp, Homo sapiens; identical to SEQ ID NO: 52272

SEQ ID NO: 52317 - DNA, 201 bp, Homo sapiens; identical to SEQ ID NO: 52273

SEQ ID NO: 52318 - DNA, 144 bp, Homo sapiens
atagttcatttaaagcccccatccctgcaaggtggtgctttctrccaatatgaatcttttcaacctggaccgttttcgctttgagaaaaggaataagattgaggaagcgcccgaagcaacccctcaaccttcccagcctggccc

SEQ ID NO: 52319 - DNA, 201 bp, Homo sapiens; identical to SEQ ID NO: 52275

SEQ ID NO: 52320 - DNA, 201 bp, Homo sapiens
ataggaagaagaaaaattttaaaatgattgatttttgactctacattctttatctaccatactgctcttttcctttttagaaatattactaagcactttcmgtatagataaatgaaatacaggctaatctttaggtgtcttaggaatttttgctttttgaaaaagaaaagctaatagcctaactgcagaggaactgagtgg

SEQ ID NO: 52321 - DNA, 201 bp, Homo sapiens
gttgtgtgtgtctgtcttcatcccaggctgagctccttgaggtgaggatgttgtgctgtttgcctccctcacagtgccttggtcttagtggatgcccagtygtcttgtgaatgacttttaagaagtgtacttaagagaaaaatcctaccttatttgaataattacaagtcatgtttttgttgcttaaaggtgataaatcag

SEQ ID NO: 52322 - DNA, 201 bp, Homo sapiens
attctgctttcaaactatactgaacattcctgtcctagcgtccctgccaccaggcccaatgcatctgatccttgaatatactctcaaagaattcactctckttttattaagagaactaaattgtttctaaatgtagatggtccctctggaaaagcagttttcagcaggggtggtaaccccttcagagggagtttggaaatg

SEQ ID NO: 52323 - DNA, 201 bp, Homo sapiens
ccagcgctttgattacactaatagtgagttcaagaaaatgcttggttttatgtcacgaggcctagaaatctgtctgaacagtcaagtcctcctggtcaacmtatgcccttggctttattaccttccctttggaccatttaaggaattaagacaaattgaaaaggatataaccagtttccttaaaaaaatcatcaaagacca

SEQ ID NO: 52324 - DNA, 201 bp, Homo sapiens
caggctgagctccttgaggtgaggatgttgtgctgtttgcctccctcacagtgccttggtcttagtggatgcccagttgtcttgtgaatgacttttaagamgtgtacttaagagaaaaatcctaccttatttgaataattacaagtcatgtttttgttgcttaaaggtgataaatcagtgtatattatttgttaatgtcca

SEQ ID NO: 52325 - DNA, 201 bp, Homo sapiens
cctcctgactggaagatttggtctaactttagccccacatccatttaatataactatttcaaggagatgaagagcatctccaagaagagatggtaaaaagrtatataaatacatatccttctaagcagattcttcctactgcaaaggacagtgaatccagcaactcagtggatccaagctgggctcagaggtcggaaggag

SEQ ID NO: 52326 - DNA, 201 bp, Homo sapiens
tatcattggggatctctttattgctgggactgataccacaactaactctttgctctggtgcctgctgtatatgtcgctgaaccccgatgtacaagaaaagrttcatgaagaaattgaaagagtcattggcgccaaccgagctccttccctcacagacaaggcccagatgccctacacagaagccaccatcatggaagtgca

SEQ ID NO: 52327 - DNA, 201 bp, Homo sapiens; identical to SEQ ID NO: 52320

SEQ ID NO: 52328 - DNA, 201 bp, Homo sapiens; identical to SEQ ID NO: 52321

SEQ ID NO: 52329 - DNA, 201 bp, Homo sapiens; identical to SEQ ID NO: 52322

SEQ ID NO: 52330 - DNA, 201 bp, Homo sapiens; identical to SEQ ID NO: 52323

SEQ ID NO: 52331 - DNA, 201 bp, Homo sapiens; identical to SEQ ID NO: 52324

SEQ ID NO: 52332 - DNA, 201 bp, Homo sapiens; identical to SEQ ID NO: 52325

SEQ ID NO: 52333 - DNA, 201 bp, Homo sapiens; identical to SEQ ID NO: 52326

SEQ ID NO: 52334 - DNA, 160 bp, Homo sapiens
caaatgccatacaggtttattttcttactgtgtgccatttgggaccaacagagcaacggstagttttaccaagagattatatttgaatgatacctgatttggtatttcatttaaagttctggaaatgggctgggcgcagtggcccatgcctataatccca

SEQ ID NO: 52335 - DNA, 201 bp, Homo sapiens
cttcacagactaatttcttatctcgagcatggtggttccccatcttttatttttttgagaaaaatgtacaaggctcaattccttgctgcttctcctggccrctgtcttggcctcctggctgcttcaaatcatcatgcaaaaagtattcacgggttcagaagattggtgaagacaatgagaaatcgacctagcccgcgtgta

SEQ ID NO: 52336 - DNA, 201 bp, Homo sapiens
acttgaccatctcctttttgatctgaagactaggggacaatggatatcatagagacagcaaaacttgaagaacatttggaaaatcaacccagtgatcctaygaacacttatgcaagacccgctgaacctgttgaagaagaaaacaaaaatggcaatggtaaacccaagagcttatccagtgggctgcgaaaaggcaccaaa

SEQ ID NO: 52337 - DNA, 201 bp, Homo sapiens
cttcacagactaatttcttatctcgagcatggtggttccccatcttttatttttttgagaaaaatgtacaaggctcaattccttgctgcttctcctggccrctgtcttggcctcctggctgcttcaaatcatcatgcaaaaagtattcacgggttcagaagattggtgaagacaatgagaaatcgacctgaggagcaaaac

SEQ ID NO: 52338 - DNA, 201 bp, Homo sapiens
ttgtgcgtcagctttgggtgaattttgtttctaccctgtcacggggaaagttcgggttgagtccaggagtgcacactgctgctgccacccaatgcgctacrtatcacttttttttgttttgttttgttttgtttttaaaagatcattttatcttaaaaaggaaagctgatccaagtaaacacgaaagtatttgacacaccc

SEQ ID NO: 52339 - DNA, 201 bp, Homo sapiens
gtcacacggttacgctgacactgacttatttgttcatcaaagaatattcgcctcgtcacttctggtggtatcatttaatctgctggctgctgagtgctgcygggatcatctgcattcttgtagcacacgaacactacactatcgatgtgatcattgcttattatatcacaacacgactgttttggtggtaccattcaatgg

SEQ ID NO: 52340 - DNA, 201 bp, Homo sapiens
atcatgcaaaaagtattcacgggttcagaagattggtgaagacaatgagaaatcgacctgaggagcaaaacaaaggcatcagctcttacaccaaaagagtyaacgctgtaaccaaaggtatagttttgttttttattttaggagaactgactggtaaatgaagaaatggaccaaattttgtgtaaacgattagaaagatga

SEQ ID NO: 52341 - DNA, 201 bp, Homo sapiens
aacggattctacgattgatttctggtggtggattgtccataactggatcacatatcttatgtggagacttcctcttcagcggtcacacggttacgctgacmctgacttatttgttcatcaaagaatattcgcctcgtcacttctggtggtatcatttaatctgctggctgctgagtgctgccgggatcatctgcattcttg

SEQ ID NO: 52342 - DNA, 201 bp, Homo sapiens
accaactcagagacgtcgatttctcattgtcttcaccaatcttctgaacccgtgaatactttttgcatgatgatttgaagcagccaggaggccaagacagyggccaggagaagcagcaaggaattgagccttgtacatttttctcaaaaaaataaaagatggggaaccaccatgctcgagataagaaattagtctgtgaag

SEQ ID NO: 52343 - DNA, 201 bp, Homo sapiens
gctggggaggccggggagaggttattacgacctattgccctgctaacaacgagccaatagcaagagtccgacaggccagtgtggcagactatgaagaaacygtaaagaaagcaagagaagcatggaaaatctgggcagatattcctgctccaaaacgaggagaaatagtaagacagattggcgatgccttgcgggagaaga

SEQ ID NO: 52344 - DNA, 201 bp, Homo sapiens
agggccttgggctcatcccgagtcccgggctcagtatgtggcgccttcctcgcgcgctgtgtgtgcacgctgcaaagaccagcaagctctctggaccttgsagcaggcctgccgccttcatgtccactctcctcatcaatcagccccagtatgcgtggctgaaagagctggggctccgcgaggaaaacgagggcgtgtata

SEQ ID NO: 52345 - DNA, 201 bp, Homo sapiens
gagcatgtttcttggagcagtggaagaagcaaagaaagaaggtggcacagtggtctatgggggcaaggttatggatcgccctggaaattatgtagaaccgrcaattgtgacaggtcttggccacgatgcgtccattgcacacacagagacttttgctccgattctctatgtctttaaattcaagaatgaagaagaggtctt

SEQ ID NO: 52346 - DNA, 201 bp, Homo sapiens
aatcagccccagtatgcgtggctgaaagagctggggctccgcgaggaaaacgagggcgtgtataatggaagctggggaggccggggagaggttattacgamctattgccctgctaacaacgagccaatagcaagagtccgacaggccagtgtggcagactatgaagaaactgtaaagaaagcaagagaagcatggaaaatc

SEQ ID NO: 52347 - DNA, 130 bp, Homo sapiens
gccgcaggctcctccggaagaccaggggcmgacggggcggtggcggggtcgtgcccagtgggaggggtcgggtctgcccaatgggttctcccgggcggggggcggggctctatttcagcagctctcaggg

SEQ ID NO: 52348 - DNA, 111 bp, Homo sapiens
gccgcaggctyctccggaagaccaggggcagacggggcggtggcggggtcgtgcccagtgggaggggtcgggtctgcccaatgggttctcccgggcggggggcggggctct

SEQ ID NO: 52349 - DNA, 201 bp, Homo sapiens
cggcattcaatttccctgtggcagtgtatggttggaacaacgccatcgccatgatctgtggaaatgtctgcctctggaaaggagctccaaccacttccctyattagtgtggctgtcacaaagataatagccaaggttctggaggacaacaagctgcctggtgcaatttgttccttgacttgtggtggagcagatattggca

SEQ ID NO: 52350 - DNA, 201 bp, Homo sapiens
ggggctctatttcagcagctctcagggccttgggctcatcccgagtcccgggctcagtatgtggcgccttcctcgcgcgctgtgtgtgcacgctgcaaagwccagcaagctctctggaccttggagcaggcctgccgccttcatgtccactctcctcatcaatcagccccagtatgcgtggctgaaagagctggggctccg

SEQ ID NO: 52351 - DNA, 201 bp, Homo sapiens
tggaaattatgtagaaccgacaattgtgacaggtcttggccacgatgcgtccattgcacacacagagacttttgctccgattctctatgtctttaaattcmagaatgaagaagaggtctttgcatggaataatgaagtaaaacagggactttcaagtagcatctttaccaaagatctgggcagaatctttcgctggcttgg

SEQ ID NO: 52352 - DNA, 201 bp, Homo sapiens
gctctcagggccttgggctcatcccgagtcccgggctcagtatgtggcgccttcctcgcgcgctgtgtgtgcacgctgcaaagaccagcaagctctctggwccttggagcaggcctgccgccttcatgtccactctcctcatcaatcagccccagtatgcgtggctgaaagagctggggctccgcgaggaaaacgagggcg

SEQ ID NO: 52353 - DNA, 201 bp, Homo sapiens
tttgtcattggctgtcagctagcaggcctggccgctcccgtgcggagagaccatctcttcagggcaatgtccaggccgagcagcgtctccccgcggcagcyggctcctggcggtggcggaggcggcggcccctcgccttgtggccctgggggcggcggccgggccaaggggctgaaggacattcgcattgatgaggaggtg

SEQ ID NO: 52354 - DNA, 201 bp, Homo sapiens
cagatcagtcttctctgaaatctacagacagcagtagttacccaagtccttgtgctagtccttctcctccatcctcaggaaagggctcaaaatctccttcrccaagaccaaacatgcctgttcgatacttcataatgaagagtagcaatttgagaaaccttgaaatttctcaacagaagggtatctggtctacaactccta

SEQ ID NO: 52355 - DNA, 201 bp, Homo sapiens
ctccatctaaaccttggtctcaagttgatgaagctaccataagagcaattatagctgttttaagcactgaagaacagtctgcaggtttacaacaaccatckgggattggccaaaggccaaggcctatgtcttcagaagagcttcctttggcctcatcttggaggtcaaataatagtaggaaaagttcagcagatactgaat

SEQ ID NO: 52356 - DNA, 201 bp, Homo sapiens
atcgatttagtgattttttacttacaaagttaagagatttgttgcaaaagcacccaactttgaaactaattctttctagtgctgccttggatgtaaatctstttataagatattttggaagttgtccagtgatatatatacagggaagaccatttgaagtaaaagaaatgtttctggaagatattttaagaacaactggat

SEQ ID NO: 52357 - DNA, 201 bp, Homo sapiens
tatagttctagttattagctttggggttttcttgtactttaagacatacctgtaaattgaacctatttgaattatattccactgtatgtgtattatggctsttttcctattagagcaacttgtgtttccctgataatgtgtacattttttaggcatgtacttaatagttcacaatgttctaaatttggaaggacttaaaaa

SEQ ID NO: 52358 - DNA, 201 bp, Homo sapiens
atcatttggctgacttgccagtagaaccacatcttggtaaaatggtcttgtgtgctgttgttttaaagtgtctggaccccatccttacaattgcttgcacrctagcttatcgagatccttttgtactacctactcaggcctctcaaaaacgtgcagctatgctttgtaggaaacgttttactgcaggagctttcagtgacc

SEQ ID NO: 52359 - DNA, 166 bp, Homo sapiens
caatggcgcaggcttcacttctgctgtggcggtgactgaggcctttctggtgacctcagcccaacrcaggccgtctccggagcttcccggtagtggccccggattcccacggtctttgtcattggctgtcagctagcaggcctggccgctcccgtgcggagagacc

SEQ ID NO: 52360 - DNA, 201 bp, Homo sapiens
attgtcccattgctgattttcttatgaaagctcctgaacctccaccagctttaattgtaagaaatgctgtacaaatgcttaagacaatagatgcaatggayacatgggaagatctgactgaacttgggtatcatttggctgacttgccagtagaaccacatcttggtaaaatggtcttgtgtgctgttgttttaaagtgtc

SEQ ID NO: 52361 - DNA, 201 bp, Homo sapiens
gattagattaagtgcttagttttattcctaattctgccccttttaacctgatgtgtaccttactctttcctccctctcttcctcccttcctcctctccccrctcctttcctgcatttctccctccctccttccctcgtcacatctcttatatgagcacagtaattatgacctttttgttttggctacaacttgattgaaac

SEQ ID NO: 52362 - DNA, 201 bp, Homo sapiens
ttctttctagtgctgccttggatgtaaatctctttataagatattttggaagttgtccagtgatatatatacagggaagaccatttgaagtaaaagaaatrtttctggaagatattttaagaacaactggatatacaaacaaagaaatgttaaaatatggtgcagtactaatttttctgcctggatatgacgaaattgttg

SEQ ID NO: 52363 - DNA, 201 bp, Homo sapiens
aaagaaagccttccctttcaatttgcacaccatttactcaatccatggaatgacaacaagaaagtgcagataagcagggatgggcaggaactagaacctcwggttggtgaacagttgctccagttatgggaacgtcttcccttgggagaaaaaaacacaactgattgacactcagaactcttagctgtggaagaacatcat

SEQ ID NO: 52364 - DNA, 201 bp, Homo sapiens
acaaatacgtcaacacctatgaaaagaagcggggaaaacaacaacaaggacaacaacaaaaaaccagtgaaattctacaagtgtcccttttaaaaatagtrtgtgctaactaagggctattcattctgccatttttaacttgagacacatttaagaataaagttggatgttctttttctgtgattatgaaatgcaataaaa

SEQ ID NO: 52365 - DNA, 201 bp, Homo sapiens
gaaatctccatctccagcattacacccacctcagaagtacaaagatagaggaattttacatcctaaacgaggtactgaggaccgatcagatcagtcttctstgaaatctacagacagcagtagttacccaagtccttgtgctagtccttctcctccatcctcaggaaagggctcaaaatctccttcgccaagaccaaacat

SEQ ID NO: 52366 - DNA, 201 bp, Homo sapiens
aggcatgtacttaatagttcacaatgttctaaatttggaaggacttaaaaaaaaaacttgtttaaatttccatctgttttgtaatatctagctctatatgkaaatgatgggtttgttggtatttaaaatgaatacaacttgaatgtaattaaagtgctgttttttggaagcgataaactttaaatatacttattaaaatga

SEQ ID NO: 52367 - DNA, 131 bp, Homo sapiens
aatatctagctctatatgtaaatgatgggtttgttggtatttaaaatgaatacaacttgaatgtaattaaagtgctgttttttggaagcgataaactttaratatacttattaaaatgaaattctattaag

SEQ ID NO: 52368 - DNA, 201 bp, Homo sapiens; identical to SEQ ID NO: 52354

SEQ ID NO: 52369 - DNA, 201 bp, Homo sapiens; identical to SEQ ID NO: 52355

SEQ ID NO: 52370 - DNA, 201 bp, Homo sapiens; identical to SEQ ID NO: 52358

SEQ ID NO: 52371 - DNA, 201 bp, Homo sapiens; identical to SEQ ID NO: 52360

SEQ ID NO: 52372 - DNA, 201 bp, Homo sapiens; identical to SEQ ID NO: 52361

SEQ ID NO: 52373 - DNA, 201 bp, Homo sapiens; identical to SEQ ID NO: 52364

SEQ ID NO: 52374 - DNA, 201 bp, Homo sapiens; identical to SEQ ID NO: 52363

SEQ ID NO: 52375 - DNA, 201 bp, Homo sapiens; identical to SEQ ID NO: 52365

SEQ ID NO: 52376 - DNA, 201 bp, Homo sapiens; identical to SEQ ID NO: 52354

SEQ ID NO: 52377 - DNA, 201 bp, Homo sapiens; identical to SEQ ID NO: 52355

SEQ ID NO: 52378 - DNA, 201 bp, Homo sapiens; identical to SEQ ID NO: 52357

SEQ ID NO: 52379 - DNA, 201 bp, Homo sapiens; identical to SEQ ID NO: 52358

SEQ ID NO: 52380 - DNA, 201 bp, Homo sapiens; identical to SEQ ID NO: 52360

SEQ ID NO: 52381 - DNA, 201 bp, Homo sapiens; identical to SEQ ID NO: 52361

SEQ ID NO: 52382 - DNA, 201 bp, Homo sapiens; identical to SEQ ID NO: 52363

SEQ ID NO: 52383 - DNA, 201 bp, Homo sapiens; identical to SEQ ID NO: 52364

SEQ ID NO: 52384 - DNA, 201 bp, Homo sapiens; identical to SEQ ID NO: 52366

SEQ ID NO: 52385 - DNA, 201 bp, Homo sapiens; identical to SEQ ID NO: 52365

SEQ ID NO: 52386 - DNA, 131 bp, Homo sapiens; identical to SEQ ID NO: 52367

SEQ ID NO: 52387 - DNA, 201 bp, Homo sapiens; identical to SEQ ID NO: 52353

SEQ ID NO: 52388 - DNA, 182 bp, Homo sapiens
ttctttctagtgctgccttggatgtaaatctctttataagatattttggaagttgtccagtgatatatatacagggaagaccatttgaagtaaaagaaatrtttctggaagatattttaagaacaactggatatacaaacaaagaaatgttaaaatataaaaaggaaaaacagcaaggtaaa

SEQ ID NO: 52389 - DNA, 201 bp, Homo sapiens; identical to SEQ ID NO: 52356

SEQ ID NO: 52390 - DNA, 166 bp, Homo sapiens; identical to SEQ ID NO: 52359

SEQ ID NO: 52391 - DNA, 201 bp, Homo sapiens
gaatgtaagcacacggacttctgaacgccttctagatctccatcaaagctggaaaaccaaggactctaaacaatgctcagagaatgtacatatctccacaygactgattttagattgggagggtggggggatttgtagcataactgtagctcaagtttaaaagccatgtataaccaagtgtgctctttttttaaaaggtag

SEQ ID NO: 52392 - DNA, 201 bp, Homo sapiens
gagcgctattcttcactcgagacaagcaggtaactcgtggcacagtcagccaggatcaaatctaaatcgctgtggtttccgaggctcttcatacctgggtrttccgttcaatccatcaaaggctcctggaacagctcatccttatgatagtggccacattgcaatgacctacactggcctctcatgcttagttattcttgg

SEQ ID NO: 52393 - DNA, 201 bp, Homo sapiens
taggttatctttttaaaaactcttcagtgcaaattgtatcttattataaaatggacacaaattttcaagtttacacttcatatagcattgataatcttcasgtgaacacttagtgatcatttaaaaagctcactgctgatcgtagaaaatttgctttaattaattaagtatctgggattattctttgaaaacagatgacca

SEQ ID NO: 52394 - DNA, 201 bp, Homo sapiens
ttagccatttgaagtttttaatttattgcccccagtgtgttagctgctctaatttcaaactaatacttttctaatttttttcaaattaaataagtaaaaartacaaaaacagaaccattcaaacagattcagtggtgtaactcaatacatggtcatttttattctcatattttcaggtaagtgaaagggaaatgcgaccat

SEQ ID NO: 52395 - DNA, 201 bp, Homo sapiens
tttgttcattgttttgttttaagtctatgaactagctaattataaaggaggtagtataaaaactcttcattagtaattaatttatcaataactcatatccrttacttgctcagtgacattcagaactattgcgtctagtactgaaatggggaaagaaatctcttcactaaaggagttggctttaagttagtcttggtgata

SEQ ID NO: 52396 - DNA, 201 bp, Homo sapiens
atctccatcaaagctggaaaaccaaggactctaaacaatgctcagagaatgtacatatctccacatgactgattttagattgggagggtggggggatttgyagcataactgtagctcaagtttaaaagccatgtataaccaagtgtgctctttttttaaaaggtagagtcttacaatcaaatctcctgctgatttcacttt

SEQ ID NO: 52397 - DNA, 201 bp, Homo sapiens
tttagagggtaagaaatagggttttgtttttgttcattgttttgttttaagtctatgaactagctaattataaaggaggtagtataaaaactcttcattartaattaatttatcaataactcatatccgttacttgctcagtgacattcagaactattgcgtctagtactgaaatggggaaagaaatctcttcactaaagg

SEQ ID NO: 52398 - DNA, 201 bp, Homo sapiens
tggaagatgggagtttttgtgcagtacctgaaggcagtgaaaatgacatgcgatttgtgtactgtgcttcctgtatttgctatatgctcaacaactggtcrggcatggatatgaaaaaagccatcacctatattagaaggagtatgtcctatgacaatggactggcacagggagctggacttgaatctcatggaggatcaa

SEQ ID NO: 52399 - DNA, 201 bp, Homo sapiens; identical to SEQ ID NO: 52391

SEQ ID NO: 52400 - DNA, 201 bp, Homo sapiens
atcggcacgtgcgatttttccagcgctgcctccaggttttgccggagcgctattcttcactcgagacaagcaggttgacaattgcattttttgcactctcygggctggatatgttggattccttagatgtggtgaacaaagatgatataatagagtggatttattccctgcaggtccttcccacagaagacagatcaaatc

SEQ ID NO: 52401 - DNA, 201 bp, Homo sapiens
agatgatataatagagtggatttattccctgcaggtccttcccacagaagacagatcaaatctaaatcgctgtggtttccgaggctcttcatacctgggtrttccgttcaatccatcaaaggctcctggaacagctcatccttatgatagtggccacattgcaatgacctacactggcctctcatgcttagttattcttgg

SEQ ID NO: 52402 - DNA, 201 bp, Homo sapiens; identical to SEQ ID NO: 52393

SEQ ID NO: 52403 - DNA, 201 bp, Homo sapiens; identical to SEQ ID NO: 52394

SEQ ID NO: 52404 - DNA, 201 bp, Homo sapiens; identical to SEQ ID NO: 52395

SEQ ID NO: 52405 - DNA, 201 bp, Homo sapiens; identical to SEQ ID NO: 52396

SEQ ID NO: 52406 - DNA, 201 bp, Homo sapiens; identical to SEQ ID NO: 52397

SEQ ID NO: 52407 - DNA, 201 bp, Homo sapiens; identical to SEQ ID NO: 52398

SEQ ID NO: 52408 - DNA, 201 bp, Homo sapiens
atacagggaaataactgcctgtgagtttgtggaatgcttcacaaagacagttgatctgagccatcagcaagaagtcaagttgaaggacaaggacagcagtrcaaaatgtggattatgtcacaatctggcatagttggatctgtgagtttaaaatgaaatagttactgctgagataccatttcttctctttgcaaggataca

SEQ ID NO: 52409 - DNA, 201 bp, Homo sapiens
gtttgtggaatgcttcacaaagacagttgatctgagccatcagcaagaagtcaagttgaaggacaaggacagcagtacaaaatgtggattatgtcacaatmtggcatagttggatctgtgagtttaaaatgaaatagttactgctgagataccatttcttctctttgcaaggatacacatattcaacatacacaagagagg

SEQ ID NO: 52410 - DNA, 201 bp, Homo sapiens
tcatctgagaagacttaagttcttccagctttggacaataactgcttttagaaactgtaaagtagttacaagagaacagttgcccaagactcagaattttwaaaaaaaaaaatggagcatgtgtattatgtggccaatgtcttcactctaacttggttatgagactaaaaccattcctcactgctctaacatgctgaagaa

SEQ ID NO: 52411 - DNA, 201 bp, Homo sapiens
gtgtactcacattttaaagtatgaaccacagttaactagtggtctcaggggtagtgaaacactcacttttttttttgtttgtttttttttgtttgtttgttgaaatggcttagttgaagtatacttaaggtactgatcatgctgtgttagtaatttgggcggggaggggggtaactcagccatgttttgtgttggcataac

SEQ ID NO: 52412 - DNA, 201 bp, Homo sapiens
ggtgtactcacattttaaagtatgaaccacagttaactagtggtctcaggggtagtgaaacactcacttttttttttgtttgtttttttttgtttgtttgttgaaatggcttagttgaagtatacttaaggtactgatcatgctgtgttagtaatttgggcggggaggggggtaactcagccatgttttgtgttggcataa

SEQ ID NO: 52413 - DNA, 201 bp, Homo sapiens
gggtgtactcacattttaaagtatgaaccacagttaactagtggtctcaggggtagtgaaacactcacttttttttttgtttgtttttttttgtttgtttgttgaaatggcttagttgaagtatacttaaggtactgatcatgctgtgttagtaatttgggcggggaggggggtaactcagccatgttttgtgttggcata

SEQ ID NO: 52414 - DNA, 201 bp, Homo sapiens
tgggtgtactcacattttaaagtatgaaccacagttaactagtggtctcaggggtagtgaaacactcacttttttttttgtttgtttttttttgtttgtttgttgaaatggcttagttgaagtatacttaaggtactgatcatgctgtgttagtaatttgggcggggaggggggtaactcagccatgttttgtgttggcat

SEQ ID NO: 52415 - DNA, 201 bp, Homo sapiens
atagatggacttttgggacccagcagttttgaaatgtgtttatggagtttaagaaatttattttccaggtgcagcccctgtctaactgaaatttctcttcmccttgtacacttgacagctgaaaaaaaacaacatgggagtaataatgggtcaaaatttgctgtgttgaagtgacttatctatgtgggatattgagtatcc

SEQ ID NO: 52416 - DNA, 201 bp, Homo sapiens
aaacaatcttttgtaaatgcaaagctgttttttgtatatactgttgggatttgcttcattgtttgacatcaaatgatgatgtaaagttcgaaagagtgaayattttgccatgttcagttaaagtgcacagtctgttacaggttgacacattgcttgacctgatttatgcagaattaataagctatttggatagtgtagctt

SEQ ID NO: 52417 - DNA, 201 bp, Homo sapiens; identical to SEQ ID NO: 52410

SEQ ID NO: 52418 - DNA, 201 bp, Homo sapiens
gcttcctttaccttcctcccatggtctccttccggttctcgatgcttctctgagcctaagggtttccgccactcgttcaccctccccccagctcatgatcytcctccctcccccgccctcctggtccaatctccgatctgtttagtaagaaggtgctgttccgagaagaaggaaaagggcttgacacgtattcactcggcc

SEQ ID NO: 52419 - DNA, 201 bp, Homo sapiens
gccactcgttcaccctccccccagctcatgatcctcctccctcccccgccctcctggtccaatctccgatctgtttagtaagaaggtgctgttccgagaaraaggaaaagggcttgacacgtattcactcggccccggacgtgggaagcaagccgtctggcttcggcctcacatcggtcttgtgctcgggacggcggcgtt

SEQ ID NO: 52420 - DNA, 201 bp, Homo sapiens
aagaaggtgctgttccgagaagaaggaaaagggcttgacacgtattcactcggccccggacgtgggaagcaagccgtctggcttcggcctcacatcggtcytgtgctcgggacggcggcgttggcggactgatccgcggcggtgaagaggcaggaggagggggaggggcggagcgtggcagctggcagtagttccgtcaga

SEQ ID NO: 52421 - DNA, 201 bp, Homo sapiens; identical to SEQ ID NO: 52411

SEQ ID NO: 52422 - DNA, 201 bp, Homo sapiens; identical to SEQ ID NO: 52412

SEQ ID NO: 52423 - DNA, 201 bp, Homo sapiens; identical to SEQ ID NO: 52413

SEQ ID NO: 52424 - DNA, 201 bp, Homo sapiens; identical to SEQ ID NO: 52414

SEQ ID NO: 52425 - DNA, 201 bp, Homo sapiens
atagatggacttttgggacccagcagttttgaaatgtgtttatggagtttaagaaatttattttccaggtgcagcccctgtctaactgaaatttctcttcmccttgtacacttgacagctgaaaaaaaacaacatgggagtaataatgggtcaaaatttgcaaaataaagtactgttttggtgtgggagttgtcatgaggc

SEQ ID NO: 52426 - DNA, 201 bp, Homo sapiens; identical to SEQ ID NO: 52416

SEQ ID NO: 52427 - DNA, 201 bp, Homo sapiens; identical to SEQ ID NO: 52410

SEQ ID NO: 52428 - DNA, 201 bp, Homo sapiens; identical to SEQ ID NO: 52418

SEQ ID NO: 52429 - DNA, 201 bp, Homo sapiens; identical to SEQ ID NO: 52419

SEQ ID NO: 52430 - DNA, 201 bp, Homo sapiens; identical to SEQ ID NO: 52420

SEQ ID NO: 52431 - DNA, 201 bp, Homo sapiens; identical to SEQ ID NO: 52411

SEQ ID NO: 52432 - DNA, 201 bp, Homo sapiens; identical to SEQ ID NO: 52412

SEQ ID NO: 52433 - DNA, 201 bp, Homo sapiens; identical to SEQ ID NO: 52413

SEQ ID NO: 52434 - DNA, 201 bp, Homo sapiens; identical to SEQ ID NO: 52414

SEQ ID NO: 52435 - DNA, 201 bp, Homo sapiens; identical to SEQ ID NO: 52415

SEQ ID NO: 52436 - DNA, 201 bp, Homo sapiens; identical to SEQ ID NO: 52416

SEQ ID NO: 52437 - DNA, 201 bp, Homo sapiens; identical to SEQ ID NO: 52410

SEQ ID NO: 52438 - DNA, 201 bp, Homo sapiens; identical to SEQ ID NO: 52411

SEQ ID NO: 52439 - DNA, 201 bp, Homo sapiens; identical to SEQ ID NO: 52412

SEQ ID NO: 52440 - DNA, 201 bp, Homo sapiens; identical to SEQ ID NO: 52413

SEQ ID NO: 52441 - DNA, 201 bp, Homo sapiens; identical to SEQ ID NO: 52414

SEQ ID NO: 52442 - DNA, 201 bp, Homo sapiens; identical to SEQ ID NO: 52425

SEQ ID NO: 52443 - DNA, 201 bp, Homo sapiens; identical to SEQ ID NO: 52416

SEQ ID NO: 52444 - DNA, 201 bp, Homo sapiens; identical to SEQ ID NO: 52410

SEQ ID NO: 52445 - DNA, 201 bp, Homo sapiens; identical to SEQ ID NO: 52411

SEQ ID NO: 52446 - DNA, 201 bp, Homo sapiens; identical to SEQ ID NO: 52412

SEQ ID NO: 52447 - DNA, 201 bp, Homo sapiens; identical to SEQ ID NO: 52413

SEQ ID NO: 52448 - DNA, 201 bp, Homo sapiens; identical to SEQ ID NO: 52414

SEQ ID NO: 52449 - DNA, 201 bp, Homo sapiens; identical to SEQ ID NO: 52415

SEQ ID NO: 52450 - DNA, 201 bp, Homo sapiens; identical to SEQ ID NO: 52416

SEQ ID NO: 52451 - DNA, 201 bp, Homo sapiens; identical to SEQ ID NO: 52410

SEQ ID NO: 52452 - DNA, 201 bp, Homo sapiens; identical to SEQ ID NO: 52411

SEQ ID NO: 52453 - DNA, 201 bp, Homo sapiens; identical to SEQ ID NO: 52412

SEQ ID NO: 52454 - DNA, 201 bp, Homo sapiens; identical to SEQ ID NO: 52413

SEQ ID NO: 52455 - DNA, 201 bp, Homo sapiens; identical to SEQ ID NO: 52414

SEQ ID NO: 52456 - DNA, 201 bp, Homo sapiens; identical to SEQ ID NO: 52425

SEQ ID NO: 52457 - DNA, 177 bp, Homo sapiens
cgcttcggttagccagccacgaagttctcgcgagagtcgtctcctcgataccaataagaaggtgctgttccgagaaraaggaaaagggcttgacacgtattcactcggccccggacgtgggaagcaagccgtctggcttcggcctcacatcggtcttgtgctcgggacggcggcgtt

SEQ ID NO: 52458 - DNA, 201 bp, Homo sapiens; identical to SEQ ID NO: 52416

SEQ ID NO: 52459 - DNA, 201 bp, Homo sapiens
aagaaggtgctgttccgagaagaaggaaaagggcttgacacgtattcactcggccccggacgtgggaagcaagccgtctggcttcggcctcacatcggtcytgtgctcgggacggcggcgttggcggactgatccgcggcggtgaagaggcgcctgtgtctggcagagctggtgtgagacgagacaatcctgccccgccgc

SEQ ID NO: 52460 - DNA, 201 bp, Homo sapiens; identical to SEQ ID NO: 52410

SEQ ID NO: 52461 - DNA, 201 bp, Homo sapiens; identical to SEQ ID NO: 52418

SEQ ID NO: 52462 - DNA, 201 bp, Homo sapiens; identical to SEQ ID NO: 52419

SEQ ID NO: 52463 - DNA, 201 bp, Homo sapiens; identical to SEQ ID NO: 52459

SEQ ID NO: 52464 - DNA, 201 bp, Homo sapiens; identical to SEQ ID NO: 52411

SEQ ID NO: 52465 - DNA, 201 bp, Homo sapiens; identical to SEQ ID NO: 52412

SEQ ID NO: 52466 - DNA, 135 bp, Homo sapiens
accaagtgaggaaactgggggacgctgtggggagrggcgtggggctggatcgcgcagcggctgcttcctttaccttcctcccatggtctccttccggttctcgatgcttctctgagcctaagggtttccgccact

SEQ ID NO: 52467 - DNA, 201 bp, Homo sapiens; identical to SEQ ID NO: 52413

SEQ ID NO: 52468 - DNA, 201 bp, Homo sapiens; identical to SEQ ID NO: 52414

SEQ ID NO: 52469 - DNA, 201 bp, Homo sapiens; identical to SEQ ID NO: 52425

SEQ ID NO: 52470 - DNA, 201 bp, Homo sapiens; identical to SEQ ID NO: 52416

SEQ ID NO: 52471 - DNA, 201 bp, Homo sapiens; identical to SEQ ID NO: 52410

SEQ ID NO: 52472 - DNA, 201 bp, Homo sapiens; identical to SEQ ID NO: 52411

SEQ ID NO: 52473 - DNA, 201 bp, Homo sapiens; identical to SEQ ID NO: 52412

SEQ ID NO: 52474 - DNA, 201 bp, Homo sapiens; identical to SEQ ID NO: 52413

SEQ ID NO: 52475 - DNA, 201 bp, Homo sapiens; identical to SEQ ID NO: 52414

SEQ ID NO: 52476 - DNA, 201 bp, Homo sapiens; identical to SEQ ID NO: 52425

SEQ ID NO: 52477 - DNA, 201 bp, Homo sapiens; identical to SEQ ID NO: 52416

SEQ ID NO: 52478 - DNA, 201 bp, Homo sapiens; identical to SEQ ID NO: 52410

SEQ ID NO: 52479 - DNA, 201 bp, Homo sapiens; identical to SEQ ID NO: 52411

SEQ ID NO: 52480 - DNA, 201 bp, Homo sapiens; identical to SEQ ID NO: 52412

SEQ ID NO: 52481 - DNA, 201 bp, Homo sapiens; identical to SEQ ID NO: 52413

SEQ ID NO: 52482 - DNA, 201 bp, Homo sapiens; identical to SEQ ID NO: 52414

SEQ ID NO: 52483 - DNA, 201 bp, Homo sapiens; identical to SEQ ID NO: 52425

SEQ ID NO: 52484 - DNA, 201 bp, Homo sapiens; identical to SEQ ID NO: 52416

SEQ ID NO: 52485 - DNA, 201 bp, Homo sapiens
attaaagacttacatgttagacctaaaaccataaaaaccctagaagaaaacctaggcaataccattcaggacataggcatgggcaaggacttcatgtctaraacaccaaaagcaatggtaacaaaagccaaaattgacaaatgggatctaattaaactaaagagcttctgcacagcaaaagaaactaccattagaatgaac

SEQ ID NO: 52486 - DNA, 201 bp, Homo sapiens
caaaagaaactaccattagaatgaacaggcaacctacagaatggaagaaaatgtttgcaatctacccatctgacaaagggctaatatccagaatctacaawgaacttaaacaaatttacaagaaaaaaatcaaacaaccccatcaaaaagtgggtgaaggatatgaacagacacttctcaaaagaagacatttatgcagcc

SEQ ID NO: 52487 - DNA, 201 bp, Homo sapiens
aacaaaagccaaaattgacaaatgggatctaattaaactaaagagcttctgcacagcaaaagaaactaccattagaatgaacaggcaacctacagaatggragaaaatgtttgcaatctacccatctgacaaagggctaatatccagaatctacaaagaacttaaacaaatttacaagaaaaaaatcaaacaaccccatca

SEQ ID NO: 52488 - DNA, 201 bp, Homo sapiens
cctcattgtctccagcccaaaatctccttaagctgataagcaacttcagcaaagtctcaggacacaaaatcaatgtgcaaaaatcacaagcattcctatayaccaataacagacaaacagagagtgaaatcatgagtgaactcccattcacaatggcttcaaagagaataaaatacctaggaatccaatttacaagggatg

SEQ ID NO: 52489 - DNA, 201 bp, Homo sapiens
acttagactcccacacaataataatggaagactttaaattatctttctatttcactaaattccacttttctgaaagttgctttcttgaacagttgaaaagstgtcatttaagcatttcaggtatttcattttcctgttacaatcctgggttagatttcctgttacttagctctcacctcttcatctattacagttttctcc

SEQ ID NO: 52490 - DNA, 201 bp, Homo sapiens
ccaaaacctggcagagataaaacaaaaaaagaaaacctcagcccattatccctgatgaacatcgatgcaaaaatcctcaataaaacactggcaaactgaayccagcagcacatcaaaaagcttaaccaccatgatcaagtgggcttcatccctgggatgcaaggctggttcaacatacgcaaatcaatgaatgtaatccat

SEQ ID NO: 52491 - DNA, 201 bp, Homo sapiens
ttaaacaaatttacaagaaaaaaatcaaacaaccccatcaaaaagtgggtgaaggatatgaacagacacttctcaaaagaagacatttatgcagccaaaaracacatgaaaaaatgctcatcatcactggccatcagacaaatgcaaatcaaaaccacaatgagataccatctcataccagttagaatggcaatcattaaa

SEQ ID NO: 52492 - DNA, 201 bp, Homo sapiens
atctacaaagaacttaaacaaatttacaagaaaaaaatcaaacaaccccatcaaaaagtgggtgaaggatatgaacagacacttctcaaaagaagacattkatgcagccaaaaaacacatgaaaaaatgctcatcatcactggccatcagacaaatgcaaatcaaaaccacaatgagataccatctcataccagttagaat

SEQ ID NO: 52493 - DNA, 201 bp, Homo sapiens
tcccattcacaatggcttcaaagagaataaaatacctaggaatccaatttacaagggatgtgaaggacctcttcaaggagaactacaaaccactgctcaasgaaataaaagaggacacaaacaaatggaagaacattctatgttcatggataggaagaatcaatatcatgaaaatggccatactgcccaaggtaatttaca

SEQ ID NO: 52494 - DNA, 201 bp, Homo sapiens
aaactaccattagaatgaacaggcaacctacagaatggaagaaaatgtttgcaatctacccatctgacaaagggctaatatccagaatctacaaagaactyaaacaaatttacaagaaaaaaatcaaacaaccccatcaaaaagtgggtgaaggatatgaacagacacttctcaaaagaagacatttatgcagccaaaaaa

SEQ ID NO: 52495 - DNA, 201 bp, Homo sapiens
gatacaatttcagagttcttgaagacaatgaaattaaggcagaaatcaagaagttacttgaaactactgagaacagagatacaaaataccggaatctatgkaatccgactaaggcagtattaagagggaaatgtatagcactgaatgcccatatcacaagttagaaagatctcaagttaacttacaacttaacatcacaac

SEQ ID NO: 52496 - DNA, 201 bp, Homo sapiens
aattccacttttctgaaagttgctttcttgaacagttgaaaagctgtcatttaagcatttcaggtatttcattttcctgttacaatcctgggttagatttsctgttacttagctctcacctcttcatctattacagttttctccctcatttaattggagtatatcctcaaagatcttccacagaaaaggcatactggagat

SEQ ID NO: 52497 - DNA, 201 bp, Homo sapiens
ggattataaatcatgctgctataaagacacatgcacacgtatgtttattgtggcactattcacaatagcaaagacttggaaccaacccaaatgtccaacartgatagactggagtaagaaaatgtggcacatatacatcatggaatactatgcagccataaaaaatgatgagttcatgtcctttttaaggacatggatgaa

SEQ ID NO: 52498 - DNA, 201 bp, Homo sapiens
cattgacaagactccatcaactgaaacttttaggtcatactttagtcgttgaatttgcaaaagagcaagatcgagttcactccccatgtcccacttcaggytctgaaaaaaaaaaaaggtctgatgaccctgtcgaagatgataaagaaaaaaaagaacttggttatttaacagtagaaaatggaattgcaccaaaccatg

SEQ ID NO: 52499 - DNA, 201 bp, Homo sapiens
ttttcaacaatgatgactggacattttctttaactttgcaaactggtcttcctgctggcacatactgtgatgtcatttctggagataaaattaatggcaaytgcacaggcattaaaatctacgtttctgacgatggcaaagctcatttttctattagtaactctgctgaggatccatttattgcaattcatgctgaatcta

SEQ ID NO: 52500 - DNA, 201 bp, Homo sapiens
gttatacttcctatttttaatgggcttttatgatgttttaggtttttttgaatcccgtgtccttcaagtgctttctaactttgagaggaagaaattgaccmcctggactatggaactttggttgaatctggcgatgtggaacccatggatatggagggctgactatatacaccatgttttttcctggcacatcactcaact

SEQ ID NO: 52501 - DNA, 174 bp, Homo sapiens
atgtcatttctggagataaaattaatggcaattgcacaggcattaaaatctacgtttctgacgatggcaaagctcatttttctattagtaactctgctgargatccatttattgcaattcatgctgaatctaaattataaaatttaaaattaaatgcatatcctcaaaacaata

SEQ ID NO: 52502 - DNA, 201 bp, Homo sapiens
taactttgcaaactggtcttcctgctggcacatactgtgatgtcatttctggagataaaattaatggcaattgcacaggcattaaaatctacgtttctgaygatggcaaagctcatttttctattagtaactctgctgaggatccatttattgcaattcatgctgaatctaaattataaaatttaaaattaaatgcatatc

SEQ ID NO: 52503 - DNA, 201 bp, Homo sapiens
gaatagtggtttccagactggttgatgaccgtaatcaccaagaacagtggttctcagtcttggctgcacattgcagtgatctggaacttaaatactaattytaaaagggtgcagtggctcatacctgtaatcccagcactttgcaagtccgagatgggagaatcacttgagcccaggagtttgagaccagcctgggcaatg

SEQ ID NO: 52504 - DNA, 201 bp, Homo sapiens
ttagttatttttaaactaatgacctgtgttatacttcctatttttaatgggcttttatgatgttttaggtttttttgaatcccgtgtccttcaagtgcttkctaactttgagaggaagaaattgaccacctggactatggaactttggttgaatctggcgatgtggaacccatggatatggagggctgactatatacacca

SEQ ID NO: 52505 - DNA, 201 bp, Homo sapiens
ggacattttctttaactttgcaaactggtcttcctgctggcacatactgtgatgtcatttctggagataaaattaatggcaattgcacaggcattaaaatytacgtttctgacgatggcaaagctcatttttctattagtaactctgctgaggatccatttattgcaattcatgctgaatctaaattataaaatttaaaat

SEQ ID NO: 52506 - DNA, 201 bp, Homo sapiens
ctggtaatgctgtgagtgcaggaacaagcagtacctgtggaagttacttcaaccctggaagtagggactttccagcagtcccatattctggatgggatttyaatgatggtaaatgtaaaactggaagtggagatatcgagaactacaatgatgctactcaggtcagagattgtcgtctggttggtcttcttgatcttgcac

SEQ ID NO: 52507 - DNA, 201 bp, Homo sapiens
atcaacgaggacatggggctggaggagcctctattcttaccttctgggatgctaggctgtataaaatggcagttggatttatgcttgctcatccttatggwtttacacgagtaatgtcaagctaccgttggccaagacagtttcaaaatggaaacgatgttaatgattgggttgggccaccaaataataatggagtaatta

SEQ ID NO: 52508 - DNA, 201 bp, Homo sapiens
atctaaacagtaactggttccctgcaggaagtaaacctttcatttaccaggaggtaattgatctgggtggtgagccaattaaaagcagtgactactttggwaatggccgggtgacagaattcaagtatggtgcaaaactcggcacagttattcgcaagtggaatggagagaagatgtcttacctaaagaactggggagaag

SEQ ID NO: 52509 - DNA, 201 bp, Homo sapiens
ctcttagttatttttaaactaatgacctgtgttatacttcctatttttaatgggcttttatgatgttttaggtttttttgaatcccgtgtccttcaagtgytttctaactttgagaggaagaaattgaccacctggactatggaactttggttgaatctggcgatgtggaacccatggatatggagggctgactatataca

SEQ ID NO: 52510 - DNA, 201 bp, Homo sapiens
aaatggcagttggatttatgcttgctcatccttatggttttacacgagtaatgtcaagctaccgttggccaagacagtttcaaaatggaaacgatgttaaygattgggttgggccaccaaataataatggagtaattaaagaagttactattaatccagacactacttgtggcaatgactgggtctgtgaacatcgatggc

SEQ ID NO: 52511 - DNA, 201 bp, Homo sapiens
gtgcaaaactcggcacagttattcgcaagtggaatggagagaagatgtcttacctaaagaactggggagaaggttggggtttcatgccttctgacagagcrcttgtctttgtggataaccatgacaatcaacgaggacatggggctggaggagcctctattcttaccttctgggatgctaggctgtataaaatggcagttg

SEQ ID NO: 52512 - DNA, 201 bp, Homo sapiens
agaaacatggtgactagatgtaacaatgttggggttcgtatttatgtggatgctgtaattaatcatatgtctggtaatgctgtgagtgcaggaacaagcastacctgtggaagttacttcaaccctggaagtagggactttccagcagtcccatattctggatgggattttaatgatggtaaatgtaaaactggaagtgga

SEQ ID NO: 52513 - DNA, 201 bp, Homo sapiens
acaatcaacgaggacatggggctggaggagcctctattcttaccttctgggatgctaggctgtataaaatggcagttggatttatgcttgctcatccttayggttttacacgagtaatgtcaagctaccgttggccaagacagtttcaaaatggaaacgatgttaatgattgggttgggccaccaaataataatggagtaa

SEQ ID NO: 52514 - DNA, 201 bp, Homo sapiens
aataatggagtaattaaagaagttactattaatccagacactacttgtggcaatgactgggtctgtgaacatcgatggcgccaaataaggaacatggttawtttccgcaatgtagtggatggccagccttttacaaactggtatgataatgggagcaaccaagtggcttttgggagaggaaacagaggattcattgttttc

SEQ ID NO: 52515 - DNA, 201 bp, Homo sapiens
gtaaaactggaagtggagatatcgagaactacaatgatgctactcaggtcagagattgtcgtctggttggtcttcttgatcttgcactggagaaagattaygtgcgttccaagattgccgaatatatgaatcatctcattgacattggtgttgcagggttcagacttgatgcttccaagcacatgtggcctggagacataa

SEQ ID NO: 52516 - DNA, 201 bp, Homo sapiens
ggttttacacgagtaatgtcaagctaccgttggccaagacagtttcaaaatggaaacgatgttaatgattgggttgggccaccaaataataatggagtaaytaaagaagttactattaatccagacactacttgtggcaatgactgggtctgtgaacatcgatggcgccaaataaggaacatggttaatttccgcaatgta

SEQ ID NO: 52517 - DNA, 201 bp, Homo sapiens
atttatgtggatgctgtaattaatcatatgtctggtaatgctgtgagtgcaggaacaagcagtacctgtggaagttacttcaaccctggaagtagggactytccagcagtcccatattctggatgggattttaatgatggtaaatgtaaaactggaagtggagatatcgagaactacaatgatgctactcaggtcagagat

SEQ ID NO: 52518 - DNA, 201 bp, Homo sapiens; identical to SEQ ID NO: 52499

SEQ ID NO: 52519 - DNA, 201 bp, Homo sapiens
gttatacttcctatttttaatgggcttttatgatgttttaggtttttttgaatcccgtgtccttcaagtgctttctaactttgagaggaagaaattgaccmcctggactatggaactgaatataaatagtttctggaaaggacactgacaacttcaaagcaaaatgaagttctttctgttgcttttcaccattgggttctg

SEQ ID NO: 52520 - DNA, 174 bp, Homo sapiens; identical to SEQ ID NO: 52501

SEQ ID NO: 52521 - DNA, 201 bp, Homo sapiens; identical to SEQ ID NO: 52502

SEQ ID NO: 52522 - DNA, 201 bp, Homo sapiens
ttagttatttttaaactaatgacctgtgttatacttcctatttttaatgggcttttatgatgttttaggtttttttgaatcccgtgtccttcaagtgcttkctaactttgagaggaagaaattgaccacctggactatggaactgaatataaatagtttctggaaaggacactgacaacttcaaagcaaaatgaagttctt

SEQ ID NO: 52523 - DNA, 201 bp, Homo sapiens; identical to SEQ ID NO: 52505

SEQ ID NO: 52524 - DNA, 201 bp, Homo sapiens; identical to SEQ ID NO: 52506

SEQ ID NO: 52525 - DNA, 201 bp, Homo sapiens; identical to SEQ ID NO: 52507

SEQ ID NO: 52526 - DNA, 201 bp, Homo sapiens; identical to SEQ ID NO: 52508

SEQ ID NO: 52527 - DNA, 201 bp, Homo sapiens
ctcttagttatttttaaactaatgacctgtgttatacttcctatttttaatgggcttttatgatgttttaggtttttttgaatcccgtgtccttcaagtgytttctaactttgagaggaagaaattgaccacctggactatggaactgaatataaatagtttctggaaaggacactgacaacttcaaagcaaaatgaagtt

SEQ ID NO: 52528 - DNA, 201 bp, Homo sapiens; identical to SEQ ID NO: 52510

SEQ ID NO: 52529 - DNA, 201 bp, Homo sapiens; identical to SEQ ID NO: 52511

SEQ ID NO: 52530 - DNA, 201 bp, Homo sapiens; identical to SEQ ID NO: 52512

SEQ ID NO: 52531 - DNA, 201 bp, Homo sapiens; identical to SEQ ID NO: 52513

SEQ ID NO: 52532 - DNA, 201 bp, Homo sapiens; identical to SEQ ID NO: 52514

SEQ ID NO: 52533 - DNA, 201 bp, Homo sapiens; identical to SEQ ID NO: 52516

SEQ ID NO: 52534 - DNA, 201 bp, Homo sapiens; identical to SEQ ID NO: 52515

SEQ ID NO: 52535 - DNA, 201 bp, Homo sapiens; identical to SEQ ID NO: 52517

SEQ ID NO: 52536 - DNA, 201 bp, Homo sapiens; identical to SEQ ID NO: 52498

SEQ ID NO: 52537 - DNA, 201 bp, Homo sapiens; identical to SEQ ID NO: 52499

SEQ ID NO: 52538 - DNA, 201 bp, Homo sapiens; identical to SEQ ID NO: 52500

SEQ ID NO: 52539 - DNA, 174 bp, Homo sapiens; identical to SEQ ID NO: 52501

SEQ ID NO: 52540 - DNA, 201 bp, Homo sapiens; identical to SEQ ID NO: 52502

SEQ ID NO: 52541 - DNA, 201 bp, Homo sapiens; identical to SEQ ID NO: 52503

SEQ ID NO: 52542 - DNA, 201 bp, Homo sapiens; identical to SEQ ID NO: 52504

SEQ ID NO: 52543 - DNA, 201 bp, Homo sapiens; identical to SEQ ID NO: 52505

SEQ ID NO: 52544 - DNA, 201 bp, Homo sapiens; identical to SEQ ID NO: 52506

SEQ ID NO: 52545 - DNA, 201 bp, Homo sapiens; identical to SEQ ID NO: 52507

SEQ ID NO: 52546 - DNA, 201 bp, Homo sapiens; identical to SEQ ID NO: 52508

SEQ ID NO: 52547 - DNA, 201 bp, Homo sapiens; identical to SEQ ID NO: 52509

SEQ ID NO: 52548 - DNA, 201 bp, Homo sapiens; identical to SEQ ID NO: 52510

SEQ ID NO: 52549 - DNA, 201 bp, Homo sapiens; identical to SEQ ID NO: 52511

SEQ ID NO: 52550 - DNA, 201 bp, Homo sapiens; identical to SEQ ID NO: 52512

SEQ ID NO: 52551 - DNA, 201 bp, Homo sapiens; identical to SEQ ID NO: 52514

SEQ ID NO: 52552 - DNA, 201 bp, Homo sapiens; identical to SEQ ID NO: 52513

SEQ ID NO: 52553 - DNA, 201 bp, Homo sapiens; identical to SEQ ID NO: 52516

SEQ ID NO: 52554 - DNA, 201 bp, Homo sapiens; identical to SEQ ID NO: 52515

SEQ ID NO: 52555 - DNA, 201 bp, Homo sapiens; identical to SEQ ID NO: 52517

SEQ ID NO: 52556 - DNA, 201 bp, Homo sapiens; identical to SEQ ID NO: 52506

SEQ ID NO: 52557 - DNA, 201 bp, Homo sapiens; identical to SEQ ID NO: 52507

SEQ ID NO: 52558 - DNA, 201 bp, Homo sapiens; identical to SEQ ID NO: 52499

SEQ ID NO: 52559 - DNA, 201 bp, Homo sapiens; identical to SEQ ID NO: 52508

SEQ ID NO: 52560 - DNA, 201 bp, Homo sapiens; identical to SEQ ID NO: 52510

SEQ ID NO: 52561 - DNA, 201 bp, Homo sapiens; identical to SEQ ID NO: 52511

SEQ ID NO: 52562 - DNA, 201 bp, Homo sapiens; identical to SEQ ID NO: 52512

SEQ ID NO: 52563 - DNA, 201 bp, Homo sapiens; identical to SEQ ID NO: 52514

SEQ ID NO: 52564 - DNA, 201 bp, Homo sapiens; identical to SEQ ID NO: 52513

SEQ ID NO: 52565 - DNA, 201 bp, Homo sapiens; identical to SEQ ID NO: 52515

SEQ ID NO: 52566 - DNA, 201 bp, Homo sapiens; identical to SEQ ID NO: 52516

SEQ ID NO: 52567 - DNA, 174 bp, Homo sapiens; identical to SEQ ID NO: 52501

SEQ ID NO: 52568 - DNA, 201 bp, Homo sapiens; identical to SEQ ID NO: 52502

SEQ ID NO: 52569 - DNA, 201 bp, Homo sapiens; identical to SEQ ID NO: 52505

SEQ ID NO: 52570 - DNA, 201 bp, Homo sapiens; identical to SEQ ID NO: 52517

SEQ ID NO: 52571 - DNA, 201 bp, Homo sapiens; identical to SEQ ID NO: 52498

SEQ ID NO: 52572 - DNA, 201 bp, Homo sapiens; identical to SEQ ID NO: 52499

SEQ ID NO: 52573 - DNA, 201 bp, Homo sapiens; identical to SEQ ID NO: 52500

SEQ ID NO: 52574 - DNA, 174 bp, Homo sapiens; identical to SEQ ID NO: 52501

SEQ ID NO: 52575 - DNA, 201 bp, Homo sapiens; identical to SEQ ID NO: 52502

SEQ ID NO: 52576 - DNA, 201 bp, Homo sapiens; identical to SEQ ID NO: 52503

SEQ ID NO: 52577 - DNA, 201 bp, Homo sapiens; identical to SEQ ID NO: 52504

SEQ ID NO: 52578 - DNA, 201 bp, Homo sapiens; identical to SEQ ID NO: 52505

SEQ ID NO: 52579 - DNA, 201 bp, Homo sapiens; identical to SEQ ID NO: 52506

SEQ ID NO: 52580 - DNA, 201 bp, Homo sapiens; identical to SEQ ID NO: 52507

SEQ ID NO: 52581 - DNA, 201 bp, Homo sapiens; identical to SEQ ID NO: 52508

SEQ ID NO: 52582 - DNA, 201 bp, Homo sapiens; identical to SEQ ID NO: 52509

SEQ ID NO: 52583 - DNA, 201 bp, Homo sapiens; identical to SEQ ID NO: 52510

SEQ ID NO: 52584 - DNA, 201 bp, Homo sapiens; identical to SEQ ID NO: 52511

SEQ ID NO: 52585 - DNA, 201 bp, Homo sapiens; identical to SEQ ID NO: 52512

SEQ ID NO: 52586 - DNA, 201 bp, Homo sapiens; identical to SEQ ID NO: 52514

SEQ ID NO: 52587 - DNA, 201 bp, Homo sapiens; identical to SEQ ID NO: 52513

SEQ ID NO: 52588 - DNA, 201 bp, Homo sapiens; identical to SEQ ID NO: 52516

SEQ ID NO: 52589 - DNA, 201 bp, Homo sapiens; identical to SEQ ID NO: 52515

SEQ ID NO: 52590 - DNA, 201 bp, Homo sapiens; identical to SEQ ID NO: 52517

SEQ ID NO: 52591 - DNA, 201 bp, Homo sapiens; identical to SEQ ID NO: 52499

SEQ ID NO: 52592 - DNA, 201 bp, Homo sapiens; identical to SEQ ID NO: 52500

SEQ ID NO: 52593 - DNA, 174 bp, Homo sapiens; identical to SEQ ID NO: 52501

SEQ ID NO: 52594 - DNA, 201 bp, Homo sapiens; identical to SEQ ID NO: 52502

SEQ ID NO: 52595 - DNA, 201 bp, Homo sapiens; identical to SEQ ID NO: 52503

SEQ ID NO: 52596 - DNA, 201 bp, Homo sapiens; identical to SEQ ID NO: 52504

SEQ ID NO: 52597 - DNA, 201 bp, Homo sapiens; identical to SEQ ID NO: 52505

SEQ ID NO: 52598 - DNA, 201 bp, Homo sapiens; identical to SEQ ID NO: 52506

SEQ ID NO: 52599 - DNA, 201 bp, Homo sapiens; identical to SEQ ID NO: 52507

SEQ ID NO: 52600 - DNA, 201 bp, Homo sapiens; identical to SEQ ID NO: 52508

SEQ ID NO: 52601 - DNA, 201 bp, Homo sapiens; identical to SEQ ID NO: 52509

SEQ ID NO: 52602 - DNA, 201 bp, Homo sapiens; identical to SEQ ID NO: 52510

SEQ ID NO: 52603 - DNA, 201 bp, Homo sapiens; identical to SEQ ID NO: 52511

SEQ ID NO: 52604 - DNA, 201 bp, Homo sapiens; identical to SEQ ID NO: 52512

SEQ ID NO: 52605 - DNA, 201 bp, Homo sapiens; identical to SEQ ID NO: 52513

SEQ ID NO: 52606 - DNA, 201 bp, Homo sapiens; identical to SEQ ID NO: 52514

SEQ ID NO: 52607 - DNA, 201 bp, Homo sapiens; identical to SEQ ID NO: 52516

SEQ ID NO: 52608 - DNA, 201 bp, Homo sapiens; identical to SEQ ID NO: 52515

SEQ ID NO: 52609 - DNA, 201 bp, Homo sapiens; identical to SEQ ID NO: 52517

SEQ ID NO: 52610 - DNA, 201 bp, Homo sapiens; identical to SEQ ID NO: 52498

SEQ ID NO: 52611 - DNA, 201 bp, Homo sapiens; identical to SEQ ID NO: 52499

SEQ ID NO: 52612 - DNA, 201 bp, Homo sapiens; identical to SEQ ID NO: 52500

SEQ ID NO: 52613 - DNA, 174 bp, Homo sapiens; identical to SEQ ID NO: 52501

SEQ ID NO: 52614 - DNA, 201 bp, Homo sapiens; identical to SEQ ID NO: 52502

SEQ ID NO: 52615 - DNA, 201 bp, Homo sapiens; identical to SEQ ID NO: 52503

SEQ ID NO: 52616 - DNA, 201 bp, Homo sapiens; identical to SEQ ID NO: 52504

SEQ ID NO: 52617 - DNA, 201 bp, Homo sapiens; identical to SEQ ID NO: 52505

SEQ ID NO: 52618 - DNA, 201 bp, Homo sapiens; identical to SEQ ID NO: 52506

SEQ ID NO: 52619 - DNA, 201 bp, Homo sapiens; identical to SEQ ID NO: 52507

SEQ ID NO: 52620 - DNA, 201 bp, Homo sapiens; identical to SEQ ID NO: 52508

SEQ ID NO: 52621 - DNA, 201 bp, Homo sapiens; identical to SEQ ID NO: 52509

SEQ ID NO: 52622 - DNA, 201 bp, Homo sapiens; identical to SEQ ID NO: 52510

SEQ ID NO: 52623 - DNA, 201 bp, Homo sapiens; identical to SEQ ID NO: 52511

SEQ ID NO: 52624 - DNA, 201 bp, Homo sapiens; identical to SEQ ID NO: 52512

SEQ ID NO: 52625 - DNA, 201 bp, Homo sapiens; identical to SEQ ID NO: 52513

SEQ ID NO: 52626 - DNA, 201 bp, Homo sapiens; identical to SEQ ID NO: 52514

SEQ ID NO: 52627 - DNA, 201 bp, Homo sapiens; identical to SEQ ID NO: 52515

SEQ ID NO: 52628 - DNA, 201 bp, Homo sapiens; identical to SEQ ID NO: 52516

SEQ ID NO: 52629 - DNA, 201 bp, Homo sapiens; identical to SEQ ID NO: 52517

SEQ ID NO: 52630 - DNA, 106 bp, Homo sapiens
caagcmgcggatgaaacaggaagtctgacagcttgagtctgcagtgggacccctagtgttttcccactccatgtcctggcatcgttccccagaagtacaaacacac

SEQ ID NO: 52631 - DNA, 201 bp, Homo sapiens
acacggatgtgtttttgatctgcttctctgtcgtaaaccctgcctcttaccacaatgtccaggaggaatgggtccccgagctcaaggactgcatgcctcaygtgccttatgtcctcatagggacccagattgatctccgtgatgacccaaaaaccttggcccgtttgctgtatatgaaagagaaacctctcacttacgagc

SEQ ID NO: 52632 - DNA, 201 bp, Homo sapiens
tgatgagctacgccaacgacgccttcccagaggaatacgtgcccactgtgtttgaccactatgcagttactgtgactgtgggaggcaagcaacacttgctyggactgtatgacaccgcgggacaggaggactacaaccagctgaggccactctcctaccccaacacggatgtgtttttgatctgcttctctgtcgtaaacc

SEQ ID NO: 52633 - DNA, 201 bp, Homo sapiens
tggaggaagcaaagggaaaaaaactccattaaaaagcccagctttcctccatgttagatgtgacttggaaaatgagaaagatttagcaaaattccaccgtrtcttttgccaggctagagacagggagagcagagtaaaaccctcaggctgctgaaatttctaggctgttaggaagcccctcgaattctgtgaaaatgaggg

SEQ ID NO: 52634 - DNA, 106 bp, Homo sapiens; identical to SEQ ID NO: 52630

SEQ ID NO: 52635 - DNA, 201 bp, Homo sapiens
tgatgagctacgccaacgacgccttcccagaggaatacgtgcccactgtgtttgaccactatgcagttactgtgactgtgggaggcaagcaacacttgctyggactgtatgacaccgcgggacagaaccttggcccgtttgctgtatatgaaagagaaacctctcacttacgagcatggtgtgaagctcgcaaaagcgatc

SEQ ID NO: 52636 - DNA, 201 bp, Homo sapiens; identical to SEQ ID NO: 52633

SEQ ID NO: 52637 - DNA, 201 bp, Homo sapiens
aatgatgtaaaacaattccaaacatccaggaatttttgtatcatagagcgaattacttcctatcttttcattagaggctatgaggacttctaattagtctyagttgcttataagtgccctggaatcacccaggtaggcacttaatttttttttcagttgcatgagcaaagtgcttcttagtagtgtgaaattacaacaact

SEQ ID NO: 52638 - DNA, 144 bp, Homo sapiens
tcagcttcttcccagccagccacaagcgaacaggctcgcaagcmgcggatgaaacaggaagtctgacagcttgagtctgcagtgggacccctagtgttttcccactccatgtcctggcatcgttccccagaagtacaaacacac

SEQ ID NO: 52639 - DNA, 201 bp, Homo sapiens; identical to SEQ ID NO: 52631

SEQ ID NO: 52640 - DNA, 109 bp, Homo sapiens
tcagcttcytcccagccagccacaagcgaacaggctcgcaagcagcggatgaaacaggaagtctgacagcttgagtctgcagtgggacccctagtgttttcccactcca

SEQ ID NO: 52641 - DNA, 134 bp, Homo sapiens
tcagcttcttcccagccagccacaagcgaacagsctcgcaagcagcggatgaaacaggaagtctgacagcttgagtctgcagtgggacccctagtgttttcccactccatgtcctggcatcgttccccagaagt

SEQ ID NO: 52642 - DNA, 201 bp, Homo sapiens; identical to SEQ ID NO: 52632

SEQ ID NO: 52643 - DNA, 201 bp, Homo sapiens; identical to SEQ ID NO: 52633

SEQ ID NO: 52644 - DNA, 201 bp, Homo sapiens; identical to SEQ ID NO: 52637

SEQ ID NO: 52645 - DNA, 201 bp, Homo sapiens
gggcagagattcacccaaaggaaattagaagagaagggaggcccaacaggcttaatcctgttgggagaagttgcccttggaaaatgtatgaactgaagcaygcttcacatatcagcaagttacccaagggcaagcacagtgtcaaaggtttgggcaaaactacccctgacccttcagctagtattactctggatggtgcag

SEQ ID NO: 52646 - DNA, 201 bp, Homo sapiens
tggaaaatgtatgaactgaagcacgcttcacatatcagcaagttacccaagggcaagcacagtgtcaaaggtttgggcaaaactacccctgacccttcagstagtattactctggatggtgcagaggttcctcttgggactgggatttcatctggtgtgaatgacacttgtctactatataatgagtacattgtctatgat

SEQ ID NO: 52647 - DNA, 201 bp, Homo sapiens
aaggaaattagaagagaagggaggcccaacaggcttaatcctgttgggagaagttgcccttggaaaatgtatgaactgaagcacgcttcacatatcagcargttacccaagggcaagcacagtgtcaaaggtttgggcaaaactacccctgacccttcagctagtattactctggatggtgcagaggttcctcttgggact

SEQ ID NO: 52648 - DNA, 201 bp, Homo sapiens
gctggcgcggacgcggctcccggggcggaggccagcccagtgaaactggacagcaagcatccaaatcccaacatccaaagagatagtggtgaacttgactrtaatgtcggctgtcactcatacccggaggtggagcatggcaaaaagcttagaaggtggcaatattttcagccagctcttagtacagtagcagctactcat

SEQ ID NO: 52649 - DNA, 201 bp, Homo sapiens
gtagcagctactcatcctccacccatagctccatgtcaagaagctgtatttgtgttcctgaagcaaccttcacacagtattcaggatcaaacgagtggggraagagggaagcaaacaccggggaagggaaagaatctgatttccacaattaccacattattagattcaaaggaaatgagatgcagcagtaaagccgtgtcc

SEQ ID NO: 52650 - DNA, 191 bp, Homo sapiens
gcaaaactacccctgacccttcagctagtattactctggatggtgcagaggttcctcttgggactgggatttcatctggtgtgaatgacacttgtctactrtataatgagtacattgtctatgatattgctcaggtagataaaactgacatagagaaaaggctggagagagattccatccgcatagactag

SEQ ID NO: 52651 - DNA, 201 bp, Homo sapiens
ggctgctggcgcggacgcggctcccggggcggaggccagcccagtgaaactggacagcaagcatccaaatcccaacatccaaagagatagtggtgaacttsactataatgtcggctgtcactcatacccggaggtggagcatggcaaaaagcttagaaggtggcaatattttcagccagctcttagtacagtagcagctac

SEQ ID NO: 52652 - DNA, 201 bp, Homo sapiens; identical to SEQ ID NO: 52645

SEQ ID NO: 52653 - DNA, 201 bp, Homo sapiens
tggctgctatgacaggccttcctagcagagtttttgctgtctctgaccaagctgaagtcagcttcttcccagccagccacaagcgaacaggctcgcaagcmgcggatgaaacaggaagtctgacagcttgagtctgcagtgggacccctagtgttttcccactccatgtcctggcatcgttccccagaagtacaaacacac

SEQ ID NO: 52654 - DNA, 201 bp, Homo sapiens; identical to SEQ ID NO: 52646

SEQ ID NO: 52655 - DNA, 201 bp, Homo sapiens; identical to SEQ ID NO: 52647

SEQ ID NO: 52656 - DNA, 201 bp, Homo sapiens; identical to SEQ ID NO: 52631

SEQ ID NO: 52657 - DNA, 201 bp, Homo sapiens
tgcacacctggttggaaggcagtttcaggaaagagtggctgctatgacaggccttcctagcagagtttttgctgtctctgaccaagctgaagtcagcttcytcccagccagccacaagcgaacaggctcgcaagcagcggatgaaacaggaagtctgacagcttgagtctgcagtgggacccctagtgttttcccactcca

SEQ ID NO: 52658 - DNA, 201 bp, Homo sapiens
caggaaagagtggctgctatgacaggccttcctagcagagtttttgctgtctctgaccaagctgaagtcagcttcttcccagccagccacaagcgaacagsctcgcaagcagcggatgaaacaggaagtctgacagcttgagtctgcagtgggacccctagtgttttcccactccatgtcctggcatcgttccccagaagt

SEQ ID NO: 52659 - DNA, 201 bp, Homo sapiens
gcaaaactacccctgacccttcagctagtattactctggatggtgcagaggttcctcttgggactgggatttcatctggtgtgaatgacacttgtctactrtataatgagtacattgtctatgatattgctcagaagacacctggaggaagtaaagccattggtagaatttcagaaactgcacacctggttggaaggcagt

SEQ ID NO: 52660 - DNA, 201 bp, Homo sapiens; identical to SEQ ID NO: 52651

SEQ ID NO: 52661 - DNA, 201 bp, Homo sapiens; identical to SEQ ID NO: 52648

SEQ ID NO: 52662 - DNA, 201 bp, Homo sapiens; identical to SEQ ID NO: 52649

SEQ ID NO: 52663 - DNA, 201 bp, Homo sapiens; identical to SEQ ID NO: 52632

SEQ ID NO: 52664 - DNA, 201 bp, Homo sapiens; identical to SEQ ID NO: 52633

SEQ ID NO: 52665 - DNA, 201 bp, Homo sapiens; identical to SEQ ID NO: 52637

SEQ ID NO: 52666 - DNA, 201 bp, Homo sapiens; identical to SEQ ID NO: 52645

SEQ ID NO: 52667 - DNA, 201 bp, Homo sapiens; identical to SEQ ID NO: 52653

SEQ ID NO: 52668 - DNA, 201 bp, Homo sapiens; identical to SEQ ID NO: 52646

SEQ ID NO: 52669 - DNA, 201 bp, Homo sapiens; identical to SEQ ID NO: 52647

SEQ ID NO: 52670 - DNA, 201 bp, Homo sapiens; identical to SEQ ID NO: 52631

SEQ ID NO: 52671 - DNA, 201 bp, Homo sapiens; identical to SEQ ID NO: 52657

SEQ ID NO: 52672 - DNA, 201 bp, Homo sapiens; identical to SEQ ID NO: 52658

SEQ ID NO: 52673 - DNA, 201 bp, Homo sapiens; identical to SEQ ID NO: 52659

SEQ ID NO: 52674 - DNA, 201 bp, Homo sapiens; identical to SEQ ID NO: 52651

SEQ ID NO: 52675 - DNA, 201 bp, Homo sapiens; identical to SEQ ID NO: 52648

SEQ ID NO: 52676 - DNA, 201 bp, Homo sapiens; identical to SEQ ID NO: 52649

SEQ ID NO: 52677 - DNA, 201 bp, Homo sapiens; identical to SEQ ID NO: 52632

SEQ ID NO: 52678 - DNA, 201 bp, Homo sapiens; identical to SEQ ID NO: 52633

SEQ ID NO: 52679 - DNA, 201 bp, Homo sapiens; identical to SEQ ID NO: 52637

SEQ ID NO: 52680 - DNA, 101 bp, Homo sapiens
ygaaggtgaagcagtccatgtcctcggtagccacaggatagactttgccagccttcaccagggcagcacagctggcctctgcctcgatgggtgcatcaaga

SEQ ID NO: 52681 - DNA, 201 bp, Homo sapiens
tggcctcctccgccgcctcctcggagcatttcgagaagctgcacgagatcttccgcggcctccatgaagacctacaaggggtgcccgagcggctgctgggracggcggggaccgaagaaaagaagaaattgatcagggattttgatgaaaagcaacaggaagcaaatgaaacgctggcagagatggaggaggagctacgtt

SEQ ID NO: 52682 - DNA, 201 bp, Homo sapiens
tagataactcaaagaactgcatcagtttgacaatttattcttgtatttaattgtttaaatatacaattttttactcattattaccttagtgtaatttggtwagagccatgtccaagcatgactctaaaggactatatcctttttattagcatggccatataatttttagctacaaaagtttaagcaaaaacaaactctgca

SEQ ID NO: 52683 - DNA, 201 bp, Homo sapiens
ctactgccaggttagctgtagtcttcgcctcttcctctgaggtggccaactgaggattgacttcaacaagatccagtgctgatagcaaccctggaagaacraagtgtgacaaaacctcaggttcccttgctgctactctcagtgagggtcatcccactgggacagggagaacaagccaaagtaaaaacaagagtccatttt

SEQ ID NO: 52684 - DNA, 201 bp, Homo sapiens
ttggtaagagccatgtccaagcatgactctaaaggactatatcctttttattagcatggccatataatttttagctacaaaagtttaagcaaaaacaaacyctgcaatgatgtggaatagcagaaaagatcctttgcaggcaagagactctagcatatttacctatgtagttaacaggctgcagacctggttgctacatac

SEQ ID NO: 52685 - DNA, 201 bp, Homo sapiens
tttgaactctaatgtgttatctgtatctgttagagcaccacaccatatgccctgaaatgtagttattactgcaaacttcattctcacccctgcaggcctgmgctctggaggcaggttccacatctaacaacatctttttgtctcccagcagactgacccagtgtcttgtacttgatcaagagaaaattcagccatatgtta

SEQ ID NO: 52686 - DNA, 201 bp, Homo sapiens
cttgttggcaaaatgtatgccacctccagtatgactaggaaccttccagatgcctgcctggaaatgaatcaagtatgaaggcagaggaaatctgccacttkcactagccaaactgcattcccacttttgaactctaatgtgttatctgtatctgttagagcaccacaccatatgccctgaaatgtagttattactgcaaac

SEQ ID NO: 52687 - DNA, 201 bp, Homo sapiens
agatcttccgcggcctccatgaagacctacaaggggtgcccgagcggctgctggggacggcggggaccgaagaaaagaagaaattgatcagggattttgakgaaaagcaacaggaagcaaatgaaacgctggcagagatggaggaggagctacgttatgcacccctgtctttccgaaaccccatgatgtctaagcttcgaa

SEQ ID NO: 52688 - DNA, 201 bp, Homo sapiens
aattgatcagggattttgatgaaaagcaacaggaagcaaatgaaacgctggcagagatggaggaggagctacgttatgcacccctgtctttccgaaacccyatgatgtctaagcttcgaaactaccggaaggaccttgctaaactccatcgggaggtgagaagcacacctttgacagccacacctggaggccgaggagaca

SEQ ID NO: 52689 - DNA, 201 bp, Homo sapiens
taaatatacaattttttactcattattaccttagtgtaatttggtaagagccatgtccaagcatgactctaaaggactatatcctttttattagcatggcsatataatttttagctacaaaagtttaagcaaaaacaaactctgcaatgatgtggaatagcagaaaagatcctttgcaggcaagagactctagcatattta

SEQ ID NO: 52690 - DNA, 201 bp, Homo sapiens
aaagtcggaagattctccgttcaatgtccagaaaagtgacaaccaacaagctgctgctttccattatcatcttactggagctcgccatcctgggaggcctrgtttactacaaattctttcgcagccattgaacttctatagggaagggtttgtggaccagaactttgaccttgtgaatgcatgatgttagggatgtggata

SEQ ID NO: 52691 - DNA, 201 bp, Homo sapiens
ttttggaatgaaaggtcatttgaagtagctttaaaaccagaagctttctgacagaaatggaaactgtttgcaaacaagtatgaattttggaaaagtagccrgtcttgataacgtagaattcatcttagtactctttccatcagccattctcatctaactgtatcccccttattagaaatcctttcaggctctagtacaaga

SEQ ID NO: 52692 - DNA, 201 bp, Homo sapiens
gtcatcccactgggacagggagaacaagccaaagtaaaaacaagagtccattttatagtagaaaatacctatttttaggaagccccttgcacctcatcctcttggccatgaatttaagttaaaacactgttgtgctatagtagattaaaagaaaccttttaagataatgaaataaaccatccctgttcaactaacataaca

SEQ ID NO: 52693 - DNA, 124 bp, Homo sapiens
gccagtcccgcaggtcccctaggyccctttcgctgcggcctttccccaacccggacccggcacttctcgggttccgcgactggcctcctccgccgcctcctcggagcatttcgagaagctgcac

SEQ ID NO: 52694 - DNA, 201 bp, Homo sapiens
tttggtagttctttaaattttggaatgaaaggtcatttgaagtagctttaaaaccagaagctttctgacagaaatggaaactgtttgcaaacaagtatgarttttggaaaagtagccagtcttgataacgtagaattcatcttagtactctttccatcagccattctcatctaactgtatcccccttattagaaatccttt

SEQ ID NO: 52695 - DNA, 201 bp, Homo sapiens
ggtcatcccactgggacagggagaacaagccaaagtaaaaacaagagtccattttatagtagaaaatacctatttttaggaagccccttgcacctcatcctcttggccatgaatttaagttaaaacactgttgtgctatagtagattaaaagaaaccttttaagataatgaaataaaccatccctgttcaactaacataac

SEQ ID NO: 52696 - DNA, 201 bp, Homo sapiens
gggtcatcccactgggacagggagaacaagccaaagtaaaaacaagagtccattttatagtagaaaatacctatttttaggaagccccttgcacctcatcctcttggccatgaatttaagttaaaacactgttgtgctatagtagattaaaagaaaccttttaagataatgaaataaaccatccctgttcaactaacataa

SEQ ID NO: 52697 - DNA, 201 bp, Homo sapiens
atgtgtaaatgttctcattaaggcagtattgacccagacaaccatttagtattcatctatcccctcaatgcctcataattctggaatgcctgttgtgaaayatgtcagtgcacagtgtctcctaaattctcacacgtgcttgattttctgattcatctggtgaactgggagtaggaagttggtcatagacaatatgccctc

SEQ ID NO: 52698 - DNA, 201 bp, Homo sapiens
taataccctgtgaactgcaaaaaaccaaatacatttacagtagtattggtcaccaaaatagaggggaaactttacaattgtgagaatgtgtaaatgttctmattaaggcagtattgacccagacaaccatttagtattcatctatcccctcaatgcctcataattctggaatgcctgttgtgaaacatgtcagtgcacagt

SEQ ID NO: 52699 - DNA, 201 bp, Homo sapiens
aactggtaaacacaagtgaaaacttgagcaaaagtcggaagattctccgttcaatgtccagaaaagtgacaaccaacaagctgctgctttccattatcatyttactggagctcgccatcctgggaggcctggtttactacaaattctttcgcagccattgaacttctatagggaagggtttgtggaccagaactttgacct

SEQ ID NO: 52700 - DNA, 201 bp, Homo sapiens; identical to SEQ ID NO: 52681

SEQ ID NO: 52701 - DNA, 201 bp, Homo sapiens; identical to SEQ ID NO: 52682

SEQ ID NO: 52702 - DNA, 201 bp, Homo sapiens; identical to SEQ ID NO: 52683

SEQ ID NO: 52703 - DNA, 201 bp, Homo sapiens; identical to SEQ ID NO: 52684

SEQ ID NO: 52704 - DNA, 201 bp, Homo sapiens; identical to SEQ ID NO: 52685

SEQ ID NO: 52705 - DNA, 201 bp, Homo sapiens; identical to SEQ ID NO: 52686

SEQ ID NO: 52706 - DNA, 201 bp, Homo sapiens; identical to SEQ ID NO: 52687

SEQ ID NO: 52707 - DNA, 201 bp, Homo sapiens; identical to SEQ ID NO: 52688

SEQ ID NO: 52708 - DNA, 201 bp, Homo sapiens; identical to SEQ ID NO: 52689

SEQ ID NO: 52709 - DNA, 201 bp, Homo sapiens; identical to SEQ ID NO: 52690

SEQ ID NO: 52710 - DNA, 201 bp, Homo sapiens; identical to SEQ ID NO: 52691

SEQ ID NO: 52711 - DNA, 201 bp, Homo sapiens; identical to SEQ ID NO: 52692

SEQ ID NO: 52712 - DNA, 201 bp, Homo sapiens; identical to SEQ ID NO: 52694

SEQ ID NO: 52713 - DNA, 124 bp, Homo sapiens; identical to SEQ ID NO: 52693

SEQ ID NO: 52714 - DNA, 201 bp, Homo sapiens; identical to SEQ ID NO: 52695

SEQ ID NO: 52715 - DNA, 201 bp, Homo sapiens; identical to SEQ ID NO: 52696

SEQ ID NO: 52716 - DNA, 201 bp, Homo sapiens; identical to SEQ ID NO: 52697

SEQ ID NO: 52717 - DNA, 201 bp, Homo sapiens; identical to SEQ ID NO: 52698

SEQ ID NO: 52718 - DNA, 201 bp, Homo sapiens
gactggtaaacacaagtgaaaacttgagcaaaagtcggaagattctccgttcaatgtccagaaaagtgacaaccaacaagctgctgctttccattatcatyttactggagctcgccatcctgggaggcctggtttactacaaattctttcgcagccattgaacttctatagggaagggtttgtggaccagaactttgacct

SEQ ID NO: 52719 - DNA, 201 bp, Homo sapiens; identical to SEQ ID NO: 52681

SEQ ID NO: 52720 - DNA, 201 bp, Homo sapiens; identical to SEQ ID NO: 52683

SEQ ID NO: 52721 - DNA, 201 bp, Homo sapiens; identical to SEQ ID NO: 52682

SEQ ID NO: 52722 - DNA, 201 bp, Homo sapiens; identical to SEQ ID NO: 52684

SEQ ID NO: 52723 - DNA, 201 bp, Homo sapiens; identical to SEQ ID NO: 52685

SEQ ID NO: 52724 - DNA, 201 bp, Homo sapiens; identical to SEQ ID NO: 52687

SEQ ID NO: 52725 - DNA, 201 bp, Homo sapiens; identical to SEQ ID NO: 52686

SEQ ID NO: 52726 - DNA, 201 bp, Homo sapiens; identical to SEQ ID NO: 52688

SEQ ID NO: 52727 - DNA, 201 bp, Homo sapiens; identical to SEQ ID NO: 52690

SEQ ID NO: 52728 - DNA, 201 bp, Homo sapiens; identical to SEQ ID NO: 52689

SEQ ID NO: 52729 - DNA, 168 bp, Homo sapiens
gaacctggcacccggagcaacgcgcgaccccgggacgagacgctctcgtccgagccaaactacatccyccggcgtgcactgcagcgcccgcccctcgccggccggcggggcccgggaggaaggcggccgcgctgccagtcccgcaggtcccctaggcccctttcgctg

SEQ ID NO: 52730 - DNA, 201 bp, Homo sapiens; identical to SEQ ID NO: 52691

SEQ ID NO: 52731 - DNA, 201 bp, Homo sapiens
aaactacatcccccggcgtgcactgcagcgcccgcccctcgccggccggcggggcccgggaggaaggcggccgcgctgccagtcccgcaggtcccctaggyccctttcgctgcggcctttccccaacccggacccggcacttctcgggttccgcgactgccgatcgccccggcgcggcaccgctccctcaggagtcgccta

SEQ ID NO: 52732 - DNA, 201 bp, Homo sapiens; identical to SEQ ID NO: 52694

SEQ ID NO: 52733 - DNA, 201 bp, Homo sapiens; identical to SEQ ID NO: 52692

SEQ ID NO: 52734 - DNA, 201 bp, Homo sapiens; identical to SEQ ID NO: 52695

SEQ ID NO: 52735 - DNA, 201 bp, Homo sapiens
ttccggctcgagaggaccctgccgcggctccggaagagcctcgtcctgggcggcggtggtgcggcggtcgccgttatggccactgggctgggcggctgacmgccgggctaggaaagggcccagggccccgaatctcggtggccgctgctccagcgcggcctgcgccatggcctcctccgccgcctcctcggagcatttcga

SEQ ID NO: 52736 - DNA, 201 bp, Homo sapiens; identical to SEQ ID NO: 52696

SEQ ID NO: 52737 - DNA, 201 bp, Homo sapiens; identical to SEQ ID NO: 52697

SEQ ID NO: 52738 - DNA, 201 bp, Homo sapiens; identical to SEQ ID NO: 52698

SEQ ID NO: 52739 - DNA, 201 bp, Homo sapiens; identical to SEQ ID NO: 52718

SEQ ID NO: 52740 - DNA, 201 bp, Homo sapiens
atgtgcacagcctctccatataccatgtgctgttgcgcctgctagtaatcgacgacattaggcaagagaaacagcggctcctcaagtcctgcccaaagacmgtccagaaaccccagcctcccgtcgccttctcgccgcctccgctgggagccgcagatcagtccaagttgacggacaggaggcgaaatgtgcaaatgttta

SEQ ID NO: 52741 - DNA, 201 bp, Homo sapiens
gcggctcctcaagtcctgcccaaagaccgtccagaaaccccagcctcccgtcgccttctcgccgcctccgctgggagccgcagatcagtccaagttgacgkacaggaggcgaaatgtgcaaatgtttatggtttcatctgtatggaaaaggagctctggtaactttggccaagacttttcagtaggaaatgcttcaaaata

SEQ ID NO: 52742 - DNA, 201 bp, Homo sapiens; identical to SEQ ID NO: 52740

SEQ ID NO: 52743 - DNA, 201 bp, Homo sapiens; identical to SEQ ID NO: 52741

SEQ ID NO: 52744 - DNA, 201 bp, Homo sapiens; identical to SEQ ID NO: 52740

SEQ ID NO: 52745 - DNA, 201 bp, Homo sapiens; identical to SEQ ID NO: 52741

SEQ ID NO: 52746 - DNA, 201 bp, Homo sapiens; identical to SEQ ID NO: 52740

SEQ ID NO: 52747 - DNA, 201 bp, Homo sapiens
gcggctcctcaagtcctgcccaaagaccgtccagaaaccccagcctcccgtcgccttctcgccgcctccgctgggagccgcagatcagtccaagttgacgkacaggaggcgaaatgtgcaaatgtttatgggccccagtgtgtgatgttccctttcctgagtaacaccattttctatctaaatgaagaaatggaggcatgg

SEQ ID NO: 52748 - DNA, 201 bp, Homo sapiens
tcctgggggatgggtcttctatcacttgggaccagctgggtgagatgtcgtacaccacaatgtgcatcaaggagacgtgccgattgattcctgcagtcccstccatttccagagatctcagcaagccacttaccttcccagatggatgcacattgcctgcagggatcaccgtggttcttagtatttggggtcttcaccaca

SEQ ID NO: 52749 - DNA, 182 bp, Homo sapiens
caaaagcagttgggccgaacgaagcgtgcgcgctttggtaaccggctagaaatcccgcacgcgcgcctgcctcctctccccrggcctgagctgcccctcccactgcctttccttcttcccgcgagtcagaagcttcgcgagggcccagagaggcggtggggtgggcgaccctacgccagctc

SEQ ID NO: 52750 - DNA, 201 bp, Homo sapiens
aaagcagttgggccgaacgaagcgtgcgcgctttggtaaccggctagaaatcccgcacgcgcgcctgcctcctctccccaggcctgagctgcccctcccastgcctttccttcttcccgcgagtcagaagcttcgcgagggcccagagaggcggtggggtgggcgaccctacgccagctccgggcgggagaaagcccaccc

SEQ ID NO: 52751 - DNA, 201 bp, Homo sapiens
tactggcccagctgcgcggcattctggagggggagctggaagggatccgcggagctggcacctggaagagtgagcgggtcatcacgtcccgtcaggggcckcacatccacgtggacggcgtctccggaggaatcctcaacttaacctcggtccgcttcatccgtggaacccaaagcatccacaagaatctagaagcaaaaa

SEQ ID NO: 52752 - DNA, 201 bp, Homo sapiens
tactggcccagctgcgcggcattctggagggggagctggaagggatccgcggagctggcacctggaagagtgagcgggtcatcacgtcccgtcaggggcckcacatccacgtggacggcgtctccggaggaatcctcaacttaacgtgccaacaactacctgggcctgagcagccaccctgaggtgattcaggcaggtctg

SEQ ID NO: 52753 - DNA, 201 bp, Homo sapiens
cttccaaattgtaaaataatggcctgaatttaagttttctaagataaactcagtggtttggtttttattattaatagagatagaactattgtgtgttaatrttagcattagtcaataagttattttaatgtcagatttttgaatgttattatatattacctgtatgatggaaggattaccactgtacacaaatctaatcaa

SEQ ID NO: 52754 - DNA, 152 bp, Homo sapiens
tagaactattgtgtgttaatgttagcattagtcaataagttattttaatgtcagatttttgaatgttattatatattacctgtatgatggaaggattaccmctgtacacaaatctaatcaataaaaacgttagaaccttctgcttagagtac

SEQ ID NO: 52755 - DNA, 201 bp, Homo sapiens; identical to SEQ ID NO: 52753

SEQ ID NO: 52756 - DNA, 152 bp, Homo sapiens; identical to SEQ ID NO: 52754

SEQ ID NO: 52757 - DNA, 201 bp, Homo sapiens
acagcctgttcggttacatggaggacctgcaggagctcaccatcatcgagaggccggtccgccggagcctcaagacaccggaagaaatagaaagattgacrgtcgatgaagacctcagtgatattgaaagggctgtttatctgctcagtgctggtcaagatgtccaaggaacaagtgtgattgcaaatctcccatttttga

SEQ ID NO: 52758 - DNA, 201 bp, Homo sapiens
atgaagttggagagcttctcatgttcttcctttgtataaagtttgcatacgtacaaaacccaggactttaatgactttaagagggggcagaattgcatctyttggaagttaacagactcatgtgaactggaatgtacgttgtggccctcacaattgattttaatatttatttgcaaagtcctttctgtttctaaataaaag

SEQ ID NO: 52759 - DNA, 201 bp, Homo sapiens
gaggccggtccgccggagcctcaagacaccggaagaaatagaaagattgacagtcgatgaagacctcagtgatattgaaagggctgtttatctgctcagtkctggtcaagatgtccaaggaacaagtgtgattgcaaatctcccatttttgatgcgacagaatcccactgagacgcttcggagagtgttgccaaaagtcag

SEQ ID NO: 52760 - DNA, 201 bp, Homo sapiens; identical to SEQ ID NO: 52757

SEQ ID NO: 52761 - DNA, 201 bp, Homo sapiens
aactgcttgatgaaggaggcaaaacaaaggcagcaggagataatgtgattggtacacaaaagctaaagcagtggctggggctttgtttttaaattttgggtttttttttttgttgttgttaatgagcagaaagagagacataatgacagctgatgttaaacttttcatatttcaaattagattccctaggaggtataatat

SEQ ID NO: 52762 - DNA, 201 bp, Homo sapiens
gttggacagaatggaaatgtctatggatgcttttcagaaaaagttttatgagaaagatttgttggatcaagagaaagaaagagaagaactacttcttttgsaaatggaacaattagagaaagaaaagcaacagaatgatggaaggcccatgagtgataaaatgtttgaaaagaaacgtagagacactaagacaccaacgca

SEQ ID NO: 52763 - DNA, 201 bp, Homo sapiens
gaggccggtccgccggagcctcaagacaccggaagaaatagaaagattgacagtcgatgaagacctcagtgatattgaaagggctgtttatctgctcagtkctggtcaagatgtccaaggaacaagtgtgattgcaaatctcccatttttgatgcgacagaatcccactgagacgcttcggagagtgttgccaaaatggaa

SEQ ID NO: 52764 - DNA, 201 bp, Homo sapiens
cacactgaaaggatgcaaatagccgtctgcgattttggcggccctccggattgtggtgacaatatgttgtacccggacattcccaaatttaaatttggcartgaaaattccacaaagatttctggtaactttgagctataaataccttaaaaataatagattgatgattttctttatttcctagagaatttattttataaa

SEQ ID NO: 52765 - DNA, 201 bp, Homo sapiens; identical to SEQ ID NO: 52757

SEQ ID NO: 52766 - DNA, 201 bp, Homo sapiens; identical to SEQ ID NO: 52761

SEQ ID NO: 52767 - DNA, 201 bp, Homo sapiens; identical to SEQ ID NO: 52762

SEQ ID NO: 52768 - DNA, 201 bp, Homo sapiens; identical to SEQ ID NO: 52759

SEQ ID NO: 52769 - DNA, 201 bp, Homo sapiens; identical to SEQ ID NO: 52764

SEQ ID NO: 52770 - DNA, 201 bp, Homo sapiens
ataagaatctcttaaaaattctgttcacgaacctgtccaacatccaccaagtgggcatatttccgagcagtggctccattggtggtgaagatggcagttcyatttccatatgggttgttatttacaatctggatggcttcatccaatgtttctgtctccagaaccacaagaactggaccaaaaatctcctctttgtaacag

SEQ ID NO: 52771 - DNA, 201 bp, Homo sapiens
taggaaatacaaccagagttctaggcctccagttccagactatgttgtttctgacagtggggaaacaaaggaatttggggatgaaagtaagcttcaagatraaatcttcatcacccagcaaattgcaatatcagactcttctggtgaagtggtgctacccactattccaaaagaacctcaggagtctgacacaggaacctt

SEQ ID NO: 52772 - DNA, 201 bp, Homo sapiens
aatataccaggataatttttctctttacagaaaccccatgctgttttctgtaacataaataatccattcttattcactcctttgcctcccaaatatgtctrtatgtttatattttgatatcaggtcgcagacactcaaaacatccttcaccatgcaattaatgtttgttgctgataaacggatttttctgtatggttctgt

SEQ ID NO: 52773 - DNA, 201 bp, Homo sapiens
ctatagtaaatataccaggataatttttctctttacagaaaccccatgctgttttctgtaacataaataatccattcttattcactcctttgcctcccaamtatgtctgtatgtttatattttgatatcaggtcgcagacactcaaaacatccttcaccatgcaattaatgtttgttgctgataaacggatttttctgtat

SEQ ID NO: 52774 - DNA, 201 bp, Homo sapiens
caaagagtttgagagtgaagttttaaaactgcagcaacacgcaatgatagagaaccaagcaggtcaggtagaaattgacaagctgcagcaccttcttcagrtgaaggacagggaaatgaatcgtgtgaagaagctggccaagaacatactggatgagagaacagaagtggaaagattctttttagatgctctgcaccaagt

SEQ ID NO: 52775 - DNA, 201 bp, Homo sapiens
gacacaggaaccttctgagaagcactgattatgacctcacagatgctgctggcagtcccttccttgcagaatccttgctcctgaatatctttaagaaaatktcttaaaggaaaagacaaaaaatttaactcaaaagttacctgtttgccatagaaattggtgtctcccctgaaggaggatcgagagccggtgaatgagaac

SEQ ID NO: 52776 - DNA, 201 bp, Homo sapiens
ttggtgtctcccctgaaggaggatcgagagccggtgaatgagaacattggcaaaggcactggaatggggacattcactcccacctaaaacagaacaaatcygtgtcatatcctaaggacaaaggaactctccatttagaaacacaaaggcatcagagaccagttttaaatacccaccttctaccctatcctctaccccatg

SEQ ID NO: 52777 - DNA, 193 bp, Homo sapiens
gagatcaatgatctgttggttaaggaaaagattatgcaacttgtccagcagagatcacaaatccaaacccttcagaagaaggtagtaaacttrgagactgctctgagttacatgaccaaagagtttgagagtgaagttttaaaactgcagcaacacgcaatgatagagaaccaagcaggtcaggtagaaattg

SEQ ID NO: 52778 - DNA, 201 bp, Homo sapiens
atgaaagtaagcttcaagataaaatcttcatcacccagcaaattgcaatatcagactcttctggtgaagtggtgctacccactattccaaaagaacctcargagtctgacacaggaaccttctgagaagcactgattatgacctcacagatgctgctggcagtcccttccttgcagaatccttgctcctgaatatctttaa

SEQ ID NO: 52779 - DNA, 201 bp, Homo sapiens
agacaattccagaagagaaaaatccaagtggagagagagttagatgatctgaaagagaatttaagaaacacagagcggatacatcaggagactcttagaaractggaaagcagattttttgaagaaaagcaccgactagaacaagaggctgaaaagaagataataatgctagcagagagagcccaccatgaggctattgtg

SEQ ID NO: 52780 - DNA, 201 bp, Homo sapiens; identical to SEQ ID NO: 52770

SEQ ID NO: 52781 - DNA, 201 bp, Homo sapiens; identical to SEQ ID NO: 52771

SEQ ID NO: 52782 - DNA, 201 bp, Homo sapiens; identical to SEQ ID NO: 52772

SEQ ID NO: 52783 - DNA, 201 bp, Homo sapiens; identical to SEQ ID NO: 52773

SEQ ID NO: 52784 - DNA, 201 bp, Homo sapiens; identical to SEQ ID NO: 52774

SEQ ID NO: 52785 - DNA, 201 bp, Homo sapiens; identical to SEQ ID NO: 52775

SEQ ID NO: 52786 - DNA, 201 bp, Homo sapiens; identical to SEQ ID NO: 52776

SEQ ID NO: 52787 - DNA, 201 bp, Homo sapiens
atcaaaaggagatcaatgatctgttggttaaggaaaagattatgcaacttgtccagcagagatcacaaatccaaacccttcagaagaaggtagtaaacttrgagactgctctgagttacatgaccaaagagtttgagagtgaagttttaaaactgcagcaacacgcaatgatagagaaccaagcaggtcaggtagaaattg

SEQ ID NO: 52788 - DNA, 201 bp, Homo sapiens; identical to SEQ ID NO: 52778

SEQ ID NO: 52789 - DNA, 201 bp, Homo sapiens
caagaggctgaaaagaagataataatgctagcagagagagcccaccatgaggctattgtgcaattgaacgatgctggaagaaatgtttttaaagagaatgwttatcttcagaaagctctggcatatcacctgaaggaaactgacgctctacaaaaaaactcccagaagttgcaagagagtcatactttacttttacatcaa

SEQ ID NO: 52790 - DNA, 201 bp, Homo sapiens
cagcattttcttacaccccctccccagcgtgccctcagccaagtgctttggcccggtgcttcccgcagctgcacagagaccttggccacgcccgcgcgccmtgagcgcagctgggttccaggagactctcagctcagctgagctagttgcctggcacccacctgtcgcgcgcggagagggggttccctgttgcttttgtgt

SEQ ID NO: 52791 - DNA, 201 bp, Homo sapiens
agctgagctagttgcctggcacccacctgtcgcgcgcggagagggggttccctgttgcttttgtgtctgtttcctgtccctggtaggggaagtgatgtcgkggatggggaggggtgggcagggtagtttcccccgcttgttttgggtgcacaggagccccactgctgatgacgaactatctctaactggtcttgaccacga

SEQ ID NO: 52792 - DNA, 201 bp, Homo sapiens
tccagccatggtttcccagtggaggtcgattctgacaccagcatcttccagctcaaggaggtggttgctaagcgacagggggttccggctgaccagttgcstgtgattttcgcagggaaggagctgaggaatgactggactgtgcagaattgtgacctggatcagcagagcattgttcacattgtgcagagaccgtggaga

SEQ ID NO: 52793 - DNA, 201 bp, Homo sapiens
ttcagcttttttttcagccattcacaacacaatcaaaagattaacaacactgcatgcggcaaaccgcatgctcttacccacactacgcagaagagaaagtrcaaccactatcttttgttctacctgtattgtctgacttctcaggaagatcgtgaacataactgagggcatgagtctcactagcacatggaggcccttttg

SEQ ID NO: 52794 - DNA, 201 bp, Homo sapiens
gctccatcacttcaggattctgggagaagagcagtacaaccggtaccagcagtatggtgcagaggagtgtgtcctgcagatggggggcgtgttatgccccygccctggctgtggagcggggctgctgccggagcctgaccagaggaaagtcacctgcgaagggggcaatggcctgggctgtgggtttgccttctgccggga

SEQ ID NO: 52795 - DNA, 201 bp, Homo sapiens
aactccttgattaaagagctccatcacttcaggattctgggagaagagcagtacaaccggtaccagcagtatggtgcagaggagtgtgtcctgcagatggrgggcgtgttatgcccccgccctggctgtggagcggggctgctgccggagcctgaccagaggaaagtcacctgcgaagggggcaatggcctgggctgtggg

SEQ ID NO: 52796 - DNA, 201 bp, Homo sapiens
ccagaggaaagtcacctgcgaagggggcaatggcctgggctgtgggtttgccttctgccgggaatgtaaagaagcgtaccatgaaggggagtgcagtgccstatttgaagcctcaggaacaactactcaggcctacagagtcgatgaaagagccgccgagcaggctcgttgggaagcagcctccaaagaaaccatcaagaa

SEQ ID NO: 52797 - DNA, 201 bp, Homo sapiens
gctggaagtccagcaggtagatcaatctacaacagcttttatgtgtattgcaaaggcccctgtcaaagagtgcagccgggaaaactcagggtacagtgcarcacctgcaggcaggcaacgctcaccttgacccaggaatttttctttaaatgtggagcacaccccacctctgacaaggaaacatcagtagctttgcacctg

SEQ ID NO: 52798 - DNA, 201 bp, Homo sapiens
ggaaggactcaccaccagctggaagtccagcaggtagatcaatctacaacagcttttatgtgtattgcaaaggcccctgtcaaagagtgcagccgggaaawctcagggtacagtgcagcacctgcaggcaggcaacgctcaccttgacccaggaatttttctttaaatgtggagcacaccccacctctgacaaggaaacat

SEQ ID NO: 52799 - DNA, 201 bp, Homo sapiens
gccccagtgcaggctcgagtggtgctggaactgtggctgcgagtggaaccgcgtctgcatgggggaccactggttcgacgtgtagccagggcggccgggcrccccatcgccacatcctgggggagcatacccagtgtctaccttcattttctaattctcttttcaaacacacacacacacgcgcgcgcgcgcacacacact

SEQ ID NO: 52800 - DNA, 201 bp, Homo sapiens
cgctgccatgtaccagtggaaaaaaatggaggctgcatgcacatgaagtgtccgcagccccagtgcaggctcgagtggtgctggaactgtggctgcgagtrgaaccgcgtctgcatgggggaccactggttcgacgtgtagccagggcggccgggcgccccatcgccacatcctgggggagcatacccagtgtctaccttc

SEQ ID NO: 52801 - DNA, 201 bp, Homo sapiens
cacagacgtcaggagccccgtcctggttttccagtgcaactcccgccacgtgatttgcttagactgtttccacttatactgtgtgacaagactcaatgatyggcagtttgttcacgaccctcaacttggctactccctgccttgtgtggctggctgtcccaactccttgattaaagagctccatcacttcaggattctggg

SEQ ID NO: 52802 - DNA, 201 bp, Homo sapiens
gagctgaggaatgactggactgtgcagaattgtgacctggatcagcagagcattgttcacattgtgcagagaccgtggagaaaaggtcaagaaatgaatgmaactggaggcgacgaccccagaaacgcggcgggaggctgtgagcgggagccccagagcttgactcgggtggacctcagcagctcagtcctcccaggagac

SEQ ID NO: 52803 - DNA, 201 bp, Homo sapiens
ggcatgagtctcactagcacatggaggcccttttggatttagagactgtaaattattaaatcggcaacagggcttctctttttagatgtagcactgaaatccttgctggagggaagagaggggatgaactcaagttttccacatcctgggacacctgtccctcttttcctaactgcctaagataacccatttcttccaacc

SEQ ID NO: 52804 - DNA, 201 bp, Homo sapiens
acatcacttgcattacgtgcacagacgtcaggagccccgtcctggttttccagtgcaactcccgccacgtgatttgcttagactgtttccacttatactgwgtgacaagactcaatgatcggcagtttgttcacgaccctcaacttggctactccctgccttgtgtggctggctgtcccaactccttgattaaagagctcc

SEQ ID NO: 52805 - DNA, 201 bp, Homo sapiens
cttttgttctacctgtattgtctgacttctcaggaagatcgtgaacataactgagggcatgagtctcactagcacatggaggcccttttggatttagagaytgtaaattattaaatcggcaacagggcttctctttttagatgtagcactgaaatccttgctggagggaagagaggggatgaactcaagttttccacatcc

SEQ ID NO: 52806 - DNA, 201 bp, Homo sapiens
gaagcctcaggaacaactactcaggcctacagagtcgatgaaagagccgccgagcaggctcgttgggaagcagcctccaaagaaaccatcaagaaaaccamcaagccctgtccccgctgccatgtaccagtggaaaaaaatggaggctgcatgcacatgaagtgtccgcagccccagtgcaggctcgagtggtgctggaac

SEQ ID NO: 52807 - DNA, 201 bp, Homo sapiens
gaccatgatagtgtttgtcaggttcaactccagccatggtttcccagtggaggtcgattctgacaccagcatcttccagctcaaggaggtggttgctaagygacagggggttccggctgaccagttgcgtgtgattttcgcagggaaggagctgaggaatgactggactgtgcagaattgtgacctggatcagcagagcat

SEQ ID NO: 52808 - DNA, 201 bp, Homo sapiens
cgtgtagccagggcggccgggcgccccatcgccacatcctgggggagcatacccagtgtctaccttcattttctaattctcttttcaaacacacacacacrcgcgcgcgcgcgcacacacactcttcaagtttttttcaaagtccaactacagccaaattgcagaagaaactcctggatccctttcactatgtccatgaaa

SEQ ID NO: 52809 - DNA, 201 bp, Homo sapiens; identical to SEQ ID NO: 52792

SEQ ID NO: 52810 - DNA, 201 bp, Homo sapiens; identical to SEQ ID NO: 52793

SEQ ID NO: 52811 - DNA, 201 bp, Homo sapiens; identical to SEQ ID NO: 52794

SEQ ID NO: 52812 - DNA, 201 bp, Homo sapiens; identical to SEQ ID NO: 52795

SEQ ID NO: 52813 - DNA, 201 bp, Homo sapiens; identical to SEQ ID NO: 52796

SEQ ID NO: 52814 - DNA, 201 bp, Homo sapiens
gctggaagtccagcaggtagatcaatctacaacagcttttatgtgtattgcaaaggcccctgtcaaagagtgcagccgggaaaactcagggtacagtgcarcacctgcaggcaggcaacgctcaccttgacccagggtccatcttgctgggatgatgttttaattccaaaccggatgagtggtgaatgccaatccccacac

SEQ ID NO: 52815 - DNA, 201 bp, Homo sapiens
ggaaggactcaccaccagctggaagtccagcaggtagatcaatctacaacagcttttatgtgtattgcaaaggcccctgtcaaagagtgcagccgggaaawctcagggtacagtgcagcacctgcaggcaggcaacgctcaccttgacccagggtccatcttgctgggatgatgttttaattccaaaccggatgagtggtg

SEQ ID NO: 52816 - DNA, 201 bp, Homo sapiens; identical to SEQ ID NO: 52799

SEQ ID NO: 52817 - DNA, 201 bp, Homo sapiens; identical to SEQ ID NO: 52800

SEQ ID NO: 52818 - DNA, 201 bp, Homo sapiens; identical to SEQ ID NO: 52801

SEQ ID NO: 52819 - DNA, 201 bp, Homo sapiens; identical to SEQ ID NO: 52802

SEQ ID NO: 52820 - DNA, 201 bp, Homo sapiens; identical to SEQ ID NO: 52803

SEQ ID NO: 52821 - DNA, 201 bp, Homo sapiens; identical to SEQ ID NO: 52804

SEQ ID NO: 52822 - DNA, 201 bp, Homo sapiens; identical to SEQ ID NO: 52805

SEQ ID NO: 52823 - DNA, 201 bp, Homo sapiens; identical to SEQ ID NO: 52806

SEQ ID NO: 52824 - DNA, 201 bp, Homo sapiens; identical to SEQ ID NO: 52807

SEQ ID NO: 52825 - DNA, 201 bp, Homo sapiens; identical to SEQ ID NO: 52808

SEQ ID NO: 52826 - DNA, 201 bp, Homo sapiens
aacatggaagttatgaagatgctgttcactctggagcccttaatgattgatctgatgttccttttatttataacaatgttaaatgcaattgtcttgtaccktgagttgagtattacacattaaagtaaagtacaagctgtaaacttgggtttttgtgatgtaggaaatggtttccatctgtactttggtcctctgatttca

SEQ ID NO: 52827 - DNA, 201 bp, Homo sapiens
ttcccataatggaaggctccacacccacttgggaccaggaaactatccgtgctaaaggtgtaagcccacgtttatcagcttctgacttcttcataagaacracagctgcagcaccatcatttattcctgaagcattggctggggtgactgttcccgttccatcagtaagaaagtaaggctttagcttggacatggcttcta

SEQ ID NO: 52828 - DNA, 201 bp, Homo sapiens
aaagaaattgaggttgttcaaagtttaagcaattcattctctctgaacacacattgctattcccatcccacccccaatgcacagggctgcaacaccacgayttctgcccattctctccagtgtgtgtaacagggtcacaagaattcgacagccagatgctccaagagggtggcccaaggctatagcccctccttcaatatt

SEQ ID NO: 52829 - DNA, 201 bp, Homo sapiens
aaggctatagcccctccttcaatattgacggtcctattcccataatggaaggctccacacccacttgggaccaggaaactatccgtgctaaaggtgtaagyccacgtttatcagcttctgacttcttcataagaacgacagctgcagcaccatcatttattcctgaagcattggctggggtgactgttcccgttccatcag

SEQ ID NO: 52830 - DNA, 201 bp, Homo sapiens
aatcaccattcttcgaattgatgatcttattaaattacatccagaaagtaaagatgataaacatggaagttatgaagatgctgttcactctggagcccttwatgattgatctgatgttccttttatttataacaatgttaaatgcaattgtcttgtaccttgagttgagtattacacattaaagtaaagtacaagctgtaa

SEQ ID NO: 52831 - DNA, 201 bp, Homo sapiens
tcccgttccatcagtaagaaagtaaggctttagcttggacatggcttctatgttgctcccatggcgaggaaactcatctgttttaacttcaataagacctyttctagttgacaccaaaactggtacaatctctttgtcaaaatggccagctttctgtgcattctctgtcctgttctgggacagaactgcaaccttgtcctg

SEQ ID NO: 52832 - DNA, 201 bp, Homo sapiens
tttgagcaatggtaaacctcgagacaacaaacaagcaggggtgtttgaaccaaccatagttaaagttaagagtttgaaatttgcaacagaagctgcaatcmccattcttcgaattgatgatcttattaaattacatccagaaagtaaagatgataaacatggaagttatgaagatgctgttcactctggagcccttaatga

SEQ ID NO: 52833 - DNA, 201 bp, Homo sapiens
atcaccattcttcgaattgatgatcttattaaattacatccagaaagtaaagatgataaacatggaagttatgaagatgctgttcactctggagcccttawtgattgatctgatgttccttttatttataacaatgttaaatgcaattgtcttgtaccttgagttgagtattacacattaaagtaaagtacaagctgtaaa

SEQ ID NO: 52834 - DNA, 201 bp, Homo sapiens
ccagaaagtaaagatgataaacatggaagttatgaagatgctgttcactctggagcccttaatgattgatctgatgttccttttatttataacaatgttaratgcaattgtcttgtaccttgagttgagtattacacattaaagtaaagtacaagctgtaaacttgggtttttgtgatgtaggaaatggtttccatctgta

SEQ ID NO: 52835 - DNA, 201 bp, Homo sapiens
cagccgggaagcgggtggggtggtgtgttacccagtagctcctgggacatcgctcgggtacgctccacgccgtcgcagccactgctgtggtcgccggtcgsccgaggggccgcgatactggttgcccgcggtgtaagcagaattcgacgtgtatcgctgccgtcaagatggaggggcctttgtccgtgttcggtgaccgca

SEQ ID NO: 52836 - DNA, 201 bp, Homo sapiens
ccttcccgccgtgccccgcggccgggccggggcagccgggaagcgggtggggtggtgtgttacccagtagctcctgggacatcgctcgggtacgctccacrccgtcgcagccactgctgtggtcgccggtcggccgaggggccgcgatactggttgcccgcggtgtaagcagaattcgacgtgtatcgctgccgtcaagat

SEQ ID NO: 52837 - DNA, 201 bp, Homo sapiens; identical to SEQ ID NO: 52826

SEQ ID NO: 52838 - DNA, 201 bp, Homo sapiens
ccattctctccagtgtgtgtaacagggtcacaagaattcgacagccagatgctccaagagggtggcccaaggctatagcccctccttcaatattgacctarcgggggagaaaagatttagattgtttattcttctgtggacacagtttaaaatcttaaacttgtctttttcctcttaatgtatcagcatgctaccctttca

SEQ ID NO: 52839 - DNA, 192 bp, Homo sapiens
cctgttgtccctgcctctttttccttcccgccgtgccccgcggccgggccggggcagccgggaagcgggtggggtggtgtgttacccagtakctcctgggacatcgctcgggtacgctccacgccgtcgcagccactgctgtggtcgccggtcggccgaggggccgcgatactggttgcccgcggtgtaagc

SEQ ID NO: 52840 - DNA, 201 bp, Homo sapiens; identical to SEQ ID NO: 52828

SEQ ID NO: 52841 - DNA, 201 bp, Homo sapiens; identical to SEQ ID NO: 52830

SEQ ID NO: 52842 - DNA, 201 bp, Homo sapiens; identical to SEQ ID NO: 52833

SEQ ID NO: 52843 - DNA, 201 bp, Homo sapiens; identical to SEQ ID NO: 52832

SEQ ID NO: 52844 - DNA, 201 bp, Homo sapiens; identical to SEQ ID NO: 52834

SEQ ID NO: 52845 - DNA, 201 bp, Homo sapiens
cttcccgccgtgccccgcggccgggccggggcagccgggaagcgggtggggtggtgtgttacccagtagctcctgggacatcgctcgggtacgctccacgycgtcgcagccactgctgtggtcgccggtcggccgaggggccgcgatactggttgcccgcggtgtaagcagaattcgacgtgtatcgctgccgtcaagatg

SEQ ID NO: 52846 - DNA, 201 bp, Homo sapiens; identical to SEQ ID NO: 52835

SEQ ID NO: 52847 - DNA, 201 bp, Homo sapiens; identical to SEQ ID NO: 52836

SEQ ID NO: 52848 - DNA, 201 bp, Homo sapiens; identical to SEQ ID NO: 52826

SEQ ID NO: 52849 - DNA, 192 bp, Homo sapiens; identical to SEQ ID NO: 52839

SEQ ID NO: 52850 - DNA, 201 bp, Homo sapiens; identical to SEQ ID NO: 52827

SEQ ID NO: 52851 - DNA, 201 bp, Homo sapiens; identical to SEQ ID NO: 52828

SEQ ID NO: 52852 - DNA, 201 bp, Homo sapiens; identical to SEQ ID NO: 52829

SEQ ID NO: 52853 - DNA, 201 bp, Homo sapiens; identical to SEQ ID NO: 52830

SEQ ID NO: 52854 - DNA, 201 bp, Homo sapiens; identical to SEQ ID NO: 52832

SEQ ID NO: 52855 - DNA, 201 bp, Homo sapiens; identical to SEQ ID NO: 52833

SEQ ID NO: 52856 - DNA, 201 bp, Homo sapiens; identical to SEQ ID NO: 52831

SEQ ID NO: 52857 - DNA, 201 bp, Homo sapiens; identical to SEQ ID NO: 52834

SEQ ID NO: 52858 - DNA, 201 bp, Homo sapiens; identical to SEQ ID NO: 52845

SEQ ID NO: 52859 - DNA, 193 bp, Homo sapiens
gcaaagctcctcctcgcagcccacaggcctgccgcgggcgggacctgagctcaggactggaatcccacgggcgagaatctcgagtgcgagcccggcccgcrgcgggtctcagcacagctctgatgggtccttttgctctcggcggcttcgggaggtcctatgcgtttctcctggcgccagtcattcgctcgcg

SEQ ID NO: 52860 - DNA, 201 bp, Homo sapiens
atacatacctccagcagaaatggcaacaggtttggcaggaaataaatgtggaagctaaacatgttaaagatatcatgaaaacactagagagctttaaactrgacagcactcccttgaaagcggcacagcatgaccttccagcttctgagggagaagtctggtccatgcctgtacctgttgaacgaagaccctcaccaggac

SEQ ID NO: 52861 - DNA, 153 bp, Homo sapiens
actgtgagaaatgtgccttaagtgtttgaatattaaatgcagtaattcattgtactgagtgctatattttttttaactttcataatggtaagatttttttwaaaaaacccttatgattctgaataaaggcaatatttttaagctgaaaatttg

SEQ ID NO: 52862 - DNA, 201 bp, Homo sapiens; identical to SEQ ID NO: 52860

SEQ ID NO: 52863 - DNA, 153 bp, Homo sapiens; identical to SEQ ID NO: 52861

SEQ ID NO: 52864 - DNA, 201 bp, Homo sapiens; identical to SEQ ID NO: 52860

SEQ ID NO: 52865 - DNA, 153 bp, Homo sapiens; identical to SEQ ID NO: 52861

SEQ ID NO: 52866 - DNA, 201 bp, Homo sapiens; identical to SEQ ID NO: 52860

SEQ ID NO: 52867 - DNA, 153 bp, Homo sapiens; identical to SEQ ID NO: 52861

SEQ ID NO: 52868 - DNA, 201 bp, Homo sapiens
aagccaaaggtgctcctatcagtgcttatcagattgttgtggaagaactgcacccacaccgaaccaagagagaagccggagccatggaatgctaccaggtkcctgtcacataccaaaatgccatgagtgggggtgcaccgtattactttgctgcagaactccccccgggaaacctacctgagcctgccccgttcactgtgg

SEQ ID NO: 52869 - DNA, 201 bp, Homo sapiens
agcaataccgtttctgctatgatgtagctttggagtacctggaatcatcttagttgggtgagactctttaaagtgcatccatgaagaaacctgtccatctrttgagccagcagctgttgtacctgttacacttgtgcagaaagattttaatgtggggggtgggagacttttacatttgagaggtaaaagtattttttttat

SEQ ID NO: 52870 - DNA, 201 bp, Homo sapiens
aagatgtgcctggtcccgtaccagtaaaatctcttcaaggaacatcctttgaaaataagatcttcttgaactggaaagaacctttggatccaaatggaatyatcactcaatatgagatcagctatagcagtataagatcatttgatcctgcagttccagtggctggacctccccagactgtatcaaatttatggaacagta

SEQ ID NO: 52871 - DNA, 201 bp, Homo sapiens
gaaccaagagagaagccggagccatggaatgctaccaggttcctgtcacataccaaaatgccatgagtgggggtgcaccgtattactttgctgcagaactmcccccgggaaacctacctgagcctgccccgttcactgtgggtgacaatcggacctaccaaggcttttggaaccctcctttggctccgcgcaaaggataca

SEQ ID NO: 52872 - DNA, 201 bp, Homo sapiens
aaaataacataagccaaagactcaagtgtaaatatgtctatatggagaaagcacattatatttattggttacttacattccttttttgatggctaaaatastaccaccacacaatcatcttttttttcctgaagaaagctttttctttagctaaaatcaattgtaaacgatttttgtagattattttttgtatgttttagt

SEQ ID NO: 52873 - DNA, 201 bp, Homo sapiens
tattctatataaagcatcaacatttcatgccacaaacatgccaccttttttctcatggtttcagtagagcagctaccacatgttgcatgagttcatacttyctacgtggcatttttctccctttctaaaatgaaagctgatgaatcttaaaaggaagaagaaaagaaaagctgtgcaaattcatagtaaagttcgtttttt

SEQ ID NO: 52874 - DNA, 201 bp, Homo sapiens
tctgtgaatttaaagctgcatattttgatatgattagaatagactcccagactaactcttcacatctcaaggatgaatttcagactctgaattcagtcacscctcgactacaagctgaagactgcagtatagcgtgcctgccaaggaaccatgacaagaaccgtttcatggacatgctgccacctgacagatgtctgcctt

SEQ ID NO: 52875 - DNA, 201 bp, Homo sapiens
gtacatgcttgtgaattaaatttgtgtaaaatcccttggcaattgggtcttttaatataggaccaaattaaaacattttgctgaatatgtatagtttttcmcaatttcattaggtaaataatggtttggtgatcatacatgagaaatgtacacattaaaaggccttgctgacaacttgcacaatgttgaacatagccttta

SEQ ID NO: 52876 - DNA, 201 bp, Homo sapiens
tatatagccagaaaggactgaatcctggcactttgaacatattagttagggtgaataaaggacctcttgccaatccaatttggaatgtgactggattcackggtagagattggcttcgggctgagctagcagtgagcaccttttggcccaatgaatatcaggtaatatttgaagctgaagtctcaggagggagaagtggtt

SEQ ID NO: 52877 - DNA, 201 bp, Homo sapiens
acatcaatcatagaaggtttgccgcttccttcagattgcaagaagtgacaaaaactgaccaggatttgtatcgctgtgtaactcagtcagaacgaggttcyggtgtgtccaattttgctcaacttattgtgagagaaccgccaagacccattgctcctcctcagcttcttggtgttgggcctacatatttgctgatccaac

SEQ ID NO: 52878 - DNA, 201 bp, Homo sapiens
caccgtattactttgctgcagaactccccccgggaaacctacctgagcctgccccgttcactgtgggtgacaatcggacctaccaaggcttttggaacccwcctttggctccgcgcaaaggatacaacatctatttccaggcgatgagcagtgtggagaaggaaactaaaacccagtgcgtacgcattgctacaaaagcag

SEQ ID NO: 52879 - DNA, 201 bp, Homo sapiens
aagatggcaacatatatgctttcagggtcaaatttgagcaaactgtaaactgtcagggtgataaaatgtttctcttgatgtttacatgcacaagctttgcrttctgactataaaaagtgtgaacaaatcaatgccagattcctgttttgcgcattgtcatgggattcttaagtgaacctttctaaatgtggtcttgttcac

SEQ ID NO: 52880 - DNA, 201 bp, Homo sapiens
gcctttaagcatcatttaaattttaaaggaatggagtttttcagcctgtggcccagcactggtcaagaaaacaagatggcaacatatatgctttcagggtyaaatttgagcaaactgtaaactgtcagggtgataaaatgtttctcttgatgtttacatgcacaagctttgcgttctgactataaaaagtgtgaacaaatc

SEQ ID NO: 52881 - DNA, 201 bp, Homo sapiens
ctgtcagggtgataaaatgtttctcttgatgtttacatgcacaagctttgcgttctgactataaaaagtgtgaacaaatcaatgccagattcctgttttgygcattgtcatgggattcttaagtgaacctttctaaatgtggtcttgttcacatgctccacgtagctgtaacttcacatcatcagcttgcagtttgtaatt

SEQ ID NO: 52882 - DNA, 201 bp, Homo sapiens; identical to SEQ ID NO: 52868

SEQ ID NO: 52883 - DNA, 201 bp, Homo sapiens; identical to SEQ ID NO: 52869

SEQ ID NO: 52884 - DNA, 201 bp, Homo sapiens; identical to SEQ ID NO: 52870

SEQ ID NO: 52885 - DNA, 201 bp, Homo sapiens; identical to SEQ ID NO: 52871

SEQ ID NO: 52886 - DNA, 201 bp, Homo sapiens; identical to SEQ ID NO: 52874

SEQ ID NO: 52887 - DNA, 201 bp, Homo sapiens
cacgggtagagattggcttcgggctgagctagcagtgagcaccttttggcccaatgaatatcaggtaatcatctgtacttttctggtgtatgttttgatgycatcagttctcactatatgtgtaatacatagatgtaaatatgcatctcatggtaatgagagattgccctcttgcctcccccacccccattattggggaag

SEQ ID NO: 52888 - DNA, 201 bp, Homo sapiens
tatatagccagaaaggactgaatcctggcactttgaacatattagttagggtgaataaaggacctcttgccaatccaatttggaatgtgactggattcackggtagagattggcttcgggctgagctagcagtgagcaccttttggcccaatgaatatcaggtaatcatctgtacttttctggtgtatgttttgatgtcat

SEQ ID NO: 52889 - DNA, 201 bp, Homo sapiens; identical to SEQ ID NO: 52877

SEQ ID NO: 52890 - DNA, 201 bp, Homo sapiens; identical to SEQ ID NO: 52878

SEQ ID NO: 52891 - DNA, 201 bp, Homo sapiens
gaatgtgactggattcacgggtagagattggcttcgggctgagctagcagtgagcaccttttggcccaatgaatatcaggtaatcatctgtacttttctgktgtatgttttgatgtcatcagttctcactatatgtgtaatacatagatgtaaatatgcatctcatggtaatgagagattgccctcttgcctcccccaccc

SEQ ID NO: 52892 - DNA, 201 bp, Homo sapiens; identical to SEQ ID NO: 52872

SEQ ID NO: 52893 - DNA, 201 bp, Homo sapiens; identical to SEQ ID NO: 52873

SEQ ID NO: 52894 - DNA, 201 bp, Homo sapiens; identical to SEQ ID NO: 52874

SEQ ID NO: 52895 - DNA, 201 bp, Homo sapiens; identical to SEQ ID NO: 52888

SEQ ID NO: 52896 - DNA, 201 bp, Homo sapiens; identical to SEQ ID NO: 52879

SEQ ID NO: 52897 - DNA, 201 bp, Homo sapiens; identical to SEQ ID NO: 52880

SEQ ID NO: 52898 - DNA, 201 bp, Homo sapiens; identical to SEQ ID NO: 52891

SEQ ID NO: 52899 - DNA, 201 bp, Homo sapiens; identical to SEQ ID NO: 52881

SEQ ID NO: 52900 - DNA, 201 bp, Homo sapiens; identical to SEQ ID NO: 52869

SEQ ID NO: 52901 - DNA, 201 bp, Homo sapiens; identical to SEQ ID NO: 52868

SEQ ID NO: 52902 - DNA, 201 bp, Homo sapiens; identical to SEQ ID NO: 52871

SEQ ID NO: 52903 - DNA, 201 bp, Homo sapiens; identical to SEQ ID NO: 52870

SEQ ID NO: 52904 - DNA, 201 bp, Homo sapiens; identical to SEQ ID NO: 52875

SEQ ID NO: 52905 - DNA, 201 bp, Homo sapiens; identical to SEQ ID NO: 52887

SEQ ID NO: 52906 - DNA, 201 bp, Homo sapiens; identical to SEQ ID NO: 52877

SEQ ID NO: 52907 - DNA, 201 bp, Homo sapiens; identical to SEQ ID NO: 52878

SEQ ID NO: 52908 - DNA, 201 bp, Homo sapiens; identical to SEQ ID NO: 52868

SEQ ID NO: 52909 - DNA, 201 bp, Homo sapiens; identical to SEQ ID NO: 52869

SEQ ID NO: 52910 - DNA, 201 bp, Homo sapiens; identical to SEQ ID NO: 52870

SEQ ID NO: 52911 - DNA, 201 bp, Homo sapiens; identical to SEQ ID NO: 52871

SEQ ID NO: 52912 - DNA, 201 bp, Homo sapiens; identical to SEQ ID NO: 52872

SEQ ID NO: 52913 - DNA, 201 bp, Homo sapiens; identical to SEQ ID NO: 52873

SEQ ID NO: 52914 - DNA, 201 bp, Homo sapiens; identical to SEQ ID NO: 52874

SEQ ID NO: 52915 - DNA, 201 bp, Homo sapiens; identical to SEQ ID NO: 52875

SEQ ID NO: 52916 - DNA, 201 bp, Homo sapiens; identical to SEQ ID NO: 52876

SEQ ID NO: 52917 - DNA, 201 bp, Homo sapiens; identical to SEQ ID NO: 52877
